United States Patent Application Publication US 2018/0305689 A1 - sequence listing, part 13

SEQ ID NO: 132929 - RNA, 19 nt, Artificial Sequence
  Description of Artificial Sequence: Synthetic oligonucleotide
  Antisense strand to SEQ ID NO: 132928
ugacucaugucuuuaaccc

SEQ ID NO: 132930 - RNA, 19 nt, Artificial Sequence
  Description of Artificial Sequence: Synthetic oligonucleotide
  Sense strand starting at position 1917 of SEQ ID NO: 1707
uacagaaauuaguggcuua

SEQ ID NO: 132931 - RNA, 19 nt, Artificial Sequence
  Description of Artificial Sequence: Synthetic oligonucleotide
  Antisense strand to SEQ ID NO: 132930
uaagccacuaauuucugua

SEQ ID NO: 132932 - RNA, 19 nt, Artificial Sequence
  Description of Artificial Sequence: Synthetic oligonucleotide
  Sense strand starting at position 1920 of SEQ ID NO: 1707
agaaauuaguggcuuacca

SEQ ID NO: 132933 - RNA, 19 nt, Artificial Sequence
  Description of Artificial Sequence: Synthetic oligonucleotide
  Antisense strand to SEQ ID NO: 132932
ugguaagccacuaauuucu

SEQ ID NO: 132934 - RNA, 19 nt, Artificial Sequence
  Description of Artificial Sequence: Synthetic oligonucleotide
  Sense strand starting at position 1922 of SEQ ID NO: 1707
aaauuaguggcuuaccaga

SEQ ID NO: 132935 - RNA, 19 nt, Artificial Sequence
  Description of Artificial Sequence: Synthetic oligonucleotide
  Antisense strand to SEQ ID NO: 132934
ucugguaagccacuaauuu

SEQ ID NO: 132936 - RNA, 19 nt, Artificial Sequence
  Description of Artificial Sequence: Synthetic oligonucleotide
  Sense strand starting at position 1959 of SEQ ID NO: 1707
ggugcucaguccucaggaa

SEQ ID NO: 132937 - RNA, 19 nt, Artificial Sequence
  Description of Artificial Sequence: Synthetic oligonucleotide
  Antisense strand to SEQ ID NO: 132936
uuccugaggacugagcacc

SEQ ID NO: 132938 - RNA, 19 nt, Artificial Sequence
  Description of Artificial Sequence: Synthetic oligonucleotide
  Sense strand starting at position 2176 of SEQ ID NO: 1707
agauuaccggauugaauca

SEQ ID NO: 132939 - RNA, 19 nt, Artificial Sequence
  Description of Artificial Sequence: Synthetic oligonucleotide
  Antisense strand to SEQ ID NO: 132938
ugauucaauccgguaaucu

SEQ ID NO: 132940 - RNA, 19 nt, Artificial Sequence
  Description of Artificial Sequence: Synthetic oligonucleotide
  Sense strand starting at position 2235 of SEQ ID NO: 1707
gcaagaaaucgacaguguu

SEQ ID NO: 132941 - RNA, 19 nt, Artificial Sequence
  Description of Artificial Sequence: Synthetic oligonucleotide
  Antisense strand to SEQ ID NO: 132940
aacacugucgauuucuugc

SEQ ID NO: 132942 - RNA, 19 nt, Artificial Sequence
  Description of Artificial Sequence: Synthetic oligonucleotide
  Sense strand starting at position 2241 of SEQ ID NO: 1707
aaucgacaguguuagggau

SEQ ID NO: 132943 - RNA, 19 nt, Artificial Sequence
  Description of Artificial Sequence: Synthetic oligonucleotide
  Antisense strand to SEQ ID NO: 132942
aucccuaacacugucgauu

SEQ ID NO: 132944 - RNA, 19 nt, Artificial Sequence
  Description of Artificial Sequence: Synthetic oligonucleotide
  Sense strand starting at position 2714 of SEQ ID NO: 1707
aaaguaguguuguuaggaa

SEQ ID NO: 132945 - RNA, 19 nt, Artificial Sequence
  Description of Artificial Sequence: Synthetic oligonucleotide
  Antisense strand to SEQ ID NO: 132944
uuccuaacaacacuacuuu

SEQ ID NO: 132946 - RNA, 19 nt, Artificial Sequence
  Description of Artificial Sequence: Synthetic oligonucleotide
  Sense strand starting at position 2718 of SEQ ID NO: 1707
uaguguuguuaggaaaucu

SEQ ID NO: 132947 - RNA, 19 nt, Artificial Sequence
  Description of Artificial Sequence: Synthetic oligonucleotide
  Antisense strand to SEQ ID NO: 132946
agauuuccuaacaacacua

SEQ ID NO: 132948 - RNA, 19 nt, Artificial Sequence
  Description of Artificial Sequence: Synthetic oligonucleotide
  Sense strand starting at position 2728 of SEQ ID NO: 1707
aggaaaucuuuggccacau

SEQ ID NO: 132949 - RNA, 19 nt, Artificial Sequence
  Description of Artificial Sequence: Synthetic oligonucleotide
  Antisense strand to SEQ ID NO: 132948
auguggccaaagauuuccu

SEQ ID NO: 132950 - RNA, 19 nt, Artificial Sequence
  Description of Artificial Sequence: Synthetic oligonucleotide
  Sense strand starting at position 2729 of SEQ ID NO: 1707
ggaaaucuuuggccacauc

SEQ ID NO: 132951 - RNA, 19 nt, Artificial Sequence
  Description of Artificial Sequence: Synthetic oligonucleotide
  Antisense strand to SEQ ID NO: 132950
gauguggccaaagauuucc

SEQ ID NO: 132952 - RNA, 19 nt, Artificial Sequence
  Description of Artificial Sequence: Synthetic oligonucleotide
  Sense strand starting at position 2793 of SEQ ID NO: 1707
aggagucgucccuaggaaa

SEQ ID NO: 132953 - RNA, 19 nt, Artificial Sequence
  Description of Artificial Sequence: Synthetic oligonucleotide
  Antisense strand to SEQ ID NO: 132952
uuuccuagggacgacuccu

SEQ ID NO: 132954 - RNA, 19 nt, Artificial Sequence
  Description of Artificial Sequence: Synthetic oligonucleotide
  Sense strand starting at position 2796 of SEQ ID NO: 1707
agucgucccuaggaaauca

SEQ ID NO: 132955 - RNA, 19 nt, Artificial Sequence
  Description of Artificial Sequence: Synthetic oligonucleotide
  Antisense strand to SEQ ID NO: 132954
ugauuuccuagggacgacu

SEQ ID NO: 132956 - RNA, 19 nt, Artificial Sequence
  Description of Artificial Sequence: Synthetic oligonucleotide
  Sense strand starting at position 2827 of SEQ ID NO: 1707
caacguauugaauggucuu

SEQ ID NO: 132957 - RNA, 19 nt, Artificial Sequence
  Description of Artificial Sequence: Synthetic oligonucleotide
  Antisense strand to SEQ ID NO: 132956
aagaccauucaauacguug

SEQ ID NO: 132958 - RNA, 19 nt, Artificial Sequence
  Description of Artificial Sequence: Synthetic oligonucleotide
  Sense strand starting at position 2833 of SEQ ID NO: 1707
auugaauggucuucgggau

SEQ ID NO: 132959 - RNA, 19 nt, Artificial Sequence
  Description of Artificial Sequence: Synthetic oligonucleotide
  Antisense strand to SEQ ID NO: 132958
aucccgaagaccauucaau

SEQ ID NO: 132960 - RNA, 19 nt, Artificial Sequence
  Description of Artificial Sequence: Synthetic oligonucleotide
  Sense strand starting at position 2834 of SEQ ID NO: 1707
uugaauggucuucgggauu

SEQ ID NO: 132961 - RNA, 19 nt, Artificial Sequence
  Description of Artificial Sequence: Synthetic oligonucleotide
  Antisense strand to SEQ ID NO: 132960
aaucccgaagaccauucaa

SEQ ID NO: 132962 - RNA, 19 nt, Artificial Sequence
  Description of Artificial Sequence: Synthetic oligonucleotide
  Sense strand starting at position 2936 of SEQ ID NO: 1707
gguuaagucuucuuuggaa

SEQ ID NO: 132963 - RNA, 19 nt, Artificial Sequence
  Description of Artificial Sequence: Synthetic oligonucleotide
  Antisense strand to SEQ ID NO: 132962
uuccaaagaagacuuaacc

SEQ ID NO: 132964 - RNA, 19 nt, Artificial Sequence
  Description of Artificial Sequence: Synthetic oligonucleotide
  Sense strand starting at position 2938 of SEQ ID NO: 1707
uuaagucuucuuuggaaga

SEQ ID NO: 132965 - RNA, 19 nt, Artificial Sequence
  Description of Artificial Sequence: Synthetic oligonucleotide
  Antisense strand to SEQ ID NO: 132964
ucuuccaaagaagacuuaa

SEQ ID NO: 132966 - RNA, 19 nt, Artificial Sequence
  Description of Artificial Sequence: Synthetic oligonucleotide
  Sense strand starting at position 3218 of SEQ ID NO: 1707
ucugcaugucagugaaucu

SEQ ID NO: 132967 - RNA, 19 nt, Artificial Sequence
  Description of Artificial Sequence: Synthetic oligonucleotide
  Antisense strand to SEQ ID NO: 132966
agauucacugacaugcaga

SEQ ID NO: 132968 - RNA, 19 nt, Artificial Sequence
  Description of Artificial Sequence: Synthetic oligonucleotide
  Sense strand starting at position 3636 of SEQ ID NO: 1707
ggguuaucgagugggugua

SEQ ID NO: 132969 - RNA, 19 nt, Artificial Sequence
  Description of Artificial Sequence: Synthetic oligonucleotide
  Antisense strand to SEQ ID NO: 132968
uacacccacucgauaaccc

SEQ ID NO: 132970 - RNA, 19 nt, Artificial Sequence
  Description of Artificial Sequence: Synthetic oligonucleotide
  Sense strand starting at position 3637 of SEQ ID NO: 1707
gguuaucgaguggguguaa

SEQ ID NO: 132971 - RNA, 19 nt, Artificial Sequence
  Description of Artificial Sequence: Synthetic oligonucleotide
  Antisense strand to SEQ ID NO: 132970
uuacacccacucgauaacc

SEQ ID NO: 132972 - RNA, 19 nt, Artificial Sequence
  Description of Artificial Sequence: Synthetic oligonucleotide
  Sense strand starting at position 3861 of SEQ ID NO: 1707
uguuaaguagaccacauau

SEQ ID NO: 132973 - RNA, 19 nt, Artificial Sequence
  Description of Artificial Sequence: Synthetic oligonucleotide
  Antisense strand to SEQ ID NO: 132972
auauguggucuacuuaaca

SEQ ID NO: 132974 - RNA, 19 nt, Artificial Sequence
  Description of Artificial Sequence: Synthetic oligonucleotide
  Sense strand starting at position 3863 of SEQ ID NO: 1707
uuaaguagaccacauaugu

SEQ ID NO: 132975 - RNA, 19 nt, Artificial Sequence
  Description of Artificial Sequence: Synthetic oligonucleotide
  Antisense strand to SEQ ID NO: 132974
acauauguggucuacuuaa

SEQ ID NO: 132976 - RNA, 19 nt, Artificial Sequence
  Description of Artificial Sequence: Synthetic oligonucleotide
  Sense strand starting at position 3820 of SEQ ID NO: 1708
gcccguguucaggcagcaa

SEQ ID NO: 132977 - RNA, 19 nt, Artificial Sequence
  Description of Artificial Sequence: Synthetic oligonucleotide
  Antisense strand to SEQ ID NO: 132976
uugcugccugaacacgggc

SEQ ID NO: 132978 - RNA, 19 nt, Artificial Sequence
  Description of Artificial Sequence: Synthetic oligonucleotide
  Sense strand starting at position 3783 of SEQ ID NO: 1708
aguggugacccugagacuu

SEQ ID NO: 132979 - RNA, 19 nt, Artificial Sequence
  Description of Artificial Sequence: Synthetic oligonucleotide
  Antisense strand to SEQ ID NO: 132978
aagucucagggucaccacu

SEQ ID NO: 132980 - RNA, 19 nt, Artificial Sequence
  Description of Artificial Sequence: Synthetic oligonucleotide
  Sense strand starting at position 3760 of SEQ ID NO: 1708
guugcuauauuccucauuu

SEQ ID NO: 132981 - RNA, 19 nt, Artificial Sequence
  Description of Artificial Sequence: Synthetic oligonucleotide
  Antisense strand to SEQ ID NO: 132980
aaaugaggaauauagcaac

SEQ ID NO: 132982 - RNA, 19 nt, Artificial Sequence
  Description of Artificial Sequence: Synthetic oligonucleotide
  Sense strand starting at position 3675 of SEQ ID NO: 1708
guugauugagcaugcacaa

SEQ ID NO: 132983 - RNA, 19 nt, Artificial Sequence
  Description of Artificial Sequence: Synthetic oligonucleotide
  Antisense strand to SEQ ID NO: 132982
uugugcaugcucaaucaac

SEQ ID NO: 132984 - RNA, 19 nt, Artificial Sequence
  Description of Artificial Sequence: Synthetic oligonucleotide
  Sense strand starting at position 3637 of SEQ ID NO: 1708
gggugagcucagcaccaaa

SEQ ID NO: 132985 - RNA, 19 nt, Artificial Sequence
  Description of Artificial Sequence: Synthetic oligonucleotide
  Antisense strand to SEQ ID NO: 132984
uuuggugcugagcucaccc

SEQ ID NO: 132986 - RNA, 19 nt, Artificial Sequence
  Description of Artificial Sequence: Synthetic oligonucleotide
  Sense strand starting at position 3566 of SEQ ID NO: 1708
ucgaguuaaacugaaacgu

SEQ ID NO: 132987 - RNA, 19 nt, Artificial Sequence
  Description of Artificial Sequence: Synthetic oligonucleotide
  Antisense strand to SEQ ID NO: 132986
acguuucaguuuaacucga

SEQ ID NO: 132988 - RNA, 19 nt, Artificial Sequence
  Description of Artificial Sequence: Synthetic oligonucleotide
  Sense strand starting at position 3560 of SEQ ID NO: 1708
gugcaaucgaguuaaacug

SEQ ID NO: 132989 - RNA, 19 nt, Artificial Sequence
  Description of Artificial Sequence: Synthetic oligonucleotide
  Antisense strand to SEQ ID NO: 132988
caguuuaacucgauugcac

SEQ ID NO: 132990 - RNA, 19 nt, Artificial Sequence
  Description of Artificial Sequence: Synthetic oligonucleotide
  Sense strand starting at position 3556 of SEQ ID NO: 1708
augugugcaaucgaguuaa

SEQ ID NO: 132991 - RNA, 19 nt, Artificial Sequence
  Description of Artificial Sequence: Synthetic oligonucleotide
  Antisense strand to SEQ ID NO: 132990
uuaacucgauugcacacau

SEQ ID NO: 132992 - RNA, 19 nt, Artificial Sequence
  Description of Artificial Sequence: Synthetic oligonucleotide
  Sense strand starting at position 3485 of SEQ ID NO: 1708
guucuccaucauggaauau

SEQ ID NO: 132993 - RNA, 19 nt, Artificial Sequence
  Description of Artificial Sequence: Synthetic oligonucleotide
  Antisense strand to SEQ ID NO: 132992
auauuccaugauggagaac

SEQ ID NO: 132994 - RNA, 19 nt, Artificial Sequence
  Description of Artificial Sequence: Synthetic oligonucleotide
  Sense strand starting at position 3478 of SEQ ID NO: 1708
gaaggauguucuccaucau

SEQ ID NO: 132995 - RNA, 19 nt, Artificial Sequence
  Description of Artificial Sequence: Synthetic oligonucleotide
  Antisense strand to SEQ ID NO: 132994
augauggagaacauccuuc

SEQ ID NO: 132996 - RNA, 19 nt, Artificial Sequence
  Description of Artificial Sequence: Synthetic oligonucleotide
  Sense strand starting at position 3475 of SEQ ID NO: 1708
uuugaaggauguucuccau

SEQ ID NO: 132997 - RNA, 19 nt, Artificial Sequence
  Description of Artificial Sequence: Synthetic oligonucleotide
  Antisense strand to SEQ ID NO: 132996
auggagaacauccuucaaa

SEQ ID NO: 132998 - RNA, 19 nt, Artificial Sequence
  Description of Artificial Sequence: Synthetic oligonucleotide
  Sense strand starting at position 3337 of SEQ ID NO: 1708
agucauucuucugcuauuu

SEQ ID NO: 132999 - RNA, 19 nt, Artificial Sequence
  Description of Artificial Sequence: Synthetic oligonucleotide
  Antisense strand to SEQ ID NO: 132998
aaauagcagaagaaugacu

SEQ ID NO: 133000 - RNA, 19 nt, Artificial Sequence
  Description of Artificial Sequence: Synthetic oligonucleotide
  Sense strand starting at position 2860 of SEQ ID NO: 1708
agucuuggccucuacuaca

SEQ ID NO: 133001 - RNA, 19 nt, Artificial Sequence
  Description of Artificial Sequence: Synthetic oligonucleotide
  Antisense strand to SEQ ID NO: 133000
uguaguagaggccaagacu

SEQ ID NO: 133002 - RNA, 19 nt, Artificial Sequence
  Description of Artificial Sequence: Synthetic oligonucleotide
  Sense strand starting at position 2855 of SEQ ID NO: 1708
gauacagucuuggccucua

SEQ ID NO: 133003 - RNA, 19 nt, Artificial Sequence
  Description of Artificial Sequence: Synthetic oligonucleotide
  Antisense strand to SEQ ID NO: 133002
uagaggccaagacuguauc

SEQ ID NO: 133004 - RNA, 19 nt, Artificial Sequence
  Description of Artificial Sequence: Synthetic oligonucleotide
  Sense strand starting at position 2758 of SEQ ID NO: 1708
ugucuagauugaguuuaaa

SEQ ID NO: 133005 - RNA, 19 nt, Artificial Sequence
  Description of Artificial Sequence: Synthetic oligonucleotide
  Antisense strand to SEQ ID NO: 133004
uuuaaacucaaucuagaca

SEQ ID NO: 133006 - RNA, 19 nt, Artificial Sequence
  Description of Artificial Sequence: Synthetic oligonucleotide
  Sense strand starting at position 2755 of SEQ ID NO: 1708
cucugucuagauugaguuu

SEQ ID NO: 133007 - RNA, 19 nt, Artificial Sequence
  Description of Artificial Sequence: Synthetic oligonucleotide
  Antisense strand to SEQ ID NO: 133006
aaacucaaucuagacagag

SEQ ID NO: 133008 - RNA, 19 nt, Artificial Sequence
  Description of Artificial Sequence: Synthetic oligonucleotide
  Sense strand starting at position 2749 of SEQ ID NO: 1708
gaaagacucugucuagauu

SEQ ID NO: 133009 - RNA, 19 nt, Artificial Sequence
  Description of Artificial Sequence: Synthetic oligonucleotide
  Antisense strand to SEQ ID NO: 133008
aaucuagacagagucuuuc

SEQ ID NO: 133010 - RNA, 19 nt, Artificial Sequence
  Description of Artificial Sequence: Synthetic oligonucleotide
  Sense strand starting at position 2747 of SEQ ID NO: 1708
uugaaagacucugucuaga

SEQ ID NO: 133011 - RNA, 19 nt, Artificial Sequence
  Description of Artificial Sequence: Synthetic oligonucleotide
  Antisense strand to SEQ ID NO: 133010
ucuagacagagucuuucaa

SEQ ID NO: 133012 - RNA, 19 nt, Artificial Sequence
  Description of Artificial Sequence: Synthetic oligonucleotide
  Sense strand starting at position 2746 of SEQ ID NO: 1708
auugaaagacucugucuag

SEQ ID NO: 133013 - RNA, 19 nt, Artificial Sequence
  Description of Artificial Sequence: Synthetic oligonucleotide
  Antisense strand to SEQ ID NO: 133012
cuagacagagucuuucaau

SEQ ID NO: 133014 - RNA, 19 nt, Artificial Sequence
  Description of Artificial Sequence: Synthetic oligonucleotide
  Sense strand starting at position 2572 of SEQ ID NO: 1708
gggugugauugaucacaag

SEQ ID NO: 133015 - RNA, 19 nt, Artificial Sequence
  Description of Artificial Sequence: Synthetic oligonucleotide
  Antisense strand to SEQ ID NO: 133014
cuugugaucaaucacaccc

SEQ ID NO: 133016 - RNA, 19 nt, Artificial Sequence
  Description of Artificial Sequence: Synthetic oligonucleotide
  Sense strand starting at position 2568 of SEQ ID NO: 1708
cggagggugugauugauca

SEQ ID NO: 133017 - RNA, 19 nt, Artificial Sequence
  Description of Artificial Sequence: Synthetic oligonucleotide
  Antisense strand to SEQ ID NO: 133016
ugaucaaucacacccuccg

SEQ ID NO: 133018 - RNA, 19 nt, Artificial Sequence
  Description of Artificial Sequence: Synthetic oligonucleotide
  Sense strand starting at position 2450 of SEQ ID NO: 1708
gacagugauguccacccua

SEQ ID NO: 133019 - RNA, 19 nt, Artificial Sequence
  Description of Artificial Sequence: Synthetic oligonucleotide
  Antisense strand to SEQ ID NO: 133018
uaggguggacaucacuguc

SEQ ID NO: 133020 - RNA, 19 nt, Artificial Sequence
  Description of Artificial Sequence: Synthetic oligonucleotide
  Sense strand starting at position 2391 of SEQ ID NO: 1708
uguggccacaucgaaauua

SEQ ID NO: 133021 - RNA, 19 nt, Artificial Sequence
  Description of Artificial Sequence: Synthetic oligonucleotide
  Antisense strand to SEQ ID NO: 133020
uaauuucgauguggccaca

SEQ ID NO: 133022 - RNA, 19 nt, Artificial Sequence
  Description of Artificial Sequence: Synthetic oligonucleotide
  Sense strand starting at position 2326 of SEQ ID NO: 1708
gguuuaaucuguuccugac

SEQ ID NO: 133023 - RNA, 19 nt, Artificial Sequence
  Description of Artificial Sequence: Synthetic oligonucleotide
  Antisense strand to SEQ ID NO: 133022
gucaggaacagauuaaacc

SEQ ID NO: 133024 - RNA, 19 nt, Artificial Sequence
  Description of Artificial Sequence: Synthetic oligonucleotide
  Sense strand starting at position 2284 of SEQ ID NO: 1708
gaugaaguuugacuaauau

SEQ ID NO: 133025 - RNA, 19 nt, Artificial Sequence
  Description of Artificial Sequence: Synthetic oligonucleotide
  Antisense strand to SEQ ID NO: 133024
auauuagucaaacuucauc

SEQ ID NO: 133026 - RNA, 19 nt, Artificial Sequence
  Description of Artificial Sequence: Synthetic oligonucleotide
  Sense strand starting at position 2154 of SEQ ID NO: 1708
guuaguccugauugaguuu

SEQ ID NO: 133027 - RNA, 19 nt, Artificial Sequence
  Description of Artificial Sequence: Synthetic oligonucleotide
  Antisense strand to SEQ ID NO: 133026
aaacucaaucaggacuaac

SEQ ID NO: 133028 - RNA, 19 nt, Artificial Sequence
  Description of Artificial Sequence: Synthetic oligonucleotide
  Sense strand starting at position 2151 of SEQ ID NO: 1708
cuaguuaguccugauugag

SEQ ID NO: 133029 - RNA, 19 nt, Artificial Sequence
  Description of Artificial Sequence: Synthetic oligonucleotide
  Antisense strand to SEQ ID NO: 133028
cucaaucaggacuaacuag

SEQ ID NO: 133030 - RNA, 19 nt, Artificial Sequence
  Description of Artificial Sequence: Synthetic oligonucleotide
  Sense strand starting at position 2120 of SEQ ID NO: 1708
agugauaccugauuagauu

SEQ ID NO: 133031 - RNA, 19 nt, Artificial Sequence
  Description of Artificial Sequence: Synthetic oligonucleotide
  Antisense strand to SEQ ID NO: 133030
aaucuaaucagguaucacu

SEQ ID NO: 133032 - RNA, 19 nt, Artificial Sequence
  Description of Artificial Sequence: Synthetic oligonucleotide
  Sense strand starting at position 2036 of SEQ ID NO: 1708
ggucucuccuuugcaaacu

SEQ ID NO: 133033 - RNA, 19 nt, Artificial Sequence
  Description of Artificial Sequence: Synthetic oligonucleotide
  Antisense strand to SEQ ID NO: 133032
aguuugcaaaggagagacc

SEQ ID NO: 133034 - RNA, 19 nt, Artificial Sequence
  Description of Artificial Sequence: Synthetic oligonucleotide
  Sense strand starting at position 2035 of SEQ ID NO: 1708
gggucucuccuuugcaaac

SEQ ID NO: 133035 - RNA, 19 nt, Artificial Sequence
  Description of Artificial Sequence: Synthetic oligonucleotide
  Antisense strand to SEQ ID NO: 133034
guuugcaaaggagagaccc

SEQ ID NO: 133036 - RNA, 19 nt, Artificial Sequence
  Description of Artificial Sequence: Synthetic oligonucleotide
  Sense strand starting at position 1866 of SEQ ID NO: 1708
ggaaauucucugugccacu

SEQ ID NO: 133037 - RNA, 19 nt, Artificial Sequence
  Description of Artificial Sequence: Synthetic oligonucleotide
  Antisense strand to SEQ ID NO: 133036
aguggcacagagaauuucc

SEQ ID NO: 133038 - RNA, 19 nt, Artificial Sequence
  Description of Artificial Sequence: Synthetic oligonucleotide
  Sense strand starting at position 1865 of SEQ ID NO: 1708
aggaaauucucugugccac

SEQ ID NO: 133039 - RNA, 19 nt, Artificial Sequence
  Description of Artificial Sequence: Synthetic oligonucleotide
  Antisense strand to SEQ ID NO: 133038
guggcacagagaauuuccu

SEQ ID NO: 133040 - RNA, 19 nt, Artificial Sequence
  Description of Artificial Sequence: Synthetic oligonucleotide
  Sense strand starting at position 1643 of SEQ ID NO: 1708
gugugugaacuguagcuga

SEQ ID NO: 133041 - RNA, 19 nt, Artificial Sequence
  Description of Artificial Sequence: Synthetic oligonucleotide
  Antisense strand to SEQ ID NO: 133040
ucagcuacaguucacacac

SEQ ID NO: 133042 - RNA, 19 nt, Artificial Sequence
  Description of Artificial Sequence: Synthetic oligonucleotide
  Sense strand starting at position 1635 of SEQ ID NO: 1708
acaacuaagugugugaacu

SEQ ID NO: 133043 - RNA, 19 nt, Artificial Sequence
  Description of Artificial Sequence: Synthetic oligonucleotide
  Antisense strand to SEQ ID NO: 133042
aguucacacacuuaguugu

SEQ ID NO: 133044 - RNA, 19 nt, Artificial Sequence
  Description of Artificial Sequence: Synthetic oligonucleotide
  Sense strand starting at position 1471 of SEQ ID NO: 1708
ggcaguauucuagagcacu

SEQ ID NO: 133045 - RNA, 19 nt, Artificial Sequence
  Description of Artificial Sequence: Synthetic oligonucleotide
  Antisense strand to SEQ ID NO: 133044
agugcucuagaauacugcc

SEQ ID NO: 133046 - RNA, 19 nt, Artificial Sequence
  Description of Artificial Sequence: Synthetic oligonucleotide
  Sense strand starting at position 1355 of SEQ ID NO: 1708
ccugcauucucaguuuaca

SEQ ID NO: 133047 - RNA, 19 nt, Artificial Sequence
  Description of Artificial Sequence: Synthetic oligonucleotide
  Antisense strand to SEQ ID NO: 133046
uguaaacugagaaugcagg

SEQ ID NO: 133048 - RNA, 19 nt, Artificial Sequence
  Description of Artificial Sequence: Synthetic oligonucleotide
  Sense strand starting at position 1243 of SEQ ID NO: 1708
ugggaucugucacucagga

SEQ ID NO: 133049 - RNA, 19 nt, Artificial Sequence
  Description of Artificial Sequence: Synthetic oligonucleotide
  Antisense strand to SEQ ID NO: 133048
uccugagugacagauccca

SEQ ID NO: 133050 - RNA, 19 nt, Artificial Sequence
  Description of Artificial Sequence: Synthetic oligonucleotide
  Sense strand starting at position 1190 of SEQ ID NO: 1708
uggccaguggcccauuaau

SEQ ID NO: 133051 - RNA, 19 nt, Artificial Sequence
  Description of Artificial Sequence: Synthetic oligonucleotide
  Antisense strand to SEQ ID NO: 133050
auuaaugggccacuggcca

SEQ ID NO: 133052 - RNA, 19 nt, Artificial Sequence
  Description of Artificial Sequence: Synthetic oligonucleotide
  Sense strand starting at position 1118 of SEQ ID NO: 1708
gccacaaaucuguaucugu

SEQ ID NO: 133053 - RNA, 19 nt, Artificial Sequence
  Description of Artificial Sequence: Synthetic oligonucleotide
  Antisense strand to SEQ ID NO: 133052
acagauacagauuuguggc

SEQ ID NO: 133054 - RNA, 19 nt, Artificial Sequence
  Description of Artificial Sequence: Synthetic oligonucleotide
  Sense strand starting at position 1053 of SEQ ID NO: 1708
aucucauugcucuggugga

SEQ ID NO: 133055 - RNA, 19 nt, Artificial Sequence
  Description of Artificial Sequence: Synthetic oligonucleotide
  Antisense strand to SEQ ID NO: 133054
uccaccagagcaaugagau

SEQ ID NO: 133056 - RNA, 19 nt, Artificial Sequence
  Description of Artificial Sequence: Synthetic oligonucleotide
  Sense strand starting at position 102 of SEQ ID NO: 1709
uguccuguucuugagacaa

SEQ ID NO: 133057 - RNA, 19 nt, Artificial Sequence
  Description of Artificial Sequence: Synthetic oligonucleotide
  Antisense strand to SEQ ID NO: 133056
uugucucaagaacaggaca

SEQ ID NO: 133058 - RNA, 19 nt, Artificial Sequence
  Description of Artificial Sequence: Synthetic oligonucleotide
  Sense strand starting at position 106 of SEQ ID NO: 1709
cuguucuugagacaaaggu

SEQ ID NO: 133059 - RNA, 19 nt, Artificial Sequence
  Description of Artificial Sequence: Synthetic oligonucleotide
  Antisense strand to SEQ ID NO: 133058
accuuugucucaagaacag

SEQ ID NO: 133060 - RNA, 19 nt, Artificial Sequence
  Description of Artificial Sequence: Synthetic oligonucleotide
  Sense strand starting at position 166 of SEQ ID NO: 1709
caguuaucugcuguuugcu

SEQ ID NO: 133061 - RNA, 19 nt, Artificial Sequence
  Description of Artificial Sequence: Synthetic oligonucleotide
  Antisense strand to SEQ ID NO: 133060
agcaaacagcagauaacug

SEQ ID NO: 133062 - RNA, 19 nt, Artificial Sequence
  Description of Artificial Sequence: Synthetic oligonucleotide
  Sense strand starting at position 167 of SEQ ID NO: 1709
aguuaucugcuguuugcuu

SEQ ID NO: 133063 - RNA, 19 nt, Artificial Sequence
  Description of Artificial Sequence: Synthetic oligonucleotide
  Antisense strand to SEQ ID NO: 133062
aagcaaacagcagauaacu

SEQ ID NO: 133064 - RNA, 19 nt, Artificial Sequence
  Description of Artificial Sequence: Synthetic oligonucleotide
  Sense strand starting at position 225 of SEQ ID NO: 1709
aaauaugucgcagaaguuc

SEQ ID NO: 133065 - RNA, 19 nt, Artificial Sequence
  Description of Artificial Sequence: Synthetic oligonucleotide
  Antisense strand to SEQ ID NO: 133064
gaacuucugcgacauauuu

SEQ ID NO: 133066 - RNA, 19 nt, Artificial Sequence
  Description of Artificial Sequence: Synthetic oligonucleotide
  Sense strand starting at position 462 of SEQ ID NO: 1709
agagaaguuucuguuuccu

SEQ ID NO: 133067 - RNA, 19 nt, Artificial Sequence
  Description of Artificial Sequence: Synthetic oligonucleotide
  Antisense strand to SEQ ID NO: 133066
aggaaacagaaacuucucu

SEQ ID NO: 133068 - RNA, 19 nt, Artificial Sequence
  Description of Artificial Sequence: Synthetic oligonucleotide
  Sense strand starting at position 942 of SEQ ID NO: 1709
cccugaugcucaucuugau

SEQ ID NO: 133069 - RNA, 19 nt, Artificial Sequence
  Description of Artificial Sequence: Synthetic oligonucleotide
  Antisense strand to SEQ ID NO: 133068
aucaagaugagcaucaggg

SEQ ID NO: 133070 - RNA, 19 nt, Artificial Sequence
  Description of Artificial Sequence: Synthetic oligonucleotide
  Sense strand starting at position 1052 of SEQ ID NO: 1709
aucucauugcucuggugga

SEQ ID NO: 133071 - RNA, 19 nt, Artificial Sequence
  Description of Artificial Sequence: Synthetic oligonucleotide
  Antisense strand to SEQ ID NO: 133070
uccaccagagcaaugagau

SEQ ID NO: 133072 - RNA, 19 nt, Artificial Sequence
  Description of Artificial Sequence: Synthetic oligonucleotide
  Sense strand starting at position 1117 of SEQ ID NO: 1709
gccacaaaucuguaucugu

SEQ ID NO: 133073 - RNA, 19 nt, Artificial Sequence
  Description of Artificial Sequence: Synthetic oligonucleotide
  Antisense strand to SEQ ID NO: 133072
acagauacagauuuguggc

SEQ ID NO: 133074 - RNA, 19 nt, Artificial Sequence
  Description of Artificial Sequence: Synthetic oligonucleotide
  Sense strand starting at position 1189 of SEQ ID NO: 1709
uggccaguggcccauuaau

SEQ ID NO: 133075 - RNA, 19 nt, Artificial Sequence
  Description of Artificial Sequence: Synthetic oligonucleotide
  Antisense strand to SEQ ID NO: 133074
auuaaugggccacuggcca

SEQ ID NO: 133076 - RNA, 19 nt, Artificial Sequence
  Description of Artificial Sequence: Synthetic oligonucleotide
  Sense strand starting at position 1242 of SEQ ID NO: 1709
ugggaucugucacucagga

SEQ ID NO: 133077 - RNA, 19 nt, Artificial Sequence
  Description of Artificial Sequence: Synthetic oligonucleotide
  Antisense strand to SEQ ID NO: 133076
uccugagugacagauccca

SEQ ID NO: 133078 - RNA, 19 nt, Artificial Sequence
  Description of Artificial Sequence: Synthetic oligonucleotide
  Sense strand starting at position 1470 of SEQ ID NO: 1709
ggcaguauucuagagcacu

SEQ ID NO: 133079 - RNA, 19 nt, Artificial Sequence
  Description of Artificial Sequence: Synthetic oligonucleotide
  Antisense strand to SEQ ID NO: 133078
agugcucuagaauacugcc

SEQ ID NO: 133080 - RNA, 19 nt, Artificial Sequence
  Description of Artificial Sequence: Synthetic oligonucleotide
  Sense strand starting at position 1634 of SEQ ID NO: 1709
acaacuaagugugugaacu

SEQ ID NO: 133081 - RNA, 19 nt, Artificial Sequence
  Description of Artificial Sequence: Synthetic oligonucleotide
  Antisense strand to SEQ ID NO: 133080
aguucacacacuuaguugu

SEQ ID NO: 133082 - RNA, 19 nt, Artificial Sequence
  Description of Artificial Sequence: Synthetic oligonucleotide
  Sense strand starting at position 1864 of SEQ ID NO: 1709
aggaaauucucugugccac

SEQ ID NO: 133083 - RNA, 19 nt, Artificial Sequence
  Description of Artificial Sequence: Synthetic oligonucleotide
  Antisense strand to SEQ ID NO: 133082
guggcacagagaauuuccu

SEQ ID NO: 133084 - RNA, 19 nt, Artificial Sequence
  Description of Artificial Sequence: Synthetic oligonucleotide
  Sense strand starting at position 1865 of SEQ ID NO: 1709
ggaaauucucugugccacu

SEQ ID NO: 133085 - RNA, 19 nt, Artificial Sequence
  Description of Artificial Sequence: Synthetic oligonucleotide
  Antisense strand to SEQ ID NO: 133084
aguggcacagagaauuucc

SEQ ID NO: 133086 - RNA, 19 nt, Artificial Sequence
  Description of Artificial Sequence: Synthetic oligonucleotide
  Sense strand starting at position 2119 of SEQ ID NO: 1709
agugauaccugauuagauu

SEQ ID NO: 133087 - RNA, 19 nt, Artificial Sequence
  Description of Artificial Sequence: Synthetic oligonucleotide
  Antisense strand to SEQ ID NO: 133086
aaucuaaucagguaucacu

SEQ ID NO: 133088 - RNA, 19 nt, Artificial Sequence
  Description of Artificial Sequence: Synthetic oligonucleotide
  Sense strand starting at position 2150 of SEQ ID NO: 1709
cuaguuaguccugauugag

SEQ ID NO: 133089 - RNA, 19 nt, Artificial Sequence
  Description of Artificial Sequence: Synthetic oligonucleotide
  Antisense strand to SEQ ID NO: 133088
cucaaucaggacuaacuag

SEQ ID NO: 133090 - RNA, 19 nt, Artificial Sequence
  Description of Artificial Sequence: Synthetic oligonucleotide
  Sense strand starting at position 2283 of SEQ ID NO: 1709
gaugaaguuugacuaauau

SEQ ID NO: 133091 - RNA, 19 nt, Artificial Sequence
  Description of Artificial Sequence: Synthetic oligonucleotide
  Antisense strand to SEQ ID NO: 133090
auauuagucaaacuucauc

SEQ ID NO: 133092 - RNA, 19 nt, Artificial Sequence
  Description of Artificial Sequence: Synthetic oligonucleotide
  Sense strand starting at position 2325 of SEQ ID NO: 1709
gguuuaaucuguuccugac

SEQ ID NO: 133093 - RNA, 19 nt, Artificial Sequence
  Description of Artificial Sequence: Synthetic oligonucleotide
  Antisense strand to SEQ ID NO: 133092
gucaggaacagauuaaacc

SEQ ID NO: 133094 - RNA, 19 nt, Artificial Sequence
  Description of Artificial Sequence: Synthetic oligonucleotide
  Sense strand starting at position 2390 of SEQ ID NO: 1709
uguggccacaucgaaauua

SEQ ID NO: 133095 - RNA, 19 nt, Artificial Sequence
  Description of Artificial Sequence: Synthetic oligonucleotide
  Antisense strand to SEQ ID NO: 133094
uaauuucgauguggccaca

SEQ ID NO: 133096 - RNA, 19 nt, Artificial Sequence
  Description of Artificial Sequence: Synthetic oligonucleotide
  Sense strand starting at position 2449 of SEQ ID NO: 1709
gacagugauguccacccua

SEQ ID NO: 133097 - RNA, 19 nt, Artificial Sequence
  Description of Artificial Sequence: Synthetic oligonucleotide
  Antisense strand to SEQ ID NO: 133096
uaggguggacaucacuguc

SEQ ID NO: 133098 - RNA, 19 nt, Artificial Sequence
  Description of Artificial Sequence: Synthetic oligonucleotide
  Sense strand starting at position 2567 of SEQ ID NO: 1709
cggagggugugauugauca

SEQ ID NO: 133099 - RNA, 19 nt, Artificial Sequence
  Description of Artificial Sequence: Synthetic oligonucleotide
  Antisense strand to SEQ ID NO: 133098
ugaucaaucacacccuccg

SEQ ID NO: 133100 - RNA, 19 nt, Artificial Sequence
  Description of Artificial Sequence: Synthetic oligonucleotide
  Sense strand starting at position 2571 of SEQ ID NO: 1709
gggugugauugaucacaag

SEQ ID NO: 133101 - RNA, 19 nt, Artificial Sequence
  Description of Artificial Sequence: Synthetic oligonucleotide
  Antisense strand to SEQ ID NO: 133100
cuugugaucaaucacaccc

SEQ ID NO: 133102 - RNA, 19 nt, Artificial Sequence
  Description of Artificial Sequence: Synthetic oligonucleotide
  Sense strand starting at position 2745 of SEQ ID NO: 1709
auugaaagacucugucuag

SEQ ID NO: 133103 - RNA, 19 nt, Artificial Sequence
  Description of Artificial Sequence: Synthetic oligonucleotide
  Antisense strand to SEQ ID NO: 133102
cuagacagagucuuucaau

SEQ ID NO: 133104 - RNA, 19 nt, Artificial Sequence
  Description of Artificial Sequence: Synthetic oligonucleotide
  Sense strand starting at position 2746 of SEQ ID NO: 1709
uugaaagacucugucuaga

SEQ ID NO: 133105 - RNA, 19 nt, Artificial Sequence
  Description of Artificial Sequence: Synthetic oligonucleotide
  Antisense strand to SEQ ID NO: 133104
ucuagacagagucuuucaa

SEQ ID NO: 133106 - RNA, 19 nt, Artificial Sequence
  Description of Artificial Sequence: Synthetic oligonucleotide
  Sense strand starting at position 2754 of SEQ ID NO: 1709
cucugucuagauugaguuu

SEQ ID NO: 133107 - RNA, 19 nt, Artificial Sequence
  Description of Artificial Sequence: Synthetic oligonucleotide
  Antisense strand to SEQ ID NO: 133106
aaacucaaucuagacagag

SEQ ID NO: 133108 - RNA, 19 nt, Artificial Sequence
  Description of Artificial Sequence: Synthetic oligonucleotide
  Sense strand starting at position 2757 of SEQ ID NO: 1709
ugucuagauugaguuuaaa

SEQ ID NO: 133109 - RNA, 19 nt, Artificial Sequence
  Description of Artificial Sequence: Synthetic oligonucleotide
  Antisense strand to SEQ ID NO: 133108
uuuaaacucaaucuagaca

SEQ ID NO: 133110 - RNA, 19 nt, Artificial Sequence
  Description of Artificial Sequence: Synthetic oligonucleotide
  Sense strand starting at position 2854 of SEQ ID NO: 1709
gauacagucuuggccucua

SEQ ID NO: 133111 - RNA, 19 nt, Artificial Sequence
  Description of Artificial Sequence: Synthetic oligonucleotide
  Antisense strand to SEQ ID NO: 133110
uagaggccaagacuguauc

SEQ ID NO: 133112 - RNA, 19 nt, Artificial Sequence
  Description of Artificial Sequence: Synthetic oligonucleotide
  Sense strand starting at position 2859 of SEQ ID NO: 1709
agucuuggccucuacuaca

SEQ ID NO: 133113 - RNA, 19 nt, Artificial Sequence
  Description of Artificial Sequence: Synthetic oligonucleotide
  Antisense strand to SEQ ID NO: 133112
uguaguagaggccaagacu

SEQ ID NO: 133114 - RNA, 19 nt, Artificial Sequence
  Description of Artificial Sequence: Synthetic oligonucleotide
  Sense strand starting at position 3314 of SEQ ID NO: 1709
agucauucuucugcuauuu

SEQ ID NO: 133115 - RNA, 19 nt, Artificial Sequence
  Description of Artificial Sequence: Synthetic oligonucleotide
  Antisense strand to SEQ ID NO: 133114
aaauagcagaagaaugacu

SEQ ID NO: 133116 - RNA, 19 nt, Artificial Sequence
  Description of Artificial Sequence: Synthetic oligonucleotide
  Sense strand starting at position 3452 of SEQ ID NO: 1709
uuugaaggauguucuccau

SEQ ID NO: 133117 - RNA, 19 nt, Artificial Sequence
  Description of Artificial Sequence: Synthetic oligonucleotide
  Antisense strand to SEQ ID NO: 133116
auggagaacauccuucaaa

SEQ ID NO: 133118 - RNA, 19 nt, Artificial Sequence
  Description of Artificial Sequence: Synthetic oligonucleotide
  Sense strand starting at position 3455 of SEQ ID NO: 1709
gaaggauguucuccaucau

SEQ ID NO: 133119 - RNA, 19 nt, Artificial Sequence
  Description of Artificial Sequence: Synthetic oligonucleotide
  Antisense strand to SEQ ID NO: 133118
augauggagaacauccuuc

SEQ ID NO: 133120 - RNA, 19 nt, Artificial Sequence
  Description of Artificial Sequence: Synthetic oligonucleotide
  Sense strand starting at position 3462 of SEQ ID NO: 1709
guucuccaucauggaauau

SEQ ID NO: 133121 - RNA, 19 nt, Artificial Sequence
  Description of Artificial Sequence: Synthetic oligonucleotide
  Antisense strand to SEQ ID NO: 133120
auauuccaugauggagaac

SEQ ID NO: 133122 - RNA, 19 nt, Artificial Sequence
  Description of Artificial Sequence: Synthetic oligonucleotide
  Sense strand starting at position 3537 of SEQ ID NO: 1709
gugcaaucgaguuaaacug

SEQ ID NO: 133123 - RNA, 19 nt, Artificial Sequence
  Description of Artificial Sequence: Synthetic oligonucleotide
  Antisense strand to SEQ ID NO: 133122
caguuuaacucgauugcac

SEQ ID NO: 133124 - RNA, 19 nt, Artificial Sequence
  Description of Artificial Sequence: Synthetic oligonucleotide
  Sense strand starting at position 3543 of SEQ ID NO: 1709
ucgaguuaaacugaaacgu

SEQ ID NO: 133125 - RNA, 19 nt, Artificial Sequence
  Description of Artificial Sequence: Synthetic oligonucleotide
  Antisense strand to SEQ ID NO: 133124
acguuucaguuuaacucga

SEQ ID NO: 133126 - RNA, 19 nt, Artificial Sequence
  Description of Artificial Sequence: Synthetic oligonucleotide
  Sense strand starting at position 3614 of SEQ ID NO: 1709
gggugagcucagcaccaaa

SEQ ID NO: 133127 - RNA, 19 nt, Artificial Sequence
  Description of Artificial Sequence: Synthetic oligonucleotide
  Antisense strand to SEQ ID NO: 133126
uuuggugcugagcucaccc

SEQ ID NO: 133128 - RNA, 19 nt, Artificial Sequence
  Description of Artificial Sequence: Synthetic oligonucleotide
  Sense strand starting at position 3652 of SEQ ID NO: 1709
guugauugagcaugcacaa

SEQ ID NO: 133129 - RNA, 19 nt, Artificial Sequence
  Description of Artificial Sequence: Synthetic oligonucleotide
  Antisense strand to SEQ ID NO: 133128
uugugcaugcucaaucaac

SEQ ID NO: 133130 - RNA, 19 nt, Artificial Sequence
  Description of Artificial Sequence: Synthetic oligonucleotide
  Sense strand starting at position 3737 of SEQ ID NO: 1709
guugcuauauuccucauuu

SEQ ID NO: 133131 - RNA, 19 nt, Artificial Sequence
  Description of Artificial Sequence: Synthetic oligonucleotide
  Antisense strand to SEQ ID NO: 133130
aaaugaggaauauagcaac

SEQ ID NO: 133132 - RNA, 19 nt, Artificial Sequence
  Description of Artificial Sequence: Synthetic oligonucleotide
  Sense strand starting at position 3760 of SEQ ID NO: 1709
aguggugacccugagacuu

SEQ ID NO: 133133 - RNA, 19 nt, Artificial Sequence
  Description of Artificial Sequence: Synthetic oligonucleotide
  Antisense strand to SEQ ID NO: 133132
aagucucagggucaccacu

SEQ ID NO: 133134 - RNA, 19 nt, Artificial Sequence
  Description of Artificial Sequence: Synthetic oligonucleotide
  Sense strand starting at position 3797 of SEQ ID NO: 1709
gcccguguucaggcagcaa

SEQ ID NO: 133135 - RNA, 19 nt, Artificial Sequence
  Description of Artificial Sequence: Synthetic oligonucleotide
  Antisense strand to SEQ ID NO: 133134
uugcugccugaacacgggc

SEQ ID NO: 133136 - RNA, 19 nt, Artificial Sequence
  Description of Artificial Sequence: Synthetic oligonucleotide
  Sense strand starting at position 3716 of SEQ ID NO: 1184
gaugaucaccugggucaua

SEQ ID NO: 133137 - RNA, 19 nt, Artificial Sequence
  Description of Artificial Sequence: Synthetic oligonucleotide
  Antisense strand to SEQ ID NO: 133136
uaugacccaggugaucauc

SEQ ID NO: 133138 - RNA, 19 nt, Artificial Sequence
  Description of Artificial Sequence: Synthetic oligonucleotide
  Sense strand starting at position 3715 of SEQ ID NO: 1184
cgaugaucaccugggucau

SEQ ID NO: 133139 - RNA, 19 nt, Artificial Sequence
  Description of Artificial Sequence: Synthetic oligonucleotide
  Antisense strand to SEQ ID NO: 133138
augacccaggugaucaucg

SEQ ID NO: 133140 - RNA, 19 nt, Artificial Sequence
  Description of Artificial Sequence: Synthetic oligonucleotide
  Sense strand starting at position 3706 of SEQ ID NO: 1184
ucauguauccgaugaucac

SEQ ID NO: 133141 - RNA, 19 nt, Artificial Sequence
  Description of Artificial Sequence: Synthetic oligonucleotide
  Antisense strand to SEQ ID NO: 133140
gugaucaucggauacauga

SEQ ID NO: 133142 - RNA, 19 nt, Artificial Sequence
  Description of Artificial Sequence: Synthetic oligonucleotide
  Sense strand starting at position 3264 of SEQ ID NO: 1184
gugagcugacauuauacua

SEQ ID NO: 133143 - RNA, 19 nt, Artificial Sequence
  Description of Artificial Sequence: Synthetic oligonucleotide
  Antisense strand to SEQ ID NO: 133142
uaguauaaugucagcucac

SEQ ID NO: 133144 - RNA, 19 nt, Artificial Sequence
  Description of Artificial Sequence: Synthetic oligonucleotide
  Sense strand starting at position 2402 of SEQ ID NO: 1184
uaaguuuguugggaacauu

SEQ ID NO: 133145 - RNA, 19 nt, Artificial Sequence
  Description of Artificial Sequence: Synthetic oligonucleotide
  Antisense strand to SEQ ID NO: 133144
aauguucccaacaaacuua

SEQ ID NO: 133146 - RNA, 19 nt, Artificial Sequence
  Description of Artificial Sequence: Synthetic oligonucleotide
  Sense strand starting at position 2401 of SEQ ID NO: 1184
auaaguuuguugggaacau

SEQ ID NO: 133147 - RNA, 19 nt, Artificial Sequence
  Description of Artificial Sequence: Synthetic oligonucleotide
  Antisense strand to SEQ ID NO: 133146
auguucccaacaaacuuau

SEQ ID NO: 133148 - RNA, 19 nt, Artificial Sequence
  Description of Artificial Sequence: Synthetic oligonucleotide
  Sense strand starting at position 2399 of SEQ ID NO: 1184
aaauaaguuuguugggaac

SEQ ID NO: 133149 - RNA, 19 nt, Artificial Sequence
  Description of Artificial Sequence: Synthetic oligonucleotide
  Antisense strand to SEQ ID NO: 133148
guucccaacaaacuuauuu

SEQ ID NO: 133150 - RNA, 19 nt, Artificial Sequence
  Description of Artificial Sequence: Synthetic oligonucleotide
  Sense strand starting at position 2398 of SEQ ID NO: 1184
caaauaaguuuguugggaa

SEQ ID NO: 133151 - RNA, 19 nt, Artificial Sequence
  Description of Artificial Sequence: Synthetic oligonucleotide
  Antisense strand to SEQ ID NO: 133150
uucccaacaaacuuauuug

SEQ ID NO: 133152 - RNA, 19 nt, Artificial Sequence
  Description of Artificial Sequence: Synthetic oligonucleotide
  Sense strand starting at position 2325 of SEQ ID NO: 1184
cugauuacucaagguucua

SEQ ID NO: 133153 - RNA, 19 nt, Artificial Sequence
  Description of Artificial Sequence: Synthetic oligonucleotide
  Antisense strand to SEQ ID NO: 133152
uagaaccuugaguaaucag

SEQ ID NO: 133154 - RNA, 19 nt, Artificial Sequence
  Description of Artificial Sequence: Synthetic oligonucleotide
  Sense strand starting at position 2321 of SEQ ID NO: 1184
auuacugauuacucaaggu

SEQ ID NO: 133155 - RNA, 19 nt, Artificial Sequence
  Description of Artificial Sequence: Synthetic oligonucleotide
  Antisense strand to SEQ ID NO: 133154
accuugaguaaucaguaau

SEQ ID NO: 133156 - RNA, 19 nt, Artificial Sequence
  Description of Artificial Sequence: Synthetic oligonucleotide
  Sense strand starting at position 220 of SEQ ID NO: 1184
cuagcuuccuaguaugaca

SEQ ID NO: 133157 - RNA, 19 nt, Artificial Sequence
  Description of Artificial Sequence: Synthetic oligonucleotide
  Antisense strand to SEQ ID NO: 133156
ugucauacuaggaagcuag

SEQ ID NO: 133158 - RNA, 19 nt, Artificial Sequence
  Description of Artificial Sequence: Synthetic oligonucleotide
  Sense strand starting at position 3500 of SEQ ID NO: 1710
agaaacuacucaguuaguu

SEQ ID NO: 133159 - RNA, 19 nt, Artificial Sequence
  Description of Artificial Sequence: Synthetic oligonucleotide
  Antisense strand to SEQ ID NO: 133158
aacuaacugaguaguuucu

SEQ ID NO: 133160 - RNA, 19 nt, Artificial Sequence
  Description of Artificial Sequence: Synthetic oligonucleotide
  Sense strand starting at position 3497 of SEQ ID NO: 1710
guaagaaacuacucaguua

SEQ ID NO: 133161 - RNA, 19 nt, Artificial Sequence
  Description of Artificial Sequence: Synthetic oligonucleotide
  Antisense strand to SEQ ID NO: 133160
uaacugaguaguuucuuac

SEQ ID NO: 133162 - RNA, 19 nt, Artificial Sequence
  Description of Artificial Sequence: Synthetic oligonucleotide
  Sense strand starting at position 3485 of SEQ ID NO: 1710
aagccuggaucuguaagaa

SEQ ID NO: 133163 - RNA, 19 nt, Artificial Sequence
  Description of Artificial Sequence: Synthetic oligonucleotide
  Antisense strand to SEQ ID NO: 133162
uucuuacagauccaggcuu

SEQ ID NO: 133164 - RNA, 19 nt, Artificial Sequence
  Description of Artificial Sequence: Synthetic oligonucleotide
  Sense strand starting at position 3433 of SEQ ID NO: 1710
ccugaaaucuagccuaaga

SEQ ID NO: 133165 - RNA, 19 nt, Artificial Sequence
  Description of Artificial Sequence: Synthetic oligonucleotide
  Antisense strand to SEQ ID NO: 133164
ucuuaggcuagauuucagg

SEQ ID NO: 133166 - RNA, 19 nt, Artificial Sequence
  Description of Artificial Sequence: Synthetic oligonucleotide
  Sense strand starting at position 3393 of SEQ ID NO: 1710
gcauaagcaucacuaggaa

SEQ ID NO: 133167 - RNA, 19 nt, Artificial Sequence
  Description of Artificial Sequence: Synthetic oligonucleotide
  Antisense strand to SEQ ID NO: 133166
uuccuagugaugcuuaugc

SEQ ID NO: 133168 - RNA, 19 nt, Artificial Sequence
  Description of Artificial Sequence: Synthetic oligonucleotide
  Sense strand starting at position 3262 of SEQ ID NO: 1710
gcuugaauccucuaucaga

SEQ ID NO: 133169 - RNA, 19 nt, Artificial Sequence
  Description of Artificial Sequence: Synthetic oligonucleotide
  Antisense strand to SEQ ID NO: 133168
ucugauagaggauucaagc

SEQ ID NO: 133170 - RNA, 19 nt, Artificial Sequence
  Description of Artificial Sequence: Synthetic oligonucleotide
  Sense strand starting at position 2967 of SEQ ID NO: 1710
uucccuguccgcuugugau

SEQ ID NO: 133171 - RNA, 19 nt, Artificial Sequence
  Description of Artificial Sequence: Synthetic oligonucleotide
  Antisense strand to SEQ ID NO: 133170
aucacaagcggacagggaa

SEQ ID NO: 133172 - RNA, 19 nt, Artificial Sequence
  Description of Artificial Sequence: Synthetic oligonucleotide
  Sense strand starting at position 2928 of SEQ ID NO: 1710
auuuaugucugcuugugau

SEQ ID NO: 133173 - RNA, 19 nt, Artificial Sequence
  Description of Artificial Sequence: Synthetic oligonucleotide
  Antisense strand to SEQ ID NO: 133172
aucacaagcagacauaaau

SEQ ID NO: 133174 - RNA, 19 nt, Artificial Sequence
  Description of Artificial Sequence: Synthetic oligonucleotide
  Sense strand starting at position 2825 of SEQ ID NO: 1710
cugugagugcugcuucuua

SEQ ID NO: 133175 - RNA, 19 nt, Artificial Sequence
  Description of Artificial Sequence: Synthetic oligonucleotide
  Antisense strand to SEQ ID NO: 133174
uaagaagcagcacucacag

SEQ ID NO: 133176 - RNA, 19 nt, Artificial Sequence
  Description of Artificial Sequence: Synthetic oligonucleotide
  Sense strand starting at position 2798 of SEQ ID NO: 1710
gcagauguccuuuacauuc

SEQ ID NO: 133177 - RNA, 19 nt, Artificial Sequence
  Description of Artificial Sequence: Synthetic oligonucleotide
  Antisense strand to SEQ ID NO: 133176
gaauguaaaggacaucugc

SEQ ID NO: 133178 - RNA, 19 nt, Artificial Sequence
  Description of Artificial Sequence: Synthetic oligonucleotide
  Sense strand starting at position 2735 of SEQ ID NO: 1710
gcgaccguucugaggaauc

SEQ ID NO: 133179 - RNA, 19 nt, Artificial Sequence
  Description of Artificial Sequence: Synthetic oligonucleotide
  Antisense strand to SEQ ID NO: 133178
gauuccucagaacggucgc

SEQ ID NO: 133180 - RNA, 19 nt, Artificial Sequence
  Description of Artificial Sequence: Synthetic oligonucleotide
  Sense strand starting at position 2699 of SEQ ID NO: 1710
ugagguuaaucccuucuca

SEQ ID NO: 133181 - RNA, 19 nt, Artificial Sequence
  Description of Artificial Sequence: Synthetic oligonucleotide
  Antisense strand to SEQ ID NO: 133180
ugagaagggauuaaccuca

SEQ ID NO: 133182 - RNA, 19 nt, Artificial Sequence
  Description of Artificial Sequence: Synthetic oligonucleotide
  Sense strand starting at position 2666 of SEQ ID NO: 1710
ugggcaaggcucugacaau

SEQ ID NO: 133183 - RNA, 19 nt, Artificial Sequence
  Description of Artificial Sequence: Synthetic oligonucleotide
  Antisense strand to SEQ ID NO: 133182
auugucagagccuugccca

SEQ ID NO: 133184 - RNA, 19 nt, Artificial Sequence
  Description of Artificial Sequence: Synthetic oligonucleotide
  Sense strand starting at position 2537 of SEQ ID NO: 1710
uugaaauaaaugugacgua

SEQ ID NO: 133185 - RNA, 19 nt, Artificial Sequence
  Description of Artificial Sequence: Synthetic oligonucleotide
  Antisense strand to SEQ ID NO: 133184
uacgucacauuuauuucaa

SEQ ID NO: 133186 - RNA, 19 nt, Artificial Sequence
  Description of Artificial Sequence: Synthetic oligonucleotide
  Sense strand starting at position 2463 of SEQ ID NO: 1710
aagggacccguacgaaauu

SEQ ID NO: 133187 - RNA, 19 nt, Artificial Sequence
  Description of Artificial Sequence: Synthetic oligonucleotide
  Antisense strand to SEQ ID NO: 133186
aauuucguacgggucccuu

SEQ ID NO: 133188 - RNA, 19 nt, Artificial Sequence
  Description of Artificial Sequence: Synthetic oligonucleotide
  Sense strand starting at position 2384 of SEQ ID NO: 1710
cuguaaaugaacuggugaa

SEQ ID NO: 133189 - RNA, 19 nt, Artificial Sequence
  Description of Artificial Sequence: Synthetic oligonucleotide
  Antisense strand to SEQ ID NO: 133188
uucaccaguucauuuacag

SEQ ID NO: 133190 - RNA, 19 nt, Artificial Sequence
  Description of Artificial Sequence: Synthetic oligonucleotide
  Sense strand starting at position 2373 of SEQ ID NO: 1710
ggcaaagugaucuguaaau

SEQ ID NO: 133191 - RNA, 19 nt, Artificial Sequence
  Description of Artificial Sequence: Synthetic oligonucleotide
  Antisense strand to SEQ ID NO: 133190
auuuacagaucacuuugcc

SEQ ID NO: 133192 - RNA, 19 nt, Artificial Sequence
  Description of Artificial Sequence: Synthetic oligonucleotide
  Sense strand starting at position 2371 of SEQ ID NO: 1710
aaggcaaagugaucuguaa

SEQ ID NO: 133193 - RNA, 19 nt, Artificial Sequence
  Description of Artificial Sequence: Synthetic oligonucleotide
  Antisense strand to SEQ ID NO: 133192
uuacagaucacuuugccuu

SEQ ID NO: 133194 - RNA, 19 nt, Artificial Sequence
  Description of Artificial Sequence: Synthetic oligonucleotide
  Sense strand starting at position 2312 of SEQ ID NO: 1710
aagugaugucgggaacgaa

SEQ ID NO: 133195 - RNA, 19 nt, Artificial Sequence
  Description of Artificial Sequence: Synthetic oligonucleotide
  Antisense strand to SEQ ID NO: 133194
uucguucccgacaucacuu

SEQ ID NO: 133196 - RNA, 19 nt, Artificial Sequence
  Description of Artificial Sequence: Synthetic oligonucleotide
  Sense strand starting at position 2287 of SEQ ID NO: 1710
gagauaugaugcucuuaga

SEQ ID NO: 133197 - RNA, 19 nt, Artificial Sequence
  Description of Artificial Sequence: Synthetic oligonucleotide
  Antisense strand to SEQ ID NO: 133196
ucuaagagcaucauaucuc

SEQ ID NO: 133198 - RNA, 19 nt, Artificial Sequence
  Description of Artificial Sequence: Synthetic oligonucleotide
  Sense strand starting at position 2275 of SEQ ID NO: 1710
uaagauuucugggagauau

SEQ ID NO: 133199 - RNA, 19 nt, Artificial Sequence
  Description of Artificial Sequence: Synthetic oligonucleotide
  Antisense strand to SEQ ID NO: 133198
auaucucccagaaaucuua

SEQ ID NO: 133200 - RNA, 19 nt, Artificial Sequence
  Description of Artificial Sequence: Synthetic oligonucleotide
  Sense strand starting at position 2272 of SEQ ID NO: 1710
cacuaagauuucugggaga

SEQ ID NO: 133201 - RNA, 19 nt, Artificial Sequence
  Description of Artificial Sequence: Synthetic oligonucleotide
  Antisense strand to SEQ ID NO: 133200
ucucccagaaaucuuagug

SEQ ID NO: 133202 - RNA, 19 nt, Artificial Sequence
  Description of Artificial Sequence: Synthetic oligonucleotide
  Sense strand starting at position 2243 of SEQ ID NO: 1710
cuugaaguucccuagggua

SEQ ID NO: 133203 - RNA, 19 nt, Artificial Sequence
  Description of Artificial Sequence: Synthetic oligonucleotide
  Antisense strand to SEQ ID NO: 133202
uacccuagggaacuucaag

SEQ ID NO: 133204 - RNA, 19 nt, Artificial Sequence
  Description of Artificial Sequence: Synthetic oligonucleotide
  Sense strand starting at position 2232 of SEQ ID NO: 1710
gcauuucgguacuugaagu

SEQ ID NO: 133205 - RNA, 19 nt, Artificial Sequence
  Description of Artificial Sequence: Synthetic oligonucleotide
  Antisense strand to SEQ ID NO: 133204
acuucaaguaccgaaaugc

SEQ ID NO: 133206 - RNA, 19 nt, Artificial Sequence
  Description of Artificial Sequence: Synthetic oligonucleotide
  Sense strand starting at position 2167 of SEQ ID NO: 1710
uaacaauuccgaggugacu

SEQ ID NO: 133207 - RNA, 19 nt, Artificial Sequence
  Description of Artificial Sequence: Synthetic oligonucleotide
  Antisense strand to SEQ ID NO: 133206
agucaccucggaauuguua

SEQ ID NO: 133208 - RNA, 19 nt, Artificial Sequence
  Description of Artificial Sequence: Synthetic oligonucleotide
  Sense strand starting at position 2063 of SEQ ID NO: 1710
ggaguuggaguccgaggaa

SEQ ID NO: 133209 - RNA, 19 nt, Artificial Sequence
  Description of Artificial Sequence: Synthetic oligonucleotide
  Antisense strand to SEQ ID NO: 133208
uuccucggacuccaacucc

SEQ ID NO: 133210 - RNA, 19 nt, Artificial Sequence
  Description of Artificial Sequence: Synthetic oligonucleotide
  Sense strand starting at position 1147 of SEQ ID NO: 1710
gcguuuguaggaaggaguu

SEQ ID NO: 133211 - RNA, 19 nt, Artificial Sequence
  Description of Artificial Sequence: Synthetic oligonucleotide
  Antisense strand to SEQ ID NO: 133210
aacuccuuccuacaaacgc

SEQ ID NO: 133212 - RNA, 19 nt, Artificial Sequence
  Description of Artificial Sequence: Synthetic oligonucleotide
  Sense strand starting at position 1116 of SEQ ID NO: 1710
agaggauuccaguggccuu

SEQ ID NO: 133213 - RNA, 19 nt, Artificial Sequence
  Description of Artificial Sequence: Synthetic oligonucleotide
  Antisense strand to SEQ ID NO: 133212
aaggccacuggaauccucu

SEQ ID NO: 133214 - RNA, 19 nt, Artificial Sequence
  Description of Artificial Sequence: Synthetic oligonucleotide
  Sense strand starting at position 993 of SEQ ID NO: 1710
gucaguaccaggugaugau

SEQ ID NO: 133215 - RNA, 19 nt, Artificial Sequence
  Description of Artificial Sequence: Synthetic oligonucleotide
  Antisense strand to SEQ ID NO: 133214
aucaucaccugguacugac

SEQ ID NO: 133216 - RNA, 19 nt, Artificial Sequence
  Description of Artificial Sequence: Synthetic oligonucleotide
  Sense strand starting at position 936 of SEQ ID NO: 1710
gccggacugaagugaagau

SEQ ID NO: 133217 - RNA, 19 nt, Artificial Sequence
  Description of Artificial Sequence: Synthetic oligonucleotide
  Antisense strand to SEQ ID NO: 133216
aucuucacuucaguccggc

SEQ ID NO: 133218 - RNA, 19 nt, Artificial Sequence
  Description of Artificial Sequence: Synthetic oligonucleotide
  Sense strand starting at position 843 of SEQ ID NO: 1710
ccagauguucggcaaaggu

SEQ ID NO: 133219 - RNA, 19 nt, Artificial Sequence
  Description of Artificial Sequence: Synthetic oligonucleotide
  Antisense strand to SEQ ID NO: 133218
accuuugccgaacaucugg

SEQ ID NO: 133220 - RNA, 19 nt, Artificial Sequence
  Description of Artificial Sequence: Synthetic oligonucleotide
  Sense strand starting at position 832 of SEQ ID NO: 1710
aaagauuugucccagaugu

SEQ ID NO: 133221 - RNA, 19 nt, Artificial Sequence
  Description of Artificial Sequence: Synthetic oligonucleotide
  Antisense strand to SEQ ID NO: 133220
acaucugggacaaaucuuu

SEQ ID NO: 133222 - RNA, 19 nt, Artificial Sequence
  Description of Artificial Sequence: Synthetic oligonucleotide
  Sense strand starting at position 715 of SEQ ID NO: 1710
gcaaaugaucugcacuaaa

SEQ ID NO: 133223 - RNA, 19 nt, Artificial Sequence
  Description of Artificial Sequence: Synthetic oligonucleotide
  Antisense strand to SEQ ID NO: 133222
uuuagugcagaucauuugc

SEQ ID NO: 133224 - RNA, 19 nt, Artificial Sequence
  Description of Artificial Sequence: Synthetic oligonucleotide
  Sense strand starting at position 714 of SEQ ID NO: 1710
ggcaaaugaucugcacuaa

SEQ ID NO: 133225 - RNA, 19 nt, Artificial Sequence
  Description of Artificial Sequence: Synthetic oligonucleotide
  Antisense strand to SEQ ID NO: 133224
uuagugcagaucauuugcc

SEQ ID NO: 133226 - RNA, 19 nt, Artificial Sequence
  Description of Artificial Sequence: Synthetic oligonucleotide
  Sense strand starting at position 702 of SEQ ID NO: 1710
ggaccaaugaacggcaaau

SEQ ID NO: 133227 - RNA, 19 nt, Artificial Sequence
  Description of Artificial Sequence: Synthetic oligonucleotide
  Antisense strand to SEQ ID NO: 133226
auuugccguucauuggucc

SEQ ID NO: 133228 - RNA, 19 nt, Artificial Sequence
  Description of Artificial Sequence: Synthetic oligonucleotide
  Sense strand starting at position 674 of SEQ ID NO: 1710
cccagagcucuguaauaau

SEQ ID NO: 133229 - RNA, 19 nt, Artificial Sequence
  Description of Artificial Sequence: Synthetic oligonucleotide
  Antisense strand to SEQ ID NO: 133228
auuauuacagagcucuggg

SEQ ID NO: 133230 - RNA, 19 nt, Artificial Sequence
  Description of Artificial Sequence: Synthetic oligonucleotide
  Sense strand starting at position 549 of SEQ ID NO: 1710
gaggcacagaucugagguu

SEQ ID NO: 133231 - RNA, 19 nt, Artificial Sequence
  Description of Artificial Sequence: Synthetic oligonucleotide
  Antisense strand to SEQ ID NO: 133230
aaccucagaucugugccuc

SEQ ID NO: 133232 - RNA, 19 nt, Artificial Sequence
  Description of Artificial Sequence: Synthetic oligonucleotide
  Sense strand starting at position 158 of SEQ ID NO: 1710
gugauaggagguugcaauu

SEQ ID NO: 133233 - RNA, 19 nt, Artificial Sequence
  Description of Artificial Sequence: Synthetic oligonucleotide
  Antisense strand to SEQ ID NO: 133232
aauugcaaccuccuaucac

SEQ ID NO: 133234 - RNA, 19 nt, Artificial Sequence
  Description of Artificial Sequence: Synthetic oligonucleotide
  Sense strand starting at position 105 of SEQ ID NO: 1710
ugauguuaagugcaaugga

SEQ ID NO: 133235 - RNA, 19 nt, Artificial Sequence
  Description of Artificial Sequence: Synthetic oligonucleotide
  Antisense strand to SEQ ID NO: 133234
uccauugcacuuaacauca

SEQ ID NO: 133236 - RNA, 19 nt, Artificial Sequence
  Description of Artificial Sequence: Synthetic oligonucleotide
  Sense strand starting at position 102 of SEQ ID NO: 1710
agaugauguuaagugcaau

SEQ ID NO: 133237 - RNA, 19 nt, Artificial Sequence
  Description of Artificial Sequence: Synthetic oligonucleotide
  Antisense strand to SEQ ID NO: 133236
auugcacuuaacaucaucu

SEQ ID NO: 133238 - RNA, 19 nt, Artificial Sequence
  Description of Artificial Sequence: Synthetic oligonucleotide
  Sense strand starting at position 3972 of SEQ ID NO: 1711
gagaacagcucaguuuaca

SEQ ID NO: 133239 - RNA, 19 nt, Artificial Sequence
  Description of Artificial Sequence: Synthetic oligonucleotide
  Antisense strand to SEQ ID NO: 133238
uguaaacugagcuguucuc

SEQ ID NO: 133240 - RNA, 19 nt, Artificial Sequence
  Description of Artificial Sequence: Synthetic oligonucleotide
  Sense strand starting at position 3970 of SEQ ID NO: 1711
cagagaacagcucaguuua

SEQ ID NO: 133241 - RNA, 19 nt, Artificial Sequence
  Description of Artificial Sequence: Synthetic oligonucleotide
  Antisense strand to SEQ ID NO: 133240
uaaacugagcuguucucug

SEQ ID NO: 133242 - RNA, 19 nt, Artificial Sequence
  Description of Artificial Sequence: Synthetic oligonucleotide
  Sense strand starting at position 3896 of SEQ ID NO: 1711
cguccuuucgagggucuau

SEQ ID NO: 133243 - RNA, 19 nt, Artificial Sequence
  Description of Artificial Sequence: Synthetic oligonucleotide
  Antisense strand to SEQ ID NO: 133242
auagacccucgaaaggacg

SEQ ID NO: 133244 - RNA, 19 nt, Artificial Sequence
  Description of Artificial Sequence: Synthetic oligonucleotide
  Sense strand starting at position 3843 of SEQ ID NO: 1711
gugagugucgccuagagaa

SEQ ID NO: 133245 - RNA, 19 nt, Artificial Sequence
  Description of Artificial Sequence: Synthetic oligonucleotide
  Antisense strand to SEQ ID NO: 133244
uucucuaggcgacacucac

SEQ ID NO: 133246 - RNA, 19 nt, Artificial Sequence
  Description of Artificial Sequence: Synthetic oligonucleotide
  Sense strand starting at position 3697 of SEQ ID NO: 1711
ccgcuucccugcucagauu

SEQ ID NO: 133247 - RNA, 19 nt, Artificial Sequence
  Description of Artificial Sequence: Synthetic oligonucleotide
  Antisense strand to SEQ ID NO: 133246
aaucugagcagggaagcgg

SEQ ID NO: 133248 - RNA, 19 nt, Artificial Sequence
  Description of Artificial Sequence: Synthetic oligonucleotide
  Sense strand starting at position 3505 of SEQ ID NO: 1711
cgcguuaaaggaggugaaa

SEQ ID NO: 133249 - RNA, 19 nt, Artificial Sequence
  Description of Artificial Sequence: Synthetic oligonucleotide
  Antisense strand to SEQ ID NO: 133248
uuucaccuccuuuaacgcg

SEQ ID NO: 133250 - RNA, 19 nt, Artificial Sequence
  Description of Artificial Sequence: Synthetic oligonucleotide
  Sense strand starting at position 3440 of SEQ ID NO: 1711
cccuuuguuguguaauaag

SEQ ID NO: 133251 - RNA, 19 nt, Artificial Sequence
  Description of Artificial Sequence: Synthetic oligonucleotide
  Antisense strand to SEQ ID NO: 133250
cuuauuacacaacaaaggg

SEQ ID NO: 133252 - RNA, 19 nt, Artificial Sequence
  Description of Artificial Sequence: Synthetic oligonucleotide
  Sense strand starting at position 3439 of SEQ ID NO: 1711
gcccuuuguuguguaauaa

SEQ ID NO: 133253 - RNA, 19 nt, Artificial Sequence
  Description of Artificial Sequence: Synthetic oligonucleotide
  Antisense strand to SEQ ID NO: 133252
uuauuacacaacaaagggc

SEQ ID NO: 133254 - RNA, 19 nt, Artificial Sequence
  Description of Artificial Sequence: Synthetic oligonucleotide
  Sense strand starting at position 3438 of SEQ ID NO: 1711
ugcccuuuguuguguaaua

SEQ ID NO: 133255 - RNA, 19 nt, Artificial Sequence
  Description of Artificial Sequence: Synthetic oligonucleotide
  Antisense strand to SEQ ID NO: 133254
uauuacacaacaaagggca

SEQ ID NO: 133256 - RNA, 19 nt, Artificial Sequence
  Description of Artificial Sequence: Synthetic oligonucleotide
  Sense strand starting at position 3437 of SEQ ID NO: 1711
cugcccuuuguuguguaau

SEQ ID NO: 133257 - RNA, 19 nt, Artificial Sequence
  Description of Artificial Sequence: Synthetic oligonucleotide
  Antisense strand to SEQ ID NO: 133256
auuacacaacaaagggcag

SEQ ID NO: 133258 - RNA, 19 nt, Artificial Sequence
  Description of Artificial Sequence: Synthetic oligonucleotide
  Sense strand starting at position 3246 of SEQ ID NO: 1711
gagaaugaauuggaaggaa

SEQ ID NO: 133259 - RNA, 19 nt, Artificial Sequence
  Description of Artificial Sequence: Synthetic oligonucleotide
  Antisense strand to SEQ ID NO: 133258
uuccuuccaauucauucuc

SEQ ID NO: 133260 - RNA, 19 nt, Artificial Sequence
  Description of Artificial Sequence: Synthetic oligonucleotide
  Sense strand starting at position 3233 of SEQ ID NO: 1711
guaucugggaaucgagaau

SEQ ID NO: 133261 - RNA, 19 nt, Artificial Sequence
  Description of Artificial Sequence: Synthetic oligonucleotide
  Antisense strand to SEQ ID NO: 133260
auucucgauucccagauac

SEQ ID NO: 133262 - RNA, 19 nt, Artificial Sequence
  Description of Artificial Sequence: Synthetic oligonucleotide
  Sense strand starting at position 3229 of SEQ ID NO: 1711
cugaguaucugggaaucga

SEQ ID NO: 133263 - RNA, 19 nt, Artificial Sequence
  Description of Artificial Sequence: Synthetic oligonucleotide
  Antisense strand to SEQ ID NO: 133262
ucgauucccagauacucag

SEQ ID NO: 133264 - RNA, 19 nt, Artificial Sequence
  Description of Artificial Sequence: Synthetic oligonucleotide
  Sense strand starting at position 3227 of SEQ ID NO: 1711
aucugaguaucugggaauc

SEQ ID NO: 133265 - RNA, 19 nt, Artificial Sequence
  Description of Artificial Sequence: Synthetic oligonucleotide
  Antisense strand to SEQ ID NO: 133264
gauucccagauacucagau

SEQ ID NO: 133266 - RNA, 19 nt, Artificial Sequence
  Description of Artificial Sequence: Synthetic oligonucleotide
  Sense strand starting at position 3216 of SEQ ID NO: 1711
gcggauuucucaucugagu

SEQ ID NO: 133267 - RNA, 19 nt, Artificial Sequence
  Description of Artificial Sequence: Synthetic oligonucleotide
  Antisense strand to SEQ ID NO: 133266
acucagaugagaaauccgc

SEQ ID NO: 133268 - RNA, 19 nt, Artificial Sequence
  Description of Artificial Sequence: Synthetic oligonucleotide
  Sense strand starting at position 2489 of SEQ ID NO: 1711
gcguuugauuacuaauuua

SEQ ID NO: 133269 - RNA, 19 nt, Artificial Sequence
  Description of Artificial Sequence: Synthetic oligonucleotide
  Antisense strand to SEQ ID NO: 133268
uaaauuaguaaucaaacgc

SEQ ID NO: 133270 - RNA, 19 nt, Artificial Sequence
  Description of Artificial Sequence: Synthetic oligonucleotide
  Sense strand starting at position 2488 of SEQ ID NO: 1711
ugcguuugauuacuaauuu

SEQ ID NO: 133271 - RNA, 19 nt, Artificial Sequence
  Description of Artificial Sequence: Synthetic oligonucleotide
  Antisense strand to SEQ ID NO: 133270
aaauuaguaaucaaacgca

SEQ ID NO: 133272 - RNA, 19 nt, Artificial Sequence
  Description of Artificial Sequence: Synthetic oligonucleotide
  Sense strand starting at position 2485 of SEQ ID NO: 1711
uacugcguuugauuacuaa

SEQ ID NO: 133273 - RNA, 19 nt, Artificial Sequence
  Description of Artificial Sequence: Synthetic oligonucleotide
  Antisense strand to SEQ ID NO: 133272
uuaguaaucaaacgcagua

SEQ ID NO: 133274 - RNA, 19 nt, Artificial Sequence
  Description of Artificial Sequence: Synthetic oligonucleotide
  Sense strand starting at position 2444 of SEQ ID NO: 1711
cgauaguucggacgcgagu

SEQ ID NO: 133275 - RNA, 19 nt, Artificial Sequence
  Description of Artificial Sequence: Synthetic oligonucleotide
  Antisense strand to SEQ ID NO: 133274
acucgcguccgaacuaucg

SEQ ID NO: 133276 - RNA, 19 nt, Artificial Sequence
  Description of Artificial Sequence: Synthetic oligonucleotide
  Sense strand starting at position 2411 of SEQ ID NO: 1711
acacgacuuccuuggaucu

SEQ ID NO: 133277 - RNA, 19 nt, Artificial Sequence
  Description of Artificial Sequence: Synthetic oligonucleotide
  Antisense strand to SEQ ID NO: 133276
agauccaaggaagucgugu

SEQ ID NO: 133278 - RNA, 19 nt, Artificial Sequence
  Description of Artificial Sequence: Synthetic oligonucleotide
  Sense strand starting at position 2158 of SEQ ID NO: 1711
cggucuucgucucacuuau

SEQ ID NO: 133279 - RNA, 19 nt, Artificial Sequence
  Description of Artificial Sequence: Synthetic oligonucleotide
  Antisense strand to SEQ ID NO: 133278
auaagugagacgaagaccg

SEQ ID NO: 133280 - RNA, 19 nt, Artificial Sequence
  Description of Artificial Sequence: Synthetic oligonucleotide
  Sense strand starting at position 2157 of SEQ ID NO: 1711
ucggucuucgucucacuua

SEQ ID NO: 133281 - RNA, 19 nt, Artificial Sequence
  Description of Artificial Sequence: Synthetic oligonucleotide
  Antisense strand to SEQ ID NO: 133280
uaagugagacgaagaccga

SEQ ID NO: 133282 - RNA, 19 nt, Artificial Sequence
  Description of Artificial Sequence: Synthetic oligonucleotide
  Sense strand starting at position 3977 of SEQ ID NO: 1712
guugaaagaacaggcuuau

SEQ ID NO: 133283 - RNA, 19 nt, Artificial Sequence
  Description of Artificial Sequence: Synthetic oligonucleotide
  Antisense strand to SEQ ID NO: 133282
auaagccuguucuuucaac

SEQ ID NO: 133284 - RNA, 19 nt, Artificial Sequence
  Description of Artificial Sequence: Synthetic oligonucleotide
  Sense strand starting at position 3725 of SEQ ID NO: 1712
gcagaacucucacugucua

SEQ ID NO: 133285 - RNA, 19 nt, Artificial Sequence
  Description of Artificial Sequence: Synthetic oligonucleotide
  Antisense strand to SEQ ID NO: 133284
uagacagugagaguucugc

SEQ ID NO: 133286 - RNA, 19 nt, Artificial Sequence
  Description of Artificial Sequence: Synthetic oligonucleotide
  Sense strand starting at position 3713 of SEQ ID NO: 1712
guuuaauucucugcagaac

SEQ ID NO: 133287 - RNA, 19 nt, Artificial Sequence
  Description of Artificial Sequence: Synthetic oligonucleotide
  Antisense strand to SEQ ID NO: 133286
guucugcagagaauuaaac

SEQ ID NO: 133288 - RNA, 19 nt, Artificial Sequence
  Description of Artificial Sequence: Synthetic oligonucleotide
  Sense strand starting at position 3712 of SEQ ID NO: 1712
cguuuaauucucugcagaa

SEQ ID NO: 133289 - RNA, 19 nt, Artificial Sequence
  Description of Artificial Sequence: Synthetic oligonucleotide
  Antisense strand to SEQ ID NO: 133288
uucugcagagaauuaaacg

SEQ ID NO: 133290 - RNA, 19 nt, Artificial Sequence
  Description of Artificial Sequence: Synthetic oligonucleotide
  Sense strand starting at position 3698 of SEQ ID NO: 1712
agugaauauuacuucguuu

SEQ ID NO: 133291 - RNA, 19 nt, Artificial Sequence
  Description of Artificial Sequence: Synthetic oligonucleotide
  Antisense strand to SEQ ID NO: 133290
aaacgaaguaauauucacu

SEQ ID NO: 133292 - RNA, 19 nt, Artificial Sequence
  Description of Artificial Sequence: Synthetic oligonucleotide
  Sense strand starting at position 3697 of SEQ ID NO: 1712
aagugaauauuacuucguu

SEQ ID NO: 133293 - RNA, 19 nt, Artificial Sequence
  Description of Artificial Sequence: Synthetic oligonucleotide
  Antisense strand to SEQ ID NO: 133292
aacgaaguaauauucacuu

SEQ ID NO: 133294 - RNA, 19 nt, Artificial Sequence
  Description of Artificial Sequence: Synthetic oligonucleotide
  Sense strand starting at position 3621 of SEQ ID NO: 1712
ggagauuccaccuacgguu

SEQ ID NO: 133295 - RNA, 19 nt, Artificial Sequence
  Description of Artificial Sequence: Synthetic oligonucleotide
  Antisense strand to SEQ ID NO: 133294
aaccguagguggaaucucc

SEQ ID NO: 133296 - RNA, 19 nt, Artificial Sequence
  Description of Artificial Sequence: Synthetic oligonucleotide
  Sense strand starting at position 3548 of SEQ ID NO: 1712
gcacaaugguuauccaaga

SEQ ID NO: 133297 - RNA, 19 nt, Artificial Sequence
  Description of Artificial Sequence: Synthetic oligonucleotide
  Antisense strand to SEQ ID NO: 133296
ucuuggauaaccauugugc

SEQ ID NO: 133298 - RNA, 19 nt, Artificial Sequence
  Description of Artificial Sequence: Synthetic oligonucleotide
  Sense strand starting at position 3546 of SEQ ID NO: 1712
uugcacaaugguuauccaa

SEQ ID NO: 133299 - RNA, 19 nt, Artificial Sequence
  Description of Artificial Sequence: Synthetic oligonucleotide
  Antisense strand to SEQ ID NO: 133298
uuggauaaccauugugcaa

SEQ ID NO: 133300 - RNA, 19 nt, Artificial Sequence
  Description of Artificial Sequence: Synthetic oligonucleotide
  Sense strand starting at position 3521 of SEQ ID NO: 1712
gcuguuagcuuccugauuu

SEQ ID NO: 133301 - RNA, 19 nt, Artificial Sequence
  Description of Artificial Sequence: Synthetic oligonucleotide
  Antisense strand to SEQ ID NO: 133300
aaaucaggaagcuaacagc

SEQ ID NO: 133302 - RNA, 19 nt, Artificial Sequence
  Description of Artificial Sequence: Synthetic oligonucleotide
  Sense strand starting at position 3491 of SEQ ID NO: 1712
uguacauauuagcuaguaa

SEQ ID NO: 133303 - RNA, 19 nt, Artificial Sequence
  Description of Artificial Sequence: Synthetic oligonucleotide
  Antisense strand to SEQ ID NO: 133302
uuacuagcuaauauguaca

SEQ ID NO: 133304 - RNA, 19 nt, Artificial Sequence
  Description of Artificial Sequence: Synthetic oligonucleotide
  Sense strand starting at position 3490 of SEQ ID NO: 1712
guguacauauuagcuagua

SEQ ID NO: 133305 - RNA, 19 nt, Artificial Sequence
  Description of Artificial Sequence: Synthetic oligonucleotide
  Antisense strand to SEQ ID NO: 133304
uacuagcuaauauguacac

SEQ ID NO: 133306 - RNA, 19 nt, Artificial Sequence
  Description of Artificial Sequence: Synthetic oligonucleotide
  Sense strand starting at position 3483 of SEQ ID NO: 1712
gaguaagguguacauauua

SEQ ID NO: 133307 - RNA, 19 nt, Artificial Sequence
  Description of Artificial Sequence: Synthetic oligonucleotide
  Antisense strand to SEQ ID NO: 133306
uaauauguacaccuuacuc

SEQ ID NO: 133308 - RNA, 19 nt, Artificial Sequence
  Description of Artificial Sequence: Synthetic oligonucleotide
  Sense strand starting at position 3479 of SEQ ID NO: 1712
accugaguaagguguacau

SEQ ID NO: 133309 - RNA, 19 nt, Artificial Sequence
  Description of Artificial Sequence: Synthetic oligonucleotide
  Antisense strand to SEQ ID NO: 133308
auguacaccuuacucaggu

SEQ ID NO: 133310 - RNA, 19 nt, Artificial Sequence
  Description of Artificial Sequence: Synthetic oligonucleotide
  Sense strand starting at position 3473 of SEQ ID NO: 1712
gacagaaccugaguaaggu

SEQ ID NO: 133311 - RNA, 19 nt, Artificial Sequence
  Description of Artificial Sequence: Synthetic oligonucleotide
  Antisense strand to SEQ ID NO: 133310
accuuacucagguucuguc

SEQ ID NO: 133312 - RNA, 19 nt, Artificial Sequence
  Description of Artificial Sequence: Synthetic oligonucleotide
  Sense strand starting at position 3318 of SEQ ID NO: 1712
gcucaaacucugggacauu

SEQ ID NO: 133313 - RNA, 19 nt, Artificial Sequence
  Description of Artificial Sequence: Synthetic oligonucleotide
  Antisense strand to SEQ ID NO: 133312
aaugucccagaguuugagc

SEQ ID NO: 133314 - RNA, 19 nt, Artificial Sequence
  Description of Artificial Sequence: Synthetic oligonucleotide
  Sense strand starting at position 3285 of SEQ ID NO: 1712
gucgaaucuaaucaugaug

SEQ ID NO: 133315 - RNA, 19 nt, Artificial Sequence
  Description of Artificial Sequence: Synthetic oligonucleotide
  Antisense strand to SEQ ID NO: 133314
caucaugauuagauucgac

SEQ ID NO: 133316 - RNA, 19 nt, Artificial Sequence
  Description of Artificial Sequence: Synthetic oligonucleotide
  Sense strand starting at position 3284 of SEQ ID NO: 1712
cgucgaaucuaaucaugau

SEQ ID NO: 133317 - RNA, 19 nt, Artificial Sequence
  Description of Artificial Sequence: Synthetic oligonucleotide
  Antisense strand to SEQ ID NO: 133316
aucaugauuagauucgacg

SEQ ID NO: 133318 - RNA, 19 nt, Artificial Sequence
  Description of Artificial Sequence: Synthetic oligonucleotide
  Sense strand starting at position 3276 of SEQ ID NO: 1712
aaugcauacgucgaaucua

SEQ ID NO: 133319 - RNA, 19 nt, Artificial Sequence
  Description of Artificial Sequence: Synthetic oligonucleotide
  Antisense strand to SEQ ID NO: 133318
uagauucgacguaugcauu

SEQ ID NO: 133320 - RNA, 19 nt, Artificial Sequence
  Description of Artificial Sequence: Synthetic oligonucleotide
  Sense strand starting at position 3041 of SEQ ID NO: 1712
uuuggcaaucaucacagua

SEQ ID NO: 133321 - RNA, 19 nt, Artificial Sequence
  Description of Artificial Sequence: Synthetic oligonucleotide
  Antisense strand to SEQ ID NO: 133320
uacugugaugauugccaaa

SEQ ID NO: 133322 - RNA, 19 nt, Artificial Sequence
  Description of Artificial Sequence: Synthetic oligonucleotide
  Sense strand starting at position 3012 of SEQ ID NO: 1712
aaagaaauguuggaauuag

SEQ ID NO: 133323 - RNA, 19 nt, Artificial Sequence
  Description of Artificial Sequence: Synthetic oligonucleotide
  Antisense strand to SEQ ID NO: 133322
cuaauuccaacauuucuuu

SEQ ID NO: 133324 - RNA, 19 nt, Artificial Sequence
  Description of Artificial Sequence: Synthetic oligonucleotide
  Sense strand starting at position 2921 of SEQ ID NO: 1712
gccucaugugaaugaauga

SEQ ID NO: 133325 - RNA, 19 nt, Artificial Sequence
  Description of Artificial Sequence: Synthetic oligonucleotide
  Antisense strand to SEQ ID NO: 133324
ucauucauucacaugaggc

SEQ ID NO: 133326 - RNA, 19 nt, Artificial Sequence
  Description of Artificial Sequence: Synthetic oligonucleotide
  Sense strand starting at position 2902 of SEQ ID NO: 1712
augagaauccgugagucca

SEQ ID NO: 133327 - RNA, 19 nt, Artificial Sequence
  Description of Artificial Sequence: Synthetic oligonucleotide
  Antisense strand to SEQ ID NO: 133326
uggacucacggauucucau

SEQ ID NO: 133328 - RNA, 19 nt, Artificial Sequence
  Description of Artificial Sequence: Synthetic oligonucleotide
  Sense strand starting at position 2811 of SEQ ID NO: 1712
ccuauugguuucucucaca

SEQ ID NO: 133329 - RNA, 19 nt, Artificial Sequence
  Description of Artificial Sequence: Synthetic oligonucleotide
  Antisense strand to SEQ ID NO: 133328
ugugagagaaaccaauagg

SEQ ID NO: 133330 - RNA, 19 nt, Artificial Sequence
  Description of Artificial Sequence: Synthetic oligonucleotide
  Sense strand starting at position 2695 of SEQ ID NO: 1712
ccacguaugacuggaagua

SEQ ID NO: 133331 - RNA, 19 nt, Artificial Sequence
  Description of Artificial Sequence: Synthetic oligonucleotide
  Antisense strand to SEQ ID NO: 133330
uacuuccagucauacgugg

SEQ ID NO: 133332 - RNA, 19 nt, Artificial Sequence
  Description of Artificial Sequence: Synthetic oligonucleotide
  Sense strand starting at position 2686 of SEQ ID NO: 1712
auucuuaagccacguauga

SEQ ID NO: 133333 - RNA, 19 nt, Artificial Sequence
  Description of Artificial Sequence: Synthetic oligonucleotide
  Antisense strand to SEQ ID NO: 133332
ucauacguggcuuaagaau

SEQ ID NO: 133334 - RNA, 19 nt, Artificial Sequence
  Description of Artificial Sequence: Synthetic oligonucleotide
  Sense strand starting at position 1233 of SEQ ID NO: 1712
guucgaaaucaucagaagu

SEQ ID NO: 133335 - RNA, 19 nt, Artificial Sequence
  Description of Artificial Sequence: Synthetic oligonucleotide
  Antisense strand to SEQ ID NO: 133334
acuucugaugauuucgaac

SEQ ID NO: 133336 - RNA, 19 nt, Artificial Sequence
  Description of Artificial Sequence: Synthetic oligonucleotide
  Sense strand starting at position 1138 of SEQ ID NO: 1712
guaugcccacuggaaauau

SEQ ID NO: 133337 - RNA, 19 nt, Artificial Sequence
  Description of Artificial Sequence: Synthetic oligonucleotide
  Antisense strand to SEQ ID NO: 133336
auauuuccagugggcauac

SEQ ID NO: 133338 - RNA, 19 nt, Artificial Sequence
  Description of Artificial Sequence: Synthetic oligonucleotide
  Sense strand starting at position 1136 of SEQ ID NO: 1712
caguaugcccacuggaaau

SEQ ID NO: 133339 - RNA, 19 nt, Artificial Sequence
  Description of Artificial Sequence: Synthetic oligonucleotide
  Antisense strand to SEQ ID NO: 133338
auuuccagugggcauacug

SEQ ID NO: 133340 - RNA, 19 nt, Artificial Sequence
  Description of Artificial Sequence: Synthetic oligonucleotide
  Sense strand starting at position 1014 of SEQ ID NO: 1712
cuguauuuguaucaauaag

SEQ ID NO: 133341 - RNA, 19 nt, Artificial Sequence
  Description of Artificial Sequence: Synthetic oligonucleotide
  Antisense strand to SEQ ID NO: 133340
cuuauugauacaaauacag

SEQ ID NO: 133342 - RNA, 19 nt, Artificial Sequence
  Description of Artificial Sequence: Synthetic oligonucleotide
  Sense strand starting at position 898 of SEQ ID NO: 1712
ugcaauguucuggauaaag

SEQ ID NO: 133343 - RNA, 19 nt, Artificial Sequence
  Description of Artificial Sequence: Synthetic oligonucleotide
  Antisense strand to SEQ ID NO: 133342
cuuuauccagaacauugca

SEQ ID NO: 133344 - RNA, 19 nt, Artificial Sequence
  Description of Artificial Sequence: Synthetic oligonucleotide
  Sense strand starting at position 848 of SEQ ID NO: 1712
ucgaguuuacgauaugauu

SEQ ID NO: 133345 - RNA, 19 nt, Artificial Sequence
  Description of Artificial Sequence: Synthetic oligonucleotide
  Antisense strand to SEQ ID NO: 133344
aaucauaucguaaacucga

SEQ ID NO: 133346 - RNA, 19 nt, Artificial Sequence
  Description of Artificial Sequence: Synthetic oligonucleotide
  Sense strand starting at position 843 of SEQ ID NO: 1712
ccaaaucgaguuuacgaua

SEQ ID NO: 133347 - RNA, 19 nt, Artificial Sequence
  Description of Artificial Sequence: Synthetic oligonucleotide
  Antisense strand to SEQ ID NO: 133346
uaucguaaacucgauuugg

SEQ ID NO: 133348 - RNA, 19 nt, Artificial Sequence
  Description of Artificial Sequence: Synthetic oligonucleotide
  Sense strand starting at position 795 of SEQ ID NO: 1712
agaacagacuucuugccua

SEQ ID NO: 133349 - RNA, 19 nt, Artificial Sequence
  Description of Artificial Sequence: Synthetic oligonucleotide
  Antisense strand to SEQ ID NO: 133348
uaggcaagaagucuguucu

SEQ ID NO: 133350 - RNA, 19 nt, Artificial Sequence
  Description of Artificial Sequence: Synthetic oligonucleotide
  Sense strand starting at position 619 of SEQ ID NO: 1712
agacucugaucgucugauu

SEQ ID NO: 133351 - RNA, 19 nt, Artificial Sequence
  Description of Artificial Sequence: Synthetic oligonucleotide
  Antisense strand to SEQ ID NO: 133350
aaucagacgaucagagucu

SEQ ID NO: 133352 - RNA, 19 nt, Artificial Sequence
  Description of Artificial Sequence: Synthetic oligonucleotide
  Sense strand starting at position 461 of SEQ ID NO: 1712
cugguaacauuaguuauaa

SEQ ID NO: 133353 - RNA, 19 nt, Artificial Sequence
  Description of Artificial Sequence: Synthetic oligonucleotide
  Antisense strand to SEQ ID NO: 133352
uuauaacuaauguuaccag

SEQ ID NO: 133354 - RNA, 19 nt, Artificial Sequence
  Description of Artificial Sequence: Synthetic oligonucleotide
  Sense strand starting at position 389 of SEQ ID NO: 1712
ugauuaguggcacaguaaa

SEQ ID NO: 133355 - RNA, 19 nt, Artificial Sequence
  Description of Artificial Sequence: Synthetic oligonucleotide
  Antisense strand to SEQ ID NO: 133354
uuuacugugccacuaauca

SEQ ID NO: 133356 - RNA, 19 nt, Artificial Sequence
  Description of Artificial Sequence: Synthetic oligonucleotide
  Sense strand starting at position 337 of SEQ ID NO: 1712
aaaguaagguugcuauuaa

SEQ ID NO: 133357 - RNA, 19 nt, Artificial Sequence
  Description of Artificial Sequence: Synthetic oligonucleotide
  Antisense strand to SEQ ID NO: 133356
uuaauagcaaccuuacuuu

SEQ ID NO: 133358 - RNA, 19 nt, Artificial Sequence
  Description of Artificial Sequence: Synthetic oligonucleotide
  Sense strand starting at position 150 of SEQ ID NO: 1712
acagucuacgcagguauaa

SEQ ID NO: 133359 - RNA, 19 nt, Artificial Sequence
  Description of Artificial Sequence: Synthetic oligonucleotide
  Antisense strand to SEQ ID NO: 133358
uuauaccugcguagacugu

SEQ ID NO: 133360 - RNA, 19 nt, Artificial Sequence
  Description of Artificial Sequence: Synthetic oligonucleotide
  Sense strand starting at position 66 of SEQ ID NO: 1712
cuaggauucuggguuauag

SEQ ID NO: 133361 - RNA, 19 nt, Artificial Sequence
  Description of Artificial Sequence: Synthetic oligonucleotide
  Antisense strand to SEQ ID NO: 133360
cuauaacccagaauccuag

SEQ ID NO: 133362 - RNA, 19 nt, Artificial Sequence
  Description of Artificial Sequence: Synthetic oligonucleotide
  Sense strand starting at position 3875 of SEQ ID NO: 1714
ggauccaugcaucgaaauu

SEQ ID NO: 133363 - RNA, 19 nt, Artificial Sequence
  Description of Artificial Sequence: Synthetic oligonucleotide
  Antisense strand to SEQ ID NO: 133362
aauuucgaugcauggaucc

SEQ ID NO: 133364 - RNA, 19 nt, Artificial Sequence
  Description of Artificial Sequence: Synthetic oligonucleotide
  Sense strand starting at position 3872 of SEQ ID NO: 1714
acuggauccaugcaucgaa

SEQ ID NO: 133365 - RNA, 19 nt, Artificial Sequence
  Description of Artificial Sequence: Synthetic oligonucleotide
  Antisense strand to SEQ ID NO: 133364
uucgaugcauggauccagu

SEQ ID NO: 133366 - RNA, 19 nt, Artificial Sequence
  Description of Artificial Sequence: Synthetic oligonucleotide
  Sense strand starting at position 3822 of SEQ ID NO: 1714
gagcaaagucaucagacuu

SEQ ID NO: 133367 - RNA, 19 nt, Artificial Sequence
  Description of Artificial Sequence: Synthetic oligonucleotide
  Antisense strand to SEQ ID NO: 133366
aagucugaugacuuugcuc

SEQ ID NO: 133368 - RNA, 19 nt, Artificial Sequence
  Description of Artificial Sequence: Synthetic oligonucleotide
  Sense strand starting at position 3821 of SEQ ID NO: 1714
ggagcaaagucaucagacu

SEQ ID NO: 133369 - RNA, 19 nt, Artificial Sequence
  Description of Artificial Sequence: Synthetic oligonucleotide
  Antisense strand to SEQ ID NO: 133368
agucugaugacuuugcucc

SEQ ID NO: 133370 - RNA, 19 nt, Artificial Sequence
  Description of Artificial Sequence: Synthetic oligonucleotide
  Sense strand starting at position 3810 of SEQ ID NO: 1714
uucucuguuguggagcaaa

SEQ ID NO: 133371 - RNA, 19 nt, Artificial Sequence
  Description of Artificial Sequence: Synthetic oligonucleotide
  Antisense strand to SEQ ID NO: 133370
uuugcuccacaacagagaa

SEQ ID NO: 133372 - RNA, 19 nt, Artificial Sequence
  Description of Artificial Sequence: Synthetic oligonucleotide
  Sense strand starting at position 3733 of SEQ ID NO: 1714
uugcuuauuucuuccgcua

SEQ ID NO: 133373 - RNA, 19 nt, Artificial Sequence
  Description of Artificial Sequence: Synthetic oligonucleotide
  Antisense strand to SEQ ID NO: 133372
uagcggaagaaauaagcaa

SEQ ID NO: 133374 - RNA, 19 nt, Artificial Sequence
  Description of Artificial Sequence: Synthetic oligonucleotide
  Sense strand starting at position 3681 of SEQ ID NO: 1714
ugagaagugacagggcuua

SEQ ID NO: 133375 - RNA, 19 nt, Artificial Sequence
  Description of Artificial Sequence: Synthetic oligonucleotide
  Antisense strand to SEQ ID NO: 133374
uaagcccugucacuucuca

SEQ ID NO: 133376 - RNA, 19 nt, Artificial Sequence
  Description of Artificial Sequence: Synthetic oligonucleotide
  Sense strand starting at position 3669 of SEQ ID NO: 1714
uuauuaaggccuugagaag

SEQ ID NO: 133377 - RNA, 19 nt, Artificial Sequence
  Description of Artificial Sequence: Synthetic oligonucleotide
  Antisense strand to SEQ ID NO: 133376
cuucucaaggccuuaauaa

SEQ ID NO: 133378 - RNA, 19 nt, Artificial Sequence
  Description of Artificial Sequence: Synthetic oligonucleotide
  Sense strand starting at position 3618 of SEQ ID NO: 1714
gaucgagucgguuauagua

SEQ ID NO: 133379 - RNA, 19 nt, Artificial Sequence
  Description of Artificial Sequence: Synthetic oligonucleotide
  Antisense strand to SEQ ID NO: 133378
uacuauaaccgacucgauc

SEQ ID NO: 133380 - RNA, 19 nt, Artificial Sequence
  Description of Artificial Sequence: Synthetic oligonucleotide
  Sense strand starting at position 3602 of SEQ ID NO: 1714
ugaggcuauagcugaugau

SEQ ID NO: 133381 - RNA, 19 nt, Artificial Sequence
  Description of Artificial Sequence: Synthetic oligonucleotide
  Antisense strand to SEQ ID NO: 133380
aucaucagcuauagccuca

SEQ ID NO: 133382 - RNA, 19 nt, Artificial Sequence
  Description of Artificial Sequence: Synthetic oligonucleotide
  Sense strand starting at position 2921 of SEQ ID NO: 1714
auguaacagguuuaaucuu

SEQ ID NO: 133383 - RNA, 19 nt, Artificial Sequence
  Description of Artificial Sequence: Synthetic oligonucleotide
  Antisense strand to SEQ ID NO: 133382
aagauuaaaccuguuacau

SEQ ID NO: 133384 - RNA, 19 nt, Artificial Sequence
  Description of Artificial Sequence: Synthetic oligonucleotide
  Sense strand starting at position 2815 of SEQ ID NO: 1714
gaagaauccgaaugugaug

SEQ ID NO: 133385 - RNA, 19 nt, Artificial Sequence
  Description of Artificial Sequence: Synthetic oligonucleotide
  Antisense strand to SEQ ID NO: 133384
caucacauucggauucuuc

SEQ ID NO: 133386 - RNA, 19 nt, Artificial Sequence
  Description of Artificial Sequence: Synthetic oligonucleotide
  Sense strand starting at position 2811 of SEQ ID NO: 1714
ucaggaagaauccgaaugu

SEQ ID NO: 133387 - RNA, 19 nt, Artificial Sequence
  Description of Artificial Sequence: Synthetic oligonucleotide
  Antisense strand to SEQ ID NO: 133386
acauucggauucuuccuga

SEQ ID NO: 133388 - RNA, 19 nt, Artificial Sequence
  Description of Artificial Sequence: Synthetic oligonucleotide
  Sense strand starting at position 2740 of SEQ ID NO: 1714
gggaguugucguuauagau

SEQ ID NO: 133389 - RNA, 19 nt, Artificial Sequence
  Description of Artificial Sequence: Synthetic oligonucleotide
  Antisense strand to SEQ ID NO: 133388
aucuauaacgacaacuccc

SEQ ID NO: 133390 - RNA, 19 nt, Artificial Sequence
  Description of Artificial Sequence: Synthetic oligonucleotide
  Sense strand starting at position 2646 of SEQ ID NO: 1714
auggcucuucgacauccaa

SEQ ID NO: 133391 - RNA, 19 nt, Artificial Sequence
  Description of Artificial Sequence: Synthetic oligonucleotide
  Antisense strand to SEQ ID NO: 133390
uuggaugucgaagagccau

SEQ ID NO: 133392 - RNA, 19 nt, Artificial Sequence
  Description of Artificial Sequence: Synthetic oligonucleotide
  Sense strand starting at position 2642 of SEQ ID NO: 1714
ggagauggcucuucgacau

SEQ ID NO: 133393 - RNA, 19 nt, Artificial Sequence
  Description of Artificial Sequence: Synthetic oligonucleotide
  Antisense strand to SEQ ID NO: 133392
augucgaagagccaucucc

SEQ ID NO: 133394 - RNA, 19 nt, Artificial Sequence
  Description of Artificial Sequence: Synthetic oligonucleotide
  Sense strand starting at position 2603 of SEQ ID NO: 1714
acucauagauguucugaug

SEQ ID NO: 133395 - RNA, 19 nt, Artificial Sequence
  Description of Artificial Sequence: Synthetic oligonucleotide
  Antisense strand to SEQ ID NO: 133394
caucagaacaucuaugagu

SEQ ID NO: 133396 - RNA, 19 nt, Artificial Sequence
  Description of Artificial Sequence: Synthetic oligonucleotide
  Sense strand starting at position 2598 of SEQ ID NO: 1714
cgacgacucauagauguuc

SEQ ID NO: 133397 - RNA, 19 nt, Artificial Sequence
  Description of Artificial Sequence: Synthetic oligonucleotide
  Antisense strand to SEQ ID NO: 133396
gaacaucuaugagucgucg

SEQ ID NO: 133398 - RNA, 19 nt, Artificial Sequence
  Description of Artificial Sequence: Synthetic oligonucleotide
  Sense strand starting at position 2337 of SEQ ID NO: 1714
aucguuggaggucauuaaa

SEQ ID NO: 133399 - RNA, 19 nt, Artificial Sequence
  Description of Artificial Sequence: Synthetic oligonucleotide
  Antisense strand to SEQ ID NO: 133398
uuuaaugaccuccaacgau

SEQ ID NO: 133400 - RNA, 19 nt, Artificial Sequence
  Description of Artificial Sequence: Synthetic oligonucleotide
  Sense strand starting at position 2271 of SEQ ID NO: 1714
uccugcgugguucaaagau

SEQ ID NO: 133401 - RNA, 19 nt, Artificial Sequence
  Description of Artificial Sequence: Synthetic oligonucleotide
  Antisense strand to SEQ ID NO: 133400
aucuuugaaccacgcagga

SEQ ID NO: 133402 - RNA, 19 nt, Artificial Sequence
  Description of Artificial Sequence: Synthetic oligonucleotide
  Sense strand starting at position 1484 of SEQ ID NO: 1714
agugcaaaugugcaagaca

SEQ ID NO: 133403 - RNA, 19 nt, Artificial Sequence
  Description of Artificial Sequence: Synthetic oligonucleotide
  Antisense strand to SEQ ID NO: 133402
ugucuugcacauuugcacu

SEQ ID NO: 133404 - RNA, 19 nt, Artificial Sequence
  Description of Artificial Sequence: Synthetic oligonucleotide
  Sense strand starting at position 1407 of SEQ ID NO: 1714
gggagacaaucuccagguu

SEQ ID NO: 133405 - RNA, 19 nt, Artificial Sequence
  Description of Artificial Sequence: Synthetic oligonucleotide
  Antisense strand to SEQ ID NO: 133404
aaccuggagauugucuccc

SEQ ID NO: 133406 - RNA, 19 nt, Artificial Sequence
  Description of Artificial Sequence: Synthetic oligonucleotide
  Sense strand starting at position 1298 of SEQ ID NO: 1714
uugauagcuuuauuagcaa

SEQ ID NO: 133407 - RNA, 19 nt, Artificial Sequence
  Description of Artificial Sequence: Synthetic oligonucleotide
  Antisense strand to SEQ ID NO: 133406
uugcuaauaaagcuaucaa

SEQ ID NO: 133408 - RNA, 19 nt, Artificial Sequence
  Description of Artificial Sequence: Synthetic oligonucleotide
  Sense strand starting at position 1237 of SEQ ID NO: 1714
gaaugacacugaccuguua

SEQ ID NO: 133409 - RNA, 19 nt, Artificial Sequence
  Description of Artificial Sequence: Synthetic oligonucleotide
  Antisense strand to SEQ ID NO: 133408
uaacaggucagugucauuc

SEQ ID NO: 133410 - RNA, 19 nt, Artificial Sequence
  Description of Artificial Sequence: Synthetic oligonucleotide
  Sense strand starting at position 1124 of SEQ ID NO: 1714
ggacuucccgguuaacuau

SEQ ID NO: 133411 - RNA, 19 nt, Artificial Sequence
  Description of Artificial Sequence: Synthetic oligonucleotide
  Antisense strand to SEQ ID NO: 133410
auaguuaaccgggaagucc

SEQ ID NO: 133412 - RNA, 19 nt, Artificial Sequence
  Description of Artificial Sequence: Synthetic oligonucleotide
  Sense strand starting at position 1121 of SEQ ID NO: 1714
ucaggacuucccgguuaac

SEQ ID NO: 133413 - RNA, 19 nt, Artificial Sequence
  Description of Artificial Sequence: Synthetic oligonucleotide
  Antisense strand to SEQ ID NO: 133412
guuaaccgggaaguccuga

SEQ ID NO: 133414 - RNA, 19 nt, Artificial Sequence
  Description of Artificial Sequence: Synthetic oligonucleotide
  Sense strand starting at position 1105 of SEQ ID NO: 1714
ugcguaguuaaggaaauca

SEQ ID NO: 133415 - RNA, 19 nt, Artificial Sequence
  Description of Artificial Sequence: Synthetic oligonucleotide
  Antisense strand to SEQ ID NO: 133414
ugauuuccuuaacuacgca

SEQ ID NO: 133416 - RNA, 19 nt, Artificial Sequence
  Description of Artificial Sequence: Synthetic oligonucleotide
  Sense strand starting at position 961 of SEQ ID NO: 1714
ucuagugucugguuaaagg

SEQ ID NO: 133417 - RNA, 19 nt, Artificial Sequence
  Description of Artificial Sequence: Synthetic oligonucleotide
  Antisense strand to SEQ ID NO: 133416
ccuuuaaccagacacuaga

SEQ ID NO: 133418 - RNA, 19 nt, Artificial Sequence
  Description of Artificial Sequence: Synthetic oligonucleotide
  Sense strand starting at position 862 of SEQ ID NO: 1714
gaguuccauuuguuguuaa

SEQ ID NO: 133419 - RNA, 19 nt, Artificial Sequence
  Description of Artificial Sequence: Synthetic oligonucleotide
  Antisense strand to SEQ ID NO: 133418
uuaacaacaaauggaacuc

SEQ ID NO: 133420 - RNA, 19 nt, Artificial Sequence
  Description of Artificial Sequence: Synthetic oligonucleotide
  Sense strand starting at position 861 of SEQ ID NO: 1714
agaguuccauuuguuguua

SEQ ID NO: 133421 - RNA, 19 nt, Artificial Sequence
  Description of Artificial Sequence: Synthetic oligonucleotide
  Antisense strand to SEQ ID NO: 133420
uaacaacaaauggaacucu

SEQ ID NO: 133422 - RNA, 19 nt, Artificial Sequence
  Description of Artificial Sequence: Synthetic oligonucleotide
  Sense strand starting at position 856 of SEQ ID NO: 1714
auugaagaguuccauuugu

SEQ ID NO: 133423 - RNA, 19 nt, Artificial Sequence
  Description of Artificial Sequence: Synthetic oligonucleotide
  Antisense strand to SEQ ID NO: 133422
acaaauggaacucuucaau

SEQ ID NO: 133424 - RNA, 19 nt, Artificial Sequence
  Description of Artificial Sequence: Synthetic oligonucleotide
  Sense strand starting at position 586 of SEQ ID NO: 1714
aggucaucucaaggcuaaa

SEQ ID NO: 133425 - RNA, 19 nt, Artificial Sequence
  Description of Artificial Sequence: Synthetic oligonucleotide
  Antisense strand to SEQ ID NO: 133424
uuuagccuugagaugaccu

SEQ ID NO: 133426 - RNA, 19 nt, Artificial Sequence
  Description of Artificial Sequence: Synthetic oligonucleotide
  Sense strand starting at position 580 of SEQ ID NO: 1714
cuuuaaaggucaucucaag

SEQ ID NO: 133427 - RNA, 19 nt, Artificial Sequence
  Description of Artificial Sequence: Synthetic oligonucleotide
  Antisense strand to SEQ ID NO: 133426
cuugagaugaccuuuaaag

SEQ ID NO: 133428 - RNA, 19 nt, Artificial Sequence
  Description of Artificial Sequence: Synthetic oligonucleotide
  Sense strand starting at position 541 of SEQ ID NO: 1714
uuuccauagcucgaaauga

SEQ ID NO: 133429 - RNA, 19 nt, Artificial Sequence
  Description of Artificial Sequence: Synthetic oligonucleotide
  Antisense strand to SEQ ID NO: 133428
ucauuucgagcuauggaaa

SEQ ID NO: 133430 - RNA, 19 nt, Artificial Sequence
  Description of Artificial Sequence: Synthetic oligonucleotide
  Sense strand starting at position 390 of SEQ ID NO: 1714
ugagcaguauuaucauguu

SEQ ID NO: 133431 - RNA, 19 nt, Artificial Sequence
  Description of Artificial Sequence: Synthetic oligonucleotide
  Antisense strand to SEQ ID NO: 133430
aacaugauaauacugcuca

SEQ ID NO: 133432 - RNA, 19 nt, Artificial Sequence
  Description of Artificial Sequence: Synthetic oligonucleotide
  Sense strand starting at position 385 of SEQ ID NO: 1714
uuuacugagcaguauuauc

SEQ ID NO: 133433 - RNA, 19 nt, Artificial Sequence
  Description of Artificial Sequence: Synthetic oligonucleotide
  Antisense strand to SEQ ID NO: 133432
gauaauacugcucaguaaa

SEQ ID NO: 133434 - RNA, 19 nt, Artificial Sequence
  Description of Artificial Sequence: Synthetic oligonucleotide
  Sense strand starting at position 137 of SEQ ID NO: 1714
guuaacaaugguuaucuga

SEQ ID NO: 133435 - RNA, 19 nt, Artificial Sequence
  Description of Artificial Sequence: Synthetic oligonucleotide
  Antisense strand to SEQ ID NO: 133434
ucagauaaccauuguuaac

SEQ ID NO: 133436 - RNA, 19 nt, Artificial Sequence
  Description of Artificial Sequence: Synthetic oligonucleotide
  Sense strand starting at position 133 of SEQ ID NO: 1714
aaacguuaacaaugguuau

SEQ ID NO: 133437 - RNA, 19 nt, Artificial Sequence
  Description of Artificial Sequence: Synthetic oligonucleotide
  Antisense strand to SEQ ID NO: 133436
auaaccauuguuaacguuu

SEQ ID NO: 133438 - RNA, 19 nt, Artificial Sequence
  Description of Artificial Sequence: Synthetic oligonucleotide
  Sense strand starting at position 127 of SEQ ID NO: 1714
ucugccaaacguuaacaau

SEQ ID NO: 133439 - RNA, 19 nt, Artificial Sequence
  Description of Artificial Sequence: Synthetic oligonucleotide
  Antisense strand to SEQ ID NO: 133438
auuguuaacguuuggcaga

SEQ ID NO: 133440 - RNA, 19 nt, Artificial Sequence
  Description of Artificial Sequence: Synthetic oligonucleotide
  Sense strand starting at position 59 of SEQ ID NO: 1714
uauauaugugaaugaacug

SEQ ID NO: 133441 - RNA, 19 nt, Artificial Sequence
  Description of Artificial Sequence: Synthetic oligonucleotide
  Antisense strand to SEQ ID NO: 133440
caguucauucacauauaua

SEQ ID NO: 133442 - RNA, 19 nt, Artificial Sequence
  Description of Artificial Sequence: Synthetic oligonucleotide
  Sense strand starting at position 3900 of SEQ ID NO: 1713
ggugaugucccucaucauc

SEQ ID NO: 133443 - RNA, 19 nt, Artificial Sequence
  Description of Artificial Sequence: Synthetic oligonucleotide
  Antisense strand to SEQ ID NO: 133442
gaugaugagggacaucacc

SEQ ID NO: 133444 - RNA, 19 nt, Artificial Sequence
  Description of Artificial Sequence: Synthetic oligonucleotide
  Sense strand starting at position 3806 of SEQ ID NO: 1713
guuguaaccauaggugaca

SEQ ID NO: 133445 - RNA, 19 nt, Artificial Sequence
  Description of Artificial Sequence: Synthetic oligonucleotide
  Antisense strand to SEQ ID NO: 133444
ugucaccuaugguuacaac

SEQ ID NO: 133446 - RNA, 19 nt, Artificial Sequence
  Description of Artificial Sequence: Synthetic oligonucleotide
  Sense strand starting at position 3638 of SEQ ID NO: 1713
aagugcagagguugagaaa

SEQ ID NO: 133447 - RNA, 19 nt, Artificial Sequence
  Description of Artificial Sequence: Synthetic oligonucleotide
  Antisense strand to SEQ ID NO: 133446
uuucucaaccucugcacuu

SEQ ID NO: 133448 - RNA, 19 nt, Artificial Sequence
  Description of Artificial Sequence: Synthetic oligonucleotide
  Sense strand starting at position 3624 of SEQ ID NO: 1713
acccaaaugucaguaagug

SEQ ID NO: 133449 - RNA, 19 nt, Artificial Sequence
  Description of Artificial Sequence: Synthetic oligonucleotide
  Antisense strand to SEQ ID NO: 133448
cacuuacugacauuugggu

SEQ ID NO: 133450 - RNA, 19 nt, Artificial Sequence
  Description of Artificial Sequence: Synthetic oligonucleotide
  Sense strand starting at position 3595 of SEQ ID NO: 1713
gaucguccuccacaacaga

SEQ ID NO: 133451 - RNA, 19 nt, Artificial Sequence
  Description of Artificial Sequence: Synthetic oligonucleotide
  Antisense strand to SEQ ID NO: 133450
ucuguuguggaggacgauc

SEQ ID NO: 133452 - RNA, 19 nt, Artificial Sequence
  Description of Artificial Sequence: Synthetic oligonucleotide
  Sense strand starting at position 3591 of SEQ ID NO: 1713
acaggaucguccuccacaa

SEQ ID NO: 133453 - RNA, 19 nt, Artificial Sequence
  Description of Artificial Sequence: Synthetic oligonucleotide
  Antisense strand to SEQ ID NO: 133452
uuguggaggacgauccugu

SEQ ID NO: 133454 - RNA, 19 nt, Artificial Sequence
  Description of Artificial Sequence: Synthetic oligonucleotide
  Sense strand starting at position 3541 of SEQ ID NO: 1713
uggcaucucccugauagag

SEQ ID NO: 133455 - RNA, 19 nt, Artificial Sequence
  Description of Artificial Sequence: Synthetic oligonucleotide
  Antisense strand to SEQ ID NO: 133454
cucuaucagggagaugcca

SEQ ID NO: 133456 - RNA, 19 nt, Artificial Sequence
  Description of Artificial Sequence: Synthetic oligonucleotide
  Sense strand starting at position 3540 of SEQ ID NO: 1713
cuggcaucucccugauaga

SEQ ID NO: 133457 - RNA, 19 nt, Artificial Sequence
  Description of Artificial Sequence: Synthetic oligonucleotide
  Antisense strand to SEQ ID NO: 133456
ucuaucagggagaugccag

SEQ ID NO: 133458 - RNA, 19 nt, Artificial Sequence
  Description of Artificial Sequence: Synthetic oligonucleotide
  Sense strand starting at position 3387 of SEQ ID NO: 1713
cuagucuauccuuacaguu

SEQ ID NO: 133459 - RNA, 19 nt, Artificial Sequence
  Description of Artificial Sequence: Synthetic oligonucleotide
  Antisense strand to SEQ ID NO: 133458
aacuguaaggauagacuag

SEQ ID NO: 133460 - RNA, 19 nt, Artificial Sequence
  Description of Artificial Sequence: Synthetic oligonucleotide
  Sense strand starting at position 3225 of SEQ ID NO: 1713
uuaugaucuccaggauacc

SEQ ID NO: 133461 - RNA, 19 nt, Artificial Sequence
  Description of Artificial Sequence: Synthetic oligonucleotide
  Antisense strand to SEQ ID NO: 133460
gguauccuggagaucauaa

SEQ ID NO: 133462 - RNA, 19 nt, Artificial Sequence
  Description of Artificial Sequence: Synthetic oligonucleotide
  Sense strand starting at position 3222 of SEQ ID NO: 1713
ccuuuaugaucuccaggau

SEQ ID NO: 133463 - RNA, 19 nt, Artificial Sequence
  Description of Artificial Sequence: Synthetic oligonucleotide
  Antisense strand to SEQ ID NO: 133462
auccuggagaucauaaagg

SEQ ID NO: 133464 - RNA, 19 nt, Artificial Sequence
  Description of Artificial Sequence: Synthetic oligonucleotide
  Sense strand starting at position 3200 of SEQ ID NO: 1713
cugauuccacgucaugaaa

SEQ ID NO: 133465 - RNA, 19 nt, Artificial Sequence
  Description of Artificial Sequence: Synthetic oligonucleotide
  Antisense strand to SEQ ID NO: 133464
uuucaugacguggaaucag

SEQ ID NO: 133466 - RNA, 19 nt, Artificial Sequence
  Description of Artificial Sequence: Synthetic oligonucleotide
  Sense strand starting at position 3140 of SEQ ID NO: 1713
acgcaucaacucuaugcaa

SEQ ID NO: 133467 - RNA, 19 nt, Artificial Sequence
  Description of Artificial Sequence: Synthetic oligonucleotide
  Antisense strand to SEQ ID NO: 133466
uugcauagaguugaugcgu

SEQ ID NO: 133468 - RNA, 19 nt, Artificial Sequence
  Description of Artificial Sequence: Synthetic oligonucleotide
  Sense strand starting at position 3115 of SEQ ID NO: 1713
ggucuauaugcuuaaauua

SEQ ID NO: 133469 - RNA, 19 nt, Artificial Sequence
  Description of Artificial Sequence: Synthetic oligonucleotide
  Antisense strand to SEQ ID NO: 133468
uaauuuaagcauauagacc

SEQ ID NO: 133470 - RNA, 19 nt, Artificial Sequence
  Description of Artificial Sequence: Synthetic oligonucleotide
  Sense strand starting at position 3114 of SEQ ID NO: 1713
uggucuauaugcuuaaauu

SEQ ID NO: 133471 - RNA, 19 nt, Artificial Sequence
  Description of Artificial Sequence: Synthetic oligonucleotide
  Antisense strand to SEQ ID NO: 133470
aauuuaagcauauagacca

SEQ ID NO: 133472 - RNA, 19 nt, Artificial Sequence
  Description of Artificial Sequence: Synthetic oligonucleotide
  Sense strand starting at position 3105 of SEQ ID NO: 1713
ucagcauaauggucuauau

SEQ ID NO: 133473 - RNA, 19 nt, Artificial Sequence
  Description of Artificial Sequence: Synthetic oligonucleotide
  Antisense strand to SEQ ID NO: 133472
auauagaccauuaugcuga

SEQ ID NO: 133474 - RNA, 19 nt, Artificial Sequence
  Description of Artificial Sequence: Synthetic oligonucleotide
  Sense strand starting at position 2962 of SEQ ID NO: 1713
cucaccauuucugugcaua

SEQ ID NO: 133475 - RNA, 19 nt, Artificial Sequence
  Description of Artificial Sequence: Synthetic oligonucleotide
  Antisense strand to SEQ ID NO: 133474
uaugcacagaaauggugag

SEQ ID NO: 133476 - RNA, 19 nt, Artificial Sequence
  Description of Artificial Sequence: Synthetic oligonucleotide
  Sense strand starting at position 2749 of SEQ ID NO: 1713
uuacguaugccacaauaaa

SEQ ID NO: 133477 - RNA, 19 nt, Artificial Sequence
  Description of Artificial Sequence: Synthetic oligonucleotide
  Antisense strand to SEQ ID NO: 133476
uuuauuguggcauacguaa

SEQ ID NO: 133478 - RNA, 19 nt, Artificial Sequence
  Description of Artificial Sequence: Synthetic oligonucleotide
  Sense strand starting at position 2745 of SEQ ID NO: 1713
aagauuacguaugccacaa

SEQ ID NO: 133479 - RNA, 19 nt, Artificial Sequence
  Description of Artificial Sequence: Synthetic oligonucleotide
  Antisense strand to SEQ ID NO: 133478
uuguggcauacguaaucuu

SEQ ID NO: 133480 - RNA, 19 nt, Artificial Sequence
  Description of Artificial Sequence: Synthetic oligonucleotide
  Sense strand starting at position 2744 of SEQ ID NO: 1713
aaagauuacguaugccaca

SEQ ID NO: 133481 - RNA, 19 nt, Artificial Sequence
  Description of Artificial Sequence: Synthetic oligonucleotide
  Antisense strand to SEQ ID NO: 133480
uguggcauacguaaucuuu

SEQ ID NO: 133482 - RNA, 19 nt, Artificial Sequence
  Description of Artificial Sequence: Synthetic oligonucleotide
  Sense strand starting at position 2738 of SEQ ID NO: 1713
ccgacuaaagauuacguau

SEQ ID NO: 133483 - RNA, 19 nt, Artificial Sequence
  Description of Artificial Sequence: Synthetic oligonucleotide
  Antisense strand to SEQ ID NO: 133482
auacguaaucuuuagucgg

SEQ ID NO: 133484 - RNA, 19 nt, Artificial Sequence
  Description of Artificial Sequence: Synthetic oligonucleotide
  Sense strand starting at position 2647 of SEQ ID NO: 1713
uuauacagauguucuguaa

SEQ ID NO: 133485 - RNA, 19 nt, Artificial Sequence
  Description of Artificial Sequence: Synthetic oligonucleotide
  Antisense strand to SEQ ID NO: 133484
uuacagaacaucuguauaa

SEQ ID NO: 133486 - RNA, 19 nt, Artificial Sequence
  Description of Artificial Sequence: Synthetic oligonucleotide
  Sense strand starting at position 2438 of SEQ ID NO: 1713
acaguauaggcaugacaug

SEQ ID NO: 133487 - RNA, 19 nt, Artificial Sequence
  Description of Artificial Sequence: Synthetic oligonucleotide
  Antisense strand to SEQ ID NO: 133486
caugucaugccuauacugu

SEQ ID NO: 133488 - RNA, 19 nt, Artificial Sequence
  Description of Artificial Sequence: Synthetic oligonucleotide
  Sense strand starting at position 2402 of SEQ ID NO: 1713
uuuauugcauguuccaaag

SEQ ID NO: 133489 - RNA, 19 nt, Artificial Sequence
  Description of Artificial Sequence: Synthetic oligonucleotide
  Antisense strand to SEQ ID NO: 133488
cuuuggaacaugcaauaaa

SEQ ID NO: 133490 - RNA, 19 nt, Artificial Sequence
  Description of Artificial Sequence: Synthetic oligonucleotide
  Sense strand starting at position 2150 of SEQ ID NO: 1713
aguuuaacauaggucuuaa

SEQ ID NO: 133491 - RNA, 19 nt, Artificial Sequence
  Description of Artificial Sequence: Synthetic oligonucleotide
  Antisense strand to SEQ ID NO: 133490
uuaagaccuauguuaaacu

SEQ ID NO: 133492 - RNA, 19 nt, Artificial Sequence
  Description of Artificial Sequence: Synthetic oligonucleotide
  Sense strand starting at position 2092 of SEQ ID NO: 1713
ugacucuuacauggcauaa

SEQ ID NO: 133493 - RNA, 19 nt, Artificial Sequence
  Description of Artificial Sequence: Synthetic oligonucleotide
  Antisense strand to SEQ ID NO: 133492
uuaugccauguaagaguca

SEQ ID NO: 133494 - RNA, 19 nt, Artificial Sequence
  Description of Artificial Sequence: Synthetic oligonucleotide
  Sense strand starting at position 2041 of SEQ ID NO: 1713
caaggucuugggcaaugua

SEQ ID NO: 133495 - RNA, 19 nt, Artificial Sequence
  Description of Artificial Sequence: Synthetic oligonucleotide
  Antisense strand to SEQ ID NO: 133494
uacauugcccaagaccuug

SEQ ID NO: 133496 - RNA, 19 nt, Artificial Sequence
  Description of Artificial Sequence: Synthetic oligonucleotide
  Sense strand starting at position 2038 of SEQ ID NO: 1713
uaacaaggucuugggcaau

SEQ ID NO: 133497 - RNA, 19 nt, Artificial Sequence
  Description of Artificial Sequence: Synthetic oligonucleotide
  Antisense strand to SEQ ID NO: 133496
auugcccaagaccuuguua

SEQ ID NO: 133498 - RNA, 19 nt, Artificial Sequence
  Description of Artificial Sequence: Synthetic oligonucleotide
  Sense strand starting at position 690 of SEQ ID NO: 1713
ggcagaauguuagcuaacu

SEQ ID NO: 133499 - RNA, 19 nt, Artificial Sequence
  Description of Artificial Sequence: Synthetic oligonucleotide
  Antisense strand to SEQ ID NO: 133498
aguuagcuaacauucugcc

SEQ ID NO: 133500 - RNA, 19 nt, Artificial Sequence
  Description of Artificial Sequence: Synthetic oligonucleotide
  Sense strand starting at position 637 of SEQ ID NO: 1713
gcagucaagagcugaaaca

SEQ ID NO: 133501 - RNA, 19 nt, Artificial Sequence
  Description of Artificial Sequence: Synthetic oligonucleotide
  Antisense strand to SEQ ID NO: 133500
uguuucagcucuugacugc

SEQ ID NO: 133502 - RNA, 19 nt, Artificial Sequence
  Description of Artificial Sequence: Synthetic oligonucleotide
  Sense strand starting at position 619 of SEQ ID NO: 1713
gcaauuaggguuugaauug

SEQ ID NO: 133503 - RNA, 19 nt, Artificial Sequence
  Description of Artificial Sequence: Synthetic oligonucleotide
  Antisense strand to SEQ ID NO: 133502
caauucaaacccuaauugc

SEQ ID NO: 133504 - RNA, 19 nt, Artificial Sequence
  Description of Artificial Sequence: Synthetic oligonucleotide
  Sense strand starting at position 520 of SEQ ID NO: 1713
ggaagauuacguugacaga

SEQ ID NO: 133505 - RNA, 19 nt, Artificial Sequence
  Description of Artificial Sequence: Synthetic oligonucleotide
  Antisense strand to SEQ ID NO: 133504
ucugucaacguaaucuucc

SEQ ID NO: 133506 - RNA, 19 nt, Artificial Sequence
  Description of Artificial Sequence: Synthetic oligonucleotide
  Sense strand starting at position 518 of SEQ ID NO: 1713
uaggaagauuacguugaca

SEQ ID NO: 133507 - RNA, 19 nt, Artificial Sequence
  Description of Artificial Sequence: Synthetic oligonucleotide
  Antisense strand to SEQ ID NO: 133506
ugucaacguaaucuuccua

SEQ ID NO: 133508 - RNA, 19 nt, Artificial Sequence
  Description of Artificial Sequence: Synthetic oligonucleotide
  Sense strand starting at position 486 of SEQ ID NO: 1713
aaggcaguguuggcaagaa

SEQ ID NO: 133509 - RNA, 19 nt, Artificial Sequence
  Description of Artificial Sequence: Synthetic oligonucleotide
  Antisense strand to SEQ ID NO: 133508
uucuugccaacacugccuu

SEQ ID NO: 133510 - RNA, 19 nt, Artificial Sequence
  Description of Artificial Sequence: Synthetic oligonucleotide
  Sense strand starting at position 405 of SEQ ID NO: 1713
agccuaugaucaccuguaa

SEQ ID NO: 133511 - RNA, 19 nt, Artificial Sequence
  Description of Artificial Sequence: Synthetic oligonucleotide
  Antisense strand to SEQ ID NO: 133510
uuacaggugaucauaggcu

SEQ ID NO: 133512 - RNA, 19 nt, Artificial Sequence
  Description of Artificial Sequence: Synthetic oligonucleotide
  Sense strand starting at position 327 of SEQ ID NO: 1713
aggaguugcuaauccuauu

SEQ ID NO: 133513 - RNA, 19 nt, Artificial Sequence
  Description of Artificial Sequence: Synthetic oligonucleotide
  Antisense strand to SEQ ID NO: 133512
aauaggauuagcaacuccu

SEQ ID NO: 133514 - RNA, 19 nt, Artificial Sequence
  Description of Artificial Sequence: Synthetic oligonucleotide
  Sense strand starting at position 301 of SEQ ID NO: 1713
gugguagaguucucagaua

SEQ ID NO: 133515 - RNA, 19 nt, Artificial Sequence
  Description of Artificial Sequence: Synthetic oligonucleotide
  Antisense strand to SEQ ID NO: 133514
uaucugagaacucuaccac

SEQ ID NO: 133516 - RNA, 19 nt, Artificial Sequence
  Description of Artificial Sequence: Synthetic oligonucleotide
  Sense strand starting at position 288 of SEQ ID NO: 1713
uaaacuugaccuuguggua

SEQ ID NO: 133517 - RNA, 19 nt, Artificial Sequence
  Description of Artificial Sequence: Synthetic oligonucleotide
  Antisense strand to SEQ ID NO: 133516
uaccacaaggucaaguuua

SEQ ID NO: 133518 - RNA, 19 nt, Artificial Sequence
  Description of Artificial Sequence: Synthetic oligonucleotide
  Sense strand starting at position 267 of SEQ ID NO: 1713
cucuuaguuccagguuaaa

SEQ ID NO: 133519 - RNA, 19 nt, Artificial Sequence
  Description of Artificial Sequence: Synthetic oligonucleotide
  Antisense strand to SEQ ID NO: 133518
uuuaaccuggaacuaagag

SEQ ID NO: 133520 - RNA, 19 nt, Artificial Sequence
  Description of Artificial Sequence: Synthetic oligonucleotide
  Sense strand starting at position 116 of SEQ ID NO: 1713
gguaaagagaaaugccuaa

SEQ ID NO: 133521 - RNA, 19 nt, Artificial Sequence
  Description of Artificial Sequence: Synthetic oligonucleotide
  Antisense strand to SEQ ID NO: 133520
uuaggcauuucucuuuacc

SEQ ID NO: 133522 - RNA, 19 nt, Artificial Sequence
  Description of Artificial Sequence: Synthetic oligonucleotide
  Sense strand starting at position 581 of SEQ ID NO: 1715
agguccauuccagaagcuu

SEQ ID NO: 133523 - RNA, 19 nt, Artificial Sequence
  Description of Artificial Sequence: Synthetic oligonucleotide
  Antisense strand to SEQ ID NO: 133522
aagcuucuggaauggaccu

SEQ ID NO: 133524 - RNA, 19 nt, Artificial Sequence
  Description of Artificial Sequence: Synthetic oligonucleotide
  Sense strand starting at position 947 of SEQ ID NO: 1715
acacaagucgcagaaacua

SEQ ID NO: 133525 - RNA, 19 nt, Artificial Sequence
  Description of Artificial Sequence: Synthetic oligonucleotide
  Antisense strand to SEQ ID NO: 133524
uaguuucugcgacuugugu

SEQ ID NO: 133526 - RNA, 19 nt, Artificial Sequence
  Description of Artificial Sequence: Synthetic oligonucleotide
  Sense strand starting at position 1018 of SEQ ID NO: 1715
cuuuauagccaguagggau

SEQ ID NO: 133527 - RNA, 19 nt, Artificial Sequence
  Description of Artificial Sequence: Synthetic oligonucleotide
  Antisense strand to SEQ ID NO: 133526
aucccuacuggcuauaaag

SEQ ID NO: 133528 - RNA, 19 nt, Artificial Sequence
  Description of Artificial Sequence: Synthetic oligonucleotide
  Sense strand starting at position 1240 of SEQ ID NO: 1715
cgcuuagguuaauccuaga

SEQ ID NO: 133529 - RNA, 19 nt, Artificial Sequence
  Description of Artificial Sequence: Synthetic oligonucleotide
  Antisense strand to SEQ ID NO: 133528
ucuaggauuaaccuaagcg

SEQ ID NO: 133530 - RNA, 19 nt, Artificial Sequence
  Description of Artificial Sequence: Synthetic oligonucleotide
  Sense strand starting at position 1243 of SEQ ID NO: 1715
uuagguuaauccuagaucu

SEQ ID NO: 133531 - RNA, 19 nt, Artificial Sequence
  Description of Artificial Sequence: Synthetic oligonucleotide
  Antisense strand to SEQ ID NO: 133530
agaucuaggauuaaccuaa

SEQ ID NO: 133532 - RNA, 19 nt, Artificial Sequence
  Description of Artificial Sequence: Synthetic oligonucleotide
  Sense strand starting at position 1251 of SEQ ID NO: 1715
auccuagaucucugcggaa

SEQ ID NO: 133533 - RNA, 19 nt, Artificial Sequence
  Description of Artificial Sequence: Synthetic oligonucleotide
  Antisense strand to SEQ ID NO: 133532
uuccgcagagaucuaggau

SEQ ID NO: 133534 - RNA, 19 nt, Artificial Sequence
  Description of Artificial Sequence: Synthetic oligonucleotide
  Sense strand starting at position 1430 of SEQ ID NO: 1715
cagcgcagauccucaguaa

SEQ ID NO: 133535 - RNA, 19 nt, Artificial Sequence
  Description of Artificial Sequence: Synthetic oligonucleotide
  Antisense strand to SEQ ID NO: 133534
uuacugaggaucugcgcug

SEQ ID NO: 133536 - RNA, 19 nt, Artificial Sequence
  Description of Artificial Sequence: Synthetic oligonucleotide
  Sense strand starting at position 1498 of SEQ ID NO: 1715
ugcugcuuucuguuguaaa

SEQ ID NO: 133537 - RNA, 19 nt, Artificial Sequence
  Description of Artificial Sequence: Synthetic oligonucleotide
  Antisense strand to SEQ ID NO: 133536
uuuacaacagaaagcagca

SEQ ID NO: 133538 - RNA, 19 nt, Artificial Sequence
  Description of Artificial Sequence: Synthetic oligonucleotide
  Sense strand starting at position 1683 of SEQ ID NO: 1715
ucagacauuuccugaugac

SEQ ID NO: 133539 - RNA, 19 nt, Artificial Sequence
  Description of Artificial Sequence: Synthetic oligonucleotide
  Antisense strand to SEQ ID NO: 133538
gucaucaggaaaugucuga

SEQ ID NO: 133540 - RNA, 19 nt, Artificial Sequence
  Description of Artificial Sequence: Synthetic oligonucleotide
  Sense strand starting at position 1790 of SEQ ID NO: 1715
ggacgugucaauugcaacu

SEQ ID NO: 133541 - RNA, 19 nt, Artificial Sequence
  Description of Artificial Sequence: Synthetic oligonucleotide
  Antisense strand to SEQ ID NO: 133540
aguugcaauugacacgucc

SEQ ID NO: 133542 - RNA, 19 nt, Artificial Sequence
  Description of Artificial Sequence: Synthetic oligonucleotide
  Sense strand starting at position 1839 of SEQ ID NO: 1715
acuaaaguuuguucuauuc

SEQ ID NO: 133543 - RNA, 19 nt, Artificial Sequence
  Description of Artificial Sequence: Synthetic oligonucleotide
  Antisense strand to SEQ ID NO: 133542
gaauagaacaaacuuuagu

SEQ ID NO: 133544 - RNA, 19 nt, Artificial Sequence
  Description of Artificial Sequence: Synthetic oligonucleotide
  Sense strand starting at position 2222 of SEQ ID NO: 1715
cuaguaguaccuuacuacu

SEQ ID NO: 133545 - RNA, 19 nt, Artificial Sequence
  Description of Artificial Sequence: Synthetic oligonucleotide
  Antisense strand to SEQ ID NO: 133544
aguaguaagguacuacuag

SEQ ID NO: 133546 - RNA, 19 nt, Artificial Sequence
  Description of Artificial Sequence: Synthetic oligonucleotide
  Sense strand starting at position 2225 of SEQ ID NO: 1715
guaguaccuuacuacuaga

SEQ ID NO: 133547 - RNA, 19 nt, Artificial Sequence
  Description of Artificial Sequence: Synthetic oligonucleotide
  Antisense strand to SEQ ID NO: 133546
ucuaguaguaagguacuac

SEQ ID NO: 133548 - RNA, 19 nt, Artificial Sequence
  Description of Artificial Sequence: Synthetic oligonucleotide
  Sense strand starting at position 2228 of SEQ ID NO: 1715
guaccuuacuacuagauua

SEQ ID NO: 133549 - RNA, 19 nt, Artificial Sequence
  Description of Artificial Sequence: Synthetic oligonucleotide
  Antisense strand to SEQ ID NO: 133548
uaaucuaguaguaagguac

SEQ ID NO: 133550 - RNA, 19 nt, Artificial Sequence
  Description of Artificial Sequence: Synthetic oligonucleotide
  Sense strand starting at position 2236 of SEQ ID NO: 1715
cuacuagauuacccugagu

SEQ ID NO: 133551 - RNA, 19 nt, Artificial Sequence
  Description of Artificial Sequence: Synthetic oligonucleotide
  Antisense strand to SEQ ID NO: 133550
acucaggguaaucuaguag

SEQ ID NO: 133552 - RNA, 19 nt, Artificial Sequence
  Description of Artificial Sequence: Synthetic oligonucleotide
  Sense strand starting at position 2239 of SEQ ID NO: 1715
cuagauuacccugagucca

SEQ ID NO: 133553 - RNA, 19 nt, Artificial Sequence
  Description of Artificial Sequence: Synthetic oligonucleotide
  Antisense strand to SEQ ID NO: 133552
uggacucaggguaaucuag

SEQ ID NO: 133554 - RNA, 19 nt, Artificial Sequence
  Description of Artificial Sequence: Synthetic oligonucleotide
  Sense strand starting at position 2583 of SEQ ID NO: 1715
uuuccugagcauuagcuaa

SEQ ID NO: 133555 - RNA, 19 nt, Artificial Sequence
  Description of Artificial Sequence: Synthetic oligonucleotide
  Antisense strand to SEQ ID NO: 133554
uuagcuaaugcucaggaaa

SEQ ID NO: 133556 - RNA, 19 nt, Artificial Sequence
  Description of Artificial Sequence: Synthetic oligonucleotide
  Sense strand starting at position 2597 of SEQ ID NO: 1715
gcuaaagucuuugccucaa

SEQ ID NO: 133557 - RNA, 19 nt, Artificial Sequence
  Description of Artificial Sequence: Synthetic oligonucleotide
  Antisense strand to SEQ ID NO: 133556
uugaggcaaagacuuuagc

SEQ ID NO: 133558 - RNA, 19 nt, Artificial Sequence
  Description of Artificial Sequence: Synthetic oligonucleotide
  Sense strand starting at position 2666 of SEQ ID NO: 1715
cugagaaccucuugggaag

SEQ ID NO: 133559 - RNA, 19 nt, Artificial Sequence
  Description of Artificial Sequence: Synthetic oligonucleotide
  Antisense strand to SEQ ID NO: 133558
cuucccaagagguucucag

SEQ ID NO: 133560 - RNA, 19 nt, Artificial Sequence
  Description of Artificial Sequence: Synthetic oligonucleotide
  Sense strand starting at position 2668 of SEQ ID NO: 1715
gagaaccucuugggaagaa

SEQ ID NO: 133561 - RNA, 19 nt, Artificial Sequence
  Description of Artificial Sequence: Synthetic oligonucleotide
  Antisense strand to SEQ ID NO: 133560
uucuucccaagagguucuc

SEQ ID NO: 133562 - RNA, 19 nt, Artificial Sequence
  Description of Artificial Sequence: Synthetic oligonucleotide
  Sense strand starting at position 2669 of SEQ ID NO: 1715
agaaccucuugggaagaaa

SEQ ID NO: 133563 - RNA, 19 nt, Artificial Sequence
  Description of Artificial Sequence: Synthetic oligonucleotide
  Antisense strand to SEQ ID NO: 133562
uuucuucccaagagguucu

SEQ ID NO: 133564 - RNA, 19 nt, Artificial Sequence
  Description of Artificial Sequence: Synthetic oligonucleotide
  Sense strand starting at position 2699 of SEQ ID NO: 1715
gugucugugacaugguuua

SEQ ID NO: 133565 - RNA, 19 nt, Artificial Sequence
  Description of Artificial Sequence: Synthetic oligonucleotide
  Antisense strand to SEQ ID NO: 133564
uaaaccaugucacagacac

SEQ ID NO: 133566 - RNA, 19 nt, Artificial Sequence
  Description of Artificial Sequence: Synthetic oligonucleotide
  Sense strand starting at position 2706 of SEQ ID NO: 1715
ugacaugguuuagucaguu

SEQ ID NO: 133567 - RNA, 19 nt, Artificial Sequence
  Description of Artificial Sequence: Synthetic oligonucleotide
  Antisense strand to SEQ ID NO: 133566
aacugacuaaaccauguca

SEQ ID NO: 133568 - RNA, 19 nt, Artificial Sequence
  Description of Artificial Sequence: Synthetic oligonucleotide
  Sense strand starting at position 2710 of SEQ ID NO: 1715
augguuuagucaguuuagu

SEQ ID NO: 133569 - RNA, 19 nt, Artificial Sequence
  Description of Artificial Sequence: Synthetic oligonucleotide
  Antisense strand to SEQ ID NO: 133568
acuaaacugacuaaaccau

SEQ ID NO: 133570 - RNA, 19 nt, Artificial Sequence
  Description of Artificial Sequence: Synthetic oligonucleotide
  Sense strand starting at position 2716 of SEQ ID NO: 1715
uagucaguuuagucacuca

SEQ ID NO: 133571 - RNA, 19 nt, Artificial Sequence
  Description of Artificial Sequence: Synthetic oligonucleotide
  Antisense strand to SEQ ID NO: 133570
ugagugacuaaacugacua

SEQ ID NO: 133572 - RNA, 19 nt, Artificial Sequence
  Description of Artificial Sequence: Synthetic oligonucleotide
  Sense strand starting at position 2781 of SEQ ID NO: 1715
ggaaaucuuucugaagucu

SEQ ID NO: 133573 - RNA, 19 nt, Artificial Sequence
  Description of Artificial Sequence: Synthetic oligonucleotide
  Antisense strand to SEQ ID NO: 133572
agacuucagaaagauuucc

SEQ ID NO: 133574 - RNA, 19 nt, Artificial Sequence
  Description of Artificial Sequence: Synthetic oligonucleotide
  Sense strand starting at position 2787 of SEQ ID NO: 1715
cuuucugaagucugaucau

SEQ ID NO: 133575 - RNA, 19 nt, Artificial Sequence
  Description of Artificial Sequence: Synthetic oligonucleotide
  Antisense strand to SEQ ID NO: 133574
augaucagacuucagaaag

SEQ ID NO: 133576 - RNA, 19 nt, Artificial Sequence
  Description of Artificial Sequence: Synthetic oligonucleotide
  Sense strand starting at position 2790 of SEQ ID NO: 1715
ucugaagucugaucauguc

SEQ ID NO: 133577 - RNA, 19 nt, Artificial Sequence
  Description of Artificial Sequence: Synthetic oligonucleotide
  Antisense strand to SEQ ID NO: 133576
gacaugaucagacuucaga

SEQ ID NO: 133578 - RNA, 19 nt, Artificial Sequence
  Description of Artificial Sequence: Synthetic oligonucleotide
  Sense strand starting at position 2798 of SEQ ID NO: 1715
cugaucaugucacuguuau

SEQ ID NO: 133579 - RNA, 19 nt, Artificial Sequence
  Description of Artificial Sequence: Synthetic oligonucleotide
  Antisense strand to SEQ ID NO: 133578
auaacagugacaugaucag

SEQ ID NO: 133580 - RNA, 19 nt, Artificial Sequence
  Description of Artificial Sequence: Synthetic oligonucleotide
  Sense strand starting at position 2799 of SEQ ID NO: 1715
ugaucaugucacuguuauu

SEQ ID NO: 133581 - RNA, 19 nt, Artificial Sequence
  Description of Artificial Sequence: Synthetic oligonucleotide
  Antisense strand to SEQ ID NO: 133580
aauaacagugacaugauca

SEQ ID NO: 133582 - RNA, 19 nt, Artificial Sequence
  Description of Artificial Sequence: Synthetic oligonucleotide
  Sense strand starting at position 2806 of SEQ ID NO: 1715
gucacuguuauucgugguu

SEQ ID NO: 133583 - RNA, 19 nt, Artificial Sequence
  Description of Artificial Sequence: Synthetic oligonucleotide
  Antisense strand to SEQ ID NO: 133582
aaccacgaauaacagugac

SEQ ID NO: 133584 - RNA, 19 nt, Artificial Sequence
  Description of Artificial Sequence: Synthetic oligonucleotide
  Sense strand starting at position 2809 of SEQ ID NO: 1715
acuguuauucgugguuuaa

SEQ ID NO: 133585 - RNA, 19 nt, Artificial Sequence
  Description of Artificial Sequence: Synthetic oligonucleotide
  Antisense strand to SEQ ID NO: 133584
uuaaaccacgaauaacagu

SEQ ID NO: 133586 - RNA, 19 nt, Artificial Sequence
  Description of Artificial Sequence: Synthetic oligonucleotide
  Sense strand starting at position 3054 of SEQ ID NO: 1715
gaggcucuguagucaauuu

SEQ ID NO: 133587 - RNA, 19 nt, Artificial Sequence
  Description of Artificial Sequence: Synthetic oligonucleotide
  Antisense strand to SEQ ID NO: 133586
aaauugacuacagagccuc

SEQ ID NO: 133588 - RNA, 19 nt, Artificial Sequence
  Description of Artificial Sequence: Synthetic oligonucleotide
  Sense strand starting at position 3282 of SEQ ID NO: 1715
aggugaaucgcuugaauca

SEQ ID NO: 133589 - RNA, 19 nt, Artificial Sequence
  Description of Artificial Sequence: Synthetic oligonucleotide
  Antisense strand to SEQ ID NO: 133588
ugauucaagcgauucaccu

SEQ ID NO: 133590 - RNA, 19 nt, Artificial Sequence
  Description of Artificial Sequence: Synthetic oligonucleotide
  Sense strand starting at position 3283 of SEQ ID NO: 1715
ggugaaucgcuugaaucag

SEQ ID NO: 133591 - RNA, 19 nt, Artificial Sequence
  Description of Artificial Sequence: Synthetic oligonucleotide
  Antisense strand to SEQ ID NO: 133590
cugauucaagcgauucacc

SEQ ID NO: 133592 - RNA, 19 nt, Artificial Sequence
  Description of Artificial Sequence: Synthetic oligonucleotide
  Sense strand starting at position 3506 of SEQ ID NO: 1715
ugugauuaucuauguaguu

SEQ ID NO: 133593 - RNA, 19 nt, Artificial Sequence
  Description of Artificial Sequence: Synthetic oligonucleotide
  Antisense strand to SEQ ID NO: 133592
aacuacauagauaaucaca

SEQ ID NO: 133594 - RNA, 19 nt, Artificial Sequence
  Description of Artificial Sequence: Synthetic oligonucleotide
  Sense strand starting at position 3507 of SEQ ID NO: 1715
gugauuaucuauguaguuc

SEQ ID NO: 133595 - RNA, 19 nt, Artificial Sequence
  Description of Artificial Sequence: Synthetic oligonucleotide
  Antisense strand to SEQ ID NO: 133594
gaacuacauagauaaucac

SEQ ID NO: 133596 - RNA, 19 nt, Artificial Sequence
  Description of Artificial Sequence: Synthetic oligonucleotide
  Sense strand starting at position 3553 of SEQ ID NO: 1715
uuagaaauguuagcugcua

SEQ ID NO: 133597 - RNA, 19 nt, Artificial Sequence
  Description of Artificial Sequence: Synthetic oligonucleotide
  Antisense strand to SEQ ID NO: 133596
uagcagcuaacauuucuaa

SEQ ID NO: 133598 - RNA, 19 nt, Artificial Sequence
  Description of Artificial Sequence: Synthetic oligonucleotide
  Sense strand starting at position 3554 of SEQ ID NO: 1715
uagaaauguuagcugcuau

SEQ ID NO: 133599 - RNA, 19 nt, Artificial Sequence
  Description of Artificial Sequence: Synthetic oligonucleotide
  Antisense strand to SEQ ID NO: 133598
auagcagcuaacauuucua

SEQ ID NO: 133600 - RNA, 19 nt, Artificial Sequence
  Description of Artificial Sequence: Synthetic oligonucleotide
  Sense strand starting at position 3607 of SEQ ID NO: 1715
cccagaacacaguguaguu

SEQ ID NO: 133601 - RNA, 19 nt, Artificial Sequence
  Description of Artificial Sequence: Synthetic oligonucleotide
  Antisense strand to SEQ ID NO: 133600
aacuacacuguguucuggg

SEQ ID NO: 133602 - RNA, 19 nt, Artificial Sequence
  Description of Artificial Sequence: Synthetic oligonucleotide
  Sense strand starting at position 297 of SEQ ID NO: 1716
ccaagauauugauuggcau

SEQ ID NO: 133603 - RNA, 19 nt, Artificial Sequence
  Description of Artificial Sequence: Synthetic oligonucleotide
  Antisense strand to SEQ ID NO: 133602
augccaaucaauaucuugg

SEQ ID NO: 133604 - RNA, 19 nt, Artificial Sequence
  Description of Artificial Sequence: Synthetic oligonucleotide
  Sense strand starting at position 308 of SEQ ID NO: 1716
auuggcaucugcuuaauuu

SEQ ID NO: 133605 - RNA, 19 nt, Artificial Sequence
  Description of Artificial Sequence: Synthetic oligonucleotide
  Antisense strand to SEQ ID NO: 133604
aaauuaagcagaugccaau

SEQ ID NO: 133606 - RNA, 19 nt, Artificial Sequence
  Description of Artificial Sequence: Synthetic oligonucleotide
  Sense strand starting at position 341 of SEQ ID NO: 1716
uuguguaagcccuagaauu

SEQ ID NO: 133607 - RNA, 19 nt, Artificial Sequence
  Description of Artificial Sequence: Synthetic oligonucleotide
  Antisense strand to SEQ ID NO: 133606
aauucuagggcuuacacaa

SEQ ID NO: 133608 - RNA, 19 nt, Artificial Sequence
  Description of Artificial Sequence: Synthetic oligonucleotide
  Sense strand starting at position 398 of SEQ ID NO: 1716
gcuaauaucccagggcgaa

SEQ ID NO: 133609 - RNA, 19 nt, Artificial Sequence
  Description of Artificial Sequence: Synthetic oligonucleotide
  Antisense strand to SEQ ID NO: 133608
uucgcccugggauauuagc

SEQ ID NO: 133610 - RNA, 19 nt, Artificial Sequence
  Description of Artificial Sequence: Synthetic oligonucleotide
  Sense strand starting at position 399 of SEQ ID NO: 1716
cuaauaucccagggcgaaa

SEQ ID NO: 133611 - RNA, 19 nt, Artificial Sequence
  Description of Artificial Sequence: Synthetic oligonucleotide
  Antisense strand to SEQ ID NO: 133610
uuucgcccugggauauuag

SEQ ID NO: 133612 - RNA, 19 nt, Artificial Sequence
  Description of Artificial Sequence: Synthetic oligonucleotide
  Sense strand starting at position 482 of SEQ ID NO: 1716
caagauuaguauugagauc

SEQ ID NO: 133613 - RNA, 19 nt, Artificial Sequence
  Description of Artificial Sequence: Synthetic oligonucleotide
  Antisense strand to SEQ ID NO: 133612
gaucucaauacuaaucuug

SEQ ID NO: 133614 - RNA, 19 nt, Artificial Sequence
  Description of Artificial Sequence: Synthetic oligonucleotide
  Sense strand starting at position 491 of SEQ ID NO: 1716
uauugagaucuuggccaag

SEQ ID NO: 133615 - RNA, 19 nt, Artificial Sequence
  Description of Artificial Sequence: Synthetic oligonucleotide
  Antisense strand to SEQ ID NO: 133614
cuuggccaagaucucaaua

SEQ ID NO: 133616 - RNA, 19 nt, Artificial Sequence
  Description of Artificial Sequence: Synthetic oligonucleotide
  Sense strand starting at position 1533 of SEQ ID NO: 1716
agguccauuccagaagcuu

SEQ ID NO: 133617 - RNA, 19 nt, Artificial Sequence
  Description of Artificial Sequence: Synthetic oligonucleotide
  Antisense strand to SEQ ID NO: 133616
aagcuucuggaauggaccu

SEQ ID NO: 133618 - RNA, 19 nt, Artificial Sequence
  Description of Artificial Sequence: Synthetic oligonucleotide
  Sense strand starting at position 1899 of SEQ ID NO: 1716
acacaagucgcagaaacua

SEQ ID NO: 133619 - RNA, 19 nt, Artificial Sequence
  Description of Artificial Sequence: Synthetic oligonucleotide
  Antisense strand to SEQ ID NO: 133618
uaguuucugcgacuugugu

SEQ ID NO: 133620 - RNA, 19 nt, Artificial Sequence
  Description of Artificial Sequence: Synthetic oligonucleotide
  Sense strand starting at position 1970 of SEQ ID NO: 1716
cuuuauagccaguagggau

SEQ ID NO: 133621 - RNA, 19 nt, Artificial Sequence
  Description of Artificial Sequence: Synthetic oligonucleotide
  Antisense strand to SEQ ID NO: 133620
aucccuacuggcuauaaag

SEQ ID NO: 133622 - RNA, 19 nt, Artificial Sequence
  Description of Artificial Sequence: Synthetic oligonucleotide
  Sense strand starting at position 2192 of SEQ ID NO: 1716
cgcuuagguuaauccuaga

SEQ ID NO: 133623 - RNA, 19 nt, Artificial Sequence
  Description of Artificial Sequence: Synthetic oligonucleotide
  Antisense strand to SEQ ID NO: 133622
ucuaggauuaaccuaagcg

SEQ ID NO: 133624 - RNA, 19 nt, Artificial Sequence
  Description of Artificial Sequence: Synthetic oligonucleotide
  Sense strand starting at position 2195 of SEQ ID NO: 1716
uuagguuaauccuagaucu

SEQ ID NO: 133625 - RNA, 19 nt, Artificial Sequence
  Description of Artificial Sequence: Synthetic oligonucleotide
  Antisense strand to SEQ ID NO: 133624
agaucuaggauuaaccuaa

SEQ ID NO: 133626 - RNA, 19 nt, Artificial Sequence
  Description of Artificial Sequence: Synthetic oligonucleotide
  Sense strand starting at position 2203 of SEQ ID NO: 1716
auccuagaucucugcggaa

SEQ ID NO: 133627 - RNA, 19 nt, Artificial Sequence
  Description of Artificial Sequence: Synthetic oligonucleotide
  Antisense strand to SEQ ID NO: 133626
uuccgcagagaucuaggau

SEQ ID NO: 133628 - RNA, 19 nt, Artificial Sequence
  Description of Artificial Sequence: Synthetic oligonucleotide
  Sense strand starting at position 2382 of SEQ ID NO: 1716
cagcgcagauccucaguaa

SEQ ID NO: 133629 - RNA, 19 nt, Artificial Sequence
  Description of Artificial Sequence: Synthetic oligonucleotide
  Antisense strand to SEQ ID NO: 133628
uuacugaggaucugcgcug

SEQ ID NO: 133630 - RNA, 19 nt, Artificial Sequence
  Description of Artificial Sequence: Synthetic oligonucleotide
  Sense strand starting at position 2450 of SEQ ID NO: 1716
ugcugcuuucuguuguaaa

SEQ ID NO: 133631 - RNA, 19 nt, Artificial Sequence
  Description of Artificial Sequence: Synthetic oligonucleotide
  Antisense strand to SEQ ID NO: 133630
uuuacaacagaaagcagca

SEQ ID NO: 133632 - RNA, 19 nt, Artificial Sequence
  Description of Artificial Sequence: Synthetic oligonucleotide
  Sense strand starting at position 2635 of SEQ ID NO: 1716
ucagacauuuccugaugac

SEQ ID NO: 133633 - RNA, 19 nt, Artificial Sequence
  Description of Artificial Sequence: Synthetic oligonucleotide
  Antisense strand to SEQ ID NO: 133632
gucaucaggaaaugucuga

SEQ ID NO: 133634 - RNA, 19 nt, Artificial Sequence
  Description of Artificial Sequence: Synthetic oligonucleotide
  Sense strand starting at position 2742 of SEQ ID NO: 1716
ggacgugucaauugcaacu

SEQ ID NO: 133635 - RNA, 19 nt, Artificial Sequence
  Description of Artificial Sequence: Synthetic oligonucleotide
  Antisense strand to SEQ ID NO: 133634
aguugcaauugacacgucc

SEQ ID NO: 133636 - RNA, 19 nt, Artificial Sequence
  Description of Artificial Sequence: Synthetic oligonucleotide
  Sense strand starting at position 2791 of SEQ ID NO: 1716
acuaaaguuuguucuauuc

SEQ ID NO: 133637 - RNA, 19 nt, Artificial Sequence
  Description of Artificial Sequence: Synthetic oligonucleotide
  Antisense strand to SEQ ID NO: 133636
gaauagaacaaacuuuagu

SEQ ID NO: 133638 - RNA, 19 nt, Artificial Sequence
  Description of Artificial Sequence: Synthetic oligonucleotide
  Sense strand starting at position 3174 of SEQ ID NO: 1716
cuaguaguaccuuacuacu

SEQ ID NO: 133639 - RNA, 19 nt, Artificial Sequence
  Description of Artificial Sequence: Synthetic oligonucleotide
  Antisense strand to SEQ ID NO: 133638
aguaguaagguacuacuag

SEQ ID NO: 133640 - RNA, 19 nt, Artificial Sequence
  Description of Artificial Sequence: Synthetic oligonucleotide
  Sense strand starting at position 3177 of SEQ ID NO: 1716
guaguaccuuacuacuaga

SEQ ID NO: 133641 - RNA, 19 nt, Artificial Sequence
  Description of Artificial Sequence: Synthetic oligonucleotide
  Antisense strand to SEQ ID NO: 133640
ucuaguaguaagguacuac

SEQ ID NO: 133642 - RNA, 19 nt, Artificial Sequence
  Description of Artificial Sequence: Synthetic oligonucleotide
  Sense strand starting at position 3180 of SEQ ID NO: 1716
guaccuuacuacuagauua

SEQ ID NO: 133643 - RNA, 19 nt, Artificial Sequence
  Description of Artificial Sequence: Synthetic oligonucleotide
  Antisense strand to SEQ ID NO: 133642
uaaucuaguaguaagguac

SEQ ID NO: 133644 - RNA, 19 nt, Artificial Sequence
  Description of Artificial Sequence: Synthetic oligonucleotide
  Sense strand starting at position 3188 of SEQ ID NO: 1716
cuacuagauuacccugagu

SEQ ID NO: 133645 - RNA, 19 nt, Artificial Sequence
  Description of Artificial Sequence: Synthetic oligonucleotide
  Antisense strand to SEQ ID NO: 133644
acucaggguaaucuaguag

SEQ ID NO: 133646 - RNA, 19 nt, Artificial Sequence
  Description of Artificial Sequence: Synthetic oligonucleotide
  Sense strand starting at position 3191 of SEQ ID NO: 1716
cuagauuacccugagucca

SEQ ID NO: 133647 - RNA, 19 nt, Artificial Sequence
  Description of Artificial Sequence: Synthetic oligonucleotide
  Antisense strand to SEQ ID NO: 133646
uggacucaggguaaucuag

SEQ ID NO: 133648 - RNA, 19 nt, Artificial Sequence
  Description of Artificial Sequence: Synthetic oligonucleotide
  Sense strand starting at position 3535 of SEQ ID NO: 1716
uuuccugagcauuagcuaa

SEQ ID NO: 133649 - RNA, 19 nt, Artificial Sequence
  Description of Artificial Sequence: Synthetic oligonucleotide
  Antisense strand to SEQ ID NO: 133648
uuagcuaaugcucaggaaa

SEQ ID NO: 133650 - RNA, 19 nt, Artificial Sequence
  Description of Artificial Sequence: Synthetic oligonucleotide
  Sense strand starting at position 3549 of SEQ ID NO: 1716
gcuaaagucuuugccucaa

SEQ ID NO: 133651 - RNA, 19 nt, Artificial Sequence
  Description of Artificial Sequence: Synthetic oligonucleotide
  Antisense strand to SEQ ID NO: 133650
uugaggcaaagacuuuagc

SEQ ID NO: 133652 - RNA, 19 nt, Artificial Sequence
  Description of Artificial Sequence: Synthetic oligonucleotide
  Sense strand starting at position 3618 of SEQ ID NO: 1716
cugagaaccucuugggaag

SEQ ID NO: 133653 - RNA, 19 nt, Artificial Sequence
  Description of Artificial Sequence: Synthetic oligonucleotide
  Antisense strand to SEQ ID NO: 133652
cuucccaagagguucucag

SEQ ID NO: 133654 - RNA, 19 nt, Artificial Sequence
  Description of Artificial Sequence: Synthetic oligonucleotide
  Sense strand starting at position 3620 of SEQ ID NO: 1716
gagaaccucuugggaagaa

SEQ ID NO: 133655 - RNA, 19 nt, Artificial Sequence
  Description of Artificial Sequence: Synthetic oligonucleotide
  Antisense strand to SEQ ID NO: 133654
uucuucccaagagguucuc

SEQ ID NO: 133656 - RNA, 19 nt, Artificial Sequence
  Description of Artificial Sequence: Synthetic oligonucleotide
  Sense strand starting at position 3621 of SEQ ID NO: 1716
agaaccucuugggaagaaa

SEQ ID NO: 133657 - RNA, 19 nt, Artificial Sequence
  Description of Artificial Sequence: Synthetic oligonucleotide
  Antisense strand to SEQ ID NO: 133656
uuucuucccaagagguucu

SEQ ID NO: 133658 - RNA, 19 nt, Artificial Sequence
  Description of Artificial Sequence: Synthetic oligonucleotide
  Sense strand starting at position 3651 of SEQ ID NO: 1716
gugucugugacaugguuua

SEQ ID NO: 133659 - RNA, 19 nt, Artificial Sequence
  Description of Artificial Sequence: Synthetic oligonucleotide
  Antisense strand to SEQ ID NO: 133658
uaaaccaugucacagacac

SEQ ID NO: 133660 - RNA, 19 nt, Artificial Sequence
  Description of Artificial Sequence: Synthetic oligonucleotide
  Sense strand starting at position 3658 of SEQ ID NO: 1716
ugacaugguuuagucaguu

SEQ ID NO: 133661 - RNA, 19 nt, Artificial Sequence
  Description of Artificial Sequence: Synthetic oligonucleotide
  Antisense strand to SEQ ID NO: 133660
aacugacuaaaccauguca

SEQ ID NO: 133662 - RNA, 19 nt, Artificial Sequence
  Description of Artificial Sequence: Synthetic oligonucleotide
  Sense strand starting at position 3662 of SEQ ID NO: 1716
augguuuagucaguuuagu

SEQ ID NO: 133663 - RNA, 19 nt, Artificial Sequence
  Description of Artificial Sequence: Synthetic oligonucleotide
  Antisense strand to SEQ ID NO: 133662
acuaaacugacuaaaccau

SEQ ID NO: 133664 - RNA, 19 nt, Artificial Sequence
  Description of Artificial Sequence: Synthetic oligonucleotide
  Sense strand starting at position 3668 of SEQ ID NO: 1716
uagucaguuuagucacuca

SEQ ID NO: 133665 - RNA, 19 nt, Artificial Sequence
  Description of Artificial Sequence: Synthetic oligonucleotide
  Antisense strand to SEQ ID NO: 133664
ugagugacuaaacugacua

SEQ ID NO: 133666 - RNA, 19 nt, Artificial Sequence
  Description of Artificial Sequence: Synthetic oligonucleotide
  Sense strand starting at position 3732 of SEQ ID NO: 1716
aggaaaucuuucugaaguc

SEQ ID NO: 133667 - RNA, 19 nt, Artificial Sequence
  Description of Artificial Sequence: Synthetic oligonucleotide
  Antisense strand to SEQ ID NO: 133666
gacuucagaaagauuuccu

SEQ ID NO: 133668 - RNA, 19 nt, Artificial Sequence
  Description of Artificial Sequence: Synthetic oligonucleotide
  Sense strand starting at position 3733 of SEQ ID NO: 1716
ggaaaucuuucugaagucu

SEQ ID NO: 133669 - RNA, 19 nt, Artificial Sequence
  Description of Artificial Sequence: Synthetic oligonucleotide
  Antisense strand to SEQ ID NO: 133668
agacuucagaaagauuucc

SEQ ID NO: 133670 - RNA, 19 nt, Artificial Sequence
  Description of Artificial Sequence: Synthetic oligonucleotide
  Sense strand starting at position 3739 of SEQ ID NO: 1716
cuuucugaagucugaucau

SEQ ID NO: 133671 - RNA, 19 nt, Artificial Sequence
  Description of Artificial Sequence: Synthetic oligonucleotide
  Antisense strand to SEQ ID NO: 133670
augaucagacuucagaaag

SEQ ID NO: 133672 - RNA, 19 nt, Artificial Sequence
  Description of Artificial Sequence: Synthetic oligonucleotide
  Sense strand starting at position 3742 of SEQ ID NO: 1716
ucugaagucugaucauguc

SEQ ID NO: 133673 - RNA, 19 nt, Artificial Sequence
  Description of Artificial Sequence: Synthetic oligonucleotide
  Antisense strand to SEQ ID NO: 133672
gacaugaucagacuucaga

SEQ ID NO: 133674 - RNA, 19 nt, Artificial Sequence
  Description of Artificial Sequence: Synthetic oligonucleotide
  Sense strand starting at position 3750 of SEQ ID NO: 1716
cugaucaugucacuguuau

SEQ ID NO: 133675 - RNA, 19 nt, Artificial Sequence
  Description of Artificial Sequence: Synthetic oligonucleotide
  Antisense strand to SEQ ID NO: 133674
auaacagugacaugaucag

SEQ ID NO: 133676 - RNA, 19 nt, Artificial Sequence
  Description of Artificial Sequence: Synthetic oligonucleotide
  Sense strand starting at position 3751 of SEQ ID NO: 1716
ugaucaugucacuguuauu

SEQ ID NO: 133677 - RNA, 19 nt, Artificial Sequence
  Description of Artificial Sequence: Synthetic oligonucleotide
  Antisense strand to SEQ ID NO: 133676
aauaacagugacaugauca

SEQ ID NO: 133678 - RNA, 19 nt, Artificial Sequence
  Description of Artificial Sequence: Synthetic oligonucleotide
  Sense strand starting at position 3758 of SEQ ID NO: 1716
gucacuguuauucgugguu

SEQ ID NO: 133679 - RNA, 19 nt, Artificial Sequence
  Description of Artificial Sequence: Synthetic oligonucleotide
  Antisense strand to SEQ ID NO: 133678
aaccacgaauaacagugac

SEQ ID NO: 133680 - RNA, 19 nt, Artificial Sequence
  Description of Artificial Sequence: Synthetic oligonucleotide
  Sense strand starting at position 3761 of SEQ ID NO: 1716
acuguuauucgugguuuaa

SEQ ID NO: 133681 - RNA, 19 nt, Artificial Sequence
  Description of Artificial Sequence: Synthetic oligonucleotide
  Antisense strand to SEQ ID NO: 133680
uuaaaccacgaauaacagu

SEQ ID NO: 133682 - RNA, 19 nt, Artificial Sequence
  Description of Artificial Sequence: Synthetic oligonucleotide
  Sense strand starting at position 3925 of SEQ ID NO: 1717
gaauuagcuguccacugaa

SEQ ID NO: 133683 - RNA, 19 nt, Artificial Sequence
  Description of Artificial Sequence: Synthetic oligonucleotide
  Antisense strand to SEQ ID NO: 133682
uucaguggacagcuaauuc

SEQ ID NO: 133684 - RNA, 19 nt, Artificial Sequence
  Description of Artificial Sequence: Synthetic oligonucleotide
  Sense strand starting at position 3924 of SEQ ID NO: 1717
ugaauuagcuguccacuga

SEQ ID NO: 133685 - RNA, 19 nt, Artificial Sequence
  Description of Artificial Sequence: Synthetic oligonucleotide
  Antisense strand to SEQ ID NO: 133684
ucaguggacagcuaauuca

SEQ ID NO: 133686 - RNA, 19 nt, Artificial Sequence
  Description of Artificial Sequence: Synthetic oligonucleotide
  Sense strand starting at position 3885 of SEQ ID NO: 1717
acuuguuugcuuuagacuu

SEQ ID NO: 133687 - RNA, 19 nt, Artificial Sequence
  Description of Artificial Sequence: Synthetic oligonucleotide
  Antisense strand to SEQ ID NO: 133686
aagucuaaagcaaacaagu

SEQ ID NO: 133688 - RNA, 19 nt, Artificial Sequence
  Description of Artificial Sequence: Synthetic oligonucleotide
  Sense strand starting at position 3769 of SEQ ID NO: 1717
cugucaaaggcauaauuau

SEQ ID NO: 133689 - RNA, 19 nt, Artificial Sequence
  Description of Artificial Sequence: Synthetic oligonucleotide
  Antisense strand to SEQ ID NO: 133688
auaauuaugccuuugacag

SEQ ID NO: 133690 - RNA, 19 nt, Artificial Sequence
  Description of Artificial Sequence: Synthetic oligonucleotide
  Sense strand starting at position 3758 of SEQ ID NO: 1717
auuauugaugucugucaaa

SEQ ID NO: 133691 - RNA, 19 nt, Artificial Sequence
  Description of Artificial Sequence: Synthetic oligonucleotide
  Antisense strand to SEQ ID NO: 133690
uuugacagacaucaauaau

SEQ ID NO: 133692 - RNA, 19 nt, Artificial Sequence
  Description of Artificial Sequence: Synthetic oligonucleotide
  Sense strand starting at position 3757 of SEQ ID NO: 1717
gauuauugaugucugucaa

SEQ ID NO: 133693 - RNA, 19 nt, Artificial Sequence
  Description of Artificial Sequence: Synthetic oligonucleotide
  Antisense strand to SEQ ID NO: 133692
uugacagacaucaauaauc

SEQ ID NO: 133694 - RNA, 19 nt, Artificial Sequence
  Description of Artificial Sequence: Synthetic oligonucleotide
  Sense strand starting at position 3659 of SEQ ID NO: 1717
agaagaguaguuuggccua

SEQ ID NO: 133695 - RNA, 19 nt, Artificial Sequence
  Description of Artificial Sequence: Synthetic oligonucleotide
  Antisense strand to SEQ ID NO: 133694
uaggccaaacuacucuucu

SEQ ID NO: 133696 - RNA, 19 nt, Artificial Sequence
  Description of Artificial Sequence: Synthetic oligonucleotide
  Sense strand starting at position 3644 of SEQ ID NO: 1717
gagaauaguugggaaagaa

SEQ ID NO: 133697 - RNA, 19 nt, Artificial Sequence
  Description of Artificial Sequence: Synthetic oligonucleotide
  Antisense strand to SEQ ID NO: 133696
uucuuucccaacuauucuc

SEQ ID NO: 133698 - RNA, 19 nt, Artificial Sequence
  Description of Artificial Sequence: Synthetic oligonucleotide
  Sense strand starting at position 3517 of SEQ ID NO: 1717
gcaguaagauuacugguaa

SEQ ID NO: 133699 - RNA, 19 nt, Artificial Sequence
  Description of Artificial Sequence: Synthetic oligonucleotide
  Antisense strand to SEQ ID NO: 133698
uuaccaguaaucuuacugc

SEQ ID NO: 133700 - RNA, 19 nt, Artificial Sequence
  Description of Artificial Sequence: Synthetic oligonucleotide
  Sense strand starting at position 3509 of SEQ ID NO: 1717
caggacuugcaguaagauu

SEQ ID NO: 133701 - RNA, 19 nt, Artificial Sequence
  Description of Artificial Sequence: Synthetic oligonucleotide
  Antisense strand to SEQ ID NO: 133700
aaucuuacugcaaguccug

SEQ ID NO: 133702 - RNA, 19 nt, Artificial Sequence
  Description of Artificial Sequence: Synthetic oligonucleotide
  Sense strand starting at position 3402 of SEQ ID NO: 1717
cauggcaauguugagagua

SEQ ID NO: 133703 - RNA, 19 nt, Artificial Sequence
  Description of Artificial Sequence: Synthetic oligonucleotide
  Antisense strand to SEQ ID NO: 133702
uacucucaacauugccaug

SEQ ID NO: 133704 - RNA, 19 nt, Artificial Sequence
  Description of Artificial Sequence: Synthetic oligonucleotide
  Sense strand starting at position 3334 of SEQ ID NO: 1717
guguaaaugauuggaguuc

SEQ ID NO: 133705 - RNA, 19 nt, Artificial Sequence
  Description of Artificial Sequence: Synthetic oligonucleotide
  Antisense strand to SEQ ID NO: 133704
gaacuccaaucauuuacac

SEQ ID NO: 133706 - RNA, 19 nt, Artificial Sequence
  Description of Artificial Sequence: Synthetic oligonucleotide
  Sense strand starting at position 3333 of SEQ ID NO: 1717
gguguaaaugauuggaguu

SEQ ID NO: 133707 - RNA, 19 nt, Artificial Sequence
  Description of Artificial Sequence: Synthetic oligonucleotide
  Antisense strand to SEQ ID NO: 133706
aacuccaaucauuuacacc

SEQ ID NO: 133708 - RNA, 19 nt, Artificial Sequence
  Description of Artificial Sequence: Synthetic oligonucleotide
  Sense strand starting at position 3332 of SEQ ID NO: 1717
agguguaaaugauuggagu

SEQ ID NO: 133709 - RNA, 19 nt, Artificial Sequence
  Description of Artificial Sequence: Synthetic oligonucleotide
  Antisense strand to SEQ ID NO: 133708
acuccaaucauuuacaccu

SEQ ID NO: 133710 - RNA, 19 nt, Artificial Sequence
  Description of Artificial Sequence: Synthetic oligonucleotide
  Sense strand starting at position 3237 of SEQ ID NO: 1717
aggccauacaguggagaaa

SEQ ID NO: 133711 - RNA, 19 nt, Artificial Sequence
  Description of Artificial Sequence: Synthetic oligonucleotide
  Antisense strand to SEQ ID NO: 133710
uuucuccacuguauggccu

SEQ ID NO: 133712 - RNA, 19 nt, Artificial Sequence
  Description of Artificial Sequence: Synthetic oligonucleotide
  Sense strand starting at position 3166 of SEQ ID NO: 1717
uaucguuuggaugaugaca

SEQ ID NO: 133713 - RNA, 19 nt, Artificial Sequence
  Description of Artificial Sequence: Synthetic oligonucleotide
  Antisense strand to SEQ ID NO: 133712
ugucaucauccaaacgaua

SEQ ID NO: 133714 - RNA, 19 nt, Artificial Sequence
  Description of Artificial Sequence: Synthetic oligonucleotide
  Sense strand starting at position 3154 of SEQ ID NO: 1717
ggaaaugguagcuaucguu

SEQ ID NO: 133715 - RNA, 19 nt, Artificial Sequence
  Description of Artificial Sequence: Synthetic oligonucleotide
  Antisense strand to SEQ ID NO: 133714
aacgauagcuaccauuucc

SEQ ID NO: 133716 - RNA, 19 nt, Artificial Sequence
  Description of Artificial Sequence: Synthetic oligonucleotide
  Sense strand starting at position 3087 of SEQ ID NO: 1717
gguggucuggucugggaaa

SEQ ID NO: 133717 - RNA, 19 nt, Artificial Sequence
  Description of Artificial Sequence: Synthetic oligonucleotide
  Antisense strand to SEQ ID NO: 133716
uuucccagaccagaccacc

SEQ ID NO: 133718 - RNA, 19 nt, Artificial Sequence
  Description of Artificial Sequence: Synthetic oligonucleotide
  Sense strand starting at position 3045 of SEQ ID NO: 1717
gguuaugugccuagagggu

SEQ ID NO: 133719 - RNA, 19 nt, Artificial Sequence
  Description of Artificial Sequence: Synthetic oligonucleotide
  Antisense strand to SEQ ID NO: 133718
acccucuaggcacauaacc

SEQ ID NO: 133720 - RNA, 19 nt, Artificial Sequence
  Description of Artificial Sequence: Synthetic oligonucleotide
  Sense strand starting at position 2714 of SEQ ID NO: 1717
aggguaauguaacuaaacu

SEQ ID NO: 133721 - RNA, 19 nt, Artificial Sequence
  Description of Artificial Sequence: Synthetic oligonucleotide
  Antisense strand to SEQ ID NO: 133720
aguuuaguuacauuacccu

SEQ ID NO: 133722 - RNA, 19 nt, Artificial Sequence
  Description of Artificial Sequence: Synthetic oligonucleotide
  Sense strand starting at position 2664 of SEQ ID NO: 1717
ggaaguggcuuucuuauug

SEQ ID NO: 133723 - RNA, 19 nt, Artificial Sequence
  Description of Artificial Sequence: Synthetic oligonucleotide
  Antisense strand to SEQ ID NO: 133722
caauaagaaagccacuucc

SEQ ID NO: 133724 - RNA, 19 nt, Artificial Sequence
  Description of Artificial Sequence: Synthetic oligonucleotide
  Sense strand starting at position 2652 of SEQ ID NO: 1717
ccuuaugucagaggaagug

SEQ ID NO: 133725 - RNA, 19 nt, Artificial Sequence
  Description of Artificial Sequence: Synthetic oligonucleotide
  Antisense strand to SEQ ID NO: 133724
cacuuccucugacauaagg

SEQ ID NO: 133726 - RNA, 19 nt, Artificial Sequence
  Description of Artificial Sequence: Synthetic oligonucleotide
  Sense strand starting at position 2359 of SEQ ID NO: 1717
acgcgcuuuagggauggaa

SEQ ID NO: 133727 - RNA, 19 nt, Artificial Sequence
  Description of Artificial Sequence: Synthetic oligonucleotide
  Antisense strand to SEQ ID NO: 133726
uuccaucccuaaagcgcgu

SEQ ID NO: 133728 - RNA, 19 nt, Artificial Sequence
  Description of Artificial Sequence: Synthetic oligonucleotide
  Sense strand starting at position 1994 of SEQ ID NO: 1717
guugguucuggcgaagaag

SEQ ID NO: 133729 - RNA, 19 nt, Artificial Sequence
  Description of Artificial Sequence: Synthetic oligonucleotide
  Antisense strand to SEQ ID NO: 133728
cuucuucgccagaaccaac

SEQ ID NO: 133730 - RNA, 19 nt, Artificial Sequence
  Description of Artificial Sequence: Synthetic oligonucleotide
  Sense strand starting at position 1484 of SEQ ID NO: 1717
guuuacuaagacgaguuaa

SEQ ID NO: 133731 - RNA, 19 nt, Artificial Sequence
  Description of Artificial Sequence: Synthetic oligonucleotide
  Antisense strand to SEQ ID NO: 133730
uuaacucgucuuaguaaac

SEQ ID NO: 133732 - RNA, 19 nt, Artificial Sequence
  Description of Artificial Sequence: Synthetic oligonucleotide
  Sense strand starting at position 1483 of SEQ ID NO: 1717
aguuuacuaagacgaguua

SEQ ID NO: 133733 - RNA, 19 nt, Artificial Sequence
  Description of Artificial Sequence: Synthetic oligonucleotide
  Antisense strand to SEQ ID NO: 133732
uaacucgucuuaguaaacu

SEQ ID NO: 133734 - RNA, 19 nt, Artificial Sequence
  Description of Artificial Sequence: Synthetic oligonucleotide
  Sense strand starting at position 1295 of SEQ ID NO: 1717
uuggccuuccuguaaccua

SEQ ID NO: 133735 - RNA, 19 nt, Artificial Sequence
  Description of Artificial Sequence: Synthetic oligonucleotide
  Antisense strand to SEQ ID NO: 133734
uagguuacaggaaggccaa

SEQ ID NO: 133736 - RNA, 19 nt, Artificial Sequence
  Description of Artificial Sequence: Synthetic oligonucleotide
  Sense strand starting at position 753 of SEQ ID NO: 1717
acuagacaugccuggaaug

SEQ ID NO: 133737 - RNA, 19 nt, Artificial Sequence
  Description of Artificial Sequence: Synthetic oligonucleotide
  Antisense strand to SEQ ID NO: 133736
cauuccaggcaugucuagu

SEQ ID NO: 133738 - RNA, 19 nt, Artificial Sequence
  Description of Artificial Sequence: Synthetic oligonucleotide
  Sense strand starting at position 568 of SEQ ID NO: 1717
ggcauaugauguguaagaa

SEQ ID NO: 133739 - RNA, 19 nt, Artificial Sequence
  Description of Artificial Sequence: Synthetic oligonucleotide
  Antisense strand to SEQ ID NO: 133738
uucuuacacaucauaugcc

SEQ ID NO: 133740 - RNA, 19 nt, Artificial Sequence
  Description of Artificial Sequence: Synthetic oligonucleotide
  Sense strand starting at position 567 of SEQ ID NO: 1717
aggcauaugauguguaaga

SEQ ID NO: 133741 - RNA, 19 nt, Artificial Sequence
  Description of Artificial Sequence: Synthetic oligonucleotide
  Antisense strand to SEQ ID NO: 133740
ucuuacacaucauaugccu

SEQ ID NO: 133742 - RNA, 19 nt, Artificial Sequence
  Description of Artificial Sequence: Synthetic oligonucleotide
  Sense strand starting at position 560 of SEQ ID NO: 1717
guuggauaggcauaugaug

SEQ ID NO: 133743 - RNA, 19 nt, Artificial Sequence
  Description of Artificial Sequence: Synthetic oligonucleotide
  Antisense strand to SEQ ID NO: 133742
caucauaugccuauccaac

SEQ ID NO: 133744 - RNA, 19 nt, Artificial Sequence
  Description of Artificial Sequence: Synthetic oligonucleotide
  Sense strand starting at position 550 of SEQ ID NO: 1717
guuauaaaggguuggauag

SEQ ID NO: 133745 - RNA, 19 nt, Artificial Sequence
  Description of Artificial Sequence: Synthetic oligonucleotide
  Antisense strand to SEQ ID NO: 133744
cuauccaacccuuuauaac

SEQ ID NO: 133746 - RNA, 19 nt, Artificial Sequence
  Description of Artificial Sequence: Synthetic oligonucleotide
  Sense strand starting at position 547 of SEQ ID NO: 1717
gagguuauaaaggguugga

SEQ ID NO: 133747 - RNA, 19 nt, Artificial Sequence
  Description of Artificial Sequence: Synthetic oligonucleotide
  Antisense strand to SEQ ID NO: 133746
uccaacccuuuauaaccuc

SEQ ID NO: 133748 - RNA, 19 nt, Artificial Sequence
  Description of Artificial Sequence: Synthetic oligonucleotide
  Sense strand starting at position 401 of SEQ ID NO: 1717
guauaagaauggccauaag

SEQ ID NO: 133749 - RNA, 19 nt, Artificial Sequence
  Description of Artificial Sequence: Synthetic oligonucleotide
  Antisense strand to SEQ ID NO: 133748
cuuauggccauucuuauac

SEQ ID NO: 133750 - RNA, 19 nt, Artificial Sequence
  Description of Artificial Sequence: Synthetic oligonucleotide
  Sense strand starting at position 389 of SEQ ID NO: 1717
ccuagauccuaaguauaag

SEQ ID NO: 133751 - RNA, 19 nt, Artificial Sequence
  Description of Artificial Sequence: Synthetic oligonucleotide
  Antisense strand to SEQ ID NO: 133750
cuuauacuuaggaucuagg

SEQ ID NO: 133752 - RNA, 19 nt, Artificial Sequence
  Description of Artificial Sequence: Synthetic oligonucleotide
  Sense strand starting at position 318 of SEQ ID NO: 1717
gagggcugcagguagaaau

SEQ ID NO: 133753 - RNA, 19 nt, Artificial Sequence
  Description of Artificial Sequence: Synthetic oligonucleotide
  Antisense strand to SEQ ID NO: 133752
auuucuaccugcagcccuc

SEQ ID NO: 133754 - RNA, 19 nt, Artificial Sequence
  Description of Artificial Sequence: Synthetic oligonucleotide
  Sense strand starting at position 189 of SEQ ID NO: 1717
aaaguaugguuagcuuaaa

SEQ ID NO: 133755 - RNA, 19 nt, Artificial Sequence
  Description of Artificial Sequence: Synthetic oligonucleotide
  Antisense strand to SEQ ID NO: 133754
uuuaagcuaaccauacuuu

SEQ ID NO: 133756 - RNA, 19 nt, Artificial Sequence
  Description of Artificial Sequence: Synthetic oligonucleotide
  Sense strand starting at position 57 of SEQ ID NO: 1717
ggcagacuuguauauuagu

SEQ ID NO: 133757 - RNA, 19 nt, Artificial Sequence
  Description of Artificial Sequence: Synthetic oligonucleotide
  Antisense strand to SEQ ID NO: 133756
acuaauauacaagucugcc

SEQ ID NO: 133758 - RNA, 19 nt, Artificial Sequence
  Description of Artificial Sequence: Synthetic oligonucleotide
  Sense strand starting at position 46 of SEQ ID NO: 1717
accugauccuaggcagacu

SEQ ID NO: 133759 - RNA, 19 nt, Artificial Sequence
  Description of Artificial Sequence: Synthetic oligonucleotide
  Antisense strand to SEQ ID NO: 133758
agucugccuaggaucaggu

SEQ ID NO: 133760 - RNA, 19 nt, Artificial Sequence
  Description of Artificial Sequence: Synthetic oligonucleotide
  Sense strand starting at position 16 of SEQ ID NO: 1717
uucucuucccgguaaggua

SEQ ID NO: 133761 - RNA, 19 nt, Artificial Sequence
  Description of Artificial Sequence: Synthetic oligonucleotide
  Antisense strand to SEQ ID NO: 133760
uaccuuaccgggaagagaa

SEQ ID NO: 133762 - RNA, 19 nt, Artificial Sequence
  Description of Artificial Sequence: Synthetic oligonucleotide
  Sense strand starting at position 3779 of SEQ ID NO: 1718
gugggugguagaugauaga

SEQ ID NO: 133763 - RNA, 19 nt, Artificial Sequence
  Description of Artificial Sequence: Synthetic oligonucleotide
  Antisense strand to SEQ ID NO: 133762
ucuaucaucuaccacccac

SEQ ID NO: 133764 - RNA, 19 nt, Artificial Sequence
  Description of Artificial Sequence: Synthetic oligonucleotide
  Sense strand starting at position 3777 of SEQ ID NO: 1718
uggugggugguagaugaua

SEQ ID NO: 133765 - RNA, 19 nt, Artificial Sequence
  Description of Artificial Sequence: Synthetic oligonucleotide
  Antisense strand to SEQ ID NO: 133764
uaucaucuaccacccacca

SEQ ID NO: 133766 - RNA, 19 nt, Artificial Sequence
  Description of Artificial Sequence: Synthetic oligonucleotide
  Sense strand starting at position 3749 of SEQ ID NO: 1718
acgccagauuugcuuguuu

SEQ ID NO: 133767 - RNA, 19 nt, Artificial Sequence
  Description of Artificial Sequence: Synthetic oligonucleotide
  Antisense strand to SEQ ID NO: 133766
aaacaagcaaaucuggcgu

SEQ ID NO: 133768 - RNA, 19 nt, Artificial Sequence
  Description of Artificial Sequence: Synthetic oligonucleotide
  Sense strand starting at position 3621 of SEQ ID NO: 1718
gaggucuugcuggaagaca

SEQ ID NO: 133769 - RNA, 19 nt, Artificial Sequence
  Description of Artificial Sequence: Synthetic oligonucleotide
  Antisense strand to SEQ ID NO: 133768
ugucuuccagcaagaccuc

SEQ ID NO: 133770 - RNA, 19 nt, Artificial Sequence
  Description of Artificial Sequence: Synthetic oligonucleotide
  Sense strand starting at position 3620 of SEQ ID NO: 1718
ugaggucuugcuggaagac

SEQ ID NO: 133771 - RNA, 19 nt, Artificial Sequence
  Description of Artificial Sequence: Synthetic oligonucleotide
  Antisense strand to SEQ ID NO: 133770
gucuuccagcaagaccuca

SEQ ID NO: 133772 - RNA, 19 nt, Artificial Sequence
  Description of Artificial Sequence: Synthetic oligonucleotide
  Sense strand starting at position 3618 of SEQ ID NO: 1718
ggugaggucuugcuggaag

SEQ ID NO: 133773 - RNA, 19 nt, Artificial Sequence
  Description of Artificial Sequence: Synthetic oligonucleotide
  Antisense strand to SEQ ID NO: 133772
cuuccagcaagaccucacc

SEQ ID NO: 133774 - RNA, 19 nt, Artificial Sequence
  Description of Artificial Sequence: Synthetic oligonucleotide
  Sense strand starting at position 3512 of SEQ ID NO: 1718
gauugcgaugaaugguaau

SEQ ID NO: 133775 - RNA, 19 nt, Artificial Sequence
  Description of Artificial Sequence: Synthetic oligonucleotide
  Antisense strand to SEQ ID NO: 133774
auuaccauucaucgcaauc

SEQ ID NO: 133776 - RNA, 19 nt, Artificial Sequence
  Description of Artificial Sequence: Synthetic oligonucleotide
  Sense strand starting at position 3509 of SEQ ID NO: 1718
agggauugcgaugaauggu

SEQ ID NO: 133777 - RNA, 19 nt, Artificial Sequence
  Description of Artificial Sequence: Synthetic oligonucleotide
  Antisense strand to SEQ ID NO: 133776
accauucaucgcaaucccu

SEQ ID NO: 133778 - RNA, 19 nt, Artificial Sequence
  Description of Artificial Sequence: Synthetic oligonucleotide
  Sense strand starting at position 3508 of SEQ ID NO: 1718
aagggauugcgaugaaugg

SEQ ID NO: 133779 - RNA, 19 nt, Artificial Sequence
  Description of Artificial Sequence: Synthetic oligonucleotide
  Antisense strand to SEQ ID NO: 133778
ccauucaucgcaaucccuu

SEQ ID NO: 133780 - RNA, 19 nt, Artificial Sequence
  Description of Artificial Sequence: Synthetic oligonucleotide
  Sense strand starting at position 3476 of SEQ ID NO: 1718
uuuauaaacugggaagaua

SEQ ID NO: 133781 - RNA, 19 nt, Artificial Sequence
  Description of Artificial Sequence: Synthetic oligonucleotide
  Antisense strand to SEQ ID NO: 133780
uaucuucccaguuuauaaa

SEQ ID NO: 133782 - RNA, 19 nt, Artificial Sequence
  Description of Artificial Sequence: Synthetic oligonucleotide
  Sense strand starting at position 3466 of SEQ ID NO: 1718
gugagagcacuuuauaaac

SEQ ID NO: 133783 - RNA, 19 nt, Artificial Sequence
  Description of Artificial Sequence: Synthetic oligonucleotide
  Antisense strand to SEQ ID NO: 133782
guuuauaaagugcucucac

SEQ ID NO: 133784 - RNA, 19 nt, Artificial Sequence
  Description of Artificial Sequence: Synthetic oligonucleotide
  Sense strand starting at position 3191 of SEQ ID NO: 1718
ccagcugacuacuuagaaa

SEQ ID NO: 133785 - RNA, 19 nt, Artificial Sequence
  Description of Artificial Sequence: Synthetic oligonucleotide
  Antisense strand to SEQ ID NO: 133784
uuucuaaguagucagcugg

SEQ ID NO: 133786 - RNA, 19 nt, Artificial Sequence
  Description of Artificial Sequence: Synthetic oligonucleotide
  Sense strand starting at position 2832 of SEQ ID NO: 1718
guaaguagaugcccaucaa

SEQ ID NO: 133787 - RNA, 19 nt, Artificial Sequence
  Description of Artificial Sequence: Synthetic oligonucleotide
  Antisense strand to SEQ ID NO: 133786
uugaugggcaucuacuuac

SEQ ID NO: 133788 - RNA, 19 nt, Artificial Sequence
  Description of Artificial Sequence: Synthetic oligonucleotide
  Sense strand starting at position 2687 of SEQ ID NO: 1718
cuguguggucaucacacaa

SEQ ID NO: 133789 - RNA, 19 nt, Artificial Sequence
  Description of Artificial Sequence: Synthetic oligonucleotide
  Antisense strand to SEQ ID NO: 133788
uugugugaugaccacacag

SEQ ID NO: 133790 - RNA, 19 nt, Artificial Sequence
  Description of Artificial Sequence: Synthetic oligonucleotide
  Sense strand starting at position 2620 of SEQ ID NO: 1718
agcucauguggacaaugua

SEQ ID NO: 133791 - RNA, 19 nt, Artificial Sequence
  Description of Artificial Sequence: Synthetic oligonucleotide
  Antisense strand to SEQ ID NO: 133790
uacauuguccacaugagcu

SEQ ID NO: 133792 - RNA, 19 nt, Artificial Sequence
  Description of Artificial Sequence: Synthetic oligonucleotide
  Sense strand starting at position 2556 of SEQ ID NO: 1718
ugaguugcacagcaaaguu

SEQ ID NO: 133793 - RNA, 19 nt, Artificial Sequence
  Description of Artificial Sequence: Synthetic oligonucleotide
  Antisense strand to SEQ ID NO: 133792
aacuuugcugugcaacuca

SEQ ID NO: 133794 - RNA, 19 nt, Artificial Sequence
  Description of Artificial Sequence: Synthetic oligonucleotide
  Sense strand starting at position 2553 of SEQ ID NO: 1718
gccugaguugcacagcaaa

SEQ ID NO: 133795 - RNA, 19 nt, Artificial Sequence
  Description of Artificial Sequence: Synthetic oligonucleotide
  Antisense strand to SEQ ID NO: 133794
uuugcugugcaacucaggc

SEQ ID NO: 133796 - RNA, 19 nt, Artificial Sequence
  Description of Artificial Sequence: Synthetic oligonucleotide
  Sense strand starting at position 2544 of SEQ ID NO: 1718
agaagucuggccugaguug

SEQ ID NO: 133797 - RNA, 19 nt, Artificial Sequence
  Description of Artificial Sequence: Synthetic oligonucleotide
  Antisense strand to SEQ ID NO: 133796
caacucaggccagacuucu

SEQ ID NO: 133798 - RNA, 19 nt, Artificial Sequence
  Description of Artificial Sequence: Synthetic oligonucleotide
  Sense strand starting at position 2542 of SEQ ID NO: 1718
ggagaagucuggccugagu

SEQ ID NO: 133799 - RNA, 19 nt, Artificial Sequence
  Description of Artificial Sequence: Synthetic oligonucleotide
  Antisense strand to SEQ ID NO: 133798
acucaggccagacuucucc

SEQ ID NO: 133800 - RNA, 19 nt, Artificial Sequence
  Description of Artificial Sequence: Synthetic oligonucleotide
  Sense strand starting at position 2493 of SEQ ID NO: 1718
aggagauaacuucgguuug

SEQ ID NO: 133801 - RNA, 19 nt, Artificial Sequence
  Description of Artificial Sequence: Synthetic oligonucleotide
  Antisense strand to SEQ ID NO: 133800
caaaccgaaguuaucuccu

SEQ ID NO: 133802 - RNA, 19 nt, Artificial Sequence
  Description of Artificial Sequence: Synthetic oligonucleotide
  Sense strand starting at position 2445 of SEQ ID NO: 1718
uuaucuucuccaggagguu

SEQ ID NO: 133803 - RNA, 19 nt, Artificial Sequence
  Description of Artificial Sequence: Synthetic oligonucleotide
  Antisense strand to SEQ ID NO: 133802
aaccuccuggagaagauaa

SEQ ID NO: 133804 - RNA, 19 nt, Artificial Sequence
  Description of Artificial Sequence: Synthetic oligonucleotide
  Sense strand starting at position 2442 of SEQ ID NO: 1718
aaguuaucuucuccaggag

SEQ ID NO: 133805 - RNA, 19 nt, Artificial Sequence
  Description of Artificial Sequence: Synthetic oligonucleotide
  Antisense strand to SEQ ID NO: 133804
cuccuggagaagauaacuu

SEQ ID NO: 133806 - RNA, 19 nt, Artificial Sequence
  Description of Artificial Sequence: Synthetic oligonucleotide
  Sense strand starting at position 2429 of SEQ ID NO: 1718
acagucuuucccuaaguua

SEQ ID NO: 133807 - RNA, 19 nt, Artificial Sequence
  Description of Artificial Sequence: Synthetic oligonucleotide
  Antisense strand to SEQ ID NO: 133806
uaacuuagggaaagacugu

SEQ ID NO: 133808 - RNA, 19 nt, Artificial Sequence
  Description of Artificial Sequence: Synthetic oligonucleotide
  Sense strand starting at position 2426 of SEQ ID NO: 1718
gugacagucuuucccuaag

SEQ ID NO: 133809 - RNA, 19 nt, Artificial Sequence
  Description of Artificial Sequence: Synthetic oligonucleotide
  Antisense strand to SEQ ID NO: 133808
cuuagggaaagacugucac

SEQ ID NO: 133810 - RNA, 19 nt, Artificial Sequence
  Description of Artificial Sequence: Synthetic oligonucleotide
  Sense strand starting at position 2365 of SEQ ID NO: 1718
cguugcucgguaguguuaa

SEQ ID NO: 133811 - RNA, 19 nt, Artificial Sequence
  Description of Artificial Sequence: Synthetic oligonucleotide
  Antisense strand to SEQ ID NO: 133810
uuaacacuaccgagcaacg

SEQ ID NO: 133812 - RNA, 19 nt, Artificial Sequence
  Description of Artificial Sequence: Synthetic oligonucleotide
  Sense strand starting at position 2224 of SEQ ID NO: 1718
uuugacccauguuuggaaa

SEQ ID NO: 133813 - RNA, 19 nt, Artificial Sequence
  Description of Artificial Sequence: Synthetic oligonucleotide
  Antisense strand to SEQ ID NO: 133812
uuuccaaacaugggucaaa

SEQ ID NO: 133814 - RNA, 19 nt, Artificial Sequence
  Description of Artificial Sequence: Synthetic oligonucleotide
  Sense strand starting at position 2219 of SEQ ID NO: 1718
gguuguuugacccauguuu

SEQ ID NO: 133815 - RNA, 19 nt, Artificial Sequence
  Description of Artificial Sequence: Synthetic oligonucleotide
  Antisense strand to SEQ ID NO: 133814
aaacaugggucaaacaacc

SEQ ID NO: 133816 - RNA, 19 nt, Artificial Sequence
  Description of Artificial Sequence: Synthetic oligonucleotide
  Sense strand starting at position 1771 of SEQ ID NO: 1718
augaaagauucuucccagu

SEQ ID NO: 133817 - RNA, 19 nt, Artificial Sequence
  Description of Artificial Sequence: Synthetic oligonucleotide
  Antisense strand to SEQ ID NO: 133816
acugggaagaaucuuucau

SEQ ID NO: 133818 - RNA, 19 nt, Artificial Sequence
  Description of Artificial Sequence: Synthetic oligonucleotide
  Sense strand starting at position 1650 of SEQ ID NO: 1718
gaaagaaguuaggaagacu

SEQ ID NO: 133819 - RNA, 19 nt, Artificial Sequence
  Description of Artificial Sequence: Synthetic oligonucleotide
  Antisense strand to SEQ ID NO: 133818
agucuuccuaacuucuuuc

SEQ ID NO: 133820 - RNA, 19 nt, Artificial Sequence
  Description of Artificial Sequence: Synthetic oligonucleotide
  Sense strand starting at position 1447 of SEQ ID NO: 1718
uuccacaaugugugacaau

SEQ ID NO: 133821 - RNA, 19 nt, Artificial Sequence
  Description of Artificial Sequence: Synthetic oligonucleotide
  Antisense strand to SEQ ID NO: 133820
auugucacacauuguggaa

SEQ ID NO: 133822 - RNA, 19 nt, Artificial Sequence
  Description of Artificial Sequence: Synthetic oligonucleotide
  Sense strand starting at position 1443 of SEQ ID NO: 1718
ugacuuccacaauguguga

SEQ ID NO: 133823 - RNA, 19 nt, Artificial Sequence
  Description of Artificial Sequence: Synthetic oligonucleotide
  Antisense strand to SEQ ID NO: 133822
ucacacauuguggaaguca

SEQ ID NO: 133824 - RNA, 19 nt, Artificial Sequence
  Description of Artificial Sequence: Synthetic oligonucleotide
  Sense strand starting at position 1440 of SEQ ID NO: 1718
gugugacuuccacaaugug

SEQ ID NO: 133825 - RNA, 19 nt, Artificial Sequence
  Description of Artificial Sequence: Synthetic oligonucleotide
  Antisense strand to SEQ ID NO: 133824
cacauuguggaagucacac

SEQ ID NO: 133826 - RNA, 19 nt, Artificial Sequence
  Description of Artificial Sequence: Synthetic oligonucleotide
  Sense strand starting at position 1275 of SEQ ID NO: 1718
ggaacaugugugcaugcau

SEQ ID NO: 133827 - RNA, 19 nt, Artificial Sequence
  Description of Artificial Sequence: Synthetic oligonucleotide
  Antisense strand to SEQ ID NO: 133826
augcaugcacacauguucc

SEQ ID NO: 133828 - RNA, 19 nt, Artificial Sequence
  Description of Artificial Sequence: Synthetic oligonucleotide
  Sense strand starting at position 1191 of SEQ ID NO: 1718
cugccaucucagugggaaa

SEQ ID NO: 133829 - RNA, 19 nt, Artificial Sequence
  Description of Artificial Sequence: Synthetic oligonucleotide
  Antisense strand to SEQ ID NO: 133828
uuucccacugagauggcag

SEQ ID NO: 133830 - RNA, 19 nt, Artificial Sequence
  Description of Artificial Sequence: Synthetic oligonucleotide
  Sense strand starting at position 1159 of SEQ ID NO: 1718
cuggacuugggaugcaaga

SEQ ID NO: 133831 - RNA, 19 nt, Artificial Sequence
  Description of Artificial Sequence: Synthetic oligonucleotide
  Antisense strand to SEQ ID NO: 133830
ucuugcaucccaaguccag

SEQ ID NO: 133832 - RNA, 19 nt, Artificial Sequence
  Description of Artificial Sequence: Synthetic oligonucleotide
  Sense strand starting at position 586 of SEQ ID NO: 1718
agagccgacaucuguauuu

SEQ ID NO: 133833 - RNA, 19 nt, Artificial Sequence
  Description of Artificial Sequence: Synthetic oligonucleotide
  Antisense strand to SEQ ID NO: 133832
aaauacagaugucggcucu

SEQ ID NO: 133834 - RNA, 19 nt, Artificial Sequence
  Description of Artificial Sequence: Synthetic oligonucleotide
  Sense strand starting at position 549 of SEQ ID NO: 1718
caagauuccugggucucga

SEQ ID NO: 133835 - RNA, 19 nt, Artificial Sequence
  Description of Artificial Sequence: Synthetic oligonucleotide
  Antisense strand to SEQ ID NO: 133834
ucgagacccaggaaucuug

SEQ ID NO: 133836 - RNA, 19 nt, Artificial Sequence
  Description of Artificial Sequence: Synthetic oligonucleotide
  Sense strand starting at position 280 of SEQ ID NO: 1718
acuuucuuacuggaauguu

SEQ ID NO: 133837 - RNA, 19 nt, Artificial Sequence
  Description of Artificial Sequence: Synthetic oligonucleotide
  Antisense strand to SEQ ID NO: 133836
aacauuccaguaagaaagu

SEQ ID NO: 133838 - RNA, 19 nt, Artificial Sequence
  Description of Artificial Sequence: Synthetic oligonucleotide
  Sense strand starting at position 277 of SEQ ID NO: 1718
ggaacuuucuuacuggaau

SEQ ID NO: 133839 - RNA, 19 nt, Artificial Sequence
  Description of Artificial Sequence: Synthetic oligonucleotide
  Antisense strand to SEQ ID NO: 133838
auuccaguaagaaaguucc

SEQ ID NO: 133840 - RNA, 19 nt, Artificial Sequence
  Description of Artificial Sequence: Synthetic oligonucleotide
  Sense strand starting at position 119 of SEQ ID NO: 1718
cagcucacccucugugaga

SEQ ID NO: 133841 - RNA, 19 nt, Artificial Sequence
  Description of Artificial Sequence: Synthetic oligonucleotide
  Antisense strand to SEQ ID NO: 133840
ucucacagagggugagcug

SEQ ID NO: 133842 - RNA, 19 nt, Artificial Sequence
  Description of Artificial Sequence: Synthetic oligonucleotide
  Sense strand starting at position 3966 of SEQ ID NO: 1719
guacauuucugcccauggu

SEQ ID NO: 133843 - RNA, 19 nt, Artificial Sequence
  Description of Artificial Sequence: Synthetic oligonucleotide
  Antisense strand to SEQ ID NO: 133842
accaugggcagaaauguac

SEQ ID NO: 133844 - RNA, 19 nt, Artificial Sequence
  Description of Artificial Sequence: Synthetic oligonucleotide
  Sense strand starting at position 3945 of SEQ ID NO: 1719
gucuacguagaccaauaau

SEQ ID NO: 133845 - RNA, 19 nt, Artificial Sequence
  Description of Artificial Sequence: Synthetic oligonucleotide
  Antisense strand to SEQ ID NO: 133844
auuauuggucuacguagac

SEQ ID NO: 133846 - RNA, 19 nt, Artificial Sequence
  Description of Artificial Sequence: Synthetic oligonucleotide
  Sense strand starting at position 3935 of SEQ ID NO: 1719
aaauuugucugucuacgua

SEQ ID NO: 133847 - RNA, 19 nt, Artificial Sequence
  Description of Artificial Sequence: Synthetic oligonucleotide
  Antisense strand to SEQ ID NO: 133846
uacguagacagacaaauuu

SEQ ID NO: 133848 - RNA, 19 nt, Artificial Sequence
  Description of Artificial Sequence: Synthetic oligonucleotide
  Sense strand starting at position 3805 of SEQ ID NO: 1719
uuuagcucugguuauauau

SEQ ID NO: 133849 - RNA, 19 nt, Artificial Sequence
  Description of Artificial Sequence: Synthetic oligonucleotide
  Antisense strand to SEQ ID NO: 133848
auauauaaccagagcuaaa

SEQ ID NO: 133850 - RNA, 19 nt, Artificial Sequence
  Description of Artificial Sequence: Synthetic oligonucleotide
  Sense strand starting at position 3770 of SEQ ID NO: 1719
gggaacuacuucucuuucu

SEQ ID NO: 133851 - RNA, 19 nt, Artificial Sequence
  Description of Artificial Sequence: Synthetic oligonucleotide
  Antisense strand to SEQ ID NO: 133850
agaaagagaaguaguuccc

SEQ ID NO: 133852 - RNA, 19 nt, Artificial Sequence
  Description of Artificial Sequence: Synthetic oligonucleotide
  Sense strand starting at position 3626 of SEQ ID NO: 1719
auacauagguuugugagau

SEQ ID NO: 133853 - RNA, 19 nt, Artificial Sequence
  Description of Artificial Sequence: Synthetic oligonucleotide
  Antisense strand to SEQ ID NO: 133852
aucucacaaaccuauguau

SEQ ID NO: 133854 - RNA, 19 nt, Artificial Sequence
  Description of Artificial Sequence: Synthetic oligonucleotide
  Sense strand starting at position 3625 of SEQ ID NO: 1719
uauacauagguuugugaga

SEQ ID NO: 133855 - RNA, 19 nt, Artificial Sequence
  Description of Artificial Sequence: Synthetic oligonucleotide
  Antisense strand to SEQ ID NO: 133854
ucucacaaaccuauguaua

SEQ ID NO: 133856 - RNA, 19 nt, Artificial Sequence
  Description of Artificial Sequence: Synthetic oligonucleotide
  Sense strand starting at position 3455 of SEQ ID NO: 1719
gugugacccauccaaggau

SEQ ID NO: 133857 - RNA, 19 nt, Artificial Sequence
  Description of Artificial Sequence: Synthetic oligonucleotide
  Antisense strand to SEQ ID NO: 133856
auccuuggaugggucacac

SEQ ID NO: 133858 - RNA, 19 nt, Artificial Sequence
  Description of Artificial Sequence: Synthetic oligonucleotide
  Sense strand starting at position 2596 of SEQ ID NO: 1719
agauaagcauguuuggaaa

SEQ ID NO: 133859 - RNA, 19 nt, Artificial Sequence
  Description of Artificial Sequence: Synthetic oligonucleotide
  Antisense strand to SEQ ID NO: 133858
uuuccaaacaugcuuaucu

SEQ ID NO: 133860 - RNA, 19 nt, Artificial Sequence
  Description of Artificial Sequence: Synthetic oligonucleotide
  Sense strand starting at position 2389 of SEQ ID NO: 1719
uaguguuagcuuguggcau

SEQ ID NO: 133861 - RNA, 19 nt, Artificial Sequence
  Description of Artificial Sequence: Synthetic oligonucleotide
  Antisense strand to SEQ ID NO: 133860
augccacaagcuaacacua

SEQ ID NO: 133862 - RNA, 19 nt, Artificial Sequence
  Description of Artificial Sequence: Synthetic oligonucleotide
  Sense strand starting at position 2367 of SEQ ID NO: 1719
aaagguagcuuugaaauuu

SEQ ID NO: 133863 - RNA, 19 nt, Artificial Sequence
  Description of Artificial Sequence: Synthetic oligonucleotide
  Antisense strand to SEQ ID NO: 133862
aaauuucaaagcuaccuuu

SEQ ID NO: 133864 - RNA, 19 nt, Artificial Sequence
  Description of Artificial Sequence: Synthetic oligonucleotide
  Sense strand starting at position 2321 of SEQ ID NO: 1719
acauacugguaucauuuau

SEQ ID NO: 133865 - RNA, 19 nt, Artificial Sequence
  Description of Artificial Sequence: Synthetic oligonucleotide
  Antisense strand to SEQ ID NO: 133864
auaaaugauaccaguaugu

SEQ ID NO: 133866 - RNA, 19 nt, Artificial Sequence
  Description of Artificial Sequence: Synthetic oligonucleotide
  Sense strand starting at position 2277 of SEQ ID NO: 1719
gcagacuuugacuaguaua

SEQ ID NO: 133867 - RNA, 19 nt, Artificial Sequence
  Description of Artificial Sequence: Synthetic oligonucleotide
  Antisense strand to SEQ ID NO: 133866
uauacuagucaaagucugc

SEQ ID NO: 133868 - RNA, 19 nt, Artificial Sequence
  Description of Artificial Sequence: Synthetic oligonucleotide
  Sense strand starting at position 2276 of SEQ ID NO: 1719
ggcagacuuugacuaguau

SEQ ID NO: 133869 - RNA, 19 nt, Artificial Sequence
  Description of Artificial Sequence: Synthetic oligonucleotide
  Antisense strand to SEQ ID NO: 133868
auacuagucaaagucugcc

SEQ ID NO: 133870 - RNA, 19 nt, Artificial Sequence
  Description of Artificial Sequence: Synthetic oligonucleotide
  Sense strand starting at position 2251 of SEQ ID NO: 1719
uuguccugagaugguaaau

SEQ ID NO: 133871 - RNA, 19 nt, Artificial Sequence
  Description of Artificial Sequence: Synthetic oligonucleotide
  Antisense strand to SEQ ID NO: 133870
auuuaccaucucaggacaa

SEQ ID NO: 133872 - RNA, 19 nt, Artificial Sequence
  Description of Artificial Sequence: Synthetic oligonucleotide
  Sense strand starting at position 2250 of SEQ ID NO: 1719
auuguccugagaugguaaa

SEQ ID NO: 133873 - RNA, 19 nt, Artificial Sequence
  Description of Artificial Sequence: Synthetic oligonucleotide
  Antisense strand to SEQ ID NO: 133872
uuuaccaucucaggacaau

SEQ ID NO: 133874 - RNA, 19 nt, Artificial Sequence
  Description of Artificial Sequence: Synthetic oligonucleotide
  Sense strand starting at position 2243 of SEQ ID NO: 1719
ugaacaaauuguccugaga

SEQ ID NO: 133875 - RNA, 19 nt, Artificial Sequence
  Description of Artificial Sequence: Synthetic oligonucleotide
  Antisense strand to SEQ ID NO: 133874
ucucaggacaauuuguuca

SEQ ID NO: 133876 - RNA, 19 nt, Artificial Sequence
  Description of Artificial Sequence: Synthetic oligonucleotide
  Sense strand starting at position 2204 of SEQ ID NO: 1719
auguauuggccagagcaca

SEQ ID NO: 133877 - RNA, 19 nt, Artificial Sequence
  Description of Artificial Sequence: Synthetic oligonucleotide
  Antisense strand to SEQ ID NO: 133876
ugugcucuggccaauacau

SEQ ID NO: 133878 - RNA, 19 nt, Artificial Sequence
  Description of Artificial Sequence: Synthetic oligonucleotide
  Sense strand starting at position 2202 of SEQ ID NO: 1719
agauguauuggccagagca

SEQ ID NO: 133879 - RNA, 19 nt, Artificial Sequence
  Description of Artificial Sequence: Synthetic oligonucleotide
  Antisense strand to SEQ ID NO: 133878
ugcucuggccaauacaucu

SEQ ID NO: 133880 - RNA, 19 nt, Artificial Sequence
  Description of Artificial Sequence: Synthetic oligonucleotide
  Sense strand starting at position 2199 of SEQ ID NO: 1719
uuuagauguauuggccaga

SEQ ID NO: 133881 - RNA, 19 nt, Artificial Sequence
  Description of Artificial Sequence: Synthetic oligonucleotide
  Antisense strand to SEQ ID NO: 133880
ucuggccaauacaucuaaa

SEQ ID NO: 133882 - RNA, 19 nt, Artificial Sequence
  Description of Artificial Sequence: Synthetic oligonucleotide
  Sense strand starting at position 2033 of SEQ ID NO: 1719
gcaaauacagugggaugaa

SEQ ID NO: 133883 - RNA, 19 nt, Artificial Sequence
  Description of Artificial Sequence: Synthetic oligonucleotide
  Antisense strand to SEQ ID NO: 133882
uucaucccacuguauuugc

SEQ ID NO: 133884 - RNA, 19 nt, Artificial Sequence
  Description of Artificial Sequence: Synthetic oligonucleotide
  Sense strand starting at position 2014 of SEQ ID NO: 1719
gggagucuuauauaucagu

SEQ ID NO: 133885 - RNA, 19 nt, Artificial Sequence
  Description of Artificial Sequence: Synthetic oligonucleotide
  Antisense strand to SEQ ID NO: 133884
acugauauauaagacuccc

SEQ ID NO: 133886 - RNA, 19 nt, Artificial Sequence
  Description of Artificial Sequence: Synthetic oligonucleotide
  Sense strand starting at position 1959 of SEQ ID NO: 1719
gcaaguuaacuuugacacu

SEQ ID NO: 133887 - RNA, 19 nt, Artificial Sequence
  Description of Artificial Sequence: Synthetic oligonucleotide
  Antisense strand to SEQ ID NO: 133886
agugucaaaguuaacuugc

SEQ ID NO: 133888 - RNA, 19 nt, Artificial Sequence
  Description of Artificial Sequence: Synthetic oligonucleotide
  Sense strand starting at position 1857 of SEQ ID NO: 1719
agguguauugcauaaacau

SEQ ID NO: 133889 - RNA, 19 nt, Artificial Sequence
  Description of Artificial Sequence: Synthetic oligonucleotide
  Antisense strand to SEQ ID NO: 133888
auguuuaugcaauacaccu

SEQ ID NO: 133890 - RNA, 19 nt, Artificial Sequence
  Description of Artificial Sequence: Synthetic oligonucleotide
  Sense strand starting at position 1800 of SEQ ID NO: 1719
uggaguuacuguuccaacu

SEQ ID NO: 133891 - RNA, 19 nt, Artificial Sequence
  Description of Artificial Sequence: Synthetic oligonucleotide
  Antisense strand to SEQ ID NO: 133890
aguuggaacaguaacucca

SEQ ID NO: 133892 - RNA, 19 nt, Artificial Sequence
  Description of Artificial Sequence: Synthetic oligonucleotide
  Sense strand starting at position 1794 of SEQ ID NO: 1719
gcaucauggaguuacuguu

SEQ ID NO: 133893 - RNA, 19 nt, Artificial Sequence
  Description of Artificial Sequence: Synthetic oligonucleotide
  Antisense strand to SEQ ID NO: 133892
aacaguaacuccaugaugc

SEQ ID NO: 133894 - RNA, 19 nt, Artificial Sequence
  Description of Artificial Sequence: Synthetic oligonucleotide
  Sense strand starting at position 1765 of SEQ ID NO: 1719
accugugucacagaaaugu

SEQ ID NO: 133895 - RNA, 19 nt, Artificial Sequence
  Description of Artificial Sequence: Synthetic oligonucleotide
  Antisense strand to SEQ ID NO: 133894
acauuucugugacacaggu

SEQ ID NO: 133896 - RNA, 19 nt, Artificial Sequence
  Description of Artificial Sequence: Synthetic oligonucleotide
  Sense strand starting at position 1311 of SEQ ID NO: 1719
ugguuaagcuaccuugaga

SEQ ID NO: 133897 - RNA, 19 nt, Artificial Sequence
  Description of Artificial Sequence: Synthetic oligonucleotide
  Antisense strand to SEQ ID NO: 133896
ucucaagguagcuuaacca

SEQ ID NO: 133898 - RNA, 19 nt, Artificial Sequence
  Description of Artificial Sequence: Synthetic oligonucleotide
  Sense strand starting at position 1197 of SEQ ID NO: 1719
gguuguacaguauauuaaa

SEQ ID NO: 133899 - RNA, 19 nt, Artificial Sequence
  Description of Artificial Sequence: Synthetic oligonucleotide
  Antisense strand to SEQ ID NO: 133898
uuuaauauacuguacaacc

SEQ ID NO: 133900 - RNA, 19 nt, Artificial Sequence
  Description of Artificial Sequence: Synthetic oligonucleotide
  Sense strand starting at position 1195 of SEQ ID NO: 1719
aagguuguacaguauauua

SEQ ID NO: 133901 - RNA, 19 nt, Artificial Sequence
  Description of Artificial Sequence: Synthetic oligonucleotide
  Antisense strand to SEQ ID NO: 133900
uaauauacuguacaaccuu

SEQ ID NO: 133902 - RNA, 19 nt, Artificial Sequence
  Description of Artificial Sequence: Synthetic oligonucleotide
  Sense strand starting at position 882 of SEQ ID NO: 1719
gguaucuaugucuaaauga

SEQ ID NO: 133903 - RNA, 19 nt, Artificial Sequence
  Description of Artificial Sequence: Synthetic oligonucleotide
  Antisense strand to SEQ ID NO: 133902
ucauuuagacauagauacc

SEQ ID NO: 133904 - RNA, 19 nt, Artificial Sequence
  Description of Artificial Sequence: Synthetic oligonucleotide
  Sense strand starting at position 881 of SEQ ID NO: 1719
ugguaucuaugucuaaaug

SEQ ID NO: 133905 - RNA, 19 nt, Artificial Sequence
  Description of Artificial Sequence: Synthetic oligonucleotide
  Antisense strand to SEQ ID NO: 133904
cauuuagacauagauacca

SEQ ID NO: 133906 - RNA, 19 nt, Artificial Sequence
  Description of Artificial Sequence: Synthetic oligonucleotide
  Sense strand starting at position 800 of SEQ ID NO: 1719
gauaaauaguucuuguaag

SEQ ID NO: 133907 - RNA, 19 nt, Artificial Sequence
  Description of Artificial Sequence: Synthetic oligonucleotide
  Antisense strand to SEQ ID NO: 133906
cuuacaagaacuauuuauc

SEQ ID NO: 133908 - RNA, 19 nt, Artificial Sequence
  Description of Artificial Sequence: Synthetic oligonucleotide
  Sense strand starting at position 777 of SEQ ID NO: 1719
acaucuguauauguccaua

SEQ ID NO: 133909 - RNA, 19 nt, Artificial Sequence
  Description of Artificial Sequence: Synthetic oligonucleotide
  Antisense strand to SEQ ID NO: 133908
uauggacauauacagaugu

SEQ ID NO: 133910 - RNA, 19 nt, Artificial Sequence
  Description of Artificial Sequence: Synthetic oligonucleotide
  Sense strand starting at position 772 of SEQ ID NO: 1719
cagucacaucuguauaugu

SEQ ID NO: 133911 - RNA, 19 nt, Artificial Sequence
  Description of Artificial Sequence: Synthetic oligonucleotide
  Antisense strand to SEQ ID NO: 133910
acauauacagaugugacug

SEQ ID NO: 133912 - RNA, 19 nt, Artificial Sequence
  Description of Artificial Sequence: Synthetic oligonucleotide
  Sense strand starting at position 669 of SEQ ID NO: 1719
cugaauguacuuuaacagu

SEQ ID NO: 133913 - RNA, 19 nt, Artificial Sequence
  Description of Artificial Sequence: Synthetic oligonucleotide
  Antisense strand to SEQ ID NO: 133912
acuguuaaaguacauucag

SEQ ID NO: 133914 - RNA, 19 nt, Artificial Sequence
  Description of Artificial Sequence: Synthetic oligonucleotide
  Sense strand starting at position 483 of SEQ ID NO: 1719
ggaaauguuuacuuuagaa

SEQ ID NO: 133915 - RNA, 19 nt, Artificial Sequence
  Description of Artificial Sequence: Synthetic oligonucleotide
  Antisense strand to SEQ ID NO: 133914
uucuaaaguaaacauuucc

SEQ ID NO: 133916 - RNA, 19 nt, Artificial Sequence
  Description of Artificial Sequence: Synthetic oligonucleotide
  Sense strand starting at position 482 of SEQ ID NO: 1719
uggaaauguuuacuuuaga

SEQ ID NO: 133917 - RNA, 19 nt, Artificial Sequence
  Description of Artificial Sequence: Synthetic oligonucleotide
  Antisense strand to SEQ ID NO: 133916
ucuaaaguaaacauuucca

SEQ ID NO: 133918 - RNA, 19 nt, Artificial Sequence
  Description of Artificial Sequence: Synthetic oligonucleotide
  Sense strand starting at position 339 of SEQ ID NO: 1719
uggaguagucaucauucuu

SEQ ID NO: 133919 - RNA, 19 nt, Artificial Sequence
  Description of Artificial Sequence: Synthetic oligonucleotide
  Antisense strand to SEQ ID NO: 133918
aagaaugaugacuacucca

SEQ ID NO: 133920 - RNA, 19 nt, Artificial Sequence
  Description of Artificial Sequence: Synthetic oligonucleotide
  Sense strand starting at position 318 of SEQ ID NO: 1719
agccgaagggucuggagau

SEQ ID NO: 133921 - RNA, 19 nt, Artificial Sequence
  Description of Artificial Sequence: Synthetic oligonucleotide
  Antisense strand to SEQ ID NO: 133920
aucuccagacccuucggcu

SEQ ID NO: 133922 - RNA, 19 nt, Artificial Sequence
  Description of Artificial Sequence: Synthetic oligonucleotide
  Sense strand starting at position 3921 of SEQ ID NO: 1720
gaugauugcuuucuugaag

SEQ ID NO: 133923 - RNA, 19 nt, Artificial Sequence
  Description of Artificial Sequence: Synthetic oligonucleotide
  Antisense strand to SEQ ID NO: 133922
cuucaagaaagcaaucauc

SEQ ID NO: 133924 - RNA, 19 nt, Artificial Sequence
  Description of Artificial Sequence: Synthetic oligonucleotide
  Sense strand starting at position 3917 of SEQ ID NO: 1720
guuagaugauugcuuucuu

SEQ ID NO: 133925 - RNA, 19 nt, Artificial Sequence
  Description of Artificial Sequence: Synthetic oligonucleotide
  Antisense strand to SEQ ID NO: 133924
aagaaagcaaucaucuaac

SEQ ID NO: 133926 - RNA, 19 nt, Artificial Sequence
  Description of Artificial Sequence: Synthetic oligonucleotide
  Sense strand starting at position 3914 of SEQ ID NO: 1720
gaaguuagaugauugcuuu

SEQ ID NO: 133927 - RNA, 19 nt, Artificial Sequence
  Description of Artificial Sequence: Synthetic oligonucleotide
  Antisense strand to SEQ ID NO: 133926
aaagcaaucaucuaacuuc

SEQ ID NO: 133928 - RNA, 19 nt, Artificial Sequence
  Description of Artificial Sequence: Synthetic oligonucleotide
  Sense strand starting at position 3851 of SEQ ID NO: 1720
guaugagauguauaugucu

SEQ ID NO: 133929 - RNA, 19 nt, Artificial Sequence
  Description of Artificial Sequence: Synthetic oligonucleotide
  Antisense strand to SEQ ID NO: 133928
agacauauacaucucauac

SEQ ID NO: 133930 - RNA, 19 nt, Artificial Sequence
  Description of Artificial Sequence: Synthetic oligonucleotide
  Sense strand starting at position 3849 of SEQ ID NO: 1720
agguaugagauguauaugu

SEQ ID NO: 133931 - RNA, 19 nt, Artificial Sequence
  Description of Artificial Sequence: Synthetic oligonucleotide
  Antisense strand to SEQ ID NO: 133930
acauauacaucucauaccu

SEQ ID NO: 133932 - RNA, 19 nt, Artificial Sequence
  Description of Artificial Sequence: Synthetic oligonucleotide
  Sense strand starting at position 3847 of SEQ ID NO: 1720
ugagguaugagauguauau

SEQ ID NO: 133933 - RNA, 19 nt, Artificial Sequence
  Description of Artificial Sequence: Synthetic oligonucleotide
  Antisense strand to SEQ ID NO: 133932
auauacaucucauaccuca

SEQ ID NO: 133934 - RNA, 19 nt, Artificial Sequence
  Description of Artificial Sequence: Synthetic oligonucleotide
  Sense strand starting at position 3811 of SEQ ID NO: 1720
guagucaagugaguaagaa

SEQ ID NO: 133935 - RNA, 19 nt, Artificial Sequence
  Description of Artificial Sequence: Synthetic oligonucleotide
  Antisense strand to SEQ ID NO: 133934
uucuuacucacuugacuac

SEQ ID NO: 133936 - RNA, 19 nt, Artificial Sequence
  Description of Artificial Sequence: Synthetic oligonucleotide
  Sense strand starting at position 3808 of SEQ ID NO: 1720
ucaguagucaagugaguaa

SEQ ID NO: 133937 - RNA, 19 nt, Artificial Sequence
  Description of Artificial Sequence: Synthetic oligonucleotide
  Antisense strand to SEQ ID NO: 133936
uuacucacuugacuacuga

SEQ ID NO: 133938 - RNA, 19 nt, Artificial Sequence
  Description of Artificial Sequence: Synthetic oligonucleotide
  Sense strand starting at position 3708 of SEQ ID NO: 1720
ugacaaguaucaucuagga

SEQ ID NO: 133939 - RNA, 19 nt, Artificial Sequence
  Description of Artificial Sequence: Synthetic oligonucleotide
  Antisense strand to SEQ ID NO: 133938
uccuagaugauacuuguca

SEQ ID NO: 133940 - RNA, 19 nt, Artificial Sequence
  Description of Artificial Sequence: Synthetic oligonucleotide
  Sense strand starting at position 3697 of SEQ ID NO: 1720
aucuuucuugcugacaagu

SEQ ID NO: 133941 - RNA, 19 nt, Artificial Sequence
  Description of Artificial Sequence: Synthetic oligonucleotide
  Antisense strand to SEQ ID NO: 133940
acuugucagcaagaaagau

SEQ ID NO: 133942 - RNA, 19 nt, Artificial Sequence
  Description of Artificial Sequence: Synthetic oligonucleotide
  Sense strand starting at position 3692 of SEQ ID NO: 1720
agaucaucuuucuugcuga

SEQ ID NO: 133943 - RNA, 19 nt, Artificial Sequence
  Description of Artificial Sequence: Synthetic oligonucleotide
  Antisense strand to SEQ ID NO: 133942
ucagcaagaaagaugaucu

SEQ ID NO: 133944 - RNA, 19 nt, Artificial Sequence
  Description of Artificial Sequence: Synthetic oligonucleotide
  Sense strand starting at position 3611 of SEQ ID NO: 1720
acaaucugaugagagauga

SEQ ID NO: 133945 - RNA, 19 nt, Artificial Sequence
  Description of Artificial Sequence: Synthetic oligonucleotide
  Antisense strand to SEQ ID NO: 133944
ucaucucucaucagauugu

SEQ ID NO: 133946 - RNA, 19 nt, Artificial Sequence
  Description of Artificial Sequence: Synthetic oligonucleotide
  Sense strand starting at position 3485 of SEQ ID NO: 1720
cuugaacacuguuuauaug

SEQ ID NO: 133947 - RNA, 19 nt, Artificial Sequence
  Description of Artificial Sequence: Synthetic oligonucleotide
  Antisense strand to SEQ ID NO: 133946
cauauaaacaguguucaag

SEQ ID NO: 133948 - RNA, 19 nt, Artificial Sequence
  Description of Artificial Sequence: Synthetic oligonucleotide
  Sense strand starting at position 3436 of SEQ ID NO: 1720
acugcaugccaguagaguu

SEQ ID NO: 133949 - RNA, 19 nt, Artificial Sequence
  Description of Artificial Sequence: Synthetic oligonucleotide
  Antisense strand to SEQ ID NO: 133948
aacucuacuggcaugcagu

SEQ ID NO: 133950 - RNA, 19 nt, Artificial Sequence
  Description of Artificial Sequence: Synthetic oligonucleotide
  Sense strand starting at position 3179 of SEQ ID NO: 1720
ugucucauucuuuaauguu

SEQ ID NO: 133951 - RNA, 19 nt, Artificial Sequence
  Description of Artificial Sequence: Synthetic oligonucleotide
  Antisense strand to SEQ ID NO: 133950
aacauuaaagaaugagaca

SEQ ID NO: 133952 - RNA, 19 nt, Artificial Sequence
  Description of Artificial Sequence: Synthetic oligonucleotide
  Sense strand starting at position 3177 of SEQ ID NO: 1720
guugucucauucuuuaaug

SEQ ID NO: 133953 - RNA, 19 nt, Artificial Sequence
  Description of Artificial Sequence: Synthetic oligonucleotide
  Antisense strand to SEQ ID NO: 133952
cauuaaagaaugagacaac

SEQ ID NO: 133954 - RNA, 19 nt, Artificial Sequence
  Description of Artificial Sequence: Synthetic oligonucleotide
  Sense strand starting at position 3101 of SEQ ID NO: 1720
agguaauaaagcgauuauc

SEQ ID NO: 133955 - RNA, 19 nt, Artificial Sequence
  Description of Artificial Sequence: Synthetic oligonucleotide
  Antisense strand to SEQ ID NO: 133954
gauaaucgcuuuauuaccu

SEQ ID NO: 133956 - RNA, 19 nt, Artificial Sequence
  Description of Artificial Sequence: Synthetic oligonucleotide
  Sense strand starting at position 2943 of SEQ ID NO: 1720
ccaguauaaggucacauau

SEQ ID NO: 133957 - RNA, 19 nt, Artificial Sequence
  Description of Artificial Sequence: Synthetic oligonucleotide
  Antisense strand to SEQ ID NO: 133956
auaugugaccuuauacugg

SEQ ID NO: 133958 - RNA, 19 nt, Artificial Sequence
  Description of Artificial Sequence: Synthetic oligonucleotide
  Sense strand starting at position 2922 of SEQ ID NO: 1720
gaggaauugugaagggcga

SEQ ID NO: 133959 - RNA, 19 nt, Artificial Sequence
  Description of Artificial Sequence: Synthetic oligonucleotide
  Antisense strand to SEQ ID NO: 133958
ucgcccuucacaauuccuc

SEQ ID NO: 133960 - RNA, 19 nt, Artificial Sequence
  Description of Artificial Sequence: Synthetic oligonucleotide
  Sense strand starting at position 2910 of SEQ ID NO: 1720
acguaagcgacagaggaau

SEQ ID NO: 133961 - RNA, 19 nt, Artificial Sequence
  Description of Artificial Sequence: Synthetic oligonucleotide
  Antisense strand to SEQ ID NO: 133960
auuccucugucgcuuacgu

SEQ ID NO: 133962 - RNA, 19 nt, Artificial Sequence
  Description of Artificial Sequence: Synthetic oligonucleotide
  Sense strand starting at position 2835 of SEQ ID NO: 1720
gugauacagcuguacaaga

SEQ ID NO: 133963 - RNA, 19 nt, Artificial Sequence
  Description of Artificial Sequence: Synthetic oligonucleotide
  Antisense strand to SEQ ID NO: 133962
ucuuguacagcuguaucac

SEQ ID NO: 133964 - RNA, 19 nt, Artificial Sequence
  Description of Artificial Sequence: Synthetic oligonucleotide
  Sense strand starting at position 2822 of SEQ ID NO: 1720
auaguaccgaaaugugaua

SEQ ID NO: 133965 - RNA, 19 nt, Artificial Sequence
  Description of Artificial Sequence: Synthetic oligonucleotide
  Antisense strand to SEQ ID NO: 133964
uaucacauuucgguacuau

SEQ ID NO: 133966 - RNA, 19 nt, Artificial Sequence
  Description of Artificial Sequence: Synthetic oligonucleotide
  Sense strand starting at position 2749 of SEQ ID NO: 1720
cgguauuugcucgaguguu

SEQ ID NO: 133967 - RNA, 19 nt, Artificial Sequence
  Description of Artificial Sequence: Synthetic oligonucleotide
  Antisense strand to SEQ ID NO: 133966
aacacucgagcaaauaccg

SEQ ID NO: 133968 - RNA, 19 nt, Artificial Sequence
  Description of Artificial Sequence: Synthetic oligonucleotide
  Sense strand starting at position 2748 of SEQ ID NO: 1720
acgguauuugcucgagugu

SEQ ID NO: 133969 - RNA, 19 nt, Artificial Sequence
  Description of Artificial Sequence: Synthetic oligonucleotide
  Antisense strand to SEQ ID NO: 133968
acacucgagcaaauaccgu

SEQ ID NO: 133970 - RNA, 19 nt, Artificial Sequence
  Description of Artificial Sequence: Synthetic oligonucleotide
  Sense strand starting at position 2738 of SEQ ID NO: 1720
aaucucagucacgguauuu

SEQ ID NO: 133971 - RNA, 19 nt, Artificial Sequence
  Description of Artificial Sequence: Synthetic oligonucleotide
  Antisense strand to SEQ ID NO: 133970
aaauaccgugacugagauu

SEQ ID NO: 133972 - RNA, 19 nt, Artificial Sequence
  Description of Artificial Sequence: Synthetic oligonucleotide
  Sense strand starting at position 2664 of SEQ ID NO: 1720
uuguccuauagauggaaga

SEQ ID NO: 133973 - RNA, 19 nt, Artificial Sequence
  Description of Artificial Sequence: Synthetic oligonucleotide
  Antisense strand to SEQ ID NO: 133972
ucuuccaucuauaggacaa

SEQ ID NO: 133974 - RNA, 19 nt, Artificial Sequence
  Description of Artificial Sequence: Synthetic oligonucleotide
  Sense strand starting at position 1264 of SEQ ID NO: 1720
accauuucugugugaccuu

SEQ ID NO: 133975 - RNA, 19 nt, Artificial Sequence
  Description of Artificial Sequence: Synthetic oligonucleotide
  Antisense strand to SEQ ID NO: 133974
aaggucacacagaaauggu

SEQ ID NO: 133976 - RNA, 19 nt, Artificial Sequence
  Description of Artificial Sequence: Synthetic oligonucleotide
  Sense strand starting at position 1084 of SEQ ID NO: 1720
gcauuccagcguuaaacaa

SEQ ID NO: 133977 - RNA, 19 nt, Artificial Sequence
  Description of Artificial Sequence: Synthetic oligonucleotide
  Antisense strand to SEQ ID NO: 133976
uuguuuaacgcuggaaugc

SEQ ID NO: 133978 - RNA, 19 nt, Artificial Sequence
  Description of Artificial Sequence: Synthetic oligonucleotide
  Sense strand starting at position 1080 of SEQ ID NO: 1720
agcugcauuccagcguuaa

SEQ ID NO: 133979 - RNA, 19 nt, Artificial Sequence
  Description of Artificial Sequence: Synthetic oligonucleotide
  Antisense strand to SEQ ID NO: 133978
uuaacgcuggaaugcagcu

SEQ ID NO: 133980 - RNA, 19 nt, Artificial Sequence
  Description of Artificial Sequence: Synthetic oligonucleotide
  Sense strand starting at position 1001 of SEQ ID NO: 1720
cuagaagucuucccauagc

SEQ ID NO: 133981 - RNA, 19 nt, Artificial Sequence
  Description of Artificial Sequence: Synthetic oligonucleotide
  Antisense strand to SEQ ID NO: 133980
gcuaugggaagacuucuag

SEQ ID NO: 133982 - RNA, 19 nt, Artificial Sequence
  Description of Artificial Sequence: Synthetic oligonucleotide
  Sense strand starting at position 923 of SEQ ID NO: 1720
cagaauaugccuuagcagu

SEQ ID NO: 133983 - RNA, 19 nt, Artificial Sequence
  Description of Artificial Sequence: Synthetic oligonucleotide
  Antisense strand to SEQ ID NO: 133982
acugcuaaggcauauucug

SEQ ID NO: 133984 - RNA, 19 nt, Artificial Sequence
  Description of Artificial Sequence: Synthetic oligonucleotide
  Sense strand starting at position 921 of SEQ ID NO: 1720
agcagaauaugccuuagca

SEQ ID NO: 133985 - RNA, 19 nt, Artificial Sequence
  Description of Artificial Sequence: Synthetic oligonucleotide
  Antisense strand to SEQ ID NO: 133984
ugcuaaggcauauucugcu

SEQ ID NO: 133986 - RNA, 19 nt, Artificial Sequence
  Description of Artificial Sequence: Synthetic oligonucleotide
  Sense strand starting at position 892 of SEQ ID NO: 1720
gggauccuaucuccaugaa

SEQ ID NO: 133987 - RNA, 19 nt, Artificial Sequence
  Description of Artificial Sequence: Synthetic oligonucleotide
  Antisense strand to SEQ ID NO: 133986
uucauggagauaggauccc

SEQ ID NO: 133988 - RNA, 19 nt, Artificial Sequence
  Description of Artificial Sequence: Synthetic oligonucleotide
  Sense strand starting at position 828 of SEQ ID NO: 1720
cuaguuacuuaacucgaau

SEQ ID NO: 133989 - RNA, 19 nt, Artificial Sequence
  Description of Artificial Sequence: Synthetic oligonucleotide
  Antisense strand to SEQ ID NO: 133988
auucgaguuaaguaacuag

SEQ ID NO: 133990 - RNA, 19 nt, Artificial Sequence
  Description of Artificial Sequence: Synthetic oligonucleotide
  Sense strand starting at position 688 of SEQ ID NO: 1720
acuuauaauucuggauuug

SEQ ID NO: 133991 - RNA, 19 nt, Artificial Sequence
  Description of Artificial Sequence: Synthetic oligonucleotide
  Antisense strand to SEQ ID NO: 133990
caaauccagaauuauaagu

SEQ ID NO: 133992 - RNA, 19 nt, Artificial Sequence
  Description of Artificial Sequence: Synthetic oligonucleotide
  Sense strand starting at position 518 of SEQ ID NO: 1720
agcugauucuuaccaaagg

SEQ ID NO: 133993 - RNA, 19 nt, Artificial Sequence
  Description of Artificial Sequence: Synthetic oligonucleotide
  Antisense strand to SEQ ID NO: 133992
ccuuugguaagaaucagcu

SEQ ID NO: 133994 - RNA, 19 nt, Artificial Sequence
  Description of Artificial Sequence: Synthetic oligonucleotide
  Sense strand starting at position 515 of SEQ ID NO: 1720
aggagcugauucuuaccaa

SEQ ID NO: 133995 - RNA, 19 nt, Artificial Sequence
  Description of Artificial Sequence: Synthetic oligonucleotide
  Antisense strand to SEQ ID NO: 133994
uugguaagaaucagcuccu

SEQ ID NO: 133996 - RNA, 19 nt, Artificial Sequence
  Description of Artificial Sequence: Synthetic oligonucleotide
  Sense strand starting at position 427 of SEQ ID NO: 1720
ccucauugccuagaacagu

SEQ ID NO: 133997 - RNA, 19 nt, Artificial Sequence
  Description of Artificial Sequence: Synthetic oligonucleotide
  Antisense strand to SEQ ID NO: 133996
acuguucuaggcaaugagg

SEQ ID NO: 133998 - RNA, 19 nt, Artificial Sequence
  Description of Artificial Sequence: Synthetic oligonucleotide
  Sense strand starting at position 256 of SEQ ID NO: 1720
gucugaccaccuuauugaa

SEQ ID NO: 133999 - RNA, 19 nt, Artificial Sequence
  Description of Artificial Sequence: Synthetic oligonucleotide
  Antisense strand to SEQ ID NO: 133998
uucaauaagguggucagac

SEQ ID NO: 134000 - RNA, 19 nt, Artificial Sequence
  Description of Artificial Sequence: Synthetic oligonucleotide
  Sense strand starting at position 26 of SEQ ID NO: 1720
ugagcaacuguauaauguu

SEQ ID NO: 134001 - RNA, 19 nt, Artificial Sequence
  Description of Artificial Sequence: Synthetic oligonucleotide
  Antisense strand to SEQ ID NO: 134000
aacauuauacaguugcuca

SEQ ID NO: 134002 - RNA, 19 nt, Artificial Sequence
  Description of Artificial Sequence: Synthetic oligonucleotide
  Sense strand starting at position 286 of SEQ ID NO: 1721
ccaggcugugaugauguua

SEQ ID NO: 134003 - RNA, 19 nt, Artificial Sequence
  Description of Artificial Sequence: Synthetic oligonucleotide
  Antisense strand to SEQ ID NO: 134002
uaacaucaucacagccugg

SEQ ID NO: 134004 - RNA, 19 nt, Artificial Sequence
  Description of Artificial Sequence: Synthetic oligonucleotide
  Sense strand starting at position 412 of SEQ ID NO: 1721
augaaaugauaggaaacau

SEQ ID NO: 134005 - RNA, 19 nt, Artificial Sequence
  Description of Artificial Sequence: Synthetic oligonucleotide
  Antisense strand to SEQ ID NO: 134004
auguuuccuaucauuucau

SEQ ID NO: 134006 - RNA, 19 nt, Artificial Sequence
  Description of Artificial Sequence: Synthetic oligonucleotide
  Sense strand starting at position 479 of SEQ ID NO: 1721
gucagucuaccuggaggaa

SEQ ID NO: 134007 - RNA, 19 nt, Artificial Sequence
  Description of Artificial Sequence: Synthetic oligonucleotide
  Antisense strand to SEQ ID NO: 134006
uuccuccagguagacugac

SEQ ID NO: 134008 - RNA, 19 nt, Artificial Sequence
  Description of Artificial Sequence: Synthetic oligonucleotide
  Sense strand starting at position 482 of SEQ ID NO: 1721
agucuaccuggaggaauua

SEQ ID NO: 134009 - RNA, 19 nt, Artificial Sequence
  Description of Artificial Sequence: Synthetic oligonucleotide
  Antisense strand to SEQ ID NO: 134008
uaauuccuccagguagacu

SEQ ID NO: 134010 - RNA, 19 nt, Artificial Sequence
  Description of Artificial Sequence: Synthetic oligonucleotide
  Sense strand starting at position 602 of SEQ ID NO: 1721
uguucucuuccugaaaguc

SEQ ID NO: 134011 - RNA, 19 nt, Artificial Sequence
  Description of Artificial Sequence: Synthetic oligonucleotide
  Antisense strand to SEQ ID NO: 134010
gacuuucaggaagagaaca

SEQ ID NO: 134012 - RNA, 19 nt, Artificial Sequence
  Description of Artificial Sequence: Synthetic oligonucleotide
  Sense strand starting at position 610 of SEQ ID NO: 1721
uccugaaaguccuuggaau

SEQ ID NO: 134013 - RNA, 19 nt, Artificial Sequence
  Description of Artificial Sequence: Synthetic oligonucleotide
  Antisense strand to SEQ ID NO: 134012
auuccaaggacuuucagga

SEQ ID NO: 134014 - RNA, 19 nt, Artificial Sequence
  Description of Artificial Sequence: Synthetic oligonucleotide
  Sense strand starting at position 612 of SEQ ID NO: 1721
cugaaaguccuuggaauug

SEQ ID NO: 134015 - RNA, 19 nt, Artificial Sequence
  Description of Artificial Sequence: Synthetic oligonucleotide
  Antisense strand to SEQ ID NO: 134014
caauuccaaggacuuucag

SEQ ID NO: 134016 - RNA, 19 nt, Artificial Sequence
  Description of Artificial Sequence: Synthetic oligonucleotide
  Sense strand starting at position 702 of SEQ ID NO: 1721
gaguaaacaagucguggaa

SEQ ID NO: 134017 - RNA, 19 nt, Artificial Sequence
  Description of Artificial Sequence: Synthetic oligonucleotide
  Antisense strand to SEQ ID NO: 134016
uuccacgacuuguuuacuc

SEQ ID NO: 134018 - RNA, 19 nt, Artificial Sequence
  Description of Artificial Sequence: Synthetic oligonucleotide
  Sense strand starting at position 705 of SEQ ID NO: 1721
uaaacaagucguggaauca

SEQ ID NO: 134019 - RNA, 19 nt, Artificial Sequence
  Description of Artificial Sequence: Synthetic oligonucleotide
  Antisense strand to SEQ ID NO: 134018
ugauuccacgacuuguuua

SEQ ID NO: 134020 - RNA, 19 nt, Artificial Sequence
  Description of Artificial Sequence: Synthetic oligonucleotide
  Sense strand starting at position 706 of SEQ ID NO: 1721
aaacaagucguggaaucau

SEQ ID NO: 134021 - RNA, 19 nt, Artificial Sequence
  Description of Artificial Sequence: Synthetic oligonucleotide
  Antisense strand to SEQ ID NO: 134020
augauuccacgacuuguuu

SEQ ID NO: 134022 - RNA, 19 nt, Artificial Sequence
  Description of Artificial Sequence: Synthetic oligonucleotide
  Sense strand starting at position 1052 of SEQ ID NO: 1721
gaaguuguccaccagggau

SEQ ID NO: 134023 - RNA, 19 nt, Artificial Sequence
  Description of Artificial Sequence: Synthetic oligonucleotide
  Antisense strand to SEQ ID NO: 134022
aucccugguggacaacuuc

SEQ ID NO: 134024 - RNA, 19 nt, Artificial Sequence
  Description of Artificial Sequence: Synthetic oligonucleotide
  Sense strand starting at position 1054 of SEQ ID NO: 1721
aguuguccaccagggauua

SEQ ID NO: 134025 - RNA, 19 nt, Artificial Sequence
  Description of Artificial Sequence: Synthetic oligonucleotide
  Antisense strand to SEQ ID NO: 134024
uaaucccugguggacaacu

SEQ ID NO: 134026 - RNA, 19 nt, Artificial Sequence
  Description of Artificial Sequence: Synthetic oligonucleotide
  Sense strand starting at position 1168 of SEQ ID NO: 1721
gccaacagauuagucagaa

SEQ ID NO: 134027 - RNA, 19 nt, Artificial Sequence
  Description of Artificial Sequence: Synthetic oligonucleotide
  Antisense strand to SEQ ID NO: 134026
uucugacuaaucuguuggc

SEQ ID NO: 134028 - RNA, 19 nt, Artificial Sequence
  Description of Artificial Sequence: Synthetic oligonucleotide
  Sense strand starting at position 1229 of SEQ ID NO: 1721
gcggcacuucaagaggaau

SEQ ID NO: 134029 - RNA, 19 nt, Artificial Sequence
  Description of Artificial Sequence: Synthetic oligonucleotide
  Antisense strand to SEQ ID NO: 134028
auuccucuugaagugccgc

SEQ ID NO: 134030 - RNA, 19 nt, Artificial Sequence
  Description of Artificial Sequence: Synthetic oligonucleotide
  Sense strand starting at position 1880 of SEQ ID NO: 1721
auggcuguucugcagauca

SEQ ID NO: 134031 - RNA, 19 nt, Artificial Sequence
  Description of Artificial Sequence: Synthetic oligonucleotide
  Antisense strand to SEQ ID NO: 134030
ugaucugcagaacagccau

SEQ ID NO: 134032 - RNA, 19 nt, Artificial Sequence
  Description of Artificial Sequence: Synthetic oligonucleotide
  Sense strand starting at position 1946 of SEQ ID NO: 1721
accagcgauuccuccuaaa

SEQ ID NO: 134033 - RNA, 19 nt, Artificial Sequence
  Description of Artificial Sequence: Synthetic oligonucleotide
  Antisense strand to SEQ ID NO: 134032
uuuaggaggaaucgcuggu

SEQ ID NO: 134034 - RNA, 19 nt, Artificial Sequence
  Description of Artificial Sequence: Synthetic oligonucleotide
  Sense strand starting at position 2145 of SEQ ID NO: 1721
gacugcgcccgggauaaua

SEQ ID NO: 134035 - RNA, 19 nt, Artificial Sequence
  Description of Artificial Sequence: Synthetic oligonucleotide
  Antisense strand to SEQ ID NO: 134034
uauuaucccgggcgcaguc

SEQ ID NO: 134036 - RNA, 19 nt, Artificial Sequence
  Description of Artificial Sequence: Synthetic oligonucleotide
  Sense strand starting at position 2341 of SEQ ID NO: 1721
ggguuccuuauagggaaua

SEQ ID NO: 134037 - RNA, 19 nt, Artificial Sequence
  Description of Artificial Sequence: Synthetic oligonucleotide
  Antisense strand to SEQ ID NO: 134036
uauucccuauaaggaaccc

SEQ ID NO: 134038 - RNA, 19 nt, Artificial Sequence
  Description of Artificial Sequence: Synthetic oligonucleotide
  Sense strand starting at position 2392 of SEQ ID NO: 1721
gaaggaagcaguggucauu

SEQ ID NO: 134039 - RNA, 19 nt, Artificial Sequence
  Description of Artificial Sequence: Synthetic oligonucleotide
  Antisense strand to SEQ ID NO: 134038
aaugaccacugcuuccuuc

SEQ ID NO: 134040 - RNA, 19 nt, Artificial Sequence
  Description of Artificial Sequence: Synthetic oligonucleotide
  Sense strand starting at position 2403 of SEQ ID NO: 1721
uggucauugcuggagguua

SEQ ID NO: 134041 - RNA, 19 nt, Artificial Sequence
  Description of Artificial Sequence: Synthetic oligonucleotide
  Antisense strand to SEQ ID NO: 134040
uaaccuccagcaaugacca

SEQ ID NO: 134042 - RNA, 19 nt, Artificial Sequence
  Description of Artificial Sequence: Synthetic oligonucleotide
  Sense strand starting at position 2405 of SEQ ID NO: 1721
gucauugcuggagguuaaa

SEQ ID NO: 134043 - RNA, 19 nt, Artificial Sequence
  Description of Artificial Sequence: Synthetic oligonucleotide
  Antisense strand to SEQ ID NO: 134042
uuuaaccuccagcaaugac

SEQ ID NO: 134044 - RNA, 19 nt, Artificial Sequence
  Description of Artificial Sequence: Synthetic oligonucleotide
  Sense strand starting at position 2870 of SEQ ID NO: 1721
gcucuccuaggcuaagaaa

SEQ ID NO: 134045 - RNA, 19 nt, Artificial Sequence
  Description of Artificial Sequence: Synthetic oligonucleotide
  Antisense strand to SEQ ID NO: 134044
uuucuuagccuaggagagc

SEQ ID NO: 134046 - RNA, 19 nt, Artificial Sequence
  Description of Artificial Sequence: Synthetic oligonucleotide
  Sense strand starting at position 2889 of SEQ ID NO: 1721
cagcauacacagugagaaa

SEQ ID NO: 134047 - RNA, 19 nt, Artificial Sequence
  Description of Artificial Sequence: Synthetic oligonucleotide
  Antisense strand to SEQ ID NO: 134046
uuucucacuguguaugcug

SEQ ID NO: 134048 - RNA, 19 nt, Artificial Sequence
  Description of Artificial Sequence: Synthetic oligonucleotide
  Sense strand starting at position 3045 of SEQ ID NO: 1721
gguacuuaccuuuguauua

SEQ ID NO: 134049 - RNA, 19 nt, Artificial Sequence
  Description of Artificial Sequence: Synthetic oligonucleotide
  Antisense strand to SEQ ID NO: 134048
uaauacaaagguaaguacc

SEQ ID NO: 134050 - RNA, 19 nt, Artificial Sequence
  Description of Artificial Sequence: Synthetic oligonucleotide
  Sense strand starting at position 3084 of SEQ ID NO: 1721
ucuagaaacguuuaucacu

SEQ ID NO: 134051 - RNA, 19 nt, Artificial Sequence
  Description of Artificial Sequence: Synthetic oligonucleotide
  Antisense strand to SEQ ID NO: 134050
agugauaaacguuucuaga

SEQ ID NO: 134052 - RNA, 19 nt, Artificial Sequence
  Description of Artificial Sequence: Synthetic oligonucleotide
  Sense strand starting at position 3119 of SEQ ID NO: 1721
agcaguguuggcgucaacu

SEQ ID NO: 134053 - RNA, 19 nt, Artificial Sequence
  Description of Artificial Sequence: Synthetic oligonucleotide
  Antisense strand to SEQ ID NO: 134052
aguugacgccaacacugcu

SEQ ID NO: 134054 - RNA, 19 nt, Artificial Sequence
  Description of Artificial Sequence: Synthetic oligonucleotide
  Sense strand starting at position 3203 of SEQ ID NO: 1721
aucacauuaaaguguguga

SEQ ID NO: 134055 - RNA, 19 nt, Artificial Sequence
  Description of Artificial Sequence: Synthetic oligonucleotide
  Antisense strand to SEQ ID NO: 134054
ucacacacuuuaaugugau

SEQ ID NO: 134056 - RNA, 19 nt, Artificial Sequence
  Description of Artificial Sequence: Synthetic oligonucleotide
  Sense strand starting at position 3205 of SEQ ID NO: 1721
cacauuaaagugugugaga

SEQ ID NO: 134057 - RNA, 19 nt, Artificial Sequence
  Description of Artificial Sequence: Synthetic oligonucleotide
  Antisense strand to SEQ ID NO: 134056
ucucacacacuuuaaugug

SEQ ID NO: 134058 - RNA, 19 nt, Artificial Sequence
  Description of Artificial Sequence: Synthetic oligonucleotide
  Sense strand starting at position 3206 of SEQ ID NO: 1721
acauuaaagugugugagaa

SEQ ID NO: 134059 - RNA, 19 nt, Artificial Sequence
  Description of Artificial Sequence: Synthetic oligonucleotide
  Antisense strand to SEQ ID NO: 134058
uucucacacacuuuaaugu

SEQ ID NO: 134060 - RNA, 19 nt, Artificial Sequence
  Description of Artificial Sequence: Synthetic oligonucleotide
  Sense strand starting at position 3331 of SEQ ID NO: 1721
caggaauacuguuuacugu

SEQ ID NO: 134061 - RNA, 19 nt, Artificial Sequence
  Description of Artificial Sequence: Synthetic oligonucleotide
  Antisense strand to SEQ ID NO: 134060
acaguaaacaguauuccug

SEQ ID NO: 134062 - RNA, 19 nt, Artificial Sequence
  Description of Artificial Sequence: Synthetic oligonucleotide
  Sense strand starting at position 3332 of SEQ ID NO: 1721
aggaauacuguuuacugua

SEQ ID NO: 134063 - RNA, 19 nt, Artificial Sequence
  Description of Artificial Sequence: Synthetic oligonucleotide
  Antisense strand to SEQ ID NO: 134062
uacaguaaacaguauuccu

SEQ ID NO: 134064 - RNA, 19 nt, Artificial Sequence
  Description of Artificial Sequence: Synthetic oligonucleotide
  Sense strand starting at position 3423 of SEQ ID NO: 1721
cacccuuucugagugagca

SEQ ID NO: 134065 - RNA, 19 nt, Artificial Sequence
  Description of Artificial Sequence: Synthetic oligonucleotide
  Antisense strand to SEQ ID NO: 134064
ugcucacucagaaagggug

SEQ ID NO: 134066 - RNA, 19 nt, Artificial Sequence
  Description of Artificial Sequence: Synthetic oligonucleotide
  Sense strand starting at position 3439 of SEQ ID NO: 1721
gcagcucuauuugcugaaa

SEQ ID NO: 134067 - RNA, 19 nt, Artificial Sequence
  Description of Artificial Sequence: Synthetic oligonucleotide
  Antisense strand to SEQ ID NO: 134066
uuucagcaaauagagcugc

SEQ ID NO: 134068 - RNA, 19 nt, Artificial Sequence
  Description of Artificial Sequence: Synthetic oligonucleotide
  Sense strand starting at position 3442 of SEQ ID NO: 1721
gcucuauuugcugaaacgu

SEQ ID NO: 134069 - RNA, 19 nt, Artificial Sequence
  Description of Artificial Sequence: Synthetic oligonucleotide
  Antisense strand to SEQ ID NO: 134068
acguuucagcaaauagagc

SEQ ID NO: 134070 - RNA, 19 nt, Artificial Sequence
  Description of Artificial Sequence: Synthetic oligonucleotide
  Sense strand starting at position 3636 of SEQ ID NO: 1721
cuuuaugucugaguacaug

SEQ ID NO: 134071 - RNA, 19 nt, Artificial Sequence
  Description of Artificial Sequence: Synthetic oligonucleotide
  Antisense strand to SEQ ID NO: 134070
cauguacucagacauaaag

SEQ ID NO: 134072 - RNA, 19 nt, Artificial Sequence
  Description of Artificial Sequence: Synthetic oligonucleotide
  Sense strand starting at position 3714 of SEQ ID NO: 1721
aagcaaggcccuugaagau

SEQ ID NO: 134073 - RNA, 19 nt, Artificial Sequence
  Description of Artificial Sequence: Synthetic oligonucleotide
  Antisense strand to SEQ ID NO: 134072
aucuucaagggccuugcuu

SEQ ID NO: 134074 - RNA, 19 nt, Artificial Sequence
  Description of Artificial Sequence: Synthetic oligonucleotide
  Sense strand starting at position 3748 of SEQ ID NO: 1721
ccuugacuuguguaguauu

SEQ ID NO: 134075 - RNA, 19 nt, Artificial Sequence
  Description of Artificial Sequence: Synthetic oligonucleotide
  Antisense strand to SEQ ID NO: 134074
aauacuacacaagucaagg

SEQ ID NO: 134076 - RNA, 19 nt, Artificial Sequence
  Description of Artificial Sequence: Synthetic oligonucleotide
  Sense strand starting at position 3803 of SEQ ID NO: 1721
auaauauguccuugguaug

SEQ ID NO: 134077 - RNA, 19 nt, Artificial Sequence
  Description of Artificial Sequence: Synthetic oligonucleotide
  Antisense strand to SEQ ID NO: 134076
cauaccaaggacauauuau

SEQ ID NO: 134078 - RNA, 19 nt, Artificial Sequence
  Description of Artificial Sequence: Synthetic oligonucleotide
  Sense strand starting at position 3817 of SEQ ID NO: 1721
guauguauuuccuugcagu

SEQ ID NO: 134079 - RNA, 19 nt, Artificial Sequence
  Description of Artificial Sequence: Synthetic oligonucleotide
  Antisense strand to SEQ ID NO: 134078
acugcaaggaaauacauac

SEQ ID NO: 134080 - RNA, 19 nt, Artificial Sequence
  Description of Artificial Sequence: Synthetic oligonucleotide
  Sense strand starting at position 3837 of SEQ ID NO: 1721
gucaaaucagccuagcaga

SEQ ID NO: 134081 - RNA, 19 nt, Artificial Sequence
  Description of Artificial Sequence: Synthetic oligonucleotide
  Antisense strand to SEQ ID NO: 134080
ucugcuaggcugauuugac

SEQ ID NO: 134082 - RNA, 19 nt, Artificial Sequence
  Description of Artificial Sequence: Synthetic oligonucleotide
  Sense strand starting at position 3938 of SEQ ID NO: 1725
agucaaauuguugaaaggu

SEQ ID NO: 134083 - RNA, 19 nt, Artificial Sequence
  Description of Artificial Sequence: Synthetic oligonucleotide
  Antisense strand to SEQ ID NO: 134082
accuuucaacaauuugacu

SEQ ID NO: 134084 - RNA, 19 nt, Artificial Sequence
  Description of Artificial Sequence: Synthetic oligonucleotide
  Sense strand starting at position 3717 of SEQ ID NO: 1725
guggacagagccugagaaa

SEQ ID NO: 134085 - RNA, 19 nt, Artificial Sequence
  Description of Artificial Sequence: Synthetic oligonucleotide
  Antisense strand to SEQ ID NO: 134084
uuucucaggcucuguccac

SEQ ID NO: 134086 - RNA, 19 nt, Artificial Sequence
  Description of Artificial Sequence: Synthetic oligonucleotide
  Sense strand starting at position 3676 of SEQ ID NO: 1725
aaucauccagucggaagaa

SEQ ID NO: 134087 - RNA, 19 nt, Artificial Sequence
  Description of Artificial Sequence: Synthetic oligonucleotide
  Antisense strand to SEQ ID NO: 134086
uucuuccgacuggaugauu

SEQ ID NO: 134088 - RNA, 19 nt, Artificial Sequence
  Description of Artificial Sequence: Synthetic oligonucleotide
  Sense strand starting at position 3396 of SEQ ID NO: 1725
uguagaauuuagcagacaa

SEQ ID NO: 134089 - RNA, 19 nt, Artificial Sequence
  Description of Artificial Sequence: Synthetic oligonucleotide
  Antisense strand to SEQ ID NO: 134088
uugucugcuaaauucuaca

SEQ ID NO: 134090 - RNA, 19 nt, Artificial Sequence
  Description of Artificial Sequence: Synthetic oligonucleotide
  Sense strand starting at position 3334 of SEQ ID NO: 1725
uugugugauccacaaugag

SEQ ID NO: 134091 - RNA, 19 nt, Artificial Sequence
  Description of Artificial Sequence: Synthetic oligonucleotide
  Antisense strand to SEQ ID NO: 134090
cucauuguggaucacacaa

SEQ ID NO: 134092 - RNA, 19 nt, Artificial Sequence
  Description of Artificial Sequence: Synthetic oligonucleotide
  Sense strand starting at position 3172 of SEQ ID NO: 1725
agaaaucaguagucacaua

SEQ ID NO: 134093 - RNA, 19 nt, Artificial Sequence
  Description of Artificial Sequence: Synthetic oligonucleotide
  Antisense strand to SEQ ID NO: 134092
uaugugacuacugauuucu

SEQ ID NO: 134094 - RNA, 19 nt, Artificial Sequence
  Description of Artificial Sequence: Synthetic oligonucleotide
  Sense strand starting at position 3002 of SEQ ID NO: 1725
gcaugugcuccucaauuug

SEQ ID NO: 134095 - RNA, 19 nt, Artificial Sequence
  Description of Artificial Sequence: Synthetic oligonucleotide
  Antisense strand to SEQ ID NO: 134094
caaauugaggagcacaugc

SEQ ID NO: 134096 - RNA, 19 nt, Artificial Sequence
  Description of Artificial Sequence: Synthetic oligonucleotide
  Sense strand starting at position 2905 of SEQ ID NO: 1725
gcaaucugacuaggaggua

SEQ ID NO: 134097 - RNA, 19 nt, Artificial Sequence
  Description of Artificial Sequence: Synthetic oligonucleotide
  Antisense strand to SEQ ID NO: 134096
uaccuccuagucagauugc

SEQ ID NO: 134098 - RNA, 19 nt, Artificial Sequence
  Description of Artificial Sequence: Synthetic oligonucleotide
  Sense strand starting at position 2809 of SEQ ID NO: 1725
gugguauagcaagaaacau

SEQ ID NO: 134099 - RNA, 19 nt, Artificial Sequence
  Description of Artificial Sequence: Synthetic oligonucleotide
  Antisense strand to SEQ ID NO: 134098
auguuucuugcuauaccac

SEQ ID NO: 134100 - RNA, 19 nt, Artificial Sequence
  Description of Artificial Sequence: Synthetic oligonucleotide
  Sense strand starting at position 2628 of SEQ ID NO: 1725
ggguagggcuggucaugaa

SEQ ID NO: 134101 - RNA, 19 nt, Artificial Sequence
  Description of Artificial Sequence: Synthetic oligonucleotide
  Antisense strand to SEQ ID NO: 134100
uucaugaccagcccuaccc

SEQ ID NO: 134102 - RNA, 19 nt, Artificial Sequence
  Description of Artificial Sequence: Synthetic oligonucleotide
  Sense strand starting at position 2600 of SEQ ID NO: 1725
uagcucagucaggagagua

SEQ ID NO: 134103 - RNA, 19 nt, Artificial Sequence
  Description of Artificial Sequence: Synthetic oligonucleotide
  Antisense strand to SEQ ID NO: 134102
uacucuccugacugagcua

SEQ ID NO: 134104 - RNA, 19 nt, Artificial Sequence
  Description of Artificial Sequence: Synthetic oligonucleotide
  Sense strand starting at position 2595 of SEQ ID NO: 1725
cuuuauagcucagucagga

SEQ ID NO: 134105 - RNA, 19 nt, Artificial Sequence
  Description of Artificial Sequence: Synthetic oligonucleotide
  Antisense strand to SEQ ID NO: 134104
uccugacugagcuauaaag

SEQ ID NO: 134106 - RNA, 19 nt, Artificial Sequence
  Description of Artificial Sequence: Synthetic oligonucleotide
  Sense strand starting at position 2556 of SEQ ID NO: 1725
gggagucagagauguucuu

SEQ ID NO: 134107 - RNA, 19 nt, Artificial Sequence
  Description of Artificial Sequence: Synthetic oligonucleotide
  Antisense strand to SEQ ID NO: 134106
aagaacaucucugacuccc

SEQ ID NO: 134108 - RNA, 19 nt, Artificial Sequence
  Description of Artificial Sequence: Synthetic oligonucleotide
  Sense strand starting at position 2554 of SEQ ID NO: 1725
gugggagucagagauguuc

SEQ ID NO: 134109 - RNA, 19 nt, Artificial Sequence
  Description of Artificial Sequence: Synthetic oligonucleotide
  Antisense strand to SEQ ID NO: 134108
gaacaucucugacucccac

SEQ ID NO: 134110 - RNA, 19 nt, Artificial Sequence
  Description of Artificial Sequence: Synthetic oligonucleotide
  Sense strand starting at position 2515 of SEQ ID NO: 1725
auuuauuugugacgaacca

SEQ ID NO: 134111 - RNA, 19 nt, Artificial Sequence
  Description of Artificial Sequence: Synthetic oligonucleotide
  Antisense strand to SEQ ID NO: 134110
ugguucgucacaaauaaau

SEQ ID NO: 134112 - RNA, 19 nt, Artificial Sequence
  Description of Artificial Sequence: Synthetic oligonucleotide
  Sense strand starting at position 2512 of SEQ ID NO: 1725
aacauuuauuugugacgaa

SEQ ID NO: 134113 - RNA, 19 nt, Artificial Sequence
  Description of Artificial Sequence: Synthetic oligonucleotide
  Antisense strand to SEQ ID NO: 134112
uucgucacaaauaaauguu

SEQ ID NO: 134114 - RNA, 19 nt, Artificial Sequence
  Description of Artificial Sequence: Synthetic oligonucleotide
  Sense strand starting at position 2477 of SEQ ID NO: 1725
cuggaaaucgagcagucau

SEQ ID NO: 134115 - RNA, 19 nt, Artificial Sequence
  Description of Artificial Sequence: Synthetic oligonucleotide
  Antisense strand to SEQ ID NO: 134114
augacugcucgauuuccag

SEQ ID NO: 134116 - RNA, 19 nt, Artificial Sequence
  Description of Artificial Sequence: Synthetic oligonucleotide
  Sense strand starting at position 2389 of SEQ ID NO: 1725
uuuggugauguggaaguaa

SEQ ID NO: 134117 - RNA, 19 nt, Artificial Sequence
  Description of Artificial Sequence: Synthetic oligonucleotide
  Antisense strand to SEQ ID NO: 134116
uuacuuccacaucaccaaa

SEQ ID NO: 134118 - RNA, 19 nt, Artificial Sequence
  Description of Artificial Sequence: Synthetic oligonucleotide
  Sense strand starting at position 2313 of SEQ ID NO: 1725
auagaaugguuccuuguua

SEQ ID NO: 134119 - RNA, 19 nt, Artificial Sequence
  Description of Artificial Sequence: Synthetic oligonucleotide
  Antisense strand to SEQ ID NO: 134118
uaacaaggaaccauucuau

SEQ ID NO: 134120 - RNA, 19 nt, Artificial Sequence
  Description of Artificial Sequence: Synthetic oligonucleotide
  Sense strand starting at position 2163 of SEQ ID NO: 1725
gcaauuauugcagaaaugu

SEQ ID NO: 134121 - RNA, 19 nt, Artificial Sequence
  Description of Artificial Sequence: Synthetic oligonucleotide
  Antisense strand to SEQ ID NO: 134120
acauuucugcaauaauugc

SEQ ID NO: 134122 - RNA, 19 nt, Artificial Sequence
  Description of Artificial Sequence: Synthetic oligonucleotide
  Sense strand starting at position 1992 of SEQ ID NO: 1725
uucuguguuauggaagaga

SEQ ID NO: 134123 - RNA, 19 nt, Artificial Sequence
  Description of Artificial Sequence: Synthetic oligonucleotide
  Antisense strand to SEQ ID NO: 134122
ucucuuccauaacacagaa

SEQ ID NO: 134124 - RNA, 19 nt, Artificial Sequence
  Description of Artificial Sequence: Synthetic oligonucleotide
  Sense strand starting at position 1534 of SEQ ID NO: 1725
uuauaucagcaugaguugu

SEQ ID NO: 134125 - RNA, 19 nt, Artificial Sequence
  Description of Artificial Sequence: Synthetic oligonucleotide
  Antisense strand to SEQ ID NO: 134124
acaacucaugcugauauaa

SEQ ID NO: 134126 - RNA, 19 nt, Artificial Sequence
  Description of Artificial Sequence: Synthetic oligonucleotide
  Sense strand starting at position 1533 of SEQ ID NO: 1725
auuauaucagcaugaguug

SEQ ID NO: 134127 - RNA, 19 nt, Artificial Sequence
  Description of Artificial Sequence: Synthetic oligonucleotide
  Antisense strand to SEQ ID NO: 134126
caacucaugcugauauaau

SEQ ID NO: 134128 - RNA, 19 nt, Artificial Sequence
  Description of Artificial Sequence: Synthetic oligonucleotide
  Sense strand starting at position 1530 of SEQ ID NO: 1725
ucaauuauaucagcaugag

SEQ ID NO: 134129 - RNA, 19 nt, Artificial Sequence
  Description of Artificial Sequence: Synthetic oligonucleotide
  Antisense strand to SEQ ID NO: 134128
cucaugcugauauaauuga

SEQ ID NO: 134130 - RNA, 19 nt, Artificial Sequence
  Description of Artificial Sequence: Synthetic oligonucleotide
  Sense strand starting at position 983 of SEQ ID NO: 1725
ccauuaauuguuuacaguu

SEQ ID NO: 134131 - RNA, 19 nt, Artificial Sequence
  Description of Artificial Sequence: Synthetic oligonucleotide
  Antisense strand to SEQ ID NO: 134130
aacuguaaacaauuaaugg

SEQ ID NO: 134132 - RNA, 19 nt, Artificial Sequence
  Description of Artificial Sequence: Synthetic oligonucleotide
  Sense strand starting at position 952 of SEQ ID NO: 1725
aacugauuauugguauuga

SEQ ID NO: 134133 - RNA, 19 nt, Artificial Sequence
  Description of Artificial Sequence: Synthetic oligonucleotide
  Antisense strand to SEQ ID NO: 134132
ucaauaccaauaaucaguu

SEQ ID NO: 134134 - RNA, 19 nt, Artificial Sequence
  Description of Artificial Sequence: Synthetic oligonucleotide
  Sense strand starting at position 949 of SEQ ID NO: 1725
agaaacugauuauugguau

SEQ ID NO: 134135 - RNA, 19 nt, Artificial Sequence
  Description of Artificial Sequence: Synthetic oligonucleotide
  Antisense strand to SEQ ID NO: 134134
auaccaauaaucaguuucu

SEQ ID NO: 134136 - RNA, 19 nt, Artificial Sequence
  Description of Artificial Sequence: Synthetic oligonucleotide
  Sense strand starting at position 869 of SEQ ID NO: 1725
ugguuagucuacuuacuaa

SEQ ID NO: 134137 - RNA, 19 nt, Artificial Sequence
  Description of Artificial Sequence: Synthetic oligonucleotide
  Antisense strand to SEQ ID NO: 134136
uuaguaaguagacuaacca

SEQ ID NO: 134138 - RNA, 19 nt, Artificial Sequence
  Description of Artificial Sequence: Synthetic oligonucleotide
  Sense strand starting at position 861 of SEQ ID NO: 1725
cucucuuaugguuagucua

SEQ ID NO: 134139 - RNA, 19 nt, Artificial Sequence
  Description of Artificial Sequence: Synthetic oligonucleotide
  Antisense strand to SEQ ID NO: 134138
uagacuaaccauaagagag

SEQ ID NO: 134140 - RNA, 19 nt, Artificial Sequence
  Description of Artificial Sequence: Synthetic oligonucleotide
  Sense strand starting at position 560 of SEQ ID NO: 1725
uugucacaaguguacuuau

SEQ ID NO: 134141 - RNA, 19 nt, Artificial Sequence
  Description of Artificial Sequence: Synthetic oligonucleotide
  Antisense strand to SEQ ID NO: 134140
auaaguacacuugugacaa

SEQ ID NO: 134142 - RNA, 19 nt, Artificial Sequence
  Description of Artificial Sequence: Synthetic oligonucleotide
  Sense strand starting at position 551 of SEQ ID NO: 1725
aaagacuaguugucacaag

SEQ ID NO: 134143 - RNA, 19 nt, Artificial Sequence
  Description of Artificial Sequence: Synthetic oligonucleotide
  Antisense strand to SEQ ID NO: 134142
cuugugacaacuagucuuu

SEQ ID NO: 134144 - RNA, 19 nt, Artificial Sequence
  Description of Artificial Sequence: Synthetic oligonucleotide
  Sense strand starting at position 474 of SEQ ID NO: 1725
caguacauacuguaguaua

SEQ ID NO: 134145 - RNA, 19 nt, Artificial Sequence
  Description of Artificial Sequence: Synthetic oligonucleotide
  Antisense strand to SEQ ID NO: 134144
uauacuacaguauguacug

SEQ ID NO: 134146 - RNA, 19 nt, Artificial Sequence
  Description of Artificial Sequence: Synthetic oligonucleotide
  Sense strand starting at position 431 of SEQ ID NO: 1725
cagguuuggcuugaaguga

SEQ ID NO: 134147 - RNA, 19 nt, Artificial Sequence
  Description of Artificial Sequence: Synthetic oligonucleotide
  Antisense strand to SEQ ID NO: 134146
ucacuucaagccaaaccug

SEQ ID NO: 134148 - RNA, 19 nt, Artificial Sequence
  Description of Artificial Sequence: Synthetic oligonucleotide
  Sense strand starting at position 372 of SEQ ID NO: 1725
ugaauuaugcucuaagcaa

SEQ ID NO: 134149 - RNA, 19 nt, Artificial Sequence
  Description of Artificial Sequence: Synthetic oligonucleotide
  Antisense strand to SEQ ID NO: 134148
uugcuuagagcauaauuca

SEQ ID NO: 134150 - RNA, 19 nt, Artificial Sequence
  Description of Artificial Sequence: Synthetic oligonucleotide
  Sense strand starting at position 275 of SEQ ID NO: 1725
acuguuauguuaucagaga

SEQ ID NO: 134151 - RNA, 19 nt, Artificial Sequence
  Description of Artificial Sequence: Synthetic oligonucleotide
  Antisense strand to SEQ ID NO: 134150
ucucugauaacauaacagu

SEQ ID NO: 134152 - RNA, 19 nt, Artificial Sequence
  Description of Artificial Sequence: Synthetic oligonucleotide
  Sense strand starting at position 153 of SEQ ID NO: 1725
ugaggugaucuccaguuau

SEQ ID NO: 134153 - RNA, 19 nt, Artificial Sequence
  Description of Artificial Sequence: Synthetic oligonucleotide
  Antisense strand to SEQ ID NO: 134152
auaacuggagaucaccuca

SEQ ID NO: 134154 - RNA, 19 nt, Artificial Sequence
  Description of Artificial Sequence: Synthetic oligonucleotide
  Sense strand starting at position 146 of SEQ ID NO: 1725
guuauaaugaggugaucuc

SEQ ID NO: 134155 - RNA, 19 nt, Artificial Sequence
  Description of Artificial Sequence: Synthetic oligonucleotide
  Antisense strand to SEQ ID NO: 134154
gagaucaccucauuauaac

SEQ ID NO: 134156 - RNA, 19 nt, Artificial Sequence
  Description of Artificial Sequence: Synthetic oligonucleotide
  Sense strand starting at position 115 of SEQ ID NO: 1725
uguacuguagcaggauaaa

SEQ ID NO: 134157 - RNA, 19 nt, Artificial Sequence
  Description of Artificial Sequence: Synthetic oligonucleotide
  Antisense strand to SEQ ID NO: 134156
uuuauccugcuacaguaca

SEQ ID NO: 134158 - RNA, 19 nt, Artificial Sequence
  Description of Artificial Sequence: Synthetic oligonucleotide
  Sense strand starting at position 98 of SEQ ID NO: 1725
guuuaagagguuuauauug

SEQ ID NO: 134159 - RNA, 19 nt, Artificial Sequence
  Description of Artificial Sequence: Synthetic oligonucleotide
  Antisense strand to SEQ ID NO: 134158
caauauaaaccucuuaaac

SEQ ID NO: 134160 - RNA, 19 nt, Artificial Sequence
  Description of Artificial Sequence: Synthetic oligonucleotide
  Sense strand starting at position 88 of SEQ ID NO: 1725
auauaacaguguuuaagag

SEQ ID NO: 134161 - RNA, 19 nt, Artificial Sequence
  Description of Artificial Sequence: Synthetic oligonucleotide
  Antisense strand to SEQ ID NO: 134160
cucuuaaacacuguuauau

SEQ ID NO: 134162 - RNA, 19 nt, Artificial Sequence
  Description of Artificial Sequence: Synthetic oligonucleotide
  Sense strand starting at position 3852 of SEQ ID NO: 1726
uguagaauuuagcagacaa

SEQ ID NO: 134163 - RNA, 19 nt, Artificial Sequence
  Description of Artificial Sequence: Synthetic oligonucleotide
  Antisense strand to SEQ ID NO: 134162
uugucugcuaaauucuaca

SEQ ID NO: 134164 - RNA, 19 nt, Artificial Sequence
  Description of Artificial Sequence: Synthetic oligonucleotide
  Sense strand starting at position 3790 of SEQ ID NO: 1726
uugugugauccacaaugag

SEQ ID NO: 134165 - RNA, 19 nt, Artificial Sequence
  Description of Artificial Sequence: Synthetic oligonucleotide
  Antisense strand to SEQ ID NO: 134164
cucauuguggaucacacaa

SEQ ID NO: 134166 - RNA, 19 nt, Artificial Sequence
  Description of Artificial Sequence: Synthetic oligonucleotide
  Sense strand starting at position 3628 of SEQ ID NO: 1726
agaaaucaguagucacaua

SEQ ID NO: 134167 - RNA, 19 nt, Artificial Sequence
  Description of Artificial Sequence: Synthetic oligonucleotide
  Antisense strand to SEQ ID NO: 134166
uaugugacuacugauuucu

SEQ ID NO: 134168 - RNA, 19 nt, Artificial Sequence
  Description of Artificial Sequence: Synthetic oligonucleotide
  Sense strand starting at position 3458 of SEQ ID NO: 1726
gcaugugcuccucaauuug

SEQ ID NO: 134169 - RNA, 19 nt, Artificial Sequence
  Description of Artificial Sequence: Synthetic oligonucleotide
  Antisense strand to SEQ ID NO: 134168
caaauugaggagcacaugc

SEQ ID NO: 134170 - RNA, 19 nt, Artificial Sequence
  Description of Artificial Sequence: Synthetic oligonucleotide
  Sense strand starting at position 3361 of SEQ ID NO: 1726
gcaaucugacuaggaggua

SEQ ID NO: 134171 - RNA, 19 nt, Artificial Sequence
  Description of Artificial Sequence: Synthetic oligonucleotide
  Antisense strand to SEQ ID NO: 134170
uaccuccuagucagauugc

SEQ ID NO: 134172 - RNA, 19 nt, Artificial Sequence
  Description of Artificial Sequence: Synthetic oligonucleotide
  Sense strand starting at position 3265 of SEQ ID NO: 1726
gugguauagcaagaaacau

SEQ ID NO: 134173 - RNA, 19 nt, Artificial Sequence
  Description of Artificial Sequence: Synthetic oligonucleotide
  Antisense strand to SEQ ID NO: 134172
auguuucuugcuauaccac

SEQ ID NO: 134174 - RNA, 19 nt, Artificial Sequence
  Description of Artificial Sequence: Synthetic oligonucleotide
  Sense strand starting at position 3056 of SEQ ID NO: 1726
uagcucagucaggagagua

SEQ ID NO: 134175 - RNA, 19 nt, Artificial Sequence
  Description of Artificial Sequence: Synthetic oligonucleotide
  Antisense strand to SEQ ID NO: 134174
uacucuccugacugagcua

SEQ ID NO: 134176 - RNA, 19 nt, Artificial Sequence
  Description of Artificial Sequence: Synthetic oligonucleotide
  Sense strand starting at position 3012 of SEQ ID NO: 1726
gggagucagagauguucuu

SEQ ID NO: 134177 - RNA, 19 nt, Artificial Sequence
  Description of Artificial Sequence: Synthetic oligonucleotide
  Antisense strand to SEQ ID NO: 134176
aagaacaucucugacuccc

SEQ ID NO: 134178 - RNA, 19 nt, Artificial Sequence
  Description of Artificial Sequence: Synthetic oligonucleotide
  Sense strand starting at position 3010 of SEQ ID NO: 1726
gugggagucagagauguuc

SEQ ID NO: 134179 - RNA, 19 nt, Artificial Sequence
  Description of Artificial Sequence: Synthetic oligonucleotide
  Antisense strand to SEQ ID NO: 134178
gaacaucucugacucccac

SEQ ID NO: 134180 - RNA, 19 nt, Artificial Sequence
  Description of Artificial Sequence: Synthetic oligonucleotide
  Sense strand starting at position 2971 of SEQ ID NO: 1726
auuuauuugugacgaacca

SEQ ID NO: 134181 - RNA, 19 nt, Artificial Sequence
  Description of Artificial Sequence: Synthetic oligonucleotide
  Antisense strand to SEQ ID NO: 134180
ugguucgucacaaauaaau

SEQ ID NO: 134182 - RNA, 19 nt, Artificial Sequence
  Description of Artificial Sequence: Synthetic oligonucleotide
  Sense strand starting at position 2968 of SEQ ID NO: 1726
aacauuuauuugugacgaa

SEQ ID NO: 134183 - RNA, 19 nt, Artificial Sequence
  Description of Artificial Sequence: Synthetic oligonucleotide
  Antisense strand to SEQ ID NO: 134182
uucgucacaaauaaauguu

SEQ ID NO: 134184 - RNA, 19 nt, Artificial Sequence
  Description of Artificial Sequence: Synthetic oligonucleotide
  Sense strand starting at position 2933 of SEQ ID NO: 1726
cuggaaaucgagcagucau

SEQ ID NO: 134185 - RNA, 19 nt, Artificial Sequence
  Description of Artificial Sequence: Synthetic oligonucleotide
  Antisense strand to SEQ ID NO: 134184
augacugcucgauuuccag

SEQ ID NO: 134186 - RNA, 19 nt, Artificial Sequence
  Description of Artificial Sequence: Synthetic oligonucleotide
  Sense strand starting at position 2845 of SEQ ID NO: 1726
uuuggugauguggaaguaa

SEQ ID NO: 134187 - RNA, 19 nt, Artificial Sequence
  Description of Artificial Sequence: Synthetic oligonucleotide
  Antisense strand to SEQ ID NO: 134186
uuacuuccacaucaccaaa

SEQ ID NO: 134188 - RNA, 19 nt, Artificial Sequence
  Description of Artificial Sequence: Synthetic oligonucleotide
  Sense strand starting at position 2769 of SEQ ID NO: 1726
auagaaugguuccuuguua

SEQ ID NO: 134189 - RNA, 19 nt, Artificial Sequence
  Description of Artificial Sequence: Synthetic oligonucleotide
  Antisense strand to SEQ ID NO: 134188
uaacaaggaaccauucuau

SEQ ID NO: 134190 - RNA, 19 nt, Artificial Sequence
  Description of Artificial Sequence: Synthetic oligonucleotide
  Sense strand starting at position 2619 of SEQ ID NO: 1726
gcaauuauugcagaaaugu

SEQ ID NO: 134191 - RNA, 19 nt, Artificial Sequence
  Description of Artificial Sequence: Synthetic oligonucleotide
  Antisense strand to SEQ ID NO: 134190
acauuucugcaauaauugc

SEQ ID NO: 134192 - RNA, 19 nt, Artificial Sequence
  Description of Artificial Sequence: Synthetic oligonucleotide
  Sense strand starting at position 2448 of SEQ ID NO: 1726
uucuguguuauggaagaga

SEQ ID NO: 134193 - RNA, 19 nt, Artificial Sequence
  Description of Artificial Sequence: Synthetic oligonucleotide
  Antisense strand to SEQ ID NO: 134192
ucucuuccauaacacagaa

SEQ ID NO: 134194 - RNA, 19 nt, Artificial Sequence
  Description of Artificial Sequence: Synthetic oligonucleotide
  Sense strand starting at position 1990 of SEQ ID NO: 1726
uuauaucagcaugaguugu

SEQ ID NO: 134195 - RNA, 19 nt, Artificial Sequence
  Description of Artificial Sequence: Synthetic oligonucleotide
  Antisense strand to SEQ ID NO: 134194
acaacucaugcugauauaa

SEQ ID NO: 134196 - RNA, 19 nt, Artificial Sequence
  Description of Artificial Sequence: Synthetic oligonucleotide
  Sense strand starting at position 1989 of SEQ ID NO: 1726
auuauaucagcaugaguug

SEQ ID NO: 134197 - RNA, 19 nt, Artificial Sequence
  Description of Artificial Sequence: Synthetic oligonucleotide
  Antisense strand to SEQ ID NO: 134196
caacucaugcugauauaau

SEQ ID NO: 134198 - RNA, 19 nt, Artificial Sequence
  Description of Artificial Sequence: Synthetic oligonucleotide
  Sense strand starting at position 1986 of SEQ ID NO: 1726
ucaauuauaucagcaugag

SEQ ID NO: 134199 - RNA, 19 nt, Artificial Sequence
  Description of Artificial Sequence: Synthetic oligonucleotide
  Antisense strand to SEQ ID NO: 134198
cucaugcugauauaauuga

SEQ ID NO: 134200 - RNA, 19 nt, Artificial Sequence
  Description of Artificial Sequence: Synthetic oligonucleotide
  Sense strand starting at position 1439 of SEQ ID NO: 1726
ccauuaauuguuuacaguu

SEQ ID NO: 134201 - RNA, 19 nt, Artificial Sequence
  Description of Artificial Sequence: Synthetic oligonucleotide
  Antisense strand to SEQ ID NO: 134200
aacuguaaacaauuaaugg

SEQ ID NO: 134202 - RNA, 19 nt, Artificial Sequence
  Description of Artificial Sequence: Synthetic oligonucleotide
  Sense strand starting at position 1408 of SEQ ID NO: 1726
aacugauuauugguauuga

SEQ ID NO: 134203 - RNA, 19 nt, Artificial Sequence
  Description of Artificial Sequence: Synthetic oligonucleotide
  Antisense strand to SEQ ID NO: 134202
ucaauaccaauaaucaguu

SEQ ID NO: 134204 - RNA, 19 nt, Artificial Sequence
  Description of Artificial Sequence: Synthetic oligonucleotide
  Sense strand starting at position 1405 of SEQ ID NO: 1726
agaaacugauuauugguau

SEQ ID NO: 134205 - RNA, 19 nt, Artificial Sequence
  Description of Artificial Sequence: Synthetic oligonucleotide
  Antisense strand to SEQ ID NO: 134204
auaccaauaaucaguuucu

SEQ ID NO: 134206 - RNA, 19 nt, Artificial Sequence
  Description of Artificial Sequence: Synthetic oligonucleotide
  Sense strand starting at position 1317 of SEQ ID NO: 1726
cucucuuaugguuagucua

SEQ ID NO: 134207 - RNA, 19 nt, Artificial Sequence
  Description of Artificial Sequence: Synthetic oligonucleotide
  Antisense strand to SEQ ID NO: 134206
uagacuaaccauaagagag

SEQ ID NO: 134208 - RNA, 19 nt, Artificial Sequence
  Description of Artificial Sequence: Synthetic oligonucleotide
  Sense strand starting at position 1016 of SEQ ID NO: 1726
uugucacaaguguacuuau

SEQ ID NO: 134209 - RNA, 19 nt, Artificial Sequence
  Description of Artificial Sequence: Synthetic oligonucleotide
  Antisense strand to SEQ ID NO: 134208
auaaguacacuugugacaa

SEQ ID NO: 134210 - RNA, 19 nt, Artificial Sequence
  Description of Artificial Sequence: Synthetic oligonucleotide
  Sense strand starting at position 1007 of SEQ ID NO: 1726
aaagacuaguugucacaag

SEQ ID NO: 134211 - RNA, 19 nt, Artificial Sequence
  Description of Artificial Sequence: Synthetic oligonucleotide
  Antisense strand to SEQ ID NO: 134210
cuugugacaacuagucuuu

SEQ ID NO: 134212 - RNA, 19 nt, Artificial Sequence
  Description of Artificial Sequence: Synthetic oligonucleotide
  Sense strand starting at position 930 of SEQ ID NO: 1726
caguacauacuguaguaua

SEQ ID NO: 134213 - RNA, 19 nt, Artificial Sequence
  Description of Artificial Sequence: Synthetic oligonucleotide
  Antisense strand to SEQ ID NO: 134212
uauacuacaguauguacug

SEQ ID NO: 134214 - RNA, 19 nt, Artificial Sequence
  Description of Artificial Sequence: Synthetic oligonucleotide
  Sense strand starting at position 887 of SEQ ID NO: 1726
cagguuuggcuugaaguga

SEQ ID NO: 134215 - RNA, 19 nt, Artificial Sequence
  Description of Artificial Sequence: Synthetic oligonucleotide
  Antisense strand to SEQ ID NO: 134214
ucacuucaagccaaaccug

SEQ ID NO: 134216 - RNA, 19 nt, Artificial Sequence
  Description of Artificial Sequence: Synthetic oligonucleotide
  Sense strand starting at position 828 of SEQ ID NO: 1726
ugaauuaugcucuaagcaa

SEQ ID NO: 134217 - RNA, 19 nt, Artificial Sequence
  Description of Artificial Sequence: Synthetic oligonucleotide
  Antisense strand to SEQ ID NO: 134216
uugcuuagagcauaauuca

SEQ ID NO: 134218 - RNA, 19 nt, Artificial Sequence
  Description of Artificial Sequence: Synthetic oligonucleotide
  Sense strand starting at position 731 of SEQ ID NO: 1726
acuguuauguuaucagaga

SEQ ID NO: 134219 - RNA, 19 nt, Artificial Sequence
  Description of Artificial Sequence: Synthetic oligonucleotide
  Antisense strand to SEQ ID NO: 134218
ucucugauaacauaacagu

SEQ ID NO: 134220 - RNA, 19 nt, Artificial Sequence
  Description of Artificial Sequence: Synthetic oligonucleotide
  Sense strand starting at position 609 of SEQ ID NO: 1726
ugaggugaucuccaguuau

SEQ ID NO: 134221 - RNA, 19 nt, Artificial Sequence
  Description of Artificial Sequence: Synthetic oligonucleotide
  Antisense strand to SEQ ID NO: 134220
auaacuggagaucaccuca

SEQ ID NO: 134222 - RNA, 19 nt, Artificial Sequence
  Description of Artificial Sequence: Synthetic oligonucleotide
  Sense strand starting at position 602 of SEQ ID NO: 1726
guuauaaugaggugaucuc

SEQ ID NO: 134223 - RNA, 19 nt, Artificial Sequence
  Description of Artificial Sequence: Synthetic oligonucleotide
  Antisense strand to SEQ ID NO: 134222
gagaucaccucauuauaac

SEQ ID NO: 134224 - RNA, 19 nt, Artificial Sequence
  Description of Artificial Sequence: Synthetic oligonucleotide
  Sense strand starting at position 554 of SEQ ID NO: 1726
guuuaagagguuuauauug

SEQ ID NO: 134225 - RNA, 19 nt, Artificial Sequence
  Description of Artificial Sequence: Synthetic oligonucleotide
  Antisense strand to SEQ ID NO: 134224
caauauaaaccucuuaaac

SEQ ID NO: 134226 - RNA, 19 nt, Artificial Sequence
  Description of Artificial Sequence: Synthetic oligonucleotide
  Sense strand starting at position 544 of SEQ ID NO: 1726
auauaacaguguuuaagag

SEQ ID NO: 134227 - RNA, 19 nt, Artificial Sequence
  Description of Artificial Sequence: Synthetic oligonucleotide
  Antisense strand to SEQ ID NO: 134226
cucuuaaacacuguuauau

SEQ ID NO: 134228 - RNA, 19 nt, Artificial Sequence
  Description of Artificial Sequence: Synthetic oligonucleotide
  Sense strand starting at position 382 of SEQ ID NO: 1726
aaggaauguuaaguuguuu

SEQ ID NO: 134229 - RNA, 19 nt, Artificial Sequence
  Description of Artificial Sequence: Synthetic oligonucleotide
  Antisense strand to SEQ ID NO: 134228
aaacaacuuaacauuccuu

SEQ ID NO: 134230 - RNA, 19 nt, Artificial Sequence
  Description of Artificial Sequence: Synthetic oligonucleotide
  Sense strand starting at position 357 of SEQ ID NO: 1726
ucaguuugauauccauaga

SEQ ID NO: 134231 - RNA, 19 nt, Artificial Sequence
  Description of Artificial Sequence: Synthetic oligonucleotide
  Antisense strand to SEQ ID NO: 134230
ucuauggauaucaaacuga

SEQ ID NO: 134232 - RNA, 19 nt, Artificial Sequence
  Description of Artificial Sequence: Synthetic oligonucleotide
  Sense strand starting at position 338 of SEQ ID NO: 1726
guaugacaaccagguauau

SEQ ID NO: 134233 - RNA, 19 nt, Artificial Sequence
  Description of Artificial Sequence: Synthetic oligonucleotide
  Antisense strand to SEQ ID NO: 134232
auauaccugguugucauac

SEQ ID NO: 134234 - RNA, 19 nt, Artificial Sequence
  Description of Artificial Sequence: Synthetic oligonucleotide
  Sense strand starting at position 255 of SEQ ID NO: 1726
cauggugguuaccuaaaga

SEQ ID NO: 134235 - RNA, 19 nt, Artificial Sequence
  Description of Artificial Sequence: Synthetic oligonucleotide
  Antisense strand to SEQ ID NO: 134234
ucuuuagguaaccaccaug

SEQ ID NO: 134236 - RNA, 19 nt, Artificial Sequence
  Description of Artificial Sequence: Synthetic oligonucleotide
  Sense strand starting at position 71 of SEQ ID NO: 1726
ccuaguugugauuacuaug

SEQ ID NO: 134237 - RNA, 19 nt, Artificial Sequence
  Description of Artificial Sequence: Synthetic oligonucleotide
  Antisense strand to SEQ ID NO: 134236
cauaguaaucacaacuagg

SEQ ID NO: 134238 - RNA, 19 nt, Artificial Sequence
  Description of Artificial Sequence: Synthetic oligonucleotide
  Sense strand starting at position 46 of SEQ ID NO: 1726
gggcauucucgacaaaguc

SEQ ID NO: 134239 - RNA, 19 nt, Artificial Sequence
  Description of Artificial Sequence: Synthetic oligonucleotide
  Antisense strand to SEQ ID NO: 134238
gacuuugucgagaaugccc

SEQ ID NO: 134240 - RNA, 19 nt, Artificial Sequence
  Description of Artificial Sequence: Synthetic oligonucleotide
  Sense strand starting at position 36 of SEQ ID NO: 1726
aguugaaauugggcauucu

SEQ ID NO: 134241 - RNA, 19 nt, Artificial Sequence
  Description of Artificial Sequence: Synthetic oligonucleotide
  Antisense strand to SEQ ID NO: 134240
agaaugcccaauuucaacu

SEQ ID NO: 134242 - RNA, 19 nt, Artificial Sequence
  Description of Artificial Sequence: Synthetic oligonucleotide
  Sense strand starting at position 3914 of SEQ ID NO: 1722
uuuagauccuaguuaagau

SEQ ID NO: 134243 - RNA, 19 nt, Artificial Sequence
  Description of Artificial Sequence: Synthetic oligonucleotide
  Antisense strand to SEQ ID NO: 134242
aucuuaacuaggaucuaaa

SEQ ID NO: 134244 - RNA, 19 nt, Artificial Sequence
  Description of Artificial Sequence: Synthetic oligonucleotide
  Sense strand starting at position 3145 of SEQ ID NO: 1722
ccauuacuugagcaguaua

SEQ ID NO: 134245 - RNA, 19 nt, Artificial Sequence
  Description of Artificial Sequence: Synthetic oligonucleotide
  Antisense strand to SEQ ID NO: 134244
uauacugcucaaguaaugg

SEQ ID NO: 134246 - RNA, 19 nt, Artificial Sequence
  Description of Artificial Sequence: Synthetic oligonucleotide
  Sense strand starting at position 3137 of SEQ ID NO: 1722
uggugcauccauuacuuga

SEQ ID NO: 134247 - RNA, 19 nt, Artificial Sequence
  Description of Artificial Sequence: Synthetic oligonucleotide
  Antisense strand to SEQ ID NO: 134246
ucaaguaauggaugcacca

SEQ ID NO: 134248 - RNA, 19 nt, Artificial Sequence
  Description of Artificial Sequence: Synthetic oligonucleotide
  Sense strand starting at position 3104 of SEQ ID NO: 1722
gaguaagcucuuuaaugau

SEQ ID NO: 134249 - RNA, 19 nt, Artificial Sequence
  Description of Artificial Sequence: Synthetic oligonucleotide
  Antisense strand to SEQ ID NO: 134248
aucauuaaagagcuuacuc

SEQ ID NO: 134250 - RNA, 19 nt, Artificial Sequence
  Description of Artificial Sequence: Synthetic oligonucleotide
  Sense strand starting at position 3103 of SEQ ID NO: 1722
ugaguaagcucuuuaauga

SEQ ID NO: 134251 - RNA, 19 nt, Artificial Sequence
  Description of Artificial Sequence: Synthetic oligonucleotide
  Antisense strand to SEQ ID NO: 134250
ucauuaaagagcuuacuca

SEQ ID NO: 134252 - RNA, 19 nt, Artificial Sequence
  Description of Artificial Sequence: Synthetic oligonucleotide
  Sense strand starting at position 2955 of SEQ ID NO: 1722
uagaauucuuuagugagaa

SEQ ID NO: 134253 - RNA, 19 nt, Artificial Sequence
  Description of Artificial Sequence: Synthetic oligonucleotide
  Antisense strand to SEQ ID NO: 134252
uucucacuaaagaauucua

SEQ ID NO: 134254 - RNA, 19 nt, Artificial Sequence
  Description of Artificial Sequence: Synthetic oligonucleotide
  Sense strand starting at position 2840 of SEQ ID NO: 1722
guuacacaaugucuaacau

SEQ ID NO: 134255 - RNA, 19 nt, Artificial Sequence
  Description of Artificial Sequence: Synthetic oligonucleotide
  Antisense strand to SEQ ID NO: 134254
auguuagacauuguguaac

SEQ ID NO: 134256 - RNA, 19 nt, Artificial Sequence
  Description of Artificial Sequence: Synthetic oligonucleotide
  Sense strand starting at position 2492 of SEQ ID NO: 1722
ucuguuggaucauuacaga

SEQ ID NO: 134257 - RNA, 19 nt, Artificial Sequence
  Description of Artificial Sequence: Synthetic oligonucleotide
  Antisense strand to SEQ ID NO: 134256
ucuguaaugauccaacaga

SEQ ID NO: 134258 - RNA, 19 nt, Artificial Sequence
  Description of Artificial Sequence: Synthetic oligonucleotide
  Sense strand starting at position 2275 of SEQ ID NO: 1722
gcugacccauuuguuuaau

SEQ ID NO: 134259 - RNA, 19 nt, Artificial Sequence
  Description of Artificial Sequence: Synthetic oligonucleotide
  Antisense strand to SEQ ID NO: 134258
auuaaacaaaugggucagc

SEQ ID NO: 134260 - RNA, 19 nt, Artificial Sequence
  Description of Artificial Sequence: Synthetic oligonucleotide
  Sense strand starting at position 2266 of SEQ ID NO: 1722
guaguaauugcugacccau

SEQ ID NO: 134261 - RNA, 19 nt, Artificial Sequence
  Description of Artificial Sequence: Synthetic oligonucleotide
  Antisense strand to SEQ ID NO: 134260
augggucagcaauuacuac

SEQ ID NO: 134262 - RNA, 19 nt, Artificial Sequence
  Description of Artificial Sequence: Synthetic oligonucleotide
  Sense strand starting at position 2237 of SEQ ID NO: 1722
gggacaaauuauguguuaa

SEQ ID NO: 134263 - RNA, 19 nt, Artificial Sequence
  Description of Artificial Sequence: Synthetic oligonucleotide
  Antisense strand to SEQ ID NO: 134262
uuaacacauaauuuguccc

SEQ ID NO: 134264 - RNA, 19 nt, Artificial Sequence
  Description of Artificial Sequence: Synthetic oligonucleotide
  Sense strand starting at position 1896 of SEQ ID NO: 1722
uaaaguuaccugugaagaa

SEQ ID NO: 134265 - RNA, 19 nt, Artificial Sequence
  Description of Artificial Sequence: Synthetic oligonucleotide
  Antisense strand to SEQ ID NO: 134264
uucuucacagguaacuuua

SEQ ID NO: 134266 - RNA, 19 nt, Artificial Sequence
  Description of Artificial Sequence: Synthetic oligonucleotide
  Sense strand starting at position 1702 of SEQ ID NO: 1722
auuauauuccaguaugcau

SEQ ID NO: 134267 - RNA, 19 nt, Artificial Sequence
  Description of Artificial Sequence: Synthetic oligonucleotide
  Antisense strand to SEQ ID NO: 134266
augcauacuggaauauaau

SEQ ID NO: 134268 - RNA, 19 nt, Artificial Sequence
  Description of Artificial Sequence: Synthetic oligonucleotide
  Sense strand starting at position 1678 of SEQ ID NO: 1722
agagccucagcugaaauau

SEQ ID NO: 134269 - RNA, 19 nt, Artificial Sequence
  Description of Artificial Sequence: Synthetic oligonucleotide
  Antisense strand to SEQ ID NO: 134268
auauuucagcugaggcucu

SEQ ID NO: 134270 - RNA, 19 nt, Artificial Sequence
  Description of Artificial Sequence: Synthetic oligonucleotide
  Sense strand starting at position 1675 of SEQ ID NO: 1722
auaagagccucagcugaaa

SEQ ID NO: 134271 - RNA, 19 nt, Artificial Sequence
  Description of Artificial Sequence: Synthetic oligonucleotide
  Antisense strand to SEQ ID NO: 134270
uuucagcugaggcucuuau

SEQ ID NO: 134272 - RNA, 19 nt, Artificial Sequence
  Description of Artificial Sequence: Synthetic oligonucleotide
  Sense strand starting at position 1268 of SEQ ID NO: 1722
guuuacccugaagguaaau

SEQ ID NO: 134273 - RNA, 19 nt, Artificial Sequence
  Description of Artificial Sequence: Synthetic oligonucleotide
  Antisense strand to SEQ ID NO: 134272
auuuaccuucaggguaaac

SEQ ID NO: 134274 - RNA, 19 nt, Artificial Sequence
  Description of Artificial Sequence: Synthetic oligonucleotide
  Sense strand starting at position 1264 of SEQ ID NO: 1722
uaaaguuuacccugaaggu

SEQ ID NO: 134275 - RNA, 19 nt, Artificial Sequence
  Description of Artificial Sequence: Synthetic oligonucleotide
  Antisense strand to SEQ ID NO: 134274
accuucaggguaaacuuua

SEQ ID NO: 134276 - RNA, 19 nt, Artificial Sequence
  Description of Artificial Sequence: Synthetic oligonucleotide
  Sense strand starting at position 1242 of SEQ ID NO: 1722
uuaauagucuagcugauaa

SEQ ID NO: 134277 - RNA, 19 nt, Artificial Sequence
  Description of Artificial Sequence: Synthetic oligonucleotide
  Antisense strand to SEQ ID NO: 134276
uuaucagcuagacuauuaa

SEQ ID NO: 134278 - RNA, 19 nt, Artificial Sequence
  Description of Artificial Sequence: Synthetic oligonucleotide
  Sense strand starting at position 1216 of SEQ ID NO: 1722
augguaagucauuauacug

SEQ ID NO: 134279 - RNA, 19 nt, Artificial Sequence
  Description of Artificial Sequence: Synthetic oligonucleotide
  Antisense strand to SEQ ID NO: 134278
caguauaaugacuuaccau

SEQ ID NO: 134280 - RNA, 19 nt, Artificial Sequence
  Description of Artificial Sequence: Synthetic oligonucleotide
  Sense strand starting at position 1126 of SEQ ID NO: 1722
acuguauacuaacuaugua

SEQ ID NO: 134281 - RNA, 19 nt, Artificial Sequence
  Description of Artificial Sequence: Synthetic oligonucleotide
  Antisense strand to SEQ ID NO: 134280
uacauaguuaguauacagu

SEQ ID NO: 134282 - RNA, 19 nt, Artificial Sequence
  Description of Artificial Sequence: Synthetic oligonucleotide
  Sense strand starting at position 1118 of SEQ ID NO: 1722
aagggcugacuguauacua

SEQ ID NO: 134283 - RNA, 19 nt, Artificial Sequence
  Description of Artificial Sequence: Synthetic oligonucleotide
  Antisense strand to SEQ ID NO: 134282
uaguauacagucagcccuu

SEQ ID NO: 134284 - RNA, 19 nt, Artificial Sequence
  Description of Artificial Sequence: Synthetic oligonucleotide
  Sense strand starting at position 1033 of SEQ ID NO: 1722
auguuagguauagauguaa

SEQ ID NO: 134285 - RNA, 19 nt, Artificial Sequence
  Description of Artificial Sequence: Synthetic oligonucleotide
  Antisense strand to SEQ ID NO: 134284
uuacaucuauaccuaacau

SEQ ID NO: 134286 - RNA, 19 nt, Artificial Sequence
  Description of Artificial Sequence: Synthetic oligonucleotide
  Sense strand starting at position 1031 of SEQ ID NO: 1722
acauguuagguauagaugu

SEQ ID NO: 134287 - RNA, 19 nt, Artificial Sequence
  Description of Artificial Sequence: Synthetic oligonucleotide
  Antisense strand to SEQ ID NO: 134286
acaucuauaccuaacaugu

SEQ ID NO: 134288 - RNA, 19 nt, Artificial Sequence
  Description of Artificial Sequence: Synthetic oligonucleotide
  Sense strand starting at position 1029 of SEQ ID NO: 1722
guacauguuagguauagau

SEQ ID NO: 134289 - RNA, 19 nt, Artificial Sequence
  Description of Artificial Sequence: Synthetic oligonucleotide
  Antisense strand to SEQ ID NO: 134288
aucuauaccuaacauguac

SEQ ID NO: 134290 - RNA, 19 nt, Artificial Sequence
  Description of Artificial Sequence: Synthetic oligonucleotide
  Sense strand starting at position 1028 of SEQ ID NO: 1722
uguacauguuagguauaga

SEQ ID NO: 134291 - RNA, 19 nt, Artificial Sequence
  Description of Artificial Sequence: Synthetic oligonucleotide
  Antisense strand to SEQ ID NO: 134290
ucuauaccuaacauguaca

SEQ ID NO: 134292 - RNA, 19 nt, Artificial Sequence
  Description of Artificial Sequence: Synthetic oligonucleotide
  Sense strand starting at position 881 of SEQ ID NO: 1722
gacagaggcuuugcauaaa

SEQ ID NO: 134293 - RNA, 19 nt, Artificial Sequence
  Description of Artificial Sequence: Synthetic oligonucleotide
  Antisense strand to SEQ ID NO: 134292
uuuaugcaaagccucuguc

SEQ ID NO: 134294 - RNA, 19 nt, Artificial Sequence
  Description of Artificial Sequence: Synthetic oligonucleotide
  Sense strand starting at position 792 of SEQ ID NO: 1722
auaguuguccaucaguauc

SEQ ID NO: 134295 - RNA, 19 nt, Artificial Sequence
  Description of Artificial Sequence: Synthetic oligonucleotide
  Antisense strand to SEQ ID NO: 134294
gauacugauggacaacuau

SEQ ID NO: 134296 - RNA, 19 nt, Artificial Sequence
  Description of Artificial Sequence: Synthetic oligonucleotide
  Sense strand starting at position 789 of SEQ ID NO: 1722
auuauaguuguccaucagu

SEQ ID NO: 134297 - RNA, 19 nt, Artificial Sequence
  Description of Artificial Sequence: Synthetic oligonucleotide
  Antisense strand to SEQ ID NO: 134296
acugauggacaacuauaau

SEQ ID NO: 134298 - RNA, 19 nt, Artificial Sequence
  Description of Artificial Sequence: Synthetic oligonucleotide
  Sense strand starting at position 768 of SEQ ID NO: 1722
aguccauaauugucacaau

SEQ ID NO: 134299 - RNA, 19 nt, Artificial Sequence
  Description of Artificial Sequence: Synthetic oligonucleotide
  Antisense strand to SEQ ID NO: 134298
auugugacaauuauggacu

SEQ ID NO: 134300 - RNA, 19 nt, Artificial Sequence
  Description of Artificial Sequence: Synthetic oligonucleotide
  Sense strand starting at position 705 of SEQ ID NO: 1722
acaugaagugguuggauca

SEQ ID NO: 134301 - RNA, 19 nt, Artificial Sequence
  Description of Artificial Sequence: Synthetic oligonucleotide
  Antisense strand to SEQ ID NO: 134300
ugauccaaccacuucaugu

SEQ ID NO: 134302 - RNA, 19 nt, Artificial Sequence
  Description of Artificial Sequence: Synthetic oligonucleotide
  Sense strand starting at position 646 of SEQ ID NO: 1722
cuaacuuucugacuugaga

SEQ ID NO: 134303 - RNA, 19 nt, Artificial Sequence
  Description of Artificial Sequence: Synthetic oligonucleotide
  Antisense strand to SEQ ID NO: 134302
ucucaagucagaaaguuag

SEQ ID NO: 134304 - RNA, 19 nt, Artificial Sequence
  Description of Artificial Sequence: Synthetic oligonucleotide
  Sense strand starting at position 595 of SEQ ID NO: 1722
auaaauugaguaggaguca

SEQ ID NO: 134305 - RNA, 19 nt, Artificial Sequence
  Description of Artificial Sequence: Synthetic oligonucleotide
  Antisense strand to SEQ ID NO: 134304
ugacuccuacucaauuuau

SEQ ID NO: 134306 - RNA, 19 nt, Artificial Sequence
  Description of Artificial Sequence: Synthetic oligonucleotide
  Sense strand starting at position 538 of SEQ ID NO: 1722
agauaccagccagguauua

SEQ ID NO: 134307 - RNA, 19 nt, Artificial Sequence
  Description of Artificial Sequence: Synthetic oligonucleotide
  Antisense strand to SEQ ID NO: 134306
uaauaccuggcugguaucu

SEQ ID NO: 134308 - RNA, 19 nt, Artificial Sequence
  Description of Artificial Sequence: Synthetic oligonucleotide
  Sense strand starting at position 482 of SEQ ID NO: 1722
augugaggauagucacaga

SEQ ID NO: 134309 - RNA, 19 nt, Artificial Sequence
  Description of Artificial Sequence: Synthetic oligonucleotide
  Antisense strand to SEQ ID NO: 134308
ucugugacuauccucacau

SEQ ID NO: 134310 - RNA, 19 nt, Artificial Sequence
  Description of Artificial Sequence: Synthetic oligonucleotide
  Sense strand starting at position 423 of SEQ ID NO: 1722
cuuguauauguguaaauca

SEQ ID NO: 134311 - RNA, 19 nt, Artificial Sequence
  Description of Artificial Sequence: Synthetic oligonucleotide
  Antisense strand to SEQ ID NO: 134310
ugauuuacacauauacaag

SEQ ID NO: 134312 - RNA, 19 nt, Artificial Sequence
  Description of Artificial Sequence: Synthetic oligonucleotide
  Sense strand starting at position 341 of SEQ ID NO: 1722
cgaagacugugauucuauu

SEQ ID NO: 134313 - RNA, 19 nt, Artificial Sequence
  Description of Artificial Sequence: Synthetic oligonucleotide
  Antisense strand to SEQ ID NO: 134312
aauagaaucacagucuucg

SEQ ID NO: 134314 - RNA, 19 nt, Artificial Sequence
  Description of Artificial Sequence: Synthetic oligonucleotide
  Sense strand starting at position 338 of SEQ ID NO: 1722
ucacgaagacugugauucu

SEQ ID NO: 134315 - RNA, 19 nt, Artificial Sequence
  Description of Artificial Sequence: Synthetic oligonucleotide
  Antisense strand to SEQ ID NO: 134314
agaaucacagucuucguga

SEQ ID NO: 134316 - RNA, 19 nt, Artificial Sequence
  Description of Artificial Sequence: Synthetic oligonucleotide
  Sense strand starting at position 267 of SEQ ID NO: 1722
cuaggucauuuagacuuaa

SEQ ID NO: 134317 - RNA, 19 nt, Artificial Sequence
  Description of Artificial Sequence: Synthetic oligonucleotide
  Antisense strand to SEQ ID NO: 134316
uuaagucuaaaugaccuag

SEQ ID NO: 134318 - RNA, 19 nt, Artificial Sequence
  Description of Artificial Sequence: Synthetic oligonucleotide
  Sense strand starting at position 259 of SEQ ID NO: 1722
uuuguauccuaggucauuu

SEQ ID NO: 134319 - RNA, 19 nt, Artificial Sequence
  Description of Artificial Sequence: Synthetic oligonucleotide
  Antisense strand to SEQ ID NO: 134318
aaaugaccuaggauacaaa

SEQ ID NO: 134320 - RNA, 19 nt, Artificial Sequence
  Description of Artificial Sequence: Synthetic oligonucleotide
  Sense strand starting at position 37 of SEQ ID NO: 1722
gcaauaaguagauagugau

SEQ ID NO: 134321 - RNA, 19 nt, Artificial Sequence
  Description of Artificial Sequence: Synthetic oligonucleotide
  Antisense strand to SEQ ID NO: 134320
aucacuaucuacuuauugc

SEQ ID NO: 134322 - RNA, 19 nt, Artificial Sequence
  Description of Artificial Sequence: Synthetic oligonucleotide
  Sense strand starting at position 3952 of SEQ ID NO: 1724
gccacauacuuccuaggaa

SEQ ID NO: 134323 - RNA, 19 nt, Artificial Sequence
  Description of Artificial Sequence: Synthetic oligonucleotide
  Antisense strand to SEQ ID NO: 134322
uuccuaggaaguauguggc

SEQ ID NO: 134324 - RNA, 19 nt, Artificial Sequence
  Description of Artificial Sequence: Synthetic oligonucleotide
  Sense strand starting at position 3944 of SEQ ID NO: 1724
ugaagucugccacauacuu

SEQ ID NO: 134325 - RNA, 19 nt, Artificial Sequence
  Description of Artificial Sequence: Synthetic oligonucleotide
  Antisense strand to SEQ ID NO: 134324
aaguauguggcagacuuca

SEQ ID NO: 134326 - RNA, 19 nt, Artificial Sequence
  Description of Artificial Sequence: Synthetic oligonucleotide
  Sense strand starting at position 3884 of SEQ ID NO: 1724
ugcucuacugaaggaaauu

SEQ ID NO: 134327 - RNA, 19 nt, Artificial Sequence
  Description of Artificial Sequence: Synthetic oligonucleotide
  Antisense strand to SEQ ID NO: 134326
aauuuccuucaguagagca

SEQ ID NO: 134328 - RNA, 19 nt, Artificial Sequence
  Description of Artificial Sequence: Synthetic oligonucleotide
  Sense strand starting at position 3792 of SEQ ID NO: 1724
auuaaaugucuguagucuu

SEQ ID NO: 134329 - RNA, 19 nt, Artificial Sequence
  Description of Artificial Sequence: Synthetic oligonucleotide
  Antisense strand to SEQ ID NO: 134328
aagacuacagacauuuaau

SEQ ID NO: 134330 - RNA, 19 nt, Artificial Sequence
  Description of Artificial Sequence: Synthetic oligonucleotide
  Sense strand starting at position 3789 of SEQ ID NO: 1724
cuuauuaaaugucuguagu

SEQ ID NO: 134331 - RNA, 19 nt, Artificial Sequence
  Description of Artificial Sequence: Synthetic oligonucleotide
  Antisense strand to SEQ ID NO: 134330
acuacagacauuuaauaag

SEQ ID NO: 134332 - RNA, 19 nt, Artificial Sequence
  Description of Artificial Sequence: Synthetic oligonucleotide
  Sense strand starting at position 3762 of SEQ ID NO: 1724
cugguagugccuuacacaa

SEQ ID NO: 134333 - RNA, 19 nt, Artificial Sequence
  Description of Artificial Sequence: Synthetic oligonucleotide
  Antisense strand to SEQ ID NO: 134332
uuguguaaggcacuaccag

SEQ ID NO: 134334 - RNA, 19 nt, Artificial Sequence
  Description of Artificial Sequence: Synthetic oligonucleotide
  Sense strand starting at position 3724 of SEQ ID NO: 1724
auauuaugugugcauaaca

SEQ ID NO: 134335 - RNA, 19 nt, Artificial Sequence
  Description of Artificial Sequence: Synthetic oligonucleotide
  Antisense strand to SEQ ID NO: 134334
uguuaugcacacauaauau

SEQ ID NO: 134336 - RNA, 19 nt, Artificial Sequence
  Description of Artificial Sequence: Synthetic oligonucleotide
  Sense strand starting at position 3468 of SEQ ID NO: 1724
guauacuuuguguaaugga

SEQ ID NO: 134337 - RNA, 19 nt, Artificial Sequence
  Description of Artificial Sequence: Synthetic oligonucleotide
  Antisense strand to SEQ ID NO: 134336
uccauuacacaaaguauac

SEQ ID NO: 134338 - RNA, 19 nt, Artificial Sequence
  Description of Artificial Sequence: Synthetic oligonucleotide
  Sense strand starting at position 3321 of SEQ ID NO: 1724
cugccaacuguuugacaaa

SEQ ID NO: 134339 - RNA, 19 nt, Artificial Sequence
  Description of Artificial Sequence: Synthetic oligonucleotide
  Antisense strand to SEQ ID NO: 134338
uuugucaaacaguuggcag

SEQ ID NO: 134340 - RNA, 19 nt, Artificial Sequence
  Description of Artificial Sequence: Synthetic oligonucleotide
  Sense strand starting at position 3204 of SEQ ID NO: 1724
agaaauuuccgugguucuc

SEQ ID NO: 134341 - RNA, 19 nt, Artificial Sequence
  Description of Artificial Sequence: Synthetic oligonucleotide
  Antisense strand to SEQ ID NO: 134340
gagaaccacggaaauuucu

SEQ ID NO: 134342 - RNA, 19 nt, Artificial Sequence
  Description of Artificial Sequence: Synthetic oligonucleotide
  Sense strand starting at position 3142 of SEQ ID NO: 1724
gaaaguaaccuguggcauu

SEQ ID NO: 134343 - RNA, 19 nt, Artificial Sequence
  Description of Artificial Sequence: Synthetic oligonucleotide
  Antisense strand to SEQ ID NO: 134342
aaugccacagguuacuuuc

SEQ ID NO: 134344 - RNA, 19 nt, Artificial Sequence
  Description of Artificial Sequence: Synthetic oligonucleotide
  Sense strand starting at position 2696 of SEQ ID NO: 1724
uuggcugagacauguuaau

SEQ ID NO: 134345 - RNA, 19 nt, Artificial Sequence
  Description of Artificial Sequence: Synthetic oligonucleotide
  Antisense strand to SEQ ID NO: 134344
auuaacaugucucagccaa

SEQ ID NO: 134346 - RNA, 19 nt, Artificial Sequence
  Description of Artificial Sequence: Synthetic oligonucleotide
  Sense strand starting at position 2689 of SEQ ID NO: 1724
cuucuaguuggcugagaca

SEQ ID NO: 134347 - RNA, 19 nt, Artificial Sequence
  Description of Artificial Sequence: Synthetic oligonucleotide
  Antisense strand to SEQ ID NO: 134346
ugucucagccaacuagaag

SEQ ID NO: 134348 - RNA, 19 nt, Artificial Sequence
  Description of Artificial Sequence: Synthetic oligonucleotide
  Sense strand starting at position 2563 of SEQ ID NO: 1724
gcugacauaugucuauuac

SEQ ID NO: 134349 - RNA, 19 nt, Artificial Sequence
  Description of Artificial Sequence: Synthetic oligonucleotide
  Antisense strand to SEQ ID NO: 134348
guaauagacauaugucagc

SEQ ID NO: 134350 - RNA, 19 nt, Artificial Sequence
  Description of Artificial Sequence: Synthetic oligonucleotide
  Sense strand starting at position 2534 of SEQ ID NO: 1724
gucaguauugcuuaucaaa

SEQ ID NO: 134351 - RNA, 19 nt, Artificial Sequence
  Description of Artificial Sequence: Synthetic oligonucleotide
  Antisense strand to SEQ ID NO: 134350
uuugauaagcaauacugac

SEQ ID NO: 134352 - RNA, 19 nt, Artificial Sequence
  Description of Artificial Sequence: Synthetic oligonucleotide
  Sense strand starting at position 2527 of SEQ ID NO: 1724
uuaguaugucaguauugcu

SEQ ID NO: 134353 - RNA, 19 nt, Artificial Sequence
  Description of Artificial Sequence: Synthetic oligonucleotide
  Antisense strand to SEQ ID NO: 134352
agcaauacugacauacuaa

SEQ ID NO: 134354 - RNA, 19 nt, Artificial Sequence
  Description of Artificial Sequence: Synthetic oligonucleotide
  Sense strand starting at position 2522 of SEQ ID NO: 1724
uacacuuaguaugucagua

SEQ ID NO: 134355 - RNA, 19 nt, Artificial Sequence
  Description of Artificial Sequence: Synthetic oligonucleotide
  Antisense strand to SEQ ID NO: 134354
uacugacauacuaagugua

SEQ ID NO: 134356 - RNA, 19 nt, Artificial Sequence
  Description of Artificial Sequence: Synthetic oligonucleotide
  Sense strand starting at position 2386 of SEQ ID NO: 1724
uaguaugaaauggguauga

SEQ ID NO: 134357 - RNA, 19 nt, Artificial Sequence
  Description of Artificial Sequence: Synthetic oligonucleotide
  Antisense strand to SEQ ID NO: 134356
ucauacccauuucauacua

SEQ ID NO: 134358 - RNA, 19 nt, Artificial Sequence
  Description of Artificial Sequence: Synthetic oligonucleotide
  Sense strand starting at position 2384 of SEQ ID NO: 1724
acuaguaugaaauggguau

SEQ ID NO: 134359 - RNA, 19 nt, Artificial Sequence
  Description of Artificial Sequence: Synthetic oligonucleotide
  Antisense strand to SEQ ID NO: 134358
auacccauuucauacuagu

SEQ ID NO: 134360 - RNA, 19 nt, Artificial Sequence
  Description of Artificial Sequence: Synthetic oligonucleotide
  Sense strand starting at position 2293 of SEQ ID NO: 1724
augcuaaagacagguugua

SEQ ID NO: 134361 - RNA, 19 nt, Artificial Sequence
  Description of Artificial Sequence: Synthetic oligonucleotide
  Antisense strand to SEQ ID NO: 134360
uacaaccugucuuuagcau

SEQ ID NO: 134362 - RNA, 19 nt, Artificial Sequence
  Description of Artificial Sequence: Synthetic oligonucleotide
  Sense strand starting at position 2243 of SEQ ID NO: 1724
ugacaagucuaugcaaaca

SEQ ID NO: 134363 - RNA, 19 nt, Artificial Sequence
  Description of Artificial Sequence: Synthetic oligonucleotide
  Antisense strand to SEQ ID NO: 134362
uguuugcauagacuuguca

SEQ ID NO: 134364 - RNA, 19 nt, Artificial Sequence
  Description of Artificial Sequence: Synthetic oligonucleotide
  Sense strand starting at position 2242 of SEQ ID NO: 1724
augacaagucuaugcaaac

SEQ ID NO: 134365 - RNA, 19 nt, Artificial Sequence
  Description of Artificial Sequence: Synthetic oligonucleotide
  Antisense strand to SEQ ID NO: 134364
guuugcauagacuugucau

SEQ ID NO: 134366 - RNA, 19 nt, Artificial Sequence
  Description of Artificial Sequence: Synthetic oligonucleotide
  Sense strand starting at position 2240 of SEQ ID NO: 1724
guaugacaagucuaugcaa

SEQ ID NO: 134367 - RNA, 19 nt, Artificial Sequence
  Description of Artificial Sequence: Synthetic oligonucleotide
  Antisense strand to SEQ ID NO: 134366
uugcauagacuugucauac

SEQ ID NO: 134368 - RNA, 19 nt, Artificial Sequence
  Description of Artificial Sequence: Synthetic oligonucleotide
  Sense strand starting at position 2231 of SEQ ID NO: 1724
guuaaacauguaugacaag

SEQ ID NO: 134369 - RNA, 19 nt, Artificial Sequence
  Description of Artificial Sequence: Synthetic oligonucleotide
  Antisense strand to SEQ ID NO: 134368
cuugucauacauguuuaac

SEQ ID NO: 134370 - RNA, 19 nt, Artificial Sequence
  Description of Artificial Sequence: Synthetic oligonucleotide
  Sense strand starting at position 2080 of SEQ ID NO: 1724
ucagcuagaguugaggauu

SEQ ID NO: 134371 - RNA, 19 nt, Artificial Sequence
  Description of Artificial Sequence: Synthetic oligonucleotide
  Antisense strand to SEQ ID NO: 134370
aauccucaacucuagcuga

SEQ ID NO: 134372 - RNA, 19 nt, Artificial Sequence
  Description of Artificial Sequence: Synthetic oligonucleotide
  Sense strand starting at position 1618 of SEQ ID NO: 1724
aggguucuuuauguuugau

SEQ ID NO: 134373 - RNA, 19 nt, Artificial Sequence
  Description of Artificial Sequence: Synthetic oligonucleotide
  Antisense strand to SEQ ID NO: 134372
aucaaacauaaagaacccu

SEQ ID NO: 134374 - RNA, 19 nt, Artificial Sequence
  Description of Artificial Sequence: Synthetic oligonucleotide
  Sense strand starting at position 1371 of SEQ ID NO: 1724
acagaugguuguuucugaa

SEQ ID NO: 134375 - RNA, 19 nt, Artificial Sequence
  Description of Artificial Sequence: Synthetic oligonucleotide
  Antisense strand to SEQ ID NO: 134374
uucagaaacaaccaucugu

SEQ ID NO: 134376 - RNA, 19 nt, Artificial Sequence
  Description of Artificial Sequence: Synthetic oligonucleotide
  Sense strand starting at position 1370 of SEQ ID NO: 1724
aacagaugguuguuucuga

SEQ ID NO: 134377 - RNA, 19 nt, Artificial Sequence
  Description of Artificial Sequence: Synthetic oligonucleotide
  Antisense strand to SEQ ID NO: 134376
ucagaaacaaccaucuguu

SEQ ID NO: 134378 - RNA, 19 nt, Artificial Sequence
  Description of Artificial Sequence: Synthetic oligonucleotide
  Sense strand starting at position 1364 of SEQ ID NO: 1724
gaaguaaacagaugguugu

SEQ ID NO: 134379 - RNA, 19 nt, Artificial Sequence
  Description of Artificial Sequence: Synthetic oligonucleotide
  Antisense strand to SEQ ID NO: 134378
acaaccaucuguuuacuuc

SEQ ID NO: 134380 - RNA, 19 nt, Artificial Sequence
  Description of Artificial Sequence: Synthetic oligonucleotide
  Sense strand starting at position 1217 of SEQ ID NO: 1724
agaaauuccuguuuguaaa

SEQ ID NO: 134381 - RNA, 19 nt, Artificial Sequence
  Description of Artificial Sequence: Synthetic oligonucleotide
  Antisense strand to SEQ ID NO: 134380
uuuacaaacaggaauuucu

SEQ ID NO: 134382 - RNA, 19 nt, Artificial Sequence
  Description of Artificial Sequence: Synthetic oligonucleotide
  Sense strand starting at position 1107 of SEQ ID NO: 1724
uccugcauuugagucauau

SEQ ID NO: 134383 - RNA, 19 nt, Artificial Sequence
  Description of Artificial Sequence: Synthetic oligonucleotide
  Antisense strand to SEQ ID NO: 134382
auaugacucaaaugcagga

SEQ ID NO: 134384 - RNA, 19 nt, Artificial Sequence
  Description of Artificial Sequence: Synthetic oligonucleotide
  Sense strand starting at position 966 of SEQ ID NO: 1724
gcacuaguauuguuuauau

SEQ ID NO: 134385 - RNA, 19 nt, Artificial Sequence
  Description of Artificial Sequence: Synthetic oligonucleotide
  Antisense strand to SEQ ID NO: 134384
auauaaacaauacuagugc

SEQ ID NO: 134386 - RNA, 19 nt, Artificial Sequence
  Description of Artificial Sequence: Synthetic oligonucleotide
  Sense strand starting at position 963 of SEQ ID NO: 1724
gcggcacuaguauuguuua

SEQ ID NO: 134387 - RNA, 19 nt, Artificial Sequence
  Description of Artificial Sequence: Synthetic oligonucleotide
  Antisense strand to SEQ ID NO: 134386
uaaacaauacuagugccgc

SEQ ID NO: 134388 - RNA, 19 nt, Artificial Sequence
  Description of Artificial Sequence: Synthetic oligonucleotide
  Sense strand starting at position 955 of SEQ ID NO: 1724
guagaauggcggcacuagu

SEQ ID NO: 134389 - RNA, 19 nt, Artificial Sequence
  Description of Artificial Sequence: Synthetic oligonucleotide
  Antisense strand to SEQ ID NO: 134388
acuagugccgccauucuac

SEQ ID NO: 134390 - RNA, 19 nt, Artificial Sequence
  Description of Artificial Sequence: Synthetic oligonucleotide
  Sense strand starting at position 837 of SEQ ID NO: 1724
gcuagugcuauuugaugau

SEQ ID NO: 134391 - RNA, 19 nt, Artificial Sequence
  Description of Artificial Sequence: Synthetic oligonucleotide
  Antisense strand to SEQ ID NO: 134390
aucaucaaauagcacuagc

SEQ ID NO: 134392 - RNA, 19 nt, Artificial Sequence
  Description of Artificial Sequence: Synthetic oligonucleotide
  Sense strand starting at position 724 of SEQ ID NO: 1724
uguauaaaccuaggaguaa

SEQ ID NO: 134393 - RNA, 19 nt, Artificial Sequence
  Description of Artificial Sequence: Synthetic oligonucleotide
  Antisense strand to SEQ ID NO: 134392
uuacuccuagguuuauaca

SEQ ID NO: 134394 - RNA, 19 nt, Artificial Sequence
  Description of Artificial Sequence: Synthetic oligonucleotide
  Sense strand starting at position 722 of SEQ ID NO: 1724
gcuguauaaaccuaggagu

SEQ ID NO: 134395 - RNA, 19 nt, Artificial Sequence
  Description of Artificial Sequence: Synthetic oligonucleotide
  Antisense strand to SEQ ID NO: 134394
acuccuagguuuauacagc

SEQ ID NO: 134396 - RNA, 19 nt, Artificial Sequence
  Description of Artificial Sequence: Synthetic oligonucleotide
  Sense strand starting at position 299 of SEQ ID NO: 1724
auaugaagagcagguauua

SEQ ID NO: 134397 - RNA, 19 nt, Artificial Sequence
  Description of Artificial Sequence: Synthetic oligonucleotide
  Antisense strand to SEQ ID NO: 134396
uaauaccugcucuucauau

SEQ ID NO: 134398 - RNA, 19 nt, Artificial Sequence
  Description of Artificial Sequence: Synthetic oligonucleotide
  Sense strand starting at position 61 of SEQ ID NO: 1724
guacaagaauccuauuugu

SEQ ID NO: 134399 - RNA, 19 nt, Artificial Sequence
  Description of Artificial Sequence: Synthetic oligonucleotide
  Antisense strand to SEQ ID NO: 134398
acaaauaggauucuuguac

SEQ ID NO: 134400 - RNA, 19 nt, Artificial Sequence
  Description of Artificial Sequence: Synthetic oligonucleotide
  Sense strand starting at position 18 of SEQ ID NO: 1724
uauuauuugcagcgcuaca

SEQ ID NO: 134401 - RNA, 19 nt, Artificial Sequence
  Description of Artificial Sequence: Synthetic oligonucleotide
  Antisense strand to SEQ ID NO: 134400
uguagcgcugcaaauaaua

SEQ ID NO: 134402 - RNA, 19 nt, Artificial Sequence
  Description of Artificial Sequence: Synthetic oligonucleotide
  Sense strand starting at position 3980 of SEQ ID NO: 1723
uuugcucugcuuuaaggaa

SEQ ID NO: 134403 - RNA, 19 nt, Artificial Sequence
  Description of Artificial Sequence: Synthetic oligonucleotide
  Antisense strand to SEQ ID NO: 134402
uuccuuaaagcagagcaaa

SEQ ID NO: 134404 - RNA, 19 nt, Artificial Sequence
  Description of Artificial Sequence: Synthetic oligonucleotide
  Sense strand starting at position 3873 of SEQ ID NO: 1723
ggaaauaaguuguuaauga

SEQ ID NO: 134405 - RNA, 19 nt, Artificial Sequence
  Description of Artificial Sequence: Synthetic oligonucleotide
  Antisense strand to SEQ ID NO: 134404
ucauuaacaacuuauuucc

SEQ ID NO: 134406 - RNA, 19 nt, Artificial Sequence
  Description of Artificial Sequence: Synthetic oligonucleotide
  Sense strand starting at position 3857 of SEQ ID NO: 1723
cuuuauuauugguuaagga

SEQ ID NO: 134407 - RNA, 19 nt, Artificial Sequence
  Description of Artificial Sequence: Synthetic oligonucleotide
  Antisense strand to SEQ ID NO: 134406
uccuuaaccaauaauaaag

SEQ ID NO: 134408 - RNA, 19 nt, Artificial Sequence
  Description of Artificial Sequence: Synthetic oligonucleotide
  Sense strand starting at position 3681 of SEQ ID NO: 1723
uuugaauucuaggucucua

SEQ ID NO: 134409 - RNA, 19 nt, Artificial Sequence
  Description of Artificial Sequence: Synthetic oligonucleotide
  Antisense strand to SEQ ID NO: 134408
uagagaccuagaauucaaa

SEQ ID NO: 134410 - RNA, 19 nt, Artificial Sequence
  Description of Artificial Sequence: Synthetic oligonucleotide
  Sense strand starting at position 3585 of SEQ ID NO: 1723
cugucauugggaugaguuu

SEQ ID NO: 134411 - RNA, 19 nt, Artificial Sequence
  Description of Artificial Sequence: Synthetic oligonucleotide
  Antisense strand to SEQ ID NO: 134410
aaacucaucccaaugacag

SEQ ID NO: 134412 - RNA, 19 nt, Artificial Sequence
  Description of Artificial Sequence: Synthetic oligonucleotide
  Sense strand starting at position 3581 of SEQ ID NO: 1723
acuacugucauugggauga

SEQ ID NO: 134413 - RNA, 19 nt, Artificial Sequence
  Description of Artificial Sequence: Synthetic oligonucleotide
  Antisense strand to SEQ ID NO: 134412
ucaucccaaugacaguagu

SEQ ID NO: 134414 - RNA, 19 nt, Artificial Sequence
  Description of Artificial Sequence: Synthetic oligonucleotide
  Sense strand starting at position 3579 of SEQ ID NO: 1723
auacuacugucauugggau

SEQ ID NO: 134415 - RNA, 19 nt, Artificial Sequence
  Description of Artificial Sequence: Synthetic oligonucleotide
  Antisense strand to SEQ ID NO: 134414
aucccaaugacaguaguau

SEQ ID NO: 134416 - RNA, 19 nt, Artificial Sequence
  Description of Artificial Sequence: Synthetic oligonucleotide
  Sense strand starting at position 3550 of SEQ ID NO: 1723
gagggaaucuuucugguau

SEQ ID NO: 134417 - RNA, 19 nt, Artificial Sequence
  Description of Artificial Sequence: Synthetic oligonucleotide
  Antisense strand to SEQ ID NO: 134416
auaccagaaagauucccuc

SEQ ID NO: 134418 - RNA, 19 nt, Artificial Sequence
  Description of Artificial Sequence: Synthetic oligonucleotide
  Sense strand starting at position 3541 of SEQ ID NO: 1723
uguauucuagagggaaucu

SEQ ID NO: 134419 - RNA, 19 nt, Artificial Sequence
  Description of Artificial Sequence: Synthetic oligonucleotide
  Antisense strand to SEQ ID NO: 134418
agauucccucuagaauaca

SEQ ID NO: 134420 - RNA, 19 nt, Artificial Sequence
  Description of Artificial Sequence: Synthetic oligonucleotide
  Sense strand starting at position 3540 of SEQ ID NO: 1723
auguauucuagagggaauc

SEQ ID NO: 134421 - RNA, 19 nt, Artificial Sequence
  Description of Artificial Sequence: Synthetic oligonucleotide
  Antisense strand to SEQ ID NO: 134420
gauucccucuagaauacau

SEQ ID NO: 134422 - RNA, 19 nt, Artificial Sequence
  Description of Artificial Sequence: Synthetic oligonucleotide
  Sense strand starting at position 3534 of SEQ ID NO: 1723
gauauuauguauucuagag

SEQ ID NO: 134423 - RNA, 19 nt, Artificial Sequence
  Description of Artificial Sequence: Synthetic oligonucleotide
  Antisense strand to SEQ ID NO: 134422
cucuagaauacauaauauc

SEQ ID NO: 134424 - RNA, 19 nt, Artificial Sequence
  Description of Artificial Sequence: Synthetic oligonucleotide
  Sense strand starting at position 3361 of SEQ ID NO: 1723
agcaaagauuuggacuaga

SEQ ID NO: 134425 - RNA, 19 nt, Artificial Sequence
  Description of Artificial Sequence: Synthetic oligonucleotide
  Antisense strand to SEQ ID NO: 134424
ucuaguccaaaucuuugcu

SEQ ID NO: 134426 - RNA, 19 nt, Artificial Sequence
  Description of Artificial Sequence: Synthetic oligonucleotide
  Sense strand starting at position 3255 of SEQ ID NO: 1723
aucccauugaguugaagag

SEQ ID NO: 134427 - RNA, 19 nt, Artificial Sequence
  Description of Artificial Sequence: Synthetic oligonucleotide
  Antisense strand to SEQ ID NO: 134426
cucuucaacucaaugggau

SEQ ID NO: 134428 - RNA, 19 nt, Artificial Sequence
  Description of Artificial Sequence: Synthetic oligonucleotide
  Sense strand starting at position 3250 of SEQ ID NO: 1723
uugaaaucccauugaguug

SEQ ID NO: 134429 - RNA, 19 nt, Artificial Sequence
  Description of Artificial Sequence: Synthetic oligonucleotide
  Antisense strand to SEQ ID NO: 134428
caacucaaugggauuucaa

SEQ ID NO: 134430 - RNA, 19 nt, Artificial Sequence
  Description of Artificial Sequence: Synthetic oligonucleotide
  Sense strand starting at position 3188 of SEQ ID NO: 1723
auccuuugucuauaauguu

SEQ ID NO: 134431 - RNA, 19 nt, Artificial Sequence
  Description of Artificial Sequence: Synthetic oligonucleotide
  Antisense strand to SEQ ID NO: 134430
aacauuauagacaaaggau

SEQ ID NO: 134432 - RNA, 19 nt, Artificial Sequence
  Description of Artificial Sequence: Synthetic oligonucleotide
  Sense strand starting at position 3186 of SEQ ID NO: 1723
ugauccuuugucuauaaug

SEQ ID NO: 134433 - RNA, 19 nt, Artificial Sequence
  Description of Artificial Sequence: Synthetic oligonucleotide
  Antisense strand to SEQ ID NO: 134432
cauuauagacaaaggauca

SEQ ID NO: 134434 - RNA, 19 nt, Artificial Sequence
  Description of Artificial Sequence: Synthetic oligonucleotide
  Sense strand starting at position 3134 of SEQ ID NO: 1723
cuauuaucugguggaagca

SEQ ID NO: 134435 - RNA, 19 nt, Artificial Sequence
  Description of Artificial Sequence: Synthetic oligonucleotide
  Antisense strand to SEQ ID NO: 134434
ugcuuccaccagauaauag

SEQ ID NO: 134436 - RNA, 19 nt, Artificial Sequence
  Description of Artificial Sequence: Synthetic oligonucleotide
  Sense strand starting at position 3130 of SEQ ID NO: 1723
acagcuauuaucuggugga

SEQ ID NO: 134437 - RNA, 19 nt, Artificial Sequence
  Description of Artificial Sequence: Synthetic oligonucleotide
  Antisense strand to SEQ ID NO: 134436
uccaccagauaauagcugu

SEQ ID NO: 134438 - RNA, 19 nt, Artificial Sequence
  Description of Artificial Sequence: Synthetic oligonucleotide
  Sense strand starting at position 3100 of SEQ ID NO: 1723
ggcacaaagaagugacuua

SEQ ID NO: 134439 - RNA, 19 nt, Artificial Sequence
  Description of Artificial Sequence: Synthetic oligonucleotide
  Antisense strand to SEQ ID NO: 134438
uaagucacuucuuugugcc

SEQ ID NO: 134440 - RNA, 19 nt, Artificial Sequence
  Description of Artificial Sequence: Synthetic oligonucleotide
  Sense strand starting at position 3052 of SEQ ID NO: 1723
cccuaugagagaugugguu

SEQ ID NO: 134441 - RNA, 19 nt, Artificial Sequence
  Description of Artificial Sequence: Synthetic oligonucleotide
  Antisense strand to SEQ ID NO: 134440
aaccacaucucucauaggg

SEQ ID NO: 134442 - RNA, 19 nt, Artificial Sequence
  Description of Artificial Sequence: Synthetic oligonucleotide
  Sense strand starting at position 2980 of SEQ ID NO: 1723
ccaauucuauuaguaaugu

SEQ ID NO: 134443 - RNA, 19 nt, Artificial Sequence
  Description of Artificial Sequence: Synthetic oligonucleotide
  Antisense strand to SEQ ID NO: 134442
acauuacuaauagaauugg

SEQ ID NO: 134444 - RNA, 19 nt, Artificial Sequence
  Description of Artificial Sequence: Synthetic oligonucleotide
  Sense strand starting at position 2758 of SEQ ID NO: 1723
uguuguugcauguuccauu

SEQ ID NO: 134445 - RNA, 19 nt, Artificial Sequence
  Description of Artificial Sequence: Synthetic oligonucleotide
  Antisense strand to SEQ ID NO: 134444
aauggaacaugcaacaaca

SEQ ID NO: 134446 - RNA, 19 nt, Artificial Sequence
  Description of Artificial Sequence: Synthetic oligonucleotide
  Sense strand starting at position 2719 of SEQ ID NO: 1723
agcuuuacuuagguaaauu

SEQ ID NO: 134447 - RNA, 19 nt, Artificial Sequence
  Description of Artificial Sequence: Synthetic oligonucleotide
  Antisense strand to SEQ ID NO: 134446
aauuuaccuaaguaaagcu

SEQ ID NO: 134448 - RNA, 19 nt, Artificial Sequence
  Description of Artificial Sequence: Synthetic oligonucleotide
  Sense strand starting at position 2627 of SEQ ID NO: 1723
gcaacuucuguguagaucu

SEQ ID NO: 134449 - RNA, 19 nt, Artificial Sequence
  Description of Artificial Sequence: Synthetic oligonucleotide
  Antisense strand to SEQ ID NO: 134448
agaucuacacagaaguugc

SEQ ID NO: 134450 - RNA, 19 nt, Artificial Sequence
  Description of Artificial Sequence: Synthetic oligonucleotide
  Sense strand starting at position 2607 of SEQ ID NO: 1723
gauguacagcauuguauuu

SEQ ID NO: 134451 - RNA, 19 nt, Artificial Sequence
  Description of Artificial Sequence: Synthetic oligonucleotide
  Antisense strand to SEQ ID NO: 134450
aaauacaaugcuguacauc

SEQ ID NO: 134452 - RNA, 19 nt, Artificial Sequence
  Description of Artificial Sequence: Synthetic oligonucleotide
  Sense strand starting at position 2592 of SEQ ID NO: 1723
ugcagaacuucuguugaug

SEQ ID NO: 134453 - RNA, 19 nt, Artificial Sequence
  Description of Artificial Sequence: Synthetic oligonucleotide
  Antisense strand to SEQ ID NO: 134452
caucaacagaaguucugca

SEQ ID NO: 134454 - RNA, 19 nt, Artificial Sequence
  Description of Artificial Sequence: Synthetic oligonucleotide
  Sense strand starting at position 2552 of SEQ ID NO: 1723
agacuucccagguggagau

SEQ ID NO: 134455 - RNA, 19 nt, Artificial Sequence
  Description of Artificial Sequence: Synthetic oligonucleotide
  Antisense strand to SEQ ID NO: 134454
aucuccaccugggaagucu

SEQ ID NO: 134456 - RNA, 19 nt, Artificial Sequence
  Description of Artificial Sequence: Synthetic oligonucleotide
  Sense strand starting at position 2461 of SEQ ID NO: 1723
uuucguucucucgcacauu

SEQ ID NO: 134457 - RNA, 19 nt, Artificial Sequence
  Description of Artificial Sequence: Synthetic oligonucleotide
  Antisense strand to SEQ ID NO: 134456
aaugugcgagagaacgaaa

SEQ ID NO: 134458 - RNA, 19 nt, Artificial Sequence
  Description of Artificial Sequence: Synthetic oligonucleotide
  Sense strand starting at position 1330 of SEQ ID NO: 1723
gugcaaguccuccucgcua

SEQ ID NO: 134459 - RNA, 19 nt, Artificial Sequence
  Description of Artificial Sequence: Synthetic oligonucleotide
  Antisense strand to SEQ ID NO: 134458
uagcgaggaggacuugcac

SEQ ID NO: 134460 - RNA, 19 nt, Artificial Sequence
  Description of Artificial Sequence: Synthetic oligonucleotide
  Sense strand starting at position 1312 of SEQ ID NO: 1723
ggaaguguuccagaacgug

SEQ ID NO: 134461 - RNA, 19 nt, Artificial Sequence
  Description of Artificial Sequence: Synthetic oligonucleotide
  Antisense strand to SEQ ID NO: 134460
cacguucuggaacacuucc

SEQ ID NO: 134462 - RNA, 19 nt, Artificial Sequence
  Description of Artificial Sequence: Synthetic oligonucleotide
  Sense strand starting at position 1286 of SEQ ID NO: 1723
gacuucuuuccucggacca

SEQ ID NO: 134463 - RNA, 19 nt, Artificial Sequence
  Description of Artificial Sequence: Synthetic oligonucleotide
  Antisense strand to SEQ ID NO: 134462
ugguccgaggaaagaaguc

SEQ ID NO: 134464 - RNA, 19 nt, Artificial Sequence
  Description of Artificial Sequence: Synthetic oligonucleotide
  Sense strand starting at position 986 of SEQ ID NO: 1723
auccuugaaugucuagaga

SEQ ID NO: 134465 - RNA, 19 nt, Artificial Sequence
  Description of Artificial Sequence: Synthetic oligonucleotide
  Antisense strand to SEQ ID NO: 134464
ucucuagacauucaaggau

SEQ ID NO: 134466 - RNA, 19 nt, Artificial Sequence
  Description of Artificial Sequence: Synthetic oligonucleotide
  Sense strand starting at position 978 of SEQ ID NO: 1723
gguagcagauccuugaaug

SEQ ID NO: 134467 - RNA, 19 nt, Artificial Sequence
  Description of Artificial Sequence: Synthetic oligonucleotide
  Antisense strand to SEQ ID NO: 134466
cauucaaggaucugcuacc

SEQ ID NO: 134468 - RNA, 19 nt, Artificial Sequence
  Description of Artificial Sequence: Synthetic oligonucleotide
  Sense strand starting at position 949 of SEQ ID NO: 1723
ccgaaugaccuuuaaguuu

SEQ ID NO: 134469 - RNA, 19 nt, Artificial Sequence
  Description of Artificial Sequence: Synthetic oligonucleotide
  Antisense strand to SEQ ID NO: 134468
aaacuuaaaggucauucgg

SEQ ID NO: 134470 - RNA, 19 nt, Artificial Sequence
  Description of Artificial Sequence: Synthetic oligonucleotide
  Sense strand starting at position 919 of SEQ ID NO: 1723
aauuaaccguguucuggaa

SEQ ID NO: 134471 - RNA, 19 nt, Artificial Sequence
  Description of Artificial Sequence: Synthetic oligonucleotide
  Antisense strand to SEQ ID NO: 134470
uuccagaacacgguuaauu

SEQ ID NO: 134472 - RNA, 19 nt, Artificial Sequence
  Description of Artificial Sequence: Synthetic oligonucleotide
  Sense strand starting at position 916 of SEQ ID NO: 1723
agaaauuaaccguguucug

SEQ ID NO: 134473 - RNA, 19 nt, Artificial Sequence
  Description of Artificial Sequence: Synthetic oligonucleotide
  Antisense strand to SEQ ID NO: 134472
cagaacacgguuaauuucu

SEQ ID NO: 134474 - RNA, 19 nt, Artificial Sequence
  Description of Artificial Sequence: Synthetic oligonucleotide
  Sense strand starting at position 913 of SEQ ID NO: 1723
agaagaaauuaaccguguu

SEQ ID NO: 134475 - RNA, 19 nt, Artificial Sequence
  Description of Artificial Sequence: Synthetic oligonucleotide
  Antisense strand to SEQ ID NO: 134474
aacacgguuaauuucuucu

SEQ ID NO: 134476 - RNA, 19 nt, Artificial Sequence
  Description of Artificial Sequence: Synthetic oligonucleotide
  Sense strand starting at position 905 of SEQ ID NO: 1723
ccgcucucagaagaaauua

SEQ ID NO: 134477 - RNA, 19 nt, Artificial Sequence
  Description of Artificial Sequence: Synthetic oligonucleotide
  Antisense strand to SEQ ID NO: 134476
uaauuucuucugagagcgg

SEQ ID NO: 134478 - RNA, 19 nt, Artificial Sequence
  Description of Artificial Sequence: Synthetic oligonucleotide
  Sense strand starting at position 876 of SEQ ID NO: 1723
ugauguaaaguguggagua

SEQ ID NO: 134479 - RNA, 19 nt, Artificial Sequence
  Description of Artificial Sequence: Synthetic oligonucleotide
  Antisense strand to SEQ ID NO: 134478
uacuccacacuuuacauca

SEQ ID NO: 134480 - RNA, 19 nt, Artificial Sequence
  Description of Artificial Sequence: Synthetic oligonucleotide
  Sense strand starting at position 830 of SEQ ID NO: 1723
accuuaucgccauacagaa

SEQ ID NO: 134481 - RNA, 19 nt, Artificial Sequence
  Description of Artificial Sequence: Synthetic oligonucleotide
  Antisense strand to SEQ ID NO: 134480
uucuguauggcgauaaggu

SEQ ID NO: 134482 - RNA, 19 nt, Artificial Sequence
  Description of Artificial Sequence: Synthetic oligonucleotide
  Sense strand starting at position 3897 of SEQ ID NO: 1730
ccugguccaguguaaacuu

SEQ ID NO: 134483 - RNA, 19 nt, Artificial Sequence
  Description of Artificial Sequence: Synthetic oligonucleotide
  Antisense strand to SEQ ID NO: 134482
aaguuuacacuggaccagg

SEQ ID NO: 134484 - RNA, 19 nt, Artificial Sequence
  Description of Artificial Sequence: Synthetic oligonucleotide
  Sense strand starting at position 3887 of SEQ ID NO: 1730
acgcauuuauccuggucca

SEQ ID NO: 134485 - RNA, 19 nt, Artificial Sequence
  Description of Artificial Sequence: Synthetic oligonucleotide
  Antisense strand to SEQ ID NO: 134484
uggaccaggauaaaugcgu

SEQ ID NO: 134486 - RNA, 19 nt, Artificial Sequence
  Description of Artificial Sequence: Synthetic oligonucleotide
  Sense strand starting at position 3602 of SEQ ID NO: 1730
gcuccaaaucagcaagcua

SEQ ID NO: 134487 - RNA, 19 nt, Artificial Sequence
  Description of Artificial Sequence: Synthetic oligonucleotide
  Antisense strand to SEQ ID NO: 134486
uagcuugcugauuuggagc

SEQ ID NO: 134488 - RNA, 19 nt, Artificial Sequence
  Description of Artificial Sequence: Synthetic oligonucleotide
  Sense strand starting at position 3594 of SEQ ID NO: 1730
ugccuagugcuccaaauca

SEQ ID NO: 134489 - RNA, 19 nt, Artificial Sequence
  Description of Artificial Sequence: Synthetic oligonucleotide
  Antisense strand to SEQ ID NO: 134488
ugauuuggagcacuaggca

SEQ ID NO: 134490 - RNA, 19 nt, Artificial Sequence
  Description of Artificial Sequence: Synthetic oligonucleotide
  Sense strand starting at position 3592 of SEQ ID NO: 1730
acugccuagugcuccaaau

SEQ ID NO: 134491 - RNA, 19 nt, Artificial Sequence
  Description of Artificial Sequence: Synthetic oligonucleotide
  Antisense strand to SEQ ID NO: 134490
auuuggagcacuaggcagu

SEQ ID NO: 134492 - RNA, 19 nt, Artificial Sequence
  Description of Artificial Sequence: Synthetic oligonucleotide
  Sense strand starting at position 3355 of SEQ ID NO: 1730
accuguguuuaucugcauu

SEQ ID NO: 134493 - RNA, 19 nt, Artificial Sequence
  Description of Artificial Sequence: Synthetic oligonucleotide
  Antisense strand to SEQ ID NO: 134492
aaugcagauaaacacaggu

SEQ ID NO: 134494 - RNA, 19 nt, Artificial Sequence
  Description of Artificial Sequence: Synthetic oligonucleotide
  Sense strand starting at position 3349 of SEQ ID NO: 1730
ucauaaaccuguguuuauc

SEQ ID NO: 134495 - RNA, 19 nt, Artificial Sequence
  Description of Artificial Sequence: Synthetic oligonucleotide
  Antisense strand to SEQ ID NO: 134494
gauaaacacagguuuauga

SEQ ID NO: 134496 - RNA, 19 nt, Artificial Sequence
  Description of Artificial Sequence: Synthetic oligonucleotide
  Sense strand starting at position 3348 of SEQ ID NO: 1730
cucauaaaccuguguuuau

SEQ ID NO: 134497 - RNA, 19 nt, Artificial Sequence
  Description of Artificial Sequence: Synthetic oligonucleotide
  Antisense strand to SEQ ID NO: 134496
auaaacacagguuuaugag

SEQ ID NO: 134498 - RNA, 19 nt, Artificial Sequence
  Description of Artificial Sequence: Synthetic oligonucleotide
  Sense strand starting at position 3308 of SEQ ID NO: 1730
cugccugaacaguaauaaa

SEQ ID NO: 134499 - RNA, 19 nt, Artificial Sequence
  Description of Artificial Sequence: Synthetic oligonucleotide
  Antisense strand to SEQ ID NO: 134498
uuuauuacuguucaggcag

SEQ ID NO: 134500 - RNA, 19 nt, Artificial Sequence
  Description of Artificial Sequence: Synthetic oligonucleotide
  Sense strand starting at position 3277 of SEQ ID NO: 1730
gcaucaucuccugauggcu

SEQ ID NO: 134501 - RNA, 19 nt, Artificial Sequence
  Description of Artificial Sequence: Synthetic oligonucleotide
  Antisense strand to SEQ ID NO: 134500
agccaucaggagaugaugc

SEQ ID NO: 134502 - RNA, 19 nt, Artificial Sequence
  Description of Artificial Sequence: Synthetic oligonucleotide
  Sense strand starting at position 3247 of SEQ ID NO: 1730
gaagcugaguaauaaacga

SEQ ID NO: 134503 - RNA, 19 nt, Artificial Sequence
  Description of Artificial Sequence: Synthetic oligonucleotide
  Antisense strand to SEQ ID NO: 134502
ucguuuauuacucagcuuc

SEQ ID NO: 134504 - RNA, 19 nt, Artificial Sequence
  Description of Artificial Sequence: Synthetic oligonucleotide
  Sense strand starting at position 3241 of SEQ ID NO: 1730
cucucagaagcugaguaau

SEQ ID NO: 134505 - RNA, 19 nt, Artificial Sequence
  Description of Artificial Sequence: Synthetic oligonucleotide
  Antisense strand to SEQ ID NO: 134504
auuacucagcuucugagag

SEQ ID NO: 134506 - RNA, 19 nt, Artificial Sequence
  Description of Artificial Sequence: Synthetic oligonucleotide
  Sense strand starting at position 2955 of SEQ ID NO: 1730
ggacuugucccacagcgaa

SEQ ID NO: 134507 - RNA, 19 nt, Artificial Sequence
  Description of Artificial Sequence: Synthetic oligonucleotide
  Antisense strand to SEQ ID NO: 134506
uucgcugugggacaagucc

SEQ ID NO: 134508 - RNA, 19 nt, Artificial Sequence
  Description of Artificial Sequence: Synthetic oligonucleotide
  Sense strand starting at position 2804 of SEQ ID NO: 1730
gggaguguccugcagaccu

SEQ ID NO: 134509 - RNA, 19 nt, Artificial Sequence
  Description of Artificial Sequence: Synthetic oligonucleotide
  Antisense strand to SEQ ID NO: 134508
aggucugcaggacacuccc

SEQ ID NO: 134510 - RNA, 19 nt, Artificial Sequence
  Description of Artificial Sequence: Synthetic oligonucleotide
  Sense strand starting at position 2715 of SEQ ID NO: 1730
ugggaauucugcccacuuc

SEQ ID NO: 134511 - RNA, 19 nt, Artificial Sequence
  Description of Artificial Sequence: Synthetic oligonucleotide
  Antisense strand to SEQ ID NO: 134510
gaagugggcagaauuccca

SEQ ID NO: 134512 - RNA, 19 nt, Artificial Sequence
  Description of Artificial Sequence: Synthetic oligonucleotide
  Sense strand starting at position 2704 of SEQ ID NO: 1730
gggugcucagcugggaauu

SEQ ID NO: 134513 - RNA, 19 nt, Artificial Sequence
  Description of Artificial Sequence: Synthetic oligonucleotide
  Antisense strand to SEQ ID NO: 134512
aauucccagcugagcaccc

SEQ ID NO: 134514 - RNA, 19 nt, Artificial Sequence
  Description of Artificial Sequence: Synthetic oligonucleotide
  Sense strand starting at position 2652 of SEQ ID NO: 1730
gcaagugagaccuggcauu

SEQ ID NO: 134515 - RNA, 19 nt, Artificial Sequence
  Description of Artificial Sequence: Synthetic oligonucleotide
  Antisense strand to SEQ ID NO: 134514
aaugccaggucucacuugc

SEQ ID NO: 134516 - RNA, 19 nt, Artificial Sequence
  Description of Artificial Sequence: Synthetic oligonucleotide
  Sense strand starting at position 2641 of SEQ ID NO: 1730
ggucaucacuggcaaguga

SEQ ID NO: 134517 - RNA, 19 nt, Artificial Sequence
  Description of Artificial Sequence: Synthetic oligonucleotide
  Antisense strand to SEQ ID NO: 134516
ucacuugccagugaugacc

SEQ ID NO: 134518 - RNA, 19 nt, Artificial Sequence
  Description of Artificial Sequence: Synthetic oligonucleotide
  Sense strand starting at position 2495 of SEQ ID NO: 1730
ccgcauucccaagaccaga

SEQ ID NO: 134519 - RNA, 19 nt, Artificial Sequence
  Description of Artificial Sequence: Synthetic oligonucleotide
  Antisense strand to SEQ ID NO: 134518
ucuggucuugggaaugcgg

SEQ ID NO: 134520 - RNA, 19 nt, Artificial Sequence
  Description of Artificial Sequence: Synthetic oligonucleotide
  Sense strand starting at position 952 of SEQ ID NO: 1730
gagugagccgugcacauua

SEQ ID NO: 134521 - RNA, 19 nt, Artificial Sequence
  Description of Artificial Sequence: Synthetic oligonucleotide
  Antisense strand to SEQ ID NO: 134520
uaaugugcacggcucacuc

SEQ ID NO: 134522 - RNA, 19 nt, Artificial Sequence
  Description of Artificial Sequence: Synthetic oligonucleotide
  Sense strand starting at position 950 of SEQ ID NO: 1730
uggagugagccgugcacau

SEQ ID NO: 134523 - RNA, 19 nt, Artificial Sequence
  Description of Artificial Sequence: Synthetic oligonucleotide
  Antisense strand to SEQ ID NO: 134522
augugcacggcucacucca

SEQ ID NO: 134524 - RNA, 19 nt, Artificial Sequence
  Description of Artificial Sequence: Synthetic oligonucleotide
  Sense strand starting at position 872 of SEQ ID NO: 1730
cgagucuaccuccaaccau

SEQ ID NO: 134525 - RNA, 19 nt, Artificial Sequence
  Description of Artificial Sequence: Synthetic oligonucleotide
  Antisense strand to SEQ ID NO: 134524
augguuggagguagacucg

SEQ ID NO: 134526 - RNA, 19 nt, Artificial Sequence
  Description of Artificial Sequence: Synthetic oligonucleotide
  Sense strand starting at position 293 of SEQ ID NO: 1730
gccaguaaccgcucgaauc

SEQ ID NO: 134527 - RNA, 19 nt, Artificial Sequence
  Description of Artificial Sequence: Synthetic oligonucleotide
  Antisense strand to SEQ ID NO: 134526
gauucgagcgguuacuggc

SEQ ID NO: 134528 - RNA, 19 nt, Artificial Sequence
  Description of Artificial Sequence: Synthetic oligonucleotide
  Sense strand starting at position 146 of SEQ ID NO: 1730
ugccgaucuggccgagaca

SEQ ID NO: 134529 - RNA, 19 nt, Artificial Sequence
  Description of Artificial Sequence: Synthetic oligonucleotide
  Antisense strand to SEQ ID NO: 134528
ugucucggccagaucggca

SEQ ID NO: 134530 - RNA, 19 nt, Artificial Sequence
  Description of Artificial Sequence: Synthetic oligonucleotide
  Sense strand starting at position 134 of SEQ ID NO: 1730
gcggaagaugugugccgau

SEQ ID NO: 134531 - RNA, 19 nt, Artificial Sequence
  Description of Artificial Sequence: Synthetic oligonucleotide
  Antisense strand to SEQ ID NO: 134530
aucggcacacaucuuccgc

SEQ ID NO: 134532 - RNA, 19 nt, Artificial Sequence
  Description of Artificial Sequence: Synthetic oligonucleotide
  Sense strand starting at position 3914 of SEQ ID NO: 1728
ugugucuccugguucugaa

SEQ ID NO: 134533 - RNA, 19 nt, Artificial Sequence
  Description of Artificial Sequence: Synthetic oligonucleotide
  Antisense strand to SEQ ID NO: 134532
uucagaaccaggagacaca

SEQ ID NO: 134534 - RNA, 19 nt, Artificial Sequence
  Description of Artificial Sequence: Synthetic oligonucleotide
  Sense strand starting at position 3488 of SEQ ID NO: 1728
guuuguccacaguguaaga

SEQ ID NO: 134535 - RNA, 19 nt, Artificial Sequence
  Description of Artificial Sequence: Synthetic oligonucleotide
  Antisense strand to SEQ ID NO: 134534
ucuuacacuguggacaaac

SEQ ID NO: 134536 - RNA, 19 nt, Artificial Sequence
  Description of Artificial Sequence: Synthetic oligonucleotide
  Sense strand starting at position 3485 of SEQ ID NO: 1728
gcuguuuguccacagugua

SEQ ID NO: 134537 - RNA, 19 nt, Artificial Sequence
  Description of Artificial Sequence: Synthetic oligonucleotide
  Antisense strand to SEQ ID NO: 134536
uacacuguggacaaacagc

SEQ ID NO: 134538 - RNA, 19 nt, Artificial Sequence
  Description of Artificial Sequence: Synthetic oligonucleotide
  Sense strand starting at position 3446 of SEQ ID NO: 1728
ggaguccucuuagaacaag

SEQ ID NO: 134539 - RNA, 19 nt, Artificial Sequence
  Description of Artificial Sequence: Synthetic oligonucleotide
  Antisense strand to SEQ ID NO: 134538
cuuguucuaagaggacucc

SEQ ID NO: 134540 - RNA, 19 nt, Artificial Sequence
  Description of Artificial Sequence: Synthetic oligonucleotide
  Sense strand starting at position 3321 of SEQ ID NO: 1728
guaacugugucuugaacug

SEQ ID NO: 134541 - RNA, 19 nt, Artificial Sequence
  Description of Artificial Sequence: Synthetic oligonucleotide
  Antisense strand to SEQ ID NO: 134540
caguucaagacacaguuac

SEQ ID NO: 134542 - RNA, 19 nt, Artificial Sequence
  Description of Artificial Sequence: Synthetic oligonucleotide
  Sense strand starting at position 3319 of SEQ ID NO: 1728
guguaacugugucuugaac

SEQ ID NO: 134543 - RNA, 19 nt, Artificial Sequence
  Description of Artificial Sequence: Synthetic oligonucleotide
  Antisense strand to SEQ ID NO: 134542
guucaagacacaguuacac

SEQ ID NO: 134544 - RNA, 19 nt, Artificial Sequence
  Description of Artificial Sequence: Synthetic oligonucleotide
  Sense strand starting at position 3317 of SEQ ID NO: 1728
cuguguaacugugucuuga

SEQ ID NO: 134545 - RNA, 19 nt, Artificial Sequence
  Description of Artificial Sequence: Synthetic oligonucleotide
  Antisense strand to SEQ ID NO: 134544
ucaagacacaguuacacag

SEQ ID NO: 134546 - RNA, 19 nt, Artificial Sequence
  Description of Artificial Sequence: Synthetic oligonucleotide
  Sense strand starting at position 3143 of SEQ ID NO: 1728
guuugugcugaugaggaaa

SEQ ID NO: 134547 - RNA, 19 nt, Artificial Sequence
  Description of Artificial Sequence: Synthetic oligonucleotide
  Antisense strand to SEQ ID NO: 134546
uuuccucaucagcacaaac

SEQ ID NO: 134548 - RNA, 19 nt, Artificial Sequence
  Description of Artificial Sequence: Synthetic oligonucleotide
  Sense strand starting at position 2769 of SEQ ID NO: 1728
gugaccagugauuacaagu

SEQ ID NO: 134549 - RNA, 19 nt, Artificial Sequence
  Description of Artificial Sequence: Synthetic oligonucleotide
  Antisense strand to SEQ ID NO: 134548
acuuguaaucacuggucac

SEQ ID NO: 134550 - RNA, 19 nt, Artificial Sequence
  Description of Artificial Sequence: Synthetic oligonucleotide
  Sense strand starting at position 2765 of SEQ ID NO: 1728
cagggugaccagugauuac

SEQ ID NO: 134551 - RNA, 19 nt, Artificial Sequence
  Description of Artificial Sequence: Synthetic oligonucleotide
  Antisense strand to SEQ ID NO: 134550
guaaucacuggucacccug

SEQ ID NO: 134552 - RNA, 19 nt, Artificial Sequence
  Description of Artificial Sequence: Synthetic oligonucleotide
  Sense strand starting at position 2666 of SEQ ID NO: 1728
cucauuauguggugagaag

SEQ ID NO: 134553 - RNA, 19 nt, Artificial Sequence
  Description of Artificial Sequence: Synthetic oligonucleotide
  Antisense strand to SEQ ID NO: 134552
cuucucaccacauaaugag

SEQ ID NO: 134554 - RNA, 19 nt, Artificial Sequence
  Description of Artificial Sequence: Synthetic oligonucleotide
  Sense strand starting at position 2664 of SEQ ID NO: 1728
accucauuauguggugaga

SEQ ID NO: 134555 - RNA, 19 nt, Artificial Sequence
  Description of Artificial Sequence: Synthetic oligonucleotide
  Antisense strand to SEQ ID NO: 134554
ucucaccacauaaugaggu

SEQ ID NO: 134556 - RNA, 19 nt, Artificial Sequence
  Description of Artificial Sequence: Synthetic oligonucleotide
  Sense strand starting at position 2583 of SEQ ID NO: 1728
ccgagacagucuccuuaca

SEQ ID NO: 134557 - RNA, 19 nt, Artificial Sequence
  Description of Artificial Sequence: Synthetic oligonucleotide
  Antisense strand to SEQ ID NO: 134556
uguaaggagacugucucgg

SEQ ID NO: 134558 - RNA, 19 nt, Artificial Sequence
  Description of Artificial Sequence: Synthetic oligonucleotide
  Sense strand starting at position 2405 of SEQ ID NO: 1728
agaaaucgcaaccaagagu

SEQ ID NO: 134559 - RNA, 19 nt, Artificial Sequence
  Description of Artificial Sequence: Synthetic oligonucleotide
  Antisense strand to SEQ ID NO: 134558
acucuugguugcgauuucu

SEQ ID NO: 134560 - RNA, 19 nt, Artificial Sequence
  Description of Artificial Sequence: Synthetic oligonucleotide
  Sense strand starting at position 1756 of SEQ ID NO: 1728
ccgcgcccuccugaauaaa

SEQ ID NO: 134561 - RNA, 19 nt, Artificial Sequence
  Description of Artificial Sequence: Synthetic oligonucleotide
  Antisense strand to SEQ ID NO: 134560
uuuauucaggagggcgcgg

SEQ ID NO: 134562 - RNA, 19 nt, Artificial Sequence
  Description of Artificial Sequence: Synthetic oligonucleotide
  Sense strand starting at position 1677 of SEQ ID NO: 1728
ccuugagaagucugaacuc

SEQ ID NO: 134563 - RNA, 19 nt, Artificial Sequence
  Description of Artificial Sequence: Synthetic oligonucleotide
  Antisense strand to SEQ ID NO: 134562
gaguucagacuucucaagg

SEQ ID NO: 134564 - RNA, 19 nt, Artificial Sequence
  Description of Artificial Sequence: Synthetic oligonucleotide
  Sense strand starting at position 1671 of SEQ ID NO: 1728
aagcguccuugagaagucu

SEQ ID NO: 134565 - RNA, 19 nt, Artificial Sequence
  Description of Artificial Sequence: Synthetic oligonucleotide
  Antisense strand to SEQ ID NO: 134564
agacuucucaaggacgcuu

SEQ ID NO: 134566 - RNA, 19 nt, Artificial Sequence
  Description of Artificial Sequence: Synthetic oligonucleotide
  Sense strand starting at position 1669 of SEQ ID NO: 1728
gcaagcguccuugagaagu

SEQ ID NO: 134567 - RNA, 19 nt, Artificial Sequence
  Description of Artificial Sequence: Synthetic oligonucleotide
  Antisense strand to SEQ ID NO: 134566
acuucucaaggacgcuugc

SEQ ID NO: 134568 - RNA, 19 nt, Artificial Sequence
  Description of Artificial Sequence: Synthetic oligonucleotide
  Sense strand starting at position 1667 of SEQ ID NO: 1728
augcaagcguccuugagaa

SEQ ID NO: 134569 - RNA, 19 nt, Artificial Sequence
  Description of Artificial Sequence: Synthetic oligonucleotide
  Antisense strand to SEQ ID NO: 134568
uucucaaggacgcuugcau

SEQ ID NO: 134570 - RNA, 19 nt, Artificial Sequence
  Description of Artificial Sequence: Synthetic oligonucleotide
  Sense strand starting at position 1644 of SEQ ID NO: 1728
acucguucucaacaauguu

SEQ ID NO: 134571 - RNA, 19 nt, Artificial Sequence
  Description of Artificial Sequence: Synthetic oligonucleotide
  Antisense strand to SEQ ID NO: 134570
aacauuguugagaacgagu

SEQ ID NO: 134572 - RNA, 19 nt, Artificial Sequence
  Description of Artificial Sequence: Synthetic oligonucleotide
  Sense strand starting at position 1641 of SEQ ID NO: 1728
guuacucguucucaacaau

SEQ ID NO: 134573 - RNA, 19 nt, Artificial Sequence
  Description of Artificial Sequence: Synthetic oligonucleotide
  Antisense strand to SEQ ID NO: 134572
auuguugagaacgaguaac

SEQ ID NO: 134574 - RNA, 19 nt, Artificial Sequence
  Description of Artificial Sequence: Synthetic oligonucleotide
  Sense strand starting at position 1640 of SEQ ID NO: 1728
gguuacucguucucaacaa

SEQ ID NO: 134575 - RNA, 19 nt, Artificial Sequence
  Description of Artificial Sequence: Synthetic oligonucleotide
  Antisense strand to SEQ ID NO: 134574
uuguugagaacgaguaacc

SEQ ID NO: 134576 - RNA, 19 nt, Artificial Sequence
  Description of Artificial Sequence: Synthetic oligonucleotide
  Sense strand starting at position 1620 of SEQ ID NO: 1728
agacgugugcugugauaag

SEQ ID NO: 134577 - RNA, 19 nt, Artificial Sequence
  Description of Artificial Sequence: Synthetic oligonucleotide
  Antisense strand to SEQ ID NO: 134576
cuuaucacagcacacgucu

SEQ ID NO: 134578 - RNA, 19 nt, Artificial Sequence
  Description of Artificial Sequence: Synthetic oligonucleotide
  Sense strand starting at position 1618 of SEQ ID NO: 1728
acagacgugugcugugaua

SEQ ID NO: 134579 - RNA, 19 nt, Artificial Sequence
  Description of Artificial Sequence: Synthetic oligonucleotide
  Antisense strand to SEQ ID NO: 134578
uaucacagcacacgucugu

SEQ ID NO: 134580 - RNA, 19 nt, Artificial Sequence
  Description of Artificial Sequence: Synthetic oligonucleotide
  Sense strand starting at position 1586 of SEQ ID NO: 1728
gccacagggaugggaaauu

SEQ ID NO: 134581 - RNA, 19 nt, Artificial Sequence
  Description of Artificial Sequence: Synthetic oligonucleotide
  Antisense strand to SEQ ID NO: 134580
aauuucccaucccuguggc

SEQ ID NO: 134582 - RNA, 19 nt, Artificial Sequence
  Description of Artificial Sequence: Synthetic oligonucleotide
  Sense strand starting at position 1516 of SEQ ID NO: 1728
agagcugucuccugacgag

SEQ ID NO: 134583 - RNA, 19 nt, Artificial Sequence
  Description of Artificial Sequence: Synthetic oligonucleotide
  Antisense strand to SEQ ID NO: 134582
cucgucaggagacagcucu

SEQ ID NO: 134584 - RNA, 19 nt, Artificial Sequence
  Description of Artificial Sequence: Synthetic oligonucleotide
  Sense strand starting at position 1415 of SEQ ID NO: 1728
aagaguugcgucuacaaac

SEQ ID NO: 134585 - RNA, 19 nt, Artificial Sequence
  Description of Artificial Sequence: Synthetic oligonucleotide
  Antisense strand to SEQ ID NO: 134584
guuuguagacgcaacucuu

SEQ ID NO: 134586 - RNA, 19 nt, Artificial Sequence
  Description of Artificial Sequence: Synthetic oligonucleotide
  Sense strand starting at position 1321 of SEQ ID NO: 1728
acgugacccuuggccaaau

SEQ ID NO: 134587 - RNA, 19 nt, Artificial Sequence
  Description of Artificial Sequence: Synthetic oligonucleotide
  Antisense strand to SEQ ID NO: 134586
auuuggccaagggucacgu

SEQ ID NO: 134588 - RNA, 19 nt, Artificial Sequence
  Description of Artificial Sequence: Synthetic oligonucleotide
  Sense strand starting at position 951 of SEQ ID NO: 1728
ccugacagcucugugacua

SEQ ID NO: 134589 - RNA, 19 nt, Artificial Sequence
  Description of Artificial Sequence: Synthetic oligonucleotide
  Antisense strand to SEQ ID NO: 134588
uagucacagagcugucagg

SEQ ID NO: 134590 - RNA, 19 nt, Artificial Sequence
  Description of Artificial Sequence: Synthetic oligonucleotide
  Sense strand starting at position 950 of SEQ ID NO: 1728
uccugacagcucugugacu

SEQ ID NO: 134591 - RNA, 19 nt, Artificial Sequence
  Description of Artificial Sequence: Synthetic oligonucleotide
  Antisense strand to SEQ ID NO: 134590
agucacagagcugucagga

SEQ ID NO: 134592 - RNA, 19 nt, Artificial Sequence
  Description of Artificial Sequence: Synthetic oligonucleotide
  Sense strand starting at position 866 of SEQ ID NO: 1728
aacuaugugucugaaagug

SEQ ID NO: 134593 - RNA, 19 nt, Artificial Sequence
  Description of Artificial Sequence: Synthetic oligonucleotide
  Antisense strand to SEQ ID NO: 134592
cacuuucagacacauaguu

SEQ ID NO: 134594 - RNA, 19 nt, Artificial Sequence
  Description of Artificial Sequence: Synthetic oligonucleotide
  Sense strand starting at position 865 of SEQ ID NO: 1728
caacuaugugucugaaagu

SEQ ID NO: 134595 - RNA, 19 nt, Artificial Sequence
  Description of Artificial Sequence: Synthetic oligonucleotide
  Antisense strand to SEQ ID NO: 134594
acuuucagacacauaguug

SEQ ID NO: 134596 - RNA, 19 nt, Artificial Sequence
  Description of Artificial Sequence: Synthetic oligonucleotide
  Sense strand starting at position 864 of SEQ ID NO: 1728
acaacuaugugucugaaag

SEQ ID NO: 134597 - RNA, 19 nt, Artificial Sequence
  Description of Artificial Sequence: Synthetic oligonucleotide
  Antisense strand to SEQ ID NO: 134596
cuuucagacacauaguugu

SEQ ID NO: 134598 - RNA, 19 nt, Artificial Sequence
  Description of Artificial Sequence: Synthetic oligonucleotide
  Sense strand starting at position 862 of SEQ ID NO: 1728
ugacaacuaugugucugaa

SEQ ID NO: 134599 - RNA, 19 nt, Artificial Sequence
  Description of Artificial Sequence: Synthetic oligonucleotide
  Antisense strand to SEQ ID NO: 134598
uucagacacauaguuguca

SEQ ID NO: 134600 - RNA, 19 nt, Artificial Sequence
  Description of Artificial Sequence: Synthetic oligonucleotide
  Sense strand starting at position 848 of SEQ ID NO: 1728
uucucauccgacgaugaca

SEQ ID NO: 134601 - RNA, 19 nt, Artificial Sequence
  Description of Artificial Sequence: Synthetic oligonucleotide
  Antisense strand to SEQ ID NO: 134600
ugucaucgucggaugagaa

SEQ ID NO: 134602 - RNA, 19 nt, Artificial Sequence
  Description of Artificial Sequence: Synthetic oligonucleotide
  Sense strand starting at position 842 of SEQ ID NO: 1728
gaauaauucucauccgacg

SEQ ID NO: 134603 - RNA, 19 nt, Artificial Sequence
  Description of Artificial Sequence: Synthetic oligonucleotide
  Antisense strand to SEQ ID NO: 134602
cgucggaugagaauuauuc

SEQ ID NO: 134604 - RNA, 19 nt, Artificial Sequence
  Description of Artificial Sequence: Synthetic oligonucleotide
  Sense strand starting at position 377 of SEQ ID NO: 1728
gaggccucacuauguaauu

SEQ ID NO: 134605 - RNA, 19 nt, Artificial Sequence
  Description of Artificial Sequence: Synthetic oligonucleotide
  Antisense strand to SEQ ID NO: 134604
aauuacauagugaggccuc

SEQ ID NO: 134606 - RNA, 19 nt, Artificial Sequence
  Description of Artificial Sequence: Synthetic oligonucleotide
  Sense strand starting at position 316 of SEQ ID NO: 1728
ugcugagagucacagguau

SEQ ID NO: 134607 - RNA, 19 nt, Artificial Sequence
  Description of Artificial Sequence: Synthetic oligonucleotide
  Antisense strand to SEQ ID NO: 134606
auaccugugacucucagca

SEQ ID NO: 134608 - RNA, 19 nt, Artificial Sequence
  Description of Artificial Sequence: Synthetic oligonucleotide
  Sense strand starting at position 3941 of SEQ ID NO: 1727
gcuccaaaucagcaagcua

SEQ ID NO: 134609 - RNA, 19 nt, Artificial Sequence
  Description of Artificial Sequence: Synthetic oligonucleotide
  Antisense strand to SEQ ID NO: 134608
uagcuugcugauuuggagc

SEQ ID NO: 134610 - RNA, 19 nt, Artificial Sequence
  Description of Artificial Sequence: Synthetic oligonucleotide
  Sense strand starting at position 3933 of SEQ ID NO: 1727
ugccuagugcuccaaauca

SEQ ID NO: 134611 - RNA, 19 nt, Artificial Sequence
  Description of Artificial Sequence: Synthetic oligonucleotide
  Antisense strand to SEQ ID NO: 134610
ugauuuggagcacuaggca

SEQ ID NO: 134612 - RNA, 19 nt, Artificial Sequence
  Description of Artificial Sequence: Synthetic oligonucleotide
  Sense strand starting at position 3931 of SEQ ID NO: 1727
acugccuagugcuccaaau

SEQ ID NO: 134613 - RNA, 19 nt, Artificial Sequence
  Description of Artificial Sequence: Synthetic oligonucleotide
  Antisense strand to SEQ ID NO: 134612
auuuggagcacuaggcagu

SEQ ID NO: 134614 - RNA, 19 nt, Artificial Sequence
  Description of Artificial Sequence: Synthetic oligonucleotide
  Sense strand starting at position 3694 of SEQ ID NO: 1727
accuguguuuaucugcauu

SEQ ID NO: 134615 - RNA, 19 nt, Artificial Sequence
  Description of Artificial Sequence: Synthetic oligonucleotide
  Antisense strand to SEQ ID NO: 134614
aaugcagauaaacacaggu

SEQ ID NO: 134616 - RNA, 19 nt, Artificial Sequence
  Description of Artificial Sequence: Synthetic oligonucleotide
  Sense strand starting at position 3688 of SEQ ID NO: 1727
ucauaaaccuguguuuauc

SEQ ID NO: 134617 - RNA, 19 nt, Artificial Sequence
  Description of Artificial Sequence: Synthetic oligonucleotide
  Antisense strand to SEQ ID NO: 134616
gauaaacacagguuuauga

SEQ ID NO: 134618 - RNA, 19 nt, Artificial Sequence
  Description of Artificial Sequence: Synthetic oligonucleotide
  Sense strand starting at position 3687 of SEQ ID NO: 1727
cucauaaaccuguguuuau

SEQ ID NO: 134619 - RNA, 19 nt, Artificial Sequence
  Description of Artificial Sequence: Synthetic oligonucleotide
  Antisense strand to SEQ ID NO: 134618
auaaacacagguuuaugag

SEQ ID NO: 134620 - RNA, 19 nt, Artificial Sequence
  Description of Artificial Sequence: Synthetic oligonucleotide
  Sense strand starting at position 3647 of SEQ ID NO: 1727
cugccugaacaguaauaaa

SEQ ID NO: 134621 - RNA, 19 nt, Artificial Sequence
  Description of Artificial Sequence: Synthetic oligonucleotide
  Antisense strand to SEQ ID NO: 134620
uuuauuacuguucaggcag

SEQ ID NO: 134622 - RNA, 19 nt, Artificial Sequence
  Description of Artificial Sequence: Synthetic oligonucleotide
  Sense strand starting at position 3616 of SEQ ID NO: 1727
gcaucaucuccugauggcu

SEQ ID NO: 134623 - RNA, 19 nt, Artificial Sequence
  Description of Artificial Sequence: Synthetic oligonucleotide
  Antisense strand to SEQ ID NO: 134622
agccaucaggagaugaugc

SEQ ID NO: 134624 - RNA, 19 nt, Artificial Sequence
  Description of Artificial Sequence: Synthetic oligonucleotide
  Sense strand starting at position 3586 of SEQ ID NO: 1727
gaagcugaguaauaaacga

SEQ ID NO: 134625 - RNA, 19 nt, Artificial Sequence
  Description of Artificial Sequence: Synthetic oligonucleotide
  Antisense strand to SEQ ID NO: 134624
ucguuuauuacucagcuuc

SEQ ID NO: 134626 - RNA, 19 nt, Artificial Sequence
  Description of Artificial Sequence: Synthetic oligonucleotide
  Sense strand starting at position 3580 of SEQ ID NO: 1727
cucucagaagcugaguaau

SEQ ID NO: 134627 - RNA, 19 nt, Artificial Sequence
  Description of Artificial Sequence: Synthetic oligonucleotide
  Antisense strand to SEQ ID NO: 134626
auuacucagcuucugagag

SEQ ID NO: 134628 - RNA, 19 nt, Artificial Sequence
  Description of Artificial Sequence: Synthetic oligonucleotide
  Sense strand starting at position 3294 of SEQ ID NO: 1727
ggacuugucccacagcgaa

SEQ ID NO: 134629 - RNA, 19 nt, Artificial Sequence
  Description of Artificial Sequence: Synthetic oligonucleotide
  Antisense strand to SEQ ID NO: 134628
uucgcugugggacaagucc

SEQ ID NO: 134630 - RNA, 19 nt, Artificial Sequence
  Description of Artificial Sequence: Synthetic oligonucleotide
  Sense strand starting at position 3143 of SEQ ID NO: 1727
gggaguguccugcagaccu

SEQ ID NO: 134631 - RNA, 19 nt, Artificial Sequence
  Description of Artificial Sequence: Synthetic oligonucleotide
  Antisense strand to SEQ ID NO: 134630
aggucugcaggacacuccc

SEQ ID NO: 134632 - RNA, 19 nt, Artificial Sequence
  Description of Artificial Sequence: Synthetic oligonucleotide
  Sense strand starting at position 3054 of SEQ ID NO: 1727
ugggaauucugcccacuuc

SEQ ID NO: 134633 - RNA, 19 nt, Artificial Sequence
  Description of Artificial Sequence: Synthetic oligonucleotide
  Antisense strand to SEQ ID NO: 134632
gaagugggcagaauuccca

SEQ ID NO: 134634 - RNA, 19 nt, Artificial Sequence
  Description of Artificial Sequence: Synthetic oligonucleotide
  Sense strand starting at position 3043 of SEQ ID NO: 1727
gggugcucagcugggaauu

SEQ ID NO: 134635 - RNA, 19 nt, Artificial Sequence
  Description of Artificial Sequence: Synthetic oligonucleotide
  Antisense strand to SEQ ID NO: 134634
aauucccagcugagcaccc

SEQ ID NO: 134636 - RNA, 19 nt, Artificial Sequence
  Description of Artificial Sequence: Synthetic oligonucleotide
  Sense strand starting at position 2991 of SEQ ID NO: 1727
gcaagugagaccuggcauu

SEQ ID NO: 134637 - RNA, 19 nt, Artificial Sequence
  Description of Artificial Sequence: Synthetic oligonucleotide
  Antisense strand to SEQ ID NO: 134636
aaugccaggucucacuugc

SEQ ID NO: 134638 - RNA, 19 nt, Artificial Sequence
  Description of Artificial Sequence: Synthetic oligonucleotide
  Sense strand starting at position 2980 of SEQ ID NO: 1727
ggucaucacuggcaaguga

SEQ ID NO: 134639 - RNA, 19 nt, Artificial Sequence
  Description of Artificial Sequence: Synthetic oligonucleotide
  Antisense strand to SEQ ID NO: 134638
ucacuugccagugaugacc

SEQ ID NO: 134640 - RNA, 19 nt, Artificial Sequence
  Description of Artificial Sequence: Synthetic oligonucleotide
  Sense strand starting at position 2834 of SEQ ID NO: 1727
ccgcauucccaagaccaga

SEQ ID NO: 134641 - RNA, 19 nt, Artificial Sequence
  Description of Artificial Sequence: Synthetic oligonucleotide
  Antisense strand to SEQ ID NO: 134640
ucuggucuugggaaugcgg

SEQ ID NO: 134642 - RNA, 19 nt, Artificial Sequence
  Description of Artificial Sequence: Synthetic oligonucleotide
  Sense strand starting at position 1291 of SEQ ID NO: 1727
gagugagccgugcacauua

SEQ ID NO: 134643 - RNA, 19 nt, Artificial Sequence
  Description of Artificial Sequence: Synthetic oligonucleotide
  Antisense strand to SEQ ID NO: 134642
uaaugugcacggcucacuc

SEQ ID NO: 134644 - RNA, 19 nt, Artificial Sequence
  Description of Artificial Sequence: Synthetic oligonucleotide
  Sense strand starting at position 1289 of SEQ ID NO: 1727
uggagugagccgugcacau

SEQ ID NO: 134645 - RNA, 19 nt, Artificial Sequence
  Description of Artificial Sequence: Synthetic oligonucleotide
  Antisense strand to SEQ ID NO: 134644
augugcacggcucacucca

SEQ ID NO: 134646 - RNA, 19 nt, Artificial Sequence
  Description of Artificial Sequence: Synthetic oligonucleotide
  Sense strand starting at position 1211 of SEQ ID NO: 1727
cgagucuaccuccaaccau

SEQ ID NO: 134647 - RNA, 19 nt, Artificial Sequence
  Description of Artificial Sequence: Synthetic oligonucleotide
  Antisense strand to SEQ ID NO: 134646
augguuggagguagacucg

SEQ ID NO: 134648 - RNA, 19 nt, Artificial Sequence
  Description of Artificial Sequence: Synthetic oligonucleotide
  Sense strand starting at position 632 of SEQ ID NO: 1727
gccaguaaccgcucgaauc

SEQ ID NO: 134649 - RNA, 19 nt, Artificial Sequence
  Description of Artificial Sequence: Synthetic oligonucleotide
  Antisense strand to SEQ ID NO: 134648
gauucgagcgguuacuggc

SEQ ID NO: 134650 - RNA, 19 nt, Artificial Sequence
  Description of Artificial Sequence: Synthetic oligonucleotide
  Sense strand starting at position 485 of SEQ ID NO: 1727
ugccgaucuggccgagaca

SEQ ID NO: 134651 - RNA, 19 nt, Artificial Sequence
  Description of Artificial Sequence: Synthetic oligonucleotide
  Antisense strand to SEQ ID NO: 134650
ugucucggccagaucggca

SEQ ID NO: 134652 - RNA, 19 nt, Artificial Sequence
  Description of Artificial Sequence: Synthetic oligonucleotide
  Sense strand starting at position 473 of SEQ ID NO: 1727
gcggaagaugugugccgau

SEQ ID NO: 134653 - RNA, 19 nt, Artificial Sequence
  Description of Artificial Sequence: Synthetic oligonucleotide
  Antisense strand to SEQ ID NO: 134652
aucggcacacaucuuccgc

SEQ ID NO: 134654 - RNA, 19 nt, Artificial Sequence
  Description of Artificial Sequence: Synthetic oligonucleotide
  Sense strand starting at position 299 of SEQ ID NO: 1727
ucggaaacaucgcagcaga

SEQ ID NO: 134655 - RNA, 19 nt, Artificial Sequence
  Description of Artificial Sequence: Synthetic oligonucleotide
  Antisense strand to SEQ ID NO: 134654
ucugcugcgauguuuccga

SEQ ID NO: 134656 - RNA, 19 nt, Artificial Sequence
  Description of Artificial Sequence: Synthetic oligonucleotide
  Sense strand starting at position 290 of SEQ ID NO: 1727
cugggagccucggaaacau

SEQ ID NO: 134657 - RNA, 19 nt, Artificial Sequence
  Description of Artificial Sequence: Synthetic oligonucleotide
  Antisense strand to SEQ ID NO: 134656
auguuuccgaggcucccag

SEQ ID NO: 134658 - RNA, 19 nt, Artificial Sequence
  Description of Artificial Sequence: Synthetic oligonucleotide
  Sense strand starting at position 272 of SEQ ID NO: 1727
gcugacagaucugauuaac

SEQ ID NO: 134659 - RNA, 19 nt, Artificial Sequence
  Description of Artificial Sequence: Synthetic oligonucleotide
  Antisense strand to SEQ ID NO: 134658
guuaaucagaucugucagc

SEQ ID NO: 134660 - RNA, 19 nt, Artificial Sequence
  Description of Artificial Sequence: Synthetic oligonucleotide
  Sense strand starting at position 271 of SEQ ID NO: 1727
ggcugacagaucugauuaa

SEQ ID NO: 134661 - RNA, 19 nt, Artificial Sequence
  Description of Artificial Sequence: Synthetic oligonucleotide
  Antisense strand to SEQ ID NO: 134660
uuaaucagaucugucagcc

SEQ ID NO: 134662 - RNA, 19 nt, Artificial Sequence
  Description of Artificial Sequence: Synthetic oligonucleotide
  Sense strand starting at position 135 of SEQ ID NO: 1727
gggaacuucucaggaugcu

SEQ ID NO: 134663 - RNA, 19 nt, Artificial Sequence
  Description of Artificial Sequence: Synthetic oligonucleotide
  Antisense strand to SEQ ID NO: 134662
agcauccugagaaguuccc

SEQ ID NO: 134664 - RNA, 19 nt, Artificial Sequence
  Description of Artificial Sequence: Synthetic oligonucleotide
  Sense strand starting at position 133 of SEQ ID NO: 1727
acgggaacuucucaggaug

SEQ ID NO: 134665 - RNA, 19 nt, Artificial Sequence
  Description of Artificial Sequence: Synthetic oligonucleotide
  Antisense strand to SEQ ID NO: 134664
cauccugagaaguucccgu

SEQ ID NO: 134666 - RNA, 19 nt, Artificial Sequence
  Description of Artificial Sequence: Synthetic oligonucleotide
  Sense strand starting at position 73 of SEQ ID NO: 1727
aaacguguggcagaugaga

SEQ ID NO: 134667 - RNA, 19 nt, Artificial Sequence
  Description of Artificial Sequence: Synthetic oligonucleotide
  Antisense strand to SEQ ID NO: 134666
ucucaucugccacacguuu

SEQ ID NO: 134668 - RNA, 19 nt, Artificial Sequence
  Description of Artificial Sequence: Synthetic oligonucleotide
  Sense strand starting at position 69 of SEQ ID NO: 1727
ucagaaacguguggcagau

SEQ ID NO: 134669 - RNA, 19 nt, Artificial Sequence
  Description of Artificial Sequence: Synthetic oligonucleotide
  Antisense strand to SEQ ID NO: 134668
aucugccacacguuucuga

SEQ ID NO: 134670 - RNA, 19 nt, Artificial Sequence
  Description of Artificial Sequence: Synthetic oligonucleotide
  Sense strand starting at position 68 of SEQ ID NO: 1727
aucagaaacguguggcaga

SEQ ID NO: 134671 - RNA, 19 nt, Artificial Sequence
  Description of Artificial Sequence: Synthetic oligonucleotide
  Antisense strand to SEQ ID NO: 134670
ucugccacacguuucugau

SEQ ID NO: 134672 - RNA, 19 nt, Artificial Sequence
  Description of Artificial Sequence: Synthetic oligonucleotide
  Sense strand starting at position 55 of SEQ ID NO: 1727
ugaguccucggcgaucaga

SEQ ID NO: 134673 - RNA, 19 nt, Artificial Sequence
  Description of Artificial Sequence: Synthetic oligonucleotide
  Antisense strand to SEQ ID NO: 134672
ucugaucgccgaggacuca

SEQ ID NO: 134674 - RNA, 19 nt, Artificial Sequence
  Description of Artificial Sequence: Synthetic oligonucleotide
  Sense strand starting at position 52 of SEQ ID NO: 1727
ggcugaguccucggcgauc

SEQ ID NO: 134675 - RNA, 19 nt, Artificial Sequence
  Description of Artificial Sequence: Synthetic oligonucleotide
  Antisense strand to SEQ ID NO: 134674
gaucgccgaggacucagcc

SEQ ID NO: 134676 - RNA, 19 nt, Artificial Sequence
  Description of Artificial Sequence: Synthetic oligonucleotide
  Sense strand starting at position 51 of SEQ ID NO: 1727
cggcugaguccucggcgau

SEQ ID NO: 134677 - RNA, 19 nt, Artificial Sequence
  Description of Artificial Sequence: Synthetic oligonucleotide
  Antisense strand to SEQ ID NO: 134676
aucgccgaggacucagccg

SEQ ID NO: 134678 - RNA, 19 nt, Artificial Sequence
  Description of Artificial Sequence: Synthetic oligonucleotide
  Sense strand starting at position 3874 of SEQ ID NO: 1729
cccagugguucccaucacu

SEQ ID NO: 134679 - RNA, 19 nt, Artificial Sequence
  Description of Artificial Sequence: Synthetic oligonucleotide
  Antisense strand to SEQ ID NO: 134678
agugaugggaaccacuggg

SEQ ID NO: 134680 - RNA, 19 nt, Artificial Sequence
  Description of Artificial Sequence: Synthetic oligonucleotide
  Sense strand starting at position 3852 of SEQ ID NO: 1729
cuuucugggucaucgaagu

SEQ ID NO: 134681 - RNA, 19 nt, Artificial Sequence
  Description of Artificial Sequence: Synthetic oligonucleotide
  Antisense strand to SEQ ID NO: 134680
acuucgaugacccagaaag

SEQ ID NO: 134682 - RNA, 19 nt, Artificial Sequence
  Description of Artificial Sequence: Synthetic oligonucleotide
  Sense strand starting at position 3850 of SEQ ID NO: 1729
aucuuucugggucaucgaa

SEQ ID NO: 134683 - RNA, 19 nt, Artificial Sequence
  Description of Artificial Sequence: Synthetic oligonucleotide
  Antisense strand to SEQ ID NO: 134682
uucgaugacccagaaagau

SEQ ID NO: 134684 - RNA, 19 nt, Artificial Sequence
  Description of Artificial Sequence: Synthetic oligonucleotide
  Sense strand starting at position 3604 of SEQ ID NO: 1729
cuuggccuuugguaucaga

SEQ ID NO: 134685 - RNA, 19 nt, Artificial Sequence
  Description of Artificial Sequence: Synthetic oligonucleotide
  Antisense strand to SEQ ID NO: 134684
ucugauaccaaaggccaag

SEQ ID NO: 134686 - RNA, 19 nt, Artificial Sequence
  Description of Artificial Sequence: Synthetic oligonucleotide
  Sense strand starting at position 3060 of SEQ ID NO: 1729
cauguucucccuggagaug

SEQ ID NO: 134687 - RNA, 19 nt, Artificial Sequence
  Description of Artificial Sequence: Synthetic oligonucleotide
  Antisense strand to SEQ ID NO: 134686
caucuccagggagaacaug

SEQ ID NO: 134688 - RNA, 19 nt, Artificial Sequence
  Description of Artificial Sequence: Synthetic oligonucleotide
  Sense strand starting at position 3059 of SEQ ID NO: 1729
ccauguucucccuggagau

SEQ ID NO: 134689 - RNA, 19 nt, Artificial Sequence
  Description of Artificial Sequence: Synthetic oligonucleotide
  Antisense strand to SEQ ID NO: 134688
aucuccagggagaacaugg

SEQ ID NO: 134690 - RNA, 19 nt, Artificial Sequence
  Description of Artificial Sequence: Synthetic oligonucleotide
  Sense strand starting at position 2707 of SEQ ID NO: 1729
gggcuugaucuggacaauc

SEQ ID NO: 134691 - RNA, 19 nt, Artificial Sequence
  Description of Artificial Sequence: Synthetic oligonucleotide
  Antisense strand to SEQ ID NO: 134690
gauuguccagaucaagccc

SEQ ID NO: 134692 - RNA, 19 nt, Artificial Sequence
  Description of Artificial Sequence: Synthetic oligonucleotide
  Sense strand starting at position 2351 of SEQ ID NO: 1729
gcuggaaacgcgaguucuc

SEQ ID NO: 134693 - RNA, 19 nt, Artificial Sequence
  Description of Artificial Sequence: Synthetic oligonucleotide
  Antisense strand to SEQ ID NO: 134692
gagaacucgcguuuccagc

SEQ ID NO: 134694 - RNA, 19 nt, Artificial Sequence
  Description of Artificial Sequence: Synthetic oligonucleotide
  Sense strand starting at position 748 of SEQ ID NO: 1729
gggcacuguccugagagga

SEQ ID NO: 134695 - RNA, 19 nt, Artificial Sequence
  Description of Artificial Sequence: Synthetic oligonucleotide
  Antisense strand to SEQ ID NO: 134694
uccucucaggacagugccc

SEQ ID NO: 134696 - RNA, 19 nt, Artificial Sequence
  Description of Artificial Sequence: Synthetic oligonucleotide
  Sense strand starting at position 235 of SEQ ID NO: 1729
gagccuuggucccaggaau

SEQ ID NO: 134697 - RNA, 19 nt, Artificial Sequence
  Description of Artificial Sequence: Synthetic oligonucleotide
  Antisense strand to SEQ ID NO: 134696
auuccugggaccaaggcuc

SEQ ID NO: 134698 - RNA, 19 nt, Artificial Sequence
  Description of Artificial Sequence: Synthetic oligonucleotide
  Sense strand starting at position 210 of SEQ ID NO: 1729
ccagaacuccaguggcauu

SEQ ID NO: 134699 - RNA, 19 nt, Artificial Sequence
  Description of Artificial Sequence: Synthetic oligonucleotide
  Antisense strand to SEQ ID NO: 134698
aaugccacuggaguucugg

SEQ ID NO: 134700 - RNA, 19 nt, Artificial Sequence
  Description of Artificial Sequence: Synthetic oligonucleotide
  Sense strand starting at position 128 of SEQ ID NO: 1729
gagucaccggguggaauua

SEQ ID NO: 134701 - RNA, 19 nt, Artificial Sequence
  Description of Artificial Sequence: Synthetic oligonucleotide
  Antisense strand to SEQ ID NO: 134700
uaauuccacccggugacuc

SEQ ID NO: 134702 - RNA, 19 nt, Artificial Sequence
  Description of Artificial Sequence: Synthetic oligonucleotide
  Sense strand starting at position 127 of SEQ ID NO: 1729
agagucaccggguggaauu

SEQ ID NO: 134703 - RNA, 19 nt, Artificial Sequence
  Description of Artificial Sequence: Synthetic oligonucleotide
  Antisense strand to SEQ ID NO: 134702
aauuccacccggugacucu

SEQ ID NO: 134704 - RNA, 19 nt, Artificial Sequence
  Description of Artificial Sequence: Synthetic oligonucleotide
  Sense strand starting at position 106 of SEQ ID NO: 1729
gucucuccagccugggaaa

SEQ ID NO: 134705 - RNA, 19 nt, Artificial Sequence
  Description of Artificial Sequence: Synthetic oligonucleotide
  Antisense strand to SEQ ID NO: 134704
uuucccaggcuggagagac

SEQ ID NO: 134706 - RNA, 19 nt, Artificial Sequence
  Description of Artificial Sequence: Synthetic oligonucleotide
  Sense strand starting at position 3924 of SEQ ID NO: 1731
uguuacuuaguguauacuu

SEQ ID NO: 134707 - RNA, 19 nt, Artificial Sequence
  Description of Artificial Sequence: Synthetic oligonucleotide
  Antisense strand to SEQ ID NO: 134706
aaguauacacuaaguaaca

SEQ ID NO: 134708 - RNA, 19 nt, Artificial Sequence
  Description of Artificial Sequence: Synthetic oligonucleotide
  Sense strand starting at position 3921 of SEQ ID NO: 1731
gguuguuacuuaguguaua

SEQ ID NO: 134709 - RNA, 19 nt, Artificial Sequence
  Description of Artificial Sequence: Synthetic oligonucleotide
  Antisense strand to SEQ ID NO: 134708
uauacacuaaguaacaacc

SEQ ID NO: 134710 - RNA, 19 nt, Artificial Sequence
  Description of Artificial Sequence: Synthetic oligonucleotide
  Sense strand starting at position 3882 of SEQ ID NO: 1731
uguaaaugugaccacuuua

SEQ ID NO: 134711 - RNA, 19 nt, Artificial Sequence
  Description of Artificial Sequence: Synthetic oligonucleotide
  Antisense strand to SEQ ID NO: 134710
uaaaguggucacauuuaca

SEQ ID NO: 134712 - RNA, 19 nt, Artificial Sequence
  Description of Artificial Sequence: Synthetic oligonucleotide
  Sense strand starting at position 3881 of SEQ ID NO: 1731
uuguaaaugugaccacuuu

SEQ ID NO: 134713 - RNA, 19 nt, Artificial Sequence
  Description of Artificial Sequence: Synthetic oligonucleotide
  Antisense strand to SEQ ID NO: 134712
aaaguggucacauuuacaa

SEQ ID NO: 134714 - RNA, 19 nt, Artificial Sequence
  Description of Artificial Sequence: Synthetic oligonucleotide
  Sense strand starting at position 3872 of SEQ ID NO: 1731
agauuagaguuguaaaugu

SEQ ID NO: 134715 - RNA, 19 nt, Artificial Sequence
  Description of Artificial Sequence: Synthetic oligonucleotide
  Antisense strand to SEQ ID NO: 134714
acauuuacaacucuaaucu

SEQ ID NO: 134716 - RNA, 19 nt, Artificial Sequence
  Description of Artificial Sequence: Synthetic oligonucleotide
  Sense strand starting at position 3846 of SEQ ID NO: 1731
auaauugaggcccagugua

SEQ ID NO: 134717 - RNA, 19 nt, Artificial Sequence
  Description of Artificial Sequence: Synthetic oligonucleotide
  Antisense strand to SEQ ID NO: 134716
uacacugggccucaauuau

SEQ ID NO: 134718 - RNA, 19 nt, Artificial Sequence
  Description of Artificial Sequence: Synthetic oligonucleotide
  Sense strand starting at position 3714 of SEQ ID NO: 1731
guuaaaucuugcuucguua

SEQ ID NO: 134719 - RNA, 19 nt, Artificial Sequence
  Description of Artificial Sequence: Synthetic oligonucleotide
  Antisense strand to SEQ ID NO: 134718
uaacgaagcaagauuuaac

SEQ ID NO: 134720 - RNA, 19 nt, Artificial Sequence
  Description of Artificial Sequence: Synthetic oligonucleotide
  Sense strand starting at position 3656 of SEQ ID NO: 1731
agggaauucuaaugggcag

SEQ ID NO: 134721 - RNA, 19 nt, Artificial Sequence
  Description of Artificial Sequence: Synthetic oligonucleotide
  Antisense strand to SEQ ID NO: 134720
cugcccauuagaauucccu

SEQ ID NO: 134722 - RNA, 19 nt, Artificial Sequence
  Description of Artificial Sequence: Synthetic oligonucleotide
  Sense strand starting at position 3584 of SEQ ID NO: 1731
gggucuaccucagaccaau

SEQ ID NO: 134723 - RNA, 19 nt, Artificial Sequence
  Description of Artificial Sequence: Synthetic oligonucleotide
  Antisense strand to SEQ ID NO: 134722
auuggucugagguagaccc

SEQ ID NO: 134724 - RNA, 19 nt, Artificial Sequence
  Description of Artificial Sequence: Synthetic oligonucleotide
  Sense strand starting at position 3545 of SEQ ID NO: 1731
agaauucucuaaggagcuu

SEQ ID NO: 134725 - RNA, 19 nt, Artificial Sequence
  Description of Artificial Sequence: Synthetic oligonucleotide
  Antisense strand to SEQ ID NO: 134724
aagcuccuuagagaauucu

SEQ ID NO: 134726 - RNA, 19 nt, Artificial Sequence
  Description of Artificial Sequence: Synthetic oligonucleotide
  Sense strand starting at position 3531 of SEQ ID NO: 1731
ccuggcugcuuauuagaau

SEQ ID NO: 134727 - RNA, 19 nt, Artificial Sequence
  Description of Artificial Sequence: Synthetic oligonucleotide
  Antisense strand to SEQ ID NO: 134726
auucuaauaagcagccagg

SEQ ID NO: 134728 - RNA, 19 nt, Artificial Sequence
  Description of Artificial Sequence: Synthetic oligonucleotide
  Sense strand starting at position 3475 of SEQ ID NO: 1731
gguuuauugauauggcauc

SEQ ID NO: 134729 - RNA, 19 nt, Artificial Sequence
  Description of Artificial Sequence: Synthetic oligonucleotide
  Antisense strand to SEQ ID NO: 134728
gaugccauaucaauaaacc

SEQ ID NO: 134730 - RNA, 19 nt, Artificial Sequence
  Description of Artificial Sequence: Synthetic oligonucleotide
  Sense strand starting at position 3473 of SEQ ID NO: 1731
uagguuuauugauauggca

SEQ ID NO: 134731 - RNA, 19 nt, Artificial Sequence
  Description of Artificial Sequence: Synthetic oligonucleotide
  Antisense strand to SEQ ID NO: 134730
ugccauaucaauaaaccua

SEQ ID NO: 134732 - RNA, 19 nt, Artificial Sequence
  Description of Artificial Sequence: Synthetic oligonucleotide
  Sense strand starting at position 3467 of SEQ ID NO: 1731
gcagaauagguuuauugau

SEQ ID NO: 134733 - RNA, 19 nt, Artificial Sequence
  Description of Artificial Sequence: Synthetic oligonucleotide
  Antisense strand to SEQ ID NO: 134732
aucaauaaaccuauucugc

SEQ ID NO: 134734 - RNA, 19 nt, Artificial Sequence
  Description of Artificial Sequence: Synthetic oligonucleotide
  Sense strand starting at position 3461 of SEQ ID NO: 1731
ucauuagcagaauagguuu

SEQ ID NO: 134735 - RNA, 19 nt, Artificial Sequence
  Description of Artificial Sequence: Synthetic oligonucleotide
  Antisense strand to SEQ ID NO: 134734
aaaccuauucugcuaauga

SEQ ID NO: 134736 - RNA, 19 nt, Artificial Sequence
  Description of Artificial Sequence: Synthetic oligonucleotide
  Sense strand starting at position 3414 of SEQ ID NO: 1731
cuugucugggaucaaaguu

SEQ ID NO: 134737 - RNA, 19 nt, Artificial Sequence
  Description of Artificial Sequence: Synthetic oligonucleotide
  Antisense strand to SEQ ID NO: 134736
aacuuugaucccagacaag

SEQ ID NO: 134738 - RNA, 19 nt, Artificial Sequence
  Description of Artificial Sequence: Synthetic oligonucleotide
  Sense strand starting at position 3408 of SEQ ID NO: 1731
guauuccuugucugggauc

SEQ ID NO: 134739 - RNA, 19 nt, Artificial Sequence
  Description of Artificial Sequence: Synthetic oligonucleotide
  Antisense strand to SEQ ID NO: 134738
gaucccagacaaggaauac

SEQ ID NO: 134740 - RNA, 19 nt, Artificial Sequence
  Description of Artificial Sequence: Synthetic oligonucleotide
  Sense strand starting at position 3407 of SEQ ID NO: 1731
uguauuccuugucugggau

SEQ ID NO: 134741 - RNA, 19 nt, Artificial Sequence
  Description of Artificial Sequence: Synthetic oligonucleotide
  Antisense strand to SEQ ID NO: 134740
aucccagacaaggaauaca

SEQ ID NO: 134742 - RNA, 19 nt, Artificial Sequence
  Description of Artificial Sequence: Synthetic oligonucleotide
  Sense strand starting at position 3406 of SEQ ID NO: 1731
cuguauuccuugucuggga

SEQ ID NO: 134743 - RNA, 19 nt, Artificial Sequence
  Description of Artificial Sequence: Synthetic oligonucleotide
  Antisense strand to SEQ ID NO: 134742
ucccagacaaggaauacag

SEQ ID NO: 134744 - RNA, 19 nt, Artificial Sequence
  Description of Artificial Sequence: Synthetic oligonucleotide
  Sense strand starting at position 3379 of SEQ ID NO: 1731
ugaauuauguccuuguaac

SEQ ID NO: 134745 - RNA, 19 nt, Artificial Sequence
  Description of Artificial Sequence: Synthetic oligonucleotide
  Antisense strand to SEQ ID NO: 134744
guuacaaggacauaauuca

SEQ ID NO: 134746 - RNA, 19 nt, Artificial Sequence
  Description of Artificial Sequence: Synthetic oligonucleotide
  Sense strand starting at position 3377 of SEQ ID NO: 1731
cuugaauuauguccuugua

SEQ ID NO: 134747 - RNA, 19 nt, Artificial Sequence
  Description of Artificial Sequence: Synthetic oligonucleotide
  Antisense strand to SEQ ID NO: 134746
uacaaggacauaauucaag

SEQ ID NO: 134748 - RNA, 19 nt, Artificial Sequence
  Description of Artificial Sequence: Synthetic oligonucleotide
  Sense strand starting at position 3368 of SEQ ID NO: 1731
ucuuguggucuugaauuau

SEQ ID NO: 134749 - RNA, 19 nt, Artificial Sequence
  Description of Artificial Sequence: Synthetic oligonucleotide
  Antisense strand to SEQ ID NO: 134748
auaauucaagaccacaaga

SEQ ID NO: 134750 - RNA, 19 nt, Artificial Sequence
  Description of Artificial Sequence: Synthetic oligonucleotide
  Sense strand starting at position 3281 of SEQ ID NO: 1731
guguccguguuauuaacaa

SEQ ID NO: 134751 - RNA, 19 nt, Artificial Sequence
  Description of Artificial Sequence: Synthetic oligonucleotide
  Antisense strand to SEQ ID NO: 134750
uuguuaauaacacggacac

SEQ ID NO: 134752 - RNA, 19 nt, Artificial Sequence
  Description of Artificial Sequence: Synthetic oligonucleotide
  Sense strand starting at position 3275 of SEQ ID NO: 1731
guauggguguccguguuau

SEQ ID NO: 134753 - RNA, 19 nt, Artificial Sequence
  Description of Artificial Sequence: Synthetic oligonucleotide
  Antisense strand to SEQ ID NO: 134752
auaacacggacacccauac

SEQ ID NO: 134754 - RNA, 19 nt, Artificial Sequence
  Description of Artificial Sequence: Synthetic oligonucleotide
  Sense strand starting at position 3274 of SEQ ID NO: 1731
uguauggguguccguguua

SEQ ID NO: 134755 - RNA, 19 nt, Artificial Sequence
  Description of Artificial Sequence: Synthetic oligonucleotide
  Antisense strand to SEQ ID NO: 134754
uaacacggacacccauaca

SEQ ID NO: 134756 - RNA, 19 nt, Artificial Sequence
  Description of Artificial Sequence: Synthetic oligonucleotide
  Sense strand starting at position 3046 of SEQ ID NO: 1731
cuagguguauucuauauau

SEQ ID NO: 134757 - RNA, 19 nt, Artificial Sequence
  Description of Artificial Sequence: Synthetic oligonucleotide
  Antisense strand to SEQ ID NO: 134756
auauauagaauacaccuag

SEQ ID NO: 134758 - RNA, 19 nt, Artificial Sequence
  Description of Artificial Sequence: Synthetic oligonucleotide
  Sense strand starting at position 3041 of SEQ ID NO: 1731
cguugcuagguguauucua

SEQ ID NO: 134759 - RNA, 19 nt, Artificial Sequence
  Description of Artificial Sequence: Synthetic oligonucleotide
  Antisense strand to SEQ ID NO: 134758
uagaauacaccuagcaacg

SEQ ID NO: 134760 - RNA, 19 nt, Artificial Sequence
  Description of Artificial Sequence: Synthetic oligonucleotide
  Sense strand starting at position 3038 of SEQ ID NO: 1731
acucguugcuagguguauu

SEQ ID NO: 134761 - RNA, 19 nt, Artificial Sequence
  Description of Artificial Sequence: Synthetic oligonucleotide
  Antisense strand to SEQ ID NO: 134760
aauacaccuagcaacgagu

SEQ ID NO: 134762 - RNA, 19 nt, Artificial Sequence
  Description of Artificial Sequence: Synthetic oligonucleotide
  Sense strand starting at position 3012 of SEQ ID NO: 1731
acucaagagccaugugaua

SEQ ID NO: 134763 - RNA, 19 nt, Artificial Sequence
  Description of Artificial Sequence: Synthetic oligonucleotide
  Antisense strand to SEQ ID NO: 134762
uaucacauggcucuugagu

SEQ ID NO: 134764 - RNA, 19 nt, Artificial Sequence
  Description of Artificial Sequence: Synthetic oligonucleotide
  Sense strand starting at position 2977 of SEQ ID NO: 1731
uggcucucuuaagaguuaa

SEQ ID NO: 134765 - RNA, 19 nt, Artificial Sequence
  Description of Artificial Sequence: Synthetic oligonucleotide
  Antisense strand to SEQ ID NO: 134764
uuaacucuuaagagagcca

SEQ ID NO: 134766 - RNA, 19 nt, Artificial Sequence
  Description of Artificial Sequence: Synthetic oligonucleotide
  Sense strand starting at position 2954 of SEQ ID NO: 1731
ucggcucugcucugauaau

SEQ ID NO: 134767 - RNA, 19 nt, Artificial Sequence
  Description of Artificial Sequence: Synthetic oligonucleotide
  Antisense strand to SEQ ID NO: 134766
auuaucagagcagagccga

SEQ ID NO: 134768 - RNA, 19 nt, Artificial Sequence
  Description of Artificial Sequence: Synthetic oligonucleotide
  Sense strand starting at position 2922 of SEQ ID NO: 1731
ugguucuacuuagaagaau

SEQ ID NO: 134769 - RNA, 19 nt, Artificial Sequence
  Description of Artificial Sequence: Synthetic oligonucleotide
  Antisense strand to SEQ ID NO: 134768
auucuucuaaguagaacca

SEQ ID NO: 134770 - RNA, 19 nt, Artificial Sequence
  Description of Artificial Sequence: Synthetic oligonucleotide
  Sense strand starting at position 2913 of SEQ ID NO: 1731
cuagguuucugguucuacu

SEQ ID NO: 134771 - RNA, 19 nt, Artificial Sequence
  Description of Artificial Sequence: Synthetic oligonucleotide
  Antisense strand to SEQ ID NO: 134770
aguagaaccagaaaccuag

SEQ ID NO: 134772 - RNA, 19 nt, Artificial Sequence
  Description of Artificial Sequence: Synthetic oligonucleotide
  Sense strand starting at position 2824 of SEQ ID NO: 1731
uugagugauuuagggcaaa

SEQ ID NO: 134773 - RNA, 19 nt, Artificial Sequence
  Description of Artificial Sequence: Synthetic oligonucleotide
  Antisense strand to SEQ ID NO: 134772
uuugcccuaaaucacucaa

SEQ ID NO: 134774 - RNA, 19 nt, Artificial Sequence
  Description of Artificial Sequence: Synthetic oligonucleotide
  Sense strand starting at position 2814 of SEQ ID NO: 1731
cacuaauuaguugagugau

SEQ ID NO: 134775 - RNA, 19 nt, Artificial Sequence
  Description of Artificial Sequence: Synthetic oligonucleotide
  Antisense strand to SEQ ID NO: 134774
aucacucaacuaauuagug

SEQ ID NO: 134776 - RNA, 19 nt, Artificial Sequence
  Description of Artificial Sequence: Synthetic oligonucleotide
  Sense strand starting at position 2743 of SEQ ID NO: 1731
gcaguuagagugcaaaugu

SEQ ID NO: 134777 - RNA, 19 nt, Artificial Sequence
  Description of Artificial Sequence: Synthetic oligonucleotide
  Antisense strand to SEQ ID NO: 134776
acauuugcacucuaacugc

SEQ ID NO: 134778 - RNA, 19 nt, Artificial Sequence
  Description of Artificial Sequence: Synthetic oligonucleotide
  Sense strand starting at position 2664 of SEQ ID NO: 1731
ggacaauuguagcucuuaa

SEQ ID NO: 134779 - RNA, 19 nt, Artificial Sequence
  Description of Artificial Sequence: Synthetic oligonucleotide
  Antisense strand to SEQ ID NO: 134778
uuaagagcuacaauugucc

SEQ ID NO: 134780 - RNA, 19 nt, Artificial Sequence
  Description of Artificial Sequence: Synthetic oligonucleotide
  Sense strand starting at position 2655 of SEQ ID NO: 1731
gccuuaacuggacaauugu

SEQ ID NO: 134781 - RNA, 19 nt, Artificial Sequence
  Description of Artificial Sequence: Synthetic oligonucleotide
  Antisense strand to SEQ ID NO: 134780
acaauuguccaguuaaggc

SEQ ID NO: 134782 - RNA, 19 nt, Artificial Sequence
  Description of Artificial Sequence: Synthetic oligonucleotide
  Sense strand starting at position 2653 of SEQ ID NO: 1731
ccgccuuaacuggacaauu

SEQ ID NO: 134783 - RNA, 19 nt, Artificial Sequence
  Description of Artificial Sequence: Synthetic oligonucleotide
  Antisense strand to SEQ ID NO: 134782
aauuguccaguuaaggcgg

SEQ ID NO: 134784 - RNA, 19 nt, Artificial Sequence
  Description of Artificial Sequence: Synthetic oligonucleotide
  Sense strand starting at position 2255 of SEQ ID NO: 1731
guuucuucugcugaacuca

SEQ ID NO: 134785 - RNA, 19 nt, Artificial Sequence
  Description of Artificial Sequence: Synthetic oligonucleotide
  Antisense strand to SEQ ID NO: 134784
ugaguucagcagaagaaac

SEQ ID NO: 134786 - RNA, 19 nt, Artificial Sequence
  Description of Artificial Sequence: Synthetic oligonucleotide
  Sense strand starting at position 3980 of SEQ ID NO: 1732
gcaacagaccuugacaagu

SEQ ID NO: 134787 - RNA, 19 nt, Artificial Sequence
  Description of Artificial Sequence: Synthetic oligonucleotide
  Antisense strand to SEQ ID NO: 134786
acuugucaaggucuguugc

SEQ ID NO: 134788 - RNA, 19 nt, Artificial Sequence
  Description of Artificial Sequence: Synthetic oligonucleotide
  Sense strand starting at position 3515 of SEQ ID NO: 1732
guucuuggcacugggaaua

SEQ ID NO: 134789 - RNA, 19 nt, Artificial Sequence
  Description of Artificial Sequence: Synthetic oligonucleotide
  Antisense strand to SEQ ID NO: 134788
uauucccagugccaagaac

SEQ ID NO: 134790 - RNA, 19 nt, Artificial Sequence
  Description of Artificial Sequence: Synthetic oligonucleotide
  Sense strand starting at position 3477 of SEQ ID NO: 1732
gacuauauuuauugagagc

SEQ ID NO: 134791 - RNA, 19 nt, Artificial Sequence
  Description of Artificial Sequence: Synthetic oligonucleotide
  Antisense strand to SEQ ID NO: 134790
gcucucaauaaauauaguc

SEQ ID NO: 134792 - RNA, 19 nt, Artificial Sequence
  Description of Artificial Sequence: Synthetic oligonucleotide
  Sense strand starting at position 3405 of SEQ ID NO: 1732
ucuauaacaugggauaaga

SEQ ID NO: 134793 - RNA, 19 nt, Artificial Sequence
  Description of Artificial Sequence: Synthetic oligonucleotide
  Antisense strand to SEQ ID NO: 134792
ucuuaucccauguuauaga

SEQ ID NO: 134794 - RNA, 19 nt, Artificial Sequence
  Description of Artificial Sequence: Synthetic oligonucleotide
  Sense strand starting at position 3325 of SEQ ID NO: 1732
agaggcagaugcuuugauu

SEQ ID NO: 134795 - RNA, 19 nt, Artificial Sequence
  Description of Artificial Sequence: Synthetic oligonucleotide
  Antisense strand to SEQ ID NO: 134794
aaucaaagcaucugccucu

SEQ ID NO: 134796 - RNA, 19 nt, Artificial Sequence
  Description of Artificial Sequence: Synthetic oligonucleotide
  Sense strand starting at position 3235 of SEQ ID NO: 1732
ggucuaggguuuccacauu

SEQ ID NO: 134797 - RNA, 19 nt, Artificial Sequence
  Description of Artificial Sequence: Synthetic oligonucleotide
  Antisense strand to SEQ ID NO: 134796
aauguggaaacccuagacc

SEQ ID NO: 134798 - RNA, 19 nt, Artificial Sequence
  Description of Artificial Sequence: Synthetic oligonucleotide
  Sense strand starting at position 3167 of SEQ ID NO: 1732
ggaaaugcaguuuguagua

SEQ ID NO: 134799 - RNA, 19 nt, Artificial Sequence
  Description of Artificial Sequence: Synthetic oligonucleotide
  Antisense strand to SEQ ID NO: 134798
uacuacaaacugcauuucc

SEQ ID NO: 134800 - RNA, 19 nt, Artificial Sequence
  Description of Artificial Sequence: Synthetic oligonucleotide
  Sense strand starting at position 3141 of SEQ ID NO: 1732
cuaauaaguguuugaaaca

SEQ ID NO: 134801 - RNA, 19 nt, Artificial Sequence
  Description of Artificial Sequence: Synthetic oligonucleotide
  Antisense strand to SEQ ID NO: 134800
uguuucaaacacuuauuag

SEQ ID NO: 134802 - RNA, 19 nt, Artificial Sequence
  Description of Artificial Sequence: Synthetic oligonucleotide
  Sense strand starting at position 3140 of SEQ ID NO: 1732
gcuaauaaguguuugaaac

SEQ ID NO: 134803 - RNA, 19 nt, Artificial Sequence
  Description of Artificial Sequence: Synthetic oligonucleotide
  Antisense strand to SEQ ID NO: 134802
guuucaaacacuuauuagc

SEQ ID NO: 134804 - RNA, 19 nt, Artificial Sequence
  Description of Artificial Sequence: Synthetic oligonucleotide
  Sense strand starting at position 3009 of SEQ ID NO: 1732
gccaacauuucccaaggua

SEQ ID NO: 134805 - RNA, 19 nt, Artificial Sequence
  Description of Artificial Sequence: Synthetic oligonucleotide
  Antisense strand to SEQ ID NO: 134804
uaccuugggaaauguuggc

SEQ ID NO: 134806 - RNA, 19 nt, Artificial Sequence
  Description of Artificial Sequence: Synthetic oligonucleotide
  Sense strand starting at position 2984 of SEQ ID NO: 1732
cugccuucucuccacagua

SEQ ID NO: 134807 - RNA, 19 nt, Artificial Sequence
  Description of Artificial Sequence: Synthetic oligonucleotide
  Antisense strand to SEQ ID NO: 134806
uacuguggagagaaggcag

SEQ ID NO: 134808 - RNA, 19 nt, Artificial Sequence
  Description of Artificial Sequence: Synthetic oligonucleotide
  Sense strand starting at position 2968 of SEQ ID NO: 1732
ugcuuugucagaugaucug

SEQ ID NO: 134809 - RNA, 19 nt, Artificial Sequence
  Description of Artificial Sequence: Synthetic oligonucleotide
  Antisense strand to SEQ ID NO: 134808
cagaucaucugacaaagca

SEQ ID NO: 134810 - RNA, 19 nt, Artificial Sequence
  Description of Artificial Sequence: Synthetic oligonucleotide
  Sense strand starting at position 2815 of SEQ ID NO: 1732
gcaugagaguggccuuauc

SEQ ID NO: 134811 - RNA, 19 nt, Artificial Sequence
  Description of Artificial Sequence: Synthetic oligonucleotide
  Antisense strand to SEQ ID NO: 134810
gauaaggccacucucaugc

SEQ ID NO: 134812 - RNA, 19 nt, Artificial Sequence
  Description of Artificial Sequence: Synthetic oligonucleotide
  Sense strand starting at position 2666 of SEQ ID NO: 1732
aagugucccuugguacaau

SEQ ID NO: 134813 - RNA, 19 nt, Artificial Sequence
  Description of Artificial Sequence: Synthetic oligonucleotide
  Antisense strand to SEQ ID NO: 134812
auuguaccaagggacacuu

SEQ ID NO: 134814 - RNA, 19 nt, Artificial Sequence
  Description of Artificial Sequence: Synthetic oligonucleotide
  Sense strand starting at position 2602 of SEQ ID NO: 1732
ugauguuccuaagugacac

SEQ ID NO: 134815 - RNA, 19 nt, Artificial Sequence
  Description of Artificial Sequence: Synthetic oligonucleotide
  Antisense strand to SEQ ID NO: 134814
gugucacuuaggaacauca

SEQ ID NO: 134816 - RNA, 19 nt, Artificial Sequence
  Description of Artificial Sequence: Synthetic oligonucleotide
  Sense strand starting at position 2518 of SEQ ID NO: 1732
gugguauccuuauuucucu

SEQ ID NO: 134817 - RNA, 19 nt, Artificial Sequence
  Description of Artificial Sequence: Synthetic oligonucleotide
  Antisense strand to SEQ ID NO: 134816
agagaaauaaggauaccac

SEQ ID NO: 134818 - RNA, 19 nt, Artificial Sequence
  Description of Artificial Sequence: Synthetic oligonucleotide
  Sense strand starting at position 2344 of SEQ ID NO: 1732
gaggaaagccucugguaau

SEQ ID NO: 134819 - RNA, 19 nt, Artificial Sequence
  Description of Artificial Sequence: Synthetic oligonucleotide
  Antisense strand to SEQ ID NO: 134818
auuaccagaggcuuuccuc

SEQ ID NO: 134820 - RNA, 19 nt, Artificial Sequence
  Description of Artificial Sequence: Synthetic oligonucleotide
  Sense strand starting at position 2273 of SEQ ID NO: 1732
ucagacaguuauguauauu

SEQ ID NO: 134821 - RNA, 19 nt, Artificial Sequence
  Description of Artificial Sequence: Synthetic oligonucleotide
  Antisense strand to SEQ ID NO: 134820
aauauacauaacugucuga

SEQ ID NO: 134822 - RNA, 19 nt, Artificial Sequence
  Description of Artificial Sequence: Synthetic oligonucleotide
  Sense strand starting at position 2151 of SEQ ID NO: 1732
ugaucucagaagcgaagau

SEQ ID NO: 134823 - RNA, 19 nt, Artificial Sequence
  Description of Artificial Sequence: Synthetic oligonucleotide
  Antisense strand to SEQ ID NO: 134822
aucuucgcuucugagauca

SEQ ID NO: 134824 - RNA, 19 nt, Artificial Sequence
  Description of Artificial Sequence: Synthetic oligonucleotide
  Sense strand starting at position 2135 of SEQ ID NO: 1732
accgauguuacucagauga

SEQ ID NO: 134825 - RNA, 19 nt, Artificial Sequence
  Description of Artificial Sequence: Synthetic oligonucleotide
  Antisense strand to SEQ ID NO: 134824
ucaucugaguaacaucggu

SEQ ID NO: 134826 - RNA, 19 nt, Artificial Sequence
  Description of Artificial Sequence: Synthetic oligonucleotide
  Sense strand starting at position 2134 of SEQ ID NO: 1732
caccgauguuacucagaug

SEQ ID NO: 134827 - RNA, 19 nt, Artificial Sequence
  Description of Artificial Sequence: Synthetic oligonucleotide
  Antisense strand to SEQ ID NO: 134826
caucugaguaacaucggug

SEQ ID NO: 134828 - RNA, 19 nt, Artificial Sequence
  Description of Artificial Sequence: Synthetic oligonucleotide
  Sense strand starting at position 1859 of SEQ ID NO: 1732
gagaauguuaggcgacuua

SEQ ID NO: 134829 - RNA, 19 nt, Artificial Sequence
  Description of Artificial Sequence: Synthetic oligonucleotide
  Antisense strand to SEQ ID NO: 134828
uaagucgccuaacauucuc

SEQ ID NO: 134830 - RNA, 19 nt, Artificial Sequence
  Description of Artificial Sequence: Synthetic oligonucleotide
  Sense strand starting at position 1858 of SEQ ID NO: 1732
agagaauguuaggcgacuu

SEQ ID NO: 134831 - RNA, 19 nt, Artificial Sequence
  Description of Artificial Sequence: Synthetic oligonucleotide
  Antisense strand to SEQ ID NO: 134830
aagucgccuaacauucucu

SEQ ID NO: 134832 - RNA, 19 nt, Artificial Sequence
  Description of Artificial Sequence: Synthetic oligonucleotide
  Sense strand starting at position 1704 of SEQ ID NO: 1732
aggucuaacuagucugaaa

SEQ ID NO: 134833 - RNA, 19 nt, Artificial Sequence
  Description of Artificial Sequence: Synthetic oligonucleotide
  Antisense strand to SEQ ID NO: 134832
uuucagacuaguuagaccu

SEQ ID NO: 134834 - RNA, 19 nt, Artificial Sequence
  Description of Artificial Sequence: Synthetic oligonucleotide
  Sense strand starting at position 1534 of SEQ ID NO: 1732
uaaguuaagguuugccaau

SEQ ID NO: 134835 - RNA, 19 nt, Artificial Sequence
  Description of Artificial Sequence: Synthetic oligonucleotide
  Antisense strand to SEQ ID NO: 134834
auuggcaaaccuuaacuua

SEQ ID NO: 134836 - RNA, 19 nt, Artificial Sequence
  Description of Artificial Sequence: Synthetic oligonucleotide
  Sense strand starting at position 1455 of SEQ ID NO: 1732
gucaacaugcuauguaaau

SEQ ID NO: 134837 - RNA, 19 nt, Artificial Sequence
  Description of Artificial Sequence: Synthetic oligonucleotide
  Antisense strand to SEQ ID NO: 134836
auuuacauagcauguugac

SEQ ID NO: 134838 - RNA, 19 nt, Artificial Sequence
  Description of Artificial Sequence: Synthetic oligonucleotide
  Sense strand starting at position 1382 of SEQ ID NO: 1732
agcggagguuaaguuuaua

SEQ ID NO: 134839 - RNA, 19 nt, Artificial Sequence
  Description of Artificial Sequence: Synthetic oligonucleotide
  Antisense strand to SEQ ID NO: 134838
uauaaacuuaaccuccgcu

SEQ ID NO: 134840 - RNA, 19 nt, Artificial Sequence
  Description of Artificial Sequence: Synthetic oligonucleotide
  Sense strand starting at position 1290 of SEQ ID NO: 1732
guacacucagcugaauguu

SEQ ID NO: 134841 - RNA, 19 nt, Artificial Sequence
  Description of Artificial Sequence: Synthetic oligonucleotide
  Antisense strand to SEQ ID NO: 134840
aacauucagcugaguguac

SEQ ID NO: 134842 - RNA, 19 nt, Artificial Sequence
  Description of Artificial Sequence: Synthetic oligonucleotide
  Sense strand starting at position 1289 of SEQ ID NO: 1732
gguacacucagcugaaugu

SEQ ID NO: 134843 - RNA, 19 nt, Artificial Sequence
  Description of Artificial Sequence: Synthetic oligonucleotide
  Antisense strand to SEQ ID NO: 134842
acauucagcugaguguacc

SEQ ID NO: 134844 - RNA, 19 nt, Artificial Sequence
  Description of Artificial Sequence: Synthetic oligonucleotide
  Sense strand starting at position 1253 of SEQ ID NO: 1732
cuggauaucuacuuguuau

SEQ ID NO: 134845 - RNA, 19 nt, Artificial Sequence
  Description of Artificial Sequence: Synthetic oligonucleotide
  Antisense strand to SEQ ID NO: 134844
auaacaaguagauauccag

SEQ ID NO: 134846 - RNA, 19 nt, Artificial Sequence
  Description of Artificial Sequence: Synthetic oligonucleotide
  Sense strand starting at position 1242 of SEQ ID NO: 1732
cugcuucgagacuggauau

SEQ ID NO: 134847 - RNA, 19 nt, Artificial Sequence
  Description of Artificial Sequence: Synthetic oligonucleotide
  Antisense strand to SEQ ID NO: 134846
auauccagucucgaagcag

SEQ ID NO: 134848 - RNA, 19 nt, Artificial Sequence
  Description of Artificial Sequence: Synthetic oligonucleotide
  Sense strand starting at position 946 of SEQ ID NO: 1732
ccaggaauuguuuggcauu

SEQ ID NO: 134849 - RNA, 19 nt, Artificial Sequence
  Description of Artificial Sequence: Synthetic oligonucleotide
  Antisense strand to SEQ ID NO: 134848
aaugccaaacaauuccugg

SEQ ID NO: 134850 - RNA, 19 nt, Artificial Sequence
  Description of Artificial Sequence: Synthetic oligonucleotide
  Sense strand starting at position 915 of SEQ ID NO: 1732
ccuuucugugaaugguaaa

SEQ ID NO: 134851 - RNA, 19 nt, Artificial Sequence
  Description of Artificial Sequence: Synthetic oligonucleotide
  Antisense strand to SEQ ID NO: 134850
uuuaccauucacagaaagg

SEQ ID NO: 134852 - RNA, 19 nt, Artificial Sequence
  Description of Artificial Sequence: Synthetic oligonucleotide
  Sense strand starting at position 844 of SEQ ID NO: 1732
uugacucgccuuuaauauu

SEQ ID NO: 134853 - RNA, 19 nt, Artificial Sequence
  Description of Artificial Sequence: Synthetic oligonucleotide
  Antisense strand to SEQ ID NO: 134852
aauauuaaaggcgagucaa

SEQ ID NO: 134854 - RNA, 19 nt, Artificial Sequence
  Description of Artificial Sequence: Synthetic oligonucleotide
  Sense strand starting at position 840 of SEQ ID NO: 1732
gcauuugacucgccuuuaa

SEQ ID NO: 134855 - RNA, 19 nt, Artificial Sequence
  Description of Artificial Sequence: Synthetic oligonucleotide
  Antisense strand to SEQ ID NO: 134854
uuaaaggcgagucaaaugc

SEQ ID NO: 134856 - RNA, 19 nt, Artificial Sequence
  Description of Artificial Sequence: Synthetic oligonucleotide
  Sense strand starting at position 337 of SEQ ID NO: 1732
aucauaaagccuuggaugu

SEQ ID NO: 134857 - RNA, 19 nt, Artificial Sequence
  Description of Artificial Sequence: Synthetic oligonucleotide
  Antisense strand to SEQ ID NO: 134856
acauccaaggcuuuaugau

SEQ ID NO: 134858 - RNA, 19 nt, Artificial Sequence
  Description of Artificial Sequence: Synthetic oligonucleotide
  Sense strand starting at position 316 of SEQ ID NO: 1732
ugucccacucuuggaagaa

SEQ ID NO: 134859 - RNA, 19 nt, Artificial Sequence
  Description of Artificial Sequence: Synthetic oligonucleotide
  Antisense strand to SEQ ID NO: 134858
uucuuccaagagugggaca

SEQ ID NO: 134860 - RNA, 19 nt, Artificial Sequence
  Description of Artificial Sequence: Synthetic oligonucleotide
  Sense strand starting at position 287 of SEQ ID NO: 1732
cuucuucucccauagaggu

SEQ ID NO: 134861 - RNA, 19 nt, Artificial Sequence
  Description of Artificial Sequence: Synthetic oligonucleotide
  Antisense strand to SEQ ID NO: 134860
accucuaugggagaagaag

SEQ ID NO: 134862 - RNA, 19 nt, Artificial Sequence
  Description of Artificial Sequence: Synthetic oligonucleotide
  Sense strand starting at position 159 of SEQ ID NO: 1732
agaucaugcagaggaguua

SEQ ID NO: 134863 - RNA, 19 nt, Artificial Sequence
  Description of Artificial Sequence: Synthetic oligonucleotide
  Antisense strand to SEQ ID NO: 134862
uaacuccucugcaugaucu

SEQ ID NO: 134864 - RNA, 19 nt, Artificial Sequence
  Description of Artificial Sequence: Synthetic oligonucleotide
  Sense strand starting at position 144 of SEQ ID NO: 1732
ggaugucagcuccacagau

SEQ ID NO: 134865 - RNA, 19 nt, Artificial Sequence
  Description of Artificial Sequence: Synthetic oligonucleotide
  Antisense strand to SEQ ID NO: 134864
aucuguggagcugacaucc

SEQ ID NO: 134866 - RNA, 19 nt, Artificial Sequence
  Description of Artificial Sequence: Synthetic oligonucleotide
  Sense strand starting at position 3965 of SEQ ID NO: 1733
uugguuuguacauauaagu

SEQ ID NO: 134867 - RNA, 19 nt, Artificial Sequence
  Description of Artificial Sequence: Synthetic oligonucleotide
  Antisense strand to SEQ ID NO: 134866
acuuauauguacaaaccaa

SEQ ID NO: 134868 - RNA, 19 nt, Artificial Sequence
  Description of Artificial Sequence: Synthetic oligonucleotide
  Sense strand starting at position 3960 of SEQ ID NO: 1733
gaaucuugguuuguacaua

SEQ ID NO: 134869 - RNA, 19 nt, Artificial Sequence
  Description of Artificial Sequence: Synthetic oligonucleotide
  Antisense strand to SEQ ID NO: 134868
uauguacaaaccaagauuc

SEQ ID NO: 134870 - RNA, 19 nt, Artificial Sequence
  Description of Artificial Sequence: Synthetic oligonucleotide
  Sense strand starting at position 3959 of SEQ ID NO: 1733
agaaucuugguuuguacau

SEQ ID NO: 134871 - RNA, 19 nt, Artificial Sequence
  Description of Artificial Sequence: Synthetic oligonucleotide
  Antisense strand to SEQ ID NO: 134870
auguacaaaccaagauucu

SEQ ID NO: 134872 - RNA, 19 nt, Artificial Sequence
  Description of Artificial Sequence: Synthetic oligonucleotide
  Sense strand starting at position 3957 of SEQ ID NO: 1733
uaagaaucuugguuuguac

SEQ ID NO: 134873 - RNA, 19 nt, Artificial Sequence
  Description of Artificial Sequence: Synthetic oligonucleotide
  Antisense strand to SEQ ID NO: 134872
guacaaaccaagauucuua

SEQ ID NO: 134874 - RNA, 19 nt, Artificial Sequence
  Description of Artificial Sequence: Synthetic oligonucleotide
  Sense strand starting at position 3956 of SEQ ID NO: 1733
uuaagaaucuugguuugua

SEQ ID NO: 134875 - RNA, 19 nt, Artificial Sequence
  Description of Artificial Sequence: Synthetic oligonucleotide
  Antisense strand to SEQ ID NO: 134874
uacaaaccaagauucuuaa

SEQ ID NO: 134876 - RNA, 19 nt, Artificial Sequence
  Description of Artificial Sequence: Synthetic oligonucleotide
  Sense strand starting at position 3832 of SEQ ID NO: 1733
acggaauaaugcuucuauu

SEQ ID NO: 134877 - RNA, 19 nt, Artificial Sequence
  Description of Artificial Sequence: Synthetic oligonucleotide
  Antisense strand to SEQ ID NO: 134876
aauagaagcauuauuccgu

SEQ ID NO: 134878 - RNA, 19 nt, Artificial Sequence
  Description of Artificial Sequence: Synthetic oligonucleotide
  Sense strand starting at position 3765 of SEQ ID NO: 1733
uguucuaaccgggauguga

SEQ ID NO: 134879 - RNA, 19 nt, Artificial Sequence
  Description of Artificial Sequence: Synthetic oligonucleotide
  Antisense strand to SEQ ID NO: 134878
ucacaucccgguuagaaca

SEQ ID NO: 134880 - RNA, 19 nt, Artificial Sequence
  Description of Artificial Sequence: Synthetic oligonucleotide
  Sense strand starting at position 3741 of SEQ ID NO: 1733
ccaacuauugacuguugua

SEQ ID NO: 134881 - RNA, 19 nt, Artificial Sequence
  Description of Artificial Sequence: Synthetic oligonucleotide
  Antisense strand to SEQ ID NO: 134880
uacaacagucaauaguugg

SEQ ID NO: 134882 - RNA, 19 nt, Artificial Sequence
  Description of Artificial Sequence: Synthetic oligonucleotide
  Sense strand starting at position 3623 of SEQ ID NO: 1733
aagagauugcgggagcauc

SEQ ID NO: 134883 - RNA, 19 nt, Artificial Sequence
  Description of Artificial Sequence: Synthetic oligonucleotide
  Antisense strand to SEQ ID NO: 134882
gaugcucccgcaaucucuu

SEQ ID NO: 134884 - RNA, 19 nt, Artificial Sequence
  Description of Artificial Sequence: Synthetic oligonucleotide
  Sense strand starting at position 3605 of SEQ ID NO: 1733
aggugucggcgauaagaaa

SEQ ID NO: 134885 - RNA, 19 nt, Artificial Sequence
  Description of Artificial Sequence: Synthetic oligonucleotide
  Antisense strand to SEQ ID NO: 134884
uuucuuaucgccgacaccu

SEQ ID NO: 134886 - RNA, 19 nt, Artificial Sequence
  Description of Artificial Sequence: Synthetic oligonucleotide
  Sense strand starting at position 3603 of SEQ ID NO: 1733
uuaggugucggcgauaaga

SEQ ID NO: 134887 - RNA, 19 nt, Artificial Sequence
  Description of Artificial Sequence: Synthetic oligonucleotide
  Antisense strand to SEQ ID NO: 134886
ucuuaucgccgacaccuaa

SEQ ID NO: 134888 - RNA, 19 nt, Artificial Sequence
  Description of Artificial Sequence: Synthetic oligonucleotide
  Sense strand starting at position 3529 of SEQ ID NO: 1733
agucuaucccggcaggaaa

SEQ ID NO: 134889 - RNA, 19 nt, Artificial Sequence
  Description of Artificial Sequence: Synthetic oligonucleotide
  Antisense strand to SEQ ID NO: 134888
uuuccugccgggauagacu

SEQ ID NO: 134890 - RNA, 19 nt, Artificial Sequence
  Description of Artificial Sequence: Synthetic oligonucleotide
  Sense strand starting at position 3503 of SEQ ID NO: 1733
uaagaauagcgauguuagu

SEQ ID NO: 134891 - RNA, 19 nt, Artificial Sequence
  Description of Artificial Sequence: Synthetic oligonucleotide
  Antisense strand to SEQ ID NO: 134890
acuaacaucgcuauucuua

SEQ ID NO: 134892 - RNA, 19 nt, Artificial Sequence
  Description of Artificial Sequence: Synthetic oligonucleotide
  Sense strand starting at position 3426 of SEQ ID NO: 1733
acuccuuccuagggaauuu

SEQ ID NO: 134893 - RNA, 19 nt, Artificial Sequence
  Description of Artificial Sequence: Synthetic oligonucleotide
  Antisense strand to SEQ ID NO: 134892
aaauucccuaggaaggagu

SEQ ID NO: 134894 - RNA, 19 nt, Artificial Sequence
  Description of Artificial Sequence: Synthetic oligonucleotide
  Sense strand starting at position 3354 of SEQ ID NO: 1733
guauuuaugagguguguua

SEQ ID NO: 134895 - RNA, 19 nt, Artificial Sequence
  Description of Artificial Sequence: Synthetic oligonucleotide
  Antisense strand to SEQ ID NO: 134894
uaacacaccucauaaauac

SEQ ID NO: 134896 - RNA, 19 nt, Artificial Sequence
  Description of Artificial Sequence: Synthetic oligonucleotide
  Sense strand starting at position 3293 of SEQ ID NO: 1733
ucgugugucccucaaauuu

SEQ ID NO: 134897 - RNA, 19 nt, Artificial Sequence
  Description of Artificial Sequence: Synthetic oligonucleotide
  Antisense strand to SEQ ID NO: 134896
aaauuugagggacacacga

SEQ ID NO: 134898 - RNA, 19 nt, Artificial Sequence
  Description of Artificial Sequence: Synthetic oligonucleotide
  Sense strand starting at position 3175 of SEQ ID NO: 1733
gcguuuaugaccuaaagau

SEQ ID NO: 134899 - RNA, 19 nt, Artificial Sequence
  Description of Artificial Sequence: Synthetic oligonucleotide
  Antisense strand to SEQ ID NO: 134898
aucuuuaggucauaaacgc

SEQ ID NO: 134900 - RNA, 19 nt, Artificial Sequence
  Description of Artificial Sequence: Synthetic oligonucleotide
  Sense strand starting at position 3054 of SEQ ID NO: 1733
uagauaauguggcucuuaa

SEQ ID NO: 134901 - RNA, 19 nt, Artificial Sequence
  Description of Artificial Sequence: Synthetic oligonucleotide
  Antisense strand to SEQ ID NO: 134900
uuaagagccacauuaucua

SEQ ID NO: 134902 - RNA, 19 nt, Artificial Sequence
  Description of Artificial Sequence: Synthetic oligonucleotide
  Sense strand starting at position 3004 of SEQ ID NO: 1733
uuacuuugguuugacauuu

SEQ ID NO: 134903 - RNA, 19 nt, Artificial Sequence
  Description of Artificial Sequence: Synthetic oligonucleotide
  Antisense strand to SEQ ID NO: 134902
aaaugucaaaccaaaguaa

SEQ ID NO: 134904 - RNA, 19 nt, Artificial Sequence
  Description of Artificial Sequence: Synthetic oligonucleotide
  Sense strand starting at position 2934 of SEQ ID NO: 1733
cuuuaaaguuuauuaggca

SEQ ID NO: 134905 - RNA, 19 nt, Artificial Sequence
  Description of Artificial Sequence: Synthetic oligonucleotide
  Antisense strand to SEQ ID NO: 134904
ugccuaauaaacuuuaaag

SEQ ID NO: 134906 - RNA, 19 nt, Artificial Sequence
  Description of Artificial Sequence: Synthetic oligonucleotide
  Sense strand starting at position 2925 of SEQ ID NO: 1733
ggcaacaaacuuuaaaguu

SEQ ID NO: 134907 - RNA, 19 nt, Artificial Sequence
  Description of Artificial Sequence: Synthetic oligonucleotide
  Antisense strand to SEQ ID NO: 134906
aacuuuaaaguuuguugcc

SEQ ID NO: 134908 - RNA, 19 nt, Artificial Sequence
  Description of Artificial Sequence: Synthetic oligonucleotide
  Sense strand starting at position 2791 of SEQ ID NO: 1733
uuggauuguagguaaagca

SEQ ID NO: 134909 - RNA, 19 nt, Artificial Sequence
  Description of Artificial Sequence: Synthetic oligonucleotide
  Antisense strand to SEQ ID NO: 134908
ugcuuuaccuacaauccaa

SEQ ID NO: 134910 - RNA, 19 nt, Artificial Sequence
  Description of Artificial Sequence: Synthetic oligonucleotide
  Sense strand starting at position 2781 of SEQ ID NO: 1733
cugacauuaguuggauugu

SEQ ID NO: 134911 - RNA, 19 nt, Artificial Sequence
  Description of Artificial Sequence: Synthetic oligonucleotide
  Antisense strand to SEQ ID NO: 134910
acaauccaacuaaugucag

SEQ ID NO: 134912 - RNA, 19 nt, Artificial Sequence
  Description of Artificial Sequence: Synthetic oligonucleotide
  Sense strand starting at position 2770 of SEQ ID NO: 1733
cuugguuaccucugacauu

SEQ ID NO: 134913 - RNA, 19 nt, Artificial Sequence
  Description of Artificial Sequence: Synthetic oligonucleotide
  Antisense strand to SEQ ID NO: 134912
aaugucagagguaaccaag

SEQ ID NO: 134914 - RNA, 19 nt, Artificial Sequence
  Description of Artificial Sequence: Synthetic oligonucleotide
  Sense strand starting at position 2725 of SEQ ID NO: 1733
ccaguuuaucuccagucca

SEQ ID NO: 134915 - RNA, 19 nt, Artificial Sequence
  Description of Artificial Sequence: Synthetic oligonucleotide
  Antisense strand to SEQ ID NO: 134914
uggacuggagauaaacugg

SEQ ID NO: 134916 - RNA, 19 nt, Artificial Sequence
  Description of Artificial Sequence: Synthetic oligonucleotide
  Sense strand starting at position 2691 of SEQ ID NO: 1733
cuguuauuagacgaagauc

SEQ ID NO: 134917 - RNA, 19 nt, Artificial Sequence
  Description of Artificial Sequence: Synthetic oligonucleotide
  Antisense strand to SEQ ID NO: 134916
gaucuucgucuaauaacag

SEQ ID NO: 134918 - RNA, 19 nt, Artificial Sequence
  Description of Artificial Sequence: Synthetic oligonucleotide
  Sense strand starting at position 2690 of SEQ ID NO: 1733
ucuguuauuagacgaagau

SEQ ID NO: 134919 - RNA, 19 nt, Artificial Sequence
  Description of Artificial Sequence: Synthetic oligonucleotide
  Antisense strand to SEQ ID NO: 134918
aucuucgucuaauaacaga

SEQ ID NO: 134920 - RNA, 19 nt, Artificial Sequence
  Description of Artificial Sequence: Synthetic oligonucleotide
  Sense strand starting at position 2632 of SEQ ID NO: 1733
cagguagguuugguauuaa

SEQ ID NO: 134921 - RNA, 19 nt, Artificial Sequence
  Description of Artificial Sequence: Synthetic oligonucleotide
  Antisense strand to SEQ ID NO: 134920
uuaauaccaaaccuaccug

SEQ ID NO: 134922 - RNA, 19 nt, Artificial Sequence
  Description of Artificial Sequence: Synthetic oligonucleotide
  Sense strand starting at position 2570 of SEQ ID NO: 1733
gguagugucaaggauacgu

SEQ ID NO: 134923 - RNA, 19 nt, Artificial Sequence
  Description of Artificial Sequence: Synthetic oligonucleotide
  Antisense strand to SEQ ID NO: 134922
acguauccuugacacuacc

SEQ ID NO: 134924 - RNA, 19 nt, Artificial Sequence
  Description of Artificial Sequence: Synthetic oligonucleotide
  Sense strand starting at position 2396 of SEQ ID NO: 1733
agauacagcugaucgaguu

SEQ ID NO: 134925 - RNA, 19 nt, Artificial Sequence
  Description of Artificial Sequence: Synthetic oligonucleotide
  Antisense strand to SEQ ID NO: 134924
aacucgaucagcuguaucu

SEQ ID NO: 134926 - RNA, 19 nt, Artificial Sequence
  Description of Artificial Sequence: Synthetic oligonucleotide
  Sense strand starting at position 2105 of SEQ ID NO: 1733
aagagaacuugggaggaaa

SEQ ID NO: 134927 - RNA, 19 nt, Artificial Sequence
  Description of Artificial Sequence: Synthetic oligonucleotide
  Antisense strand to SEQ ID NO: 134926
uuuccucccaaguucucuu

SEQ ID NO: 134928 - RNA, 19 nt, Artificial Sequence
  Description of Artificial Sequence: Synthetic oligonucleotide
  Sense strand starting at position 1020 of SEQ ID NO: 1733
guccucucuccugagaaga

SEQ ID NO: 134929 - RNA, 19 nt, Artificial Sequence
  Description of Artificial Sequence: Synthetic oligonucleotide
  Antisense strand to SEQ ID NO: 134928
ucuucucaggagagaggac

SEQ ID NO: 134930 - RNA, 19 nt, Artificial Sequence
  Description of Artificial Sequence: Synthetic oligonucleotide
  Sense strand starting at position 834 of SEQ ID NO: 1733
agugaaagguaugcaaaug

SEQ ID NO: 134931 - RNA, 19 nt, Artificial Sequence
  Description of Artificial Sequence: Synthetic oligonucleotide
  Antisense strand to SEQ ID NO: 134930
cauuugcauaccuuucacu

SEQ ID NO: 134932 - RNA, 19 nt, Artificial Sequence
  Description of Artificial Sequence: Synthetic oligonucleotide
  Sense strand starting at position 833 of SEQ ID NO: 1733
aagugaaagguaugcaaau

SEQ ID NO: 134933 - RNA, 19 nt, Artificial Sequence
  Description of Artificial Sequence: Synthetic oligonucleotide
  Antisense strand to SEQ ID NO: 134932
auuugcauaccuuucacuu

SEQ ID NO: 134934 - RNA, 19 nt, Artificial Sequence
  Description of Artificial Sequence: Synthetic oligonucleotide
  Sense strand starting at position 479 of SEQ ID NO: 1733
cagcgauggcugggagauu

SEQ ID NO: 134935 - RNA, 19 nt, Artificial Sequence
  Description of Artificial Sequence: Synthetic oligonucleotide
  Antisense strand to SEQ ID NO: 134934
aaucucccagccaucgcug

SEQ ID NO: 134936 - RNA, 19 nt, Artificial Sequence
  Description of Artificial Sequence: Synthetic oligonucleotide
  Sense strand starting at position 350 of SEQ ID NO: 1733
ucacuagucuucccaguaa

SEQ ID NO: 134937 - RNA, 19 nt, Artificial Sequence
  Description of Artificial Sequence: Synthetic oligonucleotide
  Antisense strand to SEQ ID NO: 134936
uuacugggaagacuaguga

SEQ ID NO: 134938 - RNA, 19 nt, Artificial Sequence
  Description of Artificial Sequence: Synthetic oligonucleotide
  Sense strand starting at position 297 of SEQ ID NO: 1733
uccugaucugcucaggcaa

SEQ ID NO: 134939 - RNA, 19 nt, Artificial Sequence
  Description of Artificial Sequence: Synthetic oligonucleotide
  Antisense strand to SEQ ID NO: 134938
uugccugagcagaucagga

SEQ ID NO: 134940 - RNA, 19 nt, Artificial Sequence
  Description of Artificial Sequence: Synthetic oligonucleotide
  Sense strand starting at position 221 of SEQ ID NO: 1733
gcuggcacaccagaagaau

SEQ ID NO: 134941 - RNA, 19 nt, Artificial Sequence
  Description of Artificial Sequence: Synthetic oligonucleotide
  Antisense strand to SEQ ID NO: 134940
auucuucuggugugccagc

SEQ ID NO: 134942 - RNA, 19 nt, Artificial Sequence
  Description of Artificial Sequence: Synthetic oligonucleotide
  Sense strand starting at position 131 of SEQ ID NO: 1733
gggagucuguggaaagcua

SEQ ID NO: 134943 - RNA, 19 nt, Artificial Sequence
  Description of Artificial Sequence: Synthetic oligonucleotide
  Antisense strand to SEQ ID NO: 134942
uagcuuuccacagacuccc

SEQ ID NO: 134944 - RNA, 19 nt, Artificial Sequence
  Description of Artificial Sequence: Synthetic oligonucleotide
  Sense strand starting at position 29 of SEQ ID NO: 1733
ugagcuauuuaagacuaag

SEQ ID NO: 134945 - RNA, 19 nt, Artificial Sequence
  Description of Artificial Sequence: Synthetic oligonucleotide
  Antisense strand to SEQ ID NO: 134944
cuuagucuuaaauagcuca

SEQ ID NO: 134946 - RNA, 19 nt, Artificial Sequence
  Description of Artificial Sequence: Synthetic oligonucleotide
  Sense strand starting at position 3962 of SEQ ID NO: 1734
caaugucuucugcgacaca

SEQ ID NO: 134947 - RNA, 19 nt, Artificial Sequence
  Description of Artificial Sequence: Synthetic oligonucleotide
  Antisense strand to SEQ ID NO: 134946
ugugucgcagaagacauug

SEQ ID NO: 134948 - RNA, 19 nt, Artificial Sequence
  Description of Artificial Sequence: Synthetic oligonucleotide
  Sense strand starting at position 3958 of SEQ ID NO: 1734
cuaccaaugucuucugcga

SEQ ID NO: 134949 - RNA, 19 nt, Artificial Sequence
  Description of Artificial Sequence: Synthetic oligonucleotide
  Antisense strand to SEQ ID NO: 134948
ucgcagaagacauugguag

SEQ ID NO: 134950 - RNA, 19 nt, Artificial Sequence
  Description of Artificial Sequence: Synthetic oligonucleotide
  Sense strand starting at position 3920 of SEQ ID NO: 1734
guauuuaugagguguguua

SEQ ID NO: 134951 - RNA, 19 nt, Artificial Sequence
  Description of Artificial Sequence: Synthetic oligonucleotide
  Antisense strand to SEQ ID NO: 134950
uaacacaccucauaaauac

SEQ ID NO: 134952 - RNA, 19 nt, Artificial Sequence
  Description of Artificial Sequence: Synthetic oligonucleotide
  Sense strand starting at position 3894 of SEQ ID NO: 1734
gaaucaugcugugucguga

SEQ ID NO: 134953 - RNA, 19 nt, Artificial Sequence
  Description of Artificial Sequence: Synthetic oligonucleotide
  Antisense strand to SEQ ID NO: 134952
ucacgacacagcaugauuc

SEQ ID NO: 134954 - RNA, 19 nt, Artificial Sequence
  Description of Artificial Sequence: Synthetic oligonucleotide
  Sense strand starting at position 3859 of SEQ ID NO: 1734
ucgugugucccucaaauuu

SEQ ID NO: 134955 - RNA, 19 nt, Artificial Sequence
  Description of Artificial Sequence: Synthetic oligonucleotide
  Antisense strand to SEQ ID NO: 134954
aaauuugagggacacacga

SEQ ID NO: 134956 - RNA, 19 nt, Artificial Sequence
  Description of Artificial Sequence: Synthetic oligonucleotide
  Sense strand starting at position 3741 of SEQ ID NO: 1734
gcguuuaugaccuaaagau

SEQ ID NO: 134957 - RNA, 19 nt, Artificial Sequence
  Description of Artificial Sequence: Synthetic oligonucleotide
  Antisense strand to SEQ ID NO: 134956
aucuuuaggucauaaacgc

SEQ ID NO: 134958 - RNA, 19 nt, Artificial Sequence
  Description of Artificial Sequence: Synthetic oligonucleotide
  Sense strand starting at position 3739 of SEQ ID NO: 1734
ccgcguuuaugaccuaaag

SEQ ID NO: 134959 - RNA, 19 nt, Artificial Sequence
  Description of Artificial Sequence: Synthetic oligonucleotide
  Antisense strand to SEQ ID NO: 134958
cuuuaggucauaaacgcgg

SEQ ID NO: 134960 - RNA, 19 nt, Artificial Sequence
  Description of Artificial Sequence: Synthetic oligonucleotide
  Sense strand starting at position 3620 of SEQ ID NO: 1734
uagauaauguggcucuuaa

SEQ ID NO: 134961 - RNA, 19 nt, Artificial Sequence
  Description of Artificial Sequence: Synthetic oligonucleotide
  Antisense strand to SEQ ID NO: 134960
uuaagagccacauuaucua

SEQ ID NO: 134962 - RNA, 19 nt, Artificial Sequence
  Description of Artificial Sequence: Synthetic oligonucleotide
  Sense strand starting at position 3570 of SEQ ID NO: 1734
uuacuuugguuugacauuu

SEQ ID NO: 134963 - RNA, 19 nt, Artificial Sequence
  Description of Artificial Sequence: Synthetic oligonucleotide
  Antisense strand to SEQ ID NO: 134962
aaaugucaaaccaaaguaa

SEQ ID NO: 134964 - RNA, 19 nt, Artificial Sequence
  Description of Artificial Sequence: Synthetic oligonucleotide
  Sense strand starting at position 3532 of SEQ ID NO: 1734
gcauaaaucgcaggcucua

SEQ ID NO: 134965 - RNA, 19 nt, Artificial Sequence
  Description of Artificial Sequence: Synthetic oligonucleotide
  Antisense strand to SEQ ID NO: 134964
uagagccugcgauuuaugc

SEQ ID NO: 134966 - RNA, 19 nt, Artificial Sequence
  Description of Artificial Sequence: Synthetic oligonucleotide
  Sense strand starting at position 3500 of SEQ ID NO: 1734
cuuuaaaguuuauuaggca

SEQ ID NO: 134967 - RNA, 19 nt, Artificial Sequence
  Description of Artificial Sequence: Synthetic oligonucleotide
  Antisense strand to SEQ ID NO: 134966
ugccuaauaaacuuuaaag

SEQ ID NO: 134968 - RNA, 19 nt, Artificial Sequence
  Description of Artificial Sequence: Synthetic oligonucleotide
  Sense strand starting at position 3491 of SEQ ID NO: 1734
ggcaacaaacuuuaaaguu

SEQ ID NO: 134969 - RNA, 19 nt, Artificial Sequence
  Description of Artificial Sequence: Synthetic oligonucleotide
  Antisense strand to SEQ ID NO: 134968
aacuuuaaaguuuguugcc

SEQ ID NO: 134970 - RNA, 19 nt, Artificial Sequence
  Description of Artificial Sequence: Synthetic oligonucleotide
  Sense strand starting at position 3394 of SEQ ID NO: 1734
guugcaaacaucuggcgau

SEQ ID NO: 134971 - RNA, 19 nt, Artificial Sequence
  Description of Artificial Sequence: Synthetic oligonucleotide
  Antisense strand to SEQ ID NO: 134970
aucgccagauguuugcaac

SEQ ID NO: 134972 - RNA, 19 nt, Artificial Sequence
  Description of Artificial Sequence: Synthetic oligonucleotide
  Sense strand starting at position 3357 of SEQ ID NO: 1734
uuggauuguagguaaagca

SEQ ID NO: 134973 - RNA, 19 nt, Artificial Sequence
  Description of Artificial Sequence: Synthetic oligonucleotide
  Antisense strand to SEQ ID NO: 134972
ugcuuuaccuacaauccaa

SEQ ID NO: 134974 - RNA, 19 nt, Artificial Sequence
  Description of Artificial Sequence: Synthetic oligonucleotide
  Sense strand starting at position 3347 of SEQ ID NO: 1734
cugacauuaguuggauugu

SEQ ID NO: 134975 - RNA, 19 nt, Artificial Sequence
  Description of Artificial Sequence: Synthetic oligonucleotide
  Antisense strand to SEQ ID NO: 134974
acaauccaacuaaugucag

SEQ ID NO: 134976 - RNA, 19 nt, Artificial Sequence
  Description of Artificial Sequence: Synthetic oligonucleotide
  Sense strand starting at position 3336 of SEQ ID NO: 1734
cuugguuaccucugacauu

SEQ ID NO: 134977 - RNA, 19 nt, Artificial Sequence
  Description of Artificial Sequence: Synthetic oligonucleotide
  Antisense strand to SEQ ID NO: 134976
aaugucagagguaaccaag

SEQ ID NO: 134978 - RNA, 19 nt, Artificial Sequence
  Description of Artificial Sequence: Synthetic oligonucleotide
  Sense strand starting at position 3306 of SEQ ID NO: 1734
uccaaauuaucaggaagag

SEQ ID NO: 134979 - RNA, 19 nt, Artificial Sequence
  Description of Artificial Sequence: Synthetic oligonucleotide
  Antisense strand to SEQ ID NO: 134978
cucuuccugauaauuugga

SEQ ID NO: 134980 - RNA, 19 nt, Artificial Sequence
  Description of Artificial Sequence: Synthetic oligonucleotide
  Sense strand starting at position 3291 of SEQ ID NO: 1734
ccaguuuaucuccagucca

SEQ ID NO: 134981 - RNA, 19 nt, Artificial Sequence
  Description of Artificial Sequence: Synthetic oligonucleotide
  Antisense strand to SEQ ID NO: 134980
uggacuggagauaaacugg

SEQ ID NO: 134982 - RNA, 19 nt, Artificial Sequence
  Description of Artificial Sequence: Synthetic oligonucleotide
  Sense strand starting at position 3257 of SEQ ID NO: 1734
cuguuauuagacgaagauc

SEQ ID NO: 134983 - RNA, 19 nt, Artificial Sequence
  Description of Artificial Sequence: Synthetic oligonucleotide
  Antisense strand to SEQ ID NO: 134982
gaucuucgucuaauaacag

SEQ ID NO: 134984 - RNA, 19 nt, Artificial Sequence
  Description of Artificial Sequence: Synthetic oligonucleotide
  Sense strand starting at position 3256 of SEQ ID NO: 1734
ucuguuauuagacgaagau

SEQ ID NO: 134985 - RNA, 19 nt, Artificial Sequence
  Description of Artificial Sequence: Synthetic oligonucleotide
  Antisense strand to SEQ ID NO: 134984
aucuucgucuaauaacaga

SEQ ID NO: 134986 - RNA, 19 nt, Artificial Sequence
  Description of Artificial Sequence: Synthetic oligonucleotide
  Sense strand starting at position 3198 of SEQ ID NO: 1734
cagguagguuugguauuaa

SEQ ID NO: 134987 - RNA, 19 nt, Artificial Sequence
  Description of Artificial Sequence: Synthetic oligonucleotide
  Antisense strand to SEQ ID NO: 134986
uuaauaccaaaccuaccug

SEQ ID NO: 134988 - RNA, 19 nt, Artificial Sequence
  Description of Artificial Sequence: Synthetic oligonucleotide
  Sense strand starting at position 3140 of SEQ ID NO: 1734
gugucaaggauacguguca

SEQ ID NO: 134989 - RNA, 19 nt, Artificial Sequence
  Description of Artificial Sequence: Synthetic oligonucleotide
  Antisense strand to SEQ ID NO: 134988
ugacacguauccuugacac

SEQ ID NO: 134990 - RNA, 19 nt, Artificial Sequence
  Description of Artificial Sequence: Synthetic oligonucleotide
  Sense strand starting at position 3136 of SEQ ID NO: 1734
gguagugucaaggauacgu

SEQ ID NO: 134991 - RNA, 19 nt, Artificial Sequence
  Description of Artificial Sequence: Synthetic oligonucleotide
  Antisense strand to SEQ ID NO: 134990
acguauccuugacacuacc

SEQ ID NO: 134992 - RNA, 19 nt, Artificial Sequence
  Description of Artificial Sequence: Synthetic oligonucleotide
  Sense strand starting at position 2962 of SEQ ID NO: 1734
agauacagcugaucgaguu

SEQ ID NO: 134993 - RNA, 19 nt, Artificial Sequence
  Description of Artificial Sequence: Synthetic oligonucleotide
  Antisense strand to SEQ ID NO: 134992
aacucgaucagcuguaucu

SEQ ID NO: 134994 - RNA, 19 nt, Artificial Sequence
  Description of Artificial Sequence: Synthetic oligonucleotide
  Sense strand starting at position 2671 of SEQ ID NO: 1734
aagagaacuugggaggaaa

SEQ ID NO: 134995 - RNA, 19 nt, Artificial Sequence
  Description of Artificial Sequence: Synthetic oligonucleotide
  Antisense strand to SEQ ID NO: 134994
uuuccucccaaguucucuu

SEQ ID NO: 134996 - RNA, 19 nt, Artificial Sequence
  Description of Artificial Sequence: Synthetic oligonucleotide
  Sense strand starting at position 1588 of SEQ ID NO: 1734
ccucucuccugagaagaga

SEQ ID NO: 134997 - RNA, 19 nt, Artificial Sequence
  Description of Artificial Sequence: Synthetic oligonucleotide
  Antisense strand to SEQ ID NO: 134996
ucucuucucaggagagagg

SEQ ID NO: 134998 - RNA, 19 nt, Artificial Sequence
  Description of Artificial Sequence: Synthetic oligonucleotide
  Sense strand starting at position 1586 of SEQ ID NO: 1734
guccucucuccugagaaga

SEQ ID NO: 134999 - RNA, 19 nt, Artificial Sequence
  Description of Artificial Sequence: Synthetic oligonucleotide
  Antisense strand to SEQ ID NO: 134998
ucuucucaggagagaggac

SEQ ID NO: 135000 - RNA, 19 nt, Artificial Sequence
  Description of Artificial Sequence: Synthetic oligonucleotide
  Sense strand starting at position 1400 of SEQ ID NO: 1734
agugaaagguaugcaaaug

SEQ ID NO: 135001 - RNA, 19 nt, Artificial Sequence
  Description of Artificial Sequence: Synthetic oligonucleotide
  Antisense strand to SEQ ID NO: 135000
cauuugcauaccuuucacu

SEQ ID NO: 135002 - RNA, 19 nt, Artificial Sequence
  Description of Artificial Sequence: Synthetic oligonucleotide
  Sense strand starting at position 1399 of SEQ ID NO: 1734
aagugaaagguaugcaaau

SEQ ID NO: 135003 - RNA, 19 nt, Artificial Sequence
  Description of Artificial Sequence: Synthetic oligonucleotide
  Antisense strand to SEQ ID NO: 135002
auuugcauaccuuucacuu

SEQ ID NO: 135004 - RNA, 19 nt, Artificial Sequence
  Description of Artificial Sequence: Synthetic oligonucleotide
  Sense strand starting at position 1045 of SEQ ID NO: 1734
cagcgauggcugggagauu

SEQ ID NO: 135005 - RNA, 19 nt, Artificial Sequence
  Description of Artificial Sequence: Synthetic oligonucleotide
  Antisense strand to SEQ ID NO: 135004
aaucucccagccaucgcug

SEQ ID NO: 135006 - RNA, 19 nt, Artificial Sequence
  Description of Artificial Sequence: Synthetic oligonucleotide
  Sense strand starting at position 916 of SEQ ID NO: 1734
ucacuagucuucccaguaa

SEQ ID NO: 135007 - RNA, 19 nt, Artificial Sequence
  Description of Artificial Sequence: Synthetic oligonucleotide
  Antisense strand to SEQ ID NO: 135006
uuacugggaagacuaguga

SEQ ID NO: 135008 - RNA, 19 nt, Artificial Sequence
  Description of Artificial Sequence: Synthetic oligonucleotide
  Sense strand starting at position 863 of SEQ ID NO: 1734
uccugaucugcucaggcaa

SEQ ID NO: 135009 - RNA, 19 nt, Artificial Sequence
  Description of Artificial Sequence: Synthetic oligonucleotide
  Antisense strand to SEQ ID NO: 135008
uugccugagcagaucagga

SEQ ID NO: 135010 - RNA, 19 nt, Artificial Sequence
  Description of Artificial Sequence: Synthetic oligonucleotide
  Sense strand starting at position 787 of SEQ ID NO: 1734
gcuggcacaccagaagaau

SEQ ID NO: 135011 - RNA, 19 nt, Artificial Sequence
  Description of Artificial Sequence: Synthetic oligonucleotide
  Antisense strand to SEQ ID NO: 135010
auucuucuggugugccagc

SEQ ID NO: 135012 - RNA, 19 nt, Artificial Sequence
  Description of Artificial Sequence: Synthetic oligonucleotide
  Sense strand starting at position 697 of SEQ ID NO: 1734
gggagucuguggaaagcua

SEQ ID NO: 135013 - RNA, 19 nt, Artificial Sequence
  Description of Artificial Sequence: Synthetic oligonucleotide
  Antisense strand to SEQ ID NO: 135012
uagcuuuccacagacuccc

SEQ ID NO: 135014 - RNA, 19 nt, Artificial Sequence
  Description of Artificial Sequence: Synthetic oligonucleotide
  Sense strand starting at position 595 of SEQ ID NO: 1734
ugagcuauuuaagacuaag

SEQ ID NO: 135015 - RNA, 19 nt, Artificial Sequence
  Description of Artificial Sequence: Synthetic oligonucleotide
  Antisense strand to SEQ ID NO: 135014
cuuagucuuaaauagcuca

SEQ ID NO: 135016 - RNA, 19 nt, Artificial Sequence
  Description of Artificial Sequence: Synthetic oligonucleotide
  Sense strand starting at position 412 of SEQ ID NO: 1734
gucuucuagccuugacuuu

SEQ ID NO: 135017 - RNA, 19 nt, Artificial Sequence
  Description of Artificial Sequence: Synthetic oligonucleotide
  Antisense strand to SEQ ID NO: 135016
aaagucaaggcuagaagac

SEQ ID NO: 135018 - RNA, 19 nt, Artificial Sequence
  Description of Artificial Sequence: Synthetic oligonucleotide
  Sense strand starting at position 280 of SEQ ID NO: 1734
gcacucugcuaauagauuu

SEQ ID NO: 135019 - RNA, 19 nt, Artificial Sequence
  Description of Artificial Sequence: Synthetic oligonucleotide
  Antisense strand to SEQ ID NO: 135018
aaaucuauuagcagagugc

SEQ ID NO: 135020 - RNA, 19 nt, Artificial Sequence
  Description of Artificial Sequence: Synthetic oligonucleotide
  Sense strand starting at position 233 of SEQ ID NO: 1734
gcaccugucuuucuugaca

SEQ ID NO: 135021 - RNA, 19 nt, Artificial Sequence
  Description of Artificial Sequence: Synthetic oligonucleotide
  Antisense strand to SEQ ID NO: 135020
ugucaagaaagacaggugc

SEQ ID NO: 135022 - RNA, 19 nt, Artificial Sequence
  Description of Artificial Sequence: Synthetic oligonucleotide
  Sense strand starting at position 183 of SEQ ID NO: 1734
agcauuguggucuagagcu

SEQ ID NO: 135023 - RNA, 19 nt, Artificial Sequence
  Description of Artificial Sequence: Synthetic oligonucleotide
  Antisense strand to SEQ ID NO: 135022
agcucuagaccacaaugcu

SEQ ID NO: 135024 - RNA, 19 nt, Artificial Sequence
  Description of Artificial Sequence: Synthetic oligonucleotide
  Sense strand starting at position 181 of SEQ ID NO: 1734
caagcauuguggucuagag

SEQ ID NO: 135025 - RNA, 19 nt, Artificial Sequence
  Description of Artificial Sequence: Synthetic oligonucleotide
  Antisense strand to SEQ ID NO: 135024
cucuagaccacaaugcuug

SEQ ID NO: 135026 - RNA, 19 nt, Artificial Sequence
  Description of Artificial Sequence: Synthetic oligonucleotide
  Sense strand starting at position 3604 of SEQ ID NO: 1735
agaaauguguuucuagaaa

SEQ ID NO: 135027 - RNA, 19 nt, Artificial Sequence
  Description of Artificial Sequence: Synthetic oligonucleotide
  Antisense strand to SEQ ID NO: 135026
uuucuagaaacacauuucu

SEQ ID NO: 135028 - RNA, 19 nt, Artificial Sequence
  Description of Artificial Sequence: Synthetic oligonucleotide
  Sense strand starting at position 3602 of SEQ ID NO: 1735
ggagaaauguguuucuaga

SEQ ID NO: 135029 - RNA, 19 nt, Artificial Sequence
  Description of Artificial Sequence: Synthetic oligonucleotide
  Antisense strand to SEQ ID NO: 135028
ucuagaaacacauuucucc

SEQ ID NO: 135030 - RNA, 19 nt, Artificial Sequence
  Description of Artificial Sequence: Synthetic oligonucleotide
  Sense strand starting at position 3508 of SEQ ID NO: 1735
gucuguugaauggguuaau

SEQ ID NO: 135031 - RNA, 19 nt, Artificial Sequence
  Description of Artificial Sequence: Synthetic oligonucleotide
  Antisense strand to SEQ ID NO: 135030
auuaacccauucaacagac

SEQ ID NO: 135032 - RNA, 19 nt, Artificial Sequence
  Description of Artificial Sequence: Synthetic oligonucleotide
  Sense strand starting at position 3506 of SEQ ID NO: 1735
aagucuguugaauggguua

SEQ ID NO: 135033 - RNA, 19 nt, Artificial Sequence
  Description of Artificial Sequence: Synthetic oligonucleotide
  Antisense strand to SEQ ID NO: 135032
uaacccauucaacagacuu

SEQ ID NO: 135034 - RNA, 19 nt, Artificial Sequence
  Description of Artificial Sequence: Synthetic oligonucleotide
  Sense strand starting at position 3384 of SEQ ID NO: 1735
gauaaagccuggcucugaa

SEQ ID NO: 135035 - RNA, 19 nt, Artificial Sequence
  Description of Artificial Sequence: Synthetic oligonucleotide
  Antisense strand to SEQ ID NO: 135034
uucagagccaggcuuuauc

SEQ ID NO: 135036 - RNA, 19 nt, Artificial Sequence
  Description of Artificial Sequence: Synthetic oligonucleotide
  Sense strand starting at position 3297 of SEQ ID NO: 1735
cccagauaguaggagauuu

SEQ ID NO: 135037 - RNA, 19 nt, Artificial Sequence
  Description of Artificial Sequence: Synthetic oligonucleotide
  Antisense strand to SEQ ID NO: 135036
aaaucuccuacuaucuggg

SEQ ID NO: 135038 - RNA, 19 nt, Artificial Sequence
  Description of Artificial Sequence: Synthetic oligonucleotide
  Sense strand starting at position 3271 of SEQ ID NO: 1735
guucuucagggagguuauu

SEQ ID NO: 135039 - RNA, 19 nt, Artificial Sequence
  Description of Artificial Sequence: Synthetic oligonucleotide
  Antisense strand to SEQ ID NO: 135038
aauaaccucccugaagaac

SEQ ID NO: 135040 - RNA, 19 nt, Artificial Sequence
  Description of Artificial Sequence: Synthetic oligonucleotide
  Sense strand starting at position 3268 of SEQ ID NO: 1735
guuguucuucagggagguu

SEQ ID NO: 135041 - RNA, 19 nt, Artificial Sequence
  Description of Artificial Sequence: Synthetic oligonucleotide
  Antisense strand to SEQ ID NO: 135040
aaccucccugaagaacaac

SEQ ID NO: 135042 - RNA, 19 nt, Artificial Sequence
  Description of Artificial Sequence: Synthetic oligonucleotide
  Sense strand starting at position 3231 of SEQ ID NO: 1735
aaaugucuucuugguggua

SEQ ID NO: 135043 - RNA, 19 nt, Artificial Sequence
  Description of Artificial Sequence: Synthetic oligonucleotide
  Antisense strand to SEQ ID NO: 135042
uaccaccaagaagacauuu

SEQ ID NO: 135044 - RNA, 19 nt, Artificial Sequence
  Description of Artificial Sequence: Synthetic oligonucleotide
  Sense strand starting at position 3138 of SEQ ID NO: 1735
aagauuguccaguauuaug

SEQ ID NO: 135045 - RNA, 19 nt, Artificial Sequence
  Description of Artificial Sequence: Synthetic oligonucleotide
  Antisense strand to SEQ ID NO: 135044
cauaauacuggacaaucuu

SEQ ID NO: 135046 - RNA, 19 nt, Artificial Sequence
  Description of Artificial Sequence: Synthetic oligonucleotide
  Sense strand starting at position 2721 of SEQ ID NO: 1735
gagaccuaccaguauuguu

SEQ ID NO: 135047 - RNA, 19 nt, Artificial Sequence
  Description of Artificial Sequence: Synthetic oligonucleotide
  Antisense strand to SEQ ID NO: 135046
aacaauacugguaggucuc

SEQ ID NO: 135048 - RNA, 19 nt, Artificial Sequence
  Description of Artificial Sequence: Synthetic oligonucleotide
  Sense strand starting at position 2694 of SEQ ID NO: 1735
gcacuuugggcucaauaaa

SEQ ID NO: 135049 - RNA, 19 nt, Artificial Sequence
  Description of Artificial Sequence: Synthetic oligonucleotide
  Antisense strand to SEQ ID NO: 135048
uuuauugagcccaaagugc

SEQ ID NO: 135050 - RNA, 19 nt, Artificial Sequence
  Description of Artificial Sequence: Synthetic oligonucleotide
  Sense strand starting at position 2691 of SEQ ID NO: 1735
ccagcacuuugggcucaau

SEQ ID NO: 135051 - RNA, 19 nt, Artificial Sequence
  Description of Artificial Sequence: Synthetic oligonucleotide
  Antisense strand to SEQ ID NO: 135050
auugagcccaaagugcugg

SEQ ID NO: 135052 - RNA, 19 nt, Artificial Sequence
  Description of Artificial Sequence: Synthetic oligonucleotide
  Sense strand starting at position 2610 of SEQ ID NO: 1735
gccuuucugguagaaagua

SEQ ID NO: 135053 - RNA, 19 nt, Artificial Sequence
  Description of Artificial Sequence: Synthetic oligonucleotide
  Antisense strand to SEQ ID NO: 135052
uacuuucuaccagaaaggc

SEQ ID NO: 135054 - RNA, 19 nt, Artificial Sequence
  Description of Artificial Sequence: Synthetic oligonucleotide
  Sense strand starting at position 2582 of SEQ ID NO: 1735
gaggcuucugcguuugugu

SEQ ID NO: 135055 - RNA, 19 nt, Artificial Sequence
  Description of Artificial Sequence: Synthetic oligonucleotide
  Antisense strand to SEQ ID NO: 135054
acacaaacgcagaagccuc

SEQ ID NO: 135056 - RNA, 19 nt, Artificial Sequence
  Description of Artificial Sequence: Synthetic oligonucleotide
  Sense strand starting at position 2480 of SEQ ID NO: 1735
aguuaaugucuuuaacuuc

SEQ ID NO: 135057 - RNA, 19 nt, Artificial Sequence
  Description of Artificial Sequence: Synthetic oligonucleotide
  Antisense strand to SEQ ID NO: 135056
gaaguuaaagacauuaacu

SEQ ID NO: 135058 - RNA, 19 nt, Artificial Sequence
  Description of Artificial Sequence: Synthetic oligonucleotide
  Sense strand starting at position 2105 of SEQ ID NO: 1735
ugagcaauuuccuugcuuu

SEQ ID NO: 135059 - RNA, 19 nt, Artificial Sequence
  Description of Artificial Sequence: Synthetic oligonucleotide
  Antisense strand to SEQ ID NO: 135058
aaagcaaggaaauugcuca

SEQ ID NO: 135060 - RNA, 19 nt, Artificial Sequence
  Description of Artificial Sequence: Synthetic oligonucleotide
  Sense strand starting at position 2104 of SEQ ID NO: 1735
cugagcaauuuccuugcuu

SEQ ID NO: 135061 - RNA, 19 nt, Artificial Sequence
  Description of Artificial Sequence: Synthetic oligonucleotide
  Antisense strand to SEQ ID NO: 135060
aagcaaggaaauugcucag

SEQ ID NO: 135062 - RNA, 19 nt, Artificial Sequence
  Description of Artificial Sequence: Synthetic oligonucleotide
  Sense strand starting at position 1347 of SEQ ID NO: 1735
uaagaugacgugcaaacua

SEQ ID NO: 135063 - RNA, 19 nt, Artificial Sequence
  Description of Artificial Sequence: Synthetic oligonucleotide
  Antisense strand to SEQ ID NO: 135062
uaguuugcacgucaucuua

SEQ ID NO: 135064 - RNA, 19 nt, Artificial Sequence
  Description of Artificial Sequence: Synthetic oligonucleotide
  Sense strand starting at position 1335 of SEQ ID NO: 1735
cuguuaccuccauaagaug

SEQ ID NO: 135065 - RNA, 19 nt, Artificial Sequence
  Description of Artificial Sequence: Synthetic oligonucleotide
  Antisense strand to SEQ ID NO: 135064
caucuuauggagguaacag

SEQ ID NO: 135066 - RNA, 19 nt, Artificial Sequence
  Description of Artificial Sequence: Synthetic oligonucleotide
  Sense strand starting at position 1330 of SEQ ID NO: 1735
ugccacuguuaccuccaua

SEQ ID NO: 135067 - RNA, 19 nt, Artificial Sequence
  Description of Artificial Sequence: Synthetic oligonucleotide
  Antisense strand to SEQ ID NO: 135066
uauggagguaacaguggca

SEQ ID NO: 135068 - RNA, 19 nt, Artificial Sequence
  Description of Artificial Sequence: Synthetic oligonucleotide
  Sense strand starting at position 1252 of SEQ ID NO: 1735
cgggucuuauauuccacua

SEQ ID NO: 135069 - RNA, 19 nt, Artificial Sequence
  Description of Artificial Sequence: Synthetic oligonucleotide
  Antisense strand to SEQ ID NO: 135068
uaguggaauauaagacccg

SEQ ID NO: 135070 - RNA, 19 nt, Artificial Sequence
  Description of Artificial Sequence: Synthetic oligonucleotide
  Sense strand starting at position 1072 of SEQ ID NO: 1735
gggcaaguuaaguaauucu

SEQ ID NO: 135071 - RNA, 19 nt, Artificial Sequence
  Description of Artificial Sequence: Synthetic oligonucleotide
  Antisense strand to SEQ ID NO: 135070
agaauuacuuaacuugccc

SEQ ID NO: 135072 - RNA, 19 nt, Artificial Sequence
  Description of Artificial Sequence: Synthetic oligonucleotide
  Sense strand starting at position 985 of SEQ ID NO: 1735
gcggcauauccagaugcca

SEQ ID NO: 135073 - RNA, 19 nt, Artificial Sequence
  Description of Artificial Sequence: Synthetic oligonucleotide
  Antisense strand to SEQ ID NO: 135072
uggcaucuggauaugccgc

SEQ ID NO: 135074 - RNA, 19 nt, Artificial Sequence
  Description of Artificial Sequence: Synthetic oligonucleotide
  Sense strand starting at position 945 of SEQ ID NO: 1735
gcguaccaauuucuacaua

SEQ ID NO: 135075 - RNA, 19 nt, Artificial Sequence
  Description of Artificial Sequence: Synthetic oligonucleotide
  Antisense strand to SEQ ID NO: 135074
uauguagaaauugguacgc

SEQ ID NO: 135076 - RNA, 19 nt, Artificial Sequence
  Description of Artificial Sequence: Synthetic oligonucleotide
  Sense strand starting at position 936 of SEQ ID NO: 1735
agacauacagcguaccaau

SEQ ID NO: 135077 - RNA, 19 nt, Artificial Sequence
  Description of Artificial Sequence: Synthetic oligonucleotide
  Antisense strand to SEQ ID NO: 135076
auugguacgcuguaugucu

SEQ ID NO: 135078 - RNA, 19 nt, Artificial Sequence
  Description of Artificial Sequence: Synthetic oligonucleotide
  Sense strand starting at position 903 of SEQ ID NO: 1735
auucuauggugguucuauu

SEQ ID NO: 135079 - RNA, 19 nt, Artificial Sequence
  Description of Artificial Sequence: Synthetic oligonucleotide
  Antisense strand to SEQ ID NO: 135078
aauagaaccaccauagaau

SEQ ID NO: 135080 - RNA, 19 nt, Artificial Sequence
  Description of Artificial Sequence: Synthetic oligonucleotide
  Sense strand starting at position 901 of SEQ ID NO: 1735
uaauucuauggugguucua

SEQ ID NO: 135081 - RNA, 19 nt, Artificial Sequence
  Description of Artificial Sequence: Synthetic oligonucleotide
  Antisense strand to SEQ ID NO: 135080
uagaaccaccauagaauua

SEQ ID NO: 135082 - RNA, 19 nt, Artificial Sequence
  Description of Artificial Sequence: Synthetic oligonucleotide
  Sense strand starting at position 897 of SEQ ID NO: 1735
ugaguaauucuaugguggu

SEQ ID NO: 135083 - RNA, 19 nt, Artificial Sequence
  Description of Artificial Sequence: Synthetic oligonucleotide
  Antisense strand to SEQ ID NO: 135082
accaccauagaauuacuca

SEQ ID NO: 135084 - RNA, 19 nt, Artificial Sequence
  Description of Artificial Sequence: Synthetic oligonucleotide
  Sense strand starting at position 892 of SEQ ID NO: 1735
uuacgugaguaauucuaug

SEQ ID NO: 135085 - RNA, 19 nt, Artificial Sequence
  Description of Artificial Sequence: Synthetic oligonucleotide
  Antisense strand to SEQ ID NO: 135084
cauagaauuacucacguaa

SEQ ID NO: 135086 - RNA, 19 nt, Artificial Sequence
  Description of Artificial Sequence: Synthetic oligonucleotide
  Sense strand starting at position 889 of SEQ ID NO: 1735
aaguuacgugaguaauucu

SEQ ID NO: 135087 - RNA, 19 nt, Artificial Sequence
  Description of Artificial Sequence: Synthetic oligonucleotide
  Antisense strand to SEQ ID NO: 135086
agaauuacucacguaacuu

SEQ ID NO: 135088 - RNA, 19 nt, Artificial Sequence
  Description of Artificial Sequence: Synthetic oligonucleotide
  Sense strand starting at position 888 of SEQ ID NO: 1735
caaguuacgugaguaauuc

SEQ ID NO: 135089 - RNA, 19 nt, Artificial Sequence
  Description of Artificial Sequence: Synthetic oligonucleotide
  Antisense strand to SEQ ID NO: 135088
gaauuacucacguaacuug

SEQ ID NO: 135090 - RNA, 19 nt, Artificial Sequence
  Description of Artificial Sequence: Synthetic oligonucleotide
  Sense strand starting at position 885 of SEQ ID NO: 1735
ugacaaguuacgugaguaa

SEQ ID NO: 135091 - RNA, 19 nt, Artificial Sequence
  Description of Artificial Sequence: Synthetic oligonucleotide
  Antisense strand to SEQ ID NO: 135090
uuacucacguaacuuguca

SEQ ID NO: 135092 - RNA, 19 nt, Artificial Sequence
  Description of Artificial Sequence: Synthetic oligonucleotide
  Sense strand starting at position 850 of SEQ ID NO: 1735
ugaugaaacuaagacugaa

SEQ ID NO: 135093 - RNA, 19 nt, Artificial Sequence
  Description of Artificial Sequence: Synthetic oligonucleotide
  Antisense strand to SEQ ID NO: 135092
uucagucuuaguuucauca

SEQ ID NO: 135094 - RNA, 19 nt, Artificial Sequence
  Description of Artificial Sequence: Synthetic oligonucleotide
  Sense strand starting at position 819 of SEQ ID NO: 1735
gguauauccaaaggaagcu

SEQ ID NO: 135095 - RNA, 19 nt, Artificial Sequence
  Description of Artificial Sequence: Synthetic oligonucleotide
  Antisense strand to SEQ ID NO: 135094
agcuuccuuuggauauacc

SEQ ID NO: 135096 - RNA, 19 nt, Artificial Sequence
  Description of Artificial Sequence: Synthetic oligonucleotide
  Sense strand starting at position 785 of SEQ ID NO: 1735
ucuauaagacuugaugcca

SEQ ID NO: 135097 - RNA, 19 nt, Artificial Sequence
  Description of Artificial Sequence: Synthetic oligonucleotide
  Antisense strand to SEQ ID NO: 135096
uggcaucaagucuuauaga

SEQ ID NO: 135098 - RNA, 19 nt, Artificial Sequence
  Description of Artificial Sequence: Synthetic oligonucleotide
  Sense strand starting at position 770 of SEQ ID NO: 1735
gccucuauacuagagucua

SEQ ID NO: 135099 - RNA, 19 nt, Artificial Sequence
  Description of Artificial Sequence: Synthetic oligonucleotide
  Antisense strand to SEQ ID NO: 135098
uagacucuaguauagaggc

SEQ ID NO: 135100 - RNA, 19 nt, Artificial Sequence
  Description of Artificial Sequence: Synthetic oligonucleotide
  Sense strand starting at position 749 of SEQ ID NO: 1735
ucuacauucuugguaaguu

SEQ ID NO: 135101 - RNA, 19 nt, Artificial Sequence
  Description of Artificial Sequence: Synthetic oligonucleotide
  Antisense strand to SEQ ID NO: 135100
aacuuaccaagaauguaga

SEQ ID NO: 135102 - RNA, 19 nt, Artificial Sequence
  Description of Artificial Sequence: Synthetic oligonucleotide
  Sense strand starting at position 748 of SEQ ID NO: 1735
uucuacauucuugguaagu

SEQ ID NO: 135103 - RNA, 19 nt, Artificial Sequence
  Description of Artificial Sequence: Synthetic oligonucleotide
  Antisense strand to SEQ ID NO: 135102
acuuaccaagaauguagaa

SEQ ID NO: 135104 - RNA, 19 nt, Artificial Sequence
  Description of Artificial Sequence: Synthetic oligonucleotide
  Sense strand starting at position 23 of SEQ ID NO: 1735
caccauaucggccagguaa

SEQ ID NO: 135105 - RNA, 19 nt, Artificial Sequence
  Description of Artificial Sequence: Synthetic oligonucleotide
  Antisense strand to SEQ ID NO: 135104
uuaccuggccgauauggug

SEQ ID NO: 135106 - RNA, 19 nt, Artificial Sequence
  Description of Artificial Sequence: Synthetic oligonucleotide
  Sense strand starting at position 3602 of SEQ ID NO: 1736
aguuaucaccuugaaguga

SEQ ID NO: 135107 - RNA, 19 nt, Artificial Sequence
  Description of Artificial Sequence: Synthetic oligonucleotide
  Antisense strand to SEQ ID NO: 135106
ucacuucaaggugauaacu

SEQ ID NO: 135108 - RNA, 19 nt, Artificial Sequence
  Description of Artificial Sequence: Synthetic oligonucleotide
  Sense strand starting at position 3601 of SEQ ID NO: 1736
aaguuaucaccuugaagug

SEQ ID NO: 135109 - RNA, 19 nt, Artificial Sequence
  Description of Artificial Sequence: Synthetic oligonucleotide
  Antisense strand to SEQ ID NO: 135108
cacuucaaggugauaacuu

SEQ ID NO: 135110 - RNA, 19 nt, Artificial Sequence
  Description of Artificial Sequence: Synthetic oligonucleotide
  Sense strand starting at position 3576 of SEQ ID NO: 1736
ugugccauccuguauaaga

SEQ ID NO: 135111 - RNA, 19 nt, Artificial Sequence
  Description of Artificial Sequence: Synthetic oligonucleotide
  Antisense strand to SEQ ID NO: 135110
ucuuauacaggauggcaca

SEQ ID NO: 135112 - RNA, 19 nt, Artificial Sequence
  Description of Artificial Sequence: Synthetic oligonucleotide
  Sense strand starting at position 3524 of SEQ ID NO: 1736
uaguuaagagcacaguaau

SEQ ID NO: 135113 - RNA, 19 nt, Artificial Sequence
  Description of Artificial Sequence: Synthetic oligonucleotide
  Antisense strand to SEQ ID NO: 135112
auuacugugcucuuaacua

SEQ ID NO: 135114 - RNA, 19 nt, Artificial Sequence
  Description of Artificial Sequence: Synthetic oligonucleotide
  Sense strand starting at position 3522 of SEQ ID NO: 1736
aguaguuaagagcacagua

SEQ ID NO: 135115 - RNA, 19 nt, Artificial Sequence
  Description of Artificial Sequence: Synthetic oligonucleotide
  Antisense strand to SEQ ID NO: 135114
uacugugcucuuaacuacu

SEQ ID NO: 135116 - RNA, 19 nt, Artificial Sequence
  Description of Artificial Sequence: Synthetic oligonucleotide
  Sense strand starting at position 3435 of SEQ ID NO: 1736
ccugauuuauuguaauaag

SEQ ID NO: 135117 - RNA, 19 nt, Artificial Sequence
  Description of Artificial Sequence: Synthetic oligonucleotide
  Antisense strand to SEQ ID NO: 135116
cuuauuacaauaaaucagg

SEQ ID NO: 135118 - RNA, 19 nt, Artificial Sequence
  Description of Artificial Sequence: Synthetic oligonucleotide
  Sense strand starting at position 3322 of SEQ ID NO: 1736
cacgauggguacuuaauaa

SEQ ID NO: 135119 - RNA, 19 nt, Artificial Sequence
  Description of Artificial Sequence: Synthetic oligonucleotide
  Antisense strand to SEQ ID NO: 135118
uuauuaaguacccaucgug

SEQ ID NO: 135120 - RNA, 19 nt, Artificial Sequence
  Description of Artificial Sequence: Synthetic oligonucleotide
  Sense strand starting at position 3169 of SEQ ID NO: 1736
auguuaguuccauaguauu

SEQ ID NO: 135121 - RNA, 19 nt, Artificial Sequence
  Description of Artificial Sequence: Synthetic oligonucleotide
  Antisense strand to SEQ ID NO: 135120
aauacuauggaacuaacau

SEQ ID NO: 135122 - RNA, 19 nt, Artificial Sequence
  Description of Artificial Sequence: Synthetic oligonucleotide
  Sense strand starting at position 3163 of SEQ ID NO: 1736
ugaauuauguuaguuccau

SEQ ID NO: 135123 - RNA, 19 nt, Artificial Sequence
  Description of Artificial Sequence: Synthetic oligonucleotide
  Antisense strand to SEQ ID NO: 135122
auggaacuaacauaauuca

SEQ ID NO: 135124 - RNA, 19 nt, Artificial Sequence
  Description of Artificial Sequence: Synthetic oligonucleotide
  Sense strand starting at position 3128 of SEQ ID NO: 1736
ugugaaucugccgaaauug

SEQ ID NO: 135125 - RNA, 19 nt, Artificial Sequence
  Description of Artificial Sequence: Synthetic oligonucleotide
  Antisense strand to SEQ ID NO: 135124
caauuucggcagauucaca

SEQ ID NO: 135126 - RNA, 19 nt, Artificial Sequence
  Description of Artificial Sequence: Synthetic oligonucleotide
  Sense strand starting at position 3102 of SEQ ID NO: 1736
gggcaauauguggacuuua

SEQ ID NO: 135127 - RNA, 19 nt, Artificial Sequence
  Description of Artificial Sequence: Synthetic oligonucleotide
  Antisense strand to SEQ ID NO: 135126
uaaaguccacauauugccc

SEQ ID NO: 135128 - RNA, 19 nt, Artificial Sequence
  Description of Artificial Sequence: Synthetic oligonucleotide
  Sense strand starting at position 3091 of SEQ ID NO: 1736
acuuuaauggagggcaaua

SEQ ID NO: 135129 - RNA, 19 nt, Artificial Sequence
  Description of Artificial Sequence: Synthetic oligonucleotide
  Antisense strand to SEQ ID NO: 135128
uauugcccuccauuaaagu

SEQ ID NO: 135130 - RNA, 19 nt, Artificial Sequence
  Description of Artificial Sequence: Synthetic oligonucleotide
  Sense strand starting at position 3090 of SEQ ID NO: 1736
aacuuuaauggagggcaau

SEQ ID NO: 135131 - RNA, 19 nt, Artificial Sequence
  Description of Artificial Sequence: Synthetic oligonucleotide
  Antisense strand to SEQ ID NO: 135130
auugcccuccauuaaaguu

SEQ ID NO: 135132 - RNA, 19 nt, Artificial Sequence
  Description of Artificial Sequence: Synthetic oligonucleotide
  Sense strand starting at position 3053 of SEQ ID NO: 1736
augacagaaugguuuaagu

SEQ ID NO: 135133 - RNA, 19 nt, Artificial Sequence
  Description of Artificial Sequence: Synthetic oligonucleotide
  Antisense strand to SEQ ID NO: 135132
acuuaaaccauucugucau

SEQ ID NO: 135134 - RNA, 19 nt, Artificial Sequence
  Description of Artificial Sequence: Synthetic oligonucleotide
  Sense strand starting at position 3029 of SEQ ID NO: 1736
ggaaaugccaaaggaguuu

SEQ ID NO: 135135 - RNA, 19 nt, Artificial Sequence
  Description of Artificial Sequence: Synthetic oligonucleotide
  Antisense strand to SEQ ID NO: 135134
aaacuccuuuggcauuucc

SEQ ID NO: 135136 - RNA, 19 nt, Artificial Sequence
  Description of Artificial Sequence: Synthetic oligonucleotide
  Sense strand starting at position 2970 of SEQ ID NO: 1736
ucuaguugucuguaacaca

SEQ ID NO: 135137 - RNA, 19 nt, Artificial Sequence
  Description of Artificial Sequence: Synthetic oligonucleotide
  Antisense strand to SEQ ID NO: 135136
uguguuacagacaacuaga

SEQ ID NO: 135138 - RNA, 19 nt, Artificial Sequence
  Description of Artificial Sequence: Synthetic oligonucleotide
  Sense strand starting at position 2944 of SEQ ID NO: 1736
gugaaacugcaaugauuau

SEQ ID NO: 135139 - RNA, 19 nt, Artificial Sequence
  Description of Artificial Sequence: Synthetic oligonucleotide
  Antisense strand to SEQ ID NO: 135138
auaaucauugcaguuucac

SEQ ID NO: 135140 - RNA, 19 nt, Artificial Sequence
  Description of Artificial Sequence: Synthetic oligonucleotide
  Sense strand starting at position 2920 of SEQ ID NO: 1736
aggcauucuuauccugauc

SEQ ID NO: 135141 - RNA, 19 nt, Artificial Sequence
  Description of Artificial Sequence: Synthetic oligonucleotide
  Antisense strand to SEQ ID NO: 135140
gaucaggauaagaaugccu

SEQ ID NO: 135142 - RNA, 19 nt, Artificial Sequence
  Description of Artificial Sequence: Synthetic oligonucleotide
  Sense strand starting at position 2882 of SEQ ID NO: 1736
cccggaauugaagagucuu

SEQ ID NO: 135143 - RNA, 19 nt, Artificial Sequence
  Description of Artificial Sequence: Synthetic oligonucleotide
  Antisense strand to SEQ ID NO: 135142
aagacucuucaauuccggg

SEQ ID NO: 135144 - RNA, 19 nt, Artificial Sequence
  Description of Artificial Sequence: Synthetic oligonucleotide
  Sense strand starting at position 2768 of SEQ ID NO: 1736
ggcuccuacccagaucuuu

SEQ ID NO: 135145 - RNA, 19 nt, Artificial Sequence
  Description of Artificial Sequence: Synthetic oligonucleotide
  Antisense strand to SEQ ID NO: 135144
aaagaucuggguaggagcc

SEQ ID NO: 135146 - RNA, 19 nt, Artificial Sequence
  Description of Artificial Sequence: Synthetic oligonucleotide
  Sense strand starting at position 2722 of SEQ ID NO: 1736
cagggagggacgugucuua

SEQ ID NO: 135147 - RNA, 19 nt, Artificial Sequence
  Description of Artificial Sequence: Synthetic oligonucleotide
  Antisense strand to SEQ ID NO: 135146
uaagacacgucccucccug

SEQ ID NO: 135148 - RNA, 19 nt, Artificial Sequence
  Description of Artificial Sequence: Synthetic oligonucleotide
  Sense strand starting at position 2640 of SEQ ID NO: 1736
uucuuugagcuauagugua

SEQ ID NO: 135149 - RNA, 19 nt, Artificial Sequence
  Description of Artificial Sequence: Synthetic oligonucleotide
  Antisense strand to SEQ ID NO: 135148
uacacuauagcucaaagaa

SEQ ID NO: 135150 - RNA, 19 nt, Artificial Sequence
  Description of Artificial Sequence: Synthetic oligonucleotide
  Sense strand starting at position 2580 of SEQ ID NO: 1736
ccugaugcucagugaugac

SEQ ID NO: 135151 - RNA, 19 nt, Artificial Sequence
  Description of Artificial Sequence: Synthetic oligonucleotide
  Antisense strand to SEQ ID NO: 135150
gucaucacugagcaucagg

SEQ ID NO: 135152 - RNA, 19 nt, Artificial Sequence
  Description of Artificial Sequence: Synthetic oligonucleotide
  Sense strand starting at position 2579 of SEQ ID NO: 1736
cccugaugcucagugauga

SEQ ID NO: 135153 - RNA, 19 nt, Artificial Sequence
  Description of Artificial Sequence: Synthetic oligonucleotide
  Antisense strand to SEQ ID NO: 135152
ucaucacugagcaucaggg

SEQ ID NO: 135154 - RNA, 19 nt, Artificial Sequence
  Description of Artificial Sequence: Synthetic oligonucleotide
  Sense strand starting at position 2577 of SEQ ID NO: 1736
cacccugaugcucagugau

SEQ ID NO: 135155 - RNA, 19 nt, Artificial Sequence
  Description of Artificial Sequence: Synthetic oligonucleotide
  Antisense strand to SEQ ID NO: 135154
aucacugagcaucagggug

SEQ ID NO: 135156 - RNA, 19 nt, Artificial Sequence
  Description of Artificial Sequence: Synthetic oligonucleotide
  Sense strand starting at position 2382 of SEQ ID NO: 1736
agacucagucauugauucu

SEQ ID NO: 135157 - RNA, 19 nt, Artificial Sequence
  Description of Artificial Sequence: Synthetic oligonucleotide
  Antisense strand to SEQ ID NO: 135156
agaaucaaugacugagucu

SEQ ID NO: 135158 - RNA, 19 nt, Artificial Sequence
  Description of Artificial Sequence: Synthetic oligonucleotide
  Sense strand starting at position 2377 of SEQ ID NO: 1736
ucuguagacucagucauug

SEQ ID NO: 135159 - RNA, 19 nt, Artificial Sequence
  Description of Artificial Sequence: Synthetic oligonucleotide
  Antisense strand to SEQ ID NO: 135158
caaugacugagucuacaga

SEQ ID NO: 135160 - RNA, 19 nt, Artificial Sequence
  Description of Artificial Sequence: Synthetic oligonucleotide
  Sense strand starting at position 2369 of SEQ ID NO: 1736
ggacguucucuguagacuc

SEQ ID NO: 135161 - RNA, 19 nt, Artificial Sequence
  Description of Artificial Sequence: Synthetic oligonucleotide
  Antisense strand to SEQ ID NO: 135160
gagucuacagagaacgucc

SEQ ID NO: 135162 - RNA, 19 nt, Artificial Sequence
  Description of Artificial Sequence: Synthetic oligonucleotide
  Sense strand starting at position 2051 of SEQ ID NO: 1736
gagcuaguuggugucgcaa

SEQ ID NO: 135163 - RNA, 19 nt, Artificial Sequence
  Description of Artificial Sequence: Synthetic oligonucleotide
  Antisense strand to SEQ ID NO: 135162
uugcgacaccaacuagcuc

SEQ ID NO: 135164 - RNA, 19 nt, Artificial Sequence
  Description of Artificial Sequence: Synthetic oligonucleotide
  Sense strand starting at position 1351 of SEQ ID NO: 1736
ucaacagauugugucaaag

SEQ ID NO: 135165 - RNA, 19 nt, Artificial Sequence
  Description of Artificial Sequence: Synthetic oligonucleotide
  Antisense strand to SEQ ID NO: 135164
cuuugacacaaucuguuga

SEQ ID NO: 135166 - RNA, 19 nt, Artificial Sequence
  Description of Artificial Sequence: Synthetic oligonucleotide
  Sense strand starting at position 1330 of SEQ ID NO: 1736
acguuagguccuuaaagac

SEQ ID NO: 135167 - RNA, 19 nt, Artificial Sequence
  Description of Artificial Sequence: Synthetic oligonucleotide
  Antisense strand to SEQ ID NO: 135166
gucuuuaaggaccuaacgu

SEQ ID NO: 135168 - RNA, 19 nt, Artificial Sequence
  Description of Artificial Sequence: Synthetic oligonucleotide
  Sense strand starting at position 1329 of SEQ ID NO: 1736
aacguuagguccuuaaaga

SEQ ID NO: 135169 - RNA, 19 nt, Artificial Sequence
  Description of Artificial Sequence: Synthetic oligonucleotide
  Antisense strand to SEQ ID NO: 135168
ucuuuaaggaccuaacguu

SEQ ID NO: 135170 - RNA, 19 nt, Artificial Sequence
  Description of Artificial Sequence: Synthetic oligonucleotide
  Sense strand starting at position 980 of SEQ ID NO: 1736
gagaacgaauguguauuaa

SEQ ID NO: 135171 - RNA, 19 nt, Artificial Sequence
  Description of Artificial Sequence: Synthetic oligonucleotide
  Antisense strand to SEQ ID NO: 135170
uuaauacacauucguucuc

SEQ ID NO: 135172 - RNA, 19 nt, Artificial Sequence
  Description of Artificial Sequence: Synthetic oligonucleotide
  Sense strand starting at position 979 of SEQ ID NO: 1736
ggagaacgaauguguauua

SEQ ID NO: 135173 - RNA, 19 nt, Artificial Sequence
  Description of Artificial Sequence: Synthetic oligonucleotide
  Antisense strand to SEQ ID NO: 135172
uaauacacauucguucucc

SEQ ID NO: 135174 - RNA, 19 nt, Artificial Sequence
  Description of Artificial Sequence: Synthetic oligonucleotide
  Sense strand starting at position 957 of SEQ ID NO: 1736
auacaucaacaguguaaua

SEQ ID NO: 135175 - RNA, 19 nt, Artificial Sequence
  Description of Artificial Sequence: Synthetic oligonucleotide
  Antisense strand to SEQ ID NO: 135174
uauuacacuguugauguau

SEQ ID NO: 135176 - RNA, 19 nt, Artificial Sequence
  Description of Artificial Sequence: Synthetic oligonucleotide
  Sense strand starting at position 914 of SEQ ID NO: 1736
ccuaguuggaguggaguua

SEQ ID NO: 135177 - RNA, 19 nt, Artificial Sequence
  Description of Artificial Sequence: Synthetic oligonucleotide
  Antisense strand to SEQ ID NO: 135176
uaacuccacuccaacuagg

SEQ ID NO: 135178 - RNA, 19 nt, Artificial Sequence
  Description of Artificial Sequence: Synthetic oligonucleotide
  Sense strand starting at position 677 of SEQ ID NO: 1736
cucuuauauuagcuaguga

SEQ ID NO: 135179 - RNA, 19 nt, Artificial Sequence
  Description of Artificial Sequence: Synthetic oligonucleotide
  Antisense strand to SEQ ID NO: 135178
ucacuagcuaauauaagag

SEQ ID NO: 135180 - RNA, 19 nt, Artificial Sequence
  Description of Artificial Sequence: Synthetic oligonucleotide
  Sense strand starting at position 525 of SEQ ID NO: 1736
cagagagacucuguuucca

SEQ ID NO: 135181 - RNA, 19 nt, Artificial Sequence
  Description of Artificial Sequence: Synthetic oligonucleotide
  Antisense strand to SEQ ID NO: 135180
uggaaacagagucucucug

SEQ ID NO: 135182 - RNA, 19 nt, Artificial Sequence
  Description of Artificial Sequence: Synthetic oligonucleotide
  Sense strand starting at position 320 of SEQ ID NO: 1736
uuaccugaagucuggaguu

SEQ ID NO: 135183 - RNA, 19 nt, Artificial Sequence
  Description of Artificial Sequence: Synthetic oligonucleotide
  Antisense strand to SEQ ID NO: 135182
aacuccagacuucagguaa

SEQ ID NO: 135184 - RNA, 19 nt, Artificial Sequence
  Description of Artificial Sequence: Synthetic oligonucleotide
  Sense strand starting at position 158 of SEQ ID NO: 1736
uuuagugaaucugugaaau

SEQ ID NO: 135185 - RNA, 19 nt, Artificial Sequence
  Description of Artificial Sequence: Synthetic oligonucleotide
  Antisense strand to SEQ ID NO: 135184
auuucacagauucacuaaa

SEQ ID NO: 135186 - RNA, 19 nt, Artificial Sequence
  Description of Artificial Sequence: Synthetic oligonucleotide
  Sense strand starting at position 3884 of SEQ ID NO: 1737
ugacuagacugucuggauu

SEQ ID NO: 135187 - RNA, 19 nt, Artificial Sequence
  Description of Artificial Sequence: Synthetic oligonucleotide
  Antisense strand to SEQ ID NO: 135186
aauccagacagucuaguca

SEQ ID NO: 135188 - RNA, 19 nt, Artificial Sequence
  Description of Artificial Sequence: Synthetic oligonucleotide
  Sense strand starting at position 3873 of SEQ ID NO: 1737
gugaacauuugugacuaga

SEQ ID NO: 135189 - RNA, 19 nt, Artificial Sequence
  Description of Artificial Sequence: Synthetic oligonucleotide
  Antisense strand to SEQ ID NO: 135188
ucuagucacaaauguucac

SEQ ID NO: 135190 - RNA, 19 nt, Artificial Sequence
  Description of Artificial Sequence: Synthetic oligonucleotide
  Sense strand starting at position 3629 of SEQ ID NO: 1737
aguagagacuaguuugcau

SEQ ID NO: 135191 - RNA, 19 nt, Artificial Sequence
  Description of Artificial Sequence: Synthetic oligonucleotide
  Antisense strand to SEQ ID NO: 135190
augcaaacuagucucuacu

SEQ ID NO: 135192 - RNA, 19 nt, Artificial Sequence
  Description of Artificial Sequence: Synthetic oligonucleotide
  Sense strand starting at position 3618 of SEQ ID NO: 1737
cacuuucugucaguagaga

SEQ ID NO: 135193 - RNA, 19 nt, Artificial Sequence
  Description of Artificial Sequence: Synthetic oligonucleotide
  Antisense strand to SEQ ID NO: 135192
ucucuacugacagaaagug

SEQ ID NO: 135194 - RNA, 19 nt, Artificial Sequence
  Description of Artificial Sequence: Synthetic oligonucleotide
  Sense strand starting at position 3466 of SEQ ID NO: 1737
uauauaaagccguaaguuu

SEQ ID NO: 135195 - RNA, 19 nt, Artificial Sequence
  Description of Artificial Sequence: Synthetic oligonucleotide
  Antisense strand to SEQ ID NO: 135194
aaacuuacggcuuuauaua

SEQ ID NO: 135196 - RNA, 19 nt, Artificial Sequence
  Description of Artificial Sequence: Synthetic oligonucleotide
  Sense strand starting at position 3387 of SEQ ID NO: 1737
acaggcugaagauguuauu

SEQ ID NO: 135197 - RNA, 19 nt, Artificial Sequence
  Description of Artificial Sequence: Synthetic oligonucleotide
  Antisense strand to SEQ ID NO: 135196
aauaacaucuucagccugu

SEQ ID NO: 135198 - RNA, 19 nt, Artificial Sequence
  Description of Artificial Sequence: Synthetic oligonucleotide
  Sense strand starting at position 3349 of SEQ ID NO: 1737
augauaaagugcuuuaaca

SEQ ID NO: 135199 - RNA, 19 nt, Artificial Sequence
  Description of Artificial Sequence: Synthetic oligonucleotide
  Antisense strand to SEQ ID NO: 135198
uguuaaagcacuuuaucau

SEQ ID NO: 135200 - RNA, 19 nt, Artificial Sequence
  Description of Artificial Sequence: Synthetic oligonucleotide
  Sense strand starting at position 3333 of SEQ ID NO: 1737
cucggagccagguauuaug

SEQ ID NO: 135201 - RNA, 19 nt, Artificial Sequence
  Description of Artificial Sequence: Synthetic oligonucleotide
  Antisense strand to SEQ ID NO: 135200
cauaauaccuggcuccgag

SEQ ID NO: 135202 - RNA, 19 nt, Artificial Sequence
  Description of Artificial Sequence: Synthetic oligonucleotide
  Sense strand starting at position 3300 of SEQ ID NO: 1737
ugaguuugauaucuaagug

SEQ ID NO: 135203 - RNA, 19 nt, Artificial Sequence
  Description of Artificial Sequence: Synthetic oligonucleotide
  Antisense strand to SEQ ID NO: 135202
cacuuagauaucaaacuca

SEQ ID NO: 135204 - RNA, 19 nt, Artificial Sequence
  Description of Artificial Sequence: Synthetic oligonucleotide
  Sense strand starting at position 3294 of SEQ ID NO: 1737
agagguugaguuugauauc

SEQ ID NO: 135205 - RNA, 19 nt, Artificial Sequence
  Description of Artificial Sequence: Synthetic oligonucleotide
  Antisense strand to SEQ ID NO: 135204
gauaucaaacucaaccucu

SEQ ID NO: 135206 - RNA, 19 nt, Artificial Sequence
  Description of Artificial Sequence: Synthetic oligonucleotide
  Sense strand starting at position 3291 of SEQ ID NO: 1737
uagagagguugaguuugau

SEQ ID NO: 135207 - RNA, 19 nt, Artificial Sequence
  Description of Artificial Sequence: Synthetic oligonucleotide
  Antisense strand to SEQ ID NO: 135206
aucaaacucaaccucucua

SEQ ID NO: 135208 - RNA, 19 nt, Artificial Sequence
  Description of Artificial Sequence: Synthetic oligonucleotide
  Sense strand starting at position 3276 of SEQ ID NO: 1737
ggaugaagagcuugguaga

SEQ ID NO: 135209 - RNA, 19 nt, Artificial Sequence
  Description of Artificial Sequence: Synthetic oligonucleotide
  Antisense strand to SEQ ID NO: 135208
ucuaccaagcucuucaucc

SEQ ID NO: 135210 - RNA, 19 nt, Artificial Sequence
  Description of Artificial Sequence: Synthetic oligonucleotide
  Sense strand starting at position 3229 of SEQ ID NO: 1737
augaucuuucuguauaguc

SEQ ID NO: 135211 - RNA, 19 nt, Artificial Sequence
  Description of Artificial Sequence: Synthetic oligonucleotide
  Antisense strand to SEQ ID NO: 135210
gacuauacagaaagaucau

SEQ ID NO: 135212 - RNA, 19 nt, Artificial Sequence
  Description of Artificial Sequence: Synthetic oligonucleotide
  Sense strand starting at position 2902 of SEQ ID NO: 1737
ggagcuguacgguacgaaa

SEQ ID NO: 135213 - RNA, 19 nt, Artificial Sequence
  Description of Artificial Sequence: Synthetic oligonucleotide
  Antisense strand to SEQ ID NO: 135212
uuucguaccguacagcucc

SEQ ID NO: 135214 - RNA, 19 nt, Artificial Sequence
  Description of Artificial Sequence: Synthetic oligonucleotide
  Sense strand starting at position 2881 of SEQ ID NO: 1737
uggagugauugauuagugu

SEQ ID NO: 135215 - RNA, 19 nt, Artificial Sequence
  Description of Artificial Sequence: Synthetic oligonucleotide
  Antisense strand to SEQ ID NO: 135214
acacuaaucaaucacucca

SEQ ID NO: 135216 - RNA, 19 nt, Artificial Sequence
  Description of Artificial Sequence: Synthetic oligonucleotide
  Sense strand starting at position 2874 of SEQ ID NO: 1737
aagugaauggagugauuga

SEQ ID NO: 135217 - RNA, 19 nt, Artificial Sequence
  Description of Artificial Sequence: Synthetic oligonucleotide
  Antisense strand to SEQ ID NO: 135216
ucaaucacuccauucacuu

SEQ ID NO: 135218 - RNA, 19 nt, Artificial Sequence
  Description of Artificial Sequence: Synthetic oligonucleotide
  Sense strand starting at position 2834 of SEQ ID NO: 1737
gagacaguuguuugacaga

SEQ ID NO: 135219 - RNA, 19 nt, Artificial Sequence
  Description of Artificial Sequence: Synthetic oligonucleotide
  Antisense strand to SEQ ID NO: 135218
ucugucaaacaacugucuc

SEQ ID NO: 135220 - RNA, 19 nt, Artificial Sequence
  Description of Artificial Sequence: Synthetic oligonucleotide
  Sense strand starting at position 2832 of SEQ ID NO: 1737
aagagacaguuguuugaca

SEQ ID NO: 135221 - RNA, 19 nt, Artificial Sequence
  Description of Artificial Sequence: Synthetic oligonucleotide
  Antisense strand to SEQ ID NO: 135220
ugucaaacaacugucucuu

SEQ ID NO: 135222 - RNA, 19 nt, Artificial Sequence
  Description of Artificial Sequence: Synthetic oligonucleotide
  Sense strand starting at position 2830 of SEQ ID NO: 1737
ccaagagacaguuguuuga

SEQ ID NO: 135223 - RNA, 19 nt, Artificial Sequence
  Description of Artificial Sequence: Synthetic oligonucleotide
  Antisense strand to SEQ ID NO: 135222
ucaaacaacugucucuugg

SEQ ID NO: 135224 - RNA, 19 nt, Artificial Sequence
  Description of Artificial Sequence: Synthetic oligonucleotide
  Sense strand starting at position 2680 of SEQ ID NO: 1737
ggaguuugaauguggcaau

SEQ ID NO: 135225 - RNA, 19 nt, Artificial Sequence
  Description of Artificial Sequence: Synthetic oligonucleotide
  Antisense strand to SEQ ID NO: 135224
auugccacauucaaacucc

SEQ ID NO: 135226 - RNA, 19 nt, Artificial Sequence
  Description of Artificial Sequence: Synthetic oligonucleotide
  Sense strand starting at position 2628 of SEQ ID NO: 1737
auaaacauugggcgagaua

SEQ ID NO: 135227 - RNA, 19 nt, Artificial Sequence
  Description of Artificial Sequence: Synthetic oligonucleotide
  Antisense strand to SEQ ID NO: 135226
uaucucgcccaauguuuau

SEQ ID NO: 135228 - RNA, 19 nt, Artificial Sequence
  Description of Artificial Sequence: Synthetic oligonucleotide
  Sense strand starting at position 2627 of SEQ ID NO: 1737
gauaaacauugggcgagau

SEQ ID NO: 135229 - RNA, 19 nt, Artificial Sequence
  Description of Artificial Sequence: Synthetic oligonucleotide
  Antisense strand to SEQ ID NO: 135228
aucucgcccaauguuuauc

SEQ ID NO: 135230 - RNA, 19 nt, Artificial Sequence
  Description of Artificial Sequence: Synthetic oligonucleotide
  Sense strand starting at position 2614 of SEQ ID NO: 1737
auguauccggagugauaaa

SEQ ID NO: 135231 - RNA, 19 nt, Artificial Sequence
  Description of Artificial Sequence: Synthetic oligonucleotide
  Antisense strand to SEQ ID NO: 135230
uuuaucacuccggauacau

SEQ ID NO: 135232 - RNA, 19 nt, Artificial Sequence
  Description of Artificial Sequence: Synthetic oligonucleotide
  Sense strand starting at position 2608 of SEQ ID NO: 1737
cuaggaauguauccggagu

SEQ ID NO: 135233 - RNA, 19 nt, Artificial Sequence
  Description of Artificial Sequence: Synthetic oligonucleotide
  Antisense strand to SEQ ID NO: 135232
acuccggauacauuccuag

SEQ ID NO: 135234 - RNA, 19 nt, Artificial Sequence
  Description of Artificial Sequence: Synthetic oligonucleotide
  Sense strand starting at position 2590 of SEQ ID NO: 1737
gcuccagaucuuuggauuc

SEQ ID NO: 135235 - RNA, 19 nt, Artificial Sequence
  Description of Artificial Sequence: Synthetic oligonucleotide
  Antisense strand to SEQ ID NO: 135234
gaauccaaagaucuggagc

SEQ ID NO: 135236 - RNA, 19 nt, Artificial Sequence
  Description of Artificial Sequence: Synthetic oligonucleotide
  Sense strand starting at position 2589 of SEQ ID NO: 1737
ugcuccagaucuuuggauu

SEQ ID NO: 135237 - RNA, 19 nt, Artificial Sequence
  Description of Artificial Sequence: Synthetic oligonucleotide
  Antisense strand to SEQ ID NO: 135236
aauccaaagaucuggagca

SEQ ID NO: 135238 - RNA, 19 nt, Artificial Sequence
  Description of Artificial Sequence: Synthetic oligonucleotide
  Sense strand starting at position 2503 of SEQ ID NO: 1737
uguugugagcauugaaaga

SEQ ID NO: 135239 - RNA, 19 nt, Artificial Sequence
  Description of Artificial Sequence: Synthetic oligonucleotide
  Antisense strand to SEQ ID NO: 135238
ucuuucaaugcucacaaca

SEQ ID NO: 135240 - RNA, 19 nt, Artificial Sequence
  Description of Artificial Sequence: Synthetic oligonucleotide
  Sense strand starting at position 2390 of SEQ ID NO: 1737
cccacuccuccaggagauu

SEQ ID NO: 135241 - RNA, 19 nt, Artificial Sequence
  Description of Artificial Sequence: Synthetic oligonucleotide
  Antisense strand to SEQ ID NO: 135240
aaucuccuggaggaguggg

SEQ ID NO: 135242 - RNA, 19 nt, Artificial Sequence
  Description of Artificial Sequence: Synthetic oligonucleotide
  Sense strand starting at position 2360 of SEQ ID NO: 1737
gguucucuggaagguacaa

SEQ ID NO: 135243 - RNA, 19 nt, Artificial Sequence
  Description of Artificial Sequence: Synthetic oligonucleotide
  Antisense strand to SEQ ID NO: 135242
uuguaccuuccagagaacc

SEQ ID NO: 135244 - RNA, 19 nt, Artificial Sequence
  Description of Artificial Sequence: Synthetic oligonucleotide
  Sense strand starting at position 2357 of SEQ ID NO: 1737
uaagguucucuggaaggua

SEQ ID NO: 135245 - RNA, 19 nt, Artificial Sequence
  Description of Artificial Sequence: Synthetic oligonucleotide
  Antisense strand to SEQ ID NO: 135244
uaccuuccagagaaccuua

SEQ ID NO: 135246 - RNA, 19 nt, Artificial Sequence
  Description of Artificial Sequence: Synthetic oligonucleotide
  Sense strand starting at position 2310 of SEQ ID NO: 1737
cugacuucugcagaguauc

SEQ ID NO: 135247 - RNA, 19 nt, Artificial Sequence
  Description of Artificial Sequence: Synthetic oligonucleotide
  Antisense strand to SEQ ID NO: 135246
gauacucugcagaagucag

SEQ ID NO: 135248 - RNA, 19 nt, Artificial Sequence
  Description of Artificial Sequence: Synthetic oligonucleotide
  Sense strand starting at position 2308 of SEQ ID NO: 1737
cucugacuucugcagagua

SEQ ID NO: 135249 - RNA, 19 nt, Artificial Sequence
  Description of Artificial Sequence: Synthetic oligonucleotide
  Antisense strand to SEQ ID NO: 135248
uacucugcagaagucagag

SEQ ID NO: 135250 - RNA, 19 nt, Artificial Sequence
  Description of Artificial Sequence: Synthetic oligonucleotide
  Sense strand starting at position 2283 of SEQ ID NO: 1737
ugcggugugcuugcuaaua

SEQ ID NO: 135251 - RNA, 19 nt, Artificial Sequence
  Description of Artificial Sequence: Synthetic oligonucleotide
  Antisense strand to SEQ ID NO: 135250
uauuagcaagcacaccgca

SEQ ID NO: 135252 - RNA, 19 nt, Artificial Sequence
  Description of Artificial Sequence: Synthetic oligonucleotide
  Sense strand starting at position 822 of SEQ ID NO: 1737
gggcccagauaauucuaaa

SEQ ID NO: 135253 - RNA, 19 nt, Artificial Sequence
  Description of Artificial Sequence: Synthetic oligonucleotide
  Antisense strand to SEQ ID NO: 135252
uuuagaauuaucugggccc

SEQ ID NO: 135254 - RNA, 19 nt, Artificial Sequence
  Description of Artificial Sequence: Synthetic oligonucleotide
  Sense strand starting at position 643 of SEQ ID NO: 1737
gauugagcaugauuaauag

SEQ ID NO: 135255 - RNA, 19 nt, Artificial Sequence
  Description of Artificial Sequence: Synthetic oligonucleotide
  Antisense strand to SEQ ID NO: 135254
cuauuaaucaugcucaauc

SEQ ID NO: 135256 - RNA, 19 nt, Artificial Sequence
  Description of Artificial Sequence: Synthetic oligonucleotide
  Sense strand starting at position 641 of SEQ ID NO: 1737
gcgauugagcaugauuaau

SEQ ID NO: 135257 - RNA, 19 nt, Artificial Sequence
  Description of Artificial Sequence: Synthetic oligonucleotide
  Antisense strand to SEQ ID NO: 135256
auuaaucaugcucaaucgc

SEQ ID NO: 135258 - RNA, 19 nt, Artificial Sequence
  Description of Artificial Sequence: Synthetic oligonucleotide
  Sense strand starting at position 634 of SEQ ID NO: 1737
auuuauggcgauugagcau

SEQ ID NO: 135259 - RNA, 19 nt, Artificial Sequence
  Description of Artificial Sequence: Synthetic oligonucleotide
  Antisense strand to SEQ ID NO: 135258
augcucaaucgccauaaau

SEQ ID NO: 135260 - RNA, 19 nt, Artificial Sequence
  Description of Artificial Sequence: Synthetic oligonucleotide
  Sense strand starting at position 520 of SEQ ID NO: 1737
cuacauaauuugcagggaa

SEQ ID NO: 135261 - RNA, 19 nt, Artificial Sequence
  Description of Artificial Sequence: Synthetic oligonucleotide
  Antisense strand to SEQ ID NO: 135260
uucccugcaaauuauguag

SEQ ID NO: 135262 - RNA, 19 nt, Artificial Sequence
  Description of Artificial Sequence: Synthetic oligonucleotide
  Sense strand starting at position 366 of SEQ ID NO: 1737
uugugcggucugucaaguu

SEQ ID NO: 135263 - RNA, 19 nt, Artificial Sequence
  Description of Artificial Sequence: Synthetic oligonucleotide
  Antisense strand to SEQ ID NO: 135262
aacuugacagaccgcacaa

SEQ ID NO: 135264 - RNA, 19 nt, Artificial Sequence
  Description of Artificial Sequence: Synthetic oligonucleotide
  Sense strand starting at position 164 of SEQ ID NO: 1737
guaagaggauuccaaauuu

SEQ ID NO: 135265 - RNA, 19 nt, Artificial Sequence
  Description of Artificial Sequence: Synthetic oligonucleotide
  Antisense strand to SEQ ID NO: 135264
aaauuuggaauccucuuac

SEQ ID NO: 135266 - RNA, 19 nt, Artificial Sequence
  Description of Artificial Sequence: Synthetic oligonucleotide
  Sense strand starting at position 3822 of SEQ ID NO: 1738
ccagguguauaucugaaga

SEQ ID NO: 135267 - RNA, 19 nt, Artificial Sequence
  Description of Artificial Sequence: Synthetic oligonucleotide
  Antisense strand to SEQ ID NO: 135266
ucuucagauauacaccugg

SEQ ID NO: 135268 - RNA, 19 nt, Artificial Sequence
  Description of Artificial Sequence: Synthetic oligonucleotide
  Sense strand starting at position 3815 of SEQ ID NO: 1738
ggaauacccagguguauau

SEQ ID NO: 135269 - RNA, 19 nt, Artificial Sequence
  Description of Artificial Sequence: Synthetic oligonucleotide
  Antisense strand to SEQ ID NO: 135268
auauacaccuggguauucc

SEQ ID NO: 135270 - RNA, 19 nt, Artificial Sequence
  Description of Artificial Sequence: Synthetic oligonucleotide
  Sense strand starting at position 3813 of SEQ ID NO: 1738
uuggaauacccagguguau

SEQ ID NO: 135271 - RNA, 19 nt, Artificial Sequence
  Description of Artificial Sequence: Synthetic oligonucleotide
  Antisense strand to SEQ ID NO: 135270
auacaccuggguauuccaa

SEQ ID NO: 135272 - RNA, 19 nt, Artificial Sequence
  Description of Artificial Sequence: Synthetic oligonucleotide
  Sense strand starting at position 3769 of SEQ ID NO: 1738
cauugagguccuggcagua

SEQ ID NO: 135273 - RNA, 19 nt, Artificial Sequence
  Description of Artificial Sequence: Synthetic oligonucleotide
  Antisense strand to SEQ ID NO: 135272
uacugccaggaccucaaug

SEQ ID NO: 135274 - RNA, 19 nt, Artificial Sequence
  Description of Artificial Sequence: Synthetic oligonucleotide
  Sense strand starting at position 3731 of SEQ ID NO: 1738
cugguucucagagguuaau

SEQ ID NO: 135275 - RNA, 19 nt, Artificial Sequence
  Description of Artificial Sequence: Synthetic oligonucleotide
  Antisense strand to SEQ ID NO: 135274
auuaaccucugagaaccag

SEQ ID NO: 135276 - RNA, 19 nt, Artificial Sequence
  Description of Artificial Sequence: Synthetic oligonucleotide
  Sense strand starting at position 3636 of SEQ ID NO: 1738
gucucaaauguuuauauag

SEQ ID NO: 135277 - RNA, 19 nt, Artificial Sequence
  Description of Artificial Sequence: Synthetic oligonucleotide
  Antisense strand to SEQ ID NO: 135276
cuauauaaacauuugagac

SEQ ID NO: 135278 - RNA, 19 nt, Artificial Sequence
  Description of Artificial Sequence: Synthetic oligonucleotide
  Sense strand starting at position 3608 of SEQ ID NO: 1738
agaagaauauuuggcuaaa

SEQ ID NO: 135279 - RNA, 19 nt, Artificial Sequence
  Description of Artificial Sequence: Synthetic oligonucleotide
  Antisense strand to SEQ ID NO: 135278
uuuagccaaauauucuucu

SEQ ID NO: 135280 - RNA, 19 nt, Artificial Sequence
  Description of Artificial Sequence: Synthetic oligonucleotide
  Sense strand starting at position 3597 of SEQ ID NO: 1738
gucauuuccuaagaagaau

SEQ ID NO: 135281 - RNA, 19 nt, Artificial Sequence
  Description of Artificial Sequence: Synthetic oligonucleotide
  Antisense strand to SEQ ID NO: 135280
auucuucuuaggaaaugac

SEQ ID NO: 135282 - RNA, 19 nt, Artificial Sequence
  Description of Artificial Sequence: Synthetic oligonucleotide
  Sense strand starting at position 3340 of SEQ ID NO: 1738
ugaugauguucccuuccuu

SEQ ID NO: 135283 - RNA, 19 nt, Artificial Sequence
  Description of Artificial Sequence: Synthetic oligonucleotide
  Antisense strand to SEQ ID NO: 135282
aaggaagggaacaucauca

SEQ ID NO: 135284 - RNA, 19 nt, Artificial Sequence
  Description of Artificial Sequence: Synthetic oligonucleotide
  Sense strand starting at position 3305 of SEQ ID NO: 1738
ugcugaaguugaccaaauu

SEQ ID NO: 135285 - RNA, 19 nt, Artificial Sequence
  Description of Artificial Sequence: Synthetic oligonucleotide
  Antisense strand to SEQ ID NO: 135284
aauuuggucaacuucagca

SEQ ID NO: 135286 - RNA, 19 nt, Artificial Sequence
  Description of Artificial Sequence: Synthetic oligonucleotide
  Sense strand starting at position 3123 of SEQ ID NO: 1738
gguauaguaaguggaagau

SEQ ID NO: 135287 - RNA, 19 nt, Artificial Sequence
  Description of Artificial Sequence: Synthetic oligonucleotide
  Antisense strand to SEQ ID NO: 135286
aucuuccacuuacuauacc

SEQ ID NO: 135288 - RNA, 19 nt, Artificial Sequence
  Description of Artificial Sequence: Synthetic oligonucleotide
  Sense strand starting at position 3122 of SEQ ID NO: 1738
agguauaguaaguggaaga

SEQ ID NO: 135289 - RNA, 19 nt, Artificial Sequence
  Description of Artificial Sequence: Synthetic oligonucleotide
  Antisense strand to SEQ ID NO: 135288
ucuuccacuuacuauaccu

SEQ ID NO: 135290 - RNA, 19 nt, Artificial Sequence
  Description of Artificial Sequence: Synthetic oligonucleotide
  Sense strand starting at position 3109 of SEQ ID NO: 1738
gguacuaugccauagguau

SEQ ID NO: 135291 - RNA, 19 nt, Artificial Sequence
  Description of Artificial Sequence: Synthetic oligonucleotide
  Antisense strand to SEQ ID NO: 135290
auaccuauggcauaguacc

SEQ ID NO: 135292 - RNA, 19 nt, Artificial Sequence
  Description of Artificial Sequence: Synthetic oligonucleotide
  Sense strand starting at position 2992 of SEQ ID NO: 1738
cucccaugguaucuauuau

SEQ ID NO: 135293 - RNA, 19 nt, Artificial Sequence
  Description of Artificial Sequence: Synthetic oligonucleotide
  Antisense strand to SEQ ID NO: 135292
auaauagauaccaugggag

SEQ ID NO: 135294 - RNA, 19 nt, Artificial Sequence
  Description of Artificial Sequence: Synthetic oligonucleotide
  Sense strand starting at position 2941 of SEQ ID NO: 1738
agagccuuuccugauuacu

SEQ ID NO: 135295 - RNA, 19 nt, Artificial Sequence
  Description of Artificial Sequence: Synthetic oligonucleotide
  Antisense strand to SEQ ID NO: 135294
aguaaucaggaaaggcucu

SEQ ID NO: 135296 - RNA, 19 nt, Artificial Sequence
  Description of Artificial Sequence: Synthetic oligonucleotide
  Sense strand starting at position 2938 of SEQ ID NO: 1738
cugagagccuuuccugauu

SEQ ID NO: 135297 - RNA, 19 nt, Artificial Sequence
  Description of Artificial Sequence: Synthetic oligonucleotide
  Antisense strand to SEQ ID NO: 135296
aaucaggaaaggcucucag

SEQ ID NO: 135298 - RNA, 19 nt, Artificial Sequence
  Description of Artificial Sequence: Synthetic oligonucleotide
  Sense strand starting at position 2891 of SEQ ID NO: 1738
ugggaauccuaagcauucu

SEQ ID NO: 135299 - RNA, 19 nt, Artificial Sequence
  Description of Artificial Sequence: Synthetic oligonucleotide
  Antisense strand to SEQ ID NO: 135298
agaaugcuuaggauuccca

SEQ ID NO: 135300 - RNA, 19 nt, Artificial Sequence
  Description of Artificial Sequence: Synthetic oligonucleotide
  Sense strand starting at position 2663 of SEQ ID NO: 1738
ccuuaugaaaguggaguua

SEQ ID NO: 135301 - RNA, 19 nt, Artificial Sequence
  Description of Artificial Sequence: Synthetic oligonucleotide
  Antisense strand to SEQ ID NO: 135300
uaacuccacuuucauaagg

SEQ ID NO: 135302 - RNA, 19 nt, Artificial Sequence
  Description of Artificial Sequence: Synthetic oligonucleotide
  Sense strand starting at position 2662 of SEQ ID NO: 1738
cccuuaugaaaguggaguu

SEQ ID NO: 135303 - RNA, 19 nt, Artificial Sequence
  Description of Artificial Sequence: Synthetic oligonucleotide
  Antisense strand to SEQ ID NO: 135302
aacuccacuuucauaaggg

SEQ ID NO: 135304 - RNA, 19 nt, Artificial Sequence
  Description of Artificial Sequence: Synthetic oligonucleotide
  Sense strand starting at position 2573 of SEQ ID NO: 1738
uuacucuuggguugugaag

SEQ ID NO: 135305 - RNA, 19 nt, Artificial Sequence
  Description of Artificial Sequence: Synthetic oligonucleotide
  Antisense strand to SEQ ID NO: 135304
cuucacaacccaagaguaa

SEQ ID NO: 135306 - RNA, 19 nt, Artificial Sequence
  Description of Artificial Sequence: Synthetic oligonucleotide
  Sense strand starting at position 2542 of SEQ ID NO: 1738
gauggucuugagggaaauu

SEQ ID NO: 135307 - RNA, 19 nt, Artificial Sequence
  Description of Artificial Sequence: Synthetic oligonucleotide
  Antisense strand to SEQ ID NO: 135306
aauuucccucaagaccauc

SEQ ID NO: 135308 - RNA, 19 nt, Artificial Sequence
  Description of Artificial Sequence: Synthetic oligonucleotide
  Sense strand starting at position 2539 of SEQ ID NO: 1738
cgugauggucuugagggaa

SEQ ID NO: 135309 - RNA, 19 nt, Artificial Sequence
  Description of Artificial Sequence: Synthetic oligonucleotide
  Antisense strand to SEQ ID NO: 135308
uucccucaagaccaucacg

SEQ ID NO: 135310 - RNA, 19 nt, Artificial Sequence
  Description of Artificial Sequence: Synthetic oligonucleotide
  Sense strand starting at position 2485 of SEQ ID NO: 1738
gugguuccaagcgaacaaa

SEQ ID NO: 135311 - RNA, 19 nt, Artificial Sequence
  Description of Artificial Sequence: Synthetic oligonucleotide
  Antisense strand to SEQ ID NO: 135310
uuuguucgcuuggaaccac

SEQ ID NO: 135312 - RNA, 19 nt, Artificial Sequence
  Description of Artificial Sequence: Synthetic oligonucleotide
  Sense strand starting at position 2285 of SEQ ID NO: 1738
ggauuccuugucugcccaa

SEQ ID NO: 135313 - RNA, 19 nt, Artificial Sequence
  Description of Artificial Sequence: Synthetic oligonucleotide
  Antisense strand to SEQ ID NO: 135312
uugggcagacaaggaaucc

SEQ ID NO: 135314 - RNA, 19 nt, Artificial Sequence
  Description of Artificial Sequence: Synthetic oligonucleotide
  Sense strand starting at position 2147 of SEQ ID NO: 1738
gaugccuguuaaucagacu

SEQ ID NO: 135315 - RNA, 19 nt, Artificial Sequence
  Description of Artificial Sequence: Synthetic oligonucleotide
  Antisense strand to SEQ ID NO: 135314
agucugauuaacaggcauc

SEQ ID NO: 135316 - RNA, 19 nt, Artificial Sequence
  Description of Artificial Sequence: Synthetic oligonucleotide
  Sense strand starting at position 2131 of SEQ ID NO: 1738
uugagucacugcuugggau

SEQ ID NO: 135317 - RNA, 19 nt, Artificial Sequence
  Description of Artificial Sequence: Synthetic oligonucleotide
  Antisense strand to SEQ ID NO: 135316
aucccaagcagugacucaa

SEQ ID NO: 135318 - RNA, 19 nt, Artificial Sequence
  Description of Artificial Sequence: Synthetic oligonucleotide
  Sense strand starting at position 2116 of SEQ ID NO: 1738
gaaauugccgaugguuuga

SEQ ID NO: 135319 - RNA, 19 nt, Artificial Sequence
  Description of Artificial Sequence: Synthetic oligonucleotide
  Antisense strand to SEQ ID NO: 135318
ucaaaccaucggcaauuuc

SEQ ID NO: 135320 - RNA, 19 nt, Artificial Sequence
  Description of Artificial Sequence: Synthetic oligonucleotide
  Sense strand starting at position 2113 of SEQ ID NO: 1738
ucugaaauugccgaugguu

SEQ ID NO: 135321 - RNA, 19 nt, Artificial Sequence
  Description of Artificial Sequence: Synthetic oligonucleotide
  Antisense strand to SEQ ID NO: 135320
aaccaucggcaauuucaga

SEQ ID NO: 135322 - RNA, 19 nt, Artificial Sequence
  Description of Artificial Sequence: Synthetic oligonucleotide
  Sense strand starting at position 2080 of SEQ ID NO: 1738
guauuaauuguggagucac

SEQ ID NO: 135323 - RNA, 19 nt, Artificial Sequence
  Description of Artificial Sequence: Synthetic oligonucleotide
  Antisense strand to SEQ ID NO: 135322
gugacuccacaauuaauac

SEQ ID NO: 135324 - RNA, 19 nt, Artificial Sequence
  Description of Artificial Sequence: Synthetic oligonucleotide
  Sense strand starting at position 2054 of SEQ ID NO: 1738
gggacugacuggucacaug

SEQ ID NO: 135325 - RNA, 19 nt, Artificial Sequence
  Description of Artificial Sequence: Synthetic oligonucleotide
  Antisense strand to SEQ ID NO: 135324
caugugaccagucaguccc

SEQ ID NO: 135326 - RNA, 19 nt, Artificial Sequence
  Description of Artificial Sequence: Synthetic oligonucleotide
  Sense strand starting at position 2026 of SEQ ID NO: 1738
uuauauguugcuuagucca

SEQ ID NO: 135327 - RNA, 19 nt, Artificial Sequence
  Description of Artificial Sequence: Synthetic oligonucleotide
  Antisense strand to SEQ ID NO: 135326
uggacuaagcaacauauaa

SEQ ID NO: 135328 - RNA, 19 nt, Artificial Sequence
  Description of Artificial Sequence: Synthetic oligonucleotide
  Sense strand starting at position 1836 of SEQ ID NO: 1738
guuugugaggcccaagaaa

SEQ ID NO: 135329 - RNA, 19 nt, Artificial Sequence
  Description of Artificial Sequence: Synthetic oligonucleotide
  Antisense strand to SEQ ID NO: 135328
uuucuugggccucacaaac

SEQ ID NO: 135330 - RNA, 19 nt, Artificial Sequence
  Description of Artificial Sequence: Synthetic oligonucleotide
  Sense strand starting at position 1802 of SEQ ID NO: 1738
ggcaaauucuagucuggau

SEQ ID NO: 135331 - RNA, 19 nt, Artificial Sequence
  Description of Artificial Sequence: Synthetic oligonucleotide
  Antisense strand to SEQ ID NO: 135330
auccagacuagaauuugcc

SEQ ID NO: 135332 - RNA, 19 nt, Artificial Sequence
  Description of Artificial Sequence: Synthetic oligonucleotide
  Sense strand starting at position 1746 of SEQ ID NO: 1738
ucucuucuagucuacgaau

SEQ ID NO: 135333 - RNA, 19 nt, Artificial Sequence
  Description of Artificial Sequence: Synthetic oligonucleotide
  Antisense strand to SEQ ID NO: 135332
auucguagacuagaagaga

SEQ ID NO: 135334 - RNA, 19 nt, Artificial Sequence
  Description of Artificial Sequence: Synthetic oligonucleotide
  Sense strand starting at position 1719 of SEQ ID NO: 1738
ccagucuuaccacagguuu

SEQ ID NO: 135335 - RNA, 19 nt, Artificial Sequence
  Description of Artificial Sequence: Synthetic oligonucleotide
  Antisense strand to SEQ ID NO: 135334
aaaccugugguaagacugg

SEQ ID NO: 135336 - RNA, 19 nt, Artificial Sequence
  Description of Artificial Sequence: Synthetic oligonucleotide
  Sense strand starting at position 1685 of SEQ ID NO: 1738
cuggccucugucuagacau

SEQ ID NO: 135337 - RNA, 19 nt, Artificial Sequence
  Description of Artificial Sequence: Synthetic oligonucleotide
  Antisense strand to SEQ ID NO: 135336
augucuagacagaggccag

SEQ ID NO: 135338 - RNA, 19 nt, Artificial Sequence
  Description of Artificial Sequence: Synthetic oligonucleotide
  Sense strand starting at position 261 of SEQ ID NO: 1738
cgucaagucagauaucagc

SEQ ID NO: 135339 - RNA, 19 nt, Artificial Sequence
  Description of Artificial Sequence: Synthetic oligonucleotide
  Antisense strand to SEQ ID NO: 135338
gcugauaucugacuugacg

SEQ ID NO: 135340 - RNA, 19 nt, Artificial Sequence
  Description of Artificial Sequence: Synthetic oligonucleotide
  Sense strand starting at position 232 of SEQ ID NO: 1738
ggguuugaugguggagaaa

SEQ ID NO: 135341 - RNA, 19 nt, Artificial Sequence
  Description of Artificial Sequence: Synthetic oligonucleotide
  Antisense strand to SEQ ID NO: 135340
uuucuccaccaucaaaccc

SEQ ID NO: 135342 - RNA, 19 nt, Artificial Sequence
  Description of Artificial Sequence: Synthetic oligonucleotide
  Sense strand starting at position 204 of SEQ ID NO: 1738
agaagacaguugucacaag

SEQ ID NO: 135343 - RNA, 19 nt, Artificial Sequence
  Description of Artificial Sequence: Synthetic oligonucleotide
  Antisense strand to SEQ ID NO: 135342
cuugugacaacugucuucu

SEQ ID NO: 135344 - RNA, 19 nt, Artificial Sequence
  Description of Artificial Sequence: Synthetic oligonucleotide
  Sense strand starting at position 202 of SEQ ID NO: 1738
ggagaagacaguugucaca

SEQ ID NO: 135345 - RNA, 19 nt, Artificial Sequence
  Description of Artificial Sequence: Synthetic oligonucleotide
  Antisense strand to SEQ ID NO: 135344
ugugacaacugucuucucc

SEQ ID NO: 135346 - RNA, 19 nt, Artificial Sequence
  Description of Artificial Sequence: Synthetic oligonucleotide
  Sense strand starting at position 3590 of SEQ ID NO: 1739
ugucuugagcaauggagaa

SEQ ID NO: 135347 - RNA, 19 nt, Artificial Sequence
  Description of Artificial Sequence: Synthetic oligonucleotide
  Antisense strand to SEQ ID NO: 135346
uucuccauugcucaagaca

SEQ ID NO: 135348 - RNA, 19 nt, Artificial Sequence
  Description of Artificial Sequence: Synthetic oligonucleotide
  Sense strand starting at position 3587 of SEQ ID NO: 1739
aucugucuugagcaaugga

SEQ ID NO: 135349 - RNA, 19 nt, Artificial Sequence
  Description of Artificial Sequence: Synthetic oligonucleotide
  Antisense strand to SEQ ID NO: 135348
uccauugcucaagacagau

SEQ ID NO: 135350 - RNA, 19 nt, Artificial Sequence
  Description of Artificial Sequence: Synthetic oligonucleotide
  Sense strand starting at position 3584 of SEQ ID NO: 1739
aucaucugucuugagcaau

SEQ ID NO: 135351 - RNA, 19 nt, Artificial Sequence
  Description of Artificial Sequence: Synthetic oligonucleotide
  Antisense strand to SEQ ID NO: 135350
auugcucaagacagaugau

SEQ ID NO: 135352 - RNA, 19 nt, Artificial Sequence
  Description of Artificial Sequence: Synthetic oligonucleotide
  Sense strand starting at position 3579 of SEQ ID NO: 1739
gccaaaucaucugucuuga

SEQ ID NO: 135353 - RNA, 19 nt, Artificial Sequence
  Description of Artificial Sequence: Synthetic oligonucleotide
  Antisense strand to SEQ ID NO: 135352
ucaagacagaugauuuggc

SEQ ID NO: 135354 - RNA, 19 nt, Artificial Sequence
  Description of Artificial Sequence: Synthetic oligonucleotide
  Sense strand starting at position 3247 of SEQ ID NO: 1739
uaguguccuggucacagaa

SEQ ID NO: 135355 - RNA, 19 nt, Artificial Sequence
  Description of Artificial Sequence: Synthetic oligonucleotide
  Antisense strand to SEQ ID NO: 135354
uucugugaccaggacacua

SEQ ID NO: 135356 - RNA, 19 nt, Artificial Sequence
  Description of Artificial Sequence: Synthetic oligonucleotide
  Sense strand starting at position 3202 of SEQ ID NO: 1739
agcauuacuuuagugaauu

SEQ ID NO: 135357 - RNA, 19 nt, Artificial Sequence
  Description of Artificial Sequence: Synthetic oligonucleotide
  Antisense strand to SEQ ID NO: 135356
aauucacuaaaguaaugcu

SEQ ID NO: 135358 - RNA, 19 nt, Artificial Sequence
  Description of Artificial Sequence: Synthetic oligonucleotide
  Sense strand starting at position 3200 of SEQ ID NO: 1739
gaagcauuacuuuagugaa

SEQ ID NO: 135359 - RNA, 19 nt, Artificial Sequence
  Description of Artificial Sequence: Synthetic oligonucleotide
  Antisense strand to SEQ ID NO: 135358
uucacuaaaguaaugcuuc

SEQ ID NO: 135360 - RNA, 19 nt, Artificial Sequence
  Description of Artificial Sequence: Synthetic oligonucleotide
  Sense strand starting at position 2745 of SEQ ID NO: 1739
guguauguccauggaauug

SEQ ID NO: 135361 - RNA, 19 nt, Artificial Sequence
  Description of Artificial Sequence: Synthetic oligonucleotide
  Antisense strand to SEQ ID NO: 135360
caauuccauggacauacac

SEQ ID NO: 135362 - RNA, 19 nt, Artificial Sequence
  Description of Artificial Sequence: Synthetic oligonucleotide
  Sense strand starting at position 2707 of SEQ ID NO: 1739
ccacuucuggucugaacga

SEQ ID NO: 135363 - RNA, 19 nt, Artificial Sequence
  Description of Artificial Sequence: Synthetic oligonucleotide
  Antisense strand to SEQ ID NO: 135362
ucguucagaccagaagugg

SEQ ID NO: 135364 - RNA, 19 nt, Artificial Sequence
  Description of Artificial Sequence: Synthetic oligonucleotide
  Sense strand starting at position 2666 of SEQ ID NO: 1739
gugaacuaccuaugacaua

SEQ ID NO: 135365 - RNA, 19 nt, Artificial Sequence
  Description of Artificial Sequence: Synthetic oligonucleotide
  Antisense strand to SEQ ID NO: 135364
uaugucauagguaguucac

SEQ ID NO: 135366 - RNA, 19 nt, Artificial Sequence
  Description of Artificial Sequence: Synthetic oligonucleotide
  Sense strand starting at position 2629 of SEQ ID NO: 1739
ggcgaauguuuaguaaaug

SEQ ID NO: 135367 - RNA, 19 nt, Artificial Sequence
  Description of Artificial Sequence: Synthetic oligonucleotide
  Antisense strand to SEQ ID NO: 135366
cauuuacuaaacauucgcc

SEQ ID NO: 135368 - RNA, 19 nt, Artificial Sequence
  Description of Artificial Sequence: Synthetic oligonucleotide
  Sense strand starting at position 2570 of SEQ ID NO: 1739
agaugaguguaucuggaag

SEQ ID NO: 135369 - RNA, 19 nt, Artificial Sequence
  Description of Artificial Sequence: Synthetic oligonucleotide
  Antisense strand to SEQ ID NO: 135368
cuuccagauacacucaucu

SEQ ID NO: 135370 - RNA, 19 nt, Artificial Sequence
  Description of Artificial Sequence: Synthetic oligonucleotide
  Sense strand starting at position 2559 of SEQ ID NO: 1739
guaacauaggcagaugagu

SEQ ID NO: 135371 - RNA, 19 nt, Artificial Sequence
  Description of Artificial Sequence: Synthetic oligonucleotide
  Antisense strand to SEQ ID NO: 135370
acucaucugccuauguuac

SEQ ID NO: 135372 - RNA, 19 nt, Artificial Sequence
  Description of Artificial Sequence: Synthetic oligonucleotide
  Sense strand starting at position 2446 of SEQ ID NO: 1739
ucuaauuauggaugugaga

SEQ ID NO: 135373 - RNA, 19 nt, Artificial Sequence
  Description of Artificial Sequence: Synthetic oligonucleotide
  Antisense strand to SEQ ID NO: 135372
ucucacauccauaauuaga

SEQ ID NO: 135374 - RNA, 19 nt, Artificial Sequence
  Description of Artificial Sequence: Synthetic oligonucleotide
  Sense strand starting at position 2350 of SEQ ID NO: 1739
gaagucuugguguauugaa

SEQ ID NO: 135375 - RNA, 19 nt, Artificial Sequence
  Description of Artificial Sequence: Synthetic oligonucleotide
  Antisense strand to SEQ ID NO: 135374
uucaauacaccaagacuuc

SEQ ID NO: 135376 - RNA, 19 nt, Artificial Sequence
  Description of Artificial Sequence: Synthetic oligonucleotide
  Sense strand starting at position 2347 of SEQ ID NO: 1739
ugagaagucuugguguauu

SEQ ID NO: 135377 - RNA, 19 nt, Artificial Sequence
  Description of Artificial Sequence: Synthetic oligonucleotide
  Antisense strand to SEQ ID NO: 135376
aauacaccaagacuucuca

SEQ ID NO: 135378 - RNA, 19 nt, Artificial Sequence
  Description of Artificial Sequence: Synthetic oligonucleotide
  Sense strand starting at position 2346 of SEQ ID NO: 1739
cugagaagucuugguguau

SEQ ID NO: 135379 - RNA, 19 nt, Artificial Sequence
  Description of Artificial Sequence: Synthetic oligonucleotide
  Antisense strand to SEQ ID NO: 135378
auacaccaagacuucucag

SEQ ID NO: 135380 - RNA, 19 nt, Artificial Sequence
  Description of Artificial Sequence: Synthetic oligonucleotide
  Sense strand starting at position 2318 of SEQ ID NO: 1739
caguaugucucagugaauu

SEQ ID NO: 135381 - RNA, 19 nt, Artificial Sequence
  Description of Artificial Sequence: Synthetic oligonucleotide
  Antisense strand to SEQ ID NO: 135380
aauucacugagacauacug

SEQ ID NO: 135382 - RNA, 19 nt, Artificial Sequence
  Description of Artificial Sequence: Synthetic oligonucleotide
  Sense strand starting at position 2290 of SEQ ID NO: 1739
uguguaaaugguugaacca

SEQ ID NO: 135383 - RNA, 19 nt, Artificial Sequence
  Description of Artificial Sequence: Synthetic oligonucleotide
  Antisense strand to SEQ ID NO: 135382
ugguucaaccauuuacaca

SEQ ID NO: 135384 - RNA, 19 nt, Artificial Sequence
  Description of Artificial Sequence: Synthetic oligonucleotide
  Sense strand starting at position 2287 of SEQ ID NO: 1739
ggauguguaaaugguugaa

SEQ ID NO: 135385 - RNA, 19 nt, Artificial Sequence
  Description of Artificial Sequence: Synthetic oligonucleotide
  Antisense strand to SEQ ID NO: 135384
uucaaccauuuacacaucc

SEQ ID NO: 135386 - RNA, 19 nt, Artificial Sequence
  Description of Artificial Sequence: Synthetic oligonucleotide
  Sense strand starting at position 2255 of SEQ ID NO: 1739
cagugaaaugagcacucuu

SEQ ID NO: 135387 - RNA, 19 nt, Artificial Sequence
  Description of Artificial Sequence: Synthetic oligonucleotide
  Antisense strand to SEQ ID NO: 135386
aagagugcucauuucacug

SEQ ID NO: 135388 - RNA, 19 nt, Artificial Sequence
  Description of Artificial Sequence: Synthetic oligonucleotide
  Sense strand starting at position 2231 of SEQ ID NO: 1739
cguuuacaaguugauaaua

SEQ ID NO: 135389 - RNA, 19 nt, Artificial Sequence
  Description of Artificial Sequence: Synthetic oligonucleotide
  Antisense strand to SEQ ID NO: 135388
uauuaucaacuuguaaacg

SEQ ID NO: 135390 - RNA, 19 nt, Artificial Sequence
  Description of Artificial Sequence: Synthetic oligonucleotide
  Sense strand starting at position 2217 of SEQ ID NO: 1739
ucuugaauugaccacguuu

SEQ ID NO: 135391 - RNA, 19 nt, Artificial Sequence
  Description of Artificial Sequence: Synthetic oligonucleotide
  Antisense strand to SEQ ID NO: 135390
aaacguggucaauucaaga

SEQ ID NO: 135392 - RNA, 19 nt, Artificial Sequence
  Description of Artificial Sequence: Synthetic oligonucleotide
  Sense strand starting at position 2150 of SEQ ID NO: 1739
gagggaguuucugcaauca

SEQ ID NO: 135393 - RNA, 19 nt, Artificial Sequence
  Description of Artificial Sequence: Synthetic oligonucleotide
  Antisense strand to SEQ ID NO: 135392
ugauugcagaaacucccuc

SEQ ID NO: 135394 - RNA, 19 nt, Artificial Sequence
  Description of Artificial Sequence: Synthetic oligonucleotide
  Sense strand starting at position 2043 of SEQ ID NO: 1739
ggucaaaucuccgcaagac

SEQ ID NO: 135395 - RNA, 19 nt, Artificial Sequence
  Description of Artificial Sequence: Synthetic oligonucleotide
  Antisense strand to SEQ ID NO: 135394
gucuugcggagauuugacc

SEQ ID NO: 135396 - RNA, 19 nt, Artificial Sequence
  Description of Artificial Sequence: Synthetic oligonucleotide
  Sense strand starting at position 2042 of SEQ ID NO: 1739
aggucaaaucuccgcaaga

SEQ ID NO: 135397 - RNA, 19 nt, Artificial Sequence
  Description of Artificial Sequence: Synthetic oligonucleotide
  Antisense strand to SEQ ID NO: 135396
ucuugcggagauuugaccu

SEQ ID NO: 135398 - RNA, 19 nt, Artificial Sequence
  Description of Artificial Sequence: Synthetic oligonucleotide
  Sense strand starting at position 2032 of SEQ ID NO: 1739
cuaaguacguaggucaaau

SEQ ID NO: 135399 - RNA, 19 nt, Artificial Sequence
  Description of Artificial Sequence: Synthetic oligonucleotide
  Antisense strand to SEQ ID NO: 135398
auuugaccuacguacuuag

SEQ ID NO: 135400 - RNA, 19 nt, Artificial Sequence
  Description of Artificial Sequence: Synthetic oligonucleotide
  Sense strand starting at position 1383 of SEQ ID NO: 1739
acgcauacccgacacuaaa

SEQ ID NO: 135401 - RNA, 19 nt, Artificial Sequence
  Description of Artificial Sequence: Synthetic oligonucleotide
  Antisense strand to SEQ ID NO: 135400
uuuagugucggguaugcgu

SEQ ID NO: 135402 - RNA, 19 nt, Artificial Sequence
  Description of Artificial Sequence: Synthetic oligonucleotide
  Sense strand starting at position 1294 of SEQ ID NO: 1739
auacauugcucauugcaag

SEQ ID NO: 135403 - RNA, 19 nt, Artificial Sequence
  Description of Artificial Sequence: Synthetic oligonucleotide
  Antisense strand to SEQ ID NO: 135402
cuugcaaugagcaauguau

SEQ ID NO: 135404 - RNA, 19 nt, Artificial Sequence
  Description of Artificial Sequence: Synthetic oligonucleotide
  Sense strand starting at position 1026 of SEQ ID NO: 1739
cuaucaaugucucuauagu

SEQ ID NO: 135405 - RNA, 19 nt, Artificial Sequence
  Description of Artificial Sequence: Synthetic oligonucleotide
  Antisense strand to SEQ ID NO: 135404
acuauagagacauugauag

SEQ ID NO: 135406 - RNA, 19 nt, Artificial Sequence
  Description of Artificial Sequence: Synthetic oligonucleotide
  Sense strand starting at position 922 of SEQ ID NO: 1739
aaacaucaggcaugucaga

SEQ ID NO: 135407 - RNA, 19 nt, Artificial Sequence
  Description of Artificial Sequence: Synthetic oligonucleotide
  Antisense strand to SEQ ID NO: 135406
ucugacaugccugauguuu

SEQ ID NO: 135408 - RNA, 19 nt, Artificial Sequence
  Description of Artificial Sequence: Synthetic oligonucleotide
  Sense strand starting at position 893 of SEQ ID NO: 1739
cggaaauccagguagcuuu

SEQ ID NO: 135409 - RNA, 19 nt, Artificial Sequence
  Description of Artificial Sequence: Synthetic oligonucleotide
  Antisense strand to SEQ ID NO: 135408
aaagcuaccuggauuuccg

SEQ ID NO: 135410 - RNA, 19 nt, Artificial Sequence
  Description of Artificial Sequence: Synthetic oligonucleotide
  Sense strand starting at position 842 of SEQ ID NO: 1739
guacucuaacgagguauga

SEQ ID NO: 135411 - RNA, 19 nt, Artificial Sequence
  Description of Artificial Sequence: Synthetic oligonucleotide
  Antisense strand to SEQ ID NO: 135410
ucauaccucguuagaguac

SEQ ID NO: 135412 - RNA, 19 nt, Artificial Sequence
  Description of Artificial Sequence: Synthetic oligonucleotide
  Sense strand starting at position 830 of SEQ ID NO: 1739
guacaauucuaaguacucu

SEQ ID NO: 135413 - RNA, 19 nt, Artificial Sequence
  Description of Artificial Sequence: Synthetic oligonucleotide
  Antisense strand to SEQ ID NO: 135412
agaguacuuagaauuguac

SEQ ID NO: 135414 - RNA, 19 nt, Artificial Sequence
  Description of Artificial Sequence: Synthetic oligonucleotide
  Sense strand starting at position 743 of SEQ ID NO: 1739
guaagcuauuaaguacuca

SEQ ID NO: 135415 - RNA, 19 nt, Artificial Sequence
  Description of Artificial Sequence: Synthetic oligonucleotide
  Antisense strand to SEQ ID NO: 135414
ugaguacuuaauagcuuac

SEQ ID NO: 135416 - RNA, 19 nt, Artificial Sequence
  Description of Artificial Sequence: Synthetic oligonucleotide
  Sense strand starting at position 737 of SEQ ID NO: 1739
gcaggaguaagcuauuaag

SEQ ID NO: 135417 - RNA, 19 nt, Artificial Sequence
  Description of Artificial Sequence: Synthetic oligonucleotide
  Antisense strand to SEQ ID NO: 135416
cuuaauagcuuacuccugc

SEQ ID NO: 135418 - RNA, 19 nt, Artificial Sequence
  Description of Artificial Sequence: Synthetic oligonucleotide
  Sense strand starting at position 367 of SEQ ID NO: 1739
gacuuauuacugugcucag

SEQ ID NO: 135419 - RNA, 19 nt, Artificial Sequence
  Description of Artificial Sequence: Synthetic oligonucleotide
  Antisense strand to SEQ ID NO: 135418
cugagcacaguaauaaguc

SEQ ID NO: 135420 - RNA, 19 nt, Artificial Sequence
  Description of Artificial Sequence: Synthetic oligonucleotide
  Sense strand starting at position 255 of SEQ ID NO: 1739
uggucagacuacucucuca

SEQ ID NO: 135421 - RNA, 19 nt, Artificial Sequence
  Description of Artificial Sequence: Synthetic oligonucleotide
  Antisense strand to SEQ ID NO: 135420
ugagagaguagucugacca

SEQ ID NO: 135422 - RNA, 19 nt, Artificial Sequence
  Description of Artificial Sequence: Synthetic oligonucleotide
  Sense strand starting at position 246 of SEQ ID NO: 1739
augugaccuuggucagacu

SEQ ID NO: 135423 - RNA, 19 nt, Artificial Sequence
  Description of Artificial Sequence: Synthetic oligonucleotide
  Antisense strand to SEQ ID NO: 135422
agucugaccaaggucacau

SEQ ID NO: 135424 - RNA, 19 nt, Artificial Sequence
  Description of Artificial Sequence: Synthetic oligonucleotide
  Sense strand starting at position 244 of SEQ ID NO: 1739
cuaugugaccuuggucaga

SEQ ID NO: 135425 - RNA, 19 nt, Artificial Sequence
  Description of Artificial Sequence: Synthetic oligonucleotide
  Antisense strand to SEQ ID NO: 135424
ucugaccaaggucacauag

SEQ ID NO: 135426 - RNA, 19 nt, Artificial Sequence
  Description of Artificial Sequence: Synthetic oligonucleotide
  Sense strand starting at position 3945 of SEQ ID NO: 1740
caucuaagucuacggauaa

SEQ ID NO: 135427 - RNA, 19 nt, Artificial Sequence
  Description of Artificial Sequence: Synthetic oligonucleotide
  Antisense strand to SEQ ID NO: 135426
uuauccguagacuuagaug

SEQ ID NO: 135428 - RNA, 19 nt, Artificial Sequence
  Description of Artificial Sequence: Synthetic oligonucleotide
  Sense strand starting at position 3825 of SEQ ID NO: 1740
cccagauuccuugaagcag

SEQ ID NO: 135429 - RNA, 19 nt, Artificial Sequence
  Description of Artificial Sequence: Synthetic oligonucleotide
  Antisense strand to SEQ ID NO: 135428
cugcuucaaggaaucuggg

SEQ ID NO: 135430 - RNA, 19 nt, Artificial Sequence
  Description of Artificial Sequence: Synthetic oligonucleotide
  Sense strand starting at position 3515 of SEQ ID NO: 1740
gagggagccuauuaaauaa

SEQ ID NO: 135431 - RNA, 19 nt, Artificial Sequence
  Description of Artificial Sequence: Synthetic oligonucleotide
  Antisense strand to SEQ ID NO: 135430
uuauuuaauaggcucccuc

SEQ ID NO: 135432 - RNA, 19 nt, Artificial Sequence
  Description of Artificial Sequence: Synthetic oligonucleotide
  Sense strand starting at position 3475 of SEQ ID NO: 1740
gggagaaaguaagcauauu

SEQ ID NO: 135433 - RNA, 19 nt, Artificial Sequence
  Description of Artificial Sequence: Synthetic oligonucleotide
  Antisense strand to SEQ ID NO: 135432
aauaugcuuacuuucuccc

SEQ ID NO: 135434 - RNA, 19 nt, Artificial Sequence
  Description of Artificial Sequence: Synthetic oligonucleotide
  Sense strand starting at position 3281 of SEQ ID NO: 1740
ggcauuaacuccuccagau

SEQ ID NO: 135435 - RNA, 19 nt, Artificial Sequence
  Description of Artificial Sequence: Synthetic oligonucleotide
  Antisense strand to SEQ ID NO: 135434
aucuggaggaguuaaugcc

SEQ ID NO: 135436 - RNA, 19 nt, Artificial Sequence
  Description of Artificial Sequence: Synthetic oligonucleotide
  Sense strand starting at position 3035 of SEQ ID NO: 1740
acaucagaguuagagagaa

SEQ ID NO: 135437 - RNA, 19 nt, Artificial Sequence
  Description of Artificial Sequence: Synthetic oligonucleotide
  Antisense strand to SEQ ID NO: 135436
uucucucuaacucugaugu

SEQ ID NO: 135438 - RNA, 19 nt, Artificial Sequence
  Description of Artificial Sequence: Synthetic oligonucleotide
  Sense strand starting at position 2905 of SEQ ID NO: 1740
cuguaauuacguggcaaag

SEQ ID NO: 135439 - RNA, 19 nt, Artificial Sequence
  Description of Artificial Sequence: Synthetic oligonucleotide
  Antisense strand to SEQ ID NO: 135438
cuuugccacguaauuacag

SEQ ID NO: 135440 - RNA, 19 nt, Artificial Sequence
  Description of Artificial Sequence: Synthetic oligonucleotide
  Sense strand starting at position 2904 of SEQ ID NO: 1740
ccuguaauuacguggcaaa

SEQ ID NO: 135441 - RNA, 19 nt, Artificial Sequence
  Description of Artificial Sequence: Synthetic oligonucleotide
  Antisense strand to SEQ ID NO: 135440
uuugccacguaauuacagg

SEQ ID NO: 135442 - RNA, 19 nt, Artificial Sequence
  Description of Artificial Sequence: Synthetic oligonucleotide
  Sense strand starting at position 2894 of SEQ ID NO: 1740
uuaauaggagccuguaauu

SEQ ID NO: 135443 - RNA, 19 nt, Artificial Sequence
  Description of Artificial Sequence: Synthetic oligonucleotide
  Antisense strand to SEQ ID NO: 135442
aauuacaggcuccuauuaa

SEQ ID NO: 135444 - RNA, 19 nt, Artificial Sequence
  Description of Artificial Sequence: Synthetic oligonucleotide
  Sense strand starting at position 2879 of SEQ ID NO: 1740
agggcagaucucgacuuaa

SEQ ID NO: 135445 - RNA, 19 nt, Artificial Sequence
  Description of Artificial Sequence: Synthetic oligonucleotide
  Antisense strand to SEQ ID NO: 135444
uuaagucgagaucugcccu

SEQ ID NO: 135446 - RNA, 19 nt, Artificial Sequence
  Description of Artificial Sequence: Synthetic oligonucleotide
  Sense strand starting at position 2837 of SEQ ID NO: 1740
ggaggcuuuguagggaaua

SEQ ID NO: 135447 - RNA, 19 nt, Artificial Sequence
  Description of Artificial Sequence: Synthetic oligonucleotide
  Antisense strand to SEQ ID NO: 135446
uauucccuacaaagccucc

SEQ ID NO: 135448 - RNA, 19 nt, Artificial Sequence
  Description of Artificial Sequence: Synthetic oligonucleotide
  Sense strand starting at position 2627 of SEQ ID NO: 1740
agagcaggauucucacuuu

SEQ ID NO: 135449 - RNA, 19 nt, Artificial Sequence
  Description of Artificial Sequence: Synthetic oligonucleotide
  Antisense strand to SEQ ID NO: 135448
aaagugagaauccugcucu

SEQ ID NO: 135450 - RNA, 19 nt, Artificial Sequence
  Description of Artificial Sequence: Synthetic oligonucleotide
  Sense strand starting at position 2605 of SEQ ID NO: 1740
ugaugucuugcagauguau

SEQ ID NO: 135451 - RNA, 19 nt, Artificial Sequence
  Description of Artificial Sequence: Synthetic oligonucleotide
  Antisense strand to SEQ ID NO: 135450
auacaucugcaagacauca

SEQ ID NO: 135452 - RNA, 19 nt, Artificial Sequence
  Description of Artificial Sequence: Synthetic oligonucleotide
  Sense strand starting at position 2568 of SEQ ID NO: 1740
gauucucaggagugacuaa

SEQ ID NO: 135453 - RNA, 19 nt, Artificial Sequence
  Description of Artificial Sequence: Synthetic oligonucleotide
  Antisense strand to SEQ ID NO: 135452
uuagucacuccugagaauc

SEQ ID NO: 135454 - RNA, 19 nt, Artificial Sequence
  Description of Artificial Sequence: Synthetic oligonucleotide
  Sense strand starting at position 2565 of SEQ ID NO: 1740
guggauucucaggagugac

SEQ ID NO: 135455 - RNA, 19 nt, Artificial Sequence
  Description of Artificial Sequence: Synthetic oligonucleotide
  Antisense strand to SEQ ID NO: 135454
gucacuccugagaauccac

SEQ ID NO: 135456 - RNA, 19 nt, Artificial Sequence
  Description of Artificial Sequence: Synthetic oligonucleotide
  Sense strand starting at position 2468 of SEQ ID NO: 1740
guuauucccaggcaagagu

SEQ ID NO: 135457 - RNA, 19 nt, Artificial Sequence
  Description of Artificial Sequence: Synthetic oligonucleotide
  Antisense strand to SEQ ID NO: 135456
acucuugccugggaauaac

SEQ ID NO: 135458 - RNA, 19 nt, Artificial Sequence
  Description of Artificial Sequence: Synthetic oligonucleotide
  Sense strand starting at position 2466 of SEQ ID NO: 1740
aaguuauucccaggcaaga

SEQ ID NO: 135459 - RNA, 19 nt, Artificial Sequence
  Description of Artificial Sequence: Synthetic oligonucleotide
  Antisense strand to SEQ ID NO: 135458
ucuugccugggaauaacuu

SEQ ID NO: 135460 - RNA, 19 nt, Artificial Sequence
  Description of Artificial Sequence: Synthetic oligonucleotide
  Sense strand starting at position 2221 of SEQ ID NO: 1740
cggcgcgguccaaagagau

SEQ ID NO: 135461 - RNA, 19 nt, Artificial Sequence
  Description of Artificial Sequence: Synthetic oligonucleotide
  Antisense strand to SEQ ID NO: 135460
aucucuuuggaccgcgccg

SEQ ID NO: 135462 - RNA, 19 nt, Artificial Sequence
  Description of Artificial Sequence: Synthetic oligonucleotide
  Sense strand starting at position 2200 of SEQ ID NO: 1740
uugauuuccugaggccaag

SEQ ID NO: 135463 - RNA, 19 nt, Artificial Sequence
  Description of Artificial Sequence: Synthetic oligonucleotide
  Antisense strand to SEQ ID NO: 135462
cuuggccucaggaaaucaa

SEQ ID NO: 135464 - RNA, 19 nt, Artificial Sequence
  Description of Artificial Sequence: Synthetic oligonucleotide
  Sense strand starting at position 850 of SEQ ID NO: 1740
gagguuggucggugaggau

SEQ ID NO: 135465 - RNA, 19 nt, Artificial Sequence
  Description of Artificial Sequence: Synthetic oligonucleotide
  Antisense strand to SEQ ID NO: 135464
auccucaccgaccaaccuc

SEQ ID NO: 135466 - RNA, 19 nt, Artificial Sequence
  Description of Artificial Sequence: Synthetic oligonucleotide
  Sense strand starting at position 849 of SEQ ID NO: 1740
cgagguuggucggugagga

SEQ ID NO: 135467 - RNA, 19 nt, Artificial Sequence
  Description of Artificial Sequence: Synthetic oligonucleotide
  Antisense strand to SEQ ID NO: 135466
uccucaccgaccaaccucg

SEQ ID NO: 135468 - RNA, 19 nt, Artificial Sequence
  Description of Artificial Sequence: Synthetic oligonucleotide
  Sense strand starting at position 819 of SEQ ID NO: 1740
gcacuagcgaagcgagauu

SEQ ID NO: 135469 - RNA, 19 nt, Artificial Sequence
  Description of Artificial Sequence: Synthetic oligonucleotide
  Antisense strand to SEQ ID NO: 135468
aaucucgcuucgcuagugc

SEQ ID NO: 135470 - RNA, 19 nt, Artificial Sequence
  Description of Artificial Sequence: Synthetic oligonucleotide
  Sense strand starting at position 759 of SEQ ID NO: 1740
gggugaccggucuguuaca

SEQ ID NO: 135471 - RNA, 19 nt, Artificial Sequence
  Description of Artificial Sequence: Synthetic oligonucleotide
  Antisense strand to SEQ ID NO: 135470
uguaacagaccggucaccc

SEQ ID NO: 135472 - RNA, 19 nt, Artificial Sequence
  Description of Artificial Sequence: Synthetic oligonucleotide
  Sense strand starting at position 738 of SEQ ID NO: 1740
acaugucaccugggaugaa

SEQ ID NO: 135473 - RNA, 19 nt, Artificial Sequence
  Description of Artificial Sequence: Synthetic oligonucleotide
  Antisense strand to SEQ ID NO: 135472
uucaucccaggugacaugu

SEQ ID NO: 135474 - RNA, 19 nt, Artificial Sequence
  Description of Artificial Sequence: Synthetic oligonucleotide
  Sense strand starting at position 736 of SEQ ID NO: 1740
ccacaugucaccugggaug

SEQ ID NO: 135475 - RNA, 19 nt, Artificial Sequence
  Description of Artificial Sequence: Synthetic oligonucleotide
  Antisense strand to SEQ ID NO: 135474
caucccaggugacaugugg

SEQ ID NO: 135476 - RNA, 19 nt, Artificial Sequence
  Description of Artificial Sequence: Synthetic oligonucleotide
  Sense strand starting at position 724 of SEQ ID NO: 1740
guacauaucuggccacaug

SEQ ID NO: 135477 - RNA, 19 nt, Artificial Sequence
  Description of Artificial Sequence: Synthetic oligonucleotide
  Antisense strand to SEQ ID NO: 135476
cauguggccagauauguac

SEQ ID NO: 135478 - RNA, 19 nt, Artificial Sequence
  Description of Artificial Sequence: Synthetic oligonucleotide
  Sense strand starting at position 715 of SEQ ID NO: 1740
ggaguaucuguacauaucu

SEQ ID NO: 135479 - RNA, 19 nt, Artificial Sequence
  Description of Artificial Sequence: Synthetic oligonucleotide
  Antisense strand to SEQ ID NO: 135478
agauauguacagauacucc

SEQ ID NO: 135480 - RNA, 19 nt, Artificial Sequence
  Description of Artificial Sequence: Synthetic oligonucleotide
  Sense strand starting at position 712 of SEQ ID NO: 1740
gagggaguaucuguacaua

SEQ ID NO: 135481 - RNA, 19 nt, Artificial Sequence
  Description of Artificial Sequence: Synthetic oligonucleotide
  Antisense strand to SEQ ID NO: 135480
uauguacagauacucccuc

SEQ ID NO: 135482 - RNA, 19 nt, Artificial Sequence
  Description of Artificial Sequence: Synthetic oligonucleotide
  Sense strand starting at position 658 of SEQ ID NO: 1740
agccucauuugagaacuua

SEQ ID NO: 135483 - RNA, 19 nt, Artificial Sequence
  Description of Artificial Sequence: Synthetic oligonucleotide
  Antisense strand to SEQ ID NO: 135482
uaaguucucaaaugaggcu

SEQ ID NO: 135484 - RNA, 19 nt, Artificial Sequence
  Description of Artificial Sequence: Synthetic oligonucleotide
  Sense strand starting at position 632 of SEQ ID NO: 1740
agcaacuacugacauagaa

SEQ ID NO: 135485 - RNA, 19 nt, Artificial Sequence
  Description of Artificial Sequence: Synthetic oligonucleotide
  Antisense strand to SEQ ID NO: 135484
uucuaugucaguaguugcu

SEQ ID NO: 135486 - RNA, 19 nt, Artificial Sequence
  Description of Artificial Sequence: Synthetic oligonucleotide
  Sense strand starting at position 540 of SEQ ID NO: 1740
gucugaaauaggcaacguu

SEQ ID NO: 135487 - RNA, 19 nt, Artificial Sequence
  Description of Artificial Sequence: Synthetic oligonucleotide
  Antisense strand to SEQ ID NO: 135486
aacguugccuauuucagac

SEQ ID NO: 135488 - RNA, 19 nt, Artificial Sequence
  Description of Artificial Sequence: Synthetic oligonucleotide
  Sense strand starting at position 532 of SEQ ID NO: 1740
cuuugagagucugaaauag

SEQ ID NO: 135489 - RNA, 19 nt, Artificial Sequence
  Description of Artificial Sequence: Synthetic oligonucleotide
  Antisense strand to SEQ ID NO: 135488
cuauuucagacucucaaag

SEQ ID NO: 135490 - RNA, 19 nt, Artificial Sequence
  Description of Artificial Sequence: Synthetic oligonucleotide
  Sense strand starting at position 523 of SEQ ID NO: 1740
augucuauucuuugagagu

SEQ ID NO: 135491 - RNA, 19 nt, Artificial Sequence
  Description of Artificial Sequence: Synthetic oligonucleotide
  Antisense strand to SEQ ID NO: 135490
acucucaaagaauagacau

SEQ ID NO: 135492 - RNA, 19 nt, Artificial Sequence
  Description of Artificial Sequence: Synthetic oligonucleotide
  Sense strand starting at position 522 of SEQ ID NO: 1740
uaugucuauucuuugagag

SEQ ID NO: 135493 - RNA, 19 nt, Artificial Sequence
  Description of Artificial Sequence: Synthetic oligonucleotide
  Antisense strand to SEQ ID NO: 135492
cucucaaagaauagacaua

SEQ ID NO: 135494 - RNA, 19 nt, Artificial Sequence
  Description of Artificial Sequence: Synthetic oligonucleotide
  Sense strand starting at position 521 of SEQ ID NO: 1740
guaugucuauucuuugaga

SEQ ID NO: 135495 - RNA, 19 nt, Artificial Sequence
  Description of Artificial Sequence: Synthetic oligonucleotide
  Antisense strand to SEQ ID NO: 135494
ucucaaagaauagacauac

SEQ ID NO: 135496 - RNA, 19 nt, Artificial Sequence
  Description of Artificial Sequence: Synthetic oligonucleotide
  Sense strand starting at position 512 of SEQ ID NO: 1740
guuugauuuguaugucuau

SEQ ID NO: 135497 - RNA, 19 nt, Artificial Sequence
  Description of Artificial Sequence: Synthetic oligonucleotide
  Antisense strand to SEQ ID NO: 135496
auagacauacaaaucaaac

SEQ ID NO: 135498 - RNA, 19 nt, Artificial Sequence
  Description of Artificial Sequence: Synthetic oligonucleotide
  Sense strand starting at position 508 of SEQ ID NO: 1740
ugcaguuugauuuguaugu

SEQ ID NO: 135499 - RNA, 19 nt, Artificial Sequence
  Description of Artificial Sequence: Synthetic oligonucleotide
  Antisense strand to SEQ ID NO: 135498
acauacaaaucaaacugca

SEQ ID NO: 135500 - RNA, 19 nt, Artificial Sequence
  Description of Artificial Sequence: Synthetic oligonucleotide
  Sense strand starting at position 506 of SEQ ID NO: 1740
ugugcaguuugauuuguau

SEQ ID NO: 135501 - RNA, 19 nt, Artificial Sequence
  Description of Artificial Sequence: Synthetic oligonucleotide
  Antisense strand to SEQ ID NO: 135500
auacaaaucaaacugcaca

SEQ ID NO: 135502 - RNA, 19 nt, Artificial Sequence
  Description of Artificial Sequence: Synthetic oligonucleotide
  Sense strand starting at position 495 of SEQ ID NO: 1740
aauuguuucuaugugcagu

SEQ ID NO: 135503 - RNA, 19 nt, Artificial Sequence
  Description of Artificial Sequence: Synthetic oligonucleotide
  Antisense strand to SEQ ID NO: 135502
acugcacauagaaacaauu

SEQ ID NO: 135504 - RNA, 19 nt, Artificial Sequence
  Description of Artificial Sequence: Synthetic oligonucleotide
  Sense strand starting at position 120 of SEQ ID NO: 1740
aagagugccuaugcaaaca

SEQ ID NO: 135505 - RNA, 19 nt, Artificial Sequence
  Description of Artificial Sequence: Synthetic oligonucleotide
  Antisense strand to SEQ ID NO: 135504
uguuugcauaggcacucuu

SEQ ID NO: 135506 - RNA, 19 nt, Artificial Sequence
  Description of Artificial Sequence: Synthetic oligonucleotide
  Sense strand starting at position 3756 of SEQ ID NO: 1741
auggaaacgccuggauauu

SEQ ID NO: 135507 - RNA, 19 nt, Artificial Sequence
  Description of Artificial Sequence: Synthetic oligonucleotide
  Antisense strand to SEQ ID NO: 135506
aauauccaggcguuuccau

SEQ ID NO: 135508 - RNA, 19 nt, Artificial Sequence
  Description of Artificial Sequence: Synthetic oligonucleotide
  Sense strand starting at position 3735 of SEQ ID NO: 1741
cgccuagauuucgcaguau

SEQ ID NO: 135509 - RNA, 19 nt, Artificial Sequence
  Description of Artificial Sequence: Synthetic oligonucleotide
  Antisense strand to SEQ ID NO: 135508
auacugcgaaaucuaggcg

SEQ ID NO: 135510 - RNA, 19 nt, Artificial Sequence
  Description of Artificial Sequence: Synthetic oligonucleotide
  Sense strand starting at position 3734 of SEQ ID NO: 1741
ccgccuagauuucgcagua

SEQ ID NO: 135511 - RNA, 19 nt, Artificial Sequence
  Description of Artificial Sequence: Synthetic oligonucleotide
  Antisense strand to SEQ ID NO: 135510
uacugcgaaaucuaggcgg

SEQ ID NO: 135512 - RNA, 19 nt, Artificial Sequence
  Description of Artificial Sequence: Synthetic oligonucleotide
  Sense strand starting at position 3459 of SEQ ID NO: 1741
gggcaugucaaagagcuuu

SEQ ID NO: 135513 - RNA, 19 nt, Artificial Sequence
  Description of Artificial Sequence: Synthetic oligonucleotide
  Antisense strand to SEQ ID NO: 135512
aaagcucuuugacaugccc

SEQ ID NO: 135514 - RNA, 19 nt, Artificial Sequence
  Description of Artificial Sequence: Synthetic oligonucleotide
  Sense strand starting at position 3123 of SEQ ID NO: 1741
gguaaugcuugccauguuu

SEQ ID NO: 135515 - RNA, 19 nt, Artificial Sequence
  Description of Artificial Sequence: Synthetic oligonucleotide
  Antisense strand to SEQ ID NO: 135514
aaacauggcaagcauuacc

SEQ ID NO: 135516 - RNA, 19 nt, Artificial Sequence
  Description of Artificial Sequence: Synthetic oligonucleotide
  Sense strand starting at position 3122 of SEQ ID NO: 1741
agguaaugcuugccauguu

SEQ ID NO: 135517 - RNA, 19 nt, Artificial Sequence
  Description of Artificial Sequence: Synthetic oligonucleotide
  Antisense strand to SEQ ID NO: 135516
aacauggcaagcauuaccu

SEQ ID NO: 135518 - RNA, 19 nt, Artificial Sequence
  Description of Artificial Sequence: Synthetic oligonucleotide
  Sense strand starting at position 2387 of SEQ ID NO: 1741
uuaggucaaugacaauuua

SEQ ID NO: 135519 - RNA, 19 nt, Artificial Sequence
  Description of Artificial Sequence: Synthetic oligonucleotide
  Antisense strand to SEQ ID NO: 135518
uaaauugucauugaccuaa

SEQ ID NO: 135520 - RNA, 19 nt, Artificial Sequence
  Description of Artificial Sequence: Synthetic oligonucleotide
  Sense strand starting at position 2384 of SEQ ID NO: 1741
cuguuaggucaaugacaau

SEQ ID NO: 135521 - RNA, 19 nt, Artificial Sequence
  Description of Artificial Sequence: Synthetic oligonucleotide
  Antisense strand to SEQ ID NO: 135520
auugucauugaccuaacag

SEQ ID NO: 135522 - RNA, 19 nt, Artificial Sequence
  Description of Artificial Sequence: Synthetic oligonucleotide
  Sense strand starting at position 2378 of SEQ ID NO: 1741
uuaauucuguuaggucaau

SEQ ID NO: 135523 - RNA, 19 nt, Artificial Sequence
  Description of Artificial Sequence: Synthetic oligonucleotide
  Antisense strand to SEQ ID NO: 135522
auugaccuaacagaauuaa

SEQ ID NO: 135524 - RNA, 19 nt, Artificial Sequence
  Description of Artificial Sequence: Synthetic oligonucleotide
  Sense strand starting at position 2376 of SEQ ID NO: 1741
gcuuaauucuguuagguca

SEQ ID NO: 135525 - RNA, 19 nt, Artificial Sequence
  Description of Artificial Sequence: Synthetic oligonucleotide
  Antisense strand to SEQ ID NO: 135524
ugaccuaacagaauuaagc

SEQ ID NO: 135526 - RNA, 19 nt, Artificial Sequence
  Description of Artificial Sequence: Synthetic oligonucleotide
  Sense strand starting at position 2374 of SEQ ID NO: 1741
cagcuuaauucuguuaggu

SEQ ID NO: 135527 - RNA, 19 nt, Artificial Sequence
  Description of Artificial Sequence: Synthetic oligonucleotide
  Antisense strand to SEQ ID NO: 135526
accuaacagaauuaagcug

SEQ ID NO: 135528 - RNA, 19 nt, Artificial Sequence
  Description of Artificial Sequence: Synthetic oligonucleotide
  Sense strand starting at position 2339 of SEQ ID NO: 1741
uuugaaucgugauguucuc

SEQ ID NO: 135529 - RNA, 19 nt, Artificial Sequence
  Description of Artificial Sequence: Synthetic oligonucleotide
  Antisense strand to SEQ ID NO: 135528
gagaacaucacgauucaaa

SEQ ID NO: 135530 - RNA, 19 nt, Artificial Sequence
  Description of Artificial Sequence: Synthetic oligonucleotide
  Sense strand starting at position 2322 of SEQ ID NO: 1741
auuugagaauucuguguuu

SEQ ID NO: 135531 - RNA, 19 nt, Artificial Sequence
  Description of Artificial Sequence: Synthetic oligonucleotide
  Antisense strand to SEQ ID NO: 135530
aaacacagaauucucaaau

SEQ ID NO: 135532 - RNA, 19 nt, Artificial Sequence
  Description of Artificial Sequence: Synthetic oligonucleotide
  Sense strand starting at position 2316 of SEQ ID NO: 1741
ugguccauuugagaauucu

SEQ ID NO: 135533 - RNA, 19 nt, Artificial Sequence
  Description of Artificial Sequence: Synthetic oligonucleotide
  Antisense strand to SEQ ID NO: 135532
agaauucucaaauggacca

SEQ ID NO: 135534 - RNA, 19 nt, Artificial Sequence
  Description of Artificial Sequence: Synthetic oligonucleotide
  Sense strand starting at position 2314 of SEQ ID NO: 1741
acugguccauuugagaauu

SEQ ID NO: 135535 - RNA, 19 nt, Artificial Sequence
  Description of Artificial Sequence: Synthetic oligonucleotide
  Antisense strand to SEQ ID NO: 135534
aauucucaaauggaccagu

SEQ ID NO: 135536 - RNA, 19 nt, Artificial Sequence
  Description of Artificial Sequence: Synthetic oligonucleotide
  Sense strand starting at position 2183 of SEQ ID NO: 1741
gucugugucucguggauuu

SEQ ID NO: 135537 - RNA, 19 nt, Artificial Sequence
  Description of Artificial Sequence: Synthetic oligonucleotide
  Antisense strand to SEQ ID NO: 135536
aaauccacgagacacagac

SEQ ID NO: 135538 - RNA, 19 nt, Artificial Sequence
  Description of Artificial Sequence: Synthetic oligonucleotide
  Sense strand starting at position 2181 of SEQ ID NO: 1741
augucugugucucguggau

SEQ ID NO: 135539 - RNA, 19 nt, Artificial Sequence
  Description of Artificial Sequence: Synthetic oligonucleotide
  Antisense strand to SEQ ID NO: 135538
auccacgagacacagacau

SEQ ID NO: 135540 - RNA, 19 nt, Artificial Sequence
  Description of Artificial Sequence: Synthetic oligonucleotide
  Sense strand starting at position 1458 of SEQ ID NO: 1741
ccgcuuaccugugaaagca

SEQ ID NO: 135541 - RNA, 19 nt, Artificial Sequence
  Description of Artificial Sequence: Synthetic oligonucleotide
  Antisense strand to SEQ ID NO: 135540
ugcuuucacagguaagcgg

SEQ ID NO: 135542 - RNA, 19 nt, Artificial Sequence
  Description of Artificial Sequence: Synthetic oligonucleotide
  Sense strand starting at position 1356 of SEQ ID NO: 1741
gggagucgacaauggugau

SEQ ID NO: 135543 - RNA, 19 nt, Artificial Sequence
  Description of Artificial Sequence: Synthetic oligonucleotide
  Antisense strand to SEQ ID NO: 135542
aucaccauugucgacuccc

SEQ ID NO: 135544 - RNA, 19 nt, Artificial Sequence
  Description of Artificial Sequence: Synthetic oligonucleotide
  Sense strand starting at position 1350 of SEQ ID NO: 1741
ggugaagggagucgacaau

SEQ ID NO: 135545 - RNA, 19 nt, Artificial Sequence
  Description of Artificial Sequence: Synthetic oligonucleotide
  Antisense strand to SEQ ID NO: 135544
auugucgacucccuucacc

SEQ ID NO: 135546 - RNA, 19 nt, Artificial Sequence
  Description of Artificial Sequence: Synthetic oligonucleotide
  Sense strand starting at position 1186 of SEQ ID NO: 1741
ggaucagccuugcauauga

SEQ ID NO: 135547 - RNA, 19 nt, Artificial Sequence
  Description of Artificial Sequence: Synthetic oligonucleotide
  Antisense strand to SEQ ID NO: 135546
ucauaugcaaggcugaucc

SEQ ID NO: 135548 - RNA, 19 nt, Artificial Sequence
  Description of Artificial Sequence: Synthetic oligonucleotide
  Sense strand starting at position 1034 of SEQ ID NO: 1741
gccucacuugugggaaucu

SEQ ID NO: 135549 - RNA, 19 nt, Artificial Sequence
  Description of Artificial Sequence: Synthetic oligonucleotide
  Antisense strand to SEQ ID NO: 135548
agauucccacaagugaggc

SEQ ID NO: 135550 - RNA, 19 nt, Artificial Sequence
  Description of Artificial Sequence: Synthetic oligonucleotide
  Sense strand starting at position 1032 of SEQ ID NO: 1741
cagccucacuugugggaau

SEQ ID NO: 135551 - RNA, 19 nt, Artificial Sequence
  Description of Artificial Sequence: Synthetic oligonucleotide
  Antisense strand to SEQ ID NO: 135550
auucccacaagugaggcug

SEQ ID NO: 135552 - RNA, 19 nt, Artificial Sequence
  Description of Artificial Sequence: Synthetic oligonucleotide
  Sense strand starting at position 653 of SEQ ID NO: 1741
ucuggcugucuggaagagu

SEQ ID NO: 135553 - RNA, 19 nt, Artificial Sequence
  Description of Artificial Sequence: Synthetic oligonucleotide
  Antisense strand to SEQ ID NO: 135552
acucuuccagacagccaga

SEQ ID NO: 135554 - RNA, 19 nt, Artificial Sequence
  Description of Artificial Sequence: Synthetic oligonucleotide
  Sense strand starting at position 623 of SEQ ID NO: 1741
aguuucuuccugcagcaua

SEQ ID NO: 135555 - RNA, 19 nt, Artificial Sequence
  Description of Artificial Sequence: Synthetic oligonucleotide
  Antisense strand to SEQ ID NO: 135554
uaugcugcaggaagaaacu

SEQ ID NO: 135556 - RNA, 19 nt, Artificial Sequence
  Description of Artificial Sequence: Synthetic oligonucleotide
  Sense strand starting at position 621 of SEQ ID NO: 1741
ccaguuucuuccugcagca

SEQ ID NO: 135557 - RNA, 19 nt, Artificial Sequence
  Description of Artificial Sequence: Synthetic oligonucleotide
  Antisense strand to SEQ ID NO: 135556
ugcugcaggaagaaacugg

SEQ ID NO: 135558 - RNA, 19 nt, Artificial Sequence
  Description of Artificial Sequence: Synthetic oligonucleotide
  Sense strand starting at position 596 of SEQ ID NO: 1741
gcacucacucggugggauu

SEQ ID NO: 135559 - RNA, 19 nt, Artificial Sequence
  Description of Artificial Sequence: Synthetic oligonucleotide
  Antisense strand to SEQ ID NO: 135558
aaucccaccgagugagugc

SEQ ID NO: 135560 - RNA, 19 nt, Artificial Sequence
  Description of Artificial Sequence: Synthetic oligonucleotide
  Sense strand starting at position 3791 of SEQ ID NO: 1742
cuucguccugaugagaaca

SEQ ID NO: 135561 - RNA, 19 nt, Artificial Sequence
  Description of Artificial Sequence: Synthetic oligonucleotide
  Antisense strand to SEQ ID NO: 135560
uguucucaucaggacgaag

SEQ ID NO: 135562 - RNA, 19 nt, Artificial Sequence
  Description of Artificial Sequence: Synthetic oligonucleotide
  Sense strand starting at position 3788 of SEQ ID NO: 1742
uuucuucguccugaugaga

SEQ ID NO: 135563 - RNA, 19 nt, Artificial Sequence
  Description of Artificial Sequence: Synthetic oligonucleotide
  Antisense strand to SEQ ID NO: 135562
ucucaucaggacgaagaaa

SEQ ID NO: 135564 - RNA, 19 nt, Artificial Sequence
  Description of Artificial Sequence: Synthetic oligonucleotide
  Sense strand starting at position 3770 of SEQ ID NO: 1742
gcuuguccuugccuaauuu

SEQ ID NO: 135565 - RNA, 19 nt, Artificial Sequence
  Description of Artificial Sequence: Synthetic oligonucleotide
  Antisense strand to SEQ ID NO: 135564
aaauuaggcaaggacaagc

SEQ ID NO: 135566 - RNA, 19 nt, Artificial Sequence
  Description of Artificial Sequence: Synthetic oligonucleotide
  Sense strand starting at position 3642 of SEQ ID NO: 1742
gagaaagggucuguuguuu

SEQ ID NO: 135567 - RNA, 19 nt, Artificial Sequence
  Description of Artificial Sequence: Synthetic oligonucleotide
  Antisense strand to SEQ ID NO: 135566
aaacaacagacccuuucuc

SEQ ID NO: 135568 - RNA, 19 nt, Artificial Sequence
  Description of Artificial Sequence: Synthetic oligonucleotide
  Sense strand starting at position 3641 of SEQ ID NO: 1742
agagaaagggucuguuguu

SEQ ID NO: 135569 - RNA, 19 nt, Artificial Sequence
  Description of Artificial Sequence: Synthetic oligonucleotide
  Antisense strand to SEQ ID NO: 135568
aacaacagacccuuucucu

SEQ ID NO: 135570 - RNA, 19 nt, Artificial Sequence
  Description of Artificial Sequence: Synthetic oligonucleotide
  Sense strand starting at position 2650 of SEQ ID NO: 1742
uuuagaguugcuugaaauu

SEQ ID NO: 135571 - RNA, 19 nt, Artificial Sequence
  Description of Artificial Sequence: Synthetic oligonucleotide
  Antisense strand to SEQ ID NO: 135570
aauuucaagcaacucuaaa

SEQ ID NO: 135572 - RNA, 19 nt, Artificial Sequence
  Description of Artificial Sequence: Synthetic oligonucleotide
  Sense strand starting at position 2648 of SEQ ID NO: 1742
ccuuuagaguugcuugaaa

SEQ ID NO: 135573 - RNA, 19 nt, Artificial Sequence
  Description of Artificial Sequence: Synthetic oligonucleotide
  Antisense strand to SEQ ID NO: 135572
uuucaagcaacucuaaagg

SEQ ID NO: 135574 - RNA, 19 nt, Artificial Sequence
  Description of Artificial Sequence: Synthetic oligonucleotide
  Sense strand starting at position 2562 of SEQ ID NO: 1742
cggcaaauaucuucuuccu

SEQ ID NO: 135575 - RNA, 19 nt, Artificial Sequence
  Description of Artificial Sequence: Synthetic oligonucleotide
  Antisense strand to SEQ ID NO: 135574
aggaagaagauauuugccg

SEQ ID NO: 135576 - RNA, 19 nt, Artificial Sequence
  Description of Artificial Sequence: Synthetic oligonucleotide
  Sense strand starting at position 2515 of SEQ ID NO: 1742
gcugcuucucccuuugcaa

SEQ ID NO: 135577 - RNA, 19 nt, Artificial Sequence
  Description of Artificial Sequence: Synthetic oligonucleotide
  Antisense strand to SEQ ID NO: 135576
uugcaaagggagaagcagc

SEQ ID NO: 135578 - RNA, 19 nt, Artificial Sequence
  Description of Artificial Sequence: Synthetic oligonucleotide
  Sense strand starting at position 2452 of SEQ ID NO: 1742
aggagaacauuagaauaau

SEQ ID NO: 135579 - RNA, 19 nt, Artificial Sequence
  Description of Artificial Sequence: Synthetic oligonucleotide
  Antisense strand to SEQ ID NO: 135578
auuauucuaauguucuccu

SEQ ID NO: 135580 - RNA, 19 nt, Artificial Sequence
  Description of Artificial Sequence: Synthetic oligonucleotide
  Sense strand starting at position 2296 of SEQ ID NO: 1742
cucagaucaggccaaguau

SEQ ID NO: 135581 - RNA, 19 nt, Artificial Sequence
  Description of Artificial Sequence: Synthetic oligonucleotide
  Antisense strand to SEQ ID NO: 135580
auacuuggccugaucugag

SEQ ID NO: 135582 - RNA, 19 nt, Artificial Sequence
  Description of Artificial Sequence: Synthetic oligonucleotide
  Sense strand starting at position 2242 of SEQ ID NO: 1742
aacaaauguguauguguca

SEQ ID NO: 135583 - RNA, 19 nt, Artificial Sequence
  Description of Artificial Sequence: Synthetic oligonucleotide
  Antisense strand to SEQ ID NO: 135582
ugacacauacacauuuguu

SEQ ID NO: 135584 - RNA, 19 nt, Artificial Sequence
  Description of Artificial Sequence: Synthetic oligonucleotide
  Sense strand starting at position 2236 of SEQ ID NO: 1742
ucgguaaacaaauguguau

SEQ ID NO: 135585 - RNA, 19 nt, Artificial Sequence
  Description of Artificial Sequence: Synthetic oligonucleotide
  Antisense strand to SEQ ID NO: 135584
auacacauuuguuuaccga

SEQ ID NO: 135586 - RNA, 19 nt, Artificial Sequence
  Description of Artificial Sequence: Synthetic oligonucleotide
  Sense strand starting at position 2228 of SEQ ID NO: 1742
ucagucguucgguaaacaa

SEQ ID NO: 135587 - RNA, 19 nt, Artificial Sequence
  Description of Artificial Sequence: Synthetic oligonucleotide
  Antisense strand to SEQ ID NO: 135586
uuguuuaccgaacgacuga

SEQ ID NO: 135588 - RNA, 19 nt, Artificial Sequence
  Description of Artificial Sequence: Synthetic oligonucleotide
  Sense strand starting at position 2183 of SEQ ID NO: 1742
ccgcaaugucccuagcaac

SEQ ID NO: 135589 - RNA, 19 nt, Artificial Sequence
  Description of Artificial Sequence: Synthetic oligonucleotide
  Antisense strand to SEQ ID NO: 135588
guugcuagggacauugcgg

SEQ ID NO: 135590 - RNA, 19 nt, Artificial Sequence
  Description of Artificial Sequence: Synthetic oligonucleotide
  Sense strand starting at position 1818 of SEQ ID NO: 1742
auucguuaccugcagagca

SEQ ID NO: 135591 - RNA, 19 nt, Artificial Sequence
  Description of Artificial Sequence: Synthetic oligonucleotide
  Antisense strand to SEQ ID NO: 135590
ugcucugcagguaacgaau

SEQ ID NO: 135592 - RNA, 19 nt, Artificial Sequence
  Description of Artificial Sequence: Synthetic oligonucleotide
  Sense strand starting at position 1816 of SEQ ID NO: 1742
ggauucguuaccugcagag

SEQ ID NO: 135593 - RNA, 19 nt, Artificial Sequence
  Description of Artificial Sequence: Synthetic oligonucleotide
  Antisense strand to SEQ ID NO: 135592
cucugcagguaacgaaucc

SEQ ID NO: 135594 - RNA, 19 nt, Artificial Sequence
  Description of Artificial Sequence: Synthetic oligonucleotide
  Sense strand starting at position 1815 of SEQ ID NO: 1742
gggauucguuaccugcaga

SEQ ID NO: 135595 - RNA, 19 nt, Artificial Sequence
  Description of Artificial Sequence: Synthetic oligonucleotide
  Antisense strand to SEQ ID NO: 135594
ucugcagguaacgaauccc

SEQ ID NO: 135596 - RNA, 19 nt, Artificial Sequence
  Description of Artificial Sequence: Synthetic oligonucleotide
  Sense strand starting at position 1334 of SEQ ID NO: 1742
cugccauucggaggaaaua

SEQ ID NO: 135597 - RNA, 19 nt, Artificial Sequence
  Description of Artificial Sequence: Synthetic oligonucleotide
  Antisense strand to SEQ ID NO: 135596
uauuuccuccgaauggcag

SEQ ID NO: 135598 - RNA, 19 nt, Artificial Sequence
  Description of Artificial Sequence: Synthetic oligonucleotide
  Sense strand starting at position 1212 of SEQ ID NO: 1742
cugguugugggucaacaaa

SEQ ID NO: 135599 - RNA, 19 nt, Artificial Sequence
  Description of Artificial Sequence: Synthetic oligonucleotide
  Antisense strand to SEQ ID NO: 135598
uuuguugacccacaaccag

SEQ ID NO: 135600 - RNA, 19 nt, Artificial Sequence
  Description of Artificial Sequence: Synthetic oligonucleotide
  Sense strand starting at position 1162 of SEQ ID NO: 1742
gucauuugugugcguuaag

SEQ ID NO: 135601 - RNA, 19 nt, Artificial Sequence
  Description of Artificial Sequence: Synthetic oligonucleotide
  Antisense strand to SEQ ID NO: 135600
cuuaacgcacacaaaugac

SEQ ID NO: 135602 - RNA, 19 nt, Artificial Sequence
  Description of Artificial Sequence: Synthetic oligonucleotide
  Sense strand starting at position 1161 of SEQ ID NO: 1742
ugucauuugugugcguuaa

SEQ ID NO: 135603 - RNA, 19 nt, Artificial Sequence
  Description of Artificial Sequence: Synthetic oligonucleotide
  Antisense strand to SEQ ID NO: 135602
uuaacgcacacaaaugaca

SEQ ID NO: 135604 - RNA, 19 nt, Artificial Sequence
  Description of Artificial Sequence: Synthetic oligonucleotide
  Sense strand starting at position 1085 of SEQ ID NO: 1742
agcauugaguagucauauu

SEQ ID NO: 135605 - RNA, 19 nt, Artificial Sequence
  Description of Artificial Sequence: Synthetic oligonucleotide
  Antisense strand to SEQ ID NO: 135604
aauaugacuacucaaugcu

SEQ ID NO: 135606 - RNA, 19 nt, Artificial Sequence
  Description of Artificial Sequence: Synthetic oligonucleotide
  Sense strand starting at position 1082 of SEQ ID NO: 1742
caaagcauugaguagucau

SEQ ID NO: 135607 - RNA, 19 nt, Artificial Sequence
  Description of Artificial Sequence: Synthetic oligonucleotide
  Antisense strand to SEQ ID NO: 135606
augacuacucaaugcuuug

SEQ ID NO: 135608 - RNA, 19 nt, Artificial Sequence
  Description of Artificial Sequence: Synthetic oligonucleotide
  Sense strand starting at position 914 of SEQ ID NO: 1742
agguuucuucagggcagua

SEQ ID NO: 135609 - RNA, 19 nt, Artificial Sequence
  Description of Artificial Sequence: Synthetic oligonucleotide
  Antisense strand to SEQ ID NO: 135608
uacugcccugaagaaaccu

SEQ ID NO: 135610 - RNA, 19 nt, Artificial Sequence
  Description of Artificial Sequence: Synthetic oligonucleotide
  Sense strand starting at position 904 of SEQ ID NO: 1742
ccaucuaucuagguuucuu

SEQ ID NO: 135611 - RNA, 19 nt, Artificial Sequence
  Description of Artificial Sequence: Synthetic oligonucleotide
  Antisense strand to SEQ ID NO: 135610
aagaaaccuagauagaugg

SEQ ID NO: 135612 - RNA, 19 nt, Artificial Sequence
  Description of Artificial Sequence: Synthetic oligonucleotide
  Sense strand starting at position 806 of SEQ ID NO: 1742
gcaggaauuagugacuuuc

SEQ ID NO: 135613 - RNA, 19 nt, Artificial Sequence
  Description of Artificial Sequence: Synthetic oligonucleotide
  Antisense strand to SEQ ID NO: 135612
gaaagucacuaauuccugc

SEQ ID NO: 135614 - RNA, 19 nt, Artificial Sequence
  Description of Artificial Sequence: Synthetic oligonucleotide
  Sense strand starting at position 797 of SEQ ID NO: 1742
gagucugcagcaggaauua

SEQ ID NO: 135615 - RNA, 19 nt, Artificial Sequence
  Description of Artificial Sequence: Synthetic oligonucleotide
  Antisense strand to SEQ ID NO: 135614
uaauuccugcugcagacuc

SEQ ID NO: 135616 - RNA, 19 nt, Artificial Sequence
  Description of Artificial Sequence: Synthetic oligonucleotide
  Sense strand starting at position 795 of SEQ ID NO: 1742
cugagucugcagcaggaau

SEQ ID NO: 135617 - RNA, 19 nt, Artificial Sequence
  Description of Artificial Sequence: Synthetic oligonucleotide
  Antisense strand to SEQ ID NO: 135616
auuccugcugcagacucag

SEQ ID NO: 135618 - RNA, 19 nt, Artificial Sequence
  Description of Artificial Sequence: Synthetic oligonucleotide
  Sense strand starting at position 667 of SEQ ID NO: 1742
uccaaauggccuuaugcau

SEQ ID NO: 135619 - RNA, 19 nt, Artificial Sequence
  Description of Artificial Sequence: Synthetic oligonucleotide
  Antisense strand to SEQ ID NO: 135618
augcauaaggccauuugga

SEQ ID NO: 135620 - RNA, 19 nt, Artificial Sequence
  Description of Artificial Sequence: Synthetic oligonucleotide
  Sense strand starting at position 635 of SEQ ID NO: 1742
gguggacucagagguaaca

SEQ ID NO: 135621 - RNA, 19 nt, Artificial Sequence
  Description of Artificial Sequence: Synthetic oligonucleotide
  Antisense strand to SEQ ID NO: 135620
uguuaccucugaguccacc

SEQ ID NO: 135622 - RNA, 19 nt, Artificial Sequence
  Description of Artificial Sequence: Synthetic oligonucleotide
  Sense strand starting at position 465 of SEQ ID NO: 1742
aguagaugcaugcaaagaa

SEQ ID NO: 135623 - RNA, 19 nt, Artificial Sequence
  Description of Artificial Sequence: Synthetic oligonucleotide
  Antisense strand to SEQ ID NO: 135622
uucuuugcaugcaucuacu

SEQ ID NO: 135624 - RNA, 19 nt, Artificial Sequence
  Description of Artificial Sequence: Synthetic oligonucleotide
  Sense strand starting at position 463 of SEQ ID NO: 1742
agaguagaugcaugcaaag

SEQ ID NO: 135625 - RNA, 19 nt, Artificial Sequence
  Description of Artificial Sequence: Synthetic oligonucleotide
  Antisense strand to SEQ ID NO: 135624
cuuugcaugcaucuacucu

SEQ ID NO: 135626 - RNA, 19 nt, Artificial Sequence
  Description of Artificial Sequence: Synthetic oligonucleotide
  Sense strand starting at position 449 of SEQ ID NO: 1742
aggauauaugcuggagagu

SEQ ID NO: 135627 - RNA, 19 nt, Artificial Sequence
  Description of Artificial Sequence: Synthetic oligonucleotide
  Antisense strand to SEQ ID NO: 135626
acucuccagcauauauccu

SEQ ID NO: 135628 - RNA, 19 nt, Artificial Sequence
  Description of Artificial Sequence: Synthetic oligonucleotide
  Sense strand starting at position 438 of SEQ ID NO: 1742
ggaggcucuggaggauaua

SEQ ID NO: 135629 - RNA, 19 nt, Artificial Sequence
  Description of Artificial Sequence: Synthetic oligonucleotide
  Antisense strand to SEQ ID NO: 135628
uauauccuccagagccucc

SEQ ID NO: 135630 - RNA, 19 nt, Artificial Sequence
  Description of Artificial Sequence: Synthetic oligonucleotide
  Sense strand starting at position 361 of SEQ ID NO: 1742
gagugagacccuggcugaa

SEQ ID NO: 135631 - RNA, 19 nt, Artificial Sequence
  Description of Artificial Sequence: Synthetic oligonucleotide
  Antisense strand to SEQ ID NO: 135630
uucagccagggucucacuc

SEQ ID NO: 135632 - RNA, 19 nt, Artificial Sequence
  Description of Artificial Sequence: Synthetic oligonucleotide
  Sense strand starting at position 92 of SEQ ID NO: 1742
ugcuguagagaauauacua

SEQ ID NO: 135633 - RNA, 19 nt, Artificial Sequence
  Description of Artificial Sequence: Synthetic oligonucleotide
  Antisense strand to SEQ ID NO: 135632
uaguauauucucuacagca

SEQ ID NO: 135634 - RNA, 19 nt, Artificial Sequence
  Description of Artificial Sequence: Synthetic oligonucleotide
  Sense strand starting at position 87 of SEQ ID NO: 1742
cauauugcuguagagaaua

SEQ ID NO: 135635 - RNA, 19 nt, Artificial Sequence
  Description of Artificial Sequence: Synthetic oligonucleotide
  Antisense strand to SEQ ID NO: 135634
uauucucuacagcaauaug

SEQ ID NO: 135636 - RNA, 19 nt, Artificial Sequence
  Description of Artificial Sequence: Synthetic oligonucleotide
  Sense strand starting at position 42 of SEQ ID NO: 1742
ucgagaugccagcaguauu

SEQ ID NO: 135637 - RNA, 19 nt, Artificial Sequence
  Description of Artificial Sequence: Synthetic oligonucleotide
  Antisense strand to SEQ ID NO: 135636
aauacugcuggcaucucga

SEQ ID NO: 135638 - RNA, 19 nt, Artificial Sequence
  Description of Artificial Sequence: Synthetic oligonucleotide
  Sense strand starting at position 40 of SEQ ID NO: 1742
ggucgagaugccagcagua

SEQ ID NO: 135639 - RNA, 19 nt, Artificial Sequence
  Description of Artificial Sequence: Synthetic oligonucleotide
  Antisense strand to SEQ ID NO: 135638
uacugcuggcaucucgacc

SEQ ID NO: 135640 - RNA, 19 nt, Artificial Sequence
  Description of Artificial Sequence: Synthetic oligonucleotide
  Sense strand starting at position 3890 of SEQ ID NO: 1743
gugagauaucauugucaaa

SEQ ID NO: 135641 - RNA, 19 nt, Artificial Sequence
  Description of Artificial Sequence: Synthetic oligonucleotide
  Antisense strand to SEQ ID NO: 135640
uuugacaaugauaucucac

SEQ ID NO: 135642 - RNA, 19 nt, Artificial Sequence
  Description of Artificial Sequence: Synthetic oligonucleotide
  Sense strand starting at position 3011 of SEQ ID NO: 1743
cauguauuuguuugagagc

SEQ ID NO: 135643 - RNA, 19 nt, Artificial Sequence
  Description of Artificial Sequence: Synthetic oligonucleotide
  Antisense strand to SEQ ID NO: 135642
gcucucaaacaaauacaug

SEQ ID NO: 135644 - RNA, 19 nt, Artificial Sequence
  Description of Artificial Sequence: Synthetic oligonucleotide
  Sense strand starting at position 2921 of SEQ ID NO: 1743
ucauguaugccacaguuua

SEQ ID NO: 135645 - RNA, 19 nt, Artificial Sequence
  Description of Artificial Sequence: Synthetic oligonucleotide
  Antisense strand to SEQ ID NO: 135644
uaaacuguggcauacauga

SEQ ID NO: 135646 - RNA, 19 nt, Artificial Sequence
  Description of Artificial Sequence: Synthetic oligonucleotide
  Sense strand starting at position 2830 of SEQ ID NO: 1743
ucagguagcauguaacaga

SEQ ID NO: 135647 - RNA, 19 nt, Artificial Sequence
  Description of Artificial Sequence: Synthetic oligonucleotide
  Antisense strand to SEQ ID NO: 135646
ucuguuacaugcuaccuga

SEQ ID NO: 135648 - RNA, 19 nt, Artificial Sequence
  Description of Artificial Sequence: Synthetic oligonucleotide
  Sense strand starting at position 2818 of SEQ ID NO: 1743
cgagguucauccucaggua

SEQ ID NO: 135649 - RNA, 19 nt, Artificial Sequence
  Description of Artificial Sequence: Synthetic oligonucleotide
  Antisense strand to SEQ ID NO: 135648
uaccugaggaugaaccucg

SEQ ID NO: 135650 - RNA, 19 nt, Artificial Sequence
  Description of Artificial Sequence: Synthetic oligonucleotide
  Sense strand starting at position 2724 of SEQ ID NO: 1743
gucuacuucugucucuaua

SEQ ID NO: 135651 - RNA, 19 nt, Artificial Sequence
  Description of Artificial Sequence: Synthetic oligonucleotide
  Antisense strand to SEQ ID NO: 135650
uauagagacagaaguagac

SEQ ID NO: 135652 - RNA, 19 nt, Artificial Sequence
  Description of Artificial Sequence: Synthetic oligonucleotide
  Sense strand starting at position 2672 of SEQ ID NO: 1743
ugagaaguuucuucccaau

SEQ ID NO: 135653 - RNA, 19 nt, Artificial Sequence
  Description of Artificial Sequence: Synthetic oligonucleotide
  Antisense strand to SEQ ID NO: 135652
auugggaagaaacuucuca

SEQ ID NO: 135654 - RNA, 19 nt, Artificial Sequence
  Description of Artificial Sequence: Synthetic oligonucleotide
  Sense strand starting at position 2671 of SEQ ID NO: 1743
uugagaaguuucuucccaa

SEQ ID NO: 135655 - RNA, 19 nt, Artificial Sequence
  Description of Artificial Sequence: Synthetic oligonucleotide
  Antisense strand to SEQ ID NO: 135654
uugggaagaaacuucucaa

SEQ ID NO: 135656 - RNA, 19 nt, Artificial Sequence
  Description of Artificial Sequence: Synthetic oligonucleotide
  Sense strand starting at position 2567 of SEQ ID NO: 1743
ugggcauuucaguggcauu

SEQ ID NO: 135657 - RNA, 19 nt, Artificial Sequence
  Description of Artificial Sequence: Synthetic oligonucleotide
  Antisense strand to SEQ ID NO: 135656
aaugccacugaaaugccca

SEQ ID NO: 135658 - RNA, 19 nt, Artificial Sequence
  Description of Artificial Sequence: Synthetic oligonucleotide
  Sense strand starting at position 2487 of SEQ ID NO: 1743
uggcguugucugaguaguu

SEQ ID NO: 135659 - RNA, 19 nt, Artificial Sequence
  Description of Artificial Sequence: Synthetic oligonucleotide
  Antisense strand to SEQ ID NO: 135658
aacuacucagacaacgcca

SEQ ID NO: 135660 - RNA, 19 nt, Artificial Sequence
  Description of Artificial Sequence: Synthetic oligonucleotide
  Sense strand starting at position 2481 of SEQ ID NO: 1743
auaauuuggcguugucuga

SEQ ID NO: 135661 - RNA, 19 nt, Artificial Sequence
  Description of Artificial Sequence: Synthetic oligonucleotide
  Antisense strand to SEQ ID NO: 135660
ucagacaacgccaaauuau

SEQ ID NO: 135662 - RNA, 19 nt, Artificial Sequence
  Description of Artificial Sequence: Synthetic oligonucleotide
  Sense strand starting at position 2464 of SEQ ID NO: 1743
guagguugagauugucaau

SEQ ID NO: 135663 - RNA, 19 nt, Artificial Sequence
  Description of Artificial Sequence: Synthetic oligonucleotide
  Antisense strand to SEQ ID NO: 135662
auugacaaucucaaccuac

SEQ ID NO: 135664 - RNA, 19 nt, Artificial Sequence
  Description of Artificial Sequence: Synthetic oligonucleotide
  Sense strand starting at position 2411 of SEQ ID NO: 1743
ugaccugagaauuggccua

SEQ ID NO: 135665 - RNA, 19 nt, Artificial Sequence
  Description of Artificial Sequence: Synthetic oligonucleotide
  Antisense strand to SEQ ID NO: 135664
uaggccaauucucagguca

SEQ ID NO: 135666 - RNA, 19 nt, Artificial Sequence
  Description of Artificial Sequence: Synthetic oligonucleotide
  Sense strand starting at position 2405 of SEQ ID NO: 1743
gcugccugaccugagaauu

SEQ ID NO: 135667 - RNA, 19 nt, Artificial Sequence
  Description of Artificial Sequence: Synthetic oligonucleotide
  Antisense strand to SEQ ID NO: 135666
aauucucaggucaggcagc

SEQ ID NO: 135668 - RNA, 19 nt, Artificial Sequence
  Description of Artificial Sequence: Synthetic oligonucleotide
  Sense strand starting at position 2404 of SEQ ID NO: 1743
ugcugccugaccugagaau

SEQ ID NO: 135669 - RNA, 19 nt, Artificial Sequence
  Description of Artificial Sequence: Synthetic oligonucleotide
  Antisense strand to SEQ ID NO: 135668
auucucaggucaggcagca

SEQ ID NO: 135670 - RNA, 19 nt, Artificial Sequence
  Description of Artificial Sequence: Synthetic oligonucleotide
  Sense strand starting at position 2328 of SEQ ID NO: 1743
gagaauguuccuggucugu

SEQ ID NO: 135671 - RNA, 19 nt, Artificial Sequence
  Description of Artificial Sequence: Synthetic oligonucleotide
  Antisense strand to SEQ ID NO: 135670
acagaccaggaacauucuc

SEQ ID NO: 135672 - RNA, 19 nt, Artificial Sequence
  Description of Artificial Sequence: Synthetic oligonucleotide
  Sense strand starting at position 2326 of SEQ ID NO: 1743
augagaauguuccuggucu

SEQ ID NO: 135673 - RNA, 19 nt, Artificial Sequence
  Description of Artificial Sequence: Synthetic oligonucleotide
  Antisense strand to SEQ ID NO: 135672
agaccaggaacauucucau

SEQ ID NO: 135674 - RNA, 19 nt, Artificial Sequence
  Description of Artificial Sequence: Synthetic oligonucleotide
  Sense strand starting at position 2324 of SEQ ID NO: 1743
ccaugagaauguuccuggu

SEQ ID NO: 135675 - RNA, 19 nt, Artificial Sequence
  Description of Artificial Sequence: Synthetic oligonucleotide
  Antisense strand to SEQ ID NO: 135674
accaggaacauucucaugg

SEQ ID NO: 135676 - RNA, 19 nt, Artificial Sequence
  Description of Artificial Sequence: Synthetic oligonucleotide
  Sense strand starting at position 2305 of SEQ ID NO: 1743
ggcccaaugugagcuaaca

SEQ ID NO: 135677 - RNA, 19 nt, Artificial Sequence
  Description of Artificial Sequence: Synthetic oligonucleotide
  Antisense strand to SEQ ID NO: 135676
uguuagcucacauugggcc

SEQ ID NO: 135678 - RNA, 19 nt, Artificial Sequence
  Description of Artificial Sequence: Synthetic oligonucleotide
  Sense strand starting at position 2230 of SEQ ID NO: 1743
ggacacucuuucuuguagu

SEQ ID NO: 135679 - RNA, 19 nt, Artificial Sequence
  Description of Artificial Sequence: Synthetic oligonucleotide
  Antisense strand to SEQ ID NO: 135678
acuacaagaaagagugucc

SEQ ID NO: 135680 - RNA, 19 nt, Artificial Sequence
  Description of Artificial Sequence: Synthetic oligonucleotide
  Sense strand starting at position 1534 of SEQ ID NO: 1743
cgugcaccgcuccuuuaaa

SEQ ID NO: 135681 - RNA, 19 nt, Artificial Sequence
  Description of Artificial Sequence: Synthetic oligonucleotide
  Antisense strand to SEQ ID NO: 135680
uuuaaaggagcggugcacg

SEQ ID NO: 135682 - RNA, 19 nt, Artificial Sequence
  Description of Artificial Sequence: Synthetic oligonucleotide
  Sense strand starting at position 1469 of SEQ ID NO: 1743
ggaggucuccggcgagaga

SEQ ID NO: 135683 - RNA, 19 nt, Artificial Sequence
  Description of Artificial Sequence: Synthetic oligonucleotide
  Antisense strand to SEQ ID NO: 135682
ucucucgccggagaccucc

SEQ ID NO: 135684 - RNA, 19 nt, Artificial Sequence
  Description of Artificial Sequence: Synthetic oligonucleotide
  Sense strand starting at position 1301 of SEQ ID NO: 1743
gcuggaaaugccugauaaa

SEQ ID NO: 135685 - RNA, 19 nt, Artificial Sequence
  Description of Artificial Sequence: Synthetic oligonucleotide
  Antisense strand to SEQ ID NO: 135684
uuuaucaggcauuuccagc

SEQ ID NO: 135686 - RNA, 19 nt, Artificial Sequence
  Description of Artificial Sequence: Synthetic oligonucleotide
  Sense strand starting at position 1010 of SEQ ID NO: 1743
uguaaauagggaugcaguu

SEQ ID NO: 135687 - RNA, 19 nt, Artificial Sequence
  Description of Artificial Sequence: Synthetic oligonucleotide
  Antisense strand to SEQ ID NO: 135686
aacugcaucccuauuuaca

SEQ ID NO: 135688 - RNA, 19 nt, Artificial Sequence
  Description of Artificial Sequence: Synthetic oligonucleotide
  Sense strand starting at position 1000 of SEQ ID NO: 1743
guucuccauuuguaaauag

SEQ ID NO: 135689 - RNA, 19 nt, Artificial Sequence
  Description of Artificial Sequence: Synthetic oligonucleotide
  Antisense strand to SEQ ID NO: 135688
cuauuuacaaauggagaac

SEQ ID NO: 135690 - RNA, 19 nt, Artificial Sequence
  Description of Artificial Sequence: Synthetic oligonucleotide
  Sense strand starting at position 972 of SEQ ID NO: 1743
uacaaucgucucuauggaa

SEQ ID NO: 135691 - RNA, 19 nt, Artificial Sequence
  Description of Artificial Sequence: Synthetic oligonucleotide
  Antisense strand to SEQ ID NO: 135690
uuccauagagacgauugua

SEQ ID NO: 135692 - RNA, 19 nt, Artificial Sequence
  Description of Artificial Sequence: Synthetic oligonucleotide
  Sense strand starting at position 971 of SEQ ID NO: 1743
cuacaaucgucucuaugga

SEQ ID NO: 135693 - RNA, 19 nt, Artificial Sequence
  Description of Artificial Sequence: Synthetic oligonucleotide
  Antisense strand to SEQ ID NO: 135692
uccauagagacgauuguag

SEQ ID NO: 135694 - RNA, 19 nt, Artificial Sequence
  Description of Artificial Sequence: Synthetic oligonucleotide
  Sense strand starting at position 968 of SEQ ID NO: 1743
agucuacaaucgucucuau

SEQ ID NO: 135695 - RNA, 19 nt, Artificial Sequence
  Description of Artificial Sequence: Synthetic oligonucleotide
  Antisense strand to SEQ ID NO: 135694
auagagacgauuguagacu

SEQ ID NO: 135696 - RNA, 19 nt, Artificial Sequence
  Description of Artificial Sequence: Synthetic oligonucleotide
  Sense strand starting at position 962 of SEQ ID NO: 1743
uaaguuagucuacaaucgu

SEQ ID NO: 135697 - RNA, 19 nt, Artificial Sequence
  Description of Artificial Sequence: Synthetic oligonucleotide
  Antisense strand to SEQ ID NO: 135696
acgauuguagacuaacuua

SEQ ID NO: 135698 - RNA, 19 nt, Artificial Sequence
  Description of Artificial Sequence: Synthetic oligonucleotide
  Sense strand starting at position 958 of SEQ ID NO: 1743
gaguuaaguuagucuacaa

SEQ ID NO: 135699 - RNA, 19 nt, Artificial Sequence
  Description of Artificial Sequence: Synthetic oligonucleotide
  Antisense strand to SEQ ID NO: 135698
uuguagacuaacuuaacuc

SEQ ID NO: 135700 - RNA, 19 nt, Artificial Sequence
  Description of Artificial Sequence: Synthetic oligonucleotide
  Sense strand starting at position 957 of SEQ ID NO: 1743
ugaguuaaguuagucuaca

SEQ ID NO: 135701 - RNA, 19 nt, Artificial Sequence
  Description of Artificial Sequence: Synthetic oligonucleotide
  Antisense strand to SEQ ID NO: 135700
uguagacuaacuuaacuca

SEQ ID NO: 135702 - RNA, 19 nt, Artificial Sequence
  Description of Artificial Sequence: Synthetic oligonucleotide
  Sense strand starting at position 950 of SEQ ID NO: 1743
ucgcuucugaguuaaguua

SEQ ID NO: 135703 - RNA, 19 nt, Artificial Sequence
  Description of Artificial Sequence: Synthetic oligonucleotide
  Antisense strand to SEQ ID NO: 135702
uaacuuaacucagaagcga

SEQ ID NO: 135704 - RNA, 19 nt, Artificial Sequence
  Description of Artificial Sequence: Synthetic oligonucleotide
  Sense strand starting at position 949 of SEQ ID NO: 1743
gucgcuucugaguuaaguu

SEQ ID NO: 135705 - RNA, 19 nt, Artificial Sequence
  Description of Artificial Sequence: Synthetic oligonucleotide
  Antisense strand to SEQ ID NO: 135704
aacuuaacucagaagcgac

SEQ ID NO: 135706 - RNA, 19 nt, Artificial Sequence
  Description of Artificial Sequence: Synthetic oligonucleotide
  Sense strand starting at position 911 of SEQ ID NO: 1743
ucaaguuacuucguagaca

SEQ ID NO: 135707 - RNA, 19 nt, Artificial Sequence
  Description of Artificial Sequence: Synthetic oligonucleotide
  Antisense strand to SEQ ID NO: 135706
ugucuacgaaguaacuuga

SEQ ID NO: 135708 - RNA, 19 nt, Artificial Sequence
  Description of Artificial Sequence: Synthetic oligonucleotide
  Sense strand starting at position 900 of SEQ ID NO: 1743
gucgguccuaaucaaguua

SEQ ID NO: 135709 - RNA, 19 nt, Artificial Sequence
  Description of Artificial Sequence: Synthetic oligonucleotide
  Antisense strand to SEQ ID NO: 135708
uaacuugauuaggaccgac

SEQ ID NO: 135710 - RNA, 19 nt, Artificial Sequence
  Description of Artificial Sequence: Synthetic oligonucleotide
  Sense strand starting at position 518 of SEQ ID NO: 1743
ggacucaagacuuggcaca

SEQ ID NO: 135711 - RNA, 19 nt, Artificial Sequence
  Description of Artificial Sequence: Synthetic oligonucleotide
  Antisense strand to SEQ ID NO: 135710
ugugccaagucuugagucc

SEQ ID NO: 135712 - RNA, 19 nt, Artificial Sequence
  Description of Artificial Sequence: Synthetic oligonucleotide
  Sense strand starting at position 383 of SEQ ID NO: 1743
gggagacaggugugacauu

SEQ ID NO: 135713 - RNA, 19 nt, Artificial Sequence
  Description of Artificial Sequence: Synthetic oligonucleotide
  Antisense strand to SEQ ID NO: 135712
aaugucacaccugucuccc

SEQ ID NO: 135714 - RNA, 19 nt, Artificial Sequence
  Description of Artificial Sequence: Synthetic oligonucleotide
  Sense strand starting at position 282 of SEQ ID NO: 1743
ucauaagcgagauauaugu

SEQ ID NO: 135715 - RNA, 19 nt, Artificial Sequence
  Description of Artificial Sequence: Synthetic oligonucleotide
  Antisense strand to SEQ ID NO: 135714
acauauaucucgcuuauga

SEQ ID NO: 135716 - RNA, 19 nt, Artificial Sequence
  Description of Artificial Sequence: Synthetic oligonucleotide
  Sense strand starting at position 280 of SEQ ID NO: 1743
acucauaagcgagauauau

SEQ ID NO: 135717 - RNA, 19 nt, Artificial Sequence
  Description of Artificial Sequence: Synthetic oligonucleotide
  Antisense strand to SEQ ID NO: 135716
auauaucucgcuuaugagu

SEQ ID NO: 135718 - RNA, 19 nt, Artificial Sequence
  Description of Artificial Sequence: Synthetic oligonucleotide
  Sense strand starting at position 38 of SEQ ID NO: 1743
cggguaggaguugaauaca

SEQ ID NO: 135719 - RNA, 19 nt, Artificial Sequence
  Description of Artificial Sequence: Synthetic oligonucleotide
  Antisense strand to SEQ ID NO: 135718
uguauucaacuccuacccg

SEQ ID NO: 135720 - RNA, 19 nt, Artificial Sequence
  Description of Artificial Sequence: Synthetic oligonucleotide
  Sense strand starting at position 10 of SEQ ID NO: 1746
gagccacuguaccuguaaa

SEQ ID NO: 135721 - RNA, 19 nt, Artificial Sequence
  Description of Artificial Sequence: Synthetic oligonucleotide
  Antisense strand to SEQ ID NO: 135720
uuuacagguacaguggcuc

SEQ ID NO: 135722 - RNA, 19 nt, Artificial Sequence
  Description of Artificial Sequence: Synthetic oligonucleotide
  Sense strand starting at position 630 of SEQ ID NO: 1746
aagagucuccuauaugcga

SEQ ID NO: 135723 - RNA, 19 nt, Artificial Sequence
  Description of Artificial Sequence: Synthetic oligonucleotide
  Antisense strand to SEQ ID NO: 135722
ucgcauauaggagacucuu

SEQ ID NO: 135724 - RNA, 19 nt, Artificial Sequence
  Description of Artificial Sequence: Synthetic oligonucleotide
  Sense strand starting at position 798 of SEQ ID NO: 1746
gucaauacauauguuaagu

SEQ ID NO: 135725 - RNA, 19 nt, Artificial Sequence
  Description of Artificial Sequence: Synthetic oligonucleotide
  Antisense strand to SEQ ID NO: 135724
acuuaacauauguauugac

SEQ ID NO: 135726 - RNA, 19 nt, Artificial Sequence
  Description of Artificial Sequence: Synthetic oligonucleotide
  Sense strand starting at position 811 of SEQ ID NO: 1746
uuaaguaaauggccacaaa

SEQ ID NO: 135727 - RNA, 19 nt, Artificial Sequence
  Description of Artificial Sequence: Synthetic oligonucleotide
  Antisense strand to SEQ ID NO: 135726
uuuguggccauuuacuuaa

SEQ ID NO: 135728 - RNA, 19 nt, Artificial Sequence
  Description of Artificial Sequence: Synthetic oligonucleotide
  Sense strand starting at position 892 of SEQ ID NO: 1746
augucacccgaagaugauu

SEQ ID NO: 135729 - RNA, 19 nt, Artificial Sequence
  Description of Artificial Sequence: Synthetic oligonucleotide
  Antisense strand to SEQ ID NO: 135728
aaucaucuucgggugacau

SEQ ID NO: 135730 - RNA, 19 nt, Artificial Sequence
  Description of Artificial Sequence: Synthetic oligonucleotide
  Sense strand starting at position 990 of SEQ ID NO: 1746
acacaucuucuacgaguca

SEQ ID NO: 135731 - RNA, 19 nt, Artificial Sequence
  Description of Artificial Sequence: Synthetic oligonucleotide
  Antisense strand to SEQ ID NO: 135730
ugacucguagaagaugugu

SEQ ID NO: 135732 - RNA, 19 nt, Artificial Sequence
  Description of Artificial Sequence: Synthetic oligonucleotide
  Sense strand starting at position 1050 of SEQ ID NO: 1746
ucgacaggaucagcauaua

SEQ ID NO: 135733 - RNA, 19 nt, Artificial Sequence
  Description of Artificial Sequence: Synthetic oligonucleotide
  Antisense strand to SEQ ID NO: 135732
uauaugcugauccugucga

SEQ ID NO: 135734 - RNA, 19 nt, Artificial Sequence
  Description of Artificial Sequence: Synthetic oligonucleotide
  Sense strand starting at position 1504 of SEQ ID NO: 1746
agucauacuaggcacgaaa

SEQ ID NO: 135735 - RNA, 19 nt, Artificial Sequence
  Description of Artificial Sequence: Synthetic oligonucleotide
  Antisense strand to SEQ ID NO: 135734
uuucgugccuaguaugacu

SEQ ID NO: 135736 - RNA, 19 nt, Artificial Sequence
  Description of Artificial Sequence: Synthetic oligonucleotide
  Sense strand starting at position 1674 of SEQ ID NO: 1746
cgccgauguggucuagcuu

SEQ ID NO: 135737 - RNA, 19 nt, Artificial Sequence
  Description of Artificial Sequence: Synthetic oligonucleotide
  Antisense strand to SEQ ID NO: 135736
aagcuagaccacaucggcg

SEQ ID NO: 135738 - RNA, 19 nt, Artificial Sequence
  Description of Artificial Sequence: Synthetic oligonucleotide
  Sense strand starting at position 1859 of SEQ ID NO: 1746
guacucagaccggguaaga

SEQ ID NO: 135739 - RNA, 19 nt, Artificial Sequence
  Description of Artificial Sequence: Synthetic oligonucleotide
  Antisense strand to SEQ ID NO: 135738
ucuuacccggucugaguac

SEQ ID NO: 135740 - RNA, 19 nt, Artificial Sequence
  Description of Artificial Sequence: Synthetic oligonucleotide
  Sense strand starting at position 2164 of SEQ ID NO: 1746
gugguugcuagggacgaua

SEQ ID NO: 135741 - RNA, 19 nt, Artificial Sequence
  Description of Artificial Sequence: Synthetic oligonucleotide
  Antisense strand to SEQ ID NO: 135740
uaucgucccuagcaaccac

SEQ ID NO: 135742 - RNA, 19 nt, Artificial Sequence
  Description of Artificial Sequence: Synthetic oligonucleotide
  Sense strand starting at position 2194 of SEQ ID NO: 1746
cguguagugaguucgccuu

SEQ ID NO: 135743 - RNA, 19 nt, Artificial Sequence
  Description of Artificial Sequence: Synthetic oligonucleotide
  Antisense strand to SEQ ID NO: 135742
aaggcgaacucacuacacg

SEQ ID NO: 135744 - RNA, 19 nt, Artificial Sequence
  Description of Artificial Sequence: Synthetic oligonucleotide
  Sense strand starting at position 2275 of SEQ ID NO: 1746
uugucugaacccugacaua

SEQ ID NO: 135745 - RNA, 19 nt, Artificial Sequence
  Description of Artificial Sequence: Synthetic oligonucleotide
  Antisense strand to SEQ ID NO: 135744
uaugucaggguucagacaa

SEQ ID NO: 135746 - RNA, 19 nt, Artificial Sequence
  Description of Artificial Sequence: Synthetic oligonucleotide
  Sense strand starting at position 2314 of SEQ ID NO: 1746
cguaaucccagcuagagga

SEQ ID NO: 135747 - RNA, 19 nt, Artificial Sequence
  Description of Artificial Sequence: Synthetic oligonucleotide
  Antisense strand to SEQ ID NO: 135746
uccucuagcugggauuacg

SEQ ID NO: 135748 - RNA, 19 nt, Artificial Sequence
  Description of Artificial Sequence: Synthetic oligonucleotide
  Sense strand starting at position 2434 of SEQ ID NO: 1746
caggacuuugggcgguaau

SEQ ID NO: 135749 - RNA, 19 nt, Artificial Sequence
  Description of Artificial Sequence: Synthetic oligonucleotide
  Antisense strand to SEQ ID NO: 135748
auuaccgcccaaaguccug

SEQ ID NO: 135750 - RNA, 19 nt, Artificial Sequence
  Description of Artificial Sequence: Synthetic oligonucleotide
  Sense strand starting at position 2444 of SEQ ID NO: 1746
ggcgguaaugagucggcua

SEQ ID NO: 135751 - RNA, 19 nt, Artificial Sequence
  Description of Artificial Sequence: Synthetic oligonucleotide
  Antisense strand to SEQ ID NO: 135750
uagccgacucauuaccgcc

SEQ ID NO: 135752 - RNA, 19 nt, Artificial Sequence
  Description of Artificial Sequence: Synthetic oligonucleotide
  Sense strand starting at position 2507 of SEQ ID NO: 1746
ccaguuuggcucguuuauu

SEQ ID NO: 135753 - RNA, 19 nt, Artificial Sequence
  Description of Artificial Sequence: Synthetic oligonucleotide
  Antisense strand to SEQ ID NO: 135752
aauaaacgagccaaacugg

SEQ ID NO: 135754 - RNA, 19 nt, Artificial Sequence
  Description of Artificial Sequence: Synthetic oligonucleotide
  Sense strand starting at position 2563 of SEQ ID NO: 1746
gucuuaaaguuuccacaug

SEQ ID NO: 135755 - RNA, 19 nt, Artificial Sequence
  Description of Artificial Sequence: Synthetic oligonucleotide
  Antisense strand to SEQ ID NO: 135754
cauguggaaacuuuaagac

SEQ ID NO: 135756 - RNA, 19 nt, Artificial Sequence
  Description of Artificial Sequence: Synthetic oligonucleotide
  Sense strand starting at position 2572 of SEQ ID NO: 1746
uuuccacaugguuaaggua

SEQ ID NO: 135757 - RNA, 19 nt, Artificial Sequence
  Description of Artificial Sequence: Synthetic oligonucleotide
  Antisense strand to SEQ ID NO: 135756
uaccuuaaccauguggaaa

SEQ ID NO: 135758 - RNA, 19 nt, Artificial Sequence
  Description of Artificial Sequence: Synthetic oligonucleotide
  Sense strand starting at position 2829 of SEQ ID NO: 1746
ucaauaaguugcuugagga

SEQ ID NO: 135759 - RNA, 19 nt, Artificial Sequence
  Description of Artificial Sequence: Synthetic oligonucleotide
  Antisense strand to SEQ ID NO: 135758
uccucaagcaacuuauuga

SEQ ID NO: 135760 - RNA, 19 nt, Artificial Sequence
  Description of Artificial Sequence: Synthetic oligonucleotide
  Sense strand starting at position 2862 of SEQ ID NO: 1746
ucguaauaacacuguaauu

SEQ ID NO: 135761 - RNA, 19 nt, Artificial Sequence
  Description of Artificial Sequence: Synthetic oligonucleotide
  Antisense strand to SEQ ID NO: 135760
aauuacaguguuauuacga

SEQ ID NO: 135762 - RNA, 19 nt, Artificial Sequence
  Description of Artificial Sequence: Synthetic oligonucleotide
  Sense strand starting at position 3004 of SEQ ID NO: 1746
ucauauauuguguacuuga

SEQ ID NO: 135763 - RNA, 19 nt, Artificial Sequence
  Description of Artificial Sequence: Synthetic oligonucleotide
  Antisense strand to SEQ ID NO: 135762
ucaaguacacaauauauga

SEQ ID NO: 135764 - RNA, 19 nt, Artificial Sequence
  Description of Artificial Sequence: Synthetic oligonucleotide
  Sense strand starting at position 3014 of SEQ ID NO: 1746
uguacuugaaauugugaag

SEQ ID NO: 135765 - RNA, 19 nt, Artificial Sequence
  Description of Artificial Sequence: Synthetic oligonucleotide
  Antisense strand to SEQ ID NO: 135764
cuucacaauuucaaguaca

SEQ ID NO: 135766 - RNA, 19 nt, Artificial Sequence
  Description of Artificial Sequence: Synthetic oligonucleotide
  Sense strand starting at position 3059 of SEQ ID NO: 1746
caggaaaguaugugagaug

SEQ ID NO: 135767 - RNA, 19 nt, Artificial Sequence
  Description of Artificial Sequence: Synthetic oligonucleotide
  Antisense strand to SEQ ID NO: 135766
caucucacauacuuuccug

SEQ ID NO: 135768 - RNA, 19 nt, Artificial Sequence
  Description of Artificial Sequence: Synthetic oligonucleotide
  Sense strand starting at position 3080 of SEQ ID NO: 1746
ggauuauguugauuagcuu

SEQ ID NO: 135769 - RNA, 19 nt, Artificial Sequence
  Description of Artificial Sequence: Synthetic oligonucleotide
  Antisense strand to SEQ ID NO: 135768
aagcuaaucaacauaaucc

SEQ ID NO: 135770 - RNA, 19 nt, Artificial Sequence
  Description of Artificial Sequence: Synthetic oligonucleotide
  Sense strand starting at position 3151 of SEQ ID NO: 1746
cguuguauaccauaaacau

SEQ ID NO: 135771 - RNA, 19 nt, Artificial Sequence
  Description of Artificial Sequence: Synthetic oligonucleotide
  Antisense strand to SEQ ID NO: 135770
auguuuaugguauacaacg

SEQ ID NO: 135772 - RNA, 19 nt, Artificial Sequence
  Description of Artificial Sequence: Synthetic oligonucleotide
  Sense strand starting at position 3251 of SEQ ID NO: 1746
gggaaaugccagcaucuca

SEQ ID NO: 135773 - RNA, 19 nt, Artificial Sequence
  Description of Artificial Sequence: Synthetic oligonucleotide
  Antisense strand to SEQ ID NO: 135772
ugagaugcuggcauuuccc

SEQ ID NO: 135774 - RNA, 19 nt, Artificial Sequence
  Description of Artificial Sequence: Synthetic oligonucleotide
  Sense strand starting at position 3283 of SEQ ID NO: 1746
augugauaccacuagucaa

SEQ ID NO: 135775 - RNA, 19 nt, Artificial Sequence
  Description of Artificial Sequence: Synthetic oligonucleotide
  Antisense strand to SEQ ID NO: 135774
uugacuagugguaucacau

SEQ ID NO: 135776 - RNA, 19 nt, Artificial Sequence
  Description of Artificial Sequence: Synthetic oligonucleotide
  Sense strand starting at position 3294 of SEQ ID NO: 1746
cuagucaaguccuuaaccu

SEQ ID NO: 135777 - RNA, 19 nt, Artificial Sequence
  Description of Artificial Sequence: Synthetic oligonucleotide
  Antisense strand to SEQ ID NO: 135776
agguuaaggacuugacuag

SEQ ID NO: 135778 - RNA, 19 nt, Artificial Sequence
  Description of Artificial Sequence: Synthetic oligonucleotide
  Sense strand starting at position 3320 of SEQ ID NO: 1746
ccuguaucucuccaguaaa

SEQ ID NO: 135779 - RNA, 19 nt, Artificial Sequence
  Description of Artificial Sequence: Synthetic oligonucleotide
  Antisense strand to SEQ ID NO: 135778
uuuacuggagagauacagg

SEQ ID NO: 135780 - RNA, 19 nt, Artificial Sequence
  Description of Artificial Sequence: Synthetic oligonucleotide
  Sense strand starting at position 3323 of SEQ ID NO: 1746
guaucucuccaguaaaguu

SEQ ID NO: 135781 - RNA, 19 nt, Artificial Sequence
  Description of Artificial Sequence: Synthetic oligonucleotide
  Antisense strand to SEQ ID NO: 135780
aacuuuacuggagagauac

SEQ ID NO: 135782 - RNA, 19 nt, Artificial Sequence
  Description of Artificial Sequence: Synthetic oligonucleotide
  Sense strand starting at position 3353 of SEQ ID NO: 1746
cuagauuagguuuguaagu

SEQ ID NO: 135783 - RNA, 19 nt, Artificial Sequence
  Description of Artificial Sequence: Synthetic oligonucleotide
  Antisense strand to SEQ ID NO: 135782
acuuacaaaccuaaucuag

SEQ ID NO: 135784 - RNA, 19 nt, Artificial Sequence
  Description of Artificial Sequence: Synthetic oligonucleotide
  Sense strand starting at position 3469 of SEQ ID NO: 1746
auggauucaguaggaguuu

SEQ ID NO: 135785 - RNA, 19 nt, Artificial Sequence
  Description of Artificial Sequence: Synthetic oligonucleotide
  Antisense strand to SEQ ID NO: 135784
aaacuccuacugaauccau

SEQ ID NO: 135786 - RNA, 19 nt, Artificial Sequence
  Description of Artificial Sequence: Synthetic oligonucleotide
  Sense strand starting at position 3480 of SEQ ID NO: 1746
aggaguuuaguuuggucau

SEQ ID NO: 135787 - RNA, 19 nt, Artificial Sequence
  Description of Artificial Sequence: Synthetic oligonucleotide
  Antisense strand to SEQ ID NO: 135786
augaccaaacuaaacuccu

SEQ ID NO: 135788 - RNA, 19 nt, Artificial Sequence
  Description of Artificial Sequence: Synthetic oligonucleotide
  Sense strand starting at position 3502 of SEQ ID NO: 1746
uggccaaucagauguuuag

SEQ ID NO: 135789 - RNA, 19 nt, Artificial Sequence
  Description of Artificial Sequence: Synthetic oligonucleotide
  Antisense strand to SEQ ID NO: 135788
cuaaacaucugauuggcca

SEQ ID NO: 135790 - RNA, 19 nt, Artificial Sequence
  Description of Artificial Sequence: Synthetic oligonucleotide
  Sense strand starting at position 3508 of SEQ ID NO: 1746
aucagauguuuagcacuaa

SEQ ID NO: 135791 - RNA, 19 nt, Artificial Sequence
  Description of Artificial Sequence: Synthetic oligonucleotide
  Antisense strand to SEQ ID NO: 135790
uuagugcuaaacaucugau

SEQ ID NO: 135792 - RNA, 19 nt, Artificial Sequence
  Description of Artificial Sequence: Synthetic oligonucleotide
  Sense strand starting at position 3549 of SEQ ID NO: 1746
guagcaauccucugggauc

SEQ ID NO: 135793 - RNA, 19 nt, Artificial Sequence
  Description of Artificial Sequence: Synthetic oligonucleotide
  Antisense strand to SEQ ID NO: 135792
gaucccagaggauugcuac

SEQ ID NO: 135794 - RNA, 19 nt, Artificial Sequence
  Description of Artificial Sequence: Synthetic oligonucleotide
  Sense strand starting at position 3556 of SEQ ID NO: 1746
uccucugggaucuguuaga

SEQ ID NO: 135795 - RNA, 19 nt, Artificial Sequence
  Description of Artificial Sequence: Synthetic oligonucleotide
  Antisense strand to SEQ ID NO: 135794
ucuaacagaucccagagga

SEQ ID NO: 135796 - RNA, 19 nt, Artificial Sequence
  Description of Artificial Sequence: Synthetic oligonucleotide
  Sense strand starting at position 3561 of SEQ ID NO: 1746
ugggaucuguuagauuucu

SEQ ID NO: 135797 - RNA, 19 nt, Artificial Sequence
  Description of Artificial Sequence: Synthetic oligonucleotide
  Antisense strand to SEQ ID NO: 135796
agaaaucuaacagauccca

SEQ ID NO: 135798 - RNA, 19 nt, Artificial Sequence
  Description of Artificial Sequence: Synthetic oligonucleotide
  Sense strand starting at position 3689 of SEQ ID NO: 1746
acagcugcucuuuagaagu

SEQ ID NO: 135799 - RNA, 19 nt, Artificial Sequence
  Description of Artificial Sequence: Synthetic oligonucleotide
  Antisense strand to SEQ ID NO: 135798
acuucuaaagagcagcugu

SEQ ID NO: 135800 - RNA, 19 nt, Artificial Sequence
  Description of Artificial Sequence: Synthetic oligonucleotide
  Sense strand starting at position 619 of SEQ ID NO: 1745
aagagucuccuauaugcga

SEQ ID NO: 135801 - RNA, 19 nt, Artificial Sequence
  Description of Artificial Sequence: Synthetic oligonucleotide
  Antisense strand to SEQ ID NO: 135800
ucgcauauaggagacucuu

SEQ ID NO: 135802 - RNA, 19 nt, Artificial Sequence
  Description of Artificial Sequence: Synthetic oligonucleotide
  Sense strand starting at position 787 of SEQ ID NO: 1745
gucaauacauauguuaagu

SEQ ID NO: 135803 - RNA, 19 nt, Artificial Sequence
  Description of Artificial Sequence: Synthetic oligonucleotide
  Antisense strand to SEQ ID NO: 135802
acuuaacauauguauugac

SEQ ID NO: 135804 - RNA, 19 nt, Artificial Sequence
  Description of Artificial Sequence: Synthetic oligonucleotide
  Sense strand starting at position 800 of SEQ ID NO: 1745
uuaaguaaauggccacaaa

SEQ ID NO: 135805 - RNA, 19 nt, Artificial Sequence
  Description of Artificial Sequence: Synthetic oligonucleotide
  Antisense strand to SEQ ID NO: 135804
uuuguggccauuuacuuaa

SEQ ID NO: 135806 - RNA, 19 nt, Artificial Sequence
  Description of Artificial Sequence: Synthetic oligonucleotide
  Sense strand starting at position 881 of SEQ ID NO: 1745
augucacccgaagaugauu

SEQ ID NO: 135807 - RNA, 19 nt, Artificial Sequence
  Description of Artificial Sequence: Synthetic oligonucleotide
  Antisense strand to SEQ ID NO: 135806
aaucaucuucgggugacau

SEQ ID NO: 135808 - RNA, 19 nt, Artificial Sequence
  Description of Artificial Sequence: Synthetic oligonucleotide
  Sense strand starting at position 979 of SEQ ID NO: 1745
acacaucuucuacgaguca

SEQ ID NO: 135809 - RNA, 19 nt, Artificial Sequence
  Description of Artificial Sequence: Synthetic oligonucleotide
  Antisense strand to SEQ ID NO: 135808
ugacucguagaagaugugu

SEQ ID NO: 135810 - RNA, 19 nt, Artificial Sequence
  Description of Artificial Sequence: Synthetic oligonucleotide
  Sense strand starting at position 1039 of SEQ ID NO: 1745
ucgacaggaucagcauaua

SEQ ID NO: 135811 - RNA, 19 nt, Artificial Sequence
  Description of Artificial Sequence: Synthetic oligonucleotide
  Antisense strand to SEQ ID NO: 135810
uauaugcugauccugucga

SEQ ID NO: 135812 - RNA, 19 nt, Artificial Sequence
  Description of Artificial Sequence: Synthetic oligonucleotide
  Sense strand starting at position 1392 of SEQ ID NO: 1745
cgcgcuucugaagaaacua

SEQ ID NO: 135813 - RNA, 19 nt, Artificial Sequence
  Description of Artificial Sequence: Synthetic oligonucleotide
  Antisense strand to SEQ ID NO: 135812
uaguuucuucagaagcgcg

SEQ ID NO: 135814 - RNA, 19 nt, Artificial Sequence
  Description of Artificial Sequence: Synthetic oligonucleotide
  Sense strand starting at position 1493 of SEQ ID NO: 1745
agucauacuaggcacgaaa

SEQ ID NO: 135815 - RNA, 19 nt, Artificial Sequence
  Description of Artificial Sequence: Synthetic oligonucleotide
  Antisense strand to SEQ ID NO: 135814
uuucgugccuaguaugacu

SEQ ID NO: 135816 - RNA, 19 nt, Artificial Sequence
  Description of Artificial Sequence: Synthetic oligonucleotide
  Sense strand starting at position 1663 of SEQ ID NO: 1745
cgccgauguggucuagcuu

SEQ ID NO: 135817 - RNA, 19 nt, Artificial Sequence
  Description of Artificial Sequence: Synthetic oligonucleotide
  Antisense strand to SEQ ID NO: 135816
aagcuagaccacaucggcg

SEQ ID NO: 135818 - RNA, 19 nt, Artificial Sequence
  Description of Artificial Sequence: Synthetic oligonucleotide
  Sense strand starting at position 1848 of SEQ ID NO: 1745
guacucagaccggguaaga

SEQ ID NO: 135819 - RNA, 19 nt, Artificial Sequence
  Description of Artificial Sequence: Synthetic oligonucleotide
  Antisense strand to SEQ ID NO: 135818
ucuuacccggucugaguac

SEQ ID NO: 135820 - RNA, 19 nt, Artificial Sequence
  Description of Artificial Sequence: Synthetic oligonucleotide
  Sense strand starting at position 2153 of SEQ ID NO: 1745
gugguugcuagggacgaua

SEQ ID NO: 135821 - RNA, 19 nt, Artificial Sequence
  Description of Artificial Sequence: Synthetic oligonucleotide
  Antisense strand to SEQ ID NO: 135820
uaucgucccuagcaaccac

SEQ ID NO: 135822 - RNA, 19 nt, Artificial Sequence
  Description of Artificial Sequence: Synthetic oligonucleotide
  Sense strand starting at position 2183 of SEQ ID NO: 1745
cguguagugaguucgccuu

SEQ ID NO: 135823 - RNA, 19 nt, Artificial Sequence
  Description of Artificial Sequence: Synthetic oligonucleotide
  Antisense strand to SEQ ID NO: 135822
aaggcgaacucacuacacg

SEQ ID NO: 135824 - RNA, 19 nt, Artificial Sequence
  Description of Artificial Sequence: Synthetic oligonucleotide
  Sense strand starting at position 2264 of SEQ ID NO: 1745
uugucugaacccugacaua

SEQ ID NO: 135825 - RNA, 19 nt, Artificial Sequence
  Description of Artificial Sequence: Synthetic oligonucleotide
  Antisense strand to SEQ ID NO: 135824
uaugucaggguucagacaa

SEQ ID NO: 135826 - RNA, 19 nt, Artificial Sequence
  Description of Artificial Sequence: Synthetic oligonucleotide
  Sense strand starting at position 2303 of SEQ ID NO: 1745
cguaaucccagcuagagga

SEQ ID NO: 135827 - RNA, 19 nt, Artificial Sequence
  Description of Artificial Sequence: Synthetic oligonucleotide
  Antisense strand to SEQ ID NO: 135826
uccucuagcugggauuacg

SEQ ID NO: 135828 - RNA, 19 nt, Artificial Sequence
  Description of Artificial Sequence: Synthetic oligonucleotide
  Sense strand starting at position 2423 of SEQ ID NO: 1745
caggacuuugggcgguaau

SEQ ID NO: 135829 - RNA, 19 nt, Artificial Sequence
  Description of Artificial Sequence: Synthetic oligonucleotide
  Antisense strand to SEQ ID NO: 135828
auuaccgcccaaaguccug

SEQ ID NO: 135830 - RNA, 19 nt, Artificial Sequence
  Description of Artificial Sequence: Synthetic oligonucleotide
  Sense strand starting at position 2433 of SEQ ID NO: 1745
ggcgguaaugagucggcua

SEQ ID NO: 135831 - RNA, 19 nt, Artificial Sequence
  Description of Artificial Sequence: Synthetic oligonucleotide
  Antisense strand to SEQ ID NO: 135830
uagccgacucauuaccgcc

SEQ ID NO: 135832 - RNA, 19 nt, Artificial Sequence
  Description of Artificial Sequence: Synthetic oligonucleotide
  Sense strand starting at position 2496 of SEQ ID NO: 1745
ccaguuuggcucguuuauu

SEQ ID NO: 135833 - RNA, 19 nt, Artificial Sequence
  Description of Artificial Sequence: Synthetic oligonucleotide
  Antisense strand to SEQ ID NO: 135832
aauaaacgagccaaacugg

SEQ ID NO: 135834 - RNA, 19 nt, Artificial Sequence
  Description of Artificial Sequence: Synthetic oligonucleotide
  Sense strand starting at position 2552 of SEQ ID NO: 1745
gucuuaaaguuuccacaug

SEQ ID NO: 135835 - RNA, 19 nt, Artificial Sequence
  Description of Artificial Sequence: Synthetic oligonucleotide
  Antisense strand to SEQ ID NO: 135834
cauguggaaacuuuaagac

SEQ ID NO: 135836 - RNA, 19 nt, Artificial Sequence
  Description of Artificial Sequence: Synthetic oligonucleotide
  Sense strand starting at position 2561 of SEQ ID NO: 1745
uuuccacaugguuaaggua

SEQ ID NO: 135837 - RNA, 19 nt, Artificial Sequence
  Description of Artificial Sequence: Synthetic oligonucleotide
  Antisense strand to SEQ ID NO: 135836
uaccuuaaccauguggaaa

SEQ ID NO: 135838 - RNA, 19 nt, Artificial Sequence
  Description of Artificial Sequence: Synthetic oligonucleotide
  Sense strand starting at position 2818 of SEQ ID NO: 1745
ucaauaaguugcuugagga

SEQ ID NO: 135839 - RNA, 19 nt, Artificial Sequence
  Description of Artificial Sequence: Synthetic oligonucleotide
  Antisense strand to SEQ ID NO: 135838
uccucaagcaacuuauuga

SEQ ID NO: 135840 - RNA, 19 nt, Artificial Sequence
  Description of Artificial Sequence: Synthetic oligonucleotide
  Sense strand starting at position 2851 of SEQ ID NO: 1745
ucguaauaacacuguaauu

SEQ ID NO: 135841 - RNA, 19 nt, Artificial Sequence
  Description of Artificial Sequence: Synthetic oligonucleotide
  Antisense strand to SEQ ID NO: 135840
aauuacaguguuauuacga

SEQ ID NO: 135842 - RNA, 19 nt, Artificial Sequence
  Description of Artificial Sequence: Synthetic oligonucleotide
  Sense strand starting at position 2993 of SEQ ID NO: 1745
ucauauauuguguacuuga

SEQ ID NO: 135843 - RNA, 19 nt, Artificial Sequence
  Description of Artificial Sequence: Synthetic oligonucleotide
  Antisense strand to SEQ ID NO: 135842
ucaaguacacaauauauga

SEQ ID NO: 135844 - RNA, 19 nt, Artificial Sequence
  Description of Artificial Sequence: Synthetic oligonucleotide
  Sense strand starting at position 3003 of SEQ ID NO: 1745
uguacuugaaauugugaag

SEQ ID NO: 135845 - RNA, 19 nt, Artificial Sequence
  Description of Artificial Sequence: Synthetic oligonucleotide
  Antisense strand to SEQ ID NO: 135844
cuucacaauuucaaguaca

SEQ ID NO: 135846 - RNA, 19 nt, Artificial Sequence
  Description of Artificial Sequence: Synthetic oligonucleotide
  Sense strand starting at position 3048 of SEQ ID NO: 1745
caggaaaguaugugagaug

SEQ ID NO: 135847 - RNA, 19 nt, Artificial Sequence
  Description of Artificial Sequence: Synthetic oligonucleotide
  Antisense strand to SEQ ID NO: 135846
caucucacauacuuuccug

SEQ ID NO: 135848 - RNA, 19 nt, Artificial Sequence
  Description of Artificial Sequence: Synthetic oligonucleotide
  Sense strand starting at position 3069 of SEQ ID NO: 1745
ggauuauguugauuagcuu

SEQ ID NO: 135849 - RNA, 19 nt, Artificial Sequence
  Description of Artificial Sequence: Synthetic oligonucleotide
  Antisense strand to SEQ ID NO: 135848
aagcuaaucaacauaaucc

SEQ ID NO: 135850 - RNA, 19 nt, Artificial Sequence
  Description of Artificial Sequence: Synthetic oligonucleotide
  Sense strand starting at position 3140 of SEQ ID NO: 1745
cguuguauaccauaaacau

SEQ ID NO: 135851 - RNA, 19 nt, Artificial Sequence
  Description of Artificial Sequence: Synthetic oligonucleotide
  Antisense strand to SEQ ID NO: 135850
auguuuaugguauacaacg

SEQ ID NO: 135852 - RNA, 19 nt, Artificial Sequence
  Description of Artificial Sequence: Synthetic oligonucleotide
  Sense strand starting at position 3240 of SEQ ID NO: 1745
gggaaaugccagcaucuca

SEQ ID NO: 135853 - RNA, 19 nt, Artificial Sequence
  Description of Artificial Sequence: Synthetic oligonucleotide
  Antisense strand to SEQ ID NO: 135852
ugagaugcuggcauuuccc

SEQ ID NO: 135854 - RNA, 19 nt, Artificial Sequence
  Description of Artificial Sequence: Synthetic oligonucleotide
  Sense strand starting at position 3272 of SEQ ID NO: 1745
augugauaccacuagucaa

SEQ ID NO: 135855 - RNA, 19 nt, Artificial Sequence
  Description of Artificial Sequence: Synthetic oligonucleotide
  Antisense strand to SEQ ID NO: 135854
uugacuagugguaucacau

SEQ ID NO: 135856 - RNA, 19 nt, Artificial Sequence
  Description of Artificial Sequence: Synthetic oligonucleotide
  Sense strand starting at position 3283 of SEQ ID NO: 1745
cuagucaaguccuuaaccu

SEQ ID NO: 135857 - RNA, 19 nt, Artificial Sequence
  Description of Artificial Sequence: Synthetic oligonucleotide
  Antisense strand to SEQ ID NO: 135856
agguuaaggacuugacuag

SEQ ID NO: 135858 - RNA, 19 nt, Artificial Sequence
  Description of Artificial Sequence: Synthetic oligonucleotide
  Sense strand starting at position 3309 of SEQ ID NO: 1745
ccuguaucucuccaguaaa

SEQ ID NO: 135859 - RNA, 19 nt, Artificial Sequence
  Description of Artificial Sequence: Synthetic oligonucleotide
  Antisense strand to SEQ ID NO: 135858
uuuacuggagagauacagg

SEQ ID NO: 135860 - RNA, 19 nt, Artificial Sequence
  Description of Artificial Sequence: Synthetic oligonucleotide
  Sense strand starting at position 3312 of SEQ ID NO: 1745
guaucucuccaguaaaguu

SEQ ID NO: 135861 - RNA, 19 nt, Artificial Sequence
  Description of Artificial Sequence: Synthetic oligonucleotide
  Antisense strand to SEQ ID NO: 135860
aacuuuacuggagagauac

SEQ ID NO: 135862 - RNA, 19 nt, Artificial Sequence
  Description of Artificial Sequence: Synthetic oligonucleotide
  Sense strand starting at position 3342 of SEQ ID NO: 1745
cuagauuagguuuguaagu

SEQ ID NO: 135863 - RNA, 19 nt, Artificial Sequence
  Description of Artificial Sequence: Synthetic oligonucleotide
  Antisense strand to SEQ ID NO: 135862
acuuacaaaccuaaucuag

SEQ ID NO: 135864 - RNA, 19 nt, Artificial Sequence
  Description of Artificial Sequence: Synthetic oligonucleotide
  Sense strand starting at position 3458 of SEQ ID NO: 1745
auggauucaguaggaguuu

SEQ ID NO: 135865 - RNA, 19 nt, Artificial Sequence
  Description of Artificial Sequence: Synthetic oligonucleotide
  Antisense strand to SEQ ID NO: 135864
aaacuccuacugaauccau

SEQ ID NO: 135866 - RNA, 19 nt, Artificial Sequence
  Description of Artificial Sequence: Synthetic oligonucleotide
  Sense strand starting at position 3469 of SEQ ID NO: 1745
aggaguuuaguuuggucau

SEQ ID NO: 135867 - RNA, 19 nt, Artificial Sequence
  Description of Artificial Sequence: Synthetic oligonucleotide
  Antisense strand to SEQ ID NO: 135866
augaccaaacuaaacuccu

SEQ ID NO: 135868 - RNA, 19 nt, Artificial Sequence
  Description of Artificial Sequence: Synthetic oligonucleotide
  Sense strand starting at position 3491 of SEQ ID NO: 1745
uggccaaucagauguuuag

SEQ ID NO: 135869 - RNA, 19 nt, Artificial Sequence
  Description of Artificial Sequence: Synthetic oligonucleotide
  Antisense strand to SEQ ID NO: 135868
cuaaacaucugauuggcca

SEQ ID NO: 135870 - RNA, 19 nt, Artificial Sequence
  Description of Artificial Sequence: Synthetic oligonucleotide
  Sense strand starting at position 3497 of SEQ ID NO: 1745
aucagauguuuagcacuaa

SEQ ID NO: 135871 - RNA, 19 nt, Artificial Sequence
  Description of Artificial Sequence: Synthetic oligonucleotide
  Antisense strand to SEQ ID NO: 135870
uuagugcuaaacaucugau

SEQ ID NO: 135872 - RNA, 19 nt, Artificial Sequence
  Description of Artificial Sequence: Synthetic oligonucleotide
  Sense strand starting at position 3538 of SEQ ID NO: 1745
guagcaauccucugggauc

SEQ ID NO: 135873 - RNA, 19 nt, Artificial Sequence
  Description of Artificial Sequence: Synthetic oligonucleotide
  Antisense strand to SEQ ID NO: 135872
gaucccagaggauugcuac

SEQ ID NO: 135874 - RNA, 19 nt, Artificial Sequence
  Description of Artificial Sequence: Synthetic oligonucleotide
  Sense strand starting at position 3545 of SEQ ID NO: 1745
uccucugggaucuguuaga

SEQ ID NO: 135875 - RNA, 19 nt, Artificial Sequence
  Description of Artificial Sequence: Synthetic oligonucleotide
  Antisense strand to SEQ ID NO: 135874
ucuaacagaucccagagga

SEQ ID NO: 135876 - RNA, 19 nt, Artificial Sequence
  Description of Artificial Sequence: Synthetic oligonucleotide
  Sense strand starting at position 3550 of SEQ ID NO: 1745
ugggaucuguuagauuucu

SEQ ID NO: 135877 - RNA, 19 nt, Artificial Sequence
  Description of Artificial Sequence: Synthetic oligonucleotide
  Antisense strand to SEQ ID NO: 135876
agaaaucuaacagauccca

SEQ ID NO: 135878 - RNA, 19 nt, Artificial Sequence
  Description of Artificial Sequence: Synthetic oligonucleotide
  Sense strand starting at position 3678 of SEQ ID NO: 1745
acagcugcucuuuagaagu

SEQ ID NO: 135879 - RNA, 19 nt, Artificial Sequence
  Description of Artificial Sequence: Synthetic oligonucleotide
  Antisense strand to SEQ ID NO: 135878
acuucuaaagagcagcugu

SEQ ID NO: 135880 - RNA, 19 nt, Artificial Sequence
  Description of Artificial Sequence: Synthetic oligonucleotide
  Sense strand starting at position 592 of SEQ ID NO: 1744
aagagucuccuauaugcga

SEQ ID NO: 135881 - RNA, 19 nt, Artificial Sequence
  Description of Artificial Sequence: Synthetic oligonucleotide
  Antisense strand to SEQ ID NO: 135880
ucgcauauaggagacucuu

SEQ ID NO: 135882 - RNA, 19 nt, Artificial Sequence
  Description of Artificial Sequence: Synthetic oligonucleotide
  Sense strand starting at position 760 of SEQ ID NO: 1744
gucaauacauauguuaagu

SEQ ID NO: 135883 - RNA, 19 nt, Artificial Sequence
  Description of Artificial Sequence: Synthetic oligonucleotide
  Antisense strand to SEQ ID NO: 135882
acuuaacauauguauugac

SEQ ID NO: 135884 - RNA, 19 nt, Artificial Sequence
  Description of Artificial Sequence: Synthetic oligonucleotide
  Sense strand starting at position 773 of SEQ ID NO: 1744
uuaaguaaauggccacaaa

SEQ ID NO: 135885 - RNA, 19 nt, Artificial Sequence
  Description of Artificial Sequence: Synthetic oligonucleotide
  Antisense strand to SEQ ID NO: 135884
uuuguggccauuuacuuaa

SEQ ID NO: 135886 - RNA, 19 nt, Artificial Sequence
  Description of Artificial Sequence: Synthetic oligonucleotide
  Sense strand starting at position 854 of SEQ ID NO: 1744
augucacccgaagaugauu

SEQ ID NO: 135887 - RNA, 19 nt, Artificial Sequence
  Description of Artificial Sequence: Synthetic oligonucleotide
  Antisense strand to SEQ ID NO: 135886
aaucaucuucgggugacau

SEQ ID NO: 135888 - RNA, 19 nt, Artificial Sequence
  Description of Artificial Sequence: Synthetic oligonucleotide
  Sense strand starting at position 952 of SEQ ID NO: 1744
acacaucuucuacgaguca

SEQ ID NO: 135889 - RNA, 19 nt, Artificial Sequence
  Description of Artificial Sequence: Synthetic oligonucleotide
  Antisense strand to SEQ ID NO: 135888
ugacucguagaagaugugu

SEQ ID NO: 135890 - RNA, 19 nt, Artificial Sequence
  Description of Artificial Sequence: Synthetic oligonucleotide
  Sense strand starting at position 1012 of SEQ ID NO: 1744
ucgacaggaucagcauaua

SEQ ID NO: 135891 - RNA, 19 nt, Artificial Sequence
  Description of Artificial Sequence: Synthetic oligonucleotide
  Antisense strand to SEQ ID NO: 135890
uauaugcugauccugucga

SEQ ID NO: 135892 - RNA, 19 nt, Artificial Sequence
  Description of Artificial Sequence: Synthetic oligonucleotide
  Sense strand starting at position 1365 of SEQ ID NO: 1744
cgcgcuucugaagaaacua

SEQ ID NO: 135893 - RNA, 19 nt, Artificial Sequence
  Description of Artificial Sequence: Synthetic oligonucleotide
  Antisense strand to SEQ ID NO: 135892
uaguuucuucagaagcgcg

SEQ ID NO: 135894 - RNA, 19 nt, Artificial Sequence
  Description of Artificial Sequence: Synthetic oligonucleotide
  Sense strand starting at position 1466 of SEQ ID NO: 1744
agucauacuaggcacgaaa

SEQ ID NO: 135895 - RNA, 19 nt, Artificial Sequence
  Description of Artificial Sequence: Synthetic oligonucleotide
  Antisense strand to SEQ ID NO: 135894
uuucgugccuaguaugacu

SEQ ID NO: 135896 - RNA, 19 nt, Artificial Sequence
  Description of Artificial Sequence: Synthetic oligonucleotide
  Sense strand starting at position 1636 of SEQ ID NO: 1744
cgccgauguggucuagcuu

SEQ ID NO: 135897 - RNA, 19 nt, Artificial Sequence
  Description of Artificial Sequence: Synthetic oligonucleotide
  Antisense strand to SEQ ID NO: 135896
aagcuagaccacaucggcg

SEQ ID NO: 135898 - RNA, 19 nt, Artificial Sequence
  Description of Artificial Sequence: Synthetic oligonucleotide
  Sense strand starting at position 1821 of SEQ ID NO: 1744
guacucagaccggguaaga

SEQ ID NO: 135899 - RNA, 19 nt, Artificial Sequence
  Description of Artificial Sequence: Synthetic oligonucleotide
  Antisense strand to SEQ ID NO: 135898
ucuuacccggucugaguac

SEQ ID NO: 135900 - RNA, 19 nt, Artificial Sequence
  Description of Artificial Sequence: Synthetic oligonucleotide
  Sense strand starting at position 2126 of SEQ ID NO: 1744
gugguugcuagggacgaua

SEQ ID NO: 135901 - RNA, 19 nt, Artificial Sequence
  Description of Artificial Sequence: Synthetic oligonucleotide
  Antisense strand to SEQ ID NO: 135900
uaucgucccuagcaaccac

SEQ ID NO: 135902 - RNA, 19 nt, Artificial Sequence
  Description of Artificial Sequence: Synthetic oligonucleotide
  Sense strand starting at position 2156 of SEQ ID NO: 1744
cguguagugaguucgccuu

SEQ ID NO: 135903 - RNA, 19 nt, Artificial Sequence
  Description of Artificial Sequence: Synthetic oligonucleotide
  Antisense strand to SEQ ID NO: 135902
aaggcgaacucacuacacg

SEQ ID NO: 135904 - RNA, 19 nt, Artificial Sequence
  Description of Artificial Sequence: Synthetic oligonucleotide
  Sense strand starting at position 2237 of SEQ ID NO: 1744
uugucugaacccugacaua

SEQ ID NO: 135905 - RNA, 19 nt, Artificial Sequence
  Description of Artificial Sequence: Synthetic oligonucleotide
  Antisense strand to SEQ ID NO: 135904
uaugucaggguucagacaa

SEQ ID NO: 135906 - RNA, 19 nt, Artificial Sequence
  Description of Artificial Sequence: Synthetic oligonucleotide
  Sense strand starting at position 2276 of SEQ ID NO: 1744
cguaaucccagcuagagga

SEQ ID NO: 135907 - RNA, 19 nt, Artificial Sequence
  Description of Artificial Sequence: Synthetic oligonucleotide
  Antisense strand to SEQ ID NO: 135906
uccucuagcugggauuacg

SEQ ID NO: 135908 - RNA, 19 nt, Artificial Sequence
  Description of Artificial Sequence: Synthetic oligonucleotide
  Sense strand starting at position 2396 of SEQ ID NO: 1744
caggacuuugggcgguaau

SEQ ID NO: 135909 - RNA, 19 nt, Artificial Sequence
  Description of Artificial Sequence: Synthetic oligonucleotide
  Antisense strand to SEQ ID NO: 135908
auuaccgcccaaaguccug

SEQ ID NO: 135910 - RNA, 19 nt, Artificial Sequence
  Description of Artificial Sequence: Synthetic oligonucleotide
  Sense strand starting at position 2406 of SEQ ID NO: 1744
ggcgguaaugagucggcua

SEQ ID NO: 135911 - RNA, 19 nt, Artificial Sequence
  Description of Artificial Sequence: Synthetic oligonucleotide
  Antisense strand to SEQ ID NO: 135910
uagccgacucauuaccgcc

SEQ ID NO: 135912 - RNA, 19 nt, Artificial Sequence
  Description of Artificial Sequence: Synthetic oligonucleotide
  Sense strand starting at position 2469 of SEQ ID NO: 1744
ccaguuuggcucguuuauu

SEQ ID NO: 135913 - RNA, 19 nt, Artificial Sequence
  Description of Artificial Sequence: Synthetic oligonucleotide
  Antisense strand to SEQ ID NO: 135912
aauaaacgagccaaacugg

SEQ ID NO: 135914 - RNA, 19 nt, Artificial Sequence
  Description of Artificial Sequence: Synthetic oligonucleotide
  Sense strand starting at position 2525 of SEQ ID NO: 1744
gucuuaaaguuuccacaug

SEQ ID NO: 135915 - RNA, 19 nt, Artificial Sequence
  Description of Artificial Sequence: Synthetic oligonucleotide
  Antisense strand to SEQ ID NO: 135914
cauguggaaacuuuaagac

SEQ ID NO: 135916 - RNA, 19 nt, Artificial Sequence
  Description of Artificial Sequence: Synthetic oligonucleotide
  Sense strand starting at position 2534 of SEQ ID NO: 1744
uuuccacaugguuaaggua

SEQ ID NO: 135917 - RNA, 19 nt, Artificial Sequence
  Description of Artificial Sequence: Synthetic oligonucleotide
  Antisense strand to SEQ ID NO: 135916
uaccuuaaccauguggaaa

SEQ ID NO: 135918 - RNA, 19 nt, Artificial Sequence
  Description of Artificial Sequence: Synthetic oligonucleotide
  Sense strand starting at position 2791 of SEQ ID NO: 1744
ucaauaaguugcuugagga

SEQ ID NO: 135919 - RNA, 19 nt, Artificial Sequence
  Description of Artificial Sequence: Synthetic oligonucleotide
  Antisense strand to SEQ ID NO: 135918
uccucaagcaacuuauuga

SEQ ID NO: 135920 - RNA, 19 nt, Artificial Sequence
  Description of Artificial Sequence: Synthetic oligonucleotide
  Sense strand starting at position 2824 of SEQ ID NO: 1744
ucguaauaacacuguaauu

SEQ ID NO: 135921 - RNA, 19 nt, Artificial Sequence
  Description of Artificial Sequence: Synthetic oligonucleotide
  Antisense strand to SEQ ID NO: 135920
aauuacaguguuauuacga

SEQ ID NO: 135922 - RNA, 19 nt, Artificial Sequence
  Description of Artificial Sequence: Synthetic oligonucleotide
  Sense strand starting at position 2966 of SEQ ID NO: 1744
ucauauauuguguacuuga

SEQ ID NO: 135923 - RNA, 19 nt, Artificial Sequence
  Description of Artificial Sequence: Synthetic oligonucleotide
  Antisense strand to SEQ ID NO: 135922
ucaaguacacaauauauga

SEQ ID NO: 135924 - RNA, 19 nt, Artificial Sequence
  Description of Artificial Sequence: Synthetic oligonucleotide
  Sense strand starting at position 2976 of SEQ ID NO: 1744
uguacuugaaauugugaag

SEQ ID NO: 135925 - RNA, 19 nt, Artificial Sequence
  Description of Artificial Sequence: Synthetic oligonucleotide
  Antisense strand to SEQ ID NO: 135924
cuucacaauuucaaguaca

SEQ ID NO: 135926 - RNA, 19 nt, Artificial Sequence
  Description of Artificial Sequence: Synthetic oligonucleotide
  Sense strand starting at position 3021 of SEQ ID NO: 1744
caggaaaguaugugagaug

SEQ ID NO: 135927 - RNA, 19 nt, Artificial Sequence
  Description of Artificial Sequence: Synthetic oligonucleotide
  Antisense strand to SEQ ID NO: 135926
caucucacauacuuuccug

SEQ ID NO: 135928 - RNA, 19 nt, Artificial Sequence
  Description of Artificial Sequence: Synthetic oligonucleotide
  Sense strand starting at position 3042 of SEQ ID NO: 1744
ggauuauguugauuagcuu

SEQ ID NO: 135929 - RNA, 19 nt, Artificial Sequence
  Description of Artificial Sequence: Synthetic oligonucleotide
  Antisense strand to SEQ ID NO: 135928
aagcuaaucaacauaaucc

SEQ ID NO: 135930 - RNA, 19 nt, Artificial Sequence
  Description of Artificial Sequence: Synthetic oligonucleotide
  Sense strand starting at position 3113 of SEQ ID NO: 1744
cguuguauaccauaaacau

SEQ ID NO: 135931 - RNA, 19 nt, Artificial Sequence
  Description of Artificial Sequence: Synthetic oligonucleotide
  Antisense strand to SEQ ID NO: 135930
auguuuaugguauacaacg

SEQ ID NO: 135932 - RNA, 19 nt, Artificial Sequence
  Description of Artificial Sequence: Synthetic oligonucleotide
  Sense strand starting at position 3213 of SEQ ID NO: 1744
gggaaaugccagcaucuca

SEQ ID NO: 135933 - RNA, 19 nt, Artificial Sequence
  Description of Artificial Sequence: Synthetic oligonucleotide
  Antisense strand to SEQ ID NO: 135932
ugagaugcuggcauuuccc

SEQ ID NO: 135934 - RNA, 19 nt, Artificial Sequence
  Description of Artificial Sequence: Synthetic oligonucleotide
  Sense strand starting at position 3245 of SEQ ID NO: 1744
augugauaccacuagucaa

SEQ ID NO: 135935 - RNA, 19 nt, Artificial Sequence
  Description of Artificial Sequence: Synthetic oligonucleotide
  Antisense strand to SEQ ID NO: 135934
uugacuagugguaucacau

SEQ ID NO: 135936 - RNA, 19 nt, Artificial Sequence
  Description of Artificial Sequence: Synthetic oligonucleotide
  Sense strand starting at position 3256 of SEQ ID NO: 1744
cuagucaaguccuuaaccu

SEQ ID NO: 135937 - RNA, 19 nt, Artificial Sequence
  Description of Artificial Sequence: Synthetic oligonucleotide
  Antisense strand to SEQ ID NO: 135936
agguuaaggacuugacuag

SEQ ID NO: 135938 - RNA, 19 nt, Artificial Sequence
  Description of Artificial Sequence: Synthetic oligonucleotide
  Sense strand starting at position 3282 of SEQ ID NO: 1744
ccuguaucucuccaguaaa

SEQ ID NO: 135939 - RNA, 19 nt, Artificial Sequence
  Description of Artificial Sequence: Synthetic oligonucleotide
  Antisense strand to SEQ ID NO: 135938
uuuacuggagagauacagg

SEQ ID NO: 135940 - RNA, 19 nt, Artificial Sequence
  Description of Artificial Sequence: Synthetic oligonucleotide
  Sense strand starting at position 3285 of SEQ ID NO: 1744
guaucucuccaguaaaguu

SEQ ID NO: 135941 - RNA, 19 nt, Artificial Sequence
  Description of Artificial Sequence: Synthetic oligonucleotide
  Antisense strand to SEQ ID NO: 135940
aacuuuacuggagagauac

SEQ ID NO: 135942 - RNA, 19 nt, Artificial Sequence
  Description of Artificial Sequence: Synthetic oligonucleotide
  Sense strand starting at position 3315 of SEQ ID NO: 1744
cuagauuagguuuguaagu

SEQ ID NO: 135943 - RNA, 19 nt, Artificial Sequence
  Description of Artificial Sequence: Synthetic oligonucleotide
  Antisense strand to SEQ ID NO: 135942
acuuacaaaccuaaucuag

SEQ ID NO: 135944 - RNA, 19 nt, Artificial Sequence
  Description of Artificial Sequence: Synthetic oligonucleotide
  Sense strand starting at position 3431 of SEQ ID NO: 1744
auggauucaguaggaguuu

SEQ ID NO: 135945 - RNA, 19 nt, Artificial Sequence
  Description of Artificial Sequence: Synthetic oligonucleotide
  Antisense strand to SEQ ID NO: 135944
aaacuccuacugaauccau

SEQ ID NO: 135946 - RNA, 19 nt, Artificial Sequence
  Description of Artificial Sequence: Synthetic oligonucleotide
  Sense strand starting at position 3442 of SEQ ID NO: 1744
aggaguuuaguuuggucau

SEQ ID NO: 135947 - RNA, 19 nt, Artificial Sequence
  Description of Artificial Sequence: Synthetic oligonucleotide
  Antisense strand to SEQ ID NO: 135946
augaccaaacuaaacuccu

SEQ ID NO: 135948 - RNA, 19 nt, Artificial Sequence
  Description of Artificial Sequence: Synthetic oligonucleotide
  Sense strand starting at position 3464 of SEQ ID NO: 1744
uggccaaucagauguuuag

SEQ ID NO: 135949 - RNA, 19 nt, Artificial Sequence
  Description of Artificial Sequence: Synthetic oligonucleotide
  Antisense strand to SEQ ID NO: 135948
cuaaacaucugauuggcca

SEQ ID NO: 135950 - RNA, 19 nt, Artificial Sequence
  Description of Artificial Sequence: Synthetic oligonucleotide
  Sense strand starting at position 3470 of SEQ ID NO: 1744
aucagauguuuagcacuaa

SEQ ID NO: 135951 - RNA, 19 nt, Artificial Sequence
  Description of Artificial Sequence: Synthetic oligonucleotide
  Antisense strand to SEQ ID NO: 135950
uuagugcuaaacaucugau

SEQ ID NO: 135952 - RNA, 19 nt, Artificial Sequence
  Description of Artificial Sequence: Synthetic oligonucleotide
  Sense strand starting at position 3511 of SEQ ID NO: 1744
guagcaauccucugggauc

SEQ ID NO: 135953 - RNA, 19 nt, Artificial Sequence
  Description of Artificial Sequence: Synthetic oligonucleotide
  Antisense strand to SEQ ID NO: 135952
gaucccagaggauugcuac

SEQ ID NO: 135954 - RNA, 19 nt, Artificial Sequence
  Description of Artificial Sequence: Synthetic oligonucleotide
  Sense strand starting at position 3518 of SEQ ID NO: 1744
uccucugggaucuguuaga

SEQ ID NO: 135955 - RNA, 19 nt, Artificial Sequence
  Description of Artificial Sequence: Synthetic oligonucleotide
  Antisense strand to SEQ ID NO: 135954
ucuaacagaucccagagga

SEQ ID NO: 135956 - RNA, 19 nt, Artificial Sequence
  Description of Artificial Sequence: Synthetic oligonucleotide
  Sense strand starting at position 3523 of SEQ ID NO: 1744
ugggaucuguuagauuucu

SEQ ID NO: 135957 - RNA, 19 nt, Artificial Sequence
  Description of Artificial Sequence: Synthetic oligonucleotide
  Antisense strand to SEQ ID NO: 135956
agaaaucuaacagauccca

SEQ ID NO: 135958 - RNA, 19 nt, Artificial Sequence
  Description of Artificial Sequence: Synthetic oligonucleotide
  Sense strand starting at position 3651 of SEQ ID NO: 1744
acagcugcucuuuagaagu

SEQ ID NO: 135959 - RNA, 19 nt, Artificial Sequence
  Description of Artificial Sequence: Synthetic oligonucleotide
  Antisense strand to SEQ ID NO: 135958
acuucuaaagagcagcugu

SEQ ID NO: 135960 - RNA, 19 nt, Artificial Sequence
  Description of Artificial Sequence: Synthetic oligonucleotide
  Sense strand starting at position 10 of SEQ ID NO: 1749
uggacucuucuauggguua

SEQ ID NO: 135961 - RNA, 19 nt, Artificial Sequence
  Description of Artificial Sequence: Synthetic oligonucleotide
  Antisense strand to SEQ ID NO: 135960
uaacccauagaagagucca

SEQ ID NO: 135962 - RNA, 19 nt, Artificial Sequence
  Description of Artificial Sequence: Synthetic oligonucleotide
  Sense strand starting at position 13 of SEQ ID NO: 1749
acucuucuauggguuauaa

SEQ ID NO: 135963 - RNA, 19 nt, Artificial Sequence
  Description of Artificial Sequence: Synthetic oligonucleotide
  Antisense strand to SEQ ID NO: 135962
uuauaacccauagaagagu

SEQ ID NO: 135964 - RNA, 19 nt, Artificial Sequence
  Description of Artificial Sequence: Synthetic oligonucleotide
  Sense strand starting at position 15 of SEQ ID NO: 1749
ucuucuauggguuauaagu

SEQ ID NO: 135965 - RNA, 19 nt, Artificial Sequence
  Description of Artificial Sequence: Synthetic oligonucleotide
  Antisense strand to SEQ ID NO: 135964
acuuauaacccauagaaga

SEQ ID NO: 135966 - RNA, 19 nt, Artificial Sequence
  Description of Artificial Sequence: Synthetic oligonucleotide
  Sense strand starting at position 71 of SEQ ID NO: 1749
guacauaaguaggcuuaaa

SEQ ID NO: 135967 - RNA, 19 nt, Artificial Sequence
  Description of Artificial Sequence: Synthetic oligonucleotide
  Antisense strand to SEQ ID NO: 135966
uuuaagccuacuuauguac

SEQ ID NO: 135968 - RNA, 19 nt, Artificial Sequence
  Description of Artificial Sequence: Synthetic oligonucleotide
  Sense strand starting at position 115 of SEQ ID NO: 1749
ucacauacauuugggauga

SEQ ID NO: 135969 - RNA, 19 nt, Artificial Sequence
  Description of Artificial Sequence: Synthetic oligonucleotide
  Antisense strand to SEQ ID NO: 135968
ucaucccaaauguauguga

SEQ ID NO: 135970 - RNA, 19 nt, Artificial Sequence
  Description of Artificial Sequence: Synthetic oligonucleotide
  Sense strand starting at position 162 of SEQ ID NO: 1749
uuguucuaccuagacauga

SEQ ID NO: 135971 - RNA, 19 nt, Artificial Sequence
  Description of Artificial Sequence: Synthetic oligonucleotide
  Antisense strand to SEQ ID NO: 135970
ucaugucuagguagaacaa

SEQ ID NO: 135972 - RNA, 19 nt, Artificial Sequence
  Description of Artificial Sequence: Synthetic oligonucleotide
  Sense strand starting at position 193 of SEQ ID NO: 1749
aucacuugcuugucaaaga

SEQ ID NO: 135973 - RNA, 19 nt, Artificial Sequence
  Description of Artificial Sequence: Synthetic oligonucleotide
  Antisense strand to SEQ ID NO: 135972
ucuuugacaagcaagugau

SEQ ID NO: 135974 - RNA, 19 nt, Artificial Sequence
  Description of Artificial Sequence: Synthetic oligonucleotide
  Sense strand starting at position 203 of SEQ ID NO: 1749
ugucaaagaccuuaguauu

SEQ ID NO: 135975 - RNA, 19 nt, Artificial Sequence
  Description of Artificial Sequence: Synthetic oligonucleotide
  Antisense strand to SEQ ID NO: 135974
aauacuaaggucuuugaca

SEQ ID NO: 135976 - RNA, 19 nt, Artificial Sequence
  Description of Artificial Sequence: Synthetic oligonucleotide
  Sense strand starting at position 328 of SEQ ID NO: 1749
gugcuauguuaagugauuu

SEQ ID NO: 135977 - RNA, 19 nt, Artificial Sequence
  Description of Artificial Sequence: Synthetic oligonucleotide
  Antisense strand to SEQ ID NO: 135976
aaaucacuuaacauagcac

SEQ ID NO: 135978 - RNA, 19 nt, Artificial Sequence
  Description of Artificial Sequence: Synthetic oligonucleotide
  Sense strand starting at position 398 of SEQ ID NO: 1749
agauguuagcucuagggca

SEQ ID NO: 135979 - RNA, 19 nt, Artificial Sequence
  Description of Artificial Sequence: Synthetic oligonucleotide
  Antisense strand to SEQ ID NO: 135978
ugcccuagagcuaacaucu

SEQ ID NO: 135980 - RNA, 19 nt, Artificial Sequence
  Description of Artificial Sequence: Synthetic oligonucleotide
  Sense strand starting at position 604 of SEQ ID NO: 1749
ugcagaaucuaaguuuguu

SEQ ID NO: 135981 - RNA, 19 nt, Artificial Sequence
  Description of Artificial Sequence: Synthetic oligonucleotide
  Antisense strand to SEQ ID NO: 135980
aacaaacuuagauucugca

SEQ ID NO: 135982 - RNA, 19 nt, Artificial Sequence
  Description of Artificial Sequence: Synthetic oligonucleotide
  Sense strand starting at position 632 of SEQ ID NO: 1749
ugaucaaagacgugcuacu

SEQ ID NO: 135983 - RNA, 19 nt, Artificial Sequence
  Description of Artificial Sequence: Synthetic oligonucleotide
  Antisense strand to SEQ ID NO: 135982
aguagcacgucuuugauca

SEQ ID NO: 135984 - RNA, 19 nt, Artificial Sequence
  Description of Artificial Sequence: Synthetic oligonucleotide
  Sense strand starting at position 687 of SEQ ID NO: 1749
auggucauuugacaaauau

SEQ ID NO: 135985 - RNA, 19 nt, Artificial Sequence
  Description of Artificial Sequence: Synthetic oligonucleotide
  Antisense strand to SEQ ID NO: 135984
auauuugucaaaugaccau

SEQ ID NO: 135986 - RNA, 19 nt, Artificial Sequence
  Description of Artificial Sequence: Synthetic oligonucleotide
  Sense strand starting at position 696 of SEQ ID NO: 1749
ugacaaauauguuugggca

SEQ ID NO: 135987 - RNA, 19 nt, Artificial Sequence
  Description of Artificial Sequence: Synthetic oligonucleotide
  Antisense strand to SEQ ID NO: 135986
ugcccaaacauauuuguca

SEQ ID NO: 135988 - RNA, 19 nt, Artificial Sequence
  Description of Artificial Sequence: Synthetic oligonucleotide
  Sense strand starting at position 700 of SEQ ID NO: 1749
aaauauguuugggcaccua

SEQ ID NO: 135989 - RNA, 19 nt, Artificial Sequence
  Description of Artificial Sequence: Synthetic oligonucleotide
  Antisense strand to SEQ ID NO: 135988
uaggugcccaaacauauuu

SEQ ID NO: 135990 - RNA, 19 nt, Artificial Sequence
  Description of Artificial Sequence: Synthetic oligonucleotide
  Sense strand starting at position 750 of SEQ ID NO: 1749
gugcuaaggauuugcacau

SEQ ID NO: 135991 - RNA, 19 nt, Artificial Sequence
  Description of Artificial Sequence: Synthetic oligonucleotide
  Antisense strand to SEQ ID NO: 135990
augugcaaauccuuagcac

SEQ ID NO: 135992 - RNA, 19 nt, Artificial Sequence
  Description of Artificial Sequence: Synthetic oligonucleotide
  Sense strand starting at position 779 of SEQ ID NO: 1749
cuaaauccucccgacaagu

SEQ ID NO: 135993 - RNA, 19 nt, Artificial Sequence
  Description of Artificial Sequence: Synthetic oligonucleotide
  Antisense strand to SEQ ID NO: 135992
acuugucgggaggauuuag

SEQ ID NO: 135994 - RNA, 19 nt, Artificial Sequence
  Description of Artificial Sequence: Synthetic oligonucleotide
  Sense strand starting at position 807 of SEQ ID NO: 1749
ugguauugcuaaucuuaaa

SEQ ID NO: 135995 - RNA, 19 nt, Artificial Sequence
  Description of Artificial Sequence: Synthetic oligonucleotide
  Antisense strand to SEQ ID NO: 135994
uuuaagauuagcaauacca

SEQ ID NO: 135996 - RNA, 19 nt, Artificial Sequence
  Description of Artificial Sequence: Synthetic oligonucleotide
  Sense strand starting at position 1126 of SEQ ID NO: 1749
gucucacucuccucaggau

SEQ ID NO: 135997 - RNA, 19 nt, Artificial Sequence
  Description of Artificial Sequence: Synthetic oligonucleotide
  Antisense strand to SEQ ID NO: 135996
auccugaggagagugagac

SEQ ID NO: 135998 - RNA, 19 nt, Artificial Sequence
  Description of Artificial Sequence: Synthetic oligonucleotide
  Sense strand starting at position 1148 of SEQ ID NO: 1749
accuuaugccgccaacaaa

SEQ ID NO: 135999 - RNA, 19 nt, Artificial Sequence
  Description of Artificial Sequence: Synthetic oligonucleotide
  Antisense strand to SEQ ID NO: 135998
uuuguuggcggcauaaggu

SEQ ID NO: 136000 - RNA, 19 nt, Artificial Sequence
  Description of Artificial Sequence: Synthetic oligonucleotide
  Sense strand starting at position 1191 of SEQ ID NO: 1749
ggaaacuuaucagagauuc

SEQ ID NO: 136001 - RNA, 19 nt, Artificial Sequence
  Description of Artificial Sequence: Synthetic oligonucleotide
  Antisense strand to SEQ ID NO: 136000
gaaucucugauaaguuucc

SEQ ID NO: 136002 - RNA, 19 nt, Artificial Sequence
  Description of Artificial Sequence: Synthetic oligonucleotide
  Sense strand starting at position 1232 of SEQ ID NO: 1749
ugggcaggcgcuuaaacau

SEQ ID NO: 136003 - RNA, 19 nt, Artificial Sequence
  Description of Artificial Sequence: Synthetic oligonucleotide
  Antisense strand to SEQ ID NO: 136002
auguuuaagcgccugccca

SEQ ID NO: 136004 - RNA, 19 nt, Artificial Sequence
  Description of Artificial Sequence: Synthetic oligonucleotide
  Sense strand starting at position 1257 of SEQ ID NO: 1749
acugauucccuuuaggcaa

SEQ ID NO: 136005 - RNA, 19 nt, Artificial Sequence
  Description of Artificial Sequence: Synthetic oligonucleotide
  Antisense strand to SEQ ID NO: 136004
uugccuaaagggaaucagu

SEQ ID NO: 136006 - RNA, 19 nt, Artificial Sequence
  Description of Artificial Sequence: Synthetic oligonucleotide
  Sense strand starting at position 1857 of SEQ ID NO: 1749
cuuggauaccgaugaggua

SEQ ID NO: 136007 - RNA, 19 nt, Artificial Sequence
  Description of Artificial Sequence: Synthetic oligonucleotide
  Antisense strand to SEQ ID NO: 136006
uaccucaucgguauccaag

SEQ ID NO: 136008 - RNA, 19 nt, Artificial Sequence
  Description of Artificial Sequence: Synthetic oligonucleotide
  Sense strand starting at position 1936 of SEQ ID NO: 1749
ccaggucucaccggugaga

SEQ ID NO: 136009 - RNA, 19 nt, Artificial Sequence
  Description of Artificial Sequence: Synthetic oligonucleotide
  Antisense strand to SEQ ID NO: 136008
ucucaccggugagaccugg

SEQ ID NO: 136010 - RNA, 19 nt, Artificial Sequence
  Description of Artificial Sequence: Synthetic oligonucleotide
  Sense strand starting at position 1938 of SEQ ID NO: 1749
aggucucaccggugagaca

SEQ ID NO: 136011 - RNA, 19 nt, Artificial Sequence
  Description of Artificial Sequence: Synthetic oligonucleotide
  Antisense strand to SEQ ID NO: 136010
ugucucaccggugagaccu

SEQ ID NO: 136012 - RNA, 19 nt, Artificial Sequence
  Description of Artificial Sequence: Synthetic oligonucleotide
  Sense strand starting at position 1957 of SEQ ID NO: 1749
gcaccucagagcgaagauu

SEQ ID NO: 136013 - RNA, 19 nt, Artificial Sequence
  Description of Artificial Sequence: Synthetic oligonucleotide
  Antisense strand to SEQ ID NO: 136012
aaucuucgcucugaggugc

SEQ ID NO: 136014 - RNA, 19 nt, Artificial Sequence
  Description of Artificial Sequence: Synthetic oligonucleotide
  Sense strand starting at position 2022 of SEQ ID NO: 1749
acaacugucgcgagagguu

SEQ ID NO: 136015 - RNA, 19 nt, Artificial Sequence
  Description of Artificial Sequence: Synthetic oligonucleotide
  Antisense strand to SEQ ID NO: 136014
aaccucucgcgacaguugu

SEQ ID NO: 136016 - RNA, 19 nt, Artificial Sequence
  Description of Artificial Sequence: Synthetic oligonucleotide
  Sense strand starting at position 2124 of SEQ ID NO: 1749
ggucacuugccuuauguga

SEQ ID NO: 136017 - RNA, 19 nt, Artificial Sequence
  Description of Artificial Sequence: Synthetic oligonucleotide
  Antisense strand to SEQ ID NO: 136016
ucacauaaggcaagugacc

SEQ ID NO: 136018 - RNA, 19 nt, Artificial Sequence
  Description of Artificial Sequence: Synthetic oligonucleotide
  Sense strand starting at position 2145 of SEQ ID NO: 1749
cccaguuucucuguuuaca

SEQ ID NO: 136019 - RNA, 19 nt, Artificial Sequence
  Description of Artificial Sequence: Synthetic oligonucleotide
  Antisense strand to SEQ ID NO: 136018
uguaaacagagaaacuggg

SEQ ID NO: 136020 - RNA, 19 nt, Artificial Sequence
  Description of Artificial Sequence: Synthetic oligonucleotide
  Sense strand starting at position 2367 of SEQ ID NO: 1749
aauaguauaugguuggauu

SEQ ID NO: 136021 - RNA, 19 nt, Artificial Sequence
  Description of Artificial Sequence: Synthetic oligonucleotide
  Antisense strand to SEQ ID NO: 136020
aauccaaccauauacuauu

SEQ ID NO: 136022 - RNA, 19 nt, Artificial Sequence
  Description of Artificial Sequence: Synthetic oligonucleotide
  Sense strand starting at position 2368 of SEQ ID NO: 1749
auaguauaugguuggauua

SEQ ID NO: 136023 - RNA, 19 nt, Artificial Sequence
  Description of Artificial Sequence: Synthetic oligonucleotide
  Antisense strand to SEQ ID NO: 136022
uaauccaaccauauacuau

SEQ ID NO: 136024 - RNA, 19 nt, Artificial Sequence
  Description of Artificial Sequence: Synthetic oligonucleotide
  Sense strand starting at position 2369 of SEQ ID NO: 1749
uaguauaugguuggauuaa

SEQ ID NO: 136025 - RNA, 19 nt, Artificial Sequence
  Description of Artificial Sequence: Synthetic oligonucleotide
  Antisense strand to SEQ ID NO: 136024
uuaauccaaccauauacua

SEQ ID NO: 136026 - RNA, 19 nt, Artificial Sequence
  Description of Artificial Sequence: Synthetic oligonucleotide
  Sense strand starting at position 2584 of SEQ ID NO: 1749
gacagagaaucgcuugauc

SEQ ID NO: 136027 - RNA, 19 nt, Artificial Sequence
  Description of Artificial Sequence: Synthetic oligonucleotide
  Antisense strand to SEQ ID NO: 136026
gaucaagcgauucucuguc

SEQ ID NO: 136028 - RNA, 19 nt, Artificial Sequence
  Description of Artificial Sequence: Synthetic oligonucleotide
  Sense strand starting at position 2587 of SEQ ID NO: 1749
agagaaucgcuugaucccu

SEQ ID NO: 136029 - RNA, 19 nt, Artificial Sequence
  Description of Artificial Sequence: Synthetic oligonucleotide
  Antisense strand to SEQ ID NO: 136028
agggaucaagcgauucucu

SEQ ID NO: 136030 - RNA, 19 nt, Artificial Sequence
  Description of Artificial Sequence: Synthetic oligonucleotide
  Sense strand starting at position 2764 of SEQ ID NO: 1749
uuggaagagauguguuucu

SEQ ID NO: 136031 - RNA, 19 nt, Artificial Sequence
  Description of Artificial Sequence: Synthetic oligonucleotide
  Antisense strand to SEQ ID NO: 136030
agaaacacaucucuuccaa

SEQ ID NO: 136032 - RNA, 19 nt, Artificial Sequence
  Description of Artificial Sequence: Synthetic oligonucleotide
  Sense strand starting at position 2858 of SEQ ID NO: 1749
uguggugaaagucauuauc

SEQ ID NO: 136033 - RNA, 19 nt, Artificial Sequence
  Description of Artificial Sequence: Synthetic oligonucleotide
  Antisense strand to SEQ ID NO: 136032
gauaaugacuuucaccaca

SEQ ID NO: 136034 - RNA, 19 nt, Artificial Sequence
  Description of Artificial Sequence: Synthetic oligonucleotide
  Sense strand starting at position 2860 of SEQ ID NO: 1749
uggugaaagucauuaucau

SEQ ID NO: 136035 - RNA, 19 nt, Artificial Sequence
  Description of Artificial Sequence: Synthetic oligonucleotide
  Antisense strand to SEQ ID NO: 136034
augauaaugacuuucacca

SEQ ID NO: 136036 - RNA, 19 nt, Artificial Sequence
  Description of Artificial Sequence: Synthetic oligonucleotide
  Sense strand starting at position 2887 of SEQ ID NO: 1749
guaaauguaaauugggaau

SEQ ID NO: 136037 - RNA, 19 nt, Artificial Sequence
  Description of Artificial Sequence: Synthetic oligonucleotide
  Antisense strand to SEQ ID NO: 136036
auucccaauuuacauuuac

SEQ ID NO: 136038 - RNA, 19 nt, Artificial Sequence
  Description of Artificial Sequence: Synthetic oligonucleotide
  Sense strand starting at position 3374 of SEQ ID NO: 1749
ccuugaugguaauuaggaa

SEQ ID NO: 136039 - RNA, 19 nt, Artificial Sequence
  Description of Artificial Sequence: Synthetic oligonucleotide
  Antisense strand to SEQ ID NO: 136038
uuccuaauuaccaucaagg

SEQ ID NO: 136040 - RNA, 19 nt, Artificial Sequence
  Description of Artificial Sequence: Synthetic oligonucleotide
  Sense strand starting at position 726 of SEQ ID NO: 1747
aguaauaugguuuguuaca

SEQ ID NO: 136041 - RNA, 19 nt, Artificial Sequence
  Description of Artificial Sequence: Synthetic oligonucleotide
  Antisense strand to SEQ ID NO: 136040
uguaacaaaccauauuacu

SEQ ID NO: 136042 - RNA, 19 nt, Artificial Sequence
  Description of Artificial Sequence: Synthetic oligonucleotide
  Sense strand starting at position 727 of SEQ ID NO: 1747
guaauaugguuuguuacaa

SEQ ID NO: 136043 - RNA, 19 nt, Artificial Sequence
  Description of Artificial Sequence: Synthetic oligonucleotide
  Antisense strand to SEQ ID NO: 136042
uuguaacaaaccauauuac

SEQ ID NO: 136044 - RNA, 19 nt, Artificial Sequence
  Description of Artificial Sequence: Synthetic oligonucleotide
  Sense strand starting at position 768 of SEQ ID NO: 1747
guacucuuacuauaugauc

SEQ ID NO: 136045 - RNA, 19 nt, Artificial Sequence
  Description of Artificial Sequence: Synthetic oligonucleotide
  Antisense strand to SEQ ID NO: 136044
gaucauauaguaagaguac

SEQ ID NO: 136046 - RNA, 19 nt, Artificial Sequence
  Description of Artificial Sequence: Synthetic oligonucleotide
  Sense strand starting at position 851 of SEQ ID NO: 1747
ggauguauacauuagcuuu

SEQ ID NO: 136047 - RNA, 19 nt, Artificial Sequence
  Description of Artificial Sequence: Synthetic oligonucleotide
  Antisense strand to SEQ ID NO: 136046
aaagcuaauguauacaucc

SEQ ID NO: 136048 - RNA, 19 nt, Artificial Sequence
  Description of Artificial Sequence: Synthetic oligonucleotide
  Sense strand starting at position 932 of SEQ ID NO: 1747
ccuguaguauaucuagaca

SEQ ID NO: 136049 - RNA, 19 nt, Artificial Sequence
  Description of Artificial Sequence: Synthetic oligonucleotide
  Antisense strand to SEQ ID NO: 136048
ugucuagauauacuacagg

SEQ ID NO: 136050 - RNA, 19 nt, Artificial Sequence
  Description of Artificial Sequence: Synthetic oligonucleotide
  Sense strand starting at position 1203 of SEQ ID NO: 1747
cucuguauccuguaauggu

SEQ ID NO: 136051 - RNA, 19 nt, Artificial Sequence
  Description of Artificial Sequence: Synthetic oligonucleotide
  Antisense strand to SEQ ID NO: 136050
accauuacaggauacagag

SEQ ID NO: 136052 - RNA, 19 nt, Artificial Sequence
  Description of Artificial Sequence: Synthetic oligonucleotide
  Sense strand starting at position 1207 of SEQ ID NO: 1747
guauccuguaaugguagau

SEQ ID NO: 136053 - RNA, 19 nt, Artificial Sequence
  Description of Artificial Sequence: Synthetic oligonucleotide
  Antisense strand to SEQ ID NO: 136052
aucuaccauuacaggauac

SEQ ID NO: 136054 - RNA, 19 nt, Artificial Sequence
  Description of Artificial Sequence: Synthetic oligonucleotide
  Sense strand starting at position 1211 of SEQ ID NO: 1747
ccuguaaugguagauacau

SEQ ID NO: 136055 - RNA, 19 nt, Artificial Sequence
  Description of Artificial Sequence: Synthetic oligonucleotide
  Antisense strand to SEQ ID NO: 136054
auguaucuaccauuacagg

SEQ ID NO: 136056 - RNA, 19 nt, Artificial Sequence
  Description of Artificial Sequence: Synthetic oligonucleotide
  Sense strand starting at position 1339 of SEQ ID NO: 1747
aauguaucacccuggugga

SEQ ID NO: 136057 - RNA, 19 nt, Artificial Sequence
  Description of Artificial Sequence: Synthetic oligonucleotide
  Antisense strand to SEQ ID NO: 136056
uccaccagggugauacauu

SEQ ID NO: 136058 - RNA, 19 nt, Artificial Sequence
  Description of Artificial Sequence: Synthetic oligonucleotide
  Sense strand starting at position 1340 of SEQ ID NO: 1747
auguaucacccugguggaa

SEQ ID NO: 136059 - RNA, 19 nt, Artificial Sequence
  Description of Artificial Sequence: Synthetic oligonucleotide
  Antisense strand to SEQ ID NO: 136058
uuccaccagggugauacau

SEQ ID NO: 136060 - RNA, 19 nt, Artificial Sequence
  Description of Artificial Sequence: Synthetic oligonucleotide
  Sense strand starting at position 1376 of SEQ ID NO: 1747
augcuauacauguggguga

SEQ ID NO: 136061 - RNA, 19 nt, Artificial Sequence
  Description of Artificial Sequence: Synthetic oligonucleotide
  Antisense strand to SEQ ID NO: 136060
ucacccacauguauagcau

SEQ ID NO: 136062 - RNA, 19 nt, Artificial Sequence
  Description of Artificial Sequence: Synthetic oligonucleotide
  Sense strand starting at position 1395 of SEQ ID NO: 1747
ggaggaaugugggaaaucu

SEQ ID NO: 136063 - RNA, 19 nt, Artificial Sequence
  Description of Artificial Sequence: Synthetic oligonucleotide
  Antisense strand to SEQ ID NO: 136062
agauuucccacauuccucc

SEQ ID NO: 136064 - RNA, 19 nt, Artificial Sequence
  Description of Artificial Sequence: Synthetic oligonucleotide
  Sense strand starting at position 1505 of SEQ ID NO: 1747
ucauauuggugugucccaa

SEQ ID NO: 136065 - RNA, 19 nt, Artificial Sequence
  Description of Artificial Sequence: Synthetic oligonucleotide
  Antisense strand to SEQ ID NO: 136064
uugggacacaccaauauga

SEQ ID NO: 136066 - RNA, 19 nt, Artificial Sequence
  Description of Artificial Sequence: Synthetic oligonucleotide
  Sense strand starting at position 1581 of SEQ ID NO: 1747
gcacaaagacauuggacuu

SEQ ID NO: 136067 - RNA, 19 nt, Artificial Sequence
  Description of Artificial Sequence: Synthetic oligonucleotide
  Antisense strand to SEQ ID NO: 136066
aaguccaaugucuuugugc

SEQ ID NO: 136068 - RNA, 19 nt, Artificial Sequence
  Description of Artificial Sequence: Synthetic oligonucleotide
  Sense strand starting at position 1757 of SEQ ID NO: 1747
ccagguuucggcgugugaa

SEQ ID NO: 136069 - RNA, 19 nt, Artificial Sequence
  Description of Artificial Sequence: Synthetic oligonucleotide
  Antisense strand to SEQ ID NO: 136068
uucacacgccgaaaccugg

SEQ ID NO: 136070 - RNA, 19 nt, Artificial Sequence
  Description of Artificial Sequence: Synthetic oligonucleotide
  Sense strand starting at position 1759 of SEQ ID NO: 1747
agguuucggcgugugaagu

SEQ ID NO: 136071 - RNA, 19 nt, Artificial Sequence
  Description of Artificial Sequence: Synthetic oligonucleotide
  Antisense strand to SEQ ID NO: 136070
acuucacacgccgaaaccu

SEQ ID NO: 136072 - RNA, 19 nt, Artificial Sequence
  Description of Artificial Sequence: Synthetic oligonucleotide
  Sense strand starting at position 1941 of SEQ ID NO: 1747
guacaauccuacucuaguc

SEQ ID NO: 136073 - RNA, 19 nt, Artificial Sequence
  Description of Artificial Sequence: Synthetic oligonucleotide
  Antisense strand to SEQ ID NO: 136072
gacuagaguaggauuguac

SEQ ID NO: 136074 - RNA, 19 nt, Artificial Sequence
  Description of Artificial Sequence: Synthetic oligonucleotide
  Sense strand starting at position 1969 of SEQ ID NO: 1747
augcaacagcuaugaaaua

SEQ ID NO: 136075 - RNA, 19 nt, Artificial Sequence
  Description of Artificial Sequence: Synthetic oligonucleotide
  Antisense strand to SEQ ID NO: 136074
uauuucauagcuguugcau

SEQ ID NO: 136076 - RNA, 19 nt, Artificial Sequence
  Description of Artificial Sequence: Synthetic oligonucleotide
  Sense strand starting at position 1978 of SEQ ID NO: 1747
cuaugaaauagcugguuag

SEQ ID NO: 136077 - RNA, 19 nt, Artificial Sequence
  Description of Artificial Sequence: Synthetic oligonucleotide
  Antisense strand to SEQ ID NO: 136076
cuaaccagcuauuucauag

SEQ ID NO: 136078 - RNA, 19 nt, Artificial Sequence
  Description of Artificial Sequence: Synthetic oligonucleotide
  Sense strand starting at position 1979 of SEQ ID NO: 1747
uaugaaauagcugguuagu

SEQ ID NO: 136079 - RNA, 19 nt, Artificial Sequence
  Description of Artificial Sequence: Synthetic oligonucleotide
  Antisense strand to SEQ ID NO: 136078
acuaaccagcuauuucaua

SEQ ID NO: 136080 - RNA, 19 nt, Artificial Sequence
  Description of Artificial Sequence: Synthetic oligonucleotide
  Sense strand starting at position 1981 of SEQ ID NO: 1747
ugaaauagcugguuaguac

SEQ ID NO: 136081 - RNA, 19 nt, Artificial Sequence
  Description of Artificial Sequence: Synthetic oligonucleotide
  Antisense strand to SEQ ID NO: 136080
guacuaaccagcuauuuca

SEQ ID NO: 136082 - RNA, 19 nt, Artificial Sequence
  Description of Artificial Sequence: Synthetic oligonucleotide
  Sense strand starting at position 1982 of SEQ ID NO: 1747
gaaauagcugguuaguacu

SEQ ID NO: 136083 - RNA, 19 nt, Artificial Sequence
  Description of Artificial Sequence: Synthetic oligonucleotide
  Antisense strand to SEQ ID NO: 136082
aguacuaaccagcuauuuc

SEQ ID NO: 136084 - RNA, 19 nt, Artificial Sequence
  Description of Artificial Sequence: Synthetic oligonucleotide
  Sense strand starting at position 2004 of SEQ ID NO: 1747
agcaauucuuggccacaaa

SEQ ID NO: 136085 - RNA, 19 nt, Artificial Sequence
  Description of Artificial Sequence: Synthetic oligonucleotide
  Antisense strand to SEQ ID NO: 136084
uuuguggccaagaauugcu

SEQ ID NO: 136086 - RNA, 19 nt, Artificial Sequence
  Description of Artificial Sequence: Synthetic oligonucleotide
  Sense strand starting at position 2005 of SEQ ID NO: 1747
gcaauucuuggccacaaac

SEQ ID NO: 136087 - RNA, 19 nt, Artificial Sequence
  Description of Artificial Sequence: Synthetic oligonucleotide
  Antisense strand to SEQ ID NO: 136086
guuuguggccaagaauugc

SEQ ID NO: 136088 - RNA, 19 nt, Artificial Sequence
  Description of Artificial Sequence: Synthetic oligonucleotide
  Sense strand starting at position 2033 of SEQ ID NO: 1747
ucuauaguggaaugaaacu

SEQ ID NO: 136089 - RNA, 19 nt, Artificial Sequence
  Description of Artificial Sequence: Synthetic oligonucleotide
  Antisense strand to SEQ ID NO: 136088
aguuucauuccacuauaga

SEQ ID NO: 136090 - RNA, 19 nt, Artificial Sequence
  Description of Artificial Sequence: Synthetic oligonucleotide
  Sense strand starting at position 2055 of SEQ ID NO: 1747
agcagccuugcuuaaacua

SEQ ID NO: 136091 - RNA, 19 nt, Artificial Sequence
  Description of Artificial Sequence: Synthetic oligonucleotide
  Antisense strand to SEQ ID NO: 136090
uaguuuaagcaaggcugcu

SEQ ID NO: 136092 - RNA, 19 nt, Artificial Sequence
  Description of Artificial Sequence: Synthetic oligonucleotide
  Sense strand starting at position 2095 of SEQ ID NO: 1747
guuucugccguagaaggaa

SEQ ID NO: 136093 - RNA, 19 nt, Artificial Sequence
  Description of Artificial Sequence: Synthetic oligonucleotide
  Antisense strand to SEQ ID NO: 136092
uuccuucuacggcagaaac

SEQ ID NO: 136094 - RNA, 19 nt, Artificial Sequence
  Description of Artificial Sequence: Synthetic oligonucleotide
  Sense strand starting at position 2640 of SEQ ID NO: 1747
uuccaucauucugcaguau

SEQ ID NO: 136095 - RNA, 19 nt, Artificial Sequence
  Description of Artificial Sequence: Synthetic oligonucleotide
  Antisense strand to SEQ ID NO: 136094
auacugcagaaugauggaa

SEQ ID NO: 136096 - RNA, 19 nt, Artificial Sequence
  Description of Artificial Sequence: Synthetic oligonucleotide
  Sense strand starting at position 2641 of SEQ ID NO: 1747
uccaucauucugcaguauu

SEQ ID NO: 136097 - RNA, 19 nt, Artificial Sequence
  Description of Artificial Sequence: Synthetic oligonucleotide
  Antisense strand to SEQ ID NO: 136096
aauacugcagaaugaugga

SEQ ID NO: 136098 - RNA, 19 nt, Artificial Sequence
  Description of Artificial Sequence: Synthetic oligonucleotide
  Sense strand starting at position 2705 of SEQ ID NO: 1747
uugucauaccaacaaaggu

SEQ ID NO: 136099 - RNA, 19 nt, Artificial Sequence
  Description of Artificial Sequence: Synthetic oligonucleotide
  Antisense strand to SEQ ID NO: 136098
accuuuguugguaugacaa

SEQ ID NO: 136100 - RNA, 19 nt, Artificial Sequence
  Description of Artificial Sequence: Synthetic oligonucleotide
  Sense strand starting at position 2732 of SEQ ID NO: 1747
gaggaauagcaucaggugu

SEQ ID NO: 136101 - RNA, 19 nt, Artificial Sequence
  Description of Artificial Sequence: Synthetic oligonucleotide
  Antisense strand to SEQ ID NO: 136100
acaccugaugcuauuccuc

SEQ ID NO: 136102 - RNA, 19 nt, Artificial Sequence
  Description of Artificial Sequence: Synthetic oligonucleotide
  Sense strand starting at position 3018 of SEQ ID NO: 1747
guacuuuauccucacaagu

SEQ ID NO: 136103 - RNA, 19 nt, Artificial Sequence
  Description of Artificial Sequence: Synthetic oligonucleotide
  Antisense strand to SEQ ID NO: 136102
acuugugaggauaaaguac

SEQ ID NO: 136104 - RNA, 19 nt, Artificial Sequence
  Description of Artificial Sequence: Synthetic oligonucleotide
  Sense strand starting at position 3026 of SEQ ID NO: 1747
uccucacaagucuauuagu

SEQ ID NO: 136105 - RNA, 19 nt, Artificial Sequence
  Description of Artificial Sequence: Synthetic oligonucleotide
  Antisense strand to SEQ ID NO: 136104
acuaauagacuugugagga

SEQ ID NO: 136106 - RNA, 19 nt, Artificial Sequence
  Description of Artificial Sequence: Synthetic oligonucleotide
  Sense strand starting at position 3031 of SEQ ID NO: 1747
acaagucuauuagugcaua

SEQ ID NO: 136107 - RNA, 19 nt, Artificial Sequence
  Description of Artificial Sequence: Synthetic oligonucleotide
  Antisense strand to SEQ ID NO: 136106
uaugcacuaauagacuugu

SEQ ID NO: 136108 - RNA, 19 nt, Artificial Sequence
  Description of Artificial Sequence: Synthetic oligonucleotide
  Sense strand starting at position 3034 of SEQ ID NO: 1747
agucuauuagugcauauua

SEQ ID NO: 136109 - RNA, 19 nt, Artificial Sequence
  Description of Artificial Sequence: Synthetic oligonucleotide
  Antisense strand to SEQ ID NO: 136108
uaauaugcacuaauagacu

SEQ ID NO: 136110 - RNA, 19 nt, Artificial Sequence
  Description of Artificial Sequence: Synthetic oligonucleotide
  Sense strand starting at position 3802 of SEQ ID NO: 1747
augccugauuaucugcaua

SEQ ID NO: 136111 - RNA, 19 nt, Artificial Sequence
  Description of Artificial Sequence: Synthetic oligonucleotide
  Antisense strand to SEQ ID NO: 136110
uaugcagauaaucaggcau

SEQ ID NO: 136112 - RNA, 19 nt, Artificial Sequence
  Description of Artificial Sequence: Synthetic oligonucleotide
  Sense strand starting at position 3804 of SEQ ID NO: 1747
gccugauuaucugcauaua

SEQ ID NO: 136113 - RNA, 19 nt, Artificial Sequence
  Description of Artificial Sequence: Synthetic oligonucleotide
  Antisense strand to SEQ ID NO: 136112
uauaugcagauaaucaggc

SEQ ID NO: 136114 - RNA, 19 nt, Artificial Sequence
  Description of Artificial Sequence: Synthetic oligonucleotide
  Sense strand starting at position 3805 of SEQ ID NO: 1747
ccugauuaucugcauauag

SEQ ID NO: 136115 - RNA, 19 nt, Artificial Sequence
  Description of Artificial Sequence: Synthetic oligonucleotide
  Antisense strand to SEQ ID NO: 136114
cuauaugcagauaaucagg

SEQ ID NO: 136116 - RNA, 19 nt, Artificial Sequence
  Description of Artificial Sequence: Synthetic oligonucleotide
  Sense strand starting at position 3807 of SEQ ID NO: 1747
ugauuaucugcauauagau

SEQ ID NO: 136117 - RNA, 19 nt, Artificial Sequence
  Description of Artificial Sequence: Synthetic oligonucleotide
  Antisense strand to SEQ ID NO: 136116
aucuauaugcagauaauca

SEQ ID NO: 136118 - RNA, 19 nt, Artificial Sequence
  Description of Artificial Sequence: Synthetic oligonucleotide
  Sense strand starting at position 3903 of SEQ ID NO: 1747
cuguacuuggcagguaauu

SEQ ID NO: 136119 - RNA, 19 nt, Artificial Sequence
  Description of Artificial Sequence: Synthetic oligonucleotide
  Antisense strand to SEQ ID NO: 136118
aauuaccugccaaguacag

SEQ ID NO: 136120 - RNA, 19 nt, Artificial Sequence
  Description of Artificial Sequence: Synthetic oligonucleotide
  Sense strand starting at position 35 of SEQ ID NO: 1748
gugcuauguuaagugauuu

SEQ ID NO: 136121 - RNA, 19 nt, Artificial Sequence
  Description of Artificial Sequence: Synthetic oligonucleotide
  Antisense strand to SEQ ID NO: 136120
aaaucacuuaacauagcac

SEQ ID NO: 136122 - RNA, 19 nt, Artificial Sequence
  Description of Artificial Sequence: Synthetic oligonucleotide
  Sense strand starting at position 105 of SEQ ID NO: 1748
agauguuagcucuagggca

SEQ ID NO: 136123 - RNA, 19 nt, Artificial Sequence
  Description of Artificial Sequence: Synthetic oligonucleotide
  Antisense strand to SEQ ID NO: 136122
ugcccuagagcuaacaucu

SEQ ID NO: 136124 - RNA, 19 nt, Artificial Sequence
  Description of Artificial Sequence: Synthetic oligonucleotide
  Sense strand starting at position 311 of SEQ ID NO: 1748
ugcagaaucuaaguuuguu

SEQ ID NO: 136125 - RNA, 19 nt, Artificial Sequence
  Description of Artificial Sequence: Synthetic oligonucleotide
  Antisense strand to SEQ ID NO: 136124
aacaaacuuagauucugca

SEQ ID NO: 136126 - RNA, 19 nt, Artificial Sequence
  Description of Artificial Sequence: Synthetic oligonucleotide
  Sense strand starting at position 339 of SEQ ID NO: 1748
ugaucaaagacgugcuacu

SEQ ID NO: 136127 - RNA, 19 nt, Artificial Sequence
  Description of Artificial Sequence: Synthetic oligonucleotide
  Antisense strand to SEQ ID NO: 136126
aguagcacgucuuugauca

SEQ ID NO: 136128 - RNA, 19 nt, Artificial Sequence
  Description of Artificial Sequence: Synthetic oligonucleotide
  Sense strand starting at position 394 of SEQ ID NO: 1748
auggucauuugacaaauau

SEQ ID NO: 136129 - RNA, 19 nt, Artificial Sequence
  Description of Artificial Sequence: Synthetic oligonucleotide
  Antisense strand to SEQ ID NO: 136128
auauuugucaaaugaccau

SEQ ID NO: 136130 - RNA, 19 nt, Artificial Sequence
  Description of Artificial Sequence: Synthetic oligonucleotide
  Sense strand starting at position 403 of SEQ ID NO: 1748
ugacaaauauguuugggca

SEQ ID NO: 136131 - RNA, 19 nt, Artificial Sequence
  Description of Artificial Sequence: Synthetic oligonucleotide
  Antisense strand to SEQ ID NO: 136130
ugcccaaacauauuuguca

SEQ ID NO: 136132 - RNA, 19 nt, Artificial Sequence
  Description of Artificial Sequence: Synthetic oligonucleotide
  Sense strand starting at position 407 of SEQ ID NO: 1748
aaauauguuugggcaccua

SEQ ID NO: 136133 - RNA, 19 nt, Artificial Sequence
  Description of Artificial Sequence: Synthetic oligonucleotide
  Antisense strand to SEQ ID NO: 136132
uaggugcccaaacauauuu

SEQ ID NO: 136134 - RNA, 19 nt, Artificial Sequence
  Description of Artificial Sequence: Synthetic oligonucleotide
  Sense strand starting at position 457 of SEQ ID NO: 1748
gugcuaaggauuugcacau

SEQ ID NO: 136135 - RNA, 19 nt, Artificial Sequence
  Description of Artificial Sequence: Synthetic oligonucleotide
  Antisense strand to SEQ ID NO: 136134
augugcaaauccuuagcac

SEQ ID NO: 136136 - RNA, 19 nt, Artificial Sequence
  Description of Artificial Sequence: Synthetic oligonucleotide
  Sense strand starting at position 486 of SEQ ID NO: 1748
cuaaauccucccgacaagu

SEQ ID NO: 136137 - RNA, 19 nt, Artificial Sequence
  Description of Artificial Sequence: Synthetic oligonucleotide
  Antisense strand to SEQ ID NO: 136136
acuugucgggaggauuuag

SEQ ID NO: 136138 - RNA, 19 nt, Artificial Sequence
  Description of Artificial Sequence: Synthetic oligonucleotide
  Sense strand starting at position 494 of SEQ ID NO: 1748
ucccgacaaguuugugagu

SEQ ID NO: 136139 - RNA, 19 nt, Artificial Sequence
  Description of Artificial Sequence: Synthetic oligonucleotide
  Antisense strand to SEQ ID NO: 136138
acucacaaacuugucggga

SEQ ID NO: 136140 - RNA, 19 nt, Artificial Sequence
  Description of Artificial Sequence: Synthetic oligonucleotide
  Sense strand starting at position 499 of SEQ ID NO: 1748
acaaguuugugaguuuggu

SEQ ID NO: 136141 - RNA, 19 nt, Artificial Sequence
  Description of Artificial Sequence: Synthetic oligonucleotide
  Antisense strand to SEQ ID NO: 136140
accaaacucacaaacuugu

SEQ ID NO: 136142 - RNA, 19 nt, Artificial Sequence
  Description of Artificial Sequence: Synthetic oligonucleotide
  Sense strand starting at position 514 of SEQ ID NO: 1748
ugguauugcuaaucuuaaa

SEQ ID NO: 136143 - RNA, 19 nt, Artificial Sequence
  Description of Artificial Sequence: Synthetic oligonucleotide
  Antisense strand to SEQ ID NO: 136142
uuuaagauuagcaauacca

SEQ ID NO: 136144 - RNA, 19 nt, Artificial Sequence
  Description of Artificial Sequence: Synthetic oligonucleotide
  Sense strand starting at position 833 of SEQ ID NO: 1748
gucucacucuccucaggau

SEQ ID NO: 136145 - RNA, 19 nt, Artificial Sequence
  Description of Artificial Sequence: Synthetic oligonucleotide
  Antisense strand to SEQ ID NO: 136144
auccugaggagagugagac

SEQ ID NO: 136146 - RNA, 19 nt, Artificial Sequence
  Description of Artificial Sequence: Synthetic oligonucleotide
  Sense strand starting at position 855 of SEQ ID NO: 1748
accuuaugccgccaacaaa

SEQ ID NO: 136147 - RNA, 19 nt, Artificial Sequence
  Description of Artificial Sequence: Synthetic oligonucleotide
  Antisense strand to SEQ ID NO: 136146
uuuguuggcggcauaaggu

SEQ ID NO: 136148 - RNA, 19 nt, Artificial Sequence
  Description of Artificial Sequence: Synthetic oligonucleotide
  Sense strand starting at position 898 of SEQ ID NO: 1748
ggaaacuuaucagagauuc

SEQ ID NO: 136149 - RNA, 19 nt, Artificial Sequence
  Description of Artificial Sequence: Synthetic oligonucleotide
  Antisense strand to SEQ ID NO: 136148
gaaucucugauaaguuucc

SEQ ID NO: 136150 - RNA, 19 nt, Artificial Sequence
  Description of Artificial Sequence: Synthetic oligonucleotide
  Sense strand starting at position 939 of SEQ ID NO: 1748
ugggcaggcgcuuaaacau

SEQ ID NO: 136151 - RNA, 19 nt, Artificial Sequence
  Description of Artificial Sequence: Synthetic oligonucleotide
  Antisense strand to SEQ ID NO: 136150
auguuuaagcgccugccca

SEQ ID NO: 136152 - RNA, 19 nt, Artificial Sequence
  Description of Artificial Sequence: Synthetic oligonucleotide
  Sense strand starting at position 964 of SEQ ID NO: 1748
acugauucccuuuaggcaa

SEQ ID NO: 136153 - RNA, 19 nt, Artificial Sequence
  Description of Artificial Sequence: Synthetic oligonucleotide
  Antisense strand to SEQ ID NO: 136152
uugccuaaagggaaucagu

SEQ ID NO: 136154 - RNA, 19 nt, Artificial Sequence
  Description of Artificial Sequence: Synthetic oligonucleotide
  Sense strand starting at position 1217 of SEQ ID NO: 1748
gcauaucuguucccagcua

SEQ ID NO: 136155 - RNA, 19 nt, Artificial Sequence
  Description of Artificial Sequence: Synthetic oligonucleotide
  Antisense strand to SEQ ID NO: 136154
uagcugggaacagauaugc

SEQ ID NO: 136156 - RNA, 19 nt, Artificial Sequence
  Description of Artificial Sequence: Synthetic oligonucleotide
  Sense strand starting at position 1564 of SEQ ID NO: 1748
cuuggauaccgaugaggua

SEQ ID NO: 136157 - RNA, 19 nt, Artificial Sequence
  Description of Artificial Sequence: Synthetic oligonucleotide
  Antisense strand to SEQ ID NO: 136156
uaccucaucgguauccaag

SEQ ID NO: 136158 - RNA, 19 nt, Artificial Sequence
  Description of Artificial Sequence: Synthetic oligonucleotide
  Sense strand starting at position 1643 of SEQ ID NO: 1748
ccaggucucaccggugaga

SEQ ID NO: 136159 - RNA, 19 nt, Artificial Sequence
  Description of Artificial Sequence: Synthetic oligonucleotide
  Antisense strand to SEQ ID NO: 136158
ucucaccggugagaccugg

SEQ ID NO: 136160 - RNA, 19 nt, Artificial Sequence
  Description of Artificial Sequence: Synthetic oligonucleotide
  Sense strand starting at position 1645 of SEQ ID NO: 1748
aggucucaccggugagaca

SEQ ID NO: 136161 - RNA, 19 nt, Artificial Sequence
  Description of Artificial Sequence: Synthetic oligonucleotide
  Antisense strand to SEQ ID NO: 136160
ugucucaccggugagaccu

SEQ ID NO: 136162 - RNA, 19 nt, Artificial Sequence
  Description of Artificial Sequence: Synthetic oligonucleotide
  Sense strand starting at position 1664 of SEQ ID NO: 1748
gcaccucagagcgaagauu

SEQ ID NO: 136163 - RNA, 19 nt, Artificial Sequence
  Description of Artificial Sequence: Synthetic oligonucleotide
  Antisense strand to SEQ ID NO: 136162
aaucuucgcucugaggugc

SEQ ID NO: 136164 - RNA, 19 nt, Artificial Sequence
  Description of Artificial Sequence: Synthetic oligonucleotide
  Sense strand starting at position 1729 of SEQ ID NO: 1748
acaacugucgcgagagguu

SEQ ID NO: 136165 - RNA, 19 nt, Artificial Sequence
  Description of Artificial Sequence: Synthetic oligonucleotide
  Antisense strand to SEQ ID NO: 136164
aaccucucgcgacaguugu

SEQ ID NO: 136166 - RNA, 19 nt, Artificial Sequence
  Description of Artificial Sequence: Synthetic oligonucleotide
  Sense strand starting at position 1781 of SEQ ID NO: 1748
cagugcuugucucugggau

SEQ ID NO: 136167 - RNA, 19 nt, Artificial Sequence
  Description of Artificial Sequence: Synthetic oligonucleotide
  Antisense strand to SEQ ID NO: 136166
aucccagagacaagcacug

SEQ ID NO: 136168 - RNA, 19 nt, Artificial Sequence
  Description of Artificial Sequence: Synthetic oligonucleotide
  Sense strand starting at position 1782 of SEQ ID NO: 1748
agugcuugucucugggauc

SEQ ID NO: 136169 - RNA, 19 nt, Artificial Sequence
  Description of Artificial Sequence: Synthetic oligonucleotide
  Antisense strand to SEQ ID NO: 136168
gaucccagagacaagcacu

SEQ ID NO: 136170 - RNA, 19 nt, Artificial Sequence
  Description of Artificial Sequence: Synthetic oligonucleotide
  Sense strand starting at position 1831 of SEQ ID NO: 1748
ggucacuugccuuauguga

SEQ ID NO: 136171 - RNA, 19 nt, Artificial Sequence
  Description of Artificial Sequence: Synthetic oligonucleotide
  Antisense strand to SEQ ID NO: 136170
ucacauaaggcaagugacc

SEQ ID NO: 136172 - RNA, 19 nt, Artificial Sequence
  Description of Artificial Sequence: Synthetic oligonucleotide
  Sense strand starting at position 1852 of SEQ ID NO: 1748
cccaguuucucuguuuaca

SEQ ID NO: 136173 - RNA, 19 nt, Artificial Sequence
  Description of Artificial Sequence: Synthetic oligonucleotide
  Antisense strand to SEQ ID NO: 136172
uguaaacagagaaacuggg

SEQ ID NO: 136174 - RNA, 19 nt, Artificial Sequence
  Description of Artificial Sequence: Synthetic oligonucleotide
  Sense strand starting at position 2074 of SEQ ID NO: 1748
aauaguauaugguuggauu

SEQ ID NO: 136175 - RNA, 19 nt, Artificial Sequence
  Description of Artificial Sequence: Synthetic oligonucleotide
  Antisense strand to SEQ ID NO: 136174
aauccaaccauauacuauu

SEQ ID NO: 136176 - RNA, 19 nt, Artificial Sequence
  Description of Artificial Sequence: Synthetic oligonucleotide
  Sense strand starting at position 2075 of SEQ ID NO: 1748
auaguauaugguuggauua

SEQ ID NO: 136177 - RNA, 19 nt, Artificial Sequence
  Description of Artificial Sequence: Synthetic oligonucleotide
  Antisense strand to SEQ ID NO: 136176
uaauccaaccauauacuau

SEQ ID NO: 136178 - RNA, 19 nt, Artificial Sequence
  Description of Artificial Sequence: Synthetic oligonucleotide
  Sense strand starting at position 2076 of SEQ ID NO: 1748
uaguauaugguuggauuaa

SEQ ID NO: 136179 - RNA, 19 nt, Artificial Sequence
  Description of Artificial Sequence: Synthetic oligonucleotide
  Antisense strand to SEQ ID NO: 136178
uuaauccaaccauauacua

SEQ ID NO: 136180 - RNA, 19 nt, Artificial Sequence
  Description of Artificial Sequence: Synthetic oligonucleotide
  Sense strand starting at position 2291 of SEQ ID NO: 1748
gacagagaaucgcuugauc

SEQ ID NO: 136181 - RNA, 19 nt, Artificial Sequence
  Description of Artificial Sequence: Synthetic oligonucleotide
  Antisense strand to SEQ ID NO: 136180
gaucaagcgauucucuguc

SEQ ID NO: 136182 - RNA, 19 nt, Artificial Sequence
  Description of Artificial Sequence: Synthetic oligonucleotide
  Sense strand starting at position 2294 of SEQ ID NO: 1748
agagaaucgcuugaucccu

SEQ ID NO: 136183 - RNA, 19 nt, Artificial Sequence
  Description of Artificial Sequence: Synthetic oligonucleotide
  Antisense strand to SEQ ID NO: 136182
agggaucaagcgauucucu

SEQ ID NO: 136184 - RNA, 19 nt, Artificial Sequence
  Description of Artificial Sequence: Synthetic oligonucleotide
  Sense strand starting at position 2471 of SEQ ID NO: 1748
uuggaagagauguguuucu

SEQ ID NO: 136185 - RNA, 19 nt, Artificial Sequence
  Description of Artificial Sequence: Synthetic oligonucleotide
  Antisense strand to SEQ ID NO: 136184
agaaacacaucucuuccaa

SEQ ID NO: 136186 - RNA, 19 nt, Artificial Sequence
  Description of Artificial Sequence: Synthetic oligonucleotide
  Sense strand starting at position 2555 of SEQ ID NO: 1748
cacgucucuauguggugaa

SEQ ID NO: 136187 - RNA, 19 nt, Artificial Sequence
  Description of Artificial Sequence: Synthetic oligonucleotide
  Antisense strand to SEQ ID NO: 136186
uucaccacauagagacgug

SEQ ID NO: 136188 - RNA, 19 nt, Artificial Sequence
  Description of Artificial Sequence: Synthetic oligonucleotide
  Sense strand starting at position 2565 of SEQ ID NO: 1748
uguggugaaagucauuauc

SEQ ID NO: 136189 - RNA, 19 nt, Artificial Sequence
  Description of Artificial Sequence: Synthetic oligonucleotide
  Antisense strand to SEQ ID NO: 136188
gauaaugacuuucaccaca

SEQ ID NO: 136190 - RNA, 19 nt, Artificial Sequence
  Description of Artificial Sequence: Synthetic oligonucleotide
  Sense strand starting at position 2567 of SEQ ID NO: 1748
uggugaaagucauuaucau

SEQ ID NO: 136191 - RNA, 19 nt, Artificial Sequence
  Description of Artificial Sequence: Synthetic oligonucleotide
  Antisense strand to SEQ ID NO: 136190
augauaaugacuuucacca

SEQ ID NO: 136192 - RNA, 19 nt, Artificial Sequence
  Description of Artificial Sequence: Synthetic oligonucleotide
  Sense strand starting at position 2594 of SEQ ID NO: 1748
guaaauguaaauugggaau

SEQ ID NO: 136193 - RNA, 19 nt, Artificial Sequence
  Description of Artificial Sequence: Synthetic oligonucleotide
  Antisense strand to SEQ ID NO: 136192
auucccaauuuacauuuac

SEQ ID NO: 136194 - RNA, 19 nt, Artificial Sequence
  Description of Artificial Sequence: Synthetic oligonucleotide
  Sense strand starting at position 3081 of SEQ ID NO: 1748
ccuugaugguaauuaggaa

SEQ ID NO: 136195 - RNA, 19 nt, Artificial Sequence
  Description of Artificial Sequence: Synthetic oligonucleotide
  Antisense strand to SEQ ID NO: 136194
uuccuaauuaccaucaagg

SEQ ID NO: 136196 - RNA, 19 nt, Artificial Sequence
  Description of Artificial Sequence: Synthetic oligonucleotide
  Sense strand starting at position 3221 of SEQ ID NO: 1748
aaagaaauguuuggacaca

SEQ ID NO: 136197 - RNA, 19 nt, Artificial Sequence
  Description of Artificial Sequence: Synthetic oligonucleotide
  Antisense strand to SEQ ID NO: 136196
uguguccaaacauuucuuu

SEQ ID NO: 136198 - RNA, 19 nt, Artificial Sequence
  Description of Artificial Sequence: Synthetic oligonucleotide
  Sense strand starting at position 3964 of SEQ ID NO: 1748
uggaauauugugcacccau

SEQ ID NO: 136199 - RNA, 19 nt, Artificial Sequence
  Description of Artificial Sequence: Synthetic oligonucleotide
  Antisense strand to SEQ ID NO: 136198
augggugcacaauauucca

SEQ ID NO: 136200 - RNA, 19 nt, Artificial Sequence
  Description of Artificial Sequence: Synthetic oligonucleotide
  Sense strand starting at position 3604 of SEQ ID NO: 1750
ggucaaugaugucugcuag

SEQ ID NO: 136201 - RNA, 19 nt, Artificial Sequence
  Description of Artificial Sequence: Synthetic oligonucleotide
  Antisense strand to SEQ ID NO: 136200
cuagcagacaucauugacc

SEQ ID NO: 136202 - RNA, 19 nt, Artificial Sequence
  Description of Artificial Sequence: Synthetic oligonucleotide
  Sense strand starting at position 3598 of SEQ ID NO: 1750
ugcuuaggucaaugauguc

SEQ ID NO: 136203 - RNA, 19 nt, Artificial Sequence
  Description of Artificial Sequence: Synthetic oligonucleotide
  Antisense strand to SEQ ID NO: 136202
gacaucauugaccuaagca

SEQ ID NO: 136204 - RNA, 19 nt, Artificial Sequence
  Description of Artificial Sequence: Synthetic oligonucleotide
  Sense strand starting at position 3595 of SEQ ID NO: 1750
augugcuuaggucaaugau

SEQ ID NO: 136205 - RNA, 19 nt, Artificial Sequence
  Description of Artificial Sequence: Synthetic oligonucleotide
  Antisense strand to SEQ ID NO: 136204
aucauugaccuaagcacau

SEQ ID NO: 136206 - RNA, 19 nt, Artificial Sequence
  Description of Artificial Sequence: Synthetic oligonucleotide
  Sense strand starting at position 3590 of SEQ ID NO: 1750
uguaaaugugcuuagguca

SEQ ID NO: 136207 - RNA, 19 nt, Artificial Sequence
  Description of Artificial Sequence: Synthetic oligonucleotide
  Antisense strand to SEQ ID NO: 136206
ugaccuaagcacauuuaca

SEQ ID NO: 136208 - RNA, 19 nt, Artificial Sequence
  Description of Artificial Sequence: Synthetic oligonucleotide
  Sense strand starting at position 3565 of SEQ ID NO: 1750
agugaacauuuacagaauu

SEQ ID NO: 136209 - RNA, 19 nt, Artificial Sequence
  Description of Artificial Sequence: Synthetic oligonucleotide
  Antisense strand to SEQ ID NO: 136208
aauucuguaaauguucacu

SEQ ID NO: 136210 - RNA, 19 nt, Artificial Sequence
  Description of Artificial Sequence: Synthetic oligonucleotide
  Sense strand starting at position 3555 of SEQ ID NO: 1750
gagucagggaagugaacau

SEQ ID NO: 136211 - RNA, 19 nt, Artificial Sequence
  Description of Artificial Sequence: Synthetic oligonucleotide
  Antisense strand to SEQ ID NO: 136210
auguucacuucccugacuc

SEQ ID NO: 136212 - RNA, 19 nt, Artificial Sequence
  Description of Artificial Sequence: Synthetic oligonucleotide
  Sense strand starting at position 3481 of SEQ ID NO: 1750
ugcaauuuguaugcaagua

SEQ ID NO: 136213 - RNA, 19 nt, Artificial Sequence
  Description of Artificial Sequence: Synthetic oligonucleotide
  Antisense strand to SEQ ID NO: 136212
uacuugcauacaaauugca

SEQ ID NO: 136214 - RNA, 19 nt, Artificial Sequence
  Description of Artificial Sequence: Synthetic oligonucleotide
  Sense strand starting at position 3480 of SEQ ID NO: 1750
cugcaauuuguaugcaagu

SEQ ID NO: 136215 - RNA, 19 nt, Artificial Sequence
  Description of Artificial Sequence: Synthetic oligonucleotide
  Antisense strand to SEQ ID NO: 136214
acuugcauacaaauugcag

SEQ ID NO: 136216 - RNA, 19 nt, Artificial Sequence
  Description of Artificial Sequence: Synthetic oligonucleotide
  Sense strand starting at position 3343 of SEQ ID NO: 1750
gcuggaaacugucuugaau

SEQ ID NO: 136217 - RNA, 19 nt, Artificial Sequence
  Description of Artificial Sequence: Synthetic oligonucleotide
  Antisense strand to SEQ ID NO: 136216
auucaagacaguuuccagc

SEQ ID NO: 136218 - RNA, 19 nt, Artificial Sequence
  Description of Artificial Sequence: Synthetic oligonucleotide
  Sense strand starting at position 3219 of SEQ ID NO: 1750
cugaaaguuuccuuauugu

SEQ ID NO: 136219 - RNA, 19 nt, Artificial Sequence
  Description of Artificial Sequence: Synthetic oligonucleotide
  Antisense strand to SEQ ID NO: 136218
acaauaaggaaacuuucag

SEQ ID NO: 136220 - RNA, 19 nt, Artificial Sequence
  Description of Artificial Sequence: Synthetic oligonucleotide
  Sense strand starting at position 3218 of SEQ ID NO: 1750
ucugaaaguuuccuuauug

SEQ ID NO: 136221 - RNA, 19 nt, Artificial Sequence
  Description of Artificial Sequence: Synthetic oligonucleotide
  Antisense strand to SEQ ID NO: 136220
caauaaggaaacuuucaga

SEQ ID NO: 136222 - RNA, 19 nt, Artificial Sequence
  Description of Artificial Sequence: Synthetic oligonucleotide
  Sense strand starting at position 3217 of SEQ ID NO: 1750
gucugaaaguuuccuuauu

SEQ ID NO: 136223 - RNA, 19 nt, Artificial Sequence
  Description of Artificial Sequence: Synthetic oligonucleotide
  Antisense strand to SEQ ID NO: 136222
aauaaggaaacuuucagac

SEQ ID NO: 136224 - RNA, 19 nt, Artificial Sequence
  Description of Artificial Sequence: Synthetic oligonucleotide
  Sense strand starting at position 3208 of SEQ ID NO: 1750
cuuagacaagucugaaagu

SEQ ID NO: 136225 - RNA, 19 nt, Artificial Sequence
  Description of Artificial Sequence: Synthetic oligonucleotide
  Antisense strand to SEQ ID NO: 136224
acuuucagacuugucuaag

SEQ ID NO: 136226 - RNA, 19 nt, Artificial Sequence
  Description of Artificial Sequence: Synthetic oligonucleotide
  Sense strand starting at position 2791 of SEQ ID NO: 1750
agccgauaacgguagaacu

SEQ ID NO: 136227 - RNA, 19 nt, Artificial Sequence
  Description of Artificial Sequence: Synthetic oligonucleotide
  Antisense strand to SEQ ID NO: 136226
aguucuaccguuaucggcu

SEQ ID NO: 136228 - RNA, 19 nt, Artificial Sequence
  Description of Artificial Sequence: Synthetic oligonucleotide
  Sense strand starting at position 2757 of SEQ ID NO: 1750
gaggcuugcgguguaguga

SEQ ID NO: 136229 - RNA, 19 nt, Artificial Sequence
  Description of Artificial Sequence: Synthetic oligonucleotide
  Antisense strand to SEQ ID NO: 136228
ucacuacaccgcaagccuc

SEQ ID NO: 136230 - RNA, 19 nt, Artificial Sequence
  Description of Artificial Sequence: Synthetic oligonucleotide
  Sense strand starting at position 2713 of SEQ ID NO: 1750
ccauguggcaggcauuauu

SEQ ID NO: 136231 - RNA, 19 nt, Artificial Sequence
  Description of Artificial Sequence: Synthetic oligonucleotide
  Antisense strand to SEQ ID NO: 136230
aauaaugccugccacaugg

SEQ ID NO: 136232 - RNA, 19 nt, Artificial Sequence
  Description of Artificial Sequence: Synthetic oligonucleotide
  Sense strand starting at position 2691 of SEQ ID NO: 1750
aucuguacuccucagagca

SEQ ID NO: 136233 - RNA, 19 nt, Artificial Sequence
  Description of Artificial Sequence: Synthetic oligonucleotide
  Antisense strand to SEQ ID NO: 136232
ugcucugaggaguacagau

SEQ ID NO: 136234 - RNA, 19 nt, Artificial Sequence
  Description of Artificial Sequence: Synthetic oligonucleotide
  Sense strand starting at position 2280 of SEQ ID NO: 1750
uccugagugagacgucaca

SEQ ID NO: 136235 - RNA, 19 nt, Artificial Sequence
  Description of Artificial Sequence: Synthetic oligonucleotide
  Antisense strand to SEQ ID NO: 136234
ugugacgucucacucagga

SEQ ID NO: 136236 - RNA, 19 nt, Artificial Sequence
  Description of Artificial Sequence: Synthetic oligonucleotide
  Sense strand starting at position 2205 of SEQ ID NO: 1750
agcguucuaacacacgauu

SEQ ID NO: 136237 - RNA, 19 nt, Artificial Sequence
  Description of Artificial Sequence: Synthetic oligonucleotide
  Antisense strand to SEQ ID NO: 136236
aaucguguguuagaacgcu

SEQ ID NO: 136238 - RNA, 19 nt, Artificial Sequence
  Description of Artificial Sequence: Synthetic oligonucleotide
  Sense strand starting at position 2195 of SEQ ID NO: 1750
accagaucacagcguucua

SEQ ID NO: 136239 - RNA, 19 nt, Artificial Sequence
  Description of Artificial Sequence: Synthetic oligonucleotide
  Antisense strand to SEQ ID NO: 136238
uagaacgcugugaucuggu

SEQ ID NO: 136240 - RNA, 19 nt, Artificial Sequence
  Description of Artificial Sequence: Synthetic oligonucleotide
  Sense strand starting at position 2142 of SEQ ID NO: 1750
guugaaauugcccaacauc

SEQ ID NO: 136241 - RNA, 19 nt, Artificial Sequence
  Description of Artificial Sequence: Synthetic oligonucleotide
  Antisense strand to SEQ ID NO: 136240
gauguugggcaauuucaac

SEQ ID NO: 136242 - RNA, 19 nt, Artificial Sequence
  Description of Artificial Sequence: Synthetic oligonucleotide
  Sense strand starting at position 2141 of SEQ ID NO: 1750
aguugaaauugcccaacau

SEQ ID NO: 136243 - RNA, 19 nt, Artificial Sequence
  Description of Artificial Sequence: Synthetic oligonucleotide
  Antisense strand to SEQ ID NO: 136242
auguugggcaauuucaacu

SEQ ID NO: 136244 - RNA, 19 nt, Artificial Sequence
  Description of Artificial Sequence: Synthetic oligonucleotide
  Sense strand starting at position 2138 of SEQ ID NO: 1750
gggaguugaaauugcccaa

SEQ ID NO: 136245 - RNA, 19 nt, Artificial Sequence
  Description of Artificial Sequence: Synthetic oligonucleotide
  Antisense strand to SEQ ID NO: 136244
uugggcaauuucaacuccc

SEQ ID NO: 136246 - RNA, 19 nt, Artificial Sequence
  Description of Artificial Sequence: Synthetic oligonucleotide
  Sense strand starting at position 1646 of SEQ ID NO: 1750
cugagcugcgcuucugauu

SEQ ID NO: 136247 - RNA, 19 nt, Artificial Sequence
  Description of Artificial Sequence: Synthetic oligonucleotide
  Antisense strand to SEQ ID NO: 136246
aaucagaagcgcagcucag

SEQ ID NO: 136248 - RNA, 19 nt, Artificial Sequence
  Description of Artificial Sequence: Synthetic oligonucleotide
  Sense strand starting at position 1582 of SEQ ID NO: 1750
guuccuaaagagugagaac

SEQ ID NO: 136249 - RNA, 19 nt, Artificial Sequence
  Description of Artificial Sequence: Synthetic oligonucleotide
  Antisense strand to SEQ ID NO: 136248
guucucacucuuuaggaac

SEQ ID NO: 136250 - RNA, 19 nt, Artificial Sequence
  Description of Artificial Sequence: Synthetic oligonucleotide
  Sense strand starting at position 1359 of SEQ ID NO: 1750
cuguucucuggaugacuua

SEQ ID NO: 136251 - RNA, 19 nt, Artificial Sequence
  Description of Artificial Sequence: Synthetic oligonucleotide
  Antisense strand to SEQ ID NO: 136250
uaagucauccagagaacag

SEQ ID NO: 136252 - RNA, 19 nt, Artificial Sequence
  Description of Artificial Sequence: Synthetic oligonucleotide
  Sense strand starting at position 1357 of SEQ ID NO: 1750
uccuguucucuggaugacu

SEQ ID NO: 136253 - RNA, 19 nt, Artificial Sequence
  Description of Artificial Sequence: Synthetic oligonucleotide
  Antisense strand to SEQ ID NO: 136252
agucauccagagaacagga

SEQ ID NO: 136254 - RNA, 19 nt, Artificial Sequence
  Description of Artificial Sequence: Synthetic oligonucleotide
  Sense strand starting at position 1129 of SEQ ID NO: 1750
aaaggaauugguugugaga

SEQ ID NO: 136255 - RNA, 19 nt, Artificial Sequence
  Description of Artificial Sequence: Synthetic oligonucleotide
  Antisense strand to SEQ ID NO: 136254
ucucacaaccaauuccuuu

SEQ ID NO: 136256 - RNA, 19 nt, Artificial Sequence
  Description of Artificial Sequence: Synthetic oligonucleotide
  Sense strand starting at position 937 of SEQ ID NO: 1750
uugggugguaaaggaaaua

SEQ ID NO: 136257 - RNA, 19 nt, Artificial Sequence
  Description of Artificial Sequence: Synthetic oligonucleotide
  Antisense strand to SEQ ID NO: 136256
uauuuccuuuaccacccaa

SEQ ID NO: 136258 - RNA, 19 nt, Artificial Sequence
  Description of Artificial Sequence: Synthetic oligonucleotide
  Sense strand starting at position 876 of SEQ ID NO: 1750
ugaguuaaagugggauuca

SEQ ID NO: 136259 - RNA, 19 nt, Artificial Sequence
  Description of Artificial Sequence: Synthetic oligonucleotide
  Antisense strand to SEQ ID NO: 136258
ugaaucccacuuuaacuca

SEQ ID NO: 136260 - RNA, 19 nt, Artificial Sequence
  Description of Artificial Sequence: Synthetic oligonucleotide
  Sense strand starting at position 541 of SEQ ID NO: 1750
ucaucuugucacuggaauc

SEQ ID NO: 136261 - RNA, 19 nt, Artificial Sequence
  Description of Artificial Sequence: Synthetic oligonucleotide
  Antisense strand to SEQ ID NO: 136260
gauuccagugacaagauga

SEQ ID NO: 136262 - RNA, 19 nt, Artificial Sequence
  Description of Artificial Sequence: Synthetic oligonucleotide
  Sense strand starting at position 540 of SEQ ID NO: 1750
gucaucuugucacuggaau

SEQ ID NO: 136263 - RNA, 19 nt, Artificial Sequence
  Description of Artificial Sequence: Synthetic oligonucleotide
  Antisense strand to SEQ ID NO: 136262
auuccagugacaagaugac

SEQ ID NO: 136264 - RNA, 19 nt, Artificial Sequence
  Description of Artificial Sequence: Synthetic oligonucleotide
  Sense strand starting at position 488 of SEQ ID NO: 1750
ggaagaaguucuagggugu

SEQ ID NO: 136265 - RNA, 19 nt, Artificial Sequence
  Description of Artificial Sequence: Synthetic oligonucleotide
  Antisense strand to SEQ ID NO: 136264
acacccuagaacuucuucc

SEQ ID NO: 136266 - RNA, 19 nt, Artificial Sequence
  Description of Artificial Sequence: Synthetic oligonucleotide
  Sense strand starting at position 384 of SEQ ID NO: 1750
gucucaaaucuaugguaua

SEQ ID NO: 136267 - RNA, 19 nt, Artificial Sequence
  Description of Artificial Sequence: Synthetic oligonucleotide
  Antisense strand to SEQ ID NO: 136266
uauaccauagauuugagac

SEQ ID NO: 136268 - RNA, 19 nt, Artificial Sequence
  Description of Artificial Sequence: Synthetic oligonucleotide
  Sense strand starting at position 374 of SEQ ID NO: 1750
caggcuaguugucucaaau

SEQ ID NO: 136269 - RNA, 19 nt, Artificial Sequence
  Description of Artificial Sequence: Synthetic oligonucleotide
  Antisense strand to SEQ ID NO: 136268
auuugagacaacuagccug

SEQ ID NO: 136270 - RNA, 19 nt, Artificial Sequence
  Description of Artificial Sequence: Synthetic oligonucleotide
  Sense strand starting at position 373 of SEQ ID NO: 1750
acaggcuaguugucucaaa

SEQ ID NO: 136271 - RNA, 19 nt, Artificial Sequence
  Description of Artificial Sequence: Synthetic oligonucleotide
  Antisense strand to SEQ ID NO: 136270
uuugagacaacuagccugu

SEQ ID NO: 136272 - RNA, 19 nt, Artificial Sequence
  Description of Artificial Sequence: Synthetic oligonucleotide
  Sense strand starting at position 355 of SEQ ID NO: 1750
gggauauugggcugaauaa

SEQ ID NO: 136273 - RNA, 19 nt, Artificial Sequence
  Description of Artificial Sequence: Synthetic oligonucleotide
  Antisense strand to SEQ ID NO: 136272
uuauucagcccaauauccc

SEQ ID NO: 136274 - RNA, 19 nt, Artificial Sequence
  Description of Artificial Sequence: Synthetic oligonucleotide
  Sense strand starting at position 204 of SEQ ID NO: 1750
cccucacccgguuguaaga

SEQ ID NO: 136275 - RNA, 19 nt, Artificial Sequence
  Description of Artificial Sequence: Synthetic oligonucleotide
  Antisense strand to SEQ ID NO: 136274
ucuuacaaccgggugaggg

SEQ ID NO: 136276 - RNA, 19 nt, Artificial Sequence
  Description of Artificial Sequence: Synthetic oligonucleotide
  Sense strand starting at position 58 of SEQ ID NO: 1750
gccuuaaguccuuaaauga

SEQ ID NO: 136277 - RNA, 19 nt, Artificial Sequence
  Description of Artificial Sequence: Synthetic oligonucleotide
  Antisense strand to SEQ ID NO: 136276
ucauuuaaggacuuaaggc

SEQ ID NO: 136278 - RNA, 19 nt, Artificial Sequence
  Description of Artificial Sequence: Synthetic oligonucleotide
  Sense strand starting at position 57 of SEQ ID NO: 1750
cgccuuaaguccuuaaaug

SEQ ID NO: 136279 - RNA, 19 nt, Artificial Sequence
  Description of Artificial Sequence: Synthetic oligonucleotide
  Antisense strand to SEQ ID NO: 136278
cauuuaaggacuuaaggcg

SEQ ID NO: 136280 - RNA, 19 nt, Artificial Sequence
  Description of Artificial Sequence: Synthetic oligonucleotide
  Sense strand starting at position 3980 of SEQ ID NO: 1751
ggguuauguguacauagug

SEQ ID NO: 136281 - RNA, 19 nt, Artificial Sequence
  Description of Artificial Sequence: Synthetic oligonucleotide
  Antisense strand to SEQ ID NO: 136280
cacuauguacacauaaccc

SEQ ID NO: 136282 - RNA, 19 nt, Artificial Sequence
  Description of Artificial Sequence: Synthetic oligonucleotide
  Sense strand starting at position 3978 of SEQ ID NO: 1751
cuggguuauguguacauag

SEQ ID NO: 136283 - RNA, 19 nt, Artificial Sequence
  Description of Artificial Sequence: Synthetic oligonucleotide
  Antisense strand to SEQ ID NO: 136282
cuauguacacauaacccag

SEQ ID NO: 136284 - RNA, 19 nt, Artificial Sequence
  Description of Artificial Sequence: Synthetic oligonucleotide
  Sense strand starting at position 3968 of SEQ ID NO: 1751
auuauugaggcuggguuau

SEQ ID NO: 136285 - RNA, 19 nt, Artificial Sequence
  Description of Artificial Sequence: Synthetic oligonucleotide
  Antisense strand to SEQ ID NO: 136284
auaacccagccucaauaau

SEQ ID NO: 136286 - RNA, 19 nt, Artificial Sequence
  Description of Artificial Sequence: Synthetic oligonucleotide
  Sense strand starting at position 3967 of SEQ ID NO: 1751
aauuauugaggcuggguua

SEQ ID NO: 136287 - RNA, 19 nt, Artificial Sequence
  Description of Artificial Sequence: Synthetic oligonucleotide
  Antisense strand to SEQ ID NO: 136286
uaacccagccucaauaauu

SEQ ID NO: 136288 - RNA, 19 nt, Artificial Sequence
  Description of Artificial Sequence: Synthetic oligonucleotide
  Sense strand starting at position 3729 of SEQ ID NO: 1751
uaugaaguuugggauuuaa

SEQ ID NO: 136289 - RNA, 19 nt, Artificial Sequence
  Description of Artificial Sequence: Synthetic oligonucleotide
  Antisense strand to SEQ ID NO: 136288
uuaaaucccaaacuucaua

SEQ ID NO: 136290 - RNA, 19 nt, Artificial Sequence
  Description of Artificial Sequence: Synthetic oligonucleotide
  Sense strand starting at position 3728 of SEQ ID NO: 1751
auaugaaguuugggauuua

SEQ ID NO: 136291 - RNA, 19 nt, Artificial Sequence
  Description of Artificial Sequence: Synthetic oligonucleotide
  Antisense strand to SEQ ID NO: 136290
uaaaucccaaacuucauau

SEQ ID NO: 136292 - RNA, 19 nt, Artificial Sequence
  Description of Artificial Sequence: Synthetic oligonucleotide
  Sense strand starting at position 3726 of SEQ ID NO: 1751
guauaugaaguuugggauu

SEQ ID NO: 136293 - RNA, 19 nt, Artificial Sequence
  Description of Artificial Sequence: Synthetic oligonucleotide
  Antisense strand to SEQ ID NO: 136292
aaucccaaacuucauauac

SEQ ID NO: 136294 - RNA, 19 nt, Artificial Sequence
  Description of Artificial Sequence: Synthetic oligonucleotide
  Sense strand starting at position 3684 of SEQ ID NO: 1751
ggcuuuauuaaggguuaua

SEQ ID NO: 136295 - RNA, 19 nt, Artificial Sequence
  Description of Artificial Sequence: Synthetic oligonucleotide
  Antisense strand to SEQ ID NO: 136294
uauaacccuuaauaaagcc

SEQ ID NO: 136296 - RNA, 19 nt, Artificial Sequence
  Description of Artificial Sequence: Synthetic oligonucleotide
  Sense strand starting at position 3655 of SEQ ID NO: 1751
guguuaaaguuaucacccu

SEQ ID NO: 136297 - RNA, 19 nt, Artificial Sequence
  Description of Artificial Sequence: Synthetic oligonucleotide
  Antisense strand to SEQ ID NO: 136296
agggugauaacuuuaacac

SEQ ID NO: 136298 - RNA, 19 nt, Artificial Sequence
  Description of Artificial Sequence: Synthetic oligonucleotide
  Sense strand starting at position 3603 of SEQ ID NO: 1751
aucacaucagcuggauauu

SEQ ID NO: 136299 - RNA, 19 nt, Artificial Sequence
  Description of Artificial Sequence: Synthetic oligonucleotide
  Antisense strand to SEQ ID NO: 136298
aauauccagcugaugugau

SEQ ID NO: 136300 - RNA, 19 nt, Artificial Sequence
  Description of Artificial Sequence: Synthetic oligonucleotide
  Sense strand starting at position 3194 of SEQ ID NO: 1751
gaugcaauggcuuagguuu

SEQ ID NO: 136301 - RNA, 19 nt, Artificial Sequence
  Description of Artificial Sequence: Synthetic oligonucleotide
  Antisense strand to SEQ ID NO: 136300
aaaccuaagccauugcauc

SEQ ID NO: 136302 - RNA, 19 nt, Artificial Sequence
  Description of Artificial Sequence: Synthetic oligonucleotide
  Sense strand starting at position 3059 of SEQ ID NO: 1751
gugucuuaaucuuuacaau

SEQ ID NO: 136303 - RNA, 19 nt, Artificial Sequence
  Description of Artificial Sequence: Synthetic oligonucleotide
  Antisense strand to SEQ ID NO: 136302
auuguaaagauuaagacac

SEQ ID NO: 136304 - RNA, 19 nt, Artificial Sequence
  Description of Artificial Sequence: Synthetic oligonucleotide
  Sense strand starting at position 3052 of SEQ ID NO: 1751
cggcaacgugucuuaaucu

SEQ ID NO: 136305 - RNA, 19 nt, Artificial Sequence
  Description of Artificial Sequence: Synthetic oligonucleotide
  Antisense strand to SEQ ID NO: 136304
agauuaagacacguugccg

SEQ ID NO: 136306 - RNA, 19 nt, Artificial Sequence
  Description of Artificial Sequence: Synthetic oligonucleotide
  Sense strand starting at position 3050 of SEQ ID NO: 1751
gccggcaacgugucuuaau

SEQ ID NO: 136307 - RNA, 19 nt, Artificial Sequence
  Description of Artificial Sequence: Synthetic oligonucleotide
  Antisense strand to SEQ ID NO: 136306
auuaagacacguugccggc

SEQ ID NO: 136308 - RNA, 19 nt, Artificial Sequence
  Description of Artificial Sequence: Synthetic oligonucleotide
  Sense strand starting at position 2624 of SEQ ID NO: 1751
cucaguucccuguagaauu

SEQ ID NO: 136309 - RNA, 19 nt, Artificial Sequence
  Description of Artificial Sequence: Synthetic oligonucleotide
  Antisense strand to SEQ ID NO: 136308
aauucuacagggaacugag

SEQ ID NO: 136310 - RNA, 19 nt, Artificial Sequence
  Description of Artificial Sequence: Synthetic oligonucleotide
  Sense strand starting at position 2622 of SEQ ID NO: 1751
cccucaguucccuguagaa

SEQ ID NO: 136311 - RNA, 19 nt, Artificial Sequence
  Description of Artificial Sequence: Synthetic oligonucleotide
  Antisense strand to SEQ ID NO: 136310
uucuacagggaacugaggg

SEQ ID NO: 136312 - RNA, 19 nt, Artificial Sequence
  Description of Artificial Sequence: Synthetic oligonucleotide
  Sense strand starting at position 2231 of SEQ ID NO: 1751
ggaggaaccuuugaaagug

SEQ ID NO: 136313 - RNA, 19 nt, Artificial Sequence
  Description of Artificial Sequence: Synthetic oligonucleotide
  Antisense strand to SEQ ID NO: 136312
cacuuucaaagguuccucc

SEQ ID NO: 136314 - RNA, 19 nt, Artificial Sequence
  Description of Artificial Sequence: Synthetic oligonucleotide
  Sense strand starting at position 2129 of SEQ ID NO: 1751
agggaaucgcgguaacaca

SEQ ID NO: 136315 - RNA, 19 nt, Artificial Sequence
  Description of Artificial Sequence: Synthetic oligonucleotide
  Antisense strand to SEQ ID NO: 136314
uguguuaccgcgauucccu

SEQ ID NO: 136316 - RNA, 19 nt, Artificial Sequence
  Description of Artificial Sequence: Synthetic oligonucleotide
  Sense strand starting at position 2110 of SEQ ID NO: 1751
gcgucuugaggguaguuga

SEQ ID NO: 136317 - RNA, 19 nt, Artificial Sequence
  Description of Artificial Sequence: Synthetic oligonucleotide
  Antisense strand to SEQ ID NO: 136316
ucaacuacccucaagacgc

SEQ ID NO: 136318 - RNA, 19 nt, Artificial Sequence
  Description of Artificial Sequence: Synthetic oligonucleotide
  Sense strand starting at position 2068 of SEQ ID NO: 1751
uugcguucugggaguugua

SEQ ID NO: 136319 - RNA, 19 nt, Artificial Sequence
  Description of Artificial Sequence: Synthetic oligonucleotide
  Antisense strand to SEQ ID NO: 136318
uacaacucccagaacgcaa

SEQ ID NO: 136320 - RNA, 19 nt, Artificial Sequence
  Description of Artificial Sequence: Synthetic oligonucleotide
  Sense strand starting at position 1721 of SEQ ID NO: 1751
agugguaacccgggacuau

SEQ ID NO: 136321 - RNA, 19 nt, Artificial Sequence
  Description of Artificial Sequence: Synthetic oligonucleotide
  Antisense strand to SEQ ID NO: 136320
auagucccggguuaccacu

SEQ ID NO: 136322 - RNA, 19 nt, Artificial Sequence
  Description of Artificial Sequence: Synthetic oligonucleotide
  Sense strand starting at position 1639 of SEQ ID NO: 1751
cgggcugcucuagagaaga

SEQ ID NO: 136323 - RNA, 19 nt, Artificial Sequence
  Description of Artificial Sequence: Synthetic oligonucleotide
  Antisense strand to SEQ ID NO: 136322
ucuucucuagagcagcccg

SEQ ID NO: 136324 - RNA, 19 nt, Artificial Sequence
  Description of Artificial Sequence: Synthetic oligonucleotide
  Sense strand starting at position 1614 of SEQ ID NO: 1751
gcagaacuguagcuaaaga

SEQ ID NO: 136325 - RNA, 19 nt, Artificial Sequence
  Description of Artificial Sequence: Synthetic oligonucleotide
  Antisense strand to SEQ ID NO: 136324
ucuuuagcuacaguucugc

SEQ ID NO: 136326 - RNA, 19 nt, Artificial Sequence
  Description of Artificial Sequence: Synthetic oligonucleotide
  Sense strand starting at position 1467 of SEQ ID NO: 1751
aaugguaccuuugaagaug

SEQ ID NO: 136327 - RNA, 19 nt, Artificial Sequence
  Description of Artificial Sequence: Synthetic oligonucleotide
  Antisense strand to SEQ ID NO: 136326
caucuucaaagguaccauu

SEQ ID NO: 136328 - RNA, 19 nt, Artificial Sequence
  Description of Artificial Sequence: Synthetic oligonucleotide
  Sense strand starting at position 1463 of SEQ ID NO: 1751
uguaaaugguaccuuugaa

SEQ ID NO: 136329 - RNA, 19 nt, Artificial Sequence
  Description of Artificial Sequence: Synthetic oligonucleotide
  Antisense strand to SEQ ID NO: 136328
uucaaagguaccauuuaca

SEQ ID NO: 136330 - RNA, 19 nt, Artificial Sequence
  Description of Artificial Sequence: Synthetic oligonucleotide
  Sense strand starting at position 1417 of SEQ ID NO: 1751
agguauaagugagauaaac

SEQ ID NO: 136331 - RNA, 19 nt, Artificial Sequence
  Description of Artificial Sequence: Synthetic oligonucleotide
  Antisense strand to SEQ ID NO: 136330
guuuaucucacuuauaccu

SEQ ID NO: 136332 - RNA, 19 nt, Artificial Sequence
  Description of Artificial Sequence: Synthetic oligonucleotide
  Sense strand starting at position 1410 of SEQ ID NO: 1751
gguugugagguauaaguga

SEQ ID NO: 136333 - RNA, 19 nt, Artificial Sequence
  Description of Artificial Sequence: Synthetic oligonucleotide
  Antisense strand to SEQ ID NO: 136332
ucacuuauaccucacaacc

SEQ ID NO: 136334 - RNA, 19 nt, Artificial Sequence
  Description of Artificial Sequence: Synthetic oligonucleotide
  Sense strand starting at position 1408 of SEQ ID NO: 1751
gugguugugagguauaagu

SEQ ID NO: 136335 - RNA, 19 nt, Artificial Sequence
  Description of Artificial Sequence: Synthetic oligonucleotide
  Antisense strand to SEQ ID NO: 136334
acuuauaccucacaaccac

SEQ ID NO: 136336 - RNA, 19 nt, Artificial Sequence
  Description of Artificial Sequence: Synthetic oligonucleotide
  Sense strand starting at position 1315 of SEQ ID NO: 1751
cuuaacuagcuguaugauu

SEQ ID NO: 136337 - RNA, 19 nt, Artificial Sequence
  Description of Artificial Sequence: Synthetic oligonucleotide
  Antisense strand to SEQ ID NO: 136336
aaucauacagcuaguuaag

SEQ ID NO: 136338 - RNA, 19 nt, Artificial Sequence
  Description of Artificial Sequence: Synthetic oligonucleotide
  Sense strand starting at position 1264 of SEQ ID NO: 1751
ggauaaagccuuuguguca

SEQ ID NO: 136339 - RNA, 19 nt, Artificial Sequence
  Description of Artificial Sequence: Synthetic oligonucleotide
  Antisense strand to SEQ ID NO: 136338
ugacacaaaggcuuuaucc

SEQ ID NO: 136340 - RNA, 19 nt, Artificial Sequence
  Description of Artificial Sequence: Synthetic oligonucleotide
  Sense strand starting at position 1251 of SEQ ID NO: 1751
gagcuaccucaccggauaa

SEQ ID NO: 136341 - RNA, 19 nt, Artificial Sequence
  Description of Artificial Sequence: Synthetic oligonucleotide
  Antisense strand to SEQ ID NO: 136340
uuauccggugagguagcuc

SEQ ID NO: 136342 - RNA, 19 nt, Artificial Sequence
  Description of Artificial Sequence: Synthetic oligonucleotide
  Sense strand starting at position 1250 of SEQ ID NO: 1751
agagcuaccucaccggaua

SEQ ID NO: 136343 - RNA, 19 nt, Artificial Sequence
  Description of Artificial Sequence: Synthetic oligonucleotide
  Antisense strand to SEQ ID NO: 136342
uauccggugagguagcucu

SEQ ID NO: 136344 - RNA, 19 nt, Artificial Sequence
  Description of Artificial Sequence: Synthetic oligonucleotide
  Sense strand starting at position 1198 of SEQ ID NO: 1751
cuucuaaugugacucguaa

SEQ ID NO: 136345 - RNA, 19 nt, Artificial Sequence
  Description of Artificial Sequence: Synthetic oligonucleotide
  Antisense strand to SEQ ID NO: 136344
uuacgagucacauuagaag

SEQ ID NO: 136346 - RNA, 19 nt, Artificial Sequence
  Description of Artificial Sequence: Synthetic oligonucleotide
  Sense strand starting at position 1118 of SEQ ID NO: 1751
uucgucaacuauucuguau

SEQ ID NO: 136347 - RNA, 19 nt, Artificial Sequence
  Description of Artificial Sequence: Synthetic oligonucleotide
  Antisense strand to SEQ ID NO: 136346
auacagaauaguugacgaa

SEQ ID NO: 136348 - RNA, 19 nt, Artificial Sequence
  Description of Artificial Sequence: Synthetic oligonucleotide
  Sense strand starting at position 1111 of SEQ ID NO: 1751
auuuguguucgucaacuau

SEQ ID NO: 136349 - RNA, 19 nt, Artificial Sequence
  Description of Artificial Sequence: Synthetic oligonucleotide
  Antisense strand to SEQ ID NO: 136348
auaguugacgaacacaaau

SEQ ID NO: 136350 - RNA, 19 nt, Artificial Sequence
  Description of Artificial Sequence: Synthetic oligonucleotide
  Sense strand starting at position 1109 of SEQ ID NO: 1751
ugauuuguguucgucaacu

SEQ ID NO: 136351 - RNA, 19 nt, Artificial Sequence
  Description of Artificial Sequence: Synthetic oligonucleotide
  Antisense strand to SEQ ID NO: 136350
aguugacgaacacaaauca

SEQ ID NO: 136352 - RNA, 19 nt, Artificial Sequence
  Description of Artificial Sequence: Synthetic oligonucleotide
  Sense strand starting at position 1108 of SEQ ID NO: 1751
gugauuuguguucgucaac

SEQ ID NO: 136353 - RNA, 19 nt, Artificial Sequence
  Description of Artificial Sequence: Synthetic oligonucleotide
  Antisense strand to SEQ ID NO: 136352
guugacgaacacaaaucac

SEQ ID NO: 136354 - RNA, 19 nt, Artificial Sequence
  Description of Artificial Sequence: Synthetic oligonucleotide
  Sense strand starting at position 1107 of SEQ ID NO: 1751
ggugauuuguguucgucaa

SEQ ID NO: 136355 - RNA, 19 nt, Artificial Sequence
  Description of Artificial Sequence: Synthetic oligonucleotide
  Antisense strand to SEQ ID NO: 136354
uugacgaacacaaaucacc

SEQ ID NO: 136356 - RNA, 19 nt, Artificial Sequence
  Description of Artificial Sequence: Synthetic oligonucleotide
  Sense strand starting at position 1021 of SEQ ID NO: 1751
gggcauccuguauguuauc

SEQ ID NO: 136357 - RNA, 19 nt, Artificial Sequence
  Description of Artificial Sequence: Synthetic oligonucleotide
  Antisense strand to SEQ ID NO: 136356
gauaacauacaggaugccc

SEQ ID NO: 136358 - RNA, 19 nt, Artificial Sequence
  Description of Artificial Sequence: Synthetic oligonucleotide
  Sense strand starting at position 1019 of SEQ ID NO: 1751
cugggcauccuguauguua

SEQ ID NO: 136359 - RNA, 19 nt, Artificial Sequence
  Description of Artificial Sequence: Synthetic oligonucleotide
  Antisense strand to SEQ ID NO: 136358
uaacauacaggaugcccag

SEQ ID NO: 136360 - RNA, 19 nt, Artificial Sequence
  Description of Artificial Sequence: Synthetic oligonucleotide
  Sense strand starting at position 163 of SEQ ID NO: 1752
gguggagaguugucuacau

SEQ ID NO: 136361 - RNA, 19 nt, Artificial Sequence
  Description of Artificial Sequence: Synthetic oligonucleotide
  Antisense strand to SEQ ID NO: 136360
auguagacaacucuccacc

SEQ ID NO: 136362 - RNA, 19 nt, Artificial Sequence
  Description of Artificial Sequence: Synthetic oligonucleotide
  Sense strand starting at position 167 of SEQ ID NO: 1752
gagaguugucuacauccca

SEQ ID NO: 136363 - RNA, 19 nt, Artificial Sequence
  Description of Artificial Sequence: Synthetic oligonucleotide
  Antisense strand to SEQ ID NO: 136362
ugggauguagacaacucuc

SEQ ID NO: 136364 - RNA, 19 nt, Artificial Sequence
  Description of Artificial Sequence: Synthetic oligonucleotide
  Sense strand starting at position 195 of SEQ ID NO: 1752
gguagaaguuagcugcuaa

SEQ ID NO: 136365 - RNA, 19 nt, Artificial Sequence
  Description of Artificial Sequence: Synthetic oligonucleotide
  Antisense strand to SEQ ID NO: 136364
uuagcagcuaacuucuacc

SEQ ID NO: 136366 - RNA, 19 nt, Artificial Sequence
  Description of Artificial Sequence: Synthetic oligonucleotide
  Sense strand starting at position 196 of SEQ ID NO: 1752
guagaaguuagcugcuaac

SEQ ID NO: 136367 - RNA, 19 nt, Artificial Sequence
  Description of Artificial Sequence: Synthetic oligonucleotide
  Antisense strand to SEQ ID NO: 136366
guuagcagcuaacuucuac

SEQ ID NO: 136368 - RNA, 19 nt, Artificial Sequence
  Description of Artificial Sequence: Synthetic oligonucleotide
  Sense strand starting at position 467 of SEQ ID NO: 1752
ggccucuuuccagauguag

SEQ ID NO: 136369 - RNA, 19 nt, Artificial Sequence
  Description of Artificial Sequence: Synthetic oligonucleotide
  Antisense strand to SEQ ID NO: 136368
cuacaucuggaaagaggcc

SEQ ID NO: 136370 - RNA, 19 nt, Artificial Sequence
  Description of Artificial Sequence: Synthetic oligonucleotide
  Sense strand starting at position 514 of SEQ ID NO: 1752
aucauuacuccggagucga

SEQ ID NO: 136371 - RNA, 19 nt, Artificial Sequence
  Description of Artificial Sequence: Synthetic oligonucleotide
  Antisense strand to SEQ ID NO: 136370
ucgacuccggaguaaugau

SEQ ID NO: 136372 - RNA, 19 nt, Artificial Sequence
  Description of Artificial Sequence: Synthetic oligonucleotide
  Sense strand starting at position 555 of SEQ ID NO: 1752
gggugcuccgcgucaaaga

SEQ ID NO: 136373 - RNA, 19 nt, Artificial Sequence
  Description of Artificial Sequence: Synthetic oligonucleotide
  Antisense strand to SEQ ID NO: 136372
ucuuugacgcggagcaccc

SEQ ID NO: 136374 - RNA, 19 nt, Artificial Sequence
  Description of Artificial Sequence: Synthetic oligonucleotide
  Sense strand starting at position 815 of SEQ ID NO: 1752
gggucacuucggugggaga

SEQ ID NO: 136375 - RNA, 19 nt, Artificial Sequence
  Description of Artificial Sequence: Synthetic oligonucleotide
  Antisense strand to SEQ ID NO: 136374
ucucccaccgaagugaccc

SEQ ID NO: 136376 - RNA, 19 nt, Artificial Sequence
  Description of Artificial Sequence: Synthetic oligonucleotide
  Sense strand starting at position 871 of SEQ ID NO: 1752
uguuaugucuuccuccuca

SEQ ID NO: 136377 - RNA, 19 nt, Artificial Sequence
  Description of Artificial Sequence: Synthetic oligonucleotide
  Antisense strand to SEQ ID NO: 136376
ugaggaggaagacauaaca

SEQ ID NO: 136378 - RNA, 19 nt, Artificial Sequence
  Description of Artificial Sequence: Synthetic oligonucleotide
  Sense strand starting at position 1032 of SEQ ID NO: 1752
gccucugggcgaugagaua

SEQ ID NO: 136379 - RNA, 19 nt, Artificial Sequence
  Description of Artificial Sequence: Synthetic oligonucleotide
  Antisense strand to SEQ ID NO: 136378
uaucucaucgcccagaggc

SEQ ID NO: 136380 - RNA, 19 nt, Artificial Sequence
  Description of Artificial Sequence: Synthetic oligonucleotide
  Sense strand starting at position 1041 of SEQ ID NO: 1752
cgaugagauaccugguucu

SEQ ID NO: 136381 - RNA, 19 nt, Artificial Sequence
  Description of Artificial Sequence: Synthetic oligonucleotide
  Antisense strand to SEQ ID NO: 136380
agaaccagguaucucaucg

SEQ ID NO: 136382 - RNA, 19 nt, Artificial Sequence
  Description of Artificial Sequence: Synthetic oligonucleotide
  Sense strand starting at position 1044 of SEQ ID NO: 1752
ugagauaccugguucuaug

SEQ ID NO: 136383 - RNA, 19 nt, Artificial Sequence
  Description of Artificial Sequence: Synthetic oligonucleotide
  Antisense strand to SEQ ID NO: 136382
cauagaaccagguaucuca

SEQ ID NO: 136384 - RNA, 19 nt, Artificial Sequence
  Description of Artificial Sequence: Synthetic oligonucleotide
  Sense strand starting at position 1067 of SEQ ID NO: 1752
cuaauaggccuuuagcauu

SEQ ID NO: 136385 - RNA, 19 nt, Artificial Sequence
  Description of Artificial Sequence: Synthetic oligonucleotide
  Antisense strand to SEQ ID NO: 136384
aaugcuaaaggccuauuag

SEQ ID NO: 136386 - RNA, 19 nt, Artificial Sequence
  Description of Artificial Sequence: Synthetic oligonucleotide
  Sense strand starting at position 1242 of SEQ ID NO: 1752
gcgccaaaccuugcuaagu

SEQ ID NO: 136387 - RNA, 19 nt, Artificial Sequence
  Description of Artificial Sequence: Synthetic oligonucleotide
  Antisense strand to SEQ ID NO: 136386
acuuagcaagguuuggcgc

SEQ ID NO: 136388 - RNA, 19 nt, Artificial Sequence
  Description of Artificial Sequence: Synthetic oligonucleotide
  Sense strand starting at position 1285 of SEQ ID NO: 1752
caguaagggauucgagaca

SEQ ID NO: 136389 - RNA, 19 nt, Artificial Sequence
  Description of Artificial Sequence: Synthetic oligonucleotide
  Antisense strand to SEQ ID NO: 136388
ugucucgaaucccuuacug

SEQ ID NO: 136390 - RNA, 19 nt, Artificial Sequence
  Description of Artificial Sequence: Synthetic oligonucleotide
  Sense strand starting at position 1339 of SEQ ID NO: 1752
gaggcugguaccugucaga

SEQ ID NO: 136391 - RNA, 19 nt, Artificial Sequence
  Description of Artificial Sequence: Synthetic oligonucleotide
  Antisense strand to SEQ ID NO: 136390
ucugacagguaccagccuc

SEQ ID NO: 136392 - RNA, 19 nt, Artificial Sequence
  Description of Artificial Sequence: Synthetic oligonucleotide
  Sense strand starting at position 1559 of SEQ ID NO: 1752
uagaucugagcuggagaga

SEQ ID NO: 136393 - RNA, 19 nt, Artificial Sequence
  Description of Artificial Sequence: Synthetic oligonucleotide
  Antisense strand to SEQ ID NO: 136392
ucucuccagcucagaucua

SEQ ID NO: 136394 - RNA, 19 nt, Artificial Sequence
  Description of Artificial Sequence: Synthetic oligonucleotide
  Sense strand starting at position 1580 of SEQ ID NO: 1752
ccauaccuuuccucaggua

SEQ ID NO: 136395 - RNA, 19 nt, Artificial Sequence
  Description of Artificial Sequence: Synthetic oligonucleotide
  Antisense strand to SEQ ID NO: 136394
uaccugaggaaagguaugg

SEQ ID NO: 136396 - RNA, 19 nt, Artificial Sequence
  Description of Artificial Sequence: Synthetic oligonucleotide
  Sense strand starting at position 1650 of SEQ ID NO: 1752
gggucaugcuggaggcaaa

SEQ ID NO: 136397 - RNA, 19 nt, Artificial Sequence
  Description of Artificial Sequence: Synthetic oligonucleotide
  Antisense strand to SEQ ID NO: 136396
uuugccuccagcaugaccc

SEQ ID NO: 136398 - RNA, 19 nt, Artificial Sequence
  Description of Artificial Sequence: Synthetic oligonucleotide
  Sense strand starting at position 1947 of SEQ ID NO: 1752
ggcuuucucccgcaaccua

SEQ ID NO: 136399 - RNA, 19 nt, Artificial Sequence
  Description of Artificial Sequence: Synthetic oligonucleotide
  Antisense strand to SEQ ID NO: 136398
uagguugcgggagaaagcc

SEQ ID NO: 136400 - RNA, 19 nt, Artificial Sequence
  Description of Artificial Sequence: Synthetic oligonucleotide
  Sense strand starting at position 2113 of SEQ ID NO: 1752
ggagaaccguucccagaag

SEQ ID NO: 136401 - RNA, 19 nt, Artificial Sequence
  Description of Artificial Sequence: Synthetic oligonucleotide
  Antisense strand to SEQ ID NO: 136400
cuucugggaacgguucucc

SEQ ID NO: 136402 - RNA, 19 nt, Artificial Sequence
  Description of Artificial Sequence: Synthetic oligonucleotide
  Sense strand starting at position 2356 of SEQ ID NO: 1752
cgcucuacgggaggaaauu

SEQ ID NO: 136403 - RNA, 19 nt, Artificial Sequence
  Description of Artificial Sequence: Synthetic oligonucleotide
  Antisense strand to SEQ ID NO: 136402
aauuuccucccguagagcg

SEQ ID NO: 136404 - RNA, 19 nt, Artificial Sequence
  Description of Artificial Sequence: Synthetic oligonucleotide
  Sense strand starting at position 2481 of SEQ ID NO: 1752
uauugagguucucuuagaa

SEQ ID NO: 136405 - RNA, 19 nt, Artificial Sequence
  Description of Artificial Sequence: Synthetic oligonucleotide
  Antisense strand to SEQ ID NO: 136404
uucuaagagaaccucaaua

SEQ ID NO: 136406 - RNA, 19 nt, Artificial Sequence
  Description of Artificial Sequence: Synthetic oligonucleotide
  Sense strand starting at position 2617 of SEQ ID NO: 1752
acccaaguuucgguuuaga

SEQ ID NO: 136407 - RNA, 19 nt, Artificial Sequence
  Description of Artificial Sequence: Synthetic oligonucleotide
  Antisense strand to SEQ ID NO: 136406
ucuaaaccgaaacuugggu

SEQ ID NO: 136408 - RNA, 19 nt, Artificial Sequence
  Description of Artificial Sequence: Synthetic oligonucleotide
  Sense strand starting at position 2647 of SEQ ID NO: 1752
ugaguauauuugcccucuu

SEQ ID NO: 136409 - RNA, 19 nt, Artificial Sequence
  Description of Artificial Sequence: Synthetic oligonucleotide
  Antisense strand to SEQ ID NO: 136408
aagagggcaaauauacuca

SEQ ID NO: 136410 - RNA, 19 nt, Artificial Sequence
  Description of Artificial Sequence: Synthetic oligonucleotide
  Sense strand starting at position 2675 of SEQ ID NO: 1752
cuucgcuuaucugugaaag

SEQ ID NO: 136411 - RNA, 19 nt, Artificial Sequence
  Description of Artificial Sequence: Synthetic oligonucleotide
  Antisense strand to SEQ ID NO: 136410
cuuucacagauaagcgaag

SEQ ID NO: 136412 - RNA, 19 nt, Artificial Sequence
  Description of Artificial Sequence: Synthetic oligonucleotide
  Sense strand starting at position 2676 of SEQ ID NO: 1752
uucgcuuaucugugaaagg

SEQ ID NO: 136413 - RNA, 19 nt, Artificial Sequence
  Description of Artificial Sequence: Synthetic oligonucleotide
  Antisense strand to SEQ ID NO: 136412
ccuuucacagauaagcgaa

SEQ ID NO: 136414 - RNA, 19 nt, Artificial Sequence
  Description of Artificial Sequence: Synthetic oligonucleotide
  Sense strand starting at position 2717 of SEQ ID NO: 1752
cgguguuacgaggauaauu

SEQ ID NO: 136415 - RNA, 19 nt, Artificial Sequence
  Description of Artificial Sequence: Synthetic oligonucleotide
  Antisense strand to SEQ ID NO: 136414
aauuauccucguaacaccg

SEQ ID NO: 136416 - RNA, 19 nt, Artificial Sequence
  Description of Artificial Sequence: Synthetic oligonucleotide
  Sense strand starting at position 2719 of SEQ ID NO: 1752
guguuacgaggauaauuau

SEQ ID NO: 136417 - RNA, 19 nt, Artificial Sequence
  Description of Artificial Sequence: Synthetic oligonucleotide
  Antisense strand to SEQ ID NO: 136416
auaauuauccucguaacac

SEQ ID NO: 136418 - RNA, 19 nt, Artificial Sequence
  Description of Artificial Sequence: Synthetic oligonucleotide
  Sense strand starting at position 2729 of SEQ ID NO: 1752
gauaauuaugaaggcguuu

SEQ ID NO: 136419 - RNA, 19 nt, Artificial Sequence
  Description of Artificial Sequence: Synthetic oligonucleotide
  Antisense strand to SEQ ID NO: 136418
aaacgccuucauaauuauc

SEQ ID NO: 136420 - RNA, 19 nt, Artificial Sequence
  Description of Artificial Sequence: Synthetic oligonucleotide
  Sense strand starting at position 2852 of SEQ ID NO: 1752
ugucucuguuguuucuaaa

SEQ ID NO: 136421 - RNA, 19 nt, Artificial Sequence
  Description of Artificial Sequence: Synthetic oligonucleotide
  Antisense strand to SEQ ID NO: 136420
uuuagaaacaacagagaca

SEQ ID NO: 136422 - RNA, 19 nt, Artificial Sequence
  Description of Artificial Sequence: Synthetic oligonucleotide
  Sense strand starting at position 2928 of SEQ ID NO: 1752
ggaauagaggcuggguaaa

SEQ ID NO: 136423 - RNA, 19 nt, Artificial Sequence
  Description of Artificial Sequence: Synthetic oligonucleotide
  Antisense strand to SEQ ID NO: 136422
uuuacccagccucuauucc

SEQ ID NO: 136424 - RNA, 19 nt, Artificial Sequence
  Description of Artificial Sequence: Synthetic oligonucleotide
  Sense strand starting at position 2951 of SEQ ID NO: 1752
gguugagaccugggcugua

SEQ ID NO: 136425 - RNA, 19 nt, Artificial Sequence
  Description of Artificial Sequence: Synthetic oligonucleotide
  Antisense strand to SEQ ID NO: 136424
uacagcccaggucucaacc

SEQ ID NO: 136426 - RNA, 19 nt, Artificial Sequence
  Description of Artificial Sequence: Synthetic oligonucleotide
  Sense strand starting at position 2964 of SEQ ID NO: 1752
gcuguauuccuaggagguu

SEQ ID NO: 136427 - RNA, 19 nt, Artificial Sequence
  Description of Artificial Sequence: Synthetic oligonucleotide
  Antisense strand to SEQ ID NO: 136426
aaccuccuaggaauacagc

SEQ ID NO: 136428 - RNA, 19 nt, Artificial Sequence
  Description of Artificial Sequence: Synthetic oligonucleotide
  Sense strand starting at position 3093 of SEQ ID NO: 1752
ccaagauggcgaugaaacu

SEQ ID NO: 136429 - RNA, 19 nt, Artificial Sequence
  Description of Artificial Sequence: Synthetic oligonucleotide
  Antisense strand to SEQ ID NO: 136428
aguuucaucgccaucuugg

SEQ ID NO: 136430 - RNA, 19 nt, Artificial Sequence
  Description of Artificial Sequence: Synthetic oligonucleotide
  Sense strand starting at position 3122 of SEQ ID NO: 1752
gguccucaguccucauuau

SEQ ID NO: 136431 - RNA, 19 nt, Artificial Sequence
  Description of Artificial Sequence: Synthetic oligonucleotide
  Antisense strand to SEQ ID NO: 136430
auaaugaggacugaggacc

SEQ ID NO: 136432 - RNA, 19 nt, Artificial Sequence
  Description of Artificial Sequence: Synthetic oligonucleotide
  Sense strand starting at position 3123 of SEQ ID NO: 1752
guccucaguccucauuaua

SEQ ID NO: 136433 - RNA, 19 nt, Artificial Sequence
  Description of Artificial Sequence: Synthetic oligonucleotide
  Antisense strand to SEQ ID NO: 136432
uauaaugaggacugaggac

SEQ ID NO: 136434 - RNA, 19 nt, Artificial Sequence
  Description of Artificial Sequence: Synthetic oligonucleotide
  Sense strand starting at position 3250 of SEQ ID NO: 1752
gaggaauucuuaguuccag

SEQ ID NO: 136435 - RNA, 19 nt, Artificial Sequence
  Description of Artificial Sequence: Synthetic oligonucleotide
  Antisense strand to SEQ ID NO: 136434
cuggaacuaagaauuccuc

SEQ ID NO: 136436 - RNA, 19 nt, Artificial Sequence
  Description of Artificial Sequence: Synthetic oligonucleotide
  Sense strand starting at position 3256 of SEQ ID NO: 1752
uucuuaguuccagggaguu

SEQ ID NO: 136437 - RNA, 19 nt, Artificial Sequence
  Description of Artificial Sequence: Synthetic oligonucleotide
  Antisense strand to SEQ ID NO: 136436
aacucccuggaacuaagaa

SEQ ID NO: 136438 - RNA, 19 nt, Artificial Sequence
  Description of Artificial Sequence: Synthetic oligonucleotide
  Sense strand starting at position 3930 of SEQ ID NO: 1752
gaaagugacagcuggucau

SEQ ID NO: 136439 - RNA, 19 nt, Artificial Sequence
  Description of Artificial Sequence: Synthetic oligonucleotide
  Antisense strand to SEQ ID NO: 136438
augaccagcugucacuuuc

SEQ ID NO: 136440 - RNA, 19 nt, Artificial Sequence
  Description of Artificial Sequence: Synthetic oligonucleotide
  Sense strand starting at position 427 of SEQ ID NO: 1754
gcgguuugucagcaccuaa

SEQ ID NO: 136441 - RNA, 19 nt, Artificial Sequence
  Description of Artificial Sequence: Synthetic oligonucleotide
  Antisense strand to SEQ ID NO: 136440
uuaggugcugacaaaccgc

SEQ ID NO: 136442 - RNA, 19 nt, Artificial Sequence
  Description of Artificial Sequence: Synthetic oligonucleotide
  Sense strand starting at position 599 of SEQ ID NO: 1754
ccugcugguucugucauau

SEQ ID NO: 136443 - RNA, 19 nt, Artificial Sequence
  Description of Artificial Sequence: Synthetic oligonucleotide
  Antisense strand to SEQ ID NO: 136442
auaugacagaaccagcagg

SEQ ID NO: 136444 - RNA, 19 nt, Artificial Sequence
  Description of Artificial Sequence: Synthetic oligonucleotide
  Sense strand starting at position 748 of SEQ ID NO: 1754
guauaagaaccugguuauu

SEQ ID NO: 136445 - RNA, 19 nt, Artificial Sequence
  Description of Artificial Sequence: Synthetic oligonucleotide
  Antisense strand to SEQ ID NO: 136444
aauaaccagguucuuauac

SEQ ID NO: 136446 - RNA, 19 nt, Artificial Sequence
  Description of Artificial Sequence: Synthetic oligonucleotide
  Sense strand starting at position 798 of SEQ ID NO: 1754
agcauuuagugaguuccua

SEQ ID NO: 136447 - RNA, 19 nt, Artificial Sequence
  Description of Artificial Sequence: Synthetic oligonucleotide
  Antisense strand to SEQ ID NO: 136446
uaggaacucacuaaaugcu

SEQ ID NO: 136448 - RNA, 19 nt, Artificial Sequence
  Description of Artificial Sequence: Synthetic oligonucleotide
  Sense strand starting at position 802 of SEQ ID NO: 1754
uuuagugaguuccuaagua

SEQ ID NO: 136449 - RNA, 19 nt, Artificial Sequence
  Description of Artificial Sequence: Synthetic oligonucleotide
  Antisense strand to SEQ ID NO: 136448
uacuuaggaacucacuaaa

SEQ ID NO: 136450 - RNA, 19 nt, Artificial Sequence
  Description of Artificial Sequence: Synthetic oligonucleotide
  Sense strand starting at position 829 of SEQ ID NO: 1754
uguaccagauccuuuauau

SEQ ID NO: 136451 - RNA, 19 nt, Artificial Sequence
  Description of Artificial Sequence: Synthetic oligonucleotide
  Antisense strand to SEQ ID NO: 136450
auauaaaggaucugguaca

SEQ ID NO: 136452 - RNA, 19 nt, Artificial Sequence
  Description of Artificial Sequence: Synthetic oligonucleotide
  Sense strand starting at position 916 of SEQ ID NO: 1754
gagcguaacuuggccaaga

SEQ ID NO: 136453 - RNA, 19 nt, Artificial Sequence
  Description of Artificial Sequence: Synthetic oligonucleotide
  Antisense strand to SEQ ID NO: 136452
ucuuggccaaguuacgcuc

SEQ ID NO: 136454 - RNA, 19 nt, Artificial Sequence
  Description of Artificial Sequence: Synthetic oligonucleotide
  Sense strand starting at position 1119 of SEQ ID NO: 1754
uuggguucuccaggaaugu

SEQ ID NO: 136455 - RNA, 19 nt, Artificial Sequence
  Description of Artificial Sequence: Synthetic oligonucleotide
  Antisense strand to SEQ ID NO: 136454
acauuccuggagaacccaa

SEQ ID NO: 136456 - RNA, 19 nt, Artificial Sequence
  Description of Artificial Sequence: Synthetic oligonucleotide
  Sense strand starting at position 1120 of SEQ ID NO: 1754
uggguucuccaggaauguu

SEQ ID NO: 136457 - RNA, 19 nt, Artificial Sequence
  Description of Artificial Sequence: Synthetic oligonucleotide
  Antisense strand to SEQ ID NO: 136456
aacauuccuggagaaccca

SEQ ID NO: 136458 - RNA, 19 nt, Artificial Sequence
  Description of Artificial Sequence: Synthetic oligonucleotide
  Sense strand starting at position 1129 of SEQ ID NO: 1754
caggaauguuuggacacua

SEQ ID NO: 136459 - RNA, 19 nt, Artificial Sequence
  Description of Artificial Sequence: Synthetic oligonucleotide
  Antisense strand to SEQ ID NO: 136458
uaguguccaaacauuccug

SEQ ID NO: 136460 - RNA, 19 nt, Artificial Sequence
  Description of Artificial Sequence: Synthetic oligonucleotide
  Sense strand starting at position 1167 of SEQ ID NO: 1754
agacucugggccugagaaa

SEQ ID NO: 136461 - RNA, 19 nt, Artificial Sequence
  Description of Artificial Sequence: Synthetic oligonucleotide
  Antisense strand to SEQ ID NO: 136460
uuucucaggcccagagucu

SEQ ID NO: 136462 - RNA, 19 nt, Artificial Sequence
  Description of Artificial Sequence: Synthetic oligonucleotide
  Sense strand starting at position 1718 of SEQ ID NO: 1754
ccucuaugcugucuggcaa

SEQ ID NO: 136463 - RNA, 19 nt, Artificial Sequence
  Description of Artificial Sequence: Synthetic oligonucleotide
  Antisense strand to SEQ ID NO: 136462
uugccagacagcauagagg

SEQ ID NO: 136464 - RNA, 19 nt, Artificial Sequence
  Description of Artificial Sequence: Synthetic oligonucleotide
  Sense strand starting at position 1719 of SEQ ID NO: 1754
cucuaugcugucuggcaau

SEQ ID NO: 136465 - RNA, 19 nt, Artificial Sequence
  Description of Artificial Sequence: Synthetic oligonucleotide
  Antisense strand to SEQ ID NO: 136464
auugccagacagcauagag

SEQ ID NO: 136466 - RNA, 19 nt, Artificial Sequence
  Description of Artificial Sequence: Synthetic oligonucleotide
  Sense strand starting at position 1726 of SEQ ID NO: 1754
cugucuggcaauugcagaa

SEQ ID NO: 136467 - RNA, 19 nt, Artificial Sequence
  Description of Artificial Sequence: Synthetic oligonucleotide
  Antisense strand to SEQ ID NO: 136466
uucugcaauugccagacag

SEQ ID NO: 136468 - RNA, 19 nt, Artificial Sequence
  Description of Artificial Sequence: Synthetic oligonucleotide
  Sense strand starting at position 1730 of SEQ ID NO: 1754
cuggcaauugcagaaguga

SEQ ID NO: 136469 - RNA, 19 nt, Artificial Sequence
  Description of Artificial Sequence: Synthetic oligonucleotide
  Antisense strand to SEQ ID NO: 136468
ucacuucugcaauugccag

SEQ ID NO: 136470 - RNA, 19 nt, Artificial Sequence
  Description of Artificial Sequence: Synthetic oligonucleotide
  Sense strand starting at position 1963 of SEQ ID NO: 1754
agugcauguacucaagaga

SEQ ID NO: 136471 - RNA, 19 nt, Artificial Sequence
  Description of Artificial Sequence: Synthetic oligonucleotide
  Antisense strand to SEQ ID NO: 136470
ucucuugaguacaugcacu

SEQ ID NO: 136472 - RNA, 19 nt, Artificial Sequence
  Description of Artificial Sequence: Synthetic oligonucleotide
  Sense strand starting at position 2316 of SEQ ID NO: 1754
gagaaugcccgcugggaua

SEQ ID NO: 136473 - RNA, 19 nt, Artificial Sequence
  Description of Artificial Sequence: Synthetic oligonucleotide
  Antisense strand to SEQ ID NO: 136472
uaucccagcgggcauucuc

SEQ ID NO: 136474 - RNA, 19 nt, Artificial Sequence
  Description of Artificial Sequence: Synthetic oligonucleotide
  Sense strand starting at position 2318 of SEQ ID NO: 1754
gaaugcccgcugggauaua

SEQ ID NO: 136475 - RNA, 19 nt, Artificial Sequence
  Description of Artificial Sequence: Synthetic oligonucleotide
  Antisense strand to SEQ ID NO: 136474
uauaucccagcgggcauuc

SEQ ID NO: 136476 - RNA, 19 nt, Artificial Sequence
  Description of Artificial Sequence: Synthetic oligonucleotide
  Sense strand starting at position 2631 of SEQ ID NO: 1754
ugcgguugauuucuggaga

SEQ ID NO: 136477 - RNA, 19 nt, Artificial Sequence
  Description of Artificial Sequence: Synthetic oligonucleotide
  Antisense strand to SEQ ID NO: 136476
ucuccagaaaucaaccgca

SEQ ID NO: 136478 - RNA, 19 nt, Artificial Sequence
  Description of Artificial Sequence: Synthetic oligonucleotide
  Sense strand starting at position 2632 of SEQ ID NO: 1754
gcgguugauuucuggagag

SEQ ID NO: 136479 - RNA, 19 nt, Artificial Sequence
  Description of Artificial Sequence: Synthetic oligonucleotide
  Antisense strand to SEQ ID NO: 136478
cucuccagaaaucaaccgc

SEQ ID NO: 136480 - RNA, 19 nt, Artificial Sequence
  Description of Artificial Sequence: Synthetic oligonucleotide
  Sense strand starting at position 2655 of SEQ ID NO: 1754
ggcuccauuguccaguaga

SEQ ID NO: 136481 - RNA, 19 nt, Artificial Sequence
  Description of Artificial Sequence: Synthetic oligonucleotide
  Antisense strand to SEQ ID NO: 136480
ucuacuggacaauggagcc

SEQ ID NO: 136482 - RNA, 19 nt, Artificial Sequence
  Description of Artificial Sequence: Synthetic oligonucleotide
  Sense strand starting at position 2658 of SEQ ID NO: 1754
uccauuguccaguagaaug

SEQ ID NO: 136483 - RNA, 19 nt, Artificial Sequence
  Description of Artificial Sequence: Synthetic oligonucleotide
  Antisense strand to SEQ ID NO: 136482
cauucuacuggacaaugga

SEQ ID NO: 136484 - RNA, 19 nt, Artificial Sequence
  Description of Artificial Sequence: Synthetic oligonucleotide
  Sense strand starting at position 2660 of SEQ ID NO: 1754
cauuguccaguagaauguu

SEQ ID NO: 136485 - RNA, 19 nt, Artificial Sequence
  Description of Artificial Sequence: Synthetic oligonucleotide
  Antisense strand to SEQ ID NO: 136484
aacauucuacuggacaaug

SEQ ID NO: 136486 - RNA, 19 nt, Artificial Sequence
  Description of Artificial Sequence: Synthetic oligonucleotide
  Sense strand starting at position 2666 of SEQ ID NO: 1754
ccaguagaauguucuauau

SEQ ID NO: 136487 - RNA, 19 nt, Artificial Sequence
  Description of Artificial Sequence: Synthetic oligonucleotide
  Antisense strand to SEQ ID NO: 136486
auauagaacauucuacugg

SEQ ID NO: 136488 - RNA, 19 nt, Artificial Sequence
  Description of Artificial Sequence: Synthetic oligonucleotide
  Sense strand starting at position 2695 of SEQ ID NO: 1754
guugauugcuuccuuguga

SEQ ID NO: 136489 - RNA, 19 nt, Artificial Sequence
  Description of Artificial Sequence: Synthetic oligonucleotide
  Antisense strand to SEQ ID NO: 136488
ucacaaggaagcaaucaac

SEQ ID NO: 136490 - RNA, 19 nt, Artificial Sequence
  Description of Artificial Sequence: Synthetic oligonucleotide
  Sense strand starting at position 2828 of SEQ ID NO: 1754
agcguaugaguucauggga

SEQ ID NO: 136491 - RNA, 19 nt, Artificial Sequence
  Description of Artificial Sequence: Synthetic oligonucleotide
  Antisense strand to SEQ ID NO: 136490
ucccaugaacucauacgcu

SEQ ID NO: 136492 - RNA, 19 nt, Artificial Sequence
  Description of Artificial Sequence: Synthetic oligonucleotide
  Sense strand starting at position 2831 of SEQ ID NO: 1754
guaugaguucaugggagca

SEQ ID NO: 136493 - RNA, 19 nt, Artificial Sequence
  Description of Artificial Sequence: Synthetic oligonucleotide
  Antisense strand to SEQ ID NO: 136492
ugcucccaugaacucauac

SEQ ID NO: 136494 - RNA, 19 nt, Artificial Sequence
  Description of Artificial Sequence: Synthetic oligonucleotide
  Sense strand starting at position 2865 of SEQ ID NO: 1754
guggacaaucgauggugaa

SEQ ID NO: 136495 - RNA, 19 nt, Artificial Sequence
  Description of Artificial Sequence: Synthetic oligonucleotide
  Antisense strand to SEQ ID NO: 136494
uucaccaucgauuguccac

SEQ ID NO: 136496 - RNA, 19 nt, Artificial Sequence
  Description of Artificial Sequence: Synthetic oligonucleotide
  Sense strand starting at position 2866 of SEQ ID NO: 1754
uggacaaucgauggugaau

SEQ ID NO: 136497 - RNA, 19 nt, Artificial Sequence
  Description of Artificial Sequence: Synthetic oligonucleotide
  Antisense strand to SEQ ID NO: 136496
auucaccaucgauugucca

SEQ ID NO: 136498 - RNA, 19 nt, Artificial Sequence
  Description of Artificial Sequence: Synthetic oligonucleotide
  Sense strand starting at position 2878 of SEQ ID NO: 1754
ggugaaugcacaugaaucu

SEQ ID NO: 136499 - RNA, 19 nt, Artificial Sequence
  Description of Artificial Sequence: Synthetic oligonucleotide
  Antisense strand to SEQ ID NO: 136498
agauucaugugcauucacc

SEQ ID NO: 136500 - RNA, 19 nt, Artificial Sequence
  Description of Artificial Sequence: Synthetic oligonucleotide
  Sense strand starting at position 2890 of SEQ ID NO: 1754
ugaaucucugaguguaggu

SEQ ID NO: 136501 - RNA, 19 nt, Artificial Sequence
  Description of Artificial Sequence: Synthetic oligonucleotide
  Antisense strand to SEQ ID NO: 136500
accuacacucagagauuca

SEQ ID NO: 136502 - RNA, 19 nt, Artificial Sequence
  Description of Artificial Sequence: Synthetic oligonucleotide
  Sense strand starting at position 2907 of SEQ ID NO: 1754
gugugaggguaugugugaa

SEQ ID NO: 136503 - RNA, 19 nt, Artificial Sequence
  Description of Artificial Sequence: Synthetic oligonucleotide
  Antisense strand to SEQ ID NO: 136502
uucacacauacccucacac

SEQ ID NO: 136504 - RNA, 19 nt, Artificial Sequence
  Description of Artificial Sequence: Synthetic oligonucleotide
  Sense strand starting at position 2913 of SEQ ID NO: 1754
ggguaugugugaaagugag

SEQ ID NO: 136505 - RNA, 19 nt, Artificial Sequence
  Description of Artificial Sequence: Synthetic oligonucleotide
  Antisense strand to SEQ ID NO: 136504
cucacuuucacacauaccc

SEQ ID NO: 136506 - RNA, 19 nt, Artificial Sequence
  Description of Artificial Sequence: Synthetic oligonucleotide
  Sense strand starting at position 2939 of SEQ ID NO: 1754
gggcaucccgugugcauaa

SEQ ID NO: 136507 - RNA, 19 nt, Artificial Sequence
  Description of Artificial Sequence: Synthetic oligonucleotide
  Antisense strand to SEQ ID NO: 136506
uuaugcacacgggaugccc

SEQ ID NO: 136508 - RNA, 19 nt, Artificial Sequence
  Description of Artificial Sequence: Synthetic oligonucleotide
  Sense strand starting at position 2971 of SEQ ID NO: 1754
cagaguaucugccucaguu

SEQ ID NO: 136509 - RNA, 19 nt, Artificial Sequence
  Description of Artificial Sequence: Synthetic oligonucleotide
  Antisense strand to SEQ ID NO: 136508
aacugaggcagauacucug

SEQ ID NO: 136510 - RNA, 19 nt, Artificial Sequence
  Description of Artificial Sequence: Synthetic oligonucleotide
  Sense strand starting at position 3066 of SEQ ID NO: 1754
gguggacccugucuaaaga

SEQ ID NO: 136511 - RNA, 19 nt, Artificial Sequence
  Description of Artificial Sequence: Synthetic oligonucleotide
  Antisense strand to SEQ ID NO: 136510
ucuuuagacaggguccacc

SEQ ID NO: 136512 - RNA, 19 nt, Artificial Sequence
  Description of Artificial Sequence: Synthetic oligonucleotide
  Sense strand starting at position 3082 of SEQ ID NO: 1754
agaagcaagucccucagau

SEQ ID NO: 136513 - RNA, 19 nt, Artificial Sequence
  Description of Artificial Sequence: Synthetic oligonucleotide
  Antisense strand to SEQ ID NO: 136512
aucugagggacuugcuucu

SEQ ID NO: 136514 - RNA, 19 nt, Artificial Sequence
  Description of Artificial Sequence: Synthetic oligonucleotide
  Sense strand starting at position 3634 of SEQ ID NO: 1754
acauuugccucagucaugu

SEQ ID NO: 136515 - RNA, 19 nt, Artificial Sequence
  Description of Artificial Sequence: Synthetic oligonucleotide
  Antisense strand to SEQ ID NO: 136514
acaugacugaggcaaaugu

SEQ ID NO: 136516 - RNA, 19 nt, Artificial Sequence
  Description of Artificial Sequence: Synthetic oligonucleotide
  Sense strand starting at position 3864 of SEQ ID NO: 1754
ucgaguucaugcguccaua

SEQ ID NO: 136517 - RNA, 19 nt, Artificial Sequence
  Description of Artificial Sequence: Synthetic oligonucleotide
  Antisense strand to SEQ ID NO: 136516
uauggacgcaugaacucga

SEQ ID NO: 136518 - RNA, 19 nt, Artificial Sequence
  Description of Artificial Sequence: Synthetic oligonucleotide
  Sense strand starting at position 3865 of SEQ ID NO: 1754
cgaguucaugcguccauac

SEQ ID NO: 136519 - RNA, 19 nt, Artificial Sequence
  Description of Artificial Sequence: Synthetic oligonucleotide
  Antisense strand to SEQ ID NO: 136518
guauggacgcaugaacucg

SEQ ID NO: 136520 - RNA, 19 nt, Artificial Sequence
  Description of Artificial Sequence: Synthetic oligonucleotide
  Sense strand starting at position 10 of SEQ ID NO: 1753
ggucccaguuacucaugaa

SEQ ID NO: 136521 - RNA, 19 nt, Artificial Sequence
  Description of Artificial Sequence: Synthetic oligonucleotide
  Antisense strand to SEQ ID NO: 136520
uucaugaguaacugggacc

SEQ ID NO: 136522 - RNA, 19 nt, Artificial Sequence
  Description of Artificial Sequence: Synthetic oligonucleotide
  Sense strand starting at position 182 of SEQ ID NO: 1753
ggaccagacucaccuaagu

SEQ ID NO: 136523 - RNA, 19 nt, Artificial Sequence
  Description of Artificial Sequence: Synthetic oligonucleotide
  Antisense strand to SEQ ID NO: 136522
acuuaggugagucuggucc

SEQ ID NO: 136524 - RNA, 19 nt, Artificial Sequence
  Description of Artificial Sequence: Synthetic oligonucleotide
  Sense strand starting at position 676 of SEQ ID NO: 1753
ccaggaggcaugugguaaa

SEQ ID NO: 136525 - RNA, 19 nt, Artificial Sequence
  Description of Artificial Sequence: Synthetic oligonucleotide
  Antisense strand to SEQ ID NO: 136524
uuuaccacaugccuccugg

SEQ ID NO: 136526 - RNA, 19 nt, Artificial Sequence
  Description of Artificial Sequence: Synthetic oligonucleotide
  Sense strand starting at position 945 of SEQ ID NO: 1753
aggugauccaccuguguuu

SEQ ID NO: 136527 - RNA, 19 nt, Artificial Sequence
  Description of Artificial Sequence: Synthetic oligonucleotide
  Antisense strand to SEQ ID NO: 136526
aaacacagguggaucaccu

SEQ ID NO: 136528 - RNA, 19 nt, Artificial Sequence
  Description of Artificial Sequence: Synthetic oligonucleotide
  Sense strand starting at position 964 of SEQ ID NO: 1753
uuauuaucagugugcucua

SEQ ID NO: 136529 - RNA, 19 nt, Artificial Sequence
  Description of Artificial Sequence: Synthetic oligonucleotide
  Antisense strand to SEQ ID NO: 136528
uagagcacacugauaauaa

SEQ ID NO: 136530 - RNA, 19 nt, Artificial Sequence
  Description of Artificial Sequence: Synthetic oligonucleotide
  Sense strand starting at position 1200 of SEQ ID NO: 1753
aguucugugauauguacag

SEQ ID NO: 136531 - RNA, 19 nt, Artificial Sequence
  Description of Artificial Sequence: Synthetic oligonucleotide
  Antisense strand to SEQ ID NO: 136530
cuguacauaucacagaacu

SEQ ID NO: 136532 - RNA, 19 nt, Artificial Sequence
  Description of Artificial Sequence: Synthetic oligonucleotide
  Sense strand starting at position 1206 of SEQ ID NO: 1753
gugauauguacagaugguu

SEQ ID NO: 136533 - RNA, 19 nt, Artificial Sequence
  Description of Artificial Sequence: Synthetic oligonucleotide
  Antisense strand to SEQ ID NO: 136532
aaccaucuguacauaucac

SEQ ID NO: 136534 - RNA, 19 nt, Artificial Sequence
  Description of Artificial Sequence: Synthetic oligonucleotide
  Sense strand starting at position 1259 of SEQ ID NO: 1753
ggaagauauuugugagacc

SEQ ID NO: 136535 - RNA, 19 nt, Artificial Sequence
  Description of Artificial Sequence: Synthetic oligonucleotide
  Antisense strand to SEQ ID NO: 136534
ggucucacaaauaucuucc

SEQ ID NO: 136536 - RNA, 19 nt, Artificial Sequence
  Description of Artificial Sequence: Synthetic oligonucleotide
  Sense strand starting at position 1260 of SEQ ID NO: 1753
gaagauauuugugagaccu

SEQ ID NO: 136537 - RNA, 19 nt, Artificial Sequence
  Description of Artificial Sequence: Synthetic oligonucleotide
  Antisense strand to SEQ ID NO: 136536
aggucucacaaauaucuuc

SEQ ID NO: 136538 - RNA, 19 nt, Artificial Sequence
  Description of Artificial Sequence: Synthetic oligonucleotide
  Sense strand starting at position 1262 of SEQ ID NO: 1753
agauauuugugagaccuug

SEQ ID NO: 136539 - RNA, 19 nt, Artificial Sequence
  Description of Artificial Sequence: Synthetic oligonucleotide
  Antisense strand to SEQ ID NO: 136538
caaggucucacaaauaucu

SEQ ID NO: 136540 - RNA, 19 nt, Artificial Sequence
  Description of Artificial Sequence: Synthetic oligonucleotide
  Sense strand starting at position 1282 of SEQ ID NO: 1753
ggaguagguuuguuugcag

SEQ ID NO: 136541 - RNA, 19 nt, Artificial Sequence
  Description of Artificial Sequence: Synthetic oligonucleotide
  Antisense strand to SEQ ID NO: 136540
cugcaaacaaaccuacucc

SEQ ID NO: 136542 - RNA, 19 nt, Artificial Sequence
  Description of Artificial Sequence: Synthetic oligonucleotide
  Sense strand starting at position 1354 of SEQ ID NO: 1753
gcauguugugugucuguaa

SEQ ID NO: 136543 - RNA, 19 nt, Artificial Sequence
  Description of Artificial Sequence: Synthetic oligonucleotide
  Antisense strand to SEQ ID NO: 136542
uuacagacacacaacaugc

SEQ ID NO: 136544 - RNA, 19 nt, Artificial Sequence
  Description of Artificial Sequence: Synthetic oligonucleotide
  Sense strand starting at position 1386 of SEQ ID NO: 1753
uggguuaggaucugcauca

SEQ ID NO: 136545 - RNA, 19 nt, Artificial Sequence
  Description of Artificial Sequence: Synthetic oligonucleotide
  Antisense strand to SEQ ID NO: 136544
ugaugcagauccuaaccca

SEQ ID NO: 136546 - RNA, 19 nt, Artificial Sequence
  Description of Artificial Sequence: Synthetic oligonucleotide
  Sense strand starting at position 1387 of SEQ ID NO: 1753
ggguuaggaucugcaucau

SEQ ID NO: 136547 - RNA, 19 nt, Artificial Sequence
  Description of Artificial Sequence: Synthetic oligonucleotide
  Antisense strand to SEQ ID NO: 136546
augaugcagauccuaaccc

SEQ ID NO: 136548 - RNA, 19 nt, Artificial Sequence
  Description of Artificial Sequence: Synthetic oligonucleotide
  Sense strand starting at position 1435 of SEQ ID NO: 1753
ucguguauguguauaggga

SEQ ID NO: 136549 - RNA, 19 nt, Artificial Sequence
  Description of Artificial Sequence: Synthetic oligonucleotide
  Antisense strand to SEQ ID NO: 136548
ucccuauacacauacacga

SEQ ID NO: 136550 - RNA, 19 nt, Artificial Sequence
  Description of Artificial Sequence: Synthetic oligonucleotide
  Sense strand starting at position 1451 of SEQ ID NO: 1753
ggagggucauggguuguau

SEQ ID NO: 136551 - RNA, 19 nt, Artificial Sequence
  Description of Artificial Sequence: Synthetic oligonucleotide
  Antisense strand to SEQ ID NO: 136550
auacaacccaugacccucc

SEQ ID NO: 136552 - RNA, 19 nt, Artificial Sequence
  Description of Artificial Sequence: Synthetic oligonucleotide
  Sense strand starting at position 1459 of SEQ ID NO: 1753
auggguuguaucuguggau

SEQ ID NO: 136553 - RNA, 19 nt, Artificial Sequence
  Description of Artificial Sequence: Synthetic oligonucleotide
  Antisense strand to SEQ ID NO: 136552
auccacagauacaacccau

SEQ ID NO: 136554 - RNA, 19 nt, Artificial Sequence
  Description of Artificial Sequence: Synthetic oligonucleotide
  Sense strand starting at position 1463 of SEQ ID NO: 1753
guuguaucuguggaugaug

SEQ ID NO: 136555 - RNA, 19 nt, Artificial Sequence
  Description of Artificial Sequence: Synthetic oligonucleotide
  Antisense strand to SEQ ID NO: 136554
caucauccacagauacaac

SEQ ID NO: 136556 - RNA, 19 nt, Artificial Sequence
  Description of Artificial Sequence: Synthetic oligonucleotide
  Sense strand starting at position 1485 of SEQ ID NO: 1753
gucuguuguguguugugaa

SEQ ID NO: 136557 - RNA, 19 nt, Artificial Sequence
  Description of Artificial Sequence: Synthetic oligonucleotide
  Antisense strand to SEQ ID NO: 136556
uucacaacacacaacagac

SEQ ID NO: 136558 - RNA, 19 nt, Artificial Sequence
  Description of Artificial Sequence: Synthetic oligonucleotide
  Sense strand starting at position 1492 of SEQ ID NO: 1753
guguguugugaagggauuc

SEQ ID NO: 136559 - RNA, 19 nt, Artificial Sequence
  Description of Artificial Sequence: Synthetic oligonucleotide
  Antisense strand to SEQ ID NO: 136558
gaaucccuucacaacacac

SEQ ID NO: 136560 - RNA, 19 nt, Artificial Sequence
  Description of Artificial Sequence: Synthetic oligonucleotide
  Sense strand starting at position 1504 of SEQ ID NO: 1753
gggauucugugggugacga

SEQ ID NO: 136561 - RNA, 19 nt, Artificial Sequence
  Description of Artificial Sequence: Synthetic oligonucleotide
  Antisense strand to SEQ ID NO: 136560
ucgucacccacagaauccc

SEQ ID NO: 136562 - RNA, 19 nt, Artificial Sequence
  Description of Artificial Sequence: Synthetic oligonucleotide
  Sense strand starting at position 1514 of SEQ ID NO: 1753
gggugacgaggauguguuu

SEQ ID NO: 136563 - RNA, 19 nt, Artificial Sequence
  Description of Artificial Sequence: Synthetic oligonucleotide
  Antisense strand to SEQ ID NO: 136562
aaacacauccucgucaccc

SEQ ID NO: 136564 - RNA, 19 nt, Artificial Sequence
  Description of Artificial Sequence: Synthetic oligonucleotide
  Sense strand starting at position 1774 of SEQ ID NO: 1753
ccagccucuuaccugagaa

SEQ ID NO: 136565 - RNA, 19 nt, Artificial Sequence
  Description of Artificial Sequence: Synthetic oligonucleotide
  Antisense strand to SEQ ID NO: 136564
uucucagguaagaggcugg

SEQ ID NO: 136566 - RNA, 19 nt, Artificial Sequence
  Description of Artificial Sequence: Synthetic oligonucleotide
  Sense strand starting at position 1776 of SEQ ID NO: 1753
agccucuuaccugagaaac

SEQ ID NO: 136567 - RNA, 19 nt, Artificial Sequence
  Description of Artificial Sequence: Synthetic oligonucleotide
  Antisense strand to SEQ ID NO: 136566
guuucucagguaagaggcu

SEQ ID NO: 136568 - RNA, 19 nt, Artificial Sequence
  Description of Artificial Sequence: Synthetic oligonucleotide
  Sense strand starting at position 1778 of SEQ ID NO: 1753
ccucuuaccugagaaacag

SEQ ID NO: 136569 - RNA, 19 nt, Artificial Sequence
  Description of Artificial Sequence: Synthetic oligonucleotide
  Antisense strand to SEQ ID NO: 136568
cuguuucucagguaagagg

SEQ ID NO: 136570 - RNA, 19 nt, Artificial Sequence
  Description of Artificial Sequence: Synthetic oligonucleotide
  Sense strand starting at position 1855 of SEQ ID NO: 1753
gcauguuuccuggacggcu

SEQ ID NO: 136571 - RNA, 19 nt, Artificial Sequence
  Description of Artificial Sequence: Synthetic oligonucleotide
  Antisense strand to SEQ ID NO: 136570
agccguccaggaaacaugc

SEQ ID NO: 136572 - RNA, 19 nt, Artificial Sequence
  Description of Artificial Sequence: Synthetic oligonucleotide
  Sense strand starting at position 2222 of SEQ ID NO: 1753
ggaacuggguccuuugacu

SEQ ID NO: 136573 - RNA, 19 nt, Artificial Sequence
  Description of Artificial Sequence: Synthetic oligonucleotide
  Antisense strand to SEQ ID NO: 136572
agucaaaggacccaguucc

SEQ ID NO: 136574 - RNA, 19 nt, Artificial Sequence
  Description of Artificial Sequence: Synthetic oligonucleotide
  Sense strand starting at position 2246 of SEQ ID NO: 1753
ggagaugagcccugaccua

SEQ ID NO: 136575 - RNA, 19 nt, Artificial Sequence
  Description of Artificial Sequence: Synthetic oligonucleotide
  Antisense strand to SEQ ID NO: 136574
uaggucagggcucaucucc

SEQ ID NO: 136576 - RNA, 19 nt, Artificial Sequence
  Description of Artificial Sequence: Synthetic oligonucleotide
  Sense strand starting at position 2554 of SEQ ID NO: 1753
guacaaugggugugacaaa

SEQ ID NO: 136577 - RNA, 19 nt, Artificial Sequence
  Description of Artificial Sequence: Synthetic oligonucleotide
  Antisense strand to SEQ ID NO: 136576
uuugucacacccauuguac

SEQ ID NO: 136578 - RNA, 19 nt, Artificial Sequence
  Description of Artificial Sequence: Synthetic oligonucleotide
  Sense strand starting at position 2645 of SEQ ID NO: 1753
agaaguuucugccuucuga

SEQ ID NO: 136579 - RNA, 19 nt, Artificial Sequence
  Description of Artificial Sequence: Synthetic oligonucleotide
  Antisense strand to SEQ ID NO: 136578
ucagaaggcagaaacuucu

SEQ ID NO: 136580 - RNA, 19 nt, Artificial Sequence
  Description of Artificial Sequence: Synthetic oligonucleotide
  Sense strand starting at position 2795 of SEQ ID NO: 1753
acguucugcacugaaaguu

SEQ ID NO: 136581 - RNA, 19 nt, Artificial Sequence
  Description of Artificial Sequence: Synthetic oligonucleotide
  Antisense strand to SEQ ID NO: 136580
aacuuucagugcagaacgu

SEQ ID NO: 136582 - RNA, 19 nt, Artificial Sequence
  Description of Artificial Sequence: Synthetic oligonucleotide
  Sense strand starting at position 2927 of SEQ ID NO: 1753
aggugaacauucucaaaug

SEQ ID NO: 136583 - RNA, 19 nt, Artificial Sequence
  Description of Artificial Sequence: Synthetic oligonucleotide
  Antisense strand to SEQ ID NO: 136582
cauuugagaauguucaccu

SEQ ID NO: 136584 - RNA, 19 nt, Artificial Sequence
  Description of Artificial Sequence: Synthetic oligonucleotide
  Sense strand starting at position 2950 of SEQ ID NO: 1753
cucuaagaaucugccagau

SEQ ID NO: 136585 - RNA, 19 nt, Artificial Sequence
  Description of Artificial Sequence: Synthetic oligonucleotide
  Antisense strand to SEQ ID NO: 136584
aucuggcagauucuuagag

SEQ ID NO: 136586 - RNA, 19 nt, Artificial Sequence
  Description of Artificial Sequence: Synthetic oligonucleotide
  Sense strand starting at position 2998 of SEQ ID NO: 1753
gcuugagcccugcagugaa

SEQ ID NO: 136587 - RNA, 19 nt, Artificial Sequence
  Description of Artificial Sequence: Synthetic oligonucleotide
  Antisense strand to SEQ ID NO: 136586
uucacugcagggcucaagc

SEQ ID NO: 136588 - RNA, 19 nt, Artificial Sequence
  Description of Artificial Sequence: Synthetic oligonucleotide
  Sense strand starting at position 3028 of SEQ ID NO: 1753
ccuauuuccugagucugua

SEQ ID NO: 136589 - RNA, 19 nt, Artificial Sequence
  Description of Artificial Sequence: Synthetic oligonucleotide
  Antisense strand to SEQ ID NO: 136588
uacagacucaggaaauagg

SEQ ID NO: 136590 - RNA, 19 nt, Artificial Sequence
  Description of Artificial Sequence: Synthetic oligonucleotide
  Sense strand starting at position 3562 of SEQ ID NO: 1753
guaugucuguaaucucauc

SEQ ID NO: 136591 - RNA, 19 nt, Artificial Sequence
  Description of Artificial Sequence: Synthetic oligonucleotide
  Antisense strand to SEQ ID NO: 136590
gaugagauuacagacauac

SEQ ID NO: 136592 - RNA, 19 nt, Artificial Sequence
  Description of Artificial Sequence: Synthetic oligonucleotide
  Sense strand starting at position 3567 of SEQ ID NO: 1753
ucuguaaucucaucacugu

SEQ ID NO: 136593 - RNA, 19 nt, Artificial Sequence
  Description of Artificial Sequence: Synthetic oligonucleotide
  Antisense strand to SEQ ID NO: 136592
acagugaugagauuacaga

SEQ ID NO: 136594 - RNA, 19 nt, Artificial Sequence
  Description of Artificial Sequence: Synthetic oligonucleotide
  Sense strand starting at position 3596 of SEQ ID NO: 1753
cguagaggaucacuugaga

SEQ ID NO: 136595 - RNA, 19 nt, Artificial Sequence
  Description of Artificial Sequence: Synthetic oligonucleotide
  Antisense strand to SEQ ID NO: 136594
ucucaagugauccucuacg

SEQ ID NO: 136596 - RNA, 19 nt, Artificial Sequence
  Description of Artificial Sequence: Synthetic oligonucleotide
  Sense strand starting at position 3741 of SEQ ID NO: 1753
cguucaagcccaggagauu

SEQ ID NO: 136597 - RNA, 19 nt, Artificial Sequence
  Description of Artificial Sequence: Synthetic oligonucleotide
  Antisense strand to SEQ ID NO: 136596
aaucuccugggcuugaacg

SEQ ID NO: 136598 - RNA, 19 nt, Artificial Sequence
  Description of Artificial Sequence: Synthetic oligonucleotide
  Sense strand starting at position 3904 of SEQ ID NO: 1753
aggcgauuccaagguagca

SEQ ID NO: 136599 - RNA, 19 nt, Artificial Sequence
  Description of Artificial Sequence: Synthetic oligonucleotide
  Antisense strand to SEQ ID NO: 136598
ugcuaccuuggaaucgccu

SEQ ID NO: 136600 - RNA, 19 nt, Artificial Sequence
  Description of Artificial Sequence: Synthetic oligonucleotide
  Sense strand starting at position 3949 of SEQ ID NO: 1755
ucacuuuaucuuggcaaag

SEQ ID NO: 136601 - RNA, 19 nt, Artificial Sequence
  Description of Artificial Sequence: Synthetic oligonucleotide
  Antisense strand to SEQ ID NO: 136600
cuuugccaagauaaaguga

SEQ ID NO: 136602 - RNA, 19 nt, Artificial Sequence
  Description of Artificial Sequence: Synthetic oligonucleotide
  Sense strand starting at position 3937 of SEQ ID NO: 1755
auugauugguucucacuuu

SEQ ID NO: 136603 - RNA, 19 nt, Artificial Sequence
  Description of Artificial Sequence: Synthetic oligonucleotide
  Antisense strand to SEQ ID NO: 136602
aaagugagaaccaaucaau

SEQ ID NO: 136604 - RNA, 19 nt, Artificial Sequence
  Description of Artificial Sequence: Synthetic oligonucleotide
  Sense strand starting at position 3933 of SEQ ID NO: 1755
auugauugauugguucuca

SEQ ID NO: 136605 - RNA, 19 nt, Artificial Sequence
  Description of Artificial Sequence: Synthetic oligonucleotide
  Antisense strand to SEQ ID NO: 136604
ugagaaccaaucaaucaau

SEQ ID NO: 136606 - RNA, 19 nt, Artificial Sequence
  Description of Artificial Sequence: Synthetic oligonucleotide
  Sense strand starting at position 3928 of SEQ ID NO: 1755
ucgauauugauugauuggu

SEQ ID NO: 136607 - RNA, 19 nt, Artificial Sequence
  Description of Artificial Sequence: Synthetic oligonucleotide
  Antisense strand to SEQ ID NO: 136606
accaaucaaucaauaucga

SEQ ID NO: 136608 - RNA, 19 nt, Artificial Sequence
  Description of Artificial Sequence: Synthetic oligonucleotide
  Sense strand starting at position 3926 of SEQ ID NO: 1755
gaucgauauugauugauug

SEQ ID NO: 136609 - RNA, 19 nt, Artificial Sequence
  Description of Artificial Sequence: Synthetic oligonucleotide
  Antisense strand to SEQ ID NO: 136608
caaucaaucaauaucgauc

SEQ ID NO: 136610 - RNA, 19 nt, Artificial Sequence
  Description of Artificial Sequence: Synthetic oligonucleotide
  Sense strand starting at position 3924 of SEQ ID NO: 1755
ucgaucgauauugauugau

SEQ ID NO: 136611 - RNA, 19 nt, Artificial Sequence
  Description of Artificial Sequence: Synthetic oligonucleotide
  Antisense strand to SEQ ID NO: 136610
aucaaucaauaucgaucga

SEQ ID NO: 136612 - RNA, 19 nt, Artificial Sequence
  Description of Artificial Sequence: Synthetic oligonucleotide
  Sense strand starting at position 3920 of SEQ ID NO: 1755
ucgcucgaucgauauugau

SEQ ID NO: 136613 - RNA, 19 nt, Artificial Sequence
  Description of Artificial Sequence: Synthetic oligonucleotide
  Antisense strand to SEQ ID NO: 136612
aucaauaucgaucgagcga

SEQ ID NO: 136614 - RNA, 19 nt, Artificial Sequence
  Description of Artificial Sequence: Synthetic oligonucleotide
  Sense strand starting at position 3914 of SEQ ID NO: 1755
ccacauucgcucgaucgau

SEQ ID NO: 136615 - RNA, 19 nt, Artificial Sequence
  Description of Artificial Sequence: Synthetic oligonucleotide
  Antisense strand to SEQ ID NO: 136614
aucgaucgagcgaaugugg

SEQ ID NO: 136616 - RNA, 19 nt, Artificial Sequence
  Description of Artificial Sequence: Synthetic oligonucleotide
  Sense strand starting at position 3894 of SEQ ID NO: 1755
guauuaauucuugguauuc

SEQ ID NO: 136617 - RNA, 19 nt, Artificial Sequence
  Description of Artificial Sequence: Synthetic oligonucleotide
  Antisense strand to SEQ ID NO: 136616
gaauaccaagaauuaauac

SEQ ID NO: 136618 - RNA, 19 nt, Artificial Sequence
  Description of Artificial Sequence: Synthetic oligonucleotide
  Sense strand starting at position 3892 of SEQ ID NO: 1755
ugguauuaauucuugguau

SEQ ID NO: 136619 - RNA, 19 nt, Artificial Sequence
  Description of Artificial Sequence: Synthetic oligonucleotide
  Antisense strand to SEQ ID NO: 136618
auaccaagaauuaauacca

SEQ ID NO: 136620 - RNA, 19 nt, Artificial Sequence
  Description of Artificial Sequence: Synthetic oligonucleotide
  Sense strand starting at position 3641 of SEQ ID NO: 1755
cgagguugcggugagucaa

SEQ ID NO: 136621 - RNA, 19 nt, Artificial Sequence
  Description of Artificial Sequence: Synthetic oligonucleotide
  Antisense strand to SEQ ID NO: 136620
uugacucaccgcaaccucg

SEQ ID NO: 136622 - RNA, 19 nt, Artificial Sequence
  Description of Artificial Sequence: Synthetic oligonucleotide
  Sense strand starting at position 3395 of SEQ ID NO: 1755
gggauugucaaucguuaaa

SEQ ID NO: 136623 - RNA, 19 nt, Artificial Sequence
  Description of Artificial Sequence: Synthetic oligonucleotide
  Antisense strand to SEQ ID NO: 136622
uuuaacgauugacaauccc

SEQ ID NO: 136624 - RNA, 19 nt, Artificial Sequence
  Description of Artificial Sequence: Synthetic oligonucleotide
  Sense strand starting at position 3388 of SEQ ID NO: 1755
ugccuaugggauugucaau

SEQ ID NO: 136625 - RNA, 19 nt, Artificial Sequence
  Description of Artificial Sequence: Synthetic oligonucleotide
  Antisense strand to SEQ ID NO: 136624
auugacaaucccauaggca

SEQ ID NO: 136626 - RNA, 19 nt, Artificial Sequence
  Description of Artificial Sequence: Synthetic oligonucleotide
  Sense strand starting at position 3319 of SEQ ID NO: 1755
agagcaucuuguccaaaca

SEQ ID NO: 136627 - RNA, 19 nt, Artificial Sequence
  Description of Artificial Sequence: Synthetic oligonucleotide
  Antisense strand to SEQ ID NO: 136626
uguuuggacaagaugcucu

SEQ ID NO: 136628 - RNA, 19 nt, Artificial Sequence
  Description of Artificial Sequence: Synthetic oligonucleotide
  Sense strand starting at position 2933 of SEQ ID NO: 1755
auccuuugcuaauuggaau

SEQ ID NO: 136629 - RNA, 19 nt, Artificial Sequence
  Description of Artificial Sequence: Synthetic oligonucleotide
  Antisense strand to SEQ ID NO: 136628
auuccaauuagcaaaggau

SEQ ID NO: 136630 - RNA, 19 nt, Artificial Sequence
  Description of Artificial Sequence: Synthetic oligonucleotide
  Sense strand starting at position 2764 of SEQ ID NO: 1755
cgacuuugccaguacccau

SEQ ID NO: 136631 - RNA, 19 nt, Artificial Sequence
  Description of Artificial Sequence: Synthetic oligonucleotide
  Antisense strand to SEQ ID NO: 136630
auggguacuggcaaagucg

SEQ ID NO: 136632 - RNA, 19 nt, Artificial Sequence
  Description of Artificial Sequence: Synthetic oligonucleotide
  Sense strand starting at position 2583 of SEQ ID NO: 1755
ucagauugguuagagaaag

SEQ ID NO: 136633 - RNA, 19 nt, Artificial Sequence
  Description of Artificial Sequence: Synthetic oligonucleotide
  Antisense strand to SEQ ID NO: 136632
cuuucucuaaccaaucuga

SEQ ID NO: 136634 - RNA, 19 nt, Artificial Sequence
  Description of Artificial Sequence: Synthetic oligonucleotide
  Sense strand starting at position 2565 of SEQ ID NO: 1755
gugggaacaacugagucuu

SEQ ID NO: 136635 - RNA, 19 nt, Artificial Sequence
  Description of Artificial Sequence: Synthetic oligonucleotide
  Antisense strand to SEQ ID NO: 136634
aagacucaguuguucccac

SEQ ID NO: 136636 - RNA, 19 nt, Artificial Sequence
  Description of Artificial Sequence: Synthetic oligonucleotide
  Sense strand starting at position 2524 of SEQ ID NO: 1755
guuuaacauuuggaggcau

SEQ ID NO: 136637 - RNA, 19 nt, Artificial Sequence
  Description of Artificial Sequence: Synthetic oligonucleotide
  Antisense strand to SEQ ID NO: 136636
augccuccaaauguuaaac

SEQ ID NO: 136638 - RNA, 19 nt, Artificial Sequence
  Description of Artificial Sequence: Synthetic oligonucleotide
  Sense strand starting at position 2515 of SEQ ID NO: 1755
auaguuggaguuuaacauu

SEQ ID NO: 136639 - RNA, 19 nt, Artificial Sequence
  Description of Artificial Sequence: Synthetic oligonucleotide
  Antisense strand to SEQ ID NO: 136638
aauguuaaacuccaacuau

SEQ ID NO: 136640 - RNA, 19 nt, Artificial Sequence
  Description of Artificial Sequence: Synthetic oligonucleotide
  Sense strand starting at position 2436 of SEQ ID NO: 1755
uagugugcgccuguagaaa

SEQ ID NO: 136641 - RNA, 19 nt, Artificial Sequence
  Description of Artificial Sequence: Synthetic oligonucleotide
  Antisense strand to SEQ ID NO: 136640
uuucuacaggcgcacacua

SEQ ID NO: 136642 - RNA, 19 nt, Artificial Sequence
  Description of Artificial Sequence: Synthetic oligonucleotide
  Sense strand starting at position 2434 of SEQ ID NO: 1755
auuagugugcgccuguaga

SEQ ID NO: 136643 - RNA, 19 nt, Artificial Sequence
  Description of Artificial Sequence: Synthetic oligonucleotide
  Antisense strand to SEQ ID NO: 136642
ucuacaggcgcacacuaau

SEQ ID NO: 136644 - RNA, 19 nt, Artificial Sequence
  Description of Artificial Sequence: Synthetic oligonucleotide
  Sense strand starting at position 2303 of SEQ ID NO: 1755
acgagaccacuugguaaca

SEQ ID NO: 136645 - RNA, 19 nt, Artificial Sequence
  Description of Artificial Sequence: Synthetic oligonucleotide
  Antisense strand to SEQ ID NO: 136644
uguuaccaaguggucucgu

SEQ ID NO: 136646 - RNA, 19 nt, Artificial Sequence
  Description of Artificial Sequence: Synthetic oligonucleotide
  Sense strand starting at position 771 of SEQ ID NO: 1755
gacaucggucccuaccauu

SEQ ID NO: 136647 - RNA, 19 nt, Artificial Sequence
  Description of Artificial Sequence: Synthetic oligonucleotide
  Antisense strand to SEQ ID NO: 136646
aaugguagggaccgauguc

SEQ ID NO: 136648 - RNA, 19 nt, Artificial Sequence
  Description of Artificial Sequence: Synthetic oligonucleotide
  Sense strand starting at position 756 of SEQ ID NO: 1755
gaagcauaugagcgagaca

SEQ ID NO: 136649 - RNA, 19 nt, Artificial Sequence
  Description of Artificial Sequence: Synthetic oligonucleotide
  Antisense strand to SEQ ID NO: 136648
ugucucgcucauaugcuuc

SEQ ID NO: 136650 - RNA, 19 nt, Artificial Sequence
  Description of Artificial Sequence: Synthetic oligonucleotide
  Sense strand starting at position 748 of SEQ ID NO: 1755
ucaggugugaagcauauga

SEQ ID NO: 136651 - RNA, 19 nt, Artificial Sequence
  Description of Artificial Sequence: Synthetic oligonucleotide
  Antisense strand to SEQ ID NO: 136650
ucauaugcuucacaccuga

SEQ ID NO: 136652 - RNA, 19 nt, Artificial Sequence
  Description of Artificial Sequence: Synthetic oligonucleotide
  Sense strand starting at position 649 of SEQ ID NO: 1755
augauacuauguuuacacu

SEQ ID NO: 136653 - RNA, 19 nt, Artificial Sequence
  Description of Artificial Sequence: Synthetic oligonucleotide
  Antisense strand to SEQ ID NO: 136652
aguguaaacauaguaucau

SEQ ID NO: 136654 - RNA, 19 nt, Artificial Sequence
  Description of Artificial Sequence: Synthetic oligonucleotide
  Sense strand starting at position 521 of SEQ ID NO: 1755
cugugagacuguguuaacu

SEQ ID NO: 136655 - RNA, 19 nt, Artificial Sequence
  Description of Artificial Sequence: Synthetic oligonucleotide
  Antisense strand to SEQ ID NO: 136654
aguuaacacagucucacag

SEQ ID NO: 136656 - RNA, 19 nt, Artificial Sequence
  Description of Artificial Sequence: Synthetic oligonucleotide
  Sense strand starting at position 510 of SEQ ID NO: 1755
ugauuugaauucugugaga

SEQ ID NO: 136657 - RNA, 19 nt, Artificial Sequence
  Description of Artificial Sequence: Synthetic oligonucleotide
  Antisense strand to SEQ ID NO: 136656
ucucacagaauucaaauca

SEQ ID NO: 136658 - RNA, 19 nt, Artificial Sequence
  Description of Artificial Sequence: Synthetic oligonucleotide
  Sense strand starting at position 504 of SEQ ID NO: 1755
cuaggaugauuugaauucu

SEQ ID NO: 136659 - RNA, 19 nt, Artificial Sequence
  Description of Artificial Sequence: Synthetic oligonucleotide
  Antisense strand to SEQ ID NO: 136658
agaauucaaaucauccuag

SEQ ID NO: 136660 - RNA, 19 nt, Artificial Sequence
  Description of Artificial Sequence: Synthetic oligonucleotide
  Sense strand starting at position 423 of SEQ ID NO: 1755
caucaauuuccguguugau

SEQ ID NO: 136661 - RNA, 19 nt, Artificial Sequence
  Description of Artificial Sequence: Synthetic oligonucleotide
  Antisense strand to SEQ ID NO: 136660
aucaacacggaaauugaug

SEQ ID NO: 136662 - RNA, 19 nt, Artificial Sequence
  Description of Artificial Sequence: Synthetic oligonucleotide
  Sense strand starting at position 422 of SEQ ID NO: 1755
acaucaauuuccguguuga

SEQ ID NO: 136663 - RNA, 19 nt, Artificial Sequence
  Description of Artificial Sequence: Synthetic oligonucleotide
  Antisense strand to SEQ ID NO: 136662
ucaacacggaaauugaugu

SEQ ID NO: 136664 - RNA, 19 nt, Artificial Sequence
  Description of Artificial Sequence: Synthetic oligonucleotide
  Sense strand starting at position 401 of SEQ ID NO: 1755
ugaauucuagugcaaguuu

SEQ ID NO: 136665 - RNA, 19 nt, Artificial Sequence
  Description of Artificial Sequence: Synthetic oligonucleotide
  Antisense strand to SEQ ID NO: 136664
aaacuugcacuagaauuca

SEQ ID NO: 136666 - RNA, 19 nt, Artificial Sequence
  Description of Artificial Sequence: Synthetic oligonucleotide
  Sense strand starting at position 364 of SEQ ID NO: 1755
uuuaguagucuccacagga

SEQ ID NO: 136667 - RNA, 19 nt, Artificial Sequence
  Description of Artificial Sequence: Synthetic oligonucleotide
  Antisense strand to SEQ ID NO: 136666
uccuguggagacuacuaaa

SEQ ID NO: 136668 - RNA, 19 nt, Artificial Sequence
  Description of Artificial Sequence: Synthetic oligonucleotide
  Sense strand starting at position 354 of SEQ ID NO: 1755
gcuuaaacucuuuaguagu

SEQ ID NO: 136669 - RNA, 19 nt, Artificial Sequence
  Description of Artificial Sequence: Synthetic oligonucleotide
  Antisense strand to SEQ ID NO: 136668
acuacuaaagaguuuaagc

SEQ ID NO: 136670 - RNA, 19 nt, Artificial Sequence
  Description of Artificial Sequence: Synthetic oligonucleotide
  Sense strand starting at position 353 of SEQ ID NO: 1755
cgcuuaaacucuuuaguag

SEQ ID NO: 136671 - RNA, 19 nt, Artificial Sequence
  Description of Artificial Sequence: Synthetic oligonucleotide
  Antisense strand to SEQ ID NO: 136670
cuacuaaagaguuuaagcg

SEQ ID NO: 136672 - RNA, 19 nt, Artificial Sequence
  Description of Artificial Sequence: Synthetic oligonucleotide
  Sense strand starting at position 191 of SEQ ID NO: 1755
gugacuuaccuguacuguu

SEQ ID NO: 136673 - RNA, 19 nt, Artificial Sequence
  Description of Artificial Sequence: Synthetic oligonucleotide
  Antisense strand to SEQ ID NO: 136672
aacaguacagguaagucac

SEQ ID NO: 136674 - RNA, 19 nt, Artificial Sequence
  Description of Artificial Sequence: Synthetic oligonucleotide
  Sense strand starting at position 180 of SEQ ID NO: 1755
acagaugauccgugacuua

SEQ ID NO: 136675 - RNA, 19 nt, Artificial Sequence
  Description of Artificial Sequence: Synthetic oligonucleotide
  Antisense strand to SEQ ID NO: 136674
uaagucacggaucaucugu

SEQ ID NO: 136676 - RNA, 19 nt, Artificial Sequence
  Description of Artificial Sequence: Synthetic oligonucleotide
  Sense strand starting at position 179 of SEQ ID NO: 1755
cacagaugauccgugacuu

SEQ ID NO: 136677 - RNA, 19 nt, Artificial Sequence
  Description of Artificial Sequence: Synthetic oligonucleotide
  Antisense strand to SEQ ID NO: 136676
aagucacggaucaucugug

SEQ ID NO: 136678 - RNA, 19 nt, Artificial Sequence
  Description of Artificial Sequence: Synthetic oligonucleotide
  Sense strand starting at position 33 of SEQ ID NO: 1755
agugacgauucugcaaaga

SEQ ID NO: 136679 - RNA, 19 nt, Artificial Sequence
  Description of Artificial Sequence: Synthetic oligonucleotide
  Antisense strand to SEQ ID NO: 136678
ucuuugcagaaucgucacu

SEQ ID NO: 136680 - RNA, 19 nt, Artificial Sequence
  Description of Artificial Sequence: Synthetic oligonucleotide
  Sense strand starting at position 49 of SEQ ID NO: 1756
cuaggcugucucuacuaaa

SEQ ID NO: 136681 - RNA, 19 nt, Artificial Sequence
  Description of Artificial Sequence: Synthetic oligonucleotide
  Antisense strand to SEQ ID NO: 136680
uuuaguagagacagccuag

SEQ ID NO: 136682 - RNA, 19 nt, Artificial Sequence
  Description of Artificial Sequence: Synthetic oligonucleotide
  Sense strand starting at position 161 of SEQ ID NO: 1756
guuguagugauccaggauc

SEQ ID NO: 136683 - RNA, 19 nt, Artificial Sequence
  Description of Artificial Sequence: Synthetic oligonucleotide
  Antisense strand to SEQ ID NO: 136682
gauccuggaucacuacaac

SEQ ID NO: 136684 - RNA, 19 nt, Artificial Sequence
  Description of Artificial Sequence: Synthetic oligonucleotide
  Sense strand starting at position 306 of SEQ ID NO: 1756
aagugaggauuugauucca

SEQ ID NO: 136685 - RNA, 19 nt, Artificial Sequence
  Description of Artificial Sequence: Synthetic oligonucleotide
  Antisense strand to SEQ ID NO: 136684
uggaaucaaauccucacuu

SEQ ID NO: 136686 - RNA, 19 nt, Artificial Sequence
  Description of Artificial Sequence: Synthetic oligonucleotide
  Sense strand starting at position 311 of SEQ ID NO: 1756
aggauuugauuccaucuga

SEQ ID NO: 136687 - RNA, 19 nt, Artificial Sequence
  Description of Artificial Sequence: Synthetic oligonucleotide
  Antisense strand to SEQ ID NO: 136686
ucagauggaaucaaauccu

SEQ ID NO: 136688 - RNA, 19 nt, Artificial Sequence
  Description of Artificial Sequence: Synthetic oligonucleotide
  Sense strand starting at position 333 of SEQ ID NO: 1756
uggcuauugccucaaagug

SEQ ID NO: 136689 - RNA, 19 nt, Artificial Sequence
  Description of Artificial Sequence: Synthetic oligonucleotide
  Antisense strand to SEQ ID NO: 136688
cacuuugaggcaauagcca

SEQ ID NO: 136690 - RNA, 19 nt, Artificial Sequence
  Description of Artificial Sequence: Synthetic oligonucleotide
  Sense strand starting at position 408 of SEQ ID NO: 1756
caggcuuggccagauuauu

SEQ ID NO: 136691 - RNA, 19 nt, Artificial Sequence
  Description of Artificial Sequence: Synthetic oligonucleotide
  Antisense strand to SEQ ID NO: 136690
aauaaucuggccaagccug

SEQ ID NO: 136692 - RNA, 19 nt, Artificial Sequence
  Description of Artificial Sequence: Synthetic oligonucleotide
  Sense strand starting at position 461 of SEQ ID NO: 1756
ucugauucugcuggucaga

SEQ ID NO: 136693 - RNA, 19 nt, Artificial Sequence
  Description of Artificial Sequence: Synthetic oligonucleotide
  Antisense strand to SEQ ID NO: 136692
ucugaccagcagaaucaga

SEQ ID NO: 136694 - RNA, 19 nt, Artificial Sequence
  Description of Artificial Sequence: Synthetic oligonucleotide
  Sense strand starting at position 464 of SEQ ID NO: 1756
gauucugcuggucagaagu

SEQ ID NO: 136695 - RNA, 19 nt, Artificial Sequence
  Description of Artificial Sequence: Synthetic oligonucleotide
  Antisense strand to SEQ ID NO: 136694
acuucugaccagcagaauc

SEQ ID NO: 136696 - RNA, 19 nt, Artificial Sequence
  Description of Artificial Sequence: Synthetic oligonucleotide
  Sense strand starting at position 470 of SEQ ID NO: 1756
gcuggucagaagugauuuc

SEQ ID NO: 136697 - RNA, 19 nt, Artificial Sequence
  Description of Artificial Sequence: Synthetic oligonucleotide
  Antisense strand to SEQ ID NO: 136696
gaaaucacuucugaccagc

SEQ ID NO: 136698 - RNA, 19 nt, Artificial Sequence
  Description of Artificial Sequence: Synthetic oligonucleotide
  Sense strand starting at position 517 of SEQ ID NO: 1756
acaggaugcucuguauugu

SEQ ID NO: 136699 - RNA, 19 nt, Artificial Sequence
  Description of Artificial Sequence: Synthetic oligonucleotide
  Antisense strand to SEQ ID NO: 136698
acaauacagagcauccugu

SEQ ID NO: 136700 - RNA, 19 nt, Artificial Sequence
  Description of Artificial Sequence: Synthetic oligonucleotide
  Sense strand starting at position 518 of SEQ ID NO: 1756
caggaugcucuguauugua

SEQ ID NO: 136701 - RNA, 19 nt, Artificial Sequence
  Description of Artificial Sequence: Synthetic oligonucleotide
  Antisense strand to SEQ ID NO: 136700
uacaauacagagcauccug

SEQ ID NO: 136702 - RNA, 19 nt, Artificial Sequence
  Description of Artificial Sequence: Synthetic oligonucleotide
  Sense strand starting at position 613 of SEQ ID NO: 1756
ccugaugcauugucaaaga

SEQ ID NO: 136703 - RNA, 19 nt, Artificial Sequence
  Description of Artificial Sequence: Synthetic oligonucleotide
  Antisense strand to SEQ ID NO: 136702
ucuuugacaaugcaucagg

SEQ ID NO: 136704 - RNA, 19 nt, Artificial Sequence
  Description of Artificial Sequence: Synthetic oligonucleotide
  Sense strand starting at position 705 of SEQ ID NO: 1756
ggucuaacaucugcagaug

SEQ ID NO: 136705 - RNA, 19 nt, Artificial Sequence
  Description of Artificial Sequence: Synthetic oligonucleotide
  Antisense strand to SEQ ID NO: 136704
caucugcagauguuagacc

SEQ ID NO: 136706 - RNA, 19 nt, Artificial Sequence
  Description of Artificial Sequence: Synthetic oligonucleotide
  Sense strand starting at position 706 of SEQ ID NO: 1756
gucuaacaucugcagaugu

SEQ ID NO: 136707 - RNA, 19 nt, Artificial Sequence
  Description of Artificial Sequence: Synthetic oligonucleotide
  Antisense strand to SEQ ID NO: 136706
acaucugcagauguuagac

SEQ ID NO: 136708 - RNA, 19 nt, Artificial Sequence
  Description of Artificial Sequence: Synthetic oligonucleotide
  Sense strand starting at position 851 of SEQ ID NO: 1756
uugucuugggcucaccaua

SEQ ID NO: 136709 - RNA, 19 nt, Artificial Sequence
  Description of Artificial Sequence: Synthetic oligonucleotide
  Antisense strand to SEQ ID NO: 136708
uauggugagcccaagacaa

SEQ ID NO: 136710 - RNA, 19 nt, Artificial Sequence
  Description of Artificial Sequence: Synthetic oligonucleotide
  Sense strand starting at position 918 of SEQ ID NO: 1756
guuccaaguuugucucaau

SEQ ID NO: 136711 - RNA, 19 nt, Artificial Sequence
  Description of Artificial Sequence: Synthetic oligonucleotide
  Antisense strand to SEQ ID NO: 136710
auugagacaaacuuggaac

SEQ ID NO: 136712 - RNA, 19 nt, Artificial Sequence
  Description of Artificial Sequence: Synthetic oligonucleotide
  Sense strand starting at position 919 of SEQ ID NO: 1756
uuccaaguuugucucaaua

SEQ ID NO: 136713 - RNA, 19 nt, Artificial Sequence
  Description of Artificial Sequence: Synthetic oligonucleotide
  Antisense strand to SEQ ID NO: 136712
uauugagacaaacuuggaa

SEQ ID NO: 136714 - RNA, 19 nt, Artificial Sequence
  Description of Artificial Sequence: Synthetic oligonucleotide
  Sense strand starting at position 1000 of SEQ ID NO: 1756
gccacaaugucucuggauc

SEQ ID NO: 136715 - RNA, 19 nt, Artificial Sequence
  Description of Artificial Sequence: Synthetic oligonucleotide
  Antisense strand to SEQ ID NO: 136714
gauccagagacauuguggc

SEQ ID NO: 136716 - RNA, 19 nt, Artificial Sequence
  Description of Artificial Sequence: Synthetic oligonucleotide
  Sense strand starting at position 1189 of SEQ ID NO: 1756
cuucuugauuucuggaugu

SEQ ID NO: 136717 - RNA, 19 nt, Artificial Sequence
  Description of Artificial Sequence: Synthetic oligonucleotide
  Antisense strand to SEQ ID NO: 136716
acauccagaaaucaagaag

SEQ ID NO: 136718 - RNA, 19 nt, Artificial Sequence
  Description of Artificial Sequence: Synthetic oligonucleotide
  Sense strand starting at position 2262 of SEQ ID NO: 1756
cggaauugcuggcccgaga

SEQ ID NO: 136719 - RNA, 19 nt, Artificial Sequence
  Description of Artificial Sequence: Synthetic oligonucleotide
  Antisense strand to SEQ ID NO: 136718
ucucgggccagcaauuccg

SEQ ID NO: 136720 - RNA, 19 nt, Artificial Sequence
  Description of Artificial Sequence: Synthetic oligonucleotide
  Sense strand starting at position 2548 of SEQ ID NO: 1756
aguguaaguccagaggcuu

SEQ ID NO: 136721 - RNA, 19 nt, Artificial Sequence
  Description of Artificial Sequence: Synthetic oligonucleotide
  Antisense strand to SEQ ID NO: 136720
aagccucuggacuuacacu

SEQ ID NO: 136722 - RNA, 19 nt, Artificial Sequence
  Description of Artificial Sequence: Synthetic oligonucleotide
  Sense strand starting at position 2559 of SEQ ID NO: 1756
agaggcuuacgcugagaaa

SEQ ID NO: 136723 - RNA, 19 nt, Artificial Sequence
  Description of Artificial Sequence: Synthetic oligonucleotide
  Antisense strand to SEQ ID NO: 136722
uuucucagcguaagccucu

SEQ ID NO: 136724 - RNA, 19 nt, Artificial Sequence
  Description of Artificial Sequence: Synthetic oligonucleotide
  Sense strand starting at position 2560 of SEQ ID NO: 1756
gaggcuuacgcugagaaag

SEQ ID NO: 136725 - RNA, 19 nt, Artificial Sequence
  Description of Artificial Sequence: Synthetic oligonucleotide
  Antisense strand to SEQ ID NO: 136724
cuuucucagcguaagccuc

SEQ ID NO: 136726 - RNA, 19 nt, Artificial Sequence
  Description of Artificial Sequence: Synthetic oligonucleotide
  Sense strand starting at position 2580 of SEQ ID NO: 1756
gccuuugcgggcucuguua

SEQ ID NO: 136727 - RNA, 19 nt, Artificial Sequence
  Description of Artificial Sequence: Synthetic oligonucleotide
  Antisense strand to SEQ ID NO: 136726
uaacagagcccgcaaaggc

SEQ ID NO: 136728 - RNA, 19 nt, Artificial Sequence
  Description of Artificial Sequence: Synthetic oligonucleotide
  Sense strand starting at position 2586 of SEQ ID NO: 1756
gcgggcucuguuagggaua

SEQ ID NO: 136729 - RNA, 19 nt, Artificial Sequence
  Description of Artificial Sequence: Synthetic oligonucleotide
  Antisense strand to SEQ ID NO: 136728
uaucccuaacagagcccgc

SEQ ID NO: 136730 - RNA, 19 nt, Artificial Sequence
  Description of Artificial Sequence: Synthetic oligonucleotide
  Sense strand starting at position 2591 of SEQ ID NO: 1756
cucuguuagggauacacuu

SEQ ID NO: 136731 - RNA, 19 nt, Artificial Sequence
  Description of Artificial Sequence: Synthetic oligonucleotide
  Antisense strand to SEQ ID NO: 136730
aaguguaucccuaacagag

SEQ ID NO: 136732 - RNA, 19 nt, Artificial Sequence
  Description of Artificial Sequence: Synthetic oligonucleotide
  Sense strand starting at position 3176 of SEQ ID NO: 1756
gcccaagauuucuucuguu

SEQ ID NO: 136733 - RNA, 19 nt, Artificial Sequence
  Description of Artificial Sequence: Synthetic oligonucleotide
  Antisense strand to SEQ ID NO: 136732
aacagaagaaaucuugggc

SEQ ID NO: 136734 - RNA, 19 nt, Artificial Sequence
  Description of Artificial Sequence: Synthetic oligonucleotide
  Sense strand starting at position 3273 of SEQ ID NO: 1756
aucugauagcuccaaagca

SEQ ID NO: 136735 - RNA, 19 nt, Artificial Sequence
  Description of Artificial Sequence: Synthetic oligonucleotide
  Antisense strand to SEQ ID NO: 136734
ugcuuuggagcuaucagau

SEQ ID NO: 136736 - RNA, 19 nt, Artificial Sequence
  Description of Artificial Sequence: Synthetic oligonucleotide
  Sense strand starting at position 3403 of SEQ ID NO: 1756
uuugucuuggcagauaauc

SEQ ID NO: 136737 - RNA, 19 nt, Artificial Sequence
  Description of Artificial Sequence: Synthetic oligonucleotide
  Antisense strand to SEQ ID NO: 136736
gauuaucugccaagacaaa

SEQ ID NO: 136738 - RNA, 19 nt, Artificial Sequence
  Description of Artificial Sequence: Synthetic oligonucleotide
  Sense strand starting at position 3791 of SEQ ID NO: 1756
ucucuccuggcagauaauu

SEQ ID NO: 136739 - RNA, 19 nt, Artificial Sequence
  Description of Artificial Sequence: Synthetic oligonucleotide
  Antisense strand to SEQ ID NO: 136738
aauuaucugccaggagaga

SEQ ID NO: 136740 - RNA, 19 nt, Artificial Sequence
  Description of Artificial Sequence: Synthetic oligonucleotide
  Sense strand starting at position 3814 of SEQ ID NO: 1756
cuuugugcucugcauaaca

SEQ ID NO: 136741 - RNA, 19 nt, Artificial Sequence
  Description of Artificial Sequence: Synthetic oligonucleotide
  Antisense strand to SEQ ID NO: 136740
uguuaugcagagcacaaag

SEQ ID NO: 136742 - RNA, 19 nt, Artificial Sequence
  Description of Artificial Sequence: Synthetic oligonucleotide
  Sense strand starting at position 3917 of SEQ ID NO: 1756
ggugcuuaauaauuguuga

SEQ ID NO: 136743 - RNA, 19 nt, Artificial Sequence
  Description of Artificial Sequence: Synthetic oligonucleotide
  Antisense strand to SEQ ID NO: 136742
ucaacaauuauuaagcacc

SEQ ID NO: 136744 - RNA, 19 nt, Artificial Sequence
  Description of Artificial Sequence: Synthetic oligonucleotide
  Sense strand starting at position 3920 of SEQ ID NO: 1756
gcuuaauaauuguugagug

SEQ ID NO: 136745 - RNA, 19 nt, Artificial Sequence
  Description of Artificial Sequence: Synthetic oligonucleotide
  Antisense strand to SEQ ID NO: 136744
cacucaacaauuauuaagc

SEQ ID NO: 136746 - RNA, 19 nt, Artificial Sequence
  Description of Artificial Sequence: Synthetic oligonucleotide
  Sense strand starting at position 3925 of SEQ ID NO: 1756
auaauuguugagugaguca

SEQ ID NO: 136747 - RNA, 19 nt, Artificial Sequence
  Description of Artificial Sequence: Synthetic oligonucleotide
  Antisense strand to SEQ ID NO: 136746
ugacucacucaacaauuau

SEQ ID NO: 136748 - RNA, 19 nt, Artificial Sequence
  Description of Artificial Sequence: Synthetic oligonucleotide
  Sense strand starting at position 3928 of SEQ ID NO: 1756
auuguugagugagucacua

SEQ ID NO: 136749 - RNA, 19 nt, Artificial Sequence
  Description of Artificial Sequence: Synthetic oligonucleotide
  Antisense strand to SEQ ID NO: 136748
uagugacucacucaacaau

SEQ ID NO: 136750 - RNA, 19 nt, Artificial Sequence
  Description of Artificial Sequence: Synthetic oligonucleotide
  Sense strand starting at position 3940 of SEQ ID NO: 1756
gucacuaagaguugcagaa

SEQ ID NO: 136751 - RNA, 19 nt, Artificial Sequence
  Description of Artificial Sequence: Synthetic oligonucleotide
  Antisense strand to SEQ ID NO: 136750
uucugcaacucuuagugac

SEQ ID NO: 136752 - RNA, 19 nt, Artificial Sequence
  Description of Artificial Sequence: Synthetic oligonucleotide
  Sense strand starting at position 3952 of SEQ ID NO: 1756
ugcagaauucaggguguaa

SEQ ID NO: 136753 - RNA, 19 nt, Artificial Sequence
  Description of Artificial Sequence: Synthetic oligonucleotide
  Antisense strand to SEQ ID NO: 136752
uuacacccugaauucugca

SEQ ID NO: 136754 - RNA, 19 nt, Artificial Sequence
  Description of Artificial Sequence: Synthetic oligonucleotide
  Sense strand starting at position 3964 of SEQ ID NO: 1756
gguguaaaggauuggaaau

SEQ ID NO: 136755 - RNA, 19 nt, Artificial Sequence
  Description of Artificial Sequence: Synthetic oligonucleotide
  Antisense strand to SEQ ID NO: 136754
auuuccaauccuuuacacc

SEQ ID NO: 136756 - RNA, 19 nt, Artificial Sequence
  Description of Artificial Sequence: Synthetic oligonucleotide
  Sense strand starting at position 3965 of SEQ ID NO: 1756
guguaaaggauuggaaauu

SEQ ID NO: 136757 - RNA, 19 nt, Artificial Sequence
  Description of Artificial Sequence: Synthetic oligonucleotide
  Antisense strand to SEQ ID NO: 136756
aauuuccaauccuuuacac

SEQ ID NO: 136758 - RNA, 19 nt, Artificial Sequence
  Description of Artificial Sequence: Synthetic oligonucleotide
  Sense strand starting at position 3974 of SEQ ID NO: 1756
auuggaaauugggaagaau

SEQ ID NO: 136759 - RNA, 19 nt, Artificial Sequence
  Description of Artificial Sequence: Synthetic oligonucleotide
  Antisense strand to SEQ ID NO: 136758
auucuucccaauuuccaau

SEQ ID NO: 136760 - RNA, 19 nt, Artificial Sequence
  Description of Artificial Sequence: Synthetic oligonucleotide
  Sense strand starting at position 3874 of SEQ ID NO: 1757
cuaggagccuccucaaagu

SEQ ID NO: 136761 - RNA, 19 nt, Artificial Sequence
  Description of Artificial Sequence: Synthetic oligonucleotide
  Antisense strand to SEQ ID NO: 136760
acuuugaggaggcuccuag

SEQ ID NO: 136762 - RNA, 19 nt, Artificial Sequence
  Description of Artificial Sequence: Synthetic oligonucleotide
  Sense strand starting at position 3829 of SEQ ID NO: 1757
cugggagaauggcuugauu

SEQ ID NO: 136763 - RNA, 19 nt, Artificial Sequence
  Description of Artificial Sequence: Synthetic oligonucleotide
  Antisense strand to SEQ ID NO: 136762
aaucaagccauucucccag

SEQ ID NO: 136764 - RNA, 19 nt, Artificial Sequence
  Description of Artificial Sequence: Synthetic oligonucleotide
  Sense strand starting at position 3782 of SEQ ID NO: 1757
cacaaaguguguucccaag

SEQ ID NO: 136765 - RNA, 19 nt, Artificial Sequence
  Description of Artificial Sequence: Synthetic oligonucleotide
  Antisense strand to SEQ ID NO: 136764
cuugggaacacacuuugug

SEQ ID NO: 136766 - RNA, 19 nt, Artificial Sequence
  Description of Artificial Sequence: Synthetic oligonucleotide
  Sense strand starting at position 3616 of SEQ ID NO: 1757
ggccaaaucugauaugagu

SEQ ID NO: 136767 - RNA, 19 nt, Artificial Sequence
  Description of Artificial Sequence: Synthetic oligonucleotide
  Antisense strand to SEQ ID NO: 136766
acucauaucagauuuggcc

SEQ ID NO: 136768 - RNA, 19 nt, Artificial Sequence
  Description of Artificial Sequence: Synthetic oligonucleotide
  Sense strand starting at position 3614 of SEQ ID NO: 1757
gaggccaaaucugauauga

SEQ ID NO: 136769 - RNA, 19 nt, Artificial Sequence
  Description of Artificial Sequence: Synthetic oligonucleotide
  Antisense strand to SEQ ID NO: 136768
ucauaucagauuuggccuc

SEQ ID NO: 136770 - RNA, 19 nt, Artificial Sequence
  Description of Artificial Sequence: Synthetic oligonucleotide
  Sense strand starting at position 3577 of SEQ ID NO: 1757
agaaguagagggugugaaa

SEQ ID NO: 136771 - RNA, 19 nt, Artificial Sequence
  Description of Artificial Sequence: Synthetic oligonucleotide
  Antisense strand to SEQ ID NO: 136770
uuucacacccucuacuucu

SEQ ID NO: 136772 - RNA, 19 nt, Artificial Sequence
  Description of Artificial Sequence: Synthetic oligonucleotide
  Sense strand starting at position 3566 of SEQ ID NO: 1757
gaucucucccgagaaguag

SEQ ID NO: 136773 - RNA, 19 nt, Artificial Sequence
  Description of Artificial Sequence: Synthetic oligonucleotide
  Antisense strand to SEQ ID NO: 136772
cuacuucucgggagagauc

SEQ ID NO: 136774 - RNA, 19 nt, Artificial Sequence
  Description of Artificial Sequence: Synthetic oligonucleotide
  Sense strand starting at position 3564 of SEQ ID NO: 1757
gagaucucucccgagaagu

SEQ ID NO: 136775 - RNA, 19 nt, Artificial Sequence
  Description of Artificial Sequence: Synthetic oligonucleotide
  Antisense strand to SEQ ID NO: 136774
acuucucgggagagaucuc

SEQ ID NO: 136776 - RNA, 19 nt, Artificial Sequence
  Description of Artificial Sequence: Synthetic oligonucleotide
  Sense strand starting at position 3529 of SEQ ID NO: 1757
gugccacugugagcuguaa

SEQ ID NO: 136777 - RNA, 19 nt, Artificial Sequence
  Description of Artificial Sequence: Synthetic oligonucleotide
  Antisense strand to SEQ ID NO: 136776
uuacagcucacaguggcac

SEQ ID NO: 136778 - RNA, 19 nt, Artificial Sequence
  Description of Artificial Sequence: Synthetic oligonucleotide
  Sense strand starting at position 3475 of SEQ ID NO: 1757
ggcuccaucuggccuuaaa

SEQ ID NO: 136779 - RNA, 19 nt, Artificial Sequence
  Description of Artificial Sequence: Synthetic oligonucleotide
  Antisense strand to SEQ ID NO: 136778
uuuaaggccagauggagcc

SEQ ID NO: 136780 - RNA, 19 nt, Artificial Sequence
  Description of Artificial Sequence: Synthetic oligonucleotide
  Sense strand starting at position 3450 of SEQ ID NO: 1757
ccaagucugucagaagacu

SEQ ID NO: 136781 - RNA, 19 nt, Artificial Sequence
  Description of Artificial Sequence: Synthetic oligonucleotide
  Antisense strand to SEQ ID NO: 136780
agucuucugacagacuugg

SEQ ID NO: 136782 - RNA, 19 nt, Artificial Sequence
  Description of Artificial Sequence: Synthetic oligonucleotide
  Sense strand starting at position 3353 of SEQ ID NO: 1757
cuuaucuaugcagaagcaa

SEQ ID NO: 136783 - RNA, 19 nt, Artificial Sequence
  Description of Artificial Sequence: Synthetic oligonucleotide
  Antisense strand to SEQ ID NO: 136782
uugcuucugcauagauaag

SEQ ID NO: 136784 - RNA, 19 nt, Artificial Sequence
  Description of Artificial Sequence: Synthetic oligonucleotide
  Sense strand starting at position 3350 of SEQ ID NO: 1757
gagcuuaucuaugcagaag

SEQ ID NO: 136785 - RNA, 19 nt, Artificial Sequence
  Description of Artificial Sequence: Synthetic oligonucleotide
  Antisense strand to SEQ ID NO: 136784
cuucugcauagauaagcuc

SEQ ID NO: 136786 - RNA, 19 nt, Artificial Sequence
  Description of Artificial Sequence: Synthetic oligonucleotide
  Sense strand starting at position 3349 of SEQ ID NO: 1757
agagcuuaucuaugcagaa

SEQ ID NO: 136787 - RNA, 19 nt, Artificial Sequence
  Description of Artificial Sequence: Synthetic oligonucleotide
  Antisense strand to SEQ ID NO: 136786
uucugcauagauaagcucu

SEQ ID NO: 136788 - RNA, 19 nt, Artificial Sequence
  Description of Artificial Sequence: Synthetic oligonucleotide
  Sense strand starting at position 3346 of SEQ ID NO: 1757
cugagagcuuaucuaugca

SEQ ID NO: 136789 - RNA, 19 nt, Artificial Sequence
  Description of Artificial Sequence: Synthetic oligonucleotide
  Antisense strand to SEQ ID NO: 136788
ugcauagauaagcucucag

SEQ ID NO: 136790 - RNA, 19 nt, Artificial Sequence
  Description of Artificial Sequence: Synthetic oligonucleotide
  Sense strand starting at position 3312 of SEQ ID NO: 1757
acuagacgcauugguauuu

SEQ ID NO: 136791 - RNA, 19 nt, Artificial Sequence
  Description of Artificial Sequence: Synthetic oligonucleotide
  Antisense strand to SEQ ID NO: 136790
aaauaccaaugcgucuagu

SEQ ID NO: 136792 - RNA, 19 nt, Artificial Sequence
  Description of Artificial Sequence: Synthetic oligonucleotide
  Sense strand starting at position 3076 of SEQ ID NO: 1757
augggagaguuaugaauga

SEQ ID NO: 136793 - RNA, 19 nt, Artificial Sequence
  Description of Artificial Sequence: Synthetic oligonucleotide
  Antisense strand to SEQ ID NO: 136792
ucauucauaacucucccau

SEQ ID NO: 136794 - RNA, 19 nt, Artificial Sequence
  Description of Artificial Sequence: Synthetic oligonucleotide
  Sense strand starting at position 3068 of SEQ ID NO: 1757
agaagaauaugggagaguu

SEQ ID NO: 136795 - RNA, 19 nt, Artificial Sequence
  Description of Artificial Sequence: Synthetic oligonucleotide
  Antisense strand to SEQ ID NO: 136794
aacucucccauauucuucu

SEQ ID NO: 136796 - RNA, 19 nt, Artificial Sequence
  Description of Artificial Sequence: Synthetic oligonucleotide
  Sense strand starting at position 3013 of SEQ ID NO: 1757
gggcaauggugagacacaa

SEQ ID NO: 136797 - RNA, 19 nt, Artificial Sequence
  Description of Artificial Sequence: Synthetic oligonucleotide
  Antisense strand to SEQ ID NO: 136796
uugugucucaccauugccc

SEQ ID NO: 136798 - RNA, 19 nt, Artificial Sequence
  Description of Artificial Sequence: Synthetic oligonucleotide
  Sense strand starting at position 2970 of SEQ ID NO: 1757
ucauuuguccugggugugu

SEQ ID NO: 136799 - RNA, 19 nt, Artificial Sequence
  Description of Artificial Sequence: Synthetic oligonucleotide
  Antisense strand to SEQ ID NO: 136798
acacacccaggacaaauga

SEQ ID NO: 136800 - RNA, 19 nt, Artificial Sequence
  Description of Artificial Sequence: Synthetic oligonucleotide
  Sense strand starting at position 2959 of SEQ ID NO: 1757
ccaugagcuugucauuugu

SEQ ID NO: 136801 - RNA, 19 nt, Artificial Sequence
  Description of Artificial Sequence: Synthetic oligonucleotide
  Antisense strand to SEQ ID NO: 136800
acaaaugacaagcucaugg

SEQ ID NO: 136802 - RNA, 19 nt, Artificial Sequence
  Description of Artificial Sequence: Synthetic oligonucleotide
  Sense strand starting at position 2956 of SEQ ID NO: 1757
gagccaugagcuugucauu

SEQ ID NO: 136803 - RNA, 19 nt, Artificial Sequence
  Description of Artificial Sequence: Synthetic oligonucleotide
  Antisense strand to SEQ ID NO: 136802
aaugacaagcucauggcuc

SEQ ID NO: 136804 - RNA, 19 nt, Artificial Sequence
  Description of Artificial Sequence: Synthetic oligonucleotide
  Sense strand starting at position 2950 of SEQ ID NO: 1757
gagggugagccaugagcuu

SEQ ID NO: 136805 - RNA, 19 nt, Artificial Sequence
  Description of Artificial Sequence: Synthetic oligonucleotide
  Antisense strand to SEQ ID NO: 136804
aagcucauggcucacccuc

SEQ ID NO: 136806 - RNA, 19 nt, Artificial Sequence
  Description of Artificial Sequence: Synthetic oligonucleotide
  Sense strand starting at position 2896 of SEQ ID NO: 1757
gagggaugucagugacgga

SEQ ID NO: 136807 - RNA, 19 nt, Artificial Sequence
  Description of Artificial Sequence: Synthetic oligonucleotide
  Antisense strand to SEQ ID NO: 136806
uccgucacugacaucccuc

SEQ ID NO: 136808 - RNA, 19 nt, Artificial Sequence
  Description of Artificial Sequence: Synthetic oligonucleotide
  Sense strand starting at position 2825 of SEQ ID NO: 1757
gguguugcccagggagagu

SEQ ID NO: 136809 - RNA, 19 nt, Artificial Sequence
  Description of Artificial Sequence: Synthetic oligonucleotide
  Antisense strand to SEQ ID NO: 136808
acucucccugggcaacacc

SEQ ID NO: 136810 - RNA, 19 nt, Artificial Sequence
  Description of Artificial Sequence: Synthetic oligonucleotide
  Sense strand starting at position 2812 of SEQ ID NO: 1757
gagcauuggcauugguguu

SEQ ID NO: 136811 - RNA, 19 nt, Artificial Sequence
  Description of Artificial Sequence: Synthetic oligonucleotide
  Antisense strand to SEQ ID NO: 136810
aacaccaaugccaaugcuc

SEQ ID NO: 136812 - RNA, 19 nt, Artificial Sequence
  Description of Artificial Sequence: Synthetic oligonucleotide
  Sense strand starting at position 2806 of SEQ ID NO: 1757
cucagagagcauuggcauu

SEQ ID NO: 136813 - RNA, 19 nt, Artificial Sequence
  Description of Artificial Sequence: Synthetic oligonucleotide
  Antisense strand to SEQ ID NO: 136812
aaugccaaugcucucugag

SEQ ID NO: 136814 - RNA, 19 nt, Artificial Sequence
  Description of Artificial Sequence: Synthetic oligonucleotide
  Sense strand starting at position 2456 of SEQ ID NO: 1757
gccuccgaguuuccugaua

SEQ ID NO: 136815 - RNA, 19 nt, Artificial Sequence
  Description of Artificial Sequence: Synthetic oligonucleotide
  Antisense strand to SEQ ID NO: 136814
uaucaggaaacucggaggc

SEQ ID NO: 136816 - RNA, 19 nt, Artificial Sequence
  Description of Artificial Sequence: Synthetic oligonucleotide
  Sense strand starting at position 2055 of SEQ ID NO: 1757
gcgcgaaucccaguccuca

SEQ ID NO: 136817 - RNA, 19 nt, Artificial Sequence
  Description of Artificial Sequence: Synthetic oligonucleotide
  Antisense strand to SEQ ID NO: 136816
ugaggacugggauucgcgc

SEQ ID NO: 136818 - RNA, 19 nt, Artificial Sequence
  Description of Artificial Sequence: Synthetic oligonucleotide
  Sense strand starting at position 932 of SEQ ID NO: 1757
gcgggcuucugaguuucua

SEQ ID NO: 136819 - RNA, 19 nt, Artificial Sequence
  Description of Artificial Sequence: Synthetic oligonucleotide
  Antisense strand to SEQ ID NO: 136818
uagaaacucagaagcccgc

SEQ ID NO: 136820 - RNA, 19 nt, Artificial Sequence
  Description of Artificial Sequence: Synthetic oligonucleotide
  Sense strand starting at position 868 of SEQ ID NO: 1757
guggucuguagauaugugu

SEQ ID NO: 136821 - RNA, 19 nt, Artificial Sequence
  Description of Artificial Sequence: Synthetic oligonucleotide
  Antisense strand to SEQ ID NO: 136820
acacauaucuacagaccac

SEQ ID NO: 136822 - RNA, 19 nt, Artificial Sequence
  Description of Artificial Sequence: Synthetic oligonucleotide
  Sense strand starting at position 864 of SEQ ID NO: 1757
uccaguggucuguagauau

SEQ ID NO: 136823 - RNA, 19 nt, Artificial Sequence
  Description of Artificial Sequence: Synthetic oligonucleotide
  Antisense strand to SEQ ID NO: 136822
auaucuacagaccacugga

SEQ ID NO: 136824 - RNA, 19 nt, Artificial Sequence
  Description of Artificial Sequence: Synthetic oligonucleotide
  Sense strand starting at position 862 of SEQ ID NO: 1757
uuuccaguggucuguagau

SEQ ID NO: 136825 - RNA, 19 nt, Artificial Sequence
  Description of Artificial Sequence: Synthetic oligonucleotide
  Antisense strand to SEQ ID NO: 136824
aucuacagaccacuggaaa

SEQ ID NO: 136826 - RNA, 19 nt, Artificial Sequence
  Description of Artificial Sequence: Synthetic oligonucleotide
  Sense strand starting at position 830 of SEQ ID NO: 1757
uguacuugcgcgaguguau

SEQ ID NO: 136827 - RNA, 19 nt, Artificial Sequence
  Description of Artificial Sequence: Synthetic oligonucleotide
  Antisense strand to SEQ ID NO: 136826
auacacucgcgcaaguaca

SEQ ID NO: 136828 - RNA, 19 nt, Artificial Sequence
  Description of Artificial Sequence: Synthetic oligonucleotide
  Sense strand starting at position 800 of SEQ ID NO: 1757
uugugugcgccugaggauu

SEQ ID NO: 136829 - RNA, 19 nt, Artificial Sequence
  Description of Artificial Sequence: Synthetic oligonucleotide
  Antisense strand to SEQ ID NO: 136828
aauccucaggcgcacacaa

SEQ ID NO: 136830 - RNA, 19 nt, Artificial Sequence
  Description of Artificial Sequence: Synthetic oligonucleotide
  Sense strand starting at position 741 of SEQ ID NO: 1757
acgugugugcuugugagau

SEQ ID NO: 136831 - RNA, 19 nt, Artificial Sequence
  Description of Artificial Sequence: Synthetic oligonucleotide
  Antisense strand to SEQ ID NO: 136830
aucucacaagcacacacgu

SEQ ID NO: 136832 - RNA, 19 nt, Artificial Sequence
  Description of Artificial Sequence: Synthetic oligonucleotide
  Sense strand starting at position 498 of SEQ ID NO: 1757
ccaugcuucgcccauagga

SEQ ID NO: 136833 - RNA, 19 nt, Artificial Sequence
  Description of Artificial Sequence: Synthetic oligonucleotide
  Antisense strand to SEQ ID NO: 136832
uccuaugggcgaagcaugg

SEQ ID NO: 136834 - RNA, 19 nt, Artificial Sequence
  Description of Artificial Sequence: Synthetic oligonucleotide
  Sense strand starting at position 479 of SEQ ID NO: 1757
ggguguuugcucuaaaucc

SEQ ID NO: 136835 - RNA, 19 nt, Artificial Sequence
  Description of Artificial Sequence: Synthetic oligonucleotide
  Antisense strand to SEQ ID NO: 136834
ggauuuagagcaaacaccc

SEQ ID NO: 136836 - RNA, 19 nt, Artificial Sequence
  Description of Artificial Sequence: Synthetic oligonucleotide
  Sense strand starting at position 280 of SEQ ID NO: 1757
ggacuaagguuagagaaag

SEQ ID NO: 136837 - RNA, 19 nt, Artificial Sequence
  Description of Artificial Sequence: Synthetic oligonucleotide
  Antisense strand to SEQ ID NO: 136836
cuuucucuaaccuuagucc

SEQ ID NO: 136838 - RNA, 19 nt, Artificial Sequence
  Description of Artificial Sequence: Synthetic oligonucleotide
  Sense strand starting at position 272 of SEQ ID NO: 1757
gugugucuggacuaagguu

SEQ ID NO: 136839 - RNA, 19 nt, Artificial Sequence
  Description of Artificial Sequence: Synthetic oligonucleotide
  Antisense strand to SEQ ID NO: 136838
aaccuuaguccagacacac

SEQ ID NO: 136840 - RNA, 19 nt, Artificial Sequence
  Description of Artificial Sequence: Synthetic oligonucleotide
  Sense strand starting at position 503 of SEQ ID NO: 1758
acaauaucaggcuacaguu

SEQ ID NO: 136841 - RNA, 19 nt, Artificial Sequence
  Description of Artificial Sequence: Synthetic oligonucleotide
  Antisense strand to SEQ ID NO: 136840
aacuguagccugauauugu

SEQ ID NO: 136842 - RNA, 19 nt, Artificial Sequence
  Description of Artificial Sequence: Synthetic oligonucleotide
  Sense strand starting at position 632 of SEQ ID NO: 1758
ugaucucuaugugcucaua

SEQ ID NO: 136843 - RNA, 19 nt, Artificial Sequence
  Description of Artificial Sequence: Synthetic oligonucleotide
  Antisense strand to SEQ ID NO: 136842
uaugagcacauagagauca

SEQ ID NO: 136844 - RNA, 19 nt, Artificial Sequence
  Description of Artificial Sequence: Synthetic oligonucleotide
  Sense strand starting at position 644 of SEQ ID NO: 1758
gcucauaaacagugccuaa

SEQ ID NO: 136845 - RNA, 19 nt, Artificial Sequence
  Description of Artificial Sequence: Synthetic oligonucleotide
  Antisense strand to SEQ ID NO: 136844
uuaggcacuguuuaugagc

SEQ ID NO: 136846 - RNA, 19 nt, Artificial Sequence
  Description of Artificial Sequence: Synthetic oligonucleotide
  Sense strand starting at position 1973 of SEQ ID NO: 1758
acgccuuccucucugggaa

SEQ ID NO: 136847 - RNA, 19 nt, Artificial Sequence
  Description of Artificial Sequence: Synthetic oligonucleotide
  Antisense strand to SEQ ID NO: 136846
uucccagagaggaaggcgu

SEQ ID NO: 136848 - RNA, 19 nt, Artificial Sequence
  Description of Artificial Sequence: Synthetic oligonucleotide
  Sense strand starting at position 1974 of SEQ ID NO: 1758
cgccuuccucucugggaaa

SEQ ID NO: 136849 - RNA, 19 nt, Artificial Sequence
  Description of Artificial Sequence: Synthetic oligonucleotide
  Antisense strand to SEQ ID NO: 136848
uuucccagagaggaaggcg

SEQ ID NO: 136850 - RNA, 19 nt, Artificial Sequence
  Description of Artificial Sequence: Synthetic oligonucleotide
  Sense strand starting at position 2215 of SEQ ID NO: 1758
ccaguucuccgcuaaagug

SEQ ID NO: 136851 - RNA, 19 nt, Artificial Sequence
  Description of Artificial Sequence: Synthetic oligonucleotide
  Antisense strand to SEQ ID NO: 136850
cacuuuagcggagaacugg

SEQ ID NO: 136852 - RNA, 19 nt, Artificial Sequence
  Description of Artificial Sequence: Synthetic oligonucleotide
  Sense strand starting at position 2351 of SEQ ID NO: 1758
acgggauccuucuccugaa

SEQ ID NO: 136853 - RNA, 19 nt, Artificial Sequence
  Description of Artificial Sequence: Synthetic oligonucleotide
  Antisense strand to SEQ ID NO: 136852
uucaggagaaggaucccgu

SEQ ID NO: 136854 - RNA, 19 nt, Artificial Sequence
  Description of Artificial Sequence: Synthetic oligonucleotide
  Sense strand starting at position 2364 of SEQ ID NO: 1758
ccugaaguccuuuaguaac

SEQ ID NO: 136855 - RNA, 19 nt, Artificial Sequence
  Description of Artificial Sequence: Synthetic oligonucleotide
  Antisense strand to SEQ ID NO: 136854
guuacuaaaggacuucagg

SEQ ID NO: 136856 - RNA, 19 nt, Artificial Sequence
  Description of Artificial Sequence: Synthetic oligonucleotide
  Sense strand starting at position 2398 of SEQ ID NO: 1758
aucgccuguccuuaagcaa

SEQ ID NO: 136857 - RNA, 19 nt, Artificial Sequence
  Description of Artificial Sequence: Synthetic oligonucleotide
  Antisense strand to SEQ ID NO: 136856
uugcuuaaggacaggcgau

SEQ ID NO: 136858 - RNA, 19 nt, Artificial Sequence
  Description of Artificial Sequence: Synthetic oligonucleotide
  Sense strand starting at position 2433 of SEQ ID NO: 1758
cauagcugaucguuaacuu

SEQ ID NO: 136859 - RNA, 19 nt, Artificial Sequence
  Description of Artificial Sequence: Synthetic oligonucleotide
  Antisense strand to SEQ ID NO: 136858
aaguuaacgaucagcuaug

SEQ ID NO: 136860 - RNA, 19 nt, Artificial Sequence
  Description of Artificial Sequence: Synthetic oligonucleotide
  Sense strand starting at position 2434 of SEQ ID NO: 1758
auagcugaucguuaacuuu

SEQ ID NO: 136861 - RNA, 19 nt, Artificial Sequence
  Description of Artificial Sequence: Synthetic oligonucleotide
  Antisense strand to SEQ ID NO: 136860
aaaguuaacgaucagcuau

SEQ ID NO: 136862 - RNA, 19 nt, Artificial Sequence
  Description of Artificial Sequence: Synthetic oligonucleotide
  Sense strand starting at position 2460 of SEQ ID NO: 1758
ucugcuuugugacucuaga

SEQ ID NO: 136863 - RNA, 19 nt, Artificial Sequence
  Description of Artificial Sequence: Synthetic oligonucleotide
  Antisense strand to SEQ ID NO: 136862
ucuagagucacaaagcaga

SEQ ID NO: 136864 - RNA, 19 nt, Artificial Sequence
  Description of Artificial Sequence: Synthetic oligonucleotide
  Sense strand starting at position 2468 of SEQ ID NO: 1758
gugacucuagagugauuau

SEQ ID NO: 136865 - RNA, 19 nt, Artificial Sequence
  Description of Artificial Sequence: Synthetic oligonucleotide
  Antisense strand to SEQ ID NO: 136864
auaaucacucuagagucac

SEQ ID NO: 136866 - RNA, 19 nt, Artificial Sequence
  Description of Artificial Sequence: Synthetic oligonucleotide
  Sense strand starting at position 2583 of SEQ ID NO: 1758
aaauacaucggaugguuga

SEQ ID NO: 136867 - RNA, 19 nt, Artificial Sequence
  Description of Artificial Sequence: Synthetic oligonucleotide
  Antisense strand to SEQ ID NO: 136866
ucaaccauccgauguauuu

SEQ ID NO: 136868 - RNA, 19 nt, Artificial Sequence
  Description of Artificial Sequence: Synthetic oligonucleotide
  Sense strand starting at position 2584 of SEQ ID NO: 1758
aauacaucggaugguugaa

SEQ ID NO: 136869 - RNA, 19 nt, Artificial Sequence
  Description of Artificial Sequence: Synthetic oligonucleotide
  Antisense strand to SEQ ID NO: 136868
uucaaccauccgauguauu

SEQ ID NO: 136870 - RNA, 19 nt, Artificial Sequence
  Description of Artificial Sequence: Synthetic oligonucleotide
  Sense strand starting at position 2675 of SEQ ID NO: 1758
aaaggucagcuauggcaaa

SEQ ID NO: 136871 - RNA, 19 nt, Artificial Sequence
  Description of Artificial Sequence: Synthetic oligonucleotide
  Antisense strand to SEQ ID NO: 136870
uuugccauagcugaccuuu

SEQ ID NO: 136872 - RNA, 19 nt, Artificial Sequence
  Description of Artificial Sequence: Synthetic oligonucleotide
  Sense strand starting at position 2722 of SEQ ID NO: 1758
gcauaucugagguagugaa

SEQ ID NO: 136873 - RNA, 19 nt, Artificial Sequence
  Description of Artificial Sequence: Synthetic oligonucleotide
  Antisense strand to SEQ ID NO: 136872
uucacuaccucagauaugc

SEQ ID NO: 136874 - RNA, 19 nt, Artificial Sequence
  Description of Artificial Sequence: Synthetic oligonucleotide
  Sense strand starting at position 2855 of SEQ ID NO: 1758
agauguuaugaaggccuua

SEQ ID NO: 136875 - RNA, 19 nt, Artificial Sequence
  Description of Artificial Sequence: Synthetic oligonucleotide
  Antisense strand to SEQ ID NO: 136874
uaaggccuucauaacaucu

SEQ ID NO: 136876 - RNA, 19 nt, Artificial Sequence
  Description of Artificial Sequence: Synthetic oligonucleotide
  Sense strand starting at position 2860 of SEQ ID NO: 1758
uuaugaaggccuuaaucua

SEQ ID NO: 136877 - RNA, 19 nt, Artificial Sequence
  Description of Artificial Sequence: Synthetic oligonucleotide
  Antisense strand to SEQ ID NO: 136876
uagauuaaggccuucauaa

SEQ ID NO: 136878 - RNA, 19 nt, Artificial Sequence
  Description of Artificial Sequence: Synthetic oligonucleotide
  Sense strand starting at position 2880 of SEQ ID NO: 1758
auggaaacuuugccuuuga

SEQ ID NO: 136879 - RNA, 19 nt, Artificial Sequence
  Description of Artificial Sequence: Synthetic oligonucleotide
  Antisense strand to SEQ ID NO: 136878
ucaaaggcaaaguuuccau

SEQ ID NO: 136880 - RNA, 19 nt, Artificial Sequence
  Description of Artificial Sequence: Synthetic oligonucleotide
  Sense strand starting at position 2881 of SEQ ID NO: 1758
uggaaacuuugccuuugaa

SEQ ID NO: 136881 - RNA, 19 nt, Artificial Sequence
  Description of Artificial Sequence: Synthetic oligonucleotide
  Antisense strand to SEQ ID NO: 136880
uucaaaggcaaaguuucca

SEQ ID NO: 136882 - RNA, 19 nt, Artificial Sequence
  Description of Artificial Sequence: Synthetic oligonucleotide
  Sense strand starting at position 2929 of SEQ ID NO: 1758
cuugcuugccucguaacau

SEQ ID NO: 136883 - RNA, 19 nt, Artificial Sequence
  Description of Artificial Sequence: Synthetic oligonucleotide
  Antisense strand to SEQ ID NO: 136882
auguuacgaggcaagcaag

SEQ ID NO: 136884 - RNA, 19 nt, Artificial Sequence
  Description of Artificial Sequence: Synthetic oligonucleotide
  Sense strand starting at position 3168 of SEQ ID NO: 1758
augaauauuaacggugaga

SEQ ID NO: 136885 - RNA, 19 nt, Artificial Sequence
  Description of Artificial Sequence: Synthetic oligonucleotide
  Antisense strand to SEQ ID NO: 136884
ucucaccguuaauauucau

SEQ ID NO: 136886 - RNA, 19 nt, Artificial Sequence
  Description of Artificial Sequence: Synthetic oligonucleotide
  Sense strand starting at position 3170 of SEQ ID NO: 1758
gaauauuaacggugagauc

SEQ ID NO: 136887 - RNA, 19 nt, Artificial Sequence
  Description of Artificial Sequence: Synthetic oligonucleotide
  Antisense strand to SEQ ID NO: 136886
gaucucaccguuaauauuc

SEQ ID NO: 136888 - RNA, 19 nt, Artificial Sequence
  Description of Artificial Sequence: Synthetic oligonucleotide
  Sense strand starting at position 3239 of SEQ ID NO: 1758
uacacugucuaagagauga

SEQ ID NO: 136889 - RNA, 19 nt, Artificial Sequence
  Description of Artificial Sequence: Synthetic oligonucleotide
  Antisense strand to SEQ ID NO: 136888
ucaucucuuagacagugua

SEQ ID NO: 136890 - RNA, 19 nt, Artificial Sequence
  Description of Artificial Sequence: Synthetic oligonucleotide
  Sense strand starting at position 3405 of SEQ ID NO: 1758
gcugauguucuguaugggu

SEQ ID NO: 136891 - RNA, 19 nt, Artificial Sequence
  Description of Artificial Sequence: Synthetic oligonucleotide
  Antisense strand to SEQ ID NO: 136890
acccauacagaacaucagc

SEQ ID NO: 136892 - RNA, 19 nt, Artificial Sequence
  Description of Artificial Sequence: Synthetic oligonucleotide
  Sense strand starting at position 3414 of SEQ ID NO: 1758
cuguauggguguucuuaac

SEQ ID NO: 136893 - RNA, 19 nt, Artificial Sequence
  Description of Artificial Sequence: Synthetic oligonucleotide
  Antisense strand to SEQ ID NO: 136892
guuaagaacacccauacag

SEQ ID NO: 136894 - RNA, 19 nt, Artificial Sequence
  Description of Artificial Sequence: Synthetic oligonucleotide
  Sense strand starting at position 3451 of SEQ ID NO: 1758
agguaagaaugggauaugu

SEQ ID NO: 136895 - RNA, 19 nt, Artificial Sequence
  Description of Artificial Sequence: Synthetic oligonucleotide
  Antisense strand to SEQ ID NO: 136894
acauaucccauucuuaccu

SEQ ID NO: 136896 - RNA, 19 nt, Artificial Sequence
  Description of Artificial Sequence: Synthetic oligonucleotide
  Sense strand starting at position 3460 of SEQ ID NO: 1758
ugggauaugucccucugca

SEQ ID NO: 136897 - RNA, 19 nt, Artificial Sequence
  Description of Artificial Sequence: Synthetic oligonucleotide
  Antisense strand to SEQ ID NO: 136896
ugcagagggacauauccca

SEQ ID NO: 136898 - RNA, 19 nt, Artificial Sequence
  Description of Artificial Sequence: Synthetic oligonucleotide
  Sense strand starting at position 3494 of SEQ ID NO: 1758
ugucuugauucuguaugag

SEQ ID NO: 136899 - RNA, 19 nt, Artificial Sequence
  Description of Artificial Sequence: Synthetic oligonucleotide
  Antisense strand to SEQ ID NO: 136898
cucauacagaaucaagaca

SEQ ID NO: 136900 - RNA, 19 nt, Artificial Sequence
  Description of Artificial Sequence: Synthetic oligonucleotide
  Sense strand starting at position 3497 of SEQ ID NO: 1758
cuugauucuguaugagagu

SEQ ID NO: 136901 - RNA, 19 nt, Artificial Sequence
  Description of Artificial Sequence: Synthetic oligonucleotide
  Antisense strand to SEQ ID NO: 136900
acucucauacagaaucaag

SEQ ID NO: 136902 - RNA, 19 nt, Artificial Sequence
  Description of Artificial Sequence: Synthetic oligonucleotide
  Sense strand starting at position 3677 of SEQ ID NO: 1758
aaaugucacguuuacaaug

SEQ ID NO: 136903 - RNA, 19 nt, Artificial Sequence
  Description of Artificial Sequence: Synthetic oligonucleotide
  Antisense strand to SEQ ID NO: 136902
cauuguaaacgugacauuu

SEQ ID NO: 136904 - RNA, 19 nt, Artificial Sequence
  Description of Artificial Sequence: Synthetic oligonucleotide
  Sense strand starting at position 3682 of SEQ ID NO: 1758
ucacguuuacaaugggaac

SEQ ID NO: 136905 - RNA, 19 nt, Artificial Sequence
  Description of Artificial Sequence: Synthetic oligonucleotide
  Antisense strand to SEQ ID NO: 136904
guucccauuguaaacguga

SEQ ID NO: 136906 - RNA, 19 nt, Artificial Sequence
  Description of Artificial Sequence: Synthetic oligonucleotide
  Sense strand starting at position 3684 of SEQ ID NO: 1758
acguuuacaaugggaacaa

SEQ ID NO: 136907 - RNA, 19 nt, Artificial Sequence
  Description of Artificial Sequence: Synthetic oligonucleotide
  Antisense strand to SEQ ID NO: 136906
uuguucccauuguaaacgu

SEQ ID NO: 136908 - RNA, 19 nt, Artificial Sequence
  Description of Artificial Sequence: Synthetic oligonucleotide
  Sense strand starting at position 3714 of SEQ ID NO: 1758
ggugaaaugguuugauucu

SEQ ID NO: 136909 - RNA, 19 nt, Artificial Sequence
  Description of Artificial Sequence: Synthetic oligonucleotide
  Antisense strand to SEQ ID NO: 136908
agaaucaaaccauuucacc

SEQ ID NO: 136910 - RNA, 19 nt, Artificial Sequence
  Description of Artificial Sequence: Synthetic oligonucleotide
  Sense strand starting at position 3779 of SEQ ID NO: 1758
accuguauuugggauagua

SEQ ID NO: 136911 - RNA, 19 nt, Artificial Sequence
  Description of Artificial Sequence: Synthetic oligonucleotide
  Antisense strand to SEQ ID NO: 136910
uacuaucccaaauacaggu

SEQ ID NO: 136912 - RNA, 19 nt, Artificial Sequence
  Description of Artificial Sequence: Synthetic oligonucleotide
  Sense strand starting at position 3863 of SEQ ID NO: 1758
uccaaagcauuuggaugaa

SEQ ID NO: 136913 - RNA, 19 nt, Artificial Sequence
  Description of Artificial Sequence: Synthetic oligonucleotide
  Antisense strand to SEQ ID NO: 136912
uucauccaaaugcuuugga

SEQ ID NO: 136914 - RNA, 19 nt, Artificial Sequence
  Description of Artificial Sequence: Synthetic oligonucleotide
  Sense strand starting at position 3875 of SEQ ID NO: 1758
ggaugaaaguggcuaucaa

SEQ ID NO: 136915 - RNA, 19 nt, Artificial Sequence
  Description of Artificial Sequence: Synthetic oligonucleotide
  Antisense strand to SEQ ID NO: 136914
uugauagccacuuucaucc

SEQ ID NO: 136916 - RNA, 19 nt, Artificial Sequence
  Description of Artificial Sequence: Synthetic oligonucleotide
  Sense strand starting at position 3885 of SEQ ID NO: 1758
ggcuaucaaguuuauacca

SEQ ID NO: 136917 - RNA, 19 nt, Artificial Sequence
  Description of Artificial Sequence: Synthetic oligonucleotide
  Antisense strand to SEQ ID NO: 136916
ugguauaaacuugauagcc

SEQ ID NO: 136918 - RNA, 19 nt, Artificial Sequence
  Description of Artificial Sequence: Synthetic oligonucleotide
  Sense strand starting at position 3976 of SEQ ID NO: 1758
ggaagcaaggcuuaucuuu

SEQ ID NO: 136919 - RNA, 19 nt, Artificial Sequence
  Description of Artificial Sequence: Synthetic oligonucleotide
  Antisense strand to SEQ ID NO: 136918
aaagauaagccuugcuucc

SEQ ID NO: 136920 - RNA, 19 nt, Artificial Sequence
  Description of Artificial Sequence: Synthetic oligonucleotide
  Sense strand starting at position 3923 of SEQ ID NO: 1759
gauacaugugcauagguau

SEQ ID NO: 136921 - RNA, 19 nt, Artificial Sequence
  Description of Artificial Sequence: Synthetic oligonucleotide
  Antisense strand to SEQ ID NO: 136920
auaccuaugcacauguauc

SEQ ID NO: 136922 - RNA, 19 nt, Artificial Sequence
  Description of Artificial Sequence: Synthetic oligonucleotide
  Sense strand starting at position 3919 of SEQ ID NO: 1759
cugagauacaugugcauag

SEQ ID NO: 136923 - RNA, 19 nt, Artificial Sequence
  Description of Artificial Sequence: Synthetic oligonucleotide
  Antisense strand to SEQ ID NO: 136922
cuaugcacauguaucucag

SEQ ID NO: 136924 - RNA, 19 nt, Artificial Sequence
  Description of Artificial Sequence: Synthetic oligonucleotide
  Sense strand starting at position 3211 of SEQ ID NO: 1759
agaguacuauucuuuccuu

SEQ ID NO: 136925 - RNA, 19 nt, Artificial Sequence
  Description of Artificial Sequence: Synthetic oligonucleotide
  Antisense strand to SEQ ID NO: 136924
aaggaaagaauaguacucu

SEQ ID NO: 136926 - RNA, 19 nt, Artificial Sequence
  Description of Artificial Sequence: Synthetic oligonucleotide
  Sense strand starting at position 3178 of SEQ ID NO: 1759
ugugauaagcuauacugaa

SEQ ID NO: 136927 - RNA, 19 nt, Artificial Sequence
  Description of Artificial Sequence: Synthetic oligonucleotide
  Antisense strand to SEQ ID NO: 136926
uucaguauagcuuaucaca

SEQ ID NO: 136928 - RNA, 19 nt, Artificial Sequence
  Description of Artificial Sequence: Synthetic oligonucleotide
  Sense strand starting at position 3149 of SEQ ID NO: 1759
augaauggccaguauccaa

SEQ ID NO: 136929 - RNA, 19 nt, Artificial Sequence
  Description of Artificial Sequence: Synthetic oligonucleotide
  Antisense strand to SEQ ID NO: 136928
uuggauacuggccauucau

SEQ ID NO: 136930 - RNA, 19 nt, Artificial Sequence
  Description of Artificial Sequence: Synthetic oligonucleotide
  Sense strand starting at position 3117 of SEQ ID NO: 1759
uagauaaccugguuacuag

SEQ ID NO: 136931 - RNA, 19 nt, Artificial Sequence
  Description of Artificial Sequence: Synthetic oligonucleotide
  Antisense strand to SEQ ID NO: 136930
cuaguaaccagguuaucua

SEQ ID NO: 136932 - RNA, 19 nt, Artificial Sequence
  Description of Artificial Sequence: Synthetic oligonucleotide
  Sense strand starting at position 3115 of SEQ ID NO: 1759
guuagauaaccugguuacu

SEQ ID NO: 136933 - RNA, 19 nt, Artificial Sequence
  Description of Artificial Sequence: Synthetic oligonucleotide
  Antisense strand to SEQ ID NO: 136932
aguaaccagguuaucuaac

SEQ ID NO: 136934 - RNA, 19 nt, Artificial Sequence
  Description of Artificial Sequence: Synthetic oligonucleotide
  Sense strand starting at position 2852 of SEQ ID NO: 1759
ugccacuaccuaugugaaa

SEQ ID NO: 136935 - RNA, 19 nt, Artificial Sequence
  Description of Artificial Sequence: Synthetic oligonucleotide
  Antisense strand to SEQ ID NO: 136934
uuucacauagguaguggca

SEQ ID NO: 136936 - RNA, 19 nt, Artificial Sequence
  Description of Artificial Sequence: Synthetic oligonucleotide
  Sense strand starting at position 2807 of SEQ ID NO: 1759
gugaaucuauuauugacuu

SEQ ID NO: 136937 - RNA, 19 nt, Artificial Sequence
  Description of Artificial Sequence: Synthetic oligonucleotide
  Antisense strand to SEQ ID NO: 136936
aagucaauaauagauucac

SEQ ID NO: 136938 - RNA, 19 nt, Artificial Sequence
  Description of Artificial Sequence: Synthetic oligonucleotide
  Sense strand starting at position 2747 of SEQ ID NO: 1759
cuaauauugcuucgacaca

SEQ ID NO: 136939 - RNA, 19 nt, Artificial Sequence
  Description of Artificial Sequence: Synthetic oligonucleotide
  Antisense strand to SEQ ID NO: 136938
ugugucgaagcaauauuag

SEQ ID NO: 136940 - RNA, 19 nt, Artificial Sequence
  Description of Artificial Sequence: Synthetic oligonucleotide
  Sense strand starting at position 2745 of SEQ ID NO: 1759
aucuaauauugcuucgaca

SEQ ID NO: 136941 - RNA, 19 nt, Artificial Sequence
  Description of Artificial Sequence: Synthetic oligonucleotide
  Antisense strand to SEQ ID NO: 136940
ugucgaagcaauauuagau

SEQ ID NO: 136942 - RNA, 19 nt, Artificial Sequence
  Description of Artificial Sequence: Synthetic oligonucleotide
  Sense strand starting at position 2642 of SEQ ID NO: 1759
gagauaugcgucuaauaaa

SEQ ID NO: 136943 - RNA, 19 nt, Artificial Sequence
  Description of Artificial Sequence: Synthetic oligonucleotide
  Antisense strand to SEQ ID NO: 136942
uuuauuagacgcauaucuc

SEQ ID NO: 136944 - RNA, 19 nt, Artificial Sequence
  Description of Artificial Sequence: Synthetic oligonucleotide
  Sense strand starting at position 2638 of SEQ ID NO: 1759
ccaagagauaugcgucuaa

SEQ ID NO: 136945 - RNA, 19 nt, Artificial Sequence
  Description of Artificial Sequence: Synthetic oligonucleotide
  Antisense strand to SEQ ID NO: 136944
uuagacgcauaucucuugg

SEQ ID NO: 136946 - RNA, 19 nt, Artificial Sequence
  Description of Artificial Sequence: Synthetic oligonucleotide
  Sense strand starting at position 2538 of SEQ ID NO: 1759
ugagaugacuucuugaagu

SEQ ID NO: 136947 - RNA, 19 nt, Artificial Sequence
  Description of Artificial Sequence: Synthetic oligonucleotide
  Antisense strand to SEQ ID NO: 136946
acuucaagaagucaucuca

SEQ ID NO: 136948 - RNA, 19 nt, Artificial Sequence
  Description of Artificial Sequence: Synthetic oligonucleotide
  Sense strand starting at position 2397 of SEQ ID NO: 1759
uggcaaauaucuccaggga

SEQ ID NO: 136949 - RNA, 19 nt, Artificial Sequence
  Description of Artificial Sequence: Synthetic oligonucleotide
  Antisense strand to SEQ ID NO: 136948
ucccuggagauauuugcca

SEQ ID NO: 136950 - RNA, 19 nt, Artificial Sequence
  Description of Artificial Sequence: Synthetic oligonucleotide
  Sense strand starting at position 2375 of SEQ ID NO: 1759
gugugcuugagggagaauu

SEQ ID NO: 136951 - RNA, 19 nt, Artificial Sequence
  Description of Artificial Sequence: Synthetic oligonucleotide
  Antisense strand to SEQ ID NO: 136950
aauucucccucaagcacac

SEQ ID NO: 136952 - RNA, 19 nt, Artificial Sequence
  Description of Artificial Sequence: Synthetic oligonucleotide
  Sense strand starting at position 2338 of SEQ ID NO: 1759
gcucgaaacgcauaaagaa

SEQ ID NO: 136953 - RNA, 19 nt, Artificial Sequence
  Description of Artificial Sequence: Synthetic oligonucleotide
  Antisense strand to SEQ ID NO: 136952
uucuuuaugcguuucgagc

SEQ ID NO: 136954 - RNA, 19 nt, Artificial Sequence
  Description of Artificial Sequence: Synthetic oligonucleotide
  Sense strand starting at position 1796 of SEQ ID NO: 1759
gagggaugguaccuuguca

SEQ ID NO: 136955 - RNA, 19 nt, Artificial Sequence
  Description of Artificial Sequence: Synthetic oligonucleotide
  Antisense strand to SEQ ID NO: 136954
ugacaagguaccaucccuc

SEQ ID NO: 136956 - RNA, 19 nt, Artificial Sequence
  Description of Artificial Sequence: Synthetic oligonucleotide
  Sense strand starting at position 1744 of SEQ ID NO: 1759
gauuaaaucugggucuaga

SEQ ID NO: 136957 - RNA, 19 nt, Artificial Sequence
  Description of Artificial Sequence: Synthetic oligonucleotide
  Antisense strand to SEQ ID NO: 136956
ucuagacccagauuuaauc

SEQ ID NO: 136958 - RNA, 19 nt, Artificial Sequence
  Description of Artificial Sequence: Synthetic oligonucleotide
  Sense strand starting at position 1743 of SEQ ID NO: 1759
ugauuaaaucugggucuag

SEQ ID NO: 136959 - RNA, 19 nt, Artificial Sequence
  Description of Artificial Sequence: Synthetic oligonucleotide
  Antisense strand to SEQ ID NO: 136958
cuagacccagauuuaauca

SEQ ID NO: 136960 - RNA, 19 nt, Artificial Sequence
  Description of Artificial Sequence: Synthetic oligonucleotide
  Sense strand starting at position 1741 of SEQ ID NO: 1759
guugauuaaaucugggucu

SEQ ID NO: 136961 - RNA, 19 nt, Artificial Sequence
  Description of Artificial Sequence: Synthetic oligonucleotide
  Antisense strand to SEQ ID NO: 136960
agacccagauuuaaucaac

SEQ ID NO: 136962 - RNA, 19 nt, Artificial Sequence
  Description of Artificial Sequence: Synthetic oligonucleotide
  Sense strand starting at position 1735 of SEQ ID NO: 1759
gggugaguugauuaaaucu

SEQ ID NO: 136963 - RNA, 19 nt, Artificial Sequence
  Description of Artificial Sequence: Synthetic oligonucleotide
  Antisense strand to SEQ ID NO: 136962
agauuuaaucaacucaccc

SEQ ID NO: 136964 - RNA, 19 nt, Artificial Sequence
  Description of Artificial Sequence: Synthetic oligonucleotide
  Sense strand starting at position 1422 of SEQ ID NO: 1759
cugaaacuuucugcaauug

SEQ ID NO: 136965 - RNA, 19 nt, Artificial Sequence
  Description of Artificial Sequence: Synthetic oligonucleotide
  Antisense strand to SEQ ID NO: 136964
caauugcagaaaguuucag

SEQ ID NO: 136966 - RNA, 19 nt, Artificial Sequence
  Description of Artificial Sequence: Synthetic oligonucleotide
  Sense strand starting at position 1412 of SEQ ID NO: 1759
aacgaacucgcugaaacuu

SEQ ID NO: 136967 - RNA, 19 nt, Artificial Sequence
  Description of Artificial Sequence: Synthetic oligonucleotide
  Antisense strand to SEQ ID NO: 136966
aaguuucagcgaguucguu

SEQ ID NO: 136968 - RNA, 19 nt, Artificial Sequence
  Description of Artificial Sequence: Synthetic oligonucleotide
  Sense strand starting at position 1348 of SEQ ID NO: 1759
cgacuuucgcccguuacua

SEQ ID NO: 136969 - RNA, 19 nt, Artificial Sequence
  Description of Artificial Sequence: Synthetic oligonucleotide
  Antisense strand to SEQ ID NO: 136968
uaguaacgggcgaaagucg

SEQ ID NO: 136970 - RNA, 19 nt, Artificial Sequence
  Description of Artificial Sequence: Synthetic oligonucleotide
  Sense strand starting at position 1218 of SEQ ID NO: 1759
ggcguuucccgagcagcua

SEQ ID NO: 136971 - RNA, 19 nt, Artificial Sequence
  Description of Artificial Sequence: Synthetic oligonucleotide
  Antisense strand to SEQ ID NO: 136970
uagcugcucgggaaacgcc

SEQ ID NO: 136972 - RNA, 19 nt, Artificial Sequence
  Description of Artificial Sequence: Synthetic oligonucleotide
  Sense strand starting at position 1120 of SEQ ID NO: 1759
aguauuugcuugucacucu

SEQ ID NO: 136973 - RNA, 19 nt, Artificial Sequence
  Description of Artificial Sequence: Synthetic oligonucleotide
  Antisense strand to SEQ ID NO: 136972
agagugacaagcaaauacu

SEQ ID NO: 136974 - RNA, 19 nt, Artificial Sequence
  Description of Artificial Sequence: Synthetic oligonucleotide
  Sense strand starting at position 1118 of SEQ ID NO: 1759
gaaguauuugcuugucacu

SEQ ID NO: 136975 - RNA, 19 nt, Artificial Sequence
  Description of Artificial Sequence: Synthetic oligonucleotide
  Antisense strand to SEQ ID NO: 136974
agugacaagcaaauacuuc

SEQ ID NO: 136976 - RNA, 19 nt, Artificial Sequence
  Description of Artificial Sequence: Synthetic oligonucleotide
  Sense strand starting at position 1117 of SEQ ID NO: 1759
cgaaguauuugcuugucac

SEQ ID NO: 136977 - RNA, 19 nt, Artificial Sequence
  Description of Artificial Sequence: Synthetic oligonucleotide
  Antisense strand to SEQ ID NO: 136976
gugacaagcaaauacuucg

SEQ ID NO: 136978 - RNA, 19 nt, Artificial Sequence
  Description of Artificial Sequence: Synthetic oligonucleotide
  Sense strand starting at position 1114 of SEQ ID NO: 1759
aggcgaaguauuugcuugu

SEQ ID NO: 136979 - RNA, 19 nt, Artificial Sequence
  Description of Artificial Sequence: Synthetic oligonucleotide
  Antisense strand to SEQ ID NO: 136978
acaagcaaauacuucgccu

SEQ ID NO: 136980 - RNA, 19 nt, Artificial Sequence
  Description of Artificial Sequence: Synthetic oligonucleotide
  Sense strand starting at position 1072 of SEQ ID NO: 1759
ccaagauccuguccaguua

SEQ ID NO: 136981 - RNA, 19 nt, Artificial Sequence
  Description of Artificial Sequence: Synthetic oligonucleotide
  Antisense strand to SEQ ID NO: 136980
uaacuggacaggaucuugg

SEQ ID NO: 136982 - RNA, 19 nt, Artificial Sequence
  Description of Artificial Sequence: Synthetic oligonucleotide
  Sense strand starting at position 970 of SEQ ID NO: 1759
aguggugagucucugggaa

SEQ ID NO: 136983 - RNA, 19 nt, Artificial Sequence
  Description of Artificial Sequence: Synthetic oligonucleotide
  Antisense strand to SEQ ID NO: 136982
uucccagagacucaccacu

SEQ ID NO: 136984 - RNA, 19 nt, Artificial Sequence
  Description of Artificial Sequence: Synthetic oligonucleotide
  Sense strand starting at position 902 of SEQ ID NO: 1759
cugaauauguuucuaagca

SEQ ID NO: 136985 - RNA, 19 nt, Artificial Sequence
  Description of Artificial Sequence: Synthetic oligonucleotide
  Antisense strand to SEQ ID NO: 136984
ugcuuagaaacauauucag

SEQ ID NO: 136986 - RNA, 19 nt, Artificial Sequence
  Description of Artificial Sequence: Synthetic oligonucleotide
  Sense strand starting at position 900 of SEQ ID NO: 1759
uucugaauauguuucuaag

SEQ ID NO: 136987 - RNA, 19 nt, Artificial Sequence
  Description of Artificial Sequence: Synthetic oligonucleotide
  Antisense strand to SEQ ID NO: 136986
cuuagaaacauauucagaa

SEQ ID NO: 136988 - RNA, 19 nt, Artificial Sequence
  Description of Artificial Sequence: Synthetic oligonucleotide
  Sense strand starting at position 826 of SEQ ID NO: 1759
gcuugucaggcagacauaa

SEQ ID NO: 136989 - RNA, 19 nt, Artificial Sequence
  Description of Artificial Sequence: Synthetic oligonucleotide
  Antisense strand to SEQ ID NO: 136988
uuaugucugccugacaagc

SEQ ID NO: 136990 - RNA, 19 nt, Artificial Sequence
  Description of Artificial Sequence: Synthetic oligonucleotide
  Sense strand starting at position 824 of SEQ ID NO: 1759
cugcuugucaggcagacau

SEQ ID NO: 136991 - RNA, 19 nt, Artificial Sequence
  Description of Artificial Sequence: Synthetic oligonucleotide
  Antisense strand to SEQ ID NO: 136990
augucugccugacaagcag

SEQ ID NO: 136992 - RNA, 19 nt, Artificial Sequence
  Description of Artificial Sequence: Synthetic oligonucleotide
  Sense strand starting at position 547 of SEQ ID NO: 1759
aggugaagaagcuguugaa

SEQ ID NO: 136993 - RNA, 19 nt, Artificial Sequence
  Description of Artificial Sequence: Synthetic oligonucleotide
  Antisense strand to SEQ ID NO: 136992
uucaacagcuucuucaccu

SEQ ID NO: 136994 - RNA, 19 nt, Artificial Sequence
  Description of Artificial Sequence: Synthetic oligonucleotide
  Sense strand starting at position 416 of SEQ ID NO: 1759
ucaucugacguuuaugacu

SEQ ID NO: 136995 - RNA, 19 nt, Artificial Sequence
  Description of Artificial Sequence: Synthetic oligonucleotide
  Antisense strand to SEQ ID NO: 136994
agucauaaacgucagauga

SEQ ID NO: 136996 - RNA, 19 nt, Artificial Sequence
  Description of Artificial Sequence: Synthetic oligonucleotide
  Sense strand starting at position 395 of SEQ ID NO: 1759
uuaugaacaccgcauuacu

SEQ ID NO: 136997 - RNA, 19 nt, Artificial Sequence
  Description of Artificial Sequence: Synthetic oligonucleotide
  Antisense strand to SEQ ID NO: 136996
aguaaugcgguguucauaa

SEQ ID NO: 136998 - RNA, 19 nt, Artificial Sequence
  Description of Artificial Sequence: Synthetic oligonucleotide
  Sense strand starting at position 362 of SEQ ID NO: 1759
aguccagacaucuguagga

SEQ ID NO: 136999 - RNA, 19 nt, Artificial Sequence
  Description of Artificial Sequence: Synthetic oligonucleotide
  Antisense strand to SEQ ID NO: 136998
uccuacagaugucuggacu

SEQ ID NO: 137000 - RNA, 19 nt, Artificial Sequence
  Description of Artificial Sequence: Synthetic oligonucleotide
  Sense strand starting at position 3845 of SEQ ID NO: 1760
agggaaguuucccaauuuc

SEQ ID NO: 137001 - RNA, 19 nt, Artificial Sequence
  Description of Artificial Sequence: Synthetic oligonucleotide
  Antisense strand to SEQ ID NO: 137000
gaaauugggaaacuucccu

SEQ ID NO: 137002 - RNA, 19 nt, Artificial Sequence
  Description of Artificial Sequence: Synthetic oligonucleotide
  Sense strand starting at position 3836 of SEQ ID NO: 1760
gaaucucgcagggaaguuu

SEQ ID NO: 137003 - RNA, 19 nt, Artificial Sequence
  Description of Artificial Sequence: Synthetic oligonucleotide
  Antisense strand to SEQ ID NO: 137002
aaacuucccugcgagauuc

SEQ ID NO: 137004 - RNA, 19 nt, Artificial Sequence
  Description of Artificial Sequence: Synthetic oligonucleotide
  Sense strand starting at position 3835 of SEQ ID NO: 1760
agaaucucgcagggaaguu

SEQ ID NO: 137005 - RNA, 19 nt, Artificial Sequence
  Description of Artificial Sequence: Synthetic oligonucleotide
  Antisense strand to SEQ ID NO: 137004
aacuucccugcgagauucu

SEQ ID NO: 137006 - RNA, 19 nt, Artificial Sequence
  Description of Artificial Sequence: Synthetic oligonucleotide
  Sense strand starting at position 3834 of SEQ ID NO: 1760
uagaaucucgcagggaagu

SEQ ID NO: 137007 - RNA, 19 nt, Artificial Sequence
  Description of Artificial Sequence: Synthetic oligonucleotide
  Antisense strand to SEQ ID NO: 137006
acuucccugcgagauucua

SEQ ID NO: 137008 - RNA, 19 nt, Artificial Sequence
  Description of Artificial Sequence: Synthetic oligonucleotide
  Sense strand starting at position 3648 of SEQ ID NO: 1760
agaccacucgggcaacauu

SEQ ID NO: 137009 - RNA, 19 nt, Artificial Sequence
  Description of Artificial Sequence: Synthetic oligonucleotide
  Antisense strand to SEQ ID NO: 137008
aauguugcccgaguggucu

SEQ ID NO: 137010 - RNA, 19 nt, Artificial Sequence
  Description of Artificial Sequence: Synthetic oligonucleotide
  Sense strand starting at position 3477 of SEQ ID NO: 1760
acuggagucucccuauguu

SEQ ID NO: 137011 - RNA, 19 nt, Artificial Sequence
  Description of Artificial Sequence: Synthetic oligonucleotide
  Antisense strand to SEQ ID NO: 137010
aacauagggagacuccagu

SEQ ID NO: 137012 - RNA, 19 nt, Artificial Sequence
  Description of Artificial Sequence: Synthetic oligonucleotide
  Sense strand starting at position 3165 of SEQ ID NO: 1760
guaacugguacuuguaaug

SEQ ID NO: 137013 - RNA, 19 nt, Artificial Sequence
  Description of Artificial Sequence: Synthetic oligonucleotide
  Antisense strand to SEQ ID NO: 137012
cauuacaaguaccaguuac

SEQ ID NO: 137014 - RNA, 19 nt, Artificial Sequence
  Description of Artificial Sequence: Synthetic oligonucleotide
  Sense strand starting at position 3164 of SEQ ID NO: 1760
gguaacugguacuuguaau

SEQ ID NO: 137015 - RNA, 19 nt, Artificial Sequence
  Description of Artificial Sequence: Synthetic oligonucleotide
  Antisense strand to SEQ ID NO: 137014
auuacaaguaccaguuacc

SEQ ID NO: 137016 - RNA, 19 nt, Artificial Sequence
  Description of Artificial Sequence: Synthetic oligonucleotide
  Sense strand starting at position 3037 of SEQ ID NO: 1760
cuaucaaaugugugauuag

SEQ ID NO: 137017 - RNA, 19 nt, Artificial Sequence
  Description of Artificial Sequence: Synthetic oligonucleotide
  Antisense strand to SEQ ID NO: 137016
cuaaucacacauuugauag

SEQ ID NO: 137018 - RNA, 19 nt, Artificial Sequence
  Description of Artificial Sequence: Synthetic oligonucleotide
  Sense strand starting at position 3036 of SEQ ID NO: 1760
acuaucaaaugugugauua

SEQ ID NO: 137019 - RNA, 19 nt, Artificial Sequence
  Description of Artificial Sequence: Synthetic oligonucleotide
  Antisense strand to SEQ ID NO: 137018
uaaucacacauuugauagu

SEQ ID NO: 137020 - RNA, 19 nt, Artificial Sequence
  Description of Artificial Sequence: Synthetic oligonucleotide
  Sense strand starting at position 2812 of SEQ ID NO: 1760
gcccgacuugguugggaga

SEQ ID NO: 137021 - RNA, 19 nt, Artificial Sequence
  Description of Artificial Sequence: Synthetic oligonucleotide
  Antisense strand to SEQ ID NO: 137020
ucucccaaccaagucgggc

SEQ ID NO: 137022 - RNA, 19 nt, Artificial Sequence
  Description of Artificial Sequence: Synthetic oligonucleotide
  Sense strand starting at position 2606 of SEQ ID NO: 1760
uguggcacugauuagaaca

SEQ ID NO: 137023 - RNA, 19 nt, Artificial Sequence
  Description of Artificial Sequence: Synthetic oligonucleotide
  Antisense strand to SEQ ID NO: 137022
uguucuaaucagugccaca

SEQ ID NO: 137024 - RNA, 19 nt, Artificial Sequence
  Description of Artificial Sequence: Synthetic oligonucleotide
  Sense strand starting at position 2603 of SEQ ID NO: 1760
gccuguggcacugauuaga

SEQ ID NO: 137025 - RNA, 19 nt, Artificial Sequence
  Description of Artificial Sequence: Synthetic oligonucleotide
  Antisense strand to SEQ ID NO: 137024
ucuaaucagugccacaggc

SEQ ID NO: 137026 - RNA, 19 nt, Artificial Sequence
  Description of Artificial Sequence: Synthetic oligonucleotide
  Sense strand starting at position 2601 of SEQ ID NO: 1760
gcgccuguggcacugauua

SEQ ID NO: 137027 - RNA, 19 nt, Artificial Sequence
  Description of Artificial Sequence: Synthetic oligonucleotide
  Antisense strand to SEQ ID NO: 137026
uaaucagugccacaggcgc

SEQ ID NO: 137028 - RNA, 19 nt, Artificial Sequence
  Description of Artificial Sequence: Synthetic oligonucleotide
  Sense strand starting at position 2475 of SEQ ID NO: 1760
cggugaggugcccaaggau

SEQ ID NO: 137029 - RNA, 19 nt, Artificial Sequence
  Description of Artificial Sequence: Synthetic oligonucleotide
  Antisense strand to SEQ ID NO: 137028
auccuugggcaccucaccg

SEQ ID NO: 137030 - RNA, 19 nt, Artificial Sequence
  Description of Artificial Sequence: Synthetic oligonucleotide
  Sense strand starting at position 2229 of SEQ ID NO: 1760
uggaaaucccaucgcuuua

SEQ ID NO: 137031 - RNA, 19 nt, Artificial Sequence
  Description of Artificial Sequence: Synthetic oligonucleotide
  Antisense strand to SEQ ID NO: 137030
uaaagcgaugggauuucca

SEQ ID NO: 137032 - RNA, 19 nt, Artificial Sequence
  Description of Artificial Sequence: Synthetic oligonucleotide
  Sense strand starting at position 2217 of SEQ ID NO: 1760
gaaagacucgucuggaaau

SEQ ID NO: 137033 - RNA, 19 nt, Artificial Sequence
  Description of Artificial Sequence: Synthetic oligonucleotide
  Antisense strand to SEQ ID NO: 137032
auuuccagacgagucuuuc

SEQ ID NO: 137034 - RNA, 19 nt, Artificial Sequence
  Description of Artificial Sequence: Synthetic oligonucleotide
  Sense strand starting at position 2215 of SEQ ID NO: 1760
gggaaagacucgucuggaa

SEQ ID NO: 137035 - RNA, 19 nt, Artificial Sequence
  Description of Artificial Sequence: Synthetic oligonucleotide
  Antisense strand to SEQ ID NO: 137034
uuccagacgagucuuuccc

SEQ ID NO: 137036 - RNA, 19 nt, Artificial Sequence
  Description of Artificial Sequence: Synthetic oligonucleotide
  Sense strand starting at position 2204 of SEQ ID NO: 1760
aaaguuggccugggaaaga

SEQ ID NO: 137037 - RNA, 19 nt, Artificial Sequence
  Description of Artificial Sequence: Synthetic oligonucleotide
  Antisense strand to SEQ ID NO: 137036
ucuuucccaggccaacuuu

SEQ ID NO: 137038 - RNA, 19 nt, Artificial Sequence
  Description of Artificial Sequence: Synthetic oligonucleotide
  Sense strand starting at position 2179 of SEQ ID NO: 1760
acgagaaacuuuccuccga

SEQ ID NO: 137039 - RNA, 19 nt, Artificial Sequence
  Description of Artificial Sequence: Synthetic oligonucleotide
  Antisense strand to SEQ ID NO: 137038
ucggaggaaaguuucucgu

SEQ ID NO: 137040 - RNA, 19 nt, Artificial Sequence
  Description of Artificial Sequence: Synthetic oligonucleotide
  Sense strand starting at position 2042 of SEQ ID NO: 1760
ggcgcuuugccagcaacaa

SEQ ID NO: 137041 - RNA, 19 nt, Artificial Sequence
  Description of Artificial Sequence: Synthetic oligonucleotide
  Antisense strand to SEQ ID NO: 137040
uuguugcuggcaaagcgcc

SEQ ID NO: 137042 - RNA, 19 nt, Artificial Sequence
  Description of Artificial Sequence: Synthetic oligonucleotide
  Sense strand starting at position 1154 of SEQ ID NO: 1760
gugaccuucguggaaggaa

SEQ ID NO: 137043 - RNA, 19 nt, Artificial Sequence
  Description of Artificial Sequence: Synthetic oligonucleotide
  Antisense strand to SEQ ID NO: 137042
uuccuuccacgaaggucac

SEQ ID NO: 137044 - RNA, 19 nt, Artificial Sequence
  Description of Artificial Sequence: Synthetic oligonucleotide
  Sense strand starting at position 1121 of SEQ ID NO: 1760
gccgauuuccauuguaacg

SEQ ID NO: 137045 - RNA, 19 nt, Artificial Sequence
  Description of Artificial Sequence: Synthetic oligonucleotide
  Antisense strand to SEQ ID NO: 137044
cguuacaauggaaaucggc

SEQ ID NO: 137046 - RNA, 19 nt, Artificial Sequence
  Description of Artificial Sequence: Synthetic oligonucleotide
  Sense strand starting at position 1083 of SEQ ID NO: 1760
agaucuagccacgacgaaa

SEQ ID NO: 137047 - RNA, 19 nt, Artificial Sequence
  Description of Artificial Sequence: Synthetic oligonucleotide
  Antisense strand to SEQ ID NO: 137046
uuucgucguggcuagaucu

SEQ ID NO: 137048 - RNA, 19 nt, Artificial Sequence
  Description of Artificial Sequence: Synthetic oligonucleotide
  Sense strand starting at position 1017 of SEQ ID NO: 1760
ggucuuuguguauaaauac

SEQ ID NO: 137049 - RNA, 19 nt, Artificial Sequence
  Description of Artificial Sequence: Synthetic oligonucleotide
  Antisense strand to SEQ ID NO: 137048
guauuuauacacaaagacc

SEQ ID NO: 137050 - RNA, 19 nt, Artificial Sequence
  Description of Artificial Sequence: Synthetic oligonucleotide
  Sense strand starting at position 1015 of SEQ ID NO: 1760
uaggucuuuguguauaaau

SEQ ID NO: 137051 - RNA, 19 nt, Artificial Sequence
  Description of Artificial Sequence: Synthetic oligonucleotide
  Antisense strand to SEQ ID NO: 137050
auuuauacacaaagaccua

SEQ ID NO: 137052 - RNA, 19 nt, Artificial Sequence
  Description of Artificial Sequence: Synthetic oligonucleotide
  Sense strand starting at position 1014 of SEQ ID NO: 1760
uuaggucuuuguguauaaa

SEQ ID NO: 137053 - RNA, 19 nt, Artificial Sequence
  Description of Artificial Sequence: Synthetic oligonucleotide
  Antisense strand to SEQ ID NO: 137052
uuuauacacaaagaccuaa

SEQ ID NO: 137054 - RNA, 19 nt, Artificial Sequence
  Description of Artificial Sequence: Synthetic oligonucleotide
  Sense strand starting at position 814 of SEQ ID NO: 1760
guggaucuacgugaagaug

SEQ ID NO: 137055 - RNA, 19 nt, Artificial Sequence
  Description of Artificial Sequence: Synthetic oligonucleotide
  Antisense strand to SEQ ID NO: 137054
caucuucacguagauccac

SEQ ID NO: 137056 - RNA, 19 nt, Artificial Sequence
  Description of Artificial Sequence: Synthetic oligonucleotide
  Sense strand starting at position 813 of SEQ ID NO: 1760
uguggaucuacgugaagau

SEQ ID NO: 137057 - RNA, 19 nt, Artificial Sequence
  Description of Artificial Sequence: Synthetic oligonucleotide
  Antisense strand to SEQ ID NO: 137056
aucuucacguagauccaca

SEQ ID NO: 137058 - RNA, 19 nt, Artificial Sequence
  Description of Artificial Sequence: Synthetic oligonucleotide
  Sense strand starting at position 801 of SEQ ID NO: 1760
cuaggaucaccauguggau

SEQ ID NO: 137059 - RNA, 19 nt, Artificial Sequence
  Description of Artificial Sequence: Synthetic oligonucleotide
  Antisense strand to SEQ ID NO: 137058
auccacauggugauccuag

SEQ ID NO: 137060 - RNA, 19 nt, Artificial Sequence
  Description of Artificial Sequence: Synthetic oligonucleotide
  Sense strand starting at position 687 of SEQ ID NO: 1760
gaaucaucuuguccugguu

SEQ ID NO: 137061 - RNA, 19 nt, Artificial Sequence
  Description of Artificial Sequence: Synthetic oligonucleotide
  Antisense strand to SEQ ID NO: 137060
aaccaggacaagaugauuc

SEQ ID NO: 137062 - RNA, 19 nt, Artificial Sequence
  Description of Artificial Sequence: Synthetic oligonucleotide
  Sense strand starting at position 686 of SEQ ID NO: 1760
ggaaucaucuuguccuggu

SEQ ID NO: 137063 - RNA, 19 nt, Artificial Sequence
  Description of Artificial Sequence: Synthetic oligonucleotide
  Antisense strand to SEQ ID NO: 137062
accaggacaagaugauucc

SEQ ID NO: 137064 - RNA, 19 nt, Artificial Sequence
  Description of Artificial Sequence: Synthetic oligonucleotide
  Sense strand starting at position 562 of SEQ ID NO: 1760
guaaucauuugcccugugu

SEQ ID NO: 137065 - RNA, 19 nt, Artificial Sequence
  Description of Artificial Sequence: Synthetic oligonucleotide
  Antisense strand to SEQ ID NO: 137064
acacagggcaaaugauuac

SEQ ID NO: 137066 - RNA, 19 nt, Artificial Sequence
  Description of Artificial Sequence: Synthetic oligonucleotide
  Sense strand starting at position 560 of SEQ ID NO: 1760
gaguaaucauuugcccugu

SEQ ID NO: 137067 - RNA, 19 nt, Artificial Sequence
  Description of Artificial Sequence: Synthetic oligonucleotide
  Antisense strand to SEQ ID NO: 137066
acagggcaaaugauuacuc

SEQ ID NO: 137068 - RNA, 19 nt, Artificial Sequence
  Description of Artificial Sequence: Synthetic oligonucleotide
  Sense strand starting at position 551 of SEQ ID NO: 1760
auaagugcagaguaaucau

SEQ ID NO: 137069 - RNA, 19 nt, Artificial Sequence
  Description of Artificial Sequence: Synthetic oligonucleotide
  Antisense strand to SEQ ID NO: 137068
augauuacucugcacuuau

SEQ ID NO: 137070 - RNA, 19 nt, Artificial Sequence
  Description of Artificial Sequence: Synthetic oligonucleotide
  Sense strand starting at position 548 of SEQ ID NO: 1760
accauaagugcagaguaau

SEQ ID NO: 137071 - RNA, 19 nt, Artificial Sequence
  Description of Artificial Sequence: Synthetic oligonucleotide
  Antisense strand to SEQ ID NO: 137070
auuacucugcacuuauggu

SEQ ID NO: 137072 - RNA, 19 nt, Artificial Sequence
  Description of Artificial Sequence: Synthetic oligonucleotide
  Sense strand starting at position 546 of SEQ ID NO: 1760
ugaccauaagugcagagua

SEQ ID NO: 137073 - RNA, 19 nt, Artificial Sequence
  Description of Artificial Sequence: Synthetic oligonucleotide
  Antisense strand to SEQ ID NO: 137072
uacucugcacuuaugguca

SEQ ID NO: 137074 - RNA, 19 nt, Artificial Sequence
  Description of Artificial Sequence: Synthetic oligonucleotide
  Sense strand starting at position 534 of SEQ ID NO: 1760
ucuggaacccucugaccau

SEQ ID NO: 137075 - RNA, 19 nt, Artificial Sequence
  Description of Artificial Sequence: Synthetic oligonucleotide
  Antisense strand to SEQ ID NO: 137074
auggucagaggguuccaga

SEQ ID NO: 137076 - RNA, 19 nt, Artificial Sequence
  Description of Artificial Sequence: Synthetic oligonucleotide
  Sense strand starting at position 374 of SEQ ID NO: 1760
ggacgagcucucugaggga

SEQ ID NO: 137077 - RNA, 19 nt, Artificial Sequence
  Description of Artificial Sequence: Synthetic oligonucleotide
  Antisense strand to SEQ ID NO: 137076
ucccucagagagcucgucc

SEQ ID NO: 137078 - RNA, 19 nt, Artificial Sequence
  Description of Artificial Sequence: Synthetic oligonucleotide
  Sense strand starting at position 2 of SEQ ID NO: 1760
cugcuugacccagacacau

SEQ ID NO: 137079 - RNA, 19 nt, Artificial Sequence
  Description of Artificial Sequence: Synthetic oligonucleotide
  Antisense strand to SEQ ID NO: 137078
augugucugggucaagcag

SEQ ID NO: 137080 - RNA, 19 nt, Artificial Sequence
  Description of Artificial Sequence: Synthetic oligonucleotide
  Sense strand starting at position 58 of SEQ ID NO: 1761
gaaaguggcaccugagguu

SEQ ID NO: 137081 - RNA, 19 nt, Artificial Sequence
  Description of Artificial Sequence: Synthetic oligonucleotide
  Antisense strand to SEQ ID NO: 137080
aaccucaggugccacuuuc

SEQ ID NO: 137082 - RNA, 19 nt, Artificial Sequence
  Description of Artificial Sequence: Synthetic oligonucleotide
  Sense strand starting at position 65 of SEQ ID NO: 1761
gcaccugagguugaaugua

SEQ ID NO: 137083 - RNA, 19 nt, Artificial Sequence
  Description of Artificial Sequence: Synthetic oligonucleotide
  Antisense strand to SEQ ID NO: 137082
uacauucaaccucaggugc

SEQ ID NO: 137084 - RNA, 19 nt, Artificial Sequence
  Description of Artificial Sequence: Synthetic oligonucleotide
  Sense strand starting at position 73 of SEQ ID NO: 1761
gguugaauguaacuccaaa

SEQ ID NO: 137085 - RNA, 19 nt, Artificial Sequence
  Description of Artificial Sequence: Synthetic oligonucleotide
  Antisense strand to SEQ ID NO: 137084
uuuggaguuacauucaacc

SEQ ID NO: 137086 - RNA, 19 nt, Artificial Sequence
  Description of Artificial Sequence: Synthetic oligonucleotide
  Sense strand starting at position 339 of SEQ ID NO: 1761
agaacaauucuguggccca

SEQ ID NO: 137087 - RNA, 19 nt, Artificial Sequence
  Description of Artificial Sequence: Synthetic oligonucleotide
  Antisense strand to SEQ ID NO: 137086
ugggccacagaauuguucu

SEQ ID NO: 137088 - RNA, 19 nt, Artificial Sequence
  Description of Artificial Sequence: Synthetic oligonucleotide
  Sense strand starting at position 436 of SEQ ID NO: 1761
uugugagcagacuguauaa

SEQ ID NO: 137089 - RNA, 19 nt, Artificial Sequence
  Description of Artificial Sequence: Synthetic oligonucleotide
  Antisense strand to SEQ ID NO: 137088
uuauacagucugcucacaa

SEQ ID NO: 137090 - RNA, 19 nt, Artificial Sequence
  Description of Artificial Sequence: Synthetic oligonucleotide
  Sense strand starting at position 529 of SEQ ID NO: 1761
uuugauaagcuuggaaaua

SEQ ID NO: 137091 - RNA, 19 nt, Artificial Sequence
  Description of Artificial Sequence: Synthetic oligonucleotide
  Antisense strand to SEQ ID NO: 137090
uauuuccaagcuuaucaaa

SEQ ID NO: 137092 - RNA, 19 nt, Artificial Sequence
  Description of Artificial Sequence: Synthetic oligonucleotide
  Sense strand starting at position 553 of SEQ ID NO: 1761
uuagauuaggcuuacagua

SEQ ID NO: 137093 - RNA, 19 nt, Artificial Sequence
  Description of Artificial Sequence: Synthetic oligonucleotide
  Antisense strand to SEQ ID NO: 137092
uacuguaagccuaaucuaa

SEQ ID NO: 137094 - RNA, 19 nt, Artificial Sequence
  Description of Artificial Sequence: Synthetic oligonucleotide
  Sense strand starting at position 558 of SEQ ID NO: 1761
uuaggcuuacaguauuaua

SEQ ID NO: 137095 - RNA, 19 nt, Artificial Sequence
  Description of Artificial Sequence: Synthetic oligonucleotide
  Antisense strand to SEQ ID NO: 137094
uauaauacuguaagccuaa

SEQ ID NO: 137096 - RNA, 19 nt, Artificial Sequence
  Description of Artificial Sequence: Synthetic oligonucleotide
  Sense strand starting at position 586 of SEQ ID NO: 1761
uuucuuugagaaggcuaaa

SEQ ID NO: 137097 - RNA, 19 nt, Artificial Sequence
  Description of Artificial Sequence: Synthetic oligonucleotide
  Antisense strand to SEQ ID NO: 137096
uuuagccuucucaaagaaa

SEQ ID NO: 137098 - RNA, 19 nt, Artificial Sequence
  Description of Artificial Sequence: Synthetic oligonucleotide
  Sense strand starting at position 697 of SEQ ID NO: 1761
ccuugaaguggguaaguau

SEQ ID NO: 137099 - RNA, 19 nt, Artificial Sequence
  Description of Artificial Sequence: Synthetic oligonucleotide
  Antisense strand to SEQ ID NO: 137098
auacuuacccacuucaagg

SEQ ID NO: 137100 - RNA, 19 nt, Artificial Sequence
  Description of Artificial Sequence: Synthetic oligonucleotide
  Sense strand starting at position 883 of SEQ ID NO: 1761
ggacaaacuuacguguuga

SEQ ID NO: 137101 - RNA, 19 nt, Artificial Sequence
  Description of Artificial Sequence: Synthetic oligonucleotide
  Antisense strand to SEQ ID NO: 137100
ucaacacguaaguuugucc

SEQ ID NO: 137102 - RNA, 19 nt, Artificial Sequence
  Description of Artificial Sequence: Synthetic oligonucleotide
  Sense strand starting at position 884 of SEQ ID NO: 1761
gacaaacuuacguguugag

SEQ ID NO: 137103 - RNA, 19 nt, Artificial Sequence
  Description of Artificial Sequence: Synthetic oligonucleotide
  Antisense strand to SEQ ID NO: 137102
cucaacacguaaguuuguc

SEQ ID NO: 137104 - RNA, 19 nt, Artificial Sequence
  Description of Artificial Sequence: Synthetic oligonucleotide
  Sense strand starting at position 914 of SEQ ID NO: 1761
auagaauccuguccgggua

SEQ ID NO: 137105 - RNA, 19 nt, Artificial Sequence
  Description of Artificial Sequence: Synthetic oligonucleotide
  Antisense strand to SEQ ID NO: 137104
uacccggacaggauucuau

SEQ ID NO: 137106 - RNA, 19 nt, Artificial Sequence
  Description of Artificial Sequence: Synthetic oligonucleotide
  Sense strand starting at position 1032 of SEQ ID NO: 1761
auaaaucauucucuagugu

SEQ ID NO: 137107 - RNA, 19 nt, Artificial Sequence
  Description of Artificial Sequence: Synthetic oligonucleotide
  Antisense strand to SEQ ID NO: 137106
acacuagagaaugauuuau

SEQ ID NO: 137108 - RNA, 19 nt, Artificial Sequence
  Description of Artificial Sequence: Synthetic oligonucleotide
  Sense strand starting at position 1074 of SEQ ID NO: 1761
auuguuugacuaugaauca

SEQ ID NO: 137109 - RNA, 19 nt, Artificial Sequence
  Description of Artificial Sequence: Synthetic oligonucleotide
  Antisense strand to SEQ ID NO: 137108
ugauucauagucaaacaau

SEQ ID NO: 137110 - RNA, 19 nt, Artificial Sequence
  Description of Artificial Sequence: Synthetic oligonucleotide
  Sense strand starting at position 1117 of SEQ ID NO: 1761
auauauagguagucaugga

SEQ ID NO: 137111 - RNA, 19 nt, Artificial Sequence
  Description of Artificial Sequence: Synthetic oligonucleotide
  Antisense strand to SEQ ID NO: 137110
uccaugacuaccuauauau

SEQ ID NO: 137112 - RNA, 19 nt, Artificial Sequence
  Description of Artificial Sequence: Synthetic oligonucleotide
  Sense strand starting at position 1121 of SEQ ID NO: 1761
auagguagucauggaaaua

SEQ ID NO: 137113 - RNA, 19 nt, Artificial Sequence
  Description of Artificial Sequence: Synthetic oligonucleotide
  Antisense strand to SEQ ID NO: 137112
uauuuccaugacuaccuau

SEQ ID NO: 137114 - RNA, 19 nt, Artificial Sequence
  Description of Artificial Sequence: Synthetic oligonucleotide
  Sense strand starting at position 1151 of SEQ ID NO: 1761
ccugccuuagaauggauaa

SEQ ID NO: 137115 - RNA, 19 nt, Artificial Sequence
  Description of Artificial Sequence: Synthetic oligonucleotide
  Antisense strand to SEQ ID NO: 137114
uuauccauucuaaggcagg

SEQ ID NO: 137116 - RNA, 19 nt, Artificial Sequence
  Description of Artificial Sequence: Synthetic oligonucleotide
  Sense strand starting at position 1249 of SEQ ID NO: 1761
uuaguuaacucuuuagaug

SEQ ID NO: 137117 - RNA, 19 nt, Artificial Sequence
  Description of Artificial Sequence: Synthetic oligonucleotide
  Antisense strand to SEQ ID NO: 137116
caucuaaagaguuaacuaa

SEQ ID NO: 137118 - RNA, 19 nt, Artificial Sequence
  Description of Artificial Sequence: Synthetic oligonucleotide
  Sense strand starting at position 1514 of SEQ ID NO: 1761
aucagauccugucuuauca

SEQ ID NO: 137119 - RNA, 19 nt, Artificial Sequence
  Description of Artificial Sequence: Synthetic oligonucleotide
  Antisense strand to SEQ ID NO: 137118
ugauaagacaggaucugau

SEQ ID NO: 137120 - RNA, 19 nt, Artificial Sequence
  Description of Artificial Sequence: Synthetic oligonucleotide
  Sense strand starting at position 1575 of SEQ ID NO: 1761
aggugagagugucucagau

SEQ ID NO: 137121 - RNA, 19 nt, Artificial Sequence
  Description of Artificial Sequence: Synthetic oligonucleotide
  Antisense strand to SEQ ID NO: 137120
aucugagacacucucaccu

SEQ ID NO: 137122 - RNA, 19 nt, Artificial Sequence
  Description of Artificial Sequence: Synthetic oligonucleotide
  Sense strand starting at position 1597 of SEQ ID NO: 1761
uuaaguaacuggcucauaa

SEQ ID NO: 137123 - RNA, 19 nt, Artificial Sequence
  Description of Artificial Sequence: Synthetic oligonucleotide
  Antisense strand to SEQ ID NO: 137122
uuaugagccaguuacuuaa

SEQ ID NO: 137124 - RNA, 19 nt, Artificial Sequence
  Description of Artificial Sequence: Synthetic oligonucleotide
  Sense strand starting at position 1637 of SEQ ID NO: 1761
cuggaauauccacggaguu

SEQ ID NO: 137125 - RNA, 19 nt, Artificial Sequence
  Description of Artificial Sequence: Synthetic oligonucleotide
  Antisense strand to SEQ ID NO: 137124
aacuccguggauauuccag

SEQ ID NO: 137126 - RNA, 19 nt, Artificial Sequence
  Description of Artificial Sequence: Synthetic oligonucleotide
  Sense strand starting at position 1639 of SEQ ID NO: 1761
ggaauauccacggaguucu

SEQ ID NO: 137127 - RNA, 19 nt, Artificial Sequence
  Description of Artificial Sequence: Synthetic oligonucleotide
  Antisense strand to SEQ ID NO: 137126
agaacuccguggauauucc

SEQ ID NO: 137128 - RNA, 19 nt, Artificial Sequence
  Description of Artificial Sequence: Synthetic oligonucleotide
  Sense strand starting at position 1701 of SEQ ID NO: 1761
ucucuauucggagagaagu

SEQ ID NO: 137129 - RNA, 19 nt, Artificial Sequence
  Description of Artificial Sequence: Synthetic oligonucleotide
  Antisense strand to SEQ ID NO: 137128
acuucucuccgaauagaga

SEQ ID NO: 137130 - RNA, 19 nt, Artificial Sequence
  Description of Artificial Sequence: Synthetic oligonucleotide
  Sense strand starting at position 1718 of SEQ ID NO: 1761
gucggaguacugggauaga

SEQ ID NO: 137131 - RNA, 19 nt, Artificial Sequence
  Description of Artificial Sequence: Synthetic oligonucleotide
  Antisense strand to SEQ ID NO: 137130
ucuaucccaguacuccgac

SEQ ID NO: 137132 - RNA, 19 nt, Artificial Sequence
  Description of Artificial Sequence: Synthetic oligonucleotide
  Sense strand starting at position 1991 of SEQ ID NO: 1761
acaauuggucgcuaaccga

SEQ ID NO: 137133 - RNA, 19 nt, Artificial Sequence
  Description of Artificial Sequence: Synthetic oligonucleotide
  Antisense strand to SEQ ID NO: 137132
ucgguuagcgaccaauugu

SEQ ID NO: 137134 - RNA, 19 nt, Artificial Sequence
  Description of Artificial Sequence: Synthetic oligonucleotide
  Sense strand starting at position 2050 of SEQ ID NO: 1761
ugacgaaaugacuguuucu

SEQ ID NO: 137135 - RNA, 19 nt, Artificial Sequence
  Description of Artificial Sequence: Synthetic oligonucleotide
  Antisense strand to SEQ ID NO: 137134
agaaacagucauuucguca

SEQ ID NO: 137136 - RNA, 19 nt, Artificial Sequence
  Description of Artificial Sequence: Synthetic oligonucleotide
  Sense strand starting at position 3046 of SEQ ID NO: 1761
ccaagauuaugaguuguga

SEQ ID NO: 137137 - RNA, 19 nt, Artificial Sequence
  Description of Artificial Sequence: Synthetic oligonucleotide
  Antisense strand to SEQ ID NO: 137136
ucacaacucauaaucuugg

SEQ ID NO: 137138 - RNA, 19 nt, Artificial Sequence
  Description of Artificial Sequence: Synthetic oligonucleotide
  Sense strand starting at position 3054 of SEQ ID NO: 1761
augaguugugaccauggau

SEQ ID NO: 137139 - RNA, 19 nt, Artificial Sequence
  Description of Artificial Sequence: Synthetic oligonucleotide
  Antisense strand to SEQ ID NO: 137138
auccauggucacaacucau

SEQ ID NO: 137140 - RNA, 19 nt, Artificial Sequence
  Description of Artificial Sequence: Synthetic oligonucleotide
  Sense strand starting at position 3057 of SEQ ID NO: 1761
aguugugaccauggaucaa

SEQ ID NO: 137141 - RNA, 19 nt, Artificial Sequence
  Description of Artificial Sequence: Synthetic oligonucleotide
  Antisense strand to SEQ ID NO: 137140
uugauccauggucacaacu

SEQ ID NO: 137142 - RNA, 19 nt, Artificial Sequence
  Description of Artificial Sequence: Synthetic oligonucleotide
  Sense strand starting at position 3158 of SEQ ID NO: 1761
aggaauuaauuagauggaa

SEQ ID NO: 137143 - RNA, 19 nt, Artificial Sequence
  Description of Artificial Sequence: Synthetic oligonucleotide
  Antisense strand to SEQ ID NO: 137142
uuccaucuaauuaauuccu

SEQ ID NO: 137144 - RNA, 19 nt, Artificial Sequence
  Description of Artificial Sequence: Synthetic oligonucleotide
  Sense strand starting at position 3368 of SEQ ID NO: 1761
aguccuuagcauuacagga

SEQ ID NO: 137145 - RNA, 19 nt, Artificial Sequence
  Description of Artificial Sequence: Synthetic oligonucleotide
  Antisense strand to SEQ ID NO: 137144
uccuguaaugcuaaggacu

SEQ ID NO: 137146 - RNA, 19 nt, Artificial Sequence
  Description of Artificial Sequence: Synthetic oligonucleotide
  Sense strand starting at position 3646 of SEQ ID NO: 1761
aacuaagagcguggaucau

SEQ ID NO: 137147 - RNA, 19 nt, Artificial Sequence
  Description of Artificial Sequence: Synthetic oligonucleotide
  Antisense strand to SEQ ID NO: 137146
augauccacgcucuuaguu

SEQ ID NO: 137148 - RNA, 19 nt, Artificial Sequence
  Description of Artificial Sequence: Synthetic oligonucleotide
  Sense strand starting at position 3715 of SEQ ID NO: 1761
guagguugcaucuacugaa

SEQ ID NO: 137149 - RNA, 19 nt, Artificial Sequence
  Description of Artificial Sequence: Synthetic oligonucleotide
  Antisense strand to SEQ ID NO: 137148
uucaguagaugcaaccuac

SEQ ID NO: 137150 - RNA, 19 nt, Artificial Sequence
  Description of Artificial Sequence: Synthetic oligonucleotide
  Sense strand starting at position 3761 of SEQ ID NO: 1761
auguuaguuuggguuagaa

SEQ ID NO: 137151 - RNA, 19 nt, Artificial Sequence
  Description of Artificial Sequence: Synthetic oligonucleotide
  Antisense strand to SEQ ID NO: 137150
uucuaacccaaacuaacau

SEQ ID NO: 137152 - RNA, 19 nt, Artificial Sequence
  Description of Artificial Sequence: Synthetic oligonucleotide
  Sense strand starting at position 3770 of SEQ ID NO: 1761
uggguuagaagccauguua

SEQ ID NO: 137153 - RNA, 19 nt, Artificial Sequence
  Description of Artificial Sequence: Synthetic oligonucleotide
  Antisense strand to SEQ ID NO: 137152
uaacauggcuucuaaccca

SEQ ID NO: 137154 - RNA, 19 nt, Artificial Sequence
  Description of Artificial Sequence: Synthetic oligonucleotide
  Sense strand starting at position 3861 of SEQ ID NO: 1761
uugucuuccuuaucagaca

SEQ ID NO: 137155 - RNA, 19 nt, Artificial Sequence
  Description of Artificial Sequence: Synthetic oligonucleotide
  Antisense strand to SEQ ID NO: 137154
ugucugauaaggaagacaa

SEQ ID NO: 137156 - RNA, 19 nt, Artificial Sequence
  Description of Artificial Sequence: Synthetic oligonucleotide
  Sense strand starting at position 3875 of SEQ ID NO: 1761
agacauuaauuguucuguu

SEQ ID NO: 137157 - RNA, 19 nt, Artificial Sequence
  Description of Artificial Sequence: Synthetic oligonucleotide
  Antisense strand to SEQ ID NO: 137156
aacagaacaauuaaugucu

SEQ ID NO: 137158 - RNA, 19 nt, Artificial Sequence
  Description of Artificial Sequence: Synthetic oligonucleotide
  Sense strand starting at position 3876 of SEQ ID NO: 1761
gacauuaauuguucuguug

SEQ ID NO: 137159 - RNA, 19 nt, Artificial Sequence
  Description of Artificial Sequence: Synthetic oligonucleotide
  Antisense strand to SEQ ID NO: 137158
caacagaacaauuaauguc

SEQ ID NO: 137160 - RNA, 19 nt, Artificial Sequence
  Description of Artificial Sequence: Synthetic oligonucleotide
  Sense strand starting at position 613 of SEQ ID NO: 1762
ucaaaugcuugcucaaaga

SEQ ID NO: 137161 - RNA, 19 nt, Artificial Sequence
  Description of Artificial Sequence: Synthetic oligonucleotide
  Antisense strand to SEQ ID NO: 137160
ucuuugagcaagcauuuga

SEQ ID NO: 137162 - RNA, 19 nt, Artificial Sequence
  Description of Artificial Sequence: Synthetic oligonucleotide
  Sense strand starting at position 731 of SEQ ID NO: 1762
cuuguauacgauuauuaca

SEQ ID NO: 137163 - RNA, 19 nt, Artificial Sequence
  Description of Artificial Sequence: Synthetic oligonucleotide
  Antisense strand to SEQ ID NO: 137162
uguaauaaucguauacaag

SEQ ID NO: 137164 - RNA, 19 nt, Artificial Sequence
  Description of Artificial Sequence: Synthetic oligonucleotide
  Sense strand starting at position 739 of SEQ ID NO: 1762
cgauuauuacaacgaagua

SEQ ID NO: 137165 - RNA, 19 nt, Artificial Sequence
  Description of Artificial Sequence: Synthetic oligonucleotide
  Antisense strand to SEQ ID NO: 137164
uacuucguuguaauaaucg

SEQ ID NO: 137166 - RNA, 19 nt, Artificial Sequence
  Description of Artificial Sequence: Synthetic oligonucleotide
  Sense strand starting at position 775 of SEQ ID NO: 1762
caucaaaggugguuagaau

SEQ ID NO: 137167 - RNA, 19 nt, Artificial Sequence
  Description of Artificial Sequence: Synthetic oligonucleotide
  Antisense strand to SEQ ID NO: 137166
auucuaaccaccuuugaug

SEQ ID NO: 137168 - RNA, 19 nt, Artificial Sequence
  Description of Artificial Sequence: Synthetic oligonucleotide
  Sense strand starting at position 784 of SEQ ID NO: 1762
ugguuagaauaucugaagu

SEQ ID NO: 137169 - RNA, 19 nt, Artificial Sequence
  Description of Artificial Sequence: Synthetic oligonucleotide
  Antisense strand to SEQ ID NO: 137168
acuucagauauucuaacca

SEQ ID NO: 137170 - RNA, 19 nt, Artificial Sequence
  Description of Artificial Sequence: Synthetic oligonucleotide
  Sense strand starting at position 822 of SEQ ID NO: 1762
gugucagacaccuaggcaa

SEQ ID NO: 137171 - RNA, 19 nt, Artificial Sequence
  Description of Artificial Sequence: Synthetic oligonucleotide
  Antisense strand to SEQ ID NO: 137170
uugccuaggugucugacac

SEQ ID NO: 137172 - RNA, 19 nt, Artificial Sequence
  Description of Artificial Sequence: Synthetic oligonucleotide
  Sense strand starting at position 883 of SEQ ID NO: 1762
acuaaauggcucugaaccu

SEQ ID NO: 137173 - RNA, 19 nt, Artificial Sequence
  Description of Artificial Sequence: Synthetic oligonucleotide
  Antisense strand to SEQ ID NO: 137172
agguucagagccauuuagu

SEQ ID NO: 137174 - RNA, 19 nt, Artificial Sequence
  Description of Artificial Sequence: Synthetic oligonucleotide
  Sense strand starting at position 900 of SEQ ID NO: 1762
cuguuuccucauugguaag

SEQ ID NO: 137175 - RNA, 19 nt, Artificial Sequence
  Description of Artificial Sequence: Synthetic oligonucleotide
  Antisense strand to SEQ ID NO: 137174
cuuaccaaugaggaaacag

SEQ ID NO: 137176 - RNA, 19 nt, Artificial Sequence
  Description of Artificial Sequence: Synthetic oligonucleotide
  Sense strand starting at position 906 of SEQ ID NO: 1762
ccucauugguaagagggaa

SEQ ID NO: 137177 - RNA, 19 nt, Artificial Sequence
  Description of Artificial Sequence: Synthetic oligonucleotide
  Antisense strand to SEQ ID NO: 137176
uucccucuuaccaaugagg

SEQ ID NO: 137178 - RNA, 19 nt, Artificial Sequence
  Description of Artificial Sequence: Synthetic oligonucleotide
  Sense strand starting at position 986 of SEQ ID NO: 1762
guugcauaauguguaacau

SEQ ID NO: 137179 - RNA, 19 nt, Artificial Sequence
  Description of Artificial Sequence: Synthetic oligonucleotide
  Antisense strand to SEQ ID NO: 137178
auguuacacauuaugcaac

SEQ ID NO: 137180 - RNA, 19 nt, Artificial Sequence
  Description of Artificial Sequence: Synthetic oligonucleotide
  Sense strand starting at position 1011 of SEQ ID NO: 1762
uuauaaugcuaagugcaua

SEQ ID NO: 137181 - RNA, 19 nt, Artificial Sequence
  Description of Artificial Sequence: Synthetic oligonucleotide
  Antisense strand to SEQ ID NO: 137180
uaugcacuuagcauuauaa

SEQ ID NO: 137182 - RNA, 19 nt, Artificial Sequence
  Description of Artificial Sequence: Synthetic oligonucleotide
  Sense strand starting at position 1024 of SEQ ID NO: 1762
ugcauaucguggucaauaa

SEQ ID NO: 137183 - RNA, 19 nt, Artificial Sequence
  Description of Artificial Sequence: Synthetic oligonucleotide
  Antisense strand to SEQ ID NO: 137182
uuauugaccacgauaugca

SEQ ID NO: 137184 - RNA, 19 nt, Artificial Sequence
  Description of Artificial Sequence: Synthetic oligonucleotide
  Sense strand starting at position 1025 of SEQ ID NO: 1762
gcauaucguggucaauaaa

SEQ ID NO: 137185 - RNA, 19 nt, Artificial Sequence
  Description of Artificial Sequence: Synthetic oligonucleotide
  Antisense strand to SEQ ID NO: 137184
uuuauugaccacgauaugc

SEQ ID NO: 137186 - RNA, 19 nt, Artificial Sequence
  Description of Artificial Sequence: Synthetic oligonucleotide
  Sense strand starting at position 1028 of SEQ ID NO: 1762
uaucguggucaauaaaugu

SEQ ID NO: 137187 - RNA, 19 nt, Artificial Sequence
  Description of Artificial Sequence: Synthetic oligonucleotide
  Antisense strand to SEQ ID NO: 137186
acauuuauugaccacgaua

SEQ ID NO: 137188 - RNA, 19 nt, Artificial Sequence
  Description of Artificial Sequence: Synthetic oligonucleotide
  Sense strand starting at position 1052 of SEQ ID NO: 1762
aucauuacugaauguuuga

SEQ ID NO: 137189 - RNA, 19 nt, Artificial Sequence
  Description of Artificial Sequence: Synthetic oligonucleotide
  Antisense strand to SEQ ID NO: 137188
ucaaacauucaguaaugau

SEQ ID NO: 137190 - RNA, 19 nt, Artificial Sequence
  Description of Artificial Sequence: Synthetic oligonucleotide
  Sense strand starting at position 1115 of SEQ ID NO: 1762
aguacuagauaucucuaca

SEQ ID NO: 137191 - RNA, 19 nt, Artificial Sequence
  Description of Artificial Sequence: Synthetic oligonucleotide
  Antisense strand to SEQ ID NO: 137190
uguagagauaucuaguacu

SEQ ID NO: 137192 - RNA, 19 nt, Artificial Sequence
  Description of Artificial Sequence: Synthetic oligonucleotide
  Sense strand starting at position 1227 of SEQ ID NO: 1762
aauaaauggcuuugugcua

SEQ ID NO: 137193 - RNA, 19 nt, Artificial Sequence
  Description of Artificial Sequence: Synthetic oligonucleotide
  Antisense strand to SEQ ID NO: 137192
uagcacaaagccauuuauu

SEQ ID NO: 137194 - RNA, 19 nt, Artificial Sequence
  Description of Artificial Sequence: Synthetic oligonucleotide
  Sense strand starting at position 1228 of SEQ ID NO: 1762
auaaauggcuuugugcuaa

SEQ ID NO: 137195 - RNA, 19 nt, Artificial Sequence
  Description of Artificial Sequence: Synthetic oligonucleotide
  Antisense strand to SEQ ID NO: 137194
uuagcacaaagccauuuau

SEQ ID NO: 137196 - RNA, 19 nt, Artificial Sequence
  Description of Artificial Sequence: Synthetic oligonucleotide
  Sense strand starting at position 1315 of SEQ ID NO: 1762
ugugaacuuguugagagua

SEQ ID NO: 137197 - RNA, 19 nt, Artificial Sequence
  Description of Artificial Sequence: Synthetic oligonucleotide
  Antisense strand to SEQ ID NO: 137196
uacucucaacaaguucaca

SEQ ID NO: 137198 - RNA, 19 nt, Artificial Sequence
  Description of Artificial Sequence: Synthetic oligonucleotide
  Sense strand starting at position 1320 of SEQ ID NO: 1762
acuuguugagaguagcauu

SEQ ID NO: 137199 - RNA, 19 nt, Artificial Sequence
  Description of Artificial Sequence: Synthetic oligonucleotide
  Antisense strand to SEQ ID NO: 137198
aaugcuacucucaacaagu

SEQ ID NO: 137200 - RNA, 19 nt, Artificial Sequence
  Description of Artificial Sequence: Synthetic oligonucleotide
  Sense strand starting at position 1342 of SEQ ID NO: 1762
aggguugugaguuaucaga

SEQ ID NO: 137201 - RNA, 19 nt, Artificial Sequence
  Description of Artificial Sequence: Synthetic oligonucleotide
  Antisense strand to SEQ ID NO: 137200
ucugauaacucacaacccu

SEQ ID NO: 137202 - RNA, 19 nt, Artificial Sequence
  Description of Artificial Sequence: Synthetic oligonucleotide
  Sense strand starting at position 1344 of SEQ ID NO: 1762
gguugugaguuaucagaaa

SEQ ID NO: 137203 - RNA, 19 nt, Artificial Sequence
  Description of Artificial Sequence: Synthetic oligonucleotide
  Antisense strand to SEQ ID NO: 137202
uuucugauaacucacaacc

SEQ ID NO: 137204 - RNA, 19 nt, Artificial Sequence
  Description of Artificial Sequence: Synthetic oligonucleotide
  Sense strand starting at position 1717 of SEQ ID NO: 1762
gcacuagugagacaaguua

SEQ ID NO: 137205 - RNA, 19 nt, Artificial Sequence
  Description of Artificial Sequence: Synthetic oligonucleotide
  Antisense strand to SEQ ID NO: 137204
uaacuugucucacuagugc

SEQ ID NO: 137206 - RNA, 19 nt, Artificial Sequence
  Description of Artificial Sequence: Synthetic oligonucleotide
  Sense strand starting at position 1827 of SEQ ID NO: 1762
ccaacuauuucugaggcca

SEQ ID NO: 137207 - RNA, 19 nt, Artificial Sequence
  Description of Artificial Sequence: Synthetic oligonucleotide
  Antisense strand to SEQ ID NO: 137206
uggccucagaaauaguugg

SEQ ID NO: 137208 - RNA, 19 nt, Artificial Sequence
  Description of Artificial Sequence: Synthetic oligonucleotide
  Sense strand starting at position 1870 of SEQ ID NO: 1762
ggcaauguuaauuauggca

SEQ ID NO: 137209 - RNA, 19 nt, Artificial Sequence
  Description of Artificial Sequence: Synthetic oligonucleotide
  Antisense strand to SEQ ID NO: 137208
ugccauaauuaacauugcc

SEQ ID NO: 137210 - RNA, 19 nt, Artificial Sequence
  Description of Artificial Sequence: Synthetic oligonucleotide
  Sense strand starting at position 1966 of SEQ ID NO: 1762
gccauaaaugugcaacgua

SEQ ID NO: 137211 - RNA, 19 nt, Artificial Sequence
  Description of Artificial Sequence: Synthetic oligonucleotide
  Antisense strand to SEQ ID NO: 137210
uacguugcacauuuauggc

SEQ ID NO: 137212 - RNA, 19 nt, Artificial Sequence
  Description of Artificial Sequence: Synthetic oligonucleotide
  Sense strand starting at position 1969 of SEQ ID NO: 1762
auaaaugugcaacguauau

SEQ ID NO: 137213 - RNA, 19 nt, Artificial Sequence
  Description of Artificial Sequence: Synthetic oligonucleotide
  Antisense strand to SEQ ID NO: 137212
auauacguugcacauuuau

SEQ ID NO: 137214 - RNA, 19 nt, Artificial Sequence
  Description of Artificial Sequence: Synthetic oligonucleotide
  Sense strand starting at position 2052 of SEQ ID NO: 1762
acacaaaugccugaaguca

SEQ ID NO: 137215 - RNA, 19 nt, Artificial Sequence
  Description of Artificial Sequence: Synthetic oligonucleotide
  Antisense strand to SEQ ID NO: 137214
ugacuucaggcauuugugu

SEQ ID NO: 137216 - RNA, 19 nt, Artificial Sequence
  Description of Artificial Sequence: Synthetic oligonucleotide
  Sense strand starting at position 2087 of SEQ ID NO: 1762
agcccaaagcgaugugaaa

SEQ ID NO: 137217 - RNA, 19 nt, Artificial Sequence
  Description of Artificial Sequence: Synthetic oligonucleotide
  Antisense strand to SEQ ID NO: 137216
uuucacaucgcuuugggcu

SEQ ID NO: 137218 - RNA, 19 nt, Artificial Sequence
  Description of Artificial Sequence: Synthetic oligonucleotide
  Sense strand starting at position 2089 of SEQ ID NO: 1762
cccaaagcgaugugaaaug

SEQ ID NO: 137219 - RNA, 19 nt, Artificial Sequence
  Description of Artificial Sequence: Synthetic oligonucleotide
  Antisense strand to SEQ ID NO: 137218
cauuucacaucgcuuuggg

SEQ ID NO: 137220 - RNA, 19 nt, Artificial Sequence
  Description of Artificial Sequence: Synthetic oligonucleotide
  Sense strand starting at position 2099 of SEQ ID NO: 1762
ugugaaaugucaccaauua

SEQ ID NO: 137221 - RNA, 19 nt, Artificial Sequence
  Description of Artificial Sequence: Synthetic oligonucleotide
  Antisense strand to SEQ ID NO: 137220
uaauuggugacauuucaca

SEQ ID NO: 137222 - RNA, 19 nt, Artificial Sequence
  Description of Artificial Sequence: Synthetic oligonucleotide
  Sense strand starting at position 2100 of SEQ ID NO: 1762
gugaaaugucaccaauuau

SEQ ID NO: 137223 - RNA, 19 nt, Artificial Sequence
  Description of Artificial Sequence: Synthetic oligonucleotide
  Antisense strand to SEQ ID NO: 137222
auaauuggugacauuucac

SEQ ID NO: 137224 - RNA, 19 nt, Artificial Sequence
  Description of Artificial Sequence: Synthetic oligonucleotide
  Sense strand starting at position 2133 of SEQ ID NO: 1762
uaugaagaauuggauaaag

SEQ ID NO: 137225 - RNA, 19 nt, Artificial Sequence
  Description of Artificial Sequence: Synthetic oligonucleotide
  Antisense strand to SEQ ID NO: 137224
cuuuauccaauucuucaua

SEQ ID NO: 137226 - RNA, 19 nt, Artificial Sequence
  Description of Artificial Sequence: Synthetic oligonucleotide
  Sense strand starting at position 3271 of SEQ ID NO: 1762
guaccuauaaauggguaga

SEQ ID NO: 137227 - RNA, 19 nt, Artificial Sequence
  Description of Artificial Sequence: Synthetic oligonucleotide
  Antisense strand to SEQ ID NO: 137226
ucuacccauuuauagguac

SEQ ID NO: 137228 - RNA, 19 nt, Artificial Sequence
  Description of Artificial Sequence: Synthetic oligonucleotide
  Sense strand starting at position 3284 of SEQ ID NO: 1762
gguagaggauauuaaucaa

SEQ ID NO: 137229 - RNA, 19 nt, Artificial Sequence
  Description of Artificial Sequence: Synthetic oligonucleotide
  Antisense strand to SEQ ID NO: 137228
uugauuaauauccucuacc

SEQ ID NO: 137230 - RNA, 19 nt, Artificial Sequence
  Description of Artificial Sequence: Synthetic oligonucleotide
  Sense strand starting at position 3344 of SEQ ID NO: 1762
uguguuggcccucaaugau

SEQ ID NO: 137231 - RNA, 19 nt, Artificial Sequence
  Description of Artificial Sequence: Synthetic oligonucleotide
  Antisense strand to SEQ ID NO: 137230
aucauugagggccaacaca

SEQ ID NO: 137232 - RNA, 19 nt, Artificial Sequence
  Description of Artificial Sequence: Synthetic oligonucleotide
  Sense strand starting at position 3523 of SEQ ID NO: 1762
cucacaagucuugaguagu

SEQ ID NO: 137233 - RNA, 19 nt, Artificial Sequence
  Description of Artificial Sequence: Synthetic oligonucleotide
  Antisense strand to SEQ ID NO: 137232
acuacucaagacuugugag

SEQ ID NO: 137234 - RNA, 19 nt, Artificial Sequence
  Description of Artificial Sequence: Synthetic oligonucleotide
  Sense strand starting at position 3526 of SEQ ID NO: 1762
acaagucuugaguaguugu

SEQ ID NO: 137235 - RNA, 19 nt, Artificial Sequence
  Description of Artificial Sequence: Synthetic oligonucleotide
  Antisense strand to SEQ ID NO: 137234
acaacuacucaagacuugu

SEQ ID NO: 137236 - RNA, 19 nt, Artificial Sequence
  Description of Artificial Sequence: Synthetic oligonucleotide
  Sense strand starting at position 3881 of SEQ ID NO: 1762
uaggccugcugcuuugaaa

SEQ ID NO: 137237 - RNA, 19 nt, Artificial Sequence
  Description of Artificial Sequence: Synthetic oligonucleotide
  Antisense strand to SEQ ID NO: 137236
uuucaaagcagcaggccua

SEQ ID NO: 137238 - RNA, 19 nt, Artificial Sequence
  Description of Artificial Sequence: Synthetic oligonucleotide
  Sense strand starting at position 3919 of SEQ ID NO: 1762
ggcucagucagagaacauc

SEQ ID NO: 137239 - RNA, 19 nt, Artificial Sequence
  Description of Artificial Sequence: Synthetic oligonucleotide
  Antisense strand to SEQ ID NO: 137238
gauguucucugacugagcc

SEQ ID NO: 137240 - RNA, 19 nt, Artificial Sequence
  Description of Artificial Sequence: Synthetic oligonucleotide
  Sense strand starting at position 124 of SEQ ID NO: 1763
accaacuucuaggagacau

SEQ ID NO: 137241 - RNA, 19 nt, Artificial Sequence
  Description of Artificial Sequence: Synthetic oligonucleotide
  Antisense strand to SEQ ID NO: 137240
augucuccuagaaguuggu

SEQ ID NO: 137242 - RNA, 19 nt, Artificial Sequence
  Description of Artificial Sequence: Synthetic oligonucleotide
  Sense strand starting at position 342 of SEQ ID NO: 1763
uggugugcuggcaagugau

SEQ ID NO: 137243 - RNA, 19 nt, Artificial Sequence
  Description of Artificial Sequence: Synthetic oligonucleotide
  Antisense strand to SEQ ID NO: 137242
aucacuugccagcacacca

SEQ ID NO: 137244 - RNA, 19 nt, Artificial Sequence
  Description of Artificial Sequence: Synthetic oligonucleotide
  Sense strand starting at position 348 of SEQ ID NO: 1763
gcuggcaagugauucugaa

SEQ ID NO: 137245 - RNA, 19 nt, Artificial Sequence
  Description of Artificial Sequence: Synthetic oligonucleotide
  Antisense strand to SEQ ID NO: 137244
uucagaaucacuugccagc

SEQ ID NO: 137246 - RNA, 19 nt, Artificial Sequence
  Description of Artificial Sequence: Synthetic oligonucleotide
  Sense strand starting at position 360 of SEQ ID NO: 1763
uucugaagcccugauaaug

SEQ ID NO: 137247 - RNA, 19 nt, Artificial Sequence
  Description of Artificial Sequence: Synthetic oligonucleotide
  Antisense strand to SEQ ID NO: 137246
cauuaucagggcuucagaa

SEQ ID NO: 137248 - RNA, 19 nt, Artificial Sequence
  Description of Artificial Sequence: Synthetic oligonucleotide
  Sense strand starting at position 372 of SEQ ID NO: 1763
gauaaugugucauucugua

SEQ ID NO: 137249 - RNA, 19 nt, Artificial Sequence
  Description of Artificial Sequence: Synthetic oligonucleotide
  Antisense strand to SEQ ID NO: 137248
uacagaaugacacauuauc

SEQ ID NO: 137250 - RNA, 19 nt, Artificial Sequence
  Description of Artificial Sequence: Synthetic oligonucleotide
  Sense strand starting at position 377 of SEQ ID NO: 1763
ugugucauucuguauccuu

SEQ ID NO: 137251 - RNA, 19 nt, Artificial Sequence
  Description of Artificial Sequence: Synthetic oligonucleotide
  Antisense strand to SEQ ID NO: 137250
aaggauacagaaugacaca

SEQ ID NO: 137252 - RNA, 19 nt, Artificial Sequence
  Description of Artificial Sequence: Synthetic oligonucleotide
  Sense strand starting at position 380 of SEQ ID NO: 1763
gucauucuguauccuuaau

SEQ ID NO: 137253 - RNA, 19 nt, Artificial Sequence
  Description of Artificial Sequence: Synthetic oligonucleotide
  Antisense strand to SEQ ID NO: 137252
auuaaggauacagaaugac

SEQ ID NO: 137254 - RNA, 19 nt, Artificial Sequence
  Description of Artificial Sequence: Synthetic oligonucleotide
  Sense strand starting at position 488 of SEQ ID NO: 1763
ccaacucagcaguguaaug

SEQ ID NO: 137255 - RNA, 19 nt, Artificial Sequence
  Description of Artificial Sequence: Synthetic oligonucleotide
  Antisense strand to SEQ ID NO: 137254
cauuacacugcugaguugg

SEQ ID NO: 137256 - RNA, 19 nt, Artificial Sequence
  Description of Artificial Sequence: Synthetic oligonucleotide
  Sense strand starting at position 490 of SEQ ID NO: 1763
aacucagcaguguaaugua

SEQ ID NO: 137257 - RNA, 19 nt, Artificial Sequence
  Description of Artificial Sequence: Synthetic oligonucleotide
  Antisense strand to SEQ ID NO: 137256
uacauuacacugcugaguu

SEQ ID NO: 137258 - RNA, 19 nt, Artificial Sequence
  Description of Artificial Sequence: Synthetic oligonucleotide
  Sense strand starting at position 499 of SEQ ID NO: 1763
guguaauguaguuuggcga

SEQ ID NO: 137259 - RNA, 19 nt, Artificial Sequence
  Description of Artificial Sequence: Synthetic oligonucleotide
  Antisense strand to SEQ ID NO: 137258
ucgccaaacuacauuacac

SEQ ID NO: 137260 - RNA, 19 nt, Artificial Sequence
  Description of Artificial Sequence: Synthetic oligonucleotide
  Sense strand starting at position 555 of SEQ ID NO: 1763
acacuagaauugcuaguca

SEQ ID NO: 137261 - RNA, 19 nt, Artificial Sequence
  Description of Artificial Sequence: Synthetic oligonucleotide
  Antisense strand to SEQ ID NO: 137260
ugacuagcaauucuagugu

SEQ ID NO: 137262 - RNA, 19 nt, Artificial Sequence
  Description of Artificial Sequence: Synthetic oligonucleotide
  Sense strand starting at position 584 of SEQ ID NO: 1763
cuugacaaauuccaggaaa

SEQ ID NO: 137263 - RNA, 19 nt, Artificial Sequence
  Description of Artificial Sequence: Synthetic oligonucleotide
  Antisense strand to SEQ ID NO: 137262
uuuccuggaauuugucaag

SEQ ID NO: 137264 - RNA, 19 nt, Artificial Sequence
  Description of Artificial Sequence: Synthetic oligonucleotide
  Sense strand starting at position 680 of SEQ ID NO: 1763
guuuaugcuccugaacacu

SEQ ID NO: 137265 - RNA, 19 nt, Artificial Sequence
  Description of Artificial Sequence: Synthetic oligonucleotide
  Antisense strand to SEQ ID NO: 137264
aguguucaggagcauaaac

SEQ ID NO: 137266 - RNA, 19 nt, Artificial Sequence
  Description of Artificial Sequence: Synthetic oligonucleotide
  Sense strand starting at position 779 of SEQ ID NO: 1763
uggcaucauugacaaauuu

SEQ ID NO: 137267 - RNA, 19 nt, Artificial Sequence
  Description of Artificial Sequence: Synthetic oligonucleotide
  Antisense strand to SEQ ID NO: 137266
aaauuugucaaugaugcca

SEQ ID NO: 137268 - RNA, 19 nt, Artificial Sequence
  Description of Artificial Sequence: Synthetic oligonucleotide
  Sense strand starting at position 807 of SEQ ID NO: 1763
cuuugaagucaugaaacgu

SEQ ID NO: 137269 - RNA, 19 nt, Artificial Sequence
  Description of Artificial Sequence: Synthetic oligonucleotide
  Antisense strand to SEQ ID NO: 137268
acguuucaugacuucaaag

SEQ ID NO: 137270 - RNA, 19 nt, Artificial Sequence
  Description of Artificial Sequence: Synthetic oligonucleotide
  Sense strand starting at position 813 of SEQ ID NO: 1763
agucaugaaacgugggaga

SEQ ID NO: 137271 - RNA, 19 nt, Artificial Sequence
  Description of Artificial Sequence: Synthetic oligonucleotide
  Antisense strand to SEQ ID NO: 137270
ucucccacguuucaugacu

SEQ ID NO: 137272 - RNA, 19 nt, Artificial Sequence
  Description of Artificial Sequence: Synthetic oligonucleotide
  Sense strand starting at position 976 of SEQ ID NO: 1763
caagaugcucccggaaaga

SEQ ID NO: 137273 - RNA, 19 nt, Artificial Sequence
  Description of Artificial Sequence: Synthetic oligonucleotide
  Antisense strand to SEQ ID NO: 137272
ucuuuccgggagcaucuug

SEQ ID NO: 137274 - RNA, 19 nt, Artificial Sequence
  Description of Artificial Sequence: Synthetic oligonucleotide
  Sense strand starting at position 1123 of SEQ ID NO: 1763
gcaccuucucaccgacaca

SEQ ID NO: 137275 - RNA, 19 nt, Artificial Sequence
  Description of Artificial Sequence: Synthetic oligonucleotide
  Antisense strand to SEQ ID NO: 137274
ugugucggugagaaggugc

SEQ ID NO: 137276 - RNA, 19 nt, Artificial Sequence
  Description of Artificial Sequence: Synthetic oligonucleotide
  Sense strand starting at position 2485 of SEQ ID NO: 1763
ugcaucuucgucgaagaua

SEQ ID NO: 137277 - RNA, 19 nt, Artificial Sequence
  Description of Artificial Sequence: Synthetic oligonucleotide
  Antisense strand to SEQ ID NO: 137276
uaucuucgacgaagaugca

SEQ ID NO: 137278 - RNA, 19 nt, Artificial Sequence
  Description of Artificial Sequence: Synthetic oligonucleotide
  Sense strand starting at position 2488 of SEQ ID NO: 1763
aucuucgucgaagauauua

SEQ ID NO: 137279 - RNA, 19 nt, Artificial Sequence
  Description of Artificial Sequence: Synthetic oligonucleotide
  Antisense strand to SEQ ID NO: 137278
uaauaucuucgacgaagau

SEQ ID NO: 137280 - RNA, 19 nt, Artificial Sequence
  Description of Artificial Sequence: Synthetic oligonucleotide
  Sense strand starting at position 2490 of SEQ ID NO: 1763
cuucgucgaagauauuaau

SEQ ID NO: 137281 - RNA, 19 nt, Artificial Sequence
  Description of Artificial Sequence: Synthetic oligonucleotide
  Antisense strand to SEQ ID NO: 137280
auuaauaucuucgacgaag

SEQ ID NO: 137282 - RNA, 19 nt, Artificial Sequence
  Description of Artificial Sequence: Synthetic oligonucleotide
  Sense strand starting at position 2673 of SEQ ID NO: 1763
uaucgauaacaacguauga

SEQ ID NO: 137283 - RNA, 19 nt, Artificial Sequence
  Description of Artificial Sequence: Synthetic oligonucleotide
  Antisense strand to SEQ ID NO: 137282
ucauacguuguuaucgaua

SEQ ID NO: 137284 - RNA, 19 nt, Artificial Sequence
  Description of Artificial Sequence: Synthetic oligonucleotide
  Sense strand starting at position 2675 of SEQ ID NO: 1763
ucgauaacaacguaugaaa

SEQ ID NO: 137285 - RNA, 19 nt, Artificial Sequence
  Description of Artificial Sequence: Synthetic oligonucleotide
  Antisense strand to SEQ ID NO: 137284
uuucauacguuguuaucga

SEQ ID NO: 137286 - RNA, 19 nt, Artificial Sequence
  Description of Artificial Sequence: Synthetic oligonucleotide
  Sense strand starting at position 3086 of SEQ ID NO: 1763
caccuuuaacgacgcagau

SEQ ID NO: 137287 - RNA, 19 nt, Artificial Sequence
  Description of Artificial Sequence: Synthetic oligonucleotide
  Antisense strand to SEQ ID NO: 137286
aucugcgucguuaaaggug

SEQ ID NO: 137288 - RNA, 19 nt, Artificial Sequence
  Description of Artificial Sequence: Synthetic oligonucleotide
  Sense strand starting at position 3088 of SEQ ID NO: 1763
ccuuuaacgacgcagauua

SEQ ID NO: 137289 - RNA, 19 nt, Artificial Sequence
  Description of Artificial Sequence: Synthetic oligonucleotide
  Antisense strand to SEQ ID NO: 137288
uaaucugcgucguuaaagg

SEQ ID NO: 137290 - RNA, 19 nt, Artificial Sequence
  Description of Artificial Sequence: Synthetic oligonucleotide
  Sense strand starting at position 3100 of SEQ ID NO: 1763
cagauuaucguagagauuc

SEQ ID NO: 137291 - RNA, 19 nt, Artificial Sequence
  Description of Artificial Sequence: Synthetic oligonucleotide
  Antisense strand to SEQ ID NO: 137290
gaaucucuacgauaaucug

SEQ ID NO: 137292 - RNA, 19 nt, Artificial Sequence
  Description of Artificial Sequence: Synthetic oligonucleotide
  Sense strand starting at position 3150 of SEQ ID NO: 1763
ggaagcuagccagaaauuc

SEQ ID NO: 137293 - RNA, 19 nt, Artificial Sequence
  Description of Artificial Sequence: Synthetic oligonucleotide
  Antisense strand to SEQ ID NO: 137292
gaauuucuggcuagcuucc

SEQ ID NO: 137294 - RNA, 19 nt, Artificial Sequence
  Description of Artificial Sequence: Synthetic oligonucleotide
  Sense strand starting at position 3158 of SEQ ID NO: 1763
gccagaaauucuuugccag

SEQ ID NO: 137295 - RNA, 19 nt, Artificial Sequence
  Description of Artificial Sequence: Synthetic oligonucleotide
  Antisense strand to SEQ ID NO: 137294
cuggcaaagaauuucuggc

SEQ ID NO: 137296 - RNA, 19 nt, Artificial Sequence
  Description of Artificial Sequence: Synthetic oligonucleotide
  Sense strand starting at position 3159 of SEQ ID NO: 1763
ccagaaauucuuugccaga

SEQ ID NO: 137297 - RNA, 19 nt, Artificial Sequence
  Description of Artificial Sequence: Synthetic oligonucleotide
  Antisense strand to SEQ ID NO: 137296
ucuggcaaagaauuucugg

SEQ ID NO: 137298 - RNA, 19 nt, Artificial Sequence
  Description of Artificial Sequence: Synthetic oligonucleotide
  Sense strand starting at position 3161 of SEQ ID NO: 1763
agaaauucuuugccagauc

SEQ ID NO: 137299 - RNA, 19 nt, Artificial Sequence
  Description of Artificial Sequence: Synthetic oligonucleotide
  Antisense strand to SEQ ID NO: 137298
gaucuggcaaagaauuucu

SEQ ID NO: 137300 - RNA, 19 nt, Artificial Sequence
  Description of Artificial Sequence: Synthetic oligonucleotide
  Sense strand starting at position 3456 of SEQ ID NO: 1763
gggagaagcagugaucugu

SEQ ID NO: 137301 - RNA, 19 nt, Artificial Sequence
  Description of Artificial Sequence: Synthetic oligonucleotide
  Antisense strand to SEQ ID NO: 137300
acagaucacugcuucuccc

SEQ ID NO: 137302 - RNA, 19 nt, Artificial Sequence
  Description of Artificial Sequence: Synthetic oligonucleotide
  Sense strand starting at position 3465 of SEQ ID NO: 1763
agugaucugucgucauuag

SEQ ID NO: 137303 - RNA, 19 nt, Artificial Sequence
  Description of Artificial Sequence: Synthetic oligonucleotide
  Antisense strand to SEQ ID NO: 137302
cuaaugacgacagaucacu

SEQ ID NO: 137304 - RNA, 19 nt, Artificial Sequence
  Description of Artificial Sequence: Synthetic oligonucleotide
  Sense strand starting at position 3466 of SEQ ID NO: 1763
gugaucugucgucauuaga

SEQ ID NO: 137305 - RNA, 19 nt, Artificial Sequence
  Description of Artificial Sequence: Synthetic oligonucleotide
  Antisense strand to SEQ ID NO: 137304
ucuaaugacgacagaucac

SEQ ID NO: 137306 - RNA, 19 nt, Artificial Sequence
  Description of Artificial Sequence: Synthetic oligonucleotide
  Sense strand starting at position 3553 of SEQ ID NO: 1763
aaagaaaggucuuaugacu

SEQ ID NO: 137307 - RNA, 19 nt, Artificial Sequence
  Description of Artificial Sequence: Synthetic oligonucleotide
  Antisense strand to SEQ ID NO: 137306
agucauaagaccuuucuuu

SEQ ID NO: 137308 - RNA, 19 nt, Artificial Sequence
  Description of Artificial Sequence: Synthetic oligonucleotide
  Sense strand starting at position 3662 of SEQ ID NO: 1763
cugugugggaguugagaga

SEQ ID NO: 137309 - RNA, 19 nt, Artificial Sequence
  Description of Artificial Sequence: Synthetic oligonucleotide
  Antisense strand to SEQ ID NO: 137308
ucucucaacucccacacag

SEQ ID NO: 137310 - RNA, 19 nt, Artificial Sequence
  Description of Artificial Sequence: Synthetic oligonucleotide
  Sense strand starting at position 3851 of SEQ ID NO: 1763
gucugugaguuauugauuc

SEQ ID NO: 137311 - RNA, 19 nt, Artificial Sequence
  Description of Artificial Sequence: Synthetic oligonucleotide
  Antisense strand to SEQ ID NO: 137310
gaaucaauaacucacagac

SEQ ID NO: 137312 - RNA, 19 nt, Artificial Sequence
  Description of Artificial Sequence: Synthetic oligonucleotide
  Sense strand starting at position 3858 of SEQ ID NO: 1763
aguuauugauucuuccgau

SEQ ID NO: 137313 - RNA, 19 nt, Artificial Sequence
  Description of Artificial Sequence: Synthetic oligonucleotide
  Antisense strand to SEQ ID NO: 137312
aucggaagaaucaauaacu

SEQ ID NO: 137314 - RNA, 19 nt, Artificial Sequence
  Description of Artificial Sequence: Synthetic oligonucleotide
  Sense strand starting at position 3859 of SEQ ID NO: 1763
guuauugauucuuccgaua

SEQ ID NO: 137315 - RNA, 19 nt, Artificial Sequence
  Description of Artificial Sequence: Synthetic oligonucleotide
  Antisense strand to SEQ ID NO: 137314
uaucggaagaaucaauaac

SEQ ID NO: 137316 - RNA, 19 nt, Artificial Sequence
  Description of Artificial Sequence: Synthetic oligonucleotide
  Sense strand starting at position 3864 of SEQ ID NO: 1763
ugauucuuccgauaaaguu

SEQ ID NO: 137317 - RNA, 19 nt, Artificial Sequence
  Description of Artificial Sequence: Synthetic oligonucleotide
  Antisense strand to SEQ ID NO: 137316
aacuuuaucggaagaauca

SEQ ID NO: 137318 - RNA, 19 nt, Artificial Sequence
  Description of Artificial Sequence: Synthetic oligonucleotide
  Sense strand starting at position 3978 of SEQ ID NO: 1763
ggcagucuagcagauuguu

SEQ ID NO: 137319 - RNA, 19 nt, Artificial Sequence
  Description of Artificial Sequence: Synthetic oligonucleotide
  Antisense strand to SEQ ID NO: 137318
aacaaucugcuagacugcc

SEQ ID NO: 137320 - RNA, 19 nt, Artificial Sequence
  Description of Artificial Sequence: Synthetic oligonucleotide
  Sense strand starting at position 61 of SEQ ID NO: 1764
uguagaugaucauacaaca

SEQ ID NO: 137321 - RNA, 19 nt, Artificial Sequence
  Description of Artificial Sequence: Synthetic oligonucleotide
  Antisense strand to SEQ ID NO: 137320
uguuguaugaucaucuaca

SEQ ID NO: 137322 - RNA, 19 nt, Artificial Sequence
  Description of Artificial Sequence: Synthetic oligonucleotide
  Sense strand starting at position 134 of SEQ ID NO: 1764
uuggcuccucgguaagcua

SEQ ID NO: 137323 - RNA, 19 nt, Artificial Sequence
  Description of Artificial Sequence: Synthetic oligonucleotide
  Antisense strand to SEQ ID NO: 137322
uagcuuaccgaggagccaa

SEQ ID NO: 137324 - RNA, 19 nt, Artificial Sequence
  Description of Artificial Sequence: Synthetic oligonucleotide
  Sense strand starting at position 212 of SEQ ID NO: 1764
agagaaugcuaucccagca

SEQ ID NO: 137325 - RNA, 19 nt, Artificial Sequence
  Description of Artificial Sequence: Synthetic oligonucleotide
  Antisense strand to SEQ ID NO: 137324
ugcugggauagcauucucu

SEQ ID NO: 137326 - RNA, 19 nt, Artificial Sequence
  Description of Artificial Sequence: Synthetic oligonucleotide
  Sense strand starting at position 359 of SEQ ID NO: 1764
accucuauccucuaagugu

SEQ ID NO: 137327 - RNA, 19 nt, Artificial Sequence
  Description of Artificial Sequence: Synthetic oligonucleotide
  Antisense strand to SEQ ID NO: 137326
acacuuagaggauagaggu

SEQ ID NO: 137328 - RNA, 19 nt, Artificial Sequence
  Description of Artificial Sequence: Synthetic oligonucleotide
  Sense strand starting at position 534 of SEQ ID NO: 1764
aguagaagcuggguuuguu

SEQ ID NO: 137329 - RNA, 19 nt, Artificial Sequence
  Description of Artificial Sequence: Synthetic oligonucleotide
  Antisense strand to SEQ ID NO: 137328
aacaaacccagcuucuacu

SEQ ID NO: 137330 - RNA, 19 nt, Artificial Sequence
  Description of Artificial Sequence: Synthetic oligonucleotide
  Sense strand starting at position 584 of SEQ ID NO: 1764
aguuaacacauugguggaa

SEQ ID NO: 137331 - RNA, 19 nt, Artificial Sequence
  Description of Artificial Sequence: Synthetic oligonucleotide
  Antisense strand to SEQ ID NO: 137330
uuccaccaauguguuaacu

SEQ ID NO: 137332 - RNA, 19 nt, Artificial Sequence
  Description of Artificial Sequence: Synthetic oligonucleotide
  Sense strand starting at position 585 of SEQ ID NO: 1764
guuaacacauugguggaaa

SEQ ID NO: 137333 - RNA, 19 nt, Artificial Sequence
  Description of Artificial Sequence: Synthetic oligonucleotide
  Antisense strand to SEQ ID NO: 137332
uuuccaccaauguguuaac

SEQ ID NO: 137334 - RNA, 19 nt, Artificial Sequence
  Description of Artificial Sequence: Synthetic oligonucleotide
  Sense strand starting at position 596 of SEQ ID NO: 1764
gguggaaacucuguaacug

SEQ ID NO: 137335 - RNA, 19 nt, Artificial Sequence
  Description of Artificial Sequence: Synthetic oligonucleotide
  Antisense strand to SEQ ID NO: 137334
caguuacagaguuuccacc

SEQ ID NO: 137336 - RNA, 19 nt, Artificial Sequence
  Description of Artificial Sequence: Synthetic oligonucleotide
  Sense strand starting at position 618 of SEQ ID NO: 1764
gcaccugcagucuagagau

SEQ ID NO: 137337 - RNA, 19 nt, Artificial Sequence
  Description of Artificial Sequence: Synthetic oligonucleotide
  Antisense strand to SEQ ID NO: 137336
aucucuagacugcaggugc

SEQ ID NO: 137338 - RNA, 19 nt, Artificial Sequence
  Description of Artificial Sequence: Synthetic oligonucleotide
  Sense strand starting at position 891 of SEQ ID NO: 1764
ggaaguuugaggugaagac

SEQ ID NO: 137339 - RNA, 19 nt, Artificial Sequence
  Description of Artificial Sequence: Synthetic oligonucleotide
  Antisense strand to SEQ ID NO: 137338
gucuucaccucaaacuucc

SEQ ID NO: 137340 - RNA, 19 nt, Artificial Sequence
  Description of Artificial Sequence: Synthetic oligonucleotide
  Sense strand starting at position 913 of SEQ ID NO: 1764
aucugaaauuguuuggcca

SEQ ID NO: 137341 - RNA, 19 nt, Artificial Sequence
  Description of Artificial Sequence: Synthetic oligonucleotide
  Antisense strand to SEQ ID NO: 137340
uggccaaacaauuucagau

SEQ ID NO: 137342 - RNA, 19 nt, Artificial Sequence
  Description of Artificial Sequence: Synthetic oligonucleotide
  Sense strand starting at position 1646 of SEQ ID NO: 1764
gggagguuuccgccgcgau

SEQ ID NO: 137343 - RNA, 19 nt, Artificial Sequence
  Description of Artificial Sequence: Synthetic oligonucleotide
  Antisense strand to SEQ ID NO: 137342
aucgcggcggaaaccuccc

SEQ ID NO: 137344 - RNA, 19 nt, Artificial Sequence
  Description of Artificial Sequence: Synthetic oligonucleotide
  Sense strand starting at position 1789 of SEQ ID NO: 1764
gccacuugaugucugucua

SEQ ID NO: 137345 - RNA, 19 nt, Artificial Sequence
  Description of Artificial Sequence: Synthetic oligonucleotide
  Antisense strand to SEQ ID NO: 137344
uagacagacaucaaguggc

SEQ ID NO: 137346 - RNA, 19 nt, Artificial Sequence
  Description of Artificial Sequence: Synthetic oligonucleotide
  Sense strand starting at position 2352 of SEQ ID NO: 1764
ggaugaaacucccuggagu

SEQ ID NO: 137347 - RNA, 19 nt, Artificial Sequence
  Description of Artificial Sequence: Synthetic oligonucleotide
  Antisense strand to SEQ ID NO: 137346
acuccagggaguuucaucc

SEQ ID NO: 137348 - RNA, 19 nt, Artificial Sequence
  Description of Artificial Sequence: Synthetic oligonucleotide
  Sense strand starting at position 2353 of SEQ ID NO: 1764
gaugaaacucccuggagua

SEQ ID NO: 137349 - RNA, 19 nt, Artificial Sequence
  Description of Artificial Sequence: Synthetic oligonucleotide
  Antisense strand to SEQ ID NO: 137348
uacuccagggaguuucauc

SEQ ID NO: 137350 - RNA, 19 nt, Artificial Sequence
  Description of Artificial Sequence: Synthetic oligonucleotide
  Sense strand starting at position 2354 of SEQ ID NO: 1764
augaaacucccuggaguaa

SEQ ID NO: 137351 - RNA, 19 nt, Artificial Sequence
  Description of Artificial Sequence: Synthetic oligonucleotide
  Antisense strand to SEQ ID NO: 137350
uuacuccagggaguuucau

SEQ ID NO: 137352 - RNA, 19 nt, Artificial Sequence
  Description of Artificial Sequence: Synthetic oligonucleotide
  Sense strand starting at position 2367 of SEQ ID NO: 1764
gaguaagagacguggaagu

SEQ ID NO: 137353 - RNA, 19 nt, Artificial Sequence
  Description of Artificial Sequence: Synthetic oligonucleotide
  Antisense strand to SEQ ID NO: 137352
acuuccacgucucuuacuc

SEQ ID NO: 137354 - RNA, 19 nt, Artificial Sequence
  Description of Artificial Sequence: Synthetic oligonucleotide
  Sense strand starting at position 2658 of SEQ ID NO: 1764
ucccuagaaucucugggua

SEQ ID NO: 137355 - RNA, 19 nt, Artificial Sequence
  Description of Artificial Sequence: Synthetic oligonucleotide
  Antisense strand to SEQ ID NO: 137354
uacccagagauucuaggga

SEQ ID NO: 137356 - RNA, 19 nt, Artificial Sequence
  Description of Artificial Sequence: Synthetic oligonucleotide
  Sense strand starting at position 2741 of SEQ ID NO: 1764
gccugugugcugagaguug

SEQ ID NO: 137357 - RNA, 19 nt, Artificial Sequence
  Description of Artificial Sequence: Synthetic oligonucleotide
  Antisense strand to SEQ ID NO: 137356
caacucucagcacacaggc

SEQ ID NO: 137358 - RNA, 19 nt, Artificial Sequence
  Description of Artificial Sequence: Synthetic oligonucleotide
  Sense strand starting at position 2743 of SEQ ID NO: 1764
cugugugcugagaguugga

SEQ ID NO: 137359 - RNA, 19 nt, Artificial Sequence
  Description of Artificial Sequence: Synthetic oligonucleotide
  Antisense strand to SEQ ID NO: 137358
uccaacucucagcacacag

SEQ ID NO: 137360 - RNA, 19 nt, Artificial Sequence
  Description of Artificial Sequence: Synthetic oligonucleotide
  Sense strand starting at position 2828 of SEQ ID NO: 1764
agggaacuuccuuagcacu

SEQ ID NO: 137361 - RNA, 19 nt, Artificial Sequence
  Description of Artificial Sequence: Synthetic oligonucleotide
  Antisense strand to SEQ ID NO: 137360
agugcuaaggaaguucccu

SEQ ID NO: 137362 - RNA, 19 nt, Artificial Sequence
  Description of Artificial Sequence: Synthetic oligonucleotide
  Sense strand starting at position 2972 of SEQ ID NO: 1764
agguuucuguagcugcaaa

SEQ ID NO: 137363 - RNA, 19 nt, Artificial Sequence
  Description of Artificial Sequence: Synthetic oligonucleotide
  Antisense strand to SEQ ID NO: 137362
uuugcagcuacagaaaccu

SEQ ID NO: 137364 - RNA, 19 nt, Artificial Sequence
  Description of Artificial Sequence: Synthetic oligonucleotide
  Sense strand starting at position 3004 of SEQ ID NO: 1764
ucuagauuucugugguccu

SEQ ID NO: 137365 - RNA, 19 nt, Artificial Sequence
  Description of Artificial Sequence: Synthetic oligonucleotide
  Antisense strand to SEQ ID NO: 137364
aggaccacagaaaucuaga

SEQ ID NO: 137366 - RNA, 19 nt, Artificial Sequence
  Description of Artificial Sequence: Synthetic oligonucleotide
  Sense strand starting at position 3045 of SEQ ID NO: 1764
ugggauuuaucucgguaag

SEQ ID NO: 137367 - RNA, 19 nt, Artificial Sequence
  Description of Artificial Sequence: Synthetic oligonucleotide
  Antisense strand to SEQ ID NO: 137366
cuuaccgagauaaauccca

SEQ ID NO: 137368 - RNA, 19 nt, Artificial Sequence
  Description of Artificial Sequence: Synthetic oligonucleotide
  Sense strand starting at position 3244 of SEQ ID NO: 1764
gggauuggcugagcucaga

SEQ ID NO: 137369 - RNA, 19 nt, Artificial Sequence
  Description of Artificial Sequence: Synthetic oligonucleotide
  Antisense strand to SEQ ID NO: 137368
ucugagcucagccaauccc

SEQ ID NO: 137370 - RNA, 19 nt, Artificial Sequence
  Description of Artificial Sequence: Synthetic oligonucleotide
  Sense strand starting at position 3374 of SEQ ID NO: 1764
cagguuaauugcuugaacu

SEQ ID NO: 137371 - RNA, 19 nt, Artificial Sequence
  Description of Artificial Sequence: Synthetic oligonucleotide
  Antisense strand to SEQ ID NO: 137370
aguucaagcaauuaaccug

SEQ ID NO: 137372 - RNA, 19 nt, Artificial Sequence
  Description of Artificial Sequence: Synthetic oligonucleotide
  Sense strand starting at position 3375 of SEQ ID NO: 1764
agguuaauugcuugaacuu

SEQ ID NO: 137373 - RNA, 19 nt, Artificial Sequence
  Description of Artificial Sequence: Synthetic oligonucleotide
  Antisense strand to SEQ ID NO: 137372
aaguucaagcaauuaaccu

SEQ ID NO: 137374 - RNA, 19 nt, Artificial Sequence
  Description of Artificial Sequence: Synthetic oligonucleotide
  Sense strand starting at position 3376 of SEQ ID NO: 1764
gguuaauugcuugaacuug

SEQ ID NO: 137375 - RNA, 19 nt, Artificial Sequence
  Description of Artificial Sequence: Synthetic oligonucleotide
  Antisense strand to SEQ ID NO: 137374
caaguucaagcaauuaacc

SEQ ID NO: 137376 - RNA, 19 nt, Artificial Sequence
  Description of Artificial Sequence: Synthetic oligonucleotide
  Sense strand starting at position 3452 of SEQ ID NO: 1764
cggccagacuccucucaaa

SEQ ID NO: 137377 - RNA, 19 nt, Artificial Sequence
  Description of Artificial Sequence: Synthetic oligonucleotide
  Antisense strand to SEQ ID NO: 137376
uuugagaggagucuggccg

SEQ ID NO: 137378 - RNA, 19 nt, Artificial Sequence
  Description of Artificial Sequence: Synthetic oligonucleotide
  Sense strand starting at position 3499 of SEQ ID NO: 1764
auaaauaaauccguaguga

SEQ ID NO: 137379 - RNA, 19 nt, Artificial Sequence
  Description of Artificial Sequence: Synthetic oligonucleotide
  Antisense strand to SEQ ID NO: 137378
ucacuacggauuuauuuau

SEQ ID NO: 137380 - RNA, 19 nt, Artificial Sequence
  Description of Artificial Sequence: Synthetic oligonucleotide
  Sense strand starting at position 3500 of SEQ ID NO: 1764
uaaauaaauccguagugac

SEQ ID NO: 137381 - RNA, 19 nt, Artificial Sequence
  Description of Artificial Sequence: Synthetic oligonucleotide
  Antisense strand to SEQ ID NO: 137380
gucacuacggauuuauuua

SEQ ID NO: 137382 - RNA, 19 nt, Artificial Sequence
  Description of Artificial Sequence: Synthetic oligonucleotide
  Sense strand starting at position 3539 of SEQ ID NO: 1764
ugccaaucucuagaacugu

SEQ ID NO: 137383 - RNA, 19 nt, Artificial Sequence
  Description of Artificial Sequence: Synthetic oligonucleotide
  Antisense strand to SEQ ID NO: 137382
acaguucuagagauuggca

SEQ ID NO: 137384 - RNA, 19 nt, Artificial Sequence
  Description of Artificial Sequence: Synthetic oligonucleotide
  Sense strand starting at position 3656 of SEQ ID NO: 1764
cgugcuggguuuccaaaga

SEQ ID NO: 137385 - RNA, 19 nt, Artificial Sequence
  Description of Artificial Sequence: Synthetic oligonucleotide
  Antisense strand to SEQ ID NO: 137384
ucuuuggaaacccagcacg

SEQ ID NO: 137386 - RNA, 19 nt, Artificial Sequence
  Description of Artificial Sequence: Synthetic oligonucleotide
  Sense strand starting at position 3689 of SEQ ID NO: 1764
gccugacuguguuccagaa

SEQ ID NO: 137387 - RNA, 19 nt, Artificial Sequence
  Description of Artificial Sequence: Synthetic oligonucleotide
  Antisense strand to SEQ ID NO: 137386
uucuggaacacagucaggc

SEQ ID NO: 137388 - RNA, 19 nt, Artificial Sequence
  Description of Artificial Sequence: Synthetic oligonucleotide
  Sense strand starting at position 3693 of SEQ ID NO: 1764
gacuguguuccagaaagug

SEQ ID NO: 137389 - RNA, 19 nt, Artificial Sequence
  Description of Artificial Sequence: Synthetic oligonucleotide
  Antisense strand to SEQ ID NO: 137388
cacuuucuggaacacaguc

SEQ ID NO: 137390 - RNA, 19 nt, Artificial Sequence
  Description of Artificial Sequence: Synthetic oligonucleotide
  Sense strand starting at position 3766 of SEQ ID NO: 1764
ugucucacugagggucaua

SEQ ID NO: 137391 - RNA, 19 nt, Artificial Sequence
  Description of Artificial Sequence: Synthetic oligonucleotide
  Antisense strand to SEQ ID NO: 137390
uaugacccucagugagaca

SEQ ID NO: 137392 - RNA, 19 nt, Artificial Sequence
  Description of Artificial Sequence: Synthetic oligonucleotide
  Sense strand starting at position 3780 of SEQ ID NO: 1764
ucauacaacuaggaagaua

SEQ ID NO: 137393 - RNA, 19 nt, Artificial Sequence
  Description of Artificial Sequence: Synthetic oligonucleotide
  Antisense strand to SEQ ID NO: 137392
uaucuuccuaguuguauga

SEQ ID NO: 137394 - RNA, 19 nt, Artificial Sequence
  Description of Artificial Sequence: Synthetic oligonucleotide
  Sense strand starting at position 3794 of SEQ ID NO: 1764
agauaugaucagggcccua

SEQ ID NO: 137395 - RNA, 19 nt, Artificial Sequence
  Description of Artificial Sequence: Synthetic oligonucleotide
  Antisense strand to SEQ ID NO: 137394
uagggcccugaucauaucu

SEQ ID NO: 137396 - RNA, 19 nt, Artificial Sequence
  Description of Artificial Sequence: Synthetic oligonucleotide
  Sense strand starting at position 3924 of SEQ ID NO: 1764
uugcucuuuccugggagau

SEQ ID NO: 137397 - RNA, 19 nt, Artificial Sequence
  Description of Artificial Sequence: Synthetic oligonucleotide
  Antisense strand to SEQ ID NO: 137396
aucucccaggaaagagcaa

SEQ ID NO: 137398 - RNA, 19 nt, Artificial Sequence
  Description of Artificial Sequence: Synthetic oligonucleotide
  Sense strand starting at position 3925 of SEQ ID NO: 1764
ugcucuuuccugggagaug

SEQ ID NO: 137399 - RNA, 19 nt, Artificial Sequence
  Description of Artificial Sequence: Synthetic oligonucleotide
  Antisense strand to SEQ ID NO: 137398
caucucccaggaaagagca

SEQ ID NO: 137400 - RNA, 19 nt, Artificial Sequence
  Description of Artificial Sequence: Synthetic oligonucleotide
  Sense strand starting at position 27 of SEQ ID NO: 1765
guuaccuuggcuuaggaau

SEQ ID NO: 137401 - RNA, 19 nt, Artificial Sequence
  Description of Artificial Sequence: Synthetic oligonucleotide
  Antisense strand to SEQ ID NO: 137400
auuccuaagccaagguaac

SEQ ID NO: 137402 - RNA, 19 nt, Artificial Sequence
  Description of Artificial Sequence: Synthetic oligonucleotide
  Sense strand starting at position 68 of SEQ ID NO: 1765
guauacacaugugcuagaa

SEQ ID NO: 137403 - RNA, 19 nt, Artificial Sequence
  Description of Artificial Sequence: Synthetic oligonucleotide
  Antisense strand to SEQ ID NO: 137402
uucuagcacauguguauac

SEQ ID NO: 137404 - RNA, 19 nt, Artificial Sequence
  Description of Artificial Sequence: Synthetic oligonucleotide
  Sense strand starting at position 176 of SEQ ID NO: 1765
caagauuauccauguugag

SEQ ID NO: 137405 - RNA, 19 nt, Artificial Sequence
  Description of Artificial Sequence: Synthetic oligonucleotide
  Antisense strand to SEQ ID NO: 137404
cucaacauggauaaucuug

SEQ ID NO: 137406 - RNA, 19 nt, Artificial Sequence
  Description of Artificial Sequence: Synthetic oligonucleotide
  Sense strand starting at position 354 of SEQ ID NO: 1765
agaacugaacuugguacau

SEQ ID NO: 137407 - RNA, 19 nt, Artificial Sequence
  Description of Artificial Sequence: Synthetic oligonucleotide
  Antisense strand to SEQ ID NO: 137406
auguaccaaguucaguucu

SEQ ID NO: 137408 - RNA, 19 nt, Artificial Sequence
  Description of Artificial Sequence: Synthetic oligonucleotide
  Sense strand starting at position 442 of SEQ ID NO: 1765
acaacaauccugugaggau

SEQ ID NO: 137409 - RNA, 19 nt, Artificial Sequence
  Description of Artificial Sequence: Synthetic oligonucleotide
  Antisense strand to SEQ ID NO: 137408
auccucacaggauuguugu

SEQ ID NO: 137410 - RNA, 19 nt, Artificial Sequence
  Description of Artificial Sequence: Synthetic oligonucleotide
  Sense strand starting at position 459 of SEQ ID NO: 1765
auagguaggacauguauua

SEQ ID NO: 137411 - RNA, 19 nt, Artificial Sequence
  Description of Artificial Sequence: Synthetic oligonucleotide
  Antisense strand to SEQ ID NO: 137410
uaauacauguccuaccuau

SEQ ID NO: 137412 - RNA, 19 nt, Artificial Sequence
  Description of Artificial Sequence: Synthetic oligonucleotide
  Sense strand starting at position 696 of SEQ ID NO: 1765
acccuauguuaucugauau

SEQ ID NO: 137413 - RNA, 19 nt, Artificial Sequence
  Description of Artificial Sequence: Synthetic oligonucleotide
  Antisense strand to SEQ ID NO: 137412
auaucagauaacauagggu

SEQ ID NO: 137414 - RNA, 19 nt, Artificial Sequence
  Description of Artificial Sequence: Synthetic oligonucleotide
  Sense strand starting at position 791 of SEQ ID NO: 1765
uguucuucuggguaaucua

SEQ ID NO: 137415 - RNA, 19 nt, Artificial Sequence
  Description of Artificial Sequence: Synthetic oligonucleotide
  Antisense strand to SEQ ID NO: 137414
uagauuacccagaagaaca

SEQ ID NO: 137416 - RNA, 19 nt, Artificial Sequence
  Description of Artificial Sequence: Synthetic oligonucleotide
  Sense strand starting at position 1520 of SEQ ID NO: 1765
ucuggaguuguauaugucu

SEQ ID NO: 137417 - RNA, 19 nt, Artificial Sequence
  Description of Artificial Sequence: Synthetic oligonucleotide
  Antisense strand to SEQ ID NO: 137416
agacauauacaacuccaga

SEQ ID NO: 137418 - RNA, 19 nt, Artificial Sequence
  Description of Artificial Sequence: Synthetic oligonucleotide
  Sense strand starting at position 1531 of SEQ ID NO: 1765
auaugucuucuguaggauu

SEQ ID NO: 137419 - RNA, 19 nt, Artificial Sequence
  Description of Artificial Sequence: Synthetic oligonucleotide
  Antisense strand to SEQ ID NO: 137418
aauccuacagaagacauau

SEQ ID NO: 137420 - RNA, 19 nt, Artificial Sequence
  Description of Artificial Sequence: Synthetic oligonucleotide
  Sense strand starting at position 1745 of SEQ ID NO: 1765
guauguaacuacccugaga

SEQ ID NO: 137421 - RNA, 19 nt, Artificial Sequence
  Description of Artificial Sequence: Synthetic oligonucleotide
  Antisense strand to SEQ ID NO: 137420
ucucaggguaguuacauac

SEQ ID NO: 137422 - RNA, 19 nt, Artificial Sequence
  Description of Artificial Sequence: Synthetic oligonucleotide
  Sense strand starting at position 1828 of SEQ ID NO: 1765
gggccucauccaggaacuu

SEQ ID NO: 137423 - RNA, 19 nt, Artificial Sequence
  Description of Artificial Sequence: Synthetic oligonucleotide
  Antisense strand to SEQ ID NO: 137422
aaguuccuggaugaggccc

SEQ ID NO: 137424 - RNA, 19 nt, Artificial Sequence
  Description of Artificial Sequence: Synthetic oligonucleotide
  Sense strand starting at position 1837 of SEQ ID NO: 1765
ccaggaacuucugcagaau

SEQ ID NO: 137425 - RNA, 19 nt, Artificial Sequence
  Description of Artificial Sequence: Synthetic oligonucleotide
  Antisense strand to SEQ ID NO: 137424
auucugcagaaguuccugg

SEQ ID NO: 137426 - RNA, 19 nt, Artificial Sequence
  Description of Artificial Sequence: Synthetic oligonucleotide
  Sense strand starting at position 1848 of SEQ ID NO: 1765
ugcagaauuucucuuuggu

SEQ ID NO: 137427 - RNA, 19 nt, Artificial Sequence
  Description of Artificial Sequence: Synthetic oligonucleotide
  Antisense strand to SEQ ID NO: 137426
accaaagagaaauucugca

SEQ ID NO: 137428 - RNA, 19 nt, Artificial Sequence
  Description of Artificial Sequence: Synthetic oligonucleotide
  Sense strand starting at position 2022 of SEQ ID NO: 1765
ggaaauuaguacguaacca

SEQ ID NO: 137429 - RNA, 19 nt, Artificial Sequence
  Description of Artificial Sequence: Synthetic oligonucleotide
  Antisense strand to SEQ ID NO: 137428
ugguuacguacuaauuucc

SEQ ID NO: 137430 - RNA, 19 nt, Artificial Sequence
  Description of Artificial Sequence: Synthetic oligonucleotide
  Sense strand starting at position 2040 of SEQ ID NO: 1765
accuucuguggucacauaa

SEQ ID NO: 137431 - RNA, 19 nt, Artificial Sequence
  Description of Artificial Sequence: Synthetic oligonucleotide
  Antisense strand to SEQ ID NO: 137430
uuaugugaccacagaaggu

SEQ ID NO: 137432 - RNA, 19 nt, Artificial Sequence
  Description of Artificial Sequence: Synthetic oligonucleotide
  Sense strand starting at position 2092 of SEQ ID NO: 1765
cuuccuucucagcaaagga

SEQ ID NO: 137433 - RNA, 19 nt, Artificial Sequence
  Description of Artificial Sequence: Synthetic oligonucleotide
  Antisense strand to SEQ ID NO: 137432
uccuuugcugagaaggaag

SEQ ID NO: 137434 - RNA, 19 nt, Artificial Sequence
  Description of Artificial Sequence: Synthetic oligonucleotide
  Sense strand starting at position 2377 of SEQ ID NO: 1765
gacagacacuguuuagagu

SEQ ID NO: 137435 - RNA, 19 nt, Artificial Sequence
  Description of Artificial Sequence: Synthetic oligonucleotide
  Antisense strand to SEQ ID NO: 137434
acucuaaacagugucuguc

SEQ ID NO: 137436 - RNA, 19 nt, Artificial Sequence
  Description of Artificial Sequence: Synthetic oligonucleotide
  Sense strand starting at position 2383 of SEQ ID NO: 1765
cacuguuuagagugaguga

SEQ ID NO: 137437 - RNA, 19 nt, Artificial Sequence
  Description of Artificial Sequence: Synthetic oligonucleotide
  Antisense strand to SEQ ID NO: 137436
ucacucacucuaaacagug

SEQ ID NO: 137438 - RNA, 19 nt, Artificial Sequence
  Description of Artificial Sequence: Synthetic oligonucleotide
  Sense strand starting at position 2386 of SEQ ID NO: 1765
uguuuagagugagugacau

SEQ ID NO: 137439 - RNA, 19 nt, Artificial Sequence
  Description of Artificial Sequence: Synthetic oligonucleotide
  Antisense strand to SEQ ID NO: 137438
augucacucacucuaaaca

SEQ ID NO: 137440 - RNA, 19 nt, Artificial Sequence
  Description of Artificial Sequence: Synthetic oligonucleotide
  Sense strand starting at position 2442 of SEQ ID NO: 1765
cagugugaucaaugagaaa

SEQ ID NO: 137441 - RNA, 19 nt, Artificial Sequence
  Description of Artificial Sequence: Synthetic oligonucleotide
  Antisense strand to SEQ ID NO: 137440
uuucucauugaucacacug

SEQ ID NO: 137442 - RNA, 19 nt, Artificial Sequence
  Description of Artificial Sequence: Synthetic oligonucleotide
  Sense strand starting at position 2687 of SEQ ID NO: 1765
aguguuggucuauauagga

SEQ ID NO: 137443 - RNA, 19 nt, Artificial Sequence
  Description of Artificial Sequence: Synthetic oligonucleotide
  Antisense strand to SEQ ID NO: 137442
uccuauauagaccaacacu

SEQ ID NO: 137444 - RNA, 19 nt, Artificial Sequence
  Description of Artificial Sequence: Synthetic oligonucleotide
  Sense strand starting at position 2739 of SEQ ID NO: 1765
accagacaguuagcucaau

SEQ ID NO: 137445 - RNA, 19 nt, Artificial Sequence
  Description of Artificial Sequence: Synthetic oligonucleotide
  Antisense strand to SEQ ID NO: 137444
auugagcuaacugucuggu

SEQ ID NO: 137446 - RNA, 19 nt, Artificial Sequence
  Description of Artificial Sequence: Synthetic oligonucleotide
  Sense strand starting at position 2740 of SEQ ID NO: 1765
ccagacaguuagcucaaua

SEQ ID NO: 137447 - RNA, 19 nt, Artificial Sequence
  Description of Artificial Sequence: Synthetic oligonucleotide
  Antisense strand to SEQ ID NO: 137446
uauugagcuaacugucugg

SEQ ID NO: 137448 - RNA, 19 nt, Artificial Sequence
  Description of Artificial Sequence: Synthetic oligonucleotide
  Sense strand starting at position 2778 of SEQ ID NO: 1765
guaaacugugauggaacaa

SEQ ID NO: 137449 - RNA, 19 nt, Artificial Sequence
  Description of Artificial Sequence: Synthetic oligonucleotide
  Antisense strand to SEQ ID NO: 137448
uuguuccaucacaguuuac

SEQ ID NO: 137450 - RNA, 19 nt, Artificial Sequence
  Description of Artificial Sequence: Synthetic oligonucleotide
  Sense strand starting at position 2820 of SEQ ID NO: 1765
ugcugacaacauuguaacu

SEQ ID NO: 137451 - RNA, 19 nt, Artificial Sequence
  Description of Artificial Sequence: Synthetic oligonucleotide
  Antisense strand to SEQ ID NO: 137450
aguuacaauguugucagca

SEQ ID NO: 137452 - RNA, 19 nt, Artificial Sequence
  Description of Artificial Sequence: Synthetic oligonucleotide
  Sense strand starting at position 2959 of SEQ ID NO: 1765
aaggcaggcucuucuagaa

SEQ ID NO: 137453 - RNA, 19 nt, Artificial Sequence
  Description of Artificial Sequence: Synthetic oligonucleotide
  Antisense strand to SEQ ID NO: 137452
uucuagaagagccugccuu

SEQ ID NO: 137454 - RNA, 19 nt, Artificial Sequence
  Description of Artificial Sequence: Synthetic oligonucleotide
  Sense strand starting at position 3073 of SEQ ID NO: 1765
aucuuuauugaaggcagaa

SEQ ID NO: 137455 - RNA, 19 nt, Artificial Sequence
  Description of Artificial Sequence: Synthetic oligonucleotide
  Antisense strand to SEQ ID NO: 137454
uucugccuucaauaaagau

SEQ ID NO: 137456 - RNA, 19 nt, Artificial Sequence
  Description of Artificial Sequence: Synthetic oligonucleotide
  Sense strand starting at position 3075 of SEQ ID NO: 1765
cuuuauugaaggcagaagu

SEQ ID NO: 137457 - RNA, 19 nt, Artificial Sequence
  Description of Artificial Sequence: Synthetic oligonucleotide
  Antisense strand to SEQ ID NO: 137456
acuucugccuucaauaaag

SEQ ID NO: 137458 - RNA, 19 nt, Artificial Sequence
  Description of Artificial Sequence: Synthetic oligonucleotide
  Sense strand starting at position 3138 of SEQ ID NO: 1765
ggaaauguguuguuaggac

SEQ ID NO: 137459 - RNA, 19 nt, Artificial Sequence
  Description of Artificial Sequence: Synthetic oligonucleotide
  Antisense strand to SEQ ID NO: 137458
guccuaacaacacauuucc

SEQ ID NO: 137460 - RNA, 19 nt, Artificial Sequence
  Description of Artificial Sequence: Synthetic oligonucleotide
  Sense strand starting at position 3307 of SEQ ID NO: 1765
ucgagauaucuugguuaua

SEQ ID NO: 137461 - RNA, 19 nt, Artificial Sequence
  Description of Artificial Sequence: Synthetic oligonucleotide
  Antisense strand to SEQ ID NO: 137460
uauaaccaagauaucucga

SEQ ID NO: 137462 - RNA, 19 nt, Artificial Sequence
  Description of Artificial Sequence: Synthetic oligonucleotide
  Sense strand starting at position 3308 of SEQ ID NO: 1765
cgagauaucuugguuauag

SEQ ID NO: 137463 - RNA, 19 nt, Artificial Sequence
  Description of Artificial Sequence: Synthetic oligonucleotide
  Antisense strand to SEQ ID NO: 137462
cuauaaccaagauaucucg

SEQ ID NO: 137464 - RNA, 19 nt, Artificial Sequence
  Description of Artificial Sequence: Synthetic oligonucleotide
  Sense strand starting at position 3309 of SEQ ID NO: 1765
gagauaucuugguuauaga

SEQ ID NO: 137465 - RNA, 19 nt, Artificial Sequence
  Description of Artificial Sequence: Synthetic oligonucleotide
  Antisense strand to SEQ ID NO: 137464
ucuauaaccaagauaucuc

SEQ ID NO: 137466 - RNA, 19 nt, Artificial Sequence
  Description of Artificial Sequence: Synthetic oligonucleotide
  Sense strand starting at position 3462 of SEQ ID NO: 1765
auuucuugcugcucuaagu

SEQ ID NO: 137467 - RNA, 19 nt, Artificial Sequence
  Description of Artificial Sequence: Synthetic oligonucleotide
  Antisense strand to SEQ ID NO: 137466
acuuagagcagcaagaaau

SEQ ID NO: 137468 - RNA, 19 nt, Artificial Sequence
  Description of Artificial Sequence: Synthetic oligonucleotide
  Sense strand starting at position 3520 of SEQ ID NO: 1765
ugggaaaucuuugauuuau

SEQ ID NO: 137469 - RNA, 19 nt, Artificial Sequence
  Description of Artificial Sequence: Synthetic oligonucleotide
  Antisense strand to SEQ ID NO: 137468
auaaaucaaagauuuccca

SEQ ID NO: 137470 - RNA, 19 nt, Artificial Sequence
  Description of Artificial Sequence: Synthetic oligonucleotide
  Sense strand starting at position 3585 of SEQ ID NO: 1765
uguguacauaguuaaagac

SEQ ID NO: 137471 - RNA, 19 nt, Artificial Sequence
  Description of Artificial Sequence: Synthetic oligonucleotide
  Antisense strand to SEQ ID NO: 137470
gucuuuaacuauguacaca

SEQ ID NO: 137472 - RNA, 19 nt, Artificial Sequence
  Description of Artificial Sequence: Synthetic oligonucleotide
  Sense strand starting at position 3619 of SEQ ID NO: 1765
agaaucaauuguguaaguu

SEQ ID NO: 137473 - RNA, 19 nt, Artificial Sequence
  Description of Artificial Sequence: Synthetic oligonucleotide
  Antisense strand to SEQ ID NO: 137472
aacuuacacaauugauucu

SEQ ID NO: 137474 - RNA, 19 nt, Artificial Sequence
  Description of Artificial Sequence: Synthetic oligonucleotide
  Sense strand starting at position 3620 of SEQ ID NO: 1765
gaaucaauuguguaaguuu

SEQ ID NO: 137475 - RNA, 19 nt, Artificial Sequence
  Description of Artificial Sequence: Synthetic oligonucleotide
  Antisense strand to SEQ ID NO: 137474
aaacuuacacaauugauuc

SEQ ID NO: 137476 - RNA, 19 nt, Artificial Sequence
  Description of Artificial Sequence: Synthetic oligonucleotide
  Sense strand starting at position 3775 of SEQ ID NO: 1765
ucuaaacauugucuuagga

SEQ ID NO: 137477 - RNA, 19 nt, Artificial Sequence
  Description of Artificial Sequence: Synthetic oligonucleotide
  Antisense strand to SEQ ID NO: 137476
uccuaagacaauguuuaga

SEQ ID NO: 137478 - RNA, 19 nt, Artificial Sequence
  Description of Artificial Sequence: Synthetic oligonucleotide
  Sense strand starting at position 3785 of SEQ ID NO: 1765
gucuuaggagauuggcaua

SEQ ID NO: 137479 - RNA, 19 nt, Artificial Sequence
  Description of Artificial Sequence: Synthetic oligonucleotide
  Antisense strand to SEQ ID NO: 137478
uaugccaaucuccuaagac

SEQ ID NO: 137480 - RNA, 19 nt, Artificial Sequence
  Description of Artificial Sequence: Synthetic oligonucleotide
  Sense strand starting at position 75 of SEQ ID NO: 1766
aaggguagagauuguggau

SEQ ID NO: 137481 - RNA, 19 nt, Artificial Sequence
  Description of Artificial Sequence: Synthetic oligonucleotide
  Antisense strand to SEQ ID NO: 137480
auccacaaucucuacccuu

SEQ ID NO: 137482 - RNA, 19 nt, Artificial Sequence
  Description of Artificial Sequence: Synthetic oligonucleotide
  Sense strand starting at position 77 of SEQ ID NO: 1766
ggguagagauuguggauga

SEQ ID NO: 137483 - RNA, 19 nt, Artificial Sequence
  Description of Artificial Sequence: Synthetic oligonucleotide
  Antisense strand to SEQ ID NO: 137482
ucauccacaaucucuaccc

SEQ ID NO: 137484 - RNA, 19 nt, Artificial Sequence
  Description of Artificial Sequence: Synthetic oligonucleotide
  Sense strand starting at position 78 of SEQ ID NO: 1766
gguagagauuguggaugaa

SEQ ID NO: 137485 - RNA, 19 nt, Artificial Sequence
  Description of Artificial Sequence: Synthetic oligonucleotide
  Antisense strand to SEQ ID NO: 137484
uucauccacaaucucuacc

SEQ ID NO: 137486 - RNA, 19 nt, Artificial Sequence
  Description of Artificial Sequence: Synthetic oligonucleotide
  Sense strand starting at position 211 of SEQ ID NO: 1766
auguguucucuaggacgga

SEQ ID NO: 137487 - RNA, 19 nt, Artificial Sequence
  Description of Artificial Sequence: Synthetic oligonucleotide
  Antisense strand to SEQ ID NO: 137486
uccguccuagagaacacau

SEQ ID NO: 137488 - RNA, 19 nt, Artificial Sequence
  Description of Artificial Sequence: Synthetic oligonucleotide
  Sense strand starting at position 212 of SEQ ID NO: 1766
uguguucucuaggacggaa

SEQ ID NO: 137489 - RNA, 19 nt, Artificial Sequence
  Description of Artificial Sequence: Synthetic oligonucleotide
  Antisense strand to SEQ ID NO: 137488
uuccguccuagagaacaca

SEQ ID NO: 137490 - RNA, 19 nt, Artificial Sequence
  Description of Artificial Sequence: Synthetic oligonucleotide
  Sense strand starting at position 245 of SEQ ID NO: 1766
agaagccaucucugagcua

SEQ ID NO: 137491 - RNA, 19 nt, Artificial Sequence
  Description of Artificial Sequence: Synthetic oligonucleotide
  Antisense strand to SEQ ID NO: 137490
uagcucagagauggcuucu

SEQ ID NO: 137492 - RNA, 19 nt, Artificial Sequence
  Description of Artificial Sequence: Synthetic oligonucleotide
  Sense strand starting at position 412 of SEQ ID NO: 1766
gucucuguccagggaggua

SEQ ID NO: 137493 - RNA, 19 nt, Artificial Sequence
  Description of Artificial Sequence: Synthetic oligonucleotide
  Antisense strand to SEQ ID NO: 137492
uaccucccuggacagagac

SEQ ID NO: 137494 - RNA, 19 nt, Artificial Sequence
  Description of Artificial Sequence: Synthetic oligonucleotide
  Sense strand starting at position 481 of SEQ ID NO: 1766
cuguaaccgucacaggaaa

SEQ ID NO: 137495 - RNA, 19 nt, Artificial Sequence
  Description of Artificial Sequence: Synthetic oligonucleotide
  Antisense strand to SEQ ID NO: 137494
uuuccugugacgguuacag

SEQ ID NO: 137496 - RNA, 19 nt, Artificial Sequence
  Description of Artificial Sequence: Synthetic oligonucleotide
  Sense strand starting at position 720 of SEQ ID NO: 1766
gagggucucugguagcaga

SEQ ID NO: 137497 - RNA, 19 nt, Artificial Sequence
  Description of Artificial Sequence: Synthetic oligonucleotide
  Antisense strand to SEQ ID NO: 137496
ucugcuaccagagacccuc

SEQ ID NO: 137498 - RNA, 19 nt, Artificial Sequence
  Description of Artificial Sequence: Synthetic oligonucleotide
  Sense strand starting at position 867 of SEQ ID NO: 1766
cgcacucccuccuagagau

SEQ ID NO: 137499 - RNA, 19 nt, Artificial Sequence
  Description of Artificial Sequence: Synthetic oligonucleotide
  Antisense strand to SEQ ID NO: 137498
aucucuaggagggagugcg

SEQ ID NO: 137500 - RNA, 19 nt, Artificial Sequence
  Description of Artificial Sequence: Synthetic oligonucleotide
  Sense strand starting at position 945 of SEQ ID NO: 1766
ucagauacuuacugaagca

SEQ ID NO: 137501 - RNA, 19 nt, Artificial Sequence
  Description of Artificial Sequence: Synthetic oligonucleotide
  Antisense strand to SEQ ID NO: 137500
ugcuucaguaaguaucuga

SEQ ID NO: 137502 - RNA, 19 nt, Artificial Sequence
  Description of Artificial Sequence: Synthetic oligonucleotide
  Sense strand starting at position 1015 of SEQ ID NO: 1766
gucuuugagggcugagaag

SEQ ID NO: 137503 - RNA, 19 nt, Artificial Sequence
  Description of Artificial Sequence: Synthetic oligonucleotide
  Antisense strand to SEQ ID NO: 137502
cuucucagcccucaaagac

SEQ ID NO: 137504 - RNA, 19 nt, Artificial Sequence
  Description of Artificial Sequence: Synthetic oligonucleotide
  Sense strand starting at position 1256 of SEQ ID NO: 1766
cuguguuucuccucugggu

SEQ ID NO: 137505 - RNA, 19 nt, Artificial Sequence
  Description of Artificial Sequence: Synthetic oligonucleotide
  Antisense strand to SEQ ID NO: 137504
acccagaggagaaacacag

SEQ ID NO: 137506 - RNA, 19 nt, Artificial Sequence
  Description of Artificial Sequence: Synthetic oligonucleotide
  Sense strand starting at position 1333 of SEQ ID NO: 1766
ugugcugucccacaaagaa

SEQ ID NO: 137507 - RNA, 19 nt, Artificial Sequence
  Description of Artificial Sequence: Synthetic oligonucleotide
  Antisense strand to SEQ ID NO: 137506
uucuuugugggacagcaca

SEQ ID NO: 137508 - RNA, 19 nt, Artificial Sequence
  Description of Artificial Sequence: Synthetic oligonucleotide
  Sense strand starting at position 2085 of SEQ ID NO: 1766
gucaaauggugacagcaaa

SEQ ID NO: 137509 - RNA, 19 nt, Artificial Sequence
  Description of Artificial Sequence: Synthetic oligonucleotide
  Antisense strand to SEQ ID NO: 137508
uuugcugucaccauuugac

SEQ ID NO: 137510 - RNA, 19 nt, Artificial Sequence
  Description of Artificial Sequence: Synthetic oligonucleotide
  Sense strand starting at position 2359 of SEQ ID NO: 1766
ggguggguuucccugagga

SEQ ID NO: 137511 - RNA, 19 nt, Artificial Sequence
  Description of Artificial Sequence: Synthetic oligonucleotide
  Antisense strand to SEQ ID NO: 137510
uccucagggaaacccaccc

SEQ ID NO: 137512 - RNA, 19 nt, Artificial Sequence
  Description of Artificial Sequence: Synthetic oligonucleotide
  Sense strand starting at position 2360 of SEQ ID NO: 1766
gguggguuucccugaggag

SEQ ID NO: 137513 - RNA, 19 nt, Artificial Sequence
  Description of Artificial Sequence: Synthetic oligonucleotide
  Antisense strand to SEQ ID NO: 137512
cuccucagggaaacccacc

SEQ ID NO: 137514 - RNA, 19 nt, Artificial Sequence
  Description of Artificial Sequence: Synthetic oligonucleotide
  Sense strand starting at position 2382 of SEQ ID NO: 1766
gccgauuagggcugggaaa

SEQ ID NO: 137515 - RNA, 19 nt, Artificial Sequence
  Description of Artificial Sequence: Synthetic oligonucleotide
  Antisense strand to SEQ ID NO: 137514
uuucccagcccuaaucggc

SEQ ID NO: 137516 - RNA, 19 nt, Artificial Sequence
  Description of Artificial Sequence: Synthetic oligonucleotide
  Sense strand starting at position 2596 of SEQ ID NO: 1766
agccuaugcugauuguuau

SEQ ID NO: 137517 - RNA, 19 nt, Artificial Sequence
  Description of Artificial Sequence: Synthetic oligonucleotide
  Antisense strand to SEQ ID NO: 137516
auaacaaucagcauaggcu

SEQ ID NO: 137518 - RNA, 19 nt, Artificial Sequence
  Description of Artificial Sequence: Synthetic oligonucleotide
  Sense strand starting at position 2597 of SEQ ID NO: 1766
gccuaugcugauuguuauc

SEQ ID NO: 137519 - RNA, 19 nt, Artificial Sequence
  Description of Artificial Sequence: Synthetic oligonucleotide
  Antisense strand to SEQ ID NO: 137518
gauaacaaucagcauaggc

SEQ ID NO: 137520 - RNA, 19 nt, Artificial Sequence
  Description of Artificial Sequence: Synthetic oligonucleotide
  Sense strand starting at position 2599 of SEQ ID NO: 1766
cuaugcugauuguuaucaa

SEQ ID NO: 137521 - RNA, 19 nt, Artificial Sequence
  Description of Artificial Sequence: Synthetic oligonucleotide
  Antisense strand to SEQ ID NO: 137520
uugauaacaaucagcauag

SEQ ID NO: 137522 - RNA, 19 nt, Artificial Sequence
  Description of Artificial Sequence: Synthetic oligonucleotide
  Sense strand starting at position 2600 of SEQ ID NO: 1766
uaugcugauuguuaucaag

SEQ ID NO: 137523 - RNA, 19 nt, Artificial Sequence
  Description of Artificial Sequence: Synthetic oligonucleotide
  Antisense strand to SEQ ID NO: 137522
cuugauaacaaucagcaua

SEQ ID NO: 137524 - RNA, 19 nt, Artificial Sequence
  Description of Artificial Sequence: Synthetic oligonucleotide
  Sense strand starting at position 2602 of SEQ ID NO: 1766
ugcugauuguuaucaagaa

SEQ ID NO: 137525 - RNA, 19 nt, Artificial Sequence
  Description of Artificial Sequence: Synthetic oligonucleotide
  Antisense strand to SEQ ID NO: 137524
uucuugauaacaaucagca

SEQ ID NO: 137526 - RNA, 19 nt, Artificial Sequence
  Description of Artificial Sequence: Synthetic oligonucleotide
  Sense strand starting at position 2603 of SEQ ID NO: 1766
gcugauuguuaucaagaac

SEQ ID NO: 137527 - RNA, 19 nt, Artificial Sequence
  Description of Artificial Sequence: Synthetic oligonucleotide
  Antisense strand to SEQ ID NO: 137526
guucuugauaacaaucagc

SEQ ID NO: 137528 - RNA, 19 nt, Artificial Sequence
  Description of Artificial Sequence: Synthetic oligonucleotide
  Sense strand starting at position 3004 of SEQ ID NO: 1766
gcucaugagggcugaggau

SEQ ID NO: 137529 - RNA, 19 nt, Artificial Sequence
  Description of Artificial Sequence: Synthetic oligonucleotide
  Antisense strand to SEQ ID NO: 137528
auccucagcccucaugagc

SEQ ID NO: 137530 - RNA, 19 nt, Artificial Sequence
  Description of Artificial Sequence: Synthetic oligonucleotide
  Sense strand starting at position 3043 of SEQ ID NO: 1766
gcacaagacaugcgucauc

SEQ ID NO: 137531 - RNA, 19 nt, Artificial Sequence
  Description of Artificial Sequence: Synthetic oligonucleotide
  Antisense strand to SEQ ID NO: 137530
gaugacgcaugucuugugc

SEQ ID NO: 137532 - RNA, 19 nt, Artificial Sequence
  Description of Artificial Sequence: Synthetic oligonucleotide
  Sense strand starting at position 3243 of SEQ ID NO: 1766
cucgaaucgauuuguguuc

SEQ ID NO: 137533 - RNA, 19 nt, Artificial Sequence
  Description of Artificial Sequence: Synthetic oligonucleotide
  Antisense strand to SEQ ID NO: 137532
gaacacaaaucgauucgag

SEQ ID NO: 137534 - RNA, 19 nt, Artificial Sequence
  Description of Artificial Sequence: Synthetic oligonucleotide
  Sense strand starting at position 3250 of SEQ ID NO: 1766
cgauuuguguuccuggguu

SEQ ID NO: 137535 - RNA, 19 nt, Artificial Sequence
  Description of Artificial Sequence: Synthetic oligonucleotide
  Antisense strand to SEQ ID NO: 137534
aacccaggaacacaaaucg

SEQ ID NO: 137536 - RNA, 19 nt, Artificial Sequence
  Description of Artificial Sequence: Synthetic oligonucleotide
  Sense strand starting at position 3252 of SEQ ID NO: 1766
auuuguguuccuggguuga

SEQ ID NO: 137537 - RNA, 19 nt, Artificial Sequence
  Description of Artificial Sequence: Synthetic oligonucleotide
  Antisense strand to SEQ ID NO: 137536
ucaacccaggaacacaaau

SEQ ID NO: 137538 - RNA, 19 nt, Artificial Sequence
  Description of Artificial Sequence: Synthetic oligonucleotide
  Sense strand starting at position 3254 of SEQ ID NO: 1766
uuguguuccuggguugaga

SEQ ID NO: 137539 - RNA, 19 nt, Artificial Sequence
  Description of Artificial Sequence: Synthetic oligonucleotide
  Antisense strand to SEQ ID NO: 137538
ucucaacccaggaacacaa

SEQ ID NO: 137540 - RNA, 19 nt, Artificial Sequence
  Description of Artificial Sequence: Synthetic oligonucleotide
  Sense strand starting at position 3256 of SEQ ID NO: 1766
guguuccuggguugagauu

SEQ ID NO: 137541 - RNA, 19 nt, Artificial Sequence
  Description of Artificial Sequence: Synthetic oligonucleotide
  Antisense strand to SEQ ID NO: 137540
aaucucaacccaggaacac

SEQ ID NO: 137542 - RNA, 19 nt, Artificial Sequence
  Description of Artificial Sequence: Synthetic oligonucleotide
  Sense strand starting at position 3265 of SEQ ID NO: 1766
gguugagauuuagguucua

SEQ ID NO: 137543 - RNA, 19 nt, Artificial Sequence
  Description of Artificial Sequence: Synthetic oligonucleotide
  Antisense strand to SEQ ID NO: 137542
uagaaccuaaaucucaacc

SEQ ID NO: 137544 - RNA, 19 nt, Artificial Sequence
  Description of Artificial Sequence: Synthetic oligonucleotide
  Sense strand starting at position 3300 of SEQ ID NO: 1766
gagaaaguauaguaauagu

SEQ ID NO: 137545 - RNA, 19 nt, Artificial Sequence
  Description of Artificial Sequence: Synthetic oligonucleotide
  Antisense strand to SEQ ID NO: 137544
acuauuacuauacuuucuc

SEQ ID NO: 137546 - RNA, 19 nt, Artificial Sequence
  Description of Artificial Sequence: Synthetic oligonucleotide
  Sense strand starting at position 3308 of SEQ ID NO: 1766
auaguaauaguuggaaauc

SEQ ID NO: 137547 - RNA, 19 nt, Artificial Sequence
  Description of Artificial Sequence: Synthetic oligonucleotide
  Antisense strand to SEQ ID NO: 137546
gauuuccaacuauuacuau

SEQ ID NO: 137548 - RNA, 19 nt, Artificial Sequence
  Description of Artificial Sequence: Synthetic oligonucleotide
  Sense strand starting at position 3309 of SEQ ID NO: 1766
uaguaauaguuggaaauca

SEQ ID NO: 137549 - RNA, 19 nt, Artificial Sequence
  Description of Artificial Sequence: Synthetic oligonucleotide
  Antisense strand to SEQ ID NO: 137548
ugauuuccaacuauuacua

SEQ ID NO: 137550 - RNA, 19 nt, Artificial Sequence
  Description of Artificial Sequence: Synthetic oligonucleotide
  Sense strand starting at position 3339 of SEQ ID NO: 1766
gcauaaugagucuaaacgu

SEQ ID NO: 137551 - RNA, 19 nt, Artificial Sequence
  Description of Artificial Sequence: Synthetic oligonucleotide
  Antisense strand to SEQ ID NO: 137550
acguuuagacucauuaugc

SEQ ID NO: 137552 - RNA, 19 nt, Artificial Sequence
  Description of Artificial Sequence: Synthetic oligonucleotide
  Sense strand starting at position 3345 of SEQ ID NO: 1766
ugagucuaaacguagcuua

SEQ ID NO: 137553 - RNA, 19 nt, Artificial Sequence
  Description of Artificial Sequence: Synthetic oligonucleotide
  Antisense strand to SEQ ID NO: 137552
uaagcuacguuuagacuca

SEQ ID NO: 137554 - RNA, 19 nt, Artificial Sequence
  Description of Artificial Sequence: Synthetic oligonucleotide
  Sense strand starting at position 3348 of SEQ ID NO: 1766
gucuaaacguagcuuauua

SEQ ID NO: 137555 - RNA, 19 nt, Artificial Sequence
  Description of Artificial Sequence: Synthetic oligonucleotide
  Antisense strand to SEQ ID NO: 137554
uaauaagcuacguuuagac

SEQ ID NO: 137556 - RNA, 19 nt, Artificial Sequence
  Description of Artificial Sequence: Synthetic oligonucleotide
  Sense strand starting at position 3815 of SEQ ID NO: 1766
gagagucagccuuguccca

SEQ ID NO: 137557 - RNA, 19 nt, Artificial Sequence
  Description of Artificial Sequence: Synthetic oligonucleotide
  Antisense strand to SEQ ID NO: 137556
ugggacaaggcugacucuc

SEQ ID NO: 137558 - RNA, 19 nt, Artificial Sequence
  Description of Artificial Sequence: Synthetic oligonucleotide
  Sense strand starting at position 3883 of SEQ ID NO: 1766
cgucuugacucucuuguuu

SEQ ID NO: 137559 - RNA, 19 nt, Artificial Sequence
  Description of Artificial Sequence: Synthetic oligonucleotide
  Antisense strand to SEQ ID NO: 137558
aaacaagagagucaagacg

SEQ ID NO: 137560 - RNA, 19 nt, Artificial Sequence
  Description of Artificial Sequence: Synthetic oligonucleotide
  Sense strand starting at position 42 of SEQ ID NO: 1767
ccagggugcccgugagaga

SEQ ID NO: 137561 - RNA, 19 nt, Artificial Sequence
  Description of Artificial Sequence: Synthetic oligonucleotide
  Antisense strand to SEQ ID NO: 137560
ucucucacgggcacccugg

SEQ ID NO: 137562 - RNA, 19 nt, Artificial Sequence
  Description of Artificial Sequence: Synthetic oligonucleotide
  Sense strand starting at position 70 of SEQ ID NO: 1767
gcuggcugccucugauaca

SEQ ID NO: 137563 - RNA, 19 nt, Artificial Sequence
  Description of Artificial Sequence: Synthetic oligonucleotide
  Antisense strand to SEQ ID NO: 137562
uguaucagaggcagccagc

SEQ ID NO: 137564 - RNA, 19 nt, Artificial Sequence
  Description of Artificial Sequence: Synthetic oligonucleotide
  Sense strand starting at position 421 of SEQ ID NO: 1767
gugugauggcacuauuaug

SEQ ID NO: 137565 - RNA, 19 nt, Artificial Sequence
  Description of Artificial Sequence: Synthetic oligonucleotide
  Antisense strand to SEQ ID NO: 137564
cauaauagugccaucacac

SEQ ID NO: 137566 - RNA, 19 nt, Artificial Sequence
  Description of Artificial Sequence: Synthetic oligonucleotide
  Sense strand starting at position 431 of SEQ ID NO: 1767
acuauuauggcucacagca

SEQ ID NO: 137567 - RNA, 19 nt, Artificial Sequence
  Description of Artificial Sequence: Synthetic oligonucleotide
  Antisense strand to SEQ ID NO: 137566
ugcugugagccauaauagu

SEQ ID NO: 137568 - RNA, 19 nt, Artificial Sequence
  Description of Artificial Sequence: Synthetic oligonucleotide
  Sense strand starting at position 693 of SEQ ID NO: 1767
aaguauuacuguuauaagg

SEQ ID NO: 137569 - RNA, 19 nt, Artificial Sequence
  Description of Artificial Sequence: Synthetic oligonucleotide
  Antisense strand to SEQ ID NO: 137568
ccuuauaacaguaauacuu

SEQ ID NO: 137570 - RNA, 19 nt, Artificial Sequence
  Description of Artificial Sequence: Synthetic oligonucleotide
  Sense strand starting at position 695 of SEQ ID NO: 1767
guauuacuguuauaaggca

SEQ ID NO: 137571 - RNA, 19 nt, Artificial Sequence
  Description of Artificial Sequence: Synthetic oligonucleotide
  Antisense strand to SEQ ID NO: 137570
ugccuuauaacaguaauac

SEQ ID NO: 137572 - RNA, 19 nt, Artificial Sequence
  Description of Artificial Sequence: Synthetic oligonucleotide
  Sense strand starting at position 940 of SEQ ID NO: 1767
cucccuuugucagccagaa

SEQ ID NO: 137573 - RNA, 19 nt, Artificial Sequence
  Description of Artificial Sequence: Synthetic oligonucleotide
  Antisense strand to SEQ ID NO: 137572
uucuggcugacaaagggag

SEQ ID NO: 137574 - RNA, 19 nt, Artificial Sequence
  Description of Artificial Sequence: Synthetic oligonucleotide
  Sense strand starting at position 1084 of SEQ ID NO: 1767
gcaggcucaugguugauau

SEQ ID NO: 137575 - RNA, 19 nt, Artificial Sequence
  Description of Artificial Sequence: Synthetic oligonucleotide
  Antisense strand to SEQ ID NO: 137574
auaucaaccaugagccugc

SEQ ID NO: 137576 - RNA, 19 nt, Artificial Sequence
  Description of Artificial Sequence: Synthetic oligonucleotide
  Sense strand starting at position 1086 of SEQ ID NO: 1767
aggcucaugguugauauga

SEQ ID NO: 137577 - RNA, 19 nt, Artificial Sequence
  Description of Artificial Sequence: Synthetic oligonucleotide
  Antisense strand to SEQ ID NO: 137576
ucauaucaaccaugagccu

SEQ ID NO: 137578 - RNA, 19 nt, Artificial Sequence
  Description of Artificial Sequence: Synthetic oligonucleotide
  Sense strand starting at position 1088 of SEQ ID NO: 1767
gcucaugguugauaugaaa

SEQ ID NO: 137579 - RNA, 19 nt, Artificial Sequence
  Description of Artificial Sequence: Synthetic oligonucleotide
  Antisense strand to SEQ ID NO: 137578
uuucauaucaaccaugagc

SEQ ID NO: 137580 - RNA, 19 nt, Artificial Sequence
  Description of Artificial Sequence: Synthetic oligonucleotide
  Sense strand starting at position 1454 of SEQ ID NO: 1767
ugaggucugccugaaagac

SEQ ID NO: 137581 - RNA, 19 nt, Artificial Sequence
  Description of Artificial Sequence: Synthetic oligonucleotide
  Antisense strand to SEQ ID NO: 137580
gucuuucaggcagaccuca

SEQ ID NO: 137582 - RNA, 19 nt, Artificial Sequence
  Description of Artificial Sequence: Synthetic oligonucleotide
  Sense strand starting at position 1672 of SEQ ID NO: 1767
aaggguagagauuguggau

SEQ ID NO: 137583 - RNA, 19 nt, Artificial Sequence
  Description of Artificial Sequence: Synthetic oligonucleotide
  Antisense strand to SEQ ID NO: 137582
auccacaaucucuacccuu

SEQ ID NO: 137584 - RNA, 19 nt, Artificial Sequence
  Description of Artificial Sequence: Synthetic oligonucleotide
  Sense strand starting at position 1674 of SEQ ID NO: 1767
ggguagagauuguggauga

SEQ ID NO: 137585 - RNA, 19 nt, Artificial Sequence
  Description of Artificial Sequence: Synthetic oligonucleotide
  Antisense strand to SEQ ID NO: 137584
ucauccacaaucucuaccc

SEQ ID NO: 137586 - RNA, 19 nt, Artificial Sequence
  Description of Artificial Sequence: Synthetic oligonucleotide
  Sense strand starting at position 1675 of SEQ ID NO: 1767
gguagagauuguggaugaa

SEQ ID NO: 137587 - RNA, 19 nt, Artificial Sequence
  Description of Artificial Sequence: Synthetic oligonucleotide
  Antisense strand to SEQ ID NO: 137586
uucauccacaaucucuacc

SEQ ID NO: 137588 - RNA, 19 nt, Artificial Sequence
  Description of Artificial Sequence: Synthetic oligonucleotide
  Sense strand starting at position 1808 of SEQ ID NO: 1767
auguguucucuaggacgga

SEQ ID NO: 137589 - RNA, 19 nt, Artificial Sequence
  Description of Artificial Sequence: Synthetic oligonucleotide
  Antisense strand to SEQ ID NO: 137588
uccguccuagagaacacau

SEQ ID NO: 137590 - RNA, 19 nt, Artificial Sequence
  Description of Artificial Sequence: Synthetic oligonucleotide
  Sense strand starting at position 1809 of SEQ ID NO: 1767
uguguucucuaggacggaa

SEQ ID NO: 137591 - RNA, 19 nt, Artificial Sequence
  Description of Artificial Sequence: Synthetic oligonucleotide
  Antisense strand to SEQ ID NO: 137590
uuccguccuagagaacaca

SEQ ID NO: 137592 - RNA, 19 nt, Artificial Sequence
  Description of Artificial Sequence: Synthetic oligonucleotide
  Sense strand starting at position 1842 of SEQ ID NO: 1767
agaagccaucucugagcua

SEQ ID NO: 137593 - RNA, 19 nt, Artificial Sequence
  Description of Artificial Sequence: Synthetic oligonucleotide
  Antisense strand to SEQ ID NO: 137592
uagcucagagauggcuucu

SEQ ID NO: 137594 - RNA, 19 nt, Artificial Sequence
  Description of Artificial Sequence: Synthetic oligonucleotide
  Sense strand starting at position 2009 of SEQ ID NO: 1767
gucucuguccagggaggua

SEQ ID NO: 137595 - RNA, 19 nt, Artificial Sequence
  Description of Artificial Sequence: Synthetic oligonucleotide
  Antisense strand to SEQ ID NO: 137594
uaccucccuggacagagac

SEQ ID NO: 137596 - RNA, 19 nt, Artificial Sequence
  Description of Artificial Sequence: Synthetic oligonucleotide
  Sense strand starting at position 2078 of SEQ ID NO: 1767
cuguaaccgucacaggaaa

SEQ ID NO: 137597 - RNA, 19 nt, Artificial Sequence
  Description of Artificial Sequence: Synthetic oligonucleotide
  Antisense strand to SEQ ID NO: 137596
uuuccugugacgguuacag

SEQ ID NO: 137598 - RNA, 19 nt, Artificial Sequence
  Description of Artificial Sequence: Synthetic oligonucleotide
  Sense strand starting at position 2317 of SEQ ID NO: 1767
gagggucucugguagcaga

SEQ ID NO: 137599 - RNA, 19 nt, Artificial Sequence
  Description of Artificial Sequence: Synthetic oligonucleotide
  Antisense strand to SEQ ID NO: 137598
ucugcuaccagagacccuc

SEQ ID NO: 137600 - RNA, 19 nt, Artificial Sequence
  Description of Artificial Sequence: Synthetic oligonucleotide
  Sense strand starting at position 2464 of SEQ ID NO: 1767
cgcacucccuccuagagau

SEQ ID NO: 137601 - RNA, 19 nt, Artificial Sequence
  Description of Artificial Sequence: Synthetic oligonucleotide
  Antisense strand to SEQ ID NO: 137600
aucucuaggagggagugcg

SEQ ID NO: 137602 - RNA, 19 nt, Artificial Sequence
  Description of Artificial Sequence: Synthetic oligonucleotide
  Sense strand starting at position 2542 of SEQ ID NO: 1767
ucagauacuuacugaagca

SEQ ID NO: 137603 - RNA, 19 nt, Artificial Sequence
  Description of Artificial Sequence: Synthetic oligonucleotide
  Antisense strand to SEQ ID NO: 137602
ugcuucaguaaguaucuga

SEQ ID NO: 137604 - RNA, 19 nt, Artificial Sequence
  Description of Artificial Sequence: Synthetic oligonucleotide
  Sense strand starting at position 2608 of SEQ ID NO: 1767
gucugucuuugagggcuga

SEQ ID NO: 137605 - RNA, 19 nt, Artificial Sequence
  Description of Artificial Sequence: Synthetic oligonucleotide
  Antisense strand to SEQ ID NO: 137604
ucagcccucaaagacagac

SEQ ID NO: 137606 - RNA, 19 nt, Artificial Sequence
  Description of Artificial Sequence: Synthetic oligonucleotide
  Sense strand starting at position 2612 of SEQ ID NO: 1767
gucuuugagggcugagaag

SEQ ID NO: 137607 - RNA, 19 nt, Artificial Sequence
  Description of Artificial Sequence: Synthetic oligonucleotide
  Antisense strand to SEQ ID NO: 137606
cuucucagcccucaaagac

SEQ ID NO: 137608 - RNA, 19 nt, Artificial Sequence
  Description of Artificial Sequence: Synthetic oligonucleotide
  Sense strand starting at position 2853 of SEQ ID NO: 1767
cuguguuucuccucugggu

SEQ ID NO: 137609 - RNA, 19 nt, Artificial Sequence
  Description of Artificial Sequence: Synthetic oligonucleotide
  Antisense strand to SEQ ID NO: 137608
acccagaggagaaacacag

SEQ ID NO: 137610 - RNA, 19 nt, Artificial Sequence
  Description of Artificial Sequence: Synthetic oligonucleotide
  Sense strand starting at position 2930 of SEQ ID NO: 1767
ugugcugucccacaaagaa

SEQ ID NO: 137611 - RNA, 19 nt, Artificial Sequence
  Description of Artificial Sequence: Synthetic oligonucleotide
  Antisense strand to SEQ ID NO: 137610
uucuuugugggacagcaca

SEQ ID NO: 137612 - RNA, 19 nt, Artificial Sequence
  Description of Artificial Sequence: Synthetic oligonucleotide
  Sense strand starting at position 3682 of SEQ ID NO: 1767
gucaaauggugacagcaaa

SEQ ID NO: 137613 - RNA, 19 nt, Artificial Sequence
  Description of Artificial Sequence: Synthetic oligonucleotide
  Antisense strand to SEQ ID NO: 137612
uuugcugucaccauuugac

SEQ ID NO: 137614 - RNA, 19 nt, Artificial Sequence
  Description of Artificial Sequence: Synthetic oligonucleotide
  Sense strand starting at position 3956 of SEQ ID NO: 1767
ggguggguuucccugagga

SEQ ID NO: 137615 - RNA, 19 nt, Artificial Sequence
  Description of Artificial Sequence: Synthetic oligonucleotide
  Antisense strand to SEQ ID NO: 137614
uccucagggaaacccaccc

SEQ ID NO: 137616 - RNA, 19 nt, Artificial Sequence
  Description of Artificial Sequence: Synthetic oligonucleotide
  Sense strand starting at position 3957 of SEQ ID NO: 1767
gguggguuucccugaggag

SEQ ID NO: 137617 - RNA, 19 nt, Artificial Sequence
  Description of Artificial Sequence: Synthetic oligonucleotide
  Antisense strand to SEQ ID NO: 137616
cuccucagggaaacccacc

SEQ ID NO: 137618 - RNA, 19 nt, Artificial Sequence
  Description of Artificial Sequence: Synthetic oligonucleotide
  Sense strand starting at position 3979 of SEQ ID NO: 1767
gccgauuagggcugggaaa

SEQ ID NO: 137619 - RNA, 19 nt, Artificial Sequence
  Description of Artificial Sequence: Synthetic oligonucleotide
  Antisense strand to SEQ ID NO: 137618
uuucccagcccuaaucggc

SEQ ID NO: 137620 - RNA, 19 nt, Artificial Sequence
  Description of Artificial Sequence: Synthetic oligonucleotide
  Sense strand starting at position 3982 of SEQ ID NO: 1768
gaguuuagugucuauagga

SEQ ID NO: 137621 - RNA, 19 nt, Artificial Sequence
  Description of Artificial Sequence: Synthetic oligonucleotide
  Antisense strand to SEQ ID NO: 137620
uccuauagacacuaaacuc

SEQ ID NO: 137622 - RNA, 19 nt, Artificial Sequence
  Description of Artificial Sequence: Synthetic oligonucleotide
  Sense strand starting at position 3930 of SEQ ID NO: 1768
guguuaauccaacacauau

SEQ ID NO: 137623 - RNA, 19 nt, Artificial Sequence
  Description of Artificial Sequence: Synthetic oligonucleotide
  Antisense strand to SEQ ID NO: 137622
auauguguuggauuaacac

SEQ ID NO: 137624 - RNA, 19 nt, Artificial Sequence
  Description of Artificial Sequence: Synthetic oligonucleotide
  Sense strand starting at position 3759 of SEQ ID NO: 1768
acucuauaacaaugugagu

SEQ ID NO: 137625 - RNA, 19 nt, Artificial Sequence
  Description of Artificial Sequence: Synthetic oligonucleotide
  Antisense strand to SEQ ID NO: 137624
acucacauuguuauagagu

SEQ ID NO: 137626 - RNA, 19 nt, Artificial Sequence
  Description of Artificial Sequence: Synthetic oligonucleotide
  Sense strand starting at position 3660 of SEQ ID NO: 1768
uucugugagcuugcuguua

SEQ ID NO: 137627 - RNA, 19 nt, Artificial Sequence
  Description of Artificial Sequence: Synthetic oligonucleotide
  Antisense strand to SEQ ID NO: 137626
uaacagcaagcucacagaa

SEQ ID NO: 137628 - RNA, 19 nt, Artificial Sequence
  Description of Artificial Sequence: Synthetic oligonucleotide
  Sense strand starting at position 3489 of SEQ ID NO: 1768
aagauaacugugcaaguaa

SEQ ID NO: 137629 - RNA, 19 nt, Artificial Sequence
  Description of Artificial Sequence: Synthetic oligonucleotide
  Antisense strand to SEQ ID NO: 137628
uuacuugcacaguuaucuu

SEQ ID NO: 137630 - RNA, 19 nt, Artificial Sequence
  Description of Artificial Sequence: Synthetic oligonucleotide
  Sense strand starting at position 3488 of SEQ ID NO: 1768
uaagauaacugugcaagua

SEQ ID NO: 137631 - RNA, 19 nt, Artificial Sequence
  Description of Artificial Sequence: Synthetic oligonucleotide
  Antisense strand to SEQ ID NO: 137630
uacuugcacaguuaucuua

SEQ ID NO: 137632 - RNA, 19 nt, Artificial Sequence
  Description of Artificial Sequence: Synthetic oligonucleotide
  Sense strand starting at position 3487 of SEQ ID NO: 1768
auaagauaacugugcaagu

SEQ ID NO: 137633 - RNA, 19 nt, Artificial Sequence
  Description of Artificial Sequence: Synthetic oligonucleotide
  Antisense strand to SEQ ID NO: 137632
acuugcacaguuaucuuau

SEQ ID NO: 137634 - RNA, 19 nt, Artificial Sequence
  Description of Artificial Sequence: Synthetic oligonucleotide
  Sense strand starting at position 3263 of SEQ ID NO: 1768
aguugaguugccuaagauc

SEQ ID NO: 137635 - RNA, 19 nt, Artificial Sequence
  Description of Artificial Sequence: Synthetic oligonucleotide
  Antisense strand to SEQ ID NO: 137634
gaucuuaggcaacucaacu

SEQ ID NO: 137636 - RNA, 19 nt, Artificial Sequence
  Description of Artificial Sequence: Synthetic oligonucleotide
  Sense strand starting at position 3253 of SEQ ID NO: 1768
cagagagguuaguugaguu

SEQ ID NO: 137637 - RNA, 19 nt, Artificial Sequence
  Description of Artificial Sequence: Synthetic oligonucleotide
  Antisense strand to SEQ ID NO: 137636
aacucaacuaaccucucug

SEQ ID NO: 137638 - RNA, 19 nt, Artificial Sequence
  Description of Artificial Sequence: Synthetic oligonucleotide
  Sense strand starting at position 3241 of SEQ ID NO: 1768
aucugugauguucagagag

SEQ ID NO: 137639 - RNA, 19 nt, Artificial Sequence
  Description of Artificial Sequence: Synthetic oligonucleotide
  Antisense strand to SEQ ID NO: 137638
cucucugaacaucacagau

SEQ ID NO: 137640 - RNA, 19 nt, Artificial Sequence
  Description of Artificial Sequence: Synthetic oligonucleotide
  Sense strand starting at position 3148 of SEQ ID NO: 1768
uuacuaugugcaggaacua

SEQ ID NO: 137641 - RNA, 19 nt, Artificial Sequence
  Description of Artificial Sequence: Synthetic oligonucleotide
  Antisense strand to SEQ ID NO: 137640
uaguuccugcacauaguaa

SEQ ID NO: 137642 - RNA, 19 nt, Artificial Sequence
  Description of Artificial Sequence: Synthetic oligonucleotide
  Sense strand starting at position 3058 of SEQ ID NO: 1768
gcuuaaacucuagguaaua

SEQ ID NO: 137643 - RNA, 19 nt, Artificial Sequence
  Description of Artificial Sequence: Synthetic oligonucleotide
  Antisense strand to SEQ ID NO: 137642
uauuaccuagaguuuaagc

SEQ ID NO: 137644 - RNA, 19 nt, Artificial Sequence
  Description of Artificial Sequence: Synthetic oligonucleotide
  Sense strand starting at position 2701 of SEQ ID NO: 1768
cuuaguuaaguccaucuau

SEQ ID NO: 137645 - RNA, 19 nt, Artificial Sequence
  Description of Artificial Sequence: Synthetic oligonucleotide
  Antisense strand to SEQ ID NO: 137644
auagauggacuuaacuaag

SEQ ID NO: 137646 - RNA, 19 nt, Artificial Sequence
  Description of Artificial Sequence: Synthetic oligonucleotide
  Sense strand starting at position 2524 of SEQ ID NO: 1768
guuucugugacuuaagaug

SEQ ID NO: 137647 - RNA, 19 nt, Artificial Sequence
  Description of Artificial Sequence: Synthetic oligonucleotide
  Antisense strand to SEQ ID NO: 137646
caucuuaagucacagaaac

SEQ ID NO: 137648 - RNA, 19 nt, Artificial Sequence
  Description of Artificial Sequence: Synthetic oligonucleotide
  Sense strand starting at position 2522 of SEQ ID NO: 1768
auguuucugugacuuaaga

SEQ ID NO: 137649 - RNA, 19 nt, Artificial Sequence
  Description of Artificial Sequence: Synthetic oligonucleotide
  Antisense strand to SEQ ID NO: 137648
ucuuaagucacagaaacau

SEQ ID NO: 137650 - RNA, 19 nt, Artificial Sequence
  Description of Artificial Sequence: Synthetic oligonucleotide
  Sense strand starting at position 2465 of SEQ ID NO: 1768
guggaaucagaaugucauu

SEQ ID NO: 137651 - RNA, 19 nt, Artificial Sequence
  Description of Artificial Sequence: Synthetic oligonucleotide
  Antisense strand to SEQ ID NO: 137650
aaugacauucugauuccac

SEQ ID NO: 137652 - RNA, 19 nt, Artificial Sequence
  Description of Artificial Sequence: Synthetic oligonucleotide
  Sense strand starting at position 2440 of SEQ ID NO: 1768
cacagauauccuugugaag

SEQ ID NO: 137653 - RNA, 19 nt, Artificial Sequence
  Description of Artificial Sequence: Synthetic oligonucleotide
  Antisense strand to SEQ ID NO: 137652
cuucacaaggauaucugug

SEQ ID NO: 137654 - RNA, 19 nt, Artificial Sequence
  Description of Artificial Sequence: Synthetic oligonucleotide
  Sense strand starting at position 2314 of SEQ ID NO: 1768
uuggcaacccaguaucauu

SEQ ID NO: 137655 - RNA, 19 nt, Artificial Sequence
  Description of Artificial Sequence: Synthetic oligonucleotide
  Antisense strand to SEQ ID NO: 137654
aaugauacuggguugccaa

SEQ ID NO: 137656 - RNA, 19 nt, Artificial Sequence
  Description of Artificial Sequence: Synthetic oligonucleotide
  Sense strand starting at position 2229 of SEQ ID NO: 1768
uuggcaagaugacuuagua

SEQ ID NO: 137657 - RNA, 19 nt, Artificial Sequence
  Description of Artificial Sequence: Synthetic oligonucleotide
  Antisense strand to SEQ ID NO: 137656
uacuaagucaucuugccaa

SEQ ID NO: 137658 - RNA, 19 nt, Artificial Sequence
  Description of Artificial Sequence: Synthetic oligonucleotide
  Sense strand starting at position 2224 of SEQ ID NO: 1768
ggguguuggcaagaugacu

SEQ ID NO: 137659 - RNA, 19 nt, Artificial Sequence
  Description of Artificial Sequence: Synthetic oligonucleotide
  Antisense strand to SEQ ID NO: 137658
agucaucuugccaacaccc

SEQ ID NO: 137660 - RNA, 19 nt, Artificial Sequence
  Description of Artificial Sequence: Synthetic oligonucleotide
  Sense strand starting at position 2002 of SEQ ID NO: 1768
aagucaguagaauggcauu

SEQ ID NO: 137661 - RNA, 19 nt, Artificial Sequence
  Description of Artificial Sequence: Synthetic oligonucleotide
  Antisense strand to SEQ ID NO: 137660
aaugccauucuacugacuu

SEQ ID NO: 137662 - RNA, 19 nt, Artificial Sequence
  Description of Artificial Sequence: Synthetic oligonucleotide
  Sense strand starting at position 1997 of SEQ ID NO: 1768
guucuaagucaguagaaug

SEQ ID NO: 137663 - RNA, 19 nt, Artificial Sequence
  Description of Artificial Sequence: Synthetic oligonucleotide
  Antisense strand to SEQ ID NO: 137662
cauucuacugacuuagaac

SEQ ID NO: 137664 - RNA, 19 nt, Artificial Sequence
  Description of Artificial Sequence: Synthetic oligonucleotide
  Sense strand starting at position 1759 of SEQ ID NO: 1768
auuguuaucucuguagaag

SEQ ID NO: 137665 - RNA, 19 nt, Artificial Sequence
  Description of Artificial Sequence: Synthetic oligonucleotide
  Antisense strand to SEQ ID NO: 137664
cuucuacagagauaacaau

SEQ ID NO: 137666 - RNA, 19 nt, Artificial Sequence
  Description of Artificial Sequence: Synthetic oligonucleotide
  Sense strand starting at position 1478 of SEQ ID NO: 1768
cuaugucucccugagacaa

SEQ ID NO: 137667 - RNA, 19 nt, Artificial Sequence
  Description of Artificial Sequence: Synthetic oligonucleotide
  Antisense strand to SEQ ID NO: 137666
uugucucagggagacauag

SEQ ID NO: 137668 - RNA, 19 nt, Artificial Sequence
  Description of Artificial Sequence: Synthetic oligonucleotide
  Sense strand starting at position 1349 of SEQ ID NO: 1768
uuguaauaucuuugaacag

SEQ ID NO: 137669 - RNA, 19 nt, Artificial Sequence
  Description of Artificial Sequence: Synthetic oligonucleotide
  Antisense strand to SEQ ID NO: 137668
cuguucaaagauauuacaa

SEQ ID NO: 137670 - RNA, 19 nt, Artificial Sequence
  Description of Artificial Sequence: Synthetic oligonucleotide
  Sense strand starting at position 1190 of SEQ ID NO: 1768
gagggaguggcuuacauac

SEQ ID NO: 137671 - RNA, 19 nt, Artificial Sequence
  Description of Artificial Sequence: Synthetic oligonucleotide
  Antisense strand to SEQ ID NO: 137670
guauguaagccacucccuc

SEQ ID NO: 137672 - RNA, 19 nt, Artificial Sequence
  Description of Artificial Sequence: Synthetic oligonucleotide
  Sense strand starting at position 935 of SEQ ID NO: 1768
ucaucaaggcuguaauauu

SEQ ID NO: 137673 - RNA, 19 nt, Artificial Sequence
  Description of Artificial Sequence: Synthetic oligonucleotide
  Antisense strand to SEQ ID NO: 137672
aauauuacagccuugauga

SEQ ID NO: 137674 - RNA, 19 nt, Artificial Sequence
  Description of Artificial Sequence: Synthetic oligonucleotide
  Sense strand starting at position 821 of SEQ ID NO: 1768
gaccauaaaugugcaaaga

SEQ ID NO: 137675 - RNA, 19 nt, Artificial Sequence
  Description of Artificial Sequence: Synthetic oligonucleotide
  Antisense strand to SEQ ID NO: 137674
ucuuugcacauuuaugguc

SEQ ID NO: 137676 - RNA, 19 nt, Artificial Sequence
  Description of Artificial Sequence: Synthetic oligonucleotide
  Sense strand starting at position 766 of SEQ ID NO: 1768
auugaaauguacucaugau

SEQ ID NO: 137677 - RNA, 19 nt, Artificial Sequence
  Description of Artificial Sequence: Synthetic oligonucleotide
  Antisense strand to SEQ ID NO: 137676
aucaugaguacauuucaau

SEQ ID NO: 137678 - RNA, 19 nt, Artificial Sequence
  Description of Artificial Sequence: Synthetic oligonucleotide
  Sense strand starting at position 532 of SEQ ID NO: 1768
agaaauugucaauguaaca

SEQ ID NO: 137679 - RNA, 19 nt, Artificial Sequence
  Description of Artificial Sequence: Synthetic oligonucleotide
  Antisense strand to SEQ ID NO: 137678
uguuacauugacaauuucu

SEQ ID NO: 137680 - RNA, 19 nt, Artificial Sequence
  Description of Artificial Sequence: Synthetic oligonucleotide
  Sense strand starting at position 367 of SEQ ID NO: 1768
cuuuaaagggaugguaacu

SEQ ID NO: 137681 - RNA, 19 nt, Artificial Sequence
  Description of Artificial Sequence: Synthetic oligonucleotide
  Antisense strand to SEQ ID NO: 137680
aguuaccaucccuuuaaag

SEQ ID NO: 137682 - RNA, 19 nt, Artificial Sequence
  Description of Artificial Sequence: Synthetic oligonucleotide
  Sense strand starting at position 366 of SEQ ID NO: 1768
gcuuuaaagggaugguaac

SEQ ID NO: 137683 - RNA, 19 nt, Artificial Sequence
  Description of Artificial Sequence: Synthetic oligonucleotide
  Antisense strand to SEQ ID NO: 137682
guuaccaucccuuuaaagc

SEQ ID NO: 137684 - RNA, 19 nt, Artificial Sequence
  Description of Artificial Sequence: Synthetic oligonucleotide
  Sense strand starting at position 221 of SEQ ID NO: 1768
guauuucuuuaugcucauu

SEQ ID NO: 137685 - RNA, 19 nt, Artificial Sequence
  Description of Artificial Sequence: Synthetic oligonucleotide
  Antisense strand to SEQ ID NO: 137684
aaugagcauaaagaaauac

SEQ ID NO: 137686 - RNA, 19 nt, Artificial Sequence
  Description of Artificial Sequence: Synthetic oligonucleotide
  Sense strand starting at position 217 of SEQ ID NO: 1768
cucaguauuucuuuaugcu

SEQ ID NO: 137687 - RNA, 19 nt, Artificial Sequence
  Description of Artificial Sequence: Synthetic oligonucleotide
  Antisense strand to SEQ ID NO: 137686
agcauaaagaaauacugag

SEQ ID NO: 137688 - RNA, 19 nt, Artificial Sequence
  Description of Artificial Sequence: Synthetic oligonucleotide
  Sense strand starting at position 215 of SEQ ID NO: 1768
gucucaguauuucuuuaug

SEQ ID NO: 137689 - RNA, 19 nt, Artificial Sequence
  Description of Artificial Sequence: Synthetic oligonucleotide
  Antisense strand to SEQ ID NO: 137688
cauaaagaaauacugagac

SEQ ID NO: 137690 - RNA, 19 nt, Artificial Sequence
  Description of Artificial Sequence: Synthetic oligonucleotide
  Sense strand starting at position 115 of SEQ ID NO: 1768
ggaaguuugccuggaauaa

SEQ ID NO: 137691 - RNA, 19 nt, Artificial Sequence
  Description of Artificial Sequence: Synthetic oligonucleotide
  Antisense strand to SEQ ID NO: 137690
uuauuccaggcaaacuucc

SEQ ID NO: 137692 - RNA, 19 nt, Artificial Sequence
  Description of Artificial Sequence: Synthetic oligonucleotide
  Sense strand starting at position 113 of SEQ ID NO: 1768
ugggaaguuugccuggaau

SEQ ID NO: 137693 - RNA, 19 nt, Artificial Sequence
  Description of Artificial Sequence: Synthetic oligonucleotide
  Antisense strand to SEQ ID NO: 137692
auuccaggcaaacuuccca

SEQ ID NO: 137694 - RNA, 19 nt, Artificial Sequence
  Description of Artificial Sequence: Synthetic oligonucleotide
  Sense strand starting at position 112 of SEQ ID NO: 1768
uugggaaguuugccuggaa

SEQ ID NO: 137695 - RNA, 19 nt, Artificial Sequence
  Description of Artificial Sequence: Synthetic oligonucleotide
  Antisense strand to SEQ ID NO: 137694
uuccaggcaaacuucccaa

SEQ ID NO: 137696 - RNA, 19 nt, Artificial Sequence
  Description of Artificial Sequence: Synthetic oligonucleotide
  Sense strand starting at position 22 of SEQ ID NO: 1768
guaauagaaugaguugaau

SEQ ID NO: 137697 - RNA, 19 nt, Artificial Sequence
  Description of Artificial Sequence: Synthetic oligonucleotide
  Antisense strand to SEQ ID NO: 137696
auucaacucauucuauuac

SEQ ID NO: 137698 - RNA, 19 nt, Artificial Sequence
  Description of Artificial Sequence: Synthetic oligonucleotide
  Sense strand starting at position 19 of SEQ ID NO: 1768
ccuguaauagaaugaguug

SEQ ID NO: 137699 - RNA, 19 nt, Artificial Sequence
  Description of Artificial Sequence: Synthetic oligonucleotide
  Antisense strand to SEQ ID NO: 137698
caacucauucuauuacagg

SEQ ID NO: 137700 - RNA, 19 nt, Artificial Sequence
  Description of Artificial Sequence: Synthetic oligonucleotide
  Sense strand starting at position 3900 of SEQ ID NO: 1769
gucucugauuccuuuacca

SEQ ID NO: 137701 - RNA, 19 nt, Artificial Sequence
  Description of Artificial Sequence: Synthetic oligonucleotide
  Antisense strand to SEQ ID NO: 137700
ugguaaaggaaucagagac

SEQ ID NO: 137702 - RNA, 19 nt, Artificial Sequence
  Description of Artificial Sequence: Synthetic oligonucleotide
  Sense strand starting at position 3829 of SEQ ID NO: 1769
gcccauugcugaguuauua

SEQ ID NO: 137703 - RNA, 19 nt, Artificial Sequence
  Description of Artificial Sequence: Synthetic oligonucleotide
  Antisense strand to SEQ ID NO: 137702
uaauaacucagcaaugggc

SEQ ID NO: 137704 - RNA, 19 nt, Artificial Sequence
  Description of Artificial Sequence: Synthetic oligonucleotide
  Sense strand starting at position 3827 of SEQ ID NO: 1769
cugcccauugcugaguuau

SEQ ID NO: 137705 - RNA, 19 nt, Artificial Sequence
  Description of Artificial Sequence: Synthetic oligonucleotide
  Antisense strand to SEQ ID NO: 137704
auaacucagcaaugggcag

SEQ ID NO: 137706 - RNA, 19 nt, Artificial Sequence
  Description of Artificial Sequence: Synthetic oligonucleotide
  Sense strand starting at position 3754 of SEQ ID NO: 1769
ccagaacuuugaggauuua

SEQ ID NO: 137707 - RNA, 19 nt, Artificial Sequence
  Description of Artificial Sequence: Synthetic oligonucleotide
  Antisense strand to SEQ ID NO: 137706
uaaauccucaaaguucugg

SEQ ID NO: 137708 - RNA, 19 nt, Artificial Sequence
  Description of Artificial Sequence: Synthetic oligonucleotide
  Sense strand starting at position 3751 of SEQ ID NO: 1769
uuuccagaacuuugaggau

SEQ ID NO: 137709 - RNA, 19 nt, Artificial Sequence
  Description of Artificial Sequence: Synthetic oligonucleotide
  Antisense strand to SEQ ID NO: 137708
auccucaaaguucuggaaa

SEQ ID NO: 137710 - RNA, 19 nt, Artificial Sequence
  Description of Artificial Sequence: Synthetic oligonucleotide
  Sense strand starting at position 3650 of SEQ ID NO: 1769
aaugaauauuuccagugag

SEQ ID NO: 137711 - RNA, 19 nt, Artificial Sequence
  Description of Artificial Sequence: Synthetic oligonucleotide
  Antisense strand to SEQ ID NO: 137710
cucacuggaaauauucauu

SEQ ID NO: 137712 - RNA, 19 nt, Artificial Sequence
  Description of Artificial Sequence: Synthetic oligonucleotide
  Sense strand starting at position 3620 of SEQ ID NO: 1769
caauuugguuuggaugaca

SEQ ID NO: 137713 - RNA, 19 nt, Artificial Sequence
  Description of Artificial Sequence: Synthetic oligonucleotide
  Antisense strand to SEQ ID NO: 137712
ugucauccaaaccaaauug

SEQ ID NO: 137714 - RNA, 19 nt, Artificial Sequence
  Description of Artificial Sequence: Synthetic oligonucleotide
  Sense strand starting at position 3467 of SEQ ID NO: 1769
ugcugugguguucagggau

SEQ ID NO: 137715 - RNA, 19 nt, Artificial Sequence
  Description of Artificial Sequence: Synthetic oligonucleotide
  Antisense strand to SEQ ID NO: 137714
aucccugaacaccacagca

SEQ ID NO: 137716 - RNA, 19 nt, Artificial Sequence
  Description of Artificial Sequence: Synthetic oligonucleotide
  Sense strand starting at position 3445 of SEQ ID NO: 1769
gugguaaugugcagggcau

SEQ ID NO: 137717 - RNA, 19 nt, Artificial Sequence
  Description of Artificial Sequence: Synthetic oligonucleotide
  Antisense strand to SEQ ID NO: 137716
augcccugcacauuaccac

SEQ ID NO: 137718 - RNA, 19 nt, Artificial Sequence
  Description of Artificial Sequence: Synthetic oligonucleotide
  Sense strand starting at position 3435 of SEQ ID NO: 1769
cagggaucacgugguaaug

SEQ ID NO: 137719 - RNA, 19 nt, Artificial Sequence
  Description of Artificial Sequence: Synthetic oligonucleotide
  Antisense strand to SEQ ID NO: 137718
cauuaccacgugaucccug

SEQ ID NO: 137720 - RNA, 19 nt, Artificial Sequence
  Description of Artificial Sequence: Synthetic oligonucleotide
  Sense strand starting at position 3387 of SEQ ID NO: 1769
ggagucaggugagaaauaa

SEQ ID NO: 137721 - RNA, 19 nt, Artificial Sequence
  Description of Artificial Sequence: Synthetic oligonucleotide
  Antisense strand to SEQ ID NO: 137720
uuauuucucaccugacucc

SEQ ID NO: 137722 - RNA, 19 nt, Artificial Sequence
  Description of Artificial Sequence: Synthetic oligonucleotide
  Sense strand starting at position 3384 of SEQ ID NO: 1769
uuuggagucaggugagaaa

SEQ ID NO: 137723 - RNA, 19 nt, Artificial Sequence
  Description of Artificial Sequence: Synthetic oligonucleotide
  Antisense strand to SEQ ID NO: 137722
uuucucaccugacuccaaa

SEQ ID NO: 137724 - RNA, 19 nt, Artificial Sequence
  Description of Artificial Sequence: Synthetic oligonucleotide
  Sense strand starting at position 3380 of SEQ ID NO: 1769
uaaguuuggagucagguga

SEQ ID NO: 137725 - RNA, 19 nt, Artificial Sequence
  Description of Artificial Sequence: Synthetic oligonucleotide
  Antisense strand to SEQ ID NO: 137724
ucaccugacuccaaacuua

SEQ ID NO: 137726 - RNA, 19 nt, Artificial Sequence
  Description of Artificial Sequence: Synthetic oligonucleotide
  Sense strand starting at position 3368 of SEQ ID NO: 1769
cugauaacccuguaaguuu

SEQ ID NO: 137727 - RNA, 19 nt, Artificial Sequence
  Description of Artificial Sequence: Synthetic oligonucleotide
  Antisense strand to SEQ ID NO: 137726
aaacuuacaggguuaucag

SEQ ID NO: 137728 - RNA, 19 nt, Artificial Sequence
  Description of Artificial Sequence: Synthetic oligonucleotide
  Sense strand starting at position 3366 of SEQ ID NO: 1769
uucugauaacccuguaagu

SEQ ID NO: 137729 - RNA, 19 nt, Artificial Sequence
  Description of Artificial Sequence: Synthetic oligonucleotide
  Antisense strand to SEQ ID NO: 137728
acuuacaggguuaucagaa

SEQ ID NO: 137730 - RNA, 19 nt, Artificial Sequence
  Description of Artificial Sequence: Synthetic oligonucleotide
  Sense strand starting at position 3360 of SEQ ID NO: 1769
gggucuuucugauaacccu

SEQ ID NO: 137731 - RNA, 19 nt, Artificial Sequence
  Description of Artificial Sequence: Synthetic oligonucleotide
  Antisense strand to SEQ ID NO: 137730
aggguuaucagaaagaccc

SEQ ID NO: 137732 - RNA, 19 nt, Artificial Sequence
  Description of Artificial Sequence: Synthetic oligonucleotide
  Sense strand starting at position 3303 of SEQ ID NO: 1769
ucagguaacugagcagaaa

SEQ ID NO: 137733 - RNA, 19 nt, Artificial Sequence
  Description of Artificial Sequence: Synthetic oligonucleotide
  Antisense strand to SEQ ID NO: 137732
uuucugcucaguuaccuga

SEQ ID NO: 137734 - RNA, 19 nt, Artificial Sequence
  Description of Artificial Sequence: Synthetic oligonucleotide
  Sense strand starting at position 3165 of SEQ ID NO: 1769
ccacgcaauccguguuaaa

SEQ ID NO: 137735 - RNA, 19 nt, Artificial Sequence
  Description of Artificial Sequence: Synthetic oligonucleotide
  Antisense strand to SEQ ID NO: 137734
uuuaacacggauugcgugg

SEQ ID NO: 137736 - RNA, 19 nt, Artificial Sequence
  Description of Artificial Sequence: Synthetic oligonucleotide
  Sense strand starting at position 3102 of SEQ ID NO: 1769
accuacugaucagagggau

SEQ ID NO: 137737 - RNA, 19 nt, Artificial Sequence
  Description of Artificial Sequence: Synthetic oligonucleotide
  Antisense strand to SEQ ID NO: 137736
aucccucugaucaguaggu

SEQ ID NO: 137738 - RNA, 19 nt, Artificial Sequence
  Description of Artificial Sequence: Synthetic oligonucleotide
  Sense strand starting at position 3052 of SEQ ID NO: 1769
cuagaaauuucugggugaa

SEQ ID NO: 137739 - RNA, 19 nt, Artificial Sequence
  Description of Artificial Sequence: Synthetic oligonucleotide
  Antisense strand to SEQ ID NO: 137738
uucacccagaaauuucuag

SEQ ID NO: 137740 - RNA, 19 nt, Artificial Sequence
  Description of Artificial Sequence: Synthetic oligonucleotide
  Sense strand starting at position 3051 of SEQ ID NO: 1769
ccuagaaauuucuggguga

SEQ ID NO: 137741 - RNA, 19 nt, Artificial Sequence
  Description of Artificial Sequence: Synthetic oligonucleotide
  Antisense strand to SEQ ID NO: 137740
ucacccagaaauuucuagg

SEQ ID NO: 137742 - RNA, 19 nt, Artificial Sequence
  Description of Artificial Sequence: Synthetic oligonucleotide
  Sense strand starting at position 3012 of SEQ ID NO: 1769
cugaguuucugacuucuca

SEQ ID NO: 137743 - RNA, 19 nt, Artificial Sequence
  Description of Artificial Sequence: Synthetic oligonucleotide
  Antisense strand to SEQ ID NO: 137742
ugagaagucagaaacucag

SEQ ID NO: 137744 - RNA, 19 nt, Artificial Sequence
  Description of Artificial Sequence: Synthetic oligonucleotide
  Sense strand starting at position 3008 of SEQ ID NO: 1769
aguacugaguuucugacuu

SEQ ID NO: 137745 - RNA, 19 nt, Artificial Sequence
  Description of Artificial Sequence: Synthetic oligonucleotide
  Antisense strand to SEQ ID NO: 137744
aagucagaaacucaguacu

SEQ ID NO: 137746 - RNA, 19 nt, Artificial Sequence
  Description of Artificial Sequence: Synthetic oligonucleotide
  Sense strand starting at position 2998 of SEQ ID NO: 1769
uuuaaaugucaguacugag

SEQ ID NO: 137747 - RNA, 19 nt, Artificial Sequence
  Description of Artificial Sequence: Synthetic oligonucleotide
  Antisense strand to SEQ ID NO: 137746
cucaguacugacauuuaaa

SEQ ID NO: 137748 - RNA, 19 nt, Artificial Sequence
  Description of Artificial Sequence: Synthetic oligonucleotide
  Sense strand starting at position 2951 of SEQ ID NO: 1769
uacauuggccucggaauua

SEQ ID NO: 137749 - RNA, 19 nt, Artificial Sequence
  Description of Artificial Sequence: Synthetic oligonucleotide
  Antisense strand to SEQ ID NO: 137748
uaauuccgaggccaaugua

SEQ ID NO: 137750 - RNA, 19 nt, Artificial Sequence
  Description of Artificial Sequence: Synthetic oligonucleotide
  Sense strand starting at position 2950 of SEQ ID NO: 1769
uuacauuggccucggaauu

SEQ ID NO: 137751 - RNA, 19 nt, Artificial Sequence
  Description of Artificial Sequence: Synthetic oligonucleotide
  Antisense strand to SEQ ID NO: 137750
aauuccgaggccaauguaa

SEQ ID NO: 137752 - RNA, 19 nt, Artificial Sequence
  Description of Artificial Sequence: Synthetic oligonucleotide
  Sense strand starting at position 2810 of SEQ ID NO: 1769
ccaagauaagacuggcuuu

SEQ ID NO: 137753 - RNA, 19 nt, Artificial Sequence
  Description of Artificial Sequence: Synthetic oligonucleotide
  Antisense strand to SEQ ID NO: 137752
aaagccagucuuaucuugg

SEQ ID NO: 137754 - RNA, 19 nt, Artificial Sequence
  Description of Artificial Sequence: Synthetic oligonucleotide
  Sense strand starting at position 2669 of SEQ ID NO: 1769
ugaauucgauucucaauuc

SEQ ID NO: 137755 - RNA, 19 nt, Artificial Sequence
  Description of Artificial Sequence: Synthetic oligonucleotide
  Antisense strand to SEQ ID NO: 137754
gaauugagaaucgaauuca

SEQ ID NO: 137756 - RNA, 19 nt, Artificial Sequence
  Description of Artificial Sequence: Synthetic oligonucleotide
  Sense strand starting at position 2586 of SEQ ID NO: 1769
ccaguuaucucucuucuga

SEQ ID NO: 137757 - RNA, 19 nt, Artificial Sequence
  Description of Artificial Sequence: Synthetic oligonucleotide
  Antisense strand to SEQ ID NO: 137756
ucagaagagagauaacugg

SEQ ID NO: 137758 - RNA, 19 nt, Artificial Sequence
  Description of Artificial Sequence: Synthetic oligonucleotide
  Sense strand starting at position 2464 of SEQ ID NO: 1769
uugcccuaaccuugauagu

SEQ ID NO: 137759 - RNA, 19 nt, Artificial Sequence
  Description of Artificial Sequence: Synthetic oligonucleotide
  Antisense strand to SEQ ID NO: 137758
acuaucaagguuagggcaa

SEQ ID NO: 137760 - RNA, 19 nt, Artificial Sequence
  Description of Artificial Sequence: Synthetic oligonucleotide
  Sense strand starting at position 2402 of SEQ ID NO: 1769
ugugaaccucuauacugau

SEQ ID NO: 137761 - RNA, 19 nt, Artificial Sequence
  Description of Artificial Sequence: Synthetic oligonucleotide
  Antisense strand to SEQ ID NO: 137760
aucaguauagagguucaca

SEQ ID NO: 137762 - RNA, 19 nt, Artificial Sequence
  Description of Artificial Sequence: Synthetic oligonucleotide
  Sense strand starting at position 2088 of SEQ ID NO: 1769
gugcacucucgcucguaga

SEQ ID NO: 137763 - RNA, 19 nt, Artificial Sequence
  Description of Artificial Sequence: Synthetic oligonucleotide
  Antisense strand to SEQ ID NO: 137762
ucuacgagcgagagugcac

SEQ ID NO: 137764 - RNA, 19 nt, Artificial Sequence
  Description of Artificial Sequence: Synthetic oligonucleotide
  Sense strand starting at position 1177 of SEQ ID NO: 1769
ucccgugcucgcgaacgaa

SEQ ID NO: 137765 - RNA, 19 nt, Artificial Sequence
  Description of Artificial Sequence: Synthetic oligonucleotide
  Antisense strand to SEQ ID NO: 137764
uucguucgcgagcacggga

SEQ ID NO: 137766 - RNA, 19 nt, Artificial Sequence
  Description of Artificial Sequence: Synthetic oligonucleotide
  Sense strand starting at position 669 of SEQ ID NO: 1769
gcagcauuccagggaaaug

SEQ ID NO: 137767 - RNA, 19 nt, Artificial Sequence
  Description of Artificial Sequence: Synthetic oligonucleotide
  Antisense strand to SEQ ID NO: 137766
cauuucccuggaaugcugc

SEQ ID NO: 137768 - RNA, 19 nt, Artificial Sequence
  Description of Artificial Sequence: Synthetic oligonucleotide
  Sense strand starting at position 668 of SEQ ID NO: 1769
ggcagcauuccagggaaau

SEQ ID NO: 137769 - RNA, 19 nt, Artificial Sequence
  Description of Artificial Sequence: Synthetic oligonucleotide
  Antisense strand to SEQ ID NO: 137768
auuucccuggaaugcugcc

SEQ ID NO: 137770 - RNA, 19 nt, Artificial Sequence
  Description of Artificial Sequence: Synthetic oligonucleotide
  Sense strand starting at position 231 of SEQ ID NO: 1769
ucuucuggaucccucagau

SEQ ID NO: 137771 - RNA, 19 nt, Artificial Sequence
  Description of Artificial Sequence: Synthetic oligonucleotide
  Antisense strand to SEQ ID NO: 137770
aucugagggauccagaaga

SEQ ID NO: 137772 - RNA, 19 nt, Artificial Sequence
  Description of Artificial Sequence: Synthetic oligonucleotide
  Sense strand starting at position 222 of SEQ ID NO: 1769
ucagaacucucuucuggau

SEQ ID NO: 137773 - RNA, 19 nt, Artificial Sequence
  Description of Artificial Sequence: Synthetic oligonucleotide
  Antisense strand to SEQ ID NO: 137772
auccagaagagaguucuga

SEQ ID NO: 137774 - RNA, 19 nt, Artificial Sequence
  Description of Artificial Sequence: Synthetic oligonucleotide
  Sense strand starting at position 211 of SEQ ID NO: 1769
uagauagccugucagaacu

SEQ ID NO: 137775 - RNA, 19 nt, Artificial Sequence
  Description of Artificial Sequence: Synthetic oligonucleotide
  Antisense strand to SEQ ID NO: 137774
aguucugacaggcuaucua

SEQ ID NO: 137776 - RNA, 19 nt, Artificial Sequence
  Description of Artificial Sequence: Synthetic oligonucleotide
  Sense strand starting at position 176 of SEQ ID NO: 1769
aagaguuaauaaggagcua

SEQ ID NO: 137777 - RNA, 19 nt, Artificial Sequence
  Description of Artificial Sequence: Synthetic oligonucleotide
  Antisense strand to SEQ ID NO: 137776
uagcuccuuauuaacucuu

SEQ ID NO: 137778 - RNA, 19 nt, Artificial Sequence
  Description of Artificial Sequence: Synthetic oligonucleotide
  Sense strand starting at position 7 of SEQ ID NO: 1769
gugagcugaguguggaaau

SEQ ID NO: 137779 - RNA, 19 nt, Artificial Sequence
  Description of Artificial Sequence: Synthetic oligonucleotide
  Antisense strand to SEQ ID NO: 137778
auuuccacacucagcucac

SEQ ID NO: 137780 - RNA, 19 nt, Artificial Sequence
  Description of Artificial Sequence: Synthetic oligonucleotide
  Sense strand starting at position 3980 of SEQ ID NO: 1770
gccacugaaguggaguaau

SEQ ID NO: 137781 - RNA, 19 nt, Artificial Sequence
  Description of Artificial Sequence: Synthetic oligonucleotide
  Antisense strand to SEQ ID NO: 137780
auuacuccacuucaguggc

SEQ ID NO: 137782 - RNA, 19 nt, Artificial Sequence
  Description of Artificial Sequence: Synthetic oligonucleotide
  Sense strand starting at position 3699 of SEQ ID NO: 1770
gugacauggugacauuuga

SEQ ID NO: 137783 - RNA, 19 nt, Artificial Sequence
  Description of Artificial Sequence: Synthetic oligonucleotide
  Antisense strand to SEQ ID NO: 137782
ucaaaugucaccaugucac

SEQ ID NO: 137784 - RNA, 19 nt, Artificial Sequence
  Description of Artificial Sequence: Synthetic oligonucleotide
  Sense strand starting at position 3688 of SEQ ID NO: 1770
uugcuauagaagugacaug

SEQ ID NO: 137785 - RNA, 19 nt, Artificial Sequence
  Description of Artificial Sequence: Synthetic oligonucleotide
  Antisense strand to SEQ ID NO: 137784
caugucacuucuauagcaa

SEQ ID NO: 137786 - RNA, 19 nt, Artificial Sequence
  Description of Artificial Sequence: Synthetic oligonucleotide
  Sense strand starting at position 3684 of SEQ ID NO: 1770
ggcuuugcuauagaaguga

SEQ ID NO: 137787 - RNA, 19 nt, Artificial Sequence
  Description of Artificial Sequence: Synthetic oligonucleotide
  Antisense strand to SEQ ID NO: 137786
ucacuucuauagcaaagcc

SEQ ID NO: 137788 - RNA, 19 nt, Artificial Sequence
  Description of Artificial Sequence: Synthetic oligonucleotide
  Sense strand starting at position 3682 of SEQ ID NO: 1770
agggcuuugcuauagaagu

SEQ ID NO: 137789 - RNA, 19 nt, Artificial Sequence
  Description of Artificial Sequence: Synthetic oligonucleotide
  Antisense strand to SEQ ID NO: 137788
acuucuauagcaaagcccu

SEQ ID NO: 137790 - RNA, 19 nt, Artificial Sequence
  Description of Artificial Sequence: Synthetic oligonucleotide
  Sense strand starting at position 3677 of SEQ ID NO: 1770
ccaagagggcuuugcuaua

SEQ ID NO: 137791 - RNA, 19 nt, Artificial Sequence
  Description of Artificial Sequence: Synthetic oligonucleotide
  Antisense strand to SEQ ID NO: 137790
uauagcaaagcccucuugg

SEQ ID NO: 137792 - RNA, 19 nt, Artificial Sequence
  Description of Artificial Sequence: Synthetic oligonucleotide
  Sense strand starting at position 3664 of SEQ ID NO: 1770
uuagauaagugguccaaga

SEQ ID NO: 137793 - RNA, 19 nt, Artificial Sequence
  Description of Artificial Sequence: Synthetic oligonucleotide
  Antisense strand to SEQ ID NO: 137792
ucuuggaccacuuaucuaa

SEQ ID NO: 137794 - RNA, 19 nt, Artificial Sequence
  Description of Artificial Sequence: Synthetic oligonucleotide
  Sense strand starting at position 3653 of SEQ ID NO: 1770
gggcaucuccuuuagauaa

SEQ ID NO: 137795 - RNA, 19 nt, Artificial Sequence
  Description of Artificial Sequence: Synthetic oligonucleotide
  Antisense strand to SEQ ID NO: 137794
uuaucuaaaggagaugccc

SEQ ID NO: 137796 - RNA, 19 nt, Artificial Sequence
  Description of Artificial Sequence: Synthetic oligonucleotide
  Sense strand starting at position 3624 of SEQ ID NO: 1770
ggaguauaaugauaaagaa

SEQ ID NO: 137797 - RNA, 19 nt, Artificial Sequence
  Description of Artificial Sequence: Synthetic oligonucleotide
  Antisense strand to SEQ ID NO: 137796
uucuuuaucauuauacucc

SEQ ID NO: 137798 - RNA, 19 nt, Artificial Sequence
  Description of Artificial Sequence: Synthetic oligonucleotide
  Sense strand starting at position 3621 of SEQ ID NO: 1770
gagggaguauaaugauaaa

SEQ ID NO: 137799 - RNA, 19 nt, Artificial Sequence
  Description of Artificial Sequence: Synthetic oligonucleotide
  Antisense strand to SEQ ID NO: 137798
uuuaucauuauacucccuc

SEQ ID NO: 137800 - RNA, 19 nt, Artificial Sequence
  Description of Artificial Sequence: Synthetic oligonucleotide
  Sense strand starting at position 3512 of SEQ ID NO: 1770
gggaaaugguccuagccuu

SEQ ID NO: 137801 - RNA, 19 nt, Artificial Sequence
  Description of Artificial Sequence: Synthetic oligonucleotide
  Antisense strand to SEQ ID NO: 137800
aaggcuaggaccauuuccc

SEQ ID NO: 137802 - RNA, 19 nt, Artificial Sequence
  Description of Artificial Sequence: Synthetic oligonucleotide
  Sense strand starting at position 3467 of SEQ ID NO: 1770
cguaauugaugcucaauaa

SEQ ID NO: 137803 - RNA, 19 nt, Artificial Sequence
  Description of Artificial Sequence: Synthetic oligonucleotide
  Antisense strand to SEQ ID NO: 137802
uuauugagcaucaauuacg

SEQ ID NO: 137804 - RNA, 19 nt, Artificial Sequence
  Description of Artificial Sequence: Synthetic oligonucleotide
  Sense strand starting at position 3457 of SEQ ID NO: 1770
gccucuggcacguaauuga

SEQ ID NO: 137805 - RNA, 19 nt, Artificial Sequence
  Description of Artificial Sequence: Synthetic oligonucleotide
  Antisense strand to SEQ ID NO: 137804
ucaauuacgugccagaggc

SEQ ID NO: 137806 - RNA, 19 nt, Artificial Sequence
  Description of Artificial Sequence: Synthetic oligonucleotide
  Sense strand starting at position 3455 of SEQ ID NO: 1770
cggccucuggcacguaauu

SEQ ID NO: 137807 - RNA, 19 nt, Artificial Sequence
  Description of Artificial Sequence: Synthetic oligonucleotide
  Antisense strand to SEQ ID NO: 137806
aauuacgugccagaggccg

SEQ ID NO: 137808 - RNA, 19 nt, Artificial Sequence
  Description of Artificial Sequence: Synthetic oligonucleotide
  Sense strand starting at position 3117 of SEQ ID NO: 1770
guauuuccgugcccaguau

SEQ ID NO: 137809 - RNA, 19 nt, Artificial Sequence
  Description of Artificial Sequence: Synthetic oligonucleotide
  Antisense strand to SEQ ID NO: 137808
auacugggcacggaaauac

SEQ ID NO: 137810 - RNA, 19 nt, Artificial Sequence
  Description of Artificial Sequence: Synthetic oligonucleotide
  Sense strand starting at position 3047 of SEQ ID NO: 1770
gggcuauaugaugaguuca

SEQ ID NO: 137811 - RNA, 19 nt, Artificial Sequence
  Description of Artificial Sequence: Synthetic oligonucleotide
  Antisense strand to SEQ ID NO: 137810
ugaacucaucauauagccc

SEQ ID NO: 137812 - RNA, 19 nt, Artificial Sequence
  Description of Artificial Sequence: Synthetic oligonucleotide
  Sense strand starting at position 3039 of SEQ ID NO: 1770
uagagugcgggcuauauga

SEQ ID NO: 137813 - RNA, 19 nt, Artificial Sequence
  Description of Artificial Sequence: Synthetic oligonucleotide
  Antisense strand to SEQ ID NO: 137812
ucauauagcccgcacucua

SEQ ID NO: 137814 - RNA, 19 nt, Artificial Sequence
  Description of Artificial Sequence: Synthetic oligonucleotide
  Sense strand starting at position 2955 of SEQ ID NO: 1770
guccuuuaucacugucuca

SEQ ID NO: 137815 - RNA, 19 nt, Artificial Sequence
  Description of Artificial Sequence: Synthetic oligonucleotide
  Antisense strand to SEQ ID NO: 137814
ugagacagugauaaaggac

SEQ ID NO: 137816 - RNA, 19 nt, Artificial Sequence
  Description of Artificial Sequence: Synthetic oligonucleotide
  Sense strand starting at position 2949 of SEQ ID NO: 1770
guguacguccuuuaucacu

SEQ ID NO: 137817 - RNA, 19 nt, Artificial Sequence
  Description of Artificial Sequence: Synthetic oligonucleotide
  Antisense strand to SEQ ID NO: 137816
agugauaaaggacguacac

SEQ ID NO: 137818 - RNA, 19 nt, Artificial Sequence
  Description of Artificial Sequence: Synthetic oligonucleotide
  Sense strand starting at position 2947 of SEQ ID NO: 1770
ugguguacguccuuuauca

SEQ ID NO: 137819 - RNA, 19 nt, Artificial Sequence
  Description of Artificial Sequence: Synthetic oligonucleotide
  Antisense strand to SEQ ID NO: 137818
ugauaaaggacguacacca

SEQ ID NO: 137820 - RNA, 19 nt, Artificial Sequence
  Description of Artificial Sequence: Synthetic oligonucleotide
  Sense strand starting at position 2935 of SEQ ID NO: 1770
aagcaaacccucuggugua

SEQ ID NO: 137821 - RNA, 19 nt, Artificial Sequence
  Description of Artificial Sequence: Synthetic oligonucleotide
  Antisense strand to SEQ ID NO: 137820
uacaccagaggguuugcuu

SEQ ID NO: 137822 - RNA, 19 nt, Artificial Sequence
  Description of Artificial Sequence: Synthetic oligonucleotide
  Sense strand starting at position 2726 of SEQ ID NO: 1770
uuugguuugaauugaauag

SEQ ID NO: 137823 - RNA, 19 nt, Artificial Sequence
  Description of Artificial Sequence: Synthetic oligonucleotide
  Antisense strand to SEQ ID NO: 137822
cuauucaauucaaaccaaa

SEQ ID NO: 137824 - RNA, 19 nt, Artificial Sequence
  Description of Artificial Sequence: Synthetic oligonucleotide
  Sense strand starting at position 2721 of SEQ ID NO: 1770
aguuguuugguuugaauug

SEQ ID NO: 137825 - RNA, 19 nt, Artificial Sequence
  Description of Artificial Sequence: Synthetic oligonucleotide
  Antisense strand to SEQ ID NO: 137824
caauucaaaccaaacaacu

SEQ ID NO: 137826 - RNA, 19 nt, Artificial Sequence
  Description of Artificial Sequence: Synthetic oligonucleotide
  Sense strand starting at position 2719 of SEQ ID NO: 1770
aaaguuguuugguuugaau

SEQ ID NO: 137827 - RNA, 19 nt, Artificial Sequence
  Description of Artificial Sequence: Synthetic oligonucleotide
  Antisense strand to SEQ ID NO: 137826
auucaaaccaaacaacuuu

SEQ ID NO: 137828 - RNA, 19 nt, Artificial Sequence
  Description of Artificial Sequence: Synthetic oligonucleotide
  Sense strand starting at position 2715 of SEQ ID NO: 1770
aaucaaaguuguuugguuu

SEQ ID NO: 137829 - RNA, 19 nt, Artificial Sequence
  Description of Artificial Sequence: Synthetic oligonucleotide
  Antisense strand to SEQ ID NO: 137828
aaaccaaacaacuuugauu

SEQ ID NO: 137830 - RNA, 19 nt, Artificial Sequence
  Description of Artificial Sequence: Synthetic oligonucleotide
  Sense strand starting at position 2714 of SEQ ID NO: 1770
gaaucaaaguuguuugguu

SEQ ID NO: 137831 - RNA, 19 nt, Artificial Sequence
  Description of Artificial Sequence: Synthetic oligonucleotide
  Antisense strand to SEQ ID NO: 137830
aaccaaacaacuuugauuc

SEQ ID NO: 137832 - RNA, 19 nt, Artificial Sequence
  Description of Artificial Sequence: Synthetic oligonucleotide
  Sense strand starting at position 2678 of SEQ ID NO: 1770
acuguuaugcaacaguauu

SEQ ID NO: 137833 - RNA, 19 nt, Artificial Sequence
  Description of Artificial Sequence: Synthetic oligonucleotide
  Antisense strand to SEQ ID NO: 137832
aauacuguugcauaacagu

SEQ ID NO: 137834 - RNA, 19 nt, Artificial Sequence
  Description of Artificial Sequence: Synthetic oligonucleotide
  Sense strand starting at position 2607 of SEQ ID NO: 1770
cuauguguuuaacccacau

SEQ ID NO: 137835 - RNA, 19 nt, Artificial Sequence
  Description of Artificial Sequence: Synthetic oligonucleotide
  Antisense strand to SEQ ID NO: 137834
auguggguuaaacacauag

SEQ ID NO: 137836 - RNA, 19 nt, Artificial Sequence
  Description of Artificial Sequence: Synthetic oligonucleotide
  Sense strand starting at position 2604 of SEQ ID NO: 1770
cuucuauguguuuaaccca

SEQ ID NO: 137837 - RNA, 19 nt, Artificial Sequence
  Description of Artificial Sequence: Synthetic oligonucleotide
  Antisense strand to SEQ ID NO: 137836
uggguuaaacacauagaag

SEQ ID NO: 137838 - RNA, 19 nt, Artificial Sequence
  Description of Artificial Sequence: Synthetic oligonucleotide
  Sense strand starting at position 2599 of SEQ ID NO: 1770
gguaccuucuauguguuua

SEQ ID NO: 137839 - RNA, 19 nt, Artificial Sequence
  Description of Artificial Sequence: Synthetic oligonucleotide
  Antisense strand to SEQ ID NO: 137838
uaaacacauagaagguacc

SEQ ID NO: 137840 - RNA, 19 nt, Artificial Sequence
  Description of Artificial Sequence: Synthetic oligonucleotide
  Sense strand starting at position 2578 of SEQ ID NO: 1770
gcucauuacuauguaagac

SEQ ID NO: 137841 - RNA, 19 nt, Artificial Sequence
  Description of Artificial Sequence: Synthetic oligonucleotide
  Antisense strand to SEQ ID NO: 137840
gucuuacauaguaaugagc

SEQ ID NO: 137842 - RNA, 19 nt, Artificial Sequence
  Description of Artificial Sequence: Synthetic oligonucleotide
  Sense strand starting at position 2577 of SEQ ID NO: 1770
ugcucauuacuauguaaga

SEQ ID NO: 137843 - RNA, 19 nt, Artificial Sequence
  Description of Artificial Sequence: Synthetic oligonucleotide
  Antisense strand to SEQ ID NO: 137842
ucuuacauaguaaugagca

SEQ ID NO: 137844 - RNA, 19 nt, Artificial Sequence
  Description of Artificial Sequence: Synthetic oligonucleotide
  Sense strand starting at position 2574 of SEQ ID NO: 1770
cguugcucauuacuaugua

SEQ ID NO: 137845 - RNA, 19 nt, Artificial Sequence
  Description of Artificial Sequence: Synthetic oligonucleotide
  Antisense strand to SEQ ID NO: 137844
uacauaguaaugagcaacg

SEQ ID NO: 137846 - RNA, 19 nt, Artificial Sequence
  Description of Artificial Sequence: Synthetic oligonucleotide
  Sense strand starting at position 2571 of SEQ ID NO: 1770
acucguugcucauuacuau

SEQ ID NO: 137847 - RNA, 19 nt, Artificial Sequence
  Description of Artificial Sequence: Synthetic oligonucleotide
  Antisense strand to SEQ ID NO: 137846
auaguaaugagcaacgagu

SEQ ID NO: 137848 - RNA, 19 nt, Artificial Sequence
  Description of Artificial Sequence: Synthetic oligonucleotide
  Sense strand starting at position 2567 of SEQ ID NO: 1770
gcaaacucguugcucauua

SEQ ID NO: 137849 - RNA, 19 nt, Artificial Sequence
  Description of Artificial Sequence: Synthetic oligonucleotide
  Antisense strand to SEQ ID NO: 137848
uaaugagcaacgaguuugc

SEQ ID NO: 137850 - RNA, 19 nt, Artificial Sequence
  Description of Artificial Sequence: Synthetic oligonucleotide
  Sense strand starting at position 2565 of SEQ ID NO: 1770
cugcaaacucguugcucau

SEQ ID NO: 137851 - RNA, 19 nt, Artificial Sequence
  Description of Artificial Sequence: Synthetic oligonucleotide
  Antisense strand to SEQ ID NO: 137850
augagcaacgaguuugcag

SEQ ID NO: 137852 - RNA, 19 nt, Artificial Sequence
  Description of Artificial Sequence: Synthetic oligonucleotide
  Sense strand starting at position 2564 of SEQ ID NO: 1770
ucugcaaacucguugcuca

SEQ ID NO: 137853 - RNA, 19 nt, Artificial Sequence
  Description of Artificial Sequence: Synthetic oligonucleotide
  Antisense strand to SEQ ID NO: 137852
ugagcaacgaguuugcaga

SEQ ID NO: 137854 - RNA, 19 nt, Artificial Sequence
  Description of Artificial Sequence: Synthetic oligonucleotide
  Sense strand starting at position 2555 of SEQ ID NO: 1770
gcacuaugaucugcaaacu

SEQ ID NO: 137855 - RNA, 19 nt, Artificial Sequence
  Description of Artificial Sequence: Synthetic oligonucleotide
  Antisense strand to SEQ ID NO: 137854
aguuugcagaucauagugc

SEQ ID NO: 137856 - RNA, 19 nt, Artificial Sequence
  Description of Artificial Sequence: Synthetic oligonucleotide
  Sense strand starting at position 2351 of SEQ ID NO: 1770
augcguguucuacauaccu

SEQ ID NO: 137857 - RNA, 19 nt, Artificial Sequence
  Description of Artificial Sequence: Synthetic oligonucleotide
  Antisense strand to SEQ ID NO: 137856
agguauguagaacacgcau

SEQ ID NO: 137858 - RNA, 19 nt, Artificial Sequence
  Description of Artificial Sequence: Synthetic oligonucleotide
  Sense strand starting at position 2320 of SEQ ID NO: 1770
gccugaaucccuuguaccu

SEQ ID NO: 137859 - RNA, 19 nt, Artificial Sequence
  Description of Artificial Sequence: Synthetic oligonucleotide
  Antisense strand to SEQ ID NO: 137858
agguacaagggauucaggc

SEQ ID NO: 137860 - RNA, 19 nt, Artificial Sequence
  Description of Artificial Sequence: Synthetic oligonucleotide
  Sense strand starting at position 51 of SEQ ID NO: 1771
uuguaaagcuaucuguaug

SEQ ID NO: 137861 - RNA, 19 nt, Artificial Sequence
  Description of Artificial Sequence: Synthetic oligonucleotide
  Antisense strand to SEQ ID NO: 137860
cauacagauagcuuuacaa

SEQ ID NO: 137862 - RNA, 19 nt, Artificial Sequence
  Description of Artificial Sequence: Synthetic oligonucleotide
  Sense strand starting at position 59 of SEQ ID NO: 1771
cuaucuguaugcccuaaga

SEQ ID NO: 137863 - RNA, 19 nt, Artificial Sequence
  Description of Artificial Sequence: Synthetic oligonucleotide
  Antisense strand to SEQ ID NO: 137862
ucuuagggcauacagauag

SEQ ID NO: 137864 - RNA, 19 nt, Artificial Sequence
  Description of Artificial Sequence: Synthetic oligonucleotide
  Sense strand starting at position 61 of SEQ ID NO: 1771
aucuguaugcccuaagacu

SEQ ID NO: 137865 - RNA, 19 nt, Artificial Sequence
  Description of Artificial Sequence: Synthetic oligonucleotide
  Antisense strand to SEQ ID NO: 137864
agucuuagggcauacagau

SEQ ID NO: 137866 - RNA, 19 nt, Artificial Sequence
  Description of Artificial Sequence: Synthetic oligonucleotide
  Sense strand starting at position 170 of SEQ ID NO: 1771
acauguuaucuuggguagu

SEQ ID NO: 137867 - RNA, 19 nt, Artificial Sequence
  Description of Artificial Sequence: Synthetic oligonucleotide
  Antisense strand to SEQ ID NO: 137866
acuacccaagauaacaugu

SEQ ID NO: 137868 - RNA, 19 nt, Artificial Sequence
  Description of Artificial Sequence: Synthetic oligonucleotide
  Sense strand starting at position 172 of SEQ ID NO: 1771
auguuaucuuggguaguuu

SEQ ID NO: 137869 - RNA, 19 nt, Artificial Sequence
  Description of Artificial Sequence: Synthetic oligonucleotide
  Antisense strand to SEQ ID NO: 137868
aaacuacccaagauaacau

SEQ ID NO: 137870 - RNA, 19 nt, Artificial Sequence
  Description of Artificial Sequence: Synthetic oligonucleotide
  Sense strand starting at position 255 of SEQ ID NO: 1771
cacuaauacguguagcauu

SEQ ID NO: 137871 - RNA, 19 nt, Artificial Sequence
  Description of Artificial Sequence: Synthetic oligonucleotide
  Antisense strand to SEQ ID NO: 137870
aaugcuacacguauuagug

SEQ ID NO: 137872 - RNA, 19 nt, Artificial Sequence
  Description of Artificial Sequence: Synthetic oligonucleotide
  Sense strand starting at position 258 of SEQ ID NO: 1771
uaauacguguagcauuuaa

SEQ ID NO: 137873 - RNA, 19 nt, Artificial Sequence
  Description of Artificial Sequence: Synthetic oligonucleotide
  Antisense strand to SEQ ID NO: 137872
uuaaaugcuacacguauua

SEQ ID NO: 137874 - RNA, 19 nt, Artificial Sequence
  Description of Artificial Sequence: Synthetic oligonucleotide
  Sense strand starting at position 321 of SEQ ID NO: 1771
acuagaagugcucagucca

SEQ ID NO: 137875 - RNA, 19 nt, Artificial Sequence
  Description of Artificial Sequence: Synthetic oligonucleotide
  Antisense strand to SEQ ID NO: 137874
uggacugagcacuucuagu

SEQ ID NO: 137876 - RNA, 19 nt, Artificial Sequence
  Description of Artificial Sequence: Synthetic oligonucleotide
  Sense strand starting at position 385 of SEQ ID NO: 1771
aucacuaauugaguugaau

SEQ ID NO: 137877 - RNA, 19 nt, Artificial Sequence
  Description of Artificial Sequence: Synthetic oligonucleotide
  Antisense strand to SEQ ID NO: 137876
auucaacucaauuagugau

SEQ ID NO: 137878 - RNA, 19 nt, Artificial Sequence
  Description of Artificial Sequence: Synthetic oligonucleotide
  Sense strand starting at position 415 of SEQ ID NO: 1771
cgguuuacuuuauuuccau

SEQ ID NO: 137879 - RNA, 19 nt, Artificial Sequence
  Description of Artificial Sequence: Synthetic oligonucleotide
  Antisense strand to SEQ ID NO: 137878
auggaaauaaaguaaaccg

SEQ ID NO: 137880 - RNA, 19 nt, Artificial Sequence
  Description of Artificial Sequence: Synthetic oligonucleotide
  Sense strand starting at position 493 of SEQ ID NO: 1771
acaaacauucuguggucau

SEQ ID NO: 137881 - RNA, 19 nt, Artificial Sequence
  Description of Artificial Sequence: Synthetic oligonucleotide
  Antisense strand to SEQ ID NO: 137880
augaccacagaauguuugu

SEQ ID NO: 137882 - RNA, 19 nt, Artificial Sequence
  Description of Artificial Sequence: Synthetic oligonucleotide
  Sense strand starting at position 497 of SEQ ID NO: 1771
acauucuguggucauaaau

SEQ ID NO: 137883 - RNA, 19 nt, Artificial Sequence
  Description of Artificial Sequence: Synthetic oligonucleotide
  Antisense strand to SEQ ID NO: 137882
auuuaugaccacagaaugu

SEQ ID NO: 137884 - RNA, 19 nt, Artificial Sequence
  Description of Artificial Sequence: Synthetic oligonucleotide
  Sense strand starting at position 570 of SEQ ID NO: 1771
agcuguggccuugaacaaa

SEQ ID NO: 137885 - RNA, 19 nt, Artificial Sequence
  Description of Artificial Sequence: Synthetic oligonucleotide
  Antisense strand to SEQ ID NO: 137884
uuuguucaaggccacagcu

SEQ ID NO: 137886 - RNA, 19 nt, Artificial Sequence
  Description of Artificial Sequence: Synthetic oligonucleotide
  Sense strand starting at position 638 of SEQ ID NO: 1771
cggagagcguuucccaaga

SEQ ID NO: 137887 - RNA, 19 nt, Artificial Sequence
  Description of Artificial Sequence: Synthetic oligonucleotide
  Antisense strand to SEQ ID NO: 137886
ucuugggaaacgcucuccg

SEQ ID NO: 137888 - RNA, 19 nt, Artificial Sequence
  Description of Artificial Sequence: Synthetic oligonucleotide
  Sense strand starting at position 771 of SEQ ID NO: 1771
gggccugucuuaguaaguu

SEQ ID NO: 137889 - RNA, 19 nt, Artificial Sequence
  Description of Artificial Sequence: Synthetic oligonucleotide
  Antisense strand to SEQ ID NO: 137888
aacuuacuaagacaggccc

SEQ ID NO: 137890 - RNA, 19 nt, Artificial Sequence
  Description of Artificial Sequence: Synthetic oligonucleotide
  Sense strand starting at position 976 of SEQ ID NO: 1771
aucuaaguuacgggagaau

SEQ ID NO: 137891 - RNA, 19 nt, Artificial Sequence
  Description of Artificial Sequence: Synthetic oligonucleotide
  Antisense strand to SEQ ID NO: 137890
auucucccguaacuuagau

SEQ ID NO: 137892 - RNA, 19 nt, Artificial Sequence
  Description of Artificial Sequence: Synthetic oligonucleotide
  Sense strand starting at position 1086 of SEQ ID NO: 1771
gaguguauuccucacuuga

SEQ ID NO: 137893 - RNA, 19 nt, Artificial Sequence
  Description of Artificial Sequence: Synthetic oligonucleotide
  Antisense strand to SEQ ID NO: 137892
ucaagugaggaauacacuc

SEQ ID NO: 137894 - RNA, 19 nt, Artificial Sequence
  Description of Artificial Sequence: Synthetic oligonucleotide
  Sense strand starting at position 1095 of SEQ ID NO: 1771
ccucacuugacgugggaau

SEQ ID NO: 137895 - RNA, 19 nt, Artificial Sequence
  Description of Artificial Sequence: Synthetic oligonucleotide
  Antisense strand to SEQ ID NO: 137894
auucccacgucaagugagg

SEQ ID NO: 137896 - RNA, 19 nt, Artificial Sequence
  Description of Artificial Sequence: Synthetic oligonucleotide
  Sense strand starting at position 1107 of SEQ ID NO: 1771
ugggaaugguacugacaag

SEQ ID NO: 137897 - RNA, 19 nt, Artificial Sequence
  Description of Artificial Sequence: Synthetic oligonucleotide
  Antisense strand to SEQ ID NO: 137896
cuugucaguaccauuccca

SEQ ID NO: 137898 - RNA, 19 nt, Artificial Sequence
  Description of Artificial Sequence: Synthetic oligonucleotide
  Sense strand starting at position 1148 of SEQ ID NO: 1771
ccaagcauguuugugagga

SEQ ID NO: 137899 - RNA, 19 nt, Artificial Sequence
  Description of Artificial Sequence: Synthetic oligonucleotide
  Antisense strand to SEQ ID NO: 137898
uccucacaaacaugcuugg

SEQ ID NO: 137900 - RNA, 19 nt, Artificial Sequence
  Description of Artificial Sequence: Synthetic oligonucleotide
  Sense strand starting at position 1172 of SEQ ID NO: 1771
acuaguauuguguaucuag

SEQ ID NO: 137901 - RNA, 19 nt, Artificial Sequence
  Description of Artificial Sequence: Synthetic oligonucleotide
  Antisense strand to SEQ ID NO: 137900
cuagauacacaauacuagu

SEQ ID NO: 137902 - RNA, 19 nt, Artificial Sequence
  Description of Artificial Sequence: Synthetic oligonucleotide
  Sense strand starting at position 1175 of SEQ ID NO: 1771
aguauuguguaucuagauu

SEQ ID NO: 137903 - RNA, 19 nt, Artificial Sequence
  Description of Artificial Sequence: Synthetic oligonucleotide
  Antisense strand to SEQ ID NO: 137902
aaucuagauacacaauacu

SEQ ID NO: 137904 - RNA, 19 nt, Artificial Sequence
  Description of Artificial Sequence: Synthetic oligonucleotide
  Sense strand starting at position 1363 of SEQ ID NO: 1771
auuuaaggcucgcaaaguu

SEQ ID NO: 137905 - RNA, 19 nt, Artificial Sequence
  Description of Artificial Sequence: Synthetic oligonucleotide
  Antisense strand to SEQ ID NO: 137904
aacuuugcgagccuuaaau

SEQ ID NO: 137906 - RNA, 19 nt, Artificial Sequence
  Description of Artificial Sequence: Synthetic oligonucleotide
  Sense strand starting at position 1392 of SEQ ID NO: 1771
gaaucucgccuguggacaa

SEQ ID NO: 137907 - RNA, 19 nt, Artificial Sequence
  Description of Artificial Sequence: Synthetic oligonucleotide
  Antisense strand to SEQ ID NO: 137906
uuguccacaggcgagauuc

SEQ ID NO: 137908 - RNA, 19 nt, Artificial Sequence
  Description of Artificial Sequence: Synthetic oligonucleotide
  Sense strand starting at position 1431 of SEQ ID NO: 1771
gcgauuuauuguuccuccu

SEQ ID NO: 137909 - RNA, 19 nt, Artificial Sequence
  Description of Artificial Sequence: Synthetic oligonucleotide
  Antisense strand to SEQ ID NO: 137908
aggaggaacaauaaaucgc

SEQ ID NO: 137910 - RNA, 19 nt, Artificial Sequence
  Description of Artificial Sequence: Synthetic oligonucleotide
  Sense strand starting at position 1469 of SEQ ID NO: 1771
agcucaagaagucgaagaa

SEQ ID NO: 137911 - RNA, 19 nt, Artificial Sequence
  Description of Artificial Sequence: Synthetic oligonucleotide
  Antisense strand to SEQ ID NO: 137910
uucuucgacuucuugagcu

SEQ ID NO: 137912 - RNA, 19 nt, Artificial Sequence
  Description of Artificial Sequence: Synthetic oligonucleotide
  Sense strand starting at position 1563 of SEQ ID NO: 1771
cccgaauggcaacaucaau

SEQ ID NO: 137913 - RNA, 19 nt, Artificial Sequence
  Description of Artificial Sequence: Synthetic oligonucleotide
  Antisense strand to SEQ ID NO: 137912
auugauguugccauucggg

SEQ ID NO: 137914 - RNA, 19 nt, Artificial Sequence
  Description of Artificial Sequence: Synthetic oligonucleotide
  Sense strand starting at position 1836 of SEQ ID NO: 1771
gggacaaucugcucguuag

SEQ ID NO: 137915 - RNA, 19 nt, Artificial Sequence
  Description of Artificial Sequence: Synthetic oligonucleotide
  Antisense strand to SEQ ID NO: 137914
cuaacgagcagauuguccc

SEQ ID NO: 137916 - RNA, 19 nt, Artificial Sequence
  Description of Artificial Sequence: Synthetic oligonucleotide
  Sense strand starting at position 2128 of SEQ ID NO: 1771
cugugugaacucgggaaac

SEQ ID NO: 137917 - RNA, 19 nt, Artificial Sequence
  Description of Artificial Sequence: Synthetic oligonucleotide
  Antisense strand to SEQ ID NO: 137916
guuucccgaguucacacag

SEQ ID NO: 137918 - RNA, 19 nt, Artificial Sequence
  Description of Artificial Sequence: Synthetic oligonucleotide
  Sense strand starting at position 2130 of SEQ ID NO: 1771
gugugaacucgggaaacuc

SEQ ID NO: 137919 - RNA, 19 nt, Artificial Sequence
  Description of Artificial Sequence: Synthetic oligonucleotide
  Antisense strand to SEQ ID NO: 137918
gaguuucccgaguucacac

SEQ ID NO: 137920 - RNA, 19 nt, Artificial Sequence
  Description of Artificial Sequence: Synthetic oligonucleotide
  Sense strand starting at position 2513 of SEQ ID NO: 1771
acagaauggccuggaggau

SEQ ID NO: 137921 - RNA, 19 nt, Artificial Sequence
  Description of Artificial Sequence: Synthetic oligonucleotide
  Antisense strand to SEQ ID NO: 137920
auccuccaggccauucugu

SEQ ID NO: 137922 - RNA, 19 nt, Artificial Sequence
  Description of Artificial Sequence: Synthetic oligonucleotide
  Sense strand starting at position 2534 of SEQ ID NO: 1771
aguggaauaauguauguua

SEQ ID NO: 137923 - RNA, 19 nt, Artificial Sequence
  Description of Artificial Sequence: Synthetic oligonucleotide
  Antisense strand to SEQ ID NO: 137922
uaacauacauuauuccacu

SEQ ID NO: 137924 - RNA, 19 nt, Artificial Sequence
  Description of Artificial Sequence: Synthetic oligonucleotide
  Sense strand starting at position 2536 of SEQ ID NO: 1771
uggaauaauguauguuaag

SEQ ID NO: 137925 - RNA, 19 nt, Artificial Sequence
  Description of Artificial Sequence: Synthetic oligonucleotide
  Antisense strand to SEQ ID NO: 137924
cuuaacauacauuauucca

SEQ ID NO: 137926 - RNA, 19 nt, Artificial Sequence
  Description of Artificial Sequence: Synthetic oligonucleotide
  Sense strand starting at position 2537 of SEQ ID NO: 1771
ggaauaauguauguuaagu

SEQ ID NO: 137927 - RNA, 19 nt, Artificial Sequence
  Description of Artificial Sequence: Synthetic oligonucleotide
  Antisense strand to SEQ ID NO: 137926
acuuaacauacauuauucc

SEQ ID NO: 137928 - RNA, 19 nt, Artificial Sequence
  Description of Artificial Sequence: Synthetic oligonucleotide
  Sense strand starting at position 2865 of SEQ ID NO: 1771
cggagaggcuccgucucaa

SEQ ID NO: 137929 - RNA, 19 nt, Artificial Sequence
  Description of Artificial Sequence: Synthetic oligonucleotide
  Antisense strand to SEQ ID NO: 137928
uugagacggagccucuccg

SEQ ID NO: 137930 - RNA, 19 nt, Artificial Sequence
  Description of Artificial Sequence: Synthetic oligonucleotide
  Sense strand starting at position 2911 of SEQ ID NO: 1771
gacaaaucgcaauacugua

SEQ ID NO: 137931 - RNA, 19 nt, Artificial Sequence
  Description of Artificial Sequence: Synthetic oligonucleotide
  Antisense strand to SEQ ID NO: 137930
uacaguauugcgauuuguc

SEQ ID NO: 137932 - RNA, 19 nt, Artificial Sequence
  Description of Artificial Sequence: Synthetic oligonucleotide
  Sense strand starting at position 3038 of SEQ ID NO: 1771
uaaacaucuguacgagaag

SEQ ID NO: 137933 - RNA, 19 nt, Artificial Sequence
  Description of Artificial Sequence: Synthetic oligonucleotide
  Antisense strand to SEQ ID NO: 137932
cuucucguacagauguuua

SEQ ID NO: 137934 - RNA, 19 nt, Artificial Sequence
  Description of Artificial Sequence: Synthetic oligonucleotide
  Sense strand starting at position 3563 of SEQ ID NO: 1771
ggaaaugguugaucaucau

SEQ ID NO: 137935 - RNA, 19 nt, Artificial Sequence
  Description of Artificial Sequence: Synthetic oligonucleotide
  Antisense strand to SEQ ID NO: 137934
augaugaucaaccauuucc

SEQ ID NO: 137936 - RNA, 19 nt, Artificial Sequence
  Description of Artificial Sequence: Synthetic oligonucleotide
  Sense strand starting at position 3566 of SEQ ID NO: 1771
aaugguugaucaucaugau

SEQ ID NO: 137937 - RNA, 19 nt, Artificial Sequence
  Description of Artificial Sequence: Synthetic oligonucleotide
  Antisense strand to SEQ ID NO: 137936
aucaugaugaucaaccauu

SEQ ID NO: 137938 - RNA, 19 nt, Artificial Sequence
  Description of Artificial Sequence: Synthetic oligonucleotide
  Sense strand starting at position 3796 of SEQ ID NO: 1771
ggagaauucccuugagccc

SEQ ID NO: 137939 - RNA, 19 nt, Artificial Sequence
  Description of Artificial Sequence: Synthetic oligonucleotide
  Antisense strand to SEQ ID NO: 137938
gggcucaagggaauucucc

SEQ ID NO: 137940 - RNA, 19 nt, Artificial Sequence
  Description of Artificial Sequence: Synthetic oligonucleotide
  Sense strand starting at position 3968 of SEQ ID NO: 1772
uugggaucugcuggcaagu

SEQ ID NO: 137941 - RNA, 19 nt, Artificial Sequence
  Description of Artificial Sequence: Synthetic oligonucleotide
  Antisense strand to SEQ ID NO: 137940
acuugccagcagaucccaa

SEQ ID NO: 137942 - RNA, 19 nt, Artificial Sequence
  Description of Artificial Sequence: Synthetic oligonucleotide
  Sense strand starting at position 3924 of SEQ ID NO: 1772
gcuugauuguguaugugug

SEQ ID NO: 137943 - RNA, 19 nt, Artificial Sequence
  Description of Artificial Sequence: Synthetic oligonucleotide
  Antisense strand to SEQ ID NO: 137942
cacacauacacaaucaagc

SEQ ID NO: 137944 - RNA, 19 nt, Artificial Sequence
  Description of Artificial Sequence: Synthetic oligonucleotide
  Sense strand starting at position 3918 of SEQ ID NO: 1772
augugugcuugauugugua

SEQ ID NO: 137945 - RNA, 19 nt, Artificial Sequence
  Description of Artificial Sequence: Synthetic oligonucleotide
  Antisense strand to SEQ ID NO: 137944
uacacaaucaagcacacau

SEQ ID NO: 137946 - RNA, 19 nt, Artificial Sequence
  Description of Artificial Sequence: Synthetic oligonucleotide
  Sense strand starting at position 3914 of SEQ ID NO: 1772
gcacaugugugcuugauug

SEQ ID NO: 137947 - RNA, 19 nt, Artificial Sequence
  Description of Artificial Sequence: Synthetic oligonucleotide
  Antisense strand to SEQ ID NO: 137946
caaucaagcacacaugugc

SEQ ID NO: 137948 - RNA, 19 nt, Artificial Sequence
  Description of Artificial Sequence: Synthetic oligonucleotide
  Sense strand starting at position 3900 of SEQ ID NO: 1772
gcaugaacauguuugcaca

SEQ ID NO: 137949 - RNA, 19 nt, Artificial Sequence
  Description of Artificial Sequence: Synthetic oligonucleotide
  Antisense strand to SEQ ID NO: 137948
ugugcaaacauguucaugc

SEQ ID NO: 137950 - RNA, 19 nt, Artificial Sequence
  Description of Artificial Sequence: Synthetic oligonucleotide
  Sense strand starting at position 3891 of SEQ ID NO: 1772
cauguuugugcaugaacau

SEQ ID NO: 137951 - RNA, 19 nt, Artificial Sequence
  Description of Artificial Sequence: Synthetic oligonucleotide
  Antisense strand to SEQ ID NO: 137950
auguucaugcacaaacaug

SEQ ID NO: 137952 - RNA, 19 nt, Artificial Sequence
  Description of Artificial Sequence: Synthetic oligonucleotide
  Sense strand starting at position 3888 of SEQ ID NO: 1772
aggcauguuugugcaugaa

SEQ ID NO: 137953 - RNA, 19 nt, Artificial Sequence
  Description of Artificial Sequence: Synthetic oligonucleotide
  Antisense strand to SEQ ID NO: 137952
uucaugcacaaacaugccu

SEQ ID NO: 137954 - RNA, 19 nt, Artificial Sequence
  Description of Artificial Sequence: Synthetic oligonucleotide
  Sense strand starting at position 3887 of SEQ ID NO: 1772
caggcauguuugugcauga

SEQ ID NO: 137955 - RNA, 19 nt, Artificial Sequence
  Description of Artificial Sequence: Synthetic oligonucleotide
  Antisense strand to SEQ ID NO: 137954
ucaugcacaaacaugccug

SEQ ID NO: 137956 - RNA, 19 nt, Artificial Sequence
  Description of Artificial Sequence: Synthetic oligonucleotide
  Sense strand starting at position 3863 of SEQ ID NO: 1772
auguaugugugguaccagu

SEQ ID NO: 137957 - RNA, 19 nt, Artificial Sequence
  Description of Artificial Sequence: Synthetic oligonucleotide
  Antisense strand to SEQ ID NO: 137956
acugguaccacacauacau

SEQ ID NO: 137958 - RNA, 19 nt, Artificial Sequence
  Description of Artificial Sequence: Synthetic oligonucleotide
  Sense strand starting at position 3861 of SEQ ID NO: 1772
acauguaugugugguacca

SEQ ID NO: 137959 - RNA, 19 nt, Artificial Sequence
  Description of Artificial Sequence: Synthetic oligonucleotide
  Antisense strand to SEQ ID NO: 137958
ugguaccacacauacaugu

SEQ ID NO: 137960 - RNA, 19 nt, Artificial Sequence
  Description of Artificial Sequence: Synthetic oligonucleotide
  Sense strand starting at position 3841 of SEQ ID NO: 1772
ugcagugucuccuugaaca

SEQ ID NO: 137961 - RNA, 19 nt, Artificial Sequence
  Description of Artificial Sequence: Synthetic oligonucleotide
  Antisense strand to SEQ ID NO: 137960
uguucaaggagacacugca

SEQ ID NO: 137962 - RNA, 19 nt, Artificial Sequence
  Description of Artificial Sequence: Synthetic oligonucleotide
  Sense strand starting at position 3802 of SEQ ID NO: 1772
cguguuccaucacuaggua

SEQ ID NO: 137963 - RNA, 19 nt, Artificial Sequence
  Description of Artificial Sequence: Synthetic oligonucleotide
  Antisense strand to SEQ ID NO: 137962
uaccuagugauggaacacg

SEQ ID NO: 137964 - RNA, 19 nt, Artificial Sequence
  Description of Artificial Sequence: Synthetic oligonucleotide
  Sense strand starting at position 3799 of SEQ ID NO: 1772
acgcguguuccaucacuag

SEQ ID NO: 137965 - RNA, 19 nt, Artificial Sequence
  Description of Artificial Sequence: Synthetic oligonucleotide
  Antisense strand to SEQ ID NO: 137964
cuagugauggaacacgcgu

SEQ ID NO: 137966 - RNA, 19 nt, Artificial Sequence
  Description of Artificial Sequence: Synthetic oligonucleotide
  Sense strand starting at position 3765 of SEQ ID NO: 1772
uagccaugucagcaauaga

SEQ ID NO: 137967 - RNA, 19 nt, Artificial Sequence
  Description of Artificial Sequence: Synthetic oligonucleotide
  Antisense strand to SEQ ID NO: 137966
ucuauugcugacauggcua

SEQ ID NO: 137968 - RNA, 19 nt, Artificial Sequence
  Description of Artificial Sequence: Synthetic oligonucleotide
  Sense strand starting at position 3760 of SEQ ID NO: 1772
uguguuagccaugucagca

SEQ ID NO: 137969 - RNA, 19 nt, Artificial Sequence
  Description of Artificial Sequence: Synthetic oligonucleotide
  Antisense strand to SEQ ID NO: 137968
ugcugacauggcuaacaca

SEQ ID NO: 137970 - RNA, 19 nt, Artificial Sequence
  Description of Artificial Sequence: Synthetic oligonucleotide
  Sense strand starting at position 3753 of SEQ ID NO: 1772
cacguacuguguuagccau

SEQ ID NO: 137971 - RNA, 19 nt, Artificial Sequence
  Description of Artificial Sequence: Synthetic oligonucleotide
  Antisense strand to SEQ ID NO: 137970
auggcuaacacaguacgug

SEQ ID NO: 137972 - RNA, 19 nt, Artificial Sequence
  Description of Artificial Sequence: Synthetic oligonucleotide
  Sense strand starting at position 3748 of SEQ ID NO: 1772
ggguucacguacuguguua

SEQ ID NO: 137973 - RNA, 19 nt, Artificial Sequence
  Description of Artificial Sequence: Synthetic oligonucleotide
  Antisense strand to SEQ ID NO: 137972
uaacacaguacgugaaccc

SEQ ID NO: 137974 - RNA, 19 nt, Artificial Sequence
  Description of Artificial Sequence: Synthetic oligonucleotide
  Sense strand starting at position 3740 of SEQ ID NO: 1772
gucuguguggguucacgua

SEQ ID NO: 137975 - RNA, 19 nt, Artificial Sequence
  Description of Artificial Sequence: Synthetic oligonucleotide
  Antisense strand to SEQ ID NO: 137974
uacgugaacccacacagac

SEQ ID NO: 137976 - RNA, 19 nt, Artificial Sequence
  Description of Artificial Sequence: Synthetic oligonucleotide
  Sense strand starting at position 3680 of SEQ ID NO: 1772
gugcuugcuucugcaugua

SEQ ID NO: 137977 - RNA, 19 nt, Artificial Sequence
  Description of Artificial Sequence: Synthetic oligonucleotide
  Antisense strand to SEQ ID NO: 137976
uacaugcagaagcaagcac

SEQ ID NO: 137978 - RNA, 19 nt, Artificial Sequence
  Description of Artificial Sequence: Synthetic oligonucleotide
  Sense strand starting at position 3590 of SEQ ID NO: 1772
gugcgcucuugugaacuuu

SEQ ID NO: 137979 - RNA, 19 nt, Artificial Sequence
  Description of Artificial Sequence: Synthetic oligonucleotide
  Antisense strand to SEQ ID NO: 137978
aaaguucacaagagcgcac

SEQ ID NO: 137980 - RNA, 19 nt, Artificial Sequence
  Description of Artificial Sequence: Synthetic oligonucleotide
  Sense strand starting at position 3491 of SEQ ID NO: 1772
guggacauuuggcaaacga

SEQ ID NO: 137981 - RNA, 19 nt, Artificial Sequence
  Description of Artificial Sequence: Synthetic oligonucleotide
  Antisense strand to SEQ ID NO: 137980
ucguuugccaaauguccac

SEQ ID NO: 137982 - RNA, 19 nt, Artificial Sequence
  Description of Artificial Sequence: Synthetic oligonucleotide
  Sense strand starting at position 3480 of SEQ ID NO: 1772
ggcuuugcuugguggacau

SEQ ID NO: 137983 - RNA, 19 nt, Artificial Sequence
  Description of Artificial Sequence: Synthetic oligonucleotide
  Antisense strand to SEQ ID NO: 137982
auguccaccaagcaaagcc

SEQ ID NO: 137984 - RNA, 19 nt, Artificial Sequence
  Description of Artificial Sequence: Synthetic oligonucleotide
  Sense strand starting at position 3479 of SEQ ID NO: 1772
cggcuuugcuugguggaca

SEQ ID NO: 137985 - RNA, 19 nt, Artificial Sequence
  Description of Artificial Sequence: Synthetic oligonucleotide
  Antisense strand to SEQ ID NO: 137984
uguccaccaagcaaagccg

SEQ ID NO: 137986 - RNA, 19 nt, Artificial Sequence
  Description of Artificial Sequence: Synthetic oligonucleotide
  Sense strand starting at position 3429 of SEQ ID NO: 1772
uguacaccugcgugaacua

SEQ ID NO: 137987 - RNA, 19 nt, Artificial Sequence
  Description of Artificial Sequence: Synthetic oligonucleotide
  Antisense strand to SEQ ID NO: 137986
uaguucacgcagguguaca

SEQ ID NO: 137988 - RNA, 19 nt, Artificial Sequence
  Description of Artificial Sequence: Synthetic oligonucleotide
  Sense strand starting at position 3426 of SEQ ID NO: 1772
gcguguacaccugcgugaa

SEQ ID NO: 137989 - RNA, 19 nt, Artificial Sequence
  Description of Artificial Sequence: Synthetic oligonucleotide
  Antisense strand to SEQ ID NO: 137988
uucacgcagguguacacgc

SEQ ID NO: 137990 - RNA, 19 nt, Artificial Sequence
  Description of Artificial Sequence: Synthetic oligonucleotide
  Sense strand starting at position 3295 of SEQ ID NO: 1772
cgugaagugguuugaauga

SEQ ID NO: 137991 - RNA, 19 nt, Artificial Sequence
  Description of Artificial Sequence: Synthetic oligonucleotide
  Antisense strand to SEQ ID NO: 137990
ucauucaaaccacuucacg

SEQ ID NO: 137992 - RNA, 19 nt, Artificial Sequence
  Description of Artificial Sequence: Synthetic oligonucleotide
  Sense strand starting at position 3288 of SEQ ID NO: 1772
uuggaaacgugaagugguu

SEQ ID NO: 137993 - RNA, 19 nt, Artificial Sequence
  Description of Artificial Sequence: Synthetic oligonucleotide
  Antisense strand to SEQ ID NO: 137992
aaccacuucacguuuccaa

SEQ ID NO: 137994 - RNA, 19 nt, Artificial Sequence
  Description of Artificial Sequence: Synthetic oligonucleotide
  Sense strand starting at position 2795 of SEQ ID NO: 1772
cagccaugaccguggaguu

SEQ ID NO: 137995 - RNA, 19 nt, Artificial Sequence
  Description of Artificial Sequence: Synthetic oligonucleotide
  Antisense strand to SEQ ID NO: 137994
aacuccacggucauggcug

SEQ ID NO: 137996 - RNA, 19 nt, Artificial Sequence
  Description of Artificial Sequence: Synthetic oligonucleotide
  Sense strand starting at position 1883 of SEQ ID NO: 1772
ugggaaaccuacuuaaagu

SEQ ID NO: 137997 - RNA, 19 nt, Artificial Sequence
  Description of Artificial Sequence: Synthetic oligonucleotide
  Antisense strand to SEQ ID NO: 137996
acuuuaaguagguuuccca

SEQ ID NO: 137998 - RNA, 19 nt, Artificial Sequence
  Description of Artificial Sequence: Synthetic oligonucleotide
  Sense strand starting at position 393 of SEQ ID NO: 1772
gggagguucuggucagaag

SEQ ID NO: 137999 - RNA, 19 nt, Artificial Sequence
  Description of Artificial Sequence: Synthetic oligonucleotide
  Antisense strand to SEQ ID NO: 137998
cuucugaccagaaccuccc

SEQ ID NO: 138000 - RNA, 19 nt, Artificial Sequence
  Description of Artificial Sequence: Synthetic oligonucleotide
  Sense strand starting at position 327 of SEQ ID NO: 1772
gcugcucugccacagaagu

SEQ ID NO: 138001 - RNA, 19 nt, Artificial Sequence
  Description of Artificial Sequence: Synthetic oligonucleotide
  Antisense strand to SEQ ID NO: 138000
acuucuguggcagagcagc

SEQ ID NO: 138002 - RNA, 19 nt, Artificial Sequence
  Description of Artificial Sequence: Synthetic oligonucleotide
  Sense strand starting at position 169 of SEQ ID NO: 1772
agaaacaaugcuugggcaa

SEQ ID NO: 138003 - RNA, 19 nt, Artificial Sequence
  Description of Artificial Sequence: Synthetic oligonucleotide
  Antisense strand to SEQ ID NO: 138002
uugcccaagcauuguuucu

SEQ ID NO: 138004 - RNA, 19 nt, Artificial Sequence
  Description of Artificial Sequence: Synthetic oligonucleotide
  Sense strand starting at position 154 of SEQ ID NO: 1773
auaggaaagagauguuugu

SEQ ID NO: 138005 - RNA, 19 nt, Artificial Sequence
  Description of Artificial Sequence: Synthetic oligonucleotide
  Antisense strand to SEQ ID NO: 138004
acaaacaucucuuuccuau

SEQ ID NO: 138006 - RNA, 19 nt, Artificial Sequence
  Description of Artificial Sequence: Synthetic oligonucleotide
  Sense strand starting at position 183 of SEQ ID NO: 1773
gugugucuacuccuaacgu

SEQ ID NO: 138007 - RNA, 19 nt, Artificial Sequence
  Description of Artificial Sequence: Synthetic oligonucleotide
  Antisense strand to SEQ ID NO: 138006
acguuaggaguagacacac

SEQ ID NO: 138008 - RNA, 19 nt, Artificial Sequence
  Description of Artificial Sequence: Synthetic oligonucleotide
  Sense strand starting at position 191 of SEQ ID NO: 1773
acuccuaacguugaguaau

SEQ ID NO: 138009 - RNA, 19 nt, Artificial Sequence
  Description of Artificial Sequence: Synthetic oligonucleotide
  Antisense strand to SEQ ID NO: 138008
auuacucaacguuaggagu

SEQ ID NO: 138010 - RNA, 19 nt, Artificial Sequence
  Description of Artificial Sequence: Synthetic oligonucleotide
  Sense strand starting at position 194 of SEQ ID NO: 1773
ccuaacguugaguaaucuu

SEQ ID NO: 138011 - RNA, 19 nt, Artificial Sequence
  Description of Artificial Sequence: Synthetic oligonucleotide
  Antisense strand to SEQ ID NO: 138010
aagauuacucaacguuagg

SEQ ID NO: 138012 - RNA, 19 nt, Artificial Sequence
  Description of Artificial Sequence: Synthetic oligonucleotide
  Sense strand starting at position 204 of SEQ ID NO: 1773
aguaaucuugcagaucuca

SEQ ID NO: 138013 - RNA, 19 nt, Artificial Sequence
  Description of Artificial Sequence: Synthetic oligonucleotide
  Antisense strand to SEQ ID NO: 138012
ugagaucugcaagauuacu

SEQ ID NO: 138014 - RNA, 19 nt, Artificial Sequence
  Description of Artificial Sequence: Synthetic oligonucleotide
  Sense strand starting at position 260 of SEQ ID NO: 1773
agagaguuggaguggugau

SEQ ID NO: 138015 - RNA, 19 nt, Artificial Sequence
  Description of Artificial Sequence: Synthetic oligonucleotide
  Antisense strand to SEQ ID NO: 138014
aucaccacuccaacucucu

SEQ ID NO: 138016 - RNA, 19 nt, Artificial Sequence
  Description of Artificial Sequence: Synthetic oligonucleotide
  Sense strand starting at position 261 of SEQ ID NO: 1773
gagaguuggaguggugauc

SEQ ID NO: 138017 - RNA, 19 nt, Artificial Sequence
  Description of Artificial Sequence: Synthetic oligonucleotide
  Antisense strand to SEQ ID NO: 138016
gaucaccacuccaacucuc

SEQ ID NO: 138018 - RNA, 19 nt, Artificial Sequence
  Description of Artificial Sequence: Synthetic oligonucleotide
  Sense strand starting at position 272 of SEQ ID NO: 1773
uggugaucucuuugaucuc

SEQ ID NO: 138019 - RNA, 19 nt, Artificial Sequence
  Description of Artificial Sequence: Synthetic oligonucleotide
  Antisense strand to SEQ ID NO: 138018
gagaucaaagagaucacca

SEQ ID NO: 138020 - RNA, 19 nt, Artificial Sequence
  Description of Artificial Sequence: Synthetic oligonucleotide
  Sense strand starting at position 320 of SEQ ID NO: 1773
ucuuuaaguguggguagau

SEQ ID NO: 138021 - RNA, 19 nt, Artificial Sequence
  Description of Artificial Sequence: Synthetic oligonucleotide
  Antisense strand to SEQ ID NO: 138020
aucuacccacacuuaaaga

SEQ ID NO: 138022 - RNA, 19 nt, Artificial Sequence
  Description of Artificial Sequence: Synthetic oligonucleotide
  Sense strand starting at position 321 of SEQ ID NO: 1773
cuuuaaguguggguagauc

SEQ ID NO: 138023 - RNA, 19 nt, Artificial Sequence
  Description of Artificial Sequence: Synthetic oligonucleotide
  Antisense strand to SEQ ID NO: 138022
gaucuacccacacuuaaag

SEQ ID NO: 138024 - RNA, 19 nt, Artificial Sequence
  Description of Artificial Sequence: Synthetic oligonucleotide
  Sense strand starting at position 333 of SEQ ID NO: 1773
guagaucccacaggaaagu

SEQ ID NO: 138025 - RNA, 19 nt, Artificial Sequence
  Description of Artificial Sequence: Synthetic oligonucleotide
  Antisense strand to SEQ ID NO: 138024
acuuuccugugggaucuac

SEQ ID NO: 138026 - RNA, 19 nt, Artificial Sequence
  Description of Artificial Sequence: Synthetic oligonucleotide
  Sense strand starting at position 395 of SEQ ID NO: 1773
ggccuaaacaagugagaag

SEQ ID NO: 138027 - RNA, 19 nt, Artificial Sequence
  Description of Artificial Sequence: Synthetic oligonucleotide
  Antisense strand to SEQ ID NO: 138026
cuucucacuuguuuaggcc

SEQ ID NO: 138028 - RNA, 19 nt, Artificial Sequence
  Description of Artificial Sequence: Synthetic oligonucleotide
  Sense strand starting at position 419 of SEQ ID NO: 1773
ucuggaagaugggaauuaa

SEQ ID NO: 138029 - RNA, 19 nt, Artificial Sequence
  Description of Artificial Sequence: Synthetic oligonucleotide
  Antisense strand to SEQ ID NO: 138028
uuaauucccaucuuccaga

SEQ ID NO: 138030 - RNA, 19 nt, Artificial Sequence
  Description of Artificial Sequence: Synthetic oligonucleotide
  Sense strand starting at position 475 of SEQ ID NO: 1773
guaggagcucaguauccua

SEQ ID NO: 138031 - RNA, 19 nt, Artificial Sequence
  Description of Artificial Sequence: Synthetic oligonucleotide
  Antisense strand to SEQ ID NO: 138030
uaggauacugagcuccuac

SEQ ID NO: 138032 - RNA, 19 nt, Artificial Sequence
  Description of Artificial Sequence: Synthetic oligonucleotide
  Sense strand starting at position 588 of SEQ ID NO: 1773
caaagcuuuggcuggagau

SEQ ID NO: 138033 - RNA, 19 nt, Artificial Sequence
  Description of Artificial Sequence: Synthetic oligonucleotide
  Antisense strand to SEQ ID NO: 138032
aucuccagccaaagcuuug

SEQ ID NO: 138034 - RNA, 19 nt, Artificial Sequence
  Description of Artificial Sequence: Synthetic oligonucleotide
  Sense strand starting at position 589 of SEQ ID NO: 1773
aaagcuuuggcuggagaug

SEQ ID NO: 138035 - RNA, 19 nt, Artificial Sequence
  Description of Artificial Sequence: Synthetic oligonucleotide
  Antisense strand to SEQ ID NO: 138034
caucuccagccaaagcuuu

SEQ ID NO: 138036 - RNA, 19 nt, Artificial Sequence
  Description of Artificial Sequence: Synthetic oligonucleotide
  Sense strand starting at position 627 of SEQ ID NO: 1773
cagaucuugcugggcaaca

SEQ ID NO: 138037 - RNA, 19 nt, Artificial Sequence
  Description of Artificial Sequence: Synthetic oligonucleotide
  Antisense strand to SEQ ID NO: 138036
uguugcccagcaagaucug

SEQ ID NO: 138038 - RNA, 19 nt, Artificial Sequence
  Description of Artificial Sequence: Synthetic oligonucleotide
  Sense strand starting at position 629 of SEQ ID NO: 1773
gaucuugcugggcaacaga

SEQ ID NO: 138039 - RNA, 19 nt, Artificial Sequence
  Description of Artificial Sequence: Synthetic oligonucleotide
  Antisense strand to SEQ ID NO: 138038
ucuguugcccagcaagauc

SEQ ID NO: 138040 - RNA, 19 nt, Artificial Sequence
  Description of Artificial Sequence: Synthetic oligonucleotide
  Sense strand starting at position 1010 of SEQ ID NO: 1773
uaauauugugcccagggaa

SEQ ID NO: 138041 - RNA, 19 nt, Artificial Sequence
  Description of Artificial Sequence: Synthetic oligonucleotide
  Antisense strand to SEQ ID NO: 138040
uucccugggcacaauauua

SEQ ID NO: 138042 - RNA, 19 nt, Artificial Sequence
  Description of Artificial Sequence: Synthetic oligonucleotide
  Sense strand starting at position 1730 of SEQ ID NO: 1773
ugaaguuccaccgagaucu

SEQ ID NO: 138043 - RNA, 19 nt, Artificial Sequence
  Description of Artificial Sequence: Synthetic oligonucleotide
  Antisense strand to SEQ ID NO: 138042
agaucucgguggaacuuca

SEQ ID NO: 138044 - RNA, 19 nt, Artificial Sequence
  Description of Artificial Sequence: Synthetic oligonucleotide
  Sense strand starting at position 1806 of SEQ ID NO: 1773
agaguucuugccucucgca

SEQ ID NO: 138045 - RNA, 19 nt, Artificial Sequence
  Description of Artificial Sequence: Synthetic oligonucleotide
  Antisense strand to SEQ ID NO: 138044
ugcgagaggcaagaacucu

SEQ ID NO: 138046 - RNA, 19 nt, Artificial Sequence
  Description of Artificial Sequence: Synthetic oligonucleotide
  Sense strand starting at position 2240 of SEQ ID NO: 1773
aggcccuuguggguagaaa

SEQ ID NO: 138047 - RNA, 19 nt, Artificial Sequence
  Description of Artificial Sequence: Synthetic oligonucleotide
  Antisense strand to SEQ ID NO: 138046
uuucuacccacaagggccu

SEQ ID NO: 138048 - RNA, 19 nt, Artificial Sequence
  Description of Artificial Sequence: Synthetic oligonucleotide
  Sense strand starting at position 2310 of SEQ ID NO: 1773
ugacaaguucccggaucuc

SEQ ID NO: 138049 - RNA, 19 nt, Artificial Sequence
  Description of Artificial Sequence: Synthetic oligonucleotide
  Antisense strand to SEQ ID NO: 138048
gagauccgggaacuuguca

SEQ ID NO: 138050 - RNA, 19 nt, Artificial Sequence
  Description of Artificial Sequence: Synthetic oligonucleotide
  Sense strand starting at position 2380 of SEQ ID NO: 1773
gaggaaggagucugucagu

SEQ ID NO: 138051 - RNA, 19 nt, Artificial Sequence
  Description of Artificial Sequence: Synthetic oligonucleotide
  Antisense strand to SEQ ID NO: 138050
acugacagacuccuuccuc

SEQ ID NO: 138052 - RNA, 19 nt, Artificial Sequence
  Description of Artificial Sequence: Synthetic oligonucleotide
  Sense strand starting at position 2393 of SEQ ID NO: 1773
gucagugcugcgcuguaua

SEQ ID NO: 138053 - RNA, 19 nt, Artificial Sequence
  Description of Artificial Sequence: Synthetic oligonucleotide
  Antisense strand to SEQ ID NO: 138052
uauacagcgcagcacugac

SEQ ID NO: 138054 - RNA, 19 nt, Artificial Sequence
  Description of Artificial Sequence: Synthetic oligonucleotide
  Sense strand starting at position 2713 of SEQ ID NO: 1773
gagagagguuccucucuac

SEQ ID NO: 138055 - RNA, 19 nt, Artificial Sequence
  Description of Artificial Sequence: Synthetic oligonucleotide
  Antisense strand to SEQ ID NO: 138054
guagagaggaaccucucuc

SEQ ID NO: 138056 - RNA, 19 nt, Artificial Sequence
  Description of Artificial Sequence: Synthetic oligonucleotide
  Sense strand starting at position 2754 of SEQ ID NO: 1773
aguuuacuccaaggucauu

SEQ ID NO: 138057 - RNA, 19 nt, Artificial Sequence
  Description of Artificial Sequence: Synthetic oligonucleotide
  Antisense strand to SEQ ID NO: 138056
aaugaccuuggaguaaacu

SEQ ID NO: 138058 - RNA, 19 nt, Artificial Sequence
  Description of Artificial Sequence: Synthetic oligonucleotide
  Sense strand starting at position 2760 of SEQ ID NO: 1773
cuccaaggucauuggacaa

SEQ ID NO: 138059 - RNA, 19 nt, Artificial Sequence
  Description of Artificial Sequence: Synthetic oligonucleotide
  Antisense strand to SEQ ID NO: 138058
uuguccaaugaccuuggag

SEQ ID NO: 138060 - RNA, 19 nt, Artificial Sequence
  Description of Artificial Sequence: Synthetic oligonucleotide
  Sense strand starting at position 2790 of SEQ ID NO: 1773
uggacuuugcaaggagaau

SEQ ID NO: 138061 - RNA, 19 nt, Artificial Sequence
  Description of Artificial Sequence: Synthetic oligonucleotide
  Antisense strand to SEQ ID NO: 138060
auucuccuugcaaagucca

SEQ ID NO: 138062 - RNA, 19 nt, Artificial Sequence
  Description of Artificial Sequence: Synthetic oligonucleotide
  Sense strand starting at position 2830 of SEQ ID NO: 1773
ccuguauuccuauaaguac

SEQ ID NO: 138063 - RNA, 19 nt, Artificial Sequence
  Description of Artificial Sequence: Synthetic oligonucleotide
  Antisense strand to SEQ ID NO: 138062
guacuuauaggaauacagg

SEQ ID NO: 138064 - RNA, 19 nt, Artificial Sequence
  Description of Artificial Sequence: Synthetic oligonucleotide
  Sense strand starting at position 3001 of SEQ ID NO: 1773
gcagucuagggcuaauaca

SEQ ID NO: 138065 - RNA, 19 nt, Artificial Sequence
  Description of Artificial Sequence: Synthetic oligonucleotide
  Antisense strand to SEQ ID NO: 138064
uguauuagcccuagacugc

SEQ ID NO: 138066 - RNA, 19 nt, Artificial Sequence
  Description of Artificial Sequence: Synthetic oligonucleotide
  Sense strand starting at position 3139 of SEQ ID NO: 1773
aguuguucuguguagauuu

SEQ ID NO: 138067 - RNA, 19 nt, Artificial Sequence
  Description of Artificial Sequence: Synthetic oligonucleotide
  Antisense strand to SEQ ID NO: 138066
aaaucuacacagaacaacu

SEQ ID NO: 138068 - RNA, 19 nt, Artificial Sequence
  Description of Artificial Sequence: Synthetic oligonucleotide
  Sense strand starting at position 3317 of SEQ ID NO: 1773
agcuuaugugcucauaauu

SEQ ID NO: 138069 - RNA, 19 nt, Artificial Sequence
  Description of Artificial Sequence: Synthetic oligonucleotide
  Antisense strand to SEQ ID NO: 138068
aauuaugagcacauaagcu

SEQ ID NO: 138070 - RNA, 19 nt, Artificial Sequence
  Description of Artificial Sequence: Synthetic oligonucleotide
  Sense strand starting at position 3461 of SEQ ID NO: 1773
ugugaacuccuugaaaguu

SEQ ID NO: 138071 - RNA, 19 nt, Artificial Sequence
  Description of Artificial Sequence: Synthetic oligonucleotide
  Antisense strand to SEQ ID NO: 138070
aacuuucaaggaguucaca

SEQ ID NO: 138072 - RNA, 19 nt, Artificial Sequence
  Description of Artificial Sequence: Synthetic oligonucleotide
  Sense strand starting at position 3578 of SEQ ID NO: 1773
auaaaugaguuguccggau

SEQ ID NO: 138073 - RNA, 19 nt, Artificial Sequence
  Description of Artificial Sequence: Synthetic oligonucleotide
  Antisense strand to SEQ ID NO: 138072
auccggacaacucauuuau

SEQ ID NO: 138074 - RNA, 19 nt, Artificial Sequence
  Description of Artificial Sequence: Synthetic oligonucleotide
  Sense strand starting at position 3580 of SEQ ID NO: 1773
aaaugaguuguccggauga

SEQ ID NO: 138075 - RNA, 19 nt, Artificial Sequence
  Description of Artificial Sequence: Synthetic oligonucleotide
  Antisense strand to SEQ ID NO: 138074
ucauccggacaacucauuu

SEQ ID NO: 138076 - RNA, 19 nt, Artificial Sequence
  Description of Artificial Sequence: Synthetic oligonucleotide
  Sense strand starting at position 3582 of SEQ ID NO: 1773
augaguuguccggaugaaa

SEQ ID NO: 138077 - RNA, 19 nt, Artificial Sequence
  Description of Artificial Sequence: Synthetic oligonucleotide
  Antisense strand to SEQ ID NO: 138076
uuucauccggacaacucau

SEQ ID NO: 138078 - RNA, 19 nt, Artificial Sequence
  Description of Artificial Sequence: Synthetic oligonucleotide
  Sense strand starting at position 3645 of SEQ ID NO: 1773
gugaguuacuauccugaac

SEQ ID NO: 138079 - RNA, 19 nt, Artificial Sequence
  Description of Artificial Sequence: Synthetic oligonucleotide
  Antisense strand to SEQ ID NO: 138078
guucaggauaguaacucac

SEQ ID NO: 138080 - RNA, 19 nt, Artificial Sequence
  Description of Artificial Sequence: Synthetic oligonucleotide
  Sense strand starting at position 3665 of SEQ ID NO: 1773
aggguugugaccuggacuu

SEQ ID NO: 138081 - RNA, 19 nt, Artificial Sequence
  Description of Artificial Sequence: Synthetic oligonucleotide
  Antisense strand to SEQ ID NO: 138080
aaguccaggucacaacccu

SEQ ID NO: 138082 - RNA, 19 nt, Artificial Sequence
  Description of Artificial Sequence: Synthetic oligonucleotide
  Sense strand starting at position 3667 of SEQ ID NO: 1773
gguugugaccuggacuuua

SEQ ID NO: 138083 - RNA, 19 nt, Artificial Sequence
  Description of Artificial Sequence: Synthetic oligonucleotide
  Antisense strand to SEQ ID NO: 138082
uaaaguccaggucacaacc

SEQ ID NO: 138084 - RNA, 19 nt, Artificial Sequence
  Description of Artificial Sequence: Synthetic oligonucleotide
  Sense strand starting at position 138 of SEQ ID NO: 1774
ccagaugcagccuggaauu

SEQ ID NO: 138085 - RNA, 19 nt, Artificial Sequence
  Description of Artificial Sequence: Synthetic oligonucleotide
  Antisense strand to SEQ ID NO: 138084
aauuccaggcugcaucugg

SEQ ID NO: 138086 - RNA, 19 nt, Artificial Sequence
  Description of Artificial Sequence: Synthetic oligonucleotide
  Sense strand starting at position 149 of SEQ ID NO: 1774
cuggaauucuuagcuuuau

SEQ ID NO: 138087 - RNA, 19 nt, Artificial Sequence
  Description of Artificial Sequence: Synthetic oligonucleotide
  Antisense strand to SEQ ID NO: 138086
auaaagcuaagaauuccag

SEQ ID NO: 138088 - RNA, 19 nt, Artificial Sequence
  Description of Artificial Sequence: Synthetic oligonucleotide
  Sense strand starting at position 150 of SEQ ID NO: 1774
uggaauucuuagcuuuaug

SEQ ID NO: 138089 - RNA, 19 nt, Artificial Sequence
  Description of Artificial Sequence: Synthetic oligonucleotide
  Antisense strand to SEQ ID NO: 138088
cauaaagcuaagaauucca

SEQ ID NO: 138090 - RNA, 19 nt, Artificial Sequence
  Description of Artificial Sequence: Synthetic oligonucleotide
  Sense strand starting at position 161 of SEQ ID NO: 1774
gcuuuaugcccucaggguu

SEQ ID NO: 138091 - RNA, 19 nt, Artificial Sequence
  Description of Artificial Sequence: Synthetic oligonucleotide
  Antisense strand to SEQ ID NO: 138090
aacccugagggcauaaagc

SEQ ID NO: 138092 - RNA, 19 nt, Artificial Sequence
  Description of Artificial Sequence: Synthetic oligonucleotide
  Sense strand starting at position 213 of SEQ ID NO: 1774
guugcuacuggacaaguaa

SEQ ID NO: 138093 - RNA, 19 nt, Artificial Sequence
  Description of Artificial Sequence: Synthetic oligonucleotide
  Antisense strand to SEQ ID NO: 138092
uuacuuguccaguagcaac

SEQ ID NO: 138094 - RNA, 19 nt, Artificial Sequence
  Description of Artificial Sequence: Synthetic oligonucleotide
  Sense strand starting at position 318 of SEQ ID NO: 1774
acuccucugccagguaaga

SEQ ID NO: 138095 - RNA, 19 nt, Artificial Sequence
  Description of Artificial Sequence: Synthetic oligonucleotide
  Antisense strand to SEQ ID NO: 138094
ucuuaccuggcagaggagu

SEQ ID NO: 138096 - RNA, 19 nt, Artificial Sequence
  Description of Artificial Sequence: Synthetic oligonucleotide
  Sense strand starting at position 360 of SEQ ID NO: 1774
ggcaaagggaaaugcuaau

SEQ ID NO: 138097 - RNA, 19 nt, Artificial Sequence
  Description of Artificial Sequence: Synthetic oligonucleotide
  Antisense strand to SEQ ID NO: 138096
auuagcauuucccuuugcc

SEQ ID NO: 138098 - RNA, 19 nt, Artificial Sequence
  Description of Artificial Sequence: Synthetic oligonucleotide
  Sense strand starting at position 373 of SEQ ID NO: 1774
gcuaauaccuggucguuaa

SEQ ID NO: 138099 - RNA, 19 nt, Artificial Sequence
  Description of Artificial Sequence: Synthetic oligonucleotide
  Antisense strand to SEQ ID NO: 138098
uuaacgaccagguauuagc

SEQ ID NO: 138100 - RNA, 19 nt, Artificial Sequence
  Description of Artificial Sequence: Synthetic oligonucleotide
  Sense strand starting at position 374 of SEQ ID NO: 1774
cuaauaccuggucguuaaa

SEQ ID NO: 138101 - RNA, 19 nt, Artificial Sequence
  Description of Artificial Sequence: Synthetic oligonucleotide
  Antisense strand to SEQ ID NO: 138100
uuuaacgaccagguauuag

SEQ ID NO: 138102 - RNA, 19 nt, Artificial Sequence
  Description of Artificial Sequence: Synthetic oligonucleotide
  Sense strand starting at position 401 of SEQ ID NO: 1774
ugagucaggcccuauccua

SEQ ID NO: 138103 - RNA, 19 nt, Artificial Sequence
  Description of Artificial Sequence: Synthetic oligonucleotide
  Antisense strand to SEQ ID NO: 138102
uaggauagggccugacuca

SEQ ID NO: 138104 - RNA, 19 nt, Artificial Sequence
  Description of Artificial Sequence: Synthetic oligonucleotide
  Sense strand starting at position 614 of SEQ ID NO: 1774
ggugaagacuuggaauaug

SEQ ID NO: 138105 - RNA, 19 nt, Artificial Sequence
  Description of Artificial Sequence: Synthetic oligonucleotide
  Antisense strand to SEQ ID NO: 138104
cauauuccaagucuucacc

SEQ ID NO: 138106 - RNA, 19 nt, Artificial Sequence
  Description of Artificial Sequence: Synthetic oligonucleotide
  Sense strand starting at position 738 of SEQ ID NO: 1774
caaaguggcugaguacuuu

SEQ ID NO: 138107 - RNA, 19 nt, Artificial Sequence
  Description of Artificial Sequence: Synthetic oligonucleotide
  Antisense strand to SEQ ID NO: 138106
aaaguacucagccacuuug

SEQ ID NO: 138108 - RNA, 19 nt, Artificial Sequence
  Description of Artificial Sequence: Synthetic oligonucleotide
  Sense strand starting at position 744 of SEQ ID NO: 1774
ggcugaguacuuuaagguc

SEQ ID NO: 138109 - RNA, 19 nt, Artificial Sequence
  Description of Artificial Sequence: Synthetic oligonucleotide
  Antisense strand to SEQ ID NO: 138108
gaccuuaaaguacucagcc

SEQ ID NO: 138110 - RNA, 19 nt, Artificial Sequence
  Description of Artificial Sequence: Synthetic oligonucleotide
  Sense strand starting at position 750 of SEQ ID NO: 1774
guacuuuaaggucauacaa

SEQ ID NO: 138111 - RNA, 19 nt, Artificial Sequence
  Description of Artificial Sequence: Synthetic oligonucleotide
  Antisense strand to SEQ ID NO: 138110
uuguaugaccuuaaaguac

SEQ ID NO: 138112 - RNA, 19 nt, Artificial Sequence
  Description of Artificial Sequence: Synthetic oligonucleotide
  Sense strand starting at position 763 of SEQ ID NO: 1774
auacaacucgucuauuaag

SEQ ID NO: 138113 - RNA, 19 nt, Artificial Sequence
  Description of Artificial Sequence: Synthetic oligonucleotide
  Antisense strand to SEQ ID NO: 138112
cuuaauagacgaguuguau

SEQ ID NO: 138114 - RNA, 19 nt, Artificial Sequence
  Description of Artificial Sequence: Synthetic oligonucleotide
  Sense strand starting at position 1068 of SEQ ID NO: 1774
augaguauuuauuagguac

SEQ ID NO: 138115 - RNA, 19 nt, Artificial Sequence
  Description of Artificial Sequence: Synthetic oligonucleotide
  Antisense strand to SEQ ID NO: 138114
guaccuaauaaauacucau

SEQ ID NO: 138116 - RNA, 19 nt, Artificial Sequence
  Description of Artificial Sequence: Synthetic oligonucleotide
  Sense strand starting at position 1070 of SEQ ID NO: 1774
gaguauuuauuagguaccu

SEQ ID NO: 138117 - RNA, 19 nt, Artificial Sequence
  Description of Artificial Sequence: Synthetic oligonucleotide
  Antisense strand to SEQ ID NO: 138116
agguaccuaauaaauacuc

SEQ ID NO: 138118 - RNA, 19 nt, Artificial Sequence
  Description of Artificial Sequence: Synthetic oligonucleotide
  Sense strand starting at position 1193 of SEQ ID NO: 1774
cauugagcugcccaagaga

SEQ ID NO: 138119 - RNA, 19 nt, Artificial Sequence
  Description of Artificial Sequence: Synthetic oligonucleotide
  Antisense strand to SEQ ID NO: 138118
ucucuugggcagcucaaug

SEQ ID NO: 138120 - RNA, 19 nt, Artificial Sequence
  Description of Artificial Sequence: Synthetic oligonucleotide
  Sense strand starting at position 1214 of SEQ ID NO: 1774
guggaaagauugucacguu

SEQ ID NO: 138121 - RNA, 19 nt, Artificial Sequence
  Description of Artificial Sequence: Synthetic oligonucleotide
  Antisense strand to SEQ ID NO: 138120
aacgugacaaucuuuccac

SEQ ID NO: 138122 - RNA, 19 nt, Artificial Sequence
  Description of Artificial Sequence: Synthetic oligonucleotide
  Sense strand starting at position 1224 of SEQ ID NO: 1774
ugucacguuccuggaguaa

SEQ ID NO: 138123 - RNA, 19 nt, Artificial Sequence
  Description of Artificial Sequence: Synthetic oligonucleotide
  Antisense strand to SEQ ID NO: 138122
uuacuccaggaacgugaca

SEQ ID NO: 138124 - RNA, 19 nt, Artificial Sequence
  Description of Artificial Sequence: Synthetic oligonucleotide
  Sense strand starting at position 1400 of SEQ ID NO: 1774
gcuggcuauuaucuuguga

SEQ ID NO: 138125 - RNA, 19 nt, Artificial Sequence
  Description of Artificial Sequence: Synthetic oligonucleotide
  Antisense strand to SEQ ID NO: 138124
ucacaagauaauagccagc

SEQ ID NO: 138126 - RNA, 19 nt, Artificial Sequence
  Description of Artificial Sequence: Synthetic oligonucleotide
  Sense strand starting at position 2426 of SEQ ID NO: 1774
ucacuugaacuugaguguu

SEQ ID NO: 138127 - RNA, 19 nt, Artificial Sequence
  Description of Artificial Sequence: Synthetic oligonucleotide
  Antisense strand to SEQ ID NO: 138126
aacacucaaguucaaguga

SEQ ID NO: 138128 - RNA, 19 nt, Artificial Sequence
  Description of Artificial Sequence: Synthetic oligonucleotide
  Sense strand starting at position 2439 of SEQ ID NO: 1774
aguguuucucgcgaauuug

SEQ ID NO: 138129 - RNA, 19 nt, Artificial Sequence
  Description of Artificial Sequence: Synthetic oligonucleotide
  Antisense strand to SEQ ID NO: 138128
caaauucgcgagaaacacu

SEQ ID NO: 138130 - RNA, 19 nt, Artificial Sequence
  Description of Artificial Sequence: Synthetic oligonucleotide
  Sense strand starting at position 2445 of SEQ ID NO: 1774
ucucgcgaauuuguccaaa

SEQ ID NO: 138131 - RNA, 19 nt, Artificial Sequence
  Description of Artificial Sequence: Synthetic oligonucleotide
  Antisense strand to SEQ ID NO: 138130
uuuggacaaauucgcgaga

SEQ ID NO: 138132 - RNA, 19 nt, Artificial Sequence
  Description of Artificial Sequence: Synthetic oligonucleotide
  Sense strand starting at position 2447 of SEQ ID NO: 1774
ucgcgaauuuguccaaacu

SEQ ID NO: 138133 - RNA, 19 nt, Artificial Sequence
  Description of Artificial Sequence: Synthetic oligonucleotide
  Antisense strand to SEQ ID NO: 138132
aguuuggacaaauucgcga

SEQ ID NO: 138134 - RNA, 19 nt, Artificial Sequence
  Description of Artificial Sequence: Synthetic oligonucleotide
  Sense strand starting at position 2686 of SEQ ID NO: 1774
cuaccacgaccggauaauu

SEQ ID NO: 138135 - RNA, 19 nt, Artificial Sequence
  Description of Artificial Sequence: Synthetic oligonucleotide
  Antisense strand to SEQ ID NO: 138134
aauuauccggucgugguag

SEQ ID NO: 138136 - RNA, 19 nt, Artificial Sequence
  Description of Artificial Sequence: Synthetic oligonucleotide
  Sense strand starting at position 3059 of SEQ ID NO: 1774
cugugaacuucccugagca

SEQ ID NO: 138137 - RNA, 19 nt, Artificial Sequence
  Description of Artificial Sequence: Synthetic oligonucleotide
  Antisense strand to SEQ ID NO: 138136
ugcucagggaaguucacag

SEQ ID NO: 138138 - RNA, 19 nt, Artificial Sequence
  Description of Artificial Sequence: Synthetic oligonucleotide
  Sense strand starting at position 3060 of SEQ ID NO: 1774
ugugaacuucccugagcaa

SEQ ID NO: 138139 - RNA, 19 nt, Artificial Sequence
  Description of Artificial Sequence: Synthetic oligonucleotide
  Antisense strand to SEQ ID NO: 138138
uugcucagggaaguucaca

SEQ ID NO: 138140 - RNA, 19 nt, Artificial Sequence
  Description of Artificial Sequence: Synthetic oligonucleotide
  Sense strand starting at position 3061 of SEQ ID NO: 1774
gugaacuucccugagcaag

SEQ ID NO: 138141 - RNA, 19 nt, Artificial Sequence
  Description of Artificial Sequence: Synthetic oligonucleotide
  Antisense strand to SEQ ID NO: 138140
cuugcucagggaaguucac

SEQ ID NO: 138142 - RNA, 19 nt, Artificial Sequence
  Description of Artificial Sequence: Synthetic oligonucleotide
  Sense strand starting at position 3463 of SEQ ID NO: 1774
gcaccuggccucuguauuu

SEQ ID NO: 138143 - RNA, 19 nt, Artificial Sequence
  Description of Artificial Sequence: Synthetic oligonucleotide
  Antisense strand to SEQ ID NO: 138142
aaauacagaggccaggugc

SEQ ID NO: 138144 - RNA, 19 nt, Artificial Sequence
  Description of Artificial Sequence: Synthetic oligonucleotide
  Sense strand starting at position 3512 of SEQ ID NO: 1774
gaagaaaguuuggagauaa

SEQ ID NO: 138145 - RNA, 19 nt, Artificial Sequence
  Description of Artificial Sequence: Synthetic oligonucleotide
  Antisense strand to SEQ ID NO: 138144
uuaucuccaaacuuucuuc

SEQ ID NO: 138146 - RNA, 19 nt, Artificial Sequence
  Description of Artificial Sequence: Synthetic oligonucleotide
  Sense strand starting at position 3588 of SEQ ID NO: 1774
uuugguguauuuccuuaca

SEQ ID NO: 138147 - RNA, 19 nt, Artificial Sequence
  Description of Artificial Sequence: Synthetic oligonucleotide
  Antisense strand to SEQ ID NO: 138146
uguaaggaaauacaccaaa

SEQ ID NO: 138148 - RNA, 19 nt, Artificial Sequence
  Description of Artificial Sequence: Synthetic oligonucleotide
  Sense strand starting at position 3590 of SEQ ID NO: 1774
ugguguauuuccuuacacu

SEQ ID NO: 138149 - RNA, 19 nt, Artificial Sequence
  Description of Artificial Sequence: Synthetic oligonucleotide
  Antisense strand to SEQ ID NO: 138148
aguguaaggaaauacacca

SEQ ID NO: 138150 - RNA, 19 nt, Artificial Sequence
  Description of Artificial Sequence: Synthetic oligonucleotide
  Sense strand starting at position 3679 of SEQ ID NO: 1774
ucuaguagacaugagcauu

SEQ ID NO: 138151 - RNA, 19 nt, Artificial Sequence
  Description of Artificial Sequence: Synthetic oligonucleotide
  Antisense strand to SEQ ID NO: 138150
aaugcucaugucuacuaga

SEQ ID NO: 138152 - RNA, 19 nt, Artificial Sequence
  Description of Artificial Sequence: Synthetic oligonucleotide
  Sense strand starting at position 3750 of SEQ ID NO: 1774
auguauguaccuuacugau

SEQ ID NO: 138153 - RNA, 19 nt, Artificial Sequence
  Description of Artificial Sequence: Synthetic oligonucleotide
  Antisense strand to SEQ ID NO: 138152
aucaguaagguacauacau

SEQ ID NO: 138154 - RNA, 19 nt, Artificial Sequence
  Description of Artificial Sequence: Synthetic oligonucleotide
  Sense strand starting at position 3782 of SEQ ID NO: 1774
ggucaauguuagguuuauu

SEQ ID NO: 138155 - RNA, 19 nt, Artificial Sequence
  Description of Artificial Sequence: Synthetic oligonucleotide
  Antisense strand to SEQ ID NO: 138154
aauaaaccuaacauugacc

SEQ ID NO: 138156 - RNA, 19 nt, Artificial Sequence
  Description of Artificial Sequence: Synthetic oligonucleotide
  Sense strand starting at position 3785 of SEQ ID NO: 1774
caauguuagguuuauugau

SEQ ID NO: 138157 - RNA, 19 nt, Artificial Sequence
  Description of Artificial Sequence: Synthetic oligonucleotide
  Antisense strand to SEQ ID NO: 138156
aucaauaaaccuaacauug

SEQ ID NO: 138158 - RNA, 19 nt, Artificial Sequence
  Description of Artificial Sequence: Synthetic oligonucleotide
  Sense strand starting at position 3835 of SEQ ID NO: 1774
cugggaguauagcuaugaa

SEQ ID NO: 138159 - RNA, 19 nt, Artificial Sequence
  Description of Artificial Sequence: Synthetic oligonucleotide
  Antisense strand to SEQ ID NO: 138158
uucauagcuauacucccag

SEQ ID NO: 138160 - RNA, 19 nt, Artificial Sequence
  Description of Artificial Sequence: Synthetic oligonucleotide
  Sense strand starting at position 3838 of SEQ ID NO: 1774
ggaguauagcuaugaacaa

SEQ ID NO: 138161 - RNA, 19 nt, Artificial Sequence
  Description of Artificial Sequence: Synthetic oligonucleotide
  Antisense strand to SEQ ID NO: 138160
uuguucauagcuauacucc

SEQ ID NO: 138162 - RNA, 19 nt, Artificial Sequence
  Description of Artificial Sequence: Synthetic oligonucleotide
  Sense strand starting at position 3862 of SEQ ID NO: 1774
acaaguuccuguccucaua

SEQ ID NO: 138163 - RNA, 19 nt, Artificial Sequence
  Description of Artificial Sequence: Synthetic oligonucleotide
  Antisense strand to SEQ ID NO: 138162
uaugaggacaggaacuugu

SEQ ID NO: 138164 - RNA, 19 nt, Artificial Sequence
  Description of Artificial Sequence: Synthetic oligonucleotide
  Sense strand starting at position 30 of SEQ ID NO: 1775
ggugcaaacuccgucagau

SEQ ID NO: 138165 - RNA, 19 nt, Artificial Sequence
  Description of Artificial Sequence: Synthetic oligonucleotide
  Antisense strand to SEQ ID NO: 138164
aucugacggaguuugcacc

SEQ ID NO: 138166 - RNA, 19 nt, Artificial Sequence
  Description of Artificial Sequence: Synthetic oligonucleotide
  Sense strand starting at position 32 of SEQ ID NO: 1775
ugcaaacuccgucagaugu

SEQ ID NO: 138167 - RNA, 19 nt, Artificial Sequence
  Description of Artificial Sequence: Synthetic oligonucleotide
  Antisense strand to SEQ ID NO: 138166
acaucugacggaguuugca

SEQ ID NO: 138168 - RNA, 19 nt, Artificial Sequence
  Description of Artificial Sequence: Synthetic oligonucleotide
  Sense strand starting at position 42 of SEQ ID NO: 1775
gucagaugugaguaugcag

SEQ ID NO: 138169 - RNA, 19 nt, Artificial Sequence
  Description of Artificial Sequence: Synthetic oligonucleotide
  Antisense strand to SEQ ID NO: 138168
cugcauacucacaucugac

SEQ ID NO: 138170 - RNA, 19 nt, Artificial Sequence
  Description of Artificial Sequence: Synthetic oligonucleotide
  Sense strand starting at position 581 of SEQ ID NO: 1775
ccaugaguuugaguaguaa

SEQ ID NO: 138171 - RNA, 19 nt, Artificial Sequence
  Description of Artificial Sequence: Synthetic oligonucleotide
  Antisense strand to SEQ ID NO: 138170
uuacuacucaaacucaugg

SEQ ID NO: 138172 - RNA, 19 nt, Artificial Sequence
  Description of Artificial Sequence: Synthetic oligonucleotide
  Sense strand starting at position 601 of SEQ ID NO: 1775
acagcaagucucuguuacu

SEQ ID NO: 138173 - RNA, 19 nt, Artificial Sequence
  Description of Artificial Sequence: Synthetic oligonucleotide
  Antisense strand to SEQ ID NO: 138172
aguaacagagacuugcugu

SEQ ID NO: 138174 - RNA, 19 nt, Artificial Sequence
  Description of Artificial Sequence: Synthetic oligonucleotide
  Sense strand starting at position 901 of SEQ ID NO: 1775
ucaguaagugguagguguu

SEQ ID NO: 138175 - RNA, 19 nt, Artificial Sequence
  Description of Artificial Sequence: Synthetic oligonucleotide
  Antisense strand to SEQ ID NO: 138174
aacaccuaccacuuacuga

SEQ ID NO: 138176 - RNA, 19 nt, Artificial Sequence
  Description of Artificial Sequence: Synthetic oligonucleotide
  Sense strand starting at position 902 of SEQ ID NO: 1775
caguaagugguagguguua

SEQ ID NO: 138177 - RNA, 19 nt, Artificial Sequence
  Description of Artificial Sequence: Synthetic oligonucleotide
  Antisense strand to SEQ ID NO: 138176
uaacaccuaccacuuacug

SEQ ID NO: 138178 - RNA, 19 nt, Artificial Sequence
  Description of Artificial Sequence: Synthetic oligonucleotide
  Sense strand starting at position 977 of SEQ ID NO: 1775
ugguaagaacuuuggucga

SEQ ID NO: 138179 - RNA, 19 nt, Artificial Sequence
  Description of Artificial Sequence: Synthetic oligonucleotide
  Antisense strand to SEQ ID NO: 138178
ucgaccaaaguucuuacca

SEQ ID NO: 138180 - RNA, 19 nt, Artificial Sequence
  Description of Artificial Sequence: Synthetic oligonucleotide
  Sense strand starting at position 979 of SEQ ID NO: 1775
guaagaacuuuggucgaau

SEQ ID NO: 138181 - RNA, 19 nt, Artificial Sequence
  Description of Artificial Sequence: Synthetic oligonucleotide
  Antisense strand to SEQ ID NO: 138180
auucgaccaaaguucuuac

SEQ ID NO: 138182 - RNA, 19 nt, Artificial Sequence
  Description of Artificial Sequence: Synthetic oligonucleotide
  Sense strand starting at position 980 of SEQ ID NO: 1775
uaagaacuuuggucgaauc

SEQ ID NO: 138183 - RNA, 19 nt, Artificial Sequence
  Description of Artificial Sequence: Synthetic oligonucleotide
  Antisense strand to SEQ ID NO: 138182
gauucgaccaaaguucuua

SEQ ID NO: 138184 - RNA, 19 nt, Artificial Sequence
  Description of Artificial Sequence: Synthetic oligonucleotide
  Sense strand starting at position 981 of SEQ ID NO: 1775
aagaacuuuggucgaauca

SEQ ID NO: 138185 - RNA, 19 nt, Artificial Sequence
  Description of Artificial Sequence: Synthetic oligonucleotide
  Antisense strand to SEQ ID NO: 138184
ugauucgaccaaaguucuu

SEQ ID NO: 138186 - RNA, 19 nt, Artificial Sequence
  Description of Artificial Sequence: Synthetic oligonucleotide
  Sense strand starting at position 982 of SEQ ID NO: 1775
agaacuuuggucgaaucau

SEQ ID NO: 138187 - RNA, 19 nt, Artificial Sequence
  Description of Artificial Sequence: Synthetic oligonucleotide
  Antisense strand to SEQ ID NO: 138186
augauucgaccaaaguucu

SEQ ID NO: 138188 - RNA, 19 nt, Artificial Sequence
  Description of Artificial Sequence: Synthetic oligonucleotide
  Sense strand starting at position 988 of SEQ ID NO: 1775
uuggucgaaucaucucuua

SEQ ID NO: 138189 - RNA, 19 nt, Artificial Sequence
  Description of Artificial Sequence: Synthetic oligonucleotide
  Antisense strand to SEQ ID NO: 138188
uaagagaugauucgaccaa

SEQ ID NO: 138190 - RNA, 19 nt, Artificial Sequence
  Description of Artificial Sequence: Synthetic oligonucleotide
  Sense strand starting at position 991 of SEQ ID NO: 1775
gucgaaucaucucuuagga

SEQ ID NO: 138191 - RNA, 19 nt, Artificial Sequence
  Description of Artificial Sequence: Synthetic oligonucleotide
  Antisense strand to SEQ ID NO: 138190
uccuaagagaugauucgac

SEQ ID NO: 138192 - RNA, 19 nt, Artificial Sequence
  Description of Artificial Sequence: Synthetic oligonucleotide
  Sense strand starting at position 1031 of SEQ ID NO: 1775
uguuauaagguucagcgaa

SEQ ID NO: 138193 - RNA, 19 nt, Artificial Sequence
  Description of Artificial Sequence: Synthetic oligonucleotide
  Antisense strand to SEQ ID NO: 138192
uucgcugaaccuuauaaca

SEQ ID NO: 138194 - RNA, 19 nt, Artificial Sequence
  Description of Artificial Sequence: Synthetic oligonucleotide
  Sense strand starting at position 1262 of SEQ ID NO: 1775
ggaagacgcagacaaguuu

SEQ ID NO: 138195 - RNA, 19 nt, Artificial Sequence
  Description of Artificial Sequence: Synthetic oligonucleotide
  Antisense strand to SEQ ID NO: 138194
aaacuugucugcgucuucc

SEQ ID NO: 138196 - RNA, 19 nt, Artificial Sequence
  Description of Artificial Sequence: Synthetic oligonucleotide
  Sense strand starting at position 1271 of SEQ ID NO: 1775
agacaaguuucccugaggu

SEQ ID NO: 138197 - RNA, 19 nt, Artificial Sequence
  Description of Artificial Sequence: Synthetic oligonucleotide
  Antisense strand to SEQ ID NO: 138196
accucagggaaacuugucu

SEQ ID NO: 138198 - RNA, 19 nt, Artificial Sequence
  Description of Artificial Sequence: Synthetic oligonucleotide
  Sense strand starting at position 1273 of SEQ ID NO: 1775
acaaguuucccugagguuu

SEQ ID NO: 138199 - RNA, 19 nt, Artificial Sequence
  Description of Artificial Sequence: Synthetic oligonucleotide
  Antisense strand to SEQ ID NO: 138198
aaaccucagggaaacuugu

SEQ ID NO: 138200 - RNA, 19 nt, Artificial Sequence
  Description of Artificial Sequence: Synthetic oligonucleotide
  Sense strand starting at position 1309 of SEQ ID NO: 1775
ucagccaugcucugaggaa

SEQ ID NO: 138201 - RNA, 19 nt, Artificial Sequence
  Description of Artificial Sequence: Synthetic oligonucleotide
  Antisense strand to SEQ ID NO: 138200
uuccucagagcauggcuga

SEQ ID NO: 138202 - RNA, 19 nt, Artificial Sequence
  Description of Artificial Sequence: Synthetic oligonucleotide
  Sense strand starting at position 1322 of SEQ ID NO: 1775
gaggaacuccuuuaacguc

SEQ ID NO: 138203 - RNA, 19 nt, Artificial Sequence
  Description of Artificial Sequence: Synthetic oligonucleotide
  Antisense strand to SEQ ID NO: 138202
gacguuaaaggaguuccuc

SEQ ID NO: 138204 - RNA, 19 nt, Artificial Sequence
  Description of Artificial Sequence: Synthetic oligonucleotide
  Sense strand starting at position 1458 of SEQ ID NO: 1775
uuucgauauccucaagcuc

SEQ ID NO: 138205 - RNA, 19 nt, Artificial Sequence
  Description of Artificial Sequence: Synthetic oligonucleotide
  Antisense strand to SEQ ID NO: 138204
gagcuugaggauaucgaaa

SEQ ID NO: 138206 - RNA, 19 nt, Artificial Sequence
  Description of Artificial Sequence: Synthetic oligonucleotide
  Sense strand starting at position 1473 of SEQ ID NO: 1775
gcuccaagugaguacugaa

SEQ ID NO: 138207 - RNA, 19 nt, Artificial Sequence
  Description of Artificial Sequence: Synthetic oligonucleotide
  Antisense strand to SEQ ID NO: 138206
uucaguacucacuuggagc

SEQ ID NO: 138208 - RNA, 19 nt, Artificial Sequence
  Description of Artificial Sequence: Synthetic oligonucleotide
  Sense strand starting at position 1485 of SEQ ID NO: 1775
uacugaauuccauguggcu

SEQ ID NO: 138209 - RNA, 19 nt, Artificial Sequence
  Description of Artificial Sequence: Synthetic oligonucleotide
  Antisense strand to SEQ ID NO: 138208
agccacauggaauucagua

SEQ ID NO: 138210 - RNA, 19 nt, Artificial Sequence
  Description of Artificial Sequence: Synthetic oligonucleotide
  Sense strand starting at position 1508 of SEQ ID NO: 1775
acccuagaguccucaaugu

SEQ ID NO: 138211 - RNA, 19 nt, Artificial Sequence
  Description of Artificial Sequence: Synthetic oligonucleotide
  Antisense strand to SEQ ID NO: 138210
acauugaggacucuagggu

SEQ ID NO: 138212 - RNA, 19 nt, Artificial Sequence
  Description of Artificial Sequence: Synthetic oligonucleotide
  Sense strand starting at position 1512 of SEQ ID NO: 1775
uagaguccucaauguguga

SEQ ID NO: 138213 - RNA, 19 nt, Artificial Sequence
  Description of Artificial Sequence: Synthetic oligonucleotide
  Antisense strand to SEQ ID NO: 138212
ucacacauugaggacucua

SEQ ID NO: 138214 - RNA, 19 nt, Artificial Sequence
  Description of Artificial Sequence: Synthetic oligonucleotide
  Sense strand starting at position 2546 of SEQ ID NO: 1775
uucccuuugguauaaguga

SEQ ID NO: 138215 - RNA, 19 nt, Artificial Sequence
  Description of Artificial Sequence: Synthetic oligonucleotide
  Antisense strand to SEQ ID NO: 138214
ucacuuauaccaaagggaa

SEQ ID NO: 138216 - RNA, 19 nt, Artificial Sequence
  Description of Artificial Sequence: Synthetic oligonucleotide
  Sense strand starting at position 2557 of SEQ ID NO: 1775
auaagugagacccguggaa

SEQ ID NO: 138217 - RNA, 19 nt, Artificial Sequence
  Description of Artificial Sequence: Synthetic oligonucleotide
  Antisense strand to SEQ ID NO: 138216
uuccacgggucucacuuau

SEQ ID NO: 138218 - RNA, 19 nt, Artificial Sequence
  Description of Artificial Sequence: Synthetic oligonucleotide
  Sense strand starting at position 2559 of SEQ ID NO: 1775
aagugagacccguggaaac

SEQ ID NO: 138219 - RNA, 19 nt, Artificial Sequence
  Description of Artificial Sequence: Synthetic oligonucleotide
  Antisense strand to SEQ ID NO: 138218
guuuccacgggucucacuu

SEQ ID NO: 138220 - RNA, 19 nt, Artificial Sequence
  Description of Artificial Sequence: Synthetic oligonucleotide
  Sense strand starting at position 2561 of SEQ ID NO: 1775
gugagacccguggaaacau

SEQ ID NO: 138221 - RNA, 19 nt, Artificial Sequence
  Description of Artificial Sequence: Synthetic oligonucleotide
  Antisense strand to SEQ ID NO: 138220
auguuuccacgggucucac

SEQ ID NO: 138222 - RNA, 19 nt, Artificial Sequence
  Description of Artificial Sequence: Synthetic oligonucleotide
  Sense strand starting at position 2777 of SEQ ID NO: 1775
ucagucucgcgguaagaga

SEQ ID NO: 138223 - RNA, 19 nt, Artificial Sequence
  Description of Artificial Sequence: Synthetic oligonucleotide
  Antisense strand to SEQ ID NO: 138222
ucucuuaccgcgagacuga

SEQ ID NO: 138224 - RNA, 19 nt, Artificial Sequence
  Description of Artificial Sequence: Synthetic oligonucleotide
  Sense strand starting at position 2786 of SEQ ID NO: 1775
cgguaagagacccaaguuu

SEQ ID NO: 138225 - RNA, 19 nt, Artificial Sequence
  Description of Artificial Sequence: Synthetic oligonucleotide
  Antisense strand to SEQ ID NO: 138224
aaacuugggucucuuaccg

SEQ ID NO: 138226 - RNA, 19 nt, Artificial Sequence
  Description of Artificial Sequence: Synthetic oligonucleotide
  Sense strand starting at position 2807 of SEQ ID NO: 1775
cuaguccuagauggaaaua

SEQ ID NO: 138227 - RNA, 19 nt, Artificial Sequence
  Description of Artificial Sequence: Synthetic oligonucleotide
  Antisense strand to SEQ ID NO: 138226
uauuuccaucuaggacuag

SEQ ID NO: 138228 - RNA, 19 nt, Artificial Sequence
  Description of Artificial Sequence: Synthetic oligonucleotide
  Sense strand starting at position 3142 of SEQ ID NO: 1775
gggagaguuaacuguacaa

SEQ ID NO: 138229 - RNA, 19 nt, Artificial Sequence
  Description of Artificial Sequence: Synthetic oligonucleotide
  Antisense strand to SEQ ID NO: 138228
uuguacaguuaacucuccc

SEQ ID NO: 138230 - RNA, 19 nt, Artificial Sequence
  Description of Artificial Sequence: Synthetic oligonucleotide
  Sense strand starting at position 3272 of SEQ ID NO: 1775
gagggcaggccuuaugaaa

SEQ ID NO: 138231 - RNA, 19 nt, Artificial Sequence
  Description of Artificial Sequence: Synthetic oligonucleotide
  Antisense strand to SEQ ID NO: 138230
uuucauaaggccugcccuc

SEQ ID NO: 138232 - RNA, 19 nt, Artificial Sequence
  Description of Artificial Sequence: Synthetic oligonucleotide
  Sense strand starting at position 3513 of SEQ ID NO: 1775
gcaucccugucauugaauu

SEQ ID NO: 138233 - RNA, 19 nt, Artificial Sequence
  Description of Artificial Sequence: Synthetic oligonucleotide
  Antisense strand to SEQ ID NO: 138232
aauucaaugacagggaugc

SEQ ID NO: 138234 - RNA, 19 nt, Artificial Sequence
  Description of Artificial Sequence: Synthetic oligonucleotide
  Sense strand starting at position 3539 of SEQ ID NO: 1775
ccaagaacuguuugcauaa

SEQ ID NO: 138235 - RNA, 19 nt, Artificial Sequence
  Description of Artificial Sequence: Synthetic oligonucleotide
  Antisense strand to SEQ ID NO: 138234
uuaugcaaacaguucuugg

SEQ ID NO: 138236 - RNA, 19 nt, Artificial Sequence
  Description of Artificial Sequence: Synthetic oligonucleotide
  Sense strand starting at position 3797 of SEQ ID NO: 1775
acauuaauacuuuggugau

SEQ ID NO: 138237 - RNA, 19 nt, Artificial Sequence
  Description of Artificial Sequence: Synthetic oligonucleotide
  Antisense strand to SEQ ID NO: 138236
aucaccaaaguauuaaugu

SEQ ID NO: 138238 - RNA, 19 nt, Artificial Sequence
  Description of Artificial Sequence: Synthetic oligonucleotide
  Sense strand starting at position 3803 of SEQ ID NO: 1775
auacuuuggugauuaaugu

SEQ ID NO: 138239 - RNA, 19 nt, Artificial Sequence
  Description of Artificial Sequence: Synthetic oligonucleotide
  Antisense strand to SEQ ID NO: 138238
acauuaaucaccaaaguau

SEQ ID NO: 138240 - RNA, 19 nt, Artificial Sequence
  Description of Artificial Sequence: Synthetic oligonucleotide
  Sense strand starting at position 3804 of SEQ ID NO: 1775
uacuuuggugauuaauguu

SEQ ID NO: 138241 - RNA, 19 nt, Artificial Sequence
  Description of Artificial Sequence: Synthetic oligonucleotide
  Antisense strand to SEQ ID NO: 138240
aacauuaaucaccaaagua

SEQ ID NO: 138242 - RNA, 19 nt, Artificial Sequence
  Description of Artificial Sequence: Synthetic oligonucleotide
  Sense strand starting at position 3945 of SEQ ID NO: 1775
aaacgaggucccgagaguu

SEQ ID NO: 138243 - RNA, 19 nt, Artificial Sequence
  Description of Artificial Sequence: Synthetic oligonucleotide
  Antisense strand to SEQ ID NO: 138242
aacucucgggaccucguuu

SEQ ID NO: 138244 - RNA, 19 nt, Artificial Sequence
  Description of Artificial Sequence: Synthetic oligonucleotide
  Sense strand starting at position 3906 of SEQ ID NO: 1776
ugaagcagugggcaauaau

SEQ ID NO: 138245 - RNA, 19 nt, Artificial Sequence
  Description of Artificial Sequence: Synthetic oligonucleotide
  Antisense strand to SEQ ID NO: 138244
auuauugcccacugcuuca

SEQ ID NO: 138246 - RNA, 19 nt, Artificial Sequence
  Description of Artificial Sequence: Synthetic oligonucleotide
  Sense strand starting at position 3832 of SEQ ID NO: 1776
auccauacugugcagauaa

SEQ ID NO: 138247 - RNA, 19 nt, Artificial Sequence
  Description of Artificial Sequence: Synthetic oligonucleotide
  Antisense strand to SEQ ID NO: 138246
uuaucugcacaguauggau

SEQ ID NO: 138248 - RNA, 19 nt, Artificial Sequence
  Description of Artificial Sequence: Synthetic oligonucleotide
  Sense strand starting at position 3761 of SEQ ID NO: 1776
ugguuaggacuccagcaua

SEQ ID NO: 138249 - RNA, 19 nt, Artificial Sequence
  Description of Artificial Sequence: Synthetic oligonucleotide
  Antisense strand to SEQ ID NO: 138248
uaugcuggaguccuaacca

SEQ ID NO: 138250 - RNA, 19 nt, Artificial Sequence
  Description of Artificial Sequence: Synthetic oligonucleotide
  Sense strand starting at position 3620 of SEQ ID NO: 1776
guagguagagagggauauu

SEQ ID NO: 138251 - RNA, 19 nt, Artificial Sequence
  Description of Artificial Sequence: Synthetic oligonucleotide
  Antisense strand to SEQ ID NO: 138250
aauaucccucucuaccuac

SEQ ID NO: 138252 - RNA, 19 nt, Artificial Sequence
  Description of Artificial Sequence: Synthetic oligonucleotide
  Sense strand starting at position 3598 of SEQ ID NO: 1776
acacuaaguuggucuuaag

SEQ ID NO: 138253 - RNA, 19 nt, Artificial Sequence
  Description of Artificial Sequence: Synthetic oligonucleotide
  Antisense strand to SEQ ID NO: 138252
cuuaagaccaacuuagugu

SEQ ID NO: 138254 - RNA, 19 nt, Artificial Sequence
  Description of Artificial Sequence: Synthetic oligonucleotide
  Sense strand starting at position 3597 of SEQ ID NO: 1776
gacacuaaguuggucuuaa

SEQ ID NO: 138255 - RNA, 19 nt, Artificial Sequence
  Description of Artificial Sequence: Synthetic oligonucleotide
  Antisense strand to SEQ ID NO: 138254
uuaagaccaacuuaguguc

SEQ ID NO: 138256 - RNA, 19 nt, Artificial Sequence
  Description of Artificial Sequence: Synthetic oligonucleotide
  Sense strand starting at position 3571 of SEQ ID NO: 1776
uagguuuacguugcuguua

SEQ ID NO: 138257 - RNA, 19 nt, Artificial Sequence
  Description of Artificial Sequence: Synthetic oligonucleotide
  Antisense strand to SEQ ID NO: 138256
uaacagcaacguaaaccua

SEQ ID NO: 138258 - RNA, 19 nt, Artificial Sequence
  Description of Artificial Sequence: Synthetic oligonucleotide
  Sense strand starting at position 3431 of SEQ ID NO: 1776
gggucauggagaggauagu

SEQ ID NO: 138259 - RNA, 19 nt, Artificial Sequence
  Description of Artificial Sequence: Synthetic oligonucleotide
  Antisense strand to SEQ ID NO: 138258
acuauccucuccaugaccc

SEQ ID NO: 138260 - RNA, 19 nt, Artificial Sequence
  Description of Artificial Sequence: Synthetic oligonucleotide
  Sense strand starting at position 3010 of SEQ ID NO: 1776
agggauaggccucaguuca

SEQ ID NO: 138261 - RNA, 19 nt, Artificial Sequence
  Description of Artificial Sequence: Synthetic oligonucleotide
  Antisense strand to SEQ ID NO: 138260
ugaacugaggccuaucccu

SEQ ID NO: 138262 - RNA, 19 nt, Artificial Sequence
  Description of Artificial Sequence: Synthetic oligonucleotide
  Sense strand starting at position 2929 of SEQ ID NO: 1776
aguugacacucuccugaaa

SEQ ID NO: 138263 - RNA, 19 nt, Artificial Sequence
  Description of Artificial Sequence: Synthetic oligonucleotide
  Antisense strand to SEQ ID NO: 138262
uuucaggagagugucaacu

SEQ ID NO: 138264 - RNA, 19 nt, Artificial Sequence
  Description of Artificial Sequence: Synthetic oligonucleotide
  Sense strand starting at position 2537 of SEQ ID NO: 1776
ugacuaugacuagguuauu

SEQ ID NO: 138265 - RNA, 19 nt, Artificial Sequence
  Description of Artificial Sequence: Synthetic oligonucleotide
  Antisense strand to SEQ ID NO: 138264
aauaaccuagucauaguca

SEQ ID NO: 138266 - RNA, 19 nt, Artificial Sequence
  Description of Artificial Sequence: Synthetic oligonucleotide
  Sense strand starting at position 2375 of SEQ ID NO: 1776
gaaugucugcuaugaaaua

SEQ ID NO: 138267 - RNA, 19 nt, Artificial Sequence
  Description of Artificial Sequence: Synthetic oligonucleotide
  Antisense strand to SEQ ID NO: 138266
uauuucauagcagacauuc

SEQ ID NO: 138268 - RNA, 19 nt, Artificial Sequence
  Description of Artificial Sequence: Synthetic oligonucleotide
  Sense strand starting at position 2371 of SEQ ID NO: 1776
gggagaaugucugcuauga

SEQ ID NO: 138269 - RNA, 19 nt, Artificial Sequence
  Description of Artificial Sequence: Synthetic oligonucleotide
  Antisense strand to SEQ ID NO: 138268
ucauagcagacauucuccc

SEQ ID NO: 138270 - RNA, 19 nt, Artificial Sequence
  Description of Artificial Sequence: Synthetic oligonucleotide
  Sense strand starting at position 2369 of SEQ ID NO: 1776
augggagaaugucugcuau

SEQ ID NO: 138271 - RNA, 19 nt, Artificial Sequence
  Description of Artificial Sequence: Synthetic oligonucleotide
  Antisense strand to SEQ ID NO: 138270
auagcagacauucucccau

SEQ ID NO: 138272 - RNA, 19 nt, Artificial Sequence
  Description of Artificial Sequence: Synthetic oligonucleotide
  Sense strand starting at position 2360 of SEQ ID NO: 1776
aucuccugcaugggagaau

SEQ ID NO: 138273 - RNA, 19 nt, Artificial Sequence
  Description of Artificial Sequence: Synthetic oligonucleotide
  Antisense strand to SEQ ID NO: 138272
auucucccaugcaggagau

SEQ ID NO: 138274 - RNA, 19 nt, Artificial Sequence
  Description of Artificial Sequence: Synthetic oligonucleotide
  Sense strand starting at position 2243 of SEQ ID NO: 1776
uccgaugaaugauugucaa

SEQ ID NO: 138275 - RNA, 19 nt, Artificial Sequence
  Description of Artificial Sequence: Synthetic oligonucleotide
  Antisense strand to SEQ ID NO: 138274
uugacaaucauucaucgga

SEQ ID NO: 138276 - RNA, 19 nt, Artificial Sequence
  Description of Artificial Sequence: Synthetic oligonucleotide
  Sense strand starting at position 2237 of SEQ ID NO: 1776
cucuauuccgaugaaugau

SEQ ID NO: 138277 - RNA, 19 nt, Artificial Sequence
  Description of Artificial Sequence: Synthetic oligonucleotide
  Antisense strand to SEQ ID NO: 138276
aucauucaucggaauagag

SEQ ID NO: 138278 - RNA, 19 nt, Artificial Sequence
  Description of Artificial Sequence: Synthetic oligonucleotide
  Sense strand starting at position 2236 of SEQ ID NO: 1776
ccucuauuccgaugaauga

SEQ ID NO: 138279 - RNA, 19 nt, Artificial Sequence
  Description of Artificial Sequence: Synthetic oligonucleotide
  Antisense strand to SEQ ID NO: 138278
ucauucaucggaauagagg

SEQ ID NO: 138280 - RNA, 19 nt, Artificial Sequence
  Description of Artificial Sequence: Synthetic oligonucleotide
  Sense strand starting at position 2212 of SEQ ID NO: 1776
gacuuacaugugggacauu

SEQ ID NO: 138281 - RNA, 19 nt, Artificial Sequence
  Description of Artificial Sequence: Synthetic oligonucleotide
  Antisense strand to SEQ ID NO: 138280
aaugucccacauguaaguc

SEQ ID NO: 138282 - RNA, 19 nt, Artificial Sequence
  Description of Artificial Sequence: Synthetic oligonucleotide
  Sense strand starting at position 2208 of SEQ ID NO: 1776
agcagacuuacauguggga

SEQ ID NO: 138283 - RNA, 19 nt, Artificial Sequence
  Description of Artificial Sequence: Synthetic oligonucleotide
  Antisense strand to SEQ ID NO: 138282
ucccacauguaagucugcu

SEQ ID NO: 138284 - RNA, 19 nt, Artificial Sequence
  Description of Artificial Sequence: Synthetic oligonucleotide
  Sense strand starting at position 2166 of SEQ ID NO: 1776
uugauaucugaauggaguu

SEQ ID NO: 138285 - RNA, 19 nt, Artificial Sequence
  Description of Artificial Sequence: Synthetic oligonucleotide
  Antisense strand to SEQ ID NO: 138284
aacuccauucagauaucaa

SEQ ID NO: 138286 - RNA, 19 nt, Artificial Sequence
  Description of Artificial Sequence: Synthetic oligonucleotide
  Sense strand starting at position 2161 of SEQ ID NO: 1776
aaauguugauaucugaaug

SEQ ID NO: 138287 - RNA, 19 nt, Artificial Sequence
  Description of Artificial Sequence: Synthetic oligonucleotide
  Antisense strand to SEQ ID NO: 138286
cauucagauaucaacauuu

SEQ ID NO: 138288 - RNA, 19 nt, Artificial Sequence
  Description of Artificial Sequence: Synthetic oligonucleotide
  Sense strand starting at position 1634 of SEQ ID NO: 1776
uucugaauauaguugauac

SEQ ID NO: 138289 - RNA, 19 nt, Artificial Sequence
  Description of Artificial Sequence: Synthetic oligonucleotide
  Antisense strand to SEQ ID NO: 138288
guaucaacuauauucagaa

SEQ ID NO: 138290 - RNA, 19 nt, Artificial Sequence
  Description of Artificial Sequence: Synthetic oligonucleotide
  Sense strand starting at position 1474 of SEQ ID NO: 1776
gcuuucuaaccucagagaa

SEQ ID NO: 138291 - RNA, 19 nt, Artificial Sequence
  Description of Artificial Sequence: Synthetic oligonucleotide
  Antisense strand to SEQ ID NO: 138290
uucucugagguuagaaagc

SEQ ID NO: 138292 - RNA, 19 nt, Artificial Sequence
  Description of Artificial Sequence: Synthetic oligonucleotide
  Sense strand starting at position 1380 of SEQ ID NO: 1776
ccauguuaugcauauacag

SEQ ID NO: 138293 - RNA, 19 nt, Artificial Sequence
  Description of Artificial Sequence: Synthetic oligonucleotide
  Antisense strand to SEQ ID NO: 138292
cuguauaugcauaacaugg

SEQ ID NO: 138294 - RNA, 19 nt, Artificial Sequence
  Description of Artificial Sequence: Synthetic oligonucleotide
  Sense strand starting at position 1373 of SEQ ID NO: 1776
gccguauccauguuaugca

SEQ ID NO: 138295 - RNA, 19 nt, Artificial Sequence
  Description of Artificial Sequence: Synthetic oligonucleotide
  Antisense strand to SEQ ID NO: 138294
ugcauaacauggauacggc

SEQ ID NO: 138296 - RNA, 19 nt, Artificial Sequence
  Description of Artificial Sequence: Synthetic oligonucleotide
  Sense strand starting at position 1134 of SEQ ID NO: 1776
guaaacugugugucgcuga

SEQ ID NO: 138297 - RNA, 19 nt, Artificial Sequence
  Description of Artificial Sequence: Synthetic oligonucleotide
  Antisense strand to SEQ ID NO: 138296
ucagcgacacacaguuuac

SEQ ID NO: 138298 - RNA, 19 nt, Artificial Sequence
  Description of Artificial Sequence: Synthetic oligonucleotide
  Sense strand starting at position 1122 of SEQ ID NO: 1776
cuuguuaaaugaguaaacu

SEQ ID NO: 138299 - RNA, 19 nt, Artificial Sequence
  Description of Artificial Sequence: Synthetic oligonucleotide
  Antisense strand to SEQ ID NO: 138298
aguuuacucauuuaacaag

SEQ ID NO: 138300 - RNA, 19 nt, Artificial Sequence
  Description of Artificial Sequence: Synthetic oligonucleotide
  Sense strand starting at position 1044 of SEQ ID NO: 1776
ugauacuuugugcacauca

SEQ ID NO: 138301 - RNA, 19 nt, Artificial Sequence
  Description of Artificial Sequence: Synthetic oligonucleotide
  Antisense strand to SEQ ID NO: 138300
ugaugugcacaaaguauca

SEQ ID NO: 138302 - RNA, 19 nt, Artificial Sequence
  Description of Artificial Sequence: Synthetic oligonucleotide
  Sense strand starting at position 913 of SEQ ID NO: 1776
gcacuuguagaauaauauu

SEQ ID NO: 138303 - RNA, 19 nt, Artificial Sequence
  Description of Artificial Sequence: Synthetic oligonucleotide
  Antisense strand to SEQ ID NO: 138302
aauauuauucuacaagugc

SEQ ID NO: 138304 - RNA, 19 nt, Artificial Sequence
  Description of Artificial Sequence: Synthetic oligonucleotide
  Sense strand starting at position 910 of SEQ ID NO: 1776
uuugcacuuguagaauaau

SEQ ID NO: 138305 - RNA, 19 nt, Artificial Sequence
  Description of Artificial Sequence: Synthetic oligonucleotide
  Antisense strand to SEQ ID NO: 138304
auuauucuacaagugcaaa

SEQ ID NO: 138306 - RNA, 19 nt, Artificial Sequence
  Description of Artificial Sequence: Synthetic oligonucleotide
  Sense strand starting at position 608 of SEQ ID NO: 1776
gagauauugcaccaggcua

SEQ ID NO: 138307 - RNA, 19 nt, Artificial Sequence
  Description of Artificial Sequence: Synthetic oligonucleotide
  Antisense strand to SEQ ID NO: 138306
uagccuggugcaauaucuc

SEQ ID NO: 138308 - RNA, 19 nt, Artificial Sequence
  Description of Artificial Sequence: Synthetic oligonucleotide
  Sense strand starting at position 595 of SEQ ID NO: 1776
agucaaguacacugagaua

SEQ ID NO: 138309 - RNA, 19 nt, Artificial Sequence
  Description of Artificial Sequence: Synthetic oligonucleotide
  Antisense strand to SEQ ID NO: 138308
uaucucaguguacuugacu

SEQ ID NO: 138310 - RNA, 19 nt, Artificial Sequence
  Description of Artificial Sequence: Synthetic oligonucleotide
  Sense strand starting at position 448 of SEQ ID NO: 1776
cuuauaauaggagguucua

SEQ ID NO: 138311 - RNA, 19 nt, Artificial Sequence
  Description of Artificial Sequence: Synthetic oligonucleotide
  Antisense strand to SEQ ID NO: 138310
uagaaccuccuauuauaag

SEQ ID NO: 138312 - RNA, 19 nt, Artificial Sequence
  Description of Artificial Sequence: Synthetic oligonucleotide
  Sense strand starting at position 414 of SEQ ID NO: 1776
auaugaauuugagaggagu

SEQ ID NO: 138313 - RNA, 19 nt, Artificial Sequence
  Description of Artificial Sequence: Synthetic oligonucleotide
  Antisense strand to SEQ ID NO: 138312
acuccucucaaauucauau

SEQ ID NO: 138314 - RNA, 19 nt, Artificial Sequence
  Description of Artificial Sequence: Synthetic oligonucleotide
  Sense strand starting at position 339 of SEQ ID NO: 1776
acauguaugcaugaucaca

SEQ ID NO: 138315 - RNA, 19 nt, Artificial Sequence
  Description of Artificial Sequence: Synthetic oligonucleotide
  Antisense strand to SEQ ID NO: 138314
ugugaucaugcauacaugu

SEQ ID NO: 138316 - RNA, 19 nt, Artificial Sequence
  Description of Artificial Sequence: Synthetic oligonucleotide
  Sense strand starting at position 335 of SEQ ID NO: 1776
ggaaacauguaugcaugau

SEQ ID NO: 138317 - RNA, 19 nt, Artificial Sequence
  Description of Artificial Sequence: Synthetic oligonucleotide
  Antisense strand to SEQ ID NO: 138316
aucaugcauacauguuucc

SEQ ID NO: 138318 - RNA, 19 nt, Artificial Sequence
  Description of Artificial Sequence: Synthetic oligonucleotide
  Sense strand starting at position 334 of SEQ ID NO: 1776
uggaaacauguaugcauga

SEQ ID NO: 138319 - RNA, 19 nt, Artificial Sequence
  Description of Artificial Sequence: Synthetic oligonucleotide
  Antisense strand to SEQ ID NO: 138318
ucaugcauacauguuucca

SEQ ID NO: 138320 - RNA, 19 nt, Artificial Sequence
  Description of Artificial Sequence: Synthetic oligonucleotide
  Sense strand starting at position 147 of SEQ ID NO: 1776
guugaauuccugggaagau

SEQ ID NO: 138321 - RNA, 19 nt, Artificial Sequence
  Description of Artificial Sequence: Synthetic oligonucleotide
  Antisense strand to SEQ ID NO: 138320
aucuucccaggaauucaac

SEQ ID NO: 138322 - RNA, 19 nt, Artificial Sequence
  Description of Artificial Sequence: Synthetic oligonucleotide
  Sense strand starting at position 146 of SEQ ID NO: 1776
gguugaauuccugggaaga

SEQ ID NO: 138323 - RNA, 19 nt, Artificial Sequence
  Description of Artificial Sequence: Synthetic oligonucleotide
  Antisense strand to SEQ ID NO: 138322
ucuucccaggaauucaacc

SEQ ID NO: 138324 - RNA, 19 nt, Artificial Sequence
  Description of Artificial Sequence: Synthetic oligonucleotide
  Sense strand starting at position 3973 of SEQ ID NO: 1777
agagaaauuauguguuagc

SEQ ID NO: 138325 - RNA, 19 nt, Artificial Sequence
  Description of Artificial Sequence: Synthetic oligonucleotide
  Antisense strand to SEQ ID NO: 138324
gcuaacacauaauuucucu

SEQ ID NO: 138326 - RNA, 19 nt, Artificial Sequence
  Description of Artificial Sequence: Synthetic oligonucleotide
  Sense strand starting at position 3972 of SEQ ID NO: 1777
uagagaaauuauguguuag

SEQ ID NO: 138327 - RNA, 19 nt, Artificial Sequence
  Description of Artificial Sequence: Synthetic oligonucleotide
  Antisense strand to SEQ ID NO: 138326
cuaacacauaauuucucua

SEQ ID NO: 138328 - RNA, 19 nt, Artificial Sequence
  Description of Artificial Sequence: Synthetic oligonucleotide
  Sense strand starting at position 3960 of SEQ ID NO: 1777
ucuuaagcugcauagagaa

SEQ ID NO: 138329 - RNA, 19 nt, Artificial Sequence
  Description of Artificial Sequence: Synthetic oligonucleotide
  Antisense strand to SEQ ID NO: 138328
uucucuaugcagcuuaaga

SEQ ID NO: 138330 - RNA, 19 nt, Artificial Sequence
  Description of Artificial Sequence: Synthetic oligonucleotide
  Sense strand starting at position 3724 of SEQ ID NO: 1777
uuucuugcccuauggaaag

SEQ ID NO: 138331 - RNA, 19 nt, Artificial Sequence
  Description of Artificial Sequence: Synthetic oligonucleotide
  Antisense strand to SEQ ID NO: 138330
cuuuccauagggcaagaaa

SEQ ID NO: 138332 - RNA, 19 nt, Artificial Sequence
  Description of Artificial Sequence: Synthetic oligonucleotide
  Sense strand starting at position 3687 of SEQ ID NO: 1777
agagcucugagugaguaca

SEQ ID NO: 138333 - RNA, 19 nt, Artificial Sequence
  Description of Artificial Sequence: Synthetic oligonucleotide
  Antisense strand to SEQ ID NO: 138332
uguacucacucagagcucu

SEQ ID NO: 138334 - RNA, 19 nt, Artificial Sequence
  Description of Artificial Sequence: Synthetic oligonucleotide
  Sense strand starting at position 3682 of SEQ ID NO: 1777
gggcaagagcucugaguga

SEQ ID NO: 138335 - RNA, 19 nt, Artificial Sequence
  Description of Artificial Sequence: Synthetic oligonucleotide
  Antisense strand to SEQ ID NO: 138334
ucacucagagcucuugccc

SEQ ID NO: 138336 - RNA, 19 nt, Artificial Sequence
  Description of Artificial Sequence: Synthetic oligonucleotide
  Sense strand starting at position 3559 of SEQ ID NO: 1777
cuugcuccucaggaggaua

SEQ ID NO: 138337 - RNA, 19 nt, Artificial Sequence
  Description of Artificial Sequence: Synthetic oligonucleotide
  Antisense strand to SEQ ID NO: 138336
uauccuccugaggagcaag

SEQ ID NO: 138338 - RNA, 19 nt, Artificial Sequence
  Description of Artificial Sequence: Synthetic oligonucleotide
  Sense strand starting at position 3500 of SEQ ID NO: 1777
acgacaucugcacaucaga

SEQ ID NO: 138339 - RNA, 19 nt, Artificial Sequence
  Description of Artificial Sequence: Synthetic oligonucleotide
  Antisense strand to SEQ ID NO: 138338
ucugaugugcagaugucgu

SEQ ID NO: 138340 - RNA, 19 nt, Artificial Sequence
  Description of Artificial Sequence: Synthetic oligonucleotide
  Sense strand starting at position 3376 of SEQ ID NO: 1777
agauacgcccucgaaugua

SEQ ID NO: 138341 - RNA, 19 nt, Artificial Sequence
  Description of Artificial Sequence: Synthetic oligonucleotide
  Antisense strand to SEQ ID NO: 138340
uacauucgagggcguaucu

SEQ ID NO: 138342 - RNA, 19 nt, Artificial Sequence
  Description of Artificial Sequence: Synthetic oligonucleotide
  Sense strand starting at position 3271 of SEQ ID NO: 1777
caaauuaaacggugaugua

SEQ ID NO: 138343 - RNA, 19 nt, Artificial Sequence
  Description of Artificial Sequence: Synthetic oligonucleotide
  Antisense strand to SEQ ID NO: 138342
uacaucaccguuuaauuug

SEQ ID NO: 138344 - RNA, 19 nt, Artificial Sequence
  Description of Artificial Sequence: Synthetic oligonucleotide
  Sense strand starting at position 3137 of SEQ ID NO: 1777
guaagaauagaguggcaga

SEQ ID NO: 138345 - RNA, 19 nt, Artificial Sequence
  Description of Artificial Sequence: Synthetic oligonucleotide
  Antisense strand to SEQ ID NO: 138344
ucugccacucuauucuuac

SEQ ID NO: 138346 - RNA, 19 nt, Artificial Sequence
  Description of Artificial Sequence: Synthetic oligonucleotide
  Sense strand starting at position 3110 of SEQ ID NO: 1777
cgauguuaugaagaaaugu

SEQ ID NO: 138347 - RNA, 19 nt, Artificial Sequence
  Description of Artificial Sequence: Synthetic oligonucleotide
  Antisense strand to SEQ ID NO: 138346
acauuucuucauaacaucg

SEQ ID NO: 138348 - RNA, 19 nt, Artificial Sequence
  Description of Artificial Sequence: Synthetic oligonucleotide
  Sense strand starting at position 3101 of SEQ ID NO: 1777
gauggugaccgauguuaug

SEQ ID NO: 138349 - RNA, 19 nt, Artificial Sequence
  Description of Artificial Sequence: Synthetic oligonucleotide
  Antisense strand to SEQ ID NO: 138348
cauaacaucggucaccauc

SEQ ID NO: 138350 - RNA, 19 nt, Artificial Sequence
  Description of Artificial Sequence: Synthetic oligonucleotide
  Sense strand starting at position 2994 of SEQ ID NO: 1777
cuuguuuagguauaaggau

SEQ ID NO: 138351 - RNA, 19 nt, Artificial Sequence
  Description of Artificial Sequence: Synthetic oligonucleotide
  Antisense strand to SEQ ID NO: 138350
auccuuauaccuaaacaag

SEQ ID NO: 138352 - RNA, 19 nt, Artificial Sequence
  Description of Artificial Sequence: Synthetic oligonucleotide
  Sense strand starting at position 2991 of SEQ ID NO: 1777
gcacuuguuuagguauaag

SEQ ID NO: 138353 - RNA, 19 nt, Artificial Sequence
  Description of Artificial Sequence: Synthetic oligonucleotide
  Antisense strand to SEQ ID NO: 138352
cuuauaccuaaacaagugc

SEQ ID NO: 138354 - RNA, 19 nt, Artificial Sequence
  Description of Artificial Sequence: Synthetic oligonucleotide
  Sense strand starting at position 2778 of SEQ ID NO: 1777
ugggcacuaagguguuaau

SEQ ID NO: 138355 - RNA, 19 nt, Artificial Sequence
  Description of Artificial Sequence: Synthetic oligonucleotide
  Antisense strand to SEQ ID NO: 138354
auuaacaccuuagugccca

SEQ ID NO: 138356 - RNA, 19 nt, Artificial Sequence
  Description of Artificial Sequence: Synthetic oligonucleotide
  Sense strand starting at position 2599 of SEQ ID NO: 1777
gaaucaguuuccucaggac

SEQ ID NO: 138357 - RNA, 19 nt, Artificial Sequence
  Description of Artificial Sequence: Synthetic oligonucleotide
  Antisense strand to SEQ ID NO: 138356
guccugaggaaacugauuc

SEQ ID NO: 138358 - RNA, 19 nt, Artificial Sequence
  Description of Artificial Sequence: Synthetic oligonucleotide
  Sense strand starting at position 2598 of SEQ ID NO: 1777
ggaaucaguuuccucagga

SEQ ID NO: 138359 - RNA, 19 nt, Artificial Sequence
  Description of Artificial Sequence: Synthetic oligonucleotide
  Antisense strand to SEQ ID NO: 138358
uccugaggaaacugauucc

SEQ ID NO: 138360 - RNA, 19 nt, Artificial Sequence
  Description of Artificial Sequence: Synthetic oligonucleotide
  Sense strand starting at position 2584 of SEQ ID NO: 1777
cgggcaguugccguggaau

SEQ ID NO: 138361 - RNA, 19 nt, Artificial Sequence
  Description of Artificial Sequence: Synthetic oligonucleotide
  Antisense strand to SEQ ID NO: 138360
auuccacggcaacugcccg

SEQ ID NO: 138362 - RNA, 19 nt, Artificial Sequence
  Description of Artificial Sequence: Synthetic oligonucleotide
  Sense strand starting at position 2416 of SEQ ID NO: 1777
gugaauuagaugugagaag

SEQ ID NO: 138363 - RNA, 19 nt, Artificial Sequence
  Description of Artificial Sequence: Synthetic oligonucleotide
  Antisense strand to SEQ ID NO: 138362
cuucucacaucuaauucac

SEQ ID NO: 138364 - RNA, 19 nt, Artificial Sequence
  Description of Artificial Sequence: Synthetic oligonucleotide
  Sense strand starting at position 2414 of SEQ ID NO: 1777
uugugaauuagaugugaga

SEQ ID NO: 138365 - RNA, 19 nt, Artificial Sequence
  Description of Artificial Sequence: Synthetic oligonucleotide
  Antisense strand to SEQ ID NO: 138364
ucucacaucuaauucacaa

SEQ ID NO: 138366 - RNA, 19 nt, Artificial Sequence
  Description of Artificial Sequence: Synthetic oligonucleotide
  Sense strand starting at position 2410 of SEQ ID NO: 1777
gacguugugaauuagaugu

SEQ ID NO: 138367 - RNA, 19 nt, Artificial Sequence
  Description of Artificial Sequence: Synthetic oligonucleotide
  Antisense strand to SEQ ID NO: 138366
acaucuaauucacaacguc

SEQ ID NO: 138368 - RNA, 19 nt, Artificial Sequence
  Description of Artificial Sequence: Synthetic oligonucleotide
  Sense strand starting at position 2335 of SEQ ID NO: 1777
agaggaguccguuggaaua

SEQ ID NO: 138369 - RNA, 19 nt, Artificial Sequence
  Description of Artificial Sequence: Synthetic oligonucleotide
  Antisense strand to SEQ ID NO: 138368
uauuccaacggacuccucu

SEQ ID NO: 138370 - RNA, 19 nt, Artificial Sequence
  Description of Artificial Sequence: Synthetic oligonucleotide
  Sense strand starting at position 2235 of SEQ ID NO: 1777
uguacaguccgguaaagga

SEQ ID NO: 138371 - RNA, 19 nt, Artificial Sequence
  Description of Artificial Sequence: Synthetic oligonucleotide
  Antisense strand to SEQ ID NO: 138370
uccuuuaccggacuguaca

SEQ ID NO: 138372 - RNA, 19 nt, Artificial Sequence
  Description of Artificial Sequence: Synthetic oligonucleotide
  Sense strand starting at position 1125 of SEQ ID NO: 1777
aaaggaagucuauguacca

SEQ ID NO: 138373 - RNA, 19 nt, Artificial Sequence
  Description of Artificial Sequence: Synthetic oligonucleotide
  Antisense strand to SEQ ID NO: 138372
ugguacauagacuuccuuu

SEQ ID NO: 138374 - RNA, 19 nt, Artificial Sequence
  Description of Artificial Sequence: Synthetic oligonucleotide
  Sense strand starting at position 1017 of SEQ ID NO: 1777
ggauguggcccagaagcua

SEQ ID NO: 138375 - RNA, 19 nt, Artificial Sequence
  Description of Artificial Sequence: Synthetic oligonucleotide
  Antisense strand to SEQ ID NO: 138374
uagcuucugggccacaucc

SEQ ID NO: 138376 - RNA, 19 nt, Artificial Sequence
  Description of Artificial Sequence: Synthetic oligonucleotide
  Sense strand starting at position 966 of SEQ ID NO: 1777
cugggugcauggguuuaaa

SEQ ID NO: 138377 - RNA, 19 nt, Artificial Sequence
  Description of Artificial Sequence: Synthetic oligonucleotide
  Antisense strand to SEQ ID NO: 138376
uuuaaacccaugcacccag

SEQ ID NO: 138378 - RNA, 19 nt, Artificial Sequence
  Description of Artificial Sequence: Synthetic oligonucleotide
  Sense strand starting at position 871 of SEQ ID NO: 1777
aguugauggugucuuggaa

SEQ ID NO: 138379 - RNA, 19 nt, Artificial Sequence
  Description of Artificial Sequence: Synthetic oligonucleotide
  Antisense strand to SEQ ID NO: 138378
uuccaagacaccaucaacu

SEQ ID NO: 138380 - RNA, 19 nt, Artificial Sequence
  Description of Artificial Sequence: Synthetic oligonucleotide
  Sense strand starting at position 851 of SEQ ID NO: 1777
aaaugaacagugugucuca

SEQ ID NO: 138381 - RNA, 19 nt, Artificial Sequence
  Description of Artificial Sequence: Synthetic oligonucleotide
  Antisense strand to SEQ ID NO: 138380
ugagacacacuguucauuu

SEQ ID NO: 138382 - RNA, 19 nt, Artificial Sequence
  Description of Artificial Sequence: Synthetic oligonucleotide
  Sense strand starting at position 734 of SEQ ID NO: 1777
ccucgacucuaagucuuaa

SEQ ID NO: 138383 - RNA, 19 nt, Artificial Sequence
  Description of Artificial Sequence: Synthetic oligonucleotide
  Antisense strand to SEQ ID NO: 138382
uuaagacuuagagucgagg

SEQ ID NO: 138384 - RNA, 19 nt, Artificial Sequence
  Description of Artificial Sequence: Synthetic oligonucleotide
  Sense strand starting at position 673 of SEQ ID NO: 1777
uaguaaggugccugaaaug

SEQ ID NO: 138385 - RNA, 19 nt, Artificial Sequence
  Description of Artificial Sequence: Synthetic oligonucleotide
  Antisense strand to SEQ ID NO: 138384
cauuucaggcaccuuacua

SEQ ID NO: 138386 - RNA, 19 nt, Artificial Sequence
  Description of Artificial Sequence: Synthetic oligonucleotide
  Sense strand starting at position 672 of SEQ ID NO: 1777
uuaguaaggugccugaaau

SEQ ID NO: 138387 - RNA, 19 nt, Artificial Sequence
  Description of Artificial Sequence: Synthetic oligonucleotide
  Antisense strand to SEQ ID NO: 138386
auuucaggcaccuuacuaa

SEQ ID NO: 138388 - RNA, 19 nt, Artificial Sequence
  Description of Artificial Sequence: Synthetic oligonucleotide
  Sense strand starting at position 595 of SEQ ID NO: 1777
ggauuagguggauguguga

SEQ ID NO: 138389 - RNA, 19 nt, Artificial Sequence
  Description of Artificial Sequence: Synthetic oligonucleotide
  Antisense strand to SEQ ID NO: 138388
ucacacauccaccuaaucc

SEQ ID NO: 138390 - RNA, 19 nt, Artificial Sequence
  Description of Artificial Sequence: Synthetic oligonucleotide
  Sense strand starting at position 177 of SEQ ID NO: 1777
guguaaacuggaggucaaa

SEQ ID NO: 138391 - RNA, 19 nt, Artificial Sequence
  Description of Artificial Sequence: Synthetic oligonucleotide
  Antisense strand to SEQ ID NO: 138390
uuugaccuccaguuuacac

SEQ ID NO: 138392 - RNA, 19 nt, Artificial Sequence
  Description of Artificial Sequence: Synthetic oligonucleotide
  Sense strand starting at position 107 of SEQ ID NO: 1777
guugaaauggugugaagca

SEQ ID NO: 138393 - RNA, 19 nt, Artificial Sequence
  Description of Artificial Sequence: Synthetic oligonucleotide
  Antisense strand to SEQ ID NO: 138392
ugcuucacaccauuucaac

SEQ ID NO: 138394 - RNA, 19 nt, Artificial Sequence
  Description of Artificial Sequence: Synthetic oligonucleotide
  Sense strand starting at position 95 of SEQ ID NO: 1777
cugaccaaauguguugaaa

SEQ ID NO: 138395 - RNA, 19 nt, Artificial Sequence
  Description of Artificial Sequence: Synthetic oligonucleotide
  Antisense strand to SEQ ID NO: 138394
uuucaacacauuuggucag

SEQ ID NO: 138396 - RNA, 19 nt, Artificial Sequence
  Description of Artificial Sequence: Synthetic oligonucleotide
  Sense strand starting at position 68 of SEQ ID NO: 1777
accagauguguugacauca

SEQ ID NO: 138397 - RNA, 19 nt, Artificial Sequence
  Description of Artificial Sequence: Synthetic oligonucleotide
  Antisense strand to SEQ ID NO: 138396
ugaugucaacacaucuggu

SEQ ID NO: 138398 - RNA, 19 nt, Artificial Sequence
  Description of Artificial Sequence: Synthetic oligonucleotide
  Sense strand starting at position 33 of SEQ ID NO: 1777
uuccaugauccauguucuu

SEQ ID NO: 138399 - RNA, 19 nt, Artificial Sequence
  Description of Artificial Sequence: Synthetic oligonucleotide
  Antisense strand to SEQ ID NO: 138398
aagaacauggaucauggaa

SEQ ID NO: 138400 - RNA, 19 nt, Artificial Sequence
  Description of Artificial Sequence: Synthetic oligonucleotide
  Sense strand starting at position 26 of SEQ ID NO: 1777
guuccaguuccaugaucca

SEQ ID NO: 138401 - RNA, 19 nt, Artificial Sequence
  Description of Artificial Sequence: Synthetic oligonucleotide
  Antisense strand to SEQ ID NO: 138400
uggaucauggaacuggaac

SEQ ID NO: 138402 - RNA, 19 nt, Artificial Sequence
  Description of Artificial Sequence: Synthetic oligonucleotide
  Sense strand starting at position 6 of SEQ ID NO: 1777
gagauuaccuuaucuuagg

SEQ ID NO: 138403 - RNA, 19 nt, Artificial Sequence
  Description of Artificial Sequence: Synthetic oligonucleotide
  Antisense strand to SEQ ID NO: 138402
ccuaagauaagguaaucuc

SEQ ID NO: 138404 - RNA, 19 nt, Artificial Sequence
  Description of Artificial Sequence: Synthetic oligonucleotide
  Sense strand starting at position 266 of SEQ ID NO: 1778
acggaauaauucuuccucu

SEQ ID NO: 138405 - RNA, 19 nt, Artificial Sequence
  Description of Artificial Sequence: Synthetic oligonucleotide
  Antisense strand to SEQ ID NO: 138404
agaggaagaauuauuccgu

SEQ ID NO: 138406 - RNA, 19 nt, Artificial Sequence
  Description of Artificial Sequence: Synthetic oligonucleotide
  Sense strand starting at position 364 of SEQ ID NO: 1778
ugagcugauuuccagagau

SEQ ID NO: 138407 - RNA, 19 nt, Artificial Sequence
  Description of Artificial Sequence: Synthetic oligonucleotide
  Antisense strand to SEQ ID NO: 138406
aucucuggaaaucagcuca

SEQ ID NO: 138408 - RNA, 19 nt, Artificial Sequence
  Description of Artificial Sequence: Synthetic oligonucleotide
  Sense strand starting at position 381 of SEQ ID NO: 1778
augguaguggcccaagaaa

SEQ ID NO: 138409 - RNA, 19 nt, Artificial Sequence
  Description of Artificial Sequence: Synthetic oligonucleotide
  Antisense strand to SEQ ID NO: 138408
uuucuugggccacuaccau

SEQ ID NO: 138410 - RNA, 19 nt, Artificial Sequence
  Description of Artificial Sequence: Synthetic oligonucleotide
  Sense strand starting at position 396 of SEQ ID NO: 1778
gaaacaagaugucuuugcu

SEQ ID NO: 138411 - RNA, 19 nt, Artificial Sequence
  Description of Artificial Sequence: Synthetic oligonucleotide
  Antisense strand to SEQ ID NO: 138410
agcaaagacaucuuguuuc

SEQ ID NO: 138412 - RNA, 19 nt, Artificial Sequence
  Description of Artificial Sequence: Synthetic oligonucleotide
  Sense strand starting at position 399 of SEQ ID NO: 1778
acaagaugucuuugcuuau

SEQ ID NO: 138413 - RNA, 19 nt, Artificial Sequence
  Description of Artificial Sequence: Synthetic oligonucleotide
  Antisense strand to SEQ ID NO: 138412
auaagcaaagacaucuugu

SEQ ID NO: 138414 - RNA, 19 nt, Artificial Sequence
  Description of Artificial Sequence: Synthetic oligonucleotide
  Sense strand starting at position 427 of SEQ ID NO: 1778
guuugcuaugugucaagca

SEQ ID NO: 138415 - RNA, 19 nt, Artificial Sequence
  Description of Artificial Sequence: Synthetic oligonucleotide
  Antisense strand to SEQ ID NO: 138414
ugcuugacacauagcaaac

SEQ ID NO: 138416 - RNA, 19 nt, Artificial Sequence
  Description of Artificial Sequence: Synthetic oligonucleotide
  Sense strand starting at position 539 of SEQ ID NO: 1778
cguggcuugcgucuauaau

SEQ ID NO: 138417 - RNA, 19 nt, Artificial Sequence
  Description of Artificial Sequence: Synthetic oligonucleotide
  Antisense strand to SEQ ID NO: 138416
auuauagacgcaagccacg

SEQ ID NO: 138418 - RNA, 19 nt, Artificial Sequence
  Description of Artificial Sequence: Synthetic oligonucleotide
  Sense strand starting at position 745 of SEQ ID NO: 1778
agguuaaagugagccuaga

SEQ ID NO: 138419 - RNA, 19 nt, Artificial Sequence
  Description of Artificial Sequence: Synthetic oligonucleotide
  Antisense strand to SEQ ID NO: 138418
ucuaggcucacuuuaaccu

SEQ ID NO: 138420 - RNA, 19 nt, Artificial Sequence
  Description of Artificial Sequence: Synthetic oligonucleotide
  Sense strand starting at position 896 of SEQ ID NO: 1778
accagauuugcgcaccagu

SEQ ID NO: 138421 - RNA, 19 nt, Artificial Sequence
  Description of Artificial Sequence: Synthetic oligonucleotide
  Antisense strand to SEQ ID NO: 138420
acuggugcgcaaaucuggu

SEQ ID NO: 138422 - RNA, 19 nt, Artificial Sequence
  Description of Artificial Sequence: Synthetic oligonucleotide
  Sense strand starting at position 933 of SEQ ID NO: 1778
gcauaaugccuccacuaag

SEQ ID NO: 138423 - RNA, 19 nt, Artificial Sequence
  Description of Artificial Sequence: Synthetic oligonucleotide
  Antisense strand to SEQ ID NO: 138422
cuuaguggaggcauuaugc

SEQ ID NO: 138424 - RNA, 19 nt, Artificial Sequence
  Description of Artificial Sequence: Synthetic oligonucleotide
  Sense strand starting at position 1081 of SEQ ID NO: 1778
ccauguuaugacugaacag

SEQ ID NO: 138425 - RNA, 19 nt, Artificial Sequence
  Description of Artificial Sequence: Synthetic oligonucleotide
  Antisense strand to SEQ ID NO: 138424
cuguucagucauaacaugg

SEQ ID NO: 138426 - RNA, 19 nt, Artificial Sequence
  Description of Artificial Sequence: Synthetic oligonucleotide
  Sense strand starting at position 1160 of SEQ ID NO: 1778
guuggaacuaguugggaga

SEQ ID NO: 138427 - RNA, 19 nt, Artificial Sequence
  Description of Artificial Sequence: Synthetic oligonucleotide
  Antisense strand to SEQ ID NO: 138426
ucucccaacuaguuccaac

SEQ ID NO: 138428 - RNA, 19 nt, Artificial Sequence
  Description of Artificial Sequence: Synthetic oligonucleotide
  Sense strand starting at position 1242 of SEQ ID NO: 1778
gcacuucuagaaggagcaa

SEQ ID NO: 138429 - RNA, 19 nt, Artificial Sequence
  Description of Artificial Sequence: Synthetic oligonucleotide
  Antisense strand to SEQ ID NO: 138428
uugcuccuucuagaagugc

SEQ ID NO: 138430 - RNA, 19 nt, Artificial Sequence
  Description of Artificial Sequence: Synthetic oligonucleotide
  Sense strand starting at position 1298 of SEQ ID NO: 1778
aaacguguaggagguaaau

SEQ ID NO: 138431 - RNA, 19 nt, Artificial Sequence
  Description of Artificial Sequence: Synthetic oligonucleotide
  Antisense strand to SEQ ID NO: 138430
auuuaccuccuacacguuu

SEQ ID NO: 138432 - RNA, 19 nt, Artificial Sequence
  Description of Artificial Sequence: Synthetic oligonucleotide
  Sense strand starting at position 1425 of SEQ ID NO: 1778
gaagguaugcacugaaguu

SEQ ID NO: 138433 - RNA, 19 nt, Artificial Sequence
  Description of Artificial Sequence: Synthetic oligonucleotide
  Antisense strand to SEQ ID NO: 138432
aacuucagugcauaccuuc

SEQ ID NO: 138434 - RNA, 19 nt, Artificial Sequence
  Description of Artificial Sequence: Synthetic oligonucleotide
  Sense strand starting at position 1497 of SEQ ID NO: 1778
cagugcuggcaccagaaau

SEQ ID NO: 138435 - RNA, 19 nt, Artificial Sequence
  Description of Artificial Sequence: Synthetic oligonucleotide
  Antisense strand to SEQ ID NO: 138434
auuucuggugccagcacug

SEQ ID NO: 138436 - RNA, 19 nt, Artificial Sequence
  Description of Artificial Sequence: Synthetic oligonucleotide
  Sense strand starting at position 1587 of SEQ ID NO: 1778
uuuguauagcaagaauacu

SEQ ID NO: 138437 - RNA, 19 nt, Artificial Sequence
  Description of Artificial Sequence: Synthetic oligonucleotide
  Antisense strand to SEQ ID NO: 138436
aguauucuugcuauacaaa

SEQ ID NO: 138438 - RNA, 19 nt, Artificial Sequence
  Description of Artificial Sequence: Synthetic oligonucleotide
  Sense strand starting at position 1711 of SEQ ID NO: 1778
gcugacaacucucugaauu

SEQ ID NO: 138439 - RNA, 19 nt, Artificial Sequence
  Description of Artificial Sequence: Synthetic oligonucleotide
  Antisense strand to SEQ ID NO: 138438
aauucagagaguugucagc

SEQ ID NO: 138440 - RNA, 19 nt, Artificial Sequence
  Description of Artificial Sequence: Synthetic oligonucleotide
  Sense strand starting at position 1846 of SEQ ID NO: 1778
gaagccagucuaugugaau

SEQ ID NO: 138441 - RNA, 19 nt, Artificial Sequence
  Description of Artificial Sequence: Synthetic oligonucleotide
  Antisense strand to SEQ ID NO: 138440
auucacauagacuggcuuc

SEQ ID NO: 138442 - RNA, 19 nt, Artificial Sequence
  Description of Artificial Sequence: Synthetic oligonucleotide
  Sense strand starting at position 1847 of SEQ ID NO: 1778
aagccagucuaugugaauu

SEQ ID NO: 138443 - RNA, 19 nt, Artificial Sequence
  Description of Artificial Sequence: Synthetic oligonucleotide
  Antisense strand to SEQ ID NO: 138442
aauucacauagacuggcuu

SEQ ID NO: 138444 - RNA, 19 nt, Artificial Sequence
  Description of Artificial Sequence: Synthetic oligonucleotide
  Sense strand starting at position 1865 of SEQ ID NO: 1778
uaacuagugggccaaacuu

SEQ ID NO: 138445 - RNA, 19 nt, Artificial Sequence
  Description of Artificial Sequence: Synthetic oligonucleotide
  Antisense strand to SEQ ID NO: 138444
aaguuuggcccacuaguua

SEQ ID NO: 138446 - RNA, 19 nt, Artificial Sequence
  Description of Artificial Sequence: Synthetic oligonucleotide
  Sense strand starting at position 1966 of SEQ ID NO: 1778
cagaauugucgugagacuc

SEQ ID NO: 138447 - RNA, 19 nt, Artificial Sequence
  Description of Artificial Sequence: Synthetic oligonucleotide
  Antisense strand to SEQ ID NO: 138446
gagucucacgacaauucug

SEQ ID NO: 138448 - RNA, 19 nt, Artificial Sequence
  Description of Artificial Sequence: Synthetic oligonucleotide
  Sense strand starting at position 1976 of SEQ ID NO: 1778
gugagacucuuccugucua

SEQ ID NO: 138449 - RNA, 19 nt, Artificial Sequence
  Description of Artificial Sequence: Synthetic oligonucleotide
  Antisense strand to SEQ ID NO: 138448
uagacaggaagagucucac

SEQ ID NO: 138450 - RNA, 19 nt, Artificial Sequence
  Description of Artificial Sequence: Synthetic oligonucleotide
  Sense strand starting at position 2038 of SEQ ID NO: 1778
gggagacaauguucuucuu

SEQ ID NO: 138451 - RNA, 19 nt, Artificial Sequence
  Description of Artificial Sequence: Synthetic oligonucleotide
  Antisense strand to SEQ ID NO: 138450
aagaagaacauugucuccc

SEQ ID NO: 138452 - RNA, 19 nt, Artificial Sequence
  Description of Artificial Sequence: Synthetic oligonucleotide
  Sense strand starting at position 2040 of SEQ ID NO: 1778
gagacaauguucuucuuag

SEQ ID NO: 138453 - RNA, 19 nt, Artificial Sequence
  Description of Artificial Sequence: Synthetic oligonucleotide
  Antisense strand to SEQ ID NO: 138452
cuaagaagaacauugucuc

SEQ ID NO: 138454 - RNA, 19 nt, Artificial Sequence
  Description of Artificial Sequence: Synthetic oligonucleotide
  Sense strand starting at position 2041 of SEQ ID NO: 1778
agacaauguucuucuuagu

SEQ ID NO: 138455 - RNA, 19 nt, Artificial Sequence
  Description of Artificial Sequence: Synthetic oligonucleotide
  Antisense strand to SEQ ID NO: 138454
acuaagaagaacauugucu

SEQ ID NO: 138456 - RNA, 19 nt, Artificial Sequence
  Description of Artificial Sequence: Synthetic oligonucleotide
  Sense strand starting at position 2418 of SEQ ID NO: 1778
gagagaguucuagguggug

SEQ ID NO: 138457 - RNA, 19 nt, Artificial Sequence
  Description of Artificial Sequence: Synthetic oligonucleotide
  Antisense strand to SEQ ID NO: 138456
caccaccuagaacucucuc

SEQ ID NO: 138458 - RNA, 19 nt, Artificial Sequence
  Description of Artificial Sequence: Synthetic oligonucleotide
  Sense strand starting at position 2468 of SEQ ID NO: 1778
agagaagaguucuugugga

SEQ ID NO: 138459 - RNA, 19 nt, Artificial Sequence
  Description of Artificial Sequence: Synthetic oligonucleotide
  Antisense strand to SEQ ID NO: 138458
uccacaagaacucuucucu

SEQ ID NO: 138460 - RNA, 19 nt, Artificial Sequence
  Description of Artificial Sequence: Synthetic oligonucleotide
  Sense strand starting at position 2536 of SEQ ID NO: 1778
guugaagaguuaccugaag

SEQ ID NO: 138461 - RNA, 19 nt, Artificial Sequence
  Description of Artificial Sequence: Synthetic oligonucleotide
  Antisense strand to SEQ ID NO: 138460
cuucagguaacucuucaac

SEQ ID NO: 138462 - RNA, 19 nt, Artificial Sequence
  Description of Artificial Sequence: Synthetic oligonucleotide
  Sense strand starting at position 2566 of SEQ ID NO: 1778
gugagagguuugguuacua

SEQ ID NO: 138463 - RNA, 19 nt, Artificial Sequence
  Description of Artificial Sequence: Synthetic oligonucleotide
  Antisense strand to SEQ ID NO: 138462
uaguaaccaaaccucucac

SEQ ID NO: 138464 - RNA, 19 nt, Artificial Sequence
  Description of Artificial Sequence: Synthetic oligonucleotide
  Sense strand starting at position 2570 of SEQ ID NO: 1778
gagguuugguuacuauaca

SEQ ID NO: 138465 - RNA, 19 nt, Artificial Sequence
  Description of Artificial Sequence: Synthetic oligonucleotide
  Antisense strand to SEQ ID NO: 138464
uguauaguaaccaaaccuc

SEQ ID NO: 138466 - RNA, 19 nt, Artificial Sequence
  Description of Artificial Sequence: Synthetic oligonucleotide
  Sense strand starting at position 2630 of SEQ ID NO: 1778
acuagaauuuaggagccuu

SEQ ID NO: 138467 - RNA, 19 nt, Artificial Sequence
  Description of Artificial Sequence: Synthetic oligonucleotide
  Antisense strand to SEQ ID NO: 138466
aaggcuccuaaauucuagu

SEQ ID NO: 138468 - RNA, 19 nt, Artificial Sequence
  Description of Artificial Sequence: Synthetic oligonucleotide
  Sense strand starting at position 2745 of SEQ ID NO: 1778
accgaugguggagauguaa

SEQ ID NO: 138469 - RNA, 19 nt, Artificial Sequence
  Description of Artificial Sequence: Synthetic oligonucleotide
  Antisense strand to SEQ ID NO: 138468
uuacaucuccaccaucggu

SEQ ID NO: 138470 - RNA, 19 nt, Artificial Sequence
  Description of Artificial Sequence: Synthetic oligonucleotide
  Sense strand starting at position 3386 of SEQ ID NO: 1778
gcuagaagaugaguuauca

SEQ ID NO: 138471 - RNA, 19 nt, Artificial Sequence
  Description of Artificial Sequence: Synthetic oligonucleotide
  Antisense strand to SEQ ID NO: 138470
ugauaacucaucuucuagc

SEQ ID NO: 138472 - RNA, 19 nt, Artificial Sequence
  Description of Artificial Sequence: Synthetic oligonucleotide
  Sense strand starting at position 3518 of SEQ ID NO: 1778
guuauuuguugagucaguc

SEQ ID NO: 138473 - RNA, 19 nt, Artificial Sequence
  Description of Artificial Sequence: Synthetic oligonucleotide
  Antisense strand to SEQ ID NO: 138472
gacugacucaacaaauaac

SEQ ID NO: 138474 - RNA, 19 nt, Artificial Sequence
  Description of Artificial Sequence: Synthetic oligonucleotide
  Sense strand starting at position 3638 of SEQ ID NO: 1778
uuggaacgaucucucuuau

SEQ ID NO: 138475 - RNA, 19 nt, Artificial Sequence
  Description of Artificial Sequence: Synthetic oligonucleotide
  Antisense strand to SEQ ID NO: 138474
auaagagagaucguuccaa

SEQ ID NO: 138476 - RNA, 19 nt, Artificial Sequence
  Description of Artificial Sequence: Synthetic oligonucleotide
  Sense strand starting at position 3668 of SEQ ID NO: 1778
ugugauuucucugaccaaa

SEQ ID NO: 138477 - RNA, 19 nt, Artificial Sequence
  Description of Artificial Sequence: Synthetic oligonucleotide
  Antisense strand to SEQ ID NO: 138476
uuuggucagagaaaucaca

SEQ ID NO: 138478 - RNA, 19 nt, Artificial Sequence
  Description of Artificial Sequence: Synthetic oligonucleotide
  Sense strand starting at position 3717 of SEQ ID NO: 1778
aaugucauucuuuacguga

SEQ ID NO: 138479 - RNA, 19 nt, Artificial Sequence
  Description of Artificial Sequence: Synthetic oligonucleotide
  Antisense strand to SEQ ID NO: 138478
ucacguaaagaaugacauu

SEQ ID NO: 138480 - RNA, 19 nt, Artificial Sequence
  Description of Artificial Sequence: Synthetic oligonucleotide
  Sense strand starting at position 3761 of SEQ ID NO: 1778
ugcaguacuccugaaaucu

SEQ ID NO: 138481 - RNA, 19 nt, Artificial Sequence
  Description of Artificial Sequence: Synthetic oligonucleotide
  Antisense strand to SEQ ID NO: 138480
agauuucaggaguacugca

SEQ ID NO: 138482 - RNA, 19 nt, Artificial Sequence
  Description of Artificial Sequence: Synthetic oligonucleotide
  Sense strand starting at position 3782 of SEQ ID NO: 1778
cucaauaggccaugaaugu

SEQ ID NO: 138483 - RNA, 19 nt, Artificial Sequence
  Description of Artificial Sequence: Synthetic oligonucleotide
  Antisense strand to SEQ ID NO: 138482
acauucauggccuauugag

SEQ ID NO: 138484 - RNA, 19 nt, Artificial Sequence
  Description of Artificial Sequence: Synthetic oligonucleotide
  Sense strand starting at position 70 of SEQ ID NO: 1779
ccauguuaugacugaacag

SEQ ID NO: 138485 - RNA, 19 nt, Artificial Sequence
  Description of Artificial Sequence: Synthetic oligonucleotide
  Antisense strand to SEQ ID NO: 138484
cuguucagucauaacaugg

SEQ ID NO: 138486 - RNA, 19 nt, Artificial Sequence
  Description of Artificial Sequence: Synthetic oligonucleotide
  Sense strand starting at position 149 of SEQ ID NO: 1779
guuggaacuaguugggaga

SEQ ID NO: 138487 - RNA, 19 nt, Artificial Sequence
  Description of Artificial Sequence: Synthetic oligonucleotide
  Antisense strand to SEQ ID NO: 138486
ucucccaacuaguuccaac

SEQ ID NO: 138488 - RNA, 19 nt, Artificial Sequence
  Description of Artificial Sequence: Synthetic oligonucleotide
  Sense strand starting at position 231 of SEQ ID NO: 1779
gcacuucuagaaggagcaa

SEQ ID NO: 138489 - RNA, 19 nt, Artificial Sequence
  Description of Artificial Sequence: Synthetic oligonucleotide
  Antisense strand to SEQ ID NO: 138488
uugcuccuucuagaagugc

SEQ ID NO: 138490 - RNA, 19 nt, Artificial Sequence
  Description of Artificial Sequence: Synthetic oligonucleotide
  Sense strand starting at position 287 of SEQ ID NO: 1779
aaacguguaggagguaaau

SEQ ID NO: 138491 - RNA, 19 nt, Artificial Sequence
  Description of Artificial Sequence: Synthetic oligonucleotide
  Antisense strand to SEQ ID NO: 138490
auuuaccuccuacacguuu

SEQ ID NO: 138492 - RNA, 19 nt, Artificial Sequence
  Description of Artificial Sequence: Synthetic oligonucleotide
  Sense strand starting at position 414 of SEQ ID NO: 1779
gaagguaugcacugaaguu

SEQ ID NO: 138493 - RNA, 19 nt, Artificial Sequence
  Description of Artificial Sequence: Synthetic oligonucleotide
  Antisense strand to SEQ ID NO: 138492
aacuucagugcauaccuuc

SEQ ID NO: 138494 - RNA, 19 nt, Artificial Sequence
  Description of Artificial Sequence: Synthetic oligonucleotide
  Sense strand starting at position 486 of SEQ ID NO: 1779
cagugcuggcaccagaaau

SEQ ID NO: 138495 - RNA, 19 nt, Artificial Sequence
  Description of Artificial Sequence: Synthetic oligonucleotide
  Antisense strand to SEQ ID NO: 138494
auuucuggugccagcacug

SEQ ID NO: 138496 - RNA, 19 nt, Artificial Sequence
  Description of Artificial Sequence: Synthetic oligonucleotide
  Sense strand starting at position 573 of SEQ ID NO: 1779
guauuuguauagcaagaau

SEQ ID NO: 138497 - RNA, 19 nt, Artificial Sequence
  Description of Artificial Sequence: Synthetic oligonucleotide
  Antisense strand to SEQ ID NO: 138496
auucuugcuauacaaauac

SEQ ID NO: 138498 - RNA, 19 nt, Artificial Sequence
  Description of Artificial Sequence: Synthetic oligonucleotide
  Sense strand starting at position 576 of SEQ ID NO: 1779
uuuguauagcaagaauacu

SEQ ID NO: 138499 - RNA, 19 nt, Artificial Sequence
  Description of Artificial Sequence: Synthetic oligonucleotide
  Antisense strand to SEQ ID NO: 138498
aguauucuugcuauacaaa

SEQ ID NO: 138500 - RNA, 19 nt, Artificial Sequence
  Description of Artificial Sequence: Synthetic oligonucleotide
  Sense strand starting at position 700 of SEQ ID NO: 1779
gcugacaacucucugaauu

SEQ ID NO: 138501 - RNA, 19 nt, Artificial Sequence
  Description of Artificial Sequence: Synthetic oligonucleotide
  Antisense strand to SEQ ID NO: 138500
aauucagagaguugucagc

SEQ ID NO: 138502 - RNA, 19 nt, Artificial Sequence
  Description of Artificial Sequence: Synthetic oligonucleotide
  Sense strand starting at position 835 of SEQ ID NO: 1779
gaagccagucuaugugaau

SEQ ID NO: 138503 - RNA, 19 nt, Artificial Sequence
  Description of Artificial Sequence: Synthetic oligonucleotide
  Antisense strand to SEQ ID NO: 138502
auucacauagacuggcuuc

SEQ ID NO: 138504 - RNA, 19 nt, Artificial Sequence
  Description of Artificial Sequence: Synthetic oligonucleotide
  Sense strand starting at position 836 of SEQ ID NO: 1779
aagccagucuaugugaauu

SEQ ID NO: 138505 - RNA, 19 nt, Artificial Sequence
  Description of Artificial Sequence: Synthetic oligonucleotide
  Antisense strand to SEQ ID NO: 138504
aauucacauagacuggcuu

SEQ ID NO: 138506 - RNA, 19 nt, Artificial Sequence
  Description of Artificial Sequence: Synthetic oligonucleotide
  Sense strand starting at position 854 of SEQ ID NO: 1779
uaacuagugggccaaacuu

SEQ ID NO: 138507 - RNA, 19 nt, Artificial Sequence
  Description of Artificial Sequence: Synthetic oligonucleotide
  Antisense strand to SEQ ID NO: 138506
aaguuuggcccacuaguua

SEQ ID NO: 138508 - RNA, 19 nt, Artificial Sequence
  Description of Artificial Sequence: Synthetic oligonucleotide
  Sense strand starting at position 909 of SEQ ID NO: 1779
uugagacaauuaggaaaga

SEQ ID NO: 138509 - RNA, 19 nt, Artificial Sequence
  Description of Artificial Sequence: Synthetic oligonucleotide
  Antisense strand to SEQ ID NO: 138508
ucuuuccuaauugucucaa

SEQ ID NO: 138510 - RNA, 19 nt, Artificial Sequence
  Description of Artificial Sequence: Synthetic oligonucleotide
  Sense strand starting at position 955 of SEQ ID NO: 1779
cagaauugucgugagacuc

SEQ ID NO: 138511 - RNA, 19 nt, Artificial Sequence
  Description of Artificial Sequence: Synthetic oligonucleotide
  Antisense strand to SEQ ID NO: 138510
gagucucacgacaauucug

SEQ ID NO: 138512 - RNA, 19 nt, Artificial Sequence
  Description of Artificial Sequence: Synthetic oligonucleotide
  Sense strand starting at position 965 of SEQ ID NO: 1779
gugagacucuuccugucua

SEQ ID NO: 138513 - RNA, 19 nt, Artificial Sequence
  Description of Artificial Sequence: Synthetic oligonucleotide
  Antisense strand to SEQ ID NO: 138512
uagacaggaagagucucac

SEQ ID NO: 138514 - RNA, 19 nt, Artificial Sequence
  Description of Artificial Sequence: Synthetic oligonucleotide
  Sense strand starting at position 1027 of SEQ ID NO: 1779
gggagacaauguucuucuu

SEQ ID NO: 138515 - RNA, 19 nt, Artificial Sequence
  Description of Artificial Sequence: Synthetic oligonucleotide
  Antisense strand to SEQ ID NO: 138514
aagaagaacauugucuccc

SEQ ID NO: 138516 - RNA, 19 nt, Artificial Sequence
  Description of Artificial Sequence: Synthetic oligonucleotide
  Sense strand starting at position 1029 of SEQ ID NO: 1779
gagacaauguucuucuuag

SEQ ID NO: 138517 - RNA, 19 nt, Artificial Sequence
  Description of Artificial Sequence: Synthetic oligonucleotide
  Antisense strand to SEQ ID NO: 138516
cuaagaagaacauugucuc

SEQ ID NO: 138518 - RNA, 19 nt, Artificial Sequence
  Description of Artificial Sequence: Synthetic oligonucleotide
  Sense strand starting at position 1030 of SEQ ID NO: 1779
agacaauguucuucuuagu

SEQ ID NO: 138519 - RNA, 19 nt, Artificial Sequence
  Description of Artificial Sequence: Synthetic oligonucleotide
  Antisense strand to SEQ ID NO: 138518
acuaagaagaacauugucu

SEQ ID NO: 138520 - RNA, 19 nt, Artificial Sequence
  Description of Artificial Sequence: Synthetic oligonucleotide
  Sense strand starting at position 1407 of SEQ ID NO: 1779
gagagaguucuagguggug

SEQ ID NO: 138521 - RNA, 19 nt, Artificial Sequence
  Description of Artificial Sequence: Synthetic oligonucleotide
  Antisense strand to SEQ ID NO: 138520
caccaccuagaacucucuc

SEQ ID NO: 138522 - RNA, 19 nt, Artificial Sequence
  Description of Artificial Sequence: Synthetic oligonucleotide
  Sense strand starting at position 1457 of SEQ ID NO: 1779
agagaagaguucuugugga

SEQ ID NO: 138523 - RNA, 19 nt, Artificial Sequence
  Description of Artificial Sequence: Synthetic oligonucleotide
  Antisense strand to SEQ ID NO: 138522
uccacaagaacucuucucu

SEQ ID NO: 138524 - RNA, 19 nt, Artificial Sequence
  Description of Artificial Sequence: Synthetic oligonucleotide
  Sense strand starting at position 1525 of SEQ ID NO: 1779
guugaagaguuaccugaag

SEQ ID NO: 138525 - RNA, 19 nt, Artificial Sequence
  Description of Artificial Sequence: Synthetic oligonucleotide
  Antisense strand to SEQ ID NO: 138524
cuucagguaacucuucaac

SEQ ID NO: 138526 - RNA, 19 nt, Artificial Sequence
  Description of Artificial Sequence: Synthetic oligonucleotide
  Sense strand starting at position 1555 of SEQ ID NO: 1779
gugagagguuugguuacua

SEQ ID NO: 138527 - RNA, 19 nt, Artificial Sequence
  Description of Artificial Sequence: Synthetic oligonucleotide
  Antisense strand to SEQ ID NO: 138526
uaguaaccaaaccucucac

SEQ ID NO: 138528 - RNA, 19 nt, Artificial Sequence
  Description of Artificial Sequence: Synthetic oligonucleotide
  Sense strand starting at position 1559 of SEQ ID NO: 1779
gagguuugguuacuauaca

SEQ ID NO: 138529 - RNA, 19 nt, Artificial Sequence
  Description of Artificial Sequence: Synthetic oligonucleotide
  Antisense strand to SEQ ID NO: 138528
uguauaguaaccaaaccuc

SEQ ID NO: 138530 - RNA, 19 nt, Artificial Sequence
  Description of Artificial Sequence: Synthetic oligonucleotide
  Sense strand starting at position 1619 of SEQ ID NO: 1779
acuagaauuuaggagccuu

SEQ ID NO: 138531 - RNA, 19 nt, Artificial Sequence
  Description of Artificial Sequence: Synthetic oligonucleotide
  Antisense strand to SEQ ID NO: 138530
aaggcuccuaaauucuagu

SEQ ID NO: 138532 - RNA, 19 nt, Artificial Sequence
  Description of Artificial Sequence: Synthetic oligonucleotide
  Sense strand starting at position 1734 of SEQ ID NO: 1779
accgaugguggagauguaa

SEQ ID NO: 138533 - RNA, 19 nt, Artificial Sequence
  Description of Artificial Sequence: Synthetic oligonucleotide
  Antisense strand to SEQ ID NO: 138532
uuacaucuccaccaucggu

SEQ ID NO: 138534 - RNA, 19 nt, Artificial Sequence
  Description of Artificial Sequence: Synthetic oligonucleotide
  Sense strand starting at position 2135 of SEQ ID NO: 1779
acagccuuucgguaauugu

SEQ ID NO: 138535 - RNA, 19 nt, Artificial Sequence
  Description of Artificial Sequence: Synthetic oligonucleotide
  Antisense strand to SEQ ID NO: 138534
acaauuaccgaaaggcugu

SEQ ID NO: 138536 - RNA, 19 nt, Artificial Sequence
  Description of Artificial Sequence: Synthetic oligonucleotide
  Sense strand starting at position 2375 of SEQ ID NO: 1779
gcuagaagaugaguuauca

SEQ ID NO: 138537 - RNA, 19 nt, Artificial Sequence
  Description of Artificial Sequence: Synthetic oligonucleotide
  Antisense strand to SEQ ID NO: 138536
ugauaacucaucuucuagc

SEQ ID NO: 138538 - RNA, 19 nt, Artificial Sequence
  Description of Artificial Sequence: Synthetic oligonucleotide
  Sense strand starting at position 2383 of SEQ ID NO: 1779
augaguuaucaucgguuuc

SEQ ID NO: 138539 - RNA, 19 nt, Artificial Sequence
  Description of Artificial Sequence: Synthetic oligonucleotide
  Antisense strand to SEQ ID NO: 138538
gaaaccgaugauaacucau

SEQ ID NO: 138540 - RNA, 19 nt, Artificial Sequence
  Description of Artificial Sequence: Synthetic oligonucleotide
  Sense strand starting at position 2385 of SEQ ID NO: 1779
gaguuaucaucgguuucug

SEQ ID NO: 138541 - RNA, 19 nt, Artificial Sequence
  Description of Artificial Sequence: Synthetic oligonucleotide
  Antisense strand to SEQ ID NO: 138540
cagaaaccgaugauaacuc

SEQ ID NO: 138542 - RNA, 19 nt, Artificial Sequence
  Description of Artificial Sequence: Synthetic oligonucleotide
  Sense strand starting at position 2507 of SEQ ID NO: 1779
guuauuuguugagucaguc

SEQ ID NO: 138543 - RNA, 19 nt, Artificial Sequence
  Description of Artificial Sequence: Synthetic oligonucleotide
  Antisense strand to SEQ ID NO: 138542
gacugacucaacaaauaac

SEQ ID NO: 138544 - RNA, 19 nt, Artificial Sequence
  Description of Artificial Sequence: Synthetic oligonucleotide
  Sense strand starting at position 2627 of SEQ ID NO: 1779
uuggaacgaucucucuuau

SEQ ID NO: 138545 - RNA, 19 nt, Artificial Sequence
  Description of Artificial Sequence: Synthetic oligonucleotide
  Antisense strand to SEQ ID NO: 138544
auaagagagaucguuccaa

SEQ ID NO: 138546 - RNA, 19 nt, Artificial Sequence
  Description of Artificial Sequence: Synthetic oligonucleotide
  Sense strand starting at position 2657 of SEQ ID NO: 1779
ugugauuucucugaccaaa

SEQ ID NO: 138547 - RNA, 19 nt, Artificial Sequence
  Description of Artificial Sequence: Synthetic oligonucleotide
  Antisense strand to SEQ ID NO: 138546
uuuggucagagaaaucaca

SEQ ID NO: 138548 - RNA, 19 nt, Artificial Sequence
  Description of Artificial Sequence: Synthetic oligonucleotide
  Sense strand starting at position 2706 of SEQ ID NO: 1779
aaugucauucuuuacguga

SEQ ID NO: 138549 - RNA, 19 nt, Artificial Sequence
  Description of Artificial Sequence: Synthetic oligonucleotide
  Antisense strand to SEQ ID NO: 138548
ucacguaaagaaugacauu

SEQ ID NO: 138550 - RNA, 19 nt, Artificial Sequence
  Description of Artificial Sequence: Synthetic oligonucleotide
  Sense strand starting at position 2750 of SEQ ID NO: 1779
ugcaguacuccugaaaucu

SEQ ID NO: 138551 - RNA, 19 nt, Artificial Sequence
  Description of Artificial Sequence: Synthetic oligonucleotide
  Antisense strand to SEQ ID NO: 138550
agauuucaggaguacugca

SEQ ID NO: 138552 - RNA, 19 nt, Artificial Sequence
  Description of Artificial Sequence: Synthetic oligonucleotide
  Sense strand starting at position 2771 of SEQ ID NO: 1779
cucaauaggccaugaaugu

SEQ ID NO: 138553 - RNA, 19 nt, Artificial Sequence
  Description of Artificial Sequence: Synthetic oligonucleotide
  Antisense strand to SEQ ID NO: 138552
acauucauggccuauugag

SEQ ID NO: 138554 - RNA, 19 nt, Artificial Sequence
  Description of Artificial Sequence: Synthetic oligonucleotide
  Sense strand starting at position 3211 of SEQ ID NO: 1779
uuauucuugcuauaugugu

SEQ ID NO: 138555 - RNA, 19 nt, Artificial Sequence
  Description of Artificial Sequence: Synthetic oligonucleotide
  Antisense strand to SEQ ID NO: 138554
acacauauagcaagaauaa

SEQ ID NO: 138556 - RNA, 19 nt, Artificial Sequence
  Description of Artificial Sequence: Synthetic oligonucleotide
  Sense strand starting at position 3380 of SEQ ID NO: 1779
uagugagacugcuucgaca

SEQ ID NO: 138557 - RNA, 19 nt, Artificial Sequence
  Description of Artificial Sequence: Synthetic oligonucleotide
  Antisense strand to SEQ ID NO: 138556
ugucgaagcagucucacua

SEQ ID NO: 138558 - RNA, 19 nt, Artificial Sequence
  Description of Artificial Sequence: Synthetic oligonucleotide
  Sense strand starting at position 3382 of SEQ ID NO: 1779
gugagacugcuucgacaaa

SEQ ID NO: 138559 - RNA, 19 nt, Artificial Sequence
  Description of Artificial Sequence: Synthetic oligonucleotide
  Antisense strand to SEQ ID NO: 138558
uuugucgaagcagucucac

SEQ ID NO: 138560 - RNA, 19 nt, Artificial Sequence
  Description of Artificial Sequence: Synthetic oligonucleotide
  Sense strand starting at position 3738 of SEQ ID NO: 1779
ccuguaauccucugggauu

SEQ ID NO: 138561 - RNA, 19 nt, Artificial Sequence
  Description of Artificial Sequence: Synthetic oligonucleotide
  Antisense strand to SEQ ID NO: 138560
aaucccagaggauuacagg

SEQ ID NO: 138562 - RNA, 19 nt, Artificial Sequence
  Description of Artificial Sequence: Synthetic oligonucleotide
  Sense strand starting at position 3740 of SEQ ID NO: 1779
uguaauccucugggauuac

SEQ ID NO: 138563 - RNA, 19 nt, Artificial Sequence
  Description of Artificial Sequence: Synthetic oligonucleotide
  Antisense strand to SEQ ID NO: 138562
guaaucccagaggauuaca

SEQ ID NO: 138564 - RNA, 19 nt, Artificial Sequence
  Description of Artificial Sequence: Synthetic oligonucleotide
  Sense strand starting at position 3902 of SEQ ID NO: 1780
gggucuguguaagcacaua

SEQ ID NO: 138565 - RNA, 19 nt, Artificial Sequence
  Description of Artificial Sequence: Synthetic oligonucleotide
  Antisense strand to SEQ ID NO: 138564
uaugugcuuacacagaccc

SEQ ID NO: 138566 - RNA, 19 nt, Artificial Sequence
  Description of Artificial Sequence: Synthetic oligonucleotide
  Sense strand starting at position 3810 of SEQ ID NO: 1780
uugggaggucuggguuacu

SEQ ID NO: 138567 - RNA, 19 nt, Artificial Sequence
  Description of Artificial Sequence: Synthetic oligonucleotide
  Antisense strand to SEQ ID NO: 138566
aguaacccagaccucccaa

SEQ ID NO: 138568 - RNA, 19 nt, Artificial Sequence
  Description of Artificial Sequence: Synthetic oligonucleotide
  Sense strand starting at position 3765 of SEQ ID NO: 1780
ggugaguggucugagugua

SEQ ID NO: 138569 - RNA, 19 nt, Artificial Sequence
  Description of Artificial Sequence: Synthetic oligonucleotide
  Antisense strand to SEQ ID NO: 138568
uacacucagaccacucacc

SEQ ID NO: 138570 - RNA, 19 nt, Artificial Sequence
  Description of Artificial Sequence: Synthetic oligonucleotide
  Sense strand starting at position 3764 of SEQ ID NO: 1780
gggugaguggucugagugu

SEQ ID NO: 138571 - RNA, 19 nt, Artificial Sequence
  Description of Artificial Sequence: Synthetic oligonucleotide
  Antisense strand to SEQ ID NO: 138570
acacucagaccacucaccc

SEQ ID NO: 138572 - RNA, 19 nt, Artificial Sequence
  Description of Artificial Sequence: Synthetic oligonucleotide
  Sense strand starting at position 3690 of SEQ ID NO: 1780
gcugguagcucccuauaca

SEQ ID NO: 138573 - RNA, 19 nt, Artificial Sequence
  Description of Artificial Sequence: Synthetic oligonucleotide
  Antisense strand to SEQ ID NO: 138572
uguauagggagcuaccagc

SEQ ID NO: 138574 - RNA, 19 nt, Artificial Sequence
  Description of Artificial Sequence: Synthetic oligonucleotide
  Sense strand starting at position 3654 of SEQ ID NO: 1780
ugggauggguuccuuuaua

SEQ ID NO: 138575 - RNA, 19 nt, Artificial Sequence
  Description of Artificial Sequence: Synthetic oligonucleotide
  Antisense strand to SEQ ID NO: 138574
uauaaaggaacccauccca

SEQ ID NO: 138576 - RNA, 19 nt, Artificial Sequence
  Description of Artificial Sequence: Synthetic oligonucleotide
  Sense strand starting at position 3547 of SEQ ID NO: 1780
guaucauggccacaguaac

SEQ ID NO: 138577 - RNA, 19 nt, Artificial Sequence
  Description of Artificial Sequence: Synthetic oligonucleotide
  Antisense strand to SEQ ID NO: 138576
guuacuguggccaugauac

SEQ ID NO: 138578 - RNA, 19 nt, Artificial Sequence
  Description of Artificial Sequence: Synthetic oligonucleotide
  Sense strand starting at position 3545 of SEQ ID NO: 1780
gaguaucauggccacagua

SEQ ID NO: 138579 - RNA, 19 nt, Artificial Sequence
  Description of Artificial Sequence: Synthetic oligonucleotide
  Antisense strand to SEQ ID NO: 138578
uacuguggccaugauacuc

SEQ ID NO: 138580 - RNA, 19 nt, Artificial Sequence
  Description of Artificial Sequence: Synthetic oligonucleotide
  Sense strand starting at position 3544 of SEQ ID NO: 1780
ggaguaucauggccacagu

SEQ ID NO: 138581 - RNA, 19 nt, Artificial Sequence
  Description of Artificial Sequence: Synthetic oligonucleotide
  Antisense strand to SEQ ID NO: 138580
acuguggccaugauacucc

SEQ ID NO: 138582 - RNA, 19 nt, Artificial Sequence
  Description of Artificial Sequence: Synthetic oligonucleotide
  Sense strand starting at position 3532 of SEQ ID NO: 1780
ugcagagcugugggaguau

SEQ ID NO: 138583 - RNA, 19 nt, Artificial Sequence
  Description of Artificial Sequence: Synthetic oligonucleotide
  Antisense strand to SEQ ID NO: 138582
auacucccacagcucugca

SEQ ID NO: 138584 - RNA, 19 nt, Artificial Sequence
  Description of Artificial Sequence: Synthetic oligonucleotide
  Sense strand starting at position 3473 of SEQ ID NO: 1780
gaaccagaguaagggauau

SEQ ID NO: 138585 - RNA, 19 nt, Artificial Sequence
  Description of Artificial Sequence: Synthetic oligonucleotide
  Antisense strand to SEQ ID NO: 138584
auaucccuuacucugguuc

SEQ ID NO: 138586 - RNA, 19 nt, Artificial Sequence
  Description of Artificial Sequence: Synthetic oligonucleotide
  Sense strand starting at position 2909 of SEQ ID NO: 1780
uaugguagaaacggugaaa

SEQ ID NO: 138587 - RNA, 19 nt, Artificial Sequence
  Description of Artificial Sequence: Synthetic oligonucleotide
  Antisense strand to SEQ ID NO: 138586
uuucaccguuucuaccaua

SEQ ID NO: 138588 - RNA, 19 nt, Artificial Sequence
  Description of Artificial Sequence: Synthetic oligonucleotide
  Sense strand starting at position 2062 of SEQ ID NO: 1780
gagagaugaugacgucaga

SEQ ID NO: 138589 - RNA, 19 nt, Artificial Sequence
  Description of Artificial Sequence: Synthetic oligonucleotide
  Antisense strand to SEQ ID NO: 138588
ucugacgucaucaucucuc

SEQ ID NO: 138590 - RNA, 19 nt, Artificial Sequence
  Description of Artificial Sequence: Synthetic oligonucleotide
  Sense strand starting at position 1628 of SEQ ID NO: 1780
aggucuugguaagagauaa

SEQ ID NO: 138591 - RNA, 19 nt, Artificial Sequence
  Description of Artificial Sequence: Synthetic oligonucleotide
  Antisense strand to SEQ ID NO: 138590
uuaucucuuaccaagaccu

SEQ ID NO: 138592 - RNA, 19 nt, Artificial Sequence
  Description of Artificial Sequence: Synthetic oligonucleotide
  Sense strand starting at position 1623 of SEQ ID NO: 1780
ccaggaggucuugguaaga

SEQ ID NO: 138593 - RNA, 19 nt, Artificial Sequence
  Description of Artificial Sequence: Synthetic oligonucleotide
  Antisense strand to SEQ ID NO: 138592
ucuuaccaagaccuccugg

SEQ ID NO: 138594 - RNA, 19 nt, Artificial Sequence
  Description of Artificial Sequence: Synthetic oligonucleotide
  Sense strand starting at position 1595 of SEQ ID NO: 1780
agcuuucuuucugaaggaa

SEQ ID NO: 138595 - RNA, 19 nt, Artificial Sequence
  Description of Artificial Sequence: Synthetic oligonucleotide
  Antisense strand to SEQ ID NO: 138594
uuccuucagaaagaaagcu

SEQ ID NO: 138596 - RNA, 19 nt, Artificial Sequence
  Description of Artificial Sequence: Synthetic oligonucleotide
  Sense strand starting at position 1542 of SEQ ID NO: 1780
ucagaagcucccugacuuu

SEQ ID NO: 138597 - RNA, 19 nt, Artificial Sequence
  Description of Artificial Sequence: Synthetic oligonucleotide
  Antisense strand to SEQ ID NO: 138596
aaagucagggagcuucuga

SEQ ID NO: 138598 - RNA, 19 nt, Artificial Sequence
  Description of Artificial Sequence: Synthetic oligonucleotide
  Sense strand starting at position 1541 of SEQ ID NO: 1780
cucagaagcucccugacuu

SEQ ID NO: 138599 - RNA, 19 nt, Artificial Sequence
  Description of Artificial Sequence: Synthetic oligonucleotide
  Antisense strand to SEQ ID NO: 138598
aagucagggagcuucugag

SEQ ID NO: 138600 - RNA, 19 nt, Artificial Sequence
  Description of Artificial Sequence: Synthetic oligonucleotide
  Sense strand starting at position 1453 of SEQ ID NO: 1780
uuggguuucuauuaggaac

SEQ ID NO: 138601 - RNA, 19 nt, Artificial Sequence
  Description of Artificial Sequence: Synthetic oligonucleotide
  Antisense strand to SEQ ID NO: 138600
guuccuaauagaaacccaa

SEQ ID NO: 138602 - RNA, 19 nt, Artificial Sequence
  Description of Artificial Sequence: Synthetic oligonucleotide
  Sense strand starting at position 1403 of SEQ ID NO: 1780
ucugaagucugaccuccau

SEQ ID NO: 138603 - RNA, 19 nt, Artificial Sequence
  Description of Artificial Sequence: Synthetic oligonucleotide
  Antisense strand to SEQ ID NO: 138602
auggaggucagacuucaga

SEQ ID NO: 138604 - RNA, 19 nt, Artificial Sequence
  Description of Artificial Sequence: Synthetic oligonucleotide
  Sense strand starting at position 1393 of SEQ ID NO: 1780
ggaaguccuuucugaaguc

SEQ ID NO: 138605 - RNA, 19 nt, Artificial Sequence
  Description of Artificial Sequence: Synthetic oligonucleotide
  Antisense strand to SEQ ID NO: 138604
gacuucagaaaggacuucc

SEQ ID NO: 138606 - RNA, 19 nt, Artificial Sequence
  Description of Artificial Sequence: Synthetic oligonucleotide
  Sense strand starting at position 992 of SEQ ID NO: 1780
ugggaugugucucuccuuu

SEQ ID NO: 138607 - RNA, 19 nt, Artificial Sequence
  Description of Artificial Sequence: Synthetic oligonucleotide
  Antisense strand to SEQ ID NO: 138606
aaaggagagacacauccca

SEQ ID NO: 138608 - RNA, 19 nt, Artificial Sequence
  Description of Artificial Sequence: Synthetic oligonucleotide
  Sense strand starting at position 985 of SEQ ID NO: 1780
ccuauaaugggaugugucu

SEQ ID NO: 138609 - RNA, 19 nt, Artificial Sequence
  Description of Artificial Sequence: Synthetic oligonucleotide
  Antisense strand to SEQ ID NO: 138608
agacacaucccauuauagg

SEQ ID NO: 138610 - RNA, 19 nt, Artificial Sequence
  Description of Artificial Sequence: Synthetic oligonucleotide
  Sense strand starting at position 957 of SEQ ID NO: 1780
ugucuucccuauguauuua

SEQ ID NO: 138611 - RNA, 19 nt, Artificial Sequence
  Description of Artificial Sequence: Synthetic oligonucleotide
  Antisense strand to SEQ ID NO: 138610
uaaauacauagggaagaca

SEQ ID NO: 138612 - RNA, 19 nt, Artificial Sequence
  Description of Artificial Sequence: Synthetic oligonucleotide
  Sense strand starting at position 956 of SEQ ID NO: 1780
cugucuucccuauguauuu

SEQ ID NO: 138613 - RNA, 19 nt, Artificial Sequence
  Description of Artificial Sequence: Synthetic oligonucleotide
  Antisense strand to SEQ ID NO: 138612
aaauacauagggaagacag

SEQ ID NO: 138614 - RNA, 19 nt, Artificial Sequence
  Description of Artificial Sequence: Synthetic oligonucleotide
  Sense strand starting at position 954 of SEQ ID NO: 1780
uucugucuucccuauguau

SEQ ID NO: 138615 - RNA, 19 nt, Artificial Sequence
  Description of Artificial Sequence: Synthetic oligonucleotide
  Antisense strand to SEQ ID NO: 138614
auacauagggaagacagaa

SEQ ID NO: 138616 - RNA, 19 nt, Artificial Sequence
  Description of Artificial Sequence: Synthetic oligonucleotide
  Sense strand starting at position 915 of SEQ ID NO: 1780
ucuggauucuaucagacuc

SEQ ID NO: 138617 - RNA, 19 nt, Artificial Sequence
  Description of Artificial Sequence: Synthetic oligonucleotide
  Antisense strand to SEQ ID NO: 138616
gagucugauagaauccaga

SEQ ID NO: 138618 - RNA, 19 nt, Artificial Sequence
  Description of Artificial Sequence: Synthetic oligonucleotide
  Sense strand starting at position 912 of SEQ ID NO: 1780
uccucuggauucuaucaga

SEQ ID NO: 138619 - RNA, 19 nt, Artificial Sequence
  Description of Artificial Sequence: Synthetic oligonucleotide
  Antisense strand to SEQ ID NO: 138618
ucugauagaauccagagga

SEQ ID NO: 138620 - RNA, 19 nt, Artificial Sequence
  Description of Artificial Sequence: Synthetic oligonucleotide
  Sense strand starting at position 905 of SEQ ID NO: 1780
cuaggaguccucuggauuc

SEQ ID NO: 138621 - RNA, 19 nt, Artificial Sequence
  Description of Artificial Sequence: Synthetic oligonucleotide
  Antisense strand to SEQ ID NO: 138620
gaauccagaggacuccuag

SEQ ID NO: 138622 - RNA, 19 nt, Artificial Sequence
  Description of Artificial Sequence: Synthetic oligonucleotide
  Sense strand starting at position 653 of SEQ ID NO: 1780
cggguucuggagugagagu

SEQ ID NO: 138623 - RNA, 19 nt, Artificial Sequence
  Description of Artificial Sequence: Synthetic oligonucleotide
  Antisense strand to SEQ ID NO: 138622
acucucacuccagaacccg

SEQ ID NO: 138624 - RNA, 19 nt, Artificial Sequence
  Description of Artificial Sequence: Synthetic oligonucleotide
  Sense strand starting at position 564 of SEQ ID NO: 1780
gguaguuccucauauuauu

SEQ ID NO: 138625 - RNA, 19 nt, Artificial Sequence
  Description of Artificial Sequence: Synthetic oligonucleotide
  Antisense strand to SEQ ID NO: 138624
aauaauaugaggaacuacc

SEQ ID NO: 138626 - RNA, 19 nt, Artificial Sequence
  Description of Artificial Sequence: Synthetic oligonucleotide
  Sense strand starting at position 562 of SEQ ID NO: 1780
augguaguuccucauauua

SEQ ID NO: 138627 - RNA, 19 nt, Artificial Sequence
  Description of Artificial Sequence: Synthetic oligonucleotide
  Antisense strand to SEQ ID NO: 138626
uaauaugaggaacuaccau

SEQ ID NO: 138628 - RNA, 19 nt, Artificial Sequence
  Description of Artificial Sequence: Synthetic oligonucleotide
  Sense strand starting at position 511 of SEQ ID NO: 1780
uuguuaugguauuaaugag

SEQ ID NO: 138629 - RNA, 19 nt, Artificial Sequence
  Description of Artificial Sequence: Synthetic oligonucleotide
  Antisense strand to SEQ ID NO: 138628
cucauuaauaccauaacaa

SEQ ID NO: 138630 - RNA, 19 nt, Artificial Sequence
  Description of Artificial Sequence: Synthetic oligonucleotide
  Sense strand starting at position 298 of SEQ ID NO: 1781
gcaaguaugaaccacggua

SEQ ID NO: 138631 - RNA, 19 nt, Artificial Sequence
  Description of Artificial Sequence: Synthetic oligonucleotide
  Antisense strand to SEQ ID NO: 138630
uaccgugguucauacuugc

SEQ ID NO: 138632 - RNA, 19 nt, Artificial Sequence
  Description of Artificial Sequence: Synthetic oligonucleotide
  Sense strand starting at position 332 of SEQ ID NO: 1781
gguucuuaaggagaauguu

SEQ ID NO: 138633 - RNA, 19 nt, Artificial Sequence
  Description of Artificial Sequence: Synthetic oligonucleotide
  Antisense strand to SEQ ID NO: 138632
aacauucuccuuaagaacc

SEQ ID NO: 138634 - RNA, 19 nt, Artificial Sequence
  Description of Artificial Sequence: Synthetic oligonucleotide
  Sense strand starting at position 543 of SEQ ID NO: 1781
aggcauuucugccucugaa

SEQ ID NO: 138635 - RNA, 19 nt, Artificial Sequence
  Description of Artificial Sequence: Synthetic oligonucleotide
  Antisense strand to SEQ ID NO: 138634
uucagaggcagaaaugccu

SEQ ID NO: 138636 - RNA, 19 nt, Artificial Sequence
  Description of Artificial Sequence: Synthetic oligonucleotide
  Sense strand starting at position 630 of SEQ ID NO: 1781
ccuucuccaguuugaggaa

SEQ ID NO: 138637 - RNA, 19 nt, Artificial Sequence
  Description of Artificial Sequence: Synthetic oligonucleotide
  Antisense strand to SEQ ID NO: 138636
uuccucaaacuggagaagg

SEQ ID NO: 138638 - RNA, 19 nt, Artificial Sequence
  Description of Artificial Sequence: Synthetic oligonucleotide
  Sense strand starting at position 666 of SEQ ID NO: 1781
aggucagagaagugguaua

SEQ ID NO: 138639 - RNA, 19 nt, Artificial Sequence
  Description of Artificial Sequence: Synthetic oligonucleotide
  Antisense strand to SEQ ID NO: 138638
uauaccacuucucugaccu

SEQ ID NO: 138640 - RNA, 19 nt, Artificial Sequence
  Description of Artificial Sequence: Synthetic oligonucleotide
  Sense strand starting at position 697 of SEQ ID NO: 1781
ggaagaauuccuugguuac

SEQ ID NO: 138641 - RNA, 19 nt, Artificial Sequence
  Description of Artificial Sequence: Synthetic oligonucleotide
  Antisense strand to SEQ ID NO: 138640
guaaccaaggaauucuucc

SEQ ID NO: 138642 - RNA, 19 nt, Artificial Sequence
  Description of Artificial Sequence: Synthetic oligonucleotide
  Sense strand starting at position 698 of SEQ ID NO: 1781
gaagaauuccuugguuacc

SEQ ID NO: 138643 - RNA, 19 nt, Artificial Sequence
  Description of Artificial Sequence: Synthetic oligonucleotide
  Antisense strand to SEQ ID NO: 138642
gguaaccaaggaauucuuc

SEQ ID NO: 138644 - RNA, 19 nt, Artificial Sequence
  Description of Artificial Sequence: Synthetic oligonucleotide
  Sense strand starting at position 700 of SEQ ID NO: 1781
agaauuccuugguuaccuu

SEQ ID NO: 138645 - RNA, 19 nt, Artificial Sequence
  Description of Artificial Sequence: Synthetic oligonucleotide
  Antisense strand to SEQ ID NO: 138644
aagguaaccaaggaauucu

SEQ ID NO: 138646 - RNA, 19 nt, Artificial Sequence
  Description of Artificial Sequence: Synthetic oligonucleotide
  Sense strand starting at position 1040 of SEQ ID NO: 1781
acaguacgccugcaauaaa

SEQ ID NO: 138647 - RNA, 19 nt, Artificial Sequence
  Description of Artificial Sequence: Synthetic oligonucleotide
  Antisense strand to SEQ ID NO: 138646
uuuauugcaggcguacugu

SEQ ID NO: 138648 - RNA, 19 nt, Artificial Sequence
  Description of Artificial Sequence: Synthetic oligonucleotide
  Sense strand starting at position 1133 of SEQ ID NO: 1781
gugggcucaguuugggaaa

SEQ ID NO: 138649 - RNA, 19 nt, Artificial Sequence
  Description of Artificial Sequence: Synthetic oligonucleotide
  Antisense strand to SEQ ID NO: 138648
uuucccaaacugagcccac

SEQ ID NO: 138650 - RNA, 19 nt, Artificial Sequence
  Description of Artificial Sequence: Synthetic oligonucleotide
  Sense strand starting at position 1166 of SEQ ID NO: 1781
ucaagagaggcguguaaac

SEQ ID NO: 138651 - RNA, 19 nt, Artificial Sequence
  Description of Artificial Sequence: Synthetic oligonucleotide
  Antisense strand to SEQ ID NO: 138650
guuuacacgccucucuuga

SEQ ID NO: 138652 - RNA, 19 nt, Artificial Sequence
  Description of Artificial Sequence: Synthetic oligonucleotide
  Sense strand starting at position 2008 of SEQ ID NO: 1781
ccagcuuuccucgcgguaa

SEQ ID NO: 138653 - RNA, 19 nt, Artificial Sequence
  Description of Artificial Sequence: Synthetic oligonucleotide
  Antisense strand to SEQ ID NO: 138652
uuaccgcgaggaaagcugg

SEQ ID NO: 138654 - RNA, 19 nt, Artificial Sequence
  Description of Artificial Sequence: Synthetic oligonucleotide
  Sense strand starting at position 2011 of SEQ ID NO: 1781
gcuuuccucgcgguaaaga

SEQ ID NO: 138655 - RNA, 19 nt, Artificial Sequence
  Description of Artificial Sequence: Synthetic oligonucleotide
  Antisense strand to SEQ ID NO: 138654
ucuuuaccgcgaggaaagc

SEQ ID NO: 138656 - RNA, 19 nt, Artificial Sequence
  Description of Artificial Sequence: Synthetic oligonucleotide
  Sense strand starting at position 2062 of SEQ ID NO: 1781
ccuccugggaaauguagua

SEQ ID NO: 138657 - RNA, 19 nt, Artificial Sequence
  Description of Artificial Sequence: Synthetic oligonucleotide
  Antisense strand to SEQ ID NO: 138656
uacuacauuucccaggagg

SEQ ID NO: 138658 - RNA, 19 nt, Artificial Sequence
  Description of Artificial Sequence: Synthetic oligonucleotide
  Sense strand starting at position 2069 of SEQ ID NO: 1781
ggaaauguaguauauucgu

SEQ ID NO: 138659 - RNA, 19 nt, Artificial Sequence
  Description of Artificial Sequence: Synthetic oligonucleotide
  Antisense strand to SEQ ID NO: 138658
acgaauauacuacauuucc

SEQ ID NO: 138660 - RNA, 19 nt, Artificial Sequence
  Description of Artificial Sequence: Synthetic oligonucleotide
  Sense strand starting at position 2160 of SEQ ID NO: 1781
gaaacaauucuaggucagu

SEQ ID NO: 138661 - RNA, 19 nt, Artificial Sequence
  Description of Artificial Sequence: Synthetic oligonucleotide
  Antisense strand to SEQ ID NO: 138660
acugaccuagaauuguuuc

SEQ ID NO: 138662 - RNA, 19 nt, Artificial Sequence
  Description of Artificial Sequence: Synthetic oligonucleotide
  Sense strand starting at position 2165 of SEQ ID NO: 1781
aauucuaggucaguaaaga

SEQ ID NO: 138663 - RNA, 19 nt, Artificial Sequence
  Description of Artificial Sequence: Synthetic oligonucleotide
  Antisense strand to SEQ ID NO: 138662
ucuuuacugaccuagaauu

SEQ ID NO: 138664 - RNA, 19 nt, Artificial Sequence
  Description of Artificial Sequence: Synthetic oligonucleotide
  Sense strand starting at position 2194 of SEQ ID NO: 1781
ggagauuugugcaacguga

SEQ ID NO: 138665 - RNA, 19 nt, Artificial Sequence
  Description of Artificial Sequence: Synthetic oligonucleotide
  Antisense strand to SEQ ID NO: 138664
ucacguugcacaaaucucc

SEQ ID NO: 138666 - RNA, 19 nt, Artificial Sequence
  Description of Artificial Sequence: Synthetic oligonucleotide
  Sense strand starting at position 2196 of SEQ ID NO: 1781
agauuugugcaacgugauc

SEQ ID NO: 138667 - RNA, 19 nt, Artificial Sequence
  Description of Artificial Sequence: Synthetic oligonucleotide
  Antisense strand to SEQ ID NO: 138666
gaucacguugcacaaaucu

SEQ ID NO: 138668 - RNA, 19 nt, Artificial Sequence
  Description of Artificial Sequence: Synthetic oligonucleotide
  Sense strand starting at position 2210 of SEQ ID NO: 1781
ugaucucacuggccugaau

SEQ ID NO: 138669 - RNA, 19 nt, Artificial Sequence
  Description of Artificial Sequence: Synthetic oligonucleotide
  Antisense strand to SEQ ID NO: 138668
auucaggccagugagauca

SEQ ID NO: 138670 - RNA, 19 nt, Artificial Sequence
  Description of Artificial Sequence: Synthetic oligonucleotide
  Sense strand starting at position 2260 of SEQ ID NO: 1781
agguuuaacugaguuaaga

SEQ ID NO: 138671 - RNA, 19 nt, Artificial Sequence
  Description of Artificial Sequence: Synthetic oligonucleotide
  Antisense strand to SEQ ID NO: 138670
ucuuaacucaguuaaaccu

SEQ ID NO: 138672 - RNA, 19 nt, Artificial Sequence
  Description of Artificial Sequence: Synthetic oligonucleotide
  Sense strand starting at position 2367 of SEQ ID NO: 1781
agcccaggacuuugugaaa

SEQ ID NO: 138673 - RNA, 19 nt, Artificial Sequence
  Description of Artificial Sequence: Synthetic oligonucleotide
  Antisense strand to SEQ ID NO: 138672
uuucacaaaguccugggcu

SEQ ID NO: 138674 - RNA, 19 nt, Artificial Sequence
  Description of Artificial Sequence: Synthetic oligonucleotide
  Sense strand starting at position 2585 of SEQ ID NO: 1781
uguaucacuugagcuagaa

SEQ ID NO: 138675 - RNA, 19 nt, Artificial Sequence
  Description of Artificial Sequence: Synthetic oligonucleotide
  Antisense strand to SEQ ID NO: 138674
uucuagcucaagugauaca

SEQ ID NO: 138676 - RNA, 19 nt, Artificial Sequence
  Description of Artificial Sequence: Synthetic oligonucleotide
  Sense strand starting at position 2589 of SEQ ID NO: 1781
ucacuugagcuagaagcua

SEQ ID NO: 138677 - RNA, 19 nt, Artificial Sequence
  Description of Artificial Sequence: Synthetic oligonucleotide
  Antisense strand to SEQ ID NO: 138676
uagcuucuagcucaaguga

SEQ ID NO: 138678 - RNA, 19 nt, Artificial Sequence
  Description of Artificial Sequence: Synthetic oligonucleotide
  Sense strand starting at position 2597 of SEQ ID NO: 1781
gcuagaagcuaauugaaau

SEQ ID NO: 138679 - RNA, 19 nt, Artificial Sequence
  Description of Artificial Sequence: Synthetic oligonucleotide
  Antisense strand to SEQ ID NO: 138678
auuucaauuagcuucuagc

SEQ ID NO: 138680 - RNA, 19 nt, Artificial Sequence
  Description of Artificial Sequence: Synthetic oligonucleotide
  Sense strand starting at position 2724 of SEQ ID NO: 1781
cugucacuuggguagaagu

SEQ ID NO: 138681 - RNA, 19 nt, Artificial Sequence
  Description of Artificial Sequence: Synthetic oligonucleotide
  Antisense strand to SEQ ID NO: 138680
acuucuacccaagugacag

SEQ ID NO: 138682 - RNA, 19 nt, Artificial Sequence
  Description of Artificial Sequence: Synthetic oligonucleotide
  Sense strand starting at position 2854 of SEQ ID NO: 1781
cuaggaaaucuaggucucu

SEQ ID NO: 138683 - RNA, 19 nt, Artificial Sequence
  Description of Artificial Sequence: Synthetic oligonucleotide
  Antisense strand to SEQ ID NO: 138682
agagaccuagauuuccuag

SEQ ID NO: 138684 - RNA, 19 nt, Artificial Sequence
  Description of Artificial Sequence: Synthetic oligonucleotide
  Sense strand starting at position 2855 of SEQ ID NO: 1781
uaggaaaucuaggucucuu

SEQ ID NO: 138685 - RNA, 19 nt, Artificial Sequence
  Description of Artificial Sequence: Synthetic oligonucleotide
  Antisense strand to SEQ ID NO: 138684
aagagaccuagauuuccua

SEQ ID NO: 138686 - RNA, 19 nt, Artificial Sequence
  Description of Artificial Sequence: Synthetic oligonucleotide
  Sense strand starting at position 2941 of SEQ ID NO: 1781
cagaauguucguuacccag

SEQ ID NO: 138687 - RNA, 19 nt, Artificial Sequence
  Description of Artificial Sequence: Synthetic oligonucleotide
  Antisense strand to SEQ ID NO: 138686
cuggguaacgaacauucug

SEQ ID NO: 138688 - RNA, 19 nt, Artificial Sequence
  Description of Artificial Sequence: Synthetic oligonucleotide
  Sense strand starting at position 2978 of SEQ ID NO: 1781
agcuacucaucuuuaagga

SEQ ID NO: 138689 - RNA, 19 nt, Artificial Sequence
  Description of Artificial Sequence: Synthetic oligonucleotide
  Antisense strand to SEQ ID NO: 138688
uccuuaaagaugaguagcu

SEQ ID NO: 138690 - RNA, 19 nt, Artificial Sequence
  Description of Artificial Sequence: Synthetic oligonucleotide
  Sense strand starting at position 2979 of SEQ ID NO: 1781
gcuacucaucuuuaaggau

SEQ ID NO: 138691 - RNA, 19 nt, Artificial Sequence
  Description of Artificial Sequence: Synthetic oligonucleotide
  Antisense strand to SEQ ID NO: 138690
auccuuaaagaugaguagc

SEQ ID NO: 138692 - RNA, 19 nt, Artificial Sequence
  Description of Artificial Sequence: Synthetic oligonucleotide
  Sense strand starting at position 3031 of SEQ ID NO: 1781
guugaccacuccuugacau

SEQ ID NO: 138693 - RNA, 19 nt, Artificial Sequence
  Description of Artificial Sequence: Synthetic oligonucleotide
  Antisense strand to SEQ ID NO: 138692
augucaaggaguggucaac

SEQ ID NO: 138694 - RNA, 19 nt, Artificial Sequence
  Description of Artificial Sequence: Synthetic oligonucleotide
  Sense strand starting at position 3142 of SEQ ID NO: 1781
cccauuucccgcuaaguau

SEQ ID NO: 138695 - RNA, 19 nt, Artificial Sequence
  Description of Artificial Sequence: Synthetic oligonucleotide
  Antisense strand to SEQ ID NO: 138694
auacuuagcgggaaauggg

SEQ ID NO: 138696 - RNA, 19 nt, Artificial Sequence
  Description of Artificial Sequence: Synthetic oligonucleotide
  Sense strand starting at position 3149 of SEQ ID NO: 1781
cccgcuaaguauuuccuaa

SEQ ID NO: 138697 - RNA, 19 nt, Artificial Sequence
  Description of Artificial Sequence: Synthetic oligonucleotide
  Antisense strand to SEQ ID NO: 138696
uuaggaaauacuuagcggg

SEQ ID NO: 138698 - RNA, 19 nt, Artificial Sequence
  Description of Artificial Sequence: Synthetic oligonucleotide
  Sense strand starting at position 3161 of SEQ ID NO: 1781
uuccuaaggccugauucuu

SEQ ID NO: 138699 - RNA, 19 nt, Artificial Sequence
  Description of Artificial Sequence: Synthetic oligonucleotide
  Antisense strand to SEQ ID NO: 138698
aagaaucaggccuuaggaa

SEQ ID NO: 138700 - RNA, 19 nt, Artificial Sequence
  Description of Artificial Sequence: Synthetic oligonucleotide
  Sense strand starting at position 3170 of SEQ ID NO: 1781
ccugauucuuggucucuga

SEQ ID NO: 138701 - RNA, 19 nt, Artificial Sequence
  Description of Artificial Sequence: Synthetic oligonucleotide
  Antisense strand to SEQ ID NO: 138700
ucagagaccaagaaucagg

SEQ ID NO: 138702 - RNA, 19 nt, Artificial Sequence
  Description of Artificial Sequence: Synthetic oligonucleotide
  Sense strand starting at position 3185 of SEQ ID NO: 1781
cugagucaaucauucgaua

SEQ ID NO: 138703 - RNA, 19 nt, Artificial Sequence
  Description of Artificial Sequence: Synthetic oligonucleotide
  Antisense strand to SEQ ID NO: 138702
uaucgaaugauugacucag

SEQ ID NO: 138704 - RNA, 19 nt, Artificial Sequence
  Description of Artificial Sequence: Synthetic oligonucleotide
  Sense strand starting at position 3198 of SEQ ID NO: 1781
ucgauaaacucuuuaguga

SEQ ID NO: 138705 - RNA, 19 nt, Artificial Sequence
  Description of Artificial Sequence: Synthetic oligonucleotide
  Antisense strand to SEQ ID NO: 138704
ucacuaaagaguuuaucga

SEQ ID NO: 138706 - RNA, 19 nt, Artificial Sequence
  Description of Artificial Sequence: Synthetic oligonucleotide
  Sense strand starting at position 3199 of SEQ ID NO: 1781
cgauaaacucuuuagugaa

SEQ ID NO: 138707 - RNA, 19 nt, Artificial Sequence
  Description of Artificial Sequence: Synthetic oligonucleotide
  Antisense strand to SEQ ID NO: 138706
uucacuaaagaguuuaucg

SEQ ID NO: 138708 - RNA, 19 nt, Artificial Sequence
  Description of Artificial Sequence: Synthetic oligonucleotide
  Sense strand starting at position 3271 of SEQ ID NO: 1781
cagugauauucugucaaga

SEQ ID NO: 138709 - RNA, 19 nt, Artificial Sequence
  Description of Artificial Sequence: Synthetic oligonucleotide
  Antisense strand to SEQ ID NO: 138708
ucuugacagaauaucacug

SEQ ID NO: 138710 - RNA, 19 nt, Artificial Sequence
  Description of Artificial Sequence: Synthetic oligonucleotide
  Sense strand starting at position 73 of SEQ ID NO: 1782
aucuauuucuuggacugga

SEQ ID NO: 138711 - RNA, 19 nt, Artificial Sequence
  Description of Artificial Sequence: Synthetic oligonucleotide
  Antisense strand to SEQ ID NO: 138710
uccaguccaagaaauagau

SEQ ID NO: 138712 - RNA, 19 nt, Artificial Sequence
  Description of Artificial Sequence: Synthetic oligonucleotide
  Sense strand starting at position 120 of SEQ ID NO: 1782
uacgguuuccucugauagg

SEQ ID NO: 138713 - RNA, 19 nt, Artificial Sequence
  Description of Artificial Sequence: Synthetic oligonucleotide
  Antisense strand to SEQ ID NO: 138712
ccuaucagaggaaaccgua

SEQ ID NO: 138714 - RNA, 19 nt, Artificial Sequence
  Description of Artificial Sequence: Synthetic oligonucleotide
  Sense strand starting at position 123 of SEQ ID NO: 1782
gguuuccucugauaggaac

SEQ ID NO: 138715 - RNA, 19 nt, Artificial Sequence
  Description of Artificial Sequence: Synthetic oligonucleotide
  Antisense strand to SEQ ID NO: 138714
guuccuaucagaggaaacc

SEQ ID NO: 138716 - RNA, 19 nt, Artificial Sequence
  Description of Artificial Sequence: Synthetic oligonucleotide
  Sense strand starting at position 285 of SEQ ID NO: 1782
auugucuuccucuguuuau

SEQ ID NO: 138717 - RNA, 19 nt, Artificial Sequence
  Description of Artificial Sequence: Synthetic oligonucleotide
  Antisense strand to SEQ ID NO: 138716
auaaacagaggaagacaau

SEQ ID NO: 138718 - RNA, 19 nt, Artificial Sequence
  Description of Artificial Sequence: Synthetic oligonucleotide
  Sense strand starting at position 286 of SEQ ID NO: 1782
uugucuuccucuguuuaua

SEQ ID NO: 138719 - RNA, 19 nt, Artificial Sequence
  Description of Artificial Sequence: Synthetic oligonucleotide
  Antisense strand to SEQ ID NO: 138718
uauaaacagaggaagacaa

SEQ ID NO: 138720 - RNA, 19 nt, Artificial Sequence
  Description of Artificial Sequence: Synthetic oligonucleotide
  Sense strand starting at position 294 of SEQ ID NO: 1782
cucuguuuauaggcacaga

SEQ ID NO: 138721 - RNA, 19 nt, Artificial Sequence
  Description of Artificial Sequence: Synthetic oligonucleotide
  Antisense strand to SEQ ID NO: 138720
ucugugccuauaaacagag

SEQ ID NO: 138722 - RNA, 19 nt, Artificial Sequence
  Description of Artificial Sequence: Synthetic oligonucleotide
  Sense strand starting at position 297 of SEQ ID NO: 1782
uguuuauaggcacagaaca

SEQ ID NO: 138723 - RNA, 19 nt, Artificial Sequence
  Description of Artificial Sequence: Synthetic oligonucleotide
  Antisense strand to SEQ ID NO: 138722
uguucugugccuauaaaca

SEQ ID NO: 138724 - RNA, 19 nt, Artificial Sequence
  Description of Artificial Sequence: Synthetic oligonucleotide
  Sense strand starting at position 594 of SEQ ID NO: 1782
aacagaguuggaugacuuu

SEQ ID NO: 138725 - RNA, 19 nt, Artificial Sequence
  Description of Artificial Sequence: Synthetic oligonucleotide
  Antisense strand to SEQ ID NO: 138724
aaagucauccaacucuguu

SEQ ID NO: 138726 - RNA, 19 nt, Artificial Sequence
  Description of Artificial Sequence: Synthetic oligonucleotide
  Sense strand starting at position 616 of SEQ ID NO: 1782
uguccacgauucucuuauu

SEQ ID NO: 138727 - RNA, 19 nt, Artificial Sequence
  Description of Artificial Sequence: Synthetic oligonucleotide
  Antisense strand to SEQ ID NO: 138726
aauaagagaaucguggaca

SEQ ID NO: 138728 - RNA, 19 nt, Artificial Sequence
  Description of Artificial Sequence: Synthetic oligonucleotide
  Sense strand starting at position 617 of SEQ ID NO: 1782
guccacgauucucuuauuu

SEQ ID NO: 138729 - RNA, 19 nt, Artificial Sequence
  Description of Artificial Sequence: Synthetic oligonucleotide
  Antisense strand to SEQ ID NO: 138728
aaauaagagaaucguggac

SEQ ID NO: 138730 - RNA, 19 nt, Artificial Sequence
  Description of Artificial Sequence: Synthetic oligonucleotide
  Sense strand starting at position 2035 of SEQ ID NO: 1782
gguguaauccgaggugacu

SEQ ID NO: 138731 - RNA, 19 nt, Artificial Sequence
  Description of Artificial Sequence: Synthetic oligonucleotide
  Antisense strand to SEQ ID NO: 138730
agucaccucggauuacacc

SEQ ID NO: 138732 - RNA, 19 nt, Artificial Sequence
  Description of Artificial Sequence: Synthetic oligonucleotide
  Sense strand starting at position 2079 of SEQ ID NO: 1782
gggugacucucgugauuua

SEQ ID NO: 138733 - RNA, 19 nt, Artificial Sequence
  Description of Artificial Sequence: Synthetic oligonucleotide
  Antisense strand to SEQ ID NO: 138732
uaaaucacgagagucaccc

SEQ ID NO: 138734 - RNA, 19 nt, Artificial Sequence
  Description of Artificial Sequence: Synthetic oligonucleotide
  Sense strand starting at position 2082 of SEQ ID NO: 1782
ugacucucgugauuuaucu

SEQ ID NO: 138735 - RNA, 19 nt, Artificial Sequence
  Description of Artificial Sequence: Synthetic oligonucleotide
  Antisense strand to SEQ ID NO: 138734
agauaaaucacgagaguca

SEQ ID NO: 138736 - RNA, 19 nt, Artificial Sequence
  Description of Artificial Sequence: Synthetic oligonucleotide
  Sense strand starting at position 2089 of SEQ ID NO: 1782
cgugauuuaucuuaauugu

SEQ ID NO: 138737 - RNA, 19 nt, Artificial Sequence
  Description of Artificial Sequence: Synthetic oligonucleotide
  Antisense strand to SEQ ID NO: 138736
acaauuaagauaaaucacg

SEQ ID NO: 138738 - RNA, 19 nt, Artificial Sequence
  Description of Artificial Sequence: Synthetic oligonucleotide
  Sense strand starting at position 2104 of SEQ ID NO: 1782
uugucaugccucguuccau

SEQ ID NO: 138739 - RNA, 19 nt, Artificial Sequence
  Description of Artificial Sequence: Synthetic oligonucleotide
  Antisense strand to SEQ ID NO: 138738
auggaacgaggcaugacaa

SEQ ID NO: 138740 - RNA, 19 nt, Artificial Sequence
  Description of Artificial Sequence: Synthetic oligonucleotide
  Sense strand starting at position 2115 of SEQ ID NO: 1782
cguuccauugacugaacuu

SEQ ID NO: 138741 - RNA, 19 nt, Artificial Sequence
  Description of Artificial Sequence: Synthetic oligonucleotide
  Antisense strand to SEQ ID NO: 138740
aaguucagucaauggaacg

SEQ ID NO: 138742 - RNA, 19 nt, Artificial Sequence
  Description of Artificial Sequence: Synthetic oligonucleotide
  Sense strand starting at position 2124 of SEQ ID NO: 1782
gacugaacuuacuagggua

SEQ ID NO: 138743 - RNA, 19 nt, Artificial Sequence
  Description of Artificial Sequence: Synthetic oligonucleotide
  Antisense strand to SEQ ID NO: 138742
uacccuaguaaguucaguc

SEQ ID NO: 138744 - RNA, 19 nt, Artificial Sequence
  Description of Artificial Sequence: Synthetic oligonucleotide
  Sense strand starting at position 2126 of SEQ ID NO: 1782
cugaacuuacuaggguaau

SEQ ID NO: 138745 - RNA, 19 nt, Artificial Sequence
  Description of Artificial Sequence: Synthetic oligonucleotide
  Antisense strand to SEQ ID NO: 138744
auuacccuaguaaguucag

SEQ ID NO: 138746 - RNA, 19 nt, Artificial Sequence
  Description of Artificial Sequence: Synthetic oligonucleotide
  Sense strand starting at position 2143 of SEQ ID NO: 1782
auuagagagcuuugaugau

SEQ ID NO: 138747 - RNA, 19 nt, Artificial Sequence
  Description of Artificial Sequence: Synthetic oligonucleotide
  Antisense strand to SEQ ID NO: 138746
aucaucaaagcucucuaau

SEQ ID NO: 138748 - RNA, 19 nt, Artificial Sequence
  Description of Artificial Sequence: Synthetic oligonucleotide
  Sense strand starting at position 2157 of SEQ ID NO: 1782
augauaauguagcugauga

SEQ ID NO: 138749 - RNA, 19 nt, Artificial Sequence
  Description of Artificial Sequence: Synthetic oligonucleotide
  Antisense strand to SEQ ID NO: 138748
ucaucagcuacauuaucau

SEQ ID NO: 138750 - RNA, 19 nt, Artificial Sequence
  Description of Artificial Sequence: Synthetic oligonucleotide
  Sense strand starting at position 2158 of SEQ ID NO: 1782
ugauaauguagcugaugau

SEQ ID NO: 138751 - RNA, 19 nt, Artificial Sequence
  Description of Artificial Sequence: Synthetic oligonucleotide
  Antisense strand to SEQ ID NO: 138750
aucaucagcuacauuauca

SEQ ID NO: 138752 - RNA, 19 nt, Artificial Sequence
  Description of Artificial Sequence: Synthetic oligonucleotide
  Sense strand starting at position 2406 of SEQ ID NO: 1782
ucacuucuugcuuggacua

SEQ ID NO: 138753 - RNA, 19 nt, Artificial Sequence
  Description of Artificial Sequence: Synthetic oligonucleotide
  Antisense strand to SEQ ID NO: 138752
uaguccaagcaagaaguga

SEQ ID NO: 138754 - RNA, 19 nt, Artificial Sequence
  Description of Artificial Sequence: Synthetic oligonucleotide
  Sense strand starting at position 2532 of SEQ ID NO: 1782
guggucuccagucauacca

SEQ ID NO: 138755 - RNA, 19 nt, Artificial Sequence
  Description of Artificial Sequence: Synthetic oligonucleotide
  Antisense strand to SEQ ID NO: 138754
ugguaugacuggagaccac

SEQ ID NO: 138756 - RNA, 19 nt, Artificial Sequence
  Description of Artificial Sequence: Synthetic oligonucleotide
  Sense strand starting at position 2645 of SEQ ID NO: 1782
ugccauacuccuggugacu

SEQ ID NO: 138757 - RNA, 19 nt, Artificial Sequence
  Description of Artificial Sequence: Synthetic oligonucleotide
  Antisense strand to SEQ ID NO: 138756
agucaccaggaguauggca

SEQ ID NO: 138758 - RNA, 19 nt, Artificial Sequence
  Description of Artificial Sequence: Synthetic oligonucleotide
  Sense strand starting at position 2660 of SEQ ID NO: 1782
gacuucgguagcugugaga

SEQ ID NO: 138759 - RNA, 19 nt, Artificial Sequence
  Description of Artificial Sequence: Synthetic oligonucleotide
  Antisense strand to SEQ ID NO: 138758
ucucacagcuaccgaaguc

SEQ ID NO: 138760 - RNA, 19 nt, Artificial Sequence
  Description of Artificial Sequence: Synthetic oligonucleotide
  Sense strand starting at position 2673 of SEQ ID NO: 1782
gugagacuuccugguccca

SEQ ID NO: 138761 - RNA, 19 nt, Artificial Sequence
  Description of Artificial Sequence: Synthetic oligonucleotide
  Antisense strand to SEQ ID NO: 138760
ugggaccaggaagucucac

SEQ ID NO: 138762 - RNA, 19 nt, Artificial Sequence
  Description of Artificial Sequence: Synthetic oligonucleotide
  Sense strand starting at position 2675 of SEQ ID NO: 1782
gagacuuccuggucccauu

SEQ ID NO: 138763 - RNA, 19 nt, Artificial Sequence
  Description of Artificial Sequence: Synthetic oligonucleotide
  Antisense strand to SEQ ID NO: 138762
aaugggaccaggaagucuc

SEQ ID NO: 138764 - RNA, 19 nt, Artificial Sequence
  Description of Artificial Sequence: Synthetic oligonucleotide
  Sense strand starting at position 3132 of SEQ ID NO: 1782
ggcugucaacaggaguaga

SEQ ID NO: 138765 - RNA, 19 nt, Artificial Sequence
  Description of Artificial Sequence: Synthetic oligonucleotide
  Antisense strand to SEQ ID NO: 138764
ucuacuccuguugacagcc

SEQ ID NO: 138766 - RNA, 19 nt, Artificial Sequence
  Description of Artificial Sequence: Synthetic oligonucleotide
  Sense strand starting at position 3233 of SEQ ID NO: 1782
cucaaauccugauauggac

SEQ ID NO: 138767 - RNA, 19 nt, Artificial Sequence
  Description of Artificial Sequence: Synthetic oligonucleotide
  Antisense strand to SEQ ID NO: 138766
guccauaucaggauuugag

SEQ ID NO: 138768 - RNA, 19 nt, Artificial Sequence
  Description of Artificial Sequence: Synthetic oligonucleotide
  Sense strand starting at position 3253 of SEQ ID NO: 1782
uccagucuuccugagguca

SEQ ID NO: 138769 - RNA, 19 nt, Artificial Sequence
  Description of Artificial Sequence: Synthetic oligonucleotide
  Antisense strand to SEQ ID NO: 138768
ugaccucaggaagacugga

SEQ ID NO: 138770 - RNA, 19 nt, Artificial Sequence
  Description of Artificial Sequence: Synthetic oligonucleotide
  Sense strand starting at position 3281 of SEQ ID NO: 1782
gcugaaggcuugcucuaga

SEQ ID NO: 138771 - RNA, 19 nt, Artificial Sequence
  Description of Artificial Sequence: Synthetic oligonucleotide
  Antisense strand to SEQ ID NO: 138770
ucuagagcaagccuucagc

SEQ ID NO: 138772 - RNA, 19 nt, Artificial Sequence
  Description of Artificial Sequence: Synthetic oligonucleotide
  Sense strand starting at position 3284 of SEQ ID NO: 1782
gaaggcuugcucuagaauc

SEQ ID NO: 138773 - RNA, 19 nt, Artificial Sequence
  Description of Artificial Sequence: Synthetic oligonucleotide
  Antisense strand to SEQ ID NO: 138772
gauucuagagcaagccuuc

SEQ ID NO: 138774 - RNA, 19 nt, Artificial Sequence
  Description of Artificial Sequence: Synthetic oligonucleotide
  Sense strand starting at position 3286 of SEQ ID NO: 1782
aggcuugcucuagaaucau

SEQ ID NO: 138775 - RNA, 19 nt, Artificial Sequence
  Description of Artificial Sequence: Synthetic oligonucleotide
  Antisense strand to SEQ ID NO: 138774
augauucuagagcaagccu

SEQ ID NO: 138776 - RNA, 19 nt, Artificial Sequence
  Description of Artificial Sequence: Synthetic oligonucleotide
  Sense strand starting at position 3292 of SEQ ID NO: 1782
gcucuagaaucauugucuu

SEQ ID NO: 138777 - RNA, 19 nt, Artificial Sequence
  Description of Artificial Sequence: Synthetic oligonucleotide
  Antisense strand to SEQ ID NO: 138776
aagacaaugauucuagagc

SEQ ID NO: 138778 - RNA, 19 nt, Artificial Sequence
  Description of Artificial Sequence: Synthetic oligonucleotide
  Sense strand starting at position 3336 of SEQ ID NO: 1782
aucuuagaggucugaguca

SEQ ID NO: 138779 - RNA, 19 nt, Artificial Sequence
  Description of Artificial Sequence: Synthetic oligonucleotide
  Antisense strand to SEQ ID NO: 138778
ugacucagaccucuaagau

SEQ ID NO: 138780 - RNA, 19 nt, Artificial Sequence
  Description of Artificial Sequence: Synthetic oligonucleotide
  Sense strand starting at position 3383 of SEQ ID NO: 1782
ccauuaugacccugucuac

SEQ ID NO: 138781 - RNA, 19 nt, Artificial Sequence
  Description of Artificial Sequence: Synthetic oligonucleotide
  Antisense strand to SEQ ID NO: 138780
guagacagggucauaaugg

SEQ ID NO: 138782 - RNA, 19 nt, Artificial Sequence
  Description of Artificial Sequence: Synthetic oligonucleotide
  Sense strand starting at position 3601 of SEQ ID NO: 1782
agaguacucaggugacuuc

SEQ ID NO: 138783 - RNA, 19 nt, Artificial Sequence
  Description of Artificial Sequence: Synthetic oligonucleotide
  Antisense strand to SEQ ID NO: 138782
gaagucaccugaguacucu

SEQ ID NO: 138784 - RNA, 19 nt, Artificial Sequence
  Description of Artificial Sequence: Synthetic oligonucleotide
  Sense strand starting at position 3610 of SEQ ID NO: 1782
aggugacuucuuugccuga

SEQ ID NO: 138785 - RNA, 19 nt, Artificial Sequence
  Description of Artificial Sequence: Synthetic oligonucleotide
  Antisense strand to SEQ ID NO: 138784
ucaggcaaagaagucaccu

SEQ ID NO: 138786 - RNA, 19 nt, Artificial Sequence
  Description of Artificial Sequence: Synthetic oligonucleotide
  Sense strand starting at position 3614 of SEQ ID NO: 1782
gacuucuuugccugagccu

SEQ ID NO: 138787 - RNA, 19 nt, Artificial Sequence
  Description of Artificial Sequence: Synthetic oligonucleotide
  Antisense strand to SEQ ID NO: 138786
aggcucaggcaaagaaguc

SEQ ID NO: 138788 - RNA, 19 nt, Artificial Sequence
  Description of Artificial Sequence: Synthetic oligonucleotide
  Sense strand starting at position 3965 of SEQ ID NO: 1782
ggucacucuugagcucuua

SEQ ID NO: 138789 - RNA, 19 nt, Artificial Sequence
  Description of Artificial Sequence: Synthetic oligonucleotide
  Antisense strand to SEQ ID NO: 138788
uaagagcucaagagugacc

SEQ ID NO: 138790 - RNA, 19 nt, Artificial Sequence
  Description of Artificial Sequence: Synthetic oligonucleotide
  Sense strand starting at position 275 of SEQ ID NO: 1783
acaaauguuguugauuaca

SEQ ID NO: 138791 - RNA, 19 nt, Artificial Sequence
  Description of Artificial Sequence: Synthetic oligonucleotide
  Antisense strand to SEQ ID NO: 138790
uguaaucaacaacauuugu

SEQ ID NO: 138792 - RNA, 19 nt, Artificial Sequence
  Description of Artificial Sequence: Synthetic oligonucleotide
  Sense strand starting at position 283 of SEQ ID NO: 1783
uguugauuacauuaaguac

SEQ ID NO: 138793 - RNA, 19 nt, Artificial Sequence
  Description of Artificial Sequence: Synthetic oligonucleotide
  Antisense strand to SEQ ID NO: 138792
guacuuaauguaaucaaca

SEQ ID NO: 138794 - RNA, 19 nt, Artificial Sequence
  Description of Artificial Sequence: Synthetic oligonucleotide
  Sense strand starting at position 371 of SEQ ID NO: 1783
ggucuagcuccuuauuacu

SEQ ID NO: 138795 - RNA, 19 nt, Artificial Sequence
  Description of Artificial Sequence: Synthetic oligonucleotide
  Antisense strand to SEQ ID NO: 138794
aguaauaaggagcuagacc

SEQ ID NO: 138796 - RNA, 19 nt, Artificial Sequence
  Description of Artificial Sequence: Synthetic oligonucleotide
  Sense strand starting at position 578 of SEQ ID NO: 1783
auguauaucucagucacac

SEQ ID NO: 138797 - RNA, 19 nt, Artificial Sequence
  Description of Artificial Sequence: Synthetic oligonucleotide
  Antisense strand to SEQ ID NO: 138796
gugugacugagauauacau

SEQ ID NO: 138798 - RNA, 19 nt, Artificial Sequence
  Description of Artificial Sequence: Synthetic oligonucleotide
  Sense strand starting at position 617 of SEQ ID NO: 1783
gucuguaaaccagaaguuc

SEQ ID NO: 138799 - RNA, 19 nt, Artificial Sequence
  Description of Artificial Sequence: Synthetic oligonucleotide
  Antisense strand to SEQ ID NO: 138798
gaacuucugguuuacagac

SEQ ID NO: 138800 - RNA, 19 nt, Artificial Sequence
  Description of Artificial Sequence: Synthetic oligonucleotide
  Sense strand starting at position 655 of SEQ ID NO: 1783
ccuuauuugguuuguagca

SEQ ID NO: 138801 - RNA, 19 nt, Artificial Sequence
  Description of Artificial Sequence: Synthetic oligonucleotide
  Antisense strand to SEQ ID NO: 138800
ugcuacaaaccaaauaagg

SEQ ID NO: 138802 - RNA, 19 nt, Artificial Sequence
  Description of Artificial Sequence: Synthetic oligonucleotide
  Sense strand starting at position 705 of SEQ ID NO: 1783
acagauggguucgauuuga

SEQ ID NO: 138803 - RNA, 19 nt, Artificial Sequence
  Description of Artificial Sequence: Synthetic oligonucleotide
  Antisense strand to SEQ ID NO: 138802
ucaaaucgaacccaucugu

SEQ ID NO: 138804 - RNA, 19 nt, Artificial Sequence
  Description of Artificial Sequence: Synthetic oligonucleotide
  Sense strand starting at position 757 of SEQ ID NO: 1783
cuuagugggcuuuauauca

SEQ ID NO: 138805 - RNA, 19 nt, Artificial Sequence
  Description of Artificial Sequence: Synthetic oligonucleotide
  Antisense strand to SEQ ID NO: 138804
ugauauaaagcccacuaag

SEQ ID NO: 138806 - RNA, 19 nt, Artificial Sequence
  Description of Artificial Sequence: Synthetic oligonucleotide
  Sense strand starting at position 773 of SEQ ID NO: 1783
ucaccauuccgguauagca

SEQ ID NO: 138807 - RNA, 19 nt, Artificial Sequence
  Description of Artificial Sequence: Synthetic oligonucleotide
  Antisense strand to SEQ ID NO: 138806
ugcuauaccggaaugguga

SEQ ID NO: 138808 - RNA, 19 nt, Artificial Sequence
  Description of Artificial Sequence: Synthetic oligonucleotide
  Sense strand starting at position 916 of SEQ ID NO: 1783
ucugaaagccuauauagua

SEQ ID NO: 138809 - RNA, 19 nt, Artificial Sequence
  Description of Artificial Sequence: Synthetic oligonucleotide
  Antisense strand to SEQ ID NO: 138808
uacuauauaggcuuucaga

SEQ ID NO: 138810 - RNA, 19 nt, Artificial Sequence
  Description of Artificial Sequence: Synthetic oligonucleotide
  Sense strand starting at position 1114 of SEQ ID NO: 1783
gagagagucuuaccucaag

SEQ ID NO: 138811 - RNA, 19 nt, Artificial Sequence
  Description of Artificial Sequence: Synthetic oligonucleotide
  Antisense strand to SEQ ID NO: 138810
cuugagguaagacucucuc

SEQ ID NO: 138812 - RNA, 19 nt, Artificial Sequence
  Description of Artificial Sequence: Synthetic oligonucleotide
  Sense strand starting at position 1117 of SEQ ID NO: 1783
agagucuuaccucaagagu

SEQ ID NO: 138813 - RNA, 19 nt, Artificial Sequence
  Description of Artificial Sequence: Synthetic oligonucleotide
  Antisense strand to SEQ ID NO: 138812
acucuugagguaagacucu

SEQ ID NO: 138814 - RNA, 19 nt, Artificial Sequence
  Description of Artificial Sequence: Synthetic oligonucleotide
  Sense strand starting at position 1145 of SEQ ID NO: 1783
gucagccauuuguucucaa

SEQ ID NO: 138815 - RNA, 19 nt, Artificial Sequence
  Description of Artificial Sequence: Synthetic oligonucleotide
  Antisense strand to SEQ ID NO: 138814
uugagaacaaauggcugac

SEQ ID NO: 138816 - RNA, 19 nt, Artificial Sequence
  Description of Artificial Sequence: Synthetic oligonucleotide
  Sense strand starting at position 1248 of SEQ ID NO: 1783
cacagucuccgggauggaa

SEQ ID NO: 138817 - RNA, 19 nt, Artificial Sequence
  Description of Artificial Sequence: Synthetic oligonucleotide
  Antisense strand to SEQ ID NO: 138816
uuccaucccggagacugug

SEQ ID NO: 138818 - RNA, 19 nt, Artificial Sequence
  Description of Artificial Sequence: Synthetic oligonucleotide
  Sense strand starting at position 1390 of SEQ ID NO: 1783
agaagauacucagagagaa

SEQ ID NO: 138819 - RNA, 19 nt, Artificial Sequence
  Description of Artificial Sequence: Synthetic oligonucleotide
  Antisense strand to SEQ ID NO: 138818
uucucucugaguaucuucu

SEQ ID NO: 138820 - RNA, 19 nt, Artificial Sequence
  Description of Artificial Sequence: Synthetic oligonucleotide
  Sense strand starting at position 1438 of SEQ ID NO: 1783
gagggagaaagcggugaua

SEQ ID NO: 138821 - RNA, 19 nt, Artificial Sequence
  Description of Artificial Sequence: Synthetic oligonucleotide
  Antisense strand to SEQ ID NO: 138820
uaucaccgcuuucucccuc

SEQ ID NO: 138822 - RNA, 19 nt, Artificial Sequence
  Description of Artificial Sequence: Synthetic oligonucleotide
  Sense strand starting at position 1791 of SEQ ID NO: 1783
ccuggagguccuggaagua

SEQ ID NO: 138823 - RNA, 19 nt, Artificial Sequence
  Description of Artificial Sequence: Synthetic oligonucleotide
  Antisense strand to SEQ ID NO: 138822
uacuuccaggaccuccagg

SEQ ID NO: 138824 - RNA, 19 nt, Artificial Sequence
  Description of Artificial Sequence: Synthetic oligonucleotide
  Sense strand starting at position 2176 of SEQ ID NO: 1783
agguguucuaauuggacuu

SEQ ID NO: 138825 - RNA, 19 nt, Artificial Sequence
  Description of Artificial Sequence: Synthetic oligonucleotide
  Antisense strand to SEQ ID NO: 138824
aaguccaauuagaacaccu

SEQ ID NO: 138826 - RNA, 19 nt, Artificial Sequence
  Description of Artificial Sequence: Synthetic oligonucleotide
  Sense strand starting at position 2341 of SEQ ID NO: 1783
auugcucuuccggagauua

SEQ ID NO: 138827 - RNA, 19 nt, Artificial Sequence
  Description of Artificial Sequence: Synthetic oligonucleotide
  Antisense strand to SEQ ID NO: 138826
uaaucuccggaagagcaau

SEQ ID NO: 138828 - RNA, 19 nt, Artificial Sequence
  Description of Artificial Sequence: Synthetic oligonucleotide
  Sense strand starting at position 2411 of SEQ ID NO: 1783
acgcaagcccaauauagua

SEQ ID NO: 138829 - RNA, 19 nt, Artificial Sequence
  Description of Artificial Sequence: Synthetic oligonucleotide
  Antisense strand to SEQ ID NO: 138828
uacuauauugggcuugcgu

SEQ ID NO: 138830 - RNA, 19 nt, Artificial Sequence
  Description of Artificial Sequence: Synthetic oligonucleotide
  Sense strand starting at position 2427 of SEQ ID NO: 1783
guacguguuauaguguauu

SEQ ID NO: 138831 - RNA, 19 nt, Artificial Sequence
  Description of Artificial Sequence: Synthetic oligonucleotide
  Antisense strand to SEQ ID NO: 138830
aauacacuauaacacguac

SEQ ID NO: 138832 - RNA, 19 nt, Artificial Sequence
  Description of Artificial Sequence: Synthetic oligonucleotide
  Sense strand starting at position 2541 of SEQ ID NO: 1783
cagggugcugagcauuaga

SEQ ID NO: 138833 - RNA, 19 nt, Artificial Sequence
  Description of Artificial Sequence: Synthetic oligonucleotide
  Antisense strand to SEQ ID NO: 138832
ucuaaugcucagcacccug

SEQ ID NO: 138834 - RNA, 19 nt, Artificial Sequence
  Description of Artificial Sequence: Synthetic oligonucleotide
  Sense strand starting at position 2544 of SEQ ID NO: 1783
ggugcugagcauuagagaa

SEQ ID NO: 138835 - RNA, 19 nt, Artificial Sequence
  Description of Artificial Sequence: Synthetic oligonucleotide
  Antisense strand to SEQ ID NO: 138834
uucucuaaugcucagcacc

SEQ ID NO: 138836 - RNA, 19 nt, Artificial Sequence
  Description of Artificial Sequence: Synthetic oligonucleotide
  Sense strand starting at position 2597 of SEQ ID NO: 1783
gaauucuagugacugauac

SEQ ID NO: 138837 - RNA, 19 nt, Artificial Sequence
  Description of Artificial Sequence: Synthetic oligonucleotide
  Antisense strand to SEQ ID NO: 138836
guaucagucacuagaauuc

SEQ ID NO: 138838 - RNA, 19 nt, Artificial Sequence
  Description of Artificial Sequence: Synthetic oligonucleotide
  Sense strand starting at position 2605 of SEQ ID NO: 1783
gugacugauacaggcagua

SEQ ID NO: 138839 - RNA, 19 nt, Artificial Sequence
  Description of Artificial Sequence: Synthetic oligonucleotide
  Antisense strand to SEQ ID NO: 138838
uacugccuguaucagucac

SEQ ID NO: 138840 - RNA, 19 nt, Artificial Sequence
  Description of Artificial Sequence: Synthetic oligonucleotide
  Sense strand starting at position 2621 of SEQ ID NO: 1783
guaagcaauuaauuacagu

SEQ ID NO: 138841 - RNA, 19 nt, Artificial Sequence
  Description of Artificial Sequence: Synthetic oligonucleotide
  Antisense strand to SEQ ID NO: 138840
acuguaauuaauugcuuac

SEQ ID NO: 138842 - RNA, 19 nt, Artificial Sequence
  Description of Artificial Sequence: Synthetic oligonucleotide
  Sense strand starting at position 2686 of SEQ ID NO: 1783
gacucaaaccauggauagu

SEQ ID NO: 138843 - RNA, 19 nt, Artificial Sequence
  Description of Artificial Sequence: Synthetic oligonucleotide
  Antisense strand to SEQ ID NO: 138842
acuauccaugguuugaguc

SEQ ID NO: 138844 - RNA, 19 nt, Artificial Sequence
  Description of Artificial Sequence: Synthetic oligonucleotide
  Sense strand starting at position 2851 of SEQ ID NO: 1783
ggacuacuguacuuaacua

SEQ ID NO: 138845 - RNA, 19 nt, Artificial Sequence
  Description of Artificial Sequence: Synthetic oligonucleotide
  Antisense strand to SEQ ID NO: 138844
uaguuaaguacaguagucc

SEQ ID NO: 138846 - RNA, 19 nt, Artificial Sequence
  Description of Artificial Sequence: Synthetic oligonucleotide
  Sense strand starting at position 2876 of SEQ ID NO: 1783
ugaaauugugaucaugcua

SEQ ID NO: 138847 - RNA, 19 nt, Artificial Sequence
  Description of Artificial Sequence: Synthetic oligonucleotide
  Antisense strand to SEQ ID NO: 138846
uagcaugaucacaauuuca

SEQ ID NO: 138848 - RNA, 19 nt, Artificial Sequence
  Description of Artificial Sequence: Synthetic oligonucleotide
  Sense strand starting at position 3064 of SEQ ID NO: 1783
uaaagaaauugagcugucu

SEQ ID NO: 138849 - RNA, 19 nt, Artificial Sequence
  Description of Artificial Sequence: Synthetic oligonucleotide
  Antisense strand to SEQ ID NO: 138848
agacagcucaauuucuuua

SEQ ID NO: 138850 - RNA, 19 nt, Artificial Sequence
  Description of Artificial Sequence: Synthetic oligonucleotide
  Sense strand starting at position 3078 of SEQ ID NO: 1783
ugucucugagcagacuuua

SEQ ID NO: 138851 - RNA, 19 nt, Artificial Sequence
  Description of Artificial Sequence: Synthetic oligonucleotide
  Antisense strand to SEQ ID NO: 138850
uaaagucugcucagagaca

SEQ ID NO: 138852 - RNA, 19 nt, Artificial Sequence
  Description of Artificial Sequence: Synthetic oligonucleotide
  Sense strand starting at position 3083 of SEQ ID NO: 1783
cugagcagacuuuaaguua

SEQ ID NO: 138853 - RNA, 19 nt, Artificial Sequence
  Description of Artificial Sequence: Synthetic oligonucleotide
  Antisense strand to SEQ ID NO: 138852
uaacuuaaagucugcucag

SEQ ID NO: 138854 - RNA, 19 nt, Artificial Sequence
  Description of Artificial Sequence: Synthetic oligonucleotide
  Sense strand starting at position 3328 of SEQ ID NO: 1783
ccagguuccuacuccauua

SEQ ID NO: 138855 - RNA, 19 nt, Artificial Sequence
  Description of Artificial Sequence: Synthetic oligonucleotide
  Antisense strand to SEQ ID NO: 138854
uaauggaguaggaaccugg

SEQ ID NO: 138856 - RNA, 19 nt, Artificial Sequence
  Description of Artificial Sequence: Synthetic oligonucleotide
  Sense strand starting at position 3330 of SEQ ID NO: 1783
agguuccuacuccauuauu

SEQ ID NO: 138857 - RNA, 19 nt, Artificial Sequence
  Description of Artificial Sequence: Synthetic oligonucleotide
  Antisense strand to SEQ ID NO: 138856
aauaauggaguaggaaccu

SEQ ID NO: 138858 - RNA, 19 nt, Artificial Sequence
  Description of Artificial Sequence: Synthetic oligonucleotide
  Sense strand starting at position 3446 of SEQ ID NO: 1783
ugaaucagaugugcuguaa

SEQ ID NO: 138859 - RNA, 19 nt, Artificial Sequence
  Description of Artificial Sequence: Synthetic oligonucleotide
  Antisense strand to SEQ ID NO: 138858
uuacagcacaucugauuca

SEQ ID NO: 138860 - RNA, 19 nt, Artificial Sequence
  Description of Artificial Sequence: Synthetic oligonucleotide
  Sense strand starting at position 3667 of SEQ ID NO: 1783
aguguuacuggacgaauaa

SEQ ID NO: 138861 - RNA, 19 nt, Artificial Sequence
  Description of Artificial Sequence: Synthetic oligonucleotide
  Antisense strand to SEQ ID NO: 138860
uuauucguccaguaacacu

SEQ ID NO: 138862 - RNA, 19 nt, Artificial Sequence
  Description of Artificial Sequence: Synthetic oligonucleotide
  Sense strand starting at position 3668 of SEQ ID NO: 1783
guguuacuggacgaauaac

SEQ ID NO: 138863 - RNA, 19 nt, Artificial Sequence
  Description of Artificial Sequence: Synthetic oligonucleotide
  Antisense strand to SEQ ID NO: 138862
guuauucguccaguaacac

SEQ ID NO: 138864 - RNA, 19 nt, Artificial Sequence
  Description of Artificial Sequence: Synthetic oligonucleotide
  Sense strand starting at position 3703 of SEQ ID NO: 1783
cuggaaggagacugucauu

SEQ ID NO: 138865 - RNA, 19 nt, Artificial Sequence
  Description of Artificial Sequence: Synthetic oligonucleotide
  Antisense strand to SEQ ID NO: 138864
aaugacagucuccuuccag

SEQ ID NO: 138866 - RNA, 19 nt, Artificial Sequence
  Description of Artificial Sequence: Synthetic oligonucleotide
  Sense strand starting at position 3828 of SEQ ID NO: 1783
uccugugguggucauugaa

SEQ ID NO: 138867 - RNA, 19 nt, Artificial Sequence
  Description of Artificial Sequence: Synthetic oligonucleotide
  Antisense strand to SEQ ID NO: 138866
uucaaugaccaccacagga

SEQ ID NO: 138868 - RNA, 19 nt, Artificial Sequence
  Description of Artificial Sequence: Synthetic oligonucleotide
  Sense strand starting at position 3831 of SEQ ID NO: 1783
ugugguggucauugaauuu

SEQ ID NO: 138869 - RNA, 19 nt, Artificial Sequence
  Description of Artificial Sequence: Synthetic oligonucleotide
  Antisense strand to SEQ ID NO: 138868
aaauucaaugaccaccaca

SEQ ID NO: 138870 - RNA, 19 nt, Artificial Sequence
  Description of Artificial Sequence: Synthetic oligonucleotide
  Sense strand starting at position 3934 of SEQ ID NO: 1784
cugagucuccaaggauaag

SEQ ID NO: 138871 - RNA, 19 nt, Artificial Sequence
  Description of Artificial Sequence: Synthetic oligonucleotide
  Antisense strand to SEQ ID NO: 138870
cuuauccuuggagacucag

SEQ ID NO: 138872 - RNA, 19 nt, Artificial Sequence
  Description of Artificial Sequence: Synthetic oligonucleotide
  Sense strand starting at position 3870 of SEQ ID NO: 1784
ccaugauagagcuggacuu

SEQ ID NO: 138873 - RNA, 19 nt, Artificial Sequence
  Description of Artificial Sequence: Synthetic oligonucleotide
  Antisense strand to SEQ ID NO: 138872
aaguccagcucuaucaugg

SEQ ID NO: 138874 - RNA, 19 nt, Artificial Sequence
  Description of Artificial Sequence: Synthetic oligonucleotide
  Sense strand starting at position 3861 of SEQ ID NO: 1784
cgucaaacaccaugauaga

SEQ ID NO: 138875 - RNA, 19 nt, Artificial Sequence
  Description of Artificial Sequence: Synthetic oligonucleotide
  Antisense strand to SEQ ID NO: 138874
ucuaucaugguguuugacg

SEQ ID NO: 138876 - RNA, 19 nt, Artificial Sequence
  Description of Artificial Sequence: Synthetic oligonucleotide
  Sense strand starting at position 3824 of SEQ ID NO: 1784
guggguaagugcuguucau

SEQ ID NO: 138877 - RNA, 19 nt, Artificial Sequence
  Description of Artificial Sequence: Synthetic oligonucleotide
  Antisense strand to SEQ ID NO: 138876
augaacagcacuuacccac

SEQ ID NO: 138878 - RNA, 19 nt, Artificial Sequence
  Description of Artificial Sequence: Synthetic oligonucleotide
  Sense strand starting at position 3457 of SEQ ID NO: 1784
cagcgcuuggcauaaagua

SEQ ID NO: 138879 - RNA, 19 nt, Artificial Sequence
  Description of Artificial Sequence: Synthetic oligonucleotide
  Antisense strand to SEQ ID NO: 138878
uacuuuaugccaagcgcug

SEQ ID NO: 138880 - RNA, 19 nt, Artificial Sequence
  Description of Artificial Sequence: Synthetic oligonucleotide
  Sense strand starting at position 3452 of SEQ ID NO: 1784
uaacucagcgcuuggcaua

SEQ ID NO: 138881 - RNA, 19 nt, Artificial Sequence
  Description of Artificial Sequence: Synthetic oligonucleotide
  Antisense strand to SEQ ID NO: 138880
uaugccaagcgcugaguua

SEQ ID NO: 138882 - RNA, 19 nt, Artificial Sequence
  Description of Artificial Sequence: Synthetic oligonucleotide
  Sense strand starting at position 3374 of SEQ ID NO: 1784
gaccaucucugaugucagu

SEQ ID NO: 138883 - RNA, 19 nt, Artificial Sequence
  Description of Artificial Sequence: Synthetic oligonucleotide
  Antisense strand to SEQ ID NO: 138882
acugacaucagagaugguc

SEQ ID NO: 138884 - RNA, 19 nt, Artificial Sequence
  Description of Artificial Sequence: Synthetic oligonucleotide
  Sense strand starting at position 3254 of SEQ ID NO: 1784
uagccaagguggucucaaa

SEQ ID NO: 138885 - RNA, 19 nt, Artificial Sequence
  Description of Artificial Sequence: Synthetic oligonucleotide
  Antisense strand to SEQ ID NO: 138884
uuugagaccaccuuggcua

SEQ ID NO: 138886 - RNA, 19 nt, Artificial Sequence
  Description of Artificial Sequence: Synthetic oligonucleotide
  Sense strand starting at position 2884 of SEQ ID NO: 1784
cuaagacacugguugaguu

SEQ ID NO: 138887 - RNA, 19 nt, Artificial Sequence
  Description of Artificial Sequence: Synthetic oligonucleotide
  Antisense strand to SEQ ID NO: 138886
aacucaaccagugucuuag

SEQ ID NO: 138888 - RNA, 19 nt, Artificial Sequence
  Description of Artificial Sequence: Synthetic oligonucleotide
  Sense strand starting at position 2881 of SEQ ID NO: 1784
gcacuaagacacugguuga

SEQ ID NO: 138889 - RNA, 19 nt, Artificial Sequence
  Description of Artificial Sequence: Synthetic oligonucleotide
  Antisense strand to SEQ ID NO: 138888
ucaaccagugucuuagugc

SEQ ID NO: 138890 - RNA, 19 nt, Artificial Sequence
  Description of Artificial Sequence: Synthetic oligonucleotide
  Sense strand starting at position 2816 of SEQ ID NO: 1784
ccagguuugucucauccuu

SEQ ID NO: 138891 - RNA, 19 nt, Artificial Sequence
  Description of Artificial Sequence: Synthetic oligonucleotide
  Antisense strand to SEQ ID NO: 138890
aaggaugagacaaaccugg

SEQ ID NO: 138892 - RNA, 19 nt, Artificial Sequence
  Description of Artificial Sequence: Synthetic oligonucleotide
  Sense strand starting at position 2776 of SEQ ID NO: 1784
cggcuugucucaggucaca

SEQ ID NO: 138893 - RNA, 19 nt, Artificial Sequence
  Description of Artificial Sequence: Synthetic oligonucleotide
  Antisense strand to SEQ ID NO: 138892
ugugaccugagacaagccg

SEQ ID NO: 138894 - RNA, 19 nt, Artificial Sequence
  Description of Artificial Sequence: Synthetic oligonucleotide
  Sense strand starting at position 2651 of SEQ ID NO: 1784
gccuguggauucgacaacu

SEQ ID NO: 138895 - RNA, 19 nt, Artificial Sequence
  Description of Artificial Sequence: Synthetic oligonucleotide
  Antisense strand to SEQ ID NO: 138894
aguugucgaauccacaggc

SEQ ID NO: 138896 - RNA, 19 nt, Artificial Sequence
  Description of Artificial Sequence: Synthetic oligonucleotide
  Sense strand starting at position 2586 of SEQ ID NO: 1784
ggcacagucugguugagga

SEQ ID NO: 138897 - RNA, 19 nt, Artificial Sequence
  Description of Artificial Sequence: Synthetic oligonucleotide
  Antisense strand to SEQ ID NO: 138896
uccucaaccagacugugcc

SEQ ID NO: 138898 - RNA, 19 nt, Artificial Sequence
  Description of Artificial Sequence: Synthetic oligonucleotide
  Sense strand starting at position 2540 of SEQ ID NO: 1784
ucuaaugccugucugaguu

SEQ ID NO: 138899 - RNA, 19 nt, Artificial Sequence
  Description of Artificial Sequence: Synthetic oligonucleotide
  Antisense strand to SEQ ID NO: 138898
aacucagacaggcauuaga

SEQ ID NO: 138900 - RNA, 19 nt, Artificial Sequence
  Description of Artificial Sequence: Synthetic oligonucleotide
  Sense strand starting at position 2537 of SEQ ID NO: 1784
uccucuaaugccugucuga

SEQ ID NO: 138901 - RNA, 19 nt, Artificial Sequence
  Description of Artificial Sequence: Synthetic oligonucleotide
  Antisense strand to SEQ ID NO: 138900
ucagacaggcauuagagga

SEQ ID NO: 138902 - RNA, 19 nt, Artificial Sequence
  Description of Artificial Sequence: Synthetic oligonucleotide
  Sense strand starting at position 2412 of SEQ ID NO: 1784
cuggaagugagugguuagu

SEQ ID NO: 138903 - RNA, 19 nt, Artificial Sequence
  Description of Artificial Sequence: Synthetic oligonucleotide
  Antisense strand to SEQ ID NO: 138902
acuaaccacucacuuccag

SEQ ID NO: 138904 - RNA, 19 nt, Artificial Sequence
  Description of Artificial Sequence: Synthetic oligonucleotide
  Sense strand starting at position 1677 of SEQ ID NO: 1784
gggaguugccguggccuaa

SEQ ID NO: 138905 - RNA, 19 nt, Artificial Sequence
  Description of Artificial Sequence: Synthetic oligonucleotide
  Antisense strand to SEQ ID NO: 138904
uuaggccacggcaacuccc

SEQ ID NO: 138906 - RNA, 19 nt, Artificial Sequence
  Description of Artificial Sequence: Synthetic oligonucleotide
  Sense strand starting at position 1563 of SEQ ID NO: 1784
ccgcaguguucgugggaaa

SEQ ID NO: 138907 - RNA, 19 nt, Artificial Sequence
  Description of Artificial Sequence: Synthetic oligonucleotide
  Antisense strand to SEQ ID NO: 138906
uuucccacgaacacugcgg

SEQ ID NO: 138908 - RNA, 19 nt, Artificial Sequence
  Description of Artificial Sequence: Synthetic oligonucleotide
  Sense strand starting at position 1562 of SEQ ID NO: 1784
cccgcaguguucgugggaa

SEQ ID NO: 138909 - RNA, 19 nt, Artificial Sequence
  Description of Artificial Sequence: Synthetic oligonucleotide
  Antisense strand to SEQ ID NO: 138908
uucccacgaacacugcggg

SEQ ID NO: 138910 - RNA, 19 nt, Artificial Sequence
  Description of Artificial Sequence: Synthetic oligonucleotide
  Sense strand starting at position 1519 of SEQ ID NO: 1784
gcucaaagccagggauguu

SEQ ID NO: 138911 - RNA, 19 nt, Artificial Sequence
  Description of Artificial Sequence: Synthetic oligonucleotide
  Antisense strand to SEQ ID NO: 138910
aacaucccuggcuuugagc

SEQ ID NO: 138912 - RNA, 19 nt, Artificial Sequence
  Description of Artificial Sequence: Synthetic oligonucleotide
  Sense strand starting at position 1390 of SEQ ID NO: 1784
cuguucucuuccuggcaaa

SEQ ID NO: 138913 - RNA, 19 nt, Artificial Sequence
  Description of Artificial Sequence: Synthetic oligonucleotide
  Antisense strand to SEQ ID NO: 138912
uuugccaggaagagaacag

SEQ ID NO: 138914 - RNA, 19 nt, Artificial Sequence
  Description of Artificial Sequence: Synthetic oligonucleotide
  Sense strand starting at position 1336 of SEQ ID NO: 1784
aucccucauucuuggagaa

SEQ ID NO: 138915 - RNA, 19 nt, Artificial Sequence
  Description of Artificial Sequence: Synthetic oligonucleotide
  Antisense strand to SEQ ID NO: 138914
uucuccaagaaugagggau

SEQ ID NO: 138916 - RNA, 19 nt, Artificial Sequence
  Description of Artificial Sequence: Synthetic oligonucleotide
  Sense strand starting at position 1319 of SEQ ID NO: 1784
gagcaagcgugacuugaau

SEQ ID NO: 138917 - RNA, 19 nt, Artificial Sequence
  Description of Artificial Sequence: Synthetic oligonucleotide
  Antisense strand to SEQ ID NO: 138916
auucaagucacgcuugcuc

SEQ ID NO: 138918 - RNA, 19 nt, Artificial Sequence
  Description of Artificial Sequence: Synthetic oligonucleotide
  Sense strand starting at position 957 of SEQ ID NO: 1784
cugugucucuccuaacagu

SEQ ID NO: 138919 - RNA, 19 nt, Artificial Sequence
  Description of Artificial Sequence: Synthetic oligonucleotide
  Antisense strand to SEQ ID NO: 138918
acuguuaggagagacacag

SEQ ID NO: 138920 - RNA, 19 nt, Artificial Sequence
  Description of Artificial Sequence: Synthetic oligonucleotide
  Sense strand starting at position 955 of SEQ ID NO: 1784
gucugugucucuccuaaca

SEQ ID NO: 138921 - RNA, 19 nt, Artificial Sequence
  Description of Artificial Sequence: Synthetic oligonucleotide
  Antisense strand to SEQ ID NO: 138920
uguuaggagagacacagac

SEQ ID NO: 138922 - RNA, 19 nt, Artificial Sequence
  Description of Artificial Sequence: Synthetic oligonucleotide
  Sense strand starting at position 953 of SEQ ID NO: 1784
gugucugugucucuccuaa

SEQ ID NO: 138923 - RNA, 19 nt, Artificial Sequence
  Description of Artificial Sequence: Synthetic oligonucleotide
  Antisense strand to SEQ ID NO: 138922
uuaggagagacacagacac

SEQ ID NO: 138924 - RNA, 19 nt, Artificial Sequence
  Description of Artificial Sequence: Synthetic oligonucleotide
  Sense strand starting at position 840 of SEQ ID NO: 1784
ggcugaugccuccaugaca

SEQ ID NO: 138925 - RNA, 19 nt, Artificial Sequence
  Description of Artificial Sequence: Synthetic oligonucleotide
  Antisense strand to SEQ ID NO: 138924
ugucauggaggcaucagcc

SEQ ID NO: 138926 - RNA, 19 nt, Artificial Sequence
  Description of Artificial Sequence: Synthetic oligonucleotide
  Sense strand starting at position 3973 of SEQ ID NO: 1785
ggcaaaucacgguaccuaa

SEQ ID NO: 138927 - RNA, 19 nt, Artificial Sequence
  Description of Artificial Sequence: Synthetic oligonucleotide
  Antisense strand to SEQ ID NO: 138926
uuagguaccgugauuugcc

SEQ ID NO: 138928 - RNA, 19 nt, Artificial Sequence
  Description of Artificial Sequence: Synthetic oligonucleotide
  Sense strand starting at position 3961 of SEQ ID NO: 1785
ucugcuaagucaggcaaau

SEQ ID NO: 138929 - RNA, 19 nt, Artificial Sequence
  Description of Artificial Sequence: Synthetic oligonucleotide
  Antisense strand to SEQ ID NO: 138928
auuugccugacuuagcaga

SEQ ID NO: 138930 - RNA, 19 nt, Artificial Sequence
  Description of Artificial Sequence: Synthetic oligonucleotide
  Sense strand starting at position 3891 of SEQ ID NO: 1785
ugacuucugccacagauuc

SEQ ID NO: 138931 - RNA, 19 nt, Artificial Sequence
  Description of Artificial Sequence: Synthetic oligonucleotide
  Antisense strand to SEQ ID NO: 138930
gaaucuguggcagaaguca

SEQ ID NO: 138932 - RNA, 19 nt, Artificial Sequence
  Description of Artificial Sequence: Synthetic oligonucleotide
  Sense strand starting at position 3886 of SEQ ID NO: 1785
ugccaugacuucugccaca

SEQ ID NO: 138933 - RNA, 19 nt, Artificial Sequence
  Description of Artificial Sequence: Synthetic oligonucleotide
  Antisense strand to SEQ ID NO: 138932
uguggcagaagucauggca

SEQ ID NO: 138934 - RNA, 19 nt, Artificial Sequence
  Description of Artificial Sequence: Synthetic oligonucleotide
  Sense strand starting at position 3879 of SEQ ID NO: 1785
ugacuucugccaugacuuc

SEQ ID NO: 138935 - RNA, 19 nt, Artificial Sequence
  Description of Artificial Sequence: Synthetic oligonucleotide
  Antisense strand to SEQ ID NO: 138934
gaagucauggcagaaguca

SEQ ID NO: 138936 - RNA, 19 nt, Artificial Sequence
  Description of Artificial Sequence: Synthetic oligonucleotide
  Sense strand starting at position 3877 of SEQ ID NO: 1785
gcugacuucugccaugacu

SEQ ID NO: 138937 - RNA, 19 nt, Artificial Sequence
  Description of Artificial Sequence: Synthetic oligonucleotide
  Antisense strand to SEQ ID NO: 138936
agucauggcagaagucagc

SEQ ID NO: 138938 - RNA, 19 nt, Artificial Sequence
  Description of Artificial Sequence: Synthetic oligonucleotide
  Sense strand starting at position 3781 of SEQ ID NO: 1785
gcaucuggcuucuugaacu

SEQ ID NO: 138939 - RNA, 19 nt, Artificial Sequence
  Description of Artificial Sequence: Synthetic oligonucleotide
  Antisense strand to SEQ ID NO: 138938
aguucaagaagccagaugc

SEQ ID NO: 138940 - RNA, 19 nt, Artificial Sequence
  Description of Artificial Sequence: Synthetic oligonucleotide
  Sense strand starting at position 3699 of SEQ ID NO: 1785
gcaugaagcagcuggaaau

SEQ ID NO: 138941 - RNA, 19 nt, Artificial Sequence
  Description of Artificial Sequence: Synthetic oligonucleotide
  Antisense strand to SEQ ID NO: 138940
auuuccagcugcuucaugc

SEQ ID NO: 138942 - RNA, 19 nt, Artificial Sequence
  Description of Artificial Sequence: Synthetic oligonucleotide
  Sense strand starting at position 3639 of SEQ ID NO: 1785
cugagucuccaaggauaag

SEQ ID NO: 138943 - RNA, 19 nt, Artificial Sequence
  Description of Artificial Sequence: Synthetic oligonucleotide
  Antisense strand to SEQ ID NO: 138942
cuuauccuuggagacucag

SEQ ID NO: 138944 - RNA, 19 nt, Artificial Sequence
  Description of Artificial Sequence: Synthetic oligonucleotide
  Sense strand starting at position 3575 of SEQ ID NO: 1785
ccaugauagagcuggacuu

SEQ ID NO: 138945 - RNA, 19 nt, Artificial Sequence
  Description of Artificial Sequence: Synthetic oligonucleotide
  Antisense strand to SEQ ID NO: 138944
aaguccagcucuaucaugg

SEQ ID NO: 138946 - RNA, 19 nt, Artificial Sequence
  Description of Artificial Sequence: Synthetic oligonucleotide
  Sense strand starting at position 3566 of SEQ ID NO: 1785
cgucaaacaccaugauaga

SEQ ID NO: 138947 - RNA, 19 nt, Artificial Sequence
  Description of Artificial Sequence: Synthetic oligonucleotide
  Antisense strand to SEQ ID NO: 138946
ucuaucaugguguuugacg

SEQ ID NO: 138948 - RNA, 19 nt, Artificial Sequence
  Description of Artificial Sequence: Synthetic oligonucleotide
  Sense strand starting at position 3529 of SEQ ID NO: 1785
guggguaagugcuguucau

SEQ ID NO: 138949 - RNA, 19 nt, Artificial Sequence
  Description of Artificial Sequence: Synthetic oligonucleotide
  Antisense strand to SEQ ID NO: 138948
augaacagcacuuacccac

SEQ ID NO: 138950 - RNA, 19 nt, Artificial Sequence
  Description of Artificial Sequence: Synthetic oligonucleotide
  Sense strand starting at position 3162 of SEQ ID NO: 1785
cagcgcuuggcauaaagua

SEQ ID NO: 138951 - RNA, 19 nt, Artificial Sequence
  Description of Artificial Sequence: Synthetic oligonucleotide
  Antisense strand to SEQ ID NO: 138950
uacuuuaugccaagcgcug

SEQ ID NO: 138952 - RNA, 19 nt, Artificial Sequence
  Description of Artificial Sequence: Synthetic oligonucleotide
  Sense strand starting at position 3157 of SEQ ID NO: 1785
uaacucagcgcuuggcaua

SEQ ID NO: 138953 - RNA, 19 nt, Artificial Sequence
  Description of Artificial Sequence: Synthetic oligonucleotide
  Antisense strand to SEQ ID NO: 138952
uaugccaagcgcugaguua

SEQ ID NO: 138954 - RNA, 19 nt, Artificial Sequence
  Description of Artificial Sequence: Synthetic oligonucleotide
  Sense strand starting at position 3079 of SEQ ID NO: 1785
gaccaucucugaugucagu

SEQ ID NO: 138955 - RNA, 19 nt, Artificial Sequence
  Description of Artificial Sequence: Synthetic oligonucleotide
  Antisense strand to SEQ ID NO: 138954
acugacaucagagaugguc

SEQ ID NO: 138956 - RNA, 19 nt, Artificial Sequence
  Description of Artificial Sequence: Synthetic oligonucleotide
  Sense strand starting at position 2959 of SEQ ID NO: 1785
uagccaagguggucucaaa

SEQ ID NO: 138957 - RNA, 19 nt, Artificial Sequence
  Description of Artificial Sequence: Synthetic oligonucleotide
  Antisense strand to SEQ ID NO: 138956
uuugagaccaccuuggcua

SEQ ID NO: 138958 - RNA, 19 nt, Artificial Sequence
  Description of Artificial Sequence: Synthetic oligonucleotide
  Sense strand starting at position 2589 of SEQ ID NO: 1785
cuaagacacugguugaguu

SEQ ID NO: 138959 - RNA, 19 nt, Artificial Sequence
  Description of Artificial Sequence: Synthetic oligonucleotide
  Antisense strand to SEQ ID NO: 138958
aacucaaccagugucuuag

SEQ ID NO: 138960 - RNA, 19 nt, Artificial Sequence
  Description of Artificial Sequence: Synthetic oligonucleotide
  Sense strand starting at position 2586 of SEQ ID NO: 1785
gcacuaagacacugguuga

SEQ ID NO: 138961 - RNA, 19 nt, Artificial Sequence
  Description of Artificial Sequence: Synthetic oligonucleotide
  Antisense strand to SEQ ID NO: 138960
ucaaccagugucuuagugc

SEQ ID NO: 138962 - RNA, 19 nt, Artificial Sequence
  Description of Artificial Sequence: Synthetic oligonucleotide
  Sense strand starting at position 2521 of SEQ ID NO: 1785
ccagguuugucucauccuu

SEQ ID NO: 138963 - RNA, 19 nt, Artificial Sequence
  Description of Artificial Sequence: Synthetic oligonucleotide
  Antisense strand to SEQ ID NO: 138962
aaggaugagacaaaccugg

SEQ ID NO: 138964 - RNA, 19 nt, Artificial Sequence
  Description of Artificial Sequence: Synthetic oligonucleotide
  Sense strand starting at position 2481 of SEQ ID NO: 1785
cggcuugucucaggucaca

SEQ ID NO: 138965 - RNA, 19 nt, Artificial Sequence
  Description of Artificial Sequence: Synthetic oligonucleotide
  Antisense strand to SEQ ID NO: 138964
ugugaccugagacaagccg

SEQ ID NO: 138966 - RNA, 19 nt, Artificial Sequence
  Description of Artificial Sequence: Synthetic oligonucleotide
  Sense strand starting at position 2356 of SEQ ID NO: 1785
gccuguggauucgacaacu

SEQ ID NO: 138967 - RNA, 19 nt, Artificial Sequence
  Description of Artificial Sequence: Synthetic oligonucleotide
  Antisense strand to SEQ ID NO: 138966
aguugucgaauccacaggc

SEQ ID NO: 138968 - RNA, 19 nt, Artificial Sequence
  Description of Artificial Sequence: Synthetic oligonucleotide
  Sense strand starting at position 2291 of SEQ ID NO: 1785
ggcacagucugguugagga

SEQ ID NO: 138969 - RNA, 19 nt, Artificial Sequence
  Description of Artificial Sequence: Synthetic oligonucleotide
  Antisense strand to SEQ ID NO: 138968
uccucaaccagacugugcc

SEQ ID NO: 138970 - RNA, 19 nt, Artificial Sequence
  Description of Artificial Sequence: Synthetic oligonucleotide
  Sense strand starting at position 2245 of SEQ ID NO: 1785
ucuaaugccugucugaguu

SEQ ID NO: 138971 - RNA, 19 nt, Artificial Sequence
  Description of Artificial Sequence: Synthetic oligonucleotide
  Antisense strand to SEQ ID NO: 138970
aacucagacaggcauuaga

SEQ ID NO: 138972 - RNA, 19 nt, Artificial Sequence
  Description of Artificial Sequence: Synthetic oligonucleotide
  Sense strand starting at position 2242 of SEQ ID NO: 1785
uccucuaaugccugucuga

SEQ ID NO: 138973 - RNA, 19 nt, Artificial Sequence
  Description of Artificial Sequence: Synthetic oligonucleotide
  Antisense strand to SEQ ID NO: 138972
ucagacaggcauuagagga

SEQ ID NO: 138974 - RNA, 19 nt, Artificial Sequence
  Description of Artificial Sequence: Synthetic oligonucleotide
  Sense strand starting at position 2117 of SEQ ID NO: 1785
cuggaagugagugguuagu

SEQ ID NO: 138975 - RNA, 19 nt, Artificial Sequence
  Description of Artificial Sequence: Synthetic oligonucleotide
  Antisense strand to SEQ ID NO: 138974
acuaaccacucacuuccag

SEQ ID NO: 138976 - RNA, 19 nt, Artificial Sequence
  Description of Artificial Sequence: Synthetic oligonucleotide
  Sense strand starting at position 1382 of SEQ ID NO: 1785
gggaguugccguggccuaa

SEQ ID NO: 138977 - RNA, 19 nt, Artificial Sequence
  Description of Artificial Sequence: Synthetic oligonucleotide
  Antisense strand to SEQ ID NO: 138976
uuaggccacggcaacuccc

SEQ ID NO: 138978 - RNA, 19 nt, Artificial Sequence
  Description of Artificial Sequence: Synthetic oligonucleotide
  Sense strand starting at position 1268 of SEQ ID NO: 1785
ccgcaguguucgugggaaa

SEQ ID NO: 138979 - RNA, 19 nt, Artificial Sequence
  Description of Artificial Sequence: Synthetic oligonucleotide
  Antisense strand to SEQ ID NO: 138978
uuucccacgaacacugcgg

SEQ ID NO: 138980 - RNA, 19 nt, Artificial Sequence
  Description of Artificial Sequence: Synthetic oligonucleotide
  Sense strand starting at position 1267 of SEQ ID NO: 1785
cccgcaguguucgugggaa

SEQ ID NO: 138981 - RNA, 19 nt, Artificial Sequence
  Description of Artificial Sequence: Synthetic oligonucleotide
  Antisense strand to SEQ ID NO: 138980
uucccacgaacacugcggg

SEQ ID NO: 138982 - RNA, 19 nt, Artificial Sequence
  Description of Artificial Sequence: Synthetic oligonucleotide
  Sense strand starting at position 1224 of SEQ ID NO: 1785
gcucaaagccagggauguu

SEQ ID NO: 138983 - RNA, 19 nt, Artificial Sequence
  Description of Artificial Sequence: Synthetic oligonucleotide
  Antisense strand to SEQ ID NO: 138982
aacaucccuggcuuugagc

SEQ ID NO: 138984 - RNA, 19 nt, Artificial Sequence
  Description of Artificial Sequence: Synthetic oligonucleotide
  Sense strand starting at position 1095 of SEQ ID NO: 1785
cuguucucuuccuggcaaa

SEQ ID NO: 138985 - RNA, 19 nt, Artificial Sequence
  Description of Artificial Sequence: Synthetic oligonucleotide
  Antisense strand to SEQ ID NO: 138984
uuugccaggaagagaacag

SEQ ID NO: 138986 - RNA, 19 nt, Artificial Sequence
  Description of Artificial Sequence: Synthetic oligonucleotide
  Sense strand starting at position 1041 of SEQ ID NO: 1785
aucccucauucuuggagaa

SEQ ID NO: 138987 - RNA, 19 nt, Artificial Sequence
  Description of Artificial Sequence: Synthetic oligonucleotide
  Antisense strand to SEQ ID NO: 138986
uucuccaagaaugagggau

SEQ ID NO: 138988 - RNA, 19 nt, Artificial Sequence
  Description of Artificial Sequence: Synthetic oligonucleotide
  Sense strand starting at position 1024 of SEQ ID NO: 1785
gagcaagcgugacuugaau

SEQ ID NO: 138989 - RNA, 19 nt, Artificial Sequence
  Description of Artificial Sequence: Synthetic oligonucleotide
  Antisense strand to SEQ ID NO: 138988
auucaagucacgcuugcuc

SEQ ID NO: 138990 - RNA, 19 nt, Artificial Sequence
  Description of Artificial Sequence: Synthetic oligonucleotide
  Sense strand starting at position 662 of SEQ ID NO: 1785
cugugucucuccuaacagu

SEQ ID NO: 138991 - RNA, 19 nt, Artificial Sequence
  Description of Artificial Sequence: Synthetic oligonucleotide
  Antisense strand to SEQ ID NO: 138990
acuguuaggagagacacag

SEQ ID NO: 138992 - RNA, 19 nt, Artificial Sequence
  Description of Artificial Sequence: Synthetic oligonucleotide
  Sense strand starting at position 660 of SEQ ID NO: 1785
gucugugucucuccuaaca

SEQ ID NO: 138993 - RNA, 19 nt, Artificial Sequence
  Description of Artificial Sequence: Synthetic oligonucleotide
  Antisense strand to SEQ ID NO: 138992
uguuaggagagacacagac

SEQ ID NO: 138994 - RNA, 19 nt, Artificial Sequence
  Description of Artificial Sequence: Synthetic oligonucleotide
  Sense strand starting at position 658 of SEQ ID NO: 1785
gugucugugucucuccuaa

SEQ ID NO: 138995 - RNA, 19 nt, Artificial Sequence
  Description of Artificial Sequence: Synthetic oligonucleotide
  Antisense strand to SEQ ID NO: 138994
uuaggagagacacagacac

SEQ ID NO: 138996 - RNA, 19 nt, Artificial Sequence
  Description of Artificial Sequence: Synthetic oligonucleotide
  Sense strand starting at position 545 of SEQ ID NO: 1785
ggcugaugccuccaugaca

SEQ ID NO: 138997 - RNA, 19 nt, Artificial Sequence
  Description of Artificial Sequence: Synthetic oligonucleotide
  Antisense strand to SEQ ID NO: 138996
ugucauggaggcaucagcc

SEQ ID NO: 138998 - RNA, 19 nt, Artificial Sequence
  Description of Artificial Sequence: Synthetic oligonucleotide
  Sense strand starting at position 3974 of SEQ ID NO: 1786
ugaggcacugcugauuaua

SEQ ID NO: 138999 - RNA, 19 nt, Artificial Sequence
  Description of Artificial Sequence: Synthetic oligonucleotide
  Antisense strand to SEQ ID NO: 138998
uauaaucagcagugccuca

SEQ ID NO: 139000 - RNA, 19 nt, Artificial Sequence
  Description of Artificial Sequence: Synthetic oligonucleotide
  Sense strand starting at position 3956 of SEQ ID NO: 1786
uagagacugcuuugauucu

SEQ ID NO: 139001 - RNA, 19 nt, Artificial Sequence
  Description of Artificial Sequence: Synthetic oligonucleotide
  Antisense strand to SEQ ID NO: 139000
agaaucaaagcagucucua

SEQ ID NO: 139002 - RNA, 19 nt, Artificial Sequence
  Description of Artificial Sequence: Synthetic oligonucleotide
  Sense strand starting at position 3954 of SEQ ID NO: 1786
uuuagagacugcuuugauu

SEQ ID NO: 139003 - RNA, 19 nt, Artificial Sequence
  Description of Artificial Sequence: Synthetic oligonucleotide
  Antisense strand to SEQ ID NO: 139002
aaucaaagcagucucuaaa

SEQ ID NO: 139004 - RNA, 19 nt, Artificial Sequence
  Description of Artificial Sequence: Synthetic oligonucleotide
  Sense strand starting at position 3884 of SEQ ID NO: 1786
ggaagauucuuugcaucuc

SEQ ID NO: 139005 - RNA, 19 nt, Artificial Sequence
  Description of Artificial Sequence: Synthetic oligonucleotide
  Antisense strand to SEQ ID NO: 139004
gagaugcaaagaaucuucc

SEQ ID NO: 139006 - RNA, 19 nt, Artificial Sequence
  Description of Artificial Sequence: Synthetic oligonucleotide
  Sense strand starting at position 3881 of SEQ ID NO: 1786
uguggaagauucuuugcau

SEQ ID NO: 139007 - RNA, 19 nt, Artificial Sequence
  Description of Artificial Sequence: Synthetic oligonucleotide
  Antisense strand to SEQ ID NO: 139006
augcaaagaaucuuccaca

SEQ ID NO: 139008 - RNA, 19 nt, Artificial Sequence
  Description of Artificial Sequence: Synthetic oligonucleotide
  Sense strand starting at position 3863 of SEQ ID NO: 1786
aguauccuuggaugauacu

SEQ ID NO: 139009 - RNA, 19 nt, Artificial Sequence
  Description of Artificial Sequence: Synthetic oligonucleotide
  Antisense strand to SEQ ID NO: 139008
aguaucauccaaggauacu

SEQ ID NO: 139010 - RNA, 19 nt, Artificial Sequence
  Description of Artificial Sequence: Synthetic oligonucleotide
  Sense strand starting at position 3732 of SEQ ID NO: 1786
uagguaggccuuugggaaa

SEQ ID NO: 139011 - RNA, 19 nt, Artificial Sequence
  Description of Artificial Sequence: Synthetic oligonucleotide
  Antisense strand to SEQ ID NO: 139010
uuucccaaaggccuaccua

SEQ ID NO: 139012 - RNA, 19 nt, Artificial Sequence
  Description of Artificial Sequence: Synthetic oligonucleotide
  Sense strand starting at position 3612 of SEQ ID NO: 1786
agcauuauugacugaaacu

SEQ ID NO: 139013 - RNA, 19 nt, Artificial Sequence
  Description of Artificial Sequence: Synthetic oligonucleotide
  Antisense strand to SEQ ID NO: 139012
aguuucagucaauaaugcu

SEQ ID NO: 139014 - RNA, 19 nt, Artificial Sequence
  Description of Artificial Sequence: Synthetic oligonucleotide
  Sense strand starting at position 3605 of SEQ ID NO: 1786
gauaguuagcauuauugac

SEQ ID NO: 139015 - RNA, 19 nt, Artificial Sequence
  Description of Artificial Sequence: Synthetic oligonucleotide
  Antisense strand to SEQ ID NO: 139014
gucaauaaugcuaacuauc

SEQ ID NO: 139016 - RNA, 19 nt, Artificial Sequence
  Description of Artificial Sequence: Synthetic oligonucleotide
  Sense strand starting at position 3582 of SEQ ID NO: 1786
gaaagaagucagugagcug

SEQ ID NO: 139017 - RNA, 19 nt, Artificial Sequence
  Description of Artificial Sequence: Synthetic oligonucleotide
  Antisense strand to SEQ ID NO: 139016
cagcucacugacuucuuuc

SEQ ID NO: 139018 - RNA, 19 nt, Artificial Sequence
  Description of Artificial Sequence: Synthetic oligonucleotide
  Sense strand starting at position 3513 of SEQ ID NO: 1786
acagcaucaccugaaguua

SEQ ID NO: 139019 - RNA, 19 nt, Artificial Sequence
  Description of Artificial Sequence: Synthetic oligonucleotide
  Antisense strand to SEQ ID NO: 139018
uaacuucaggugaugcugu

SEQ ID NO: 139020 - RNA, 19 nt, Artificial Sequence
  Description of Artificial Sequence: Synthetic oligonucleotide
  Sense strand starting at position 3446 of SEQ ID NO: 1786
auaacagauugguucugau

SEQ ID NO: 139021 - RNA, 19 nt, Artificial Sequence
  Description of Artificial Sequence: Synthetic oligonucleotide
  Antisense strand to SEQ ID NO: 139020
aucagaaccaaucuguuau

SEQ ID NO: 139022 - RNA, 19 nt, Artificial Sequence
  Description of Artificial Sequence: Synthetic oligonucleotide
  Sense strand starting at position 3435 of SEQ ID NO: 1786
ggcuccugaguauaacaga

SEQ ID NO: 139023 - RNA, 19 nt, Artificial Sequence
  Description of Artificial Sequence: Synthetic oligonucleotide
  Antisense strand to SEQ ID NO: 139022
ucuguuauacucaggagcc

SEQ ID NO: 139024 - RNA, 19 nt, Artificial Sequence
  Description of Artificial Sequence: Synthetic oligonucleotide
  Sense strand starting at position 3433 of SEQ ID NO: 1786
uaggcuccugaguauaaca

SEQ ID NO: 139025 - RNA, 19 nt, Artificial Sequence
  Description of Artificial Sequence: Synthetic oligonucleotide
  Antisense strand to SEQ ID NO: 139024
uguuauacucaggagccua

SEQ ID NO: 139026 - RNA, 19 nt, Artificial Sequence
  Description of Artificial Sequence: Synthetic oligonucleotide
  Sense strand starting at position 3414 of SEQ ID NO: 1786
cugcaugucguguuugauu

SEQ ID NO: 139027 - RNA, 19 nt, Artificial Sequence
  Description of Artificial Sequence: Synthetic oligonucleotide
  Antisense strand to SEQ ID NO: 139026
aaucaaacacgacaugcag

SEQ ID NO: 139028 - RNA, 19 nt, Artificial Sequence
  Description of Artificial Sequence: Synthetic oligonucleotide
  Sense strand starting at position 3413 of SEQ ID NO: 1786
ucugcaugucguguuugau

SEQ ID NO: 139029 - RNA, 19 nt, Artificial Sequence
  Description of Artificial Sequence: Synthetic oligonucleotide
  Antisense strand to SEQ ID NO: 139028
aucaaacacgacaugcaga

SEQ ID NO: 139030 - RNA, 19 nt, Artificial Sequence
  Description of Artificial Sequence: Synthetic oligonucleotide
  Sense strand starting at position 3233 of SEQ ID NO: 1786
ggcuauuugggucgguauu

SEQ ID NO: 139031 - RNA, 19 nt, Artificial Sequence
  Description of Artificial Sequence: Synthetic oligonucleotide
  Antisense strand to SEQ ID NO: 139030
aauaccgacccaaauagcc

SEQ ID NO: 139032 - RNA, 19 nt, Artificial Sequence
  Description of Artificial Sequence: Synthetic oligonucleotide
  Sense strand starting at position 3231 of SEQ ID NO: 1786
guggcuauuugggucggua

SEQ ID NO: 139033 - RNA, 19 nt, Artificial Sequence
  Description of Artificial Sequence: Synthetic oligonucleotide
  Antisense strand to SEQ ID NO: 139032
uaccgacccaaauagccac

SEQ ID NO: 139034 - RNA, 19 nt, Artificial Sequence
  Description of Artificial Sequence: Synthetic oligonucleotide
  Sense strand starting at position 3028 of SEQ ID NO: 1786
gagcuugaucagggccaca

SEQ ID NO: 139035 - RNA, 19 nt, Artificial Sequence
  Description of Artificial Sequence: Synthetic oligonucleotide
  Antisense strand to SEQ ID NO: 139034
uguggcccugaucaagcuc

SEQ ID NO: 139036 - RNA, 19 nt, Artificial Sequence
  Description of Artificial Sequence: Synthetic oligonucleotide
  Sense strand starting at position 2919 of SEQ ID NO: 1786
uggauaguuugguuucaga

SEQ ID NO: 139037 - RNA, 19 nt, Artificial Sequence
  Description of Artificial Sequence: Synthetic oligonucleotide
  Antisense strand to SEQ ID NO: 139036
ucugaaaccaaacuaucca

SEQ ID NO: 139038 - RNA, 19 nt, Artificial Sequence
  Description of Artificial Sequence: Synthetic oligonucleotide
  Sense strand starting at position 2606 of SEQ ID NO: 1786
uggauuacgguugagaagu

SEQ ID NO: 139039 - RNA, 19 nt, Artificial Sequence
  Description of Artificial Sequence: Synthetic oligonucleotide
  Antisense strand to SEQ ID NO: 139038
acuucucaaccguaaucca

SEQ ID NO: 139040 - RNA, 19 nt, Artificial Sequence
  Description of Artificial Sequence: Synthetic oligonucleotide
  Sense strand starting at position 2605 of SEQ ID NO: 1786
cuggauuacgguugagaag

SEQ ID NO: 139041 - RNA, 19 nt, Artificial Sequence
  Description of Artificial Sequence: Synthetic oligonucleotide
  Antisense strand to SEQ ID NO: 139040
cuucucaaccguaauccag

SEQ ID NO: 139042 - RNA, 19 nt, Artificial Sequence
  Description of Artificial Sequence: Synthetic oligonucleotide
  Sense strand starting at position 2551 of SEQ ID NO: 1786
aggucaucgcaagacuaca

SEQ ID NO: 139043 - RNA, 19 nt, Artificial Sequence
  Description of Artificial Sequence: Synthetic oligonucleotide
  Antisense strand to SEQ ID NO: 139042
uguagucuugcgaugaccu

SEQ ID NO: 139044 - RNA, 19 nt, Artificial Sequence
  Description of Artificial Sequence: Synthetic oligonucleotide
  Sense strand starting at position 2365 of SEQ ID NO: 1786
uugguuaauguguaacaag

SEQ ID NO: 139045 - RNA, 19 nt, Artificial Sequence
  Description of Artificial Sequence: Synthetic oligonucleotide
  Antisense strand to SEQ ID NO: 139044
cuuguuacacauuaaccaa

SEQ ID NO: 139046 - RNA, 19 nt, Artificial Sequence
  Description of Artificial Sequence: Synthetic oligonucleotide
  Sense strand starting at position 2364 of SEQ ID NO: 1786
cuugguuaauguguaacaa

SEQ ID NO: 139047 - RNA, 19 nt, Artificial Sequence
  Description of Artificial Sequence: Synthetic oligonucleotide
  Antisense strand to SEQ ID NO: 139046
uuguuacacauuaaccaag

SEQ ID NO: 139048 - RNA, 19 nt, Artificial Sequence
  Description of Artificial Sequence: Synthetic oligonucleotide
  Sense strand starting at position 2355 of SEQ ID NO: 1786
aggccagaacuugguuaau

SEQ ID NO: 139049 - RNA, 19 nt, Artificial Sequence
  Description of Artificial Sequence: Synthetic oligonucleotide
  Antisense strand to SEQ ID NO: 139048
auuaaccaaguucuggccu

SEQ ID NO: 139050 - RNA, 19 nt, Artificial Sequence
  Description of Artificial Sequence: Synthetic oligonucleotide
  Sense strand starting at position 2289 of SEQ ID NO: 1786
cguugucuucggucaucau

SEQ ID NO: 139051 - RNA, 19 nt, Artificial Sequence
  Description of Artificial Sequence: Synthetic oligonucleotide
  Antisense strand to SEQ ID NO: 139050
augaugaccgaagacaacg

SEQ ID NO: 139052 - RNA, 19 nt, Artificial Sequence
  Description of Artificial Sequence: Synthetic oligonucleotide
  Sense strand starting at position 2252 of SEQ ID NO: 1786
gcaguccauuugccaaauu

SEQ ID NO: 139053 - RNA, 19 nt, Artificial Sequence
  Description of Artificial Sequence: Synthetic oligonucleotide
  Antisense strand to SEQ ID NO: 139052
aauuuggcaaauggacugc

SEQ ID NO: 139054 - RNA, 19 nt, Artificial Sequence
  Description of Artificial Sequence: Synthetic oligonucleotide
  Sense strand starting at position 1270 of SEQ ID NO: 1786
ugaaguauuugaggaacac

SEQ ID NO: 139055 - RNA, 19 nt, Artificial Sequence
  Description of Artificial Sequence: Synthetic oligonucleotide
  Antisense strand to SEQ ID NO: 139054
guguuccucaaauacuuca

SEQ ID NO: 139056 - RNA, 19 nt, Artificial Sequence
  Description of Artificial Sequence: Synthetic oligonucleotide
  Sense strand starting at position 1221 of SEQ ID NO: 1786
cuguaaucccaauguaaag

SEQ ID NO: 139057 - RNA, 19 nt, Artificial Sequence
  Description of Artificial Sequence: Synthetic oligonucleotide
  Antisense strand to SEQ ID NO: 139056
cuuuacauugggauuacag

SEQ ID NO: 139058 - RNA, 19 nt, Artificial Sequence
  Description of Artificial Sequence: Synthetic oligonucleotide
  Sense strand starting at position 1190 of SEQ ID NO: 1786
augaaugaauuagccuauu

SEQ ID NO: 139059 - RNA, 19 nt, Artificial Sequence
  Description of Artificial Sequence: Synthetic oligonucleotide
  Antisense strand to SEQ ID NO: 139058
aauaggcuaauucauucau

SEQ ID NO: 139060 - RNA, 19 nt, Artificial Sequence
  Description of Artificial Sequence: Synthetic oligonucleotide
  Sense strand starting at position 1167 of SEQ ID NO: 1786
gcaagaggucuccggagga

SEQ ID NO: 139061 - RNA, 19 nt, Artificial Sequence
  Description of Artificial Sequence: Synthetic oligonucleotide
  Antisense strand to SEQ ID NO: 139060
uccuccggagaccucuugc

SEQ ID NO: 139062 - RNA, 19 nt, Artificial Sequence
  Description of Artificial Sequence: Synthetic oligonucleotide
  Sense strand starting at position 1072 of SEQ ID NO: 1786
cggucuuaagaaggagaca

SEQ ID NO: 139063 - RNA, 19 nt, Artificial Sequence
  Description of Artificial Sequence: Synthetic oligonucleotide
  Antisense strand to SEQ ID NO: 139062
ugucuccuucuuaagaccg

SEQ ID NO: 139064 - RNA, 19 nt, Artificial Sequence
  Description of Artificial Sequence: Synthetic oligonucleotide
  Sense strand starting at position 951 of SEQ ID NO: 1786
cagcauaugcacugggaaa

SEQ ID NO: 139065 - RNA, 19 nt, Artificial Sequence
  Description of Artificial Sequence: Synthetic oligonucleotide
  Antisense strand to SEQ ID NO: 139064
uuucccagugcauaugcug

SEQ ID NO: 139066 - RNA, 19 nt, Artificial Sequence
  Description of Artificial Sequence: Synthetic oligonucleotide
  Sense strand starting at position 842 of SEQ ID NO: 1786
gugauuagggacugguaaa

SEQ ID NO: 139067 - RNA, 19 nt, Artificial Sequence
  Description of Artificial Sequence: Synthetic oligonucleotide
  Antisense strand to SEQ ID NO: 139066
uuuaccagucccuaaucac

SEQ ID NO: 139068 - RNA, 19 nt, Artificial Sequence
  Description of Artificial Sequence: Synthetic oligonucleotide
  Sense strand starting at position 745 of SEQ ID NO: 1786
uuuggcuugagguauguaa

SEQ ID NO: 139069 - RNA, 19 nt, Artificial Sequence
  Description of Artificial Sequence: Synthetic oligonucleotide
  Antisense strand to SEQ ID NO: 139068
uuacauaccucaagccaaa

SEQ ID NO: 139070 - RNA, 19 nt, Artificial Sequence
  Description of Artificial Sequence: Synthetic oligonucleotide
  Sense strand starting at position 712 of SEQ ID NO: 1786
gcagcaugccaggacagau

SEQ ID NO: 139071 - RNA, 19 nt, Artificial Sequence
  Description of Artificial Sequence: Synthetic oligonucleotide
  Antisense strand to SEQ ID NO: 139070
aucuguccuggcaugcugc

SEQ ID NO: 139072 - RNA, 19 nt, Artificial Sequence
  Description of Artificial Sequence: Synthetic oligonucleotide
  Sense strand starting at position 593 of SEQ ID NO: 1786
uagacuacgcuccaugaga

SEQ ID NO: 139073 - RNA, 19 nt, Artificial Sequence
  Description of Artificial Sequence: Synthetic oligonucleotide
  Antisense strand to SEQ ID NO: 139072
ucucauggagcguagucua

SEQ ID NO: 139074 - RNA, 19 nt, Artificial Sequence
  Description of Artificial Sequence: Synthetic oligonucleotide
  Sense strand starting at position 145 of SEQ ID NO: 1786
ugaugaaggcaucgacuua

SEQ ID NO: 139075 - RNA, 19 nt, Artificial Sequence
  Description of Artificial Sequence: Synthetic oligonucleotide
  Antisense strand to SEQ ID NO: 139074
uaagucgaugccuucauca

SEQ ID NO: 139076 - RNA, 19 nt, Artificial Sequence
  Description of Artificial Sequence: Synthetic oligonucleotide
  Sense strand starting at position 83 of SEQ ID NO: 1786
ugguucucuacaggaagaa

SEQ ID NO: 139077 - RNA, 19 nt, Artificial Sequence
  Description of Artificial Sequence: Synthetic oligonucleotide
  Antisense strand to SEQ ID NO: 139076
uucuuccuguagagaacca

SEQ ID NO: 139078 - RNA, 19 nt, Artificial Sequence
  Description of Artificial Sequence: Synthetic oligonucleotide
  Sense strand starting at position 30 of SEQ ID NO: 1788
uaguguugucacuaagccu

SEQ ID NO: 139079 - RNA, 19 nt, Artificial Sequence
  Description of Artificial Sequence: Synthetic oligonucleotide
  Antisense strand to SEQ ID NO: 139078
aggcuuagugacaacacua

SEQ ID NO: 139080 - RNA, 19 nt, Artificial Sequence
  Description of Artificial Sequence: Synthetic oligonucleotide
  Sense strand starting at position 105 of SEQ ID NO: 1788
uaggcugagucauccucua

SEQ ID NO: 139081 - RNA, 19 nt, Artificial Sequence
  Description of Artificial Sequence: Synthetic oligonucleotide
  Antisense strand to SEQ ID NO: 139080
uagaggaugacucagccua

SEQ ID NO: 139082 - RNA, 19 nt, Artificial Sequence
  Description of Artificial Sequence: Synthetic oligonucleotide
  Sense strand starting at position 110 of SEQ ID NO: 1788
ugagucauccucuacuguu

SEQ ID NO: 139083 - RNA, 19 nt, Artificial Sequence
  Description of Artificial Sequence: Synthetic oligonucleotide
  Antisense strand to SEQ ID NO: 139082
aacaguagaggaugacuca

SEQ ID NO: 139084 - RNA, 19 nt, Artificial Sequence
  Description of Artificial Sequence: Synthetic oligonucleotide
  Sense strand starting at position 144 of SEQ ID NO: 1788
gcaggauugaaaugcagga

SEQ ID NO: 139085 - RNA, 19 nt, Artificial Sequence
  Description of Artificial Sequence: Synthetic oligonucleotide
  Antisense strand to SEQ ID NO: 139084
uccugcauuucaauccugc

SEQ ID NO: 139086 - RNA, 19 nt, Artificial Sequence
  Description of Artificial Sequence: Synthetic oligonucleotide
  Sense strand starting at position 148 of SEQ ID NO: 1788
gauugaaaugcaggacucu

SEQ ID NO: 139087 - RNA, 19 nt, Artificial Sequence
  Description of Artificial Sequence: Synthetic oligonucleotide
  Antisense strand to SEQ ID NO: 139086
agaguccugcauuucaauc

SEQ ID NO: 139088 - RNA, 19 nt, Artificial Sequence
  Description of Artificial Sequence: Synthetic oligonucleotide
  Sense strand starting at position 729 of SEQ ID NO: 1788
guugccucccaguaauguu

SEQ ID NO: 139089 - RNA, 19 nt, Artificial Sequence
  Description of Artificial Sequence: Synthetic oligonucleotide
  Antisense strand to SEQ ID NO: 139088
aacauuacugggaggcaac

SEQ ID NO: 139090 - RNA, 19 nt, Artificial Sequence
  Description of Artificial Sequence: Synthetic oligonucleotide
  Sense strand starting at position 843 of SEQ ID NO: 1788
cuuguucuuuagguuauuu

SEQ ID NO: 139091 - RNA, 19 nt, Artificial Sequence
  Description of Artificial Sequence: Synthetic oligonucleotide
  Antisense strand to SEQ ID NO: 139090
aaauaaccuaaagaacaag

SEQ ID NO: 139092 - RNA, 19 nt, Artificial Sequence
  Description of Artificial Sequence: Synthetic oligonucleotide
  Sense strand starting at position 852 of SEQ ID NO: 1788
uagguuauuugaggaucuu

SEQ ID NO: 139093 - RNA, 19 nt, Artificial Sequence
  Description of Artificial Sequence: Synthetic oligonucleotide
  Antisense strand to SEQ ID NO: 139092
aagauccucaaauaaccua

SEQ ID NO: 139094 - RNA, 19 nt, Artificial Sequence
  Description of Artificial Sequence: Synthetic oligonucleotide
  Sense strand starting at position 865 of SEQ ID NO: 1788
gaucuugucuccuugagua

SEQ ID NO: 139095 - RNA, 19 nt, Artificial Sequence
  Description of Artificial Sequence: Synthetic oligonucleotide
  Antisense strand to SEQ ID NO: 139094
uacucaaggagacaagauc

SEQ ID NO: 139096 - RNA, 19 nt, Artificial Sequence
  Description of Artificial Sequence: Synthetic oligonucleotide
  Sense strand starting at position 867 of SEQ ID NO: 1788
ucuugucuccuugaguaga

SEQ ID NO: 139097 - RNA, 19 nt, Artificial Sequence
  Description of Artificial Sequence: Synthetic oligonucleotide
  Antisense strand to SEQ ID NO: 139096
ucuacucaaggagacaaga

SEQ ID NO: 139098 - RNA, 19 nt, Artificial Sequence
  Description of Artificial Sequence: Synthetic oligonucleotide
  Sense strand starting at position 875 of SEQ ID NO: 1788
ccuugaguagacuguccau

SEQ ID NO: 139099 - RNA, 19 nt, Artificial Sequence
  Description of Artificial Sequence: Synthetic oligonucleotide
  Antisense strand to SEQ ID NO: 139098
auggacagucuacucaagg

SEQ ID NO: 139100 - RNA, 19 nt, Artificial Sequence
  Description of Artificial Sequence: Synthetic oligonucleotide
  Sense strand starting at position 946 of SEQ ID NO: 1788
ugaccaaugcugggauucu

SEQ ID NO: 139101 - RNA, 19 nt, Artificial Sequence
  Description of Artificial Sequence: Synthetic oligonucleotide
  Antisense strand to SEQ ID NO: 139100
agaaucccagcauugguca

SEQ ID NO: 139102 - RNA, 19 nt, Artificial Sequence
  Description of Artificial Sequence: Synthetic oligonucleotide
  Sense strand starting at position 1051 of SEQ ID NO: 1788
agcacuguguaggucuaaa

SEQ ID NO: 139103 - RNA, 19 nt, Artificial Sequence
  Description of Artificial Sequence: Synthetic oligonucleotide
  Antisense strand to SEQ ID NO: 139102
uuuagaccuacacagugcu

SEQ ID NO: 139104 - RNA, 19 nt, Artificial Sequence
  Description of Artificial Sequence: Synthetic oligonucleotide
  Sense strand starting at position 1080 of SEQ ID NO: 1788
aguuacuaucuccguggga

SEQ ID NO: 139105 - RNA, 19 nt, Artificial Sequence
  Description of Artificial Sequence: Synthetic oligonucleotide
  Antisense strand to SEQ ID NO: 139104
ucccacggagauaguaacu

SEQ ID NO: 139106 - RNA, 19 nt, Artificial Sequence
  Description of Artificial Sequence: Synthetic oligonucleotide
  Sense strand starting at position 1097 of SEQ ID NO: 1788
gaccuuuguggugggagau

SEQ ID NO: 139107 - RNA, 19 nt, Artificial Sequence
  Description of Artificial Sequence: Synthetic oligonucleotide
  Antisense strand to SEQ ID NO: 139106
aucucccaccacaaagguc

SEQ ID NO: 139108 - RNA, 19 nt, Artificial Sequence
  Description of Artificial Sequence: Synthetic oligonucleotide
  Sense strand starting at position 1098 of SEQ ID NO: 1788
accuuuguggugggagauu

SEQ ID NO: 139109 - RNA, 19 nt, Artificial Sequence
  Description of Artificial Sequence: Synthetic oligonucleotide
  Antisense strand to SEQ ID NO: 139108
aaucucccaccacaaaggu

SEQ ID NO: 139110 - RNA, 19 nt, Artificial Sequence
  Description of Artificial Sequence: Synthetic oligonucleotide
  Sense strand starting at position 1107 of SEQ ID NO: 1788
gugggagauugaucuguaa

SEQ ID NO: 139111 - RNA, 19 nt, Artificial Sequence
  Description of Artificial Sequence: Synthetic oligonucleotide
  Antisense strand to SEQ ID NO: 139110
uuacagaucaaucucccac

SEQ ID NO: 139112 - RNA, 19 nt, Artificial Sequence
  Description of Artificial Sequence: Synthetic oligonucleotide
  Sense strand starting at position 1109 of SEQ ID NO: 1788
gggagauugaucuguaagc

SEQ ID NO: 139113 - RNA, 19 nt, Artificial Sequence
  Description of Artificial Sequence: Synthetic oligonucleotide
  Antisense strand to SEQ ID NO: 139112
gcuuacagaucaaucuccc

SEQ ID NO: 139114 - RNA, 19 nt, Artificial Sequence
  Description of Artificial Sequence: Synthetic oligonucleotide
  Sense strand starting at position 1114 of SEQ ID NO: 1788
auugaucuguaagcccaaa

SEQ ID NO: 139115 - RNA, 19 nt, Artificial Sequence
  Description of Artificial Sequence: Synthetic oligonucleotide
  Antisense strand to SEQ ID NO: 139114
uuugggcuuacagaucaau

SEQ ID NO: 139116 - RNA, 19 nt, Artificial Sequence
  Description of Artificial Sequence: Synthetic oligonucleotide
  Sense strand starting at position 1218 of SEQ ID NO: 1788
gggucaagaacuggguaua

SEQ ID NO: 139117 - RNA, 19 nt, Artificial Sequence
  Description of Artificial Sequence: Synthetic oligonucleotide
  Antisense strand to SEQ ID NO: 139116
uauacccaguucuugaccc

SEQ ID NO: 139118 - RNA, 19 nt, Artificial Sequence
  Description of Artificial Sequence: Synthetic oligonucleotide
  Sense strand starting at position 1397 of SEQ ID NO: 1788
gcacucugucaaugucaca

SEQ ID NO: 139119 - RNA, 19 nt, Artificial Sequence
  Description of Artificial Sequence: Synthetic oligonucleotide
  Antisense strand to SEQ ID NO: 139118
ugugacauugacagagugc

SEQ ID NO: 139120 - RNA, 19 nt, Artificial Sequence
  Description of Artificial Sequence: Synthetic oligonucleotide
  Sense strand starting at position 1972 of SEQ ID NO: 1788
cgugcacagacuugggaaa

SEQ ID NO: 139121 - RNA, 19 nt, Artificial Sequence
  Description of Artificial Sequence: Synthetic oligonucleotide
  Antisense strand to SEQ ID NO: 139120
uuucccaagucugugcacg

SEQ ID NO: 139122 - RNA, 19 nt, Artificial Sequence
  Description of Artificial Sequence: Synthetic oligonucleotide
  Sense strand starting at position 2199 of SEQ ID NO: 1788
ucugguuggcuuuagaaac

SEQ ID NO: 139123 - RNA, 19 nt, Artificial Sequence
  Description of Artificial Sequence: Synthetic oligonucleotide
  Antisense strand to SEQ ID NO: 139122
guuucuaaagccaaccaga

SEQ ID NO: 139124 - RNA, 19 nt, Artificial Sequence
  Description of Artificial Sequence: Synthetic oligonucleotide
  Sense strand starting at position 2329 of SEQ ID NO: 1788
gguucugguccuuaugcuu

SEQ ID NO: 139125 - RNA, 19 nt, Artificial Sequence
  Description of Artificial Sequence: Synthetic oligonucleotide
  Antisense strand to SEQ ID NO: 139124
aagcauaaggaccagaacc

SEQ ID NO: 139126 - RNA, 19 nt, Artificial Sequence
  Description of Artificial Sequence: Synthetic oligonucleotide
  Sense strand starting at position 3453 of SEQ ID NO: 1788
gcuugugagauaugaggca

SEQ ID NO: 139127 - RNA, 19 nt, Artificial Sequence
  Description of Artificial Sequence: Synthetic oligonucleotide
  Antisense strand to SEQ ID NO: 139126
ugccucauaucucacaagc

SEQ ID NO: 139128 - RNA, 19 nt, Artificial Sequence
  Description of Artificial Sequence: Synthetic oligonucleotide
  Sense strand starting at position 3513 of SEQ ID NO: 1788
ugaaguaccuaggagacua

SEQ ID NO: 139129 - RNA, 19 nt, Artificial Sequence
  Description of Artificial Sequence: Synthetic oligonucleotide
  Antisense strand to SEQ ID NO: 139128
uagucuccuagguacuuca

SEQ ID NO: 139130 - RNA, 19 nt, Artificial Sequence
  Description of Artificial Sequence: Synthetic oligonucleotide
  Sense strand starting at position 3565 of SEQ ID NO: 1788
uuugguaucucuuugagcu

SEQ ID NO: 139131 - RNA, 19 nt, Artificial Sequence
  Description of Artificial Sequence: Synthetic oligonucleotide
  Antisense strand to SEQ ID NO: 139130
agcucaaagagauaccaaa

SEQ ID NO: 139132 - RNA, 19 nt, Artificial Sequence
  Description of Artificial Sequence: Synthetic oligonucleotide
  Sense strand starting at position 3566 of SEQ ID NO: 1788
uugguaucucuuugagcug

SEQ ID NO: 139133 - RNA, 19 nt, Artificial Sequence
  Description of Artificial Sequence: Synthetic oligonucleotide
  Antisense strand to SEQ ID NO: 139132
cagcucaaagagauaccaa

SEQ ID NO: 139134 - RNA, 19 nt, Artificial Sequence
  Description of Artificial Sequence: Synthetic oligonucleotide
  Sense strand starting at position 3625 of SEQ ID NO: 1788
agcagaaugaaaugaguuu

SEQ ID NO: 139135 - RNA, 19 nt, Artificial Sequence
  Description of Artificial Sequence: Synthetic oligonucleotide
  Antisense strand to SEQ ID NO: 139134
aaacucauuucauucugcu

SEQ ID NO: 139136 - RNA, 19 nt, Artificial Sequence
  Description of Artificial Sequence: Synthetic oligonucleotide
  Sense strand starting at position 3686 of SEQ ID NO: 1788
ccucaagucguguaaugca

SEQ ID NO: 139137 - RNA, 19 nt, Artificial Sequence
  Description of Artificial Sequence: Synthetic oligonucleotide
  Antisense strand to SEQ ID NO: 139136
ugcauuacacgacuugagg

SEQ ID NO: 139138 - RNA, 19 nt, Artificial Sequence
  Description of Artificial Sequence: Synthetic oligonucleotide
  Sense strand starting at position 3691 of SEQ ID NO: 1788
agucguguaaugcauugga

SEQ ID NO: 139139 - RNA, 19 nt, Artificial Sequence
  Description of Artificial Sequence: Synthetic oligonucleotide
  Antisense strand to SEQ ID NO: 139138
uccaaugcauuacacgacu

SEQ ID NO: 139140 - RNA, 19 nt, Artificial Sequence
  Description of Artificial Sequence: Synthetic oligonucleotide
  Sense strand starting at position 3769 of SEQ ID NO: 1788
aucuaauaauccucugggu

SEQ ID NO: 139141 - RNA, 19 nt, Artificial Sequence
  Description of Artificial Sequence: Synthetic oligonucleotide
  Antisense strand to SEQ ID NO: 139140
acccagaggauuauuagau

SEQ ID NO: 139142 - RNA, 19 nt, Artificial Sequence
  Description of Artificial Sequence: Synthetic oligonucleotide
  Sense strand starting at position 3771 of SEQ ID NO: 1788
cuaauaauccucuggguca

SEQ ID NO: 139143 - RNA, 19 nt, Artificial Sequence
  Description of Artificial Sequence: Synthetic oligonucleotide
  Antisense strand to SEQ ID NO: 139142
ugacccagaggauuauuag

SEQ ID NO: 139144 - RNA, 19 nt, Artificial Sequence
  Description of Artificial Sequence: Synthetic oligonucleotide
  Sense strand starting at position 3790 of SEQ ID NO: 1788
gggaguucuuccucguauc

SEQ ID NO: 139145 - RNA, 19 nt, Artificial Sequence
  Description of Artificial Sequence: Synthetic oligonucleotide
  Antisense strand to SEQ ID NO: 139144
gauacgaggaagaacuccc

SEQ ID NO: 139146 - RNA, 19 nt, Artificial Sequence
  Description of Artificial Sequence: Synthetic oligonucleotide
  Sense strand starting at position 3800 of SEQ ID NO: 1788
ccucguauccaacagaagu

SEQ ID NO: 139147 - RNA, 19 nt, Artificial Sequence
  Description of Artificial Sequence: Synthetic oligonucleotide
  Antisense strand to SEQ ID NO: 139146
acuucuguuggauacgagg

SEQ ID NO: 139148 - RNA, 19 nt, Artificial Sequence
  Description of Artificial Sequence: Synthetic oligonucleotide
  Sense strand starting at position 3849 of SEQ ID NO: 1788
gucucaucuggccgauuag

SEQ ID NO: 139149 - RNA, 19 nt, Artificial Sequence
  Description of Artificial Sequence: Synthetic oligonucleotide
  Antisense strand to SEQ ID NO: 139148
cuaaucggccagaugagac

SEQ ID NO: 139150 - RNA, 19 nt, Artificial Sequence
  Description of Artificial Sequence: Synthetic oligonucleotide
  Sense strand starting at position 3850 of SEQ ID NO: 1788
ucucaucuggccgauuaga

SEQ ID NO: 139151 - RNA, 19 nt, Artificial Sequence
  Description of Artificial Sequence: Synthetic oligonucleotide
  Antisense strand to SEQ ID NO: 139150
ucuaaucggccagaugaga

SEQ ID NO: 139152 - RNA, 19 nt, Artificial Sequence
  Description of Artificial Sequence: Synthetic oligonucleotide
  Sense strand starting at position 3858 of SEQ ID NO: 1788
ggccgauuagacuacacau

SEQ ID NO: 139153 - RNA, 19 nt, Artificial Sequence
  Description of Artificial Sequence: Synthetic oligonucleotide
  Antisense strand to SEQ ID NO: 139152
auguguagucuaaucggcc

SEQ ID NO: 139154 - RNA, 19 nt, Artificial Sequence
  Description of Artificial Sequence: Synthetic oligonucleotide
  Sense strand starting at position 3893 of SEQ ID NO: 1788
gagcgaguauccuugaauc

SEQ ID NO: 139155 - RNA, 19 nt, Artificial Sequence
  Description of Artificial Sequence: Synthetic oligonucleotide
  Antisense strand to SEQ ID NO: 139154
gauucaaggauacucgcuc

SEQ ID NO: 139156 - RNA, 19 nt, Artificial Sequence
  Description of Artificial Sequence: Synthetic oligonucleotide
  Sense strand starting at position 3966 of SEQ ID NO: 1788
gugguuucuucaguggaaa

SEQ ID NO: 139157 - RNA, 19 nt, Artificial Sequence
  Description of Artificial Sequence: Synthetic oligonucleotide
  Antisense strand to SEQ ID NO: 139156
uuuccacugaagaaaccac

SEQ ID NO: 139158 - RNA, 19 nt, Artificial Sequence
  Description of Artificial Sequence: Synthetic oligonucleotide
  Sense strand starting at position 102 of SEQ ID NO: 1787
gggacaaucuuggccagga

SEQ ID NO: 139159 - RNA, 19 nt, Artificial Sequence
  Description of Artificial Sequence: Synthetic oligonucleotide
  Antisense strand to SEQ ID NO: 139158
uccuggccaagauuguccc

SEQ ID NO: 139160 - RNA, 19 nt, Artificial Sequence
  Description of Artificial Sequence: Synthetic oligonucleotide
  Sense strand starting at position 314 of SEQ ID NO: 1787
gcuggauuacaucauguca

SEQ ID NO: 139161 - RNA, 19 nt, Artificial Sequence
  Description of Artificial Sequence: Synthetic oligonucleotide
  Antisense strand to SEQ ID NO: 139160
ugacaugauguaauccagc

SEQ ID NO: 139162 - RNA, 19 nt, Artificial Sequence
  Description of Artificial Sequence: Synthetic oligonucleotide
  Sense strand starting at position 497 of SEQ ID NO: 1787
gggucaucaagguggcaau

SEQ ID NO: 139163 - RNA, 19 nt, Artificial Sequence
  Description of Artificial Sequence: Synthetic oligonucleotide
  Antisense strand to SEQ ID NO: 139162
auugccaccuugaugaccc

SEQ ID NO: 139164 - RNA, 19 nt, Artificial Sequence
  Description of Artificial Sequence: Synthetic oligonucleotide
  Sense strand starting at position 541 of SEQ ID NO: 1787
aaacuuggaccucgggaau

SEQ ID NO: 139165 - RNA, 19 nt, Artificial Sequence
  Description of Artificial Sequence: Synthetic oligonucleotide
  Antisense strand to SEQ ID NO: 139164
auucccgagguccaaguuu

SEQ ID NO: 139166 - RNA, 19 nt, Artificial Sequence
  Description of Artificial Sequence: Synthetic oligonucleotide
  Sense strand starting at position 554 of SEQ ID NO: 1787
gggaaugucuugccuaaga

SEQ ID NO: 139167 - RNA, 19 nt, Artificial Sequence
  Description of Artificial Sequence: Synthetic oligonucleotide
  Antisense strand to SEQ ID NO: 139166
ucuuaggcaagacauuccc

SEQ ID NO: 139168 - RNA, 19 nt, Artificial Sequence
  Description of Artificial Sequence: Synthetic oligonucleotide
  Sense strand starting at position 556 of SEQ ID NO: 1787
gaaugucuugccuaagauc

SEQ ID NO: 139169 - RNA, 19 nt, Artificial Sequence
  Description of Artificial Sequence: Synthetic oligonucleotide
  Antisense strand to SEQ ID NO: 139168
gaucuuaggcaagacauuc

SEQ ID NO: 139170 - RNA, 19 nt, Artificial Sequence
  Description of Artificial Sequence: Synthetic oligonucleotide
  Sense strand starting at position 629 of SEQ ID NO: 1787
ggauuaauguccuuccuuc

SEQ ID NO: 139171 - RNA, 19 nt, Artificial Sequence
  Description of Artificial Sequence: Synthetic oligonucleotide
  Antisense strand to SEQ ID NO: 139170
gaaggaaggacauuaaucc

SEQ ID NO: 139172 - RNA, 19 nt, Artificial Sequence
  Description of Artificial Sequence: Synthetic oligonucleotide
  Sense strand starting at position 755 of SEQ ID NO: 1787
uguacugcauaacuugaua

SEQ ID NO: 139173 - RNA, 19 nt, Artificial Sequence
  Description of Artificial Sequence: Synthetic oligonucleotide
  Antisense strand to SEQ ID NO: 139172
uaucaaguuaugcaguaca

SEQ ID NO: 139174 - RNA, 19 nt, Artificial Sequence
  Description of Artificial Sequence: Synthetic oligonucleotide
  Sense strand starting at position 843 of SEQ ID NO: 1787
ggcccaugagcugaaguuu

SEQ ID NO: 139175 - RNA, 19 nt, Artificial Sequence
  Description of Artificial Sequence: Synthetic oligonucleotide
  Antisense strand to SEQ ID NO: 139174
aaacuucagcucaugggcc

SEQ ID NO: 139176 - RNA, 19 nt, Artificial Sequence
  Description of Artificial Sequence: Synthetic oligonucleotide
  Sense strand starting at position 993 of SEQ ID NO: 1787
aguugugucacccaauaug

SEQ ID NO: 139177 - RNA, 19 nt, Artificial Sequence
  Description of Artificial Sequence: Synthetic oligonucleotide
  Antisense strand to SEQ ID NO: 139176
cauauugggugacacaacu

SEQ ID NO: 139178 - RNA, 19 nt, Artificial Sequence
  Description of Artificial Sequence: Synthetic oligonucleotide
  Sense strand starting at position 996 of SEQ ID NO: 1787
ugugucacccaauaugaua

SEQ ID NO: 139179 - RNA, 19 nt, Artificial Sequence
  Description of Artificial Sequence: Synthetic oligonucleotide
  Antisense strand to SEQ ID NO: 139178
uaucauauugggugacaca

SEQ ID NO: 139180 - RNA, 19 nt, Artificial Sequence
  Description of Artificial Sequence: Synthetic oligonucleotide
  Sense strand starting at position 1204 of SEQ ID NO: 1787
acugucucucccugagauu

SEQ ID NO: 139181 - RNA, 19 nt, Artificial Sequence
  Description of Artificial Sequence: Synthetic oligonucleotide
  Antisense strand to SEQ ID NO: 139180
aaucucagggagagacagu

SEQ ID NO: 139182 - RNA, 19 nt, Artificial Sequence
  Description of Artificial Sequence: Synthetic oligonucleotide
  Sense strand starting at position 1205 of SEQ ID NO: 1787
cugucucucccugagauuc

SEQ ID NO: 139183 - RNA, 19 nt, Artificial Sequence
  Description of Artificial Sequence: Synthetic oligonucleotide
  Antisense strand to SEQ ID NO: 139182
gaaucucagggagagacag

SEQ ID NO: 139184 - RNA, 19 nt, Artificial Sequence
  Description of Artificial Sequence: Synthetic oligonucleotide
  Sense strand starting at position 1213 of SEQ ID NO: 1787
cccugagauucugaauuuc

SEQ ID NO: 139185 - RNA, 19 nt, Artificial Sequence
  Description of Artificial Sequence: Synthetic oligonucleotide
  Antisense strand to SEQ ID NO: 139184
gaaauucagaaucucaggg

SEQ ID NO: 139186 - RNA, 19 nt, Artificial Sequence
  Description of Artificial Sequence: Synthetic oligonucleotide
  Sense strand starting at position 1322 of SEQ ID NO: 1787
gucuggagacgguggaaua

SEQ ID NO: 139187 - RNA, 19 nt, Artificial Sequence
  Description of Artificial Sequence: Synthetic oligonucleotide
  Antisense strand to SEQ ID NO: 139186
uauuccaccgucuccagac

SEQ ID NO: 139188 - RNA, 19 nt, Artificial Sequence
  Description of Artificial Sequence: Synthetic oligonucleotide
  Sense strand starting at position 1323 of SEQ ID NO: 1787
ucuggagacgguggaauau

SEQ ID NO: 139189 - RNA, 19 nt, Artificial Sequence
  Description of Artificial Sequence: Synthetic oligonucleotide
  Antisense strand to SEQ ID NO: 139188
auauuccaccgucuccaga

SEQ ID NO: 139190 - RNA, 19 nt, Artificial Sequence
  Description of Artificial Sequence: Synthetic oligonucleotide
  Sense strand starting at position 1459 of SEQ ID NO: 1787
uggaaaccaucuguuuaca

SEQ ID NO: 139191 - RNA, 19 nt, Artificial Sequence
  Description of Artificial Sequence: Synthetic oligonucleotide
  Antisense strand to SEQ ID NO: 139190
uguaaacagaugguuucca

SEQ ID NO: 139192 - RNA, 19 nt, Artificial Sequence
  Description of Artificial Sequence: Synthetic oligonucleotide
  Sense strand starting at position 1725 of SEQ ID NO: 1787
agaggucauccacaugcua

SEQ ID NO: 139193 - RNA, 19 nt, Artificial Sequence
  Description of Artificial Sequence: Synthetic oligonucleotide
  Antisense strand to SEQ ID NO: 139192
uagcauguggaugaccucu

SEQ ID NO: 139194 - RNA, 19 nt, Artificial Sequence
  Description of Artificial Sequence: Synthetic oligonucleotide
  Sense strand starting at position 2225 of SEQ ID NO: 1787
ucauacauguuucuggaaa

SEQ ID NO: 139195 - RNA, 19 nt, Artificial Sequence
  Description of Artificial Sequence: Synthetic oligonucleotide
  Antisense strand to SEQ ID NO: 139194
uuuccagaaacauguauga

SEQ ID NO: 139196 - RNA, 19 nt, Artificial Sequence
  Description of Artificial Sequence: Synthetic oligonucleotide
  Sense strand starting at position 2297 of SEQ ID NO: 1787
aggaauuuguccuaaagaa

SEQ ID NO: 139197 - RNA, 19 nt, Artificial Sequence
  Description of Artificial Sequence: Synthetic oligonucleotide
  Antisense strand to SEQ ID NO: 139196
uucuuuaggacaaauuccu

SEQ ID NO: 139198 - RNA, 19 nt, Artificial Sequence
  Description of Artificial Sequence: Synthetic oligonucleotide
  Sense strand starting at position 2319 of SEQ ID NO: 1787
auccgaaauguggguaaag

SEQ ID NO: 139199 - RNA, 19 nt, Artificial Sequence
  Description of Artificial Sequence: Synthetic oligonucleotide
  Antisense strand to SEQ ID NO: 139198
cuuuacccacauuucggau

SEQ ID NO: 139200 - RNA, 19 nt, Artificial Sequence
  Description of Artificial Sequence: Synthetic oligonucleotide
  Sense strand starting at position 2320 of SEQ ID NO: 1787
uccgaaauguggguaaaga

SEQ ID NO: 139201 - RNA, 19 nt, Artificial Sequence
  Description of Artificial Sequence: Synthetic oligonucleotide
  Antisense strand to SEQ ID NO: 139200
ucuuuacccacauuucgga

SEQ ID NO: 139202 - RNA, 19 nt, Artificial Sequence
  Description of Artificial Sequence: Synthetic oligonucleotide
  Sense strand starting at position 2321 of SEQ ID NO: 1787
ccgaaauguggguaaagac

SEQ ID NO: 139203 - RNA, 19 nt, Artificial Sequence
  Description of Artificial Sequence: Synthetic oligonucleotide
  Antisense strand to SEQ ID NO: 139202
gucuuuacccacauuucgg

SEQ ID NO: 139204 - RNA, 19 nt, Artificial Sequence
  Description of Artificial Sequence: Synthetic oligonucleotide
  Sense strand starting at position 2338 of SEQ ID NO: 1787
acucuuguccaagaauguu

SEQ ID NO: 139205 - RNA, 19 nt, Artificial Sequence
  Description of Artificial Sequence: Synthetic oligonucleotide
  Antisense strand to SEQ ID NO: 139204
aacauucuuggacaagagu

SEQ ID NO: 139206 - RNA, 19 nt, Artificial Sequence
  Description of Artificial Sequence: Synthetic oligonucleotide
  Sense strand starting at position 2384 of SEQ ID NO: 1787
acacuaaagcagugguuaa

SEQ ID NO: 139207 - RNA, 19 nt, Artificial Sequence
  Description of Artificial Sequence: Synthetic oligonucleotide
  Antisense strand to SEQ ID NO: 139206
uuaaccacugcuuuagugu

SEQ ID NO: 139208 - RNA, 19 nt, Artificial Sequence
  Description of Artificial Sequence: Synthetic oligonucleotide
  Sense strand starting at position 2388 of SEQ ID NO: 1787
uaaagcagugguuaaauca

SEQ ID NO: 139209 - RNA, 19 nt, Artificial Sequence
  Description of Artificial Sequence: Synthetic oligonucleotide
  Antisense strand to SEQ ID NO: 139208
ugauuuaaccacugcuuua

SEQ ID NO: 139210 - RNA, 19 nt, Artificial Sequence
  Description of Artificial Sequence: Synthetic oligonucleotide
  Sense strand starting at position 2416 of SEQ ID NO: 1787
augaauuauuaagcaguca

SEQ ID NO: 139211 - RNA, 19 nt, Artificial Sequence
  Description of Artificial Sequence: Synthetic oligonucleotide
  Antisense strand to SEQ ID NO: 139210
ugacugcuuaauaauucau

SEQ ID NO: 139212 - RNA, 19 nt, Artificial Sequence
  Description of Artificial Sequence: Synthetic oligonucleotide
  Sense strand starting at position 2428 of SEQ ID NO: 1787
gcagucauuaaauggaguu

SEQ ID NO: 139213 - RNA, 19 nt, Artificial Sequence
  Description of Artificial Sequence: Synthetic oligonucleotide
  Antisense strand to SEQ ID NO: 139212
aacuccauuuaaugacugc

SEQ ID NO: 139214 - RNA, 19 nt, Artificial Sequence
  Description of Artificial Sequence: Synthetic oligonucleotide
  Sense strand starting at position 2539 of SEQ ID NO: 1787
gaugguacauucucagcaa

SEQ ID NO: 139215 - RNA, 19 nt, Artificial Sequence
  Description of Artificial Sequence: Synthetic oligonucleotide
  Antisense strand to SEQ ID NO: 139214
uugcugagaauguaccauc

SEQ ID NO: 139216 - RNA, 19 nt, Artificial Sequence
  Description of Artificial Sequence: Synthetic oligonucleotide
  Sense strand starting at position 2595 of SEQ ID NO: 1787
ucacucauagaucguaauu

SEQ ID NO: 139217 - RNA, 19 nt, Artificial Sequence
  Description of Artificial Sequence: Synthetic oligonucleotide
  Antisense strand to SEQ ID NO: 139216
aauuacgaucuaugaguga

SEQ ID NO: 139218 - RNA, 19 nt, Artificial Sequence
  Description of Artificial Sequence: Synthetic oligonucleotide
  Sense strand starting at position 2600 of SEQ ID NO: 1787
cauagaucguaauugaaca

SEQ ID NO: 139219 - RNA, 19 nt, Artificial Sequence
  Description of Artificial Sequence: Synthetic oligonucleotide
  Antisense strand to SEQ ID NO: 139218
uguucaauuacgaucuaug

SEQ ID NO: 139220 - RNA, 19 nt, Artificial Sequence
  Description of Artificial Sequence: Synthetic oligonucleotide
  Sense strand starting at position 3307 of SEQ ID NO: 1787
gggagauguuagaggauaa

SEQ ID NO: 139221 - RNA, 19 nt, Artificial Sequence
  Description of Artificial Sequence: Synthetic oligonucleotide
  Antisense strand to SEQ ID NO: 139220
uuauccucuaacaucuccc

SEQ ID NO: 139222 - RNA, 19 nt, Artificial Sequence
  Description of Artificial Sequence: Synthetic oligonucleotide
  Sense strand starting at position 3541 of SEQ ID NO: 1787
augguaaguguguacaauu

SEQ ID NO: 139223 - RNA, 19 nt, Artificial Sequence
  Description of Artificial Sequence: Synthetic oligonucleotide
  Antisense strand to SEQ ID NO: 139222
aauuguacacacuuaccau

SEQ ID NO: 139224 - RNA, 19 nt, Artificial Sequence
  Description of Artificial Sequence: Synthetic oligonucleotide
  Sense strand starting at position 3583 of SEQ ID NO: 1787
aaguuauucugguugguag

SEQ ID NO: 139225 - RNA, 19 nt, Artificial Sequence
  Description of Artificial Sequence: Synthetic oligonucleotide
  Antisense strand to SEQ ID NO: 139224
cuaccaaccagaauaacuu

SEQ ID NO: 139226 - RNA, 19 nt, Artificial Sequence
  Description of Artificial Sequence: Synthetic oligonucleotide
  Sense strand starting at position 3586 of SEQ ID NO: 1787
uuauucugguugguaggaa

SEQ ID NO: 139227 - RNA, 19 nt, Artificial Sequence
  Description of Artificial Sequence: Synthetic oligonucleotide
  Antisense strand to SEQ ID NO: 139226
uuccuaccaaccagaauaa

SEQ ID NO: 139228 - RNA, 19 nt, Artificial Sequence
  Description of Artificial Sequence: Synthetic oligonucleotide
  Sense strand starting at position 3740 of SEQ ID NO: 1787
uguguuuaacaagguaaag

SEQ ID NO: 139229 - RNA, 19 nt, Artificial Sequence
  Description of Artificial Sequence: Synthetic oligonucleotide
  Antisense strand to SEQ ID NO: 139228
cuuuaccuuguuaaacaca

SEQ ID NO: 139230 - RNA, 19 nt, Artificial Sequence
  Description of Artificial Sequence: Synthetic oligonucleotide
  Sense strand starting at position 3874 of SEQ ID NO: 1787
cugaguaaaccuugacuug

SEQ ID NO: 139231 - RNA, 19 nt, Artificial Sequence
  Description of Artificial Sequence: Synthetic oligonucleotide
  Antisense strand to SEQ ID NO: 139230
caagucaagguuuacucag

SEQ ID NO: 139232 - RNA, 19 nt, Artificial Sequence
  Description of Artificial Sequence: Synthetic oligonucleotide
  Sense strand starting at position 3886 of SEQ ID NO: 1787
ugacuugacucugcucaga

SEQ ID NO: 139233 - RNA, 19 nt, Artificial Sequence
  Description of Artificial Sequence: Synthetic oligonucleotide
  Antisense strand to SEQ ID NO: 139232
ucugagcagagucaaguca

SEQ ID NO: 139234 - RNA, 19 nt, Artificial Sequence
  Description of Artificial Sequence: Synthetic oligonucleotide
  Sense strand starting at position 3888 of SEQ ID NO: 1787
acuugacucugcucagaug

SEQ ID NO: 139235 - RNA, 19 nt, Artificial Sequence
  Description of Artificial Sequence: Synthetic oligonucleotide
  Antisense strand to SEQ ID NO: 139234
caucugagcagagucaagu

SEQ ID NO: 139236 - RNA, 19 nt, Artificial Sequence
  Description of Artificial Sequence: Synthetic oligonucleotide
  Sense strand starting at position 3889 of SEQ ID NO: 1787
cuugacucugcucagauga

SEQ ID NO: 139237 - RNA, 19 nt, Artificial Sequence
  Description of Artificial Sequence: Synthetic oligonucleotide
  Antisense strand to SEQ ID NO: 139236
ucaucugagcagagucaag

SEQ ID NO: 139238 - RNA, 19 nt, Artificial Sequence
  Description of Artificial Sequence: Synthetic oligonucleotide
  Sense strand starting at position 3646 of SEQ ID NO: 1792
gcauuaugggaguagcauu

SEQ ID NO: 139239 - RNA, 19 nt, Artificial Sequence
  Description of Artificial Sequence: Synthetic oligonucleotide
  Antisense strand to SEQ ID NO: 139238
aaugcuacucccauaaugc

SEQ ID NO: 139240 - RNA, 19 nt, Artificial Sequence
  Description of Artificial Sequence: Synthetic oligonucleotide
  Sense strand starting at position 3591 of SEQ ID NO: 1792
ugaauaagaaguggcuauu

SEQ ID NO: 139241 - RNA, 19 nt, Artificial Sequence
  Description of Artificial Sequence: Synthetic oligonucleotide
  Antisense strand to SEQ ID NO: 139240
aauagccacuucuuauuca

SEQ ID NO: 139242 - RNA, 19 nt, Artificial Sequence
  Description of Artificial Sequence: Synthetic oligonucleotide
  Sense strand starting at position 3590 of SEQ ID NO: 1792
uugaauaagaaguggcuau

SEQ ID NO: 139243 - RNA, 19 nt, Artificial Sequence
  Description of Artificial Sequence: Synthetic oligonucleotide
  Antisense strand to SEQ ID NO: 139242
auagccacuucuuauucaa

SEQ ID NO: 139244 - RNA, 19 nt, Artificial Sequence
  Description of Artificial Sequence: Synthetic oligonucleotide
  Sense strand starting at position 3512 of SEQ ID NO: 1792
gucauacuaugagucaaau

SEQ ID NO: 139245 - RNA, 19 nt, Artificial Sequence
  Description of Artificial Sequence: Synthetic oligonucleotide
  Antisense strand to SEQ ID NO: 139244
auuugacucauaguaugac

SEQ ID NO: 139246 - RNA, 19 nt, Artificial Sequence
  Description of Artificial Sequence: Synthetic oligonucleotide
  Sense strand starting at position 3509 of SEQ ID NO: 1792
ugggucauacuaugaguca

SEQ ID NO: 139247 - RNA, 19 nt, Artificial Sequence
  Description of Artificial Sequence: Synthetic oligonucleotide
  Antisense strand to SEQ ID NO: 139246
ugacucauaguaugaccca

SEQ ID NO: 139248 - RNA, 19 nt, Artificial Sequence
  Description of Artificial Sequence: Synthetic oligonucleotide
  Sense strand starting at position 3502 of SEQ ID NO: 1792
gcauaccugggucauacua

SEQ ID NO: 139249 - RNA, 19 nt, Artificial Sequence
  Description of Artificial Sequence: Synthetic oligonucleotide
  Antisense strand to SEQ ID NO: 139248
uaguaugacccagguaugc

SEQ ID NO: 139250 - RNA, 19 nt, Artificial Sequence
  Description of Artificial Sequence: Synthetic oligonucleotide
  Sense strand starting at position 3499 of SEQ ID NO: 1792
aaagcauaccugggucaua

SEQ ID NO: 139251 - RNA, 19 nt, Artificial Sequence
  Description of Artificial Sequence: Synthetic oligonucleotide
  Antisense strand to SEQ ID NO: 139250
uaugacccagguaugcuuu

SEQ ID NO: 139252 - RNA, 19 nt, Artificial Sequence
  Description of Artificial Sequence: Synthetic oligonucleotide
  Sense strand starting at position 3427 of SEQ ID NO: 1792
cugaaagaguauuccauac

SEQ ID NO: 139253 - RNA, 19 nt, Artificial Sequence
  Description of Artificial Sequence: Synthetic oligonucleotide
  Antisense strand to SEQ ID NO: 139252
guauggaauacucuuucag

SEQ ID NO: 139254 - RNA, 19 nt, Artificial Sequence
  Description of Artificial Sequence: Synthetic oligonucleotide
  Sense strand starting at position 3314 of SEQ ID NO: 1792
gaaccuaucgaauagguuu

SEQ ID NO: 139255 - RNA, 19 nt, Artificial Sequence
  Description of Artificial Sequence: Synthetic oligonucleotide
  Antisense strand to SEQ ID NO: 139254
aaaccuauucgauagguuc

SEQ ID NO: 139256 - RNA, 19 nt, Artificial Sequence
  Description of Artificial Sequence: Synthetic oligonucleotide
  Sense strand starting at position 3300 of SEQ ID NO: 1792
agguuuauuugauagaacc

SEQ ID NO: 139257 - RNA, 19 nt, Artificial Sequence
  Description of Artificial Sequence: Synthetic oligonucleotide
  Antisense strand to SEQ ID NO: 139256
gguucuaucaaauaaaccu

SEQ ID NO: 139258 - RNA, 19 nt, Artificial Sequence
  Description of Artificial Sequence: Synthetic oligonucleotide
  Sense strand starting at position 3254 of SEQ ID NO: 1792
agguuuauuugauagaaga

SEQ ID NO: 139259 - RNA, 19 nt, Artificial Sequence
  Description of Artificial Sequence: Synthetic oligonucleotide
  Antisense strand to SEQ ID NO: 139258
ucuucuaucaaauaaaccu

SEQ ID NO: 139260 - RNA, 19 nt, Artificial Sequence
  Description of Artificial Sequence: Synthetic oligonucleotide
  Sense strand starting at position 3146 of SEQ ID NO: 1792
uuuccucauggucauguaa

SEQ ID NO: 139261 - RNA, 19 nt, Artificial Sequence
  Description of Artificial Sequence: Synthetic oligonucleotide
  Antisense strand to SEQ ID NO: 139260
uuacaugaccaugaggaaa

SEQ ID NO: 139262 - RNA, 19 nt, Artificial Sequence
  Description of Artificial Sequence: Synthetic oligonucleotide
  Sense strand starting at position 3123 of SEQ ID NO: 1792
cauuuaacuucgcuagguu

SEQ ID NO: 139263 - RNA, 19 nt, Artificial Sequence
  Description of Artificial Sequence: Synthetic oligonucleotide
  Antisense strand to SEQ ID NO: 139262
aaccuagcgaaguuaaaug

SEQ ID NO: 139264 - RNA, 19 nt, Artificial Sequence
  Description of Artificial Sequence: Synthetic oligonucleotide
  Sense strand starting at position 3122 of SEQ ID NO: 1792
ucauuuaacuucgcuaggu

SEQ ID NO: 139265 - RNA, 19 nt, Artificial Sequence
  Description of Artificial Sequence: Synthetic oligonucleotide
  Antisense strand to SEQ ID NO: 139264
accuagcgaaguuaaauga

SEQ ID NO: 139266 - RNA, 19 nt, Artificial Sequence
  Description of Artificial Sequence: Synthetic oligonucleotide
  Sense strand starting at position 2941 of SEQ ID NO: 1792
ggcagugguguggagaauu

SEQ ID NO: 139267 - RNA, 19 nt, Artificial Sequence
  Description of Artificial Sequence: Synthetic oligonucleotide
  Antisense strand to SEQ ID NO: 139266
aauucuccacaccacugcc

SEQ ID NO: 139268 - RNA, 19 nt, Artificial Sequence
  Description of Artificial Sequence: Synthetic oligonucleotide
  Sense strand starting at position 2662 of SEQ ID NO: 1792
guguacuauauuugugguu

SEQ ID NO: 139269 - RNA, 19 nt, Artificial Sequence
  Description of Artificial Sequence: Synthetic oligonucleotide
  Antisense strand to SEQ ID NO: 139268
aaccacaaauauaguacac

SEQ ID NO: 139270 - RNA, 19 nt, Artificial Sequence
  Description of Artificial Sequence: Synthetic oligonucleotide
  Sense strand starting at position 2653 of SEQ ID NO: 1792
ccuuauuaaguguacuaua

SEQ ID NO: 139271 - RNA, 19 nt, Artificial Sequence
  Description of Artificial Sequence: Synthetic oligonucleotide
  Antisense strand to SEQ ID NO: 139270
uauaguacacuuaauaagg

SEQ ID NO: 139272 - RNA, 19 nt, Artificial Sequence
  Description of Artificial Sequence: Synthetic oligonucleotide
  Sense strand starting at position 2540 of SEQ ID NO: 1792
gggacacucuaaguuugau

SEQ ID NO: 139273 - RNA, 19 nt, Artificial Sequence
  Description of Artificial Sequence: Synthetic oligonucleotide
  Antisense strand to SEQ ID NO: 139272
aucaaacuuagaguguccc

SEQ ID NO: 139274 - RNA, 19 nt, Artificial Sequence
  Description of Artificial Sequence: Synthetic oligonucleotide
  Sense strand starting at position 2379 of SEQ ID NO: 1792
cuacacagguucuuagaua

SEQ ID NO: 139275 - RNA, 19 nt, Artificial Sequence
  Description of Artificial Sequence: Synthetic oligonucleotide
  Antisense strand to SEQ ID NO: 139274
uaucuaagaaccuguguag

SEQ ID NO: 139276 - RNA, 19 nt, Artificial Sequence
  Description of Artificial Sequence: Synthetic oligonucleotide
  Sense strand starting at position 2225 of SEQ ID NO: 1792
agaggugcuguacauuaaa

SEQ ID NO: 139277 - RNA, 19 nt, Artificial Sequence
  Description of Artificial Sequence: Synthetic oligonucleotide
  Antisense strand to SEQ ID NO: 139276
uuuaauguacagcaccucu

SEQ ID NO: 139278 - RNA, 19 nt, Artificial Sequence
  Description of Artificial Sequence: Synthetic oligonucleotide
  Sense strand starting at position 2009 of SEQ ID NO: 1792
acaccuguuguggaaggua

SEQ ID NO: 139279 - RNA, 19 nt, Artificial Sequence
  Description of Artificial Sequence: Synthetic oligonucleotide
  Antisense strand to SEQ ID NO: 139278
uaccuuccacaacaggugu

SEQ ID NO: 139280 - RNA, 19 nt, Artificial Sequence
  Description of Artificial Sequence: Synthetic oligonucleotide
  Sense strand starting at position 1674 of SEQ ID NO: 1792
cugcuuugucuguuaagca

SEQ ID NO: 139281 - RNA, 19 nt, Artificial Sequence
  Description of Artificial Sequence: Synthetic oligonucleotide
  Antisense strand to SEQ ID NO: 139280
ugcuuaacagacaaagcag

SEQ ID NO: 139282 - RNA, 19 nt, Artificial Sequence
  Description of Artificial Sequence: Synthetic oligonucleotide
  Sense strand starting at position 1625 of SEQ ID NO: 1792
ccuuguuggagucaguaaa

SEQ ID NO: 139283 - RNA, 19 nt, Artificial Sequence
  Description of Artificial Sequence: Synthetic oligonucleotide
  Antisense strand to SEQ ID NO: 139282
uuuacugacuccaacaagg

SEQ ID NO: 139284 - RNA, 19 nt, Artificial Sequence
  Description of Artificial Sequence: Synthetic oligonucleotide
  Sense strand starting at position 1519 of SEQ ID NO: 1792
accugauugcuaggaaaca

SEQ ID NO: 139285 - RNA, 19 nt, Artificial Sequence
  Description of Artificial Sequence: Synthetic oligonucleotide
  Antisense strand to SEQ ID NO: 139284
uguuuccuagcaaucaggu

SEQ ID NO: 139286 - RNA, 19 nt, Artificial Sequence
  Description of Artificial Sequence: Synthetic oligonucleotide
  Sense strand starting at position 1474 of SEQ ID NO: 1792
agcauucuagcuuauaaga

SEQ ID NO: 139287 - RNA, 19 nt, Artificial Sequence
  Description of Artificial Sequence: Synthetic oligonucleotide
  Antisense strand to SEQ ID NO: 139286
ucuuauaagcuagaaugcu

SEQ ID NO: 139288 - RNA, 19 nt, Artificial Sequence
  Description of Artificial Sequence: Synthetic oligonucleotide
  Sense strand starting at position 1302 of SEQ ID NO: 1792
ggauuauguuaccuaaauu

SEQ ID NO: 139289 - RNA, 19 nt, Artificial Sequence
  Description of Artificial Sequence: Synthetic oligonucleotide
  Antisense strand to SEQ ID NO: 139288
aauuuagguaacauaaucc

SEQ ID NO: 139290 - RNA, 19 nt, Artificial Sequence
  Description of Artificial Sequence: Synthetic oligonucleotide
  Sense strand starting at position 1301 of SEQ ID NO: 1792
aggauuauguuaccuaaau

SEQ ID NO: 139291 - RNA, 19 nt, Artificial Sequence
  Description of Artificial Sequence: Synthetic oligonucleotide
  Antisense strand to SEQ ID NO: 139290
auuuagguaacauaauccu

SEQ ID NO: 139292 - RNA, 19 nt, Artificial Sequence
  Description of Artificial Sequence: Synthetic oligonucleotide
  Sense strand starting at position 1290 of SEQ ID NO: 1792
uuaccaauagcaggauuau

SEQ ID NO: 139293 - RNA, 19 nt, Artificial Sequence
  Description of Artificial Sequence: Synthetic oligonucleotide
  Antisense strand to SEQ ID NO: 139292
auaauccugcuauugguaa

SEQ ID NO: 139294 - RNA, 19 nt, Artificial Sequence
  Description of Artificial Sequence: Synthetic oligonucleotide
  Sense strand starting at position 1182 of SEQ ID NO: 1792
gagaaauauucuuuguuag

SEQ ID NO: 139295 - RNA, 19 nt, Artificial Sequence
  Description of Artificial Sequence: Synthetic oligonucleotide
  Antisense strand to SEQ ID NO: 139294
cuaacaaagaauauuucuc

SEQ ID NO: 139296 - RNA, 19 nt, Artificial Sequence
  Description of Artificial Sequence: Synthetic oligonucleotide
  Sense strand starting at position 1088 of SEQ ID NO: 1792
agauaaggcuucucugaag

SEQ ID NO: 139297 - RNA, 19 nt, Artificial Sequence
  Description of Artificial Sequence: Synthetic oligonucleotide
  Antisense strand to SEQ ID NO: 139296
cuucagagaagccuuaucu

SEQ ID NO: 139298 - RNA, 19 nt, Artificial Sequence
  Description of Artificial Sequence: Synthetic oligonucleotide
  Sense strand starting at position 1010 of SEQ ID NO: 1792
aaaguugcuugaucaggaa

SEQ ID NO: 139299 - RNA, 19 nt, Artificial Sequence
  Description of Artificial Sequence: Synthetic oligonucleotide
  Antisense strand to SEQ ID NO: 139298
uuccugaucaagcaacuuu

SEQ ID NO: 139300 - RNA, 19 nt, Artificial Sequence
  Description of Artificial Sequence: Synthetic oligonucleotide
  Sense strand starting at position 983 of SEQ ID NO: 1792
uugaaaguugcccauaauc

SEQ ID NO: 139301 - RNA, 19 nt, Artificial Sequence
  Description of Artificial Sequence: Synthetic oligonucleotide
  Antisense strand to SEQ ID NO: 139300
gauuaugggcaacuuucaa

SEQ ID NO: 139302 - RNA, 19 nt, Artificial Sequence
  Description of Artificial Sequence: Synthetic oligonucleotide
  Sense strand starting at position 884 of SEQ ID NO: 1792
guagauagccauuaacugu

SEQ ID NO: 139303 - RNA, 19 nt, Artificial Sequence
  Description of Artificial Sequence: Synthetic oligonucleotide
  Antisense strand to SEQ ID NO: 139302
acaguuaauggcuaucuac

SEQ ID NO: 139304 - RNA, 19 nt, Artificial Sequence
  Description of Artificial Sequence: Synthetic oligonucleotide
  Sense strand starting at position 880 of SEQ ID NO: 1792
aucaguagauagccauuaa

SEQ ID NO: 139305 - RNA, 19 nt, Artificial Sequence
  Description of Artificial Sequence: Synthetic oligonucleotide
  Antisense strand to SEQ ID NO: 139304
uuaauggcuaucuacugau

SEQ ID NO: 139306 - RNA, 19 nt, Artificial Sequence
  Description of Artificial Sequence: Synthetic oligonucleotide
  Sense strand starting at position 598 of SEQ ID NO: 1792
aagugaucuccugaagucu

SEQ ID NO: 139307 - RNA, 19 nt, Artificial Sequence
  Description of Artificial Sequence: Synthetic oligonucleotide
  Antisense strand to SEQ ID NO: 139306
agacuucaggagaucacuu

SEQ ID NO: 139308 - RNA, 19 nt, Artificial Sequence
  Description of Artificial Sequence: Synthetic oligonucleotide
  Sense strand starting at position 473 of SEQ ID NO: 1792
ugaagauuguucuuggaga

SEQ ID NO: 139309 - RNA, 19 nt, Artificial Sequence
  Description of Artificial Sequence: Synthetic oligonucleotide
  Antisense strand to SEQ ID NO: 139308
ucuccaagaacaaucuuca

SEQ ID NO: 139310 - RNA, 19 nt, Artificial Sequence
  Description of Artificial Sequence: Synthetic oligonucleotide
  Sense strand starting at position 471 of SEQ ID NO: 1792
caugaagauuguucuugga

SEQ ID NO: 139311 - RNA, 19 nt, Artificial Sequence
  Description of Artificial Sequence: Synthetic oligonucleotide
  Antisense strand to SEQ ID NO: 139310
uccaagaacaaucuucaug

SEQ ID NO: 139312 - RNA, 19 nt, Artificial Sequence
  Description of Artificial Sequence: Synthetic oligonucleotide
  Sense strand starting at position 285 of SEQ ID NO: 1792
cugcauuuauaacagagaa

SEQ ID NO: 139313 - RNA, 19 nt, Artificial Sequence
  Description of Artificial Sequence: Synthetic oligonucleotide
  Antisense strand to SEQ ID NO: 139312
uucucuguuauaaaugcag

SEQ ID NO: 139314 - RNA, 19 nt, Artificial Sequence
  Description of Artificial Sequence: Synthetic oligonucleotide
  Sense strand starting at position 250 of SEQ ID NO: 1792
uuaucuaugcaggaaguau

SEQ ID NO: 139315 - RNA, 19 nt, Artificial Sequence
  Description of Artificial Sequence: Synthetic oligonucleotide
  Antisense strand to SEQ ID NO: 139314
auacuuccugcauagauaa

SEQ ID NO: 139316 - RNA, 19 nt, Artificial Sequence
  Description of Artificial Sequence: Synthetic oligonucleotide
  Sense strand starting at position 246 of SEQ ID NO: 1792
uuucuuaucuaugcaggaa

SEQ ID NO: 139317 - RNA, 19 nt, Artificial Sequence
  Description of Artificial Sequence: Synthetic oligonucleotide
  Antisense strand to SEQ ID NO: 139316
uuccugcauagauaagaaa

SEQ ID NO: 139318 - RNA, 19 nt, Artificial Sequence
  Description of Artificial Sequence: Synthetic oligonucleotide
  Sense strand starting at position 3931 of SEQ ID NO: 1793
ugugcucuaagugagguaa

SEQ ID NO: 139319 - RNA, 19 nt, Artificial Sequence
  Description of Artificial Sequence: Synthetic oligonucleotide
  Antisense strand to SEQ ID NO: 139318
uuaccucacuuagagcaca

SEQ ID NO: 139320 - RNA, 19 nt, Artificial Sequence
  Description of Artificial Sequence: Synthetic oligonucleotide
  Sense strand starting at position 3903 of SEQ ID NO: 1793
cucuuagcaguguacauua

SEQ ID NO: 139321 - RNA, 19 nt, Artificial Sequence
  Description of Artificial Sequence: Synthetic oligonucleotide
  Antisense strand to SEQ ID NO: 139320
uaauguacacugcuaagag

SEQ ID NO: 139322 - RNA, 19 nt, Artificial Sequence
  Description of Artificial Sequence: Synthetic oligonucleotide
  Sense strand starting at position 3447 of SEQ ID NO: 1793
agguaacucuaugcaaaca

SEQ ID NO: 139323 - RNA, 19 nt, Artificial Sequence
  Description of Artificial Sequence: Synthetic oligonucleotide
  Antisense strand to SEQ ID NO: 139322
uguuugcauagaguuaccu

SEQ ID NO: 139324 - RNA, 19 nt, Artificial Sequence
  Description of Artificial Sequence: Synthetic oligonucleotide
  Sense strand starting at position 3437 of SEQ ID NO: 1793
agauguuccuagguaacuc

SEQ ID NO: 139325 - RNA, 19 nt, Artificial Sequence
  Description of Artificial Sequence: Synthetic oligonucleotide
  Antisense strand to SEQ ID NO: 139324
gaguuaccuaggaacaucu

SEQ ID NO: 139326 - RNA, 19 nt, Artificial Sequence
  Description of Artificial Sequence: Synthetic oligonucleotide
  Sense strand starting at position 3321 of SEQ ID NO: 1793
uaugguuuagagggcagaa

SEQ ID NO: 139327 - RNA, 19 nt, Artificial Sequence
  Description of Artificial Sequence: Synthetic oligonucleotide
  Antisense strand to SEQ ID NO: 139326
uucugcccucuaaaccaua

SEQ ID NO: 139328 - RNA, 19 nt, Artificial Sequence
  Description of Artificial Sequence: Synthetic oligonucleotide
  Sense strand starting at position 3005 of SEQ ID NO: 1793
agaaauauggcuuaggcca

SEQ ID NO: 139329 - RNA, 19 nt, Artificial Sequence
  Description of Artificial Sequence: Synthetic oligonucleotide
  Antisense strand to SEQ ID NO: 139328
uggccuaagccauauuucu

SEQ ID NO: 139330 - RNA, 19 nt, Artificial Sequence
  Description of Artificial Sequence: Synthetic oligonucleotide
  Sense strand starting at position 2922 of SEQ ID NO: 1793
cucauauucuacuuguuga

SEQ ID NO: 139331 - RNA, 19 nt, Artificial Sequence
  Description of Artificial Sequence: Synthetic oligonucleotide
  Antisense strand to SEQ ID NO: 139330
ucaacaaguagaauaugag

SEQ ID NO: 139332 - RNA, 19 nt, Artificial Sequence
  Description of Artificial Sequence: Synthetic oligonucleotide
  Sense strand starting at position 2514 of SEQ ID NO: 1793
gcauuaugggaguagcauu

SEQ ID NO: 139333 - RNA, 19 nt, Artificial Sequence
  Description of Artificial Sequence: Synthetic oligonucleotide
  Antisense strand to SEQ ID NO: 139332
aaugcuacucccauaaugc

SEQ ID NO: 139334 - RNA, 19 nt, Artificial Sequence
  Description of Artificial Sequence: Synthetic oligonucleotide
  Sense strand starting at position 2459 of SEQ ID NO: 1793
ugaauaagaaguggcuauu

SEQ ID NO: 139335 - RNA, 19 nt, Artificial Sequence
  Description of Artificial Sequence: Synthetic oligonucleotide
  Antisense strand to SEQ ID NO: 139334
aauagccacuucuuauuca

SEQ ID NO: 139336 - RNA, 19 nt, Artificial Sequence
  Description of Artificial Sequence: Synthetic oligonucleotide
  Sense strand starting at position 2458 of SEQ ID NO: 1793
uugaauaagaaguggcuau

SEQ ID NO: 139337 - RNA, 19 nt, Artificial Sequence
  Description of Artificial Sequence: Synthetic oligonucleotide
  Antisense strand to SEQ ID NO: 139336
auagccacuucuuauucaa

SEQ ID NO: 139338 - RNA, 19 nt, Artificial Sequence
  Description of Artificial Sequence: Synthetic oligonucleotide
  Sense strand starting at position 2380 of SEQ ID NO: 1793
gucauacuaugagucaaau

SEQ ID NO: 139339 - RNA, 19 nt, Artificial Sequence
  Description of Artificial Sequence: Synthetic oligonucleotide
  Antisense strand to SEQ ID NO: 139338
auuugacucauaguaugac

SEQ ID NO: 139340 - RNA, 19 nt, Artificial Sequence
  Description of Artificial Sequence: Synthetic oligonucleotide
  Sense strand starting at position 2377 of SEQ ID NO: 1793
ugggucauacuaugaguca

SEQ ID NO: 139341 - RNA, 19 nt, Artificial Sequence
  Description of Artificial Sequence: Synthetic oligonucleotide
  Antisense strand to SEQ ID NO: 139340
ugacucauaguaugaccca

SEQ ID NO: 139342 - RNA, 19 nt, Artificial Sequence
  Description of Artificial Sequence: Synthetic oligonucleotide
  Sense strand starting at position 2370 of SEQ ID NO: 1793
gcauaccugggucauacua

SEQ ID NO: 139343 - RNA, 19 nt, Artificial Sequence
  Description of Artificial Sequence: Synthetic oligonucleotide
  Antisense strand to SEQ ID NO: 139342
uaguaugacccagguaugc

SEQ ID NO: 139344 - RNA, 19 nt, Artificial Sequence
  Description of Artificial Sequence: Synthetic oligonucleotide
  Sense strand starting at position 2367 of SEQ ID NO: 1793
aaagcauaccugggucaua

SEQ ID NO: 139345 - RNA, 19 nt, Artificial Sequence
  Description of Artificial Sequence: Synthetic oligonucleotide
  Antisense strand to SEQ ID NO: 139344
uaugacccagguaugcuuu

SEQ ID NO: 139346 - RNA, 19 nt, Artificial Sequence
  Description of Artificial Sequence: Synthetic oligonucleotide
  Sense strand starting at position 2295 of SEQ ID NO: 1793
cugaaagaguauuccauac

SEQ ID NO: 139347 - RNA, 19 nt, Artificial Sequence
  Description of Artificial Sequence: Synthetic oligonucleotide
  Antisense strand to SEQ ID NO: 139346
guauggaauacucuuucag

SEQ ID NO: 139348 - RNA, 19 nt, Artificial Sequence
  Description of Artificial Sequence: Synthetic oligonucleotide
  Sense strand starting at position 2182 of SEQ ID NO: 1793
gaaccuaucgaauagguuu

SEQ ID NO: 139349 - RNA, 19 nt, Artificial Sequence
  Description of Artificial Sequence: Synthetic oligonucleotide
  Antisense strand to SEQ ID NO: 139348
aaaccuauucgauagguuc

SEQ ID NO: 139350 - RNA, 19 nt, Artificial Sequence
  Description of Artificial Sequence: Synthetic oligonucleotide
  Sense strand starting at position 2168 of SEQ ID NO: 1793
agguuuauuugauagaacc

SEQ ID NO: 139351 - RNA, 19 nt, Artificial Sequence
  Description of Artificial Sequence: Synthetic oligonucleotide
  Antisense strand to SEQ ID NO: 139350
gguucuaucaaauaaaccu

SEQ ID NO: 139352 - RNA, 19 nt, Artificial Sequence
  Description of Artificial Sequence: Synthetic oligonucleotide
  Sense strand starting at position 2122 of SEQ ID NO: 1793
agguuuauuugauagaaga

SEQ ID NO: 139353 - RNA, 19 nt, Artificial Sequence
  Description of Artificial Sequence: Synthetic oligonucleotide
  Antisense strand to SEQ ID NO: 139352
ucuucuaucaaauaaaccu

SEQ ID NO: 139354 - RNA, 19 nt, Artificial Sequence
  Description of Artificial Sequence: Synthetic oligonucleotide
  Sense strand starting at position 2057 of SEQ ID NO: 1793
ugguuuccacauggguaua

SEQ ID NO: 139355 - RNA, 19 nt, Artificial Sequence
  Description of Artificial Sequence: Synthetic oligonucleotide
  Antisense strand to SEQ ID NO: 139354
uauacccauguggaaacca

SEQ ID NO: 139356 - RNA, 19 nt, Artificial Sequence
  Description of Artificial Sequence: Synthetic oligonucleotide
  Sense strand starting at position 2014 of SEQ ID NO: 1793
uuuccucauggucauguaa

SEQ ID NO: 139357 - RNA, 19 nt, Artificial Sequence
  Description of Artificial Sequence: Synthetic oligonucleotide
  Antisense strand to SEQ ID NO: 139356
uuacaugaccaugaggaaa

SEQ ID NO: 139358 - RNA, 19 nt, Artificial Sequence
  Description of Artificial Sequence: Synthetic oligonucleotide
  Sense strand starting at position 1991 of SEQ ID NO: 1793
cauuuaacuucgcuagguu

SEQ ID NO: 139359 - RNA, 19 nt, Artificial Sequence
  Description of Artificial Sequence: Synthetic oligonucleotide
  Antisense strand to SEQ ID NO: 139358
aaccuagcgaaguuaaaug

SEQ ID NO: 139360 - RNA, 19 nt, Artificial Sequence
  Description of Artificial Sequence: Synthetic oligonucleotide
  Sense strand starting at position 1990 of SEQ ID NO: 1793
ucauuuaacuucgcuaggu

SEQ ID NO: 139361 - RNA, 19 nt, Artificial Sequence
  Description of Artificial Sequence: Synthetic oligonucleotide
  Antisense strand to SEQ ID NO: 139360
accuagcgaaguuaaauga

SEQ ID NO: 139362 - RNA, 19 nt, Artificial Sequence
  Description of Artificial Sequence: Synthetic oligonucleotide
  Sense strand starting at position 1841 of SEQ ID NO: 1793
ggcugugguguggacaaua

SEQ ID NO: 139363 - RNA, 19 nt, Artificial Sequence
  Description of Artificial Sequence: Synthetic oligonucleotide
  Antisense strand to SEQ ID NO: 139362
uauuguccacaccacagcc

SEQ ID NO: 139364 - RNA, 19 nt, Artificial Sequence
  Description of Artificial Sequence: Synthetic oligonucleotide
  Sense strand starting at position 1809 of SEQ ID NO: 1793
ggcagugguguggagaauu

SEQ ID NO: 139365 - RNA, 19 nt, Artificial Sequence
  Description of Artificial Sequence: Synthetic oligonucleotide
  Antisense strand to SEQ ID NO: 139364
aauucuccacaccacugcc

SEQ ID NO: 139366 - RNA, 19 nt, Artificial Sequence
  Description of Artificial Sequence: Synthetic oligonucleotide
  Sense strand starting at position 1530 of SEQ ID NO: 1793
guguacuauauuugugguu

SEQ ID NO: 139367 - RNA, 19 nt, Artificial Sequence
  Description of Artificial Sequence: Synthetic oligonucleotide
  Antisense strand to SEQ ID NO: 139366
aaccacaaauauaguacac

SEQ ID NO: 139368 - RNA, 19 nt, Artificial Sequence
  Description of Artificial Sequence: Synthetic oligonucleotide
  Sense strand starting at position 1521 of SEQ ID NO: 1793
ccuuauuaaguguacuaua

SEQ ID NO: 139369 - RNA, 19 nt, Artificial Sequence
  Description of Artificial Sequence: Synthetic oligonucleotide
  Antisense strand to SEQ ID NO: 139368
uauaguacacuuaauaagg

SEQ ID NO: 139370 - RNA, 19 nt, Artificial Sequence
  Description of Artificial Sequence: Synthetic oligonucleotide
  Sense strand starting at position 1408 of SEQ ID NO: 1793
gggacacucuaaguuugau

SEQ ID NO: 139371 - RNA, 19 nt, Artificial Sequence
  Description of Artificial Sequence: Synthetic oligonucleotide
  Antisense strand to SEQ ID NO: 139370
aucaaacuuagaguguccc

SEQ ID NO: 139372 - RNA, 19 nt, Artificial Sequence
  Description of Artificial Sequence: Synthetic oligonucleotide
  Sense strand starting at position 1247 of SEQ ID NO: 1793
cuacacagguucuuagaua

SEQ ID NO: 139373 - RNA, 19 nt, Artificial Sequence
  Description of Artificial Sequence: Synthetic oligonucleotide
  Antisense strand to SEQ ID NO: 139372
uaucuaagaaccuguguag

SEQ ID NO: 139374 - RNA, 19 nt, Artificial Sequence
  Description of Artificial Sequence: Synthetic oligonucleotide
  Sense strand starting at position 1093 of SEQ ID NO: 1793
agaggugcuguacauuaaa

SEQ ID NO: 139375 - RNA, 19 nt, Artificial Sequence
  Description of Artificial Sequence: Synthetic oligonucleotide
  Antisense strand to SEQ ID NO: 139374
uuuaauguacagcaccucu

SEQ ID NO: 139376 - RNA, 19 nt, Artificial Sequence
  Description of Artificial Sequence: Synthetic oligonucleotide
  Sense strand starting at position 1019 of SEQ ID NO: 1793
uaaucuucuugguuacgaa

SEQ ID NO: 139377 - RNA, 19 nt, Artificial Sequence
  Description of Artificial Sequence: Synthetic oligonucleotide
  Antisense strand to SEQ ID NO: 139376
uucguaaccaagaagauua

SEQ ID NO: 139378 - RNA, 19 nt, Artificial Sequence
  Description of Artificial Sequence: Synthetic oligonucleotide
  Sense strand starting at position 1015 of SEQ ID NO: 1793
uagguaaucuucuugguua

SEQ ID NO: 139379 - RNA, 19 nt, Artificial Sequence
  Description of Artificial Sequence: Synthetic oligonucleotide
  Antisense strand to SEQ ID NO: 139378
uaaccaagaagauuaccua

SEQ ID NO: 139380 - RNA, 19 nt, Artificial Sequence
  Description of Artificial Sequence: Synthetic oligonucleotide
  Sense strand starting at position 877 of SEQ ID NO: 1793
acaccuguuguggaaggua

SEQ ID NO: 139381 - RNA, 19 nt, Artificial Sequence
  Description of Artificial Sequence: Synthetic oligonucleotide
  Antisense strand to SEQ ID NO: 139380
uaccuuccacaacaggugu

SEQ ID NO: 139382 - RNA, 19 nt, Artificial Sequence
  Description of Artificial Sequence: Synthetic oligonucleotide
  Sense strand starting at position 542 of SEQ ID NO: 1793
cugcuuugucuguuaagca

SEQ ID NO: 139383 - RNA, 19 nt, Artificial Sequence
  Description of Artificial Sequence: Synthetic oligonucleotide
  Antisense strand to SEQ ID NO: 139382
ugcuuaacagacaaagcag

SEQ ID NO: 139384 - RNA, 19 nt, Artificial Sequence
  Description of Artificial Sequence: Synthetic oligonucleotide
  Sense strand starting at position 493 of SEQ ID NO: 1793
ccuuguuggagucaguaaa

SEQ ID NO: 139385 - RNA, 19 nt, Artificial Sequence
  Description of Artificial Sequence: Synthetic oligonucleotide
  Antisense strand to SEQ ID NO: 139384
uuuacugacuccaacaagg

SEQ ID NO: 139386 - RNA, 19 nt, Artificial Sequence
  Description of Artificial Sequence: Synthetic oligonucleotide
  Sense strand starting at position 387 of SEQ ID NO: 1793
accugauugcuaggaaaca

SEQ ID NO: 139387 - RNA, 19 nt, Artificial Sequence
  Description of Artificial Sequence: Synthetic oligonucleotide
  Antisense strand to SEQ ID NO: 139386
uguuuccuagcaaucaggu

SEQ ID NO: 139388 - RNA, 19 nt, Artificial Sequence
  Description of Artificial Sequence: Synthetic oligonucleotide
  Sense strand starting at position 342 of SEQ ID NO: 1793
agcauucuagcuuauaaga

SEQ ID NO: 139389 - RNA, 19 nt, Artificial Sequence
  Description of Artificial Sequence: Synthetic oligonucleotide
  Antisense strand to SEQ ID NO: 139388
ucuuauaagcuagaaugcu

SEQ ID NO: 139390 - RNA, 19 nt, Artificial Sequence
  Description of Artificial Sequence: Synthetic oligonucleotide
  Sense strand starting at position 170 of SEQ ID NO: 1793
ggauuauguuaccuaaauu

SEQ ID NO: 139391 - RNA, 19 nt, Artificial Sequence
  Description of Artificial Sequence: Synthetic oligonucleotide
  Antisense strand to SEQ ID NO: 139390
aauuuagguaacauaaucc

SEQ ID NO: 139392 - RNA, 19 nt, Artificial Sequence
  Description of Artificial Sequence: Synthetic oligonucleotide
  Sense strand starting at position 169 of SEQ ID NO: 1793
aggauuauguuaccuaaau

SEQ ID NO: 139393 - RNA, 19 nt, Artificial Sequence
  Description of Artificial Sequence: Synthetic oligonucleotide
  Antisense strand to SEQ ID NO: 139392
auuuagguaacauaauccu

SEQ ID NO: 139394 - RNA, 19 nt, Artificial Sequence
  Description of Artificial Sequence: Synthetic oligonucleotide
  Sense strand starting at position 158 of SEQ ID NO: 1793
uuaccaauagcaggauuau

SEQ ID NO: 139395 - RNA, 19 nt, Artificial Sequence
  Description of Artificial Sequence: Synthetic oligonucleotide
  Antisense strand to SEQ ID NO: 139394
auaauccugcuauugguaa

SEQ ID NO: 139396 - RNA, 19 nt, Artificial Sequence
  Description of Artificial Sequence: Synthetic oligonucleotide
  Sense strand starting at position 50 of SEQ ID NO: 1793
gagaaauauucuuuguuag

SEQ ID NO: 139397 - RNA, 19 nt, Artificial Sequence
  Description of Artificial Sequence: Synthetic oligonucleotide
  Antisense strand to SEQ ID NO: 139396
cuaacaaagaauauuucuc

SEQ ID NO: 139398 - RNA, 19 nt, Artificial Sequence
  Description of Artificial Sequence: Synthetic oligonucleotide
  Sense strand starting at position 3383 of SEQ ID NO: 1789
agcuauauugcuugagaag

SEQ ID NO: 139399 - RNA, 19 nt, Artificial Sequence
  Description of Artificial Sequence: Synthetic oligonucleotide
  Antisense strand to SEQ ID NO: 139398
cuucucaagcaauauagcu

SEQ ID NO: 139400 - RNA, 19 nt, Artificial Sequence
  Description of Artificial Sequence: Synthetic oligonucleotide
  Sense strand starting at position 3348 of SEQ ID NO: 1789
agaccagcauuguuagaaa

SEQ ID NO: 139401 - RNA, 19 nt, Artificial Sequence
  Description of Artificial Sequence: Synthetic oligonucleotide
  Antisense strand to SEQ ID NO: 139400
uuucuaacaaugcuggucu

SEQ ID NO: 139402 - RNA, 19 nt, Artificial Sequence
  Description of Artificial Sequence: Synthetic oligonucleotide
  Sense strand starting at position 3259 of SEQ ID NO: 1789
cucugaagaucaccaguaa

SEQ ID NO: 139403 - RNA, 19 nt, Artificial Sequence
  Description of Artificial Sequence: Synthetic oligonucleotide
  Antisense strand to SEQ ID NO: 139402
uuacuggugaucuucagag

SEQ ID NO: 139404 - RNA, 19 nt, Artificial Sequence
  Description of Artificial Sequence: Synthetic oligonucleotide
  Sense strand starting at position 2921 of SEQ ID NO: 1789
gccagaaaguaacuauauu

SEQ ID NO: 139405 - RNA, 19 nt, Artificial Sequence
  Description of Artificial Sequence: Synthetic oligonucleotide
  Antisense strand to SEQ ID NO: 139404
aauauaguuacuuucuggc

SEQ ID NO: 139406 - RNA, 19 nt, Artificial Sequence
  Description of Artificial Sequence: Synthetic oligonucleotide
  Sense strand starting at position 2913 of SEQ ID NO: 1789
uguaaauugccagaaagua

SEQ ID NO: 139407 - RNA, 19 nt, Artificial Sequence
  Description of Artificial Sequence: Synthetic oligonucleotide
  Antisense strand to SEQ ID NO: 139406
uacuuucuggcaauuuaca

SEQ ID NO: 139408 - RNA, 19 nt, Artificial Sequence
  Description of Artificial Sequence: Synthetic oligonucleotide
  Sense strand starting at position 2910 of SEQ ID NO: 1789
uaguguaaauugccagaaa

SEQ ID NO: 139409 - RNA, 19 nt, Artificial Sequence
  Description of Artificial Sequence: Synthetic oligonucleotide
  Antisense strand to SEQ ID NO: 139408
uuucuggcaauuuacacua

SEQ ID NO: 139410 - RNA, 19 nt, Artificial Sequence
  Description of Artificial Sequence: Synthetic oligonucleotide
  Sense strand starting at position 2680 of SEQ ID NO: 1789
uaaugaagaucugagaaag

SEQ ID NO: 139411 - RNA, 19 nt, Artificial Sequence
  Description of Artificial Sequence: Synthetic oligonucleotide
  Antisense strand to SEQ ID NO: 139410
cuuucucagaucuucauua

SEQ ID NO: 139412 - RNA, 19 nt, Artificial Sequence
  Description of Artificial Sequence: Synthetic oligonucleotide
  Sense strand starting at position 2668 of SEQ ID NO: 1789
cuauguuguccauaaugaa

SEQ ID NO: 139413 - RNA, 19 nt, Artificial Sequence
  Description of Artificial Sequence: Synthetic oligonucleotide
  Antisense strand to SEQ ID NO: 139412
uucauuauggacaacauag

SEQ ID NO: 139414 - RNA, 19 nt, Artificial Sequence
  Description of Artificial Sequence: Synthetic oligonucleotide
  Sense strand starting at position 2666 of SEQ ID NO: 1789
aucuauguuguccauaaug

SEQ ID NO: 139415 - RNA, 19 nt, Artificial Sequence
  Description of Artificial Sequence: Synthetic oligonucleotide
  Antisense strand to SEQ ID NO: 139414
cauuauggacaacauagau

SEQ ID NO: 139416 - RNA, 19 nt, Artificial Sequence
  Description of Artificial Sequence: Synthetic oligonucleotide
  Sense strand starting at position 2664 of SEQ ID NO: 1789
auaucuauguuguccauaa

SEQ ID NO: 139417 - RNA, 19 nt, Artificial Sequence
  Description of Artificial Sequence: Synthetic oligonucleotide
  Antisense strand to SEQ ID NO: 139416
uuauggacaacauagauau

SEQ ID NO: 139418 - RNA, 19 nt, Artificial Sequence
  Description of Artificial Sequence: Synthetic oligonucleotide
  Sense strand starting at position 2475 of SEQ ID NO: 1789
gaugaauucuuggcacaug

SEQ ID NO: 139419 - RNA, 19 nt, Artificial Sequence
  Description of Artificial Sequence: Synthetic oligonucleotide
  Antisense strand to SEQ ID NO: 139418
caugugccaagaauucauc

SEQ ID NO: 139420 - RNA, 19 nt, Artificial Sequence
  Description of Artificial Sequence: Synthetic oligonucleotide
  Sense strand starting at position 2474 of SEQ ID NO: 1789
ugaugaauucuuggcacau

SEQ ID NO: 139421 - RNA, 19 nt, Artificial Sequence
  Description of Artificial Sequence: Synthetic oligonucleotide
  Antisense strand to SEQ ID NO: 139420
augugccaagaauucauca

SEQ ID NO: 139422 - RNA, 19 nt, Artificial Sequence
  Description of Artificial Sequence: Synthetic oligonucleotide
  Sense strand starting at position 2459 of SEQ ID NO: 1789
uguugucugcugcuaugau

SEQ ID NO: 139423 - RNA, 19 nt, Artificial Sequence
  Description of Artificial Sequence: Synthetic oligonucleotide
  Antisense strand to SEQ ID NO: 139422
aucauagcagcagacaaca

SEQ ID NO: 139424 - RNA, 19 nt, Artificial Sequence
  Description of Artificial Sequence: Synthetic oligonucleotide
  Sense strand starting at position 2456 of SEQ ID NO: 1789
ggguguugucugcugcuau

SEQ ID NO: 139425 - RNA, 19 nt, Artificial Sequence
  Description of Artificial Sequence: Synthetic oligonucleotide
  Antisense strand to SEQ ID NO: 139424
auagcagcagacaacaccc

SEQ ID NO: 139426 - RNA, 19 nt, Artificial Sequence
  Description of Artificial Sequence: Synthetic oligonucleotide
  Sense strand starting at position 2313 of SEQ ID NO: 1789
gguucaagggauugugaac

SEQ ID NO: 139427 - RNA, 19 nt, Artificial Sequence
  Description of Artificial Sequence: Synthetic oligonucleotide
  Antisense strand to SEQ ID NO: 139426
guucacaaucccuugaacc

SEQ ID NO: 139428 - RNA, 19 nt, Artificial Sequence
  Description of Artificial Sequence: Synthetic oligonucleotide
  Sense strand starting at position 2177 of SEQ ID NO: 1789
cuuauaugacaaggucaga

SEQ ID NO: 139429 - RNA, 19 nt, Artificial Sequence
  Description of Artificial Sequence: Synthetic oligonucleotide
  Antisense strand to SEQ ID NO: 139428
ucugaccuugucauauaag

SEQ ID NO: 139430 - RNA, 19 nt, Artificial Sequence
  Description of Artificial Sequence: Synthetic oligonucleotide
  Sense strand starting at position 1684 of SEQ ID NO: 1789
gggaaaguuugguuaguaa

SEQ ID NO: 139431 - RNA, 19 nt, Artificial Sequence
  Description of Artificial Sequence: Synthetic oligonucleotide
  Antisense strand to SEQ ID NO: 139430
uuacuaaccaaacuuuccc

SEQ ID NO: 139432 - RNA, 19 nt, Artificial Sequence
  Description of Artificial Sequence: Synthetic oligonucleotide
  Sense strand starting at position 1683 of SEQ ID NO: 1789
ugggaaaguuugguuagua

SEQ ID NO: 139433 - RNA, 19 nt, Artificial Sequence
  Description of Artificial Sequence: Synthetic oligonucleotide
  Antisense strand to SEQ ID NO: 139432
uacuaaccaaacuuuccca

SEQ ID NO: 139434 - RNA, 19 nt, Artificial Sequence
  Description of Artificial Sequence: Synthetic oligonucleotide
  Sense strand starting at position 1607 of SEQ ID NO: 1789
acugacaccguuugaacaa

SEQ ID NO: 139435 - RNA, 19 nt, Artificial Sequence
  Description of Artificial Sequence: Synthetic oligonucleotide
  Antisense strand to SEQ ID NO: 139434
uuguucaaacggugucagu

SEQ ID NO: 139436 - RNA, 19 nt, Artificial Sequence
  Description of Artificial Sequence: Synthetic oligonucleotide
  Sense strand starting at position 1535 of SEQ ID NO: 1789
aggagacacugcuuacaua

SEQ ID NO: 139437 - RNA, 19 nt, Artificial Sequence
  Description of Artificial Sequence: Synthetic oligonucleotide
  Antisense strand to SEQ ID NO: 139436
uauguaagcagugucuccu

SEQ ID NO: 139438 - RNA, 19 nt, Artificial Sequence
  Description of Artificial Sequence: Synthetic oligonucleotide
  Sense strand starting at position 1474 of SEQ ID NO: 1789
gcucaaagccuguaaacaa

SEQ ID NO: 139439 - RNA, 19 nt, Artificial Sequence
  Description of Artificial Sequence: Synthetic oligonucleotide
  Antisense strand to SEQ ID NO: 139438
uuguuuacaggcuuugagc

SEQ ID NO: 139440 - RNA, 19 nt, Artificial Sequence
  Description of Artificial Sequence: Synthetic oligonucleotide
  Sense strand starting at position 1417 of SEQ ID NO: 1789
ucagucagcccagagaaau

SEQ ID NO: 139441 - RNA, 19 nt, Artificial Sequence
  Description of Artificial Sequence: Synthetic oligonucleotide
  Antisense strand to SEQ ID NO: 139440
auuucucugggcugacuga

SEQ ID NO: 139442 - RNA, 19 nt, Artificial Sequence
  Description of Artificial Sequence: Synthetic oligonucleotide
  Sense strand starting at position 1372 of SEQ ID NO: 1789
aaggguugcccauggaaga

SEQ ID NO: 139443 - RNA, 19 nt, Artificial Sequence
  Description of Artificial Sequence: Synthetic oligonucleotide
  Antisense strand to SEQ ID NO: 139442
ucuuccaugggcaacccuu

SEQ ID NO: 139444 - RNA, 19 nt, Artificial Sequence
  Description of Artificial Sequence: Synthetic oligonucleotide
  Sense strand starting at position 1284 of SEQ ID NO: 1789
gccuguauacuagaaugga

SEQ ID NO: 139445 - RNA, 19 nt, Artificial Sequence
  Description of Artificial Sequence: Synthetic oligonucleotide
  Antisense strand to SEQ ID NO: 139444
uccauucuaguauacaggc

SEQ ID NO: 139446 - RNA, 19 nt, Artificial Sequence
  Description of Artificial Sequence: Synthetic oligonucleotide
  Sense strand starting at position 1134 of SEQ ID NO: 1789
cugcuacugagauggagau

SEQ ID NO: 139447 - RNA, 19 nt, Artificial Sequence
  Description of Artificial Sequence: Synthetic oligonucleotide
  Antisense strand to SEQ ID NO: 139446
aucuccaucucaguagcag

SEQ ID NO: 139448 - RNA, 19 nt, Artificial Sequence
  Description of Artificial Sequence: Synthetic oligonucleotide
  Sense strand starting at position 1091 of SEQ ID NO: 1789
guaugaacccagggugagu

SEQ ID NO: 139449 - RNA, 19 nt, Artificial Sequence
  Description of Artificial Sequence: Synthetic oligonucleotide
  Antisense strand to SEQ ID NO: 139448
acucacccuggguucauac

SEQ ID NO: 139450 - RNA, 19 nt, Artificial Sequence
  Description of Artificial Sequence: Synthetic oligonucleotide
  Sense strand starting at position 891 of SEQ ID NO: 1789
ggagaaacugagugucuca

SEQ ID NO: 139451 - RNA, 19 nt, Artificial Sequence
  Description of Artificial Sequence: Synthetic oligonucleotide
  Antisense strand to SEQ ID NO: 139450
ugagacacucaguuucucc

SEQ ID NO: 139452 - RNA, 19 nt, Artificial Sequence
  Description of Artificial Sequence: Synthetic oligonucleotide
  Sense strand starting at position 785 of SEQ ID NO: 1789
cugaaauucugacuaguaa

SEQ ID NO: 139453 - RNA, 19 nt, Artificial Sequence
  Description of Artificial Sequence: Synthetic oligonucleotide
  Antisense strand to SEQ ID NO: 139452
uuacuagucagaauuucag

SEQ ID NO: 139454 - RNA, 19 nt, Artificial Sequence
  Description of Artificial Sequence: Synthetic oligonucleotide
  Sense strand starting at position 762 of SEQ ID NO: 1789
auaagaaagaggugugagu

SEQ ID NO: 139455 - RNA, 19 nt, Artificial Sequence
  Description of Artificial Sequence: Synthetic oligonucleotide
  Antisense strand to SEQ ID NO: 139454
acucacaccucuuucuuau

SEQ ID NO: 139456 - RNA, 19 nt, Artificial Sequence
  Description of Artificial Sequence: Synthetic oligonucleotide
  Sense strand starting at position 745 of SEQ ID NO: 1789
gauggauuaucuguuauau

SEQ ID NO: 139457 - RNA, 19 nt, Artificial Sequence
  Description of Artificial Sequence: Synthetic oligonucleotide
  Antisense strand to SEQ ID NO: 139456
auauaacagauaauccauc

SEQ ID NO: 139458 - RNA, 19 nt, Artificial Sequence
  Description of Artificial Sequence: Synthetic oligonucleotide
  Sense strand starting at position 742 of SEQ ID NO: 1789
ucugauggauuaucuguua

SEQ ID NO: 139459 - RNA, 19 nt, Artificial Sequence
  Description of Artificial Sequence: Synthetic oligonucleotide
  Antisense strand to SEQ ID NO: 139458
uaacagauaauccaucaga

SEQ ID NO: 139460 - RNA, 19 nt, Artificial Sequence
  Description of Artificial Sequence: Synthetic oligonucleotide
  Sense strand starting at position 697 of SEQ ID NO: 1789
gaaaucauaccagguagcu

SEQ ID NO: 139461 - RNA, 19 nt, Artificial Sequence
  Description of Artificial Sequence: Synthetic oligonucleotide
  Antisense strand to SEQ ID NO: 139460
agcuaccugguaugauuuc

SEQ ID NO: 139462 - RNA, 19 nt, Artificial Sequence
  Description of Artificial Sequence: Synthetic oligonucleotide
  Sense strand starting at position 649 of SEQ ID NO: 1789
aguaaagucauaggauguu

SEQ ID NO: 139463 - RNA, 19 nt, Artificial Sequence
  Description of Artificial Sequence: Synthetic oligonucleotide
  Antisense strand to SEQ ID NO: 139462
aacauccuaugacuuuacu

SEQ ID NO: 139464 - RNA, 19 nt, Artificial Sequence
  Description of Artificial Sequence: Synthetic oligonucleotide
  Sense strand starting at position 479 of SEQ ID NO: 1789
ugaguuaaguauccuauug

SEQ ID NO: 139465 - RNA, 19 nt, Artificial Sequence
  Description of Artificial Sequence: Synthetic oligonucleotide
  Antisense strand to SEQ ID NO: 139464
caauaggauacuuaacuca

SEQ ID NO: 139466 - RNA, 19 nt, Artificial Sequence
  Description of Artificial Sequence: Synthetic oligonucleotide
  Sense strand starting at position 472 of SEQ ID NO: 1789
guauuccugaguuaaguau

SEQ ID NO: 139467 - RNA, 19 nt, Artificial Sequence
  Description of Artificial Sequence: Synthetic oligonucleotide
  Antisense strand to SEQ ID NO: 139466
auacuuaacucaggaauac

SEQ ID NO: 139468 - RNA, 19 nt, Artificial Sequence
  Description of Artificial Sequence: Synthetic oligonucleotide
  Sense strand starting at position 468 of SEQ ID NO: 1789
auagguauuccugaguuaa

SEQ ID NO: 139469 - RNA, 19 nt, Artificial Sequence
  Description of Artificial Sequence: Synthetic oligonucleotide
  Antisense strand to SEQ ID NO: 139468
uuaacucaggaauaccuau

SEQ ID NO: 139470 - RNA, 19 nt, Artificial Sequence
  Description of Artificial Sequence: Synthetic oligonucleotide
  Sense strand starting at position 441 of SEQ ID NO: 1789
ucaagaaacuaagauaaga

SEQ ID NO: 139471 - RNA, 19 nt, Artificial Sequence
  Description of Artificial Sequence: Synthetic oligonucleotide
  Antisense strand to SEQ ID NO: 139470
ucuuaucuuaguuucuuga

SEQ ID NO: 139472 - RNA, 19 nt, Artificial Sequence
  Description of Artificial Sequence: Synthetic oligonucleotide
  Sense strand starting at position 181 of SEQ ID NO: 1789
ugaaucuuugccuaagcaa

SEQ ID NO: 139473 - RNA, 19 nt, Artificial Sequence
  Description of Artificial Sequence: Synthetic oligonucleotide
  Antisense strand to SEQ ID NO: 139472
uugcuuaggcaaagauuca

SEQ ID NO: 139474 - RNA, 19 nt, Artificial Sequence
  Description of Artificial Sequence: Synthetic oligonucleotide
  Sense strand starting at position 53 of SEQ ID NO: 1789
acuuguacucaucagauuc

SEQ ID NO: 139475 - RNA, 19 nt, Artificial Sequence
  Description of Artificial Sequence: Synthetic oligonucleotide
  Antisense strand to SEQ ID NO: 139474
gaaucugaugaguacaagu

SEQ ID NO: 139476 - RNA, 19 nt, Artificial Sequence
  Description of Artificial Sequence: Synthetic oligonucleotide
  Sense strand starting at position 25 of SEQ ID NO: 1789
gaagacugugaaugcucuu

SEQ ID NO: 139477 - RNA, 19 nt, Artificial Sequence
  Description of Artificial Sequence: Synthetic oligonucleotide
  Antisense strand to SEQ ID NO: 139476
aagagcauucacagucuuc

SEQ ID NO: 139478 - RNA, 19 nt, Artificial Sequence
  Description of Artificial Sequence: Synthetic oligonucleotide
  Sense strand starting at position 3854 of SEQ ID NO: 1790
ucaggaguuccaggcucua

SEQ ID NO: 139479 - RNA, 19 nt, Artificial Sequence
  Description of Artificial Sequence: Synthetic oligonucleotide
  Antisense strand to SEQ ID NO: 139478
uagagccuggaacuccuga

SEQ ID NO: 139480 - RNA, 19 nt, Artificial Sequence
  Description of Artificial Sequence: Synthetic oligonucleotide
  Sense strand starting at position 3312 of SEQ ID NO: 1790
gggagauucugccucccuu

SEQ ID NO: 139481 - RNA, 19 nt, Artificial Sequence
  Description of Artificial Sequence: Synthetic oligonucleotide
  Antisense strand to SEQ ID NO: 139480
aagggaggcagaaucuccc

SEQ ID NO: 139482 - RNA, 19 nt, Artificial Sequence
  Description of Artificial Sequence: Synthetic oligonucleotide
  Sense strand starting at position 3100 of SEQ ID NO: 1790
ccaggcugguuucuccaua

SEQ ID NO: 139483 - RNA, 19 nt, Artificial Sequence
  Description of Artificial Sequence: Synthetic oligonucleotide
  Antisense strand to SEQ ID NO: 139482
uauggagaaaccagccugg

SEQ ID NO: 139484 - RNA, 19 nt, Artificial Sequence
  Description of Artificial Sequence: Synthetic oligonucleotide
  Sense strand starting at position 3011 of SEQ ID NO: 1790
uagggacagucucuuaacu

SEQ ID NO: 139485 - RNA, 19 nt, Artificial Sequence
  Description of Artificial Sequence: Synthetic oligonucleotide
  Antisense strand to SEQ ID NO: 139484
aguuaagagacugucccua

SEQ ID NO: 139486 - RNA, 19 nt, Artificial Sequence
  Description of Artificial Sequence: Synthetic oligonucleotide
  Sense strand starting at position 2945 of SEQ ID NO: 1790
uuaguuuacuuguugugaa

SEQ ID NO: 139487 - RNA, 19 nt, Artificial Sequence
  Description of Artificial Sequence: Synthetic oligonucleotide
  Antisense strand to SEQ ID NO: 139486
uucacaacaaguaaacuaa

SEQ ID NO: 139488 - RNA, 19 nt, Artificial Sequence
  Description of Artificial Sequence: Synthetic oligonucleotide
  Sense strand starting at position 2853 of SEQ ID NO: 1790
cugauaaaucucuggucaa

SEQ ID NO: 139489 - RNA, 19 nt, Artificial Sequence
  Description of Artificial Sequence: Synthetic oligonucleotide
  Antisense strand to SEQ ID NO: 139488
uugaccagagauuuaucag

SEQ ID NO: 139490 - RNA, 19 nt, Artificial Sequence
  Description of Artificial Sequence: Synthetic oligonucleotide
  Sense strand starting at position 2852 of SEQ ID NO: 1790
ucugauaaaucucugguca

SEQ ID NO: 139491 - RNA, 19 nt, Artificial Sequence
  Description of Artificial Sequence: Synthetic oligonucleotide
  Antisense strand to SEQ ID NO: 139490
ugaccagagauuuaucaga

SEQ ID NO: 139492 - RNA, 19 nt, Artificial Sequence
  Description of Artificial Sequence: Synthetic oligonucleotide
  Sense strand starting at position 2806 of SEQ ID NO: 1790
ugccacagaccuugauaaa

SEQ ID NO: 139493 - RNA, 19 nt, Artificial Sequence
  Description of Artificial Sequence: Synthetic oligonucleotide
  Antisense strand to SEQ ID NO: 139492
uuuaucaaggucuguggca

SEQ ID NO: 139494 - RNA, 19 nt, Artificial Sequence
  Description of Artificial Sequence: Synthetic oligonucleotide
  Sense strand starting at position 2738 of SEQ ID NO: 1790
acguauuaagaguauacau

SEQ ID NO: 139495 - RNA, 19 nt, Artificial Sequence
  Description of Artificial Sequence: Synthetic oligonucleotide
  Antisense strand to SEQ ID NO: 139494
auguauacucuuaauacgu

SEQ ID NO: 139496 - RNA, 19 nt, Artificial Sequence
  Description of Artificial Sequence: Synthetic oligonucleotide
  Sense strand starting at position 2671 of SEQ ID NO: 1790
aaggcuggccaugauuaaa

SEQ ID NO: 139497 - RNA, 19 nt, Artificial Sequence
  Description of Artificial Sequence: Synthetic oligonucleotide
  Antisense strand to SEQ ID NO: 139496
uuuaaucauggccagccuu

SEQ ID NO: 139498 - RNA, 19 nt, Artificial Sequence
  Description of Artificial Sequence: Synthetic oligonucleotide
  Sense strand starting at position 2670 of SEQ ID NO: 1790
gaaggcuggccaugauuaa

SEQ ID NO: 139499 - RNA, 19 nt, Artificial Sequence
  Description of Artificial Sequence: Synthetic oligonucleotide
  Antisense strand to SEQ ID NO: 139498
uuaaucauggccagccuuc

SEQ ID NO: 139500 - RNA, 19 nt, Artificial Sequence
  Description of Artificial Sequence: Synthetic oligonucleotide
  Sense strand starting at position 2604 of SEQ ID NO: 1790
ugaaguguuuaugcaauaa

SEQ ID NO: 139501 - RNA, 19 nt, Artificial Sequence
  Description of Artificial Sequence: Synthetic oligonucleotide
  Antisense strand to SEQ ID NO: 139500
uuauugcauaaacacuuca

SEQ ID NO: 139502 - RNA, 19 nt, Artificial Sequence
  Description of Artificial Sequence: Synthetic oligonucleotide
  Sense strand starting at position 2601 of SEQ ID NO: 1790
aguugaaguguuuaugcaa

SEQ ID NO: 139503 - RNA, 19 nt, Artificial Sequence
  Description of Artificial Sequence: Synthetic oligonucleotide
  Antisense strand to SEQ ID NO: 139502
uugcauaaacacuucaacu

SEQ ID NO: 139504 - RNA, 19 nt, Artificial Sequence
  Description of Artificial Sequence: Synthetic oligonucleotide
  Sense strand starting at position 2471 of SEQ ID NO: 1790
gauuuaaagugggauguuc

SEQ ID NO: 139505 - RNA, 19 nt, Artificial Sequence
  Description of Artificial Sequence: Synthetic oligonucleotide
  Antisense strand to SEQ ID NO: 139504
gaacaucccacuuuaaauc

SEQ ID NO: 139506 - RNA, 19 nt, Artificial Sequence
  Description of Artificial Sequence: Synthetic oligonucleotide
  Sense strand starting at position 2438 of SEQ ID NO: 1790
gcuuucuaacaacgagaau

SEQ ID NO: 139507 - RNA, 19 nt, Artificial Sequence
  Description of Artificial Sequence: Synthetic oligonucleotide
  Antisense strand to SEQ ID NO: 139506
auucucguuguuagaaagc

SEQ ID NO: 139508 - RNA, 19 nt, Artificial Sequence
  Description of Artificial Sequence: Synthetic oligonucleotide
  Sense strand starting at position 2371 of SEQ ID NO: 1790
acaugugacgcucacagaa

SEQ ID NO: 139509 - RNA, 19 nt, Artificial Sequence
  Description of Artificial Sequence: Synthetic oligonucleotide
  Antisense strand to SEQ ID NO: 139508
uucugugagcgucacaugu

SEQ ID NO: 139510 - RNA, 19 nt, Artificial Sequence
  Description of Artificial Sequence: Synthetic oligonucleotide
  Sense strand starting at position 2144 of SEQ ID NO: 1790
cgcugugaaucaguaauga

SEQ ID NO: 139511 - RNA, 19 nt, Artificial Sequence
  Description of Artificial Sequence: Synthetic oligonucleotide
  Antisense strand to SEQ ID NO: 139510
ucauuacugauucacagcg

SEQ ID NO: 139512 - RNA, 19 nt, Artificial Sequence
  Description of Artificial Sequence: Synthetic oligonucleotide
  Sense strand starting at position 2142 of SEQ ID NO: 1790
cucgcugugaaucaguaau

SEQ ID NO: 139513 - RNA, 19 nt, Artificial Sequence
  Description of Artificial Sequence: Synthetic oligonucleotide
  Antisense strand to SEQ ID NO: 139512
auuacugauucacagcgag

SEQ ID NO: 139514 - RNA, 19 nt, Artificial Sequence
  Description of Artificial Sequence: Synthetic oligonucleotide
  Sense strand starting at position 2075 of SEQ ID NO: 1790
aauccucgauucgugacaa

SEQ ID NO: 139515 - RNA, 19 nt, Artificial Sequence
  Description of Artificial Sequence: Synthetic oligonucleotide
  Antisense strand to SEQ ID NO: 139514
uugucacgaaucgaggauu

SEQ ID NO: 139516 - RNA, 19 nt, Artificial Sequence
  Description of Artificial Sequence: Synthetic oligonucleotide
  Sense strand starting at position 2060 of SEQ ID NO: 1790
cgaugagcucauugcaauc

SEQ ID NO: 139517 - RNA, 19 nt, Artificial Sequence
  Description of Artificial Sequence: Synthetic oligonucleotide
  Antisense strand to SEQ ID NO: 139516
gauugcaaugagcucaucg

SEQ ID NO: 139518 - RNA, 19 nt, Artificial Sequence
  Description of Artificial Sequence: Synthetic oligonucleotide
  Sense strand starting at position 2057 of SEQ ID NO: 1790
aaacgaugagcucauugca

SEQ ID NO: 139519 - RNA, 19 nt, Artificial Sequence
  Description of Artificial Sequence: Synthetic oligonucleotide
  Antisense strand to SEQ ID NO: 139518
ugcaaugagcucaucguuu

SEQ ID NO: 139520 - RNA, 19 nt, Artificial Sequence
  Description of Artificial Sequence: Synthetic oligonucleotide
  Sense strand starting at position 1267 of SEQ ID NO: 1790
auuuccuucucggcagaau

SEQ ID NO: 139521 - RNA, 19 nt, Artificial Sequence
  Description of Artificial Sequence: Synthetic oligonucleotide
  Antisense strand to SEQ ID NO: 139520
auucugccgagaaggaaau

SEQ ID NO: 139522 - RNA, 19 nt, Artificial Sequence
  Description of Artificial Sequence: Synthetic oligonucleotide
  Sense strand starting at position 1168 of SEQ ID NO: 1790
gacccugggcucugagaaa

SEQ ID NO: 139523 - RNA, 19 nt, Artificial Sequence
  Description of Artificial Sequence: Synthetic oligonucleotide
  Antisense strand to SEQ ID NO: 139522
uuucucagagcccaggguc

SEQ ID NO: 139524 - RNA, 19 nt, Artificial Sequence
  Description of Artificial Sequence: Synthetic oligonucleotide
  Sense strand starting at position 1150 of SEQ ID NO: 1790
agauaaugccacuaaugug

SEQ ID NO: 139525 - RNA, 19 nt, Artificial Sequence
  Description of Artificial Sequence: Synthetic oligonucleotide
  Antisense strand to SEQ ID NO: 139524
cacauuaguggcauuaucu

SEQ ID NO: 139526 - RNA, 19 nt, Artificial Sequence
  Description of Artificial Sequence: Synthetic oligonucleotide
  Sense strand starting at position 1089 of SEQ ID NO: 1790
uggguauucugcuuuauug

SEQ ID NO: 139527 - RNA, 19 nt, Artificial Sequence
  Description of Artificial Sequence: Synthetic oligonucleotide
  Antisense strand to SEQ ID NO: 139526
caauaaagcagaauaccca

SEQ ID NO: 139528 - RNA, 19 nt, Artificial Sequence
  Description of Artificial Sequence: Synthetic oligonucleotide
  Sense strand starting at position 1041 of SEQ ID NO: 1790
auuuaacccuuuggagaua

SEQ ID NO: 139529 - RNA, 19 nt, Artificial Sequence
  Description of Artificial Sequence: Synthetic oligonucleotide
  Antisense strand to SEQ ID NO: 139528
uaucuccaaaggguuaaau

SEQ ID NO: 139530 - RNA, 19 nt, Artificial Sequence
  Description of Artificial Sequence: Synthetic oligonucleotide
  Sense strand starting at position 1009 of SEQ ID NO: 1790
cagucuagauaaguugcua

SEQ ID NO: 139531 - RNA, 19 nt, Artificial Sequence
  Description of Artificial Sequence: Synthetic oligonucleotide
  Antisense strand to SEQ ID NO: 139530
uagcaacuuaucuagacug

SEQ ID NO: 139532 - RNA, 19 nt, Artificial Sequence
  Description of Artificial Sequence: Synthetic oligonucleotide
  Sense strand starting at position 723 of SEQ ID NO: 1790
cagcgauuguggguauuua

SEQ ID NO: 139533 - RNA, 19 nt, Artificial Sequence
  Description of Artificial Sequence: Synthetic oligonucleotide
  Antisense strand to SEQ ID NO: 139532
uaaauacccacaaucgcug

SEQ ID NO: 139534 - RNA, 19 nt, Artificial Sequence
  Description of Artificial Sequence: Synthetic oligonucleotide
  Sense strand starting at position 691 of SEQ ID NO: 1790
auaguugcuagguauaguu

SEQ ID NO: 139535 - RNA, 19 nt, Artificial Sequence
  Description of Artificial Sequence: Synthetic oligonucleotide
  Antisense strand to SEQ ID NO: 139534
aacuauaccuagcaacuau

SEQ ID NO: 139536 - RNA, 19 nt, Artificial Sequence
  Description of Artificial Sequence: Synthetic oligonucleotide
  Sense strand starting at position 690 of SEQ ID NO: 1790
aauaguugcuagguauagu

SEQ ID NO: 139537 - RNA, 19 nt, Artificial Sequence
  Description of Artificial Sequence: Synthetic oligonucleotide
  Antisense strand to SEQ ID NO: 139536
acuauaccuagcaacuauu

SEQ ID NO: 139538 - RNA, 19 nt, Artificial Sequence
  Description of Artificial Sequence: Synthetic oligonucleotide
  Sense strand starting at position 686 of SEQ ID NO: 1790
auagaauaguugcuaggua

SEQ ID NO: 139539 - RNA, 19 nt, Artificial Sequence
  Description of Artificial Sequence: Synthetic oligonucleotide
  Antisense strand to SEQ ID NO: 139538
uaccuagcaacuauucuau

SEQ ID NO: 139540 - RNA, 19 nt, Artificial Sequence
  Description of Artificial Sequence: Synthetic oligonucleotide
  Sense strand starting at position 548 of SEQ ID NO: 1790
agacucuaauaugagagaa

SEQ ID NO: 139541 - RNA, 19 nt, Artificial Sequence
  Description of Artificial Sequence: Synthetic oligonucleotide
  Antisense strand to SEQ ID NO: 139540
uucucucauauuagagucu

SEQ ID NO: 139542 - RNA, 19 nt, Artificial Sequence
  Description of Artificial Sequence: Synthetic oligonucleotide
  Sense strand starting at position 474 of SEQ ID NO: 1790
agagaugaauuauagugaa

SEQ ID NO: 139543 - RNA, 19 nt, Artificial Sequence
  Description of Artificial Sequence: Synthetic oligonucleotide
  Antisense strand to SEQ ID NO: 139542
uucacuauaauucaucucu

SEQ ID NO: 139544 - RNA, 19 nt, Artificial Sequence
  Description of Artificial Sequence: Synthetic oligonucleotide
  Sense strand starting at position 442 of SEQ ID NO: 1790
cugaacuaguaauuguaaa

SEQ ID NO: 139545 - RNA, 19 nt, Artificial Sequence
  Description of Artificial Sequence: Synthetic oligonucleotide
  Antisense strand to SEQ ID NO: 139544
uuuacaauuacuaguucag

SEQ ID NO: 139546 - RNA, 19 nt, Artificial Sequence
  Description of Artificial Sequence: Synthetic oligonucleotide
  Sense strand starting at position 386 of SEQ ID NO: 1790
gucuguuaugauuguacag

SEQ ID NO: 139547 - RNA, 19 nt, Artificial Sequence
  Description of Artificial Sequence: Synthetic oligonucleotide
  Antisense strand to SEQ ID NO: 139546
cuguacaaucauaacagac

SEQ ID NO: 139548 - RNA, 19 nt, Artificial Sequence
  Description of Artificial Sequence: Synthetic oligonucleotide
  Sense strand starting at position 343 of SEQ ID NO: 1790
uccuuaggaugggaaauuu

SEQ ID NO: 139549 - RNA, 19 nt, Artificial Sequence
  Description of Artificial Sequence: Synthetic oligonucleotide
  Antisense strand to SEQ ID NO: 139548
aaauuucccauccuaagga

SEQ ID NO: 139550 - RNA, 19 nt, Artificial Sequence
  Description of Artificial Sequence: Synthetic oligonucleotide
  Sense strand starting at position 285 of SEQ ID NO: 1790
ccuauaauuguaugcuagu

SEQ ID NO: 139551 - RNA, 19 nt, Artificial Sequence
  Description of Artificial Sequence: Synthetic oligonucleotide
  Antisense strand to SEQ ID NO: 139550
acuagcauacaauuauagg

SEQ ID NO: 139552 - RNA, 19 nt, Artificial Sequence
  Description of Artificial Sequence: Synthetic oligonucleotide
  Sense strand starting at position 242 of SEQ ID NO: 1790
uucuuuaaaugacaaagga

SEQ ID NO: 139553 - RNA, 19 nt, Artificial Sequence
  Description of Artificial Sequence: Synthetic oligonucleotide
  Antisense strand to SEQ ID NO: 139552
uccuuugucauuuaaagaa

SEQ ID NO: 139554 - RNA, 19 nt, Artificial Sequence
  Description of Artificial Sequence: Synthetic oligonucleotide
  Sense strand starting at position 34 of SEQ ID NO: 1790
ugaaauauaguuuagcacu

SEQ ID NO: 139555 - RNA, 19 nt, Artificial Sequence
  Description of Artificial Sequence: Synthetic oligonucleotide
  Antisense strand to SEQ ID NO: 139554
agugcuaaacuauauuuca

SEQ ID NO: 139556 - RNA, 19 nt, Artificial Sequence
  Description of Artificial Sequence: Synthetic oligonucleotide
  Sense strand starting at position 32 of SEQ ID NO: 1790
guugaaauauaguuuagca

SEQ ID NO: 139557 - RNA, 19 nt, Artificial Sequence
  Description of Artificial Sequence: Synthetic oligonucleotide
  Antisense strand to SEQ ID NO: 139556
ugcuaaacuauauuucaac

SEQ ID NO: 139558 - RNA, 19 nt, Artificial Sequence
  Description of Artificial Sequence: Synthetic oligonucleotide
  Sense strand starting at position 3955 of SEQ ID NO: 1791
gugguaugugcugcucacu

SEQ ID NO: 139559 - RNA, 19 nt, Artificial Sequence
  Description of Artificial Sequence: Synthetic oligonucleotide
  Antisense strand to SEQ ID NO: 139558
agugagcagcacauaccac

SEQ ID NO: 139560 - RNA, 19 nt, Artificial Sequence
  Description of Artificial Sequence: Synthetic oligonucleotide
  Sense strand starting at position 3813 of SEQ ID NO: 1791
caauuaaggugaucugaug

SEQ ID NO: 139561 - RNA, 19 nt, Artificial Sequence
  Description of Artificial Sequence: Synthetic oligonucleotide
  Antisense strand to SEQ ID NO: 139560
caucagaucaccuuaauug

SEQ ID NO: 139562 - RNA, 19 nt, Artificial Sequence
  Description of Artificial Sequence: Synthetic oligonucleotide
  Sense strand starting at position 3698 of SEQ ID NO: 1791
gucccauggccacauguaa

SEQ ID NO: 139563 - RNA, 19 nt, Artificial Sequence
  Description of Artificial Sequence: Synthetic oligonucleotide
  Antisense strand to SEQ ID NO: 139562
uuacauguggccaugggac

SEQ ID NO: 139564 - RNA, 19 nt, Artificial Sequence
  Description of Artificial Sequence: Synthetic oligonucleotide
  Sense strand starting at position 3667 of SEQ ID NO: 1791
gccaacuugcuauaaggaa

SEQ ID NO: 139565 - RNA, 19 nt, Artificial Sequence
  Description of Artificial Sequence: Synthetic oligonucleotide
  Antisense strand to SEQ ID NO: 139564
uuccuuauagcaaguuggc

SEQ ID NO: 139566 - RNA, 19 nt, Artificial Sequence
  Description of Artificial Sequence: Synthetic oligonucleotide
  Sense strand starting at position 3580 of SEQ ID NO: 1791
uuccauaugucuuugaaag

SEQ ID NO: 139567 - RNA, 19 nt, Artificial Sequence
  Description of Artificial Sequence: Synthetic oligonucleotide
  Antisense strand to SEQ ID NO: 139566
cuuucaaagacauauggaa

SEQ ID NO: 139568 - RNA, 19 nt, Artificial Sequence
  Description of Artificial Sequence: Synthetic oligonucleotide
  Sense strand starting at position 3473 of SEQ ID NO: 1791
ggacaauggaugugguaau

SEQ ID NO: 139569 - RNA, 19 nt, Artificial Sequence
  Description of Artificial Sequence: Synthetic oligonucleotide
  Antisense strand to SEQ ID NO: 139568
auuaccacauccauugucc

SEQ ID NO: 139570 - RNA, 19 nt, Artificial Sequence
  Description of Artificial Sequence: Synthetic oligonucleotide
  Sense strand starting at position 3214 of SEQ ID NO: 1791
agcccugggccugacaaua

SEQ ID NO: 139571 - RNA, 19 nt, Artificial Sequence
  Description of Artificial Sequence: Synthetic oligonucleotide
  Antisense strand to SEQ ID NO: 139570
uauugucaggcccagggcu

SEQ ID NO: 139572 - RNA, 19 nt, Artificial Sequence
  Description of Artificial Sequence: Synthetic oligonucleotide
  Sense strand starting at position 3125 of SEQ ID NO: 1791
acauaucaagaguguugua

SEQ ID NO: 139573 - RNA, 19 nt, Artificial Sequence
  Description of Artificial Sequence: Synthetic oligonucleotide
  Antisense strand to SEQ ID NO: 139572
uacaacacucuugauaugu

SEQ ID NO: 139574 - RNA, 19 nt, Artificial Sequence
  Description of Artificial Sequence: Synthetic oligonucleotide
  Sense strand starting at position 3100 of SEQ ID NO: 1791
gauguuaaugucuauagau

SEQ ID NO: 139575 - RNA, 19 nt, Artificial Sequence
  Description of Artificial Sequence: Synthetic oligonucleotide
  Antisense strand to SEQ ID NO: 139574
aucuauagacauuaacauc

SEQ ID NO: 139576 - RNA, 19 nt, Artificial Sequence
  Description of Artificial Sequence: Synthetic oligonucleotide
  Sense strand starting at position 3099 of SEQ ID NO: 1791
ugauguuaaugucuauaga

SEQ ID NO: 139577 - RNA, 19 nt, Artificial Sequence
  Description of Artificial Sequence: Synthetic oligonucleotide
  Antisense strand to SEQ ID NO: 139576
ucuauagacauuaacauca

SEQ ID NO: 139578 - RNA, 19 nt, Artificial Sequence
  Description of Artificial Sequence: Synthetic oligonucleotide
  Sense strand starting at position 3053 of SEQ ID NO: 1791
agggcccucccugacaaau

SEQ ID NO: 139579 - RNA, 19 nt, Artificial Sequence
  Description of Artificial Sequence: Synthetic oligonucleotide
  Antisense strand to SEQ ID NO: 139578
auuugucagggagggcccu

SEQ ID NO: 139580 - RNA, 19 nt, Artificial Sequence
  Description of Artificial Sequence: Synthetic oligonucleotide
  Sense strand starting at position 3027 of SEQ ID NO: 1791
cucugagaaacgugacauu

SEQ ID NO: 139581 - RNA, 19 nt, Artificial Sequence
  Description of Artificial Sequence: Synthetic oligonucleotide
  Antisense strand to SEQ ID NO: 139580
aaugucacguuucucagag

SEQ ID NO: 139582 - RNA, 19 nt, Artificial Sequence
  Description of Artificial Sequence: Synthetic oligonucleotide
  Sense strand starting at position 2940 of SEQ ID NO: 1791
gccauagaaugacuuuagu

SEQ ID NO: 139583 - RNA, 19 nt, Artificial Sequence
  Description of Artificial Sequence: Synthetic oligonucleotide
  Antisense strand to SEQ ID NO: 139582
acuaaagucauucuauggc

SEQ ID NO: 139584 - RNA, 19 nt, Artificial Sequence
  Description of Artificial Sequence: Synthetic oligonucleotide
  Sense strand starting at position 2930 of SEQ ID NO: 1791
agugauugcagccauagaa

SEQ ID NO: 139585 - RNA, 19 nt, Artificial Sequence
  Description of Artificial Sequence: Synthetic oligonucleotide
  Antisense strand to SEQ ID NO: 139584
uucuauggcugcaaucacu

SEQ ID NO: 139586 - RNA, 19 nt, Artificial Sequence
  Description of Artificial Sequence: Synthetic oligonucleotide
  Sense strand starting at position 2917 of SEQ ID NO: 1791
gaauauaguguccagugau

SEQ ID NO: 139587 - RNA, 19 nt, Artificial Sequence
  Description of Artificial Sequence: Synthetic oligonucleotide
  Antisense strand to SEQ ID NO: 139586
aucacuggacacuauauuc

SEQ ID NO: 139588 - RNA, 19 nt, Artificial Sequence
  Description of Artificial Sequence: Synthetic oligonucleotide
  Sense strand starting at position 2916 of SEQ ID NO: 1791
ugaauauaguguccaguga

SEQ ID NO: 139589 - RNA, 19 nt, Artificial Sequence
  Description of Artificial Sequence: Synthetic oligonucleotide
  Antisense strand to SEQ ID NO: 139588
ucacuggacacuauauuca

SEQ ID NO: 139590 - RNA, 19 nt, Artificial Sequence
  Description of Artificial Sequence: Synthetic oligonucleotide
  Sense strand starting at position 2903 of SEQ ID NO: 1791
uugcauggauaagugaaua

SEQ ID NO: 139591 - RNA, 19 nt, Artificial Sequence
  Description of Artificial Sequence: Synthetic oligonucleotide
  Antisense strand to SEQ ID NO: 139590
uauucacuuauccaugcaa

SEQ ID NO: 139592 - RNA, 19 nt, Artificial Sequence
  Description of Artificial Sequence: Synthetic oligonucleotide
  Sense strand starting at position 2898 of SEQ ID NO: 1791
ugugauugcauggauaagu

SEQ ID NO: 139593 - RNA, 19 nt, Artificial Sequence
  Description of Artificial Sequence: Synthetic oligonucleotide
  Antisense strand to SEQ ID NO: 139592
acuuauccaugcaaucaca

SEQ ID NO: 139594 - RNA, 19 nt, Artificial Sequence
  Description of Artificial Sequence: Synthetic oligonucleotide
  Sense strand starting at position 2897 of SEQ ID NO: 1791
augugauugcauggauaag

SEQ ID NO: 139595 - RNA, 19 nt, Artificial Sequence
  Description of Artificial Sequence: Synthetic oligonucleotide
  Antisense strand to SEQ ID NO: 139594
cuuauccaugcaaucacau

SEQ ID NO: 139596 - RNA, 19 nt, Artificial Sequence
  Description of Artificial Sequence: Synthetic oligonucleotide
  Sense strand starting at position 2891 of SEQ ID NO: 1791
caaugaaugugauugcaug

SEQ ID NO: 139597 - RNA, 19 nt, Artificial Sequence
  Description of Artificial Sequence: Synthetic oligonucleotide
  Antisense strand to SEQ ID NO: 139596
caugcaaucacauucauug

SEQ ID NO: 139598 - RNA, 19 nt, Artificial Sequence
  Description of Artificial Sequence: Synthetic oligonucleotide
  Sense strand starting at position 2886 of SEQ ID NO: 1791
gcacucaaugaaugugauu

SEQ ID NO: 139599 - RNA, 19 nt, Artificial Sequence
  Description of Artificial Sequence: Synthetic oligonucleotide
  Antisense strand to SEQ ID NO: 139598
aaucacauucauugagugc

SEQ ID NO: 139600 - RNA, 19 nt, Artificial Sequence
  Description of Artificial Sequence: Synthetic oligonucleotide
  Sense strand starting at position 2882 of SEQ ID NO: 1791
ggaagcacucaaugaaugu

SEQ ID NO: 139601 - RNA, 19 nt, Artificial Sequence
  Description of Artificial Sequence: Synthetic oligonucleotide
  Antisense strand to SEQ ID NO: 139600
acauucauugagugcuucc

SEQ ID NO: 139602 - RNA, 19 nt, Artificial Sequence
  Description of Artificial Sequence: Synthetic oligonucleotide
  Sense strand starting at position 2679 of SEQ ID NO: 1791
ggacauccuucuucuagau

SEQ ID NO: 139603 - RNA, 19 nt, Artificial Sequence
  Description of Artificial Sequence: Synthetic oligonucleotide
  Antisense strand to SEQ ID NO: 139602
aucuagaagaaggaugucc

SEQ ID NO: 139604 - RNA, 19 nt, Artificial Sequence
  Description of Artificial Sequence: Synthetic oligonucleotide
  Sense strand starting at position 2678 of SEQ ID NO: 1791
uggacauccuucuucuaga

SEQ ID NO: 139605 - RNA, 19 nt, Artificial Sequence
  Description of Artificial Sequence: Synthetic oligonucleotide
  Antisense strand to SEQ ID NO: 139604
ucuagaagaaggaugucca

SEQ ID NO: 139606 - RNA, 19 nt, Artificial Sequence
  Description of Artificial Sequence: Synthetic oligonucleotide
  Sense strand starting at position 2659 of SEQ ID NO: 1791
uguacugauccuugaauug

SEQ ID NO: 139607 - RNA, 19 nt, Artificial Sequence
  Description of Artificial Sequence: Synthetic oligonucleotide
  Antisense strand to SEQ ID NO: 139606
caauucaaggaucaguaca

SEQ ID NO: 139608 - RNA, 19 nt, Artificial Sequence
  Description of Artificial Sequence: Synthetic oligonucleotide
  Sense strand starting at position 2658 of SEQ ID NO: 1791
uuguacugauccuugaauu

SEQ ID NO: 139609 - RNA, 19 nt, Artificial Sequence
  Description of Artificial Sequence: Synthetic oligonucleotide
  Antisense strand to SEQ ID NO: 139608
aauucaaggaucaguacaa

SEQ ID NO: 139610 - RNA, 19 nt, Artificial Sequence
  Description of Artificial Sequence: Synthetic oligonucleotide
  Sense strand starting at position 2405 of SEQ ID NO: 1791
ucuucugcgccuguuugaa

SEQ ID NO: 139611 - RNA, 19 nt, Artificial Sequence
  Description of Artificial Sequence: Synthetic oligonucleotide
  Antisense strand to SEQ ID NO: 139610
uucaaacaggcgcagaaga

SEQ ID NO: 139612 - RNA, 19 nt, Artificial Sequence
  Description of Artificial Sequence: Synthetic oligonucleotide
  Sense strand starting at position 2321 of SEQ ID NO: 1791
guaaaccugguuuacauau

SEQ ID NO: 139613 - RNA, 19 nt, Artificial Sequence
  Description of Artificial Sequence: Synthetic oligonucleotide
  Antisense strand to SEQ ID NO: 139612
auauguaaaccagguuuac

SEQ ID NO: 139614 - RNA, 19 nt, Artificial Sequence
  Description of Artificial Sequence: Synthetic oligonucleotide
  Sense strand starting at position 2278 of SEQ ID NO: 1791
ucggaagauuaacucugaa

SEQ ID NO: 139615 - RNA, 19 nt, Artificial Sequence
  Description of Artificial Sequence: Synthetic oligonucleotide
  Antisense strand to SEQ ID NO: 139614
uucagaguuaaucuuccga

SEQ ID NO: 139616 - RNA, 19 nt, Artificial Sequence
  Description of Artificial Sequence: Synthetic oligonucleotide
  Sense strand starting at position 1302 of SEQ ID NO: 1791
gagagaaauggucgaguac

SEQ ID NO: 139617 - RNA, 19 nt, Artificial Sequence
  Description of Artificial Sequence: Synthetic oligonucleotide
  Antisense strand to SEQ ID NO: 139616
guacucgaccauuucucuc

SEQ ID NO: 139618 - RNA, 19 nt, Artificial Sequence
  Description of Artificial Sequence: Synthetic oligonucleotide
  Sense strand starting at position 1301 of SEQ ID NO: 1791
ggagagaaauggucgagua

SEQ ID NO: 139619 - RNA, 19 nt, Artificial Sequence
  Description of Artificial Sequence: Synthetic oligonucleotide
  Antisense strand to SEQ ID NO: 139618
uacucgaccauuucucucc

SEQ ID NO: 139620 - RNA, 19 nt, Artificial Sequence
  Description of Artificial Sequence: Synthetic oligonucleotide
  Sense strand starting at position 850 of SEQ ID NO: 1791
guuuacuugcaugaaacca

SEQ ID NO: 139621 - RNA, 19 nt, Artificial Sequence
  Description of Artificial Sequence: Synthetic oligonucleotide
  Antisense strand to SEQ ID NO: 139620
ugguuucaugcaaguaaac

SEQ ID NO: 139622 - RNA, 19 nt, Artificial Sequence
  Description of Artificial Sequence: Synthetic oligonucleotide
  Sense strand starting at position 829 of SEQ ID NO: 1791
uguaauaaggcuggcauuu

SEQ ID NO: 139623 - RNA, 19 nt, Artificial Sequence
  Description of Artificial Sequence: Synthetic oligonucleotide
  Antisense strand to SEQ ID NO: 139622
aaaugccagccuuauuaca

SEQ ID NO: 139624 - RNA, 19 nt, Artificial Sequence
  Description of Artificial Sequence: Synthetic oligonucleotide
  Sense strand starting at position 819 of SEQ ID NO: 1791
uuaccauuaguguaauaag

SEQ ID NO: 139625 - RNA, 19 nt, Artificial Sequence
  Description of Artificial Sequence: Synthetic oligonucleotide
  Antisense strand to SEQ ID NO: 139624
cuuauuacacuaaugguaa

SEQ ID NO: 139626 - RNA, 19 nt, Artificial Sequence
  Description of Artificial Sequence: Synthetic oligonucleotide
  Sense strand starting at position 814 of SEQ ID NO: 1791
ucuccuuaccauuagugua

SEQ ID NO: 139627 - RNA, 19 nt, Artificial Sequence
  Description of Artificial Sequence: Synthetic oligonucleotide
  Antisense strand to SEQ ID NO: 139626
uacacuaaugguaaggaga

SEQ ID NO: 139628 - RNA, 19 nt, Artificial Sequence
  Description of Artificial Sequence: Synthetic oligonucleotide
  Sense strand starting at position 697 of SEQ ID NO: 1791
cacuaugcacgaggaaauu

SEQ ID NO: 139629 - RNA, 19 nt, Artificial Sequence
  Description of Artificial Sequence: Synthetic oligonucleotide
  Antisense strand to SEQ ID NO: 139628
aauuuccucgugcauagug

SEQ ID NO: 139630 - RNA, 19 nt, Artificial Sequence
  Description of Artificial Sequence: Synthetic oligonucleotide
  Sense strand starting at position 695 of SEQ ID NO: 1791
cccacuaugcacgaggaaa

SEQ ID NO: 139631 - RNA, 19 nt, Artificial Sequence
  Description of Artificial Sequence: Synthetic oligonucleotide
  Antisense strand to SEQ ID NO: 139630
uuuccucgugcauaguggg

SEQ ID NO: 139632 - RNA, 19 nt, Artificial Sequence
  Description of Artificial Sequence: Synthetic oligonucleotide
  Sense strand starting at position 329 of SEQ ID NO: 1791
acucaaagucuagagcuaa

SEQ ID NO: 139633 - RNA, 19 nt, Artificial Sequence
  Description of Artificial Sequence: Synthetic oligonucleotide
  Antisense strand to SEQ ID NO: 139632
uuagcucuagacuuugagu

SEQ ID NO: 139634 - RNA, 19 nt, Artificial Sequence
  Description of Artificial Sequence: Synthetic oligonucleotide
  Sense strand starting at position 279 of SEQ ID NO: 1791
acauaauaucagcgcauuu

SEQ ID NO: 139635 - RNA, 19 nt, Artificial Sequence
  Description of Artificial Sequence: Synthetic oligonucleotide
  Antisense strand to SEQ ID NO: 139634
aaaugcgcugauauuaugu

SEQ ID NO: 139636 - RNA, 19 nt, Artificial Sequence
  Description of Artificial Sequence: Synthetic oligonucleotide
  Sense strand starting at position 205 of SEQ ID NO: 1791
gcaaauguaggcuacauaa

SEQ ID NO: 139637 - RNA, 19 nt, Artificial Sequence
  Description of Artificial Sequence: Synthetic oligonucleotide
  Antisense strand to SEQ ID NO: 139636
uuauguagccuacauuugc

SEQ ID NO: 139638 - RNA, 19 nt, Artificial Sequence
  Description of Artificial Sequence: Synthetic oligonucleotide
  Sense strand starting at position 3838 of SEQ ID NO: 1794
guuggauugcugcacccau

SEQ ID NO: 139639 - RNA, 19 nt, Artificial Sequence
  Description of Artificial Sequence: Synthetic oligonucleotide
  Antisense strand to SEQ ID NO: 139638
augggugcagcaauccaac

SEQ ID NO: 139640 - RNA, 19 nt, Artificial Sequence
  Description of Artificial Sequence: Synthetic oligonucleotide
  Sense strand starting at position 3716 of SEQ ID NO: 1794
uucuucggagagugcuaau

SEQ ID NO: 139641 - RNA, 19 nt, Artificial Sequence
  Description of Artificial Sequence: Synthetic oligonucleotide
  Antisense strand to SEQ ID NO: 139640
auuagcacucuccgaagaa

SEQ ID NO: 139642 - RNA, 19 nt, Artificial Sequence
  Description of Artificial Sequence: Synthetic oligonucleotide
  Sense strand starting at position 3708 of SEQ ID NO: 1794
acaaacacuucuucggaga

SEQ ID NO: 139643 - RNA, 19 nt, Artificial Sequence
  Description of Artificial Sequence: Synthetic oligonucleotide
  Antisense strand to SEQ ID NO: 139642
ucuccgaagaaguguuugu

SEQ ID NO: 139644 - RNA, 19 nt, Artificial Sequence
  Description of Artificial Sequence: Synthetic oligonucleotide
  Sense strand starting at position 3611 of SEQ ID NO: 1794
uccuguuugccuuaucuau

SEQ ID NO: 139645 - RNA, 19 nt, Artificial Sequence
  Description of Artificial Sequence: Synthetic oligonucleotide
  Antisense strand to SEQ ID NO: 139644
auagauaaggcaaacagga

SEQ ID NO: 139646 - RNA, 19 nt, Artificial Sequence
  Description of Artificial Sequence: Synthetic oligonucleotide
  Sense strand starting at position 3541 of SEQ ID NO: 1794
ccugcuuacacguaguaag

SEQ ID NO: 139647 - RNA, 19 nt, Artificial Sequence
  Description of Artificial Sequence: Synthetic oligonucleotide
  Antisense strand to SEQ ID NO: 139646
cuuacuacguguaagcagg

SEQ ID NO: 139648 - RNA, 19 nt, Artificial Sequence
  Description of Artificial Sequence: Synthetic oligonucleotide
  Sense strand starting at position 3540 of SEQ ID NO: 1794
gccugcuuacacguaguaa

SEQ ID NO: 139649 - RNA, 19 nt, Artificial Sequence
  Description of Artificial Sequence: Synthetic oligonucleotide
  Antisense strand to SEQ ID NO: 139648
uuacuacguguaagcaggc

SEQ ID NO: 139650 - RNA, 19 nt, Artificial Sequence
  Description of Artificial Sequence: Synthetic oligonucleotide
  Sense strand starting at position 3521 of SEQ ID NO: 1794
ggcuguuaauuaguagagu

SEQ ID NO: 139651 - RNA, 19 nt, Artificial Sequence
  Description of Artificial Sequence: Synthetic oligonucleotide
  Antisense strand to SEQ ID NO: 139650
acucuacuaauuaacagcc

SEQ ID NO: 139652 - RNA, 19 nt, Artificial Sequence
  Description of Artificial Sequence: Synthetic oligonucleotide
  Sense strand starting at position 3519 of SEQ ID NO: 1794
auggcuguuaauuaguaga

SEQ ID NO: 139653 - RNA, 19 nt, Artificial Sequence
  Description of Artificial Sequence: Synthetic oligonucleotide
  Antisense strand to SEQ ID NO: 139652
ucuacuaauuaacagccau

SEQ ID NO: 139654 - RNA, 19 nt, Artificial Sequence
  Description of Artificial Sequence: Synthetic oligonucleotide
  Sense strand starting at position 3512 of SEQ ID NO: 1794
aucugaaauggcuguuaau

SEQ ID NO: 139655 - RNA, 19 nt, Artificial Sequence
  Description of Artificial Sequence: Synthetic oligonucleotide
  Antisense strand to SEQ ID NO: 139654
auuaacagccauuucagau

SEQ ID NO: 139656 - RNA, 19 nt, Artificial Sequence
  Description of Artificial Sequence: Synthetic oligonucleotide
  Sense strand starting at position 3406 of SEQ ID NO: 1794
uacagugagcggugauaau

SEQ ID NO: 139657 - RNA, 19 nt, Artificial Sequence
  Description of Artificial Sequence: Synthetic oligonucleotide
  Antisense strand to SEQ ID NO: 139656
auuaucaccgcucacugua

SEQ ID NO: 139658 - RNA, 19 nt, Artificial Sequence
  Description of Artificial Sequence: Synthetic oligonucleotide
  Sense strand starting at position 3185 of SEQ ID NO: 1794
auccguuaggucugauuuc

SEQ ID NO: 139659 - RNA, 19 nt, Artificial Sequence
  Description of Artificial Sequence: Synthetic oligonucleotide
  Antisense strand to SEQ ID NO: 139658
gaaaucagaccuaacggau

SEQ ID NO: 139660 - RNA, 19 nt, Artificial Sequence
  Description of Artificial Sequence: Synthetic oligonucleotide
  Sense strand starting at position 3179 of SEQ ID NO: 1794
gauggaauccguuaggucu

SEQ ID NO: 139661 - RNA, 19 nt, Artificial Sequence
  Description of Artificial Sequence: Synthetic oligonucleotide
  Antisense strand to SEQ ID NO: 139660
agaccuaacggauuccauc

SEQ ID NO: 139662 - RNA, 19 nt, Artificial Sequence
  Description of Artificial Sequence: Synthetic oligonucleotide
  Sense strand starting at position 2603 of SEQ ID NO: 1794
ucaagaacuuaucuuaggu

SEQ ID NO: 139663 - RNA, 19 nt, Artificial Sequence
  Description of Artificial Sequence: Synthetic oligonucleotide
  Antisense strand to SEQ ID NO: 139662
accuaagauaaguucuuga

SEQ ID NO: 139664 - RNA, 19 nt, Artificial Sequence
  Description of Artificial Sequence: Synthetic oligonucleotide
  Sense strand starting at position 2548 of SEQ ID NO: 1794
uuaccaaucugggugguuu

SEQ ID NO: 139665 - RNA, 19 nt, Artificial Sequence
  Description of Artificial Sequence: Synthetic oligonucleotide
  Antisense strand to SEQ ID NO: 139664
aaaccacccagauugguaa

SEQ ID NO: 139666 - RNA, 19 nt, Artificial Sequence
  Description of Artificial Sequence: Synthetic oligonucleotide
  Sense strand starting at position 2530 of SEQ ID NO: 1794
agaacugguugagccaaau

SEQ ID NO: 139667 - RNA, 19 nt, Artificial Sequence
  Description of Artificial Sequence: Synthetic oligonucleotide
  Antisense strand to SEQ ID NO: 139666
auuuggcucaaccaguucu

SEQ ID NO: 139668 - RNA, 19 nt, Artificial Sequence
  Description of Artificial Sequence: Synthetic oligonucleotide
  Sense strand starting at position 2410 of SEQ ID NO: 1794
agauaauucggcgauuagg

SEQ ID NO: 139669 - RNA, 19 nt, Artificial Sequence
  Description of Artificial Sequence: Synthetic oligonucleotide
  Antisense strand to SEQ ID NO: 139668
ccuaaucgccgaauuaucu

SEQ ID NO: 139670 - RNA, 19 nt, Artificial Sequence
  Description of Artificial Sequence: Synthetic oligonucleotide
  Sense strand starting at position 2409 of SEQ ID NO: 1794
aagauaauucggcgauuag

SEQ ID NO: 139671 - RNA, 19 nt, Artificial Sequence
  Description of Artificial Sequence: Synthetic oligonucleotide
  Antisense strand to SEQ ID NO: 139670
cuaaucgccgaauuaucuu

SEQ ID NO: 139672 - RNA, 19 nt, Artificial Sequence
  Description of Artificial Sequence: Synthetic oligonucleotide
  Sense strand starting at position 2408 of SEQ ID NO: 1794
aaagauaauucggcgauua

SEQ ID NO: 139673 - RNA, 19 nt, Artificial Sequence
  Description of Artificial Sequence: Synthetic oligonucleotide
  Antisense strand to SEQ ID NO: 139672
uaaucgccgaauuaucuuu

SEQ ID NO: 139674 - RNA, 19 nt, Artificial Sequence
  Description of Artificial Sequence: Synthetic oligonucleotide
  Sense strand starting at position 2186 of SEQ ID NO: 1794
uuaaauaucugaguugcuu

SEQ ID NO: 139675 - RNA, 19 nt, Artificial Sequence
  Description of Artificial Sequence: Synthetic oligonucleotide
  Antisense strand to SEQ ID NO: 139674
aagcaacucagauauuuaa

SEQ ID NO: 139676 - RNA, 19 nt, Artificial Sequence
  Description of Artificial Sequence: Synthetic oligonucleotide
  Sense strand starting at position 2140 of SEQ ID NO: 1794
gucccauagucacuccgau

SEQ ID NO: 139677 - RNA, 19 nt, Artificial Sequence
  Description of Artificial Sequence: Synthetic oligonucleotide
  Antisense strand to SEQ ID NO: 139676
aucggagugacuaugggac

SEQ ID NO: 139678 - RNA, 19 nt, Artificial Sequence
  Description of Artificial Sequence: Synthetic oligonucleotide
  Sense strand starting at position 2129 of SEQ ID NO: 1794
accauaugcuugucccaua

SEQ ID NO: 139679 - RNA, 19 nt, Artificial Sequence
  Description of Artificial Sequence: Synthetic oligonucleotide
  Antisense strand to SEQ ID NO: 139678
uaugggacaagcauauggu

SEQ ID NO: 139680 - RNA, 19 nt, Artificial Sequence
  Description of Artificial Sequence: Synthetic oligonucleotide
  Sense strand starting at position 1842 of SEQ ID NO: 1794
aggugaccagugugcuuaa

SEQ ID NO: 139681 - RNA, 19 nt, Artificial Sequence
  Description of Artificial Sequence: Synthetic oligonucleotide
  Antisense strand to SEQ ID NO: 139680
uuaagcacacuggucaccu

SEQ ID NO: 139682 - RNA, 19 nt, Artificial Sequence
  Description of Artificial Sequence: Synthetic oligonucleotide
  Sense strand starting at position 1667 of SEQ ID NO: 1794
cagaaaucgggcugcucaa

SEQ ID NO: 139683 - RNA, 19 nt, Artificial Sequence
  Description of Artificial Sequence: Synthetic oligonucleotide
  Antisense strand to SEQ ID NO: 139682
uugagcagcccgauuucug

SEQ ID NO: 139684 - RNA, 19 nt, Artificial Sequence
  Description of Artificial Sequence: Synthetic oligonucleotide
  Sense strand starting at position 1520 of SEQ ID NO: 1794
ggaagugauuaaguaccga

SEQ ID NO: 139685 - RNA, 19 nt, Artificial Sequence
  Description of Artificial Sequence: Synthetic oligonucleotide
  Antisense strand to SEQ ID NO: 139684
ucgguacuuaaucacuucc

SEQ ID NO: 139686 - RNA, 19 nt, Artificial Sequence
  Description of Artificial Sequence: Synthetic oligonucleotide
  Sense strand starting at position 1464 of SEQ ID NO: 1794
auaucuuccucauugagag

SEQ ID NO: 139687 - RNA, 19 nt, Artificial Sequence
  Description of Artificial Sequence: Synthetic oligonucleotide
  Antisense strand to SEQ ID NO: 139686
cucucaaugaggaagauau

SEQ ID NO: 139688 - RNA, 19 nt, Artificial Sequence
  Description of Artificial Sequence: Synthetic oligonucleotide
  Sense strand starting at position 1433 of SEQ ID NO: 1794
augugaugcggcucuaguu

SEQ ID NO: 139689 - RNA, 19 nt, Artificial Sequence
  Description of Artificial Sequence: Synthetic oligonucleotide
  Antisense strand to SEQ ID NO: 139688
aacuagagccgcaucacau

SEQ ID NO: 139690 - RNA, 19 nt, Artificial Sequence
  Description of Artificial Sequence: Synthetic oligonucleotide
  Sense strand starting at position 1407 of SEQ ID NO: 1794
gagucucuguauuugcaga

SEQ ID NO: 139691 - RNA, 19 nt, Artificial Sequence
  Description of Artificial Sequence: Synthetic oligonucleotide
  Antisense strand to SEQ ID NO: 139690
ucugcaaauacagagacuc

SEQ ID NO: 139692 - RNA, 19 nt, Artificial Sequence
  Description of Artificial Sequence: Synthetic oligonucleotide
  Sense strand starting at position 1401 of SEQ ID NO: 1794
uaauccgagucucuguauu

SEQ ID NO: 139693 - RNA, 19 nt, Artificial Sequence
  Description of Artificial Sequence: Synthetic oligonucleotide
  Antisense strand to SEQ ID NO: 139692
aauacagagacucggauua

SEQ ID NO: 139694 - RNA, 19 nt, Artificial Sequence
  Description of Artificial Sequence: Synthetic oligonucleotide
  Sense strand starting at position 1293 of SEQ ID NO: 1794
cgaauucuugcuuaaucaa

SEQ ID NO: 139695 - RNA, 19 nt, Artificial Sequence
  Description of Artificial Sequence: Synthetic oligonucleotide
  Antisense strand to SEQ ID NO: 139694
uugauuaagcaagaauucg

SEQ ID NO: 139696 - RNA, 19 nt, Artificial Sequence
  Description of Artificial Sequence: Synthetic oligonucleotide
  Sense strand starting at position 1228 of SEQ ID NO: 1794
acgguuuacauguggcaga

SEQ ID NO: 139697 - RNA, 19 nt, Artificial Sequence
  Description of Artificial Sequence: Synthetic oligonucleotide
  Antisense strand to SEQ ID NO: 139696
ucugccacauguaaaccgu

SEQ ID NO: 139698 - RNA, 19 nt, Artificial Sequence
  Description of Artificial Sequence: Synthetic oligonucleotide
  Sense strand starting at position 865 of SEQ ID NO: 1794
gcuugagccagggaaauua

SEQ ID NO: 139699 - RNA, 19 nt, Artificial Sequence
  Description of Artificial Sequence: Synthetic oligonucleotide
  Antisense strand to SEQ ID NO: 139698
uaauuucccuggcucaagc

SEQ ID NO: 139700 - RNA, 19 nt, Artificial Sequence
  Description of Artificial Sequence: Synthetic oligonucleotide
  Sense strand starting at position 728 of SEQ ID NO: 1794
uguuuaccucuacaacguu

SEQ ID NO: 139701 - RNA, 19 nt, Artificial Sequence
  Description of Artificial Sequence: Synthetic oligonucleotide
  Antisense strand to SEQ ID NO: 139700
aacguuguagagguaaaca

SEQ ID NO: 139702 - RNA, 19 nt, Artificial Sequence
  Description of Artificial Sequence: Synthetic oligonucleotide
  Sense strand starting at position 713 of SEQ ID NO: 1794
ugguaaucucaucaauguu

SEQ ID NO: 139703 - RNA, 19 nt, Artificial Sequence
  Description of Artificial Sequence: Synthetic oligonucleotide
  Antisense strand to SEQ ID NO: 139702
aacauugaugagauuacca

SEQ ID NO: 139704 - RNA, 19 nt, Artificial Sequence
  Description of Artificial Sequence: Synthetic oligonucleotide
  Sense strand starting at position 712 of SEQ ID NO: 1794
gugguaaucucaucaaugu

SEQ ID NO: 139705 - RNA, 19 nt, Artificial Sequence
  Description of Artificial Sequence: Synthetic oligonucleotide
  Antisense strand to SEQ ID NO: 139704
acauugaugagauuaccac

SEQ ID NO: 139706 - RNA, 19 nt, Artificial Sequence
  Description of Artificial Sequence: Synthetic oligonucleotide
  Sense strand starting at position 529 of SEQ ID NO: 1794
acugcuuaugacugucaca

SEQ ID NO: 139707 - RNA, 19 nt, Artificial Sequence
  Description of Artificial Sequence: Synthetic oligonucleotide
  Antisense strand to SEQ ID NO: 139706
ugugacagucauaagcagu

SEQ ID NO: 139708 - RNA, 19 nt, Artificial Sequence
  Description of Artificial Sequence: Synthetic oligonucleotide
  Sense strand starting at position 489 of SEQ ID NO: 1794
cauggaguuggaugccauu

SEQ ID NO: 139709 - RNA, 19 nt, Artificial Sequence
  Description of Artificial Sequence: Synthetic oligonucleotide
  Antisense strand to SEQ ID NO: 139708
aauggcauccaacuccaug

SEQ ID NO: 139710 - RNA, 19 nt, Artificial Sequence
  Description of Artificial Sequence: Synthetic oligonucleotide
  Sense strand starting at position 382 of SEQ ID NO: 1794
gcccucucaguauagguaa

SEQ ID NO: 139711 - RNA, 19 nt, Artificial Sequence
  Description of Artificial Sequence: Synthetic oligonucleotide
  Antisense strand to SEQ ID NO: 139710
uuaccuauacugagagggc

SEQ ID NO: 139712 - RNA, 19 nt, Artificial Sequence
  Description of Artificial Sequence: Synthetic oligonucleotide
  Sense strand starting at position 164 of SEQ ID NO: 1794
uugcuaagauugucccaga

SEQ ID NO: 139713 - RNA, 19 nt, Artificial Sequence
  Description of Artificial Sequence: Synthetic oligonucleotide
  Antisense strand to SEQ ID NO: 139712
ucugggacaaucuuagcaa

SEQ ID NO: 139714 - RNA, 19 nt, Artificial Sequence
  Description of Artificial Sequence: Synthetic oligonucleotide
  Sense strand starting at position 145 of SEQ ID NO: 1794
cuaaguuguuuacuacuuu

SEQ ID NO: 139715 - RNA, 19 nt, Artificial Sequence
  Description of Artificial Sequence: Synthetic oligonucleotide
  Antisense strand to SEQ ID NO: 139714
aaaguaguaaacaacuuag

SEQ ID NO: 139716 - RNA, 19 nt, Artificial Sequence
  Description of Artificial Sequence: Synthetic oligonucleotide
  Sense strand starting at position 81 of SEQ ID NO: 1794
cccacaaaucgguagacua

SEQ ID NO: 139717 - RNA, 19 nt, Artificial Sequence
  Description of Artificial Sequence: Synthetic oligonucleotide
  Antisense strand to SEQ ID NO: 139716
uagucuaccgauuuguggg

SEQ ID NO: 139718 - RNA, 19 nt, Artificial Sequence
  Description of Artificial Sequence: Synthetic oligonucleotide
  Sense strand starting at position 217 of SEQ ID NO: 1795
cugcaucucauggagguua

SEQ ID NO: 139719 - RNA, 19 nt, Artificial Sequence
  Description of Artificial Sequence: Synthetic oligonucleotide
  Antisense strand to SEQ ID NO: 139718
uaaccuccaugagaugcag

SEQ ID NO: 139720 - RNA, 19 nt, Artificial Sequence
  Description of Artificial Sequence: Synthetic oligonucleotide
  Sense strand starting at position 219 of SEQ ID NO: 1795
gcaucucauggagguuaaa

SEQ ID NO: 139721 - RNA, 19 nt, Artificial Sequence
  Description of Artificial Sequence: Synthetic oligonucleotide
  Antisense strand to SEQ ID NO: 139720
uuuaaccuccaugagaugc

SEQ ID NO: 139722 - RNA, 19 nt, Artificial Sequence
  Description of Artificial Sequence: Synthetic oligonucleotide
  Sense strand starting at position 909 of SEQ ID NO: 1795
auaggaugugucuaugguu

SEQ ID NO: 139723 - RNA, 19 nt, Artificial Sequence
  Description of Artificial Sequence: Synthetic oligonucleotide
  Antisense strand to SEQ ID NO: 139722
aaccauagacacauccuau

SEQ ID NO: 139724 - RNA, 19 nt, Artificial Sequence
  Description of Artificial Sequence: Synthetic oligonucleotide
  Sense strand starting at position 916 of SEQ ID NO: 1795
gugucuaugguugaaauga

SEQ ID NO: 139725 - RNA, 19 nt, Artificial Sequence
  Description of Artificial Sequence: Synthetic oligonucleotide
  Antisense strand to SEQ ID NO: 139724
ucauuucaaccauagacac

SEQ ID NO: 139726 - RNA, 19 nt, Artificial Sequence
  Description of Artificial Sequence: Synthetic oligonucleotide
  Sense strand starting at position 1004 of SEQ ID NO: 1795
ggugguaggaaggguauua

SEQ ID NO: 139727 - RNA, 19 nt, Artificial Sequence
  Description of Artificial Sequence: Synthetic oligonucleotide
  Antisense strand to SEQ ID NO: 139726
uaauacccuuccuaccacc

SEQ ID NO: 139728 - RNA, 19 nt, Artificial Sequence
  Description of Artificial Sequence: Synthetic oligonucleotide
  Sense strand starting at position 1072 of SEQ ID NO: 1795
ccaggacgucagggaucua

SEQ ID NO: 139729 - RNA, 19 nt, Artificial Sequence
  Description of Artificial Sequence: Synthetic oligonucleotide
  Antisense strand to SEQ ID NO: 139728
uagaucccugacguccugg

SEQ ID NO: 139730 - RNA, 19 nt, Artificial Sequence
  Description of Artificial Sequence: Synthetic oligonucleotide
  Sense strand starting at position 1230 of SEQ ID NO: 1795
ucauaaaugagacggugaa

SEQ ID NO: 139731 - RNA, 19 nt, Artificial Sequence
  Description of Artificial Sequence: Synthetic oligonucleotide
  Antisense strand to SEQ ID NO: 139730
uucaccgucucauuuauga

SEQ ID NO: 139732 - RNA, 19 nt, Artificial Sequence
  Description of Artificial Sequence: Synthetic oligonucleotide
  Sense strand starting at position 1231 of SEQ ID NO: 1795
cauaaaugagacggugaau

SEQ ID NO: 139733 - RNA, 19 nt, Artificial Sequence
  Description of Artificial Sequence: Synthetic oligonucleotide
  Antisense strand to SEQ ID NO: 139732
auucaccgucucauuuaug

SEQ ID NO: 139734 - RNA, 19 nt, Artificial Sequence
  Description of Artificial Sequence: Synthetic oligonucleotide
  Sense strand starting at position 1264 of SEQ ID NO: 1795
ugaggucuaaagugggaaa

SEQ ID NO: 139735 - RNA, 19 nt, Artificial Sequence
  Description of Artificial Sequence: Synthetic oligonucleotide
  Antisense strand to SEQ ID NO: 139734
uuucccacuuuagaccuca

SEQ ID NO: 139736 - RNA, 19 nt, Artificial Sequence
  Description of Artificial Sequence: Synthetic oligonucleotide
  Sense strand starting at position 1616 of SEQ ID NO: 1795
cgcgguugccggaaauuga

SEQ ID NO: 139737 - RNA, 19 nt, Artificial Sequence
  Description of Artificial Sequence: Synthetic oligonucleotide
  Antisense strand to SEQ ID NO: 139736
ucaauuuccggcaaccgcg

SEQ ID NO: 139738 - RNA, 19 nt, Artificial Sequence
  Description of Artificial Sequence: Synthetic oligonucleotide
  Sense strand starting at position 1674 of SEQ ID NO: 1795
gggagacuguggguguaaa

SEQ ID NO: 139739 - RNA, 19 nt, Artificial Sequence
  Description of Artificial Sequence: Synthetic oligonucleotide
  Antisense strand to SEQ ID NO: 139738
uuuacacccacagucuccc

SEQ ID NO: 139740 - RNA, 19 nt, Artificial Sequence
  Description of Artificial Sequence: Synthetic oligonucleotide
  Sense strand starting at position 2127 of SEQ ID NO: 1795
cuagacaaaucauuagguu

SEQ ID NO: 139741 - RNA, 19 nt, Artificial Sequence
  Description of Artificial Sequence: Synthetic oligonucleotide
  Antisense strand to SEQ ID NO: 139740
aaccuaaugauuugucuag

SEQ ID NO: 139742 - RNA, 19 nt, Artificial Sequence
  Description of Artificial Sequence: Synthetic oligonucleotide
  Sense strand starting at position 2234 of SEQ ID NO: 1795
cggacuucccaucaaguuu

SEQ ID NO: 139743 - RNA, 19 nt, Artificial Sequence
  Description of Artificial Sequence: Synthetic oligonucleotide
  Antisense strand to SEQ ID NO: 139742
aaacuugaugggaaguccg

SEQ ID NO: 139744 - RNA, 19 nt, Artificial Sequence
  Description of Artificial Sequence: Synthetic oligonucleotide
  Sense strand starting at position 2504 of SEQ ID NO: 1795
gcucuuaauuaacuaggau

SEQ ID NO: 139745 - RNA, 19 nt, Artificial Sequence
  Description of Artificial Sequence: Synthetic oligonucleotide
  Antisense strand to SEQ ID NO: 139744
auccuaguuaauuaagagc

SEQ ID NO: 139746 - RNA, 19 nt, Artificial Sequence
  Description of Artificial Sequence: Synthetic oligonucleotide
  Sense strand starting at position 2507 of SEQ ID NO: 1795
cuuaauuaacuaggauugu

SEQ ID NO: 139747 - RNA, 19 nt, Artificial Sequence
  Description of Artificial Sequence: Synthetic oligonucleotide
  Antisense strand to SEQ ID NO: 139746
acaauccuaguuaauuaag

SEQ ID NO: 139748 - RNA, 19 nt, Artificial Sequence
  Description of Artificial Sequence: Synthetic oligonucleotide
  Sense strand starting at position 2754 of SEQ ID NO: 1795
agaaauaacuguucgauau

SEQ ID NO: 139749 - RNA, 19 nt, Artificial Sequence
  Description of Artificial Sequence: Synthetic oligonucleotide
  Antisense strand to SEQ ID NO: 139748
auaucgaacaguuauuucu

SEQ ID NO: 139750 - RNA, 19 nt, Artificial Sequence
  Description of Artificial Sequence: Synthetic oligonucleotide
  Sense strand starting at position 2755 of SEQ ID NO: 1795
gaaauaacuguucgauauu

SEQ ID NO: 139751 - RNA, 19 nt, Artificial Sequence
  Description of Artificial Sequence: Synthetic oligonucleotide
  Antisense strand to SEQ ID NO: 139750
aauaucgaacaguuauuuc

SEQ ID NO: 139752 - RNA, 19 nt, Artificial Sequence
  Description of Artificial Sequence: Synthetic oligonucleotide
  Sense strand starting at position 2769 of SEQ ID NO: 1795
auauuuacugucugcugua

SEQ ID NO: 139753 - RNA, 19 nt, Artificial Sequence
  Description of Artificial Sequence: Synthetic oligonucleotide
  Antisense strand to SEQ ID NO: 139752
uacagcagacaguaaauau

SEQ ID NO: 139754 - RNA, 19 nt, Artificial Sequence
  Description of Artificial Sequence: Synthetic oligonucleotide
  Sense strand starting at position 2778 of SEQ ID NO: 1795
gucugcuguauguuaagca

SEQ ID NO: 139755 - RNA, 19 nt, Artificial Sequence
  Description of Artificial Sequence: Synthetic oligonucleotide
  Antisense strand to SEQ ID NO: 139754
ugcuuaacauacagcagac

SEQ ID NO: 139756 - RNA, 19 nt, Artificial Sequence
  Description of Artificial Sequence: Synthetic oligonucleotide
  Sense strand starting at position 2788 of SEQ ID NO: 1795
uguuaagcacuguaaugau

SEQ ID NO: 139757 - RNA, 19 nt, Artificial Sequence
  Description of Artificial Sequence: Synthetic oligonucleotide
  Antisense strand to SEQ ID NO: 139756
aucauuacagugcuuaaca

SEQ ID NO: 139758 - RNA, 19 nt, Artificial Sequence
  Description of Artificial Sequence: Synthetic oligonucleotide
  Sense strand starting at position 2904 of SEQ ID NO: 1795
ucaucagucuagcucagaa

SEQ ID NO: 139759 - RNA, 19 nt, Artificial Sequence
  Description of Artificial Sequence: Synthetic oligonucleotide
  Antisense strand to SEQ ID NO: 139758
uucugagcuagacugauga

SEQ ID NO: 139760 - RNA, 19 nt, Artificial Sequence
  Description of Artificial Sequence: Synthetic oligonucleotide
  Sense strand starting at position 3054 of SEQ ID NO: 1795
cagguuagauaacuaagua

SEQ ID NO: 139761 - RNA, 19 nt, Artificial Sequence
  Description of Artificial Sequence: Synthetic oligonucleotide
  Antisense strand to SEQ ID NO: 139760
uacuuaguuaucuaaccug

SEQ ID NO: 139762 - RNA, 19 nt, Artificial Sequence
  Description of Artificial Sequence: Synthetic oligonucleotide
  Sense strand starting at position 3074 of SEQ ID NO: 1795
cugguugccaguuauggga

SEQ ID NO: 139763 - RNA, 19 nt, Artificial Sequence
  Description of Artificial Sequence: Synthetic oligonucleotide
  Antisense strand to SEQ ID NO: 139762
ucccauaacuggcaaccag

SEQ ID NO: 139764 - RNA, 19 nt, Artificial Sequence
  Description of Artificial Sequence: Synthetic oligonucleotide
  Sense strand starting at position 3138 of SEQ ID NO: 1795
uauguaugugagcacauga

SEQ ID NO: 139765 - RNA, 19 nt, Artificial Sequence
  Description of Artificial Sequence: Synthetic oligonucleotide
  Antisense strand to SEQ ID NO: 139764
ucaugugcucacauacaua

SEQ ID NO: 139766 - RNA, 19 nt, Artificial Sequence
  Description of Artificial Sequence: Synthetic oligonucleotide
  Sense strand starting at position 3152 of SEQ ID NO: 1795
caugaaaguguguacgauu

SEQ ID NO: 139767 - RNA, 19 nt, Artificial Sequence
  Description of Artificial Sequence: Synthetic oligonucleotide
  Antisense strand to SEQ ID NO: 139766
aaucguacacacuuucaug

SEQ ID NO: 139768 - RNA, 19 nt, Artificial Sequence
  Description of Artificial Sequence: Synthetic oligonucleotide
  Sense strand starting at position 3164 of SEQ ID NO: 1795
uacgauugugaagagugaa

SEQ ID NO: 139769 - RNA, 19 nt, Artificial Sequence
  Description of Artificial Sequence: Synthetic oligonucleotide
  Antisense strand to SEQ ID NO: 139768
uucacucuucacaaucgua

SEQ ID NO: 139770 - RNA, 19 nt, Artificial Sequence
  Description of Artificial Sequence: Synthetic oligonucleotide
  Sense strand starting at position 3250 of SEQ ID NO: 1795
uugugaaguuggucugaaa

SEQ ID NO: 139771 - RNA, 19 nt, Artificial Sequence
  Description of Artificial Sequence: Synthetic oligonucleotide
  Antisense strand to SEQ ID NO: 139770
uuucagaccaacuucacaa

SEQ ID NO: 139772 - RNA, 19 nt, Artificial Sequence
  Description of Artificial Sequence: Synthetic oligonucleotide
  Sense strand starting at position 3261 of SEQ ID NO: 1795
gucugaaacucauuaguca

SEQ ID NO: 139773 - RNA, 19 nt, Artificial Sequence
  Description of Artificial Sequence: Synthetic oligonucleotide
  Antisense strand to SEQ ID NO: 139772
ugacuaaugaguuucagac

SEQ ID NO: 139774 - RNA, 19 nt, Artificial Sequence
  Description of Artificial Sequence: Synthetic oligonucleotide
  Sense strand starting at position 3268 of SEQ ID NO: 1795
acucauuagucagcacuga

SEQ ID NO: 139775 - RNA, 19 nt, Artificial Sequence
  Description of Artificial Sequence: Synthetic oligonucleotide
  Antisense strand to SEQ ID NO: 139774
ucagugcugacuaaugagu

SEQ ID NO: 139776 - RNA, 19 nt, Artificial Sequence
  Description of Artificial Sequence: Synthetic oligonucleotide
  Sense strand starting at position 3269 of SEQ ID NO: 1795
cucauuagucagcacugaa

SEQ ID NO: 139777 - RNA, 19 nt, Artificial Sequence
  Description of Artificial Sequence: Synthetic oligonucleotide
  Antisense strand to SEQ ID NO: 139776
uucagugcugacuaaugag

SEQ ID NO: 139778 - RNA, 19 nt, Artificial Sequence
  Description of Artificial Sequence: Synthetic oligonucleotide
  Sense strand starting at position 3322 of SEQ ID NO: 1795
cuggaucucuuccugagau

SEQ ID NO: 139779 - RNA, 19 nt, Artificial Sequence
  Description of Artificial Sequence: Synthetic oligonucleotide
  Antisense strand to SEQ ID NO: 139778
aucucaggaagagauccag

SEQ ID NO: 139780 - RNA, 19 nt, Artificial Sequence
  Description of Artificial Sequence: Synthetic oligonucleotide
  Sense strand starting at position 3679 of SEQ ID NO: 1795
ugaugagaaucuccaaagu

SEQ ID NO: 139781 - RNA, 19 nt, Artificial Sequence
  Description of Artificial Sequence: Synthetic oligonucleotide
  Antisense strand to SEQ ID NO: 139780
acuuuggagauucucauca

SEQ ID NO: 139782 - RNA, 19 nt, Artificial Sequence
  Description of Artificial Sequence: Synthetic oligonucleotide
  Sense strand starting at position 3713 of SEQ ID NO: 1795
cuuaccugugucuaacaua

SEQ ID NO: 139783 - RNA, 19 nt, Artificial Sequence
  Description of Artificial Sequence: Synthetic oligonucleotide
  Antisense strand to SEQ ID NO: 139782
uauguuagacacagguaag

SEQ ID NO: 139784 - RNA, 19 nt, Artificial Sequence
  Description of Artificial Sequence: Synthetic oligonucleotide
  Sense strand starting at position 3792 of SEQ ID NO: 1795
ggcugaucccuacaucuuu

SEQ ID NO: 139785 - RNA, 19 nt, Artificial Sequence
  Description of Artificial Sequence: Synthetic oligonucleotide
  Antisense strand to SEQ ID NO: 139784
aaagauguagggaucagcc

SEQ ID NO: 139786 - RNA, 19 nt, Artificial Sequence
  Description of Artificial Sequence: Synthetic oligonucleotide
  Sense strand starting at position 3859 of SEQ ID NO: 1795
ggcauuugagaccguugau

SEQ ID NO: 139787 - RNA, 19 nt, Artificial Sequence
  Description of Artificial Sequence: Synthetic oligonucleotide
  Antisense strand to SEQ ID NO: 139786
aucaacggucucaaaugcc

SEQ ID NO: 139788 - RNA, 19 nt, Artificial Sequence
  Description of Artificial Sequence: Synthetic oligonucleotide
  Sense strand starting at position 3906 of SEQ ID NO: 1795
ggaaauuaacucuguaggu

SEQ ID NO: 139789 - RNA, 19 nt, Artificial Sequence
  Description of Artificial Sequence: Synthetic oligonucleotide
  Antisense strand to SEQ ID NO: 139788
accuacagaguuaauuucc

SEQ ID NO: 139790 - RNA, 19 nt, Artificial Sequence
  Description of Artificial Sequence: Synthetic oligonucleotide
  Sense strand starting at position 3907 of SEQ ID NO: 1795
gaaauuaacucuguagguc

SEQ ID NO: 139791 - RNA, 19 nt, Artificial Sequence
  Description of Artificial Sequence: Synthetic oligonucleotide
  Antisense strand to SEQ ID NO: 139790
gaccuacagaguuaauuuc

SEQ ID NO: 139792 - RNA, 19 nt, Artificial Sequence
  Description of Artificial Sequence: Synthetic oligonucleotide
  Sense strand starting at position 3911 of SEQ ID NO: 1795
uuaacucuguaggucaaua

SEQ ID NO: 139793 - RNA, 19 nt, Artificial Sequence
  Description of Artificial Sequence: Synthetic oligonucleotide
  Antisense strand to SEQ ID NO: 139792
uauugaccuacagaguuaa

SEQ ID NO: 139794 - RNA, 19 nt, Artificial Sequence
  Description of Artificial Sequence: Synthetic oligonucleotide
  Sense strand starting at position 3916 of SEQ ID NO: 1795
ucuguaggucaauacaacu

SEQ ID NO: 139795 - RNA, 19 nt, Artificial Sequence
  Description of Artificial Sequence: Synthetic oligonucleotide
  Antisense strand to SEQ ID NO: 139794
aguuguauugaccuacaga

SEQ ID NO: 139796 - RNA, 19 nt, Artificial Sequence
  Description of Artificial Sequence: Synthetic oligonucleotide
  Sense strand starting at position 3970 of SEQ ID NO: 1795
gguuguuuagguuaucaca

SEQ ID NO: 139797 - RNA, 19 nt, Artificial Sequence
  Description of Artificial Sequence: Synthetic oligonucleotide
  Antisense strand to SEQ ID NO: 139796
ugugauaaccuaaacaacc

SEQ ID NO: 139798 - RNA, 19 nt, Artificial Sequence
  Description of Artificial Sequence: Synthetic oligonucleotide
  Sense strand starting at position 3763 of SEQ ID NO: 1796
guauuaaucgguugggagg

SEQ ID NO: 139799 - RNA, 19 nt, Artificial Sequence
  Description of Artificial Sequence: Synthetic oligonucleotide
  Antisense strand to SEQ ID NO: 139798
ccucccaaccgauuaauac

SEQ ID NO: 139800 - RNA, 19 nt, Artificial Sequence
  Description of Artificial Sequence: Synthetic oligonucleotide
  Sense strand starting at position 3761 of SEQ ID NO: 1796
aaguauuaaucgguuggga

SEQ ID NO: 139801 - RNA, 19 nt, Artificial Sequence
  Description of Artificial Sequence: Synthetic oligonucleotide
  Antisense strand to SEQ ID NO: 139800
ucccaaccgauuaauacuu

SEQ ID NO: 139802 - RNA, 19 nt, Artificial Sequence
  Description of Artificial Sequence: Synthetic oligonucleotide
  Sense strand starting at position 3137 of SEQ ID NO: 1796
gaauucugaggucaggcau

SEQ ID NO: 139803 - RNA, 19 nt, Artificial Sequence
  Description of Artificial Sequence: Synthetic oligonucleotide
  Antisense strand to SEQ ID NO: 139802
augccugaccucagaauuc

SEQ ID NO: 139804 - RNA, 19 nt, Artificial Sequence
  Description of Artificial Sequence: Synthetic oligonucleotide
  Sense strand starting at position 3134 of SEQ ID NO: 1796
caagaauucugaggucagg

SEQ ID NO: 139805 - RNA, 19 nt, Artificial Sequence
  Description of Artificial Sequence: Synthetic oligonucleotide
  Antisense strand to SEQ ID NO: 139804
ccugaccucagaauucuug

SEQ ID NO: 139806 - RNA, 19 nt, Artificial Sequence
  Description of Artificial Sequence: Synthetic oligonucleotide
  Sense strand starting at position 3121 of SEQ ID NO: 1796
cucacaggguuaucaagaa

SEQ ID NO: 139807 - RNA, 19 nt, Artificial Sequence
  Description of Artificial Sequence: Synthetic oligonucleotide
  Antisense strand to SEQ ID NO: 139806
uucuugauaacccugugag

SEQ ID NO: 139808 - RNA, 19 nt, Artificial Sequence
  Description of Artificial Sequence: Synthetic oligonucleotide
  Sense strand starting at position 3100 of SEQ ID NO: 1796
cugaguauagcuuaagcca

SEQ ID NO: 139809 - RNA, 19 nt, Artificial Sequence
  Description of Artificial Sequence: Synthetic oligonucleotide
  Antisense strand to SEQ ID NO: 139808
uggcuuaagcuauacucag

SEQ ID NO: 139810 - RNA, 19 nt, Artificial Sequence
  Description of Artificial Sequence: Synthetic oligonucleotide
  Sense strand starting at position 3090 of SEQ ID NO: 1796
ggucacacaccugaguaua

SEQ ID NO: 139811 - RNA, 19 nt, Artificial Sequence
  Description of Artificial Sequence: Synthetic oligonucleotide
  Antisense strand to SEQ ID NO: 139810
uauacucaggugugugacc

SEQ ID NO: 139812 - RNA, 19 nt, Artificial Sequence
  Description of Artificial Sequence: Synthetic oligonucleotide
  Sense strand starting at position 3013 of SEQ ID NO: 1796
gacuaugagguagguuuau

SEQ ID NO: 139813 - RNA, 19 nt, Artificial Sequence
  Description of Artificial Sequence: Synthetic oligonucleotide
  Antisense strand to SEQ ID NO: 139812
auaaaccuaccucauaguc

SEQ ID NO: 139814 - RNA, 19 nt, Artificial Sequence
  Description of Artificial Sequence: Synthetic oligonucleotide
  Sense strand starting at position 3011 of SEQ ID NO: 1796
augacuaugagguagguuu

SEQ ID NO: 139815 - RNA, 19 nt, Artificial Sequence
  Description of Artificial Sequence: Synthetic oligonucleotide
  Antisense strand to SEQ ID NO: 139814
aaaccuaccucauagucau

SEQ ID NO: 139816 - RNA, 19 nt, Artificial Sequence
  Description of Artificial Sequence: Synthetic oligonucleotide
  Sense strand starting at position 3006 of SEQ ID NO: 1796
ugcucaugacuaugaggua

SEQ ID NO: 139817 - RNA, 19 nt, Artificial Sequence
  Description of Artificial Sequence: Synthetic oligonucleotide
  Antisense strand to SEQ ID NO: 139816
uaccucauagucaugagca

SEQ ID NO: 139818 - RNA, 19 nt, Artificial Sequence
  Description of Artificial Sequence: Synthetic oligonucleotide
  Sense strand starting at position 2998 of SEQ ID NO: 1796
ucauguaaugcucaugacu

SEQ ID NO: 139819 - RNA, 19 nt, Artificial Sequence
  Description of Artificial Sequence: Synthetic oligonucleotide
  Antisense strand to SEQ ID NO: 139818
agucaugagcauuacauga

SEQ ID NO: 139820 - RNA, 19 nt, Artificial Sequence
  Description of Artificial Sequence: Synthetic oligonucleotide
  Sense strand starting at position 2975 of SEQ ID NO: 1796
cugagcuucuaagauauaa

SEQ ID NO: 139821 - RNA, 19 nt, Artificial Sequence
  Description of Artificial Sequence: Synthetic oligonucleotide
  Antisense strand to SEQ ID NO: 139820
uuauaucuuagaagcucag

SEQ ID NO: 139822 - RNA, 19 nt, Artificial Sequence
  Description of Artificial Sequence: Synthetic oligonucleotide
  Sense strand starting at position 2967 of SEQ ID NO: 1796
aggcauuucugagcuucua

SEQ ID NO: 139823 - RNA, 19 nt, Artificial Sequence
  Description of Artificial Sequence: Synthetic oligonucleotide
  Antisense strand to SEQ ID NO: 139822
uagaagcucagaaaugccu

SEQ ID NO: 139824 - RNA, 19 nt, Artificial Sequence
  Description of Artificial Sequence: Synthetic oligonucleotide
  Sense strand starting at position 2921 of SEQ ID NO: 1796
gguacucacuaauaaugau

SEQ ID NO: 139825 - RNA, 19 nt, Artificial Sequence
  Description of Artificial Sequence: Synthetic oligonucleotide
  Antisense strand to SEQ ID NO: 139824
aucauuauuagugaguacc

SEQ ID NO: 139826 - RNA, 19 nt, Artificial Sequence
  Description of Artificial Sequence: Synthetic oligonucleotide
  Sense strand starting at position 2878 of SEQ ID NO: 1796
aauuaaugugcguaaagca

SEQ ID NO: 139827 - RNA, 19 nt, Artificial Sequence
  Description of Artificial Sequence: Synthetic oligonucleotide
  Antisense strand to SEQ ID NO: 139826
ugcuuuacgcacauuaauu

SEQ ID NO: 139828 - RNA, 19 nt, Artificial Sequence
  Description of Artificial Sequence: Synthetic oligonucleotide
  Sense strand starting at position 2876 of SEQ ID NO: 1796
uaaauuaaugugcguaaag

SEQ ID NO: 139829 - RNA, 19 nt, Artificial Sequence
  Description of Artificial Sequence: Synthetic oligonucleotide
  Antisense strand to SEQ ID NO: 139828
cuuuacgcacauuaauuua

SEQ ID NO: 139830 - RNA, 19 nt, Artificial Sequence
  Description of Artificial Sequence: Synthetic oligonucleotide
  Sense strand starting at position 2875 of SEQ ID NO: 1796
guaaauuaaugugcguaaa

SEQ ID NO: 139831 - RNA, 19 nt, Artificial Sequence
  Description of Artificial Sequence: Synthetic oligonucleotide
  Antisense strand to SEQ ID NO: 139830
uuuacgcacauuaauuuac

SEQ ID NO: 139832 - RNA, 19 nt, Artificial Sequence
  Description of Artificial Sequence: Synthetic oligonucleotide
  Sense strand starting at position 2874 of SEQ ID NO: 1796
aguaaauuaaugugcguaa

SEQ ID NO: 139833 - RNA, 19 nt, Artificial Sequence
  Description of Artificial Sequence: Synthetic oligonucleotide
  Antisense strand to SEQ ID NO: 139832
uuacgcacauuaauuuacu

SEQ ID NO: 139834 - RNA, 19 nt, Artificial Sequence
  Description of Artificial Sequence: Synthetic oligonucleotide
  Sense strand starting at position 2769 of SEQ ID NO: 1796
uguguuuggagucagagau

SEQ ID NO: 139835 - RNA, 19 nt, Artificial Sequence
  Description of Artificial Sequence: Synthetic oligonucleotide
  Antisense strand to SEQ ID NO: 139834
aucucugacuccaaacaca

SEQ ID NO: 139836 - RNA, 19 nt, Artificial Sequence
  Description of Artificial Sequence: Synthetic oligonucleotide
  Sense strand starting at position 2757 of SEQ ID NO: 1796
uggaggaagcguuguguuu

SEQ ID NO: 139837 - RNA, 19 nt, Artificial Sequence
  Description of Artificial Sequence: Synthetic oligonucleotide
  Antisense strand to SEQ ID NO: 139836
aaacacaacgcuuccucca

SEQ ID NO: 139838 - RNA, 19 nt, Artificial Sequence
  Description of Artificial Sequence: Synthetic oligonucleotide
  Sense strand starting at position 2547 of SEQ ID NO: 1796
gggaguuuggauugaaucu

SEQ ID NO: 139839 - RNA, 19 nt, Artificial Sequence
  Description of Artificial Sequence: Synthetic oligonucleotide
  Antisense strand to SEQ ID NO: 139838
agauucaauccaaacuccc

SEQ ID NO: 139840 - RNA, 19 nt, Artificial Sequence
  Description of Artificial Sequence: Synthetic oligonucleotide
  Sense strand starting at position 2537 of SEQ ID NO: 1796
gcacauuucugggaguuug

SEQ ID NO: 139841 - RNA, 19 nt, Artificial Sequence
  Description of Artificial Sequence: Synthetic oligonucleotide
  Antisense strand to SEQ ID NO: 139840
caaacucccagaaaugugc

SEQ ID NO: 139842 - RNA, 19 nt, Artificial Sequence
  Description of Artificial Sequence: Synthetic oligonucleotide
  Sense strand starting at position 2494 of SEQ ID NO: 1796
ggaguuaccaccuguagug

SEQ ID NO: 139843 - RNA, 19 nt, Artificial Sequence
  Description of Artificial Sequence: Synthetic oligonucleotide
  Antisense strand to SEQ ID NO: 139842
cacuacaggugguaacucc

SEQ ID NO: 139844 - RNA, 19 nt, Artificial Sequence
  Description of Artificial Sequence: Synthetic oligonucleotide
  Sense strand starting at position 2388 of SEQ ID NO: 1796
cuaccugcgagcuggaauu

SEQ ID NO: 139845 - RNA, 19 nt, Artificial Sequence
  Description of Artificial Sequence: Synthetic oligonucleotide
  Antisense strand to SEQ ID NO: 139844
aauuccagcucgcagguag

SEQ ID NO: 139846 - RNA, 19 nt, Artificial Sequence
  Description of Artificial Sequence: Synthetic oligonucleotide
  Sense strand starting at position 2054 of SEQ ID NO: 1796
ggaauagugcugcgcccaa

SEQ ID NO: 139847 - RNA, 19 nt, Artificial Sequence
  Description of Artificial Sequence: Synthetic oligonucleotide
  Antisense strand to SEQ ID NO: 139846
uugggcgcagcacuauucc

SEQ ID NO: 139848 - RNA, 19 nt, Artificial Sequence
  Description of Artificial Sequence: Synthetic oligonucleotide
  Sense strand starting at position 909 of SEQ ID NO: 1796
ugacuacccugaggauaaa

SEQ ID NO: 139849 - RNA, 19 nt, Artificial Sequence
  Description of Artificial Sequence: Synthetic oligonucleotide
  Antisense strand to SEQ ID NO: 139848
uuuauccucaggguaguca

SEQ ID NO: 139850 - RNA, 19 nt, Artificial Sequence
  Description of Artificial Sequence: Synthetic oligonucleotide
  Sense strand starting at position 906 of SEQ ID NO: 1796
uagugacuacccugaggau

SEQ ID NO: 139851 - RNA, 19 nt, Artificial Sequence
  Description of Artificial Sequence: Synthetic oligonucleotide
  Antisense strand to SEQ ID NO: 139850
auccucaggguagucacua

SEQ ID NO: 139852 - RNA, 19 nt, Artificial Sequence
  Description of Artificial Sequence: Synthetic oligonucleotide
  Sense strand starting at position 795 of SEQ ID NO: 1796
ugcuaauugcuguugugua

SEQ ID NO: 139853 - RNA, 19 nt, Artificial Sequence
  Description of Artificial Sequence: Synthetic oligonucleotide
  Antisense strand to SEQ ID NO: 139852
uacacaacagcaauuagca

SEQ ID NO: 139854 - RNA, 19 nt, Artificial Sequence
  Description of Artificial Sequence: Synthetic oligonucleotide
  Sense strand starting at position 746 of SEQ ID NO: 1796
ucuacuguucugugacacu

SEQ ID NO: 139855 - RNA, 19 nt, Artificial Sequence
  Description of Artificial Sequence: Synthetic oligonucleotide
  Antisense strand to SEQ ID NO: 139854
agugucacagaacaguaga

SEQ ID NO: 139856 - RNA, 19 nt, Artificial Sequence
  Description of Artificial Sequence: Synthetic oligonucleotide
  Sense strand starting at position 742 of SEQ ID NO: 1796
acacucuacuguucuguga

SEQ ID NO: 139857 - RNA, 19 nt, Artificial Sequence
  Description of Artificial Sequence: Synthetic oligonucleotide
  Antisense strand to SEQ ID NO: 139856
ucacagaacaguagagugu

SEQ ID NO: 139858 - RNA, 19 nt, Artificial Sequence
  Description of Artificial Sequence: Synthetic oligonucleotide
  Sense strand starting at position 693 of SEQ ID NO: 1796
cugucagaucuaggcccaa

SEQ ID NO: 139859 - RNA, 19 nt, Artificial Sequence
  Description of Artificial Sequence: Synthetic oligonucleotide
  Antisense strand to SEQ ID NO: 139858
uugggccuagaucugacag

SEQ ID NO: 139860 - RNA, 19 nt, Artificial Sequence
  Description of Artificial Sequence: Synthetic oligonucleotide
  Sense strand starting at position 656 of SEQ ID NO: 1796
uguacuugaguaugagcaa

SEQ ID NO: 139861 - RNA, 19 nt, Artificial Sequence
  Description of Artificial Sequence: Synthetic oligonucleotide
  Antisense strand to SEQ ID NO: 139860
uugcucauacucaaguaca

SEQ ID NO: 139862 - RNA, 19 nt, Artificial Sequence
  Description of Artificial Sequence: Synthetic oligonucleotide
  Sense strand starting at position 524 of SEQ ID NO: 1796
gcucuuauucucugaaguc

SEQ ID NO: 139863 - RNA, 19 nt, Artificial Sequence
  Description of Artificial Sequence: Synthetic oligonucleotide
  Antisense strand to SEQ ID NO: 139862
gacuucagagaauaagagc

SEQ ID NO: 139864 - RNA, 19 nt, Artificial Sequence
  Description of Artificial Sequence: Synthetic oligonucleotide
  Sense strand starting at position 523 of SEQ ID NO: 1796
ugcucuuauucucugaagu

SEQ ID NO: 139865 - RNA, 19 nt, Artificial Sequence
  Description of Artificial Sequence: Synthetic oligonucleotide
  Antisense strand to SEQ ID NO: 139864
acuucagagaauaagagca

SEQ ID NO: 139866 - RNA, 19 nt, Artificial Sequence
  Description of Artificial Sequence: Synthetic oligonucleotide
  Sense strand starting at position 365 of SEQ ID NO: 1796
aagccucagugauccugua

SEQ ID NO: 139867 - RNA, 19 nt, Artificial Sequence
  Description of Artificial Sequence: Synthetic oligonucleotide
  Antisense strand to SEQ ID NO: 139866
uacaggaucacugaggcuu

SEQ ID NO: 139868 - RNA, 19 nt, Artificial Sequence
  Description of Artificial Sequence: Synthetic oligonucleotide
  Sense strand starting at position 344 of SEQ ID NO: 1796
accagcuugccaggauauu

SEQ ID NO: 139869 - RNA, 19 nt, Artificial Sequence
  Description of Artificial Sequence: Synthetic oligonucleotide
  Antisense strand to SEQ ID NO: 139868
aauauccuggcaagcuggu

SEQ ID NO: 139870 - RNA, 19 nt, Artificial Sequence
  Description of Artificial Sequence: Synthetic oligonucleotide
  Sense strand starting at position 217 of SEQ ID NO: 1796
gucugagacccauguacau

SEQ ID NO: 139871 - RNA, 19 nt, Artificial Sequence
  Description of Artificial Sequence: Synthetic oligonucleotide
  Antisense strand to SEQ ID NO: 139870
auguacaugggucucagac

SEQ ID NO: 139872 - RNA, 19 nt, Artificial Sequence
  Description of Artificial Sequence: Synthetic oligonucleotide
  Sense strand starting at position 48 of SEQ ID NO: 1796
cugaguuuccaagaggcaa

SEQ ID NO: 139873 - RNA, 19 nt, Artificial Sequence
  Description of Artificial Sequence: Synthetic oligonucleotide
  Antisense strand to SEQ ID NO: 139872
uugccucuuggaaacucag

SEQ ID NO: 139874 - RNA, 19 nt, Artificial Sequence
  Description of Artificial Sequence: Synthetic oligonucleotide
  Sense strand starting at position 37 of SEQ ID NO: 1796
caaacauuucgcugaguuu

SEQ ID NO: 139875 - RNA, 19 nt, Artificial Sequence
  Description of Artificial Sequence: Synthetic oligonucleotide
  Antisense strand to SEQ ID NO: 139874
aaacucagcgaaauguuug

SEQ ID NO: 139876 - RNA, 19 nt, Artificial Sequence
  Description of Artificial Sequence: Synthetic oligonucleotide
  Sense strand starting at position 36 of SEQ ID NO: 1796
ccaaacauuucgcugaguu

SEQ ID NO: 139877 - RNA, 19 nt, Artificial Sequence
  Description of Artificial Sequence: Synthetic oligonucleotide
  Antisense strand to SEQ ID NO: 139876
aacucagcgaaauguuugg

SEQ ID NO: 139878 - RNA, 19 nt, Artificial Sequence
  Description of Artificial Sequence: Synthetic oligonucleotide
  Sense strand starting at position 3948 of SEQ ID NO: 1797
gaagcuggucgcuacuaaa

SEQ ID NO: 139879 - RNA, 19 nt, Artificial Sequence
  Description of Artificial Sequence: Synthetic oligonucleotide
  Antisense strand to SEQ ID NO: 139878
uuuaguagcgaccagcuuc

SEQ ID NO: 139880 - RNA, 19 nt, Artificial Sequence
  Description of Artificial Sequence: Synthetic oligonucleotide
  Sense strand starting at position 3511 of SEQ ID NO: 1797
acucuuauguuguuaaaug

SEQ ID NO: 139881 - RNA, 19 nt, Artificial Sequence
  Description of Artificial Sequence: Synthetic oligonucleotide
  Antisense strand to SEQ ID NO: 139880
cauuuaacaacauaagagu

SEQ ID NO: 139882 - RNA, 19 nt, Artificial Sequence
  Description of Artificial Sequence: Synthetic oligonucleotide
  Sense strand starting at position 3384 of SEQ ID NO: 1797
cuuaaaguguuacuaagag

SEQ ID NO: 139883 - RNA, 19 nt, Artificial Sequence
  Description of Artificial Sequence: Synthetic oligonucleotide
  Antisense strand to SEQ ID NO: 139882
cucuuaguaacacuuuaag

SEQ ID NO: 139884 - RNA, 19 nt, Artificial Sequence
  Description of Artificial Sequence: Synthetic oligonucleotide
  Sense strand starting at position 3357 of SEQ ID NO: 1797
uauugaguuggguaaaugu

SEQ ID NO: 139885 - RNA, 19 nt, Artificial Sequence
  Description of Artificial Sequence: Synthetic oligonucleotide
  Antisense strand to SEQ ID NO: 139884
acauuuacccaacucaaua

SEQ ID NO: 139886 - RNA, 19 nt, Artificial Sequence
  Description of Artificial Sequence: Synthetic oligonucleotide
  Sense strand starting at position 3354 of SEQ ID NO: 1797
aguuauugaguuggguaaa

SEQ ID NO: 139887 - RNA, 19 nt, Artificial Sequence
  Description of Artificial Sequence: Synthetic oligonucleotide
  Antisense strand to SEQ ID NO: 139886
uuuacccaacucaauaacu

SEQ ID NO: 139888 - RNA, 19 nt, Artificial Sequence
  Description of Artificial Sequence: Synthetic oligonucleotide
  Sense strand starting at position 3353 of SEQ ID NO: 1797
caguuauugaguuggguaa

SEQ ID NO: 139889 - RNA, 19 nt, Artificial Sequence
  Description of Artificial Sequence: Synthetic oligonucleotide
  Antisense strand to SEQ ID NO: 139888
uuacccaacucaauaacug

SEQ ID NO: 139890 - RNA, 19 nt, Artificial Sequence
  Description of Artificial Sequence: Synthetic oligonucleotide
  Sense strand starting at position 3351 of SEQ ID NO: 1797
uccaguuauugaguugggu

SEQ ID NO: 139891 - RNA, 19 nt, Artificial Sequence
  Description of Artificial Sequence: Synthetic oligonucleotide
  Antisense strand to SEQ ID NO: 139890
acccaacucaauaacugga

SEQ ID NO: 139892 - RNA, 19 nt, Artificial Sequence
  Description of Artificial Sequence: Synthetic oligonucleotide
  Sense strand starting at position 3252 of SEQ ID NO: 1797
gugcauuauguauacagaa

SEQ ID NO: 139893 - RNA, 19 nt, Artificial Sequence
  Description of Artificial Sequence: Synthetic oligonucleotide
  Antisense strand to SEQ ID NO: 139892
uucuguauacauaaugcac

SEQ ID NO: 139894 - RNA, 19 nt, Artificial Sequence
  Description of Artificial Sequence: Synthetic oligonucleotide
  Sense strand starting at position 3246 of SEQ ID NO: 1797
agggaagugcauuauguau

SEQ ID NO: 139895 - RNA, 19 nt, Artificial Sequence
  Description of Artificial Sequence: Synthetic oligonucleotide
  Antisense strand to SEQ ID NO: 139894
auacauaaugcacuucccu

SEQ ID NO: 139896 - RNA, 19 nt, Artificial Sequence
  Description of Artificial Sequence: Synthetic oligonucleotide
  Sense strand starting at position 2898 of SEQ ID NO: 1797
cguugaagauugcuaauua

SEQ ID NO: 139897 - RNA, 19 nt, Artificial Sequence
  Description of Artificial Sequence: Synthetic oligonucleotide
  Antisense strand to SEQ ID NO: 139896
uaauuagcaaucuucaacg

SEQ ID NO: 139898 - RNA, 19 nt, Artificial Sequence
  Description of Artificial Sequence: Synthetic oligonucleotide
  Sense strand starting at position 2896 of SEQ ID NO: 1797
aacguugaagauugcuaau

SEQ ID NO: 139899 - RNA, 19 nt, Artificial Sequence
  Description of Artificial Sequence: Synthetic oligonucleotide
  Antisense strand to SEQ ID NO: 139898
auuagcaaucuucaacguu

SEQ ID NO: 139900 - RNA, 19 nt, Artificial Sequence
  Description of Artificial Sequence: Synthetic oligonucleotide
  Sense strand starting at position 2889 of SEQ ID NO: 1797
aaucuugaacguugaagau

SEQ ID NO: 139901 - RNA, 19 nt, Artificial Sequence
  Description of Artificial Sequence: Synthetic oligonucleotide
  Antisense strand to SEQ ID NO: 139900
aucuucaacguucaagauu

SEQ ID NO: 139902 - RNA, 19 nt, Artificial Sequence
  Description of Artificial Sequence: Synthetic oligonucleotide
  Sense strand starting at position 2886 of SEQ ID NO: 1797
auuaaucuugaacguugaa

SEQ ID NO: 139903 - RNA, 19 nt, Artificial Sequence
  Description of Artificial Sequence: Synthetic oligonucleotide
  Antisense strand to SEQ ID NO: 139902
uucaacguucaagauuaau

SEQ ID NO: 139904 - RNA, 19 nt, Artificial Sequence
  Description of Artificial Sequence: Synthetic oligonucleotide
  Sense strand starting at position 2883 of SEQ ID NO: 1797
cugauuaaucuugaacguu

SEQ ID NO: 139905 - RNA, 19 nt, Artificial Sequence
  Description of Artificial Sequence: Synthetic oligonucleotide
  Antisense strand to SEQ ID NO: 139904
aacguucaagauuaaucag

SEQ ID NO: 139906 - RNA, 19 nt, Artificial Sequence
  Description of Artificial Sequence: Synthetic oligonucleotide
  Sense strand starting at position 2759 of SEQ ID NO: 1797
ggcaaugugcaguagaaug

SEQ ID NO: 139907 - RNA, 19 nt, Artificial Sequence
  Description of Artificial Sequence: Synthetic oligonucleotide
  Antisense strand to SEQ ID NO: 139906
cauucuacugcacauugcc

SEQ ID NO: 139908 - RNA, 19 nt, Artificial Sequence
  Description of Artificial Sequence: Synthetic oligonucleotide
  Sense strand starting at position 2724 of SEQ ID NO: 1797
ggauaauuauuugaugauc

SEQ ID NO: 139909 - RNA, 19 nt, Artificial Sequence
  Description of Artificial Sequence: Synthetic oligonucleotide
  Antisense strand to SEQ ID NO: 139908
gaucaucaaauaauuaucc

SEQ ID NO: 139910 - RNA, 19 nt, Artificial Sequence
  Description of Artificial Sequence: Synthetic oligonucleotide
  Sense strand starting at position 2696 of SEQ ID NO: 1797
aucugcugucauuagacca

SEQ ID NO: 139911 - RNA, 19 nt, Artificial Sequence
  Description of Artificial Sequence: Synthetic oligonucleotide
  Antisense strand to SEQ ID NO: 139910
uggucuaaugacagcagau

SEQ ID NO: 139912 - RNA, 19 nt, Artificial Sequence
  Description of Artificial Sequence: Synthetic oligonucleotide
  Sense strand starting at position 2679 of SEQ ID NO: 1797
aagugagccgccuuuguau

SEQ ID NO: 139913 - RNA, 19 nt, Artificial Sequence
  Description of Artificial Sequence: Synthetic oligonucleotide
  Antisense strand to SEQ ID NO: 139912
auacaaaggcggcucacuu

SEQ ID NO: 139914 - RNA, 19 nt, Artificial Sequence
  Description of Artificial Sequence: Synthetic oligonucleotide
  Sense strand starting at position 2548 of SEQ ID NO: 1797
gguacuacccuugacuuaa

SEQ ID NO: 139915 - RNA, 19 nt, Artificial Sequence
  Description of Artificial Sequence: Synthetic oligonucleotide
  Antisense strand to SEQ ID NO: 139914
uuaagucaaggguaguacc

SEQ ID NO: 139916 - RNA, 19 nt, Artificial Sequence
  Description of Artificial Sequence: Synthetic oligonucleotide
  Sense strand starting at position 2547 of SEQ ID NO: 1797
ggguacuacccuugacuua

SEQ ID NO: 139917 - RNA, 19 nt, Artificial Sequence
  Description of Artificial Sequence: Synthetic oligonucleotide
  Antisense strand to SEQ ID NO: 139916
uaagucaaggguaguaccc

SEQ ID NO: 139918 - RNA, 19 nt, Artificial Sequence
  Description of Artificial Sequence: Synthetic oligonucleotide
  Sense strand starting at position 2533 of SEQ ID NO: 1797
uaagauguuacgcagggua

SEQ ID NO: 139919 - RNA, 19 nt, Artificial Sequence
  Description of Artificial Sequence: Synthetic oligonucleotide
  Antisense strand to SEQ ID NO: 139918
uacccugcguaacaucuua

SEQ ID NO: 139920 - RNA, 19 nt, Artificial Sequence
  Description of Artificial Sequence: Synthetic oligonucleotide
  Sense strand starting at position 2519 of SEQ ID NO: 1797
gaaguaggccuuuguaaga

SEQ ID NO: 139921 - RNA, 19 nt, Artificial Sequence
  Description of Artificial Sequence: Synthetic oligonucleotide
  Antisense strand to SEQ ID NO: 139920
ucuuacaaaggccuacuuc

SEQ ID NO: 139922 - RNA, 19 nt, Artificial Sequence
  Description of Artificial Sequence: Synthetic oligonucleotide
  Sense strand starting at position 2502 of SEQ ID NO: 1797
agauucgggaaguguuaga

SEQ ID NO: 139923 - RNA, 19 nt, Artificial Sequence
  Description of Artificial Sequence: Synthetic oligonucleotide
  Antisense strand to SEQ ID NO: 139922
ucuaacacuucccgaaucu

SEQ ID NO: 139924 - RNA, 19 nt, Artificial Sequence
  Description of Artificial Sequence: Synthetic oligonucleotide
  Sense strand starting at position 2278 of SEQ ID NO: 1797
gugaaauccgccgugaugu

SEQ ID NO: 139925 - RNA, 19 nt, Artificial Sequence
  Description of Artificial Sequence: Synthetic oligonucleotide
  Antisense strand to SEQ ID NO: 139924
acaucacggcggauuucac

SEQ ID NO: 139926 - RNA, 19 nt, Artificial Sequence
  Description of Artificial Sequence: Synthetic oligonucleotide
  Sense strand starting at position 1009 of SEQ ID NO: 1797
augagauacguucggaauc

SEQ ID NO: 139927 - RNA, 19 nt, Artificial Sequence
  Description of Artificial Sequence: Synthetic oligonucleotide
  Antisense strand to SEQ ID NO: 139926
gauuccgaacguaucucau

SEQ ID NO: 139928 - RNA, 19 nt, Artificial Sequence
  Description of Artificial Sequence: Synthetic oligonucleotide
  Sense strand starting at position 980 of SEQ ID NO: 1797
gacagaucucccggcuuug

SEQ ID NO: 139929 - RNA, 19 nt, Artificial Sequence
  Description of Artificial Sequence: Synthetic oligonucleotide
  Antisense strand to SEQ ID NO: 139928
caaagccgggagaucuguc

SEQ ID NO: 139930 - RNA, 19 nt, Artificial Sequence
  Description of Artificial Sequence: Synthetic oligonucleotide
  Sense strand starting at position 948 of SEQ ID NO: 1797
ccgauacugcaauggaauu

SEQ ID NO: 139931 - RNA, 19 nt, Artificial Sequence
  Description of Artificial Sequence: Synthetic oligonucleotide
  Antisense strand to SEQ ID NO: 139930
aauuccauugcaguaucgg

SEQ ID NO: 139932 - RNA, 19 nt, Artificial Sequence
  Description of Artificial Sequence: Synthetic oligonucleotide
  Sense strand starting at position 928 of SEQ ID NO: 1797
uguuuaugagccuaccuaa

SEQ ID NO: 139933 - RNA, 19 nt, Artificial Sequence
  Description of Artificial Sequence: Synthetic oligonucleotide
  Antisense strand to SEQ ID NO: 139932
uuagguaggcucauaaaca

SEQ ID NO: 139934 - RNA, 19 nt, Artificial Sequence
  Description of Artificial Sequence: Synthetic oligonucleotide
  Sense strand starting at position 564 of SEQ ID NO: 1797
cacaguaggcauuagauau

SEQ ID NO: 139935 - RNA, 19 nt, Artificial Sequence
  Description of Artificial Sequence: Synthetic oligonucleotide
  Antisense strand to SEQ ID NO: 139934
auaucuaaugccuacugug

SEQ ID NO: 139936 - RNA, 19 nt, Artificial Sequence
  Description of Artificial Sequence: Synthetic oligonucleotide
  Sense strand starting at position 501 of SEQ ID NO: 1797
gagcauaaacgauaaagcu

SEQ ID NO: 139937 - RNA, 19 nt, Artificial Sequence
  Description of Artificial Sequence: Synthetic oligonucleotide
  Antisense strand to SEQ ID NO: 139936
agcuuuaucguuuaugcuc

SEQ ID NO: 139938 - RNA, 19 nt, Artificial Sequence
  Description of Artificial Sequence: Synthetic oligonucleotide
  Sense strand starting at position 399 of SEQ ID NO: 1797
cgaucuaaugguggacaca

SEQ ID NO: 139939 - RNA, 19 nt, Artificial Sequence
  Description of Artificial Sequence: Synthetic oligonucleotide
  Antisense strand to SEQ ID NO: 139938
uguguccaccauuagaucg

SEQ ID NO: 139940 - RNA, 19 nt, Artificial Sequence
  Description of Artificial Sequence: Synthetic oligonucleotide
  Sense strand starting at position 306 of SEQ ID NO: 1797
cuaugaucugucuaacagc

SEQ ID NO: 139941 - RNA, 19 nt, Artificial Sequence
  Description of Artificial Sequence: Synthetic oligonucleotide
  Antisense strand to SEQ ID NO: 139940
gcuguuagacagaucauag

SEQ ID NO: 139942 - RNA, 19 nt, Artificial Sequence
  Description of Artificial Sequence: Synthetic oligonucleotide
  Sense strand starting at position 290 of SEQ ID NO: 1797
cuuuauaaugagcaagcua

SEQ ID NO: 139943 - RNA, 19 nt, Artificial Sequence
  Description of Artificial Sequence: Synthetic oligonucleotide
  Antisense strand to SEQ ID NO: 139942
uagcuugcucauuauaaag

SEQ ID NO: 139944 - RNA, 19 nt, Artificial Sequence
  Description of Artificial Sequence: Synthetic oligonucleotide
  Sense strand starting at position 268 of SEQ ID NO: 1797
uaaugaucuugaguggaac

SEQ ID NO: 139945 - RNA, 19 nt, Artificial Sequence
  Description of Artificial Sequence: Synthetic oligonucleotide
  Antisense strand to SEQ ID NO: 139944
guuccacucaagaucauua

SEQ ID NO: 139946 - RNA, 19 nt, Artificial Sequence
  Description of Artificial Sequence: Synthetic oligonucleotide
  Sense strand starting at position 256 of SEQ ID NO: 1797
cuuguacaagcauaaugau

SEQ ID NO: 139947 - RNA, 19 nt, Artificial Sequence
  Description of Artificial Sequence: Synthetic oligonucleotide
  Antisense strand to SEQ ID NO: 139946
aucauuaugcuuguacaag

SEQ ID NO: 139948 - RNA, 19 nt, Artificial Sequence
  Description of Artificial Sequence: Synthetic oligonucleotide
  Sense strand starting at position 214 of SEQ ID NO: 1797
auacacuuauguguaugau

SEQ ID NO: 139949 - RNA, 19 nt, Artificial Sequence
  Description of Artificial Sequence: Synthetic oligonucleotide
  Antisense strand to SEQ ID NO: 139948
aucauacacauaaguguau

SEQ ID NO: 139950 - RNA, 19 nt, Artificial Sequence
  Description of Artificial Sequence: Synthetic oligonucleotide
  Sense strand starting at position 165 of SEQ ID NO: 1797
uuggaaguuuccucauaau

SEQ ID NO: 139951 - RNA, 19 nt, Artificial Sequence
  Description of Artificial Sequence: Synthetic oligonucleotide
  Antisense strand to SEQ ID NO: 139950
auuaugaggaaacuuccaa

SEQ ID NO: 139952 - RNA, 19 nt, Artificial Sequence
  Description of Artificial Sequence: Synthetic oligonucleotide
  Sense strand starting at position 164 of SEQ ID NO: 1797
uuuggaaguuuccucauaa

SEQ ID NO: 139953 - RNA, 19 nt, Artificial Sequence
  Description of Artificial Sequence: Synthetic oligonucleotide
  Antisense strand to SEQ ID NO: 139952
uuaugaggaaacuuccaaa

SEQ ID NO: 139954 - RNA, 19 nt, Artificial Sequence
  Description of Artificial Sequence: Synthetic oligonucleotide
  Sense strand starting at position 122 of SEQ ID NO: 1797
agagguuaucuuuguuaaa

SEQ ID NO: 139955 - RNA, 19 nt, Artificial Sequence
  Description of Artificial Sequence: Synthetic oligonucleotide
  Antisense strand to SEQ ID NO: 139954
uuuaacaaagauaaccucu

SEQ ID NO: 139956 - RNA, 19 nt, Artificial Sequence
  Description of Artificial Sequence: Synthetic oligonucleotide
  Sense strand starting at position 116 of SEQ ID NO: 1797
ugaguuagagguuaucuuu

SEQ ID NO: 139957 - RNA, 19 nt, Artificial Sequence
  Description of Artificial Sequence: Synthetic oligonucleotide
  Antisense strand to SEQ ID NO: 139956
aaagauaaccucuaacuca

SEQ ID NO: 139958 - RNA, 19 nt, Artificial Sequence
  Description of Artificial Sequence: Synthetic oligonucleotide
  Sense strand starting at position 3712 of SEQ ID NO: 1799
uuuaguaugcuggaaugau

SEQ ID NO: 139959 - RNA, 19 nt, Artificial Sequence
  Description of Artificial Sequence: Synthetic oligonucleotide
  Antisense strand to SEQ ID NO: 139958
aucauuccagcauacuaaa

SEQ ID NO: 139960 - RNA, 19 nt, Artificial Sequence
  Description of Artificial Sequence: Synthetic oligonucleotide
  Sense strand starting at position 3620 of SEQ ID NO: 1799
gaggcuuugcuuugaagga

SEQ ID NO: 139961 - RNA, 19 nt, Artificial Sequence
  Description of Artificial Sequence: Synthetic oligonucleotide
  Antisense strand to SEQ ID NO: 139960
uccuucaaagcaaagccuc

SEQ ID NO: 139962 - RNA, 19 nt, Artificial Sequence
  Description of Artificial Sequence: Synthetic oligonucleotide
  Sense strand starting at position 3616 of SEQ ID NO: 1799
uugagaggcuuugcuuuga

SEQ ID NO: 139963 - RNA, 19 nt, Artificial Sequence
  Description of Artificial Sequence: Synthetic oligonucleotide
  Antisense strand to SEQ ID NO: 139962
ucaaagcaaagccucucaa

SEQ ID NO: 139964 - RNA, 19 nt, Artificial Sequence
  Description of Artificial Sequence: Synthetic oligonucleotide
  Sense strand starting at position 3558 of SEQ ID NO: 1799
ugauuaggguauguuaaua

SEQ ID NO: 139965 - RNA, 19 nt, Artificial Sequence
  Description of Artificial Sequence: Synthetic oligonucleotide
  Antisense strand to SEQ ID NO: 139964
uauuaacauacccuaauca

SEQ ID NO: 139966 - RNA, 19 nt, Artificial Sequence
  Description of Artificial Sequence: Synthetic oligonucleotide
  Sense strand starting at position 3557 of SEQ ID NO: 1799
cugauuaggguauguuaau

SEQ ID NO: 139967 - RNA, 19 nt, Artificial Sequence
  Description of Artificial Sequence: Synthetic oligonucleotide
  Antisense strand to SEQ ID NO: 139966
auuaacauacccuaaucag

SEQ ID NO: 139968 - RNA, 19 nt, Artificial Sequence
  Description of Artificial Sequence: Synthetic oligonucleotide
  Sense strand starting at position 3555 of SEQ ID NO: 1799
gucugauuaggguauguua

SEQ ID NO: 139969 - RNA, 19 nt, Artificial Sequence
  Description of Artificial Sequence: Synthetic oligonucleotide
  Antisense strand to SEQ ID NO: 139968
uaacauacccuaaucagac

SEQ ID NO: 139970 - RNA, 19 nt, Artificial Sequence
  Description of Artificial Sequence: Synthetic oligonucleotide
  Sense strand starting at position 3549 of SEQ ID NO: 1799
gagaaagucugauuagggu

SEQ ID NO: 139971 - RNA, 19 nt, Artificial Sequence
  Description of Artificial Sequence: Synthetic oligonucleotide
  Antisense strand to SEQ ID NO: 139970
acccuaaucagacuuucuc

SEQ ID NO: 139972 - RNA, 19 nt, Artificial Sequence
  Description of Artificial Sequence: Synthetic oligonucleotide
  Sense strand starting at position 3506 of SEQ ID NO: 1799
ugcugaugaccuugaugaa

SEQ ID NO: 139973 - RNA, 19 nt, Artificial Sequence
  Description of Artificial Sequence: Synthetic oligonucleotide
  Antisense strand to SEQ ID NO: 139972
uucaucaaggucaucagca

SEQ ID NO: 139974 - RNA, 19 nt, Artificial Sequence
  Description of Artificial Sequence: Synthetic oligonucleotide
  Sense strand starting at position 3485 of SEQ ID NO: 1799
cuggauguggccugaugaa

SEQ ID NO: 139975 - RNA, 19 nt, Artificial Sequence
  Description of Artificial Sequence: Synthetic oligonucleotide
  Antisense strand to SEQ ID NO: 139974
uucaucaggccacauccag

SEQ ID NO: 139976 - RNA, 19 nt, Artificial Sequence
  Description of Artificial Sequence: Synthetic oligonucleotide
  Sense strand starting at position 3427 of SEQ ID NO: 1799
ugaagagucuuaucagaua

SEQ ID NO: 139977 - RNA, 19 nt, Artificial Sequence
  Description of Artificial Sequence: Synthetic oligonucleotide
  Antisense strand to SEQ ID NO: 139976
uaucugauaagacucuuca

SEQ ID NO: 139978 - RNA, 19 nt, Artificial Sequence
  Description of Artificial Sequence: Synthetic oligonucleotide
  Sense strand starting at position 3322 of SEQ ID NO: 1799
cuugaagguuaaguagaaa

SEQ ID NO: 139979 - RNA, 19 nt, Artificial Sequence
  Description of Artificial Sequence: Synthetic oligonucleotide
  Antisense strand to SEQ ID NO: 139978
uuucuacuuaaccuucaag

SEQ ID NO: 139980 - RNA, 19 nt, Artificial Sequence
  Description of Artificial Sequence: Synthetic oligonucleotide
  Sense strand starting at position 3252 of SEQ ID NO: 1799
ucuuaagucuaguuaggau

SEQ ID NO: 139981 - RNA, 19 nt, Artificial Sequence
  Description of Artificial Sequence: Synthetic oligonucleotide
  Antisense strand to SEQ ID NO: 139980
auccuaacuagacuuaaga

SEQ ID NO: 139982 - RNA, 19 nt, Artificial Sequence
  Description of Artificial Sequence: Synthetic oligonucleotide
  Sense strand starting at position 3191 of SEQ ID NO: 1799
aucgauauaugagucuaga

SEQ ID NO: 139983 - RNA, 19 nt, Artificial Sequence
  Description of Artificial Sequence: Synthetic oligonucleotide
  Antisense strand to SEQ ID NO: 139982
ucuagacucauauaucgau

SEQ ID NO: 139984 - RNA, 19 nt, Artificial Sequence
  Description of Artificial Sequence: Synthetic oligonucleotide
  Sense strand starting at position 3070 of SEQ ID NO: 1799
ggcggugccacuuaaugaa

SEQ ID NO: 139985 - RNA, 19 nt, Artificial Sequence
  Description of Artificial Sequence: Synthetic oligonucleotide
  Antisense strand to SEQ ID NO: 139984
uucauuaaguggcaccgcc

SEQ ID NO: 139986 - RNA, 19 nt, Artificial Sequence
  Description of Artificial Sequence: Synthetic oligonucleotide
  Sense strand starting at position 3052 of SEQ ID NO: 1799
ccugaugacugaguuaaug

SEQ ID NO: 139987 - RNA, 19 nt, Artificial Sequence
  Description of Artificial Sequence: Synthetic oligonucleotide
  Antisense strand to SEQ ID NO: 139986
cauuaacucagucaucagg

SEQ ID NO: 139988 - RNA, 19 nt, Artificial Sequence
  Description of Artificial Sequence: Synthetic oligonucleotide
  Sense strand starting at position 3049 of SEQ ID NO: 1799
gggccugaugacugaguua

SEQ ID NO: 139989 - RNA, 19 nt, Artificial Sequence
  Description of Artificial Sequence: Synthetic oligonucleotide
  Antisense strand to SEQ ID NO: 139988
uaacucagucaucaggccc

SEQ ID NO: 139990 - RNA, 19 nt, Artificial Sequence
  Description of Artificial Sequence: Synthetic oligonucleotide
  Sense strand starting at position 3029 of SEQ ID NO: 1799
aagaguugauucuuagguu

SEQ ID NO: 139991 - RNA, 19 nt, Artificial Sequence
  Description of Artificial Sequence: Synthetic oligonucleotide
  Antisense strand to SEQ ID NO: 139990
aaccuaagaaucaacucuu

SEQ ID NO: 139992 - RNA, 19 nt, Artificial Sequence
  Description of Artificial Sequence: Synthetic oligonucleotide
  Sense strand starting at position 2997 of SEQ ID NO: 1799
gggcauagugugugaaaga

SEQ ID NO: 139993 - RNA, 19 nt, Artificial Sequence
  Description of Artificial Sequence: Synthetic oligonucleotide
  Antisense strand to SEQ ID NO: 139992
ucuuucacacacuaugccc

SEQ ID NO: 139994 - RNA, 19 nt, Artificial Sequence
  Description of Artificial Sequence: Synthetic oligonucleotide
  Sense strand starting at position 2863 of SEQ ID NO: 1799
acagauguccuugggauac

SEQ ID NO: 139995 - RNA, 19 nt, Artificial Sequence
  Description of Artificial Sequence: Synthetic oligonucleotide
  Antisense strand to SEQ ID NO: 139994
guaucccaaggacaucugu

SEQ ID NO: 139996 - RNA, 19 nt, Artificial Sequence
  Description of Artificial Sequence: Synthetic oligonucleotide
  Sense strand starting at position 2735 of SEQ ID NO: 1799
aagccugugggccauuaua

SEQ ID NO: 139997 - RNA, 19 nt, Artificial Sequence
  Description of Artificial Sequence: Synthetic oligonucleotide
  Antisense strand to SEQ ID NO: 139996
uauaauggcccacaggcuu

SEQ ID NO: 139998 - RNA, 19 nt, Artificial Sequence
  Description of Artificial Sequence: Synthetic oligonucleotide
  Sense strand starting at position 2590 of SEQ ID NO: 1799
gccuuuccaagcugagaga

SEQ ID NO: 139999 - RNA, 19 nt, Artificial Sequence
  Description of Artificial Sequence: Synthetic oligonucleotide
  Antisense strand to SEQ ID NO: 139998
ucucucagcuuggaaaggc

SEQ ID NO: 140000 - RNA, 19 nt, Artificial Sequence
  Description of Artificial Sequence: Synthetic oligonucleotide
  Sense strand starting at position 2584 of SEQ ID NO: 1799
ggaauagccuuuccaagcu

SEQ ID NO: 140001 - RNA, 19 nt, Artificial Sequence
  Description of Artificial Sequence: Synthetic oligonucleotide
  Antisense strand to SEQ ID NO: 140000
agcuuggaaaggcuauucc

SEQ ID NO: 140002 - RNA, 19 nt, Artificial Sequence
  Description of Artificial Sequence: Synthetic oligonucleotide
  Sense strand starting at position 2518 of SEQ ID NO: 1799
gaagaccuuugagcgcaua

SEQ ID NO: 140003 - RNA, 19 nt, Artificial Sequence
  Description of Artificial Sequence: Synthetic oligonucleotide
  Antisense strand to SEQ ID NO: 140002
uaugcgcucaaaggucuuc

SEQ ID NO: 140004 - RNA, 19 nt, Artificial Sequence
  Description of Artificial Sequence: Synthetic oligonucleotide
  Sense strand starting at position 2485 of SEQ ID NO: 1799
gacuuuacaccuggugaga

SEQ ID NO: 140005 - RNA, 19 nt, Artificial Sequence
  Description of Artificial Sequence: Synthetic oligonucleotide
  Antisense strand to SEQ ID NO: 140004
ucucaccagguguaaaguc

SEQ ID NO: 140006 - RNA, 19 nt, Artificial Sequence
  Description of Artificial Sequence: Synthetic oligonucleotide
  Sense strand starting at position 2445 of SEQ ID NO: 1799
ugauaagugguguggagaa

SEQ ID NO: 140007 - RNA, 19 nt, Artificial Sequence
  Description of Artificial Sequence: Synthetic oligonucleotide
  Antisense strand to SEQ ID NO: 140006
uucuccacaccacuuauca

SEQ ID NO: 140008 - RNA, 19 nt, Artificial Sequence
  Description of Artificial Sequence: Synthetic oligonucleotide
  Sense strand starting at position 2329 of SEQ ID NO: 1799
uaacuaagcgcagagguuu

SEQ ID NO: 140009 - RNA, 19 nt, Artificial Sequence
  Description of Artificial Sequence: Synthetic oligonucleotide
  Antisense strand to SEQ ID NO: 140008
aaaccucugcgcuuaguua

SEQ ID NO: 140010 - RNA, 19 nt, Artificial Sequence
  Description of Artificial Sequence: Synthetic oligonucleotide
  Sense strand starting at position 2271 of SEQ ID NO: 1799
ggaacucaaucauucgaca

SEQ ID NO: 140011 - RNA, 19 nt, Artificial Sequence
  Description of Artificial Sequence: Synthetic oligonucleotide
  Antisense strand to SEQ ID NO: 140010
ugucgaaugauugaguucc

SEQ ID NO: 140012 - RNA, 19 nt, Artificial Sequence
  Description of Artificial Sequence: Synthetic oligonucleotide
  Sense strand starting at position 1251 of SEQ ID NO: 1799
acagcaaugcuccagucua

SEQ ID NO: 140013 - RNA, 19 nt, Artificial Sequence
  Description of Artificial Sequence: Synthetic oligonucleotide
  Antisense strand to SEQ ID NO: 140012
uagacuggagcauugcugu

SEQ ID NO: 140014 - RNA, 19 nt, Artificial Sequence
  Description of Artificial Sequence: Synthetic oligonucleotide
  Sense strand starting at position 1235 of SEQ ID NO: 1799
agaagugagcccggagaca

SEQ ID NO: 140015 - RNA, 19 nt, Artificial Sequence
  Description of Artificial Sequence: Synthetic oligonucleotide
  Antisense strand to SEQ ID NO: 140014
ugucuccgggcucacuucu

SEQ ID NO: 140016 - RNA, 19 nt, Artificial Sequence
  Description of Artificial Sequence: Synthetic oligonucleotide
  Sense strand starting at position 1175 of SEQ ID NO: 1799
agaugucagcccuauuaac

SEQ ID NO: 140017 - RNA, 19 nt, Artificial Sequence
  Description of Artificial Sequence: Synthetic oligonucleotide
  Antisense strand to SEQ ID NO: 140016
guuaauagggcugacaucu

SEQ ID NO: 140018 - RNA, 19 nt, Artificial Sequence
  Description of Artificial Sequence: Synthetic oligonucleotide
  Sense strand starting at position 1160 of SEQ ID NO: 1799
gguggagugggauguagau

SEQ ID NO: 140019 - RNA, 19 nt, Artificial Sequence
  Description of Artificial Sequence: Synthetic oligonucleotide
  Antisense strand to SEQ ID NO: 140018
aucuacaucccacuccacc

SEQ ID NO: 140020 - RNA, 19 nt, Artificial Sequence
  Description of Artificial Sequence: Synthetic oligonucleotide
  Sense strand starting at position 1011 of SEQ ID NO: 1799
uuugaaggauaacaagaau

SEQ ID NO: 140021 - RNA, 19 nt, Artificial Sequence
  Description of Artificial Sequence: Synthetic oligonucleotide
  Antisense strand to SEQ ID NO: 140020
auucuuguuauccuucaaa

SEQ ID NO: 140022 - RNA, 19 nt, Artificial Sequence
  Description of Artificial Sequence: Synthetic oligonucleotide
  Sense strand starting at position 838 of SEQ ID NO: 1799
gucaaagguucccuaaacu

SEQ ID NO: 140023 - RNA, 19 nt, Artificial Sequence
  Description of Artificial Sequence: Synthetic oligonucleotide
  Antisense strand to SEQ ID NO: 140022
aguuuagggaaccuuugac

SEQ ID NO: 140024 - RNA, 19 nt, Artificial Sequence
  Description of Artificial Sequence: Synthetic oligonucleotide
  Sense strand starting at position 837 of SEQ ID NO: 1799
ggucaaagguucccuaaac

SEQ ID NO: 140025 - RNA, 19 nt, Artificial Sequence
  Description of Artificial Sequence: Synthetic oligonucleotide
  Antisense strand to SEQ ID NO: 140024
guuuagggaaccuuugacc

SEQ ID NO: 140026 - RNA, 19 nt, Artificial Sequence
  Description of Artificial Sequence: Synthetic oligonucleotide
  Sense strand starting at position 560 of SEQ ID NO: 1799
agcagcaucucuucugaga

SEQ ID NO: 140027 - RNA, 19 nt, Artificial Sequence
  Description of Artificial Sequence: Synthetic oligonucleotide
  Antisense strand to SEQ ID NO: 140026
ucucagaagagaugcugcu

SEQ ID NO: 140028 - RNA, 19 nt, Artificial Sequence
  Description of Artificial Sequence: Synthetic oligonucleotide
  Sense strand starting at position 380 of SEQ ID NO: 1799
acaacaauguuauaggaaa

SEQ ID NO: 140029 - RNA, 19 nt, Artificial Sequence
  Description of Artificial Sequence: Synthetic oligonucleotide
  Antisense strand to SEQ ID NO: 140028
uuuccuauaacauuguugu

SEQ ID NO: 140030 - RNA, 19 nt, Artificial Sequence
  Description of Artificial Sequence: Synthetic oligonucleotide
  Sense strand starting at position 285 of SEQ ID NO: 1799
ucugaaguaggccauaauu

SEQ ID NO: 140031 - RNA, 19 nt, Artificial Sequence
  Description of Artificial Sequence: Synthetic oligonucleotide
  Antisense strand to SEQ ID NO: 140030
aauuauggccuacuucaga

SEQ ID NO: 140032 - RNA, 19 nt, Artificial Sequence
  Description of Artificial Sequence: Synthetic oligonucleotide
  Sense strand starting at position 118 of SEQ ID NO: 1799
gguuaagaauuacuaucuu

SEQ ID NO: 140033 - RNA, 19 nt, Artificial Sequence
  Description of Artificial Sequence: Synthetic oligonucleotide
  Antisense strand to SEQ ID NO: 140032
aagauaguaauucuuaacc

SEQ ID NO: 140034 - RNA, 19 nt, Artificial Sequence
  Description of Artificial Sequence: Synthetic oligonucleotide
  Sense strand starting at position 97 of SEQ ID NO: 1799
aggugucaguggccuagaa

SEQ ID NO: 140035 - RNA, 19 nt, Artificial Sequence
  Description of Artificial Sequence: Synthetic oligonucleotide
  Antisense strand to SEQ ID NO: 140034
uucuaggccacugacaccu

SEQ ID NO: 140036 - RNA, 19 nt, Artificial Sequence
  Description of Artificial Sequence: Synthetic oligonucleotide
  Sense strand starting at position 34 of SEQ ID NO: 1799
gugaauaaaugccuauuaa

SEQ ID NO: 140037 - RNA, 19 nt, Artificial Sequence
  Description of Artificial Sequence: Synthetic oligonucleotide
  Antisense strand to SEQ ID NO: 140036
uuaauaggcauuuauucac

SEQ ID NO: 140038 - RNA, 19 nt, Artificial Sequence
  Description of Artificial Sequence: Synthetic oligonucleotide
  Sense strand starting at position 3922 of SEQ ID NO: 1798
ugauuaggguauguuaaua

SEQ ID NO: 140039 - RNA, 19 nt, Artificial Sequence
  Description of Artificial Sequence: Synthetic oligonucleotide
  Antisense strand to SEQ ID NO: 140038
uauuaacauacccuaauca

SEQ ID NO: 140040 - RNA, 19 nt, Artificial Sequence
  Description of Artificial Sequence: Synthetic oligonucleotide
  Sense strand starting at position 3921 of SEQ ID NO: 1798
cugauuaggguauguuaau

SEQ ID NO: 140041 - RNA, 19 nt, Artificial Sequence
  Description of Artificial Sequence: Synthetic oligonucleotide
  Antisense strand to SEQ ID NO: 140040
auuaacauacccuaaucag

SEQ ID NO: 140042 - RNA, 19 nt, Artificial Sequence
  Description of Artificial Sequence: Synthetic oligonucleotide
  Sense strand starting at position 3919 of SEQ ID NO: 1798
gucugauuaggguauguua

SEQ ID NO: 140043 - RNA, 19 nt, Artificial Sequence
  Description of Artificial Sequence: Synthetic oligonucleotide
  Antisense strand to SEQ ID NO: 140042
uaacauacccuaaucagac

SEQ ID NO: 140044 - RNA, 19 nt, Artificial Sequence
  Description of Artificial Sequence: Synthetic oligonucleotide
  Sense strand starting at position 3913 of SEQ ID NO: 1798
gagaaagucugauuagggu

SEQ ID NO: 140045 - RNA, 19 nt, Artificial Sequence
  Description of Artificial Sequence: Synthetic oligonucleotide
  Antisense strand to SEQ ID NO: 140044
acccuaaucagacuuucuc

SEQ ID NO: 140046 - RNA, 19 nt, Artificial Sequence
  Description of Artificial Sequence: Synthetic oligonucleotide
  Sense strand starting at position 3870 of SEQ ID NO: 1798
ugcugaugaccuugaugaa

SEQ ID NO: 140047 - RNA, 19 nt, Artificial Sequence
  Description of Artificial Sequence: Synthetic oligonucleotide
  Antisense strand to SEQ ID NO: 140046
uucaucaaggucaucagca

SEQ ID NO: 140048 - RNA, 19 nt, Artificial Sequence
  Description of Artificial Sequence: Synthetic oligonucleotide
  Sense strand starting at position 3849 of SEQ ID NO: 1798
cuggauguggccugaugaa

SEQ ID NO: 140049 - RNA, 19 nt, Artificial Sequence
  Description of Artificial Sequence: Synthetic oligonucleotide
  Antisense strand to SEQ ID NO: 140048
uucaucaggccacauccag

SEQ ID NO: 140050 - RNA, 19 nt, Artificial Sequence
  Description of Artificial Sequence: Synthetic oligonucleotide
  Sense strand starting at position 3791 of SEQ ID NO: 1798
ugaagagucuuaucagaua

SEQ ID NO: 140051 - RNA, 19 nt, Artificial Sequence
  Description of Artificial Sequence: Synthetic oligonucleotide
  Antisense strand to SEQ ID NO: 140050
uaucugauaagacucuuca

SEQ ID NO: 140052 - RNA, 19 nt, Artificial Sequence
  Description of Artificial Sequence: Synthetic oligonucleotide
  Sense strand starting at position 3686 of SEQ ID NO: 1798
cuugaagguuaaguagaaa

SEQ ID NO: 140053 - RNA, 19 nt, Artificial Sequence
  Description of Artificial Sequence: Synthetic oligonucleotide
  Antisense strand to SEQ ID NO: 140052
uuucuacuuaaccuucaag

SEQ ID NO: 140054 - RNA, 19 nt, Artificial Sequence
  Description of Artificial Sequence: Synthetic oligonucleotide
  Sense strand starting at position 3616 of SEQ ID NO: 1798
ucuuaagucuaguuaggau

SEQ ID NO: 140055 - RNA, 19 nt, Artificial Sequence
  Description of Artificial Sequence: Synthetic oligonucleotide
  Antisense strand to SEQ ID NO: 140054
auccuaacuagacuuaaga

SEQ ID NO: 140056 - RNA, 19 nt, Artificial Sequence
  Description of Artificial Sequence: Synthetic oligonucleotide
  Sense strand starting at position 3555 of SEQ ID NO: 1798
aucgauauaugagucuaga

SEQ ID NO: 140057 - RNA, 19 nt, Artificial Sequence
  Description of Artificial Sequence: Synthetic oligonucleotide
  Antisense strand to SEQ ID NO: 140056
ucuagacucauauaucgau

SEQ ID NO: 140058 - RNA, 19 nt, Artificial Sequence
  Description of Artificial Sequence: Synthetic oligonucleotide
  Sense strand starting at position 3434 of SEQ ID NO: 1798
ggcggugccacuuaaugaa

SEQ ID NO: 140059 - RNA, 19 nt, Artificial Sequence
  Description of Artificial Sequence: Synthetic oligonucleotide
  Antisense strand to SEQ ID NO: 140058
uucauuaaguggcaccgcc

SEQ ID NO: 140060 - RNA, 19 nt, Artificial Sequence
  Description of Artificial Sequence: Synthetic oligonucleotide
  Sense strand starting at position 3416 of SEQ ID NO: 1798
ccugaugacugaguuaaug

SEQ ID NO: 140061 - RNA, 19 nt, Artificial Sequence
  Description of Artificial Sequence: Synthetic oligonucleotide
  Antisense strand to SEQ ID NO: 140060
cauuaacucagucaucagg

SEQ ID NO: 140062 - RNA, 19 nt, Artificial Sequence
  Description of Artificial Sequence: Synthetic oligonucleotide
  Sense strand starting at position 3413 of SEQ ID NO: 1798
gggccugaugacugaguua

SEQ ID NO: 140063 - RNA, 19 nt, Artificial Sequence
  Description of Artificial Sequence: Synthetic oligonucleotide
  Antisense strand to SEQ ID NO: 140062
uaacucagucaucaggccc

SEQ ID NO: 140064 - RNA, 19 nt, Artificial Sequence
  Description of Artificial Sequence: Synthetic oligonucleotide
  Sense strand starting at position 3393 of SEQ ID NO: 1798
aagaguugauucuuagguu

SEQ ID NO: 140065 - RNA, 19 nt, Artificial Sequence
  Description of Artificial Sequence: Synthetic oligonucleotide
  Antisense strand to SEQ ID NO: 140064
aaccuaagaaucaacucuu

SEQ ID NO: 140066 - RNA, 19 nt, Artificial Sequence
  Description of Artificial Sequence: Synthetic oligonucleotide
  Sense strand starting at position 3361 of SEQ ID NO: 1798
gggcauagugugugaaaga

SEQ ID NO: 140067 - RNA, 19 nt, Artificial Sequence
  Description of Artificial Sequence: Synthetic oligonucleotide
  Antisense strand to SEQ ID NO: 140066
ucuuucacacacuaugccc

SEQ ID NO: 140068 - RNA, 19 nt, Artificial Sequence
  Description of Artificial Sequence: Synthetic oligonucleotide
  Sense strand starting at position 3227 of SEQ ID NO: 1798
acagauguccuugggauac

SEQ ID NO: 140069 - RNA, 19 nt, Artificial Sequence
  Description of Artificial Sequence: Synthetic oligonucleotide
  Antisense strand to SEQ ID NO: 140068
guaucccaaggacaucugu

SEQ ID NO: 140070 - RNA, 19 nt, Artificial Sequence
  Description of Artificial Sequence: Synthetic oligonucleotide
  Sense strand starting at position 3099 of SEQ ID NO: 1798
aagccugugggccauuaua

SEQ ID NO: 140071 - RNA, 19 nt, Artificial Sequence
  Description of Artificial Sequence: Synthetic oligonucleotide
  Antisense strand to SEQ ID NO: 140070
uauaauggcccacaggcuu

SEQ ID NO: 140072 - RNA, 19 nt, Artificial Sequence
  Description of Artificial Sequence: Synthetic oligonucleotide
  Sense strand starting at position 2954 of SEQ ID NO: 1798
gccuuuccaagcugagaga

SEQ ID NO: 140073 - RNA, 19 nt, Artificial Sequence
  Description of Artificial Sequence: Synthetic oligonucleotide
  Antisense strand to SEQ ID NO: 140072
ucucucagcuuggaaaggc

SEQ ID NO: 140074 - RNA, 19 nt, Artificial Sequence
  Description of Artificial Sequence: Synthetic oligonucleotide
  Sense strand starting at position 2948 of SEQ ID NO: 1798
ggaauagccuuuccaagcu

SEQ ID NO: 140075 - RNA, 19 nt, Artificial Sequence
  Description of Artificial Sequence: Synthetic oligonucleotide
  Antisense strand to SEQ ID NO: 140074
agcuuggaaaggcuauucc

SEQ ID NO: 140076 - RNA, 19 nt, Artificial Sequence
  Description of Artificial Sequence: Synthetic oligonucleotide
  Sense strand starting at position 2882 of SEQ ID NO: 1798
gaagaccuuugagcgcaua

SEQ ID NO: 140077 - RNA, 19 nt, Artificial Sequence
  Description of Artificial Sequence: Synthetic oligonucleotide
  Antisense strand to SEQ ID NO: 140076
uaugcgcucaaaggucuuc

SEQ ID NO: 140078 - RNA, 19 nt, Artificial Sequence
  Description of Artificial Sequence: Synthetic oligonucleotide
  Sense strand starting at position 2849 of SEQ ID NO: 1798
gacuuuacaccuggugaga

SEQ ID NO: 140079 - RNA, 19 nt, Artificial Sequence
  Description of Artificial Sequence: Synthetic oligonucleotide
  Antisense strand to SEQ ID NO: 140078
ucucaccagguguaaaguc

SEQ ID NO: 140080 - RNA, 19 nt, Artificial Sequence
  Description of Artificial Sequence: Synthetic oligonucleotide
  Sense strand starting at position 2809 of SEQ ID NO: 1798
ugauaagugguguggagaa

SEQ ID NO: 140081 - RNA, 19 nt, Artificial Sequence
  Description of Artificial Sequence: Synthetic oligonucleotide
  Antisense strand to SEQ ID NO: 140080
uucuccacaccacuuauca

SEQ ID NO: 140082 - RNA, 19 nt, Artificial Sequence
  Description of Artificial Sequence: Synthetic oligonucleotide
  Sense strand starting at position 2693 of SEQ ID NO: 1798
uaacuaagcgcagagguuu

SEQ ID NO: 140083 - RNA, 19 nt, Artificial Sequence
  Description of Artificial Sequence: Synthetic oligonucleotide
  Antisense strand to SEQ ID NO: 140082
aaaccucugcgcuuaguua

SEQ ID NO: 140084 - RNA, 19 nt, Artificial Sequence
  Description of Artificial Sequence: Synthetic oligonucleotide
  Sense strand starting at position 2635 of SEQ ID NO: 1798
ggaacucaaucauucgaca

SEQ ID NO: 140085 - RNA, 19 nt, Artificial Sequence
  Description of Artificial Sequence: Synthetic oligonucleotide
  Antisense strand to SEQ ID NO: 140084
ugucgaaugauugaguucc

SEQ ID NO: 140086 - RNA, 19 nt, Artificial Sequence
  Description of Artificial Sequence: Synthetic oligonucleotide
  Sense strand starting at position 1615 of SEQ ID NO: 1798
acagcaaugcuccagucua

SEQ ID NO: 140087 - RNA, 19 nt, Artificial Sequence
  Description of Artificial Sequence: Synthetic oligonucleotide
  Antisense strand to SEQ ID NO: 140086
uagacuggagcauugcugu

SEQ ID NO: 140088 - RNA, 19 nt, Artificial Sequence
  Description of Artificial Sequence: Synthetic oligonucleotide
  Sense strand starting at position 1599 of SEQ ID NO: 1798
agaagugagcccggagaca

SEQ ID NO: 140089 - RNA, 19 nt, Artificial Sequence
  Description of Artificial Sequence: Synthetic oligonucleotide
  Antisense strand to SEQ ID NO: 140088
ugucuccgggcucacuucu

SEQ ID NO: 140090 - RNA, 19 nt, Artificial Sequence
  Description of Artificial Sequence: Synthetic oligonucleotide
  Sense strand starting at position 1539 of SEQ ID NO: 1798
agaugucagcccuauuaac

SEQ ID NO: 140091 - RNA, 19 nt, Artificial Sequence
  Description of Artificial Sequence: Synthetic oligonucleotide
  Antisense strand to SEQ ID NO: 140090
guuaauagggcugacaucu

SEQ ID NO: 140092 - RNA, 19 nt, Artificial Sequence
  Description of Artificial Sequence: Synthetic oligonucleotide
  Sense strand starting at position 1524 of SEQ ID NO: 1798
gguggagugggauguagau

SEQ ID NO: 140093 - RNA, 19 nt, Artificial Sequence
  Description of Artificial Sequence: Synthetic oligonucleotide
  Antisense strand to SEQ ID NO: 140092
aucuacaucccacuccacc

SEQ ID NO: 140094 - RNA, 19 nt, Artificial Sequence
  Description of Artificial Sequence: Synthetic oligonucleotide
  Sense strand starting at position 1375 of SEQ ID NO: 1798
uuugaaggauaacaagaau

SEQ ID NO: 140095 - RNA, 19 nt, Artificial Sequence
  Description of Artificial Sequence: Synthetic oligonucleotide
  Antisense strand to SEQ ID NO: 140094
auucuuguuauccuucaaa

SEQ ID NO: 140096 - RNA, 19 nt, Artificial Sequence
  Description of Artificial Sequence: Synthetic oligonucleotide
  Sense strand starting at position 1202 of SEQ ID NO: 1798
gucaaagguucccuaaacu

SEQ ID NO: 140097 - RNA, 19 nt, Artificial Sequence
  Description of Artificial Sequence: Synthetic oligonucleotide
  Antisense strand to SEQ ID NO: 140096
aguuuagggaaccuuugac

SEQ ID NO: 140098 - RNA, 19 nt, Artificial Sequence
  Description of Artificial Sequence: Synthetic oligonucleotide
  Sense strand starting at position 1201 of SEQ ID NO: 1798
ggucaaagguucccuaaac

SEQ ID NO: 140099 - RNA, 19 nt, Artificial Sequence
  Description of Artificial Sequence: Synthetic oligonucleotide
  Antisense strand to SEQ ID NO: 140098
guuuagggaaccuuugacc

SEQ ID NO: 140100 - RNA, 19 nt, Artificial Sequence
  Description of Artificial Sequence: Synthetic oligonucleotide
  Sense strand starting at position 924 of SEQ ID NO: 1798
agcagcaucucuucugaga

SEQ ID NO: 140101 - RNA, 19 nt, Artificial Sequence
  Description of Artificial Sequence: Synthetic oligonucleotide
  Antisense strand to SEQ ID NO: 140100
ucucagaagagaugcugcu

SEQ ID NO: 140102 - RNA, 19 nt, Artificial Sequence
  Description of Artificial Sequence: Synthetic oligonucleotide
  Sense strand starting at position 649 of SEQ ID NO: 1798
ucugaaguaggccauaauu

SEQ ID NO: 140103 - RNA, 19 nt, Artificial Sequence
  Description of Artificial Sequence: Synthetic oligonucleotide
  Antisense strand to SEQ ID NO: 140102
aauuauggccuacuucaga

SEQ ID NO: 140104 - RNA, 19 nt, Artificial Sequence
  Description of Artificial Sequence: Synthetic oligonucleotide
  Sense strand starting at position 482 of SEQ ID NO: 1798
gguuaagaauuacuaucuu

SEQ ID NO: 140105 - RNA, 19 nt, Artificial Sequence
  Description of Artificial Sequence: Synthetic oligonucleotide
  Antisense strand to SEQ ID NO: 140104
aagauaguaauucuuaacc

SEQ ID NO: 140106 - RNA, 19 nt, Artificial Sequence
  Description of Artificial Sequence: Synthetic oligonucleotide
  Sense strand starting at position 398 of SEQ ID NO: 1798
gugaauaaaugccuauuaa

SEQ ID NO: 140107 - RNA, 19 nt, Artificial Sequence
  Description of Artificial Sequence: Synthetic oligonucleotide
  Antisense strand to SEQ ID NO: 140106
uuaauaggcauuuauucac

SEQ ID NO: 140108 - RNA, 19 nt, Artificial Sequence
  Description of Artificial Sequence: Synthetic oligonucleotide
  Sense strand starting at position 306 of SEQ ID NO: 1798
cuguguaacacugagggau

SEQ ID NO: 140109 - RNA, 19 nt, Artificial Sequence
  Description of Artificial Sequence: Synthetic oligonucleotide
  Antisense strand to SEQ ID NO: 140108
aucccucaguguuacacag

SEQ ID NO: 140110 - RNA, 19 nt, Artificial Sequence
  Description of Artificial Sequence: Synthetic oligonucleotide
  Sense strand starting at position 299 of SEQ ID NO: 1798
uauggaacuguguaacacu

SEQ ID NO: 140111 - RNA, 19 nt, Artificial Sequence
  Description of Artificial Sequence: Synthetic oligonucleotide
  Antisense strand to SEQ ID NO: 140110
aguguuacacaguuccaua

SEQ ID NO: 140112 - RNA, 19 nt, Artificial Sequence
  Description of Artificial Sequence: Synthetic oligonucleotide
  Sense strand starting at position 227 of SEQ ID NO: 1798
guauauuaaguguagauac

SEQ ID NO: 140113 - RNA, 19 nt, Artificial Sequence
  Description of Artificial Sequence: Synthetic oligonucleotide
  Antisense strand to SEQ ID NO: 140112
guaucuacacuuaauauac

SEQ ID NO: 140114 - RNA, 19 nt, Artificial Sequence
  Description of Artificial Sequence: Synthetic oligonucleotide
  Sense strand starting at position 225 of SEQ ID NO: 1798
ggguauauuaaguguagau

SEQ ID NO: 140115 - RNA, 19 nt, Artificial Sequence
  Description of Artificial Sequence: Synthetic oligonucleotide
  Antisense strand to SEQ ID NO: 140114
aucuacacuuaauauaccc

SEQ ID NO: 140116 - RNA, 19 nt, Artificial Sequence
  Description of Artificial Sequence: Synthetic oligonucleotide
  Sense strand starting at position 121 of SEQ ID NO: 1798
ugaacaugugcauauacaa

SEQ ID NO: 140117 - RNA, 19 nt, Artificial Sequence
  Description of Artificial Sequence: Synthetic oligonucleotide
  Antisense strand to SEQ ID NO: 140116
uuguauaugcacauguuca

SEQ ID NO: 140118 - RNA, 19 nt, Artificial Sequence
  Description of Artificial Sequence: Synthetic oligonucleotide
  Sense strand starting at position 2 of SEQ ID NO: 1801
gguaguuagagccaggaga

SEQ ID NO: 140119 - RNA, 19 nt, Artificial Sequence
  Description of Artificial Sequence: Synthetic oligonucleotide
  Antisense strand to SEQ ID NO: 140118
ucuccuggcucuaacuacc

SEQ ID NO: 140120 - RNA, 19 nt, Artificial Sequence
  Description of Artificial Sequence: Synthetic oligonucleotide
  Sense strand starting at position 74 of SEQ ID NO: 1801
gagggcuuugcccaagcaa

SEQ ID NO: 140121 - RNA, 19 nt, Artificial Sequence
  Description of Artificial Sequence: Synthetic oligonucleotide
  Antisense strand to SEQ ID NO: 140120
uugcuugggcaaagcccuc

SEQ ID NO: 140122 - RNA, 19 nt, Artificial Sequence
  Description of Artificial Sequence: Synthetic oligonucleotide
  Sense strand starting at position 331 of SEQ ID NO: 1801
gagucagaguaccacgauu

SEQ ID NO: 140123 - RNA, 19 nt, Artificial Sequence
  Description of Artificial Sequence: Synthetic oligonucleotide
  Antisense strand to SEQ ID NO: 140122
aaucgugguacucugacuc

SEQ ID NO: 140124 - RNA, 19 nt, Artificial Sequence
  Description of Artificial Sequence: Synthetic oligonucleotide
  Sense strand starting at position 333 of SEQ ID NO: 1801
gucagaguaccacgauucu

SEQ ID NO: 140125 - RNA, 19 nt, Artificial Sequence
  Description of Artificial Sequence: Synthetic oligonucleotide
  Antisense strand to SEQ ID NO: 140124
agaaucgugguacucugac

SEQ ID NO: 140126 - RNA, 19 nt, Artificial Sequence
  Description of Artificial Sequence: Synthetic oligonucleotide
  Sense strand starting at position 439 of SEQ ID NO: 1801
cagcgccugcccugaaaua

SEQ ID NO: 140127 - RNA, 19 nt, Artificial Sequence
  Description of Artificial Sequence: Synthetic oligonucleotide
  Antisense strand to SEQ ID NO: 140126
uauuucagggcaggcgcug

SEQ ID NO: 140128 - RNA, 19 nt, Artificial Sequence
  Description of Artificial Sequence: Synthetic oligonucleotide
  Sense strand starting at position 440 of SEQ ID NO: 1801
agcgccugcccugaaauau

SEQ ID NO: 140129 - RNA, 19 nt, Artificial Sequence
  Description of Artificial Sequence: Synthetic oligonucleotide
  Antisense strand to SEQ ID NO: 140128
auauuucagggcaggcgcu

SEQ ID NO: 140130 - RNA, 19 nt, Artificial Sequence
  Description of Artificial Sequence: Synthetic oligonucleotide
  Sense strand starting at position 449 of SEQ ID NO: 1801
ccugaaauauugcugugaa

SEQ ID NO: 140131 - RNA, 19 nt, Artificial Sequence
  Description of Artificial Sequence: Synthetic oligonucleotide
  Antisense strand to SEQ ID NO: 140130
uucacagcaauauuucagg

SEQ ID NO: 140132 - RNA, 19 nt, Artificial Sequence
  Description of Artificial Sequence: Synthetic oligonucleotide
  Sense strand starting at position 450 of SEQ ID NO: 1801
cugaaauauugcugugaag

SEQ ID NO: 140133 - RNA, 19 nt, Artificial Sequence
  Description of Artificial Sequence: Synthetic oligonucleotide
  Antisense strand to SEQ ID NO: 140132
cuucacagcaauauuucag

SEQ ID NO: 140134 - RNA, 19 nt, Artificial Sequence
  Description of Artificial Sequence: Synthetic oligonucleotide
  Sense strand starting at position 452 of SEQ ID NO: 1801
gaaauauugcugugaaggg

SEQ ID NO: 140135 - RNA, 19 nt, Artificial Sequence
  Description of Artificial Sequence: Synthetic oligonucleotide
  Antisense strand to SEQ ID NO: 140134
cccuucacagcaauauuuc

SEQ ID NO: 140136 - RNA, 19 nt, Artificial Sequence
  Description of Artificial Sequence: Synthetic oligonucleotide
  Sense strand starting at position 482 of SEQ ID NO: 1801
gugccaccugaggauuaau

SEQ ID NO: 140137 - RNA, 19 nt, Artificial Sequence
  Description of Artificial Sequence: Synthetic oligonucleotide
  Antisense strand to SEQ ID NO: 140136
auuaauccucagguggcac

SEQ ID NO: 140138 - RNA, 19 nt, Artificial Sequence
  Description of Artificial Sequence: Synthetic oligonucleotide
  Sense strand starting at position 720 of SEQ ID NO: 1801
cuguuucaucugcgaggca

SEQ ID NO: 140139 - RNA, 19 nt, Artificial Sequence
  Description of Artificial Sequence: Synthetic oligonucleotide
  Antisense strand to SEQ ID NO: 140138
ugccucgcagaugaaacag

SEQ ID NO: 140140 - RNA, 19 nt, Artificial Sequence
  Description of Artificial Sequence: Synthetic oligonucleotide
  Sense strand starting at position 1020 of SEQ ID NO: 1801
gccaaugagcccugagaac

SEQ ID NO: 140141 - RNA, 19 nt, Artificial Sequence
  Description of Artificial Sequence: Synthetic oligonucleotide
  Antisense strand to SEQ ID NO: 140140
guucucagggcucauuggc

SEQ ID NO: 140142 - RNA, 19 nt, Artificial Sequence
  Description of Artificial Sequence: Synthetic oligonucleotide
  Sense strand starting at position 2279 of SEQ ID NO: 1801
ugggacaacuucuggauca

SEQ ID NO: 140143 - RNA, 19 nt, Artificial Sequence
  Description of Artificial Sequence: Synthetic oligonucleotide
  Antisense strand to SEQ ID NO: 140142
ugauccagaaguuguccca

SEQ ID NO: 140144 - RNA, 19 nt, Artificial Sequence
  Description of Artificial Sequence: Synthetic oligonucleotide
  Sense strand starting at position 2280 of SEQ ID NO: 1801
gggacaacuucuggaucaa

SEQ ID NO: 140145 - RNA, 19 nt, Artificial Sequence
  Description of Artificial Sequence: Synthetic oligonucleotide
  Antisense strand to SEQ ID NO: 140144
uugauccagaaguuguccc

SEQ ID NO: 140146 - RNA, 19 nt, Artificial Sequence
  Description of Artificial Sequence: Synthetic oligonucleotide
  Sense strand starting at position 2746 of SEQ ID NO: 1801
ucccuucuuugauggucaa

SEQ ID NO: 140147 - RNA, 19 nt, Artificial Sequence
  Description of Artificial Sequence: Synthetic oligonucleotide
  Antisense strand to SEQ ID NO: 140146
uugaccaucaaagaaggga

SEQ ID NO: 140148 - RNA, 19 nt, Artificial Sequence
  Description of Artificial Sequence: Synthetic oligonucleotide
  Sense strand starting at position 2944 of SEQ ID NO: 1801
aggucaugaacucgucaca

SEQ ID NO: 140149 - RNA, 19 nt, Artificial Sequence
  Description of Artificial Sequence: Synthetic oligonucleotide
  Antisense strand to SEQ ID NO: 140148
ugugacgaguucaugaccu

SEQ ID NO: 140150 - RNA, 19 nt, Artificial Sequence
  Description of Artificial Sequence: Synthetic oligonucleotide
  Sense strand starting at position 2947 of SEQ ID NO: 1801
ucaugaacucgucacagaa

SEQ ID NO: 140151 - RNA, 19 nt, Artificial Sequence
  Description of Artificial Sequence: Synthetic oligonucleotide
  Antisense strand to SEQ ID NO: 140150
uucugugacgaguucauga

SEQ ID NO: 140152 - RNA, 19 nt, Artificial Sequence
  Description of Artificial Sequence: Synthetic oligonucleotide
  Sense strand starting at position 2949 of SEQ ID NO: 1801
augaacucgucacagaaca

SEQ ID NO: 140153 - RNA, 19 nt, Artificial Sequence
  Description of Artificial Sequence: Synthetic oligonucleotide
  Antisense strand to SEQ ID NO: 140152
uguucugugacgaguucau

SEQ ID NO: 140154 - RNA, 19 nt, Artificial Sequence
  Description of Artificial Sequence: Synthetic oligonucleotide
  Sense strand starting at position 2986 of SEQ ID NO: 1801
cucugaaaucucuggaucu

SEQ ID NO: 140155 - RNA, 19 nt, Artificial Sequence
  Description of Artificial Sequence: Synthetic oligonucleotide
  Antisense strand to SEQ ID NO: 140154
agauccagagauuucagag

SEQ ID NO: 140156 - RNA, 19 nt, Artificial Sequence
  Description of Artificial Sequence: Synthetic oligonucleotide
  Sense strand starting at position 3074 of SEQ ID NO: 1801
uuucgaauuggugggucaa

SEQ ID NO: 140157 - RNA, 19 nt, Artificial Sequence
  Description of Artificial Sequence: Synthetic oligonucleotide
  Antisense strand to SEQ ID NO: 140156
uugacccaccaauucgaaa

SEQ ID NO: 140158 - RNA, 19 nt, Artificial Sequence
  Description of Artificial Sequence: Synthetic oligonucleotide
  Sense strand starting at position 3075 of SEQ ID NO: 1801
uucgaauuggugggucaag

SEQ ID NO: 140159 - RNA, 19 nt, Artificial Sequence
  Description of Artificial Sequence: Synthetic oligonucleotide
  Antisense strand to SEQ ID NO: 140158
cuugacccaccaauucgaa

SEQ ID NO: 140160 - RNA, 19 nt, Artificial Sequence
  Description of Artificial Sequence: Synthetic oligonucleotide
  Sense strand starting at position 3127 of SEQ ID NO: 1801
aggcccacuugacagauaa

SEQ ID NO: 140161 - RNA, 19 nt, Artificial Sequence
  Description of Artificial Sequence: Synthetic oligonucleotide
  Antisense strand to SEQ ID NO: 140160
uuaucugucaagugggccu

SEQ ID NO: 140162 - RNA, 19 nt, Artificial Sequence
  Description of Artificial Sequence: Synthetic oligonucleotide
  Sense strand starting at position 3194 of SEQ ID NO: 1801
gcaucuacugugugcuuaa

SEQ ID NO: 140163 - RNA, 19 nt, Artificial Sequence
  Description of Artificial Sequence: Synthetic oligonucleotide
  Antisense strand to SEQ ID NO: 140162
uuaagcacacaguagaugc

SEQ ID NO: 140164 - RNA, 19 nt, Artificial Sequence
  Description of Artificial Sequence: Synthetic oligonucleotide
  Sense strand starting at position 3314 of SEQ ID NO: 1801
ucuggaggaucugagacau

SEQ ID NO: 140165 - RNA, 19 nt, Artificial Sequence
  Description of Artificial Sequence: Synthetic oligonucleotide
  Antisense strand to SEQ ID NO: 140164
augucucagauccuccaga

SEQ ID NO: 140166 - RNA, 19 nt, Artificial Sequence
  Description of Artificial Sequence: Synthetic oligonucleotide
  Sense strand starting at position 3542 of SEQ ID NO: 1801
ccuagcuguauaugggaaa

SEQ ID NO: 140167 - RNA, 19 nt, Artificial Sequence
  Description of Artificial Sequence: Synthetic oligonucleotide
  Antisense strand to SEQ ID NO: 140166
uuucccauauacagcuagg

SEQ ID NO: 140168 - RNA, 19 nt, Artificial Sequence
  Description of Artificial Sequence: Synthetic oligonucleotide
  Sense strand starting at position 3669 of SEQ ID NO: 1801
gaagcuucguggcugcaga

SEQ ID NO: 140169 - RNA, 19 nt, Artificial Sequence
  Description of Artificial Sequence: Synthetic oligonucleotide
  Antisense strand to SEQ ID NO: 140168
ucugcagccacgaagcuuc

SEQ ID NO: 140170 - RNA, 19 nt, Artificial Sequence
  Description of Artificial Sequence: Synthetic oligonucleotide
  Sense strand starting at position 3715 of SEQ ID NO: 1801
gcaaguugucagggcagga

SEQ ID NO: 140171 - RNA, 19 nt, Artificial Sequence
  Description of Artificial Sequence: Synthetic oligonucleotide
  Antisense strand to SEQ ID NO: 140170
uccugcccugacaacuugc

SEQ ID NO: 140172 - RNA, 19 nt, Artificial Sequence
  Description of Artificial Sequence: Synthetic oligonucleotide
  Sense strand starting at position 3732 of SEQ ID NO: 1801
gaggaagacuccugcggua

SEQ ID NO: 140173 - RNA, 19 nt, Artificial Sequence
  Description of Artificial Sequence: Synthetic oligonucleotide
  Antisense strand to SEQ ID NO: 140172
uaccgcaggagucuuccuc

SEQ ID NO: 140174 - RNA, 19 nt, Artificial Sequence
  Description of Artificial Sequence: Synthetic oligonucleotide
  Sense strand starting at position 3734 of SEQ ID NO: 1801
ggaagacuccugcgguauc

SEQ ID NO: 140175 - RNA, 19 nt, Artificial Sequence
  Description of Artificial Sequence: Synthetic oligonucleotide
  Antisense strand to SEQ ID NO: 140174
gauaccgcaggagucuucc

SEQ ID NO: 140176 - RNA, 19 nt, Artificial Sequence
  Description of Artificial Sequence: Synthetic oligonucleotide
  Sense strand starting at position 3748 of SEQ ID NO: 1801
guaucacaugcucacucau

SEQ ID NO: 140177 - RNA, 19 nt, Artificial Sequence
  Description of Artificial Sequence: Synthetic oligonucleotide
  Antisense strand to SEQ ID NO: 140176
augagugagcaugugauac

SEQ ID NO: 140178 - RNA, 19 nt, Artificial Sequence
  Description of Artificial Sequence: Synthetic oligonucleotide
  Sense strand starting at position 3791 of SEQ ID NO: 1801
uugaucuccugccuaggaa

SEQ ID NO: 140179 - RNA, 19 nt, Artificial Sequence
  Description of Artificial Sequence: Synthetic oligonucleotide
  Antisense strand to SEQ ID NO: 140178
uuccuaggcaggagaucaa

SEQ ID NO: 140180 - RNA, 19 nt, Artificial Sequence
  Description of Artificial Sequence: Synthetic oligonucleotide
  Sense strand starting at position 3792 of SEQ ID NO: 1801
ugaucuccugccuaggaau

SEQ ID NO: 140181 - RNA, 19 nt, Artificial Sequence
  Description of Artificial Sequence: Synthetic oligonucleotide
  Antisense strand to SEQ ID NO: 140180
auuccuaggcaggagauca

SEQ ID NO: 140182 - RNA, 19 nt, Artificial Sequence
  Description of Artificial Sequence: Synthetic oligonucleotide
  Sense strand starting at position 3817 of SEQ ID NO: 1801
ggacuauauaguuggcuca

SEQ ID NO: 140183 - RNA, 19 nt, Artificial Sequence
  Description of Artificial Sequence: Synthetic oligonucleotide
  Antisense strand to SEQ ID NO: 140182
ugagccaacuauauagucc

SEQ ID NO: 140184 - RNA, 19 nt, Artificial Sequence
  Description of Artificial Sequence: Synthetic oligonucleotide
  Sense strand starting at position 3818 of SEQ ID NO: 1801
gacuauauaguuggcucaa

SEQ ID NO: 140185 - RNA, 19 nt, Artificial Sequence
  Description of Artificial Sequence: Synthetic oligonucleotide
  Antisense strand to SEQ ID NO: 140184
uugagccaacuauauaguc

SEQ ID NO: 140186 - RNA, 19 nt, Artificial Sequence
  Description of Artificial Sequence: Synthetic oligonucleotide
  Sense strand starting at position 3819 of SEQ ID NO: 1801
acuauauaguuggcucaaa

SEQ ID NO: 140187 - RNA, 19 nt, Artificial Sequence
  Description of Artificial Sequence: Synthetic oligonucleotide
  Antisense strand to SEQ ID NO: 140186
uuugagccaacuauauagu

SEQ ID NO: 140188 - RNA, 19 nt, Artificial Sequence
  Description of Artificial Sequence: Synthetic oligonucleotide
  Sense strand starting at position 3820 of SEQ ID NO: 1801
cuauauaguuggcucaaac

SEQ ID NO: 140189 - RNA, 19 nt, Artificial Sequence
  Description of Artificial Sequence: Synthetic oligonucleotide
  Antisense strand to SEQ ID NO: 140188
guuugagccaacuauauag

SEQ ID NO: 140190 - RNA, 19 nt, Artificial Sequence
  Description of Artificial Sequence: Synthetic oligonucleotide
  Sense strand starting at position 3829 of SEQ ID NO: 1801
uggcucaaacacuguaaua

SEQ ID NO: 140191 - RNA, 19 nt, Artificial Sequence
  Description of Artificial Sequence: Synthetic oligonucleotide
  Antisense strand to SEQ ID NO: 140190
uauuacaguguuugagcca

SEQ ID NO: 140192 - RNA, 19 nt, Artificial Sequence
  Description of Artificial Sequence: Synthetic oligonucleotide
  Sense strand starting at position 3959 of SEQ ID NO: 1801
cugggagaugcuuggucaa

SEQ ID NO: 140193 - RNA, 19 nt, Artificial Sequence
  Description of Artificial Sequence: Synthetic oligonucleotide
  Antisense strand to SEQ ID NO: 140192
uugaccaagcaucucccag

SEQ ID NO: 140194 - RNA, 19 nt, Artificial Sequence
  Description of Artificial Sequence: Synthetic oligonucleotide
  Sense strand starting at position 3961 of SEQ ID NO: 1801
gggagaugcuuggucaaau

SEQ ID NO: 140195 - RNA, 19 nt, Artificial Sequence
  Description of Artificial Sequence: Synthetic oligonucleotide
  Antisense strand to SEQ ID NO: 140194
auuugaccaagcaucuccc

SEQ ID NO: 140196 - RNA, 19 nt, Artificial Sequence
  Description of Artificial Sequence: Synthetic oligonucleotide
  Sense strand starting at position 3962 of SEQ ID NO: 1801
ggagaugcuuggucaaaua

SEQ ID NO: 140197 - RNA, 19 nt, Artificial Sequence
  Description of Artificial Sequence: Synthetic oligonucleotide
  Antisense strand to SEQ ID NO: 140196
uauuugaccaagcaucucc

SEQ ID NO: 140198 - RNA, 19 nt, Artificial Sequence
  Description of Artificial Sequence: Synthetic oligonucleotide
  Sense strand starting at position 45 of SEQ ID NO: 1800
uggagaagguccuguuucu

SEQ ID NO: 140199 - RNA, 19 nt, Artificial Sequence
  Description of Artificial Sequence: Synthetic oligonucleotide
  Antisense strand to SEQ ID NO: 140198
agaaacaggaccuucucca

SEQ ID NO: 140200 - RNA, 19 nt, Artificial Sequence
  Description of Artificial Sequence: Synthetic oligonucleotide
  Sense strand starting at position 51 of SEQ ID NO: 1800
agguccuguuucuaaggau

SEQ ID NO: 140201 - RNA, 19 nt, Artificial Sequence
  Description of Artificial Sequence: Synthetic oligonucleotide
  Antisense strand to SEQ ID NO: 140200
auccuuagaaacaggaccu

SEQ ID NO: 140202 - RNA, 19 nt, Artificial Sequence
  Description of Artificial Sequence: Synthetic oligonucleotide
  Sense strand starting at position 104 of SEQ ID NO: 1800
ucgccugacugucagauua

SEQ ID NO: 140203 - RNA, 19 nt, Artificial Sequence
  Description of Artificial Sequence: Synthetic oligonucleotide
  Antisense strand to SEQ ID NO: 140202
uaaucugacagucaggcga

SEQ ID NO: 140204 - RNA, 19 nt, Artificial Sequence
  Description of Artificial Sequence: Synthetic oligonucleotide
  Sense strand starting at position 255 of SEQ ID NO: 1800
cuuggaucauggcaaggau

SEQ ID NO: 140205 - RNA, 19 nt, Artificial Sequence
  Description of Artificial Sequence: Synthetic oligonucleotide
  Antisense strand to SEQ ID NO: 140204
auccuugccaugauccaag

SEQ ID NO: 140206 - RNA, 19 nt, Artificial Sequence
  Description of Artificial Sequence: Synthetic oligonucleotide
  Sense strand starting at position 258 of SEQ ID NO: 1800
ggaucauggcaaggaugua

SEQ ID NO: 140207 - RNA, 19 nt, Artificial Sequence
  Description of Artificial Sequence: Synthetic oligonucleotide
  Antisense strand to SEQ ID NO: 140206
uacauccuugccaugaucc

SEQ ID NO: 140208 - RNA, 19 nt, Artificial Sequence
  Description of Artificial Sequence: Synthetic oligonucleotide
  Sense strand starting at position 300 of SEQ ID NO: 1800
gagccuuucuaggcaggau

SEQ ID NO: 140209 - RNA, 19 nt, Artificial Sequence
  Description of Artificial Sequence: Synthetic oligonucleotide
  Antisense strand to SEQ ID NO: 140208
auccugccuagaaaggcuc

SEQ ID NO: 140210 - RNA, 19 nt, Artificial Sequence
  Description of Artificial Sequence: Synthetic oligonucleotide
  Sense strand starting at position 316 of SEQ ID NO: 1800
gauggaaguuugcuggaua

SEQ ID NO: 140211 - RNA, 19 nt, Artificial Sequence
  Description of Artificial Sequence: Synthetic oligonucleotide
  Antisense strand to SEQ ID NO: 140210
uauccagcaaacuuccauc

SEQ ID NO: 140212 - RNA, 19 nt, Artificial Sequence
  Description of Artificial Sequence: Synthetic oligonucleotide
  Sense strand starting at position 317 of SEQ ID NO: 1800
auggaaguuugcuggauau

SEQ ID NO: 140213 - RNA, 19 nt, Artificial Sequence
  Description of Artificial Sequence: Synthetic oligonucleotide
  Antisense strand to SEQ ID NO: 140212
auauccagcaaacuuccau

SEQ ID NO: 140214 - RNA, 19 nt, Artificial Sequence
  Description of Artificial Sequence: Synthetic oligonucleotide
  Sense strand starting at position 321 of SEQ ID NO: 1800
aaguuugcuggauaucuau

SEQ ID NO: 140215 - RNA, 19 nt, Artificial Sequence
  Description of Artificial Sequence: Synthetic oligonucleotide
  Antisense strand to SEQ ID NO: 140214
auagauauccagcaaacuu

SEQ ID NO: 140216 - RNA, 19 nt, Artificial Sequence
  Description of Artificial Sequence: Synthetic oligonucleotide
  Sense strand starting at position 327 of SEQ ID NO: 1800
gcuggauaucuaugguuua

SEQ ID NO: 140217 - RNA, 19 nt, Artificial Sequence
  Description of Artificial Sequence: Synthetic oligonucleotide
  Antisense strand to SEQ ID NO: 140216
uaaaccauagauauccagc

SEQ ID NO: 140218 - RNA, 19 nt, Artificial Sequence
  Description of Artificial Sequence: Synthetic oligonucleotide
  Sense strand starting at position 328 of SEQ ID NO: 1800
cuggauaucuaugguuuau

SEQ ID NO: 140219 - RNA, 19 nt, Artificial Sequence
  Description of Artificial Sequence: Synthetic oligonucleotide
  Antisense strand to SEQ ID NO: 140218
auaaaccauagauauccag

SEQ ID NO: 140220 - RNA, 19 nt, Artificial Sequence
  Description of Artificial Sequence: Synthetic oligonucleotide
  Sense strand starting at position 338 of SEQ ID NO: 1800
augguuuauggugggcaga

SEQ ID NO: 140221 - RNA, 19 nt, Artificial Sequence
  Description of Artificial Sequence: Synthetic oligonucleotide
  Antisense strand to SEQ ID NO: 140220
ucugcccaccauaaaccau

SEQ ID NO: 140222 - RNA, 19 nt, Artificial Sequence
  Description of Artificial Sequence: Synthetic oligonucleotide
  Sense strand starting at position 339 of SEQ ID NO: 1800
ugguuuauggugggcagaa

SEQ ID NO: 140223 - RNA, 19 nt, Artificial Sequence
  Description of Artificial Sequence: Synthetic oligonucleotide
  Antisense strand to SEQ ID NO: 140222
uucugcccaccauaaacca

SEQ ID NO: 140224 - RNA, 19 nt, Artificial Sequence
  Description of Artificial Sequence: Synthetic oligonucleotide
  Sense strand starting at position 340 of SEQ ID NO: 1800
gguuuauggugggcagaaa

SEQ ID NO: 140225 - RNA, 19 nt, Artificial Sequence
  Description of Artificial Sequence: Synthetic oligonucleotide
  Antisense strand to SEQ ID NO: 140224
uuucugcccaccauaaacc

SEQ ID NO: 140226 - RNA, 19 nt, Artificial Sequence
  Description of Artificial Sequence: Synthetic oligonucleotide
  Sense strand starting at position 423 of SEQ ID NO: 1800
gaagcaaaugucugcgaau

SEQ ID NO: 140227 - RNA, 19 nt, Artificial Sequence
  Description of Artificial Sequence: Synthetic oligonucleotide
  Antisense strand to SEQ ID NO: 140226
auucgcagacauuugcuuc

SEQ ID NO: 140228 - RNA, 19 nt, Artificial Sequence
  Description of Artificial Sequence: Synthetic oligonucleotide
  Sense strand starting at position 424 of SEQ ID NO: 1800
aagcaaaugucugcgaauc

SEQ ID NO: 140229 - RNA, 19 nt, Artificial Sequence
  Description of Artificial Sequence: Synthetic oligonucleotide
  Antisense strand to SEQ ID NO: 140228
gauucgcagacauuugcuu

SEQ ID NO: 140230 - RNA, 19 nt, Artificial Sequence
  Description of Artificial Sequence: Synthetic oligonucleotide
  Sense strand starting at position 425 of SEQ ID NO: 1800
agcaaaugucugcgaaucu

SEQ ID NO: 140231 - RNA, 19 nt, Artificial Sequence
  Description of Artificial Sequence: Synthetic oligonucleotide
  Antisense strand to SEQ ID NO: 140230
agauucgcagacauuugcu

SEQ ID NO: 140232 - RNA, 19 nt, Artificial Sequence
  Description of Artificial Sequence: Synthetic oligonucleotide
  Sense strand starting at position 1135 of SEQ ID NO: 1800
ggagguagggccuggugaa

SEQ ID NO: 140233 - RNA, 19 nt, Artificial Sequence
  Description of Artificial Sequence: Synthetic oligonucleotide
  Antisense strand to SEQ ID NO: 140232
uucaccaggcccuaccucc

SEQ ID NO: 140234 - RNA, 19 nt, Artificial Sequence
  Description of Artificial Sequence: Synthetic oligonucleotide
  Sense strand starting at position 1225 of SEQ ID NO: 1800
uugccaaaucuccgcaaca

SEQ ID NO: 140235 - RNA, 19 nt, Artificial Sequence
  Description of Artificial Sequence: Synthetic oligonucleotide
  Antisense strand to SEQ ID NO: 140234
uguugcggagauuuggcaa

SEQ ID NO: 140236 - RNA, 19 nt, Artificial Sequence
  Description of Artificial Sequence: Synthetic oligonucleotide
  Sense strand starting at position 1425 of SEQ ID NO: 1800
cuucuagagucccuuuauc

SEQ ID NO: 140237 - RNA, 19 nt, Artificial Sequence
  Description of Artificial Sequence: Synthetic oligonucleotide
  Antisense strand to SEQ ID NO: 140236
gauaaagggacucuagaag

SEQ ID NO: 140238 - RNA, 19 nt, Artificial Sequence
  Description of Artificial Sequence: Synthetic oligonucleotide
  Sense strand starting at position 1631 of SEQ ID NO: 1800
ccacuaucaugugcuuaga

SEQ ID NO: 140239 - RNA, 19 nt, Artificial Sequence
  Description of Artificial Sequence: Synthetic oligonucleotide
  Antisense strand to SEQ ID NO: 140238
ucuaagcacaugauagugg

SEQ ID NO: 140240 - RNA, 19 nt, Artificial Sequence
  Description of Artificial Sequence: Synthetic oligonucleotide
  Sense strand starting at position 1633 of SEQ ID NO: 1800
acuaucaugugcuuagaca

SEQ ID NO: 140241 - RNA, 19 nt, Artificial Sequence
  Description of Artificial Sequence: Synthetic oligonucleotide
  Antisense strand to SEQ ID NO: 140240
ugucuaagcacaugauagu

SEQ ID NO: 140242 - RNA, 19 nt, Artificial Sequence
  Description of Artificial Sequence: Synthetic oligonucleotide
  Sense strand starting at position 1634 of SEQ ID NO: 1800
cuaucaugugcuuagacac

SEQ ID NO: 140243 - RNA, 19 nt, Artificial Sequence
  Description of Artificial Sequence: Synthetic oligonucleotide
  Antisense strand to SEQ ID NO: 140242
gugucuaagcacaugauag

SEQ ID NO: 140244 - RNA, 19 nt, Artificial Sequence
  Description of Artificial Sequence: Synthetic oligonucleotide
  Sense strand starting at position 2496 of SEQ ID NO: 1800
ugaguucacgcacguaaag

SEQ ID NO: 140245 - RNA, 19 nt, Artificial Sequence
  Description of Artificial Sequence: Synthetic oligonucleotide
  Antisense strand to SEQ ID NO: 140244
cuuuacgugcgugaacuca

SEQ ID NO: 140246 - RNA, 19 nt, Artificial Sequence
  Description of Artificial Sequence: Synthetic oligonucleotide
  Sense strand starting at position 2548 of SEQ ID NO: 1800
uuaauaaaugccggguaca

SEQ ID NO: 140247 - RNA, 19 nt, Artificial Sequence
  Description of Artificial Sequence: Synthetic oligonucleotide
  Antisense strand to SEQ ID NO: 140246
uguacccggcauuuauuaa

SEQ ID NO: 140248 - RNA, 19 nt, Artificial Sequence
  Description of Artificial Sequence: Synthetic oligonucleotide
  Sense strand starting at position 2549 of SEQ ID NO: 1800
uaauaaaugccggguacaa

SEQ ID NO: 140249 - RNA, 19 nt, Artificial Sequence
  Description of Artificial Sequence: Synthetic oligonucleotide
  Antisense strand to SEQ ID NO: 140248
uuguacccggcauuuauua

SEQ ID NO: 140250 - RNA, 19 nt, Artificial Sequence
  Description of Artificial Sequence: Synthetic oligonucleotide
  Sense strand starting at position 2551 of SEQ ID NO: 1800
auaaaugccggguacaaga

SEQ ID NO: 140251 - RNA, 19 nt, Artificial Sequence
  Description of Artificial Sequence: Synthetic oligonucleotide
  Antisense strand to SEQ ID NO: 140250
ucuuguacccggcauuuau

SEQ ID NO: 140252 - RNA, 19 nt, Artificial Sequence
  Description of Artificial Sequence: Synthetic oligonucleotide
  Sense strand starting at position 2811 of SEQ ID NO: 1800
gguacucauucgcucacua

SEQ ID NO: 140253 - RNA, 19 nt, Artificial Sequence
  Description of Artificial Sequence: Synthetic oligonucleotide
  Antisense strand to SEQ ID NO: 140252
uagugagcgaaugaguacc

SEQ ID NO: 140254 - RNA, 19 nt, Artificial Sequence
  Description of Artificial Sequence: Synthetic oligonucleotide
  Sense strand starting at position 2879 of SEQ ID NO: 1800
cagcgcucuuccucagagu

SEQ ID NO: 140255 - RNA, 19 nt, Artificial Sequence
  Description of Artificial Sequence: Synthetic oligonucleotide
  Antisense strand to SEQ ID NO: 140254
acucugaggaagagcgcug

SEQ ID NO: 140256 - RNA, 19 nt, Artificial Sequence
  Description of Artificial Sequence: Synthetic oligonucleotide
  Sense strand starting at position 2880 of SEQ ID NO: 1800
agcgcucuuccucagagua

SEQ ID NO: 140257 - RNA, 19 nt, Artificial Sequence
  Description of Artificial Sequence: Synthetic oligonucleotide
  Antisense strand to SEQ ID NO: 140256
uacucugaggaagagcgcu

SEQ ID NO: 140258 - RNA, 19 nt, Artificial Sequence
  Description of Artificial Sequence: Synthetic oligonucleotide
  Sense strand starting at position 2882 of SEQ ID NO: 1800
cgcucuuccucagaguaag

SEQ ID NO: 140259 - RNA, 19 nt, Artificial Sequence
  Description of Artificial Sequence: Synthetic oligonucleotide
  Antisense strand to SEQ ID NO: 140258
cuuacucugaggaagagcg

SEQ ID NO: 140260 - RNA, 19 nt, Artificial Sequence
  Description of Artificial Sequence: Synthetic oligonucleotide
  Sense strand starting at position 3057 of SEQ ID NO: 1800
caagguuugcuaugggauu

SEQ ID NO: 140261 - RNA, 19 nt, Artificial Sequence
  Description of Artificial Sequence: Synthetic oligonucleotide
  Antisense strand to SEQ ID NO: 140260
aaucccauagcaaaccuug

SEQ ID NO: 140262 - RNA, 19 nt, Artificial Sequence
  Description of Artificial Sequence: Synthetic oligonucleotide
  Sense strand starting at position 3058 of SEQ ID NO: 1800
aagguuugcuaugggauuu

SEQ ID NO: 140263 - RNA, 19 nt, Artificial Sequence
  Description of Artificial Sequence: Synthetic oligonucleotide
  Antisense strand to SEQ ID NO: 140262
aaaucccauagcaaaccuu

SEQ ID NO: 140264 - RNA, 19 nt, Artificial Sequence
  Description of Artificial Sequence: Synthetic oligonucleotide
  Sense strand starting at position 3259 of SEQ ID NO: 1800
gggucuacgguuugucuca

SEQ ID NO: 140265 - RNA, 19 nt, Artificial Sequence
  Description of Artificial Sequence: Synthetic oligonucleotide
  Antisense strand to SEQ ID NO: 140264
ugagacaaaccguagaccc

SEQ ID NO: 140266 - RNA, 19 nt, Artificial Sequence
  Description of Artificial Sequence: Synthetic oligonucleotide
  Sense strand starting at position 3499 of SEQ ID NO: 1800
agaacuaugucccuugguu

SEQ ID NO: 140267 - RNA, 19 nt, Artificial Sequence
  Description of Artificial Sequence: Synthetic oligonucleotide
  Antisense strand to SEQ ID NO: 140266
aaccaagggacauaguucu

SEQ ID NO: 140268 - RNA, 19 nt, Artificial Sequence
  Description of Artificial Sequence: Synthetic oligonucleotide
  Sense strand starting at position 3652 of SEQ ID NO: 1800
uccugagagcacugaaguu

SEQ ID NO: 140269 - RNA, 19 nt, Artificial Sequence
  Description of Artificial Sequence: Synthetic oligonucleotide
  Antisense strand to SEQ ID NO: 140268
aacuucagugcucucagga

SEQ ID NO: 140270 - RNA, 19 nt, Artificial Sequence
  Description of Artificial Sequence: Synthetic oligonucleotide
  Sense strand starting at position 3662 of SEQ ID NO: 1800
acugaaguuugccugagaa

SEQ ID NO: 140271 - RNA, 19 nt, Artificial Sequence
  Description of Artificial Sequence: Synthetic oligonucleotide
  Antisense strand to SEQ ID NO: 140270
uucucaggcaaacuucagu

SEQ ID NO: 140272 - RNA, 19 nt, Artificial Sequence
  Description of Artificial Sequence: Synthetic oligonucleotide
  Sense strand starting at position 3664 of SEQ ID NO: 1800
ugaaguuugccugagaagg

SEQ ID NO: 140273 - RNA, 19 nt, Artificial Sequence
  Description of Artificial Sequence: Synthetic oligonucleotide
  Antisense strand to SEQ ID NO: 140272
ccuucucaggcaaacuuca

SEQ ID NO: 140274 - RNA, 19 nt, Artificial Sequence
  Description of Artificial Sequence: Synthetic oligonucleotide
  Sense strand starting at position 3666 of SEQ ID NO: 1800
aaguuugccugagaaggga

SEQ ID NO: 140275 - RNA, 19 nt, Artificial Sequence
  Description of Artificial Sequence: Synthetic oligonucleotide
  Antisense strand to SEQ ID NO: 140274
ucccuucucaggcaaacuu

SEQ ID NO: 140276 - RNA, 19 nt, Artificial Sequence
  Description of Artificial Sequence: Synthetic oligonucleotide
  Sense strand starting at position 3971 of SEQ ID NO: 1800
ggaccuauaccucgccagu

SEQ ID NO: 140277 - RNA, 19 nt, Artificial Sequence
  Description of Artificial Sequence: Synthetic oligonucleotide
  Antisense strand to SEQ ID NO: 140276
acuggcgagguauaggucc

SEQ ID NO: 140278 - RNA, 19 nt, Artificial Sequence
  Description of Artificial Sequence: Synthetic oligonucleotide
  Sense strand starting at position 3924 of SEQ ID NO: 1802
auucguaaccaaugaggga

SEQ ID NO: 140279 - RNA, 19 nt, Artificial Sequence
  Description of Artificial Sequence: Synthetic oligonucleotide
  Antisense strand to SEQ ID NO: 140278
ucccucauugguuacgaau

SEQ ID NO: 140280 - RNA, 19 nt, Artificial Sequence
  Description of Artificial Sequence: Synthetic oligonucleotide
  Sense strand starting at position 3870 of SEQ ID NO: 1802
caaauugugugaucuaaug

SEQ ID NO: 140281 - RNA, 19 nt, Artificial Sequence
  Description of Artificial Sequence: Synthetic oligonucleotide
  Antisense strand to SEQ ID NO: 140280
cauuagaucacacaauuug

SEQ ID NO: 140282 - RNA, 19 nt, Artificial Sequence
  Description of Artificial Sequence: Synthetic oligonucleotide
  Sense strand starting at position 3465 of SEQ ID NO: 1802
uugguagcuaaguauugaa

SEQ ID NO: 140283 - RNA, 19 nt, Artificial Sequence
  Description of Artificial Sequence: Synthetic oligonucleotide
  Antisense strand to SEQ ID NO: 140282
uucaauacuuagcuaccaa

SEQ ID NO: 140284 - RNA, 19 nt, Artificial Sequence
  Description of Artificial Sequence: Synthetic oligonucleotide
  Sense strand starting at position 3427 of SEQ ID NO: 1802
cagguuuguguacaauaug

SEQ ID NO: 140285 - RNA, 19 nt, Artificial Sequence
  Description of Artificial Sequence: Synthetic oligonucleotide
  Antisense strand to SEQ ID NO: 140284
cauauuguacacaaaccug

SEQ ID NO: 140286 - RNA, 19 nt, Artificial Sequence
  Description of Artificial Sequence: Synthetic oligonucleotide
  Sense strand starting at position 3382 of SEQ ID NO: 1802
gcuaaaucacugugauaag

SEQ ID NO: 140287 - RNA, 19 nt, Artificial Sequence
  Description of Artificial Sequence: Synthetic oligonucleotide
  Antisense strand to SEQ ID NO: 140286
cuuaucacagugauuuagc

SEQ ID NO: 140288 - RNA, 19 nt, Artificial Sequence
  Description of Artificial Sequence: Synthetic oligonucleotide
  Sense strand starting at position 3379 of SEQ ID NO: 1802
auagcuaaaucacugugau

SEQ ID NO: 140289 - RNA, 19 nt, Artificial Sequence
  Description of Artificial Sequence: Synthetic oligonucleotide
  Antisense strand to SEQ ID NO: 140288
aucacagugauuuagcuau

SEQ ID NO: 140290 - RNA, 19 nt, Artificial Sequence
  Description of Artificial Sequence: Synthetic oligonucleotide
  Sense strand starting at position 2604 of SEQ ID NO: 1802
agaaaugcccuguauugua

SEQ ID NO: 140291 - RNA, 19 nt, Artificial Sequence
  Description of Artificial Sequence: Synthetic oligonucleotide
  Antisense strand to SEQ ID NO: 140290
uacaauacagggcauuucu

SEQ ID NO: 140292 - RNA, 19 nt, Artificial Sequence
  Description of Artificial Sequence: Synthetic oligonucleotide
  Sense strand starting at position 2536 of SEQ ID NO: 1802
caggucuuaggcuagaacu

SEQ ID NO: 140293 - RNA, 19 nt, Artificial Sequence
  Description of Artificial Sequence: Synthetic oligonucleotide
  Antisense strand to SEQ ID NO: 140292
aguucuagccuaagaccug

SEQ ID NO: 140294 - RNA, 19 nt, Artificial Sequence
  Description of Artificial Sequence: Synthetic oligonucleotide
  Sense strand starting at position 2447 of SEQ ID NO: 1802
ucuuaaaccgaucaguuua

SEQ ID NO: 140295 - RNA, 19 nt, Artificial Sequence
  Description of Artificial Sequence: Synthetic oligonucleotide
  Antisense strand to SEQ ID NO: 140294
uaaacugaucgguuuaaga

SEQ ID NO: 140296 - RNA, 19 nt, Artificial Sequence
  Description of Artificial Sequence: Synthetic oligonucleotide
  Sense strand starting at position 2400 of SEQ ID NO: 1802
gagauagaagccuguuaac

SEQ ID NO: 140297 - RNA, 19 nt, Artificial Sequence
  Description of Artificial Sequence: Synthetic oligonucleotide
  Antisense strand to SEQ ID NO: 140296
guuaacaggcuucuaucuc

SEQ ID NO: 140298 - RNA, 19 nt, Artificial Sequence
  Description of Artificial Sequence: Synthetic oligonucleotide
  Sense strand starting at position 2165 of SEQ ID NO: 1802
ggcagucuacuucaggaga

SEQ ID NO: 140299 - RNA, 19 nt, Artificial Sequence
  Description of Artificial Sequence: Synthetic oligonucleotide
  Antisense strand to SEQ ID NO: 140298
ucuccugaaguagacugcc

SEQ ID NO: 140300 - RNA, 19 nt, Artificial Sequence
  Description of Artificial Sequence: Synthetic oligonucleotide
  Sense strand starting at position 2009 of SEQ ID NO: 1802
gacaguuuggaaugcagaa

SEQ ID NO: 140301 - RNA, 19 nt, Artificial Sequence
  Description of Artificial Sequence: Synthetic oligonucleotide
  Antisense strand to SEQ ID NO: 140300
uucugcauuccaaacuguc

SEQ ID NO: 140302 - RNA, 19 nt, Artificial Sequence
  Description of Artificial Sequence: Synthetic oligonucleotide
  Sense strand starting at position 1776 of SEQ ID NO: 1802
gucacugcauuuguguaau

SEQ ID NO: 140303 - RNA, 19 nt, Artificial Sequence
  Description of Artificial Sequence: Synthetic oligonucleotide
  Antisense strand to SEQ ID NO: 140302
auuacacaaaugcagugac

SEQ ID NO: 140304 - RNA, 19 nt, Artificial Sequence
  Description of Artificial Sequence: Synthetic oligonucleotide
  Sense strand starting at position 1769 of SEQ ID NO: 1802
guaaauagucacugcauuu

SEQ ID NO: 140305 - RNA, 19 nt, Artificial Sequence
  Description of Artificial Sequence: Synthetic oligonucleotide
  Antisense strand to SEQ ID NO: 140304
aaaugcagugacuauuuac

SEQ ID NO: 140306 - RNA, 19 nt, Artificial Sequence
  Description of Artificial Sequence: Synthetic oligonucleotide
  Sense strand starting at position 1643 of SEQ ID NO: 1802
uucuuagauggcuauucuu

SEQ ID NO: 140307 - RNA, 19 nt, Artificial Sequence
  Description of Artificial Sequence: Synthetic oligonucleotide
  Antisense strand to SEQ ID NO: 140306
aagaauagccaucuaagaa

SEQ ID NO: 140308 - RNA, 19 nt, Artificial Sequence
  Description of Artificial Sequence: Synthetic oligonucleotide
  Sense strand starting at position 1486 of SEQ ID NO: 1802
agaaaugagcuuuaccugu

SEQ ID NO: 140309 - RNA, 19 nt, Artificial Sequence
  Description of Artificial Sequence: Synthetic oligonucleotide
  Antisense strand to SEQ ID NO: 140308
acagguaaagcucauuucu

SEQ ID NO: 140310 - RNA, 19 nt, Artificial Sequence
  Description of Artificial Sequence: Synthetic oligonucleotide
  Sense strand starting at position 1479 of SEQ ID NO: 1802
cucagagagaaaugagcuu

SEQ ID NO: 140311 - RNA, 19 nt, Artificial Sequence
  Description of Artificial Sequence: Synthetic oligonucleotide
  Antisense strand to SEQ ID NO: 140310
aagcucauuucucucugag

SEQ ID NO: 140312 - RNA, 19 nt, Artificial Sequence
  Description of Artificial Sequence: Synthetic oligonucleotide
  Sense strand starting at position 1453 of SEQ ID NO: 1802
guugauggucaauauauuc

SEQ ID NO: 140313 - RNA, 19 nt, Artificial Sequence
  Description of Artificial Sequence: Synthetic oligonucleotide
  Antisense strand to SEQ ID NO: 140312
gaauauauugaccaucaac

SEQ ID NO: 140314 - RNA, 19 nt, Artificial Sequence
  Description of Artificial Sequence: Synthetic oligonucleotide
  Sense strand starting at position 1450 of SEQ ID NO: 1802
cuuguugauggucaauaua

SEQ ID NO: 140315 - RNA, 19 nt, Artificial Sequence
  Description of Artificial Sequence: Synthetic oligonucleotide
  Antisense strand to SEQ ID NO: 140314
uauauugaccaucaacaag

SEQ ID NO: 140316 - RNA, 19 nt, Artificial Sequence
  Description of Artificial Sequence: Synthetic oligonucleotide
  Sense strand starting at position 1411 of SEQ ID NO: 1802
gauuauguguuacugagau

SEQ ID NO: 140317 - RNA, 19 nt, Artificial Sequence
  Description of Artificial Sequence: Synthetic oligonucleotide
  Antisense strand to SEQ ID NO: 140316
aucucaguaacacauaauc

SEQ ID NO: 140318 - RNA, 19 nt, Artificial Sequence
  Description of Artificial Sequence: Synthetic oligonucleotide
  Sense strand starting at position 1293 of SEQ ID NO: 1802
gucaucuuggcagaggaua

SEQ ID NO: 140319 - RNA, 19 nt, Artificial Sequence
  Description of Artificial Sequence: Synthetic oligonucleotide
  Antisense strand to SEQ ID NO: 140318
uauccucugccaagaugac

SEQ ID NO: 140320 - RNA, 19 nt, Artificial Sequence
  Description of Artificial Sequence: Synthetic oligonucleotide
  Sense strand starting at position 427 of SEQ ID NO: 1802
uuuagcucacuagaauagu

SEQ ID NO: 140321 - RNA, 19 nt, Artificial Sequence
  Description of Artificial Sequence: Synthetic oligonucleotide
  Antisense strand to SEQ ID NO: 140320
acuauucuagugagcuaaa

SEQ ID NO: 140322 - RNA, 19 nt, Artificial Sequence
  Description of Artificial Sequence: Synthetic oligonucleotide
  Sense strand starting at position 392 of SEQ ID NO: 1802
augacagauucuguugaca

SEQ ID NO: 140323 - RNA, 19 nt, Artificial Sequence
  Description of Artificial Sequence: Synthetic oligonucleotide
  Antisense strand to SEQ ID NO: 140322
ugucaacagaaucugucau

SEQ ID NO: 140324 - RNA, 19 nt, Artificial Sequence
  Description of Artificial Sequence: Synthetic oligonucleotide
  Sense strand starting at position 381 of SEQ ID NO: 1802
uguaaagagccaugacaga

SEQ ID NO: 140325 - RNA, 19 nt, Artificial Sequence
  Description of Artificial Sequence: Synthetic oligonucleotide
  Antisense strand to SEQ ID NO: 140324
ucugucauggcucuuuaca

SEQ ID NO: 140326 - RNA, 19 nt, Artificial Sequence
  Description of Artificial Sequence: Synthetic oligonucleotide
  Sense strand starting at position 379 of SEQ ID NO: 1802
guuguaaagagccaugaca

SEQ ID NO: 140327 - RNA, 19 nt, Artificial Sequence
  Description of Artificial Sequence: Synthetic oligonucleotide
  Antisense strand to SEQ ID NO: 140326
ugucauggcucuuuacaac

SEQ ID NO: 140328 - RNA, 19 nt, Artificial Sequence
  Description of Artificial Sequence: Synthetic oligonucleotide
  Sense strand starting at position 375 of SEQ ID NO: 1802
aggaguuguaaagagccau

SEQ ID NO: 140329 - RNA, 19 nt, Artificial Sequence
  Description of Artificial Sequence: Synthetic oligonucleotide
  Antisense strand to SEQ ID NO: 140328
auggcucuuuacaacuccu

SEQ ID NO: 140330 - RNA, 19 nt, Artificial Sequence
  Description of Artificial Sequence: Synthetic oligonucleotide
  Sense strand starting at position 302 of SEQ ID NO: 1802
caggucaggcuuuaauaca

SEQ ID NO: 140331 - RNA, 19 nt, Artificial Sequence
  Description of Artificial Sequence: Synthetic oligonucleotide
  Antisense strand to SEQ ID NO: 140330
uguauuaaagccugaccug

SEQ ID NO: 140332 - RNA, 19 nt, Artificial Sequence
  Description of Artificial Sequence: Synthetic oligonucleotide
  Sense strand starting at position 251 of SEQ ID NO: 1802
cuuguaagucaguacuaca

SEQ ID NO: 140333 - RNA, 19 nt, Artificial Sequence
  Description of Artificial Sequence: Synthetic oligonucleotide
  Antisense strand to SEQ ID NO: 140332
uguaguacugacuuacaag

SEQ ID NO: 140334 - RNA, 19 nt, Artificial Sequence
  Description of Artificial Sequence: Synthetic oligonucleotide
  Sense strand starting at position 248 of SEQ ID NO: 1802
agacuuguaagucaguacu

SEQ ID NO: 140335 - RNA, 19 nt, Artificial Sequence
  Description of Artificial Sequence: Synthetic oligonucleotide
  Antisense strand to SEQ ID NO: 140334
aguacugacuuacaagucu

SEQ ID NO: 140336 - RNA, 19 nt, Artificial Sequence
  Description of Artificial Sequence: Synthetic oligonucleotide
  Sense strand starting at position 190 of SEQ ID NO: 1802
cgauauagccgagaggagu

SEQ ID NO: 140337 - RNA, 19 nt, Artificial Sequence
  Description of Artificial Sequence: Synthetic oligonucleotide
  Antisense strand to SEQ ID NO: 140336
acuccucucggcuauaucg

SEQ ID NO: 140338 - RNA, 19 nt, Artificial Sequence
  Description of Artificial Sequence: Synthetic oligonucleotide
  Sense strand starting at position 177 of SEQ ID NO: 1802
guaauuugguuuccgauau

SEQ ID NO: 140339 - RNA, 19 nt, Artificial Sequence
  Description of Artificial Sequence: Synthetic oligonucleotide
  Antisense strand to SEQ ID NO: 140338
auaucggaaaccaaauuac

SEQ ID NO: 140340 - RNA, 19 nt, Artificial Sequence
  Description of Artificial Sequence: Synthetic oligonucleotide
  Sense strand starting at position 174 of SEQ ID NO: 1802
uugguaauuugguuuccga

SEQ ID NO: 140341 - RNA, 19 nt, Artificial Sequence
  Description of Artificial Sequence: Synthetic oligonucleotide
  Antisense strand to SEQ ID NO: 140340
ucggaaaccaaauuaccaa

SEQ ID NO: 140342 - RNA, 19 nt, Artificial Sequence
  Description of Artificial Sequence: Synthetic oligonucleotide
  Sense strand starting at position 151 of SEQ ID NO: 1802
uuccuacuggguggagaau

SEQ ID NO: 140343 - RNA, 19 nt, Artificial Sequence
  Description of Artificial Sequence: Synthetic oligonucleotide
  Antisense strand to SEQ ID NO: 140342
auucuccacccaguaggaa

SEQ ID NO: 140344 - RNA, 19 nt, Artificial Sequence
  Description of Artificial Sequence: Synthetic oligonucleotide
  Sense strand starting at position 150 of SEQ ID NO: 1802
uuuccuacuggguggagaa

SEQ ID NO: 140345 - RNA, 19 nt, Artificial Sequence
  Description of Artificial Sequence: Synthetic oligonucleotide
  Antisense strand to SEQ ID NO: 140344
uucuccacccaguaggaaa

SEQ ID NO: 140346 - RNA, 19 nt, Artificial Sequence
  Description of Artificial Sequence: Synthetic oligonucleotide
  Sense strand starting at position 54 of SEQ ID NO: 1802
uggauagagcauuaauguc

SEQ ID NO: 140347 - RNA, 19 nt, Artificial Sequence
  Description of Artificial Sequence: Synthetic oligonucleotide
  Antisense strand to SEQ ID NO: 140346
gacauuaaugcucuaucca

SEQ ID NO: 140348 - RNA, 19 nt, Artificial Sequence
  Description of Artificial Sequence: Synthetic oligonucleotide
  Sense strand starting at position 48 of SEQ ID NO: 1802
uuaaguuggauagagcauu

SEQ ID NO: 140349 - RNA, 19 nt, Artificial Sequence
  Description of Artificial Sequence: Synthetic oligonucleotide
  Antisense strand to SEQ ID NO: 140348
aaugcucuauccaacuuaa

SEQ ID NO: 140350 - RNA, 19 nt, Artificial Sequence
  Description of Artificial Sequence: Synthetic oligonucleotide
  Sense strand starting at position 46 of SEQ ID NO: 1802
uguuaaguuggauagagca

SEQ ID NO: 140351 - RNA, 19 nt, Artificial Sequence
  Description of Artificial Sequence: Synthetic oligonucleotide
  Antisense strand to SEQ ID NO: 140350
ugcucuauccaacuuaaca

SEQ ID NO: 140352 - RNA, 19 nt, Artificial Sequence
  Description of Artificial Sequence: Synthetic oligonucleotide
  Sense strand starting at position 43 of SEQ ID NO: 1802
uacuguuaaguuggauaga

SEQ ID NO: 140353 - RNA, 19 nt, Artificial Sequence
  Description of Artificial Sequence: Synthetic oligonucleotide
  Antisense strand to SEQ ID NO: 140352
ucuauccaacuuaacagua

SEQ ID NO: 140354 - RNA, 19 nt, Artificial Sequence
  Description of Artificial Sequence: Synthetic oligonucleotide
  Sense strand starting at position 40 of SEQ ID NO: 1802
gaauacuguuaaguuggau

SEQ ID NO: 140355 - RNA, 19 nt, Artificial Sequence
  Description of Artificial Sequence: Synthetic oligonucleotide
  Antisense strand to SEQ ID NO: 140354
auccaacuuaacaguauuc

SEQ ID NO: 140356 - RNA, 19 nt, Artificial Sequence
  Description of Artificial Sequence: Synthetic oligonucleotide
  Sense strand starting at position 9 of SEQ ID NO: 1802
agaagaaucuaagcuuugu

SEQ ID NO: 140357 - RNA, 19 nt, Artificial Sequence
  Description of Artificial Sequence: Synthetic oligonucleotide
  Antisense strand to SEQ ID NO: 140356
acaaagcuuagauucuucu

SEQ ID NO: 140358 - RNA, 19 nt, Artificial Sequence
  Description of Artificial Sequence: Synthetic oligonucleotide
  Sense strand starting at position 3793 of SEQ ID NO: 1803
uaacauggugguuacagua

SEQ ID NO: 140359 - RNA, 19 nt, Artificial Sequence
  Description of Artificial Sequence: Synthetic oligonucleotide
  Antisense strand to SEQ ID NO: 140358
uacuguaaccaccauguua

SEQ ID NO: 140360 - RNA, 19 nt, Artificial Sequence
  Description of Artificial Sequence: Synthetic oligonucleotide
  Sense strand starting at position 3507 of SEQ ID NO: 1803
ugaguaucucuuuacuagu

SEQ ID NO: 140361 - RNA, 19 nt, Artificial Sequence
  Description of Artificial Sequence: Synthetic oligonucleotide
  Antisense strand to SEQ ID NO: 140360
acuaguaaagagauacuca

SEQ ID NO: 140362 - RNA, 19 nt, Artificial Sequence
  Description of Artificial Sequence: Synthetic oligonucleotide
  Sense strand starting at position 3506 of SEQ ID NO: 1803
uugaguaucucuuuacuag

SEQ ID NO: 140363 - RNA, 19 nt, Artificial Sequence
  Description of Artificial Sequence: Synthetic oligonucleotide
  Antisense strand to SEQ ID NO: 140362
cuaguaaagagauacucaa

SEQ ID NO: 140364 - RNA, 19 nt, Artificial Sequence
  Description of Artificial Sequence: Synthetic oligonucleotide
  Sense strand starting at position 3489 of SEQ ID NO: 1803
gcaucaaauguacaaaguu

SEQ ID NO: 140365 - RNA, 19 nt, Artificial Sequence
  Description of Artificial Sequence: Synthetic oligonucleotide
  Antisense strand to SEQ ID NO: 140364
aacuuuguacauuugaugc

SEQ ID NO: 140366 - RNA, 19 nt, Artificial Sequence
  Description of Artificial Sequence: Synthetic oligonucleotide
  Sense strand starting at position 3481 of SEQ ID NO: 1803
ugaauauggcaucaaaugu

SEQ ID NO: 140367 - RNA, 19 nt, Artificial Sequence
  Description of Artificial Sequence: Synthetic oligonucleotide
  Antisense strand to SEQ ID NO: 140366
acauuugaugccauauuca

SEQ ID NO: 140368 - RNA, 19 nt, Artificial Sequence
  Description of Artificial Sequence: Synthetic oligonucleotide
  Sense strand starting at position 3414 of SEQ ID NO: 1803
ugaguagaccuagagcauu

SEQ ID NO: 140369 - RNA, 19 nt, Artificial Sequence
  Description of Artificial Sequence: Synthetic oligonucleotide
  Antisense strand to SEQ ID NO: 140368
aaugcucuaggucuacuca

SEQ ID NO: 140370 - RNA, 19 nt, Artificial Sequence
  Description of Artificial Sequence: Synthetic oligonucleotide
  Sense strand starting at position 3377 of SEQ ID NO: 1803
aagagauguugagugcuga

SEQ ID NO: 140371 - RNA, 19 nt, Artificial Sequence
  Description of Artificial Sequence: Synthetic oligonucleotide
  Antisense strand to SEQ ID NO: 140370
ucagcacucaacaucucuu

SEQ ID NO: 140372 - RNA, 19 nt, Artificial Sequence
  Description of Artificial Sequence: Synthetic oligonucleotide
  Sense strand starting at position 3371 of SEQ ID NO: 1803
guggauaagagauguugag

SEQ ID NO: 140373 - RNA, 19 nt, Artificial Sequence
  Description of Artificial Sequence: Synthetic oligonucleotide
  Antisense strand to SEQ ID NO: 140372
cucaacaucucuuauccac

SEQ ID NO: 140374 - RNA, 19 nt, Artificial Sequence
  Description of Artificial Sequence: Synthetic oligonucleotide
  Sense strand starting at position 3362 of SEQ ID NO: 1803
ugugcuuuaguggauaaga

SEQ ID NO: 140375 - RNA, 19 nt, Artificial Sequence
  Description of Artificial Sequence: Synthetic oligonucleotide
  Antisense strand to SEQ ID NO: 140374
ucuuauccacuaaagcaca

SEQ ID NO: 140376 - RNA, 19 nt, Artificial Sequence
  Description of Artificial Sequence: Synthetic oligonucleotide
  Sense strand starting at position 3256 of SEQ ID NO: 1803
guuuacaggaauggucauu

SEQ ID NO: 140377 - RNA, 19 nt, Artificial Sequence
  Description of Artificial Sequence: Synthetic oligonucleotide
  Antisense strand to SEQ ID NO: 140376
aaugaccauuccuguaaac

SEQ ID NO: 140378 - RNA, 19 nt, Artificial Sequence
  Description of Artificial Sequence: Synthetic oligonucleotide
  Sense strand starting at position 3255 of SEQ ID NO: 1803
gguuuacaggaauggucau

SEQ ID NO: 140379 - RNA, 19 nt, Artificial Sequence
  Description of Artificial Sequence: Synthetic oligonucleotide
  Antisense strand to SEQ ID NO: 140378
augaccauuccuguaaacc

SEQ ID NO: 140380 - RNA, 19 nt, Artificial Sequence
  Description of Artificial Sequence: Synthetic oligonucleotide
  Sense strand starting at position 3237 of SEQ ID NO: 1803
guugauuuguggcuugaug

SEQ ID NO: 140381 - RNA, 19 nt, Artificial Sequence
  Description of Artificial Sequence: Synthetic oligonucleotide
  Antisense strand to SEQ ID NO: 140380
caucaagccacaaaucaac

SEQ ID NO: 140382 - RNA, 19 nt, Artificial Sequence
  Description of Artificial Sequence: Synthetic oligonucleotide
  Sense strand starting at position 3136 of SEQ ID NO: 1803
agcuuaccuggcuaaucaa

SEQ ID NO: 140383 - RNA, 19 nt, Artificial Sequence
  Description of Artificial Sequence: Synthetic oligonucleotide
  Antisense strand to SEQ ID NO: 140382
uugauuagccagguaagcu

SEQ ID NO: 140384 - RNA, 19 nt, Artificial Sequence
  Description of Artificial Sequence: Synthetic oligonucleotide
  Sense strand starting at position 3103 of SEQ ID NO: 1803
uuguuuaacaggugaggaa

SEQ ID NO: 140385 - RNA, 19 nt, Artificial Sequence
  Description of Artificial Sequence: Synthetic oligonucleotide
  Antisense strand to SEQ ID NO: 140384
uuccucaccuguuaaacaa

SEQ ID NO: 140386 - RNA, 19 nt, Artificial Sequence
  Description of Artificial Sequence: Synthetic oligonucleotide
  Sense strand starting at position 2923 of SEQ ID NO: 1803
gcacaaagagacuggucua

SEQ ID NO: 140387 - RNA, 19 nt, Artificial Sequence
  Description of Artificial Sequence: Synthetic oligonucleotide
  Antisense strand to SEQ ID NO: 140386
uagaccagucucuuugugc

SEQ ID NO: 140388 - RNA, 19 nt, Artificial Sequence
  Description of Artificial Sequence: Synthetic oligonucleotide
  Sense strand starting at position 2814 of SEQ ID NO: 1803
cuugaauguggcuaccuaa

SEQ ID NO: 140389 - RNA, 19 nt, Artificial Sequence
  Description of Artificial Sequence: Synthetic oligonucleotide
  Antisense strand to SEQ ID NO: 140388
uuagguagccacauucaag

SEQ ID NO: 140390 - RNA, 19 nt, Artificial Sequence
  Description of Artificial Sequence: Synthetic oligonucleotide
  Sense strand starting at position 2791 of SEQ ID NO: 1803
auaguagaucuccaacagu

SEQ ID NO: 140391 - RNA, 19 nt, Artificial Sequence
  Description of Artificial Sequence: Synthetic oligonucleotide
  Antisense strand to SEQ ID NO: 140390
acuguuggagaucuacuau

SEQ ID NO: 140392 - RNA, 19 nt, Artificial Sequence
  Description of Artificial Sequence: Synthetic oligonucleotide
  Sense strand starting at position 2780 of SEQ ID NO: 1803
gugccuuggacauaguaga

SEQ ID NO: 140393 - RNA, 19 nt, Artificial Sequence
  Description of Artificial Sequence: Synthetic oligonucleotide
  Antisense strand to SEQ ID NO: 140392
ucuacuauguccaaggcac

SEQ ID NO: 140394 - RNA, 19 nt, Artificial Sequence
  Description of Artificial Sequence: Synthetic oligonucleotide
  Sense strand starting at position 2579 of SEQ ID NO: 1803
gaucuuugugcaguguguu

SEQ ID NO: 140395 - RNA, 19 nt, Artificial Sequence
  Description of Artificial Sequence: Synthetic oligonucleotide
  Antisense strand to SEQ ID NO: 140394
aacacacugcacaaagauc

SEQ ID NO: 140396 - RNA, 19 nt, Artificial Sequence
  Description of Artificial Sequence: Synthetic oligonucleotide
  Sense strand starting at position 2513 of SEQ ID NO: 1803
gccucucaggcacaugaaa

SEQ ID NO: 140397 - RNA, 19 nt, Artificial Sequence
  Description of Artificial Sequence: Synthetic oligonucleotide
  Antisense strand to SEQ ID NO: 140396
uuucaugugccugagaggc

SEQ ID NO: 140398 - RNA, 19 nt, Artificial Sequence
  Description of Artificial Sequence: Synthetic oligonucleotide
  Sense strand starting at position 2296 of SEQ ID NO: 1803
guuucuuucuuauuggaca

SEQ ID NO: 140399 - RNA, 19 nt, Artificial Sequence
  Description of Artificial Sequence: Synthetic oligonucleotide
  Antisense strand to SEQ ID NO: 140398
uguccaauaagaaagaaac

SEQ ID NO: 140400 - RNA, 19 nt, Artificial Sequence
  Description of Artificial Sequence: Synthetic oligonucleotide
  Sense strand starting at position 956 of SEQ ID NO: 1803
gagccugugacuuagggaa

SEQ ID NO: 140401 - RNA, 19 nt, Artificial Sequence
  Description of Artificial Sequence: Synthetic oligonucleotide
  Antisense strand to SEQ ID NO: 140400
uucccuaagucacaggcuc

SEQ ID NO: 140402 - RNA, 19 nt, Artificial Sequence
  Description of Artificial Sequence: Synthetic oligonucleotide
  Sense strand starting at position 949 of SEQ ID NO: 1803
ugggaaugagccugugacu

SEQ ID NO: 140403 - RNA, 19 nt, Artificial Sequence
  Description of Artificial Sequence: Synthetic oligonucleotide
  Antisense strand to SEQ ID NO: 140402
agucacaggcucauuccca

SEQ ID NO: 140404 - RNA, 19 nt, Artificial Sequence
  Description of Artificial Sequence: Synthetic oligonucleotide
  Sense strand starting at position 848 of SEQ ID NO: 1803
gagugacaucccugcccaa

SEQ ID NO: 140405 - RNA, 19 nt, Artificial Sequence
  Description of Artificial Sequence: Synthetic oligonucleotide
  Antisense strand to SEQ ID NO: 140404
uugggcagggaugucacuc

SEQ ID NO: 140406 - RNA, 19 nt, Artificial Sequence
  Description of Artificial Sequence: Synthetic oligonucleotide
  Sense strand starting at position 839 of SEQ ID NO: 1803
gaccauacugagugacauc

SEQ ID NO: 140407 - RNA, 19 nt, Artificial Sequence
  Description of Artificial Sequence: Synthetic oligonucleotide
  Antisense strand to SEQ ID NO: 140406
gaugucacucaguaugguc

SEQ ID NO: 140408 - RNA, 19 nt, Artificial Sequence
  Description of Artificial Sequence: Synthetic oligonucleotide
  Sense strand starting at position 838 of SEQ ID NO: 1803
agaccauacugagugacau

SEQ ID NO: 140409 - RNA, 19 nt, Artificial Sequence
  Description of Artificial Sequence: Synthetic oligonucleotide
  Antisense strand to SEQ ID NO: 140408
augucacucaguauggucu

SEQ ID NO: 140410 - RNA, 19 nt, Artificial Sequence
  Description of Artificial Sequence: Synthetic oligonucleotide
  Sense strand starting at position 759 of SEQ ID NO: 1803
gaaguaaucgccuaagaau

SEQ ID NO: 140411 - RNA, 19 nt, Artificial Sequence
  Description of Artificial Sequence: Synthetic oligonucleotide
  Antisense strand to SEQ ID NO: 140410
auucuuaggcgauuacuuc

SEQ ID NO: 140412 - RNA, 19 nt, Artificial Sequence
  Description of Artificial Sequence: Synthetic oligonucleotide
  Sense strand starting at position 747 of SEQ ID NO: 1803
ggcuguucccuugaaguaa

SEQ ID NO: 140413 - RNA, 19 nt, Artificial Sequence
  Description of Artificial Sequence: Synthetic oligonucleotide
  Antisense strand to SEQ ID NO: 140412
uuacuucaagggaacagcc

SEQ ID NO: 140414 - RNA, 19 nt, Artificial Sequence
  Description of Artificial Sequence: Synthetic oligonucleotide
  Sense strand starting at position 557 of SEQ ID NO: 1803
gagguuauagauuagucuu

SEQ ID NO: 140415 - RNA, 19 nt, Artificial Sequence
  Description of Artificial Sequence: Synthetic oligonucleotide
  Antisense strand to SEQ ID NO: 140414
aagacuaaucuauaaccuc

SEQ ID NO: 140416 - RNA, 19 nt, Artificial Sequence
  Description of Artificial Sequence: Synthetic oligonucleotide
  Sense strand starting at position 545 of SEQ ID NO: 1803
gagguucaggcagagguua

SEQ ID NO: 140417 - RNA, 19 nt, Artificial Sequence
  Description of Artificial Sequence: Synthetic oligonucleotide
  Antisense strand to SEQ ID NO: 140416
uaaccucugccugaaccuc

SEQ ID NO: 140418 - RNA, 19 nt, Artificial Sequence
  Description of Artificial Sequence: Synthetic oligonucleotide
  Sense strand starting at position 504 of SEQ ID NO: 1803
auccacacccguuggaaua

SEQ ID NO: 140419 - RNA, 19 nt, Artificial Sequence
  Description of Artificial Sequence: Synthetic oligonucleotide
  Antisense strand to SEQ ID NO: 140418
uauuccaacggguguggau

SEQ ID NO: 140420 - RNA, 19 nt, Artificial Sequence
  Description of Artificial Sequence: Synthetic oligonucleotide
  Sense strand starting at position 483 of SEQ ID NO: 1803
acaauaguguaaucugaaa

SEQ ID NO: 140421 - RNA, 19 nt, Artificial Sequence
  Description of Artificial Sequence: Synthetic oligonucleotide
  Antisense strand to SEQ ID NO: 140420
uuucagauuacacuauugu

SEQ ID NO: 140422 - RNA, 19 nt, Artificial Sequence
  Description of Artificial Sequence: Synthetic oligonucleotide
  Sense strand starting at position 459 of SEQ ID NO: 1803
gucacuuuacaacgagauu

SEQ ID NO: 140423 - RNA, 19 nt, Artificial Sequence
  Description of Artificial Sequence: Synthetic oligonucleotide
  Antisense strand to SEQ ID NO: 140422
aaucucguuguaaagugac

SEQ ID NO: 140424 - RNA, 19 nt, Artificial Sequence
  Description of Artificial Sequence: Synthetic oligonucleotide
  Sense strand starting at position 386 of SEQ ID NO: 1803
ggugguuaccaggaaugca

SEQ ID NO: 140425 - RNA, 19 nt, Artificial Sequence
  Description of Artificial Sequence: Synthetic oligonucleotide
  Antisense strand to SEQ ID NO: 140424
ugcauuccugguaaccacc

SEQ ID NO: 140426 - RNA, 19 nt, Artificial Sequence
  Description of Artificial Sequence: Synthetic oligonucleotide
  Sense strand starting at position 225 of SEQ ID NO: 1803
gcgauaaacaucuugccgu

SEQ ID NO: 140427 - RNA, 19 nt, Artificial Sequence
  Description of Artificial Sequence: Synthetic oligonucleotide
  Antisense strand to SEQ ID NO: 140426
acggcaagauguuuaucgc

SEQ ID NO: 140428 - RNA, 19 nt, Artificial Sequence
  Description of Artificial Sequence: Synthetic oligonucleotide
  Sense strand starting at position 217 of SEQ ID NO: 1803
ugagcuaggcgauaaacau

SEQ ID NO: 140429 - RNA, 19 nt, Artificial Sequence
  Description of Artificial Sequence: Synthetic oligonucleotide
  Antisense strand to SEQ ID NO: 140428
auguuuaucgccuagcuca

SEQ ID NO: 140430 - RNA, 19 nt, Artificial Sequence
  Description of Artificial Sequence: Synthetic oligonucleotide
  Sense strand starting at position 105 of SEQ ID NO: 1803
ggcuuagaugcacaagacu

SEQ ID NO: 140431 - RNA, 19 nt, Artificial Sequence
  Description of Artificial Sequence: Synthetic oligonucleotide
  Antisense strand to SEQ ID NO: 140430
agucuugugcaucuaagcc

SEQ ID NO: 140432 - RNA, 19 nt, Artificial Sequence
  Description of Artificial Sequence: Synthetic oligonucleotide
  Sense strand starting at position 36 of SEQ ID NO: 1803
cuugaauaguaagcauaua

SEQ ID NO: 140433 - RNA, 19 nt, Artificial Sequence
  Description of Artificial Sequence: Synthetic oligonucleotide
  Antisense strand to SEQ ID NO: 140432
uauaugcuuacuauucaag

SEQ ID NO: 140434 - RNA, 19 nt, Artificial Sequence
  Description of Artificial Sequence: Synthetic oligonucleotide
  Sense strand starting at position 30 of SEQ ID NO: 1803
gucacucuugaauaguaag

SEQ ID NO: 140435 - RNA, 19 nt, Artificial Sequence
  Description of Artificial Sequence: Synthetic oligonucleotide
  Antisense strand to SEQ ID NO: 140434
cuuacuauucaagagugac

SEQ ID NO: 140436 - RNA, 19 nt, Artificial Sequence
  Description of Artificial Sequence: Synthetic oligonucleotide
  Sense strand starting at position 27 of SEQ ID NO: 1803
uuggucacucuugaauagu

SEQ ID NO: 140437 - RNA, 19 nt, Artificial Sequence
  Description of Artificial Sequence: Synthetic oligonucleotide
  Antisense strand to SEQ ID NO: 140436
acuauucaagagugaccaa

SEQ ID NO: 140438 - RNA, 19 nt, Artificial Sequence
  Description of Artificial Sequence: Synthetic oligonucleotide
  Sense strand starting at position 3951 of SEQ ID NO: 1805
gguggugauucugagaaug

SEQ ID NO: 140439 - RNA, 19 nt, Artificial Sequence
  Description of Artificial Sequence: Synthetic oligonucleotide
  Antisense strand to SEQ ID NO: 140438
cauucucagaaucaccacc

SEQ ID NO: 140440 - RNA, 19 nt, Artificial Sequence
  Description of Artificial Sequence: Synthetic oligonucleotide
  Sense strand starting at position 3798 of SEQ ID NO: 1805
agggcuuguuaagauuauu

SEQ ID NO: 140441 - RNA, 19 nt, Artificial Sequence
  Description of Artificial Sequence: Synthetic oligonucleotide
  Antisense strand to SEQ ID NO: 140440
aauaaucuuaacaagcccu

SEQ ID NO: 140442 - RNA, 19 nt, Artificial Sequence
  Description of Artificial Sequence: Synthetic oligonucleotide
  Sense strand starting at position 3605 of SEQ ID NO: 1805
gugguuucugaggaaugac

SEQ ID NO: 140443 - RNA, 19 nt, Artificial Sequence
  Description of Artificial Sequence: Synthetic oligonucleotide
  Antisense strand to SEQ ID NO: 140442
gucauuccucagaaaccac

SEQ ID NO: 140444 - RNA, 19 nt, Artificial Sequence
  Description of Artificial Sequence: Synthetic oligonucleotide
  Sense strand starting at position 3534 of SEQ ID NO: 1805
ccaaaucuguagcagaaga

SEQ ID NO: 140445 - RNA, 19 nt, Artificial Sequence
  Description of Artificial Sequence: Synthetic oligonucleotide
  Antisense strand to SEQ ID NO: 140444
ucuucugcuacagauuugg

SEQ ID NO: 140446 - RNA, 19 nt, Artificial Sequence
  Description of Artificial Sequence: Synthetic oligonucleotide
  Sense strand starting at position 3531 of SEQ ID NO: 1805
cucccaaaucuguagcaga

SEQ ID NO: 140447 - RNA, 19 nt, Artificial Sequence
  Description of Artificial Sequence: Synthetic oligonucleotide
  Antisense strand to SEQ ID NO: 140446
ucugcuacagauuugggag

SEQ ID NO: 140448 - RNA, 19 nt, Artificial Sequence
  Description of Artificial Sequence: Synthetic oligonucleotide
  Sense strand starting at position 3434 of SEQ ID NO: 1805
uuagguaauuccuaagauu

SEQ ID NO: 140449 - RNA, 19 nt, Artificial Sequence
  Description of Artificial Sequence: Synthetic oligonucleotide
  Antisense strand to SEQ ID NO: 140448
aaucuuaggaauuaccuaa

SEQ ID NO: 140450 - RNA, 19 nt, Artificial Sequence
  Description of Artificial Sequence: Synthetic oligonucleotide
  Sense strand starting at position 3313 of SEQ ID NO: 1805
agucuaaauucuucuggac

SEQ ID NO: 140451 - RNA, 19 nt, Artificial Sequence
  Description of Artificial Sequence: Synthetic oligonucleotide
  Antisense strand to SEQ ID NO: 140450
guccagaagaauuuagacu

SEQ ID NO: 140452 - RNA, 19 nt, Artificial Sequence
  Description of Artificial Sequence: Synthetic oligonucleotide
  Sense strand starting at position 3190 of SEQ ID NO: 1805
gagacaggugguuguuaac

SEQ ID NO: 140453 - RNA, 19 nt, Artificial Sequence
  Description of Artificial Sequence: Synthetic oligonucleotide
  Antisense strand to SEQ ID NO: 140452
guuaacaaccaccugucuc

SEQ ID NO: 140454 - RNA, 19 nt, Artificial Sequence
  Description of Artificial Sequence: Synthetic oligonucleotide
  Sense strand starting at position 3189 of SEQ ID NO: 1805
ggagacaggugguuguuaa

SEQ ID NO: 140455 - RNA, 19 nt, Artificial Sequence
  Description of Artificial Sequence: Synthetic oligonucleotide
  Antisense strand to SEQ ID NO: 140454
uuaacaaccaccugucucc

SEQ ID NO: 140456 - RNA, 19 nt, Artificial Sequence
  Description of Artificial Sequence: Synthetic oligonucleotide
  Sense strand starting at position 3065 of SEQ ID NO: 1805
accuuugcccauggaaaca

SEQ ID NO: 140457 - RNA, 19 nt, Artificial Sequence
  Description of Artificial Sequence: Synthetic oligonucleotide
  Antisense strand to SEQ ID NO: 140456
uguuuccaugggcaaaggu

SEQ ID NO: 140458 - RNA, 19 nt, Artificial Sequence
  Description of Artificial Sequence: Synthetic oligonucleotide
  Sense strand starting at position 3023 of SEQ ID NO: 1805
uugcacugguucccacaaa

SEQ ID NO: 140459 - RNA, 19 nt, Artificial Sequence
  Description of Artificial Sequence: Synthetic oligonucleotide
  Antisense strand to SEQ ID NO: 140458
uuugugggaaccagugcaa

SEQ ID NO: 140460 - RNA, 19 nt, Artificial Sequence
  Description of Artificial Sequence: Synthetic oligonucleotide
  Sense strand starting at position 2917 of SEQ ID NO: 1805
cgugaaggcuugcuucaag

SEQ ID NO: 140461 - RNA, 19 nt, Artificial Sequence
  Description of Artificial Sequence: Synthetic oligonucleotide
  Antisense strand to SEQ ID NO: 140460
cuugaagcaagccuucacg

SEQ ID NO: 140462 - RNA, 19 nt, Artificial Sequence
  Description of Artificial Sequence: Synthetic oligonucleotide
  Sense strand starting at position 2846 of SEQ ID NO: 1805
aguggaaccugguauggau

SEQ ID NO: 140463 - RNA, 19 nt, Artificial Sequence
  Description of Artificial Sequence: Synthetic oligonucleotide
  Antisense strand to SEQ ID NO: 140462
auccauaccagguuccacu

SEQ ID NO: 140464 - RNA, 19 nt, Artificial Sequence
  Description of Artificial Sequence: Synthetic oligonucleotide
  Sense strand starting at position 2806 of SEQ ID NO: 1805
aguaauuacuguggagaua

SEQ ID NO: 140465 - RNA, 19 nt, Artificial Sequence
  Description of Artificial Sequence: Synthetic oligonucleotide
  Antisense strand to SEQ ID NO: 140464
uaucuccacaguaauuacu

SEQ ID NO: 140466 - RNA, 19 nt, Artificial Sequence
  Description of Artificial Sequence: Synthetic oligonucleotide
  Sense strand starting at position 2805 of SEQ ID NO: 1805
uaguaauuacuguggagau

SEQ ID NO: 140467 - RNA, 19 nt, Artificial Sequence
  Description of Artificial Sequence: Synthetic oligonucleotide
  Antisense strand to SEQ ID NO: 140466
aucuccacaguaauuacua

SEQ ID NO: 140468 - RNA, 19 nt, Artificial Sequence
  Description of Artificial Sequence: Synthetic oligonucleotide
  Sense strand starting at position 2675 of SEQ ID NO: 1805
uccucuuuccuggaagacu

SEQ ID NO: 140469 - RNA, 19 nt, Artificial Sequence
  Description of Artificial Sequence: Synthetic oligonucleotide
  Antisense strand to SEQ ID NO: 140468
agucuuccaggaaagagga

SEQ ID NO: 140470 - RNA, 19 nt, Artificial Sequence
  Description of Artificial Sequence: Synthetic oligonucleotide
  Sense strand starting at position 2671 of SEQ ID NO: 1805
guauuccucuuuccuggaa

SEQ ID NO: 140471 - RNA, 19 nt, Artificial Sequence
  Description of Artificial Sequence: Synthetic oligonucleotide
  Antisense strand to SEQ ID NO: 140470
uuccaggaaagaggaauac

SEQ ID NO: 140472 - RNA, 19 nt, Artificial Sequence
  Description of Artificial Sequence: Synthetic oligonucleotide
  Sense strand starting at position 1334 of SEQ ID NO: 1805
uuguuaucuccuuauguuc

SEQ ID NO: 140473 - RNA, 19 nt, Artificial Sequence
  Description of Artificial Sequence: Synthetic oligonucleotide
  Antisense strand to SEQ ID NO: 140472
gaacauaaggagauaacaa

SEQ ID NO: 140474 - RNA, 19 nt, Artificial Sequence
  Description of Artificial Sequence: Synthetic oligonucleotide
  Sense strand starting at position 1237 of SEQ ID NO: 1805
acagguaucuguuaacuac

SEQ ID NO: 140475 - RNA, 19 nt, Artificial Sequence
  Description of Artificial Sequence: Synthetic oligonucleotide
  Antisense strand to SEQ ID NO: 140474
guaguuaacagauaccugu

SEQ ID NO: 140476 - RNA, 19 nt, Artificial Sequence
  Description of Artificial Sequence: Synthetic oligonucleotide
  Sense strand starting at position 1233 of SEQ ID NO: 1805
ggagacagguaucuguuaa

SEQ ID NO: 140477 - RNA, 19 nt, Artificial Sequence
  Description of Artificial Sequence: Synthetic oligonucleotide
  Antisense strand to SEQ ID NO: 140476
uuaacagauaccugucucc

SEQ ID NO: 140478 - RNA, 19 nt, Artificial Sequence
  Description of Artificial Sequence: Synthetic oligonucleotide
  Sense strand starting at position 1050 of SEQ ID NO: 1805
cggucaucucaacagcagu

SEQ ID NO: 140479 - RNA, 19 nt, Artificial Sequence
  Description of Artificial Sequence: Synthetic oligonucleotide
  Antisense strand to SEQ ID NO: 140478
acugcuguugagaugaccg

SEQ ID NO: 140480 - RNA, 19 nt, Artificial Sequence
  Description of Artificial Sequence: Synthetic oligonucleotide
  Sense strand starting at position 1044 of SEQ ID NO: 1805
gucaaacggucaucucaac

SEQ ID NO: 140481 - RNA, 19 nt, Artificial Sequence
  Description of Artificial Sequence: Synthetic oligonucleotide
  Antisense strand to SEQ ID NO: 140480
guugagaugaccguuugac

SEQ ID NO: 140482 - RNA, 19 nt, Artificial Sequence
  Description of Artificial Sequence: Synthetic oligonucleotide
  Sense strand starting at position 1042 of SEQ ID NO: 1805
gggucaaacggucaucuca

SEQ ID NO: 140483 - RNA, 19 nt, Artificial Sequence
  Description of Artificial Sequence: Synthetic oligonucleotide
  Antisense strand to SEQ ID NO: 140482
ugagaugaccguuugaccc

SEQ ID NO: 140484 - RNA, 19 nt, Artificial Sequence
  Description of Artificial Sequence: Synthetic oligonucleotide
  Sense strand starting at position 742 of SEQ ID NO: 1805
ucaggagcugaguaauguu

SEQ ID NO: 140485 - RNA, 19 nt, Artificial Sequence
  Description of Artificial Sequence: Synthetic oligonucleotide
  Antisense strand to SEQ ID NO: 140484
aacauuacucagcuccuga

SEQ ID NO: 140486 - RNA, 19 nt, Artificial Sequence
  Description of Artificial Sequence: Synthetic oligonucleotide
  Sense strand starting at position 739 of SEQ ID NO: 1805
cugucaggagcugaguaau

SEQ ID NO: 140487 - RNA, 19 nt, Artificial Sequence
  Description of Artificial Sequence: Synthetic oligonucleotide
  Antisense strand to SEQ ID NO: 140486
auuacucagcuccugacag

SEQ ID NO: 140488 - RNA, 19 nt, Artificial Sequence
  Description of Artificial Sequence: Synthetic oligonucleotide
  Sense strand starting at position 738 of SEQ ID NO: 1805
ccugucaggagcugaguaa

SEQ ID NO: 140489 - RNA, 19 nt, Artificial Sequence
  Description of Artificial Sequence: Synthetic oligonucleotide
  Antisense strand to SEQ ID NO: 140488
uuacucagcuccugacagg

SEQ ID NO: 140490 - RNA, 19 nt, Artificial Sequence
  Description of Artificial Sequence: Synthetic oligonucleotide
  Sense strand starting at position 623 of SEQ ID NO: 1805
acugaagauuggcucagaa

SEQ ID NO: 140491 - RNA, 19 nt, Artificial Sequence
  Description of Artificial Sequence: Synthetic oligonucleotide
  Antisense strand to SEQ ID NO: 140490
uucugagccaaucuucagu

SEQ ID NO: 140492 - RNA, 19 nt, Artificial Sequence
  Description of Artificial Sequence: Synthetic oligonucleotide
  Sense strand starting at position 622 of SEQ ID NO: 1805
gacugaagauuggcucaga

SEQ ID NO: 140493 - RNA, 19 nt, Artificial Sequence
  Description of Artificial Sequence: Synthetic oligonucleotide
  Antisense strand to SEQ ID NO: 140492
ucugagccaaucuucaguc

SEQ ID NO: 140494 - RNA, 19 nt, Artificial Sequence
  Description of Artificial Sequence: Synthetic oligonucleotide
  Sense strand starting at position 503 of SEQ ID NO: 1805
uggauauccucugauaaac

SEQ ID NO: 140495 - RNA, 19 nt, Artificial Sequence
  Description of Artificial Sequence: Synthetic oligonucleotide
  Antisense strand to SEQ ID NO: 140494
guuuaucagaggauaucca

SEQ ID NO: 140496 - RNA, 19 nt, Artificial Sequence
  Description of Artificial Sequence: Synthetic oligonucleotide
  Sense strand starting at position 502 of SEQ ID NO: 1805
guggauauccucugauaaa

SEQ ID NO: 140497 - RNA, 19 nt, Artificial Sequence
  Description of Artificial Sequence: Synthetic oligonucleotide
  Antisense strand to SEQ ID NO: 140496
uuuaucagaggauauccac

SEQ ID NO: 140498 - RNA, 19 nt, Artificial Sequence
  Description of Artificial Sequence: Synthetic oligonucleotide
  Sense strand starting at position 491 of SEQ ID NO: 1805
aacacauggcuguggauau

SEQ ID NO: 140499 - RNA, 19 nt, Artificial Sequence
  Description of Artificial Sequence: Synthetic oligonucleotide
  Antisense strand to SEQ ID NO: 140498
auauccacagccauguguu

SEQ ID NO: 140500 - RNA, 19 nt, Artificial Sequence
  Description of Artificial Sequence: Synthetic oligonucleotide
  Sense strand starting at position 414 of SEQ ID NO: 1805
cagagaugcuuguuagagg

SEQ ID NO: 140501 - RNA, 19 nt, Artificial Sequence
  Description of Artificial Sequence: Synthetic oligonucleotide
  Antisense strand to SEQ ID NO: 140500
ccucuaacaagcaucucug

SEQ ID NO: 140502 - RNA, 19 nt, Artificial Sequence
  Description of Artificial Sequence: Synthetic oligonucleotide
  Sense strand starting at position 412 of SEQ ID NO: 1805
uccagagaugcuuguuaga

SEQ ID NO: 140503 - RNA, 19 nt, Artificial Sequence
  Description of Artificial Sequence: Synthetic oligonucleotide
  Antisense strand to SEQ ID NO: 140502
ucuaacaagcaucucugga

SEQ ID NO: 140504 - RNA, 19 nt, Artificial Sequence
  Description of Artificial Sequence: Synthetic oligonucleotide
  Sense strand starting at position 376 of SEQ ID NO: 1805
agggccuuugcugaaagau

SEQ ID NO: 140505 - RNA, 19 nt, Artificial Sequence
  Description of Artificial Sequence: Synthetic oligonucleotide
  Antisense strand to SEQ ID NO: 140504
aucuuucagcaaaggcccu

SEQ ID NO: 140506 - RNA, 19 nt, Artificial Sequence
  Description of Artificial Sequence: Synthetic oligonucleotide
  Sense strand starting at position 205 of SEQ ID NO: 1805
cuuagugucugaguucuau

SEQ ID NO: 140507 - RNA, 19 nt, Artificial Sequence
  Description of Artificial Sequence: Synthetic oligonucleotide
  Antisense strand to SEQ ID NO: 140506
auagaacucagacacuaag

SEQ ID NO: 140508 - RNA, 19 nt, Artificial Sequence
  Description of Artificial Sequence: Synthetic oligonucleotide
  Sense strand starting at position 202 of SEQ ID NO: 1805
aggcuuagugucugaguuc

SEQ ID NO: 140509 - RNA, 19 nt, Artificial Sequence
  Description of Artificial Sequence: Synthetic oligonucleotide
  Antisense strand to SEQ ID NO: 140508
gaacucagacacuaagccu

SEQ ID NO: 140510 - RNA, 19 nt, Artificial Sequence
  Description of Artificial Sequence: Synthetic oligonucleotide
  Sense strand starting at position 201 of SEQ ID NO: 1805
caggcuuagugucugaguu

SEQ ID NO: 140511 - RNA, 19 nt, Artificial Sequence
  Description of Artificial Sequence: Synthetic oligonucleotide
  Antisense strand to SEQ ID NO: 140510
aacucagacacuaagccug

SEQ ID NO: 140512 - RNA, 19 nt, Artificial Sequence
  Description of Artificial Sequence: Synthetic oligonucleotide
  Sense strand starting at position 26 of SEQ ID NO: 1805
auuugauucuacuguaguc

SEQ ID NO: 140513 - RNA, 19 nt, Artificial Sequence
  Description of Artificial Sequence: Synthetic oligonucleotide
  Antisense strand to SEQ ID NO: 140512
gacuacaguagaaucaaau

SEQ ID NO: 140514 - RNA, 19 nt, Artificial Sequence
  Description of Artificial Sequence: Synthetic oligonucleotide
  Sense strand starting at position 23 of SEQ ID NO: 1805
ugcauuugauucuacugua

SEQ ID NO: 140515 - RNA, 19 nt, Artificial Sequence
  Description of Artificial Sequence: Synthetic oligonucleotide
  Antisense strand to SEQ ID NO: 140514
uacaguagaaucaaaugca

SEQ ID NO: 140516 - RNA, 19 nt, Artificial Sequence
  Description of Artificial Sequence: Synthetic oligonucleotide
  Sense strand starting at position 13 of SEQ ID NO: 1805
aaggauaaguugcauuuga

SEQ ID NO: 140517 - RNA, 19 nt, Artificial Sequence
  Description of Artificial Sequence: Synthetic oligonucleotide
  Antisense strand to SEQ ID NO: 140516
ucaaaugcaacuuauccuu

SEQ ID NO: 140518 - RNA, 19 nt, Artificial Sequence
  Description of Artificial Sequence: Synthetic oligonucleotide
  Sense strand starting at position 3924 of SEQ ID NO: 1804
gcaugaaucucuccuuaga

SEQ ID NO: 140519 - RNA, 19 nt, Artificial Sequence
  Description of Artificial Sequence: Synthetic oligonucleotide
  Antisense strand to SEQ ID NO: 140518
ucuaaggagagauucaugc

SEQ ID NO: 140520 - RNA, 19 nt, Artificial Sequence
  Description of Artificial Sequence: Synthetic oligonucleotide
  Sense strand starting at position 3709 of SEQ ID NO: 1804
ugcuuuguccagccagcua

SEQ ID NO: 140521 - RNA, 19 nt, Artificial Sequence
  Description of Artificial Sequence: Synthetic oligonucleotide
  Antisense strand to SEQ ID NO: 140520
uagcuggcuggacaaagca

SEQ ID NO: 140522 - RNA, 19 nt, Artificial Sequence
  Description of Artificial Sequence: Synthetic oligonucleotide
  Sense strand starting at position 3679 of SEQ ID NO: 1804
ugauccuugggccaucaau

SEQ ID NO: 140523 - RNA, 19 nt, Artificial Sequence
  Description of Artificial Sequence: Synthetic oligonucleotide
  Antisense strand to SEQ ID NO: 140522
auugauggcccaaggauca

SEQ ID NO: 140524 - RNA, 19 nt, Artificial Sequence
  Description of Artificial Sequence: Synthetic oligonucleotide
  Sense strand starting at position 3664 of SEQ ID NO: 1804
agaggugguuuccugugau

SEQ ID NO: 140525 - RNA, 19 nt, Artificial Sequence
  Description of Artificial Sequence: Synthetic oligonucleotide
  Antisense strand to SEQ ID NO: 140524
aucacaggaaaccaccucu

SEQ ID NO: 140526 - RNA, 19 nt, Artificial Sequence
  Description of Artificial Sequence: Synthetic oligonucleotide
  Sense strand starting at position 3605 of SEQ ID NO: 1804
cuuugucuggagcaaucuu

SEQ ID NO: 140527 - RNA, 19 nt, Artificial Sequence
  Description of Artificial Sequence: Synthetic oligonucleotide
  Antisense strand to SEQ ID NO: 140526
aagauugcuccagacaaag

SEQ ID NO: 140528 - RNA, 19 nt, Artificial Sequence
  Description of Artificial Sequence: Synthetic oligonucleotide
  Sense strand starting at position 3602 of SEQ ID NO: 1804
uggcuuugucuggagcaau

SEQ ID NO: 140529 - RNA, 19 nt, Artificial Sequence
  Description of Artificial Sequence: Synthetic oligonucleotide
  Antisense strand to SEQ ID NO: 140528
auugcuccagacaaagcca

SEQ ID NO: 140530 - RNA, 19 nt, Artificial Sequence
  Description of Artificial Sequence: Synthetic oligonucleotide
  Sense strand starting at position 3373 of SEQ ID NO: 1804
gucuucuucccagaagccu

SEQ ID NO: 140531 - RNA, 19 nt, Artificial Sequence
  Description of Artificial Sequence: Synthetic oligonucleotide
  Antisense strand to SEQ ID NO: 140530
aggcuucugggaagaagac

SEQ ID NO: 140532 - RNA, 19 nt, Artificial Sequence
  Description of Artificial Sequence: Synthetic oligonucleotide
  Sense strand starting at position 3370 of SEQ ID NO: 1804
acagucuucuucccagaag

SEQ ID NO: 140533 - RNA, 19 nt, Artificial Sequence
  Description of Artificial Sequence: Synthetic oligonucleotide
  Antisense strand to SEQ ID NO: 140532
cuucugggaagaagacugu

SEQ ID NO: 140534 - RNA, 19 nt, Artificial Sequence
  Description of Artificial Sequence: Synthetic oligonucleotide
  Sense strand starting at position 2956 of SEQ ID NO: 1804
uguacagacccucagcaau

SEQ ID NO: 140535 - RNA, 19 nt, Artificial Sequence
  Description of Artificial Sequence: Synthetic oligonucleotide
  Antisense strand to SEQ ID NO: 140534
auugcugagggucuguaca

SEQ ID NO: 140536 - RNA, 19 nt, Artificial Sequence
  Description of Artificial Sequence: Synthetic oligonucleotide
  Sense strand starting at position 2946 of SEQ ID NO: 1804
gucacugucauguacagac

SEQ ID NO: 140537 - RNA, 19 nt, Artificial Sequence
  Description of Artificial Sequence: Synthetic oligonucleotide
  Antisense strand to SEQ ID NO: 140536
gucuguacaugacagugac

SEQ ID NO: 140538 - RNA, 19 nt, Artificial Sequence
  Description of Artificial Sequence: Synthetic oligonucleotide
  Sense strand starting at position 2879 of SEQ ID NO: 1804
cggagucacacagguagaa

SEQ ID NO: 140539 - RNA, 19 nt, Artificial Sequence
  Description of Artificial Sequence: Synthetic oligonucleotide
  Antisense strand to SEQ ID NO: 140538
uucuaccugugugacuccg

SEQ ID NO: 140540 - RNA, 19 nt, Artificial Sequence
  Description of Artificial Sequence: Synthetic oligonucleotide
  Sense strand starting at position 2829 of SEQ ID NO: 1804
uuccaauagccuugagaca

SEQ ID NO: 140541 - RNA, 19 nt, Artificial Sequence
  Description of Artificial Sequence: Synthetic oligonucleotide
  Antisense strand to SEQ ID NO: 140540
ugucucaaggcuauuggaa

SEQ ID NO: 140542 - RNA, 19 nt, Artificial Sequence
  Description of Artificial Sequence: Synthetic oligonucleotide
  Sense strand starting at position 2799 of SEQ ID NO: 1804
gugauuuacgugcacucua

SEQ ID NO: 140543 - RNA, 19 nt, Artificial Sequence
  Description of Artificial Sequence: Synthetic oligonucleotide
  Antisense strand to SEQ ID NO: 140542
uagagugcacguaaaucac

SEQ ID NO: 140544 - RNA, 19 nt, Artificial Sequence
  Description of Artificial Sequence: Synthetic oligonucleotide
  Sense strand starting at position 2780 of SEQ ID NO: 1804
ugaacaacucucugugcaa

SEQ ID NO: 140545 - RNA, 19 nt, Artificial Sequence
  Description of Artificial Sequence: Synthetic oligonucleotide
  Antisense strand to SEQ ID NO: 140544
uugcacagagaguuguuca

SEQ ID NO: 140546 - RNA, 19 nt, Artificial Sequence
  Description of Artificial Sequence: Synthetic oligonucleotide
  Sense strand starting at position 2768 of SEQ ID NO: 1804
gcuaccauuguuugaacaa

SEQ ID NO: 140547 - RNA, 19 nt, Artificial Sequence
  Description of Artificial Sequence: Synthetic oligonucleotide
  Antisense strand to SEQ ID NO: 140546
uuguucaaacaaugguagc

SEQ ID NO: 140548 - RNA, 19 nt, Artificial Sequence
  Description of Artificial Sequence: Synthetic oligonucleotide
  Sense strand starting at position 2678 of SEQ ID NO: 1804
uucccaucugacuggacaa

SEQ ID NO: 140549 - RNA, 19 nt, Artificial Sequence
  Description of Artificial Sequence: Synthetic oligonucleotide
  Antisense strand to SEQ ID NO: 140548
uuguccagucagaugggaa

SEQ ID NO: 140550 - RNA, 19 nt, Artificial Sequence
  Description of Artificial Sequence: Synthetic oligonucleotide
  Sense strand starting at position 2478 of SEQ ID NO: 1804
gcaaaucagaugcagaguu

SEQ ID NO: 140551 - RNA, 19 nt, Artificial Sequence
  Description of Artificial Sequence: Synthetic oligonucleotide
  Antisense strand to SEQ ID NO: 140550
aacucugcaucugauuugc

SEQ ID NO: 140552 - RNA, 19 nt, Artificial Sequence
  Description of Artificial Sequence: Synthetic oligonucleotide
  Sense strand starting at position 2366 of SEQ ID NO: 1804
gucaaucggaaugguuaga

SEQ ID NO: 140553 - RNA, 19 nt, Artificial Sequence
  Description of Artificial Sequence: Synthetic oligonucleotide
  Antisense strand to SEQ ID NO: 140552
ucuaaccauuccgauugac

SEQ ID NO: 140554 - RNA, 19 nt, Artificial Sequence
  Description of Artificial Sequence: Synthetic oligonucleotide
  Sense strand starting at position 2365 of SEQ ID NO: 1804
ggucaaucggaaugguuag

SEQ ID NO: 140555 - RNA, 19 nt, Artificial Sequence
  Description of Artificial Sequence: Synthetic oligonucleotide
  Antisense strand to SEQ ID NO: 140554
cuaaccauuccgauugacc

SEQ ID NO: 140556 - RNA, 19 nt, Artificial Sequence
  Description of Artificial Sequence: Synthetic oligonucleotide
  Sense strand starting at position 2245 of SEQ ID NO: 1804
ucagguuccacggaguaaa

SEQ ID NO: 140557 - RNA, 19 nt, Artificial Sequence
  Description of Artificial Sequence: Synthetic oligonucleotide
  Antisense strand to SEQ ID NO: 140556
uuuacuccguggaaccuga

SEQ ID NO: 140558 - RNA, 19 nt, Artificial Sequence
  Description of Artificial Sequence: Synthetic oligonucleotide
  Sense strand starting at position 2121 of SEQ ID NO: 1804
aggucauauaagggaugca

SEQ ID NO: 140559 - RNA, 19 nt, Artificial Sequence
  Description of Artificial Sequence: Synthetic oligonucleotide
  Antisense strand to SEQ ID NO: 140558
ugcaucccuuauaugaccu

SEQ ID NO: 140560 - RNA, 19 nt, Artificial Sequence
  Description of Artificial Sequence: Synthetic oligonucleotide
  Sense strand starting at position 2110 of SEQ ID NO: 1804
cagggaacugcaggucaua

SEQ ID NO: 140561 - RNA, 19 nt, Artificial Sequence
  Description of Artificial Sequence: Synthetic oligonucleotide
  Antisense strand to SEQ ID NO: 140560
uaugaccugcaguucccug

SEQ ID NO: 140562 - RNA, 19 nt, Artificial Sequence
  Description of Artificial Sequence: Synthetic oligonucleotide
  Sense strand starting at position 2006 of SEQ ID NO: 1804
ccacuuccucugcaagguu

SEQ ID NO: 140563 - RNA, 19 nt, Artificial Sequence
  Description of Artificial Sequence: Synthetic oligonucleotide
  Antisense strand to SEQ ID NO: 140562
aaccuugcagaggaagugg

SEQ ID NO: 140564 - RNA, 19 nt, Artificial Sequence
  Description of Artificial Sequence: Synthetic oligonucleotide
  Sense strand starting at position 1986 of SEQ ID NO: 1804
cgcguaaagcaguucugaa

SEQ ID NO: 140565 - RNA, 19 nt, Artificial Sequence
  Description of Artificial Sequence: Synthetic oligonucleotide
  Antisense strand to SEQ ID NO: 140564
uucagaacugcuuuacgcg

SEQ ID NO: 140566 - RNA, 19 nt, Artificial Sequence
  Description of Artificial Sequence: Synthetic oligonucleotide
  Sense strand starting at position 1985 of SEQ ID NO: 1804
ucgcguaaagcaguucuga

SEQ ID NO: 140567 - RNA, 19 nt, Artificial Sequence
  Description of Artificial Sequence: Synthetic oligonucleotide
  Antisense strand to SEQ ID NO: 140566
ucagaacugcuuuacgcga

SEQ ID NO: 140568 - RNA, 19 nt, Artificial Sequence
  Description of Artificial Sequence: Synthetic oligonucleotide
  Sense strand starting at position 1392 of SEQ ID NO: 1804
gagcaagguuucccuucua

SEQ ID NO: 140569 - RNA, 19 nt, Artificial Sequence
  Description of Artificial Sequence: Synthetic oligonucleotide
  Antisense strand to SEQ ID NO: 140568
uagaagggaaaccuugcuc

SEQ ID NO: 140570 - RNA, 19 nt, Artificial Sequence
  Description of Artificial Sequence: Synthetic oligonucleotide
  Sense strand starting at position 1354 of SEQ ID NO: 1804
ggccacuuuccugacaugu

SEQ ID NO: 140571 - RNA, 19 nt, Artificial Sequence
  Description of Artificial Sequence: Synthetic oligonucleotide
  Antisense strand to SEQ ID NO: 140570
acaugucaggaaaguggcc

SEQ ID NO: 140572 - RNA, 19 nt, Artificial Sequence
  Description of Artificial Sequence: Synthetic oligonucleotide
  Sense strand starting at position 1246 of SEQ ID NO: 1804
uuugaagagaucuguggau

SEQ ID NO: 140573 - RNA, 19 nt, Artificial Sequence
  Description of Artificial Sequence: Synthetic oligonucleotide
  Antisense strand to SEQ ID NO: 140572
auccacagaucucuucaaa

SEQ ID NO: 140574 - RNA, 19 nt, Artificial Sequence
  Description of Artificial Sequence: Synthetic oligonucleotide
  Sense strand starting at position 1076 of SEQ ID NO: 1804
acugaugaauguuuaucuu

SEQ ID NO: 140575 - RNA, 19 nt, Artificial Sequence
  Description of Artificial Sequence: Synthetic oligonucleotide
  Antisense strand to SEQ ID NO: 140574
aagauaaacauucaucagu

SEQ ID NO: 140576 - RNA, 19 nt, Artificial Sequence
  Description of Artificial Sequence: Synthetic oligonucleotide
  Sense strand starting at position 1073 of SEQ ID NO: 1804
ucaacugaugaauguuuau

SEQ ID NO: 140577 - RNA, 19 nt, Artificial Sequence
  Description of Artificial Sequence: Synthetic oligonucleotide
  Antisense strand to SEQ ID NO: 140576
auaaacauucaucaguuga

SEQ ID NO: 140578 - RNA, 19 nt, Artificial Sequence
  Description of Artificial Sequence: Synthetic oligonucleotide
  Sense strand starting at position 1034 of SEQ ID NO: 1804
ggaagucccaaccgaugaa

SEQ ID NO: 140579 - RNA, 19 nt, Artificial Sequence
  Description of Artificial Sequence: Synthetic oligonucleotide
  Antisense strand to SEQ ID NO: 140578
uucaucgguugggacuucc

SEQ ID NO: 140580 - RNA, 19 nt, Artificial Sequence
  Description of Artificial Sequence: Synthetic oligonucleotide
  Sense strand starting at position 973 of SEQ ID NO: 1804
ccuggacuucugcaaaguu

SEQ ID NO: 140581 - RNA, 19 nt, Artificial Sequence
  Description of Artificial Sequence: Synthetic oligonucleotide
  Antisense strand to SEQ ID NO: 140580
aacuuugcagaaguccagg

SEQ ID NO: 140582 - RNA, 19 nt, Artificial Sequence
  Description of Artificial Sequence: Synthetic oligonucleotide
  Sense strand starting at position 694 of SEQ ID NO: 1804
ggagcccucucaucuaagu

SEQ ID NO: 140583 - RNA, 19 nt, Artificial Sequence
  Description of Artificial Sequence: Synthetic oligonucleotide
  Antisense strand to SEQ ID NO: 140582
acuuagaugagagggcucc

SEQ ID NO: 140584 - RNA, 19 nt, Artificial Sequence
  Description of Artificial Sequence: Synthetic oligonucleotide
  Sense strand starting at position 667 of SEQ ID NO: 1804
uagguaaccucucuaagga

SEQ ID NO: 140585 - RNA, 19 nt, Artificial Sequence
  Description of Artificial Sequence: Synthetic oligonucleotide
  Antisense strand to SEQ ID NO: 140584
uccuuagagagguuaccua

SEQ ID NO: 140586 - RNA, 19 nt, Artificial Sequence
  Description of Artificial Sequence: Synthetic oligonucleotide
  Sense strand starting at position 584 of SEQ ID NO: 1804
uguagcacugcugaauuaa

SEQ ID NO: 140587 - RNA, 19 nt, Artificial Sequence
  Description of Artificial Sequence: Synthetic oligonucleotide
  Antisense strand to SEQ ID NO: 140586
uuaauucagcagugcuaca

SEQ ID NO: 140588 - RNA, 19 nt, Artificial Sequence
  Description of Artificial Sequence: Synthetic oligonucleotide
  Sense strand starting at position 574 of SEQ ID NO: 1804
uuugaauugguguagcacu

SEQ ID NO: 140589 - RNA, 19 nt, Artificial Sequence
  Description of Artificial Sequence: Synthetic oligonucleotide
  Antisense strand to SEQ ID NO: 140588
agugcuacaccaauucaaa

SEQ ID NO: 140590 - RNA, 19 nt, Artificial Sequence
  Description of Artificial Sequence: Synthetic oligonucleotide
  Sense strand starting at position 506 of SEQ ID NO: 1804
gccuacaggcaagaugaau

SEQ ID NO: 140591 - RNA, 19 nt, Artificial Sequence
  Description of Artificial Sequence: Synthetic oligonucleotide
  Antisense strand to SEQ ID NO: 140590
auucaucuugccuguaggc

SEQ ID NO: 140592 - RNA, 19 nt, Artificial Sequence
  Description of Artificial Sequence: Synthetic oligonucleotide
  Sense strand starting at position 468 of SEQ ID NO: 1804
aguauauuugccugacuuc

SEQ ID NO: 140593 - RNA, 19 nt, Artificial Sequence
  Description of Artificial Sequence: Synthetic oligonucleotide
  Antisense strand to SEQ ID NO: 140592
gaagucaggcaaauauacu

SEQ ID NO: 140594 - RNA, 19 nt, Artificial Sequence
  Description of Artificial Sequence: Synthetic oligonucleotide
  Sense strand starting at position 439 of SEQ ID NO: 1804
uugggccucuucucacaau

SEQ ID NO: 140595 - RNA, 19 nt, Artificial Sequence
  Description of Artificial Sequence: Synthetic oligonucleotide
  Antisense strand to SEQ ID NO: 140594
auugugagaagaggcccaa

SEQ ID NO: 140596 - RNA, 19 nt, Artificial Sequence
  Description of Artificial Sequence: Synthetic oligonucleotide
  Sense strand starting at position 103 of SEQ ID NO: 1804
uucuaaagcuuccugugaa

SEQ ID NO: 140597 - RNA, 19 nt, Artificial Sequence
  Description of Artificial Sequence: Synthetic oligonucleotide
  Antisense strand to SEQ ID NO: 140596
uucacaggaagcuuuagaa

SEQ ID NO: 140598 - RNA, 19 nt, Artificial Sequence
  Description of Artificial Sequence: Synthetic oligonucleotide
  Sense strand starting at position 3927 of SEQ ID NO: 1806
gcauauuauucuguugaau

SEQ ID NO: 140599 - RNA, 19 nt, Artificial Sequence
  Description of Artificial Sequence: Synthetic oligonucleotide
  Antisense strand to SEQ ID NO: 140598
auucaacagaauaauaugc

SEQ ID NO: 140600 - RNA, 19 nt, Artificial Sequence
  Description of Artificial Sequence: Synthetic oligonucleotide
  Sense strand starting at position 3899 of SEQ ID NO: 1806
guauuugaauaccaugguu

SEQ ID NO: 140601 - RNA, 19 nt, Artificial Sequence
  Description of Artificial Sequence: Synthetic oligonucleotide
  Antisense strand to SEQ ID NO: 140600
aaccaugguauucaaauac

SEQ ID NO: 140602 - RNA, 19 nt, Artificial Sequence
  Description of Artificial Sequence: Synthetic oligonucleotide
  Sense strand starting at position 3828 of SEQ ID NO: 1806
gauauucuguaguuuacag

SEQ ID NO: 140603 - RNA, 19 nt, Artificial Sequence
  Description of Artificial Sequence: Synthetic oligonucleotide
  Antisense strand to SEQ ID NO: 140602
cuguaaacuacagaauauc

SEQ ID NO: 140604 - RNA, 19 nt, Artificial Sequence
  Description of Artificial Sequence: Synthetic oligonucleotide
  Sense strand starting at position 3794 of SEQ ID NO: 1806
acgugacuauuacugcaua

SEQ ID NO: 140605 - RNA, 19 nt, Artificial Sequence
  Description of Artificial Sequence: Synthetic oligonucleotide
  Antisense strand to SEQ ID NO: 140604
uaugcaguaauagucacgu

SEQ ID NO: 140606 - RNA, 19 nt, Artificial Sequence
  Description of Artificial Sequence: Synthetic oligonucleotide
  Sense strand starting at position 3789 of SEQ ID NO: 1806
uuauuacgugacuauuacu

SEQ ID NO: 140607 - RNA, 19 nt, Artificial Sequence
  Description of Artificial Sequence: Synthetic oligonucleotide
  Antisense strand to SEQ ID NO: 140606
aguaauagucacguaauaa

SEQ ID NO: 140608 - RNA, 19 nt, Artificial Sequence
  Description of Artificial Sequence: Synthetic oligonucleotide
  Sense strand starting at position 3745 of SEQ ID NO: 1806
uguacuaaauagucacuga

SEQ ID NO: 140609 - RNA, 19 nt, Artificial Sequence
  Description of Artificial Sequence: Synthetic oligonucleotide
  Antisense strand to SEQ ID NO: 140608
ucagugacuauuuaguaca

SEQ ID NO: 140610 - RNA, 19 nt, Artificial Sequence
  Description of Artificial Sequence: Synthetic oligonucleotide
  Sense strand starting at position 3724 of SEQ ID NO: 1806
gcaguagcccaauaauaug

SEQ ID NO: 140611 - RNA, 19 nt, Artificial Sequence
  Description of Artificial Sequence: Synthetic oligonucleotide
  Antisense strand to SEQ ID NO: 140610
cauauuauugggcuacugc

SEQ ID NO: 140612 - RNA, 19 nt, Artificial Sequence
  Description of Artificial Sequence: Synthetic oligonucleotide
  Sense strand starting at position 3669 of SEQ ID NO: 1806
gugcaaacauccuuaugga

SEQ ID NO: 140613 - RNA, 19 nt, Artificial Sequence
  Description of Artificial Sequence: Synthetic oligonucleotide
  Antisense strand to SEQ ID NO: 140612
uccauaaggauguuugcac

SEQ ID NO: 140614 - RNA, 19 nt, Artificial Sequence
  Description of Artificial Sequence: Synthetic oligonucleotide
  Sense strand starting at position 3660 of SEQ ID NO: 1806
agguaaugggugcaaacau

SEQ ID NO: 140615 - RNA, 19 nt, Artificial Sequence
  Description of Artificial Sequence: Synthetic oligonucleotide
  Antisense strand to SEQ ID NO: 140614
auguuugcacccauuaccu

SEQ ID NO: 140616 - RNA, 19 nt, Artificial Sequence
  Description of Artificial Sequence: Synthetic oligonucleotide
  Sense strand starting at position 3628 of SEQ ID NO: 1806
acagauugguguuuaccaa

SEQ ID NO: 140617 - RNA, 19 nt, Artificial Sequence
  Description of Artificial Sequence: Synthetic oligonucleotide
  Antisense strand to SEQ ID NO: 140616
uugguaaacaccaaucugu

SEQ ID NO: 140618 - RNA, 19 nt, Artificial Sequence
  Description of Artificial Sequence: Synthetic oligonucleotide
  Sense strand starting at position 3624 of SEQ ID NO: 1806
gaacacagauugguguuua

SEQ ID NO: 140619 - RNA, 19 nt, Artificial Sequence
  Description of Artificial Sequence: Synthetic oligonucleotide
  Antisense strand to SEQ ID NO: 140618
uaaacaccaaucuguguuc

SEQ ID NO: 140620 - RNA, 19 nt, Artificial Sequence
  Description of Artificial Sequence: Synthetic oligonucleotide
  Sense strand starting at position 3623 of SEQ ID NO: 1806
ggaacacagauugguguuu

SEQ ID NO: 140621 - RNA, 19 nt, Artificial Sequence
  Description of Artificial Sequence: Synthetic oligonucleotide
  Antisense strand to SEQ ID NO: 140620
aaacaccaaucuguguucc

SEQ ID NO: 140622 - RNA, 19 nt, Artificial Sequence
  Description of Artificial Sequence: Synthetic oligonucleotide
  Sense strand starting at position 3577 of SEQ ID NO: 1806
augauuccaugcguauaaa

SEQ ID NO: 140623 - RNA, 19 nt, Artificial Sequence
  Description of Artificial Sequence: Synthetic oligonucleotide
  Antisense strand to SEQ ID NO: 140622
uuuauacgcauggaaucau

SEQ ID NO: 140624 - RNA, 19 nt, Artificial Sequence
  Description of Artificial Sequence: Synthetic oligonucleotide
  Sense strand starting at position 3446 of SEQ ID NO: 1806
aggcaaagcgugggauaua

SEQ ID NO: 140625 - RNA, 19 nt, Artificial Sequence
  Description of Artificial Sequence: Synthetic oligonucleotide
  Antisense strand to SEQ ID NO: 140624
uauaucccacgcuuugccu

SEQ ID NO: 140626 - RNA, 19 nt, Artificial Sequence
  Description of Artificial Sequence: Synthetic oligonucleotide
  Sense strand starting at position 3425 of SEQ ID NO: 1806
uccauuuauugaugaacag

SEQ ID NO: 140627 - RNA, 19 nt, Artificial Sequence
  Description of Artificial Sequence: Synthetic oligonucleotide
  Antisense strand to SEQ ID NO: 140626
cuguucaucaauaaaugga

SEQ ID NO: 140628 - RNA, 19 nt, Artificial Sequence
  Description of Artificial Sequence: Synthetic oligonucleotide
  Sense strand starting at position 3266 of SEQ ID NO: 1806
aaagcccaguguucugaau

SEQ ID NO: 140629 - RNA, 19 nt, Artificial Sequence
  Description of Artificial Sequence: Synthetic oligonucleotide
  Antisense strand to SEQ ID NO: 140628
auucagaacacugggcuuu

SEQ ID NO: 140630 - RNA, 19 nt, Artificial Sequence
  Description of Artificial Sequence: Synthetic oligonucleotide
  Sense strand starting at position 3250 of SEQ ID NO: 1806
uguucugauugauuccaaa

SEQ ID NO: 140631 - RNA, 19 nt, Artificial Sequence
  Description of Artificial Sequence: Synthetic oligonucleotide
  Antisense strand to SEQ ID NO: 140630
uuuggaaucaaucagaaca

SEQ ID NO: 140632 - RNA, 19 nt, Artificial Sequence
  Description of Artificial Sequence: Synthetic oligonucleotide
  Sense strand starting at position 2915 of SEQ ID NO: 1806
uagucaaacggaugucauc

SEQ ID NO: 140633 - RNA, 19 nt, Artificial Sequence
  Description of Artificial Sequence: Synthetic oligonucleotide
  Antisense strand to SEQ ID NO: 140632
gaugacauccguuugacua

SEQ ID NO: 140634 - RNA, 19 nt, Artificial Sequence
  Description of Artificial Sequence: Synthetic oligonucleotide
  Sense strand starting at position 2902 of SEQ ID NO: 1806
guagaacuauacuuaguca

SEQ ID NO: 140635 - RNA, 19 nt, Artificial Sequence
  Description of Artificial Sequence: Synthetic oligonucleotide
  Antisense strand to SEQ ID NO: 140634
ugacuaaguauaguucuac

SEQ ID NO: 140636 - RNA, 19 nt, Artificial Sequence
  Description of Artificial Sequence: Synthetic oligonucleotide
  Sense strand starting at position 2891 of SEQ ID NO: 1806
agaguuacaguguagaacu

SEQ ID NO: 140637 - RNA, 19 nt, Artificial Sequence
  Description of Artificial Sequence: Synthetic oligonucleotide
  Antisense strand to SEQ ID NO: 140636
aguucuacacuguaacucu

SEQ ID NO: 140638 - RNA, 19 nt, Artificial Sequence
  Description of Artificial Sequence: Synthetic oligonucleotide
  Sense strand starting at position 2597 of SEQ ID NO: 1806
uugaguuuacaaugagauu

SEQ ID NO: 140639 - RNA, 19 nt, Artificial Sequence
  Description of Artificial Sequence: Synthetic oligonucleotide
  Antisense strand to SEQ ID NO: 140638
aaucucauuguaaacucaa

SEQ ID NO: 140640 - RNA, 19 nt, Artificial Sequence
  Description of Artificial Sequence: Synthetic oligonucleotide
  Sense strand starting at position 2589 of SEQ ID NO: 1806
ggcaaaguuugaguuuaca

SEQ ID NO: 140641 - RNA, 19 nt, Artificial Sequence
  Description of Artificial Sequence: Synthetic oligonucleotide
  Antisense strand to SEQ ID NO: 140640
uguaaacucaaacuuugcc

SEQ ID NO: 140642 - RNA, 19 nt, Artificial Sequence
  Description of Artificial Sequence: Synthetic oligonucleotide
  Sense strand starting at position 1328 of SEQ ID NO: 1806
augugugcuccacaacuca

SEQ ID NO: 140643 - RNA, 19 nt, Artificial Sequence
  Description of Artificial Sequence: Synthetic oligonucleotide
  Antisense strand to SEQ ID NO: 140642
ugaguuguggagcacacau

SEQ ID NO: 140644 - RNA, 19 nt, Artificial Sequence
  Description of Artificial Sequence: Synthetic oligonucleotide
  Sense strand starting at position 954 of SEQ ID NO: 1806
gaugcagaguuucuaaucu

SEQ ID NO: 140645 - RNA, 19 nt, Artificial Sequence
  Description of Artificial Sequence: Synthetic oligonucleotide
  Antisense strand to SEQ ID NO: 140644
agauuagaaacucugcauc

SEQ ID NO: 140646 - RNA, 19 nt, Artificial Sequence
  Description of Artificial Sequence: Synthetic oligonucleotide
  Sense strand starting at position 946 of SEQ ID NO: 1806
guuaaauagaugcagaguu

SEQ ID NO: 140647 - RNA, 19 nt, Artificial Sequence
  Description of Artificial Sequence: Synthetic oligonucleotide
  Antisense strand to SEQ ID NO: 140646
aacucugcaucuauuuaac

SEQ ID NO: 140648 - RNA, 19 nt, Artificial Sequence
  Description of Artificial Sequence: Synthetic oligonucleotide
  Sense strand starting at position 843 of SEQ ID NO: 1806
guaucagaaauauggguaa

SEQ ID NO: 140649 - RNA, 19 nt, Artificial Sequence
  Description of Artificial Sequence: Synthetic oligonucleotide
  Antisense strand to SEQ ID NO: 140648
uuacccauauuucugauac

SEQ ID NO: 140650 - RNA, 19 nt, Artificial Sequence
  Description of Artificial Sequence: Synthetic oligonucleotide
  Sense strand starting at position 821 of SEQ ID NO: 1806
ggauaacaaugguuaucuu

SEQ ID NO: 140651 - RNA, 19 nt, Artificial Sequence
  Description of Artificial Sequence: Synthetic oligonucleotide
  Antisense strand to SEQ ID NO: 140650
aagauaaccauuguuaucc

SEQ ID NO: 140652 - RNA, 19 nt, Artificial Sequence
  Description of Artificial Sequence: Synthetic oligonucleotide
  Sense strand starting at position 818 of SEQ ID NO: 1806
ccaggauaacaaugguuau

SEQ ID NO: 140653 - RNA, 19 nt, Artificial Sequence
  Description of Artificial Sequence: Synthetic oligonucleotide
  Antisense strand to SEQ ID NO: 140652
auaaccauuguuauccugg

SEQ ID NO: 140654 - RNA, 19 nt, Artificial Sequence
  Description of Artificial Sequence: Synthetic oligonucleotide
  Sense strand starting at position 807 of SEQ ID NO: 1806
agaacaacaucccaggaua

SEQ ID NO: 140655 - RNA, 19 nt, Artificial Sequence
  Description of Artificial Sequence: Synthetic oligonucleotide
  Antisense strand to SEQ ID NO: 140654
uauccugggauguuguucu

SEQ ID NO: 140656 - RNA, 19 nt, Artificial Sequence
  Description of Artificial Sequence: Synthetic oligonucleotide
  Sense strand starting at position 701 of SEQ ID NO: 1806
gugaaacaugugugaacau

SEQ ID NO: 140657 - RNA, 19 nt, Artificial Sequence
  Description of Artificial Sequence: Synthetic oligonucleotide
  Antisense strand to SEQ ID NO: 140656
auguucacacauguuucac

SEQ ID NO: 140658 - RNA, 19 nt, Artificial Sequence
  Description of Artificial Sequence: Synthetic oligonucleotide
  Sense strand starting at position 700 of SEQ ID NO: 1806
ugugaaacaugugugaaca

SEQ ID NO: 140659 - RNA, 19 nt, Artificial Sequence
  Description of Artificial Sequence: Synthetic oligonucleotide
  Antisense strand to SEQ ID NO: 140658
uguucacacauguuucaca

SEQ ID NO: 140660 - RNA, 19 nt, Artificial Sequence
  Description of Artificial Sequence: Synthetic oligonucleotide
  Sense strand starting at position 699 of SEQ ID NO: 1806
augugaaacaugugugaac

SEQ ID NO: 140661 - RNA, 19 nt, Artificial Sequence
  Description of Artificial Sequence: Synthetic oligonucleotide
  Antisense strand to SEQ ID NO: 140660
guucacacauguuucacau

SEQ ID NO: 140662 - RNA, 19 nt, Artificial Sequence
  Description of Artificial Sequence: Synthetic oligonucleotide
  Sense strand starting at position 697 of SEQ ID NO: 1806
auaugugaaacauguguga

SEQ ID NO: 140663 - RNA, 19 nt, Artificial Sequence
  Description of Artificial Sequence: Synthetic oligonucleotide
  Antisense strand to SEQ ID NO: 140662
ucacacauguuucacauau

SEQ ID NO: 140664 - RNA, 19 nt, Artificial Sequence
  Description of Artificial Sequence: Synthetic oligonucleotide
  Sense strand starting at position 671 of SEQ ID NO: 1806
cucggagcaguauauaaau

SEQ ID NO: 140665 - RNA, 19 nt, Artificial Sequence
  Description of Artificial Sequence: Synthetic oligonucleotide
  Antisense strand to SEQ ID NO: 140664
auuuauauacugcuccgag

SEQ ID NO: 140666 - RNA, 19 nt, Artificial Sequence
  Description of Artificial Sequence: Synthetic oligonucleotide
  Sense strand starting at position 495 of SEQ ID NO: 1806
uauugugaauggcuaugua

SEQ ID NO: 140667 - RNA, 19 nt, Artificial Sequence
  Description of Artificial Sequence: Synthetic oligonucleotide
  Antisense strand to SEQ ID NO: 140666
uacauagccauucacaaua

SEQ ID NO: 140668 - RNA, 19 nt, Artificial Sequence
  Description of Artificial Sequence: Synthetic oligonucleotide
  Sense strand starting at position 469 of SEQ ID NO: 1806
ggguuauaagguuauaugu

SEQ ID NO: 140669 - RNA, 19 nt, Artificial Sequence
  Description of Artificial Sequence: Synthetic oligonucleotide
  Antisense strand to SEQ ID NO: 140668
acauauaaccuuauaaccc

SEQ ID NO: 140670 - RNA, 19 nt, Artificial Sequence
  Description of Artificial Sequence: Synthetic oligonucleotide
  Sense strand starting at position 328 of SEQ ID NO: 1806
guccuuaacagguaguauc

SEQ ID NO: 140671 - RNA, 19 nt, Artificial Sequence
  Description of Artificial Sequence: Synthetic oligonucleotide
  Antisense strand to SEQ ID NO: 140670
gauacuaccuguuaaggac

SEQ ID NO: 140672 - RNA, 19 nt, Artificial Sequence
  Description of Artificial Sequence: Synthetic oligonucleotide
  Sense strand starting at position 296 of SEQ ID NO: 1806
ggcugcuuccaagaaauca

SEQ ID NO: 140673 - RNA, 19 nt, Artificial Sequence
  Description of Artificial Sequence: Synthetic oligonucleotide
  Antisense strand to SEQ ID NO: 140672
ugauuucuuggaagcagcc

SEQ ID NO: 140674 - RNA, 19 nt, Artificial Sequence
  Description of Artificial Sequence: Synthetic oligonucleotide
  Sense strand starting at position 169 of SEQ ID NO: 1806
cuccuagacugucuauaca

SEQ ID NO: 140675 - RNA, 19 nt, Artificial Sequence
  Description of Artificial Sequence: Synthetic oligonucleotide
  Antisense strand to SEQ ID NO: 140674
uguauagacagucuaggag

SEQ ID NO: 140676 - RNA, 19 nt, Artificial Sequence
  Description of Artificial Sequence: Synthetic oligonucleotide
  Sense strand starting at position 6 of SEQ ID NO: 1806
gucuauugcgaagggaaau

SEQ ID NO: 140677 - RNA, 19 nt, Artificial Sequence
  Description of Artificial Sequence: Synthetic oligonucleotide
  Antisense strand to SEQ ID NO: 140676
auuucccuucgcaauagac

SEQ ID NO: 140678 - RNA, 19 nt, Artificial Sequence
  Description of Artificial Sequence: Synthetic oligonucleotide
  Sense strand starting at position 3793 of SEQ ID NO: 1807
auaguauucuaggcaaugu

SEQ ID NO: 140679 - RNA, 19 nt, Artificial Sequence
  Description of Artificial Sequence: Synthetic oligonucleotide
  Antisense strand to SEQ ID NO: 140678
acauugccuagaauacuau

SEQ ID NO: 140680 - RNA, 19 nt, Artificial Sequence
  Description of Artificial Sequence: Synthetic oligonucleotide
  Sense strand starting at position 3792 of SEQ ID NO: 1807
cauaguauucuaggcaaug

SEQ ID NO: 140681 - RNA, 19 nt, Artificial Sequence
  Description of Artificial Sequence: Synthetic oligonucleotide
  Antisense strand to SEQ ID NO: 140680
cauugccuagaauacuaug

SEQ ID NO: 140682 - RNA, 19 nt, Artificial Sequence
  Description of Artificial Sequence: Synthetic oligonucleotide
  Sense strand starting at position 3676 of SEQ ID NO: 1807
agcugucaucccuaaaggu

SEQ ID NO: 140683 - RNA, 19 nt, Artificial Sequence
  Description of Artificial Sequence: Synthetic oligonucleotide
  Antisense strand to SEQ ID NO: 140682
accuuuagggaugacagcu

SEQ ID NO: 140684 - RNA, 19 nt, Artificial Sequence
  Description of Artificial Sequence: Synthetic oligonucleotide
  Sense strand starting at position 3615 of SEQ ID NO: 1807
uagugacuuuaggcaaauc

SEQ ID NO: 140685 - RNA, 19 nt, Artificial Sequence
  Description of Artificial Sequence: Synthetic oligonucleotide
  Antisense strand to SEQ ID NO: 140684
gauuugccuaaagucacua

SEQ ID NO: 140686 - RNA, 19 nt, Artificial Sequence
  Description of Artificial Sequence: Synthetic oligonucleotide
  Sense strand starting at position 3601 of SEQ ID NO: 1807
gccauuuauucgcuuagug

SEQ ID NO: 140687 - RNA, 19 nt, Artificial Sequence
  Description of Artificial Sequence: Synthetic oligonucleotide
  Antisense strand to SEQ ID NO: 140686
cacuaagcgaauaaauggc

SEQ ID NO: 140688 - RNA, 19 nt, Artificial Sequence
  Description of Artificial Sequence: Synthetic oligonucleotide
  Sense strand starting at position 3600 of SEQ ID NO: 1807
ugccauuuauucgcuuagu

SEQ ID NO: 140689 - RNA, 19 nt, Artificial Sequence
  Description of Artificial Sequence: Synthetic oligonucleotide
  Antisense strand to SEQ ID NO: 140688
acuaagcgaauaaauggca

SEQ ID NO: 140690 - RNA, 19 nt, Artificial Sequence
  Description of Artificial Sequence: Synthetic oligonucleotide
  Sense strand starting at position 3598 of SEQ ID NO: 1807
uuugccauuuauucgcuua

SEQ ID NO: 140691 - RNA, 19 nt, Artificial Sequence
  Description of Artificial Sequence: Synthetic oligonucleotide
  Antisense strand to SEQ ID NO: 140690
uaagcgaauaaauggcaaa

SEQ ID NO: 140692 - RNA, 19 nt, Artificial Sequence
  Description of Artificial Sequence: Synthetic oligonucleotide
  Sense strand starting at position 3554 of SEQ ID NO: 1807
gugcaauggagcgaucaua

SEQ ID NO: 140693 - RNA, 19 nt, Artificial Sequence
  Description of Artificial Sequence: Synthetic oligonucleotide
  Antisense strand to SEQ ID NO: 140692
uaugaucgcuccauugcac

SEQ ID NO: 140694 - RNA, 19 nt, Artificial Sequence
  Description of Artificial Sequence: Synthetic oligonucleotide
  Sense strand starting at position 3055 of SEQ ID NO: 1807
uagagugugcgagguuaga

SEQ ID NO: 140695 - RNA, 19 nt, Artificial Sequence
  Description of Artificial Sequence: Synthetic oligonucleotide
  Antisense strand to SEQ ID NO: 140694
ucuaaccucgcacacucua

SEQ ID NO: 140696 - RNA, 19 nt, Artificial Sequence
  Description of Artificial Sequence: Synthetic oligonucleotide
  Sense strand starting at position 3048 of SEQ ID NO: 1807
gugagauuagagugugcga

SEQ ID NO: 140697 - RNA, 19 nt, Artificial Sequence
  Description of Artificial Sequence: Synthetic oligonucleotide
  Antisense strand to SEQ ID NO: 140696
ucgcacacucuaaucucac

SEQ ID NO: 140698 - RNA, 19 nt, Artificial Sequence
  Description of Artificial Sequence: Synthetic oligonucleotide
  Sense strand starting at position 3038 of SEQ ID NO: 1807
uuucccaacggugagauua

SEQ ID NO: 140699 - RNA, 19 nt, Artificial Sequence
  Description of Artificial Sequence: Synthetic oligonucleotide
  Antisense strand to SEQ ID NO: 140698
uaaucucaccguugggaaa

SEQ ID NO: 140700 - RNA, 19 nt, Artificial Sequence
  Description of Artificial Sequence: Synthetic oligonucleotide
  Sense strand starting at position 3009 of SEQ ID NO: 1807
ggcguuugcaggguuguua

SEQ ID NO: 140701 - RNA, 19 nt, Artificial Sequence
  Description of Artificial Sequence: Synthetic oligonucleotide
  Antisense strand to SEQ ID NO: 140700
uaacaacccugcaaacgcc

SEQ ID NO: 140702 - RNA, 19 nt, Artificial Sequence
  Description of Artificial Sequence: Synthetic oligonucleotide
  Sense strand starting at position 2901 of SEQ ID NO: 1807
uuuaauagucgcgaaaccu

SEQ ID NO: 140703 - RNA, 19 nt, Artificial Sequence
  Description of Artificial Sequence: Synthetic oligonucleotide
  Antisense strand to SEQ ID NO: 140702
agguuucgcgacuauuaaa

SEQ ID NO: 140704 - RNA, 19 nt, Artificial Sequence
  Description of Artificial Sequence: Synthetic oligonucleotide
  Sense strand starting at position 2847 of SEQ ID NO: 1807
guuguagucgcguucguac

SEQ ID NO: 140705 - RNA, 19 nt, Artificial Sequence
  Description of Artificial Sequence: Synthetic oligonucleotide
  Antisense strand to SEQ ID NO: 140704
guacgaacgcgacuacaac

SEQ ID NO: 140706 - RNA, 19 nt, Artificial Sequence
  Description of Artificial Sequence: Synthetic oligonucleotide
  Sense strand starting at position 2846 of SEQ ID NO: 1807
uguuguagucgcguucgua

SEQ ID NO: 140707 - RNA, 19 nt, Artificial Sequence
  Description of Artificial Sequence: Synthetic oligonucleotide
  Antisense strand to SEQ ID NO: 140706
uacgaacgcgacuacaaca

SEQ ID NO: 140708 - RNA, 19 nt, Artificial Sequence
  Description of Artificial Sequence: Synthetic oligonucleotide
  Sense strand starting at position 2821 of SEQ ID NO: 1807
caggcaugaucccauuugu

SEQ ID NO: 140709 - RNA, 19 nt, Artificial Sequence
  Description of Artificial Sequence: Synthetic oligonucleotide
  Antisense strand to SEQ ID NO: 140708
acaaaugggaucaugccug

SEQ ID NO: 140710 - RNA, 19 nt, Artificial Sequence
  Description of Artificial Sequence: Synthetic oligonucleotide
  Sense strand starting at position 2717 of SEQ ID NO: 1807
gugaguagguggcuuacuu

SEQ ID NO: 140711 - RNA, 19 nt, Artificial Sequence
  Description of Artificial Sequence: Synthetic oligonucleotide
  Antisense strand to SEQ ID NO: 140710
aaguaagccaccuacucac

SEQ ID NO: 140712 - RNA, 19 nt, Artificial Sequence
  Description of Artificial Sequence: Synthetic oligonucleotide
  Sense strand starting at position 2704 of SEQ ID NO: 1807
aggaaguacgagugugagu

SEQ ID NO: 140713 - RNA, 19 nt, Artificial Sequence
  Description of Artificial Sequence: Synthetic oligonucleotide
  Antisense strand to SEQ ID NO: 140712
acucacacucguacuuccu

SEQ ID NO: 140714 - RNA, 19 nt, Artificial Sequence
  Description of Artificial Sequence: Synthetic oligonucleotide
  Sense strand starting at position 2646 of SEQ ID NO: 1807
agauuacaauuugacugaa

SEQ ID NO: 140715 - RNA, 19 nt, Artificial Sequence
  Description of Artificial Sequence: Synthetic oligonucleotide
  Antisense strand to SEQ ID NO: 140714
uucagucaaauuguaaucu

SEQ ID NO: 140716 - RNA, 19 nt, Artificial Sequence
  Description of Artificial Sequence: Synthetic oligonucleotide
  Sense strand starting at position 2603 of SEQ ID NO: 1807
ugucuaauccugcagucau

SEQ ID NO: 140717 - RNA, 19 nt, Artificial Sequence
  Description of Artificial Sequence: Synthetic oligonucleotide
  Antisense strand to SEQ ID NO: 140716
augacugcaggauuagaca

SEQ ID NO: 140718 - RNA, 19 nt, Artificial Sequence
  Description of Artificial Sequence: Synthetic oligonucleotide
  Sense strand starting at position 2598 of SEQ ID NO: 1807
uagagugucuaauccugca

SEQ ID NO: 140719 - RNA, 19 nt, Artificial Sequence
  Description of Artificial Sequence: Synthetic oligonucleotide
  Antisense strand to SEQ ID NO: 140718
ugcaggauuagacacucua

SEQ ID NO: 140720 - RNA, 19 nt, Artificial Sequence
  Description of Artificial Sequence: Synthetic oligonucleotide
  Sense strand starting at position 2591 of SEQ ID NO: 1807
gcggaaguagagugucuaa

SEQ ID NO: 140721 - RNA, 19 nt, Artificial Sequence
  Description of Artificial Sequence: Synthetic oligonucleotide
  Antisense strand to SEQ ID NO: 140720
uuagacacucuacuuccgc

SEQ ID NO: 140722 - RNA, 19 nt, Artificial Sequence
  Description of Artificial Sequence: Synthetic oligonucleotide
  Sense strand starting at position 2502 of SEQ ID NO: 1807
aaaggagugugguccuuua

SEQ ID NO: 140723 - RNA, 19 nt, Artificial Sequence
  Description of Artificial Sequence: Synthetic oligonucleotide
  Antisense strand to SEQ ID NO: 140722
uaaaggaccacacuccuuu

SEQ ID NO: 140724 - RNA, 19 nt, Artificial Sequence
  Description of Artificial Sequence: Synthetic oligonucleotide
  Sense strand starting at position 2381 of SEQ ID NO: 1807
uuccuuagucuuuggaaag

SEQ ID NO: 140725 - RNA, 19 nt, Artificial Sequence
  Description of Artificial Sequence: Synthetic oligonucleotide
  Antisense strand to SEQ ID NO: 140724
cuuuccaaagacuaaggaa

SEQ ID NO: 140726 - RNA, 19 nt, Artificial Sequence
  Description of Artificial Sequence: Synthetic oligonucleotide
  Sense strand starting at position 2380 of SEQ ID NO: 1807
uuuccuuagucuuuggaaa

SEQ ID NO: 140727 - RNA, 19 nt, Artificial Sequence
  Description of Artificial Sequence: Synthetic oligonucleotide
  Antisense strand to SEQ ID NO: 140726
uuuccaaagacuaaggaaa

SEQ ID NO: 140728 - RNA, 19 nt, Artificial Sequence
  Description of Artificial Sequence: Synthetic oligonucleotide
  Sense strand starting at position 2323 of SEQ ID NO: 1807
gaaagaaccucgccaguca

SEQ ID NO: 140729 - RNA, 19 nt, Artificial Sequence
  Description of Artificial Sequence: Synthetic oligonucleotide
  Antisense strand to SEQ ID NO: 140728
ugacuggcgagguucuuuc

SEQ ID NO: 140730 - RNA, 19 nt, Artificial Sequence
  Description of Artificial Sequence: Synthetic oligonucleotide
  Sense strand starting at position 2288 of SEQ ID NO: 1807
cgggucuaguuaucaauuu

SEQ ID NO: 140731 - RNA, 19 nt, Artificial Sequence
  Description of Artificial Sequence: Synthetic oligonucleotide
  Antisense strand to SEQ ID NO: 140730
aaauugauaacuagacccg

SEQ ID NO: 140732 - RNA, 19 nt, Artificial Sequence
  Description of Artificial Sequence: Synthetic oligonucleotide
  Sense strand starting at position 2282 of SEQ ID NO: 1807
ugccuucgggucuaguuau

SEQ ID NO: 140733 - RNA, 19 nt, Artificial Sequence
  Description of Artificial Sequence: Synthetic oligonucleotide
  Antisense strand to SEQ ID NO: 140732
auaacuagacccgaaggca

SEQ ID NO: 140734 - RNA, 19 nt, Artificial Sequence
  Description of Artificial Sequence: Synthetic oligonucleotide
  Sense strand starting at position 1566 of SEQ ID NO: 1807
ccgagaaaccgauaucgga

SEQ ID NO: 140735 - RNA, 19 nt, Artificial Sequence
  Description of Artificial Sequence: Synthetic oligonucleotide
  Antisense strand to SEQ ID NO: 140734
uccgauaucgguuucucgg

SEQ ID NO: 140736 - RNA, 19 nt, Artificial Sequence
  Description of Artificial Sequence: Synthetic oligonucleotide
  Sense strand starting at position 1306 of SEQ ID NO: 1807
gcaugacuccuacagccua

SEQ ID NO: 140737 - RNA, 19 nt, Artificial Sequence
  Description of Artificial Sequence: Synthetic oligonucleotide
  Antisense strand to SEQ ID NO: 140736
uaggcuguaggagucaugc

SEQ ID NO: 140738 - RNA, 19 nt, Artificial Sequence
  Description of Artificial Sequence: Synthetic oligonucleotide
  Sense strand starting at position 1282 of SEQ ID NO: 1807
gaguaauccucugcaaagc

SEQ ID NO: 140739 - RNA, 19 nt, Artificial Sequence
  Description of Artificial Sequence: Synthetic oligonucleotide
  Antisense strand to SEQ ID NO: 140738
gcuuugcagaggauuacuc

SEQ ID NO: 140740 - RNA, 19 nt, Artificial Sequence
  Description of Artificial Sequence: Synthetic oligonucleotide
  Sense strand starting at position 1281 of SEQ ID NO: 1807
cgaguaauccucugcaaag

SEQ ID NO: 140741 - RNA, 19 nt, Artificial Sequence
  Description of Artificial Sequence: Synthetic oligonucleotide
  Antisense strand to SEQ ID NO: 140740
cuuugcagaggauuacucg

SEQ ID NO: 140742 - RNA, 19 nt, Artificial Sequence
  Description of Artificial Sequence: Synthetic oligonucleotide
  Sense strand starting at position 1273 of SEQ ID NO: 1807
acggaaaccgaguaauccu

SEQ ID NO: 140743 - RNA, 19 nt, Artificial Sequence
  Description of Artificial Sequence: Synthetic oligonucleotide
  Antisense strand to SEQ ID NO: 140742
aggauuacucgguuuccgu

SEQ ID NO: 140744 - RNA, 19 nt, Artificial Sequence
  Description of Artificial Sequence: Synthetic oligonucleotide
  Sense strand starting at position 1077 of SEQ ID NO: 1807
agucaugucaccugguuac

SEQ ID NO: 140745 - RNA, 19 nt, Artificial Sequence
  Description of Artificial Sequence: Synthetic oligonucleotide
  Antisense strand to SEQ ID NO: 140744
guaaccaggugacaugacu

SEQ ID NO: 140746 - RNA, 19 nt, Artificial Sequence
  Description of Artificial Sequence: Synthetic oligonucleotide
  Sense strand starting at position 1075 of SEQ ID NO: 1807
agagucaugucaccugguu

SEQ ID NO: 140747 - RNA, 19 nt, Artificial Sequence
  Description of Artificial Sequence: Synthetic oligonucleotide
  Antisense strand to SEQ ID NO: 140746
aaccaggugacaugacucu

SEQ ID NO: 140748 - RNA, 19 nt, Artificial Sequence
  Description of Artificial Sequence: Synthetic oligonucleotide
  Sense strand starting at position 1064 of SEQ ID NO: 1807
uaacguucgggagagucau

SEQ ID NO: 140749 - RNA, 19 nt, Artificial Sequence
  Description of Artificial Sequence: Synthetic oligonucleotide
  Antisense strand to SEQ ID NO: 140748
augacucucccgaacguua

SEQ ID NO: 140750 - RNA, 19 nt, Artificial Sequence
  Description of Artificial Sequence: Synthetic oligonucleotide
  Sense strand starting at position 902 of SEQ ID NO: 1807
ucucuugucagguaaguua

SEQ ID NO: 140751 - RNA, 19 nt, Artificial Sequence
  Description of Artificial Sequence: Synthetic oligonucleotide
  Antisense strand to SEQ ID NO: 140750
uaacuuaccugacaagaga

SEQ ID NO: 140752 - RNA, 19 nt, Artificial Sequence
  Description of Artificial Sequence: Synthetic oligonucleotide
  Sense strand starting at position 820 of SEQ ID NO: 1807
ugguacagccacuauuauu

SEQ ID NO: 140753 - RNA, 19 nt, Artificial Sequence
  Description of Artificial Sequence: Synthetic oligonucleotide
  Antisense strand to SEQ ID NO: 140752
aauaauaguggcuguacca

SEQ ID NO: 140754 - RNA, 19 nt, Artificial Sequence
  Description of Artificial Sequence: Synthetic oligonucleotide
  Sense strand starting at position 621 of SEQ ID NO: 1807
ggacuagacucauuguaau

SEQ ID NO: 140755 - RNA, 19 nt, Artificial Sequence
  Description of Artificial Sequence: Synthetic oligonucleotide
  Antisense strand to SEQ ID NO: 140754
auuacaaugagucuagucc

SEQ ID NO: 140756 - RNA, 19 nt, Artificial Sequence
  Description of Artificial Sequence: Synthetic oligonucleotide
  Sense strand starting at position 237 of SEQ ID NO: 1807
uagacaaugugcuccuuga

SEQ ID NO: 140757 - RNA, 19 nt, Artificial Sequence
  Description of Artificial Sequence: Synthetic oligonucleotide
  Antisense strand to SEQ ID NO: 140756
ucaaggagcacauugucua

SEQ ID NO: 140758 - RNA, 19 nt, Artificial Sequence
  Description of Artificial Sequence: Synthetic oligonucleotide
  Sense strand starting at position 3886 of SEQ ID NO: 1808
agcugucaucccuaaaggu

SEQ ID NO: 140759 - RNA, 19 nt, Artificial Sequence
  Description of Artificial Sequence: Synthetic oligonucleotide
  Antisense strand to SEQ ID NO: 140758
accuuuagggaugacagcu

SEQ ID NO: 140760 - RNA, 19 nt, Artificial Sequence
  Description of Artificial Sequence: Synthetic oligonucleotide
  Sense strand starting at position 3825 of SEQ ID NO: 1808
uagugacuuuaggcaaauc

SEQ ID NO: 140761 - RNA, 19 nt, Artificial Sequence
  Description of Artificial Sequence: Synthetic oligonucleotide
  Antisense strand to SEQ ID NO: 140760
gauuugccuaaagucacua

SEQ ID NO: 140762 - RNA, 19 nt, Artificial Sequence
  Description of Artificial Sequence: Synthetic oligonucleotide
  Sense strand starting at position 3811 of SEQ ID NO: 1808
gccauuuauucgcuuagug

SEQ ID NO: 140763 - RNA, 19 nt, Artificial Sequence
  Description of Artificial Sequence: Synthetic oligonucleotide
  Antisense strand to SEQ ID NO: 140762
cacuaagcgaauaaauggc

SEQ ID NO: 140764 - RNA, 19 nt, Artificial Sequence
  Description of Artificial Sequence: Synthetic oligonucleotide
  Sense strand starting at position 3810 of SEQ ID NO: 1808
ugccauuuauucgcuuagu

SEQ ID NO: 140765 - RNA, 19 nt, Artificial Sequence
  Description of Artificial Sequence: Synthetic oligonucleotide
  Antisense strand to SEQ ID NO: 140764
acuaagcgaauaaauggca

SEQ ID NO: 140766 - RNA, 19 nt, Artificial Sequence
  Description of Artificial Sequence: Synthetic oligonucleotide
  Sense strand starting at position 3808 of SEQ ID NO: 1808
uuugccauuuauucgcuua

SEQ ID NO: 140767 - RNA, 19 nt, Artificial Sequence
  Description of Artificial Sequence: Synthetic oligonucleotide
  Antisense strand to SEQ ID NO: 140766
uaagcgaauaaauggcaaa

SEQ ID NO: 140768 - RNA, 19 nt, Artificial Sequence
  Description of Artificial Sequence: Synthetic oligonucleotide
  Sense strand starting at position 3764 of SEQ ID NO: 1808
gugcaauggagcgaucaua

SEQ ID NO: 140769 - RNA, 19 nt, Artificial Sequence
  Description of Artificial Sequence: Synthetic oligonucleotide
  Antisense strand to SEQ ID NO: 140768
uaugaucgcuccauugcac

SEQ ID NO: 140770 - RNA, 19 nt, Artificial Sequence
  Description of Artificial Sequence: Synthetic oligonucleotide
  Sense strand starting at position 3265 of SEQ ID NO: 1808
uagagugugcgagguuaga

SEQ ID NO: 140771 - RNA, 19 nt, Artificial Sequence
  Description of Artificial Sequence: Synthetic oligonucleotide
  Antisense strand to SEQ ID NO: 140770
ucuaaccucgcacacucua

SEQ ID NO: 140772 - RNA, 19 nt, Artificial Sequence
  Description of Artificial Sequence: Synthetic oligonucleotide
  Sense strand starting at position 3258 of SEQ ID NO: 1808
gugagauuagagugugcga

SEQ ID NO: 140773 - RNA, 19 nt, Artificial Sequence
  Description of Artificial Sequence: Synthetic oligonucleotide
  Antisense strand to SEQ ID NO: 140772
ucgcacacucuaaucucac

SEQ ID NO: 140774 - RNA, 19 nt, Artificial Sequence
  Description of Artificial Sequence: Synthetic oligonucleotide
  Sense strand starting at position 3248 of SEQ ID NO: 1808
uuucccaacggugagauua

SEQ ID NO: 140775 - RNA, 19 nt, Artificial Sequence
  Description of Artificial Sequence: Synthetic oligonucleotide
  Antisense strand to SEQ ID NO: 140774
uaaucucaccguugggaaa

SEQ ID NO: 140776 - RNA, 19 nt, Artificial Sequence
  Description of Artificial Sequence: Synthetic oligonucleotide
  Sense strand starting at position 3219 of SEQ ID NO: 1808
ggcguuugcaggguuguua

SEQ ID NO: 140777 - RNA, 19 nt, Artificial Sequence
  Description of Artificial Sequence: Synthetic oligonucleotide
  Antisense strand to SEQ ID NO: 140776
uaacaacccugcaaacgcc

SEQ ID NO: 140778 - RNA, 19 nt, Artificial Sequence
  Description of Artificial Sequence: Synthetic oligonucleotide
  Sense strand starting at position 3111 of SEQ ID NO: 1808
uuuaauagucgcgaaaccu

SEQ ID NO: 140779 - RNA, 19 nt, Artificial Sequence
  Description of Artificial Sequence: Synthetic oligonucleotide
  Antisense strand to SEQ ID NO: 140778
agguuucgcgacuauuaaa

SEQ ID NO: 140780 - RNA, 19 nt, Artificial Sequence
  Description of Artificial Sequence: Synthetic oligonucleotide
  Sense strand starting at position 3057 of SEQ ID NO: 1808
guuguagucgcguucguac

SEQ ID NO: 140781 - RNA, 19 nt, Artificial Sequence
  Description of Artificial Sequence: Synthetic oligonucleotide
  Antisense strand to SEQ ID NO: 140780
guacgaacgcgacuacaac

SEQ ID NO: 140782 - RNA, 19 nt, Artificial Sequence
  Description of Artificial Sequence: Synthetic oligonucleotide
  Sense strand starting at position 3056 of SEQ ID NO: 1808
uguuguagucgcguucgua

SEQ ID NO: 140783 - RNA, 19 nt, Artificial Sequence
  Description of Artificial Sequence: Synthetic oligonucleotide
  Antisense strand to SEQ ID NO: 140782
uacgaacgcgacuacaaca

SEQ ID NO: 140784 - RNA, 19 nt, Artificial Sequence
  Description of Artificial Sequence: Synthetic oligonucleotide
  Sense strand starting at position 3031 of SEQ ID NO: 1808
caggcaugaucccauuugu

SEQ ID NO: 140785 - RNA, 19 nt, Artificial Sequence
  Description of Artificial Sequence: Synthetic oligonucleotide
  Antisense strand to SEQ ID NO: 140784
acaaaugggaucaugccug

SEQ ID NO: 140786 - RNA, 19 nt, Artificial Sequence
  Description of Artificial Sequence: Synthetic oligonucleotide
  Sense strand starting at position 2927 of SEQ ID NO: 1808
gugaguagguggcuuacuu

SEQ ID NO: 140787 - RNA, 19 nt, Artificial Sequence
  Description of Artificial Sequence: Synthetic oligonucleotide
  Antisense strand to SEQ ID NO: 140786
aaguaagccaccuacucac

SEQ ID NO: 140788 - RNA, 19 nt, Artificial Sequence
  Description of Artificial Sequence: Synthetic oligonucleotide
  Sense strand starting at position 2914 of SEQ ID NO: 1808
aggaaguacgagugugagu

SEQ ID NO: 140789 - RNA, 19 nt, Artificial Sequence
  Description of Artificial Sequence: Synthetic oligonucleotide
  Antisense strand to SEQ ID NO: 140788
acucacacucguacuuccu

SEQ ID NO: 140790 - RNA, 19 nt, Artificial Sequence
  Description of Artificial Sequence: Synthetic oligonucleotide
  Sense strand starting at position 2856 of SEQ ID NO: 1808
agauuacaauuugacugaa

SEQ ID NO: 140791 - RNA, 19 nt, Artificial Sequence
  Description of Artificial Sequence: Synthetic oligonucleotide
  Antisense strand to SEQ ID NO: 140790
uucagucaaauuguaaucu

SEQ ID NO: 140792 - RNA, 19 nt, Artificial Sequence
  Description of Artificial Sequence: Synthetic oligonucleotide
  Sense strand starting at position 2813 of SEQ ID NO: 1808
ugucuaauccugcagucau

SEQ ID NO: 140793 - RNA, 19 nt, Artificial Sequence
  Description of Artificial Sequence: Synthetic oligonucleotide
  Antisense strand to SEQ ID NO: 140792
augacugcaggauuagaca

SEQ ID NO: 140794 - RNA, 19 nt, Artificial Sequence
  Description of Artificial Sequence: Synthetic oligonucleotide
  Sense strand starting at position 2808 of SEQ ID NO: 1808
uagagugucuaauccugca

SEQ ID NO: 140795 - RNA, 19 nt, Artificial Sequence
  Description of Artificial Sequence: Synthetic oligonucleotide
  Antisense strand to SEQ ID NO: 140794
ugcaggauuagacacucua

SEQ ID NO: 140796 - RNA, 19 nt, Artificial Sequence
  Description of Artificial Sequence: Synthetic oligonucleotide
  Sense strand starting at position 2801 of SEQ ID NO: 1808
gcggaaguagagugucuaa

SEQ ID NO: 140797 - RNA, 19 nt, Artificial Sequence
  Description of Artificial Sequence: Synthetic oligonucleotide
  Antisense strand to SEQ ID NO: 140796
uuagacacucuacuuccgc

SEQ ID NO: 140798 - RNA, 19 nt, Artificial Sequence
  Description of Artificial Sequence: Synthetic oligonucleotide
  Sense strand starting at position 2712 of SEQ ID NO: 1808
aaaggagugugguccuuua

SEQ ID NO: 140799 - RNA, 19 nt, Artificial Sequence
  Description of Artificial Sequence: Synthetic oligonucleotide
  Antisense strand to SEQ ID NO: 140798
uaaaggaccacacuccuuu

SEQ ID NO: 140800 - RNA, 19 nt, Artificial Sequence
  Description of Artificial Sequence: Synthetic oligonucleotide
  Sense strand starting at position 2591 of SEQ ID NO: 1808
uuccuuagucuuuggaaag

SEQ ID NO: 140801 - RNA, 19 nt, Artificial Sequence
  Description of Artificial Sequence: Synthetic oligonucleotide
  Antisense strand to SEQ ID NO: 140800
cuuuccaaagacuaaggaa

SEQ ID NO: 140802 - RNA, 19 nt, Artificial Sequence
  Description of Artificial Sequence: Synthetic oligonucleotide
  Sense strand starting at position 2590 of SEQ ID NO: 1808
uuuccuuagucuuuggaaa

SEQ ID NO: 140803 - RNA, 19 nt, Artificial Sequence
  Description of Artificial Sequence: Synthetic oligonucleotide
  Antisense strand to SEQ ID NO: 140802
uuuccaaagacuaaggaaa

SEQ ID NO: 140804 - RNA, 19 nt, Artificial Sequence
  Description of Artificial Sequence: Synthetic oligonucleotide
  Sense strand starting at position 2533 of SEQ ID NO: 1808
gaaagaaccucgccaguca

SEQ ID NO: 140805 - RNA, 19 nt, Artificial Sequence
  Description of Artificial Sequence: Synthetic oligonucleotide
  Antisense strand to SEQ ID NO: 140804
ugacuggcgagguucuuuc

SEQ ID NO: 140806 - RNA, 19 nt, Artificial Sequence
  Description of Artificial Sequence: Synthetic oligonucleotide
  Sense strand starting at position 2498 of SEQ ID NO: 1808
cgggucuaguuaucaauuu

SEQ ID NO: 140807 - RNA, 19 nt, Artificial Sequence
  Description of Artificial Sequence: Synthetic oligonucleotide
  Antisense strand to SEQ ID NO: 140806
aaauugauaacuagacccg

SEQ ID NO: 140808 - RNA, 19 nt, Artificial Sequence
  Description of Artificial Sequence: Synthetic oligonucleotide
  Sense strand starting at position 2492 of SEQ ID NO: 1808
ugccuucgggucuaguuau

SEQ ID NO: 140809 - RNA, 19 nt, Artificial Sequence
  Description of Artificial Sequence: Synthetic oligonucleotide
  Antisense strand to SEQ ID NO: 140808
auaacuagacccgaaggca

SEQ ID NO: 140810 - RNA, 19 nt, Artificial Sequence
  Description of Artificial Sequence: Synthetic oligonucleotide
  Sense strand starting at position 1776 of SEQ ID NO: 1808
ccgagaaaccgauaucgga

SEQ ID NO: 140811 - RNA, 19 nt, Artificial Sequence
  Description of Artificial Sequence: Synthetic oligonucleotide
  Antisense strand to SEQ ID NO: 140810
uccgauaucgguuucucgg

SEQ ID NO: 140812 - RNA, 19 nt, Artificial Sequence
  Description of Artificial Sequence: Synthetic oligonucleotide
  Sense strand starting at position 1516 of SEQ ID NO: 1808
gcaugacuccuacagccua

SEQ ID NO: 140813 - RNA, 19 nt, Artificial Sequence
  Description of Artificial Sequence: Synthetic oligonucleotide
  Antisense strand to SEQ ID NO: 140812
uaggcuguaggagucaugc

SEQ ID NO: 140814 - RNA, 19 nt, Artificial Sequence
  Description of Artificial Sequence: Synthetic oligonucleotide
  Sense strand starting at position 1492 of SEQ ID NO: 1808
gaguaauccucugcaaagc

SEQ ID NO: 140815 - RNA, 19 nt, Artificial Sequence
  Description of Artificial Sequence: Synthetic oligonucleotide
  Antisense strand to SEQ ID NO: 140814
gcuuugcagaggauuacuc

SEQ ID NO: 140816 - RNA, 19 nt, Artificial Sequence
  Description of Artificial Sequence: Synthetic oligonucleotide
  Sense strand starting at position 1491 of SEQ ID NO: 1808
cgaguaauccucugcaaag

SEQ ID NO: 140817 - RNA, 19 nt, Artificial Sequence
  Description of Artificial Sequence: Synthetic oligonucleotide
  Antisense strand to SEQ ID NO: 140816
cuuugcagaggauuacucg

SEQ ID NO: 140818 - RNA, 19 nt, Artificial Sequence
  Description of Artificial Sequence: Synthetic oligonucleotide
  Sense strand starting at position 1483 of SEQ ID NO: 1808
acggaaaccgaguaauccu

SEQ ID NO: 140819 - RNA, 19 nt, Artificial Sequence
  Description of Artificial Sequence: Synthetic oligonucleotide
  Antisense strand to SEQ ID NO: 140818
aggauuacucgguuuccgu

SEQ ID NO: 140820 - RNA, 19 nt, Artificial Sequence
  Description of Artificial Sequence: Synthetic oligonucleotide
  Sense strand starting at position 1287 of SEQ ID NO: 1808
agucaugucaccugguuac

SEQ ID NO: 140821 - RNA, 19 nt, Artificial Sequence
  Description of Artificial Sequence: Synthetic oligonucleotide
  Antisense strand to SEQ ID NO: 140820
guaaccaggugacaugacu

SEQ ID NO: 140822 - RNA, 19 nt, Artificial Sequence
  Description of Artificial Sequence: Synthetic oligonucleotide
  Sense strand starting at position 1285 of SEQ ID NO: 1808
agagucaugucaccugguu

SEQ ID NO: 140823 - RNA, 19 nt, Artificial Sequence
  Description of Artificial Sequence: Synthetic oligonucleotide
  Antisense strand to SEQ ID NO: 140822
aaccaggugacaugacucu

SEQ ID NO: 140824 - RNA, 19 nt, Artificial Sequence
  Description of Artificial Sequence: Synthetic oligonucleotide
  Sense strand starting at position 1274 of SEQ ID NO: 1808
uaacguucgggagagucau

SEQ ID NO: 140825 - RNA, 19 nt, Artificial Sequence
  Description of Artificial Sequence: Synthetic oligonucleotide
  Antisense strand to SEQ ID NO: 140824
augacucucccgaacguua

SEQ ID NO: 140826 - RNA, 19 nt, Artificial Sequence
  Description of Artificial Sequence: Synthetic oligonucleotide
  Sense strand starting at position 1201 of SEQ ID NO: 1808
gccuucuccgggugacuga

SEQ ID NO: 140827 - RNA, 19 nt, Artificial Sequence
  Description of Artificial Sequence: Synthetic oligonucleotide
  Antisense strand to SEQ ID NO: 140826
ucagucacccggagaaggc

SEQ ID NO: 140828 - RNA, 19 nt, Artificial Sequence
  Description of Artificial Sequence: Synthetic oligonucleotide
  Sense strand starting at position 1112 of SEQ ID NO: 1808
ucucuugucagguaaguua

SEQ ID NO: 140829 - RNA, 19 nt, Artificial Sequence
  Description of Artificial Sequence: Synthetic oligonucleotide
  Antisense strand to SEQ ID NO: 140828
uaacuuaccugacaagaga

SEQ ID NO: 140830 - RNA, 19 nt, Artificial Sequence
  Description of Artificial Sequence: Synthetic oligonucleotide
  Sense strand starting at position 1030 of SEQ ID NO: 1808
ugguacagccacuauuauu

SEQ ID NO: 140831 - RNA, 19 nt, Artificial Sequence
  Description of Artificial Sequence: Synthetic oligonucleotide
  Antisense strand to SEQ ID NO: 140830
aauaauaguggcuguacca

SEQ ID NO: 140832 - RNA, 19 nt, Artificial Sequence
  Description of Artificial Sequence: Synthetic oligonucleotide
  Sense strand starting at position 831 of SEQ ID NO: 1808
ggacuagacucauuguaau

SEQ ID NO: 140833 - RNA, 19 nt, Artificial Sequence
  Description of Artificial Sequence: Synthetic oligonucleotide
  Antisense strand to SEQ ID NO: 140832
auuacaaugagucuagucc

SEQ ID NO: 140834 - RNA, 19 nt, Artificial Sequence
  Description of Artificial Sequence: Synthetic oligonucleotide
  Sense strand starting at position 477 of SEQ ID NO: 1808
augacauacuacgagaauu

SEQ ID NO: 140835 - RNA, 19 nt, Artificial Sequence
  Description of Artificial Sequence: Synthetic oligonucleotide
  Antisense strand to SEQ ID NO: 140834
aauucucguaguaugucau

SEQ ID NO: 140836 - RNA, 19 nt, Artificial Sequence
  Description of Artificial Sequence: Synthetic oligonucleotide
  Sense strand starting at position 447 of SEQ ID NO: 1808
uagacaaugugcuccuuga

SEQ ID NO: 140837 - RNA, 19 nt, Artificial Sequence
  Description of Artificial Sequence: Synthetic oligonucleotide
  Antisense strand to SEQ ID NO: 140836
ucaaggagcacauugucua

SEQ ID NO: 140838 - RNA, 19 nt, Artificial Sequence
  Description of Artificial Sequence: Synthetic oligonucleotide
  Sense strand starting at position 240 of SEQ ID NO: 1809
cauagcucugauugaguua

SEQ ID NO: 140839 - RNA, 19 nt, Artificial Sequence
  Description of Artificial Sequence: Synthetic oligonucleotide
  Antisense strand to SEQ ID NO: 140838
uaacucaaucagagcuaug

SEQ ID NO: 140840 - RNA, 19 nt, Artificial Sequence
  Description of Artificial Sequence: Synthetic oligonucleotide
  Sense strand starting at position 243 of SEQ ID NO: 1809
agcucugauugaguuacua

SEQ ID NO: 140841 - RNA, 19 nt, Artificial Sequence
  Description of Artificial Sequence: Synthetic oligonucleotide
  Antisense strand to SEQ ID NO: 140840
uaguaacucaaucagagcu

SEQ ID NO: 140842 - RNA, 19 nt, Artificial Sequence
  Description of Artificial Sequence: Synthetic oligonucleotide
  Sense strand starting at position 316 of SEQ ID NO: 1809
gagcuaggcauucgagaac

SEQ ID NO: 140843 - RNA, 19 nt, Artificial Sequence
  Description of Artificial Sequence: Synthetic oligonucleotide
  Antisense strand to SEQ ID NO: 140842
guucucgaaugccuagcuc

SEQ ID NO: 140844 - RNA, 19 nt, Artificial Sequence
  Description of Artificial Sequence: Synthetic oligonucleotide
  Sense strand starting at position 319 of SEQ ID NO: 1809
cuaggcauucgagaaccaa

SEQ ID NO: 140845 - RNA, 19 nt, Artificial Sequence
  Description of Artificial Sequence: Synthetic oligonucleotide
  Antisense strand to SEQ ID NO: 140844
uugguucucgaaugccuag

SEQ ID NO: 140846 - RNA, 19 nt, Artificial Sequence
  Description of Artificial Sequence: Synthetic oligonucleotide
  Sense strand starting at position 407 of SEQ ID NO: 1809
uucuuuaggucuucucuca

SEQ ID NO: 140847 - RNA, 19 nt, Artificial Sequence
  Description of Artificial Sequence: Synthetic oligonucleotide
  Antisense strand to SEQ ID NO: 140846
ugagagaagaccuaaagaa

SEQ ID NO: 140848 - RNA, 19 nt, Artificial Sequence
  Description of Artificial Sequence: Synthetic oligonucleotide
  Sense strand starting at position 422 of SEQ ID NO: 1809
cucacugaugccuacugaa

SEQ ID NO: 140849 - RNA, 19 nt, Artificial Sequence
  Description of Artificial Sequence: Synthetic oligonucleotide
  Antisense strand to SEQ ID NO: 140848
uucaguaggcaucagugag

SEQ ID NO: 140850 - RNA, 19 nt, Artificial Sequence
  Description of Artificial Sequence: Synthetic oligonucleotide
  Sense strand starting at position 1125 of SEQ ID NO: 1809
ugcuaaaugucaccuaaug

SEQ ID NO: 140851 - RNA, 19 nt, Artificial Sequence
  Description of Artificial Sequence: Synthetic oligonucleotide
  Antisense strand to SEQ ID NO: 140850
cauuaggugacauuuagca

SEQ ID NO: 140852 - RNA, 19 nt, Artificial Sequence
  Description of Artificial Sequence: Synthetic oligonucleotide
  Sense strand starting at position 1307 of SEQ ID NO: 1809
auuggauuccagugccaac

SEQ ID NO: 140853 - RNA, 19 nt, Artificial Sequence
  Description of Artificial Sequence: Synthetic oligonucleotide
  Antisense strand to SEQ ID NO: 140852
guuggcacuggaauccaau

SEQ ID NO: 140854 - RNA, 19 nt, Artificial Sequence
  Description of Artificial Sequence: Synthetic oligonucleotide
  Sense strand starting at position 1609 of SEQ ID NO: 1809
cccaucgcuccauaauuga

SEQ ID NO: 140855 - RNA, 19 nt, Artificial Sequence
  Description of Artificial Sequence: Synthetic oligonucleotide
  Antisense strand to SEQ ID NO: 140854
ucaauuauggagcgauggg

SEQ ID NO: 140856 - RNA, 19 nt, Artificial Sequence
  Description of Artificial Sequence: Synthetic oligonucleotide
  Sense strand starting at position 1612 of SEQ ID NO: 1809
aucgcuccauaauugauau

SEQ ID NO: 140857 - RNA, 19 nt, Artificial Sequence
  Description of Artificial Sequence: Synthetic oligonucleotide
  Antisense strand to SEQ ID NO: 140856
auaucaauuauggagcgau

SEQ ID NO: 140858 - RNA, 19 nt, Artificial Sequence
  Description of Artificial Sequence: Synthetic oligonucleotide
  Sense strand starting at position 1715 of SEQ ID NO: 1809
cccagugauccauagccga

SEQ ID NO: 140859 - RNA, 19 nt, Artificial Sequence
  Description of Artificial Sequence: Synthetic oligonucleotide
  Antisense strand to SEQ ID NO: 140858
ucggcuauggaucacuggg

SEQ ID NO: 140860 - RNA, 19 nt, Artificial Sequence
  Description of Artificial Sequence: Synthetic oligonucleotide
  Sense strand starting at position 1731 of SEQ ID NO: 1809
cgaacagugucccuaagau

SEQ ID NO: 140861 - RNA, 19 nt, Artificial Sequence
  Description of Artificial Sequence: Synthetic oligonucleotide
  Antisense strand to SEQ ID NO: 140860
aucuuagggacacuguucg

SEQ ID NO: 140862 - RNA, 19 nt, Artificial Sequence
  Description of Artificial Sequence: Synthetic oligonucleotide
  Sense strand starting at position 1914 of SEQ ID NO: 1809
cagcaacuugcgucuaagu

SEQ ID NO: 140863 - RNA, 19 nt, Artificial Sequence
  Description of Artificial Sequence: Synthetic oligonucleotide
  Antisense strand to SEQ ID NO: 140862
acuuagacgcaaguugcug

SEQ ID NO: 140864 - RNA, 19 nt, Artificial Sequence
  Description of Artificial Sequence: Synthetic oligonucleotide
  Sense strand starting at position 2071 of SEQ ID NO: 1809
auacacucucucggaaaca

SEQ ID NO: 140865 - RNA, 19 nt, Artificial Sequence
  Description of Artificial Sequence: Synthetic oligonucleotide
  Antisense strand to SEQ ID NO: 140864
uguuuccgagagaguguau

SEQ ID NO: 140866 - RNA, 19 nt, Artificial Sequence
  Description of Artificial Sequence: Synthetic oligonucleotide
  Sense strand starting at position 2095 of SEQ ID NO: 1809
uuaugaucuuugcugaggu

SEQ ID NO: 140867 - RNA, 19 nt, Artificial Sequence
  Description of Artificial Sequence: Synthetic oligonucleotide
  Antisense strand to SEQ ID NO: 140866
accucagcaaagaucauaa

SEQ ID NO: 140868 - RNA, 19 nt, Artificial Sequence
  Description of Artificial Sequence: Synthetic oligonucleotide
  Sense strand starting at position 2109 of SEQ ID NO: 1809
gagguacaacaauguuauc

SEQ ID NO: 140869 - RNA, 19 nt, Artificial Sequence
  Description of Artificial Sequence: Synthetic oligonucleotide
  Antisense strand to SEQ ID NO: 140868
gauaacauuguuguaccuc

SEQ ID NO: 140870 - RNA, 19 nt, Artificial Sequence
  Description of Artificial Sequence: Synthetic oligonucleotide
  Sense strand starting at position 2120 of SEQ ID NO: 1809
auguuaucgucacuaggga

SEQ ID NO: 140871 - RNA, 19 nt, Artificial Sequence
  Description of Artificial Sequence: Synthetic oligonucleotide
  Antisense strand to SEQ ID NO: 140870
ucccuagugacgauaacau

SEQ ID NO: 140872 - RNA, 19 nt, Artificial Sequence
  Description of Artificial Sequence: Synthetic oligonucleotide
  Sense strand starting at position 2140 of SEQ ID NO: 1809
uuuaaauagcgcgacaauu

SEQ ID NO: 140873 - RNA, 19 nt, Artificial Sequence
  Description of Artificial Sequence: Synthetic oligonucleotide
  Antisense strand to SEQ ID NO: 140872
aauugucgcgcuauuuaaa

SEQ ID NO: 140874 - RNA, 19 nt, Artificial Sequence
  Description of Artificial Sequence: Synthetic oligonucleotide
  Sense strand starting at position 2150 of SEQ ID NO: 1809
gcgacaauuuaagauuauu

SEQ ID NO: 140875 - RNA, 19 nt, Artificial Sequence
  Description of Artificial Sequence: Synthetic oligonucleotide
  Antisense strand to SEQ ID NO: 140874
aauaaucuuaaauugucgc

SEQ ID NO: 140876 - RNA, 19 nt, Artificial Sequence
  Description of Artificial Sequence: Synthetic oligonucleotide
  Sense strand starting at position 2176 of SEQ ID NO: 1809
ggaacauguaggugaggua

SEQ ID NO: 140877 - RNA, 19 nt, Artificial Sequence
  Description of Artificial Sequence: Synthetic oligonucleotide
  Antisense strand to SEQ ID NO: 140876
uaccucaccuacauguucc

SEQ ID NO: 140878 - RNA, 19 nt, Artificial Sequence
  Description of Artificial Sequence: Synthetic oligonucleotide
  Sense strand starting at position 2192 of SEQ ID NO: 1809
guagaaauuccaggcauac

SEQ ID NO: 140879 - RNA, 19 nt, Artificial Sequence
  Description of Artificial Sequence: Synthetic oligonucleotide
  Antisense strand to SEQ ID NO: 140878
guaugccuggaauuucuac

SEQ ID NO: 140880 - RNA, 19 nt, Artificial Sequence
  Description of Artificial Sequence: Synthetic oligonucleotide
  Sense strand starting at position 2335 of SEQ ID NO: 1809
ccuagugcucgggugugua

SEQ ID NO: 140881 - RNA, 19 nt, Artificial Sequence
  Description of Artificial Sequence: Synthetic oligonucleotide
  Antisense strand to SEQ ID NO: 140880
uacacacccgagcacuagg

SEQ ID NO: 140882 - RNA, 19 nt, Artificial Sequence
  Description of Artificial Sequence: Synthetic oligonucleotide
  Sense strand starting at position 2408 of SEQ ID NO: 1809
ggguguuucggucucguga

SEQ ID NO: 140883 - RNA, 19 nt, Artificial Sequence
  Description of Artificial Sequence: Synthetic oligonucleotide
  Antisense strand to SEQ ID NO: 140882
ucacgagaccgaaacaccc

SEQ ID NO: 140884 - RNA, 19 nt, Artificial Sequence
  Description of Artificial Sequence: Synthetic oligonucleotide
  Sense strand starting at position 2409 of SEQ ID NO: 1809
gguguuucggucucgugaa

SEQ ID NO: 140885 - RNA, 19 nt, Artificial Sequence
  Description of Artificial Sequence: Synthetic oligonucleotide
  Antisense strand to SEQ ID NO: 140884
uucacgagaccgaaacacc

SEQ ID NO: 140886 - RNA, 19 nt, Artificial Sequence
  Description of Artificial Sequence: Synthetic oligonucleotide
  Sense strand starting at position 2609 of SEQ ID NO: 1809
cugaguuucccggagcuca

SEQ ID NO: 140887 - RNA, 19 nt, Artificial Sequence
  Description of Artificial Sequence: Synthetic oligonucleotide
  Antisense strand to SEQ ID NO: 140886
ugagcuccgggaaacucag

SEQ ID NO: 140888 - RNA, 19 nt, Artificial Sequence
  Description of Artificial Sequence: Synthetic oligonucleotide
  Sense strand starting at position 2675 of SEQ ID NO: 1809
guuacugguaucuagcgaa

SEQ ID NO: 140889 - RNA, 19 nt, Artificial Sequence
  Description of Artificial Sequence: Synthetic oligonucleotide
  Antisense strand to SEQ ID NO: 140888
uucgcuagauaccaguaac

SEQ ID NO: 140890 - RNA, 19 nt, Artificial Sequence
  Description of Artificial Sequence: Synthetic oligonucleotide
  Sense strand starting at position 2679 of SEQ ID NO: 1809
cugguaucuagcgaaagag

SEQ ID NO: 140891 - RNA, 19 nt, Artificial Sequence
  Description of Artificial Sequence: Synthetic oligonucleotide
  Antisense strand to SEQ ID NO: 140890
cucuuucgcuagauaccag

SEQ ID NO: 140892 - RNA, 19 nt, Artificial Sequence
  Description of Artificial Sequence: Synthetic oligonucleotide
  Sense strand starting at position 2728 of SEQ ID NO: 1809
aaugcuguggcucaucaga

SEQ ID NO: 140893 - RNA, 19 nt, Artificial Sequence
  Description of Artificial Sequence: Synthetic oligonucleotide
  Antisense strand to SEQ ID NO: 140892
ucugaugagccacagcauu

SEQ ID NO: 140894 - RNA, 19 nt, Artificial Sequence
  Description of Artificial Sequence: Synthetic oligonucleotide
  Sense strand starting at position 2730 of SEQ ID NO: 1809
ugcuguggcucaucagaaa

SEQ ID NO: 140895 - RNA, 19 nt, Artificial Sequence
  Description of Artificial Sequence: Synthetic oligonucleotide
  Antisense strand to SEQ ID NO: 140894
uuucugaugagccacagca

SEQ ID NO: 140896 - RNA, 19 nt, Artificial Sequence
  Description of Artificial Sequence: Synthetic oligonucleotide
  Sense strand starting at position 2790 of SEQ ID NO: 1809
gggcuaggucuccgacaau

SEQ ID NO: 140897 - RNA, 19 nt, Artificial Sequence
  Description of Artificial Sequence: Synthetic oligonucleotide
  Antisense strand to SEQ ID NO: 140896
auugucggagaccuagccc

SEQ ID NO: 140898 - RNA, 19 nt, Artificial Sequence
  Description of Artificial Sequence: Synthetic oligonucleotide
  Sense strand starting at position 2793 of SEQ ID NO: 1809
cuaggucuccgacaaugga

SEQ ID NO: 140899 - RNA, 19 nt, Artificial Sequence
  Description of Artificial Sequence: Synthetic oligonucleotide
  Antisense strand to SEQ ID NO: 140898
uccauugucggagaccuag

SEQ ID NO: 140900 - RNA, 19 nt, Artificial Sequence
  Description of Artificial Sequence: Synthetic oligonucleotide
  Sense strand starting at position 2950 of SEQ ID NO: 1809
gucugccucuacuugacaa

SEQ ID NO: 140901 - RNA, 19 nt, Artificial Sequence
  Description of Artificial Sequence: Synthetic oligonucleotide
  Antisense strand to SEQ ID NO: 140900
uugucaaguagaggcagac

SEQ ID NO: 140902 - RNA, 19 nt, Artificial Sequence
  Description of Artificial Sequence: Synthetic oligonucleotide
  Sense strand starting at position 3115 of SEQ ID NO: 1809
gucugacacaucgauugaa

SEQ ID NO: 140903 - RNA, 19 nt, Artificial Sequence
  Description of Artificial Sequence: Synthetic oligonucleotide
  Antisense strand to SEQ ID NO: 140902
uucaaucgaugugucagac

SEQ ID NO: 140904 - RNA, 19 nt, Artificial Sequence
  Description of Artificial Sequence: Synthetic oligonucleotide
  Sense strand starting at position 3239 of SEQ ID NO: 1809
caaagauaauacuuggugu

SEQ ID NO: 140905 - RNA, 19 nt, Artificial Sequence
  Description of Artificial Sequence: Synthetic oligonucleotide
  Antisense strand to SEQ ID NO: 140904
acaccaaguauuaucuuug

SEQ ID NO: 140906 - RNA, 19 nt, Artificial Sequence
  Description of Artificial Sequence: Synthetic oligonucleotide
  Sense strand starting at position 3241 of SEQ ID NO: 1809
aagauaauacuugguguau

SEQ ID NO: 140907 - RNA, 19 nt, Artificial Sequence
  Description of Artificial Sequence: Synthetic oligonucleotide
  Antisense strand to SEQ ID NO: 140906
auacaccaaguauuaucuu

SEQ ID NO: 140908 - RNA, 19 nt, Artificial Sequence
  Description of Artificial Sequence: Synthetic oligonucleotide
  Sense strand starting at position 3242 of SEQ ID NO: 1809
agauaauacuugguguauc

SEQ ID NO: 140909 - RNA, 19 nt, Artificial Sequence
  Description of Artificial Sequence: Synthetic oligonucleotide
  Antisense strand to SEQ ID NO: 140908
gauacaccaaguauuaucu

SEQ ID NO: 140910 - RNA, 19 nt, Artificial Sequence
  Description of Artificial Sequence: Synthetic oligonucleotide
  Sense strand starting at position 3256 of SEQ ID NO: 1809
guauccaauuaguucccaa

SEQ ID NO: 140911 - RNA, 19 nt, Artificial Sequence
  Description of Artificial Sequence: Synthetic oligonucleotide
  Antisense strand to SEQ ID NO: 140910
uugggaacuaauuggauac

SEQ ID NO: 140912 - RNA, 19 nt, Artificial Sequence
  Description of Artificial Sequence: Synthetic oligonucleotide
  Sense strand starting at position 3833 of SEQ ID NO: 1809
accauagcucacuacugua

SEQ ID NO: 140913 - RNA, 19 nt, Artificial Sequence
  Description of Artificial Sequence: Synthetic oligonucleotide
  Antisense strand to SEQ ID NO: 140912
uacaguagugagcuauggu

SEQ ID NO: 140914 - RNA, 19 nt, Artificial Sequence
  Description of Artificial Sequence: Synthetic oligonucleotide
  Sense strand starting at position 3935 of SEQ ID NO: 1809
gccugauuccaauguaaua

SEQ ID NO: 140915 - RNA, 19 nt, Artificial Sequence
  Description of Artificial Sequence: Synthetic oligonucleotide
  Antisense strand to SEQ ID NO: 140914
uauuacauuggaaucaggc

SEQ ID NO: 140916 - RNA, 19 nt, Artificial Sequence
  Description of Artificial Sequence: Synthetic oligonucleotide
  Sense strand starting at position 3969 of SEQ ID NO: 1809
augcuaauauagcuaauga

SEQ ID NO: 140917 - RNA, 19 nt, Artificial Sequence
  Description of Artificial Sequence: Synthetic oligonucleotide
  Antisense strand to SEQ ID NO: 140916
ucauuagcuauauuagcau

SEQ ID NO: 140918 - RNA, 19 nt, Artificial Sequence
  Description of Artificial Sequence: Synthetic oligonucleotide
  Sense strand starting at position 3963 of SEQ ID NO: 1810
guuuguauuuaugaguaug

SEQ ID NO: 140919 - RNA, 19 nt, Artificial Sequence
  Description of Artificial Sequence: Synthetic oligonucleotide
  Antisense strand to SEQ ID NO: 140918
cauacucauaaauacaaac

SEQ ID NO: 140920 - RNA, 19 nt, Artificial Sequence
  Description of Artificial Sequence: Synthetic oligonucleotide
  Sense strand starting at position 3860 of SEQ ID NO: 1810
uauuguaauguguagacau

SEQ ID NO: 140921 - RNA, 19 nt, Artificial Sequence
  Description of Artificial Sequence: Synthetic oligonucleotide
  Antisense strand to SEQ ID NO: 140920
augucuacacauuacaaua

SEQ ID NO: 140922 - RNA, 19 nt, Artificial Sequence
  Description of Artificial Sequence: Synthetic oligonucleotide
  Sense strand starting at position 3856 of SEQ ID NO: 1810
acaauauuguaauguguag

SEQ ID NO: 140923 - RNA, 19 nt, Artificial Sequence
  Description of Artificial Sequence: Synthetic oligonucleotide
  Antisense strand to SEQ ID NO: 140922
cuacacauuacaauauugu

SEQ ID NO: 140924 - RNA, 19 nt, Artificial Sequence
  Description of Artificial Sequence: Synthetic oligonucleotide
  Sense strand starting at position 3787 of SEQ ID NO: 1810
ggccuucuaucucuugauu

SEQ ID NO: 140925 - RNA, 19 nt, Artificial Sequence
  Description of Artificial Sequence: Synthetic oligonucleotide
  Antisense strand to SEQ ID NO: 140924
aaucaagagauagaaggcc

SEQ ID NO: 140926 - RNA, 19 nt, Artificial Sequence
  Description of Artificial Sequence: Synthetic oligonucleotide
  Sense strand starting at position 3759 of SEQ ID NO: 1810
aaauaaucgugaggaaugu

SEQ ID NO: 140927 - RNA, 19 nt, Artificial Sequence
  Description of Artificial Sequence: Synthetic oligonucleotide
  Antisense strand to SEQ ID NO: 140926
acauuccucacgauuauuu

SEQ ID NO: 140928 - RNA, 19 nt, Artificial Sequence
  Description of Artificial Sequence: Synthetic oligonucleotide
  Sense strand starting at position 3756 of SEQ ID NO: 1810
uguaaauaaucgugaggaa

SEQ ID NO: 140929 - RNA, 19 nt, Artificial Sequence
  Description of Artificial Sequence: Synthetic oligonucleotide
  Antisense strand to SEQ ID NO: 140928
uuccucacgauuauuuaca

SEQ ID NO: 140930 - RNA, 19 nt, Artificial Sequence
  Description of Artificial Sequence: Synthetic oligonucleotide
  Sense strand starting at position 3709 of SEQ ID NO: 1810
uagggacuguaaccuaaau

SEQ ID NO: 140931 - RNA, 19 nt, Artificial Sequence
  Description of Artificial Sequence: Synthetic oligonucleotide
  Antisense strand to SEQ ID NO: 140930
auuuagguuacagucccua

SEQ ID NO: 140932 - RNA, 19 nt, Artificial Sequence
  Description of Artificial Sequence: Synthetic oligonucleotide
  Sense strand starting at position 3559 of SEQ ID NO: 1810
ugaggauucuuguauugau

SEQ ID NO: 140933 - RNA, 19 nt, Artificial Sequence
  Description of Artificial Sequence: Synthetic oligonucleotide
  Antisense strand to SEQ ID NO: 140932
aucaauacaagaauccuca

SEQ ID NO: 140934 - RNA, 19 nt, Artificial Sequence
  Description of Artificial Sequence: Synthetic oligonucleotide
  Sense strand starting at position 3556 of SEQ ID NO: 1810
uuaugaggauucuuguauu

SEQ ID NO: 140935 - RNA, 19 nt, Artificial Sequence
  Description of Artificial Sequence: Synthetic oligonucleotide
  Antisense strand to SEQ ID NO: 140934
aauacaagaauccucauaa

SEQ ID NO: 140936 - RNA, 19 nt, Artificial Sequence
  Description of Artificial Sequence: Synthetic oligonucleotide
  Sense strand starting at position 3548 of SEQ ID NO: 1810
ggcggagguuaugaggauu

SEQ ID NO: 140937 - RNA, 19 nt, Artificial Sequence
  Description of Artificial Sequence: Synthetic oligonucleotide
  Antisense strand to SEQ ID NO: 140936
aauccucauaaccuccgcc

SEQ ID NO: 140938 - RNA, 19 nt, Artificial Sequence
  Description of Artificial Sequence: Synthetic oligonucleotide
  Sense strand starting at position 3356 of SEQ ID NO: 1810
agucguucgccguacaacu

SEQ ID NO: 140939 - RNA, 19 nt, Artificial Sequence
  Description of Artificial Sequence: Synthetic oligonucleotide
  Antisense strand to SEQ ID NO: 140938
aguuguacggcgaacgacu

SEQ ID NO: 140940 - RNA, 19 nt, Artificial Sequence
  Description of Artificial Sequence: Synthetic oligonucleotide
  Sense strand starting at position 3354 of SEQ ID NO: 1810
ucagucguucgccguacaa

SEQ ID NO: 140941 - RNA, 19 nt, Artificial Sequence
  Description of Artificial Sequence: Synthetic oligonucleotide
  Antisense strand to SEQ ID NO: 140940
uuguacggcgaacgacuga

SEQ ID NO: 140942 - RNA, 19 nt, Artificial Sequence
  Description of Artificial Sequence: Synthetic oligonucleotide
  Sense strand starting at position 3232 of SEQ ID NO: 1810
gcagauaugucacuuguuu

SEQ ID NO: 140943 - RNA, 19 nt, Artificial Sequence
  Description of Artificial Sequence: Synthetic oligonucleotide
  Antisense strand to SEQ ID NO: 140942
aaacaagugacauaucugc

SEQ ID NO: 140944 - RNA, 19 nt, Artificial Sequence
  Description of Artificial Sequence: Synthetic oligonucleotide
  Sense strand starting at position 3213 of SEQ ID NO: 1810
agcgaaauuuaggcuccau

SEQ ID NO: 140945 - RNA, 19 nt, Artificial Sequence
  Description of Artificial Sequence: Synthetic oligonucleotide
  Antisense strand to SEQ ID NO: 140944
auggagccuaaauuucgcu

SEQ ID NO: 140946 - RNA, 19 nt, Artificial Sequence
  Description of Artificial Sequence: Synthetic oligonucleotide
  Sense strand starting at position 3126 of SEQ ID NO: 1810
ugcgaaucuguguggauuu

SEQ ID NO: 140947 - RNA, 19 nt, Artificial Sequence
  Description of Artificial Sequence: Synthetic oligonucleotide
  Antisense strand to SEQ ID NO: 140946
aaauccacacagauucgca

SEQ ID NO: 140948 - RNA, 19 nt, Artificial Sequence
  Description of Artificial Sequence: Synthetic oligonucleotide
  Sense strand starting at position 3125 of SEQ ID NO: 1810
uugcgaaucuguguggauu

SEQ ID NO: 140949 - RNA, 19 nt, Artificial Sequence
  Description of Artificial Sequence: Synthetic oligonucleotide
  Antisense strand to SEQ ID NO: 140948
aauccacacagauucgcaa

SEQ ID NO: 140950 - RNA, 19 nt, Artificial Sequence
  Description of Artificial Sequence: Synthetic oligonucleotide
  Sense strand starting at position 3120 of SEQ ID NO: 1810
uuauguugcgaaucugugu

SEQ ID NO: 140951 - RNA, 19 nt, Artificial Sequence
  Description of Artificial Sequence: Synthetic oligonucleotide
  Antisense strand to SEQ ID NO: 140950
acacagauucgcaacauaa

SEQ ID NO: 140952 - RNA, 19 nt, Artificial Sequence
  Description of Artificial Sequence: Synthetic oligonucleotide
  Sense strand starting at position 3009 of SEQ ID NO: 1810
gcccaaguacuccggguaa

SEQ ID NO: 140953 - RNA, 19 nt, Artificial Sequence
  Description of Artificial Sequence: Synthetic oligonucleotide
  Antisense strand to SEQ ID NO: 140952
uuacccggaguacuugggc

SEQ ID NO: 140954 - RNA, 19 nt, Artificial Sequence
  Description of Artificial Sequence: Synthetic oligonucleotide
  Sense strand starting at position 2924 of SEQ ID NO: 1810
gcgggaccucgagagcuaa

SEQ ID NO: 140955 - RNA, 19 nt, Artificial Sequence
  Description of Artificial Sequence: Synthetic oligonucleotide
  Antisense strand to SEQ ID NO: 140954
uuagcucucgaggucccgc

SEQ ID NO: 140956 - RNA, 19 nt, Artificial Sequence
  Description of Artificial Sequence: Synthetic oligonucleotide
  Sense strand starting at position 2772 of SEQ ID NO: 1810
ugugguagcugagugaaca

SEQ ID NO: 140957 - RNA, 19 nt, Artificial Sequence
  Description of Artificial Sequence: Synthetic oligonucleotide
  Antisense strand to SEQ ID NO: 140956
uguucacucagcuaccaca

SEQ ID NO: 140958 - RNA, 19 nt, Artificial Sequence
  Description of Artificial Sequence: Synthetic oligonucleotide
  Sense strand starting at position 2639 of SEQ ID NO: 1810
guucgaaacuucugagcuc

SEQ ID NO: 140959 - RNA, 19 nt, Artificial Sequence
  Description of Artificial Sequence: Synthetic oligonucleotide
  Antisense strand to SEQ ID NO: 140958
gagcucagaaguuucgaac

SEQ ID NO: 140960 - RNA, 19 nt, Artificial Sequence
  Description of Artificial Sequence: Synthetic oligonucleotide
  Sense strand starting at position 2630 of SEQ ID NO: 1810
gcccuuggaguucgaaacu

SEQ ID NO: 140961 - RNA, 19 nt, Artificial Sequence
  Description of Artificial Sequence: Synthetic oligonucleotide
  Antisense strand to SEQ ID NO: 140960
aguuucgaacuccaagggc

SEQ ID NO: 140962 - RNA, 19 nt, Artificial Sequence
  Description of Artificial Sequence: Synthetic oligonucleotide
  Sense strand starting at position 2523 of SEQ ID NO: 1810
uuagaugucgcgagagggu

SEQ ID NO: 140963 - RNA, 19 nt, Artificial Sequence
  Description of Artificial Sequence: Synthetic oligonucleotide
  Antisense strand to SEQ ID NO: 140962
acccucucgcgacaucuaa

SEQ ID NO: 140964 - RNA, 19 nt, Artificial Sequence
  Description of Artificial Sequence: Synthetic oligonucleotide
  Sense strand starting at position 2507 of SEQ ID NO: 1810
ugcugugcgacgucacuua

SEQ ID NO: 140965 - RNA, 19 nt, Artificial Sequence
  Description of Artificial Sequence: Synthetic oligonucleotide
  Antisense strand to SEQ ID NO: 140964
uaagugacgucgcacagca

SEQ ID NO: 140966 - RNA, 19 nt, Artificial Sequence
  Description of Artificial Sequence: Synthetic oligonucleotide
  Sense strand starting at position 2431 of SEQ ID NO: 1810
guccaucacucgcuuaaag

SEQ ID NO: 140967 - RNA, 19 nt, Artificial Sequence
  Description of Artificial Sequence: Synthetic oligonucleotide
  Antisense strand to SEQ ID NO: 140966
cuuuaagcgagugauggac

SEQ ID NO: 140968 - RNA, 19 nt, Artificial Sequence
  Description of Artificial Sequence: Synthetic oligonucleotide
  Sense strand starting at position 2392 of SEQ ID NO: 1810
auuggaugucggcaaggaa

SEQ ID NO: 140969 - RNA, 19 nt, Artificial Sequence
  Description of Artificial Sequence: Synthetic oligonucleotide
  Antisense strand to SEQ ID NO: 140968
uuccuugccgacauccaau

SEQ ID NO: 140970 - RNA, 19 nt, Artificial Sequence
  Description of Artificial Sequence: Synthetic oligonucleotide
  Sense strand starting at position 2382 of SEQ ID NO: 1810
uuuaaaucugauuggaugu

SEQ ID NO: 140971 - RNA, 19 nt, Artificial Sequence
  Description of Artificial Sequence: Synthetic oligonucleotide
  Antisense strand to SEQ ID NO: 140970
acauccaaucagauuuaaa

SEQ ID NO: 140972 - RNA, 19 nt, Artificial Sequence
  Description of Artificial Sequence: Synthetic oligonucleotide
  Sense strand starting at position 2381 of SEQ ID NO: 1810
guuuaaaucugauuggaug

SEQ ID NO: 140973 - RNA, 19 nt, Artificial Sequence
  Description of Artificial Sequence: Synthetic oligonucleotide
  Antisense strand to SEQ ID NO: 140972
cauccaaucagauuuaaac

SEQ ID NO: 140974 - RNA, 19 nt, Artificial Sequence
  Description of Artificial Sequence: Synthetic oligonucleotide
  Sense strand starting at position 2379 of SEQ ID NO: 1810
aaguuuaaaucugauugga

SEQ ID NO: 140975 - RNA, 19 nt, Artificial Sequence
  Description of Artificial Sequence: Synthetic oligonucleotide
  Antisense strand to SEQ ID NO: 140974
uccaaucagauuuaaacuu

SEQ ID NO: 140976 - RNA, 19 nt, Artificial Sequence
  Description of Artificial Sequence: Synthetic oligonucleotide
  Sense strand starting at position 2308 of SEQ ID NO: 1810
cagcgauaucgcgagagac

SEQ ID NO: 140977 - RNA, 19 nt, Artificial Sequence
  Description of Artificial Sequence: Synthetic oligonucleotide
  Antisense strand to SEQ ID NO: 140976
gucucucgcgauaucgcug

SEQ ID NO: 140978 - RNA, 19 nt, Artificial Sequence
  Description of Artificial Sequence: Synthetic oligonucleotide
  Sense strand starting at position 2176 of SEQ ID NO: 1810
gguacuucuugcucaguga

SEQ ID NO: 140979 - RNA, 19 nt, Artificial Sequence
  Description of Artificial Sequence: Synthetic oligonucleotide
  Antisense strand to SEQ ID NO: 140978
ucacugagcaagaaguacc

SEQ ID NO: 140980 - RNA, 19 nt, Artificial Sequence
  Description of Artificial Sequence: Synthetic oligonucleotide
  Sense strand starting at position 2140 of SEQ ID NO: 1810
ugagguguugauuggacaa

SEQ ID NO: 140981 - RNA, 19 nt, Artificial Sequence
  Description of Artificial Sequence: Synthetic oligonucleotide
  Antisense strand to SEQ ID NO: 140980
uuguccaaucaacaccuca

SEQ ID NO: 140982 - RNA, 19 nt, Artificial Sequence
  Description of Artificial Sequence: Synthetic oligonucleotide
  Sense strand starting at position 2137 of SEQ ID NO: 1810
uguugagguguugauugga

SEQ ID NO: 140983 - RNA, 19 nt, Artificial Sequence
  Description of Artificial Sequence: Synthetic oligonucleotide
  Antisense strand to SEQ ID NO: 140982
uccaaucaacaccucaaca

SEQ ID NO: 140984 - RNA, 19 nt, Artificial Sequence
  Description of Artificial Sequence: Synthetic oligonucleotide
  Sense strand starting at position 2055 of SEQ ID NO: 1810
uuacauuuguugucuaucu

SEQ ID NO: 140985 - RNA, 19 nt, Artificial Sequence
  Description of Artificial Sequence: Synthetic oligonucleotide
  Antisense strand to SEQ ID NO: 140984
agauagacaacaaauguaa

SEQ ID NO: 140986 - RNA, 19 nt, Artificial Sequence
  Description of Artificial Sequence: Synthetic oligonucleotide
  Sense strand starting at position 2053 of SEQ ID NO: 1810
gguuacauuuguugucuau

SEQ ID NO: 140987 - RNA, 19 nt, Artificial Sequence
  Description of Artificial Sequence: Synthetic oligonucleotide
  Antisense strand to SEQ ID NO: 140986
auagacaacaaauguaacc

SEQ ID NO: 140988 - RNA, 19 nt, Artificial Sequence
  Description of Artificial Sequence: Synthetic oligonucleotide
  Sense strand starting at position 2052 of SEQ ID NO: 1810
ugguuacauuuguugucua

SEQ ID NO: 140989 - RNA, 19 nt, Artificial Sequence
  Description of Artificial Sequence: Synthetic oligonucleotide
  Antisense strand to SEQ ID NO: 140988
uagacaacaaauguaacca

SEQ ID NO: 140990 - RNA, 19 nt, Artificial Sequence
  Description of Artificial Sequence: Synthetic oligonucleotide
  Sense strand starting at position 2043 of SEQ ID NO: 1810
guaccucauugguuacauu

SEQ ID NO: 140991 - RNA, 19 nt, Artificial Sequence
  Description of Artificial Sequence: Synthetic oligonucleotide
  Antisense strand to SEQ ID NO: 140990
aauguaaccaaugagguac

SEQ ID NO: 140992 - RNA, 19 nt, Artificial Sequence
  Description of Artificial Sequence: Synthetic oligonucleotide
  Sense strand starting at position 2040 of SEQ ID NO: 1810
ggaguaccucauugguuac

SEQ ID NO: 140993 - RNA, 19 nt, Artificial Sequence
  Description of Artificial Sequence: Synthetic oligonucleotide
  Antisense strand to SEQ ID NO: 140992
guaaccaaugagguacucc

SEQ ID NO: 140994 - RNA, 19 nt, Artificial Sequence
  Description of Artificial Sequence: Synthetic oligonucleotide
  Sense strand starting at position 2039 of SEQ ID NO: 1810
cggaguaccucauugguua

SEQ ID NO: 140995 - RNA, 19 nt, Artificial Sequence
  Description of Artificial Sequence: Synthetic oligonucleotide
  Antisense strand to SEQ ID NO: 140994
uaaccaaugagguacuccg

SEQ ID NO: 140996 - RNA, 19 nt, Artificial Sequence
  Description of Artificial Sequence: Synthetic oligonucleotide
  Sense strand starting at position 2010 of SEQ ID NO: 1810
cacuguuauuggguuccca

SEQ ID NO: 140997 - RNA, 19 nt, Artificial Sequence
  Description of Artificial Sequence: Synthetic oligonucleotide
  Antisense strand to SEQ ID NO: 140996
ugggaacccaauaacagug

SEQ ID NO: 140998 - RNA, 19 nt, Artificial Sequence
  Description of Artificial Sequence: Synthetic oligonucleotide
  Sense strand starting at position 153 of SEQ ID NO: 1811
gugugauggcgcgcccaua

SEQ ID NO: 140999 - RNA, 19 nt, Artificial Sequence
  Description of Artificial Sequence: Synthetic oligonucleotide
  Antisense strand to SEQ ID NO: 140998
uaugggcgcgccaucacac

SEQ ID NO: 141000 - RNA, 19 nt, Artificial Sequence
  Description of Artificial Sequence: Synthetic oligonucleotide
  Sense strand starting at position 1191 of SEQ ID NO: 1811
caaguauaggaauguuaau

SEQ ID NO: 141001 - RNA, 19 nt, Artificial Sequence
  Description of Artificial Sequence: Synthetic oligonucleotide
  Antisense strand to SEQ ID NO: 141000
auuaacauuccuauacuug

SEQ ID NO: 141002 - RNA, 19 nt, Artificial Sequence
  Description of Artificial Sequence: Synthetic oligonucleotide
  Sense strand starting at position 1486 of SEQ ID NO: 1811
cucucacugguauguaaga

SEQ ID NO: 141003 - RNA, 19 nt, Artificial Sequence
  Description of Artificial Sequence: Synthetic oligonucleotide
  Antisense strand to SEQ ID NO: 141002
ucuuacauaccagugagag

SEQ ID NO: 141004 - RNA, 19 nt, Artificial Sequence
  Description of Artificial Sequence: Synthetic oligonucleotide
  Sense strand starting at position 1488 of SEQ ID NO: 1811
cucacugguauguaagagu

SEQ ID NO: 141005 - RNA, 19 nt, Artificial Sequence
  Description of Artificial Sequence: Synthetic oligonucleotide
  Antisense strand to SEQ ID NO: 141004
acucuuacauaccagugag

SEQ ID NO: 141006 - RNA, 19 nt, Artificial Sequence
  Description of Artificial Sequence: Synthetic oligonucleotide
  Sense strand starting at position 1502 of SEQ ID NO: 1811
agagucaugaaagguuacu

SEQ ID NO: 141007 - RNA, 19 nt, Artificial Sequence
  Description of Artificial Sequence: Synthetic oligonucleotide
  Antisense strand to SEQ ID NO: 141006
aguaaccuuucaugacucu

SEQ ID NO: 141008 - RNA, 19 nt, Artificial Sequence
  Description of Artificial Sequence: Synthetic oligonucleotide
  Sense strand starting at position 1570 of SEQ ID NO: 1811
guaagaagauugcuuugua

SEQ ID NO: 141009 - RNA, 19 nt, Artificial Sequence
  Description of Artificial Sequence: Synthetic oligonucleotide
  Antisense strand to SEQ ID NO: 141008
uacaaagcaaucuucuuac

SEQ ID NO: 141010 - RNA, 19 nt, Artificial Sequence
  Description of Artificial Sequence: Synthetic oligonucleotide
  Sense strand starting at position 1571 of SEQ ID NO: 1811
uaagaagauugcuuuguau

SEQ ID NO: 141011 - RNA, 19 nt, Artificial Sequence
  Description of Artificial Sequence: Synthetic oligonucleotide
  Antisense strand to SEQ ID NO: 141010
auacaaagcaaucuucuua

SEQ ID NO: 141012 - RNA, 19 nt, Artificial Sequence
  Description of Artificial Sequence: Synthetic oligonucleotide
  Sense strand starting at position 1593 of SEQ ID NO: 1811
agugguucuaacgagcuau

SEQ ID NO: 141013 - RNA, 19 nt, Artificial Sequence
  Description of Artificial Sequence: Synthetic oligonucleotide
  Antisense strand to SEQ ID NO: 141012
auagcucguuagaaccacu

SEQ ID NO: 141014 - RNA, 19 nt, Artificial Sequence
  Description of Artificial Sequence: Synthetic oligonucleotide
  Sense strand starting at position 1604 of SEQ ID NO: 1811
cgagcuauucgggaagaaa

SEQ ID NO: 141015 - RNA, 19 nt, Artificial Sequence
  Description of Artificial Sequence: Synthetic oligonucleotide
  Antisense strand to SEQ ID NO: 141014
uuucuucccgaauagcucg

SEQ ID NO: 141016 - RNA, 19 nt, Artificial Sequence
  Description of Artificial Sequence: Synthetic oligonucleotide
  Sense strand starting at position 1617 of SEQ ID NO: 1811
aagaaagcccagugacuua

SEQ ID NO: 141017 - RNA, 19 nt, Artificial Sequence
  Description of Artificial Sequence: Synthetic oligonucleotide
  Antisense strand to SEQ ID NO: 141016
uaagucacugggcuuucuu

SEQ ID NO: 141018 - RNA, 19 nt, Artificial Sequence
  Description of Artificial Sequence: Synthetic oligonucleotide
  Sense strand starting at position 1721 of SEQ ID NO: 1811
augguguucgccgcgaaau

SEQ ID NO: 141019 - RNA, 19 nt, Artificial Sequence
  Description of Artificial Sequence: Synthetic oligonucleotide
  Antisense strand to SEQ ID NO: 141018
auuucgcggcgaacaccau

SEQ ID NO: 141020 - RNA, 19 nt, Artificial Sequence
  Description of Artificial Sequence: Synthetic oligonucleotide
  Sense strand starting at position 1724 of SEQ ID NO: 1811
guguucgccgcgaaauaag

SEQ ID NO: 141021 - RNA, 19 nt, Artificial Sequence
  Description of Artificial Sequence: Synthetic oligonucleotide
  Antisense strand to SEQ ID NO: 141020
cuuauuucgcggcgaacac

SEQ ID NO: 141022 - RNA, 19 nt, Artificial Sequence
  Description of Artificial Sequence: Synthetic oligonucleotide
  Sense strand starting at position 1965 of SEQ ID NO: 1811
ggccauucuuacuccaaag

SEQ ID NO: 141023 - RNA, 19 nt, Artificial Sequence
  Description of Artificial Sequence: Synthetic oligonucleotide
  Antisense strand to SEQ ID NO: 141022
cuuuggaguaagaauggcc

SEQ ID NO: 141024 - RNA, 19 nt, Artificial Sequence
  Description of Artificial Sequence: Synthetic oligonucleotide
  Sense strand starting at position 2135 of SEQ ID NO: 1811
ugguccucgccguuucaga

SEQ ID NO: 141025 - RNA, 19 nt, Artificial Sequence
  Description of Artificial Sequence: Synthetic oligonucleotide
  Antisense strand to SEQ ID NO: 141024
ucugaaacggcgaggacca

SEQ ID NO: 141026 - RNA, 19 nt, Artificial Sequence
  Description of Artificial Sequence: Synthetic oligonucleotide
  Sense strand starting at position 2136 of SEQ ID NO: 1811
gguccucgccguuucagaa

SEQ ID NO: 141027 - RNA, 19 nt, Artificial Sequence
  Description of Artificial Sequence: Synthetic oligonucleotide
  Antisense strand to SEQ ID NO: 141026
uucugaaacggcgaggacc

SEQ ID NO: 141028 - RNA, 19 nt, Artificial Sequence
  Description of Artificial Sequence: Synthetic oligonucleotide
  Sense strand starting at position 2137 of SEQ ID NO: 1811
guccucgccguuucagaaa

SEQ ID NO: 141029 - RNA, 19 nt, Artificial Sequence
  Description of Artificial Sequence: Synthetic oligonucleotide
  Antisense strand to SEQ ID NO: 141028
uuucugaaacggcgaggac

SEQ ID NO: 141030 - RNA, 19 nt, Artificial Sequence
  Description of Artificial Sequence: Synthetic oligonucleotide
  Sense strand starting at position 2178 of SEQ ID NO: 1811
acgucuucugggagugguu

SEQ ID NO: 141031 - RNA, 19 nt, Artificial Sequence
  Description of Artificial Sequence: Synthetic oligonucleotide
  Antisense strand to SEQ ID NO: 141030
aaccacucccagaagacgu

SEQ ID NO: 141032 - RNA, 19 nt, Artificial Sequence
  Description of Artificial Sequence: Synthetic oligonucleotide
  Sense strand starting at position 2181 of SEQ ID NO: 1811
ucuucugggagugguugaa

SEQ ID NO: 141033 - RNA, 19 nt, Artificial Sequence
  Description of Artificial Sequence: Synthetic oligonucleotide
  Antisense strand to SEQ ID NO: 141032
uucaaccacucccagaaga

SEQ ID NO: 141034 - RNA, 19 nt, Artificial Sequence
  Description of Artificial Sequence: Synthetic oligonucleotide
  Sense strand starting at position 2265 of SEQ ID NO: 1811
guagaauacugacuuguug

SEQ ID NO: 141035 - RNA, 19 nt, Artificial Sequence
  Description of Artificial Sequence: Synthetic oligonucleotide
  Antisense strand to SEQ ID NO: 141034
caacaagucaguauucuac

SEQ ID NO: 141036 - RNA, 19 nt, Artificial Sequence
  Description of Artificial Sequence: Synthetic oligonucleotide
  Sense strand starting at position 2293 of SEQ ID NO: 1811
gagggagguuuggcaagaa

SEQ ID NO: 141037 - RNA, 19 nt, Artificial Sequence
  Description of Artificial Sequence: Synthetic oligonucleotide
  Antisense strand to SEQ ID NO: 141036
uucuugccaaaccucccuc

SEQ ID NO: 141038 - RNA, 19 nt, Artificial Sequence
  Description of Artificial Sequence: Synthetic oligonucleotide
  Sense strand starting at position 2347 of SEQ ID NO: 1811
auuugcuaaucgcugugaa

SEQ ID NO: 141039 - RNA, 19 nt, Artificial Sequence
  Description of Artificial Sequence: Synthetic oligonucleotide
  Antisense strand to SEQ ID NO: 141038
uucacagcgauuagcaaau

SEQ ID NO: 141040 - RNA, 19 nt, Artificial Sequence
  Description of Artificial Sequence: Synthetic oligonucleotide
  Sense strand starting at position 2392 of SEQ ID NO: 1811
ucuugcaacuugucugaaa

SEQ ID NO: 141041 - RNA, 19 nt, Artificial Sequence
  Description of Artificial Sequence: Synthetic oligonucleotide
  Antisense strand to SEQ ID NO: 141040
uuucagacaaguugcaaga

SEQ ID NO: 141042 - RNA, 19 nt, Artificial Sequence
  Description of Artificial Sequence: Synthetic oligonucleotide
  Sense strand starting at position 2393 of SEQ ID NO: 1811
cuugcaacuugucugaaac

SEQ ID NO: 141043 - RNA, 19 nt, Artificial Sequence
  Description of Artificial Sequence: Synthetic oligonucleotide
  Antisense strand to SEQ ID NO: 141042
guuucagacaaguugcaag

SEQ ID NO: 141044 - RNA, 19 nt, Artificial Sequence
  Description of Artificial Sequence: Synthetic oligonucleotide
  Sense strand starting at position 2394 of SEQ ID NO: 1811
uugcaacuugucugaaaca

SEQ ID NO: 141045 - RNA, 19 nt, Artificial Sequence
  Description of Artificial Sequence: Synthetic oligonucleotide
  Antisense strand to SEQ ID NO: 141044
uguuucagacaaguugcaa

SEQ ID NO: 141046 - RNA, 19 nt, Artificial Sequence
  Description of Artificial Sequence: Synthetic oligonucleotide
  Sense strand starting at position 2448 of SEQ ID NO: 1811
gagucacgucaacauacaa

SEQ ID NO: 141047 - RNA, 19 nt, Artificial Sequence
  Description of Artificial Sequence: Synthetic oligonucleotide
  Antisense strand to SEQ ID NO: 141046
uuguauguugacgugacuc

SEQ ID NO: 141048 - RNA, 19 nt, Artificial Sequence
  Description of Artificial Sequence: Synthetic oligonucleotide
  Sense strand starting at position 2489 of SEQ ID NO: 1811
cugcuauucuaccuggaaa

SEQ ID NO: 141049 - RNA, 19 nt, Artificial Sequence
  Description of Artificial Sequence: Synthetic oligonucleotide
  Antisense strand to SEQ ID NO: 141048
uuuccagguagaauagcag

SEQ ID NO: 141050 - RNA, 19 nt, Artificial Sequence
  Description of Artificial Sequence: Synthetic oligonucleotide
  Sense strand starting at position 2549 of SEQ ID NO: 1811
cccgucuucccagacucau

SEQ ID NO: 141051 - RNA, 19 nt, Artificial Sequence
  Description of Artificial Sequence: Synthetic oligonucleotide
  Antisense strand to SEQ ID NO: 141050
augagucugggaagacggg

SEQ ID NO: 141052 - RNA, 19 nt, Artificial Sequence
  Description of Artificial Sequence: Synthetic oligonucleotide
  Sense strand starting at position 2781 of SEQ ID NO: 1811
ggaggauugcgugaggacu

SEQ ID NO: 141053 - RNA, 19 nt, Artificial Sequence
  Description of Artificial Sequence: Synthetic oligonucleotide
  Antisense strand to SEQ ID NO: 141052
aguccucacgcaauccucc

SEQ ID NO: 141054 - RNA, 19 nt, Artificial Sequence
  Description of Artificial Sequence: Synthetic oligonucleotide
  Sense strand starting at position 2820 of SEQ ID NO: 1811
ucgaucuagcgagacuuau

SEQ ID NO: 141055 - RNA, 19 nt, Artificial Sequence
  Description of Artificial Sequence: Synthetic oligonucleotide
  Antisense strand to SEQ ID NO: 141054
auaagucucgcuagaucga

SEQ ID NO: 141056 - RNA, 19 nt, Artificial Sequence
  Description of Artificial Sequence: Synthetic oligonucleotide
  Sense strand starting at position 2826 of SEQ ID NO: 1811
uagcgagacuuauucucua

SEQ ID NO: 141057 - RNA, 19 nt, Artificial Sequence
  Description of Artificial Sequence: Synthetic oligonucleotide
  Antisense strand to SEQ ID NO: 141056
uagagaauaagucucgcua

SEQ ID NO: 141058 - RNA, 19 nt, Artificial Sequence
  Description of Artificial Sequence: Synthetic oligonucleotide
  Sense strand starting at position 2829 of SEQ ID NO: 1811
cgagacuuauucucuacag

SEQ ID NO: 141059 - RNA, 19 nt, Artificial Sequence
  Description of Artificial Sequence: Synthetic oligonucleotide
  Antisense strand to SEQ ID NO: 141058
cuguagagaauaagucucg

SEQ ID NO: 141060 - RNA, 19 nt, Artificial Sequence
  Description of Artificial Sequence: Synthetic oligonucleotide
  Sense strand starting at position 3087 of SEQ ID NO: 1811
gucugcuuuaguguuaguu

SEQ ID NO: 141061 - RNA, 19 nt, Artificial Sequence
  Description of Artificial Sequence: Synthetic oligonucleotide
  Antisense strand to SEQ ID NO: 141060
aacuaacacuaaagcagac

SEQ ID NO: 141062 - RNA, 19 nt, Artificial Sequence
  Description of Artificial Sequence: Synthetic oligonucleotide
  Sense strand starting at position 3103 of SEQ ID NO: 1811
guuacagucucuuuagaug

SEQ ID NO: 141063 - RNA, 19 nt, Artificial Sequence
  Description of Artificial Sequence: Synthetic oligonucleotide
  Antisense strand to SEQ ID NO: 141062
caucuaaagagacuguaac

SEQ ID NO: 141064 - RNA, 19 nt, Artificial Sequence
  Description of Artificial Sequence: Synthetic oligonucleotide
  Sense strand starting at position 3114 of SEQ ID NO: 1811
uuuagauguaaaggcaaga

SEQ ID NO: 141065 - RNA, 19 nt, Artificial Sequence
  Description of Artificial Sequence: Synthetic oligonucleotide
  Antisense strand to SEQ ID NO: 141064
ucuugccuuuacaucuaaa

SEQ ID NO: 141066 - RNA, 19 nt, Artificial Sequence
  Description of Artificial Sequence: Synthetic oligonucleotide
  Sense strand starting at position 3204 of SEQ ID NO: 1811
auugacucucaggguaaua

SEQ ID NO: 141067 - RNA, 19 nt, Artificial Sequence
  Description of Artificial Sequence: Synthetic oligonucleotide
  Antisense strand to SEQ ID NO: 141066
uauuacccugagagucaau

SEQ ID NO: 141068 - RNA, 19 nt, Artificial Sequence
  Description of Artificial Sequence: Synthetic oligonucleotide
  Sense strand starting at position 3244 of SEQ ID NO: 1811
ccaauaguuugaguggcaa

SEQ ID NO: 141069 - RNA, 19 nt, Artificial Sequence
  Description of Artificial Sequence: Synthetic oligonucleotide
  Antisense strand to SEQ ID NO: 141068
uugccacucaaacuauugg

SEQ ID NO: 141070 - RNA, 19 nt, Artificial Sequence
  Description of Artificial Sequence: Synthetic oligonucleotide
  Sense strand starting at position 3932 of SEQ ID NO: 1811
ccaaguugacugggaauau

SEQ ID NO: 141071 - RNA, 19 nt, Artificial Sequence
  Description of Artificial Sequence: Synthetic oligonucleotide
  Antisense strand to SEQ ID NO: 141070
auauucccagucaacuugg

SEQ ID NO: 141072 - RNA, 19 nt, Artificial Sequence
  Description of Artificial Sequence: Synthetic oligonucleotide
  Sense strand starting at position 3936 of SEQ ID NO: 1811
guugacugggaauauaugu

SEQ ID NO: 141073 - RNA, 19 nt, Artificial Sequence
  Description of Artificial Sequence: Synthetic oligonucleotide
  Antisense strand to SEQ ID NO: 141072
acauauauucccagucaac

SEQ ID NO: 141074 - RNA, 19 nt, Artificial Sequence
  Description of Artificial Sequence: Synthetic oligonucleotide
  Sense strand starting at position 3941 of SEQ ID NO: 1811
cugggaauauaugugacuu

SEQ ID NO: 141075 - RNA, 19 nt, Artificial Sequence
  Description of Artificial Sequence: Synthetic oligonucleotide
  Antisense strand to SEQ ID NO: 141074
aagucacauauauucccag

SEQ ID NO: 141076 - RNA, 19 nt, Artificial Sequence
  Description of Artificial Sequence: Synthetic oligonucleotide
  Sense strand starting at position 3942 of SEQ ID NO: 1811
ugggaauauaugugacuuu

SEQ ID NO: 141077 - RNA, 19 nt, Artificial Sequence
  Description of Artificial Sequence: Synthetic oligonucleotide
  Antisense strand to SEQ ID NO: 141076
aaagucacauauauuccca

SEQ ID NO: 141078 - RNA, 19 nt, Artificial Sequence
  Description of Artificial Sequence: Synthetic oligonucleotide
  Sense strand starting at position 14 of SEQ ID NO: 1812
gagcuaugaucagcugcaa

SEQ ID NO: 141079 - RNA, 19 nt, Artificial Sequence
  Description of Artificial Sequence: Synthetic oligonucleotide
  Antisense strand to SEQ ID NO: 141078
uugcagcugaucauagcuc

SEQ ID NO: 141080 - RNA, 19 nt, Artificial Sequence
  Description of Artificial Sequence: Synthetic oligonucleotide
  Sense strand starting at position 135 of SEQ ID NO: 1812
cuugcuaugcuuuagaacu

SEQ ID NO: 141081 - RNA, 19 nt, Artificial Sequence
  Description of Artificial Sequence: Synthetic oligonucleotide
  Antisense strand to SEQ ID NO: 141080
aguucuaaagcauagcaag

SEQ ID NO: 141082 - RNA, 19 nt, Artificial Sequence
  Description of Artificial Sequence: Synthetic oligonucleotide
  Sense strand starting at position 228 of SEQ ID NO: 1812
acgcauauacgguaagaga

SEQ ID NO: 141083 - RNA, 19 nt, Artificial Sequence
  Description of Artificial Sequence: Synthetic oligonucleotide
  Antisense strand to SEQ ID NO: 141082
ucucuuaccguauaugcgu

SEQ ID NO: 141084 - RNA, 19 nt, Artificial Sequence
  Description of Artificial Sequence: Synthetic oligonucleotide
  Sense strand starting at position 231 of SEQ ID NO: 1812
cauauacgguaagagauua

SEQ ID NO: 141085 - RNA, 19 nt, Artificial Sequence
  Description of Artificial Sequence: Synthetic oligonucleotide
  Antisense strand to SEQ ID NO: 141084
uaaucucuuaccguauaug

SEQ ID NO: 141086 - RNA, 19 nt, Artificial Sequence
  Description of Artificial Sequence: Synthetic oligonucleotide
  Sense strand starting at position 565 of SEQ ID NO: 1812
aucaaauccuggccauuga

SEQ ID NO: 141087 - RNA, 19 nt, Artificial Sequence
  Description of Artificial Sequence: Synthetic oligonucleotide
  Antisense strand to SEQ ID NO: 141086
ucaauggccaggauuugau

SEQ ID NO: 141088 - RNA, 19 nt, Artificial Sequence
  Description of Artificial Sequence: Synthetic oligonucleotide
  Sense strand starting at position 576 of SEQ ID NO: 1812
gccauugagucccuccaua

SEQ ID NO: 141089 - RNA, 19 nt, Artificial Sequence
  Description of Artificial Sequence: Synthetic oligonucleotide
  Antisense strand to SEQ ID NO: 141088
uauggagggacucaauggc

SEQ ID NO: 141090 - RNA, 19 nt, Artificial Sequence
  Description of Artificial Sequence: Synthetic oligonucleotide
  Sense strand starting at position 688 of SEQ ID NO: 1812
aguaucacugaguaucuuu

SEQ ID NO: 141091 - RNA, 19 nt, Artificial Sequence
  Description of Artificial Sequence: Synthetic oligonucleotide
  Antisense strand to SEQ ID NO: 141090
aaagauacucagugauacu

SEQ ID NO: 141092 - RNA, 19 nt, Artificial Sequence
  Description of Artificial Sequence: Synthetic oligonucleotide
  Sense strand starting at position 897 of SEQ ID NO: 1812
accuaaggcuuaugaaaga

SEQ ID NO: 141093 - RNA, 19 nt, Artificial Sequence
  Description of Artificial Sequence: Synthetic oligonucleotide
  Antisense strand to SEQ ID NO: 141092
ucuuucauaagccuuaggu

SEQ ID NO: 141094 - RNA, 19 nt, Artificial Sequence
  Description of Artificial Sequence: Synthetic oligonucleotide
  Sense strand starting at position 924 of SEQ ID NO: 1812
aauaaagugucacuuagga

SEQ ID NO: 141095 - RNA, 19 nt, Artificial Sequence
  Description of Artificial Sequence: Synthetic oligonucleotide
  Antisense strand to SEQ ID NO: 141094
uccuaagugacacuuuauu

SEQ ID NO: 141096 - RNA, 19 nt, Artificial Sequence
  Description of Artificial Sequence: Synthetic oligonucleotide
  Sense strand starting at position 969 of SEQ ID NO: 1812
cgagguugagaugaauguu

SEQ ID NO: 141097 - RNA, 19 nt, Artificial Sequence
  Description of Artificial Sequence: Synthetic oligonucleotide
  Antisense strand to SEQ ID NO: 141096
aacauucaucucaaccucg

SEQ ID NO: 141098 - RNA, 19 nt, Artificial Sequence
  Description of Artificial Sequence: Synthetic oligonucleotide
  Sense strand starting at position 997 of SEQ ID NO: 1812
cccauauucugcgaauuug

SEQ ID NO: 141099 - RNA, 19 nt, Artificial Sequence
  Description of Artificial Sequence: Synthetic oligonucleotide
  Antisense strand to SEQ ID NO: 141098
caaauucgcagaauauggg

SEQ ID NO: 141100 - RNA, 19 nt, Artificial Sequence
  Description of Artificial Sequence: Synthetic oligonucleotide
  Sense strand starting at position 1009 of SEQ ID NO: 1812
gaauuugucguguaugucu

SEQ ID NO: 141101 - RNA, 19 nt, Artificial Sequence
  Description of Artificial Sequence: Synthetic oligonucleotide
  Antisense strand to SEQ ID NO: 141100
agacauacacgacaaauuc

SEQ ID NO: 141102 - RNA, 19 nt, Artificial Sequence
  Description of Artificial Sequence: Synthetic oligonucleotide
  Sense strand starting at position 1100 of SEQ ID NO: 1812
gaaguuguaugaguacaug

SEQ ID NO: 141103 - RNA, 19 nt, Artificial Sequence
  Description of Artificial Sequence: Synthetic oligonucleotide
  Antisense strand to SEQ ID NO: 141102
cauguacucauacaacuuc

SEQ ID NO: 141104 - RNA, 19 nt, Artificial Sequence
  Description of Artificial Sequence: Synthetic oligonucleotide
  Sense strand starting at position 1103 of SEQ ID NO: 1812
guuguaugaguacaugaga

SEQ ID NO: 141105 - RNA, 19 nt, Artificial Sequence
  Description of Artificial Sequence: Synthetic oligonucleotide
  Antisense strand to SEQ ID NO: 141104
ucucauguacucauacaac

SEQ ID NO: 141106 - RNA, 19 nt, Artificial Sequence
  Description of Artificial Sequence: Synthetic oligonucleotide
  Sense strand starting at position 1157 of SEQ ID NO: 1812
gcggacucagauuguuuaa

SEQ ID NO: 141107 - RNA, 19 nt, Artificial Sequence
  Description of Artificial Sequence: Synthetic oligonucleotide
  Antisense strand to SEQ ID NO: 141106
uuaaacaaucugaguccgc

SEQ ID NO: 141108 - RNA, 19 nt, Artificial Sequence
  Description of Artificial Sequence: Synthetic oligonucleotide
  Sense strand starting at position 1160 of SEQ ID NO: 1812
gacucagauuguuuaagcu

SEQ ID NO: 141109 - RNA, 19 nt, Artificial Sequence
  Description of Artificial Sequence: Synthetic oligonucleotide
  Antisense strand to SEQ ID NO: 141108
agcuuaaacaaucugaguc

SEQ ID NO: 141110 - RNA, 19 nt, Artificial Sequence
  Description of Artificial Sequence: Synthetic oligonucleotide
  Sense strand starting at position 1169 of SEQ ID NO: 1812
uguuuaagcuaucucugaa

SEQ ID NO: 141111 - RNA, 19 nt, Artificial Sequence
  Description of Artificial Sequence: Synthetic oligonucleotide
  Antisense strand to SEQ ID NO: 141110
uucagagauagcuuaaaca

SEQ ID NO: 141112 - RNA, 19 nt, Artificial Sequence
  Description of Artificial Sequence: Synthetic oligonucleotide
  Sense strand starting at position 1189 of SEQ ID NO: 1812
ccauuccuacugcguuuaa

SEQ ID NO: 141113 - RNA, 19 nt, Artificial Sequence
  Description of Artificial Sequence: Synthetic oligonucleotide
  Antisense strand to SEQ ID NO: 141112
uuaaacgcaguaggaaugg

SEQ ID NO: 141114 - RNA, 19 nt, Artificial Sequence
  Description of Artificial Sequence: Synthetic oligonucleotide
  Sense strand starting at position 1193 of SEQ ID NO: 1812
uccuacugcguuuaacuau

SEQ ID NO: 141115 - RNA, 19 nt, Artificial Sequence
  Description of Artificial Sequence: Synthetic oligonucleotide
  Antisense strand to SEQ ID NO: 141114
auaguuaaacgcaguagga

SEQ ID NO: 141116 - RNA, 19 nt, Artificial Sequence
  Description of Artificial Sequence: Synthetic oligonucleotide
  Sense strand starting at position 1311 of SEQ ID NO: 1812
cugucauaauccucacgca

SEQ ID NO: 141117 - RNA, 19 nt, Artificial Sequence
  Description of Artificial Sequence: Synthetic oligonucleotide
  Antisense strand to SEQ ID NO: 141116
ugcgugaggauuaugacag

SEQ ID NO: 141118 - RNA, 19 nt, Artificial Sequence
  Description of Artificial Sequence: Synthetic oligonucleotide
  Sense strand starting at position 1312 of SEQ ID NO: 1812
ugucauaauccucacgcau

SEQ ID NO: 141119 - RNA, 19 nt, Artificial Sequence
  Description of Artificial Sequence: Synthetic oligonucleotide
  Antisense strand to SEQ ID NO: 141118
augcgugaggauuaugaca

SEQ ID NO: 141120 - RNA, 19 nt, Artificial Sequence
  Description of Artificial Sequence: Synthetic oligonucleotide
  Sense strand starting at position 1530 of SEQ ID NO: 1812
ugugaaugcucucuggaac

SEQ ID NO: 141121 - RNA, 19 nt, Artificial Sequence
  Description of Artificial Sequence: Synthetic oligonucleotide
  Antisense strand to SEQ ID NO: 141120
guuccagagagcauucaca

SEQ ID NO: 141122 - RNA, 19 nt, Artificial Sequence
  Description of Artificial Sequence: Synthetic oligonucleotide
  Sense strand starting at position 1580 of SEQ ID NO: 1812
agucauuuguaacaaucgu

SEQ ID NO: 141123 - RNA, 19 nt, Artificial Sequence
  Description of Artificial Sequence: Synthetic oligonucleotide
  Antisense strand to SEQ ID NO: 141122
acgauuguuacaaaugacu

SEQ ID NO: 141124 - RNA, 19 nt, Artificial Sequence
  Description of Artificial Sequence: Synthetic oligonucleotide
  Sense strand starting at position 1586 of SEQ ID NO: 1812
uuguaacaaucgucucuuu

SEQ ID NO: 141125 - RNA, 19 nt, Artificial Sequence
  Description of Artificial Sequence: Synthetic oligonucleotide
  Antisense strand to SEQ ID NO: 141124
aaagagacgauuguuacaa

SEQ ID NO: 141126 - RNA, 19 nt, Artificial Sequence
  Description of Artificial Sequence: Synthetic oligonucleotide
  Sense strand starting at position 1831 of SEQ ID NO: 1812
auccucauccauggcgaaa

SEQ ID NO: 141127 - RNA, 19 nt, Artificial Sequence
  Description of Artificial Sequence: Synthetic oligonucleotide
  Antisense strand to SEQ ID NO: 141126
uuucgccauggaugaggau

SEQ ID NO: 141128 - RNA, 19 nt, Artificial Sequence
  Description of Artificial Sequence: Synthetic oligonucleotide
  Sense strand starting at position 1958 of SEQ ID NO: 1812
gggaaaggucgccagucaa

SEQ ID NO: 141129 - RNA, 19 nt, Artificial Sequence
  Description of Artificial Sequence: Synthetic oligonucleotide
  Antisense strand to SEQ ID NO: 141128
uugacuggcgaccuuuccc

SEQ ID NO: 141130 - RNA, 19 nt, Artificial Sequence
  Description of Artificial Sequence: Synthetic oligonucleotide
  Sense strand starting at position 2042 of SEQ ID NO: 1812
gggccuagugcggaaagau

SEQ ID NO: 141131 - RNA, 19 nt, Artificial Sequence
  Description of Artificial Sequence: Synthetic oligonucleotide
  Antisense strand to SEQ ID NO: 141130
aucuuuccgcacuaggccc

SEQ ID NO: 141132 - RNA, 19 nt, Artificial Sequence
  Description of Artificial Sequence: Synthetic oligonucleotide
  Sense strand starting at position 2064 of SEQ ID NO: 1812
ggaaguguuucuguggcca

SEQ ID NO: 141133 - RNA, 19 nt, Artificial Sequence
  Description of Artificial Sequence: Synthetic oligonucleotide
  Antisense strand to SEQ ID NO: 141132
uggccacagaaacacuucc

SEQ ID NO: 141134 - RNA, 19 nt, Artificial Sequence
  Description of Artificial Sequence: Synthetic oligonucleotide
  Sense strand starting at position 2137 of SEQ ID NO: 1812
ggccguggcuuccucuuaa

SEQ ID NO: 141135 - RNA, 19 nt, Artificial Sequence
  Description of Artificial Sequence: Synthetic oligonucleotide
  Antisense strand to SEQ ID NO: 141134
uuaagaggaagccacggcc

SEQ ID NO: 141136 - RNA, 19 nt, Artificial Sequence
  Description of Artificial Sequence: Synthetic oligonucleotide
  Sense strand starting at position 2158 of SEQ ID NO: 1812
gcggcagcugcugauaaau

SEQ ID NO: 141137 - RNA, 19 nt, Artificial Sequence
  Description of Artificial Sequence: Synthetic oligonucleotide
  Antisense strand to SEQ ID NO: 141136
auuuaucagcagcugccgc

SEQ ID NO: 141138 - RNA, 19 nt, Artificial Sequence
  Description of Artificial Sequence: Synthetic oligonucleotide
  Sense strand starting at position 2190 of SEQ ID NO: 1812
cagugaggcccggcguaau

SEQ ID NO: 141139 - RNA, 19 nt, Artificial Sequence
  Description of Artificial Sequence: Synthetic oligonucleotide
  Antisense strand to SEQ ID NO: 141138
auuacgccgggccucacug

SEQ ID NO: 141140 - RNA, 19 nt, Artificial Sequence
  Description of Artificial Sequence: Synthetic oligonucleotide
  Sense strand starting at position 2200 of SEQ ID NO: 1812
cggcguaauuuccuuauua

SEQ ID NO: 141141 - RNA, 19 nt, Artificial Sequence
  Description of Artificial Sequence: Synthetic oligonucleotide
  Antisense strand to SEQ ID NO: 141140
uaauaaggaaauuacgccg

SEQ ID NO: 141142 - RNA, 19 nt, Artificial Sequence
  Description of Artificial Sequence: Synthetic oligonucleotide
  Sense strand starting at position 2201 of SEQ ID NO: 1812
ggcguaauuuccuuauuag

SEQ ID NO: 141143 - RNA, 19 nt, Artificial Sequence
  Description of Artificial Sequence: Synthetic oligonucleotide
  Antisense strand to SEQ ID NO: 141142
cuaauaaggaaauuacgcc

SEQ ID NO: 141144 - RNA, 19 nt, Artificial Sequence
  Description of Artificial Sequence: Synthetic oligonucleotide
  Sense strand starting at position 2313 of SEQ ID NO: 1812
ggcagcgugguguaugaua

SEQ ID NO: 141145 - RNA, 19 nt, Artificial Sequence
  Description of Artificial Sequence: Synthetic oligonucleotide
  Antisense strand to SEQ ID NO: 141144
uaucauacaccacgcugcc

SEQ ID NO: 141146 - RNA, 19 nt, Artificial Sequence
  Description of Artificial Sequence: Synthetic oligonucleotide
  Sense strand starting at position 2348 of SEQ ID NO: 1812
auaguuugaucagcaguga

SEQ ID NO: 141147 - RNA, 19 nt, Artificial Sequence
  Description of Artificial Sequence: Synthetic oligonucleotide
  Antisense strand to SEQ ID NO: 141146
ucacugcugaucaaacuau

SEQ ID NO: 141148 - RNA, 19 nt, Artificial Sequence
  Description of Artificial Sequence: Synthetic oligonucleotide
  Sense strand starting at position 2420 of SEQ ID NO: 1812
cuaacagacuugguugcaa

SEQ ID NO: 141149 - RNA, 19 nt, Artificial Sequence
  Description of Artificial Sequence: Synthetic oligonucleotide
  Antisense strand to SEQ ID NO: 141148
uugcaaccaagucuguuag

SEQ ID NO: 141150 - RNA, 19 nt, Artificial Sequence
  Description of Artificial Sequence: Synthetic oligonucleotide
  Sense strand starting at position 2422 of SEQ ID NO: 1812
aacagacuugguugcaaua

SEQ ID NO: 141151 - RNA, 19 nt, Artificial Sequence
  Description of Artificial Sequence: Synthetic oligonucleotide
  Antisense strand to SEQ ID NO: 141150
uauugcaaccaagucuguu

SEQ ID NO: 141152 - RNA, 19 nt, Artificial Sequence
  Description of Artificial Sequence: Synthetic oligonucleotide
  Sense strand starting at position 2434 of SEQ ID NO: 1812
ugcaauacgguuggugaga

SEQ ID NO: 141153 - RNA, 19 nt, Artificial Sequence
  Description of Artificial Sequence: Synthetic oligonucleotide
  Antisense strand to SEQ ID NO: 141152
ucucaccaaccguauugca

SEQ ID NO: 141154 - RNA, 19 nt, Artificial Sequence
  Description of Artificial Sequence: Synthetic oligonucleotide
  Sense strand starting at position 3293 of SEQ ID NO: 1812
ggcucuuuccuuggcauuu

SEQ ID NO: 141155 - RNA, 19 nt, Artificial Sequence
  Description of Artificial Sequence: Synthetic oligonucleotide
  Antisense strand to SEQ ID NO: 141154
aaaugccaaggaaagagcc

SEQ ID NO: 141156 - RNA, 19 nt, Artificial Sequence
  Description of Artificial Sequence: Synthetic oligonucleotide
  Sense strand starting at position 3429 of SEQ ID NO: 1812
uguggugugcucuuucuca

SEQ ID NO: 141157 - RNA, 19 nt, Artificial Sequence
  Description of Artificial Sequence: Synthetic oligonucleotide
  Antisense strand to SEQ ID NO: 141156
ugagaaagagcacaccaca

SEQ ID NO: 141158 - RNA, 19 nt, Artificial Sequence
  Description of Artificial Sequence: Synthetic oligonucleotide
  Sense strand starting at position 62 of SEQ ID NO: 336
caggaugaucuacgugauc

SEQ ID NO: 141159 - RNA, 19 nt, Artificial Sequence
  Description of Artificial Sequence: Synthetic oligonucleotide
  Antisense strand to SEQ ID NO: 141158
gaucacguagaucauccug

SEQ ID NO: 141160 - RNA, 19 nt, Artificial Sequence
  Description of Artificial Sequence: Synthetic oligonucleotide
  Sense strand starting at position 64 of SEQ ID NO: 336
ggaugaucuacgugaucua

SEQ ID NO: 141161 - RNA, 19 nt, Artificial Sequence
  Description of Artificial Sequence: Synthetic oligonucleotide
  Antisense strand to SEQ ID NO: 141160
uagaucacguagaucaucc

SEQ ID NO: 141162 - RNA, 19 nt, Artificial Sequence
  Description of Artificial Sequence: Synthetic oligonucleotide
  Sense strand starting at position 65 of SEQ ID NO: 336
gaugaucuacgugaucuaa

SEQ ID NO: 141163 - RNA, 19 nt, Artificial Sequence
  Description of Artificial Sequence: Synthetic oligonucleotide
  Antisense strand to SEQ ID NO: 141162
uuagaucacguagaucauc

SEQ ID NO: 141164 - RNA, 19 nt, Artificial Sequence
  Description of Artificial Sequence: Synthetic oligonucleotide
  Sense strand starting at position 89 of SEQ ID NO: 336
gcauauuaugcauaaaguc

SEQ ID NO: 141165 - RNA, 19 nt, Artificial Sequence
  Description of Artificial Sequence: Synthetic oligonucleotide
  Antisense strand to SEQ ID NO: 141164
gacuuuaugcauaauaugc

SEQ ID NO: 141166 - RNA, 19 nt, Artificial Sequence
  Description of Artificial Sequence: Synthetic oligonucleotide
  Sense strand starting at position 119 of SEQ ID NO: 336
acgcaugaucuauagaaau

SEQ ID NO: 141167 - RNA, 19 nt, Artificial Sequence
  Description of Artificial Sequence: Synthetic oligonucleotide
  Antisense strand to SEQ ID NO: 141166
auuucuauagaucaugcgu

SEQ ID NO: 141168 - RNA, 19 nt, Artificial Sequence
  Description of Artificial Sequence: Synthetic oligonucleotide
  Sense strand starting at position 391 of SEQ ID NO: 336
ccagaacaucuggguuaac

SEQ ID NO: 141169 - RNA, 19 nt, Artificial Sequence
  Description of Artificial Sequence: Synthetic oligonucleotide
  Antisense strand to SEQ ID NO: 141168
guuaacccagauguucugg

SEQ ID NO: 141170 - RNA, 19 nt, Artificial Sequence
  Description of Artificial Sequence: Synthetic oligonucleotide
  Sense strand starting at position 392 of SEQ ID NO: 336
cagaacaucuggguuaacu

SEQ ID NO: 141171 - RNA, 19 nt, Artificial Sequence
  Description of Artificial Sequence: Synthetic oligonucleotide
  Antisense strand to SEQ ID NO: 141170
aguuaacccagauguucug

SEQ ID NO: 141172 - RNA, 19 nt, Artificial Sequence
  Description of Artificial Sequence: Synthetic oligonucleotide
  Sense strand starting at position 484 of SEQ ID NO: 336
guccgaccacuguaaagau

SEQ ID NO: 141173 - RNA, 19 nt, Artificial Sequence
  Description of Artificial Sequence: Synthetic oligonucleotide
  Antisense strand to SEQ ID NO: 141172
aucuuuacaguggucggac

SEQ ID NO: 141174 - RNA, 19 nt, Artificial Sequence
  Description of Artificial Sequence: Synthetic oligonucleotide
  Sense strand starting at position 536 of SEQ ID NO: 336
cuucuagaauguuuauaag

SEQ ID NO: 141175 - RNA, 19 nt, Artificial Sequence
  Description of Artificial Sequence: Synthetic oligonucleotide
  Antisense strand to SEQ ID NO: 141174
cuuauaaacauucuagaag

SEQ ID NO: 141176 - RNA, 19 nt, Artificial Sequence
  Description of Artificial Sequence: Synthetic oligonucleotide
  Sense strand starting at position 572 of SEQ ID NO: 336
aggguaucuagacggugaa

SEQ ID NO: 141177 - RNA, 19 nt, Artificial Sequence
  Description of Artificial Sequence: Synthetic oligonucleotide
  Antisense strand to SEQ ID NO: 141176
uucaccgucuagauacccu

SEQ ID NO: 141178 - RNA, 19 nt, Artificial Sequence
  Description of Artificial Sequence: Synthetic oligonucleotide
  Sense strand starting at position 575 of SEQ ID NO: 336
guaucuagacggugaacaa

SEQ ID NO: 141179 - RNA, 19 nt, Artificial Sequence
  Description of Artificial Sequence: Synthetic oligonucleotide
  Antisense strand to SEQ ID NO: 141178
uuguucaccgucuagauac

SEQ ID NO: 141180 - RNA, 19 nt, Artificial Sequence
  Description of Artificial Sequence: Synthetic oligonucleotide
  Sense strand starting at position 633 of SEQ ID NO: 336
aagccacgucuuuagaaca

SEQ ID NO: 141181 - RNA, 19 nt, Artificial Sequence
  Description of Artificial Sequence: Synthetic oligonucleotide
  Antisense strand to SEQ ID NO: 141180
uguucuaaagacguggcuu

SEQ ID NO: 141182 - RNA, 19 nt, Artificial Sequence
  Description of Artificial Sequence: Synthetic oligonucleotide
  Sense strand starting at position 696 of SEQ ID NO: 336
gagacacgagccugaaauu

SEQ ID NO: 141183 - RNA, 19 nt, Artificial Sequence
  Description of Artificial Sequence: Synthetic oligonucleotide
  Antisense strand to SEQ ID NO: 141182
aauuucaggcucgugucuc

SEQ ID NO: 141184 - RNA, 19 nt, Artificial Sequence
  Description of Artificial Sequence: Synthetic oligonucleotide
  Sense strand starting at position 736 of SEQ ID NO: 336
aauggauucguguaacuau

SEQ ID NO: 141185 - RNA, 19 nt, Artificial Sequence
  Description of Artificial Sequence: Synthetic oligonucleotide
  Antisense strand to SEQ ID NO: 141184
auaguuacacgaauccauu

SEQ ID NO: 141186 - RNA, 19 nt, Artificial Sequence
  Description of Artificial Sequence: Synthetic oligonucleotide
  Sense strand starting at position 739 of SEQ ID NO: 336
ggauucguguaacuauaaa

SEQ ID NO: 141187 - RNA, 19 nt, Artificial Sequence
  Description of Artificial Sequence: Synthetic oligonucleotide
  Antisense strand to SEQ ID NO: 141186
uuuauaguuacacgaaucc

SEQ ID NO: 141188 - RNA, 19 nt, Artificial Sequence
  Description of Artificial Sequence: Synthetic oligonucleotide
  Sense strand starting at position 903 of SEQ ID NO: 336
gaaggauuucugcgccacu

SEQ ID NO: 141189 - RNA, 19 nt, Artificial Sequence
  Description of Artificial Sequence: Synthetic oligonucleotide
  Antisense strand to SEQ ID NO: 141188
aguggcgcagaaauccuuc

SEQ ID NO: 141190 - RNA, 19 nt, Artificial Sequence
  Description of Artificial Sequence: Synthetic oligonucleotide
  Sense strand starting at position 906 of SEQ ID NO: 336
ggauuucugcgccacucga

SEQ ID NO: 141191 - RNA, 19 nt, Artificial Sequence
  Description of Artificial Sequence: Synthetic oligonucleotide
  Antisense strand to SEQ ID NO: 141190
ucgaguggcgcagaaaucc

SEQ ID NO: 141192 - RNA, 19 nt, Artificial Sequence
  Description of Artificial Sequence: Synthetic oligonucleotide
  Sense strand starting at position 1778 of SEQ ID NO: 336
ggaucucuaggcuggaaga

SEQ ID NO: 141193 - RNA, 19 nt, Artificial Sequence
  Description of Artificial Sequence: Synthetic oligonucleotide
  Antisense strand to SEQ ID NO: 141192
ucuuccagccuagagaucc

SEQ ID NO: 141194 - RNA, 19 nt, Artificial Sequence
  Description of Artificial Sequence: Synthetic oligonucleotide
  Sense strand starting at position 1951 of SEQ ID NO: 336
ccgcgaucgcggaauggau

SEQ ID NO: 141195 - RNA, 19 nt, Artificial Sequence
  Description of Artificial Sequence: Synthetic oligonucleotide
  Antisense strand to SEQ ID NO: 141194
auccauuccgcgaucgcgg

SEQ ID NO: 141196 - RNA, 19 nt, Artificial Sequence
  Description of Artificial Sequence: Synthetic oligonucleotide
  Sense strand starting at position 2163 of SEQ ID NO: 336
gggacuuggauauggguau

SEQ ID NO: 141197 - RNA, 19 nt, Artificial Sequence
  Description of Artificial Sequence: Synthetic oligonucleotide
  Antisense strand to SEQ ID NO: 141196
auacccauauccaaguccc

SEQ ID NO: 141198 - RNA, 19 nt, Artificial Sequence
  Description of Artificial Sequence: Synthetic oligonucleotide
  Sense strand starting at position 2169 of SEQ ID NO: 336
uggauauggguauggaauu

SEQ ID NO: 141199 - RNA, 19 nt, Artificial Sequence
  Description of Artificial Sequence: Synthetic oligonucleotide
  Antisense strand to SEQ ID NO: 141198
aauuccauacccauaucca

SEQ ID NO: 141200 - RNA, 19 nt, Artificial Sequence
  Description of Artificial Sequence: Synthetic oligonucleotide
  Sense strand starting at position 2302 of SEQ ID NO: 336
gagggaucggguuggaaua

SEQ ID NO: 141201 - RNA, 19 nt, Artificial Sequence
  Description of Artificial Sequence: Synthetic oligonucleotide
  Antisense strand to SEQ ID NO: 141200
uauuccaacccgaucccuc

SEQ ID NO: 141202 - RNA, 19 nt, Artificial Sequence
  Description of Artificial Sequence: Synthetic oligonucleotide
  Sense strand starting at position 2303 of SEQ ID NO: 336
agggaucggguuggaauaa

SEQ ID NO: 141203 - RNA, 19 nt, Artificial Sequence
  Description of Artificial Sequence: Synthetic oligonucleotide
  Antisense strand to SEQ ID NO: 141202
uuauuccaacccgaucccu

SEQ ID NO: 141204 - RNA, 19 nt, Artificial Sequence
  Description of Artificial Sequence: Synthetic oligonucleotide
  Sense strand starting at position 2324 of SEQ ID NO: 336
uuggaaggugccugagaga

SEQ ID NO: 141205 - RNA, 19 nt, Artificial Sequence
  Description of Artificial Sequence: Synthetic oligonucleotide
  Antisense strand to SEQ ID NO: 141204
ucucucaggcaccuuccaa

SEQ ID NO: 141206 - RNA, 19 nt, Artificial Sequence
  Description of Artificial Sequence: Synthetic oligonucleotide
  Sense strand starting at position 2378 of SEQ ID NO: 336
agaugcauuugucauuuga

SEQ ID NO: 141207 - RNA, 19 nt, Artificial Sequence
  Description of Artificial Sequence: Synthetic oligonucleotide
  Antisense strand to SEQ ID NO: 141206
ucaaaugacaaaugcaucu

SEQ ID NO: 141208 - RNA, 19 nt, Artificial Sequence
  Description of Artificial Sequence: Synthetic oligonucleotide
  Sense strand starting at position 2433 of SEQ ID NO: 336
cacuuuccuggauaugagu

SEQ ID NO: 141209 - RNA, 19 nt, Artificial Sequence
  Description of Artificial Sequence: Synthetic oligonucleotide
  Antisense strand to SEQ ID NO: 141208
acucauauccaggaaagug

SEQ ID NO: 141210 - RNA, 19 nt, Artificial Sequence
  Description of Artificial Sequence: Synthetic oligonucleotide
  Sense strand starting at position 2441 of SEQ ID NO: 336
uggauaugaguuugaucag

SEQ ID NO: 141211 - RNA, 19 nt, Artificial Sequence
  Description of Artificial Sequence: Synthetic oligonucleotide
  Antisense strand to SEQ ID NO: 141210
cugaucaaacucauaucca

SEQ ID NO: 141212 - RNA, 19 nt, Artificial Sequence
  Description of Artificial Sequence: Synthetic oligonucleotide
  Sense strand starting at position 2444 of SEQ ID NO: 336
auaugaguuugaucagcaa

SEQ ID NO: 141213 - RNA, 19 nt, Artificial Sequence
  Description of Artificial Sequence: Synthetic oligonucleotide
  Antisense strand to SEQ ID NO: 141212
uugcugaucaaacucauau

SEQ ID NO: 141214 - RNA, 19 nt, Artificial Sequence
  Description of Artificial Sequence: Synthetic oligonucleotide
  Sense strand starting at position 2448 of SEQ ID NO: 336
gaguuugaucagcaaacua

SEQ ID NO: 141215 - RNA, 19 nt, Artificial Sequence
  Description of Artificial Sequence: Synthetic oligonucleotide
  Antisense strand to SEQ ID NO: 141214
uaguuugcugaucaaacuc

SEQ ID NO: 141216 - RNA, 19 nt, Artificial Sequence
  Description of Artificial Sequence: Synthetic oligonucleotide
  Sense strand starting at position 2680 of SEQ ID NO: 336
ggcguuagcauuguuauuc

SEQ ID NO: 141217 - RNA, 19 nt, Artificial Sequence
  Description of Artificial Sequence: Synthetic oligonucleotide
  Antisense strand to SEQ ID NO: 141216
gaauaacaaugcuaacgcc

SEQ ID NO: 141218 - RNA, 19 nt, Artificial Sequence
  Description of Artificial Sequence: Synthetic oligonucleotide
  Sense strand starting at position 2793 of SEQ ID NO: 336
gaaauuauuguguacaggu

SEQ ID NO: 141219 - RNA, 19 nt, Artificial Sequence
  Description of Artificial Sequence: Synthetic oligonucleotide
  Antisense strand to SEQ ID NO: 141218
accuguacacaauaauuuc

SEQ ID NO: 141220 - RNA, 19 nt, Artificial Sequence
  Description of Artificial Sequence: Synthetic oligonucleotide
  Sense strand starting at position 2885 of SEQ ID NO: 336
gcgauuggugaucauacua

SEQ ID NO: 141221 - RNA, 19 nt, Artificial Sequence
  Description of Artificial Sequence: Synthetic oligonucleotide
  Antisense strand to SEQ ID NO: 141220
uaguaugaucaccaaucgc

SEQ ID NO: 141222 - RNA, 19 nt, Artificial Sequence
  Description of Artificial Sequence: Synthetic oligonucleotide
  Sense strand starting at position 2942 of SEQ ID NO: 336
agcuguaaucggcaaagaa

SEQ ID NO: 141223 - RNA, 19 nt, Artificial Sequence
  Description of Artificial Sequence: Synthetic oligonucleotide
  Antisense strand to SEQ ID NO: 141222
uucuuugccgauuacagcu

SEQ ID NO: 141224 - RNA, 19 nt, Artificial Sequence
  Description of Artificial Sequence: Synthetic oligonucleotide
  Sense strand starting at position 3046 of SEQ ID NO: 336
ggaggaggauaguuuggua

SEQ ID NO: 141225 - RNA, 19 nt, Artificial Sequence
  Description of Artificial Sequence: Synthetic oligonucleotide
  Antisense strand to SEQ ID NO: 141224
uaccaaacuauccuccucc

SEQ ID NO: 141226 - RNA, 19 nt, Artificial Sequence
  Description of Artificial Sequence: Synthetic oligonucleotide
  Sense strand starting at position 3240 of SEQ ID NO: 336
gugucaguucuguucguga

SEQ ID NO: 141227 - RNA, 19 nt, Artificial Sequence
  Description of Artificial Sequence: Synthetic oligonucleotide
  Antisense strand to SEQ ID NO: 141226
ucacgaacagaacugacac

SEQ ID NO: 141228 - RNA, 19 nt, Artificial Sequence
  Description of Artificial Sequence: Synthetic oligonucleotide
  Sense strand starting at position 3283 of SEQ ID NO: 336
ucauauaauguugaggcaa

SEQ ID NO: 141229 - RNA, 19 nt, Artificial Sequence
  Description of Artificial Sequence: Synthetic oligonucleotide
  Antisense strand to SEQ ID NO: 141228
uugccucaacauuauauga

SEQ ID NO: 141230 - RNA, 19 nt, Artificial Sequence
  Description of Artificial Sequence: Synthetic oligonucleotide
  Sense strand starting at position 3389 of SEQ ID NO: 336
augacuuuagaggguggua

SEQ ID NO: 141231 - RNA, 19 nt, Artificial Sequence
  Description of Artificial Sequence: Synthetic oligonucleotide
  Antisense strand to SEQ ID NO: 141230
uaccacccucuaaagucau

SEQ ID NO: 141232 - RNA, 19 nt, Artificial Sequence
  Description of Artificial Sequence: Synthetic oligonucleotide
  Sense strand starting at position 3422 of SEQ ID NO: 336
agcagugauggguggagau

SEQ ID NO: 141233 - RNA, 19 nt, Artificial Sequence
  Description of Artificial Sequence: Synthetic oligonucleotide
  Antisense strand to SEQ ID NO: 141232
aucuccacccaucacugcu

SEQ ID NO: 141234 - RNA, 19 nt, Artificial Sequence
  Description of Artificial Sequence: Synthetic oligonucleotide
  Sense strand starting at position 3423 of SEQ ID NO: 336
gcagugauggguggagaua

SEQ ID NO: 141235 - RNA, 19 nt, Artificial Sequence
  Description of Artificial Sequence: Synthetic oligonucleotide
  Antisense strand to SEQ ID NO: 141234
uaucuccacccaucacugc

SEQ ID NO: 141236 - RNA, 19 nt, Artificial Sequence
  Description of Artificial Sequence: Synthetic oligonucleotide
  Sense strand starting at position 3604 of SEQ ID NO: 336
ugaaauuacuagcuaauag

SEQ ID NO: 141237 - RNA, 19 nt, Artificial Sequence
  Description of Artificial Sequence: Synthetic oligonucleotide
  Antisense strand to SEQ ID NO: 141236
cuauuagcuaguaauuuca

SEQ ID NO: 141238 - RNA, 19 nt, Artificial Sequence
  Description of Artificial Sequence: Synthetic oligonucleotide
  Sense strand starting at position 2791 of SEQ ID NO: 1813
auaugcuggcuccaagacu

SEQ ID NO: 141239 - RNA, 19 nt, Artificial Sequence
  Description of Artificial Sequence: Synthetic oligonucleotide
  Antisense strand to SEQ ID NO: 141238
agucuuggagccagcauau

SEQ ID NO: 141240 - RNA, 19 nt, Artificial Sequence
  Description of Artificial Sequence: Synthetic oligonucleotide
  Sense strand starting at position 2788 of SEQ ID NO: 1813
uagauaugcuggcuccaag

SEQ ID NO: 141241 - RNA, 19 nt, Artificial Sequence
  Description of Artificial Sequence: Synthetic oligonucleotide
  Antisense strand to SEQ ID NO: 141240
cuuggagccagcauaucua

SEQ ID NO: 141242 - RNA, 19 nt, Artificial Sequence
  Description of Artificial Sequence: Synthetic oligonucleotide
  Sense strand starting at position 2786 of SEQ ID NO: 1813
ccuagauaugcuggcucca

SEQ ID NO: 141243 - RNA, 19 nt, Artificial Sequence
  Description of Artificial Sequence: Synthetic oligonucleotide
  Antisense strand to SEQ ID NO: 141242
uggagccagcauaucuagg

SEQ ID NO: 141244 - RNA, 19 nt, Artificial Sequence
  Description of Artificial Sequence: Synthetic oligonucleotide
  Sense strand starting at position 2776 of SEQ ID NO: 1813
acaaacaccgccuagauau

SEQ ID NO: 141245 - RNA, 19 nt, Artificial Sequence
  Description of Artificial Sequence: Synthetic oligonucleotide
  Antisense strand to SEQ ID NO: 141244
auaucuaggcgguguuugu

SEQ ID NO: 141246 - RNA, 19 nt, Artificial Sequence
  Description of Artificial Sequence: Synthetic oligonucleotide
  Sense strand starting at position 2753 of SEQ ID NO: 1813
ugggcuaaccuacaacauu

SEQ ID NO: 141247 - RNA, 19 nt, Artificial Sequence
  Description of Artificial Sequence: Synthetic oligonucleotide
  Antisense strand to SEQ ID NO: 141246
aauguuguagguuagccca

SEQ ID NO: 141248 - RNA, 19 nt, Artificial Sequence
  Description of Artificial Sequence: Synthetic oligonucleotide
  Sense strand starting at position 2706 of SEQ ID NO: 1813
cauuuagccucagagcaga

SEQ ID NO: 141249 - RNA, 19 nt, Artificial Sequence
  Description of Artificial Sequence: Synthetic oligonucleotide
  Antisense strand to SEQ ID NO: 141248
ucugcucugaggcuaaaug

SEQ ID NO: 141250 - RNA, 19 nt, Artificial Sequence
  Description of Artificial Sequence: Synthetic oligonucleotide
  Sense strand starting at position 2691 of SEQ ID NO: 1813
gauucuagucugcagcauu

SEQ ID NO: 141251 - RNA, 19 nt, Artificial Sequence
  Description of Artificial Sequence: Synthetic oligonucleotide
  Antisense strand to SEQ ID NO: 141250
aaugcugcagacuagaauc

SEQ ID NO: 141252 - RNA, 19 nt, Artificial Sequence
  Description of Artificial Sequence: Synthetic oligonucleotide
  Sense strand starting at position 2690 of SEQ ID NO: 1813
ggauucuagucugcagcau

SEQ ID NO: 141253 - RNA, 19 nt, Artificial Sequence
  Description of Artificial Sequence: Synthetic oligonucleotide
  Antisense strand to SEQ ID NO: 141252
augcugcagacuagaaucc

SEQ ID NO: 141254 - RNA, 19 nt, Artificial Sequence
  Description of Artificial Sequence: Synthetic oligonucleotide
  Sense strand starting at position 2689 of SEQ ID NO: 1813
gggauucuagucugcagca

SEQ ID NO: 141255 - RNA, 19 nt, Artificial Sequence
  Description of Artificial Sequence: Synthetic oligonucleotide
  Antisense strand to SEQ ID NO: 141254
ugcugcagacuagaauccc

SEQ ID NO: 141256 - RNA, 19 nt, Artificial Sequence
  Description of Artificial Sequence: Synthetic oligonucleotide
  Sense strand starting at position 2621 of SEQ ID NO: 1813
gcagguuucuguguacauu

SEQ ID NO: 141257 - RNA, 19 nt, Artificial Sequence
  Description of Artificial Sequence: Synthetic oligonucleotide
  Antisense strand to SEQ ID NO: 141256
aauguacacagaaaccugc

SEQ ID NO: 141258 - RNA, 19 nt, Artificial Sequence
  Description of Artificial Sequence: Synthetic oligonucleotide
  Sense strand starting at position 2610 of SEQ ID NO: 1813
gaaauuacccagcagguuu

SEQ ID NO: 141259 - RNA, 19 nt, Artificial Sequence
  Description of Artificial Sequence: Synthetic oligonucleotide
  Antisense strand to SEQ ID NO: 141258
aaaccugcuggguaauuuc

SEQ ID NO: 141260 - RNA, 19 nt, Artificial Sequence
  Description of Artificial Sequence: Synthetic oligonucleotide
  Sense strand starting at position 2583 of SEQ ID NO: 1813
aagucuggauaguuggaaa

SEQ ID NO: 141261 - RNA, 19 nt, Artificial Sequence
  Description of Artificial Sequence: Synthetic oligonucleotide
  Antisense strand to SEQ ID NO: 141260
uuuccaacuauccagacuu

SEQ ID NO: 141262 - RNA, 19 nt, Artificial Sequence
  Description of Artificial Sequence: Synthetic oligonucleotide
  Sense strand starting at position 2578 of SEQ ID NO: 1813
ccuauaagucuggauaguu

SEQ ID NO: 141263 - RNA, 19 nt, Artificial Sequence
  Description of Artificial Sequence: Synthetic oligonucleotide
  Antisense strand to SEQ ID NO: 141262
aacuauccagacuuauagg

SEQ ID NO: 141264 - RNA, 19 nt, Artificial Sequence
  Description of Artificial Sequence: Synthetic oligonucleotide
  Sense strand starting at position 2577 of SEQ ID NO: 1813
uccuauaagucuggauagu

SEQ ID NO: 141265 - RNA, 19 nt, Artificial Sequence
  Description of Artificial Sequence: Synthetic oligonucleotide
  Antisense strand to SEQ ID NO: 141264
acuauccagacuuauagga

SEQ ID NO: 141266 - RNA, 19 nt, Artificial Sequence
  Description of Artificial Sequence: Synthetic oligonucleotide
  Sense strand starting at position 2576 of SEQ ID NO: 1813
cuccuauaagucuggauag

SEQ ID NO: 141267 - RNA, 19 nt, Artificial Sequence
  Description of Artificial Sequence: Synthetic oligonucleotide
  Antisense strand to SEQ ID NO: 141266
cuauccagacuuauaggag

SEQ ID NO: 141268 - RNA, 19 nt, Artificial Sequence
  Description of Artificial Sequence: Synthetic oligonucleotide
  Sense strand starting at position 2459 of SEQ ID NO: 1813
cuuguuaccuccuggucau

SEQ ID NO: 141269 - RNA, 19 nt, Artificial Sequence
  Description of Artificial Sequence: Synthetic oligonucleotide
  Antisense strand to SEQ ID NO: 141268
augaccaggagguaacaag

SEQ ID NO: 141270 - RNA, 19 nt, Artificial Sequence
  Description of Artificial Sequence: Synthetic oligonucleotide
  Sense strand starting at position 2420 of SEQ ID NO: 1813
cagcuucgucucugugacu

SEQ ID NO: 141271 - RNA, 19 nt, Artificial Sequence
  Description of Artificial Sequence: Synthetic oligonucleotide
  Antisense strand to SEQ ID NO: 141270
agucacagagacgaagcug

SEQ ID NO: 141272 - RNA, 19 nt, Artificial Sequence
  Description of Artificial Sequence: Synthetic oligonucleotide
  Sense strand starting at position 2418 of SEQ ID NO: 1813
cgcagcuucgucucuguga

SEQ ID NO: 141273 - RNA, 19 nt, Artificial Sequence
  Description of Artificial Sequence: Synthetic oligonucleotide
  Antisense strand to SEQ ID NO: 141272
ucacagagacgaagcugcg

SEQ ID NO: 141274 - RNA, 19 nt, Artificial Sequence
  Description of Artificial Sequence: Synthetic oligonucleotide
  Sense strand starting at position 2394 of SEQ ID NO: 1813
cagugauucgcaccucggu

SEQ ID NO: 141275 - RNA, 19 nt, Artificial Sequence
  Description of Artificial Sequence: Synthetic oligonucleotide
  Antisense strand to SEQ ID NO: 141274
accgaggugcgaaucacug

SEQ ID NO: 141276 - RNA, 19 nt, Artificial Sequence
  Description of Artificial Sequence: Synthetic oligonucleotide
  Sense strand starting at position 2373 of SEQ ID NO: 1813
augauucgcaccuaggaau

SEQ ID NO: 141277 - RNA, 19 nt, Artificial Sequence
  Description of Artificial Sequence: Synthetic oligonucleotide
  Antisense strand to SEQ ID NO: 141276
auuccuaggugcgaaucau

SEQ ID NO: 141278 - RNA, 19 nt, Artificial Sequence
  Description of Artificial Sequence: Synthetic oligonucleotide
  Sense strand starting at position 2369 of SEQ ID NO: 1813
ggugaugauucgcaccuag

SEQ ID NO: 141279 - RNA, 19 nt, Artificial Sequence
  Description of Artificial Sequence: Synthetic oligonucleotide
  Antisense strand to SEQ ID NO: 141278
cuaggugcgaaucaucacc

SEQ ID NO: 141280 - RNA, 19 nt, Artificial Sequence
  Description of Artificial Sequence: Synthetic oligonucleotide
  Sense strand starting at position 2368 of SEQ ID NO: 1813
uggugaugauucgcaccua

SEQ ID NO: 141281 - RNA, 19 nt, Artificial Sequence
  Description of Artificial Sequence: Synthetic oligonucleotide
  Antisense strand to SEQ ID NO: 141280
uaggugcgaaucaucacca

SEQ ID NO: 141282 - RNA, 19 nt, Artificial Sequence
  Description of Artificial Sequence: Synthetic oligonucleotide
  Sense strand starting at position 2360 of SEQ ID NO: 1813
gugauugcuggugaugauu

SEQ ID NO: 141283 - RNA, 19 nt, Artificial Sequence
  Description of Artificial Sequence: Synthetic oligonucleotide
  Antisense strand to SEQ ID NO: 141282
aaucaucaccagcaaucac

SEQ ID NO: 141284 - RNA, 19 nt, Artificial Sequence
  Description of Artificial Sequence: Synthetic oligonucleotide
  Sense strand starting at position 2359 of SEQ ID NO: 1813
agugauugcuggugaugau

SEQ ID NO: 141285 - RNA, 19 nt, Artificial Sequence
  Description of Artificial Sequence: Synthetic oligonucleotide
  Antisense strand to SEQ ID NO: 141284
aucaucaccagcaaucacu

SEQ ID NO: 141286 - RNA, 19 nt, Artificial Sequence
  Description of Artificial Sequence: Synthetic oligonucleotide
  Sense strand starting at position 2356 of SEQ ID NO: 1813
agaagugauugcuggugau

SEQ ID NO: 141287 - RNA, 19 nt, Artificial Sequence
  Description of Artificial Sequence: Synthetic oligonucleotide
  Antisense strand to SEQ ID NO: 141286
aucaccagcaaucacuucu

SEQ ID NO: 141288 - RNA, 19 nt, Artificial Sequence
  Description of Artificial Sequence: Synthetic oligonucleotide
  Sense strand starting at position 2353 of SEQ ID NO: 1813
gagagaagugauugcuggu

SEQ ID NO: 141289 - RNA, 19 nt, Artificial Sequence
  Description of Artificial Sequence: Synthetic oligonucleotide
  Antisense strand to SEQ ID NO: 141288
accagcaaucacuucucuc

SEQ ID NO: 141290 - RNA, 19 nt, Artificial Sequence
  Description of Artificial Sequence: Synthetic oligonucleotide
  Sense strand starting at position 2313 of SEQ ID NO: 1813
cucaauaaauaggaguuua

SEQ ID NO: 141291 - RNA, 19 nt, Artificial Sequence
  Description of Artificial Sequence: Synthetic oligonucleotide
  Antisense strand to SEQ ID NO: 141290
uaaacuccuauuuauugag

SEQ ID NO: 141292 - RNA, 19 nt, Artificial Sequence
  Description of Artificial Sequence: Synthetic oligonucleotide
  Sense strand starting at position 2209 of SEQ ID NO: 1813
cuucccugcuuauauguua

SEQ ID NO: 141293 - RNA, 19 nt, Artificial Sequence
  Description of Artificial Sequence: Synthetic oligonucleotide
  Antisense strand to SEQ ID NO: 141292
uaacauauaagcagggaag

SEQ ID NO: 141294 - RNA, 19 nt, Artificial Sequence
  Description of Artificial Sequence: Synthetic oligonucleotide
  Sense strand starting at position 2176 of SEQ ID NO: 1813
ucucaugucccagacuguu

SEQ ID NO: 141295 - RNA, 19 nt, Artificial Sequence
  Description of Artificial Sequence: Synthetic oligonucleotide
  Antisense strand to SEQ ID NO: 141294
aacagucugggacaugaga

SEQ ID NO: 141296 - RNA, 19 nt, Artificial Sequence
  Description of Artificial Sequence: Synthetic oligonucleotide
  Sense strand starting at position 558 of SEQ ID NO: 1813
ggcagauguucgagaccag

SEQ ID NO: 141297 - RNA, 19 nt, Artificial Sequence
  Description of Artificial Sequence: Synthetic oligonucleotide
  Antisense strand to SEQ ID NO: 141296
cuggucucgaacaucugcc

SEQ ID NO: 141298 - RNA, 19 nt, Artificial Sequence
  Description of Artificial Sequence: Synthetic oligonucleotide
  Sense strand starting at position 410 of SEQ ID NO: 1813
cuuaucucuugggauauga

SEQ ID NO: 141299 - RNA, 19 nt, Artificial Sequence
  Description of Artificial Sequence: Synthetic oligonucleotide
  Antisense strand to SEQ ID NO: 141298
ucauaucccaagagauaag

SEQ ID NO: 141300 - RNA, 19 nt, Artificial Sequence
  Description of Artificial Sequence: Synthetic oligonucleotide
  Sense strand starting at position 409 of SEQ ID NO: 1813
ucuuaucucuugggauaug

SEQ ID NO: 141301 - RNA, 19 nt, Artificial Sequence
  Description of Artificial Sequence: Synthetic oligonucleotide
  Antisense strand to SEQ ID NO: 141300
cauaucccaagagauaaga

SEQ ID NO: 141302 - RNA, 19 nt, Artificial Sequence
  Description of Artificial Sequence: Synthetic oligonucleotide
  Sense strand starting at position 408 of SEQ ID NO: 1813
cucuuaucucuugggauau

SEQ ID NO: 141303 - RNA, 19 nt, Artificial Sequence
  Description of Artificial Sequence: Synthetic oligonucleotide
  Antisense strand to SEQ ID NO: 141302
auaucccaagagauaagag

SEQ ID NO: 141304 - RNA, 19 nt, Artificial Sequence
  Description of Artificial Sequence: Synthetic oligonucleotide
  Sense strand starting at position 407 of SEQ ID NO: 1813
acucuuaucucuugggaua

SEQ ID NO: 141305 - RNA, 19 nt, Artificial Sequence
  Description of Artificial Sequence: Synthetic oligonucleotide
  Antisense strand to SEQ ID NO: 141304
uaucccaagagauaagagu

SEQ ID NO: 141306 - RNA, 19 nt, Artificial Sequence
  Description of Artificial Sequence: Synthetic oligonucleotide
  Sense strand starting at position 405 of SEQ ID NO: 1813
acacucuuaucucuuggga

SEQ ID NO: 141307 - RNA, 19 nt, Artificial Sequence
  Description of Artificial Sequence: Synthetic oligonucleotide
  Antisense strand to SEQ ID NO: 141306
ucccaagagauaagagugu

SEQ ID NO: 141308 - RNA, 19 nt, Artificial Sequence
  Description of Artificial Sequence: Synthetic oligonucleotide
  Sense strand starting at position 360 of SEQ ID NO: 1813
ucauaagacucucaaguga

SEQ ID NO: 141309 - RNA, 19 nt, Artificial Sequence
  Description of Artificial Sequence: Synthetic oligonucleotide
  Antisense strand to SEQ ID NO: 141308
ucacuugagagucuuauga

SEQ ID NO: 141310 - RNA, 19 nt, Artificial Sequence
  Description of Artificial Sequence: Synthetic oligonucleotide
  Sense strand starting at position 351 of SEQ ID NO: 1813
ugaagaagaucauaagacu

SEQ ID NO: 141311 - RNA, 19 nt, Artificial Sequence
  Description of Artificial Sequence: Synthetic oligonucleotide
  Antisense strand to SEQ ID NO: 141310
agucuuaugaucuucuuca

SEQ ID NO: 141312 - RNA, 19 nt, Artificial Sequence
  Description of Artificial Sequence: Synthetic oligonucleotide
  Sense strand starting at position 340 of SEQ ID NO: 1813
ugcucuuccucugaagaag

SEQ ID NO: 141313 - RNA, 19 nt, Artificial Sequence
  Description of Artificial Sequence: Synthetic oligonucleotide
  Antisense strand to SEQ ID NO: 141312
cuucuucagaggaagagca

SEQ ID NO: 141314 - RNA, 19 nt, Artificial Sequence
  Description of Artificial Sequence: Synthetic oligonucleotide
  Sense strand starting at position 327 of SEQ ID NO: 1814
ccaugucaucugugaauga

SEQ ID NO: 141315 - RNA, 19 nt, Artificial Sequence
  Description of Artificial Sequence: Synthetic oligonucleotide
  Antisense strand to SEQ ID NO: 141314
ucauucacagaugacaugg

SEQ ID NO: 141316 - RNA, 19 nt, Artificial Sequence
  Description of Artificial Sequence: Synthetic oligonucleotide
  Sense strand starting at position 416 of SEQ ID NO: 1814
gaagguccuguaugauguu

SEQ ID NO: 141317 - RNA, 19 nt, Artificial Sequence
  Description of Artificial Sequence: Synthetic oligonucleotide
  Antisense strand to SEQ ID NO: 141316
aacaucauacaggaccuuc

SEQ ID NO: 141318 - RNA, 19 nt, Artificial Sequence
  Description of Artificial Sequence: Synthetic oligonucleotide
  Sense strand starting at position 443 of SEQ ID NO: 1814
auaguuaagaguggagauc

SEQ ID NO: 141319 - RNA, 19 nt, Artificial Sequence
  Description of Artificial Sequence: Synthetic oligonucleotide
  Antisense strand to SEQ ID NO: 141318
gaucuccacucuuaacuau

SEQ ID NO: 141320 - RNA, 19 nt, Artificial Sequence
  Description of Artificial Sequence: Synthetic oligonucleotide
  Sense strand starting at position 452 of SEQ ID NO: 1814
aguggagauccuugacuug

SEQ ID NO: 141321 - RNA, 19 nt, Artificial Sequence
  Description of Artificial Sequence: Synthetic oligonucleotide
  Antisense strand to SEQ ID NO: 141320
caagucaaggaucuccacu

SEQ ID NO: 141322 - RNA, 19 nt, Artificial Sequence
  Description of Artificial Sequence: Synthetic oligonucleotide
  Sense strand starting at position 466 of SEQ ID NO: 1814
acuuguuccugaucuuaca

SEQ ID NO: 141323 - RNA, 19 nt, Artificial Sequence
  Description of Artificial Sequence: Synthetic oligonucleotide
  Antisense strand to SEQ ID NO: 141322
uguaagaucaggaacaagu

SEQ ID NO: 141324 - RNA, 19 nt, Artificial Sequence
  Description of Artificial Sequence: Synthetic oligonucleotide
  Sense strand starting at position 540 of SEQ ID NO: 1814
uguccuuuggguugaagaa

SEQ ID NO: 141325 - RNA, 19 nt, Artificial Sequence
  Description of Artificial Sequence: Synthetic oligonucleotide
  Antisense strand to SEQ ID NO: 141324
uucuucaacccaaaggaca

SEQ ID NO: 141326 - RNA, 19 nt, Artificial Sequence
  Description of Artificial Sequence: Synthetic oligonucleotide
  Sense strand starting at position 637 of SEQ ID NO: 1814
agaugaucauaugugugca

SEQ ID NO: 141327 - RNA, 19 nt, Artificial Sequence
  Description of Artificial Sequence: Synthetic oligonucleotide
  Antisense strand to SEQ ID NO: 141326
ugcacacauaugaucaucu

SEQ ID NO: 141328 - RNA, 19 nt, Artificial Sequence
  Description of Artificial Sequence: Synthetic oligonucleotide
  Sense strand starting at position 639 of SEQ ID NO: 1814
augaucauaugugugcaau

SEQ ID NO: 141329 - RNA, 19 nt, Artificial Sequence
  Description of Artificial Sequence: Synthetic oligonucleotide
  Antisense strand to SEQ ID NO: 141328
auugcacacauaugaucau

SEQ ID NO: 141330 - RNA, 19 nt, Artificial Sequence
  Description of Artificial Sequence: Synthetic oligonucleotide
  Sense strand starting at position 641 of SEQ ID NO: 1814
gaucauaugugugcaauuu

SEQ ID NO: 141331 - RNA, 19 nt, Artificial Sequence
  Description of Artificial Sequence: Synthetic oligonucleotide
  Antisense strand to SEQ ID NO: 141330
aaauugcacacauaugauc

SEQ ID NO: 141332 - RNA, 19 nt, Artificial Sequence
  Description of Artificial Sequence: Synthetic oligonucleotide
  Sense strand starting at position 699 of SEQ ID NO: 1814
ugcagauguuaagucaaac

SEQ ID NO: 141333 - RNA, 19 nt, Artificial Sequence
  Description of Artificial Sequence: Synthetic oligonucleotide
  Antisense strand to SEQ ID NO: 141332
guuugacuuaacaucugca

SEQ ID NO: 141334 - RNA, 19 nt, Artificial Sequence
  Description of Artificial Sequence: Synthetic oligonucleotide
  Sense strand starting at position 883 of SEQ ID NO: 1814
cauuaaguguguucuaaug

SEQ ID NO: 141335 - RNA, 19 nt, Artificial Sequence
  Description of Artificial Sequence: Synthetic oligonucleotide
  Antisense strand to SEQ ID NO: 141334
cauuagaacacacuuaaug

SEQ ID NO: 141336 - RNA, 19 nt, Artificial Sequence
  Description of Artificial Sequence: Synthetic oligonucleotide
  Sense strand starting at position 894 of SEQ ID NO: 1814
uucuaaugguucccaaaug

SEQ ID NO: 141337 - RNA, 19 nt, Artificial Sequence
  Description of Artificial Sequence: Synthetic oligonucleotide
  Antisense strand to SEQ ID NO: 141336
cauuugggaaccauuagaa

SEQ ID NO: 141338 - RNA, 19 nt, Artificial Sequence
  Description of Artificial Sequence: Synthetic oligonucleotide
  Sense strand starting at position 994 of SEQ ID NO: 1814
cuucucuacugaguaaagu

SEQ ID NO: 141339 - RNA, 19 nt, Artificial Sequence
  Description of Artificial Sequence: Synthetic oligonucleotide
  Antisense strand to SEQ ID NO: 141338
acuuuacucaguagagaag

SEQ ID NO: 141340 - RNA, 19 nt, Artificial Sequence
  Description of Artificial Sequence: Synthetic oligonucleotide
  Sense strand starting at position 1397 of SEQ ID NO: 1814
cauagcuagguuuauugaa

SEQ ID NO: 141341 - RNA, 19 nt, Artificial Sequence
  Description of Artificial Sequence: Synthetic oligonucleotide
  Antisense strand to SEQ ID NO: 141340
uucaauaaaccuagcuaug

SEQ ID NO: 141342 - RNA, 19 nt, Artificial Sequence
  Description of Artificial Sequence: Synthetic oligonucleotide
  Sense strand starting at position 1399 of SEQ ID NO: 1814
uagcuagguuuauugaaua

SEQ ID NO: 141343 - RNA, 19 nt, Artificial Sequence
  Description of Artificial Sequence: Synthetic oligonucleotide
  Antisense strand to SEQ ID NO: 141342
uauucaauaaaccuagcua

SEQ ID NO: 141344 - RNA, 19 nt, Artificial Sequence
  Description of Artificial Sequence: Synthetic oligonucleotide
  Sense strand starting at position 1425 of SEQ ID NO: 1814
agauuaaauggauguuacu

SEQ ID NO: 141345 - RNA, 19 nt, Artificial Sequence
  Description of Artificial Sequence: Synthetic oligonucleotide
  Antisense strand to SEQ ID NO: 141344
aguaacauccauuuaaucu

SEQ ID NO: 141346 - RNA, 19 nt, Artificial Sequence
  Description of Artificial Sequence: Synthetic oligonucleotide
  Sense strand starting at position 1438 of SEQ ID NO: 1814
guuacuguacuaugacuaa

SEQ ID NO: 141347 - RNA, 19 nt, Artificial Sequence
  Description of Artificial Sequence: Synthetic oligonucleotide
  Antisense strand to SEQ ID NO: 141346
uuagucauaguacaguaac

SEQ ID NO: 141348 - RNA, 19 nt, Artificial Sequence
  Description of Artificial Sequence: Synthetic oligonucleotide
  Sense strand starting at position 1721 of SEQ ID NO: 1814
ggaggagcucaaugucugu

SEQ ID NO: 141349 - RNA, 19 nt, Artificial Sequence
  Description of Artificial Sequence: Synthetic oligonucleotide
  Antisense strand to SEQ ID NO: 141348
acagacauugagcuccucc

SEQ ID NO: 141350 - RNA, 19 nt, Artificial Sequence
  Description of Artificial Sequence: Synthetic oligonucleotide
  Sense strand starting at position 1727 of SEQ ID NO: 1814
gcucaaugucuguauugau

SEQ ID NO: 141351 - RNA, 19 nt, Artificial Sequence
  Description of Artificial Sequence: Synthetic oligonucleotide
  Antisense strand to SEQ ID NO: 141350
aucaauacagacauugagc

SEQ ID NO: 141352 - RNA, 19 nt, Artificial Sequence
  Description of Artificial Sequence: Synthetic oligonucleotide
  Sense strand starting at position 1741 of SEQ ID NO: 1814
uugauaguggucuggucaa

SEQ ID NO: 141353 - RNA, 19 nt, Artificial Sequence
  Description of Artificial Sequence: Synthetic oligonucleotide
  Antisense strand to SEQ ID NO: 141352
uugaccagaccacuaucaa

SEQ ID NO: 141354 - RNA, 19 nt, Artificial Sequence
  Description of Artificial Sequence: Synthetic oligonucleotide
  Sense strand starting at position 1775 of SEQ ID NO: 1814
gguggaguuuauucaggca

SEQ ID NO: 141355 - RNA, 19 nt, Artificial Sequence
  Description of Artificial Sequence: Synthetic oligonucleotide
  Antisense strand to SEQ ID NO: 141354
ugccugaauaaacuccacc

SEQ ID NO: 141356 - RNA, 19 nt, Artificial Sequence
  Description of Artificial Sequence: Synthetic oligonucleotide
  Sense strand starting at position 1791 of SEQ ID NO: 1814
gcacaucuugcagacagua

SEQ ID NO: 141357 - RNA, 19 nt, Artificial Sequence
  Description of Artificial Sequence: Synthetic oligonucleotide
  Antisense strand to SEQ ID NO: 141356
uacugucugcaagaugugc

SEQ ID NO: 141358 - RNA, 19 nt, Artificial Sequence
  Description of Artificial Sequence: Synthetic oligonucleotide
  Sense strand starting at position 1834 of SEQ ID NO: 1814
uuucgaauuguuucgucga

SEQ ID NO: 141359 - RNA, 19 nt, Artificial Sequence
  Description of Artificial Sequence: Synthetic oligonucleotide
  Antisense strand to SEQ ID NO: 141358
ucgacgaaacaauucgaaa

SEQ ID NO: 141360 - RNA, 19 nt, Artificial Sequence
  Description of Artificial Sequence: Synthetic oligonucleotide
  Sense strand starting at position 1849 of SEQ ID NO: 1814
ucgaaagucugagugcaaa

SEQ ID NO: 141361 - RNA, 19 nt, Artificial Sequence
  Description of Artificial Sequence: Synthetic oligonucleotide
  Antisense strand to SEQ ID NO: 141360
uuugcacucagacuuucga

SEQ ID NO: 141362 - RNA, 19 nt, Artificial Sequence
  Description of Artificial Sequence: Synthetic oligonucleotide
  Sense strand starting at position 2041 of SEQ ID NO: 1814
cagcacauagugugaaaua

SEQ ID NO: 141363 - RNA, 19 nt, Artificial Sequence
  Description of Artificial Sequence: Synthetic oligonucleotide
  Antisense strand to SEQ ID NO: 141362
uauuucacacuaugugcug

SEQ ID NO: 141364 - RNA, 19 nt, Artificial Sequence
  Description of Artificial Sequence: Synthetic oligonucleotide
  Sense strand starting at position 2134 of SEQ ID NO: 1814
aguccagucuuauuccaca

SEQ ID NO: 141365 - RNA, 19 nt, Artificial Sequence
  Description of Artificial Sequence: Synthetic oligonucleotide
  Antisense strand to SEQ ID NO: 141364
uguggaauaagacuggacu

SEQ ID NO: 141366 - RNA, 19 nt, Artificial Sequence
  Description of Artificial Sequence: Synthetic oligonucleotide
  Sense strand starting at position 2311 of SEQ ID NO: 1814
ggacccuagucucuuaagu

SEQ ID NO: 141367 - RNA, 19 nt, Artificial Sequence
  Description of Artificial Sequence: Synthetic oligonucleotide
  Antisense strand to SEQ ID NO: 141366
acuuaagagacuagggucc

SEQ ID NO: 141368 - RNA, 19 nt, Artificial Sequence
  Description of Artificial Sequence: Synthetic oligonucleotide
  Sense strand starting at position 2319 of SEQ ID NO: 1814
gucucuuaaguuuaucuaa

SEQ ID NO: 141369 - RNA, 19 nt, Artificial Sequence
  Description of Artificial Sequence: Synthetic oligonucleotide
  Antisense strand to SEQ ID NO: 141368
uuagauaaacuuaagagac

SEQ ID NO: 141370 - RNA, 19 nt, Artificial Sequence
  Description of Artificial Sequence: Synthetic oligonucleotide
  Sense strand starting at position 2321 of SEQ ID NO: 1814
cucuuaaguuuaucuaagu

SEQ ID NO: 141371 - RNA, 19 nt, Artificial Sequence
  Description of Artificial Sequence: Synthetic oligonucleotide
  Antisense strand to SEQ ID NO: 141370
acuuagauaaacuuaagag

SEQ ID NO: 141372 - RNA, 19 nt, Artificial Sequence
  Description of Artificial Sequence: Synthetic oligonucleotide
  Sense strand starting at position 2656 of SEQ ID NO: 1814
aaauaaucuuggcugggua

SEQ ID NO: 141373 - RNA, 19 nt, Artificial Sequence
  Description of Artificial Sequence: Synthetic oligonucleotide
  Antisense strand to SEQ ID NO: 141372
uacccagccaagauuauuu

SEQ ID NO: 141374 - RNA, 19 nt, Artificial Sequence
  Description of Artificial Sequence: Synthetic oligonucleotide
  Sense strand starting at position 2657 of SEQ ID NO: 1814
aauaaucuuggcuggguau

SEQ ID NO: 141375 - RNA, 19 nt, Artificial Sequence
  Description of Artificial Sequence: Synthetic oligonucleotide
  Antisense strand to SEQ ID NO: 141374
auacccagccaagauuauu

SEQ ID NO: 141376 - RNA, 19 nt, Artificial Sequence
  Description of Artificial Sequence: Synthetic oligonucleotide
  Sense strand starting at position 3195 of SEQ ID NO: 1814
gcuguaaucccaggaacuc

SEQ ID NO: 141377 - RNA, 19 nt, Artificial Sequence
  Description of Artificial Sequence: Synthetic oligonucleotide
  Antisense strand to SEQ ID NO: 141376
gaguuccugggauuacagc

SEQ ID NO: 141378 - RNA, 19 nt, Artificial Sequence
  Description of Artificial Sequence: Synthetic oligonucleotide
  Sense strand starting at position 3390 of SEQ ID NO: 1814
auauguuuccucuguauuu

SEQ ID NO: 141379 - RNA, 19 nt, Artificial Sequence
  Description of Artificial Sequence: Synthetic oligonucleotide
  Antisense strand to SEQ ID NO: 141378
aaauacagaggaaacauau

SEQ ID NO: 141380 - RNA, 19 nt, Artificial Sequence
  Description of Artificial Sequence: Synthetic oligonucleotide
  Sense strand starting at position 3938 of SEQ ID NO: 1814
aaguuaugguaagugauau

SEQ ID NO: 141381 - RNA, 19 nt, Artificial Sequence
  Description of Artificial Sequence: Synthetic oligonucleotide
  Antisense strand to SEQ ID NO: 141380
auaucacuuaccauaacuu

SEQ ID NO: 141382 - RNA, 19 nt, Artificial Sequence
  Description of Artificial Sequence: Synthetic oligonucleotide
  Sense strand starting at position 3939 of SEQ ID NO: 1814
aguuaugguaagugauaug

SEQ ID NO: 141383 - RNA, 19 nt, Artificial Sequence
  Description of Artificial Sequence: Synthetic oligonucleotide
  Antisense strand to SEQ ID NO: 141382
cauaucacuuaccauaacu

SEQ ID NO: 141384 - RNA, 19 nt, Artificial Sequence
  Description of Artificial Sequence: Synthetic oligonucleotide
  Sense strand starting at position 3944 of SEQ ID NO: 1814
ugguaagugauauguaggu

SEQ ID NO: 141385 - RNA, 19 nt, Artificial Sequence
  Description of Artificial Sequence: Synthetic oligonucleotide
  Antisense strand to SEQ ID NO: 141384
accuacauaucacuuacca

SEQ ID NO: 141386 - RNA, 19 nt, Artificial Sequence
  Description of Artificial Sequence: Synthetic oligonucleotide
  Sense strand starting at position 3946 of SEQ ID NO: 1814
guaagugauauguagguaa

SEQ ID NO: 141387 - RNA, 19 nt, Artificial Sequence
  Description of Artificial Sequence: Synthetic oligonucleotide
  Antisense strand to SEQ ID NO: 141386
uuaccuacauaucacuuac

SEQ ID NO: 141388 - RNA, 19 nt, Artificial Sequence
  Description of Artificial Sequence: Synthetic oligonucleotide
  Sense strand starting at position 3948 of SEQ ID NO: 1814
aagugauauguagguaaag

SEQ ID NO: 141389 - RNA, 19 nt, Artificial Sequence
  Description of Artificial Sequence: Synthetic oligonucleotide
  Antisense strand to SEQ ID NO: 141388
cuuuaccuacauaucacuu

SEQ ID NO: 141390 - RNA, 19 nt, Artificial Sequence
  Description of Artificial Sequence: Synthetic oligonucleotide
  Sense strand starting at position 3949 of SEQ ID NO: 1814
agugauauguagguaaagu

SEQ ID NO: 141391 - RNA, 19 nt, Artificial Sequence
  Description of Artificial Sequence: Synthetic oligonucleotide
  Antisense strand to SEQ ID NO: 141390
acuuuaccuacauaucacu

SEQ ID NO: 141392 - RNA, 19 nt, Artificial Sequence
  Description of Artificial Sequence: Synthetic oligonucleotide
  Sense strand starting at position 3950 of SEQ ID NO: 1814
gugauauguagguaaagua

SEQ ID NO: 141393 - RNA, 19 nt, Artificial Sequence
  Description of Artificial Sequence: Synthetic oligonucleotide
  Antisense strand to SEQ ID NO: 141392
uacuuuaccuacauaucac

SEQ ID NO: 141394 - RNA, 19 nt, Artificial Sequence
  Description of Artificial Sequence: Synthetic oligonucleotide
  Sense strand starting at position 3415 of SEQ ID NO: 1816
cauagucaccgagguaugu

SEQ ID NO: 141395 - RNA, 19 nt, Artificial Sequence
  Description of Artificial Sequence: Synthetic oligonucleotide
  Antisense strand to SEQ ID NO: 141394
acauaccucggugacuaug

SEQ ID NO: 141396 - RNA, 19 nt, Artificial Sequence
  Description of Artificial Sequence: Synthetic oligonucleotide
  Sense strand starting at position 3413 of SEQ ID NO: 1816
agcauagucaccgagguau

SEQ ID NO: 141397 - RNA, 19 nt, Artificial Sequence
  Description of Artificial Sequence: Synthetic oligonucleotide
  Antisense strand to SEQ ID NO: 141396
auaccucggugacuaugcu

SEQ ID NO: 141398 - RNA, 19 nt, Artificial Sequence
  Description of Artificial Sequence: Synthetic oligonucleotide
  Sense strand starting at position 3412 of SEQ ID NO: 1816
cagcauagucaccgaggua

SEQ ID NO: 141399 - RNA, 19 nt, Artificial Sequence
  Description of Artificial Sequence: Synthetic oligonucleotide
  Antisense strand to SEQ ID NO: 141398
uaccucggugacuaugcug

SEQ ID NO: 141400 - RNA, 19 nt, Artificial Sequence
  Description of Artificial Sequence: Synthetic oligonucleotide
  Sense strand starting at position 3400 of SEQ ID NO: 1816
agcaguugagcccagcaua

SEQ ID NO: 141401 - RNA, 19 nt, Artificial Sequence
  Description of Artificial Sequence: Synthetic oligonucleotide
  Antisense strand to SEQ ID NO: 141400
uaugcugggcucaacugcu

SEQ ID NO: 141402 - RNA, 19 nt, Artificial Sequence
  Description of Artificial Sequence: Synthetic oligonucleotide
  Sense strand starting at position 3263 of SEQ ID NO: 1816
agugaagcuuaacaucaaa

SEQ ID NO: 141403 - RNA, 19 nt, Artificial Sequence
  Description of Artificial Sequence: Synthetic oligonucleotide
  Antisense strand to SEQ ID NO: 141402
uuugauguuaagcuucacu

SEQ ID NO: 141404 - RNA, 19 nt, Artificial Sequence
  Description of Artificial Sequence: Synthetic oligonucleotide
  Sense strand starting at position 2981 of SEQ ID NO: 1816
ucccuuagccggcagagaa

SEQ ID NO: 141405 - RNA, 19 nt, Artificial Sequence
  Description of Artificial Sequence: Synthetic oligonucleotide
  Antisense strand to SEQ ID NO: 141404
uucucugccggcuaaggga

SEQ ID NO: 141406 - RNA, 19 nt, Artificial Sequence
  Description of Artificial Sequence: Synthetic oligonucleotide
  Sense strand starting at position 2969 of SEQ ID NO: 1816
gcuggugucucuucccuua

SEQ ID NO: 141407 - RNA, 19 nt, Artificial Sequence
  Description of Artificial Sequence: Synthetic oligonucleotide
  Antisense strand to SEQ ID NO: 141406
uaagggaagagacaccagc

SEQ ID NO: 141408 - RNA, 19 nt, Artificial Sequence
  Description of Artificial Sequence: Synthetic oligonucleotide
  Sense strand starting at position 2896 of SEQ ID NO: 1816
cuuacauuggcagguauua

SEQ ID NO: 141409 - RNA, 19 nt, Artificial Sequence
  Description of Artificial Sequence: Synthetic oligonucleotide
  Antisense strand to SEQ ID NO: 141408
uaauaccugccaauguaag

SEQ ID NO: 141410 - RNA, 19 nt, Artificial Sequence
  Description of Artificial Sequence: Synthetic oligonucleotide
  Sense strand starting at position 2871 of SEQ ID NO: 1816
gcgaguuucagugauagga

SEQ ID NO: 141411 - RNA, 19 nt, Artificial Sequence
  Description of Artificial Sequence: Synthetic oligonucleotide
  Antisense strand to SEQ ID NO: 141410
uccuaucacugaaacucgc

SEQ ID NO: 141412 - RNA, 19 nt, Artificial Sequence
  Description of Artificial Sequence: Synthetic oligonucleotide
  Sense strand starting at position 2869 of SEQ ID NO: 1816
gagcgaguuucagugauag

SEQ ID NO: 141413 - RNA, 19 nt, Artificial Sequence
  Description of Artificial Sequence: Synthetic oligonucleotide
  Antisense strand to SEQ ID NO: 141412
cuaucacugaaacucgcuc

SEQ ID NO: 141414 - RNA, 19 nt, Artificial Sequence
  Description of Artificial Sequence: Synthetic oligonucleotide
  Sense strand starting at position 2860 of SEQ ID NO: 1816
uaagcuguugagcgaguuu

SEQ ID NO: 141415 - RNA, 19 nt, Artificial Sequence
  Description of Artificial Sequence: Synthetic oligonucleotide
  Antisense strand to SEQ ID NO: 141414
aaacucgcucaacagcuua

SEQ ID NO: 141416 - RNA, 19 nt, Artificial Sequence
  Description of Artificial Sequence: Synthetic oligonucleotide
  Sense strand starting at position 2817 of SEQ ID NO: 1816
gggacaugauuacaacuau

SEQ ID NO: 141417 - RNA, 19 nt, Artificial Sequence
  Description of Artificial Sequence: Synthetic oligonucleotide
  Antisense strand to SEQ ID NO: 141416
auaguuguaaucauguccc

SEQ ID NO: 141418 - RNA, 19 nt, Artificial Sequence
  Description of Artificial Sequence: Synthetic oligonucleotide
  Sense strand starting at position 2715 of SEQ ID NO: 1816
ccuaucuaccguugucaua

SEQ ID NO: 141419 - RNA, 19 nt, Artificial Sequence
  Description of Artificial Sequence: Synthetic oligonucleotide
  Antisense strand to SEQ ID NO: 141418
uaugacaacgguagauagg

SEQ ID NO: 141420 - RNA, 19 nt, Artificial Sequence
  Description of Artificial Sequence: Synthetic oligonucleotide
  Sense strand starting at position 2365 of SEQ ID NO: 1816
uaggaauaugacgaacguu

SEQ ID NO: 141421 - RNA, 19 nt, Artificial Sequence
  Description of Artificial Sequence: Synthetic oligonucleotide
  Antisense strand to SEQ ID NO: 141420
aacguucgucauauuccua

SEQ ID NO: 141422 - RNA, 19 nt, Artificial Sequence
  Description of Artificial Sequence: Synthetic oligonucleotide
  Sense strand starting at position 1312 of SEQ ID NO: 1816
cacuaaugcgauggugauc

SEQ ID NO: 141423 - RNA, 19 nt, Artificial Sequence
  Description of Artificial Sequence: Synthetic oligonucleotide
  Antisense strand to SEQ ID NO: 141422
gaucaccaucgcauuagug

SEQ ID NO: 141424 - RNA, 19 nt, Artificial Sequence
  Description of Artificial Sequence: Synthetic oligonucleotide
  Sense strand starting at position 1311 of SEQ ID NO: 1816
ucacuaaugcgauggugau

SEQ ID NO: 141425 - RNA, 19 nt, Artificial Sequence
  Description of Artificial Sequence: Synthetic oligonucleotide
  Antisense strand to SEQ ID NO: 141424
aucaccaucgcauuaguga

SEQ ID NO: 141426 - RNA, 19 nt, Artificial Sequence
  Description of Artificial Sequence: Synthetic oligonucleotide
  Sense strand starting at position 1157 of SEQ ID NO: 1816
cuggauugcuuccuacacu

SEQ ID NO: 141427 - RNA, 19 nt, Artificial Sequence
  Description of Artificial Sequence: Synthetic oligonucleotide
  Antisense strand to SEQ ID NO: 141426
aguguaggaagcaauccag

SEQ ID NO: 141428 - RNA, 19 nt, Artificial Sequence
  Description of Artificial Sequence: Synthetic oligonucleotide
  Sense strand starting at position 1132 of SEQ ID NO: 1816
ccuuguuuguaucugaaac

SEQ ID NO: 141429 - RNA, 19 nt, Artificial Sequence
  Description of Artificial Sequence: Synthetic oligonucleotide
  Antisense strand to SEQ ID NO: 141428
guuucagauacaaacaagg

SEQ ID NO: 141430 - RNA, 19 nt, Artificial Sequence
  Description of Artificial Sequence: Synthetic oligonucleotide
  Sense strand starting at position 1072 of SEQ ID NO: 1816
acaaguggaagcgaauauu

SEQ ID NO: 141431 - RNA, 19 nt, Artificial Sequence
  Description of Artificial Sequence: Synthetic oligonucleotide
  Antisense strand to SEQ ID NO: 141430
aauauucgcuuccacuugu

SEQ ID NO: 141432 - RNA, 19 nt, Artificial Sequence
  Description of Artificial Sequence: Synthetic oligonucleotide
  Sense strand starting at position 1018 of SEQ ID NO: 1816
aucagagacuucuaugaaa

SEQ ID NO: 141433 - RNA, 19 nt, Artificial Sequence
  Description of Artificial Sequence: Synthetic oligonucleotide
  Antisense strand to SEQ ID NO: 141432
uuucauagaagucucugau

SEQ ID NO: 141434 - RNA, 19 nt, Artificial Sequence
  Description of Artificial Sequence: Synthetic oligonucleotide
  Sense strand starting at position 1005 of SEQ ID NO: 1816
ugccaaauaguacaucaga

SEQ ID NO: 141435 - RNA, 19 nt, Artificial Sequence
  Description of Artificial Sequence: Synthetic oligonucleotide
  Antisense strand to SEQ ID NO: 141434
ucugauguacuauuuggca

SEQ ID NO: 141436 - RNA, 19 nt, Artificial Sequence
  Description of Artificial Sequence: Synthetic oligonucleotide
  Sense strand starting at position 958 of SEQ ID NO: 1816
uuuacaucguauguaauca

SEQ ID NO: 141437 - RNA, 19 nt, Artificial Sequence
  Description of Artificial Sequence: Synthetic oligonucleotide
  Antisense strand to SEQ ID NO: 141436
ugauuacauacgauguaaa

SEQ ID NO: 141438 - RNA, 19 nt, Artificial Sequence
  Description of Artificial Sequence: Synthetic oligonucleotide
  Sense strand starting at position 957 of SEQ ID NO: 1816
cuuuacaucguauguaauc

SEQ ID NO: 141439 - RNA, 19 nt, Artificial Sequence
  Description of Artificial Sequence: Synthetic oligonucleotide
  Antisense strand to SEQ ID NO: 141438
gauuacauacgauguaaag

SEQ ID NO: 141440 - RNA, 19 nt, Artificial Sequence
  Description of Artificial Sequence: Synthetic oligonucleotide
  Sense strand starting at position 908 of SEQ ID NO: 1816
aguuuaagauauugaacca

SEQ ID NO: 141441 - RNA, 19 nt, Artificial Sequence
  Description of Artificial Sequence: Synthetic oligonucleotide
  Antisense strand to SEQ ID NO: 141440
ugguucaauaucuuaaacu

SEQ ID NO: 141442 - RNA, 19 nt, Artificial Sequence
  Description of Artificial Sequence: Synthetic oligonucleotide
  Sense strand starting at position 890 of SEQ ID NO: 1816
ugaauuauguguuuacaga

SEQ ID NO: 141443 - RNA, 19 nt, Artificial Sequence
  Description of Artificial Sequence: Synthetic oligonucleotide
  Antisense strand to SEQ ID NO: 141442
ucuguaaacacauaauuca

SEQ ID NO: 141444 - RNA, 19 nt, Artificial Sequence
  Description of Artificial Sequence: Synthetic oligonucleotide
  Sense strand starting at position 888 of SEQ ID NO: 1816
ccugaauuauguguuuaca

SEQ ID NO: 141445 - RNA, 19 nt, Artificial Sequence
  Description of Artificial Sequence: Synthetic oligonucleotide
  Antisense strand to SEQ ID NO: 141444
uguaaacacauaauucagg

SEQ ID NO: 141446 - RNA, 19 nt, Artificial Sequence
  Description of Artificial Sequence: Synthetic oligonucleotide
  Sense strand starting at position 861 of SEQ ID NO: 1816
acacauuugugugaugcau

SEQ ID NO: 141447 - RNA, 19 nt, Artificial Sequence
  Description of Artificial Sequence: Synthetic oligonucleotide
  Antisense strand to SEQ ID NO: 141446
augcaucacacaaaugugu

SEQ ID NO: 141448 - RNA, 19 nt, Artificial Sequence
  Description of Artificial Sequence: Synthetic oligonucleotide
  Sense strand starting at position 858 of SEQ ID NO: 1816
agaacacauuugugugaug

SEQ ID NO: 141449 - RNA, 19 nt, Artificial Sequence
  Description of Artificial Sequence: Synthetic oligonucleotide
  Antisense strand to SEQ ID NO: 141448
caucacacaaauguguucu

SEQ ID NO: 141450 - RNA, 19 nt, Artificial Sequence
  Description of Artificial Sequence: Synthetic oligonucleotide
  Sense strand starting at position 805 of SEQ ID NO: 1816
agucuuccuggauggaaag

SEQ ID NO: 141451 - RNA, 19 nt, Artificial Sequence
  Description of Artificial Sequence: Synthetic oligonucleotide
  Antisense strand to SEQ ID NO: 141450
cuuuccauccaggaagacu

SEQ ID NO: 141452 - RNA, 19 nt, Artificial Sequence
  Description of Artificial Sequence: Synthetic oligonucleotide
  Sense strand starting at position 802 of SEQ ID NO: 1816
cacagucuuccuggaugga

SEQ ID NO: 141453 - RNA, 19 nt, Artificial Sequence
  Description of Artificial Sequence: Synthetic oligonucleotide
  Antisense strand to SEQ ID NO: 141452
uccauccaggaagacugug

SEQ ID NO: 141454 - RNA, 19 nt, Artificial Sequence
  Description of Artificial Sequence: Synthetic oligonucleotide
  Sense strand starting at position 758 of SEQ ID NO: 1816
agcugaugaccuggcuaaa

SEQ ID NO: 141455 - RNA, 19 nt, Artificial Sequence
  Description of Artificial Sequence: Synthetic oligonucleotide
  Antisense strand to SEQ ID NO: 141454
uuuagccaggucaucagcu

SEQ ID NO: 141456 - RNA, 19 nt, Artificial Sequence
  Description of Artificial Sequence: Synthetic oligonucleotide
  Sense strand starting at position 731 of SEQ ID NO: 1816
aaggcuugccaaugcagua

SEQ ID NO: 141457 - RNA, 19 nt, Artificial Sequence
  Description of Artificial Sequence: Synthetic oligonucleotide
  Antisense strand to SEQ ID NO: 141456
uacugcauuggcaagccuu

SEQ ID NO: 141458 - RNA, 19 nt, Artificial Sequence
  Description of Artificial Sequence: Synthetic oligonucleotide
  Sense strand starting at position 233 of SEQ ID NO: 1816
ggauuuccgcgucacacua

SEQ ID NO: 141459 - RNA, 19 nt, Artificial Sequence
  Description of Artificial Sequence: Synthetic oligonucleotide
  Antisense strand to SEQ ID NO: 141458
uagugugacgcggaaaucc

SEQ ID NO: 141460 - RNA, 19 nt, Artificial Sequence
  Description of Artificial Sequence: Synthetic oligonucleotide
  Sense strand starting at position 230 of SEQ ID NO: 1816
aauggauuuccgcgucaca

SEQ ID NO: 141461 - RNA, 19 nt, Artificial Sequence
  Description of Artificial Sequence: Synthetic oligonucleotide
  Antisense strand to SEQ ID NO: 141460
ugugacgcggaaauccauu

SEQ ID NO: 141462 - RNA, 19 nt, Artificial Sequence
  Description of Artificial Sequence: Synthetic oligonucleotide
  Sense strand starting at position 186 of SEQ ID NO: 1816
gguguugaacuuuagagcu

SEQ ID NO: 141463 - RNA, 19 nt, Artificial Sequence
  Description of Artificial Sequence: Synthetic oligonucleotide
  Antisense strand to SEQ ID NO: 141462
agcucuaaaguucaacacc

SEQ ID NO: 141464 - RNA, 19 nt, Artificial Sequence
  Description of Artificial Sequence: Synthetic oligonucleotide
  Sense strand starting at position 176 of SEQ ID NO: 1816
aguaacaaacgguguugaa

SEQ ID NO: 141465 - RNA, 19 nt, Artificial Sequence
  Description of Artificial Sequence: Synthetic oligonucleotide
  Antisense strand to SEQ ID NO: 141464
uucaacaccguuuguuacu

SEQ ID NO: 141466 - RNA, 19 nt, Artificial Sequence
  Description of Artificial Sequence: Synthetic oligonucleotide
  Sense strand starting at position 134 of SEQ ID NO: 1816
ggagauugcuguccgaccu

SEQ ID NO: 141467 - RNA, 19 nt, Artificial Sequence
  Description of Artificial Sequence: Synthetic oligonucleotide
  Antisense strand to SEQ ID NO: 141466
aggucggacagcaaucucc

SEQ ID NO: 141468 - RNA, 19 nt, Artificial Sequence
  Description of Artificial Sequence: Synthetic oligonucleotide
  Sense strand starting at position 74 of SEQ ID NO: 1816
uguugugcuguguauaauu

SEQ ID NO: 141469 - RNA, 19 nt, Artificial Sequence
  Description of Artificial Sequence: Synthetic oligonucleotide
  Antisense strand to SEQ ID NO: 141468
aauuauacacagcacaaca

SEQ ID NO: 141470 - RNA, 19 nt, Artificial Sequence
  Description of Artificial Sequence: Synthetic oligonucleotide
  Sense strand starting at position 61 of SEQ ID NO: 1816
gacugaugcuauuuguugu

SEQ ID NO: 141471 - RNA, 19 nt, Artificial Sequence
  Description of Artificial Sequence: Synthetic oligonucleotide
  Antisense strand to SEQ ID NO: 141470
acaacaaauagcaucaguc

SEQ ID NO: 141472 - RNA, 19 nt, Artificial Sequence
  Description of Artificial Sequence: Synthetic oligonucleotide
  Sense strand starting at position 49 of SEQ ID NO: 1816
ugagauauauaagacugau

SEQ ID NO: 141473 - RNA, 19 nt, Artificial Sequence
  Description of Artificial Sequence: Synthetic oligonucleotide
  Antisense strand to SEQ ID NO: 141472
aucagucuuauauaucuca

SEQ ID NO: 141474 - RNA, 19 nt, Artificial Sequence
  Description of Artificial Sequence: Synthetic oligonucleotide
  Sense strand starting at position 3876 of SEQ ID NO: 1815
uuaucagcucuacaagugu

SEQ ID NO: 141475 - RNA, 19 nt, Artificial Sequence
  Description of Artificial Sequence: Synthetic oligonucleotide
  Antisense strand to SEQ ID NO: 141474
acacuuguagagcugauaa

SEQ ID NO: 141476 - RNA, 19 nt, Artificial Sequence
  Description of Artificial Sequence: Synthetic oligonucleotide
  Sense strand starting at position 3860 of SEQ ID NO: 1815
gcaaacaagugcuccauua

SEQ ID NO: 141477 - RNA, 19 nt, Artificial Sequence
  Description of Artificial Sequence: Synthetic oligonucleotide
  Antisense strand to SEQ ID NO: 141476
uaauggagcacuuguuugc

SEQ ID NO: 141478 - RNA, 19 nt, Artificial Sequence
  Description of Artificial Sequence: Synthetic oligonucleotide
  Sense strand starting at position 3794 of SEQ ID NO: 1815
guaucuuagcuagauguac

SEQ ID NO: 141479 - RNA, 19 nt, Artificial Sequence
  Description of Artificial Sequence: Synthetic oligonucleotide
  Antisense strand to SEQ ID NO: 141478
guacaucuagcuaagauac

SEQ ID NO: 141480 - RNA, 19 nt, Artificial Sequence
  Description of Artificial Sequence: Synthetic oligonucleotide
  Sense strand starting at position 3791 of SEQ ID NO: 1815
ucaguaucuuagcuagaug

SEQ ID NO: 141481 - RNA, 19 nt, Artificial Sequence
  Description of Artificial Sequence: Synthetic oligonucleotide
  Antisense strand to SEQ ID NO: 141480
caucuagcuaagauacuga

SEQ ID NO: 141482 - RNA, 19 nt, Artificial Sequence
  Description of Artificial Sequence: Synthetic oligonucleotide
  Sense strand starting at position 3772 of SEQ ID NO: 1815
ucccaacuuggugaacauu

SEQ ID NO: 141483 - RNA, 19 nt, Artificial Sequence
  Description of Artificial Sequence: Synthetic oligonucleotide
  Antisense strand to SEQ ID NO: 141482
aauguucaccaaguuggga

SEQ ID NO: 141484 - RNA, 19 nt, Artificial Sequence
  Description of Artificial Sequence: Synthetic oligonucleotide
  Sense strand starting at position 3404 of SEQ ID NO: 1815
cuaaacuguuccucaguuu

SEQ ID NO: 141485 - RNA, 19 nt, Artificial Sequence
  Description of Artificial Sequence: Synthetic oligonucleotide
  Antisense strand to SEQ ID NO: 141484
aaacugaggaacaguuuag

SEQ ID NO: 141486 - RNA, 19 nt, Artificial Sequence
  Description of Artificial Sequence: Synthetic oligonucleotide
  Sense strand starting at position 3403 of SEQ ID NO: 1815
acuaaacuguuccucaguu

SEQ ID NO: 141487 - RNA, 19 nt, Artificial Sequence
  Description of Artificial Sequence: Synthetic oligonucleotide
  Antisense strand to SEQ ID NO: 141486
aacugaggaacaguuuagu

SEQ ID NO: 141488 - RNA, 19 nt, Artificial Sequence
  Description of Artificial Sequence: Synthetic oligonucleotide
  Sense strand starting at position 3275 of SEQ ID NO: 1815
gucaaauuauuugucguuu

SEQ ID NO: 141489 - RNA, 19 nt, Artificial Sequence
  Description of Artificial Sequence: Synthetic oligonucleotide
  Antisense strand to SEQ ID NO: 141488
aaacgacaaauaauuugac

SEQ ID NO: 141490 - RNA, 19 nt, Artificial Sequence
  Description of Artificial Sequence: Synthetic oligonucleotide
  Sense strand starting at position 2688 of SEQ ID NO: 1815
agcucuggcugacuagauu

SEQ ID NO: 141491 - RNA, 19 nt, Artificial Sequence
  Description of Artificial Sequence: Synthetic oligonucleotide
  Antisense strand to SEQ ID NO: 141490
aaucuagucagccagagcu

SEQ ID NO: 141492 - RNA, 19 nt, Artificial Sequence
  Description of Artificial Sequence: Synthetic oligonucleotide
  Sense strand starting at position 2686 of SEQ ID NO: 1815
ggagcucuggcugacuaga

SEQ ID NO: 141493 - RNA, 19 nt, Artificial Sequence
  Description of Artificial Sequence: Synthetic oligonucleotide
  Antisense strand to SEQ ID NO: 141492
ucuagucagccagagcucc

SEQ ID NO: 141494 - RNA, 19 nt, Artificial Sequence
  Description of Artificial Sequence: Synthetic oligonucleotide
  Sense strand starting at position 2581 of SEQ ID NO: 1815
uguaucuuaucucuuagag

SEQ ID NO: 141495 - RNA, 19 nt, Artificial Sequence
  Description of Artificial Sequence: Synthetic oligonucleotide
  Antisense strand to SEQ ID NO: 141494
cucuaagagauaagauaca

SEQ ID NO: 141496 - RNA, 19 nt, Artificial Sequence
  Description of Artificial Sequence: Synthetic oligonucleotide
  Sense strand starting at position 2222 of SEQ ID NO: 1815
agagauagcuucccaagga

SEQ ID NO: 141497 - RNA, 19 nt, Artificial Sequence
  Description of Artificial Sequence: Synthetic oligonucleotide
  Antisense strand to SEQ ID NO: 141496
uccuugggaagcuaucucu

SEQ ID NO: 141498 - RNA, 19 nt, Artificial Sequence
  Description of Artificial Sequence: Synthetic oligonucleotide
  Sense strand starting at position 2204 of SEQ ID NO: 1815
ugaauucugcaugggauua

SEQ ID NO: 141499 - RNA, 19 nt, Artificial Sequence
  Description of Artificial Sequence: Synthetic oligonucleotide
  Antisense strand to SEQ ID NO: 141498
uaaucccaugcagaauuca

SEQ ID NO: 141500 - RNA, 19 nt, Artificial Sequence
  Description of Artificial Sequence: Synthetic oligonucleotide
  Sense strand starting at position 2203 of SEQ ID NO: 1815
uugaauucugcaugggauu

SEQ ID NO: 141501 - RNA, 19 nt, Artificial Sequence
  Description of Artificial Sequence: Synthetic oligonucleotide
  Antisense strand to SEQ ID NO: 141500
aaucccaugcagaauucaa

SEQ ID NO: 141502 - RNA, 19 nt, Artificial Sequence
  Description of Artificial Sequence: Synthetic oligonucleotide
  Sense strand starting at position 2175 of SEQ ID NO: 1815
cugauaugucagcacagac

SEQ ID NO: 141503 - RNA, 19 nt, Artificial Sequence
  Description of Artificial Sequence: Synthetic oligonucleotide
  Antisense strand to SEQ ID NO: 141502
gucugugcugacauaucag

SEQ ID NO: 141504 - RNA, 19 nt, Artificial Sequence
  Description of Artificial Sequence: Synthetic oligonucleotide
  Sense strand starting at position 2174 of SEQ ID NO: 1815
acugauaugucagcacaga

SEQ ID NO: 141505 - RNA, 19 nt, Artificial Sequence
  Description of Artificial Sequence: Synthetic oligonucleotide
  Antisense strand to SEQ ID NO: 141504
ucugugcugacauaucagu

SEQ ID NO: 141506 - RNA, 19 nt, Artificial Sequence
  Description of Artificial Sequence: Synthetic oligonucleotide
  Sense strand starting at position 2071 of SEQ ID NO: 1815
aagacuguaucugugaaac

SEQ ID NO: 141507 - RNA, 19 nt, Artificial Sequence
  Description of Artificial Sequence: Synthetic oligonucleotide
  Antisense strand to SEQ ID NO: 141506
guuucacagauacagucuu

SEQ ID NO: 141508 - RNA, 19 nt, Artificial Sequence
  Description of Artificial Sequence: Synthetic oligonucleotide
  Sense strand starting at position 2069 of SEQ ID NO: 1815
acaagacuguaucugugaa

SEQ ID NO: 141509 - RNA, 19 nt, Artificial Sequence
  Description of Artificial Sequence: Synthetic oligonucleotide
  Antisense strand to SEQ ID NO: 141508
uucacagauacagucuugu

SEQ ID NO: 141510 - RNA, 19 nt, Artificial Sequence
  Description of Artificial Sequence: Synthetic oligonucleotide
  Sense strand starting at position 2025 of SEQ ID NO: 1815
auacacuuacauugugauu

SEQ ID NO: 141511 - RNA, 19 nt, Artificial Sequence
  Description of Artificial Sequence: Synthetic oligonucleotide
  Antisense strand to SEQ ID NO: 141510
aaucacaauguaaguguau

SEQ ID NO: 141512 - RNA, 19 nt, Artificial Sequence
  Description of Artificial Sequence: Synthetic oligonucleotide
  Sense strand starting at position 1380 of SEQ ID NO: 1815
aucagucauccauaugggu

SEQ ID NO: 141513 - RNA, 19 nt, Artificial Sequence
  Description of Artificial Sequence: Synthetic oligonucleotide
  Antisense strand to SEQ ID NO: 141512
acccauauggaugacugau

SEQ ID NO: 141514 - RNA, 19 nt, Artificial Sequence
  Description of Artificial Sequence: Synthetic oligonucleotide
  Sense strand starting at position 1297 of SEQ ID NO: 1815
gaggauggguaguuuggaa

SEQ ID NO: 141515 - RNA, 19 nt, Artificial Sequence
  Description of Artificial Sequence: Synthetic oligonucleotide
  Antisense strand to SEQ ID NO: 141514
uuccaaacuacccauccuc

SEQ ID NO: 141516 - RNA, 19 nt, Artificial Sequence
  Description of Artificial Sequence: Synthetic oligonucleotide
  Sense strand starting at position 1277 of SEQ ID NO: 1815
gcagaaccuugagcaauaa

SEQ ID NO: 141517 - RNA, 19 nt, Artificial Sequence
  Description of Artificial Sequence: Synthetic oligonucleotide
  Antisense strand to SEQ ID NO: 141516
uuauugcucaagguucugc

SEQ ID NO: 141518 - RNA, 19 nt, Artificial Sequence
  Description of Artificial Sequence: Synthetic oligonucleotide
  Sense strand starting at position 1274 of SEQ ID NO: 1815
agagcagaaccuugagcaa

SEQ ID NO: 141519 - RNA, 19 nt, Artificial Sequence
  Description of Artificial Sequence: Synthetic oligonucleotide
  Antisense strand to SEQ ID NO: 141518
uugcucaagguucugcucu

SEQ ID NO: 141520 - RNA, 19 nt, Artificial Sequence
  Description of Artificial Sequence: Synthetic oligonucleotide
  Sense strand starting at position 1242 of SEQ ID NO: 1815
ggaugaaugucaccaaagu

SEQ ID NO: 141521 - RNA, 19 nt, Artificial Sequence
  Description of Artificial Sequence: Synthetic oligonucleotide
  Antisense strand to SEQ ID NO: 141520
acuuuggugacauucaucc

SEQ ID NO: 141522 - RNA, 19 nt, Artificial Sequence
  Description of Artificial Sequence: Synthetic oligonucleotide
  Sense strand starting at position 1223 of SEQ ID NO: 1815
gugcaacgaccuuaagaca

SEQ ID NO: 141523 - RNA, 19 nt, Artificial Sequence
  Description of Artificial Sequence: Synthetic oligonucleotide
  Antisense strand to SEQ ID NO: 141522
ugucuuaaggucguugcac

SEQ ID NO: 141524 - RNA, 19 nt, Artificial Sequence
  Description of Artificial Sequence: Synthetic oligonucleotide
  Sense strand starting at position 1142 of SEQ ID NO: 1815
gccuaaucaccagagguuc

SEQ ID NO: 141525 - RNA, 19 nt, Artificial Sequence
  Description of Artificial Sequence: Synthetic oligonucleotide
  Antisense strand to SEQ ID NO: 141524
gaaccucuggugauuaggc

SEQ ID NO: 141526 - RNA, 19 nt, Artificial Sequence
  Description of Artificial Sequence: Synthetic oligonucleotide
  Sense strand starting at position 1132 of SEQ ID NO: 1815
guauuuagcugccuaauca

SEQ ID NO: 141527 - RNA, 19 nt, Artificial Sequence
  Description of Artificial Sequence: Synthetic oligonucleotide
  Antisense strand to SEQ ID NO: 141526
ugauuaggcagcuaaauac

SEQ ID NO: 141528 - RNA, 19 nt, Artificial Sequence
  Description of Artificial Sequence: Synthetic oligonucleotide
  Sense strand starting at position 1129 of SEQ ID NO: 1815
ggaguauuuagcugccuaa

SEQ ID NO: 141529 - RNA, 19 nt, Artificial Sequence
  Description of Artificial Sequence: Synthetic oligonucleotide
  Antisense strand to SEQ ID NO: 141528
uuaggcagcuaaauacucc

SEQ ID NO: 141530 - RNA, 19 nt, Artificial Sequence
  Description of Artificial Sequence: Synthetic oligonucleotide
  Sense strand starting at position 1128 of SEQ ID NO: 1815
uggaguauuuagcugccua

SEQ ID NO: 141531 - RNA, 19 nt, Artificial Sequence
  Description of Artificial Sequence: Synthetic oligonucleotide
  Antisense strand to SEQ ID NO: 141530
uaggcagcuaaauacucca

SEQ ID NO: 141532 - RNA, 19 nt, Artificial Sequence
  Description of Artificial Sequence: Synthetic oligonucleotide
  Sense strand starting at position 1116 of SEQ ID NO: 1815
cuuuauccacacuggagua

SEQ ID NO: 141533 - RNA, 19 nt, Artificial Sequence
  Description of Artificial Sequence: Synthetic oligonucleotide
  Antisense strand to SEQ ID NO: 141532
uacuccaguguggauaaag

SEQ ID NO: 141534 - RNA, 19 nt, Artificial Sequence
  Description of Artificial Sequence: Synthetic oligonucleotide
  Sense strand starting at position 941 of SEQ ID NO: 1815
agccuaucucuguagcaca

SEQ ID NO: 141535 - RNA, 19 nt, Artificial Sequence
  Description of Artificial Sequence: Synthetic oligonucleotide
  Antisense strand to SEQ ID NO: 141534
ugugcuacagagauaggcu

SEQ ID NO: 141536 - RNA, 19 nt, Artificial Sequence
  Description of Artificial Sequence: Synthetic oligonucleotide
  Sense strand starting at position 870 of SEQ ID NO: 1815
uuacaauuaucuguaacga

SEQ ID NO: 141537 - RNA, 19 nt, Artificial Sequence
  Description of Artificial Sequence: Synthetic oligonucleotide
  Antisense strand to SEQ ID NO: 141536
ucguuacagauaauuguaa

SEQ ID NO: 141538 - RNA, 19 nt, Artificial Sequence
  Description of Artificial Sequence: Synthetic oligonucleotide
  Sense strand starting at position 853 of SEQ ID NO: 1815
ucgugugaccggcuuuauu

SEQ ID NO: 141539 - RNA, 19 nt, Artificial Sequence
  Description of Artificial Sequence: Synthetic oligonucleotide
  Antisense strand to SEQ ID NO: 141538
aauaaagccggucacacga

SEQ ID NO: 141540 - RNA, 19 nt, Artificial Sequence
  Description of Artificial Sequence: Synthetic oligonucleotide
  Sense strand starting at position 710 of SEQ ID NO: 1815
ccaaccgaucauuaguauu

SEQ ID NO: 141541 - RNA, 19 nt, Artificial Sequence
  Description of Artificial Sequence: Synthetic oligonucleotide
  Antisense strand to SEQ ID NO: 141540
aauacuaaugaucgguugg

SEQ ID NO: 141542 - RNA, 19 nt, Artificial Sequence
  Description of Artificial Sequence: Synthetic oligonucleotide
  Sense strand starting at position 477 of SEQ ID NO: 1815
cgugaucauguucacugua

SEQ ID NO: 141543 - RNA, 19 nt, Artificial Sequence
  Description of Artificial Sequence: Synthetic oligonucleotide
  Antisense strand to SEQ ID NO: 141542
uacagugaacaugaucacg

SEQ ID NO: 141544 - RNA, 19 nt, Artificial Sequence
  Description of Artificial Sequence: Synthetic oligonucleotide
  Sense strand starting at position 283 of SEQ ID NO: 1815
cgugaaaugcuguugucuu

SEQ ID NO: 141545 - RNA, 19 nt, Artificial Sequence
  Description of Artificial Sequence: Synthetic oligonucleotide
  Antisense strand to SEQ ID NO: 141544
aagacaacagcauuucacg

SEQ ID NO: 141546 - RNA, 19 nt, Artificial Sequence
  Description of Artificial Sequence: Synthetic oligonucleotide
  Sense strand starting at position 282 of SEQ ID NO: 1815
ucgugaaaugcuguugucu

SEQ ID NO: 141547 - RNA, 19 nt, Artificial Sequence
  Description of Artificial Sequence: Synthetic oligonucleotide
  Antisense strand to SEQ ID NO: 141546
agacaacagcauuucacga

SEQ ID NO: 141548 - RNA, 19 nt, Artificial Sequence
  Description of Artificial Sequence: Synthetic oligonucleotide
  Sense strand starting at position 274 of SEQ ID NO: 1815
gaaaucuuucgugaaaugc

SEQ ID NO: 141549 - RNA, 19 nt, Artificial Sequence
  Description of Artificial Sequence: Synthetic oligonucleotide
  Antisense strand to SEQ ID NO: 141548
gcauuucacgaaagauuuc

SEQ ID NO: 141550 - RNA, 19 nt, Artificial Sequence
  Description of Artificial Sequence: Synthetic oligonucleotide
  Sense strand starting at position 224 of SEQ ID NO: 1815
gaacuucuacuguagguaa

SEQ ID NO: 141551 - RNA, 19 nt, Artificial Sequence
  Description of Artificial Sequence: Synthetic oligonucleotide
  Antisense strand to SEQ ID NO: 141550
uuaccuacaguagaaguuc

SEQ ID NO: 141552 - RNA, 19 nt, Artificial Sequence
  Description of Artificial Sequence: Synthetic oligonucleotide
  Sense strand starting at position 5 of SEQ ID NO: 1815
uaaagaugugacugaauuc

SEQ ID NO: 141553 - RNA, 19 nt, Artificial Sequence
  Description of Artificial Sequence: Synthetic oligonucleotide
  Antisense strand to SEQ ID NO: 141552
gaauucagucacaucuuua

SEQ ID NO: 141554 - RNA, 19 nt, Artificial Sequence
  Description of Artificial Sequence: Synthetic oligonucleotide
  Sense strand starting at position 3909 of SEQ ID NO: 1818
cgacauuaggauuaaguuu

SEQ ID NO: 141555 - RNA, 19 nt, Artificial Sequence
  Description of Artificial Sequence: Synthetic oligonucleotide
  Antisense strand to SEQ ID NO: 141554
aaacuuaauccuaaugucg

SEQ ID NO: 141556 - RNA, 19 nt, Artificial Sequence
  Description of Artificial Sequence: Synthetic oligonucleotide
  Sense strand starting at position 3897 of SEQ ID NO: 1818
gggcuuaaacuacgacauu

SEQ ID NO: 141557 - RNA, 19 nt, Artificial Sequence
  Description of Artificial Sequence: Synthetic oligonucleotide
  Antisense strand to SEQ ID NO: 141556
aaugucguaguuuaagccc

SEQ ID NO: 141558 - RNA, 19 nt, Artificial Sequence
  Description of Artificial Sequence: Synthetic oligonucleotide
  Sense strand starting at position 3810 of SEQ ID NO: 1818
caucaaucagacuggguua

SEQ ID NO: 141559 - RNA, 19 nt, Artificial Sequence
  Description of Artificial Sequence: Synthetic oligonucleotide
  Antisense strand to SEQ ID NO: 141558
uaacccagucugauugaug

SEQ ID NO: 141560 - RNA, 19 nt, Artificial Sequence
  Description of Artificial Sequence: Synthetic oligonucleotide
  Sense strand starting at position 3675 of SEQ ID NO: 1818
guuguauuugugcacugag

SEQ ID NO: 141561 - RNA, 19 nt, Artificial Sequence
  Description of Artificial Sequence: Synthetic oligonucleotide
  Antisense strand to SEQ ID NO: 141560
cucagugcacaaauacaac

SEQ ID NO: 141562 - RNA, 19 nt, Artificial Sequence
  Description of Artificial Sequence: Synthetic oligonucleotide
  Sense strand starting at position 3674 of SEQ ID NO: 1818
aguuguauuugugcacuga

SEQ ID NO: 141563 - RNA, 19 nt, Artificial Sequence
  Description of Artificial Sequence: Synthetic oligonucleotide
  Antisense strand to SEQ ID NO: 141562
ucagugcacaaauacaacu

SEQ ID NO: 141564 - RNA, 19 nt, Artificial Sequence
  Description of Artificial Sequence: Synthetic oligonucleotide
  Sense strand starting at position 3665 of SEQ ID NO: 1818
uugugauacaguuguauuu

SEQ ID NO: 141565 - RNA, 19 nt, Artificial Sequence
  Description of Artificial Sequence: Synthetic oligonucleotide
  Antisense strand to SEQ ID NO: 141564
aaauacaacuguaucacaa

SEQ ID NO: 141566 - RNA, 19 nt, Artificial Sequence
  Description of Artificial Sequence: Synthetic oligonucleotide
  Sense strand starting at position 3661 of SEQ ID NO: 1818
gugauugugauacaguugu

SEQ ID NO: 141567 - RNA, 19 nt, Artificial Sequence
  Description of Artificial Sequence: Synthetic oligonucleotide
  Antisense strand to SEQ ID NO: 141566
acaacuguaucacaaucac

SEQ ID NO: 141568 - RNA, 19 nt, Artificial Sequence
  Description of Artificial Sequence: Synthetic oligonucleotide
  Sense strand starting at position 3654 of SEQ ID NO: 1818
ggagacagugauugugaua

SEQ ID NO: 141569 - RNA, 19 nt, Artificial Sequence
  Description of Artificial Sequence: Synthetic oligonucleotide
  Antisense strand to SEQ ID NO: 141568
uaucacaaucacugucucc

SEQ ID NO: 141570 - RNA, 19 nt, Artificial Sequence
  Description of Artificial Sequence: Synthetic oligonucleotide
  Sense strand starting at position 3653 of SEQ ID NO: 1818
gggagacagugauugugau

SEQ ID NO: 141571 - RNA, 19 nt, Artificial Sequence
  Description of Artificial Sequence: Synthetic oligonucleotide
  Antisense strand to SEQ ID NO: 141570
aucacaaucacugucuccc

SEQ ID NO: 141572 - RNA, 19 nt, Artificial Sequence
  Description of Artificial Sequence: Synthetic oligonucleotide
  Sense strand starting at position 3560 of SEQ ID NO: 1818
uuuaguuucccugagguau

SEQ ID NO: 141573 - RNA, 19 nt, Artificial Sequence
  Description of Artificial Sequence: Synthetic oligonucleotide
  Antisense strand to SEQ ID NO: 141572
auaccucagggaaacuaaa

SEQ ID NO: 141574 - RNA, 19 nt, Artificial Sequence
  Description of Artificial Sequence: Synthetic oligonucleotide
  Sense strand starting at position 3482 of SEQ ID NO: 1818
ccuggagaugucugaugca

SEQ ID NO: 141575 - RNA, 19 nt, Artificial Sequence
  Description of Artificial Sequence: Synthetic oligonucleotide
  Antisense strand to SEQ ID NO: 141574
ugcaucagacaucuccagg

SEQ ID NO: 141576 - RNA, 19 nt, Artificial Sequence
  Description of Artificial Sequence: Synthetic oligonucleotide
  Sense strand starting at position 2869 of SEQ ID NO: 1818
cauagucaccgagguaugu

SEQ ID NO: 141577 - RNA, 19 nt, Artificial Sequence
  Description of Artificial Sequence: Synthetic oligonucleotide
  Antisense strand to SEQ ID NO: 141576
acauaccucggugacuaug

SEQ ID NO: 141578 - RNA, 19 nt, Artificial Sequence
  Description of Artificial Sequence: Synthetic oligonucleotide
  Sense strand starting at position 2867 of SEQ ID NO: 1818
agcauagucaccgagguau

SEQ ID NO: 141579 - RNA, 19 nt, Artificial Sequence
  Description of Artificial Sequence: Synthetic oligonucleotide
  Antisense strand to SEQ ID NO: 141578
auaccucggugacuaugcu

SEQ ID NO: 141580 - RNA, 19 nt, Artificial Sequence
  Description of Artificial Sequence: Synthetic oligonucleotide
  Sense strand starting at position 2866 of SEQ ID NO: 1818
cagcauagucaccgaggua

SEQ ID NO: 141581 - RNA, 19 nt, Artificial Sequence
  Description of Artificial Sequence: Synthetic oligonucleotide
  Antisense strand to SEQ ID NO: 141580
uaccucggugacuaugcug

SEQ ID NO: 141582 - RNA, 19 nt, Artificial Sequence
  Description of Artificial Sequence: Synthetic oligonucleotide
  Sense strand starting at position 2854 of SEQ ID NO: 1818
agcaguugagcccagcaua

SEQ ID NO: 141583 - RNA, 19 nt, Artificial Sequence
  Description of Artificial Sequence: Synthetic oligonucleotide
  Antisense strand to SEQ ID NO: 141582
uaugcugggcucaacugcu

SEQ ID NO: 141584 - RNA, 19 nt, Artificial Sequence
  Description of Artificial Sequence: Synthetic oligonucleotide
  Sense strand starting at position 2717 of SEQ ID NO: 1818
agugaagcuuaacaucaaa

SEQ ID NO: 141585 - RNA, 19 nt, Artificial Sequence
  Description of Artificial Sequence: Synthetic oligonucleotide
  Antisense strand to SEQ ID NO: 141584
uuugauguuaagcuucacu

SEQ ID NO: 141586 - RNA, 19 nt, Artificial Sequence
  Description of Artificial Sequence: Synthetic oligonucleotide
  Sense strand starting at position 2435 of SEQ ID NO: 1818
ucccuuagccggcagagaa

SEQ ID NO: 141587 - RNA, 19 nt, Artificial Sequence
  Description of Artificial Sequence: Synthetic oligonucleotide
  Antisense strand to SEQ ID NO: 141586
uucucugccggcuaaggga

SEQ ID NO: 141588 - RNA, 19 nt, Artificial Sequence
  Description of Artificial Sequence: Synthetic oligonucleotide
  Sense strand starting at position 2350 of SEQ ID NO: 1818
cuuacauuggcagguauua

SEQ ID NO: 141589 - RNA, 19 nt, Artificial Sequence
  Description of Artificial Sequence: Synthetic oligonucleotide
  Antisense strand to SEQ ID NO: 141588
uaauaccugccaauguaag

SEQ ID NO: 141590 - RNA, 19 nt, Artificial Sequence
  Description of Artificial Sequence: Synthetic oligonucleotide
  Sense strand starting at position 2325 of SEQ ID NO: 1818
gcgaguuucagugauagga

SEQ ID NO: 141591 - RNA, 19 nt, Artificial Sequence
  Description of Artificial Sequence: Synthetic oligonucleotide
  Antisense strand to SEQ ID NO: 141590
uccuaucacugaaacucgc

SEQ ID NO: 141592 - RNA, 19 nt, Artificial Sequence
  Description of Artificial Sequence: Synthetic oligonucleotide
  Sense strand starting at position 2323 of SEQ ID NO: 1818
gagcgaguuucagugauag

SEQ ID NO: 141593 - RNA, 19 nt, Artificial Sequence
  Description of Artificial Sequence: Synthetic oligonucleotide
  Antisense strand to SEQ ID NO: 141592
cuaucacugaaacucgcuc

SEQ ID NO: 141594 - RNA, 19 nt, Artificial Sequence
  Description of Artificial Sequence: Synthetic oligonucleotide
  Sense strand starting at position 2271 of SEQ ID NO: 1818
gggacaugauuacaacuau

SEQ ID NO: 141595 - RNA, 19 nt, Artificial Sequence
  Description of Artificial Sequence: Synthetic oligonucleotide
  Antisense strand to SEQ ID NO: 141594
auaguuguaaucauguccc

SEQ ID NO: 141596 - RNA, 19 nt, Artificial Sequence
  Description of Artificial Sequence: Synthetic oligonucleotide
  Sense strand starting at position 2169 of SEQ ID NO: 1818
ccuaucuaccguugucaua

SEQ ID NO: 141597 - RNA, 19 nt, Artificial Sequence
  Description of Artificial Sequence: Synthetic oligonucleotide
  Antisense strand to SEQ ID NO: 141596
uaugacaacgguagauagg

SEQ ID NO: 141598 - RNA, 19 nt, Artificial Sequence
  Description of Artificial Sequence: Synthetic oligonucleotide
  Sense strand starting at position 1819 of SEQ ID NO: 1818
uaggaauaugacgaacguu

SEQ ID NO: 141599 - RNA, 19 nt, Artificial Sequence
  Description of Artificial Sequence: Synthetic oligonucleotide
  Antisense strand to SEQ ID NO: 141598
aacguucgucauauuccua

SEQ ID NO: 141600 - RNA, 19 nt, Artificial Sequence
  Description of Artificial Sequence: Synthetic oligonucleotide
  Sense strand starting at position 766 of SEQ ID NO: 1818
cacuaaugcgauggugauc

SEQ ID NO: 141601 - RNA, 19 nt, Artificial Sequence
  Description of Artificial Sequence: Synthetic oligonucleotide
  Antisense strand to SEQ ID NO: 141600
gaucaccaucgcauuagug

SEQ ID NO: 141602 - RNA, 19 nt, Artificial Sequence
  Description of Artificial Sequence: Synthetic oligonucleotide
  Sense strand starting at position 765 of SEQ ID NO: 1818
ucacuaaugcgauggugau

SEQ ID NO: 141603 - RNA, 19 nt, Artificial Sequence
  Description of Artificial Sequence: Synthetic oligonucleotide
  Antisense strand to SEQ ID NO: 141602
aucaccaucgcauuaguga

SEQ ID NO: 141604 - RNA, 19 nt, Artificial Sequence
  Description of Artificial Sequence: Synthetic oligonucleotide
  Sense strand starting at position 611 of SEQ ID NO: 1818
cuggauugcuuccuacacu

SEQ ID NO: 141605 - RNA, 19 nt, Artificial Sequence
  Description of Artificial Sequence: Synthetic oligonucleotide
  Antisense strand to SEQ ID NO: 141604
aguguaggaagcaauccag

SEQ ID NO: 141606 - RNA, 19 nt, Artificial Sequence
  Description of Artificial Sequence: Synthetic oligonucleotide
  Sense strand starting at position 586 of SEQ ID NO: 1818
ccuuguuuguaucugaaac

SEQ ID NO: 141607 - RNA, 19 nt, Artificial Sequence
  Description of Artificial Sequence: Synthetic oligonucleotide
  Antisense strand to SEQ ID NO: 141606
guuucagauacaaacaagg

SEQ ID NO: 141608 - RNA, 19 nt, Artificial Sequence
  Description of Artificial Sequence: Synthetic oligonucleotide
  Sense strand starting at position 526 of SEQ ID NO: 1818
acaaguggaagcgaauauu

SEQ ID NO: 141609 - RNA, 19 nt, Artificial Sequence
  Description of Artificial Sequence: Synthetic oligonucleotide
  Antisense strand to SEQ ID NO: 141608
aauauucgcuuccacuugu

SEQ ID NO: 141610 - RNA, 19 nt, Artificial Sequence
  Description of Artificial Sequence: Synthetic oligonucleotide
  Sense strand starting at position 472 of SEQ ID NO: 1818
aucagagacuucuaugaaa

SEQ ID NO: 141611 - RNA, 19 nt, Artificial Sequence
  Description of Artificial Sequence: Synthetic oligonucleotide
  Antisense strand to SEQ ID NO: 141610
uuucauagaagucucugau

SEQ ID NO: 141612 - RNA, 19 nt, Artificial Sequence
  Description of Artificial Sequence: Synthetic oligonucleotide
  Sense strand starting at position 459 of SEQ ID NO: 1818
ugccaaauaguacaucaga

SEQ ID NO: 141613 - RNA, 19 nt, Artificial Sequence
  Description of Artificial Sequence: Synthetic oligonucleotide
  Antisense strand to SEQ ID NO: 141612
ucugauguacuauuuggca

SEQ ID NO: 141614 - RNA, 19 nt, Artificial Sequence
  Description of Artificial Sequence: Synthetic oligonucleotide
  Sense strand starting at position 412 of SEQ ID NO: 1818
uuuacaucguauguaauca

SEQ ID NO: 141615 - RNA, 19 nt, Artificial Sequence
  Description of Artificial Sequence: Synthetic oligonucleotide
  Antisense strand to SEQ ID NO: 141614
ugauuacauacgauguaaa

SEQ ID NO: 141616 - RNA, 19 nt, Artificial Sequence
  Description of Artificial Sequence: Synthetic oligonucleotide
  Sense strand starting at position 411 of SEQ ID NO: 1818
cuuuacaucguauguaauc

SEQ ID NO: 141617 - RNA, 19 nt, Artificial Sequence
  Description of Artificial Sequence: Synthetic oligonucleotide
  Antisense strand to SEQ ID NO: 141616
gauuacauacgauguaaag

SEQ ID NO: 141618 - RNA, 19 nt, Artificial Sequence
  Description of Artificial Sequence: Synthetic oligonucleotide
  Sense strand starting at position 344 of SEQ ID NO: 1818
ugaauuauguguuuacaga

SEQ ID NO: 141619 - RNA, 19 nt, Artificial Sequence
  Description of Artificial Sequence: Synthetic oligonucleotide
  Antisense strand to SEQ ID NO: 141618
ucuguaaacacauaauuca

SEQ ID NO: 141620 - RNA, 19 nt, Artificial Sequence
  Description of Artificial Sequence: Synthetic oligonucleotide
  Sense strand starting at position 342 of SEQ ID NO: 1818
ccugaauuauguguuuaca

SEQ ID NO: 141621 - RNA, 19 nt, Artificial Sequence
  Description of Artificial Sequence: Synthetic oligonucleotide
  Antisense strand to SEQ ID NO: 141620
uguaaacacauaauucagg

SEQ ID NO: 141622 - RNA, 19 nt, Artificial Sequence
  Description of Artificial Sequence: Synthetic oligonucleotide
  Sense strand starting at position 315 of SEQ ID NO: 1818
acacauuugugugaugcau

SEQ ID NO: 141623 - RNA, 19 nt, Artificial Sequence
  Description of Artificial Sequence: Synthetic oligonucleotide
  Antisense strand to SEQ ID NO: 141622
augcaucacacaaaugugu

SEQ ID NO: 141624 - RNA, 19 nt, Artificial Sequence
  Description of Artificial Sequence: Synthetic oligonucleotide
  Sense strand starting at position 312 of SEQ ID NO: 1818
agaacacauuugugugaug

SEQ ID NO: 141625 - RNA, 19 nt, Artificial Sequence
  Description of Artificial Sequence: Synthetic oligonucleotide
  Antisense strand to SEQ ID NO: 141624
caucacacaaauguguucu

SEQ ID NO: 141626 - RNA, 19 nt, Artificial Sequence
  Description of Artificial Sequence: Synthetic oligonucleotide
  Sense strand starting at position 259 of SEQ ID NO: 1818
agucuuccuggauggaaag

SEQ ID NO: 141627 - RNA, 19 nt, Artificial Sequence
  Description of Artificial Sequence: Synthetic oligonucleotide
  Antisense strand to SEQ ID NO: 141626
cuuuccauccaggaagacu

SEQ ID NO: 141628 - RNA, 19 nt, Artificial Sequence
  Description of Artificial Sequence: Synthetic oligonucleotide
  Sense strand starting at position 256 of SEQ ID NO: 1818
cacagucuuccuggaugga

SEQ ID NO: 141629 - RNA, 19 nt, Artificial Sequence
  Description of Artificial Sequence: Synthetic oligonucleotide
  Antisense strand to SEQ ID NO: 141628
uccauccaggaagacugug

SEQ ID NO: 141630 - RNA, 19 nt, Artificial Sequence
  Description of Artificial Sequence: Synthetic oligonucleotide
  Sense strand starting at position 212 of SEQ ID NO: 1818
agcugaugaccuggcuaaa

SEQ ID NO: 141631 - RNA, 19 nt, Artificial Sequence
  Description of Artificial Sequence: Synthetic oligonucleotide
  Antisense strand to SEQ ID NO: 141630
uuuagccaggucaucagcu

SEQ ID NO: 141632 - RNA, 19 nt, Artificial Sequence
  Description of Artificial Sequence: Synthetic oligonucleotide
  Sense strand starting at position 185 of SEQ ID NO: 1818
aaggcuugccaaugcagua

SEQ ID NO: 141633 - RNA, 19 nt, Artificial Sequence
  Description of Artificial Sequence: Synthetic oligonucleotide
  Antisense strand to SEQ ID NO: 141632
uacugcauuggcaagccuu

SEQ ID NO: 141634 - RNA, 19 nt, Artificial Sequence
  Description of Artificial Sequence: Synthetic oligonucleotide
  Sense strand starting at position 3934 of SEQ ID NO: 1817
agcugucagcuguacuuaa

SEQ ID NO: 141635 - RNA, 19 nt, Artificial Sequence
  Description of Artificial Sequence: Synthetic oligonucleotide
  Antisense strand to SEQ ID NO: 141634
uuaaguacagcugacagcu

SEQ ID NO: 141636 - RNA, 19 nt, Artificial Sequence
  Description of Artificial Sequence: Synthetic oligonucleotide
  Sense strand starting at position 3588 of SEQ ID NO: 1817
cuaagugauuaugauuacu

SEQ ID NO: 141637 - RNA, 19 nt, Artificial Sequence
  Description of Artificial Sequence: Synthetic oligonucleotide
  Antisense strand to SEQ ID NO: 141636
aguaaucauaaucacuuag

SEQ ID NO: 141638 - RNA, 19 nt, Artificial Sequence
  Description of Artificial Sequence: Synthetic oligonucleotide
  Sense strand starting at position 3512 of SEQ ID NO: 1817
agcagagagccuuggacau

SEQ ID NO: 141639 - RNA, 19 nt, Artificial Sequence
  Description of Artificial Sequence: Synthetic oligonucleotide
  Antisense strand to SEQ ID NO: 141638
auguccaaggcucucugcu

SEQ ID NO: 141640 - RNA, 19 nt, Artificial Sequence
  Description of Artificial Sequence: Synthetic oligonucleotide
  Sense strand starting at position 3455 of SEQ ID NO: 1817
auaggcuguuucuaugcau

SEQ ID NO: 141641 - RNA, 19 nt, Artificial Sequence
  Description of Artificial Sequence: Synthetic oligonucleotide
  Antisense strand to SEQ ID NO: 141640
augcauagaaacagccuau

SEQ ID NO: 141642 - RNA, 19 nt, Artificial Sequence
  Description of Artificial Sequence: Synthetic oligonucleotide
  Sense strand starting at position 3414 of SEQ ID NO: 1817
cagugucccuggguggaau

SEQ ID NO: 141643 - RNA, 19 nt, Artificial Sequence
  Description of Artificial Sequence: Synthetic oligonucleotide
  Antisense strand to SEQ ID NO: 141642
auuccacccagggacacug

SEQ ID NO: 141644 - RNA, 19 nt, Artificial Sequence
  Description of Artificial Sequence: Synthetic oligonucleotide
  Sense strand starting at position 3395 of SEQ ID NO: 1817
ggcaaaugucuggagcuga

SEQ ID NO: 141645 - RNA, 19 nt, Artificial Sequence
  Description of Artificial Sequence: Synthetic oligonucleotide
  Antisense strand to SEQ ID NO: 141644
ucagcuccagacauuugcc

SEQ ID NO: 141646 - RNA, 19 nt, Artificial Sequence
  Description of Artificial Sequence: Synthetic oligonucleotide
  Sense strand starting at position 2950 of SEQ ID NO: 1817
ggcugaggcagugaucaaa

SEQ ID NO: 141647 - RNA, 19 nt, Artificial Sequence
  Description of Artificial Sequence: Synthetic oligonucleotide
  Antisense strand to SEQ ID NO: 141646
uuugaucacugccucagcc

SEQ ID NO: 141648 - RNA, 19 nt, Artificial Sequence
  Description of Artificial Sequence: Synthetic oligonucleotide
  Sense strand starting at position 2661 of SEQ ID NO: 1817
gauggagucguguuguguu

SEQ ID NO: 141649 - RNA, 19 nt, Artificial Sequence
  Description of Artificial Sequence: Synthetic oligonucleotide
  Antisense strand to SEQ ID NO: 141648
aacacaacacgacuccauc

SEQ ID NO: 141650 - RNA, 19 nt, Artificial Sequence
  Description of Artificial Sequence: Synthetic oligonucleotide
  Sense strand starting at position 2562 of SEQ ID NO: 1817
guuagaaauauuugcggua

SEQ ID NO: 141651 - RNA, 19 nt, Artificial Sequence
  Description of Artificial Sequence: Synthetic oligonucleotide
  Antisense strand to SEQ ID NO: 141650
uaccgcaaauauuucuaac

SEQ ID NO: 141652 - RNA, 19 nt, Artificial Sequence
  Description of Artificial Sequence: Synthetic oligonucleotide
  Sense strand starting at position 2509 of SEQ ID NO: 1817
agaauuaaguuacacagaa

SEQ ID NO: 141653 - RNA, 19 nt, Artificial Sequence
  Description of Artificial Sequence: Synthetic oligonucleotide
  Antisense strand to SEQ ID NO: 141652
uucuguguaacuuaauucu

SEQ ID NO: 141654 - RNA, 19 nt, Artificial Sequence
  Description of Artificial Sequence: Synthetic oligonucleotide
  Sense strand starting at position 2451 of SEQ ID NO: 1817
cugugaugagcugacucua

SEQ ID NO: 141655 - RNA, 19 nt, Artificial Sequence
  Description of Artificial Sequence: Synthetic oligonucleotide
  Antisense strand to SEQ ID NO: 141654
uagagucagcucaucacag

SEQ ID NO: 141656 - RNA, 19 nt, Artificial Sequence
  Description of Artificial Sequence: Synthetic oligonucleotide
  Sense strand starting at position 2442 of SEQ ID NO: 1817
aaauauggucugugaugag

SEQ ID NO: 141657 - RNA, 19 nt, Artificial Sequence
  Description of Artificial Sequence: Synthetic oligonucleotide
  Antisense strand to SEQ ID NO: 141656
cucaucacagaccauauuu

SEQ ID NO: 141658 - RNA, 19 nt, Artificial Sequence
  Description of Artificial Sequence: Synthetic oligonucleotide
  Sense strand starting at position 2441 of SEQ ID NO: 1817
gaaauauggucugugauga

SEQ ID NO: 141659 - RNA, 19 nt, Artificial Sequence
  Description of Artificial Sequence: Synthetic oligonucleotide
  Antisense strand to SEQ ID NO: 141658
ucaucacagaccauauuuc

SEQ ID NO: 141660 - RNA, 19 nt, Artificial Sequence
  Description of Artificial Sequence: Synthetic oligonucleotide
  Sense strand starting at position 2440 of SEQ ID NO: 1817
ugaaauauggucugugaug

SEQ ID NO: 141661 - RNA, 19 nt, Artificial Sequence
  Description of Artificial Sequence: Synthetic oligonucleotide
  Antisense strand to SEQ ID NO: 141660
caucacagaccauauuuca

SEQ ID NO: 141662 - RNA, 19 nt, Artificial Sequence
  Description of Artificial Sequence: Synthetic oligonucleotide
  Sense strand starting at position 2438 of SEQ ID NO: 1817
ccugaaauauggucuguga

SEQ ID NO: 141663 - RNA, 19 nt, Artificial Sequence
  Description of Artificial Sequence: Synthetic oligonucleotide
  Antisense strand to SEQ ID NO: 141662
ucacagaccauauuucagg

SEQ ID NO: 141664 - RNA, 19 nt, Artificial Sequence
  Description of Artificial Sequence: Synthetic oligonucleotide
  Sense strand starting at position 2309 of SEQ ID NO: 1817
guuuauaagcaguagaaag

SEQ ID NO: 141665 - RNA, 19 nt, Artificial Sequence
  Description of Artificial Sequence: Synthetic oligonucleotide
  Antisense strand to SEQ ID NO: 141664
cuuucuacugcuuauaaac

SEQ ID NO: 141666 - RNA, 19 nt, Artificial Sequence
  Description of Artificial Sequence: Synthetic oligonucleotide
  Sense strand starting at position 2283 of SEQ ID NO: 1817
augagaucauaucaauaug

SEQ ID NO: 141667 - RNA, 19 nt, Artificial Sequence
  Description of Artificial Sequence: Synthetic oligonucleotide
  Antisense strand to SEQ ID NO: 141666
cauauugauaugaucucau

SEQ ID NO: 141668 - RNA, 19 nt, Artificial Sequence
  Description of Artificial Sequence: Synthetic oligonucleotide
  Sense strand starting at position 2176 of SEQ ID NO: 1817
ugauuugcuuagcauauuu

SEQ ID NO: 141669 - RNA, 19 nt, Artificial Sequence
  Description of Artificial Sequence: Synthetic oligonucleotide
  Antisense strand to SEQ ID NO: 141668
aaauaugcuaagcaaauca

SEQ ID NO: 141670 - RNA, 19 nt, Artificial Sequence
  Description of Artificial Sequence: Synthetic oligonucleotide
  Sense strand starting at position 2175 of SEQ ID NO: 1817
uugauuugcuuagcauauu

SEQ ID NO: 141671 - RNA, 19 nt, Artificial Sequence
  Description of Artificial Sequence: Synthetic oligonucleotide
  Antisense strand to SEQ ID NO: 141670
aauaugcuaagcaaaucaa

SEQ ID NO: 141672 - RNA, 19 nt, Artificial Sequence
  Description of Artificial Sequence: Synthetic oligonucleotide
  Sense strand starting at position 2154 of SEQ ID NO: 1817
gugaauucuagauacgcua

SEQ ID NO: 141673 - RNA, 19 nt, Artificial Sequence
  Description of Artificial Sequence: Synthetic oligonucleotide
  Antisense strand to SEQ ID NO: 141672
uagcguaucuagaauucac

SEQ ID NO: 141674 - RNA, 19 nt, Artificial Sequence
  Description of Artificial Sequence: Synthetic oligonucleotide
  Sense strand starting at position 2150 of SEQ ID NO: 1817
guaagugaauucuagauac

SEQ ID NO: 141675 - RNA, 19 nt, Artificial Sequence
  Description of Artificial Sequence: Synthetic oligonucleotide
  Antisense strand to SEQ ID NO: 141674
guaucuagaauucacuuac

SEQ ID NO: 141676 - RNA, 19 nt, Artificial Sequence
  Description of Artificial Sequence: Synthetic oligonucleotide
  Sense strand starting at position 2142 of SEQ ID NO: 1817
caguccucguaagugaauu

SEQ ID NO: 141677 - RNA, 19 nt, Artificial Sequence
  Description of Artificial Sequence: Synthetic oligonucleotide
  Antisense strand to SEQ ID NO: 141676
aauucacuuacgaggacug

SEQ ID NO: 141678 - RNA, 19 nt, Artificial Sequence
  Description of Artificial Sequence: Synthetic oligonucleotide
  Sense strand starting at position 2137 of SEQ ID NO: 1817
cauuacaguccucguaagu

SEQ ID NO: 141679 - RNA, 19 nt, Artificial Sequence
  Description of Artificial Sequence: Synthetic oligonucleotide
  Antisense strand to SEQ ID NO: 141678
acuuacgaggacuguaaug

SEQ ID NO: 141680 - RNA, 19 nt, Artificial Sequence
  Description of Artificial Sequence: Synthetic oligonucleotide
  Sense strand starting at position 2136 of SEQ ID NO: 1817
gcauuacaguccucguaag

SEQ ID NO: 141681 - RNA, 19 nt, Artificial Sequence
  Description of Artificial Sequence: Synthetic oligonucleotide
  Antisense strand to SEQ ID NO: 141680
cuuacgaggacuguaaugc

SEQ ID NO: 141682 - RNA, 19 nt, Artificial Sequence
  Description of Artificial Sequence: Synthetic oligonucleotide
  Sense strand starting at position 1991 of SEQ ID NO: 1817
ucaggcacccacuguuaaa

SEQ ID NO: 141683 - RNA, 19 nt, Artificial Sequence
  Description of Artificial Sequence: Synthetic oligonucleotide
  Antisense strand to SEQ ID NO: 141682
uuuaacagugggugccuga

SEQ ID NO: 141684 - RNA, 19 nt, Artificial Sequence
  Description of Artificial Sequence: Synthetic oligonucleotide
  Sense strand starting at position 1732 of SEQ ID NO: 1817
gaggauagaugccuaccuu

SEQ ID NO: 141685 - RNA, 19 nt, Artificial Sequence
  Description of Artificial Sequence: Synthetic oligonucleotide
  Antisense strand to SEQ ID NO: 141684
aagguaggcaucuauccuc

SEQ ID NO: 141686 - RNA, 19 nt, Artificial Sequence
  Description of Artificial Sequence: Synthetic oligonucleotide
  Sense strand starting at position 1654 of SEQ ID NO: 1817
cuuaauuugucagggacca

SEQ ID NO: 141687 - RNA, 19 nt, Artificial Sequence
  Description of Artificial Sequence: Synthetic oligonucleotide
  Antisense strand to SEQ ID NO: 141686
uggucccugacaaauuaag

SEQ ID NO: 141688 - RNA, 19 nt, Artificial Sequence
  Description of Artificial Sequence: Synthetic oligonucleotide
  Sense strand starting at position 1652 of SEQ ID NO: 1817
uacuuaauuugucagggac

SEQ ID NO: 141689 - RNA, 19 nt, Artificial Sequence
  Description of Artificial Sequence: Synthetic oligonucleotide
  Antisense strand to SEQ ID NO: 141688
gucccugacaaauuaagua

SEQ ID NO: 141690 - RNA, 19 nt, Artificial Sequence
  Description of Artificial Sequence: Synthetic oligonucleotide
  Sense strand starting at position 1215 of SEQ ID NO: 1817
uaaagugucuauggagaag

SEQ ID NO: 141691 - RNA, 19 nt, Artificial Sequence
  Description of Artificial Sequence: Synthetic oligonucleotide
  Antisense strand to SEQ ID NO: 141690
cuucuccauagacacuuua

SEQ ID NO: 141692 - RNA, 19 nt, Artificial Sequence
  Description of Artificial Sequence: Synthetic oligonucleotide
  Sense strand starting at position 1211 of SEQ ID NO: 1817
uucuuaaagugucuaugga

SEQ ID NO: 141693 - RNA, 19 nt, Artificial Sequence
  Description of Artificial Sequence: Synthetic oligonucleotide
  Antisense strand to SEQ ID NO: 141692
uccauagacacuuuaagaa

SEQ ID NO: 141694 - RNA, 19 nt, Artificial Sequence
  Description of Artificial Sequence: Synthetic oligonucleotide
  Sense strand starting at position 1121 of SEQ ID NO: 1817
cuuuaauuguagucuccga

SEQ ID NO: 141695 - RNA, 19 nt, Artificial Sequence
  Description of Artificial Sequence: Synthetic oligonucleotide
  Antisense strand to SEQ ID NO: 141694
ucggagacuacaauuaaag

SEQ ID NO: 141696 - RNA, 19 nt, Artificial Sequence
  Description of Artificial Sequence: Synthetic oligonucleotide
  Sense strand starting at position 761 of SEQ ID NO: 1817
gacacaucccaguggcaga

SEQ ID NO: 141697 - RNA, 19 nt, Artificial Sequence
  Description of Artificial Sequence: Synthetic oligonucleotide
  Antisense strand to SEQ ID NO: 141696
ucugccacugggauguguc

SEQ ID NO: 141698 - RNA, 19 nt, Artificial Sequence
  Description of Artificial Sequence: Synthetic oligonucleotide
  Sense strand starting at position 694 of SEQ ID NO: 1817
uuggguacaucggcugaaa

SEQ ID NO: 141699 - RNA, 19 nt, Artificial Sequence
  Description of Artificial Sequence: Synthetic oligonucleotide
  Antisense strand to SEQ ID NO: 141698
uuucagccgauguacccaa

SEQ ID NO: 141700 - RNA, 19 nt, Artificial Sequence
  Description of Artificial Sequence: Synthetic oligonucleotide
  Sense strand starting at position 666 of SEQ ID NO: 1817
ccaagaaagucaucggaag

SEQ ID NO: 141701 - RNA, 19 nt, Artificial Sequence
  Description of Artificial Sequence: Synthetic oligonucleotide
  Antisense strand to SEQ ID NO: 141700
cuuccgaugacuuucuugg

SEQ ID NO: 141702 - RNA, 19 nt, Artificial Sequence
  Description of Artificial Sequence: Synthetic oligonucleotide
  Sense strand starting at position 639 of SEQ ID NO: 1817
ugaguuaaacgguauugaa

SEQ ID NO: 141703 - RNA, 19 nt, Artificial Sequence
  Description of Artificial Sequence: Synthetic oligonucleotide
  Antisense strand to SEQ ID NO: 141702
uucaauaccguuuaacuca

SEQ ID NO: 141704 - RNA, 19 nt, Artificial Sequence
  Description of Artificial Sequence: Synthetic oligonucleotide
  Sense strand starting at position 636 of SEQ ID NO: 1817
uccugaguuaaacgguauu

SEQ ID NO: 141705 - RNA, 19 nt, Artificial Sequence
  Description of Artificial Sequence: Synthetic oligonucleotide
  Antisense strand to SEQ ID NO: 141704
aauaccguuuaacucagga

SEQ ID NO: 141706 - RNA, 19 nt, Artificial Sequence
  Description of Artificial Sequence: Synthetic oligonucleotide
  Sense strand starting at position 628 of SEQ ID NO: 1817
caaguauguccugaguuaa

SEQ ID NO: 141707 - RNA, 19 nt, Artificial Sequence
  Description of Artificial Sequence: Synthetic oligonucleotide
  Antisense strand to SEQ ID NO: 141706
uuaacucaggacauacuug

SEQ ID NO: 141708 - RNA, 19 nt, Artificial Sequence
  Description of Artificial Sequence: Synthetic oligonucleotide
  Sense strand starting at position 625 of SEQ ID NO: 1817
acucaaguauguccugagu

SEQ ID NO: 141709 - RNA, 19 nt, Artificial Sequence
  Description of Artificial Sequence: Synthetic oligonucleotide
  Antisense strand to SEQ ID NO: 141708
acucaggacauacuugagu

SEQ ID NO: 141710 - RNA, 19 nt, Artificial Sequence
  Description of Artificial Sequence: Synthetic oligonucleotide
  Sense strand starting at position 616 of SEQ ID NO: 1817
accguaggcacucaaguau

SEQ ID NO: 141711 - RNA, 19 nt, Artificial Sequence
  Description of Artificial Sequence: Synthetic oligonucleotide
  Antisense strand to SEQ ID NO: 141710
auacuugagugccuacggu

SEQ ID NO: 141712 - RNA, 19 nt, Artificial Sequence
  Description of Artificial Sequence: Synthetic oligonucleotide
  Sense strand starting at position 473 of SEQ ID NO: 1817
gcacuaagauuccauuuga

SEQ ID NO: 141713 - RNA, 19 nt, Artificial Sequence
  Description of Artificial Sequence: Synthetic oligonucleotide
  Antisense strand to SEQ ID NO: 141712
ucaaauggaaucuuagugc

SEQ ID NO: 141714 - RNA, 19 nt, Artificial Sequence
  Description of Artificial Sequence: Synthetic oligonucleotide
  Sense strand starting at position 3070 of SEQ ID NO: 1819
uuugaugaguucuuaccaa

SEQ ID NO: 141715 - RNA, 19 nt, Artificial Sequence
  Description of Artificial Sequence: Synthetic oligonucleotide
  Antisense strand to SEQ ID NO: 141714
uugguaagaacucaucaaa

SEQ ID NO: 141716 - RNA, 19 nt, Artificial Sequence
  Description of Artificial Sequence: Synthetic oligonucleotide
  Sense strand starting at position 2971 of SEQ ID NO: 1819
ucagguguucccugaaacc

SEQ ID NO: 141717 - RNA, 19 nt, Artificial Sequence
  Description of Artificial Sequence: Synthetic oligonucleotide
  Antisense strand to SEQ ID NO: 141716
gguuucagggaacaccuga

SEQ ID NO: 141718 - RNA, 19 nt, Artificial Sequence
  Description of Artificial Sequence: Synthetic oligonucleotide
  Sense strand starting at position 2914 of SEQ ID NO: 1819
ggcugucucuuauuaacac

SEQ ID NO: 141719 - RNA, 19 nt, Artificial Sequence
  Description of Artificial Sequence: Synthetic oligonucleotide
  Antisense strand to SEQ ID NO: 141718
guguuaauaagagacagcc

SEQ ID NO: 141720 - RNA, 19 nt, Artificial Sequence
  Description of Artificial Sequence: Synthetic oligonucleotide
  Sense strand starting at position 2765 of SEQ ID NO: 1819
augaucagaucuuauagaa

SEQ ID NO: 141721 - RNA, 19 nt, Artificial Sequence
  Description of Artificial Sequence: Synthetic oligonucleotide
  Antisense strand to SEQ ID NO: 141720
uucuauaagaucugaucau

SEQ ID NO: 141722 - RNA, 19 nt, Artificial Sequence
  Description of Artificial Sequence: Synthetic oligonucleotide
  Sense strand starting at position 2749 of SEQ ID NO: 1819
acaagagcauccuaauaug

SEQ ID NO: 141723 - RNA, 19 nt, Artificial Sequence
  Description of Artificial Sequence: Synthetic oligonucleotide
  Antisense strand to SEQ ID NO: 141722
cauauuaggaugcucuugu

SEQ ID NO: 141724 - RNA, 19 nt, Artificial Sequence
  Description of Artificial Sequence: Synthetic oligonucleotide
  Sense strand starting at position 2728 of SEQ ID NO: 1819
ccagucaucuucuuaugag

SEQ ID NO: 141725 - RNA, 19 nt, Artificial Sequence
  Description of Artificial Sequence: Synthetic oligonucleotide
  Antisense strand to SEQ ID NO: 141724
cucauaagaagaugacugg

SEQ ID NO: 141726 - RNA, 19 nt, Artificial Sequence
  Description of Artificial Sequence: Synthetic oligonucleotide
  Sense strand starting at position 2709 of SEQ ID NO: 1819
cucauaugcgugugaacac

SEQ ID NO: 141727 - RNA, 19 nt, Artificial Sequence
  Description of Artificial Sequence: Synthetic oligonucleotide
  Antisense strand to SEQ ID NO: 141726
guguucacacgcauaugag

SEQ ID NO: 141728 - RNA, 19 nt, Artificial Sequence
  Description of Artificial Sequence: Synthetic oligonucleotide
  Sense strand starting at position 2707 of SEQ ID NO: 1819
aucucauaugcgugugaac

SEQ ID NO: 141729 - RNA, 19 nt, Artificial Sequence
  Description of Artificial Sequence: Synthetic oligonucleotide
  Antisense strand to SEQ ID NO: 141728
guucacacgcauaugagau

SEQ ID NO: 141730 - RNA, 19 nt, Artificial Sequence
  Description of Artificial Sequence: Synthetic oligonucleotide
  Sense strand starting at position 2706 of SEQ ID NO: 1819
caucucauaugcgugugaa

SEQ ID NO: 141731 - RNA, 19 nt, Artificial Sequence
  Description of Artificial Sequence: Synthetic oligonucleotide
  Antisense strand to SEQ ID NO: 141730
uucacacgcauaugagaug

SEQ ID NO: 141732 - RNA, 19 nt, Artificial Sequence
  Description of Artificial Sequence: Synthetic oligonucleotide
  Sense strand starting at position 2679 of SEQ ID NO: 1819
augucuuaacaagguuuga

SEQ ID NO: 141733 - RNA, 19 nt, Artificial Sequence
  Description of Artificial Sequence: Synthetic oligonucleotide
  Antisense strand to SEQ ID NO: 141732
ucaaaccuuguuaagacau

SEQ ID NO: 141734 - RNA, 19 nt, Artificial Sequence
  Description of Artificial Sequence: Synthetic oligonucleotide
  Sense strand starting at position 2654 of SEQ ID NO: 1819
guuaacaucagauggguau

SEQ ID NO: 141735 - RNA, 19 nt, Artificial Sequence
  Description of Artificial Sequence: Synthetic oligonucleotide
  Antisense strand to SEQ ID NO: 141734
auacccaucugauguuaac

SEQ ID NO: 141736 - RNA, 19 nt, Artificial Sequence
  Description of Artificial Sequence: Synthetic oligonucleotide
  Sense strand starting at position 2551 of SEQ ID NO: 1819
cagggucuugugugucuaa

SEQ ID NO: 141737 - RNA, 19 nt, Artificial Sequence
  Description of Artificial Sequence: Synthetic oligonucleotide
  Antisense strand to SEQ ID NO: 141736
uuagacacacaagacccug

SEQ ID NO: 141738 - RNA, 19 nt, Artificial Sequence
  Description of Artificial Sequence: Synthetic oligonucleotide
  Sense strand starting at position 2209 of SEQ ID NO: 1819
cagaaagacuccuugaguu

SEQ ID NO: 141739 - RNA, 19 nt, Artificial Sequence
  Description of Artificial Sequence: Synthetic oligonucleotide
  Antisense strand to SEQ ID NO: 141738
aacucaaggagucuuucug

SEQ ID NO: 141740 - RNA, 19 nt, Artificial Sequence
  Description of Artificial Sequence: Synthetic oligonucleotide
  Sense strand starting at position 2154 of SEQ ID NO: 1819
guuccagugggcguguauu

SEQ ID NO: 141741 - RNA, 19 nt, Artificial Sequence
  Description of Artificial Sequence: Synthetic oligonucleotide
  Antisense strand to SEQ ID NO: 141740
aauacacgcccacuggaac

SEQ ID NO: 141742 - RNA, 19 nt, Artificial Sequence
  Description of Artificial Sequence: Synthetic oligonucleotide
  Sense strand starting at position 1609 of SEQ ID NO: 1819
gcgcucgcgcaguuugaau

SEQ ID NO: 141743 - RNA, 19 nt, Artificial Sequence
  Description of Artificial Sequence: Synthetic oligonucleotide
  Antisense strand to SEQ ID NO: 141742
auucaaacugcgcgagcgc

SEQ ID NO: 141744 - RNA, 19 nt, Artificial Sequence
  Description of Artificial Sequence: Synthetic oligonucleotide
  Sense strand starting at position 1385 of SEQ ID NO: 1819
agcaaauaaucugcugaca

SEQ ID NO: 141745 - RNA, 19 nt, Artificial Sequence
  Description of Artificial Sequence: Synthetic oligonucleotide
  Antisense strand to SEQ ID NO: 141744
ugucagcagauuauuugcu

SEQ ID NO: 141746 - RNA, 19 nt, Artificial Sequence
  Description of Artificial Sequence: Synthetic oligonucleotide
  Sense strand starting at position 1372 of SEQ ID NO: 1819
gcaauaaauggccagcaaa

SEQ ID NO: 141747 - RNA, 19 nt, Artificial Sequence
  Description of Artificial Sequence: Synthetic oligonucleotide
  Antisense strand to SEQ ID NO: 141746
uuugcuggccauuuauugc

SEQ ID NO: 141748 - RNA, 19 nt, Artificial Sequence
  Description of Artificial Sequence: Synthetic oligonucleotide
  Sense strand starting at position 1304 of SEQ ID NO: 1819
ggcauaguucgcuaaugac

SEQ ID NO: 141749 - RNA, 19 nt, Artificial Sequence
  Description of Artificial Sequence: Synthetic oligonucleotide
  Antisense strand to SEQ ID NO: 141748
gucauuagcgaacuaugcc

SEQ ID NO: 141750 - RNA, 19 nt, Artificial Sequence
  Description of Artificial Sequence: Synthetic oligonucleotide
  Sense strand starting at position 1303 of SEQ ID NO: 1819
gggcauaguucgcuaauga

SEQ ID NO: 141751 - RNA, 19 nt, Artificial Sequence
  Description of Artificial Sequence: Synthetic oligonucleotide
  Antisense strand to SEQ ID NO: 141750
ucauuagcgaacuaugccc

SEQ ID NO: 141752 - RNA, 19 nt, Artificial Sequence
  Description of Artificial Sequence: Synthetic oligonucleotide
  Sense strand starting at position 1302 of SEQ ID NO: 1819
agggcauaguucgcuaaug

SEQ ID NO: 141753 - RNA, 19 nt, Artificial Sequence
  Description of Artificial Sequence: Synthetic oligonucleotide
  Antisense strand to SEQ ID NO: 141752
cauuagcgaacuaugcccu

SEQ ID NO: 141754 - RNA, 19 nt, Artificial Sequence
  Description of Artificial Sequence: Synthetic oligonucleotide
  Sense strand starting at position 1301 of SEQ ID NO: 1819
aagggcauaguucgcuaau

SEQ ID NO: 141755 - RNA, 19 nt, Artificial Sequence
  Description of Artificial Sequence: Synthetic oligonucleotide
  Antisense strand to SEQ ID NO: 141754
auuagcgaacuaugcccuu

SEQ ID NO: 141756 - RNA, 19 nt, Artificial Sequence
  Description of Artificial Sequence: Synthetic oligonucleotide
  Sense strand starting at position 1262 of SEQ ID NO: 1819
guaugaaugacuugccagu

SEQ ID NO: 141757 - RNA, 19 nt, Artificial Sequence
  Description of Artificial Sequence: Synthetic oligonucleotide
  Antisense strand to SEQ ID NO: 141756
acuggcaagucauucauac

SEQ ID NO: 141758 - RNA, 19 nt, Artificial Sequence
  Description of Artificial Sequence: Synthetic oligonucleotide
  Sense strand starting at position 1253 of SEQ ID NO: 1819
auaugugacguaugaauga

SEQ ID NO: 141759 - RNA, 19 nt, Artificial Sequence
  Description of Artificial Sequence: Synthetic oligonucleotide
  Antisense strand to SEQ ID NO: 141758
ucauucauacgucacauau

SEQ ID NO: 141760 - RNA, 19 nt, Artificial Sequence
  Description of Artificial Sequence: Synthetic oligonucleotide
  Sense strand starting at position 1246 of SEQ ID NO: 1819
uaggucaauaugugacgua

SEQ ID NO: 141761 - RNA, 19 nt, Artificial Sequence
  Description of Artificial Sequence: Synthetic oligonucleotide
  Antisense strand to SEQ ID NO: 141760
uacgucacauauugaccua

SEQ ID NO: 141762 - RNA, 19 nt, Artificial Sequence
  Description of Artificial Sequence: Synthetic oligonucleotide
  Sense strand starting at position 1242 of SEQ ID NO: 1819
aaguuaggucaauauguga

SEQ ID NO: 141763 - RNA, 19 nt, Artificial Sequence
  Description of Artificial Sequence: Synthetic oligonucleotide
  Antisense strand to SEQ ID NO: 141762
ucacauauugaccuaacuu

SEQ ID NO: 141764 - RNA, 19 nt, Artificial Sequence
  Description of Artificial Sequence: Synthetic oligonucleotide
  Sense strand starting at position 1237 of SEQ ID NO: 1819
ggucgaaguuaggucaaua

SEQ ID NO: 141765 - RNA, 19 nt, Artificial Sequence
  Description of Artificial Sequence: Synthetic oligonucleotide
  Antisense strand to SEQ ID NO: 141764
uauugaccuaacuucgacc

SEQ ID NO: 141766 - RNA, 19 nt, Artificial Sequence
  Description of Artificial Sequence: Synthetic oligonucleotide
  Sense strand starting at position 993 of SEQ ID NO: 1819
ugguaucccugaccacaau

SEQ ID NO: 141767 - RNA, 19 nt, Artificial Sequence
  Description of Artificial Sequence: Synthetic oligonucleotide
  Antisense strand to SEQ ID NO: 141766
auuguggucagggauacca

SEQ ID NO: 141768 - RNA, 19 nt, Artificial Sequence
  Description of Artificial Sequence: Synthetic oligonucleotide
  Sense strand starting at position 991 of SEQ ID NO: 1819
ugugguaucccugaccaca

SEQ ID NO: 141769 - RNA, 19 nt, Artificial Sequence
  Description of Artificial Sequence: Synthetic oligonucleotide
  Antisense strand to SEQ ID NO: 141768
uguggucagggauaccaca

SEQ ID NO: 141770 - RNA, 19 nt, Artificial Sequence
  Description of Artificial Sequence: Synthetic oligonucleotide
  Sense strand starting at position 981 of SEQ ID NO: 1819
ccucaagaccugugguauc

SEQ ID NO: 141771 - RNA, 19 nt, Artificial Sequence
  Description of Artificial Sequence: Synthetic oligonucleotide
  Antisense strand to SEQ ID NO: 141770
gauaccacaggucuugagg

SEQ ID NO: 141772 - RNA, 19 nt, Artificial Sequence
  Description of Artificial Sequence: Synthetic oligonucleotide
  Sense strand starting at position 949 of SEQ ID NO: 1819
uguaucaucuuguuacucu

SEQ ID NO: 141773 - RNA, 19 nt, Artificial Sequence
  Description of Artificial Sequence: Synthetic oligonucleotide
  Antisense strand to SEQ ID NO: 141772
agaguaacaagaugauaca

SEQ ID NO: 141774 - RNA, 19 nt, Artificial Sequence
  Description of Artificial Sequence: Synthetic oligonucleotide
  Sense strand starting at position 908 of SEQ ID NO: 1819
cuuagucuugcacacaaga

SEQ ID NO: 141775 - RNA, 19 nt, Artificial Sequence
  Description of Artificial Sequence: Synthetic oligonucleotide
  Antisense strand to SEQ ID NO: 141774
ucuugugugcaagacuaag

SEQ ID NO: 141776 - RNA, 19 nt, Artificial Sequence
  Description of Artificial Sequence: Synthetic oligonucleotide
  Sense strand starting at position 901 of SEQ ID NO: 1819
agaguuccuuagucuugca

SEQ ID NO: 141777 - RNA, 19 nt, Artificial Sequence
  Description of Artificial Sequence: Synthetic oligonucleotide
  Antisense strand to SEQ ID NO: 141776
ugcaagacuaaggaacucu

SEQ ID NO: 141778 - RNA, 19 nt, Artificial Sequence
  Description of Artificial Sequence: Synthetic oligonucleotide
  Sense strand starting at position 898 of SEQ ID NO: 1819
cgcagaguuccuuagucuu

SEQ ID NO: 141779 - RNA, 19 nt, Artificial Sequence
  Description of Artificial Sequence: Synthetic oligonucleotide
  Antisense strand to SEQ ID NO: 141778
aagacuaaggaacucugcg

SEQ ID NO: 141780 - RNA, 19 nt, Artificial Sequence
  Description of Artificial Sequence: Synthetic oligonucleotide
  Sense strand starting at position 795 of SEQ ID NO: 1819
uugggaugucuuugaaaca

SEQ ID NO: 141781 - RNA, 19 nt, Artificial Sequence
  Description of Artificial Sequence: Synthetic oligonucleotide
  Antisense strand to SEQ ID NO: 141780
uguuucaaagacaucccaa

SEQ ID NO: 141782 - RNA, 19 nt, Artificial Sequence
  Description of Artificial Sequence: Synthetic oligonucleotide
  Sense strand starting at position 327 of SEQ ID NO: 1819
gaccaagauucuguaucag

SEQ ID NO: 141783 - RNA, 19 nt, Artificial Sequence
  Description of Artificial Sequence: Synthetic oligonucleotide
  Antisense strand to SEQ ID NO: 141782
cugauacagaaucuugguc

SEQ ID NO: 141784 - RNA, 19 nt, Artificial Sequence
  Description of Artificial Sequence: Synthetic oligonucleotide
  Sense strand starting at position 291 of SEQ ID NO: 1819
cugagagcacgacacuaua

SEQ ID NO: 141785 - RNA, 19 nt, Artificial Sequence
  Description of Artificial Sequence: Synthetic oligonucleotide
  Antisense strand to SEQ ID NO: 141784
uauagugucgugcucucag

SEQ ID NO: 141786 - RNA, 19 nt, Artificial Sequence
  Description of Artificial Sequence: Synthetic oligonucleotide
  Sense strand starting at position 224 of SEQ ID NO: 1819
ggauauuacuauucgggag

SEQ ID NO: 141787 - RNA, 19 nt, Artificial Sequence
  Description of Artificial Sequence: Synthetic oligonucleotide
  Antisense strand to SEQ ID NO: 141786
cucccgaauaguaauaucc

SEQ ID NO: 141788 - RNA, 19 nt, Artificial Sequence
  Description of Artificial Sequence: Synthetic oligonucleotide
  Sense strand starting at position 115 of SEQ ID NO: 1819
aggaguuucucaccuggga

SEQ ID NO: 141789 - RNA, 19 nt, Artificial Sequence
  Description of Artificial Sequence: Synthetic oligonucleotide
  Antisense strand to SEQ ID NO: 141788
ucccaggugagaaacuccu

SEQ ID NO: 141790 - RNA, 19 nt, Artificial Sequence
  Description of Artificial Sequence: Synthetic oligonucleotide
  Sense strand starting at position 90 of SEQ ID NO: 1819
gcacacaggugguauauuu

SEQ ID NO: 141791 - RNA, 19 nt, Artificial Sequence
  Description of Artificial Sequence: Synthetic oligonucleotide
  Antisense strand to SEQ ID NO: 141790
aaauauaccaccugugugc

SEQ ID NO: 141792 - RNA, 19 nt, Artificial Sequence
  Description of Artificial Sequence: Synthetic oligonucleotide
  Sense strand starting at position 40 of SEQ ID NO: 1819
gagggcucaugugucaaca

SEQ ID NO: 141793 - RNA, 19 nt, Artificial Sequence
  Description of Artificial Sequence: Synthetic oligonucleotide
  Antisense strand to SEQ ID NO: 141792
uguugacacaugagcccuc

SEQ ID NO: 141794 - RNA, 19 nt, Artificial Sequence
  Description of Artificial Sequence: Synthetic oligonucleotide
  Sense strand starting at position 3666 of SEQ ID NO: 1820
uuacuaucgcagcaauucu

SEQ ID NO: 141795 - RNA, 19 nt, Artificial Sequence
  Description of Artificial Sequence: Synthetic oligonucleotide
  Antisense strand to SEQ ID NO: 141794
agaauugcugcgauaguaa

SEQ ID NO: 141796 - RNA, 19 nt, Artificial Sequence
  Description of Artificial Sequence: Synthetic oligonucleotide
  Sense strand starting at position 3645 of SEQ ID NO: 1820
augcuuuauuacguacauu

SEQ ID NO: 141797 - RNA, 19 nt, Artificial Sequence
  Description of Artificial Sequence: Synthetic oligonucleotide
  Antisense strand to SEQ ID NO: 141796
aauguacguaauaaagcau

SEQ ID NO: 141798 - RNA, 19 nt, Artificial Sequence
  Description of Artificial Sequence: Synthetic oligonucleotide
  Sense strand starting at position 3641 of SEQ ID NO: 1820
cugaaugcuuuauuacgua

SEQ ID NO: 141799 - RNA, 19 nt, Artificial Sequence
  Description of Artificial Sequence: Synthetic oligonucleotide
  Antisense strand to SEQ ID NO: 141798
uacguaauaaagcauucag

SEQ ID NO: 141800 - RNA, 19 nt, Artificial Sequence
  Description of Artificial Sequence: Synthetic oligonucleotide
  Sense strand starting at position 3613 of SEQ ID NO: 1820
guguuccuccuacauauua

SEQ ID NO: 141801 - RNA, 19 nt, Artificial Sequence
  Description of Artificial Sequence: Synthetic oligonucleotide
  Antisense strand to SEQ ID NO: 141800
uaauauguaggaggaacac

SEQ ID NO: 141802 - RNA, 19 nt, Artificial Sequence
  Description of Artificial Sequence: Synthetic oligonucleotide
  Sense strand starting at position 3598 of SEQ ID NO: 1820
guaguaacguuuauggugu

SEQ ID NO: 141803 - RNA, 19 nt, Artificial Sequence
  Description of Artificial Sequence: Synthetic oligonucleotide
  Antisense strand to SEQ ID NO: 141802
acaccauaaacguuacuac

SEQ ID NO: 141804 - RNA, 19 nt, Artificial Sequence
  Description of Artificial Sequence: Synthetic oligonucleotide
  Sense strand starting at position 3587 of SEQ ID NO: 1820
ggcuaucuugaguaguaac

SEQ ID NO: 141805 - RNA, 19 nt, Artificial Sequence
  Description of Artificial Sequence: Synthetic oligonucleotide
  Antisense strand to SEQ ID NO: 141804
guuacuacucaagauagcc

SEQ ID NO: 141806 - RNA, 19 nt, Artificial Sequence
  Description of Artificial Sequence: Synthetic oligonucleotide
  Sense strand starting at position 3586 of SEQ ID NO: 1820
gggcuaucuugaguaguaa

SEQ ID NO: 141807 - RNA, 19 nt, Artificial Sequence
  Description of Artificial Sequence: Synthetic oligonucleotide
  Antisense strand to SEQ ID NO: 141806
uuacuacucaagauagccc

SEQ ID NO: 141808 - RNA, 19 nt, Artificial Sequence
  Description of Artificial Sequence: Synthetic oligonucleotide
  Sense strand starting at position 3584 of SEQ ID NO: 1820
cugggcuaucuugaguagu

SEQ ID NO: 141809 - RNA, 19 nt, Artificial Sequence
  Description of Artificial Sequence: Synthetic oligonucleotide
  Antisense strand to SEQ ID NO: 141808
acuacucaagauagcccag

SEQ ID NO: 141810 - RNA, 19 nt, Artificial Sequence
  Description of Artificial Sequence: Synthetic oligonucleotide
  Sense strand starting at position 3474 of SEQ ID NO: 1820
aguaaagaaugcuuacgau

SEQ ID NO: 141811 - RNA, 19 nt, Artificial Sequence
  Description of Artificial Sequence: Synthetic oligonucleotide
  Antisense strand to SEQ ID NO: 141810
aucguaagcauucuuuacu

SEQ ID NO: 141812 - RNA, 19 nt, Artificial Sequence
  Description of Artificial Sequence: Synthetic oligonucleotide
  Sense strand starting at position 2643 of SEQ ID NO: 1820
gaagguaaauaagaugaaa

SEQ ID NO: 141813 - RNA, 19 nt, Artificial Sequence
  Description of Artificial Sequence: Synthetic oligonucleotide
  Antisense strand to SEQ ID NO: 141812
uuucaucuuauuuaccuuc

SEQ ID NO: 141814 - RNA, 19 nt, Artificial Sequence
  Description of Artificial Sequence: Synthetic oligonucleotide
  Sense strand starting at position 2631 of SEQ ID NO: 1820
uuugauaaaugugaaggua

SEQ ID NO: 141815 - RNA, 19 nt, Artificial Sequence
  Description of Artificial Sequence: Synthetic oligonucleotide
  Antisense strand to SEQ ID NO: 141814
uaccuucacauuuaucaaa

SEQ ID NO: 141816 - RNA, 19 nt, Artificial Sequence
  Description of Artificial Sequence: Synthetic oligonucleotide
  Sense strand starting at position 2607 of SEQ ID NO: 1820
cucugucaccugugaaaga

SEQ ID NO: 141817 - RNA, 19 nt, Artificial Sequence
  Description of Artificial Sequence: Synthetic oligonucleotide
  Antisense strand to SEQ ID NO: 141816
ucuuucacaggugacagag

SEQ ID NO: 141818 - RNA, 19 nt, Artificial Sequence
  Description of Artificial Sequence: Synthetic oligonucleotide
  Sense strand starting at position 2177 of SEQ ID NO: 1820
ggacucagucuguaggaua

SEQ ID NO: 141819 - RNA, 19 nt, Artificial Sequence
  Description of Artificial Sequence: Synthetic oligonucleotide
  Antisense strand to SEQ ID NO: 141818
uauccuacagacugagucc

SEQ ID NO: 141820 - RNA, 19 nt, Artificial Sequence
  Description of Artificial Sequence: Synthetic oligonucleotide
  Sense strand starting at position 2176 of SEQ ID NO: 1820
uggacucagucuguaggau

SEQ ID NO: 141821 - RNA, 19 nt, Artificial Sequence
  Description of Artificial Sequence: Synthetic oligonucleotide
  Antisense strand to SEQ ID NO: 141820
auccuacagacugagucca

SEQ ID NO: 141822 - RNA, 19 nt, Artificial Sequence
  Description of Artificial Sequence: Synthetic oligonucleotide
  Sense strand starting at position 2156 of SEQ ID NO: 1820
guuuacuucugugcaauca

SEQ ID NO: 141823 - RNA, 19 nt, Artificial Sequence
  Description of Artificial Sequence: Synthetic oligonucleotide
  Antisense strand to SEQ ID NO: 141822
ugauugcacagaaguaaac

SEQ ID NO: 141824 - RNA, 19 nt, Artificial Sequence
  Description of Artificial Sequence: Synthetic oligonucleotide
  Sense strand starting at position 2154 of SEQ ID NO: 1820
acguuuacuucugugcaau

SEQ ID NO: 141825 - RNA, 19 nt, Artificial Sequence
  Description of Artificial Sequence: Synthetic oligonucleotide
  Antisense strand to SEQ ID NO: 141824
auugcacagaaguaaacgu

SEQ ID NO: 141826 - RNA, 19 nt, Artificial Sequence
  Description of Artificial Sequence: Synthetic oligonucleotide
  Sense strand starting at position 2133 of SEQ ID NO: 1820
guagguauguagcugcaga

SEQ ID NO: 141827 - RNA, 19 nt, Artificial Sequence
  Description of Artificial Sequence: Synthetic oligonucleotide
  Antisense strand to SEQ ID NO: 141826
ucugcagcuacauaccuac

SEQ ID NO: 141828 - RNA, 19 nt, Artificial Sequence
  Description of Artificial Sequence: Synthetic oligonucleotide
  Sense strand starting at position 2125 of SEQ ID NO: 1820
auagguuuguagguaugua

SEQ ID NO: 141829 - RNA, 19 nt, Artificial Sequence
  Description of Artificial Sequence: Synthetic oligonucleotide
  Antisense strand to SEQ ID NO: 141828
uacauaccuacaaaccuau

SEQ ID NO: 141830 - RNA, 19 nt, Artificial Sequence
  Description of Artificial Sequence: Synthetic oligonucleotide
  Sense strand starting at position 2121 of SEQ ID NO: 1820
agaaauagguuuguaggua

SEQ ID NO: 141831 - RNA, 19 nt, Artificial Sequence
  Description of Artificial Sequence: Synthetic oligonucleotide
  Antisense strand to SEQ ID NO: 141830
uaccuacaaaccuauuucu

SEQ ID NO: 141832 - RNA, 19 nt, Artificial Sequence
  Description of Artificial Sequence: Synthetic oligonucleotide
  Sense strand starting at position 2120 of SEQ ID NO: 1820
cagaaauagguuuguaggu

SEQ ID NO: 141833 - RNA, 19 nt, Artificial Sequence
  Description of Artificial Sequence: Synthetic oligonucleotide
  Antisense strand to SEQ ID NO: 141832
accuacaaaccuauuucug

SEQ ID NO: 141834 - RNA, 19 nt, Artificial Sequence
  Description of Artificial Sequence: Synthetic oligonucleotide
  Sense strand starting at position 2114 of SEQ ID NO: 1820
acguuacagaaauagguuu

SEQ ID NO: 141835 - RNA, 19 nt, Artificial Sequence
  Description of Artificial Sequence: Synthetic oligonucleotide
  Antisense strand to SEQ ID NO: 141834
aaaccuauuucuguaacgu

SEQ ID NO: 141836 - RNA, 19 nt, Artificial Sequence
  Description of Artificial Sequence: Synthetic oligonucleotide
  Sense strand starting at position 2106 of SEQ ID NO: 1820
gggaauguacguuacagaa

SEQ ID NO: 141837 - RNA, 19 nt, Artificial Sequence
  Description of Artificial Sequence: Synthetic oligonucleotide
  Antisense strand to SEQ ID NO: 141836
uucuguaacguacauuccc

SEQ ID NO: 141838 - RNA, 19 nt, Artificial Sequence
  Description of Artificial Sequence: Synthetic oligonucleotide
  Sense strand starting at position 1822 of SEQ ID NO: 1820
gcaagcaucugaucacacu

SEQ ID NO: 141839 - RNA, 19 nt, Artificial Sequence
  Description of Artificial Sequence: Synthetic oligonucleotide
  Antisense strand to SEQ ID NO: 141838
agugugaucagaugcuugc

SEQ ID NO: 141840 - RNA, 19 nt, Artificial Sequence
  Description of Artificial Sequence: Synthetic oligonucleotide
  Sense strand starting at position 1788 of SEQ ID NO: 1820
acugaucuauagcauuaga

SEQ ID NO: 141841 - RNA, 19 nt, Artificial Sequence
  Description of Artificial Sequence: Synthetic oligonucleotide
  Antisense strand to SEQ ID NO: 141840
ucuaaugcuauagaucagu

SEQ ID NO: 141842 - RNA, 19 nt, Artificial Sequence
  Description of Artificial Sequence: Synthetic oligonucleotide
  Sense strand starting at position 1785 of SEQ ID NO: 1820
gcuacugaucuauagcauu

SEQ ID NO: 141843 - RNA, 19 nt, Artificial Sequence
  Description of Artificial Sequence: Synthetic oligonucleotide
  Antisense strand to SEQ ID NO: 141842
aaugcuauagaucaguagc

SEQ ID NO: 141844 - RNA, 19 nt, Artificial Sequence
  Description of Artificial Sequence: Synthetic oligonucleotide
  Sense strand starting at position 1783 of SEQ ID NO: 1820
cggcuacugaucuauagca

SEQ ID NO: 141845 - RNA, 19 nt, Artificial Sequence
  Description of Artificial Sequence: Synthetic oligonucleotide
  Antisense strand to SEQ ID NO: 141844
ugcuauagaucaguagccg

SEQ ID NO: 141846 - RNA, 19 nt, Artificial Sequence
  Description of Artificial Sequence: Synthetic oligonucleotide
  Sense strand starting at position 1761 of SEQ ID NO: 1820
auaugaucuuccuagggaa

SEQ ID NO: 141847 - RNA, 19 nt, Artificial Sequence
  Description of Artificial Sequence: Synthetic oligonucleotide
  Antisense strand to SEQ ID NO: 141846
uucccuaggaagaucauau

SEQ ID NO: 141848 - RNA, 19 nt, Artificial Sequence
  Description of Artificial Sequence: Synthetic oligonucleotide
  Sense strand starting at position 1511 of SEQ ID NO: 1820
ggugguggaucaccggaaa

SEQ ID NO: 141849 - RNA, 19 nt, Artificial Sequence
  Description of Artificial Sequence: Synthetic oligonucleotide
  Antisense strand to SEQ ID NO: 141848
uuuccggugauccaccacc

SEQ ID NO: 141850 - RNA, 19 nt, Artificial Sequence
  Description of Artificial Sequence: Synthetic oligonucleotide
  Sense strand starting at position 1256 of SEQ ID NO: 1820
cgacaaugugccuacuaug

SEQ ID NO: 141851 - RNA, 19 nt, Artificial Sequence
  Description of Artificial Sequence: Synthetic oligonucleotide
  Antisense strand to SEQ ID NO: 141850
cauaguaggcacauugucg

SEQ ID NO: 141852 - RNA, 19 nt, Artificial Sequence
  Description of Artificial Sequence: Synthetic oligonucleotide
  Sense strand starting at position 1255 of SEQ ID NO: 1820
acgacaaugugccuacuau

SEQ ID NO: 141853 - RNA, 19 nt, Artificial Sequence
  Description of Artificial Sequence: Synthetic oligonucleotide
  Antisense strand to SEQ ID NO: 141852
auaguaggcacauugucgu

SEQ ID NO: 141854 - RNA, 19 nt, Artificial Sequence
  Description of Artificial Sequence: Synthetic oligonucleotide
  Sense strand starting at position 810 of SEQ ID NO: 1820
aggcccagcuauccuaaau

SEQ ID NO: 141855 - RNA, 19 nt, Artificial Sequence
  Description of Artificial Sequence: Synthetic oligonucleotide
  Antisense strand to SEQ ID NO: 141854
auuuaggauagcugggccu

SEQ ID NO: 141856 - RNA, 19 nt, Artificial Sequence
  Description of Artificial Sequence: Synthetic oligonucleotide
  Sense strand starting at position 768 of SEQ ID NO: 1820
uaguacuauguggaaggua

SEQ ID NO: 141857 - RNA, 19 nt, Artificial Sequence
  Description of Artificial Sequence: Synthetic oligonucleotide
  Antisense strand to SEQ ID NO: 141856
uaccuuccacauaguacua

SEQ ID NO: 141858 - RNA, 19 nt, Artificial Sequence
  Description of Artificial Sequence: Synthetic oligonucleotide
  Sense strand starting at position 764 of SEQ ID NO: 1820
cgguuaguacuauguggaa

SEQ ID NO: 141859 - RNA, 19 nt, Artificial Sequence
  Description of Artificial Sequence: Synthetic oligonucleotide
  Antisense strand to SEQ ID NO: 141858
uuccacauaguacuaaccg

SEQ ID NO: 141860 - RNA, 19 nt, Artificial Sequence
  Description of Artificial Sequence: Synthetic oligonucleotide
  Sense strand starting at position 712 of SEQ ID NO: 1820
uuucuagacugguaacaug

SEQ ID NO: 141861 - RNA, 19 nt, Artificial Sequence
  Description of Artificial Sequence: Synthetic oligonucleotide
  Antisense strand to SEQ ID NO: 141860
cauguuaccagucuagaaa

SEQ ID NO: 141862 - RNA, 19 nt, Artificial Sequence
  Description of Artificial Sequence: Synthetic oligonucleotide
  Sense strand starting at position 710 of SEQ ID NO: 1820
gguuucuagacugguaaca

SEQ ID NO: 141863 - RNA, 19 nt, Artificial Sequence
  Description of Artificial Sequence: Synthetic oligonucleotide
  Antisense strand to SEQ ID NO: 141862
uguuaccagucuagaaacc

SEQ ID NO: 141864 - RNA, 19 nt, Artificial Sequence
  Description of Artificial Sequence: Synthetic oligonucleotide
  Sense strand starting at position 709 of SEQ ID NO: 1820
cgguuucuagacugguaac

SEQ ID NO: 141865 - RNA, 19 nt, Artificial Sequence
  Description of Artificial Sequence: Synthetic oligonucleotide
  Antisense strand to SEQ ID NO: 141864
guuaccagucuagaaaccg

SEQ ID NO: 141866 - RNA, 19 nt, Artificial Sequence
  Description of Artificial Sequence: Synthetic oligonucleotide
  Sense strand starting at position 592 of SEQ ID NO: 1820
cgcauaaauuuacagaauc

SEQ ID NO: 141867 - RNA, 19 nt, Artificial Sequence
  Description of Artificial Sequence: Synthetic oligonucleotide
  Antisense strand to SEQ ID NO: 141866
gauucuguaaauuuaugcg

SEQ ID NO: 141868 - RNA, 19 nt, Artificial Sequence
  Description of Artificial Sequence: Synthetic oligonucleotide
  Sense strand starting at position 577 of SEQ ID NO: 1820
ggacaaucaguguaacgca

SEQ ID NO: 141869 - RNA, 19 nt, Artificial Sequence
  Description of Artificial Sequence: Synthetic oligonucleotide
  Antisense strand to SEQ ID NO: 141868
ugcguuacacugauugucc

SEQ ID NO: 141870 - RNA, 19 nt, Artificial Sequence
  Description of Artificial Sequence: Synthetic oligonucleotide
  Sense strand starting at position 564 of SEQ ID NO: 1820
guguauccacguuggacaa

SEQ ID NO: 141871 - RNA, 19 nt, Artificial Sequence
  Description of Artificial Sequence: Synthetic oligonucleotide
  Antisense strand to SEQ ID NO: 141870
uuguccaacguggauacac

SEQ ID NO: 141872 - RNA, 19 nt, Artificial Sequence
  Description of Artificial Sequence: Synthetic oligonucleotide
  Sense strand starting at position 224 of SEQ ID NO: 1820
gcaggagaaucacuuagca

SEQ ID NO: 141873 - RNA, 19 nt, Artificial Sequence
  Description of Artificial Sequence: Synthetic oligonucleotide
  Antisense strand to SEQ ID NO: 141872
ugcuaagugauucuccugc

SEQ ID NO: 141874 - RNA, 19 nt, Artificial Sequence
  Description of Artificial Sequence: Synthetic oligonucleotide
  Sense strand starting at position 144 of SEQ ID NO: 1821
agcugauaacugcagucuu

SEQ ID NO: 141875 - RNA, 19 nt, Artificial Sequence
  Description of Artificial Sequence: Synthetic oligonucleotide
  Antisense strand to SEQ ID NO: 141874
aagacugcaguuaucagcu

SEQ ID NO: 141876 - RNA, 19 nt, Artificial Sequence
  Description of Artificial Sequence: Synthetic oligonucleotide
  Sense strand starting at position 157 of SEQ ID NO: 1821
agucuuggaugucuaaaca

SEQ ID NO: 141877 - RNA, 19 nt, Artificial Sequence
  Description of Artificial Sequence: Synthetic oligonucleotide
  Antisense strand to SEQ ID NO: 141876
uguuuagacauccaagacu

SEQ ID NO: 141878 - RNA, 19 nt, Artificial Sequence
  Description of Artificial Sequence: Synthetic oligonucleotide
  Sense strand starting at position 264 of SEQ ID NO: 1821
cuguguucggagggcaaau

SEQ ID NO: 141879 - RNA, 19 nt, Artificial Sequence
  Description of Artificial Sequence: Synthetic oligonucleotide
  Antisense strand to SEQ ID NO: 141878
auuugcccuccgaacacag

SEQ ID NO: 141880 - RNA, 19 nt, Artificial Sequence
  Description of Artificial Sequence: Synthetic oligonucleotide
  Sense strand starting at position 331 of SEQ ID NO: 1821
guguuccaguuucucaaua

SEQ ID NO: 141881 - RNA, 19 nt, Artificial Sequence
  Description of Artificial Sequence: Synthetic oligonucleotide
  Antisense strand to SEQ ID NO: 141880
uauugagaaacuggaacac

SEQ ID NO: 141882 - RNA, 19 nt, Artificial Sequence
  Description of Artificial Sequence: Synthetic oligonucleotide
  Sense strand starting at position 363 of SEQ ID NO: 1821
cuagucuagccugauccaa

SEQ ID NO: 141883 - RNA, 19 nt, Artificial Sequence
  Description of Artificial Sequence: Synthetic oligonucleotide
  Antisense strand to SEQ ID NO: 141882
uuggaucaggcuagacuag

SEQ ID NO: 141884 - RNA, 19 nt, Artificial Sequence
  Description of Artificial Sequence: Synthetic oligonucleotide
  Sense strand starting at position 365 of SEQ ID NO: 1821
agucuagccugauccaaga

SEQ ID NO: 141885 - RNA, 19 nt, Artificial Sequence
  Description of Artificial Sequence: Synthetic oligonucleotide
  Antisense strand to SEQ ID NO: 141884
ucuuggaucaggcuagacu

SEQ ID NO: 141886 - RNA, 19 nt, Artificial Sequence
  Description of Artificial Sequence: Synthetic oligonucleotide
  Sense strand starting at position 472 of SEQ ID NO: 1821
agcauauucccaugugcaa

SEQ ID NO: 141887 - RNA, 19 nt, Artificial Sequence
  Description of Artificial Sequence: Synthetic oligonucleotide
  Antisense strand to SEQ ID NO: 141886
uugcacaugggaauaugcu

SEQ ID NO: 141888 - RNA, 19 nt, Artificial Sequence
  Description of Artificial Sequence: Synthetic oligonucleotide
  Sense strand starting at position 625 of SEQ ID NO: 1821
ugcgcuucucuggaggaaa

SEQ ID NO: 141889 - RNA, 19 nt, Artificial Sequence
  Description of Artificial Sequence: Synthetic oligonucleotide
  Antisense strand to SEQ ID NO: 141888
uuuccuccagagaagcgca

SEQ ID NO: 141890 - RNA, 19 nt, Artificial Sequence
  Description of Artificial Sequence: Synthetic oligonucleotide
  Sense strand starting at position 924 of SEQ ID NO: 1821
ccacgaccuuaauuaagau

SEQ ID NO: 141891 - RNA, 19 nt, Artificial Sequence
  Description of Artificial Sequence: Synthetic oligonucleotide
  Antisense strand to SEQ ID NO: 141890
aucuuaauuaaggucgugg

SEQ ID NO: 141892 - RNA, 19 nt, Artificial Sequence
  Description of Artificial Sequence: Synthetic oligonucleotide
  Sense strand starting at position 1985 of SEQ ID NO: 1821
gcacaauggacggguuaua

SEQ ID NO: 141893 - RNA, 19 nt, Artificial Sequence
  Description of Artificial Sequence: Synthetic oligonucleotide
  Antisense strand to SEQ ID NO: 141892
uauaacccguccauugugc

SEQ ID NO: 141894 - RNA, 19 nt, Artificial Sequence
  Description of Artificial Sequence: Synthetic oligonucleotide
  Sense strand starting at position 2229 of SEQ ID NO: 1821
aaguuagguuugcccacaa

SEQ ID NO: 141895 - RNA, 19 nt, Artificial Sequence
  Description of Artificial Sequence: Synthetic oligonucleotide
  Antisense strand to SEQ ID NO: 141894
uugugggcaaaccuaacuu

SEQ ID NO: 141896 - RNA, 19 nt, Artificial Sequence
  Description of Artificial Sequence: Synthetic oligonucleotide
  Sense strand starting at position 2233 of SEQ ID NO: 1821
uagguuugcccacaaagca

SEQ ID NO: 141897 - RNA, 19 nt, Artificial Sequence
  Description of Artificial Sequence: Synthetic oligonucleotide
  Antisense strand to SEQ ID NO: 141896
ugcuuugugggcaaaccua

SEQ ID NO: 141898 - RNA, 19 nt, Artificial Sequence
  Description of Artificial Sequence: Synthetic oligonucleotide
  Sense strand starting at position 2323 of SEQ ID NO: 1821
uaaagaaggcuucgggaca

SEQ ID NO: 141899 - RNA, 19 nt, Artificial Sequence
  Description of Artificial Sequence: Synthetic oligonucleotide
  Antisense strand to SEQ ID NO: 141898
ugucccgaagccuucuuua

SEQ ID NO: 141900 - RNA, 19 nt, Artificial Sequence
  Description of Artificial Sequence: Synthetic oligonucleotide
  Sense strand starting at position 2697 of SEQ ID NO: 1821
cuccgauucgacugcaaag

SEQ ID NO: 141901 - RNA, 19 nt, Artificial Sequence
  Description of Artificial Sequence: Synthetic oligonucleotide
  Antisense strand to SEQ ID NO: 141900
cuuugcagucgaaucggag

SEQ ID NO: 141902 - RNA, 19 nt, Artificial Sequence
  Description of Artificial Sequence: Synthetic oligonucleotide
  Sense strand starting at position 2807 of SEQ ID NO: 1821
ucugucugucuccgauuaa

SEQ ID NO: 141903 - RNA, 19 nt, Artificial Sequence
  Description of Artificial Sequence: Synthetic oligonucleotide
  Antisense strand to SEQ ID NO: 141902
uuaaucggagacagacaga

SEQ ID NO: 141904 - RNA, 19 nt, Artificial Sequence
  Description of Artificial Sequence: Synthetic oligonucleotide
  Sense strand starting at position 2811 of SEQ ID NO: 1821
ucugucuccgauuaaacca

SEQ ID NO: 141905 - RNA, 19 nt, Artificial Sequence
  Description of Artificial Sequence: Synthetic oligonucleotide
  Antisense strand to SEQ ID NO: 141904
ugguuuaaucggagacaga

SEQ ID NO: 141906 - RNA, 19 nt, Artificial Sequence
  Description of Artificial Sequence: Synthetic oligonucleotide
  Sense strand starting at position 2818 of SEQ ID NO: 1821
ccgauuaaaccacguggau

SEQ ID NO: 141907 - RNA, 19 nt, Artificial Sequence
  Description of Artificial Sequence: Synthetic oligonucleotide
  Antisense strand to SEQ ID NO: 141906
auccacgugguuuaaucgg

SEQ ID NO: 141908 - RNA, 19 nt, Artificial Sequence
  Description of Artificial Sequence: Synthetic oligonucleotide
  Sense strand starting at position 2950 of SEQ ID NO: 1821
caaacugaucacugucgau

SEQ ID NO: 141909 - RNA, 19 nt, Artificial Sequence
  Description of Artificial Sequence: Synthetic oligonucleotide
  Antisense strand to SEQ ID NO: 141908
aucgacagugaucaguuug

SEQ ID NO: 141910 - RNA, 19 nt, Artificial Sequence
  Description of Artificial Sequence: Synthetic oligonucleotide
  Sense strand starting at position 3490 of SEQ ID NO: 1821
uaguuacuucgcucacgca

SEQ ID NO: 141911 - RNA, 19 nt, Artificial Sequence
  Description of Artificial Sequence: Synthetic oligonucleotide
  Antisense strand to SEQ ID NO: 141910
ugcgugagcgaaguaacua

SEQ ID NO: 141912 - RNA, 19 nt, Artificial Sequence
  Description of Artificial Sequence: Synthetic oligonucleotide
  Sense strand starting at position 3519 of SEQ ID NO: 1821
agggacgugcccuaauuga

SEQ ID NO: 141913 - RNA, 19 nt, Artificial Sequence
  Description of Artificial Sequence: Synthetic oligonucleotide
  Antisense strand to SEQ ID NO: 141912
ucaauuagggcacgucccu

SEQ ID NO: 141914 - RNA, 19 nt, Artificial Sequence
  Description of Artificial Sequence: Synthetic oligonucleotide
  Sense strand starting at position 3530 of SEQ ID NO: 1821
cuaauugagugauuggaau

SEQ ID NO: 141915 - RNA, 19 nt, Artificial Sequence
  Description of Artificial Sequence: Synthetic oligonucleotide
  Antisense strand to SEQ ID NO: 141914
auuccaaucacucaauuag

SEQ ID NO: 141916 - RNA, 19 nt, Artificial Sequence
  Description of Artificial Sequence: Synthetic oligonucleotide
  Sense strand starting at position 3601 of SEQ ID NO: 1821
uuuauuugccuguggaugu

SEQ ID NO: 141917 - RNA, 19 nt, Artificial Sequence
  Description of Artificial Sequence: Synthetic oligonucleotide
  Antisense strand to SEQ ID NO: 141916
acauccacaggcaaauaaa

SEQ ID NO: 141918 - RNA, 19 nt, Artificial Sequence
  Description of Artificial Sequence: Synthetic oligonucleotide
  Sense strand starting at position 3612 of SEQ ID NO: 1821
guggauguguccucaguau

SEQ ID NO: 141919 - RNA, 19 nt, Artificial Sequence
  Description of Artificial Sequence: Synthetic oligonucleotide
  Antisense strand to SEQ ID NO: 141918
auacugaggacacauccac

SEQ ID NO: 141920 - RNA, 19 nt, Artificial Sequence
  Description of Artificial Sequence: Synthetic oligonucleotide
  Sense strand starting at position 3616 of SEQ ID NO: 1821
auguguccucaguauguaa

SEQ ID NO: 141921 - RNA, 19 nt, Artificial Sequence
  Description of Artificial Sequence: Synthetic oligonucleotide
  Antisense strand to SEQ ID NO: 141920
uuacauacugaggacacau

SEQ ID NO: 141922 - RNA, 19 nt, Artificial Sequence
  Description of Artificial Sequence: Synthetic oligonucleotide
  Sense strand starting at position 3618 of SEQ ID NO: 1821
guguccucaguauguaaca

SEQ ID NO: 141923 - RNA, 19 nt, Artificial Sequence
  Description of Artificial Sequence: Synthetic oligonucleotide
  Antisense strand to SEQ ID NO: 141922
uguuacauacugaggacac

SEQ ID NO: 141924 - RNA, 19 nt, Artificial Sequence
  Description of Artificial Sequence: Synthetic oligonucleotide
  Sense strand starting at position 3619 of SEQ ID NO: 1821
uguccucaguauguaacaa

SEQ ID NO: 141925 - RNA, 19 nt, Artificial Sequence
  Description of Artificial Sequence: Synthetic oligonucleotide
  Antisense strand to SEQ ID NO: 141924
uuguuacauacugaggaca

SEQ ID NO: 141926 - RNA, 19 nt, Artificial Sequence
  Description of Artificial Sequence: Synthetic oligonucleotide
  Sense strand starting at position 3640 of SEQ ID NO: 1821
ugcugugacacggaagaau

SEQ ID NO: 141927 - RNA, 19 nt, Artificial Sequence
  Description of Artificial Sequence: Synthetic oligonucleotide
  Antisense strand to SEQ ID NO: 141926
auucuuccgugucacagca

SEQ ID NO: 141928 - RNA, 19 nt, Artificial Sequence
  Description of Artificial Sequence: Synthetic oligonucleotide
  Sense strand starting at position 3649 of SEQ ID NO: 1821
acggaagaaucacauaaag

SEQ ID NO: 141929 - RNA, 19 nt, Artificial Sequence
  Description of Artificial Sequence: Synthetic oligonucleotide
  Antisense strand to SEQ ID NO: 141928
cuuuaugugauucuuccgu

SEQ ID NO: 141930 - RNA, 19 nt, Artificial Sequence
  Description of Artificial Sequence: Synthetic oligonucleotide
  Sense strand starting at position 3659 of SEQ ID NO: 1821
cacauaaagguuugcugua

SEQ ID NO: 141931 - RNA, 19 nt, Artificial Sequence
  Description of Artificial Sequence: Synthetic oligonucleotide
  Antisense strand to SEQ ID NO: 141930
uacagcaaaccuuuaugug

SEQ ID NO: 141932 - RNA, 19 nt, Artificial Sequence
  Description of Artificial Sequence: Synthetic oligonucleotide
  Sense strand starting at position 3660 of SEQ ID NO: 1821
acauaaagguuugcuguau

SEQ ID NO: 141933 - RNA, 19 nt, Artificial Sequence
  Description of Artificial Sequence: Synthetic oligonucleotide
  Antisense strand to SEQ ID NO: 141932
auacagcaaaccuuuaugu

SEQ ID NO: 141934 - RNA, 19 nt, Artificial Sequence
  Description of Artificial Sequence: Synthetic oligonucleotide
  Sense strand starting at position 3661 of SEQ ID NO: 1821
cauaaagguuugcuguauu

SEQ ID NO: 141935 - RNA, 19 nt, Artificial Sequence
  Description of Artificial Sequence: Synthetic oligonucleotide
  Antisense strand to SEQ ID NO: 141934
aauacagcaaaccuuuaug

SEQ ID NO: 141936 - RNA, 19 nt, Artificial Sequence
  Description of Artificial Sequence: Synthetic oligonucleotide
  Sense strand starting at position 3664 of SEQ ID NO: 1821
aaagguuugcuguauuagu

SEQ ID NO: 141937 - RNA, 19 nt, Artificial Sequence
  Description of Artificial Sequence: Synthetic oligonucleotide
  Antisense strand to SEQ ID NO: 141936
acuaauacagcaaaccuuu

SEQ ID NO: 141938 - RNA, 19 nt, Artificial Sequence
  Description of Artificial Sequence: Synthetic oligonucleotide
  Sense strand starting at position 3669 of SEQ ID NO: 1821
uuugcuguauuagugaauu

SEQ ID NO: 141939 - RNA, 19 nt, Artificial Sequence
  Description of Artificial Sequence: Synthetic oligonucleotide
  Antisense strand to SEQ ID NO: 141938
aauucacuaauacagcaaa

SEQ ID NO: 141940 - RNA, 19 nt, Artificial Sequence
  Description of Artificial Sequence: Synthetic oligonucleotide
  Sense strand starting at position 3892 of SEQ ID NO: 1821
agugguaagcuuuacaaag

SEQ ID NO: 141941 - RNA, 19 nt, Artificial Sequence
  Description of Artificial Sequence: Synthetic oligonucleotide
  Antisense strand to SEQ ID NO: 141940
cuuuguaaagcuuaccacu

SEQ ID NO: 141942 - RNA, 19 nt, Artificial Sequence
  Description of Artificial Sequence: Synthetic oligonucleotide
  Sense strand starting at position 3906 of SEQ ID NO: 1821
caaagugaugccuguguag

SEQ ID NO: 141943 - RNA, 19 nt, Artificial Sequence
  Description of Artificial Sequence: Synthetic oligonucleotide
  Antisense strand to SEQ ID NO: 141942
cuacacaggcaucacuuug

SEQ ID NO: 141944 - RNA, 19 nt, Artificial Sequence
  Description of Artificial Sequence: Synthetic oligonucleotide
  Sense strand starting at position 3908 of SEQ ID NO: 1821
aagugaugccuguguagga

SEQ ID NO: 141945 - RNA, 19 nt, Artificial Sequence
  Description of Artificial Sequence: Synthetic oligonucleotide
  Antisense strand to SEQ ID NO: 141944
uccuacacaggcaucacuu

SEQ ID NO: 141946 - RNA, 19 nt, Artificial Sequence
  Description of Artificial Sequence: Synthetic oligonucleotide
  Sense strand starting at position 3909 of SEQ ID NO: 1821
agugaugccuguguaggaa

SEQ ID NO: 141947 - RNA, 19 nt, Artificial Sequence
  Description of Artificial Sequence: Synthetic oligonucleotide
  Antisense strand to SEQ ID NO: 141946
uuccuacacaggcaucacu

SEQ ID NO: 141948 - RNA, 19 nt, Artificial Sequence
  Description of Artificial Sequence: Synthetic oligonucleotide
  Sense strand starting at position 3968 of SEQ ID NO: 1821
aggcauucagguggaaagu

SEQ ID NO: 141949 - RNA, 19 nt, Artificial Sequence
  Description of Artificial Sequence: Synthetic oligonucleotide
  Antisense strand to SEQ ID NO: 141948
acuuuccaccugaaugccu

SEQ ID NO: 141950 - RNA, 19 nt, Artificial Sequence
  Description of Artificial Sequence: Synthetic oligonucleotide
  Sense strand starting at position 3969 of SEQ ID NO: 1821
ggcauucagguggaaaguu

SEQ ID NO: 141951 - RNA, 19 nt, Artificial Sequence
  Description of Artificial Sequence: Synthetic oligonucleotide
  Antisense strand to SEQ ID NO: 141950
aacuuuccaccugaaugcc

SEQ ID NO: 141952 - RNA, 19 nt, Artificial Sequence
  Description of Artificial Sequence: Synthetic oligonucleotide
  Sense strand starting at position 3978 of SEQ ID NO: 1821
guggaaaguuaugcugaac

SEQ ID NO: 141953 - RNA, 19 nt, Artificial Sequence
  Description of Artificial Sequence: Synthetic oligonucleotide
  Antisense strand to SEQ ID NO: 141952
guucagcauaacuuuccac

SEQ ID NO: 141954 - RNA, 19 nt, Artificial Sequence
  Description of Artificial Sequence: Synthetic oligonucleotide
  Sense strand starting at position 794 of SEQ ID NO: 1822
gcacaauggacggguuaua

SEQ ID NO: 141955 - RNA, 19 nt, Artificial Sequence
  Description of Artificial Sequence: Synthetic oligonucleotide
  Antisense strand to SEQ ID NO: 141954
uauaacccguccauugugc

SEQ ID NO: 141956 - RNA, 19 nt, Artificial Sequence
  Description of Artificial Sequence: Synthetic oligonucleotide
  Sense strand starting at position 1038 of SEQ ID NO: 1822
aaguuagguuugcccacaa

SEQ ID NO: 141957 - RNA, 19 nt, Artificial Sequence
  Description of Artificial Sequence: Synthetic oligonucleotide
  Antisense strand to SEQ ID NO: 141956
uugugggcaaaccuaacuu

SEQ ID NO: 141958 - RNA, 19 nt, Artificial Sequence
  Description of Artificial Sequence: Synthetic oligonucleotide
  Sense strand starting at position 1042 of SEQ ID NO: 1822
uagguuugcccacaaagca

SEQ ID NO: 141959 - RNA, 19 nt, Artificial Sequence
  Description of Artificial Sequence: Synthetic oligonucleotide
  Antisense strand to SEQ ID NO: 141958
ugcuuugugggcaaaccua

SEQ ID NO: 141960 - RNA, 19 nt, Artificial Sequence
  Description of Artificial Sequence: Synthetic oligonucleotide
  Sense strand starting at position 1132 of SEQ ID NO: 1822
uaaagaaggcuucgggaca

SEQ ID NO: 141961 - RNA, 19 nt, Artificial Sequence
  Description of Artificial Sequence: Synthetic oligonucleotide
  Antisense strand to SEQ ID NO: 141960
ugucccgaagccuucuuua

SEQ ID NO: 141962 - RNA, 19 nt, Artificial Sequence
  Description of Artificial Sequence: Synthetic oligonucleotide
  Sense strand starting at position 1506 of SEQ ID NO: 1822
cuccgauucgacugcaaag

SEQ ID NO: 141963 - RNA, 19 nt, Artificial Sequence
  Description of Artificial Sequence: Synthetic oligonucleotide
  Antisense strand to SEQ ID NO: 141962
cuuugcagucgaaucggag

SEQ ID NO: 141964 - RNA, 19 nt, Artificial Sequence
  Description of Artificial Sequence: Synthetic oligonucleotide
  Sense strand starting at position 1620 of SEQ ID NO: 1822
ucugucuccgauuaaacca

SEQ ID NO: 141965 - RNA, 19 nt, Artificial Sequence
  Description of Artificial Sequence: Synthetic oligonucleotide
  Antisense strand to SEQ ID NO: 141964
ugguuuaaucggagacaga

SEQ ID NO: 141966 - RNA, 19 nt, Artificial Sequence
  Description of Artificial Sequence: Synthetic oligonucleotide
  Sense strand starting at position 1627 of SEQ ID NO: 1822
ccgauuaaaccacguggau

SEQ ID NO: 141967 - RNA, 19 nt, Artificial Sequence
  Description of Artificial Sequence: Synthetic oligonucleotide
  Antisense strand to SEQ ID NO: 141966
auccacgugguuuaaucgg

SEQ ID NO: 141968 - RNA, 19 nt, Artificial Sequence
  Description of Artificial Sequence: Synthetic oligonucleotide
  Sense strand starting at position 1759 of SEQ ID NO: 1822
caaacugaucacugucgau

SEQ ID NO: 141969 - RNA, 19 nt, Artificial Sequence
  Description of Artificial Sequence: Synthetic oligonucleotide
  Antisense strand to SEQ ID NO: 141968
aucgacagugaucaguuug

SEQ ID NO: 141970 - RNA, 19 nt, Artificial Sequence
  Description of Artificial Sequence: Synthetic oligonucleotide
  Sense strand starting at position 2299 of SEQ ID NO: 1822
uaguuacuucgcucacgca

SEQ ID NO: 141971 - RNA, 19 nt, Artificial Sequence
  Description of Artificial Sequence: Synthetic oligonucleotide
  Antisense strand to SEQ ID NO: 141970
ugcgugagcgaaguaacua

SEQ ID NO: 141972 - RNA, 19 nt, Artificial Sequence
  Description of Artificial Sequence: Synthetic oligonucleotide
  Sense strand starting at position 2328 of SEQ ID NO: 1822
agggacgugcccuaauuga

SEQ ID NO: 141973 - RNA, 19 nt, Artificial Sequence
  Description of Artificial Sequence: Synthetic oligonucleotide
  Antisense strand to SEQ ID NO: 141972
ucaauuagggcacgucccu

SEQ ID NO: 141974 - RNA, 19 nt, Artificial Sequence
  Description of Artificial Sequence: Synthetic oligonucleotide
  Sense strand starting at position 2339 of SEQ ID NO: 1822
cuaauugagugauuggaau

SEQ ID NO: 141975 - RNA, 19 nt, Artificial Sequence
  Description of Artificial Sequence: Synthetic oligonucleotide
  Antisense strand to SEQ ID NO: 141974
auuccaaucacucaauuag

SEQ ID NO: 141976 - RNA, 19 nt, Artificial Sequence
  Description of Artificial Sequence: Synthetic oligonucleotide
  Sense strand starting at position 2410 of SEQ ID NO: 1822
uuuauuugccuguggaugu

SEQ ID NO: 141977 - RNA, 19 nt, Artificial Sequence
  Description of Artificial Sequence: Synthetic oligonucleotide
  Antisense strand to SEQ ID NO: 141976
acauccacaggcaaauaaa

SEQ ID NO: 141978 - RNA, 19 nt, Artificial Sequence
  Description of Artificial Sequence: Synthetic oligonucleotide
  Sense strand starting at position 2425 of SEQ ID NO: 1822
auguguccucaguauguaa

SEQ ID NO: 141979 - RNA, 19 nt, Artificial Sequence
  Description of Artificial Sequence: Synthetic oligonucleotide
  Antisense strand to SEQ ID NO: 141978
uuacauacugaggacacau

SEQ ID NO: 141980 - RNA, 19 nt, Artificial Sequence
  Description of Artificial Sequence: Synthetic oligonucleotide
  Sense strand starting at position 2428 of SEQ ID NO: 1822
uguccucaguauguaacaa

SEQ ID NO: 141981 - RNA, 19 nt, Artificial Sequence
  Description of Artificial Sequence: Synthetic oligonucleotide
  Antisense strand to SEQ ID NO: 141980
uuguuacauacugaggaca

SEQ ID NO: 141982 - RNA, 19 nt, Artificial Sequence
  Description of Artificial Sequence: Synthetic oligonucleotide
  Sense strand starting at position 2449 of SEQ ID NO: 1822
ugcugugacacggaagaau

SEQ ID NO: 141983 - RNA, 19 nt, Artificial Sequence
  Description of Artificial Sequence: Synthetic oligonucleotide
  Antisense strand to SEQ ID NO: 141982
auucuuccgugucacagca

SEQ ID NO: 141984 - RNA, 19 nt, Artificial Sequence
  Description of Artificial Sequence: Synthetic oligonucleotide
  Sense strand starting at position 2458 of SEQ ID NO: 1822
acggaagaaucacauaaag

SEQ ID NO: 141985 - RNA, 19 nt, Artificial Sequence
  Description of Artificial Sequence: Synthetic oligonucleotide
  Antisense strand to SEQ ID NO: 141984
cuuuaugugauucuuccgu

SEQ ID NO: 141986 - RNA, 19 nt, Artificial Sequence
  Description of Artificial Sequence: Synthetic oligonucleotide
  Sense strand starting at position 2468 of SEQ ID NO: 1822
cacauaaagguuugcugua

SEQ ID NO: 141987 - RNA, 19 nt, Artificial Sequence
  Description of Artificial Sequence: Synthetic oligonucleotide
  Antisense strand to SEQ ID NO: 141986
uacagcaaaccuuuaugug

SEQ ID NO: 141988 - RNA, 19 nt, Artificial Sequence
  Description of Artificial Sequence: Synthetic oligonucleotide
  Sense strand starting at position 2469 of SEQ ID NO: 1822
acauaaagguuugcuguau

SEQ ID NO: 141989 - RNA, 19 nt, Artificial Sequence
  Description of Artificial Sequence: Synthetic oligonucleotide
  Antisense strand to SEQ ID NO: 141988
auacagcaaaccuuuaugu

SEQ ID NO: 141990 - RNA, 19 nt, Artificial Sequence
  Description of Artificial Sequence: Synthetic oligonucleotide
  Sense strand starting at position 2470 of SEQ ID NO: 1822
cauaaagguuugcuguauu

SEQ ID NO: 141991 - RNA, 19 nt, Artificial Sequence
  Description of Artificial Sequence: Synthetic oligonucleotide
  Antisense strand to SEQ ID NO: 141990
aauacagcaaaccuuuaug

SEQ ID NO: 141992 - RNA, 19 nt, Artificial Sequence
  Description of Artificial Sequence: Synthetic oligonucleotide
  Sense strand starting at position 2473 of SEQ ID NO: 1822
aaagguuugcuguauuagu

SEQ ID NO: 141993 - RNA, 19 nt, Artificial Sequence
  Description of Artificial Sequence: Synthetic oligonucleotide
  Antisense strand to SEQ ID NO: 141992
acuaauacagcaaaccuuu

SEQ ID NO: 141994 - RNA, 19 nt, Artificial Sequence
  Description of Artificial Sequence: Synthetic oligonucleotide
  Sense strand starting at position 2478 of SEQ ID NO: 1822
uuugcuguauuagugaauu

SEQ ID NO: 141995 - RNA, 19 nt, Artificial Sequence
  Description of Artificial Sequence: Synthetic oligonucleotide
  Antisense strand to SEQ ID NO: 141994
aauucacuaauacagcaaa

SEQ ID NO: 141996 - RNA, 19 nt, Artificial Sequence
  Description of Artificial Sequence: Synthetic oligonucleotide
  Sense strand starting at position 2701 of SEQ ID NO: 1822
agugguaagcuuuacaaag

SEQ ID NO: 141997 - RNA, 19 nt, Artificial Sequence
  Description of Artificial Sequence: Synthetic oligonucleotide
  Antisense strand to SEQ ID NO: 141996
cuuuguaaagcuuaccacu

SEQ ID NO: 141998 - RNA, 19 nt, Artificial Sequence
  Description of Artificial Sequence: Synthetic oligonucleotide
  Sense strand starting at position 2715 of SEQ ID NO: 1822
caaagugaugccuguguag

SEQ ID NO: 141999 - RNA, 19 nt, Artificial Sequence
  Description of Artificial Sequence: Synthetic oligonucleotide
  Antisense strand to SEQ ID NO: 141998
cuacacaggcaucacuuug

SEQ ID NO: 142000 - RNA, 19 nt, Artificial Sequence
  Description of Artificial Sequence: Synthetic oligonucleotide
  Sense strand starting at position 2717 of SEQ ID NO: 1822
aagugaugccuguguagga

SEQ ID NO: 142001 - RNA, 19 nt, Artificial Sequence
  Description of Artificial Sequence: Synthetic oligonucleotide
  Antisense strand to SEQ ID NO: 142000
uccuacacaggcaucacuu

SEQ ID NO: 142002 - RNA, 19 nt, Artificial Sequence
  Description of Artificial Sequence: Synthetic oligonucleotide
  Sense strand starting at position 2718 of SEQ ID NO: 1822
agugaugccuguguaggaa

SEQ ID NO: 142003 - RNA, 19 nt, Artificial Sequence
  Description of Artificial Sequence: Synthetic oligonucleotide
  Antisense strand to SEQ ID NO: 142002
uuccuacacaggcaucacu

SEQ ID NO: 142004 - RNA, 19 nt, Artificial Sequence
  Description of Artificial Sequence: Synthetic oligonucleotide
  Sense strand starting at position 2777 of SEQ ID NO: 1822
aggcauucagguggaaagu

SEQ ID NO: 142005 - RNA, 19 nt, Artificial Sequence
  Description of Artificial Sequence: Synthetic oligonucleotide
  Antisense strand to SEQ ID NO: 142004
acuuuccaccugaaugccu

SEQ ID NO: 142006 - RNA, 19 nt, Artificial Sequence
  Description of Artificial Sequence: Synthetic oligonucleotide
  Sense strand starting at position 2778 of SEQ ID NO: 1822
ggcauucagguggaaaguu

SEQ ID NO: 142007 - RNA, 19 nt, Artificial Sequence
  Description of Artificial Sequence: Synthetic oligonucleotide
  Antisense strand to SEQ ID NO: 142006
aacuuuccaccugaaugcc

SEQ ID NO: 142008 - RNA, 19 nt, Artificial Sequence
  Description of Artificial Sequence: Synthetic oligonucleotide
  Sense strand starting at position 2787 of SEQ ID NO: 1822
guggaaaguuaugcugaac

SEQ ID NO: 142009 - RNA, 19 nt, Artificial Sequence
  Description of Artificial Sequence: Synthetic oligonucleotide
  Antisense strand to SEQ ID NO: 142008
guucagcauaacuuuccac

SEQ ID NO: 142010 - RNA, 19 nt, Artificial Sequence
  Description of Artificial Sequence: Synthetic oligonucleotide
  Sense strand starting at position 2793 of SEQ ID NO: 1822
aguuaugcugaacaacuua

SEQ ID NO: 142011 - RNA, 19 nt, Artificial Sequence
  Description of Artificial Sequence: Synthetic oligonucleotide
  Antisense strand to SEQ ID NO: 142010
uaaguuguucagcauaacu

SEQ ID NO: 142012 - RNA, 19 nt, Artificial Sequence
  Description of Artificial Sequence: Synthetic oligonucleotide
  Sense strand starting at position 2994 of SEQ ID NO: 1822
cugcauagacccuagugaa

SEQ ID NO: 142013 - RNA, 19 nt, Artificial Sequence
  Description of Artificial Sequence: Synthetic oligonucleotide
  Antisense strand to SEQ ID NO: 142012
uucacuagggucuaugcag

SEQ ID NO: 142014 - RNA, 19 nt, Artificial Sequence
  Description of Artificial Sequence: Synthetic oligonucleotide
  Sense strand starting at position 3287 of SEQ ID NO: 1822
agcaucaaguguccuguaa

SEQ ID NO: 142015 - RNA, 19 nt, Artificial Sequence
  Description of Artificial Sequence: Synthetic oligonucleotide
  Antisense strand to SEQ ID NO: 142014
uuacaggacacuugaugcu

SEQ ID NO: 142016 - RNA, 19 nt, Artificial Sequence
  Description of Artificial Sequence: Synthetic oligonucleotide
  Sense strand starting at position 3291 of SEQ ID NO: 1822
ucaaguguccuguaaagga

SEQ ID NO: 142017 - RNA, 19 nt, Artificial Sequence
  Description of Artificial Sequence: Synthetic oligonucleotide
  Antisense strand to SEQ ID NO: 142016
uccuuuacaggacacuuga

SEQ ID NO: 142018 - RNA, 19 nt, Artificial Sequence
  Description of Artificial Sequence: Synthetic oligonucleotide
  Sense strand starting at position 3374 of SEQ ID NO: 1822
gagagcugagagugcuuau

SEQ ID NO: 142019 - RNA, 19 nt, Artificial Sequence
  Description of Artificial Sequence: Synthetic oligonucleotide
  Antisense strand to SEQ ID NO: 142018
auaagcacucucagcucuc

SEQ ID NO: 142020 - RNA, 19 nt, Artificial Sequence
  Description of Artificial Sequence: Synthetic oligonucleotide
  Sense strand starting at position 3605 of SEQ ID NO: 1822
caggaaauggcaugcugau

SEQ ID NO: 142021 - RNA, 19 nt, Artificial Sequence
  Description of Artificial Sequence: Synthetic oligonucleotide
  Antisense strand to SEQ ID NO: 142020
aucagcaugccauuuccug

SEQ ID NO: 142022 - RNA, 19 nt, Artificial Sequence
  Description of Artificial Sequence: Synthetic oligonucleotide
  Sense strand starting at position 3646 of SEQ ID NO: 1822
cuggguguuuauccucuaa

SEQ ID NO: 142023 - RNA, 19 nt, Artificial Sequence
  Description of Artificial Sequence: Synthetic oligonucleotide
  Antisense strand to SEQ ID NO: 142022
uuagaggauaaacacccag

SEQ ID NO: 142024 - RNA, 19 nt, Artificial Sequence
  Description of Artificial Sequence: Synthetic oligonucleotide
  Sense strand starting at position 3648 of SEQ ID NO: 1822
ggguguuuauccucuaaac

SEQ ID NO: 142025 - RNA, 19 nt, Artificial Sequence
  Description of Artificial Sequence: Synthetic oligonucleotide
  Antisense strand to SEQ ID NO: 142024
guuuagaggauaaacaccc

SEQ ID NO: 142026 - RNA, 19 nt, Artificial Sequence
  Description of Artificial Sequence: Synthetic oligonucleotide
  Sense strand starting at position 3650 of SEQ ID NO: 1822
guguuuauccucuaaacac

SEQ ID NO: 142027 - RNA, 19 nt, Artificial Sequence
  Description of Artificial Sequence: Synthetic oligonucleotide
  Antisense strand to SEQ ID NO: 142026
guguuuagaggauaaacac

SEQ ID NO: 142028 - RNA, 19 nt, Artificial Sequence
  Description of Artificial Sequence: Synthetic oligonucleotide
  Sense strand starting at position 3870 of SEQ ID NO: 1822
gagguuaugcugcaguaga

SEQ ID NO: 142029 - RNA, 19 nt, Artificial Sequence
  Description of Artificial Sequence: Synthetic oligonucleotide
  Antisense strand to SEQ ID NO: 142028
ucuacugcagcauaaccuc

SEQ ID NO: 142030 - RNA, 19 nt, Artificial Sequence
  Description of Artificial Sequence: Synthetic oligonucleotide
  Sense strand starting at position 3890 of SEQ ID NO: 1822
aagcacuuuggguauaaca

SEQ ID NO: 142031 - RNA, 19 nt, Artificial Sequence
  Description of Artificial Sequence: Synthetic oligonucleotide
  Antisense strand to SEQ ID NO: 142030
uguuauacccaaagugcuu

SEQ ID NO: 142032 - RNA, 19 nt, Artificial Sequence
  Description of Artificial Sequence: Synthetic oligonucleotide
  Sense strand starting at position 3900 of SEQ ID NO: 1822
gguauaacacccuggaacu

SEQ ID NO: 142033 - RNA, 19 nt, Artificial Sequence
  Description of Artificial Sequence: Synthetic oligonucleotide
  Antisense strand to SEQ ID NO: 142032
aguuccaggguguuauacc

SEQ ID NO: 142034 - RNA, 19 nt, Artificial Sequence
  Description of Artificial Sequence: Synthetic oligonucleotide
  Sense strand starting at position 3964 of SEQ ID NO: 1823
gcauuccacaguuaggaga

SEQ ID NO: 142035 - RNA, 19 nt, Artificial Sequence
  Description of Artificial Sequence: Synthetic oligonucleotide
  Antisense strand to SEQ ID NO: 142034
ucuccuaacuguggaaugc

SEQ ID NO: 142036 - RNA, 19 nt, Artificial Sequence
  Description of Artificial Sequence: Synthetic oligonucleotide
  Sense strand starting at position 3912 of SEQ ID NO: 1823
gugagaagauuccauucga

SEQ ID NO: 142037 - RNA, 19 nt, Artificial Sequence
  Description of Artificial Sequence: Synthetic oligonucleotide
  Antisense strand to SEQ ID NO: 142036
ucgaauggaaucuucucac

SEQ ID NO: 142038 - RNA, 19 nt, Artificial Sequence
  Description of Artificial Sequence: Synthetic oligonucleotide
  Sense strand starting at position 3904 of SEQ ID NO: 1823
ccaguaaagugagaagauu

SEQ ID NO: 142039 - RNA, 19 nt, Artificial Sequence
  Description of Artificial Sequence: Synthetic oligonucleotide
  Antisense strand to SEQ ID NO: 142038
aaucuucucacuuuacugg

SEQ ID NO: 142040 - RNA, 19 nt, Artificial Sequence
  Description of Artificial Sequence: Synthetic oligonucleotide
  Sense strand starting at position 3881 of SEQ ID NO: 1823
guaacuucuguuuauuagu

SEQ ID NO: 142041 - RNA, 19 nt, Artificial Sequence
  Description of Artificial Sequence: Synthetic oligonucleotide
  Antisense strand to SEQ ID NO: 142040
acuaauaaacagaaguuac

SEQ ID NO: 142042 - RNA, 19 nt, Artificial Sequence
  Description of Artificial Sequence: Synthetic oligonucleotide
  Sense strand starting at position 3663 of SEQ ID NO: 1823
guauguuggucuuuaugca

SEQ ID NO: 142043 - RNA, 19 nt, Artificial Sequence
  Description of Artificial Sequence: Synthetic oligonucleotide
  Antisense strand to SEQ ID NO: 142042
ugcauaaagaccaacauac

SEQ ID NO: 142044 - RNA, 19 nt, Artificial Sequence
  Description of Artificial Sequence: Synthetic oligonucleotide
  Sense strand starting at position 3660 of SEQ ID NO: 1823
cugguauguuggucuuuau

SEQ ID NO: 142045 - RNA, 19 nt, Artificial Sequence
  Description of Artificial Sequence: Synthetic oligonucleotide
  Antisense strand to SEQ ID NO: 142044
auaaagaccaacauaccag

SEQ ID NO: 142046 - RNA, 19 nt, Artificial Sequence
  Description of Artificial Sequence: Synthetic oligonucleotide
  Sense strand starting at position 3659 of SEQ ID NO: 1823
acugguauguuggucuuua

SEQ ID NO: 142047 - RNA, 19 nt, Artificial Sequence
  Description of Artificial Sequence: Synthetic oligonucleotide
  Antisense strand to SEQ ID NO: 142046
uaaagaccaacauaccagu

SEQ ID NO: 142048 - RNA, 19 nt, Artificial Sequence
  Description of Artificial Sequence: Synthetic oligonucleotide
  Sense strand starting at position 3585 of SEQ ID NO: 1823
agagaaugcccuggccaaa

SEQ ID NO: 142049 - RNA, 19 nt, Artificial Sequence
  Description of Artificial Sequence: Synthetic oligonucleotide
  Antisense strand to SEQ ID NO: 142048
uuuggccagggcauucucu

SEQ ID NO: 142050 - RNA, 19 nt, Artificial Sequence
  Description of Artificial Sequence: Synthetic oligonucleotide
  Sense strand starting at position 3584 of SEQ ID NO: 1823
gagagaaugcccuggccaa

SEQ ID NO: 142051 - RNA, 19 nt, Artificial Sequence
  Description of Artificial Sequence: Synthetic oligonucleotide
  Antisense strand to SEQ ID NO: 142050
uuggccagggcauucucuc

SEQ ID NO: 142052 - RNA, 19 nt, Artificial Sequence
  Description of Artificial Sequence: Synthetic oligonucleotide
  Sense strand starting at position 3538 of SEQ ID NO: 1823
ugcaguucugaauauuauu

SEQ ID NO: 142053 - RNA, 19 nt, Artificial Sequence
  Description of Artificial Sequence: Synthetic oligonucleotide
  Antisense strand to SEQ ID NO: 142052
aauaauauucagaacugca

SEQ ID NO: 142054 - RNA, 19 nt, Artificial Sequence
  Description of Artificial Sequence: Synthetic oligonucleotide
  Sense strand starting at position 3466 of SEQ ID NO: 1823
agcuuaaugugauuccauu

SEQ ID NO: 142055 - RNA, 19 nt, Artificial Sequence
  Description of Artificial Sequence: Synthetic oligonucleotide
  Antisense strand to SEQ ID NO: 142054
aauggaaucacauuaagcu

SEQ ID NO: 142056 - RNA, 19 nt, Artificial Sequence
  Description of Artificial Sequence: Synthetic oligonucleotide
  Sense strand starting at position 3430 of SEQ ID NO: 1823
guucuaguaguagagauag

SEQ ID NO: 142057 - RNA, 19 nt, Artificial Sequence
  Description of Artificial Sequence: Synthetic oligonucleotide
  Antisense strand to SEQ ID NO: 142056
cuaucucuacuacuagaac

SEQ ID NO: 142058 - RNA, 19 nt, Artificial Sequence
  Description of Artificial Sequence: Synthetic oligonucleotide
  Sense strand starting at position 3380 of SEQ ID NO: 1823
guaaauauuucugaaguga

SEQ ID NO: 142059 - RNA, 19 nt, Artificial Sequence
  Description of Artificial Sequence: Synthetic oligonucleotide
  Antisense strand to SEQ ID NO: 142058
ucacuucagaaauauuuac

SEQ ID NO: 142060 - RNA, 19 nt, Artificial Sequence
  Description of Artificial Sequence: Synthetic oligonucleotide
  Sense strand starting at position 3341 of SEQ ID NO: 1823
auaucuaacucaggaauug

SEQ ID NO: 142061 - RNA, 19 nt, Artificial Sequence
  Description of Artificial Sequence: Synthetic oligonucleotide
  Antisense strand to SEQ ID NO: 142060
caauuccugaguuagauau

SEQ ID NO: 142062 - RNA, 19 nt, Artificial Sequence
  Description of Artificial Sequence: Synthetic oligonucleotide
  Sense strand starting at position 3316 of SEQ ID NO: 1823
agcaaaccuuacugagaga

SEQ ID NO: 142063 - RNA, 19 nt, Artificial Sequence
  Description of Artificial Sequence: Synthetic oligonucleotide
  Antisense strand to SEQ ID NO: 142062
ucucucaguaagguuugcu

SEQ ID NO: 142064 - RNA, 19 nt, Artificial Sequence
  Description of Artificial Sequence: Synthetic oligonucleotide
  Sense strand starting at position 3261 of SEQ ID NO: 1823
ucuauuaugggucaaucca

SEQ ID NO: 142065 - RNA, 19 nt, Artificial Sequence
  Description of Artificial Sequence: Synthetic oligonucleotide
  Antisense strand to SEQ ID NO: 142064
uggauugacccauaauaga

SEQ ID NO: 142066 - RNA, 19 nt, Artificial Sequence
  Description of Artificial Sequence: Synthetic oligonucleotide
  Sense strand starting at position 3259 of SEQ ID NO: 1823
auucuauuaugggucaauc

SEQ ID NO: 142067 - RNA, 19 nt, Artificial Sequence
  Description of Artificial Sequence: Synthetic oligonucleotide
  Antisense strand to SEQ ID NO: 142066
gauugacccauaauagaau

SEQ ID NO: 142068 - RNA, 19 nt, Artificial Sequence
  Description of Artificial Sequence: Synthetic oligonucleotide
  Sense strand starting at position 3191 of SEQ ID NO: 1823
auguaugcugagcgguauu

SEQ ID NO: 142069 - RNA, 19 nt, Artificial Sequence
  Description of Artificial Sequence: Synthetic oligonucleotide
  Antisense strand to SEQ ID NO: 142068
aauaccgcucagcauacau

SEQ ID NO: 142070 - RNA, 19 nt, Artificial Sequence
  Description of Artificial Sequence: Synthetic oligonucleotide
  Sense strand starting at position 3190 of SEQ ID NO: 1823
gauguaugcugagcgguau

SEQ ID NO: 142071 - RNA, 19 nt, Artificial Sequence
  Description of Artificial Sequence: Synthetic oligonucleotide
  Antisense strand to SEQ ID NO: 142070
auaccgcucagcauacauc

SEQ ID NO: 142072 - RNA, 19 nt, Artificial Sequence
  Description of Artificial Sequence: Synthetic oligonucleotide
  Sense strand starting at position 3189 of SEQ ID NO: 1823
agauguaugcugagcggua

SEQ ID NO: 142073 - RNA, 19 nt, Artificial Sequence
  Description of Artificial Sequence: Synthetic oligonucleotide
  Antisense strand to SEQ ID NO: 142072
uaccgcucagcauacaucu

SEQ ID NO: 142074 - RNA, 19 nt, Artificial Sequence
  Description of Artificial Sequence: Synthetic oligonucleotide
  Sense strand starting at position 3150 of SEQ ID NO: 1823
agaaauaagugaggauuua

SEQ ID NO: 142075 - RNA, 19 nt, Artificial Sequence
  Description of Artificial Sequence: Synthetic oligonucleotide
  Antisense strand to SEQ ID NO: 142074
uaaauccucacuuauuucu

SEQ ID NO: 142076 - RNA, 19 nt, Artificial Sequence
  Description of Artificial Sequence: Synthetic oligonucleotide
  Sense strand starting at position 3018 of SEQ ID NO: 1823
guaggaaacugcguuuauu

SEQ ID NO: 142077 - RNA, 19 nt, Artificial Sequence
  Description of Artificial Sequence: Synthetic oligonucleotide
  Antisense strand to SEQ ID NO: 142076
aauaaacgcaguuuccuac

SEQ ID NO: 142078 - RNA, 19 nt, Artificial Sequence
  Description of Artificial Sequence: Synthetic oligonucleotide
  Sense strand starting at position 3002 of SEQ ID NO: 1823
gcauucggcgaaaggagua

SEQ ID NO: 142079 - RNA, 19 nt, Artificial Sequence
  Description of Artificial Sequence: Synthetic oligonucleotide
  Antisense strand to SEQ ID NO: 142078
uacuccuuucgccgaaugc

SEQ ID NO: 142080 - RNA, 19 nt, Artificial Sequence
  Description of Artificial Sequence: Synthetic oligonucleotide
  Sense strand starting at position 2999 of SEQ ID NO: 1823
auugcauucggcgaaagga

SEQ ID NO: 142081 - RNA, 19 nt, Artificial Sequence
  Description of Artificial Sequence: Synthetic oligonucleotide
  Antisense strand to SEQ ID NO: 142080
uccuuucgccgaaugcaau

SEQ ID NO: 142082 - RNA, 19 nt, Artificial Sequence
  Description of Artificial Sequence: Synthetic oligonucleotide
  Sense strand starting at position 2995 of SEQ ID NO: 1823
cugaauugcauucggcgaa

SEQ ID NO: 142083 - RNA, 19 nt, Artificial Sequence
  Description of Artificial Sequence: Synthetic oligonucleotide
  Antisense strand to SEQ ID NO: 142082
uucgccgaaugcaauucag

SEQ ID NO: 142084 - RNA, 19 nt, Artificial Sequence
  Description of Artificial Sequence: Synthetic oligonucleotide
  Sense strand starting at position 2973 of SEQ ID NO: 1823
aguugugcucuguaaugcu

SEQ ID NO: 142085 - RNA, 19 nt, Artificial Sequence
  Description of Artificial Sequence: Synthetic oligonucleotide
  Antisense strand to SEQ ID NO: 142084
agcauuacagagcacaacu

SEQ ID NO: 142086 - RNA, 19 nt, Artificial Sequence
  Description of Artificial Sequence: Synthetic oligonucleotide
  Sense strand starting at position 2971 of SEQ ID NO: 1823
ggaguugugcucuguaaug

SEQ ID NO: 142087 - RNA, 19 nt, Artificial Sequence
  Description of Artificial Sequence: Synthetic oligonucleotide
  Antisense strand to SEQ ID NO: 142086
cauuacagagcacaacucc

SEQ ID NO: 142088 - RNA, 19 nt, Artificial Sequence
  Description of Artificial Sequence: Synthetic oligonucleotide
  Sense strand starting at position 2661 of SEQ ID NO: 1823
gggaugacgggaugaguuu

SEQ ID NO: 142089 - RNA, 19 nt, Artificial Sequence
  Description of Artificial Sequence: Synthetic oligonucleotide
  Antisense strand to SEQ ID NO: 142088
aaacucaucccgucauccc

SEQ ID NO: 142090 - RNA, 19 nt, Artificial Sequence
  Description of Artificial Sequence: Synthetic oligonucleotide
  Sense strand starting at position 2615 of SEQ ID NO: 1823
guuucuggaucucugaagu

SEQ ID NO: 142091 - RNA, 19 nt, Artificial Sequence
  Description of Artificial Sequence: Synthetic oligonucleotide
  Antisense strand to SEQ ID NO: 142090
acuucagagauccagaaac

SEQ ID NO: 142092 - RNA, 19 nt, Artificial Sequence
  Description of Artificial Sequence: Synthetic oligonucleotide
  Sense strand starting at position 2593 of SEQ ID NO: 1823
ccaucucgacgcuacaauu

SEQ ID NO: 142093 - RNA, 19 nt, Artificial Sequence
  Description of Artificial Sequence: Synthetic oligonucleotide
  Antisense strand to SEQ ID NO: 142092
aauuguagcgucgagaugg

SEQ ID NO: 142094 - RNA, 19 nt, Artificial Sequence
  Description of Artificial Sequence: Synthetic oligonucleotide
  Sense strand starting at position 2574 of SEQ ID NO: 1823
gaaguagacucggcccuaa

SEQ ID NO: 142095 - RNA, 19 nt, Artificial Sequence
  Description of Artificial Sequence: Synthetic oligonucleotide
  Antisense strand to SEQ ID NO: 142094
uuagggccgagucuacuuc

SEQ ID NO: 142096 - RNA, 19 nt, Artificial Sequence
  Description of Artificial Sequence: Synthetic oligonucleotide
  Sense strand starting at position 820 of SEQ ID NO: 1823
cgagguggcaauugacauu

SEQ ID NO: 142097 - RNA, 19 nt, Artificial Sequence
  Description of Artificial Sequence: Synthetic oligonucleotide
  Antisense strand to SEQ ID NO: 142096
aaugucaauugccaccucg

SEQ ID NO: 142098 - RNA, 19 nt, Artificial Sequence
  Description of Artificial Sequence: Synthetic oligonucleotide
  Sense strand starting at position 537 of SEQ ID NO: 1823
gccacuguccuguggucua

SEQ ID NO: 142099 - RNA, 19 nt, Artificial Sequence
  Description of Artificial Sequence: Synthetic oligonucleotide
  Antisense strand to SEQ ID NO: 142098
uagaccacaggacaguggc

SEQ ID NO: 142100 - RNA, 19 nt, Artificial Sequence
  Description of Artificial Sequence: Synthetic oligonucleotide
  Sense strand starting at position 298 of SEQ ID NO: 1823
agccuuaacugagaagggu

SEQ ID NO: 142101 - RNA, 19 nt, Artificial Sequence
  Description of Artificial Sequence: Synthetic oligonucleotide
  Antisense strand to SEQ ID NO: 142100
acccuucucaguuaaggcu

SEQ ID NO: 142102 - RNA, 19 nt, Artificial Sequence
  Description of Artificial Sequence: Synthetic oligonucleotide
  Sense strand starting at position 291 of SEQ ID NO: 1823
uguccaaagccuuaacuga

SEQ ID NO: 142103 - RNA, 19 nt, Artificial Sequence
  Description of Artificial Sequence: Synthetic oligonucleotide
  Antisense strand to SEQ ID NO: 142102
ucaguuaaggcuuuggaca

SEQ ID NO: 142104 - RNA, 19 nt, Artificial Sequence
  Description of Artificial Sequence: Synthetic oligonucleotide
  Sense strand starting at position 119 of SEQ ID NO: 1823
acgccucuguauccuaaua

SEQ ID NO: 142105 - RNA, 19 nt, Artificial Sequence
  Description of Artificial Sequence: Synthetic oligonucleotide
  Antisense strand to SEQ ID NO: 142104
uauuaggauacagaggcgu

SEQ ID NO: 142106 - RNA, 19 nt, Artificial Sequence
  Description of Artificial Sequence: Synthetic oligonucleotide
  Sense strand starting at position 58 of SEQ ID NO: 1823
ccaaaugguugguaaauau

SEQ ID NO: 142107 - RNA, 19 nt, Artificial Sequence
  Description of Artificial Sequence: Synthetic oligonucleotide
  Antisense strand to SEQ ID NO: 142106
auauuuaccaaccauuugg

SEQ ID NO: 142108 - RNA, 19 nt, Artificial Sequence
  Description of Artificial Sequence: Synthetic oligonucleotide
  Sense strand starting at position 57 of SEQ ID NO: 1823
uccaaaugguugguaaaua

SEQ ID NO: 142109 - RNA, 19 nt, Artificial Sequence
  Description of Artificial Sequence: Synthetic oligonucleotide
  Antisense strand to SEQ ID NO: 142108
uauuuaccaaccauuugga

SEQ ID NO: 142110 - RNA, 19 nt, Artificial Sequence
  Description of Artificial Sequence: Synthetic oligonucleotide
  Sense strand starting at position 56 of SEQ ID NO: 1823
auccaaaugguugguaaau

SEQ ID NO: 142111 - RNA, 19 nt, Artificial Sequence
  Description of Artificial Sequence: Synthetic oligonucleotide
  Antisense strand to SEQ ID NO: 142110
auuuaccaaccauuuggau

SEQ ID NO: 142112 - RNA, 19 nt, Artificial Sequence
  Description of Artificial Sequence: Synthetic oligonucleotide
  Sense strand starting at position 55 of SEQ ID NO: 1823
aauccaaaugguugguaaa

SEQ ID NO: 142113 - RNA, 19 nt, Artificial Sequence
  Description of Artificial Sequence: Synthetic oligonucleotide
  Antisense strand to SEQ ID NO: 142112
uuuaccaaccauuuggauu

SEQ ID NO: 142114 - RNA, 19 nt, Artificial Sequence
  Description of Artificial Sequence: Synthetic oligonucleotide
  Sense strand starting at position 3961 of SEQ ID NO: 1824
guaaauauuucugaaguga

SEQ ID NO: 142115 - RNA, 19 nt, Artificial Sequence
  Description of Artificial Sequence: Synthetic oligonucleotide
  Antisense strand to SEQ ID NO: 142114
ucacuucagaaauauuuac

SEQ ID NO: 142116 - RNA, 19 nt, Artificial Sequence
  Description of Artificial Sequence: Synthetic oligonucleotide
  Sense strand starting at position 3922 of SEQ ID NO: 1824
auaucuaacucaggaauug

SEQ ID NO: 142117 - RNA, 19 nt, Artificial Sequence
  Description of Artificial Sequence: Synthetic oligonucleotide
  Antisense strand to SEQ ID NO: 142116
caauuccugaguuagauau

SEQ ID NO: 142118 - RNA, 19 nt, Artificial Sequence
  Description of Artificial Sequence: Synthetic oligonucleotide
  Sense strand starting at position 3897 of SEQ ID NO: 1824
agcaaaccuuacugagaga

SEQ ID NO: 142119 - RNA, 19 nt, Artificial Sequence
  Description of Artificial Sequence: Synthetic oligonucleotide
  Antisense strand to SEQ ID NO: 142118
ucucucaguaagguuugcu

SEQ ID NO: 142120 - RNA, 19 nt, Artificial Sequence
  Description of Artificial Sequence: Synthetic oligonucleotide
  Sense strand starting at position 3842 of SEQ ID NO: 1824
ucuauuaugggucaaucca

SEQ ID NO: 142121 - RNA, 19 nt, Artificial Sequence
  Description of Artificial Sequence: Synthetic oligonucleotide
  Antisense strand to SEQ ID NO: 142120
uggauugacccauaauaga

SEQ ID NO: 142122 - RNA, 19 nt, Artificial Sequence
  Description of Artificial Sequence: Synthetic oligonucleotide
  Sense strand starting at position 3840 of SEQ ID NO: 1824
auucuauuaugggucaauc

SEQ ID NO: 142123 - RNA, 19 nt, Artificial Sequence
  Description of Artificial Sequence: Synthetic oligonucleotide
  Antisense strand to SEQ ID NO: 142122
gauugacccauaauagaau

SEQ ID NO: 142124 - RNA, 19 nt, Artificial Sequence
  Description of Artificial Sequence: Synthetic oligonucleotide
  Sense strand starting at position 3826 of SEQ ID NO: 1824
acugucuuguaauaauucu

SEQ ID NO: 142125 - RNA, 19 nt, Artificial Sequence
  Description of Artificial Sequence: Synthetic oligonucleotide
  Antisense strand to SEQ ID NO: 142124
agaauuauuacaagacagu

SEQ ID NO: 142126 - RNA, 19 nt, Artificial Sequence
  Description of Artificial Sequence: Synthetic oligonucleotide
  Sense strand starting at position 3772 of SEQ ID NO: 1824
auguaugcugagcgguauu

SEQ ID NO: 142127 - RNA, 19 nt, Artificial Sequence
  Description of Artificial Sequence: Synthetic oligonucleotide
  Antisense strand to SEQ ID NO: 142126
aauaccgcucagcauacau

SEQ ID NO: 142128 - RNA, 19 nt, Artificial Sequence
  Description of Artificial Sequence: Synthetic oligonucleotide
  Sense strand starting at position 3771 of SEQ ID NO: 1824
gauguaugcugagcgguau

SEQ ID NO: 142129 - RNA, 19 nt, Artificial Sequence
  Description of Artificial Sequence: Synthetic oligonucleotide
  Antisense strand to SEQ ID NO: 142128
auaccgcucagcauacauc

SEQ ID NO: 142130 - RNA, 19 nt, Artificial Sequence
  Description of Artificial Sequence: Synthetic oligonucleotide
  Sense strand starting at position 3770 of SEQ ID NO: 1824
agauguaugcugagcggua

SEQ ID NO: 142131 - RNA, 19 nt, Artificial Sequence
  Description of Artificial Sequence: Synthetic oligonucleotide
  Antisense strand to SEQ ID NO: 142130
uaccgcucagcauacaucu

SEQ ID NO: 142132 - RNA, 19 nt, Artificial Sequence
  Description of Artificial Sequence: Synthetic oligonucleotide
  Sense strand starting at position 3731 of SEQ ID NO: 1824
agaaauaagugaggauuua

SEQ ID NO: 142133 - RNA, 19 nt, Artificial Sequence
  Description of Artificial Sequence: Synthetic oligonucleotide
  Antisense strand to SEQ ID NO: 142132
uaaauccucacuuauuucu

SEQ ID NO: 142134 - RNA, 19 nt, Artificial Sequence
  Description of Artificial Sequence: Synthetic oligonucleotide
  Sense strand starting at position 3599 of SEQ ID NO: 1824
guaggaaacugcguuuauu

SEQ ID NO: 142135 - RNA, 19 nt, Artificial Sequence
  Description of Artificial Sequence: Synthetic oligonucleotide
  Antisense strand to SEQ ID NO: 142134
aauaaacgcaguuuccuac

SEQ ID NO: 142136 - RNA, 19 nt, Artificial Sequence
  Description of Artificial Sequence: Synthetic oligonucleotide
  Sense strand starting at position 3583 of SEQ ID NO: 1824
gcauucggcgaaaggagua

SEQ ID NO: 142137 - RNA, 19 nt, Artificial Sequence
  Description of Artificial Sequence: Synthetic oligonucleotide
  Antisense strand to SEQ ID NO: 142136
uacuccuuucgccgaaugc

SEQ ID NO: 142138 - RNA, 19 nt, Artificial Sequence
  Description of Artificial Sequence: Synthetic oligonucleotide
  Sense strand starting at position 3580 of SEQ ID NO: 1824
auugcauucggcgaaagga

SEQ ID NO: 142139 - RNA, 19 nt, Artificial Sequence
  Description of Artificial Sequence: Synthetic oligonucleotide
  Antisense strand to SEQ ID NO: 142138
uccuuucgccgaaugcaau

SEQ ID NO: 142140 - RNA, 19 nt, Artificial Sequence
  Description of Artificial Sequence: Synthetic oligonucleotide
  Sense strand starting at position 3577 of SEQ ID NO: 1824
ugaauugcauucggcgaaa

SEQ ID NO: 142141 - RNA, 19 nt, Artificial Sequence
  Description of Artificial Sequence: Synthetic oligonucleotide
  Antisense strand to SEQ ID NO: 142140
uuucgccgaaugcaauuca

SEQ ID NO: 142142 - RNA, 19 nt, Artificial Sequence
  Description of Artificial Sequence: Synthetic oligonucleotide
  Sense strand starting at position 3576 of SEQ ID NO: 1824
cugaauugcauucggcgaa

SEQ ID NO: 142143 - RNA, 19 nt, Artificial Sequence
  Description of Artificial Sequence: Synthetic oligonucleotide
  Antisense strand to SEQ ID NO: 142142
uucgccgaaugcaauucag

SEQ ID NO: 142144 - RNA, 19 nt, Artificial Sequence
  Description of Artificial Sequence: Synthetic oligonucleotide
  Sense strand starting at position 3554 of SEQ ID NO: 1824
aguugugcucuguaaugcu

SEQ ID NO: 142145 - RNA, 19 nt, Artificial Sequence
  Description of Artificial Sequence: Synthetic oligonucleotide
  Antisense strand to SEQ ID NO: 142144
agcauuacagagcacaacu

SEQ ID NO: 142146 - RNA, 19 nt, Artificial Sequence
  Description of Artificial Sequence: Synthetic oligonucleotide
  Sense strand starting at position 3552 of SEQ ID NO: 1824
ggaguugugcucuguaaug

SEQ ID NO: 142147 - RNA, 19 nt, Artificial Sequence
  Description of Artificial Sequence: Synthetic oligonucleotide
  Antisense strand to SEQ ID NO: 142146
cauuacagagcacaacucc

SEQ ID NO: 142148 - RNA, 19 nt, Artificial Sequence
  Description of Artificial Sequence: Synthetic oligonucleotide
  Sense strand starting at position 3242 of SEQ ID NO: 1824
gggaugacgggaugaguuu

SEQ ID NO: 142149 - RNA, 19 nt, Artificial Sequence
  Description of Artificial Sequence: Synthetic oligonucleotide
  Antisense strand to SEQ ID NO: 142148
aaacucaucccgucauccc

SEQ ID NO: 142150 - RNA, 19 nt, Artificial Sequence
  Description of Artificial Sequence: Synthetic oligonucleotide
  Sense strand starting at position 3196 of SEQ ID NO: 1824
guuucuggaucucugaagu

SEQ ID NO: 142151 - RNA, 19 nt, Artificial Sequence
  Description of Artificial Sequence: Synthetic oligonucleotide
  Antisense strand to SEQ ID NO: 142150
acuucagagauccagaaac

SEQ ID NO: 142152 - RNA, 19 nt, Artificial Sequence
  Description of Artificial Sequence: Synthetic oligonucleotide
  Sense strand starting at position 3174 of SEQ ID NO: 1824
ccaucucgacgcuacaauu

SEQ ID NO: 142153 - RNA, 19 nt, Artificial Sequence
  Description of Artificial Sequence: Synthetic oligonucleotide
  Antisense strand to SEQ ID NO: 142152
aauuguagcgucgagaugg

SEQ ID NO: 142154 - RNA, 19 nt, Artificial Sequence
  Description of Artificial Sequence: Synthetic oligonucleotide
  Sense strand starting at position 3155 of SEQ ID NO: 1824
gaaguagacucggcccuaa

SEQ ID NO: 142155 - RNA, 19 nt, Artificial Sequence
  Description of Artificial Sequence: Synthetic oligonucleotide
  Antisense strand to SEQ ID NO: 142154
uuagggccgagucuacuuc

SEQ ID NO: 142156 - RNA, 19 nt, Artificial Sequence
  Description of Artificial Sequence: Synthetic oligonucleotide
  Sense strand starting at position 3097 of SEQ ID NO: 1824
ggugcagucgcgcaguaua

SEQ ID NO: 142157 - RNA, 19 nt, Artificial Sequence
  Description of Artificial Sequence: Synthetic oligonucleotide
  Antisense strand to SEQ ID NO: 142156
uauacugcgcgacugcacc

SEQ ID NO: 142158 - RNA, 19 nt, Artificial Sequence
  Description of Artificial Sequence: Synthetic oligonucleotide
  Sense strand starting at position 3009 of SEQ ID NO: 1824
cggcguuccucagaugucu

SEQ ID NO: 142159 - RNA, 19 nt, Artificial Sequence
  Description of Artificial Sequence: Synthetic oligonucleotide
  Antisense strand to SEQ ID NO: 142158
agacaucugaggaacgccg

SEQ ID NO: 142160 - RNA, 19 nt, Artificial Sequence
  Description of Artificial Sequence: Synthetic oligonucleotide
  Sense strand starting at position 1401 of SEQ ID NO: 1824
cgagguggcaauugacauu

SEQ ID NO: 142161 - RNA, 19 nt, Artificial Sequence
  Description of Artificial Sequence: Synthetic oligonucleotide
  Antisense strand to SEQ ID NO: 142160
aaugucaauugccaccucg

SEQ ID NO: 142162 - RNA, 19 nt, Artificial Sequence
  Description of Artificial Sequence: Synthetic oligonucleotide
  Sense strand starting at position 1131 of SEQ ID NO: 1824
ggucuaacuucccagagcu

SEQ ID NO: 142163 - RNA, 19 nt, Artificial Sequence
  Description of Artificial Sequence: Synthetic oligonucleotide
  Antisense strand to SEQ ID NO: 142162
agcucugggaaguuagacc

SEQ ID NO: 142164 - RNA, 19 nt, Artificial Sequence
  Description of Artificial Sequence: Synthetic oligonucleotide
  Sense strand starting at position 1118 of SEQ ID NO: 1824
gccacuguccuguggucua

SEQ ID NO: 142165 - RNA, 19 nt, Artificial Sequence
  Description of Artificial Sequence: Synthetic oligonucleotide
  Antisense strand to SEQ ID NO: 142164
uagaccacaggacaguggc

SEQ ID NO: 142166 - RNA, 19 nt, Artificial Sequence
  Description of Artificial Sequence: Synthetic oligonucleotide
  Sense strand starting at position 1014 of SEQ ID NO: 1824
gggagccuguuuggagaaa

SEQ ID NO: 142167 - RNA, 19 nt, Artificial Sequence
  Description of Artificial Sequence: Synthetic oligonucleotide
  Antisense strand to SEQ ID NO: 142166
uuucuccaaacaggcuccc

SEQ ID NO: 142168 - RNA, 19 nt, Artificial Sequence
  Description of Artificial Sequence: Synthetic oligonucleotide
  Sense strand starting at position 879 of SEQ ID NO: 1824
agccuuaacugagaagggu

SEQ ID NO: 142169 - RNA, 19 nt, Artificial Sequence
  Description of Artificial Sequence: Synthetic oligonucleotide
  Antisense strand to SEQ ID NO: 142168
acccuucucaguuaaggcu

SEQ ID NO: 142170 - RNA, 19 nt, Artificial Sequence
  Description of Artificial Sequence: Synthetic oligonucleotide
  Sense strand starting at position 872 of SEQ ID NO: 1824
uguccaaagccuuaacuga

SEQ ID NO: 142171 - RNA, 19 nt, Artificial Sequence
  Description of Artificial Sequence: Synthetic oligonucleotide
  Antisense strand to SEQ ID NO: 142170
ucaguuaaggcuuuggaca

SEQ ID NO: 142172 - RNA, 19 nt, Artificial Sequence
  Description of Artificial Sequence: Synthetic oligonucleotide
  Sense strand starting at position 700 of SEQ ID NO: 1824
acgccucuguauccuaaua

SEQ ID NO: 142173 - RNA, 19 nt, Artificial Sequence
  Description of Artificial Sequence: Synthetic oligonucleotide
  Antisense strand to SEQ ID NO: 142172
uauuaggauacagaggcgu

SEQ ID NO: 142174 - RNA, 19 nt, Artificial Sequence
  Description of Artificial Sequence: Synthetic oligonucleotide
  Sense strand starting at position 639 of SEQ ID NO: 1824
ccaaaugguugguaaauau

SEQ ID NO: 142175 - RNA, 19 nt, Artificial Sequence
  Description of Artificial Sequence: Synthetic oligonucleotide
  Antisense strand to SEQ ID NO: 142174
auauuuaccaaccauuugg

SEQ ID NO: 142176 - RNA, 19 nt, Artificial Sequence
  Description of Artificial Sequence: Synthetic oligonucleotide
  Sense strand starting at position 638 of SEQ ID NO: 1824
uccaaaugguugguaaaua

SEQ ID NO: 142177 - RNA, 19 nt, Artificial Sequence
  Description of Artificial Sequence: Synthetic oligonucleotide
  Antisense strand to SEQ ID NO: 142176
uauuuaccaaccauuugga

SEQ ID NO: 142178 - RNA, 19 nt, Artificial Sequence
  Description of Artificial Sequence: Synthetic oligonucleotide
  Sense strand starting at position 637 of SEQ ID NO: 1824
auccaaaugguugguaaau

SEQ ID NO: 142179 - RNA, 19 nt, Artificial Sequence
  Description of Artificial Sequence: Synthetic oligonucleotide
  Antisense strand to SEQ ID NO: 142178
auuuaccaaccauuuggau

SEQ ID NO: 142180 - RNA, 19 nt, Artificial Sequence
  Description of Artificial Sequence: Synthetic oligonucleotide
  Sense strand starting at position 636 of SEQ ID NO: 1824
aauccaaaugguugguaaa

SEQ ID NO: 142181 - RNA, 19 nt, Artificial Sequence
  Description of Artificial Sequence: Synthetic oligonucleotide
  Antisense strand to SEQ ID NO: 142180
uuuaccaaccauuuggauu

SEQ ID NO: 142182 - RNA, 19 nt, Artificial Sequence
  Description of Artificial Sequence: Synthetic oligonucleotide
  Sense strand starting at position 569 of SEQ ID NO: 1824
ugagacugucccgacucau

SEQ ID NO: 142183 - RNA, 19 nt, Artificial Sequence
  Description of Artificial Sequence: Synthetic oligonucleotide
  Antisense strand to SEQ ID NO: 142182
augagucgggacagucuca

SEQ ID NO: 142184 - RNA, 19 nt, Artificial Sequence
  Description of Artificial Sequence: Synthetic oligonucleotide
  Sense strand starting at position 530 of SEQ ID NO: 1824
agugaacacucuugcauca

SEQ ID NO: 142185 - RNA, 19 nt, Artificial Sequence
  Description of Artificial Sequence: Synthetic oligonucleotide
  Antisense strand to SEQ ID NO: 142184
ugaugcaagaguguucacu

SEQ ID NO: 142186 - RNA, 19 nt, Artificial Sequence
  Description of Artificial Sequence: Synthetic oligonucleotide
  Sense strand starting at position 501 of SEQ ID NO: 1824
gccagucauuuagaaggca

SEQ ID NO: 142187 - RNA, 19 nt, Artificial Sequence
  Description of Artificial Sequence: Synthetic oligonucleotide
  Antisense strand to SEQ ID NO: 142186
ugccuucuaaaugacuggc

SEQ ID NO: 142188 - RNA, 19 nt, Artificial Sequence
  Description of Artificial Sequence: Synthetic oligonucleotide
  Sense strand starting at position 448 of SEQ ID NO: 1824
uuugaagcccaucaguaua

SEQ ID NO: 142189 - RNA, 19 nt, Artificial Sequence
  Description of Artificial Sequence: Synthetic oligonucleotide
  Antisense strand to SEQ ID NO: 142188
uauacugaugggcuucaaa

SEQ ID NO: 142190 - RNA, 19 nt, Artificial Sequence
  Description of Artificial Sequence: Synthetic oligonucleotide
  Sense strand starting at position 367 of SEQ ID NO: 1824
ggagcagaguggugugaaa

SEQ ID NO: 142191 - RNA, 19 nt, Artificial Sequence
  Description of Artificial Sequence: Synthetic oligonucleotide
  Antisense strand to SEQ ID NO: 142190
uuucacaccacucugcucc

SEQ ID NO: 142192 - RNA, 19 nt, Artificial Sequence
  Description of Artificial Sequence: Synthetic oligonucleotide
  Sense strand starting at position 333 of SEQ ID NO: 1824
augugcucuuuccaaaugu

SEQ ID NO: 142193 - RNA, 19 nt, Artificial Sequence
  Description of Artificial Sequence: Synthetic oligonucleotide
  Antisense strand to SEQ ID NO: 142192
acauuuggaaagagcacau

SEQ ID NO: 142194 - RNA, 19 nt, Artificial Sequence
  Description of Artificial Sequence: Synthetic oligonucleotide
  Sense strand starting at position 3980 of SEQ ID NO: 1825
ccguuaggccuagauaaca

SEQ ID NO: 142195 - RNA, 19 nt, Artificial Sequence
  Description of Artificial Sequence: Synthetic oligonucleotide
  Antisense strand to SEQ ID NO: 142194
uguuaucuaggccuaacgg

SEQ ID NO: 142196 - RNA, 19 nt, Artificial Sequence
  Description of Artificial Sequence: Synthetic oligonucleotide
  Sense strand starting at position 3978 of SEQ ID NO: 1825
aaccguuaggccuagauaa

SEQ ID NO: 142197 - RNA, 19 nt, Artificial Sequence
  Description of Artificial Sequence: Synthetic oligonucleotide
  Antisense strand to SEQ ID NO: 142196
uuaucuaggccuaacgguu

SEQ ID NO: 142198 - RNA, 19 nt, Artificial Sequence
  Description of Artificial Sequence: Synthetic oligonucleotide
  Sense strand starting at position 3896 of SEQ ID NO: 1825
cuccuuugugcucagaaug

SEQ ID NO: 142199 - RNA, 19 nt, Artificial Sequence
  Description of Artificial Sequence: Synthetic oligonucleotide
  Antisense strand to SEQ ID NO: 142198
cauucugagcacaaaggag

SEQ ID NO: 142200 - RNA, 19 nt, Artificial Sequence
  Description of Artificial Sequence: Synthetic oligonucleotide
  Sense strand starting at position 3589 of SEQ ID NO: 1825
ugaauaagagccugauauu

SEQ ID NO: 142201 - RNA, 19 nt, Artificial Sequence
  Description of Artificial Sequence: Synthetic oligonucleotide
  Antisense strand to SEQ ID NO: 142200
aauaucaggcucuuauuca

SEQ ID NO: 142202 - RNA, 19 nt, Artificial Sequence
  Description of Artificial Sequence: Synthetic oligonucleotide
  Sense strand starting at position 3512 of SEQ ID NO: 1825
ucaccuauacaauguagua

SEQ ID NO: 142203 - RNA, 19 nt, Artificial Sequence
  Description of Artificial Sequence: Synthetic oligonucleotide
  Antisense strand to SEQ ID NO: 142202
uacuacauuguauagguga

SEQ ID NO: 142204 - RNA, 19 nt, Artificial Sequence
  Description of Artificial Sequence: Synthetic oligonucleotide
  Sense strand starting at position 3427 of SEQ ID NO: 1825
cagauugagggcugaauuc

SEQ ID NO: 142205 - RNA, 19 nt, Artificial Sequence
  Description of Artificial Sequence: Synthetic oligonucleotide
  Antisense strand to SEQ ID NO: 142204
gaauucagcccucaaucug

SEQ ID NO: 142206 - RNA, 19 nt, Artificial Sequence
  Description of Artificial Sequence: Synthetic oligonucleotide
  Sense strand starting at position 3375 of SEQ ID NO: 1825
aguucuuuagcuuagcuaa

SEQ ID NO: 142207 - RNA, 19 nt, Artificial Sequence
  Description of Artificial Sequence: Synthetic oligonucleotide
  Antisense strand to SEQ ID NO: 142206
uuagcuaagcuaaagaacu

SEQ ID NO: 142208 - RNA, 19 nt, Artificial Sequence
  Description of Artificial Sequence: Synthetic oligonucleotide
  Sense strand starting at position 3370 of SEQ ID NO: 1825
cuucuaguucuuuagcuua

SEQ ID NO: 142209 - RNA, 19 nt, Artificial Sequence
  Description of Artificial Sequence: Synthetic oligonucleotide
  Antisense strand to SEQ ID NO: 142208
uaagcuaaagaacuagaag

SEQ ID NO: 142210 - RNA, 19 nt, Artificial Sequence
  Description of Artificial Sequence: Synthetic oligonucleotide
  Sense strand starting at position 3288 of SEQ ID NO: 1825
uuagaaauauggccuccuu

SEQ ID NO: 142211 - RNA, 19 nt, Artificial Sequence
  Description of Artificial Sequence: Synthetic oligonucleotide
  Antisense strand to SEQ ID NO: 142210
aaggaggccauauuucuaa

SEQ ID NO: 142212 - RNA, 19 nt, Artificial Sequence
  Description of Artificial Sequence: Synthetic oligonucleotide
  Sense strand starting at position 3052 of SEQ ID NO: 1825
uggguuaucccacagcauu

SEQ ID NO: 142213 - RNA, 19 nt, Artificial Sequence
  Description of Artificial Sequence: Synthetic oligonucleotide
  Antisense strand to SEQ ID NO: 142212
aaugcugugggauaaccca

SEQ ID NO: 142214 - RNA, 19 nt, Artificial Sequence
  Description of Artificial Sequence: Synthetic oligonucleotide
  Sense strand starting at position 3025 of SEQ ID NO: 1825
ggguauuggcuggguauau

SEQ ID NO: 142215 - RNA, 19 nt, Artificial Sequence
  Description of Artificial Sequence: Synthetic oligonucleotide
  Antisense strand to SEQ ID NO: 142214
auauacccagccaauaccc

SEQ ID NO: 142216 - RNA, 19 nt, Artificial Sequence
  Description of Artificial Sequence: Synthetic oligonucleotide
  Sense strand starting at position 3024 of SEQ ID NO: 1825
aggguauuggcuggguaua

SEQ ID NO: 142217 - RNA, 19 nt, Artificial Sequence
  Description of Artificial Sequence: Synthetic oligonucleotide
  Antisense strand to SEQ ID NO: 142216
uauacccagccaauacccu

SEQ ID NO: 142218 - RNA, 19 nt, Artificial Sequence
  Description of Artificial Sequence: Synthetic oligonucleotide
  Sense strand starting at position 3002 of SEQ ID NO: 1825
ccuugagagaccugugagu

SEQ ID NO: 142219 - RNA, 19 nt, Artificial Sequence
  Description of Artificial Sequence: Synthetic oligonucleotide
  Antisense strand to SEQ ID NO: 142218
acucacaggucucucaagg

SEQ ID NO: 142220 - RNA, 19 nt, Artificial Sequence
  Description of Artificial Sequence: Synthetic oligonucleotide
  Sense strand starting at position 2816 of SEQ ID NO: 1825
gggcaagaugcucaacauc

SEQ ID NO: 142221 - RNA, 19 nt, Artificial Sequence
  Description of Artificial Sequence: Synthetic oligonucleotide
  Antisense strand to SEQ ID NO: 142220
gauguugagcaucuugccc

SEQ ID NO: 142222 - RNA, 19 nt, Artificial Sequence
  Description of Artificial Sequence: Synthetic oligonucleotide
  Sense strand starting at position 2815 of SEQ ID NO: 1825
agggcaagaugcucaacau

SEQ ID NO: 142223 - RNA, 19 nt, Artificial Sequence
  Description of Artificial Sequence: Synthetic oligonucleotide
  Antisense strand to SEQ ID NO: 142222
auguugagcaucuugcccu

SEQ ID NO: 142224 - RNA, 19 nt, Artificial Sequence
  Description of Artificial Sequence: Synthetic oligonucleotide
  Sense strand starting at position 2688 of SEQ ID NO: 1825
gcucccugaagugguaaau

SEQ ID NO: 142225 - RNA, 19 nt, Artificial Sequence
  Description of Artificial Sequence: Synthetic oligonucleotide
  Antisense strand to SEQ ID NO: 142224
auuuaccacuucagggagc

SEQ ID NO: 142226 - RNA, 19 nt, Artificial Sequence
  Description of Artificial Sequence: Synthetic oligonucleotide
  Sense strand starting at position 2618 of SEQ ID NO: 1825
cuaucuucuguauacgagu

SEQ ID NO: 142227 - RNA, 19 nt, Artificial Sequence
  Description of Artificial Sequence: Synthetic oligonucleotide
  Antisense strand to SEQ ID NO: 142226
acucguauacagaagauag

SEQ ID NO: 142228 - RNA, 19 nt, Artificial Sequence
  Description of Artificial Sequence: Synthetic oligonucleotide
  Sense strand starting at position 2616 of SEQ ID NO: 1825
aucuaucuucuguauacga

SEQ ID NO: 142229 - RNA, 19 nt, Artificial Sequence
  Description of Artificial Sequence: Synthetic oligonucleotide
  Antisense strand to SEQ ID NO: 142228
ucguauacagaagauagau

SEQ ID NO: 142230 - RNA, 19 nt, Artificial Sequence
  Description of Artificial Sequence: Synthetic oligonucleotide
  Sense strand starting at position 2479 of SEQ ID NO: 1825
ggcguuuguguucuaccaa

SEQ ID NO: 142231 - RNA, 19 nt, Artificial Sequence
  Description of Artificial Sequence: Synthetic oligonucleotide
  Antisense strand to SEQ ID NO: 142230
uugguagaacacaaacgcc

SEQ ID NO: 142232 - RNA, 19 nt, Artificial Sequence
  Description of Artificial Sequence: Synthetic oligonucleotide
  Sense strand starting at position 2472 of SEQ ID NO: 1825
gguggaaggcguuuguguu

SEQ ID NO: 142233 - RNA, 19 nt, Artificial Sequence
  Description of Artificial Sequence: Synthetic oligonucleotide
  Antisense strand to SEQ ID NO: 142232
aacacaaacgccuuccacc

SEQ ID NO: 142234 - RNA, 19 nt, Artificial Sequence
  Description of Artificial Sequence: Synthetic oligonucleotide
  Sense strand starting at position 2308 of SEQ ID NO: 1825
gaauuagagugguccuuua

SEQ ID NO: 142235 - RNA, 19 nt, Artificial Sequence
  Description of Artificial Sequence: Synthetic oligonucleotide
  Antisense strand to SEQ ID NO: 142234
uaaaggaccacucuaauuc

SEQ ID NO: 142236 - RNA, 19 nt, Artificial Sequence
  Description of Artificial Sequence: Synthetic oligonucleotide
  Sense strand starting at position 2305 of SEQ ID NO: 1825
caagaauuagagugguccu

SEQ ID NO: 142237 - RNA, 19 nt, Artificial Sequence
  Description of Artificial Sequence: Synthetic oligonucleotide
  Antisense strand to SEQ ID NO: 142236
aggaccacucuaauucuug

SEQ ID NO: 142238 - RNA, 19 nt, Artificial Sequence
  Description of Artificial Sequence: Synthetic oligonucleotide
  Sense strand starting at position 1518 of SEQ ID NO: 1825
gcauuuaaguuccuagcca

SEQ ID NO: 142239 - RNA, 19 nt, Artificial Sequence
  Description of Artificial Sequence: Synthetic oligonucleotide
  Antisense strand to SEQ ID NO: 142238
uggcuaggaacuuaaaugc

SEQ ID NO: 142240 - RNA, 19 nt, Artificial Sequence
  Description of Artificial Sequence: Synthetic oligonucleotide
  Sense strand starting at position 1375 of SEQ ID NO: 1825
gccaguucuguuucucuuu

SEQ ID NO: 142241 - RNA, 19 nt, Artificial Sequence
  Description of Artificial Sequence: Synthetic oligonucleotide
  Antisense strand to SEQ ID NO: 142240
aaagagaaacagaacuggc

SEQ ID NO: 142242 - RNA, 19 nt, Artificial Sequence
  Description of Artificial Sequence: Synthetic oligonucleotide
  Sense strand starting at position 1369 of SEQ ID NO: 1825
cguguugccaguucuguuu

SEQ ID NO: 142243 - RNA, 19 nt, Artificial Sequence
  Description of Artificial Sequence: Synthetic oligonucleotide
  Antisense strand to SEQ ID NO: 142242
aaacagaacuggcaacacg

SEQ ID NO: 142244 - RNA, 19 nt, Artificial Sequence
  Description of Artificial Sequence: Synthetic oligonucleotide
  Sense strand starting at position 1368 of SEQ ID NO: 1825
ucguguugccaguucuguu

SEQ ID NO: 142245 - RNA, 19 nt, Artificial Sequence
  Description of Artificial Sequence: Synthetic oligonucleotide
  Antisense strand to SEQ ID NO: 142244
aacagaacuggcaacacga

SEQ ID NO: 142246 - RNA, 19 nt, Artificial Sequence
  Description of Artificial Sequence: Synthetic oligonucleotide
  Sense strand starting at position 1210 of SEQ ID NO: 1825
ucauucgacugaccaguaa

SEQ ID NO: 142247 - RNA, 19 nt, Artificial Sequence
  Description of Artificial Sequence: Synthetic oligonucleotide
  Antisense strand to SEQ ID NO: 142246
uuacuggucagucgaauga

SEQ ID NO: 142248 - RNA, 19 nt, Artificial Sequence
  Description of Artificial Sequence: Synthetic oligonucleotide
  Sense strand starting at position 1208 of SEQ ID NO: 1825
ugucauucgacugaccagu

SEQ ID NO: 142249 - RNA, 19 nt, Artificial Sequence
  Description of Artificial Sequence: Synthetic oligonucleotide
  Antisense strand to SEQ ID NO: 142248
acuggucagucgaaugaca

SEQ ID NO: 142250 - RNA, 19 nt, Artificial Sequence
  Description of Artificial Sequence: Synthetic oligonucleotide
  Sense strand starting at position 1201 of SEQ ID NO: 1825
gaaauaaugucauucgacu

SEQ ID NO: 142251 - RNA, 19 nt, Artificial Sequence
  Description of Artificial Sequence: Synthetic oligonucleotide
  Antisense strand to SEQ ID NO: 142250
agucgaaugacauuauuuc

SEQ ID NO: 142252 - RNA, 19 nt, Artificial Sequence
  Description of Artificial Sequence: Synthetic oligonucleotide
  Sense strand starting at position 936 of SEQ ID NO: 1825
uugacuuagggcuacauau

SEQ ID NO: 142253 - RNA, 19 nt, Artificial Sequence
  Description of Artificial Sequence: Synthetic oligonucleotide
  Antisense strand to SEQ ID NO: 142252
auauguagcccuaagucaa

SEQ ID NO: 142254 - RNA, 19 nt, Artificial Sequence
  Description of Artificial Sequence: Synthetic oligonucleotide
  Sense strand starting at position 809 of SEQ ID NO: 1825
ugugaauccugauugcacu

SEQ ID NO: 142255 - RNA, 19 nt, Artificial Sequence
  Description of Artificial Sequence: Synthetic oligonucleotide
  Antisense strand to SEQ ID NO: 142254
agugcaaucaggauucaca

SEQ ID NO: 142256 - RNA, 19 nt, Artificial Sequence
  Description of Artificial Sequence: Synthetic oligonucleotide
  Sense strand starting at position 788 of SEQ ID NO: 1825
ggaagagauagcggaguua

SEQ ID NO: 142257 - RNA, 19 nt, Artificial Sequence
  Description of Artificial Sequence: Synthetic oligonucleotide
  Antisense strand to SEQ ID NO: 142256
uaacuccgcuaucucuucc

SEQ ID NO: 142258 - RNA, 19 nt, Artificial Sequence
  Description of Artificial Sequence: Synthetic oligonucleotide
  Sense strand starting at position 421 of SEQ ID NO: 1825
cacagagucuagcuuagaa

SEQ ID NO: 142259 - RNA, 19 nt, Artificial Sequence
  Description of Artificial Sequence: Synthetic oligonucleotide
  Antisense strand to SEQ ID NO: 142258
uucuaagcuagacucugug

SEQ ID NO: 142260 - RNA, 19 nt, Artificial Sequence
  Description of Artificial Sequence: Synthetic oligonucleotide
  Sense strand starting at position 404 of SEQ ID NO: 1825
gaagcuuugccggcaagca

SEQ ID NO: 142261 - RNA, 19 nt, Artificial Sequence
  Description of Artificial Sequence: Synthetic oligonucleotide
  Antisense strand to SEQ ID NO: 142260
ugcuugccggcaaagcuuc

SEQ ID NO: 142262 - RNA, 19 nt, Artificial Sequence
  Description of Artificial Sequence: Synthetic oligonucleotide
  Sense strand starting at position 332 of SEQ ID NO: 1825
ugggcuggaugccugaaua

SEQ ID NO: 142263 - RNA, 19 nt, Artificial Sequence
  Description of Artificial Sequence: Synthetic oligonucleotide
  Antisense strand to SEQ ID NO: 142262
uauucaggcauccagccca

SEQ ID NO: 142264 - RNA, 19 nt, Artificial Sequence
  Description of Artificial Sequence: Synthetic oligonucleotide
  Sense strand starting at position 305 of SEQ ID NO: 1825
auucccuguuccuugaaga

SEQ ID NO: 142265 - RNA, 19 nt, Artificial Sequence
  Description of Artificial Sequence: Synthetic oligonucleotide
  Antisense strand to SEQ ID NO: 142264
ucuucaaggaacagggaau

SEQ ID NO: 142266 - RNA, 19 nt, Artificial Sequence
  Description of Artificial Sequence: Synthetic oligonucleotide
  Sense strand starting at position 284 of SEQ ID NO: 1825
uauaaagucuccuugaagg

SEQ ID NO: 142267 - RNA, 19 nt, Artificial Sequence
  Description of Artificial Sequence: Synthetic oligonucleotide
  Antisense strand to SEQ ID NO: 142266
ccuucaaggagacuuuaua

SEQ ID NO: 142268 - RNA, 19 nt, Artificial Sequence
  Description of Artificial Sequence: Synthetic oligonucleotide
  Sense strand starting at position 272 of SEQ ID NO: 1825
guucuugcagucuauaaag

SEQ ID NO: 142269 - RNA, 19 nt, Artificial Sequence
  Description of Artificial Sequence: Synthetic oligonucleotide
  Antisense strand to SEQ ID NO: 142268
cuuuauagacugcaagaac

SEQ ID NO: 142270 - RNA, 19 nt, Artificial Sequence
  Description of Artificial Sequence: Synthetic oligonucleotide
  Sense strand starting at position 110 of SEQ ID NO: 1825
cagagagaacccuguuguu

SEQ ID NO: 142271 - RNA, 19 nt, Artificial Sequence
  Description of Artificial Sequence: Synthetic oligonucleotide
  Antisense strand to SEQ ID NO: 142270
aacaacaggguucucucug

SEQ ID NO: 142272 - RNA, 19 nt, Artificial Sequence
  Description of Artificial Sequence: Synthetic oligonucleotide
  Sense strand starting at position 22 of SEQ ID NO: 1825
acaauuucuuaaggagacu

SEQ ID NO: 142273 - RNA, 19 nt, Artificial Sequence
  Description of Artificial Sequence: Synthetic oligonucleotide
  Antisense strand to SEQ ID NO: 142272
agucuccuuaagaaauugu

SEQ ID NO: 142274 - RNA, 19 nt, Artificial Sequence
  Description of Artificial Sequence: Synthetic oligonucleotide
  Sense strand starting at position 42 of SEQ ID NO: 1826
agaggaauguggguugaau

SEQ ID NO: 142275 - RNA, 19 nt, Artificial Sequence
  Description of Artificial Sequence: Synthetic oligonucleotide
  Antisense strand to SEQ ID NO: 142274
auucaacccacauuccucu

SEQ ID NO: 142276 - RNA, 19 nt, Artificial Sequence
  Description of Artificial Sequence: Synthetic oligonucleotide
  Sense strand starting at position 44 of SEQ ID NO: 1826
aggaauguggguugaaucu

SEQ ID NO: 142277 - RNA, 19 nt, Artificial Sequence
  Description of Artificial Sequence: Synthetic oligonucleotide
  Antisense strand to SEQ ID NO: 142276
agauucaacccacauuccu

SEQ ID NO: 142278 - RNA, 19 nt, Artificial Sequence
  Description of Artificial Sequence: Synthetic oligonucleotide
  Sense strand starting at position 417 of SEQ ID NO: 1826
gcucgaaucacaguucgca

SEQ ID NO: 142279 - RNA, 19 nt, Artificial Sequence
  Description of Artificial Sequence: Synthetic oligonucleotide
  Antisense strand to SEQ ID NO: 142278
ugcgaacugugauucgagc

SEQ ID NO: 142280 - RNA, 19 nt, Artificial Sequence
  Description of Artificial Sequence: Synthetic oligonucleotide
  Sense strand starting at position 484 of SEQ ID NO: 1826
cuguguccacucuauaaag

SEQ ID NO: 142281 - RNA, 19 nt, Artificial Sequence
  Description of Artificial Sequence: Synthetic oligonucleotide
  Antisense strand to SEQ ID NO: 142280
cuuuauagaguggacacag

SEQ ID NO: 142282 - RNA, 19 nt, Artificial Sequence
  Description of Artificial Sequence: Synthetic oligonucleotide
  Sense strand starting at position 1025 of SEQ ID NO: 1826
gccggcuggccucaaauuu

SEQ ID NO: 142283 - RNA, 19 nt, Artificial Sequence
  Description of Artificial Sequence: Synthetic oligonucleotide
  Antisense strand to SEQ ID NO: 142282
aaauuugaggccagccggc

SEQ ID NO: 142284 - RNA, 19 nt, Artificial Sequence
  Description of Artificial Sequence: Synthetic oligonucleotide
  Sense strand starting at position 1048 of SEQ ID NO: 1826
ucucuuugguucucugaga

SEQ ID NO: 142285 - RNA, 19 nt, Artificial Sequence
  Description of Artificial Sequence: Synthetic oligonucleotide
  Antisense strand to SEQ ID NO: 142284
ucucagagaaccaaagaga

SEQ ID NO: 142286 - RNA, 19 nt, Artificial Sequence
  Description of Artificial Sequence: Synthetic oligonucleotide
  Sense strand starting at position 1049 of SEQ ID NO: 1826
cucuuugguucucugagaa

SEQ ID NO: 142287 - RNA, 19 nt, Artificial Sequence
  Description of Artificial Sequence: Synthetic oligonucleotide
  Antisense strand to SEQ ID NO: 142286
uucucagagaaccaaagag

SEQ ID NO: 142288 - RNA, 19 nt, Artificial Sequence
  Description of Artificial Sequence: Synthetic oligonucleotide
  Sense strand starting at position 1094 of SEQ ID NO: 1826
agagauccagccuggacua

SEQ ID NO: 142289 - RNA, 19 nt, Artificial Sequence
  Description of Artificial Sequence: Synthetic oligonucleotide
  Antisense strand to SEQ ID NO: 142288
uaguccaggcuggaucucu

SEQ ID NO: 142290 - RNA, 19 nt, Artificial Sequence
  Description of Artificial Sequence: Synthetic oligonucleotide
  Sense strand starting at position 1294 of SEQ ID NO: 1826
gcauuaucuguagagggag

SEQ ID NO: 142291 - RNA, 19 nt, Artificial Sequence
  Description of Artificial Sequence: Synthetic oligonucleotide
  Antisense strand to SEQ ID NO: 142290
cucccucuacagauaaugc

SEQ ID NO: 142292 - RNA, 19 nt, Artificial Sequence
  Description of Artificial Sequence: Synthetic oligonucleotide
  Sense strand starting at position 1308 of SEQ ID NO: 1826
gggaguggcugaucugaca

SEQ ID NO: 142293 - RNA, 19 nt, Artificial Sequence
  Description of Artificial Sequence: Synthetic oligonucleotide
  Antisense strand to SEQ ID NO: 142292
ugucagaucagccacuccc

SEQ ID NO: 142294 - RNA, 19 nt, Artificial Sequence
  Description of Artificial Sequence: Synthetic oligonucleotide
  Sense strand starting at position 1746 of SEQ ID NO: 1826
aacagaaagcauugacguu

SEQ ID NO: 142295 - RNA, 19 nt, Artificial Sequence
  Description of Artificial Sequence: Synthetic oligonucleotide
  Antisense strand to SEQ ID NO: 142294
aacgucaaugcuuucuguu

SEQ ID NO: 142296 - RNA, 19 nt, Artificial Sequence
  Description of Artificial Sequence: Synthetic oligonucleotide
  Sense strand starting at position 1753 of SEQ ID NO: 1826
agcauugacguugagguau

SEQ ID NO: 142297 - RNA, 19 nt, Artificial Sequence
  Description of Artificial Sequence: Synthetic oligonucleotide
  Antisense strand to SEQ ID NO: 142296
auaccucaacgucaaugcu

SEQ ID NO: 142298 - RNA, 19 nt, Artificial Sequence
  Description of Artificial Sequence: Synthetic oligonucleotide
  Sense strand starting at position 1764 of SEQ ID NO: 1826
ugagguauuugagauaaca

SEQ ID NO: 142299 - RNA, 19 nt, Artificial Sequence
  Description of Artificial Sequence: Synthetic oligonucleotide
  Antisense strand to SEQ ID NO: 142298
uguuaucucaaauaccuca

SEQ ID NO: 142300 - RNA, 19 nt, Artificial Sequence
  Description of Artificial Sequence: Synthetic oligonucleotide
  Sense strand starting at position 2068 of SEQ ID NO: 1826
uuugauuguguuggaaaua

SEQ ID NO: 142301 - RNA, 19 nt, Artificial Sequence
  Description of Artificial Sequence: Synthetic oligonucleotide
  Antisense strand to SEQ ID NO: 142300
uauuuccaacacaaucaaa

SEQ ID NO: 142302 - RNA, 19 nt, Artificial Sequence
  Description of Artificial Sequence: Synthetic oligonucleotide
  Sense strand starting at position 2073 of SEQ ID NO: 1826
uuguguuggaaauaaagca

SEQ ID NO: 142303 - RNA, 19 nt, Artificial Sequence
  Description of Artificial Sequence: Synthetic oligonucleotide
  Antisense strand to SEQ ID NO: 142302
ugcuuuauuuccaacacaa

SEQ ID NO: 142304 - RNA, 19 nt, Artificial Sequence
  Description of Artificial Sequence: Synthetic oligonucleotide
  Sense strand starting at position 2164 of SEQ ID NO: 1826
ugauuucgucccuggguga

SEQ ID NO: 142305 - RNA, 19 nt, Artificial Sequence
  Description of Artificial Sequence: Synthetic oligonucleotide
  Antisense strand to SEQ ID NO: 142304
ucacccagggacgaaauca

SEQ ID NO: 142306 - RNA, 19 nt, Artificial Sequence
  Description of Artificial Sequence: Synthetic oligonucleotide
  Sense strand starting at position 2165 of SEQ ID NO: 1826
gauuucgucccugggugau

SEQ ID NO: 142307 - RNA, 19 nt, Artificial Sequence
  Description of Artificial Sequence: Synthetic oligonucleotide
  Antisense strand to SEQ ID NO: 142306
aucacccagggacgaaauc

SEQ ID NO: 142308 - RNA, 19 nt, Artificial Sequence
  Description of Artificial Sequence: Synthetic oligonucleotide
  Sense strand starting at position 2178 of SEQ ID NO: 1826
ggugauuugucacuucgug

SEQ ID NO: 142309 - RNA, 19 nt, Artificial Sequence
  Description of Artificial Sequence: Synthetic oligonucleotide
  Antisense strand to SEQ ID NO: 142308
cacgaagugacaaaucacc

SEQ ID NO: 142310 - RNA, 19 nt, Artificial Sequence
  Description of Artificial Sequence: Synthetic oligonucleotide
  Sense strand starting at position 2262 of SEQ ID NO: 1826
caagauucuugagucagga

SEQ ID NO: 142311 - RNA, 19 nt, Artificial Sequence
  Description of Artificial Sequence: Synthetic oligonucleotide
  Antisense strand to SEQ ID NO: 142310
uccugacucaagaaucuug

SEQ ID NO: 142312 - RNA, 19 nt, Artificial Sequence
  Description of Artificial Sequence: Synthetic oligonucleotide
  Sense strand starting at position 2264 of SEQ ID NO: 1826
agauucuugagucaggagu

SEQ ID NO: 142313 - RNA, 19 nt, Artificial Sequence
  Description of Artificial Sequence: Synthetic oligonucleotide
  Antisense strand to SEQ ID NO: 142312
acuccugacucaagaaucu

SEQ ID NO: 142314 - RNA, 19 nt, Artificial Sequence
  Description of Artificial Sequence: Synthetic oligonucleotide
  Sense strand starting at position 2272 of SEQ ID NO: 1826
gagucaggaguuggaucau

SEQ ID NO: 142315 - RNA, 19 nt, Artificial Sequence
  Description of Artificial Sequence: Synthetic oligonucleotide
  Antisense strand to SEQ ID NO: 142314
augauccaacuccugacuc

SEQ ID NO: 142316 - RNA, 19 nt, Artificial Sequence
  Description of Artificial Sequence: Synthetic oligonucleotide
  Sense strand starting at position 2668 of SEQ ID NO: 1826
ugcagcacguauuucuaaa

SEQ ID NO: 142317 - RNA, 19 nt, Artificial Sequence
  Description of Artificial Sequence: Synthetic oligonucleotide
  Antisense strand to SEQ ID NO: 142316
uuuagaaauacgugcugca

SEQ ID NO: 142318 - RNA, 19 nt, Artificial Sequence
  Description of Artificial Sequence: Synthetic oligonucleotide
  Sense strand starting at position 2833 of SEQ ID NO: 1826
agcauuagggcccagaguu

SEQ ID NO: 142319 - RNA, 19 nt, Artificial Sequence
  Description of Artificial Sequence: Synthetic oligonucleotide
  Antisense strand to SEQ ID NO: 142318
aacucugggcccuaaugcu

SEQ ID NO: 142320 - RNA, 19 nt, Artificial Sequence
  Description of Artificial Sequence: Synthetic oligonucleotide
  Sense strand starting at position 2894 of SEQ ID NO: 1826
ugaccauucuguguuugaa

SEQ ID NO: 142321 - RNA, 19 nt, Artificial Sequence
  Description of Artificial Sequence: Synthetic oligonucleotide
  Antisense strand to SEQ ID NO: 142320
uucaaacacagaaugguca

SEQ ID NO: 142322 - RNA, 19 nt, Artificial Sequence
  Description of Artificial Sequence: Synthetic oligonucleotide
  Sense strand starting at position 2896 of SEQ ID NO: 1826
accauucuguguuugaaua

SEQ ID NO: 142323 - RNA, 19 nt, Artificial Sequence
  Description of Artificial Sequence: Synthetic oligonucleotide
  Antisense strand to SEQ ID NO: 142322
uauucaaacacagaauggu

SEQ ID NO: 142324 - RNA, 19 nt, Artificial Sequence
  Description of Artificial Sequence: Synthetic oligonucleotide
  Sense strand starting at position 2897 of SEQ ID NO: 1826
ccauucuguguuugaauaa

SEQ ID NO: 142325 - RNA, 19 nt, Artificial Sequence
  Description of Artificial Sequence: Synthetic oligonucleotide
  Antisense strand to SEQ ID NO: 142324
uuauucaaacacagaaugg

SEQ ID NO: 142326 - RNA, 19 nt, Artificial Sequence
  Description of Artificial Sequence: Synthetic oligonucleotide
  Sense strand starting at position 3161 of SEQ ID NO: 1826
ggugccugugauuagaaga

SEQ ID NO: 142327 - RNA, 19 nt, Artificial Sequence
  Description of Artificial Sequence: Synthetic oligonucleotide
  Antisense strand to SEQ ID NO: 142326
ucuucuaaucacaggcacc

SEQ ID NO: 142328 - RNA, 19 nt, Artificial Sequence
  Description of Artificial Sequence: Synthetic oligonucleotide
  Sense strand starting at position 3251 of SEQ ID NO: 1826
uguguugacuccucauuua

SEQ ID NO: 142329 - RNA, 19 nt, Artificial Sequence
  Description of Artificial Sequence: Synthetic oligonucleotide
  Antisense strand to SEQ ID NO: 142328
uaaaugaggagucaacaca

SEQ ID NO: 142330 - RNA, 19 nt, Artificial Sequence
  Description of Artificial Sequence: Synthetic oligonucleotide
  Sense strand starting at position 3262 of SEQ ID NO: 1826
cucauuuauucugauuugu

SEQ ID NO: 142331 - RNA, 19 nt, Artificial Sequence
  Description of Artificial Sequence: Synthetic oligonucleotide
  Antisense strand to SEQ ID NO: 142330
acaaaucagaauaaaugag

SEQ ID NO: 142332 - RNA, 19 nt, Artificial Sequence
  Description of Artificial Sequence: Synthetic oligonucleotide
  Sense strand starting at position 3276 of SEQ ID NO: 1826
uuuguucaccuguggagga

SEQ ID NO: 142333 - RNA, 19 nt, Artificial Sequence
  Description of Artificial Sequence: Synthetic oligonucleotide
  Antisense strand to SEQ ID NO: 142332
uccuccacaggugaacaaa

SEQ ID NO: 142334 - RNA, 19 nt, Artificial Sequence
  Description of Artificial Sequence: Synthetic oligonucleotide
  Sense strand starting at position 3278 of SEQ ID NO: 1826
uguucaccuguggaggauu

SEQ ID NO: 142335 - RNA, 19 nt, Artificial Sequence
  Description of Artificial Sequence: Synthetic oligonucleotide
  Antisense strand to SEQ ID NO: 142334
aauccuccacaggugaaca

SEQ ID NO: 142336 - RNA, 19 nt, Artificial Sequence
  Description of Artificial Sequence: Synthetic oligonucleotide
  Sense strand starting at position 3306 of SEQ ID NO: 1826
ccuugcugagugugaauuu

SEQ ID NO: 142337 - RNA, 19 nt, Artificial Sequence
  Description of Artificial Sequence: Synthetic oligonucleotide
  Antisense strand to SEQ ID NO: 142336
aaauucacacucagcaagg

SEQ ID NO: 142338 - RNA, 19 nt, Artificial Sequence
  Description of Artificial Sequence: Synthetic oligonucleotide
  Sense strand starting at position 3372 of SEQ ID NO: 1826
auggaaguugcugaagcau

SEQ ID NO: 142339 - RNA, 19 nt, Artificial Sequence
  Description of Artificial Sequence: Synthetic oligonucleotide
  Antisense strand to SEQ ID NO: 142338
augcuucagcaacuuccau

SEQ ID NO: 142340 - RNA, 19 nt, Artificial Sequence
  Description of Artificial Sequence: Synthetic oligonucleotide
  Sense strand starting at position 3378 of SEQ ID NO: 1826
guugcugaagcauagauau

SEQ ID NO: 142341 - RNA, 19 nt, Artificial Sequence
  Description of Artificial Sequence: Synthetic oligonucleotide
  Antisense strand to SEQ ID NO: 142340
auaucuaugcuucagcaac

SEQ ID NO: 142342 - RNA, 19 nt, Artificial Sequence
  Description of Artificial Sequence: Synthetic oligonucleotide
  Sense strand starting at position 3434 of SEQ ID NO: 1826
gcaacauugccucauagau

SEQ ID NO: 142343 - RNA, 19 nt, Artificial Sequence
  Description of Artificial Sequence: Synthetic oligonucleotide
  Antisense strand to SEQ ID NO: 142342
aucuaugaggcaauguugc

SEQ ID NO: 142344 - RNA, 19 nt, Artificial Sequence
  Description of Artificial Sequence: Synthetic oligonucleotide
  Sense strand starting at position 3480 of SEQ ID NO: 1826
ggaguuaugaggcgauuac

SEQ ID NO: 142345 - RNA, 19 nt, Artificial Sequence
  Description of Artificial Sequence: Synthetic oligonucleotide
  Antisense strand to SEQ ID NO: 142344
guaaucgccucauaacucc

SEQ ID NO: 142346 - RNA, 19 nt, Artificial Sequence
  Description of Artificial Sequence: Synthetic oligonucleotide
  Sense strand starting at position 3481 of SEQ ID NO: 1826
gaguuaugaggcgauuaca

SEQ ID NO: 142347 - RNA, 19 nt, Artificial Sequence
  Description of Artificial Sequence: Synthetic oligonucleotide
  Antisense strand to SEQ ID NO: 142346
uguaaucgccucauaacuc

SEQ ID NO: 142348 - RNA, 19 nt, Artificial Sequence
  Description of Artificial Sequence: Synthetic oligonucleotide
  Sense strand starting at position 3498 of SEQ ID NO: 1826
caugcaaggcuggauuaaa

SEQ ID NO: 142349 - RNA, 19 nt, Artificial Sequence
  Description of Artificial Sequence: Synthetic oligonucleotide
  Antisense strand to SEQ ID NO: 142348
uuuaauccagccuugcaug

SEQ ID NO: 142350 - RNA, 19 nt, Artificial Sequence
  Description of Artificial Sequence: Synthetic oligonucleotide
  Sense strand starting at position 3896 of SEQ ID NO: 1826
ggaccuuucggaugugauu

SEQ ID NO: 142351 - RNA, 19 nt, Artificial Sequence
  Description of Artificial Sequence: Synthetic oligonucleotide
  Antisense strand to SEQ ID NO: 142350
aaucacauccgaaaggucc

SEQ ID NO: 142352 - RNA, 19 nt, Artificial Sequence
  Description of Artificial Sequence: Synthetic oligonucleotide
  Sense strand starting at position 3945 of SEQ ID NO: 1826
gauuacugcccuugugaaa

SEQ ID NO: 142353 - RNA, 19 nt, Artificial Sequence
  Description of Artificial Sequence: Synthetic oligonucleotide
  Antisense strand to SEQ ID NO: 142352
uuucacaagggcaguaauc

SEQ ID NO: 142354 - RNA, 19 nt, Artificial Sequence
  Description of Artificial Sequence: Synthetic oligonucleotide
  Sense strand starting at position 182 of SEQ ID NO: 1827
aaauguaugggcugugaua

SEQ ID NO: 142355 - RNA, 19 nt, Artificial Sequence
  Description of Artificial Sequence: Synthetic oligonucleotide
  Antisense strand to SEQ ID NO: 142354
uaucacagcccauacauuu

SEQ ID NO: 142356 - RNA, 19 nt, Artificial Sequence
  Description of Artificial Sequence: Synthetic oligonucleotide
  Sense strand starting at position 242 of SEQ ID NO: 1827
gcucccagagaaugcuuaa

SEQ ID NO: 142357 - RNA, 19 nt, Artificial Sequence
  Description of Artificial Sequence: Synthetic oligonucleotide
  Antisense strand to SEQ ID NO: 142356
uuaagcauucucugggagc

SEQ ID NO: 142358 - RNA, 19 nt, Artificial Sequence
  Description of Artificial Sequence: Synthetic oligonucleotide
  Sense strand starting at position 874 of SEQ ID NO: 1827
gguccaucugaacacuuua

SEQ ID NO: 142359 - RNA, 19 nt, Artificial Sequence
  Description of Artificial Sequence: Synthetic oligonucleotide
  Antisense strand to SEQ ID NO: 142358
uaaaguguucagauggacc

SEQ ID NO: 142360 - RNA, 19 nt, Artificial Sequence
  Description of Artificial Sequence: Synthetic oligonucleotide
  Sense strand starting at position 913 of SEQ ID NO: 1827
gagacaaagcuuggagagu

SEQ ID NO: 142361 - RNA, 19 nt, Artificial Sequence
  Description of Artificial Sequence: Synthetic oligonucleotide
  Antisense strand to SEQ ID NO: 142360
acucuccaagcuuugucuc

SEQ ID NO: 142362 - RNA, 19 nt, Artificial Sequence
  Description of Artificial Sequence: Synthetic oligonucleotide
  Sense strand starting at position 967 of SEQ ID NO: 1827
aaaucauugcgugaaccuu

SEQ ID NO: 142363 - RNA, 19 nt, Artificial Sequence
  Description of Artificial Sequence: Synthetic oligonucleotide
  Antisense strand to SEQ ID NO: 142362
aagguucacgcaaugauuu

SEQ ID NO: 142364 - RNA, 19 nt, Artificial Sequence
  Description of Artificial Sequence: Synthetic oligonucleotide
  Sense strand starting at position 1150 of SEQ ID NO: 1827
auugaaugucugcauguca

SEQ ID NO: 142365 - RNA, 19 nt, Artificial Sequence
  Description of Artificial Sequence: Synthetic oligonucleotide
  Antisense strand to SEQ ID NO: 142364
ugacaugcagacauucaau

SEQ ID NO: 142366 - RNA, 19 nt, Artificial Sequence
  Description of Artificial Sequence: Synthetic oligonucleotide
  Sense strand starting at position 1522 of SEQ ID NO: 1827
uguagaucucaugaaugca

SEQ ID NO: 142367 - RNA, 19 nt, Artificial Sequence
  Description of Artificial Sequence: Synthetic oligonucleotide
  Antisense strand to SEQ ID NO: 142366
ugcauucaugagaucuaca

SEQ ID NO: 142368 - RNA, 19 nt, Artificial Sequence
  Description of Artificial Sequence: Synthetic oligonucleotide
  Sense strand starting at position 1559 of SEQ ID NO: 1827
ugacacuuaugauugagua

SEQ ID NO: 142369 - RNA, 19 nt, Artificial Sequence
  Description of Artificial Sequence: Synthetic oligonucleotide
  Antisense strand to SEQ ID NO: 142368
uacucaaucauaaguguca

SEQ ID NO: 142370 - RNA, 19 nt, Artificial Sequence
  Description of Artificial Sequence: Synthetic oligonucleotide
  Sense strand starting at position 1560 of SEQ ID NO: 1827
gacacuuaugauugaguaa

SEQ ID NO: 142371 - RNA, 19 nt, Artificial Sequence
  Description of Artificial Sequence: Synthetic oligonucleotide
  Antisense strand to SEQ ID NO: 142370
uuacucaaucauaaguguc

SEQ ID NO: 142372 - RNA, 19 nt, Artificial Sequence
  Description of Artificial Sequence: Synthetic oligonucleotide
  Sense strand starting at position 1651 of SEQ ID NO: 1827
gcucuuugcagugaaggaa

SEQ ID NO: 142373 - RNA, 19 nt, Artificial Sequence
  Description of Artificial Sequence: Synthetic oligonucleotide
  Antisense strand to SEQ ID NO: 142372
uuccuucacugcaaagagc

SEQ ID NO: 142374 - RNA, 19 nt, Artificial Sequence
  Description of Artificial Sequence: Synthetic oligonucleotide
  Sense strand starting at position 1718 of SEQ ID NO: 1827
ugacaagccucacuagaaa

SEQ ID NO: 142375 - RNA, 19 nt, Artificial Sequence
  Description of Artificial Sequence: Synthetic oligonucleotide
  Antisense strand to SEQ ID NO: 142374
uuucuagugaggcuuguca

SEQ ID NO: 142376 - RNA, 19 nt, Artificial Sequence
  Description of Artificial Sequence: Synthetic oligonucleotide
  Sense strand starting at position 1746 of SEQ ID NO: 1827
ucauuucuggccuggcuaa

SEQ ID NO: 142377 - RNA, 19 nt, Artificial Sequence
  Description of Artificial Sequence: Synthetic oligonucleotide
  Antisense strand to SEQ ID NO: 142376
uuagccaggccagaaauga

SEQ ID NO: 142378 - RNA, 19 nt, Artificial Sequence
  Description of Artificial Sequence: Synthetic oligonucleotide
  Sense strand starting at position 1757 of SEQ ID NO: 1827
cuggcuaauagcugacaga

SEQ ID NO: 142379 - RNA, 19 nt, Artificial Sequence
  Description of Artificial Sequence: Synthetic oligonucleotide
  Antisense strand to SEQ ID NO: 142378
ucugucagcuauuagccag

SEQ ID NO: 142380 - RNA, 19 nt, Artificial Sequence
  Description of Artificial Sequence: Synthetic oligonucleotide
  Sense strand starting at position 1816 of SEQ ID NO: 1827
cgaggaggauuaccuguuu

SEQ ID NO: 142381 - RNA, 19 nt, Artificial Sequence
  Description of Artificial Sequence: Synthetic oligonucleotide
  Antisense strand to SEQ ID NO: 142380
aaacagguaauccuccucg

SEQ ID NO: 142382 - RNA, 19 nt, Artificial Sequence
  Description of Artificial Sequence: Synthetic oligonucleotide
  Sense strand starting at position 1821 of SEQ ID NO: 1827
aggauuaccuguuuggcaa

SEQ ID NO: 142383 - RNA, 19 nt, Artificial Sequence
  Description of Artificial Sequence: Synthetic oligonucleotide
  Antisense strand to SEQ ID NO: 142382
uugccaaacagguaauccu

SEQ ID NO: 142384 - RNA, 19 nt, Artificial Sequence
  Description of Artificial Sequence: Synthetic oligonucleotide
  Sense strand starting at position 1911 of SEQ ID NO: 1827
aucuucuugccucaggaau

SEQ ID NO: 142385 - RNA, 19 nt, Artificial Sequence
  Description of Artificial Sequence: Synthetic oligonucleotide
  Antisense strand to SEQ ID NO: 142384
auuccugaggcaagaagau

SEQ ID NO: 142386 - RNA, 19 nt, Artificial Sequence
  Description of Artificial Sequence: Synthetic oligonucleotide
  Sense strand starting at position 1947 of SEQ ID NO: 1827
gucacaaagcgauaauauu

SEQ ID NO: 142387 - RNA, 19 nt, Artificial Sequence
  Description of Artificial Sequence: Synthetic oligonucleotide
  Antisense strand to SEQ ID NO: 142386
aauauuaucgcuuugugac

SEQ ID NO: 142388 - RNA, 19 nt, Artificial Sequence
  Description of Artificial Sequence: Synthetic oligonucleotide
  Sense strand starting at position 2056 of SEQ ID NO: 1827
ugcuuugacuagccaggaa

SEQ ID NO: 142389 - RNA, 19 nt, Artificial Sequence
  Description of Artificial Sequence: Synthetic oligonucleotide
  Antisense strand to SEQ ID NO: 142388
uuccuggcuagucaaagca

SEQ ID NO: 142390 - RNA, 19 nt, Artificial Sequence
  Description of Artificial Sequence: Synthetic oligonucleotide
  Sense strand starting at position 2395 of SEQ ID NO: 1827
gcagaacauggaugaucau

SEQ ID NO: 142391 - RNA, 19 nt, Artificial Sequence
  Description of Artificial Sequence: Synthetic oligonucleotide
  Antisense strand to SEQ ID NO: 142390
augaucauccauguucugc

SEQ ID NO: 142392 - RNA, 19 nt, Artificial Sequence
  Description of Artificial Sequence: Synthetic oligonucleotide
  Sense strand starting at position 2427 of SEQ ID NO: 1827
acaucaacagaguguguua

SEQ ID NO: 142393 - RNA, 19 nt, Artificial Sequence
  Description of Artificial Sequence: Synthetic oligonucleotide
  Antisense strand to SEQ ID NO: 142392
uaacacacucuguugaugu

SEQ ID NO: 142394 - RNA, 19 nt, Artificial Sequence
  Description of Artificial Sequence: Synthetic oligonucleotide
  Sense strand starting at position 2430 of SEQ ID NO: 1827
ucaacagaguguguuacaa

SEQ ID NO: 142395 - RNA, 19 nt, Artificial Sequence
  Description of Artificial Sequence: Synthetic oligonucleotide
  Antisense strand to SEQ ID NO: 142394
uuguaacacacucuguuga

SEQ ID NO: 142396 - RNA, 19 nt, Artificial Sequence
  Description of Artificial Sequence: Synthetic oligonucleotide
  Sense strand starting at position 2490 of SEQ ID NO: 1827
aauccuugugagcagcaua

SEQ ID NO: 142397 - RNA, 19 nt, Artificial Sequence
  Description of Artificial Sequence: Synthetic oligonucleotide
  Antisense strand to SEQ ID NO: 142396
uaugcugcucacaaggauu

SEQ ID NO: 142398 - RNA, 19 nt, Artificial Sequence
  Description of Artificial Sequence: Synthetic oligonucleotide
  Sense strand starting at position 2629 of SEQ ID NO: 1827
aaauauagguguuugccaa

SEQ ID NO: 142399 - RNA, 19 nt, Artificial Sequence
  Description of Artificial Sequence: Synthetic oligonucleotide
  Antisense strand to SEQ ID NO: 142398
uuggcaaacaccuauauuu

SEQ ID NO: 142400 - RNA, 19 nt, Artificial Sequence
  Description of Artificial Sequence: Synthetic oligonucleotide
  Sense strand starting at position 2630 of SEQ ID NO: 1827
aauauagguguuugccaaa

SEQ ID NO: 142401 - RNA, 19 nt, Artificial Sequence
  Description of Artificial Sequence: Synthetic oligonucleotide
  Antisense strand to SEQ ID NO: 142400
uuuggcaaacaccuauauu

SEQ ID NO: 142402 - RNA, 19 nt, Artificial Sequence
  Description of Artificial Sequence: Synthetic oligonucleotide
  Sense strand starting at position 2730 of SEQ ID NO: 1827
guaggugccagagaugacu

SEQ ID NO: 142403 - RNA, 19 nt, Artificial Sequence
  Description of Artificial Sequence: Synthetic oligonucleotide
  Antisense strand to SEQ ID NO: 142402
agucaucucuggcaccuac

SEQ ID NO: 142404 - RNA, 19 nt, Artificial Sequence
  Description of Artificial Sequence: Synthetic oligonucleotide
  Sense strand starting at position 2780 of SEQ ID NO: 1827
ggaccuuuaugucuggaaa

SEQ ID NO: 142405 - RNA, 19 nt, Artificial Sequence
  Description of Artificial Sequence: Synthetic oligonucleotide
  Antisense strand to SEQ ID NO: 142404
uuuccagacauaaaggucc

SEQ ID NO: 142406 - RNA, 19 nt, Artificial Sequence
  Description of Artificial Sequence: Synthetic oligonucleotide
  Sense strand starting at position 2781 of SEQ ID NO: 1827
gaccuuuaugucuggaaac

SEQ ID NO: 142407 - RNA, 19 nt, Artificial Sequence
  Description of Artificial Sequence: Synthetic oligonucleotide
  Antisense strand to SEQ ID NO: 142406
guuuccagacauaaagguc

SEQ ID NO: 142408 - RNA, 19 nt, Artificial Sequence
  Description of Artificial Sequence: Synthetic oligonucleotide
  Sense strand starting at position 2783 of SEQ ID NO: 1827
ccuuuaugucuggaaacuu

SEQ ID NO: 142409 - RNA, 19 nt, Artificial Sequence
  Description of Artificial Sequence: Synthetic oligonucleotide
  Antisense strand to SEQ ID NO: 142408
aaguuuccagacauaaagg

SEQ ID NO: 142410 - RNA, 19 nt, Artificial Sequence
  Description of Artificial Sequence: Synthetic oligonucleotide
  Sense strand starting at position 2814 of SEQ ID NO: 1827
ggaccauaguaguuaucaa

SEQ ID NO: 142411 - RNA, 19 nt, Artificial Sequence
  Description of Artificial Sequence: Synthetic oligonucleotide
  Antisense strand to SEQ ID NO: 142410
uugauaacuacuauggucc

SEQ ID NO: 142412 - RNA, 19 nt, Artificial Sequence
  Description of Artificial Sequence: Synthetic oligonucleotide
  Sense strand starting at position 2845 of SEQ ID NO: 1827
uguucuacuggugaggaaa

SEQ ID NO: 142413 - RNA, 19 nt, Artificial Sequence
  Description of Artificial Sequence: Synthetic oligonucleotide
  Antisense strand to SEQ ID NO: 142412
uuuccucaccaguagaaca

SEQ ID NO: 142414 - RNA, 19 nt, Artificial Sequence
  Description of Artificial Sequence: Synthetic oligonucleotide
  Sense strand starting at position 2876 of SEQ ID NO: 1827
gaaacauugugacuaguuu

SEQ ID NO: 142415 - RNA, 19 nt, Artificial Sequence
  Description of Artificial Sequence: Synthetic oligonucleotide
  Antisense strand to SEQ ID NO: 142414
aaacuagucacaauguuuc

SEQ ID NO: 142416 - RNA, 19 nt, Artificial Sequence
  Description of Artificial Sequence: Synthetic oligonucleotide
  Sense strand starting at position 2880 of SEQ ID NO: 1827
cauugugacuaguuuaaug

SEQ ID NO: 142417 - RNA, 19 nt, Artificial Sequence
  Description of Artificial Sequence: Synthetic oligonucleotide
  Antisense strand to SEQ ID NO: 142416
cauuaaacuagucacaaug

SEQ ID NO: 142418 - RNA, 19 nt, Artificial Sequence
  Description of Artificial Sequence: Synthetic oligonucleotide
  Sense strand starting at position 2882 of SEQ ID NO: 1827
uugugacuaguuuaaugca

SEQ ID NO: 142419 - RNA, 19 nt, Artificial Sequence
  Description of Artificial Sequence: Synthetic oligonucleotide
  Antisense strand to SEQ ID NO: 142418
ugcauuaaacuagucacaa

SEQ ID NO: 142420 - RNA, 19 nt, Artificial Sequence
  Description of Artificial Sequence: Synthetic oligonucleotide
  Sense strand starting at position 2910 of SEQ ID NO: 1827
gugggugaagcugauauca

SEQ ID NO: 142421 - RNA, 19 nt, Artificial Sequence
  Description of Artificial Sequence: Synthetic oligonucleotide
  Antisense strand to SEQ ID NO: 142420
ugauaucagcuucacccac

SEQ ID NO: 142422 - RNA, 19 nt, Artificial Sequence
  Description of Artificial Sequence: Synthetic oligonucleotide
  Sense strand starting at position 3009 of SEQ ID NO: 1827
guguaaauucaugguagga

SEQ ID NO: 142423 - RNA, 19 nt, Artificial Sequence
  Description of Artificial Sequence: Synthetic oligonucleotide
  Antisense strand to SEQ ID NO: 142422
uccuaccaugaauuuacac

SEQ ID NO: 142424 - RNA, 19 nt, Artificial Sequence
  Description of Artificial Sequence: Synthetic oligonucleotide
  Sense strand starting at position 3078 of SEQ ID NO: 1827
cucccaucagaauguuuga

SEQ ID NO: 142425 - RNA, 19 nt, Artificial Sequence
  Description of Artificial Sequence: Synthetic oligonucleotide
  Antisense strand to SEQ ID NO: 142424
ucaaacauucugaugggag

SEQ ID NO: 142426 - RNA, 19 nt, Artificial Sequence
  Description of Artificial Sequence: Synthetic oligonucleotide
  Sense strand starting at position 3127 of SEQ ID NO: 1827
ugggaaucaucauugcuuc

SEQ ID NO: 142427 - RNA, 19 nt, Artificial Sequence
  Description of Artificial Sequence: Synthetic oligonucleotide
  Antisense strand to SEQ ID NO: 142426
gaagcaaugaugauuccca

SEQ ID NO: 142428 - RNA, 19 nt, Artificial Sequence
  Description of Artificial Sequence: Synthetic oligonucleotide
  Sense strand starting at position 3196 of SEQ ID NO: 1827
aguccugguccagauguaa

SEQ ID NO: 142429 - RNA, 19 nt, Artificial Sequence
  Description of Artificial Sequence: Synthetic oligonucleotide
  Antisense strand to SEQ ID NO: 142428
uuacaucuggaccaggacu

SEQ ID NO: 142430 - RNA, 19 nt, Artificial Sequence
  Description of Artificial Sequence: Synthetic oligonucleotide
  Sense strand starting at position 3243 of SEQ ID NO: 1827
uuagauagaucuccugugu

SEQ ID NO: 142431 - RNA, 19 nt, Artificial Sequence
  Description of Artificial Sequence: Synthetic oligonucleotide
  Antisense strand to SEQ ID NO: 142430
acacaggagaucuaucuaa

SEQ ID NO: 142432 - RNA, 19 nt, Artificial Sequence
  Description of Artificial Sequence: Synthetic oligonucleotide
  Sense strand starting at position 3805 of SEQ ID NO: 1827
cgguguauacuauacccaa

SEQ ID NO: 142433 - RNA, 19 nt, Artificial Sequence
  Description of Artificial Sequence: Synthetic oligonucleotide
  Antisense strand to SEQ ID NO: 142432
uuggguauaguauacaccg

SEQ ID NO: 142434 - RNA, 19 nt, Artificial Sequence
  Description of Artificial Sequence: Synthetic oligonucleotide
  Sense strand starting at position 13 of SEQ ID NO: 1828
gugggaaugcugaguuguu

SEQ ID NO: 142435 - RNA, 19 nt, Artificial Sequence
  Description of Artificial Sequence: Synthetic oligonucleotide
  Antisense strand to SEQ ID NO: 142434
aacaacucagcauucccac

SEQ ID NO: 142436 - RNA, 19 nt, Artificial Sequence
  Description of Artificial Sequence: Synthetic oligonucleotide
  Sense strand starting at position 603 of SEQ ID NO: 1828
cuaauugugggcuaccuaa

SEQ ID NO: 142437 - RNA, 19 nt, Artificial Sequence
  Description of Artificial Sequence: Synthetic oligonucleotide
  Antisense strand to SEQ ID NO: 142436
uuagguagcccacaauuag

SEQ ID NO: 142438 - RNA, 19 nt, Artificial Sequence
  Description of Artificial Sequence: Synthetic oligonucleotide
  Sense strand starting at position 954 of SEQ ID NO: 1828
guaagaaucuauccuguag

SEQ ID NO: 142439 - RNA, 19 nt, Artificial Sequence
  Description of Artificial Sequence: Synthetic oligonucleotide
  Antisense strand to SEQ ID NO: 142438
cuacaggauagauucuuac

SEQ ID NO: 142440 - RNA, 19 nt, Artificial Sequence
  Description of Artificial Sequence: Synthetic oligonucleotide
  Sense strand starting at position 1132 of SEQ ID NO: 1828
gaccuaguuuguucugcua

SEQ ID NO: 142441 - RNA, 19 nt, Artificial Sequence
  Description of Artificial Sequence: Synthetic oligonucleotide
  Antisense strand to SEQ ID NO: 142440
uagcagaacaaacuagguc

SEQ ID NO: 142442 - RNA, 19 nt, Artificial Sequence
  Description of Artificial Sequence: Synthetic oligonucleotide
  Sense strand starting at position 1141 of SEQ ID NO: 1828
uguucugcuagugaagcaa

SEQ ID NO: 142443 - RNA, 19 nt, Artificial Sequence
  Description of Artificial Sequence: Synthetic oligonucleotide
  Antisense strand to SEQ ID NO: 142442
uugcuucacuagcagaaca

SEQ ID NO: 142444 - RNA, 19 nt, Artificial Sequence
  Description of Artificial Sequence: Synthetic oligonucleotide
  Sense strand starting at position 1317 of SEQ ID NO: 1828
acgaucuuggcucagcaau

SEQ ID NO: 142445 - RNA, 19 nt, Artificial Sequence
  Description of Artificial Sequence: Synthetic oligonucleotide
  Antisense strand to SEQ ID NO: 142444
auugcugagccaagaucgu

SEQ ID NO: 142446 - RNA, 19 nt, Artificial Sequence
  Description of Artificial Sequence: Synthetic oligonucleotide
  Sense strand starting at position 1614 of SEQ ID NO: 1828
uucugaguucucuacagug

SEQ ID NO: 142447 - RNA, 19 nt, Artificial Sequence
  Description of Artificial Sequence: Synthetic oligonucleotide
  Antisense strand to SEQ ID NO: 142446
cacuguagagaacucagaa

SEQ ID NO: 142448 - RNA, 19 nt, Artificial Sequence
  Description of Artificial Sequence: Synthetic oligonucleotide
  Sense strand starting at position 1622 of SEQ ID NO: 1828
ucucuacagugcuuaguua

SEQ ID NO: 142449 - RNA, 19 nt, Artificial Sequence
  Description of Artificial Sequence: Synthetic oligonucleotide
  Antisense strand to SEQ ID NO: 142448
uaacuaagcacuguagaga

SEQ ID NO: 142450 - RNA, 19 nt, Artificial Sequence
  Description of Artificial Sequence: Synthetic oligonucleotide
  Sense strand starting at position 1692 of SEQ ID NO: 1828
uagugucauuuauugggca

SEQ ID NO: 142451 - RNA, 19 nt, Artificial Sequence
  Description of Artificial Sequence: Synthetic oligonucleotide
  Antisense strand to SEQ ID NO: 142450
ugcccaauaaaugacacua

SEQ ID NO: 142452 - RNA, 19 nt, Artificial Sequence
  Description of Artificial Sequence: Synthetic oligonucleotide
  Sense strand starting at position 1694 of SEQ ID NO: 1828
gugucauuuauugggcaag

SEQ ID NO: 142453 - RNA, 19 nt, Artificial Sequence
  Description of Artificial Sequence: Synthetic oligonucleotide
  Antisense strand to SEQ ID NO: 142452
cuugcccaauaaaugacac

SEQ ID NO: 142454 - RNA, 19 nt, Artificial Sequence
  Description of Artificial Sequence: Synthetic oligonucleotide
  Sense strand starting at position 1696 of SEQ ID NO: 1828
gucauuuauugggcaaguc

SEQ ID NO: 142455 - RNA, 19 nt, Artificial Sequence
  Description of Artificial Sequence: Synthetic oligonucleotide
  Antisense strand to SEQ ID NO: 142454
gacuugcccaauaaaugac

SEQ ID NO: 142456 - RNA, 19 nt, Artificial Sequence
  Description of Artificial Sequence: Synthetic oligonucleotide
  Sense strand starting at position 1756 of SEQ ID NO: 1828
gaucguaaggacugaauga

SEQ ID NO: 142457 - RNA, 19 nt, Artificial Sequence
  Description of Artificial Sequence: Synthetic oligonucleotide
  Antisense strand to SEQ ID NO: 142456
ucauucaguccuuacgauc

SEQ ID NO: 142458 - RNA, 19 nt, Artificial Sequence
  Description of Artificial Sequence: Synthetic oligonucleotide
  Sense strand starting at position 1832 of SEQ ID NO: 1828
cccuucucugccugaguua

SEQ ID NO: 142459 - RNA, 19 nt, Artificial Sequence
  Description of Artificial Sequence: Synthetic oligonucleotide
  Antisense strand to SEQ ID NO: 142458
uaacucaggcagagaaggg

SEQ ID NO: 142460 - RNA, 19 nt, Artificial Sequence
  Description of Artificial Sequence: Synthetic oligonucleotide
  Sense strand starting at position 1839 of SEQ ID NO: 1828
cugccugaguuaccaauua

SEQ ID NO: 142461 - RNA, 19 nt, Artificial Sequence
  Description of Artificial Sequence: Synthetic oligonucleotide
  Antisense strand to SEQ ID NO: 142460
uaauugguaacucaggcag

SEQ ID NO: 142462 - RNA, 19 nt, Artificial Sequence
  Description of Artificial Sequence: Synthetic oligonucleotide
  Sense strand starting at position 1851 of SEQ ID NO: 1828
ccaauuaccguuuaaaggu

SEQ ID NO: 142463 - RNA, 19 nt, Artificial Sequence
  Description of Artificial Sequence: Synthetic oligonucleotide
  Antisense strand to SEQ ID NO: 142462
accuuuaaacgguaauugg

SEQ ID NO: 142464 - RNA, 19 nt, Artificial Sequence
  Description of Artificial Sequence: Synthetic oligonucleotide
  Sense strand starting at position 2056 of SEQ ID NO: 1828
ucugcucugcccugauuua

SEQ ID NO: 142465 - RNA, 19 nt, Artificial Sequence
  Description of Artificial Sequence: Synthetic oligonucleotide
  Antisense strand to SEQ ID NO: 142464
uaaaucagggcagagcaga

SEQ ID NO: 142466 - RNA, 19 nt, Artificial Sequence
  Description of Artificial Sequence: Synthetic oligonucleotide
  Sense strand starting at position 2057 of SEQ ID NO: 1828
cugcucugcccugauuuau

SEQ ID NO: 142467 - RNA, 19 nt, Artificial Sequence
  Description of Artificial Sequence: Synthetic oligonucleotide
  Antisense strand to SEQ ID NO: 142466
auaaaucagggcagagcag

SEQ ID NO: 142468 - RNA, 19 nt, Artificial Sequence
  Description of Artificial Sequence: Synthetic oligonucleotide
  Sense strand starting at position 2093 of SEQ ID NO: 1828
cagggcagucagcaauaaa

SEQ ID NO: 142469 - RNA, 19 nt, Artificial Sequence
  Description of Artificial Sequence: Synthetic oligonucleotide
  Antisense strand to SEQ ID NO: 142468
uuuauugcugacugcccug

SEQ ID NO: 142470 - RNA, 19 nt, Artificial Sequence
  Description of Artificial Sequence: Synthetic oligonucleotide
  Sense strand starting at position 2096 of SEQ ID NO: 1828
ggcagucagcaauaaaucu

SEQ ID NO: 142471 - RNA, 19 nt, Artificial Sequence
  Description of Artificial Sequence: Synthetic oligonucleotide
  Antisense strand to SEQ ID NO: 142470
agauuuauugcugacugcc

SEQ ID NO: 142472 - RNA, 19 nt, Artificial Sequence
  Description of Artificial Sequence: Synthetic oligonucleotide
  Sense strand starting at position 2106 of SEQ ID NO: 1828
aauaaaucucacugcggga

SEQ ID NO: 142473 - RNA, 19 nt, Artificial Sequence
  Description of Artificial Sequence: Synthetic oligonucleotide
  Antisense strand to SEQ ID NO: 142472
ucccgcagugagauuuauu

SEQ ID NO: 142474 - RNA, 19 nt, Artificial Sequence
  Description of Artificial Sequence: Synthetic oligonucleotide
  Sense strand starting at position 2200 of SEQ ID NO: 1828
aagcaaucuuguguccagu

SEQ ID NO: 142475 - RNA, 19 nt, Artificial Sequence
  Description of Artificial Sequence: Synthetic oligonucleotide
  Antisense strand to SEQ ID NO: 142474
acuggacacaagauugcuu

SEQ ID NO: 142476 - RNA, 19 nt, Artificial Sequence
  Description of Artificial Sequence: Synthetic oligonucleotide
  Sense strand starting at position 2202 of SEQ ID NO: 1828
gcaaucuuguguccaguga

SEQ ID NO: 142477 - RNA, 19 nt, Artificial Sequence
  Description of Artificial Sequence: Synthetic oligonucleotide
  Antisense strand to SEQ ID NO: 142476
ucacuggacacaagauugc

SEQ ID NO: 142478 - RNA, 19 nt, Artificial Sequence
  Description of Artificial Sequence: Synthetic oligonucleotide
  Sense strand starting at position 2473 of SEQ ID NO: 1828
acugguuucuuggcaggaa

SEQ ID NO: 142479 - RNA, 19 nt, Artificial Sequence
  Description of Artificial Sequence: Synthetic oligonucleotide
  Antisense strand to SEQ ID NO: 142478
uuccugccaagaaaccagu

SEQ ID NO: 142480 - RNA, 19 nt, Artificial Sequence
  Description of Artificial Sequence: Synthetic oligonucleotide
  Sense strand starting at position 2493 of SEQ ID NO: 1828
agcaacagcugguuuaauu

SEQ ID NO: 142481 - RNA, 19 nt, Artificial Sequence
  Description of Artificial Sequence: Synthetic oligonucleotide
  Antisense strand to SEQ ID NO: 142480
aauuaaaccagcuguugcu

SEQ ID NO: 142482 - RNA, 19 nt, Artificial Sequence
  Description of Artificial Sequence: Synthetic oligonucleotide
  Sense strand starting at position 2869 of SEQ ID NO: 1828
gguauuauccuuuaggcua

SEQ ID NO: 142483 - RNA, 19 nt, Artificial Sequence
  Description of Artificial Sequence: Synthetic oligonucleotide
  Antisense strand to SEQ ID NO: 142482
uagccuaaaggauaauacc

SEQ ID NO: 142484 - RNA, 19 nt, Artificial Sequence
  Description of Artificial Sequence: Synthetic oligonucleotide
  Sense strand starting at position 2895 of SEQ ID NO: 1828
cugcuuagcucuguacaua

SEQ ID NO: 142485 - RNA, 19 nt, Artificial Sequence
  Description of Artificial Sequence: Synthetic oligonucleotide
  Antisense strand to SEQ ID NO: 142484
uauguacagagcuaagcag

SEQ ID NO: 142486 - RNA, 19 nt, Artificial Sequence
  Description of Artificial Sequence: Synthetic oligonucleotide
  Sense strand starting at position 3036 of SEQ ID NO: 1828
aaagauguauaggaacauu

SEQ ID NO: 142487 - RNA, 19 nt, Artificial Sequence
  Description of Artificial Sequence: Synthetic oligonucleotide
  Antisense strand to SEQ ID NO: 142486
aauguuccuauacaucuuu

SEQ ID NO: 142488 - RNA, 19 nt, Artificial Sequence
  Description of Artificial Sequence: Synthetic oligonucleotide
  Sense strand starting at position 3113 of SEQ ID NO: 1828
ggugucuguggucaucagu

SEQ ID NO: 142489 - RNA, 19 nt, Artificial Sequence
  Description of Artificial Sequence: Synthetic oligonucleotide
  Antisense strand to SEQ ID NO: 142488
acugaugaccacagacacc

SEQ ID NO: 142490 - RNA, 19 nt, Artificial Sequence
  Description of Artificial Sequence: Synthetic oligonucleotide
  Sense strand starting at position 3205 of SEQ ID NO: 1828
ucagaugguucuuuaugau

SEQ ID NO: 142491 - RNA, 19 nt, Artificial Sequence
  Description of Artificial Sequence: Synthetic oligonucleotide
  Antisense strand to SEQ ID NO: 142490
aucauaaagaaccaucuga

SEQ ID NO: 142492 - RNA, 19 nt, Artificial Sequence
  Description of Artificial Sequence: Synthetic oligonucleotide
  Sense strand starting at position 3250 of SEQ ID NO: 1828
ugguucucugaauaaggua

SEQ ID NO: 142493 - RNA, 19 nt, Artificial Sequence
  Description of Artificial Sequence: Synthetic oligonucleotide
  Antisense strand to SEQ ID NO: 142492
uaccuuauucagagaacca

SEQ ID NO: 142494 - RNA, 19 nt, Artificial Sequence
  Description of Artificial Sequence: Synthetic oligonucleotide
  Sense strand starting at position 3309 of SEQ ID NO: 1828
uguuguguggcaagugaua

SEQ ID NO: 142495 - RNA, 19 nt, Artificial Sequence
  Description of Artificial Sequence: Synthetic oligonucleotide
  Antisense strand to SEQ ID NO: 142494
uaucacuugccacacaaca

SEQ ID NO: 142496 - RNA, 19 nt, Artificial Sequence
  Description of Artificial Sequence: Synthetic oligonucleotide
  Sense strand starting at position 3345 of SEQ ID NO: 1828
acucauagccuugaacagu

SEQ ID NO: 142497 - RNA, 19 nt, Artificial Sequence
  Description of Artificial Sequence: Synthetic oligonucleotide
  Antisense strand to SEQ ID NO: 142496
acuguucaaggcuaugagu

SEQ ID NO: 142498 - RNA, 19 nt, Artificial Sequence
  Description of Artificial Sequence: Synthetic oligonucleotide
  Sense strand starting at position 3359 of SEQ ID NO: 1828
acagucuuucugugucuga

SEQ ID NO: 142499 - RNA, 19 nt, Artificial Sequence
  Description of Artificial Sequence: Synthetic oligonucleotide
  Antisense strand to SEQ ID NO: 142498
ucagacacagaaagacugu

SEQ ID NO: 142500 - RNA, 19 nt, Artificial Sequence
  Description of Artificial Sequence: Synthetic oligonucleotide
  Sense strand starting at position 3360 of SEQ ID NO: 1828
cagucuuucugugucugau

SEQ ID NO: 142501 - RNA, 19 nt, Artificial Sequence
  Description of Artificial Sequence: Synthetic oligonucleotide
  Antisense strand to SEQ ID NO: 142500
aucagacacagaaagacug

SEQ ID NO: 142502 - RNA, 19 nt, Artificial Sequence
  Description of Artificial Sequence: Synthetic oligonucleotide
  Sense strand starting at position 3362 of SEQ ID NO: 1828
gucuuucugugucugauua

SEQ ID NO: 142503 - RNA, 19 nt, Artificial Sequence
  Description of Artificial Sequence: Synthetic oligonucleotide
  Antisense strand to SEQ ID NO: 142502
uaaucagacacagaaagac

SEQ ID NO: 142504 - RNA, 19 nt, Artificial Sequence
  Description of Artificial Sequence: Synthetic oligonucleotide
  Sense strand starting at position 3366 of SEQ ID NO: 1828
uucugugucugauuacauu

SEQ ID NO: 142505 - RNA, 19 nt, Artificial Sequence
  Description of Artificial Sequence: Synthetic oligonucleotide
  Antisense strand to SEQ ID NO: 142504
aauguaaucagacacagaa

SEQ ID NO: 142506 - RNA, 19 nt, Artificial Sequence
  Description of Artificial Sequence: Synthetic oligonucleotide
  Sense strand starting at position 3400 of SEQ ID NO: 1828
ucagguuugacuuacaggu

SEQ ID NO: 142507 - RNA, 19 nt, Artificial Sequence
  Description of Artificial Sequence: Synthetic oligonucleotide
  Antisense strand to SEQ ID NO: 142506
accuguaagucaaaccuga

SEQ ID NO: 142508 - RNA, 19 nt, Artificial Sequence
  Description of Artificial Sequence: Synthetic oligonucleotide
  Sense strand starting at position 3480 of SEQ ID NO: 1828
uuugguagcuggccuaaga

SEQ ID NO: 142509 - RNA, 19 nt, Artificial Sequence
  Description of Artificial Sequence: Synthetic oligonucleotide
  Antisense strand to SEQ ID NO: 142508
ucuuaggccagcuaccaaa

SEQ ID NO: 142510 - RNA, 19 nt, Artificial Sequence
  Description of Artificial Sequence: Synthetic oligonucleotide
  Sense strand starting at position 3884 of SEQ ID NO: 1828
uagaaagguuaagucuuua

SEQ ID NO: 142511 - RNA, 19 nt, Artificial Sequence
  Description of Artificial Sequence: Synthetic oligonucleotide
  Antisense strand to SEQ ID NO: 142510
uaaagacuuaaccuuucua

SEQ ID NO: 142512 - RNA, 19 nt, Artificial Sequence
  Description of Artificial Sequence: Synthetic oligonucleotide
  Sense strand starting at position 3889 of SEQ ID NO: 1828
agguuaagucuuuauauuc

SEQ ID NO: 142513 - RNA, 19 nt, Artificial Sequence
  Description of Artificial Sequence: Synthetic oligonucleotide
  Antisense strand to SEQ ID NO: 142512
gaauauaaagacuuaaccu

SEQ ID NO: 142514 - RNA, 19 nt, Artificial Sequence
  Description of Artificial Sequence: Synthetic oligonucleotide
  Sense strand starting at position 3947 of SEQ ID NO: 1829
uguagcuuucgagcccauu

SEQ ID NO: 142515 - RNA, 19 nt, Artificial Sequence
  Description of Artificial Sequence: Synthetic oligonucleotide
  Antisense strand to SEQ ID NO: 142514
aaugggcucgaaagcuaca

SEQ ID NO: 142516 - RNA, 19 nt, Artificial Sequence
  Description of Artificial Sequence: Synthetic oligonucleotide
  Sense strand starting at position 3937 of SEQ ID NO: 1829
uggcauuuccuguagcuuu

SEQ ID NO: 142517 - RNA, 19 nt, Artificial Sequence
  Description of Artificial Sequence: Synthetic oligonucleotide
  Antisense strand to SEQ ID NO: 142516
aaagcuacaggaaaugcca

SEQ ID NO: 142518 - RNA, 19 nt, Artificial Sequence
  Description of Artificial Sequence: Synthetic oligonucleotide
  Sense strand starting at position 3808 of SEQ ID NO: 1829
cuucuuucgauaugaagga

SEQ ID NO: 142519 - RNA, 19 nt, Artificial Sequence
  Description of Artificial Sequence: Synthetic oligonucleotide
  Antisense strand to SEQ ID NO: 142518
uccuucauaucgaaagaag

SEQ ID NO: 142520 - RNA, 19 nt, Artificial Sequence
  Description of Artificial Sequence: Synthetic oligonucleotide
  Sense strand starting at position 3806 of SEQ ID NO: 1829
uccuucuuucgauaugaag

SEQ ID NO: 142521 - RNA, 19 nt, Artificial Sequence
  Description of Artificial Sequence: Synthetic oligonucleotide
  Antisense strand to SEQ ID NO: 142520
cuucauaucgaaagaagga

SEQ ID NO: 142522 - RNA, 19 nt, Artificial Sequence
  Description of Artificial Sequence: Synthetic oligonucleotide
  Sense strand starting at position 3788 of SEQ ID NO: 1829
gucuacguauacccaaauu

SEQ ID NO: 142523 - RNA, 19 nt, Artificial Sequence
  Description of Artificial Sequence: Synthetic oligonucleotide
  Antisense strand to SEQ ID NO: 142522
aauuuggguauacguagac

SEQ ID NO: 142524 - RNA, 19 nt, Artificial Sequence
  Description of Artificial Sequence: Synthetic oligonucleotide
  Sense strand starting at position 3785 of SEQ ID NO: 1829
ggugucuacguauacccaa

SEQ ID NO: 142525 - RNA, 19 nt, Artificial Sequence
  Description of Artificial Sequence: Synthetic oligonucleotide
  Antisense strand to SEQ ID NO: 142524
uuggguauacguagacacc

SEQ ID NO: 142526 - RNA, 19 nt, Artificial Sequence
  Description of Artificial Sequence: Synthetic oligonucleotide
  Sense strand starting at position 3779 of SEQ ID NO: 1829
gguuauggugucuacguau

SEQ ID NO: 142527 - RNA, 19 nt, Artificial Sequence
  Description of Artificial Sequence: Synthetic oligonucleotide
  Antisense strand to SEQ ID NO: 142526
auacguagacaccauaacc

SEQ ID NO: 142528 - RNA, 19 nt, Artificial Sequence
  Description of Artificial Sequence: Synthetic oligonucleotide
  Sense strand starting at position 3778 of SEQ ID NO: 1829
agguuauggugucuacgua

SEQ ID NO: 142529 - RNA, 19 nt, Artificial Sequence
  Description of Artificial Sequence: Synthetic oligonucleotide
  Antisense strand to SEQ ID NO: 142528
uacguagacaccauaaccu

SEQ ID NO: 142530 - RNA, 19 nt, Artificial Sequence
  Description of Artificial Sequence: Synthetic oligonucleotide
  Sense strand starting at position 3761 of SEQ ID NO: 1829
gugucuucucaauacucag

SEQ ID NO: 142531 - RNA, 19 nt, Artificial Sequence
  Description of Artificial Sequence: Synthetic oligonucleotide
  Antisense strand to SEQ ID NO: 142530
cugaguauugagaagacac

SEQ ID NO: 142532 - RNA, 19 nt, Artificial Sequence
  Description of Artificial Sequence: Synthetic oligonucleotide
  Sense strand starting at position 3563 of SEQ ID NO: 1829
gguccucauccuugucaca

SEQ ID NO: 142533 - RNA, 19 nt, Artificial Sequence
  Description of Artificial Sequence: Synthetic oligonucleotide
  Antisense strand to SEQ ID NO: 142532
ugugacaaggaugaggacc

SEQ ID NO: 142534 - RNA, 19 nt, Artificial Sequence
  Description of Artificial Sequence: Synthetic oligonucleotide
  Sense strand starting at position 3301 of SEQ ID NO: 1829
gccauccuuggguaugagu

SEQ ID NO: 142535 - RNA, 19 nt, Artificial Sequence
  Description of Artificial Sequence: Synthetic oligonucleotide
  Antisense strand to SEQ ID NO: 142534
acucauacccaaggauggc

SEQ ID NO: 142536 - RNA, 19 nt, Artificial Sequence
  Description of Artificial Sequence: Synthetic oligonucleotide
  Sense strand starting at position 3131 of SEQ ID NO: 1829
gauacaguagccuguagua

SEQ ID NO: 142537 - RNA, 19 nt, Artificial Sequence
  Description of Artificial Sequence: Synthetic oligonucleotide
  Antisense strand to SEQ ID NO: 142536
uacuacaggcuacuguauc

SEQ ID NO: 142538 - RNA, 19 nt, Artificial Sequence
  Description of Artificial Sequence: Synthetic oligonucleotide
  Sense strand starting at position 3114 of SEQ ID NO: 1829
gacccugauuugggacaga

SEQ ID NO: 142539 - RNA, 19 nt, Artificial Sequence
  Description of Artificial Sequence: Synthetic oligonucleotide
  Antisense strand to SEQ ID NO: 142538
ucugucccaaaucaggguc

SEQ ID NO: 142540 - RNA, 19 nt, Artificial Sequence
  Description of Artificial Sequence: Synthetic oligonucleotide
  Sense strand starting at position 3037 of SEQ ID NO: 1829
uaggaacuguuucuagaau

SEQ ID NO: 142541 - RNA, 19 nt, Artificial Sequence
  Description of Artificial Sequence: Synthetic oligonucleotide
  Antisense strand to SEQ ID NO: 142540
auucuagaaacaguuccua

SEQ ID NO: 142542 - RNA, 19 nt, Artificial Sequence
  Description of Artificial Sequence: Synthetic oligonucleotide
  Sense strand starting at position 2209 of SEQ ID NO: 1829
guugcuggucgcuaagaga

SEQ ID NO: 142543 - RNA, 19 nt, Artificial Sequence
  Description of Artificial Sequence: Synthetic oligonucleotide
  Antisense strand to SEQ ID NO: 142542
ucucuuagcgaccagcaac

SEQ ID NO: 142544 - RNA, 19 nt, Artificial Sequence
  Description of Artificial Sequence: Synthetic oligonucleotide
  Sense strand starting at position 2123 of SEQ ID NO: 1829
cuagcuucgcuccagagau

SEQ ID NO: 142545 - RNA, 19 nt, Artificial Sequence
  Description of Artificial Sequence: Synthetic oligonucleotide
  Antisense strand to SEQ ID NO: 142544
aucucuggagcgaagcuag

SEQ ID NO: 142546 - RNA, 19 nt, Artificial Sequence
  Description of Artificial Sequence: Synthetic oligonucleotide
  Sense strand starting at position 1422 of SEQ ID NO: 1829
ggcacauuacucuggaaua

SEQ ID NO: 142547 - RNA, 19 nt, Artificial Sequence
  Description of Artificial Sequence: Synthetic oligonucleotide
  Antisense strand to SEQ ID NO: 142546
uauuccagaguaaugugcc

SEQ ID NO: 142548 - RNA, 19 nt, Artificial Sequence
  Description of Artificial Sequence: Synthetic oligonucleotide
  Sense strand starting at position 1319 of SEQ ID NO: 1829
cgauguaacuaguuucccu

SEQ ID NO: 142549 - RNA, 19 nt, Artificial Sequence
  Description of Artificial Sequence: Synthetic oligonucleotide
  Antisense strand to SEQ ID NO: 142548
agggaaacuaguuacaucg

SEQ ID NO: 142550 - RNA, 19 nt, Artificial Sequence
  Description of Artificial Sequence: Synthetic oligonucleotide
  Sense strand starting at position 1264 of SEQ ID NO: 1829
uaagucagccuggagaauu

SEQ ID NO: 142551 - RNA, 19 nt, Artificial Sequence
  Description of Artificial Sequence: Synthetic oligonucleotide
  Antisense strand to SEQ ID NO: 142550
aauucuccaggcugacuua

SEQ ID NO: 142552 - RNA, 19 nt, Artificial Sequence
  Description of Artificial Sequence: Synthetic oligonucleotide
  Sense strand starting at position 1263 of SEQ ID NO: 1829
cuaagucagccuggagaau

SEQ ID NO: 142553 - RNA, 19 nt, Artificial Sequence
  Description of Artificial Sequence: Synthetic oligonucleotide
  Antisense strand to SEQ ID NO: 142552
auucuccaggcugacuuag

SEQ ID NO: 142554 - RNA, 19 nt, Artificial Sequence
  Description of Artificial Sequence: Synthetic oligonucleotide
  Sense strand starting at position 1227 of SEQ ID NO: 1829
gaacgauaccuuuaucagu

SEQ ID NO: 142555 - RNA, 19 nt, Artificial Sequence
  Description of Artificial Sequence: Synthetic oligonucleotide
  Antisense strand to SEQ ID NO: 142554
acugauaaagguaucguuc

SEQ ID NO: 142556 - RNA, 19 nt, Artificial Sequence
  Description of Artificial Sequence: Synthetic oligonucleotide
  Sense strand starting at position 1194 of SEQ ID NO: 1829
cccucugugcugugagaca

SEQ ID NO: 142557 - RNA, 19 nt, Artificial Sequence
  Description of Artificial Sequence: Synthetic oligonucleotide
  Antisense strand to SEQ ID NO: 142556
ugucucacagcacagaggg

SEQ ID NO: 142558 - RNA, 19 nt, Artificial Sequence
  Description of Artificial Sequence: Synthetic oligonucleotide
  Sense strand starting at position 1174 of SEQ ID NO: 1829
gguacuuaggcugaaagca

SEQ ID NO: 142559 - RNA, 19 nt, Artificial Sequence
  Description of Artificial Sequence: Synthetic oligonucleotide
  Antisense strand to SEQ ID NO: 142558
ugcuuucagccuaaguacc

SEQ ID NO: 142560 - RNA, 19 nt, Artificial Sequence
  Description of Artificial Sequence: Synthetic oligonucleotide
  Sense strand starting at position 1171 of SEQ ID NO: 1829
gaagguacuuaggcugaaa

SEQ ID NO: 142561 - RNA, 19 nt, Artificial Sequence
  Description of Artificial Sequence: Synthetic oligonucleotide
  Antisense strand to SEQ ID NO: 142560
uuucagccuaaguaccuuc

SEQ ID NO: 142562 - RNA, 19 nt, Artificial Sequence
  Description of Artificial Sequence: Synthetic oligonucleotide
  Sense strand starting at position 1070 of SEQ ID NO: 1829
ugcaucuuccugggaaaug

SEQ ID NO: 142563 - RNA, 19 nt, Artificial Sequence
  Description of Artificial Sequence: Synthetic oligonucleotide
  Antisense strand to SEQ ID NO: 142562
cauuucccaggaagaugca

SEQ ID NO: 142564 - RNA, 19 nt, Artificial Sequence
  Description of Artificial Sequence: Synthetic oligonucleotide
  Sense strand starting at position 1020 of SEQ ID NO: 1829
augugagagucugaauuac

SEQ ID NO: 142565 - RNA, 19 nt, Artificial Sequence
  Description of Artificial Sequence: Synthetic oligonucleotide
  Antisense strand to SEQ ID NO: 142564
guaauucagacucucacau

SEQ ID NO: 142566 - RNA, 19 nt, Artificial Sequence
  Description of Artificial Sequence: Synthetic oligonucleotide
  Sense strand starting at position 790 of SEQ ID NO: 1829
ccaauuccuccgggacuaa

SEQ ID NO: 142567 - RNA, 19 nt, Artificial Sequence
  Description of Artificial Sequence: Synthetic oligonucleotide
  Antisense strand to SEQ ID NO: 142566
uuagucccggaggaauugg

SEQ ID NO: 142568 - RNA, 19 nt, Artificial Sequence
  Description of Artificial Sequence: Synthetic oligonucleotide
  Sense strand starting at position 638 of SEQ ID NO: 1829
guguaagacucucuaugug

SEQ ID NO: 142569 - RNA, 19 nt, Artificial Sequence
  Description of Artificial Sequence: Synthetic oligonucleotide
  Antisense strand to SEQ ID NO: 142568
cacauagagagucuuacac

SEQ ID NO: 142570 - RNA, 19 nt, Artificial Sequence
  Description of Artificial Sequence: Synthetic oligonucleotide
  Sense strand starting at position 561 of SEQ ID NO: 1829
cuuuaugccuggucacaaa

SEQ ID NO: 142571 - RNA, 19 nt, Artificial Sequence
  Description of Artificial Sequence: Synthetic oligonucleotide
  Antisense strand to SEQ ID NO: 142570
uuugugaccaggcauaaag

SEQ ID NO: 142572 - RNA, 19 nt, Artificial Sequence
  Description of Artificial Sequence: Synthetic oligonucleotide
  Sense strand starting at position 559 of SEQ ID NO: 1829
ugcuuuaugccuggucaca

SEQ ID NO: 142573 - RNA, 19 nt, Artificial Sequence
  Description of Artificial Sequence: Synthetic oligonucleotide
  Antisense strand to SEQ ID NO: 142572
ugugaccaggcauaaagca

SEQ ID NO: 142574 - RNA, 19 nt, Artificial Sequence
  Description of Artificial Sequence: Synthetic oligonucleotide
  Sense strand starting at position 547 of SEQ ID NO: 1829
guugaaggugacugcuuua

SEQ ID NO: 142575 - RNA, 19 nt, Artificial Sequence
  Description of Artificial Sequence: Synthetic oligonucleotide
  Antisense strand to SEQ ID NO: 142574
uaaagcagucaccuucaac

SEQ ID NO: 142576 - RNA, 19 nt, Artificial Sequence
  Description of Artificial Sequence: Synthetic oligonucleotide
  Sense strand starting at position 509 of SEQ ID NO: 1829
ggaaguccauuacauagua

SEQ ID NO: 142577 - RNA, 19 nt, Artificial Sequence
  Description of Artificial Sequence: Synthetic oligonucleotide
  Antisense strand to SEQ ID NO: 142576
uacuauguaauggacuucc

SEQ ID NO: 142578 - RNA, 19 nt, Artificial Sequence
  Description of Artificial Sequence: Synthetic oligonucleotide
  Sense strand starting at position 442 of SEQ ID NO: 1829
uuucuccugcuagaaugaa

SEQ ID NO: 142579 - RNA, 19 nt, Artificial Sequence
  Description of Artificial Sequence: Synthetic oligonucleotide
  Antisense strand to SEQ ID NO: 142578
uucauucuagcaggagaaa

SEQ ID NO: 142580 - RNA, 19 nt, Artificial Sequence
  Description of Artificial Sequence: Synthetic oligonucleotide
  Sense strand starting at position 417 of SEQ ID NO: 1829
auaccuuucugguuuacuu

SEQ ID NO: 142581 - RNA, 19 nt, Artificial Sequence
  Description of Artificial Sequence: Synthetic oligonucleotide
  Antisense strand to SEQ ID NO: 142580
aaguaaaccagaaagguau

SEQ ID NO: 142582 - RNA, 19 nt, Artificial Sequence
  Description of Artificial Sequence: Synthetic oligonucleotide
  Sense strand starting at position 413 of SEQ ID NO: 1829
ccugauaccuuucugguuu

SEQ ID NO: 142583 - RNA, 19 nt, Artificial Sequence
  Description of Artificial Sequence: Synthetic oligonucleotide
  Antisense strand to SEQ ID NO: 142582
aaaccagaaagguaucagg

SEQ ID NO: 142584 - RNA, 19 nt, Artificial Sequence
  Description of Artificial Sequence: Synthetic oligonucleotide
  Sense strand starting at position 401 of SEQ ID NO: 1829
guacaacuguuuccugaua

SEQ ID NO: 142585 - RNA, 19 nt, Artificial Sequence
  Description of Artificial Sequence: Synthetic oligonucleotide
  Antisense strand to SEQ ID NO: 142584
uaucaggaaacaguuguac

SEQ ID NO: 142586 - RNA, 19 nt, Artificial Sequence
  Description of Artificial Sequence: Synthetic oligonucleotide
  Sense strand starting at position 399 of SEQ ID NO: 1829
guguacaacuguuuccuga

SEQ ID NO: 142587 - RNA, 19 nt, Artificial Sequence
  Description of Artificial Sequence: Synthetic oligonucleotide
  Antisense strand to SEQ ID NO: 142586
ucaggaaacaguuguacac

SEQ ID NO: 142588 - RNA, 19 nt, Artificial Sequence
  Description of Artificial Sequence: Synthetic oligonucleotide
  Sense strand starting at position 177 of SEQ ID NO: 1829
caaggcucucgugaggaau

SEQ ID NO: 142589 - RNA, 19 nt, Artificial Sequence
  Description of Artificial Sequence: Synthetic oligonucleotide
  Antisense strand to SEQ ID NO: 142588
auuccucacgagagccuug

SEQ ID NO: 142590 - RNA, 19 nt, Artificial Sequence
  Description of Artificial Sequence: Synthetic oligonucleotide
  Sense strand starting at position 127 of SEQ ID NO: 1829
cagguuccagucugugaaa

SEQ ID NO: 142591 - RNA, 19 nt, Artificial Sequence
  Description of Artificial Sequence: Synthetic oligonucleotide
  Antisense strand to SEQ ID NO: 142590
uuucacagacuggaaccug

SEQ ID NO: 142592 - RNA, 19 nt, Artificial Sequence
  Description of Artificial Sequence: Synthetic oligonucleotide
  Sense strand starting at position 27 of SEQ ID NO: 1829
ggagcaagaacgugaacuu

SEQ ID NO: 142593 - RNA, 19 nt, Artificial Sequence
  Description of Artificial Sequence: Synthetic oligonucleotide
  Antisense strand to SEQ ID NO: 142592
aaguucacguucuugcucc

SEQ ID NO: 142594 - RNA, 19 nt, Artificial Sequence
  Description of Artificial Sequence: Synthetic oligonucleotide
  Sense strand starting at position 22 of SEQ ID NO: 1831
gcaugagauggguggaaga

SEQ ID NO: 142595 - RNA, 19 nt, Artificial Sequence
  Description of Artificial Sequence: Synthetic oligonucleotide
  Antisense strand to SEQ ID NO: 142594
ucuuccacccaucucaugc

SEQ ID NO: 142596 - RNA, 19 nt, Artificial Sequence
  Description of Artificial Sequence: Synthetic oligonucleotide
  Sense strand starting at position 33 of SEQ ID NO: 1831
guggaagaaagcuguaaca

SEQ ID NO: 142597 - RNA, 19 nt, Artificial Sequence
  Description of Artificial Sequence: Synthetic oligonucleotide
  Antisense strand to SEQ ID NO: 142596
uguuacagcuuucuuccac

SEQ ID NO: 142598 - RNA, 19 nt, Artificial Sequence
  Description of Artificial Sequence: Synthetic oligonucleotide
  Sense strand starting at position 113 of SEQ ID NO: 1831
gugcaaaccuagucccaaa

SEQ ID NO: 142599 - RNA, 19 nt, Artificial Sequence
  Description of Artificial Sequence: Synthetic oligonucleotide
  Antisense strand to SEQ ID NO: 142598
uuugggacuagguuugcac

SEQ ID NO: 142600 - RNA, 19 nt, Artificial Sequence
  Description of Artificial Sequence: Synthetic oligonucleotide
  Sense strand starting at position 142 of SEQ ID NO: 1831
agagaaugaauguguguau

SEQ ID NO: 142601 - RNA, 19 nt, Artificial Sequence
  Description of Artificial Sequence: Synthetic oligonucleotide
  Antisense strand to SEQ ID NO: 142600
auacacacauucauucucu

SEQ ID NO: 142602 - RNA, 19 nt, Artificial Sequence
  Description of Artificial Sequence: Synthetic oligonucleotide
  Sense strand starting at position 145 of SEQ ID NO: 1831
gaaugaauguguguaugga

SEQ ID NO: 142603 - RNA, 19 nt, Artificial Sequence
  Description of Artificial Sequence: Synthetic oligonucleotide
  Antisense strand to SEQ ID NO: 142602
uccauacacacauucauuc

SEQ ID NO: 142604 - RNA, 19 nt, Artificial Sequence
  Description of Artificial Sequence: Synthetic oligonucleotide
  Sense strand starting at position 146 of SEQ ID NO: 1831
aaugaauguguguauggaa

SEQ ID NO: 142605 - RNA, 19 nt, Artificial Sequence
  Description of Artificial Sequence: Synthetic oligonucleotide
  Antisense strand to SEQ ID NO: 142604
uuccauacacacauucauu

SEQ ID NO: 142606 - RNA, 19 nt, Artificial Sequence
  Description of Artificial Sequence: Synthetic oligonucleotide
  Sense strand starting at position 153 of SEQ ID NO: 1831
guguguauggaagaacaau

SEQ ID NO: 142607 - RNA, 19 nt, Artificial Sequence
  Description of Artificial Sequence: Synthetic oligonucleotide
  Antisense strand to SEQ ID NO: 142606
auuguucuuccauacacac

SEQ ID NO: 142608 - RNA, 19 nt, Artificial Sequence
  Description of Artificial Sequence: Synthetic oligonucleotide
  Sense strand starting at position 346 of SEQ ID NO: 1831
aguauuaacucagcaagca

SEQ ID NO: 142609 - RNA, 19 nt, Artificial Sequence
  Description of Artificial Sequence: Synthetic oligonucleotide
  Antisense strand to SEQ ID NO: 142608
ugcuugcugaguuaauacu

SEQ ID NO: 142610 - RNA, 19 nt, Artificial Sequence
  Description of Artificial Sequence: Synthetic oligonucleotide
  Sense strand starting at position 347 of SEQ ID NO: 1831
guauuaacucagcaagcaa

SEQ ID NO: 142611 - RNA, 19 nt, Artificial Sequence
  Description of Artificial Sequence: Synthetic oligonucleotide
  Antisense strand to SEQ ID NO: 142610
uugcuugcugaguuaauac

SEQ ID NO: 142612 - RNA, 19 nt, Artificial Sequence
  Description of Artificial Sequence: Synthetic oligonucleotide
  Sense strand starting at position 435 of SEQ ID NO: 1831
ccaacagacugagacuaaa

SEQ ID NO: 142613 - RNA, 19 nt, Artificial Sequence
  Description of Artificial Sequence: Synthetic oligonucleotide
  Antisense strand to SEQ ID NO: 142612
uuuagucucagucuguugg

SEQ ID NO: 142614 - RNA, 19 nt, Artificial Sequence
  Description of Artificial Sequence: Synthetic oligonucleotide
  Sense strand starting at position 743 of SEQ ID NO: 1831
guuugaagucuguaaucca

SEQ ID NO: 142615 - RNA, 19 nt, Artificial Sequence
  Description of Artificial Sequence: Synthetic oligonucleotide
  Antisense strand to SEQ ID NO: 142614
uggauuacagacuucaaac

SEQ ID NO: 142616 - RNA, 19 nt, Artificial Sequence
  Description of Artificial Sequence: Synthetic oligonucleotide
  Sense strand starting at position 746 of SEQ ID NO: 1831
ugaagucuguaauccagaa

SEQ ID NO: 142617 - RNA, 19 nt, Artificial Sequence
  Description of Artificial Sequence: Synthetic oligonucleotide
  Antisense strand to SEQ ID NO: 142616
uucuggauuacagacuuca

SEQ ID NO: 142618 - RNA, 19 nt, Artificial Sequence
  Description of Artificial Sequence: Synthetic oligonucleotide
  Sense strand starting at position 906 of SEQ ID NO: 1831
cauacacacguguauguaa

SEQ ID NO: 142619 - RNA, 19 nt, Artificial Sequence
  Description of Artificial Sequence: Synthetic oligonucleotide
  Antisense strand to SEQ ID NO: 142618
uuacauacacguguguaug

SEQ ID NO: 142620 - RNA, 19 nt, Artificial Sequence
  Description of Artificial Sequence: Synthetic oligonucleotide
  Sense strand starting at position 1015 of SEQ ID NO: 1831
ucuauucugcugcaaguga

SEQ ID NO: 142621 - RNA, 19 nt, Artificial Sequence
  Description of Artificial Sequence: Synthetic oligonucleotide
  Antisense strand to SEQ ID NO: 142620
ucacuugcagcagaauaga

SEQ ID NO: 142622 - RNA, 19 nt, Artificial Sequence
  Description of Artificial Sequence: Synthetic oligonucleotide
  Sense strand starting at position 1222 of SEQ ID NO: 1831
ccaauaauguagucacaug

SEQ ID NO: 142623 - RNA, 19 nt, Artificial Sequence
  Description of Artificial Sequence: Synthetic oligonucleotide
  Antisense strand to SEQ ID NO: 142622
caugugacuacauuauugg

SEQ ID NO: 142624 - RNA, 19 nt, Artificial Sequence
  Description of Artificial Sequence: Synthetic oligonucleotide
  Sense strand starting at position 1762 of SEQ ID NO: 1831
ccaggaucaugucugguuu

SEQ ID NO: 142625 - RNA, 19 nt, Artificial Sequence
  Description of Artificial Sequence: Synthetic oligonucleotide
  Antisense strand to SEQ ID NO: 142624
aaaccagacaugauccugg

SEQ ID NO: 142626 - RNA, 19 nt, Artificial Sequence
  Description of Artificial Sequence: Synthetic oligonucleotide
  Sense strand starting at position 2347 of SEQ ID NO: 1831
cgucuuugugagagugcga

SEQ ID NO: 142627 - RNA, 19 nt, Artificial Sequence
  Description of Artificial Sequence: Synthetic oligonucleotide
  Antisense strand to SEQ ID NO: 142626
ucgcacucucacaaagacg

SEQ ID NO: 142628 - RNA, 19 nt, Artificial Sequence
  Description of Artificial Sequence: Synthetic oligonucleotide
  Sense strand starting at position 2547 of SEQ ID NO: 1831
gcuacagaguggguguaaa

SEQ ID NO: 142629 - RNA, 19 nt, Artificial Sequence
  Description of Artificial Sequence: Synthetic oligonucleotide
  Antisense strand to SEQ ID NO: 142628
uuuacacccacucuguagc

SEQ ID NO: 142630 - RNA, 19 nt, Artificial Sequence
  Description of Artificial Sequence: Synthetic oligonucleotide
  Sense strand starting at position 2674 of SEQ ID NO: 1831
ucgcacugcuuauuugaaa

SEQ ID NO: 142631 - RNA, 19 nt, Artificial Sequence
  Description of Artificial Sequence: Synthetic oligonucleotide
  Antisense strand to SEQ ID NO: 142630
uuucaaauaagcagugcga

SEQ ID NO: 142632 - RNA, 19 nt, Artificial Sequence
  Description of Artificial Sequence: Synthetic oligonucleotide
  Sense strand starting at position 2701 of SEQ ID NO: 1831
aagugucaugaaggcauaa

SEQ ID NO: 142633 - RNA, 19 nt, Artificial Sequence
  Description of Artificial Sequence: Synthetic oligonucleotide
  Antisense strand to SEQ ID NO: 142632
uuaugccuucaugacacuu

SEQ ID NO: 142634 - RNA, 19 nt, Artificial Sequence
  Description of Artificial Sequence: Synthetic oligonucleotide
  Sense strand starting at position 2703 of SEQ ID NO: 1831
gugucaugaaggcauaaag

SEQ ID NO: 142635 - RNA, 19 nt, Artificial Sequence
  Description of Artificial Sequence: Synthetic oligonucleotide
  Antisense strand to SEQ ID NO: 142634
cuuuaugccuucaugacac

SEQ ID NO: 142636 - RNA, 19 nt, Artificial Sequence
  Description of Artificial Sequence: Synthetic oligonucleotide
  Sense strand starting at position 2751 of SEQ ID NO: 1831
uagaaagagcaguguacaa

SEQ ID NO: 142637 - RNA, 19 nt, Artificial Sequence
  Description of Artificial Sequence: Synthetic oligonucleotide
  Antisense strand to SEQ ID NO: 142636
uuguacacugcucuuucua

SEQ ID NO: 142638 - RNA, 19 nt, Artificial Sequence
  Description of Artificial Sequence: Synthetic oligonucleotide
  Sense strand starting at position 2763 of SEQ ID NO: 1831
uguacaacucuauaaggua

SEQ ID NO: 142639 - RNA, 19 nt, Artificial Sequence
  Description of Artificial Sequence: Synthetic oligonucleotide
  Antisense strand to SEQ ID NO: 142638
uaccuuauagaguuguaca

SEQ ID NO: 142640 - RNA, 19 nt, Artificial Sequence
  Description of Artificial Sequence: Synthetic oligonucleotide
  Sense strand starting at position 2772 of SEQ ID NO: 1831
cuauaagguacgugugaaa

SEQ ID NO: 142641 - RNA, 19 nt, Artificial Sequence
  Description of Artificial Sequence: Synthetic oligonucleotide
  Antisense strand to SEQ ID NO: 142640
uuucacacguaccuuauag

SEQ ID NO: 142642 - RNA, 19 nt, Artificial Sequence
  Description of Artificial Sequence: Synthetic oligonucleotide
  Sense strand starting at position 2831 of SEQ ID NO: 1831
uucuuugaagaaugaagua

SEQ ID NO: 142643 - RNA, 19 nt, Artificial Sequence
  Description of Artificial Sequence: Synthetic oligonucleotide
  Antisense strand to SEQ ID NO: 142642
uacuucauucuucaaagaa

SEQ ID NO: 142644 - RNA, 19 nt, Artificial Sequence
  Description of Artificial Sequence: Synthetic oligonucleotide
  Sense strand starting at position 2862 of SEQ ID NO: 1831
ucccgaaagccugauaauc

SEQ ID NO: 142645 - RNA, 19 nt, Artificial Sequence
  Description of Artificial Sequence: Synthetic oligonucleotide
  Antisense strand to SEQ ID NO: 142644
gauuaucaggcuuucggga

SEQ ID NO: 142646 - RNA, 19 nt, Artificial Sequence
  Description of Artificial Sequence: Synthetic oligonucleotide
  Sense strand starting at position 2873 of SEQ ID NO: 1831
ugauaaucacagggucuau

SEQ ID NO: 142647 - RNA, 19 nt, Artificial Sequence
  Description of Artificial Sequence: Synthetic oligonucleotide
  Antisense strand to SEQ ID NO: 142646
auagacccugugauuauca

SEQ ID NO: 142648 - RNA, 19 nt, Artificial Sequence
  Description of Artificial Sequence: Synthetic oligonucleotide
  Sense strand starting at position 2941 of SEQ ID NO: 1831
uauaauuuaugggauugag

SEQ ID NO: 142649 - RNA, 19 nt, Artificial Sequence
  Description of Artificial Sequence: Synthetic oligonucleotide
  Antisense strand to SEQ ID NO: 142648
cucaaucccauaaauuaua

SEQ ID NO: 142650 - RNA, 19 nt, Artificial Sequence
  Description of Artificial Sequence: Synthetic oligonucleotide
  Sense strand starting at position 2994 of SEQ ID NO: 1831
ugaaaugcacaucauguuu

SEQ ID NO: 142651 - RNA, 19 nt, Artificial Sequence
  Description of Artificial Sequence: Synthetic oligonucleotide
  Antisense strand to SEQ ID NO: 142650
aaacaugaugugcauuuca

SEQ ID NO: 142652 - RNA, 19 nt, Artificial Sequence
  Description of Artificial Sequence: Synthetic oligonucleotide
  Sense strand starting at position 2999 of SEQ ID NO: 1831
ugcacaucauguuuauuga

SEQ ID NO: 142653 - RNA, 19 nt, Artificial Sequence
  Description of Artificial Sequence: Synthetic oligonucleotide
  Antisense strand to SEQ ID NO: 142652
ucaauaaacaugaugugca

SEQ ID NO: 142654 - RNA, 19 nt, Artificial Sequence
  Description of Artificial Sequence: Synthetic oligonucleotide
  Sense strand starting at position 3002 of SEQ ID NO: 1831
acaucauguuuauugaguu

SEQ ID NO: 142655 - RNA, 19 nt, Artificial Sequence
  Description of Artificial Sequence: Synthetic oligonucleotide
  Antisense strand to SEQ ID NO: 142654
aacucaauaaacaugaugu

SEQ ID NO: 142656 - RNA, 19 nt, Artificial Sequence
  Description of Artificial Sequence: Synthetic oligonucleotide
  Sense strand starting at position 3036 of SEQ ID NO: 1831
gcacgaauccagggugaau

SEQ ID NO: 142657 - RNA, 19 nt, Artificial Sequence
  Description of Artificial Sequence: Synthetic oligonucleotide
  Antisense strand to SEQ ID NO: 142656
auucacccuggauucgugc

SEQ ID NO: 142658 - RNA, 19 nt, Artificial Sequence
  Description of Artificial Sequence: Synthetic oligonucleotide
  Sense strand starting at position 3075 of SEQ ID NO: 1831
guuaauauucuguaaaugc

SEQ ID NO: 142659 - RNA, 19 nt, Artificial Sequence
  Description of Artificial Sequence: Synthetic oligonucleotide
  Antisense strand to SEQ ID NO: 142658
gcauuuacagaauauuaac

SEQ ID NO: 142660 - RNA, 19 nt, Artificial Sequence
  Description of Artificial Sequence: Synthetic oligonucleotide
  Sense strand starting at position 3117 of SEQ ID NO: 1831
acucuucccgaaggaguua

SEQ ID NO: 142661 - RNA, 19 nt, Artificial Sequence
  Description of Artificial Sequence: Synthetic oligonucleotide
  Antisense strand to SEQ ID NO: 142660
uaacuccuucgggaagagu

SEQ ID NO: 142662 - RNA, 19 nt, Artificial Sequence
  Description of Artificial Sequence: Synthetic oligonucleotide
  Sense strand starting at position 3129 of SEQ ID NO: 1831
ggaguuaagguccguauaa

SEQ ID NO: 142663 - RNA, 19 nt, Artificial Sequence
  Description of Artificial Sequence: Synthetic oligonucleotide
  Antisense strand to SEQ ID NO: 142662
uuauacggaccuuaacucc

SEQ ID NO: 142664 - RNA, 19 nt, Artificial Sequence
  Description of Artificial Sequence: Synthetic oligonucleotide
  Sense strand starting at position 3130 of SEQ ID NO: 1831
gaguuaagguccguauaaa

SEQ ID NO: 142665 - RNA, 19 nt, Artificial Sequence
  Description of Artificial Sequence: Synthetic oligonucleotide
  Antisense strand to SEQ ID NO: 142664
uuuauacggaccuuaacuc

SEQ ID NO: 142666 - RNA, 19 nt, Artificial Sequence
  Description of Artificial Sequence: Synthetic oligonucleotide
  Sense strand starting at position 3694 of SEQ ID NO: 1831
uccucuuugcuggaguuau

SEQ ID NO: 142667 - RNA, 19 nt, Artificial Sequence
  Description of Artificial Sequence: Synthetic oligonucleotide
  Antisense strand to SEQ ID NO: 142666
auaacuccagcaaagagga

SEQ ID NO: 142668 - RNA, 19 nt, Artificial Sequence
  Description of Artificial Sequence: Synthetic oligonucleotide
  Sense strand starting at position 3698 of SEQ ID NO: 1831
cuuugcuggaguuaugaaa

SEQ ID NO: 142669 - RNA, 19 nt, Artificial Sequence
  Description of Artificial Sequence: Synthetic oligonucleotide
  Antisense strand to SEQ ID NO: 142668
uuucauaacuccagcaaag

SEQ ID NO: 142670 - RNA, 19 nt, Artificial Sequence
  Description of Artificial Sequence: Synthetic oligonucleotide
  Sense strand starting at position 3828 of SEQ ID NO: 1831
cugacuuccuguuuggaaa

SEQ ID NO: 142671 - RNA, 19 nt, Artificial Sequence
  Description of Artificial Sequence: Synthetic oligonucleotide
  Antisense strand to SEQ ID NO: 142670
uuuccaaacaggaagucag

SEQ ID NO: 142672 - RNA, 19 nt, Artificial Sequence
  Description of Artificial Sequence: Synthetic oligonucleotide
  Sense strand starting at position 3829 of SEQ ID NO: 1831
ugacuuccuguuuggaaau

SEQ ID NO: 142673 - RNA, 19 nt, Artificial Sequence
  Description of Artificial Sequence: Synthetic oligonucleotide
  Antisense strand to SEQ ID NO: 142672
auuuccaaacaggaaguca

SEQ ID NO: 142674 - RNA, 19 nt, Artificial Sequence
  Description of Artificial Sequence: Synthetic oligonucleotide
  Sense strand starting at position 156 of SEQ ID NO: 1830
ucccaaaguccugaagagu

SEQ ID NO: 142675 - RNA, 19 nt, Artificial Sequence
  Description of Artificial Sequence: Synthetic oligonucleotide
  Antisense strand to SEQ ID NO: 142674
acucuucaggacuuuggga

SEQ ID NO: 142676 - RNA, 19 nt, Artificial Sequence
  Description of Artificial Sequence: Synthetic oligonucleotide
  Sense strand starting at position 159 of SEQ ID NO: 1830
caaaguccugaagaguguu

SEQ ID NO: 142677 - RNA, 19 nt, Artificial Sequence
  Description of Artificial Sequence: Synthetic oligonucleotide
  Antisense strand to SEQ ID NO: 142676
aacacucuucaggacuuug

SEQ ID NO: 142678 - RNA, 19 nt, Artificial Sequence
  Description of Artificial Sequence: Synthetic oligonucleotide
  Sense strand starting at position 172 of SEQ ID NO: 1830
aguguuucugguuaaugag

SEQ ID NO: 142679 - RNA, 19 nt, Artificial Sequence
  Description of Artificial Sequence: Synthetic oligonucleotide
  Antisense strand to SEQ ID NO: 142678
cucauuaaccagaaacacu

SEQ ID NO: 142680 - RNA, 19 nt, Artificial Sequence
  Description of Artificial Sequence: Synthetic oligonucleotide
  Sense strand starting at position 414 of SEQ ID NO: 1830
acguuuaucgggcacauuu

SEQ ID NO: 142681 - RNA, 19 nt, Artificial Sequence
  Description of Artificial Sequence: Synthetic oligonucleotide
  Antisense strand to SEQ ID NO: 142680
aaaugugcccgauaaacgu

SEQ ID NO: 142682 - RNA, 19 nt, Artificial Sequence
  Description of Artificial Sequence: Synthetic oligonucleotide
  Sense strand starting at position 425 of SEQ ID NO: 1830
gcacauuugucagcucuga

SEQ ID NO: 142683 - RNA, 19 nt, Artificial Sequence
  Description of Artificial Sequence: Synthetic oligonucleotide
  Antisense strand to SEQ ID NO: 142682
ucagagcugacaaaugugc

SEQ ID NO: 142684 - RNA, 19 nt, Artificial Sequence
  Description of Artificial Sequence: Synthetic oligonucleotide
  Sense strand starting at position 455 of SEQ ID NO: 1830
gugaaauacuaaguaguuu

SEQ ID NO: 142685 - RNA, 19 nt, Artificial Sequence
  Description of Artificial Sequence: Synthetic oligonucleotide
  Antisense strand to SEQ ID NO: 142684
aaacuacuuaguauuucac

SEQ ID NO: 142686 - RNA, 19 nt, Artificial Sequence
  Description of Artificial Sequence: Synthetic oligonucleotide
  Sense strand starting at position 515 of SEQ ID NO: 1830
acaucuguccaguggaaag

SEQ ID NO: 142687 - RNA, 19 nt, Artificial Sequence
  Description of Artificial Sequence: Synthetic oligonucleotide
  Antisense strand to SEQ ID NO: 142686
cuuuccacuggacagaugu

SEQ ID NO: 142688 - RNA, 19 nt, Artificial Sequence
  Description of Artificial Sequence: Synthetic oligonucleotide
  Sense strand starting at position 535 of SEQ ID NO: 1830
gcaaacucucagggauaga

SEQ ID NO: 142689 - RNA, 19 nt, Artificial Sequence
  Description of Artificial Sequence: Synthetic oligonucleotide
  Antisense strand to SEQ ID NO: 142688
ucuaucccugagaguuugc

SEQ ID NO: 142690 - RNA, 19 nt, Artificial Sequence
  Description of Artificial Sequence: Synthetic oligonucleotide
  Sense strand starting at position 546 of SEQ ID NO: 1830
gggauagaauauuaaagag

SEQ ID NO: 142691 - RNA, 19 nt, Artificial Sequence
  Description of Artificial Sequence: Synthetic oligonucleotide
  Antisense strand to SEQ ID NO: 142690
cucuuuaauauucuauccc

SEQ ID NO: 142692 - RNA, 19 nt, Artificial Sequence
  Description of Artificial Sequence: Synthetic oligonucleotide
  Sense strand starting at position 646 of SEQ ID NO: 1830
ucugguuugguugaugauu

SEQ ID NO: 142693 - RNA, 19 nt, Artificial Sequence
  Description of Artificial Sequence: Synthetic oligonucleotide
  Antisense strand to SEQ ID NO: 142692
aaucaucaaccaaaccaga

SEQ ID NO: 142694 - RNA, 19 nt, Artificial Sequence
  Description of Artificial Sequence: Synthetic oligonucleotide
  Sense strand starting at position 786 of SEQ ID NO: 1830
agaccuuucuguucucaga

SEQ ID NO: 142695 - RNA, 19 nt, Artificial Sequence
  Description of Artificial Sequence: Synthetic oligonucleotide
  Antisense strand to SEQ ID NO: 142694
ucugagaacagaaaggucu

SEQ ID NO: 142696 - RNA, 19 nt, Artificial Sequence
  Description of Artificial Sequence: Synthetic oligonucleotide
  Sense strand starting at position 834 of SEQ ID NO: 1830
ggauaagcauaaucuguca

SEQ ID NO: 142697 - RNA, 19 nt, Artificial Sequence
  Description of Artificial Sequence: Synthetic oligonucleotide
  Antisense strand to SEQ ID NO: 142696
ugacagauuaugcuuaucc

SEQ ID NO: 142698 - RNA, 19 nt, Artificial Sequence
  Description of Artificial Sequence: Synthetic oligonucleotide
  Sense strand starting at position 1038 of SEQ ID NO: 1830
acuguuuccuuauugggaa

SEQ ID NO: 142699 - RNA, 19 nt, Artificial Sequence
  Description of Artificial Sequence: Synthetic oligonucleotide
  Antisense strand to SEQ ID NO: 142698
uucccaauaaggaaacagu

SEQ ID NO: 142700 - RNA, 19 nt, Artificial Sequence
  Description of Artificial Sequence: Synthetic oligonucleotide
  Sense strand starting at position 1096 of SEQ ID NO: 1830
gccugagucccuuaacgaa

SEQ ID NO: 142701 - RNA, 19 nt, Artificial Sequence
  Description of Artificial Sequence: Synthetic oligonucleotide
  Antisense strand to SEQ ID NO: 142700
uucguuaagggacucaggc

SEQ ID NO: 142702 - RNA, 19 nt, Artificial Sequence
  Description of Artificial Sequence: Synthetic oligonucleotide
  Sense strand starting at position 1165 of SEQ ID NO: 1830
acaggaugucagcaaagca

SEQ ID NO: 142703 - RNA, 19 nt, Artificial Sequence
  Description of Artificial Sequence: Synthetic oligonucleotide
  Antisense strand to SEQ ID NO: 142702
ugcuuugcugacauccugu

SEQ ID NO: 142704 - RNA, 19 nt, Artificial Sequence
  Description of Artificial Sequence: Synthetic oligonucleotide
  Sense strand starting at position 1221 of SEQ ID NO: 1830
aagucucggcuagggaaua

SEQ ID NO: 142705 - RNA, 19 nt, Artificial Sequence
  Description of Artificial Sequence: Synthetic oligonucleotide
  Antisense strand to SEQ ID NO: 142704
uauucccuagccgagacuu

SEQ ID NO: 142706 - RNA, 19 nt, Artificial Sequence
  Description of Artificial Sequence: Synthetic oligonucleotide
  Sense strand starting at position 1339 of SEQ ID NO: 1830
cagggcagcgcguuuaaga

SEQ ID NO: 142707 - RNA, 19 nt, Artificial Sequence
  Description of Artificial Sequence: Synthetic oligonucleotide
  Antisense strand to SEQ ID NO: 142706
ucuuaaacgcgcugcccug

SEQ ID NO: 142708 - RNA, 19 nt, Artificial Sequence
  Description of Artificial Sequence: Synthetic oligonucleotide
  Sense strand starting at position 1423 of SEQ ID NO: 1830
ggugcacgaagguauaaau

SEQ ID NO: 142709 - RNA, 19 nt, Artificial Sequence
  Description of Artificial Sequence: Synthetic oligonucleotide
  Antisense strand to SEQ ID NO: 142708
auuuauaccuucgugcacc

SEQ ID NO: 142710 - RNA, 19 nt, Artificial Sequence
  Description of Artificial Sequence: Synthetic oligonucleotide
  Sense strand starting at position 1487 of SEQ ID NO: 1830
ccaagcuucccagaagugu

SEQ ID NO: 142711 - RNA, 19 nt, Artificial Sequence
  Description of Artificial Sequence: Synthetic oligonucleotide
  Antisense strand to SEQ ID NO: 142710
acacuucugggaagcuugg

SEQ ID NO: 142712 - RNA, 19 nt, Artificial Sequence
  Description of Artificial Sequence: Synthetic oligonucleotide
  Sense strand starting at position 1495 of SEQ ID NO: 1830
cccagaagugucgagcaga

SEQ ID NO: 142713 - RNA, 19 nt, Artificial Sequence
  Description of Artificial Sequence: Synthetic oligonucleotide
  Antisense strand to SEQ ID NO: 142712
ucugcucgacacuucuggg

SEQ ID NO: 142714 - RNA, 19 nt, Artificial Sequence
  Description of Artificial Sequence: Synthetic oligonucleotide
  Sense strand starting at position 1498 of SEQ ID NO: 1830
agaagugucgagcagaaag

SEQ ID NO: 142715 - RNA, 19 nt, Artificial Sequence
  Description of Artificial Sequence: Synthetic oligonucleotide
  Antisense strand to SEQ ID NO: 142714
cuuucugcucgacacuucu

SEQ ID NO: 142716 - RNA, 19 nt, Artificial Sequence
  Description of Artificial Sequence: Synthetic oligonucleotide
  Sense strand starting at position 1536 of SEQ ID NO: 1830
ggugacucuucuccagaag

SEQ ID NO: 142717 - RNA, 19 nt, Artificial Sequence
  Description of Artificial Sequence: Synthetic oligonucleotide
  Antisense strand to SEQ ID NO: 142716
cuucuggagaagagucacc

SEQ ID NO: 142718 - RNA, 19 nt, Artificial Sequence
  Description of Artificial Sequence: Synthetic oligonucleotide
  Sense strand starting at position 2768 of SEQ ID NO: 1830
agauaugacucaucauugu

SEQ ID NO: 142719 - RNA, 19 nt, Artificial Sequence
  Description of Artificial Sequence: Synthetic oligonucleotide
  Antisense strand to SEQ ID NO: 142718
acaaugaugagucauaucu

SEQ ID NO: 142720 - RNA, 19 nt, Artificial Sequence
  Description of Artificial Sequence: Synthetic oligonucleotide
  Sense strand starting at position 2846 of SEQ ID NO: 1830
gcaagcucuccucuagugu

SEQ ID NO: 142721 - RNA, 19 nt, Artificial Sequence
  Description of Artificial Sequence: Synthetic oligonucleotide
  Antisense strand to SEQ ID NO: 142720
acacuagaggagagcuugc

SEQ ID NO: 142722 - RNA, 19 nt, Artificial Sequence
  Description of Artificial Sequence: Synthetic oligonucleotide
  Sense strand starting at position 2866 of SEQ ID NO: 1830
aggagugaccuuuguuacu

SEQ ID NO: 142723 - RNA, 19 nt, Artificial Sequence
  Description of Artificial Sequence: Synthetic oligonucleotide
  Antisense strand to SEQ ID NO: 142722
aguaacaaaggucacuccu

SEQ ID NO: 142724 - RNA, 19 nt, Artificial Sequence
  Description of Artificial Sequence: Synthetic oligonucleotide
  Sense strand starting at position 2871 of SEQ ID NO: 1830
ugaccuuuguuacuugaca

SEQ ID NO: 142725 - RNA, 19 nt, Artificial Sequence
  Description of Artificial Sequence: Synthetic oligonucleotide
  Antisense strand to SEQ ID NO: 142724
ugucaaguaacaaagguca

SEQ ID NO: 142726 - RNA, 19 nt, Artificial Sequence
  Description of Artificial Sequence: Synthetic oligonucleotide
  Sense strand starting at position 2896 of SEQ ID NO: 1830
ucguuuauaugaucaacag

SEQ ID NO: 142727 - RNA, 19 nt, Artificial Sequence
  Description of Artificial Sequence: Synthetic oligonucleotide
  Antisense strand to SEQ ID NO: 142726
cuguugaucauauaaacga

SEQ ID NO: 142728 - RNA, 19 nt, Artificial Sequence
  Description of Artificial Sequence: Synthetic oligonucleotide
  Sense strand starting at position 2935 of SEQ ID NO: 1830
acagcauaucaccgggaga

SEQ ID NO: 142729 - RNA, 19 nt, Artificial Sequence
  Description of Artificial Sequence: Synthetic oligonucleotide
  Antisense strand to SEQ ID NO: 142728
ucucccggugauaugcugu

SEQ ID NO: 142730 - RNA, 19 nt, Artificial Sequence
  Description of Artificial Sequence: Synthetic oligonucleotide
  Sense strand starting at position 2937 of SEQ ID NO: 1830
agcauaucaccgggagaga

SEQ ID NO: 142731 - RNA, 19 nt, Artificial Sequence
  Description of Artificial Sequence: Synthetic oligonucleotide
  Antisense strand to SEQ ID NO: 142730
ucucucccggugauaugcu

SEQ ID NO: 142732 - RNA, 19 nt, Artificial Sequence
  Description of Artificial Sequence: Synthetic oligonucleotide
  Sense strand starting at position 3110 of SEQ ID NO: 1830
ugaugucuuagaggaagug

SEQ ID NO: 142733 - RNA, 19 nt, Artificial Sequence
  Description of Artificial Sequence: Synthetic oligonucleotide
  Antisense strand to SEQ ID NO: 142732
cacuuccucuaagacauca

SEQ ID NO: 142734 - RNA, 19 nt, Artificial Sequence
  Description of Artificial Sequence: Synthetic oligonucleotide
  Sense strand starting at position 3176 of SEQ ID NO: 1830
gcagaagucagccaggaaa

SEQ ID NO: 142735 - RNA, 19 nt, Artificial Sequence
  Description of Artificial Sequence: Synthetic oligonucleotide
  Antisense strand to SEQ ID NO: 142734
uuuccuggcugacuucugc

SEQ ID NO: 142736 - RNA, 19 nt, Artificial Sequence
  Description of Artificial Sequence: Synthetic oligonucleotide
  Sense strand starting at position 3311 of SEQ ID NO: 1830
acggaagaguuccuaauug

SEQ ID NO: 142737 - RNA, 19 nt, Artificial Sequence
  Description of Artificial Sequence: Synthetic oligonucleotide
  Antisense strand to SEQ ID NO: 142736
caauuaggaacucuuccgu

SEQ ID NO: 142738 - RNA, 19 nt, Artificial Sequence
  Description of Artificial Sequence: Synthetic oligonucleotide
  Sense strand starting at position 3448 of SEQ ID NO: 1830
acaguucagguaugagaug

SEQ ID NO: 142739 - RNA, 19 nt, Artificial Sequence
  Description of Artificial Sequence: Synthetic oligonucleotide
  Antisense strand to SEQ ID NO: 142738
caucucauaccugaacugu

SEQ ID NO: 142740 - RNA, 19 nt, Artificial Sequence
  Description of Artificial Sequence: Synthetic oligonucleotide
  Sense strand starting at position 3628 of SEQ ID NO: 1830
acguaagauaaguaugugu

SEQ ID NO: 142741 - RNA, 19 nt, Artificial Sequence
  Description of Artificial Sequence: Synthetic oligonucleotide
  Antisense strand to SEQ ID NO: 142740
acacauacuuaucuuacgu

SEQ ID NO: 142742 - RNA, 19 nt, Artificial Sequence
  Description of Artificial Sequence: Synthetic oligonucleotide
  Sense strand starting at position 3631 of SEQ ID NO: 1830
uaagauaaguaugugugaa

SEQ ID NO: 142743 - RNA, 19 nt, Artificial Sequence
  Description of Artificial Sequence: Synthetic oligonucleotide
  Antisense strand to SEQ ID NO: 142742
uucacacauacuuaucuua

SEQ ID NO: 142744 - RNA, 19 nt, Artificial Sequence
  Description of Artificial Sequence: Synthetic oligonucleotide
  Sense strand starting at position 3632 of SEQ ID NO: 1830
aagauaaguaugugugaag

SEQ ID NO: 142745 - RNA, 19 nt, Artificial Sequence
  Description of Artificial Sequence: Synthetic oligonucleotide
  Antisense strand to SEQ ID NO: 142744
cuucacacauacuuaucuu

SEQ ID NO: 142746 - RNA, 19 nt, Artificial Sequence
  Description of Artificial Sequence: Synthetic oligonucleotide
  Sense strand starting at position 3633 of SEQ ID NO: 1830
agauaaguaugugugaagu

SEQ ID NO: 142747 - RNA, 19 nt, Artificial Sequence
  Description of Artificial Sequence: Synthetic oligonucleotide
  Antisense strand to SEQ ID NO: 142746
acuucacacauacuuaucu

SEQ ID NO: 142748 - RNA, 19 nt, Artificial Sequence
  Description of Artificial Sequence: Synthetic oligonucleotide
  Sense strand starting at position 3643 of SEQ ID NO: 1830
gugugaagucauuacagaa

SEQ ID NO: 142749 - RNA, 19 nt, Artificial Sequence
  Description of Artificial Sequence: Synthetic oligonucleotide
  Antisense strand to SEQ ID NO: 142748
uucuguaaugacuucacac

SEQ ID NO: 142750 - RNA, 19 nt, Artificial Sequence
  Description of Artificial Sequence: Synthetic oligonucleotide
  Sense strand starting at position 3667 of SEQ ID NO: 1830
ugagaugucaucuggccaa

SEQ ID NO: 142751 - RNA, 19 nt, Artificial Sequence
  Description of Artificial Sequence: Synthetic oligonucleotide
  Antisense strand to SEQ ID NO: 142750
uuggccagaugacaucuca

SEQ ID NO: 142752 - RNA, 19 nt, Artificial Sequence
  Description of Artificial Sequence: Synthetic oligonucleotide
  Sense strand starting at position 3785 of SEQ ID NO: 1830
ugacaucagcgagaucaca

SEQ ID NO: 142753 - RNA, 19 nt, Artificial Sequence
  Description of Artificial Sequence: Synthetic oligonucleotide
  Antisense strand to SEQ ID NO: 142752
ugugaucucgcugauguca

SEQ ID NO: 142754 - RNA, 19 nt, Artificial Sequence
  Description of Artificial Sequence: Synthetic oligonucleotide
  Sense strand starting at position 154 of SEQ ID NO: 1832
uagaaaccguaagucuaau

SEQ ID NO: 142755 - RNA, 19 nt, Artificial Sequence
  Description of Artificial Sequence: Synthetic oligonucleotide
  Antisense strand to SEQ ID NO: 142754
auuagacuuacgguuucua

SEQ ID NO: 142756 - RNA, 19 nt, Artificial Sequence
  Description of Artificial Sequence: Synthetic oligonucleotide
  Sense strand starting at position 160 of SEQ ID NO: 1832
ccguaagucuaaucaauaa

SEQ ID NO: 142757 - RNA, 19 nt, Artificial Sequence
  Description of Artificial Sequence: Synthetic oligonucleotide
  Antisense strand to SEQ ID NO: 142756
uuauugauuagacuuacgg

SEQ ID NO: 142758 - RNA, 19 nt, Artificial Sequence
  Description of Artificial Sequence: Synthetic oligonucleotide
  Sense strand starting at position 264 of SEQ ID NO: 1832
ccucauaaugacugugcaa

SEQ ID NO: 142759 - RNA, 19 nt, Artificial Sequence
  Description of Artificial Sequence: Synthetic oligonucleotide
  Antisense strand to SEQ ID NO: 142758
uugcacagucauuaugagg

SEQ ID NO: 142760 - RNA, 19 nt, Artificial Sequence
  Description of Artificial Sequence: Synthetic oligonucleotide
  Sense strand starting at position 500 of SEQ ID NO: 1832
acuaaauguuacucuguau

SEQ ID NO: 142761 - RNA, 19 nt, Artificial Sequence
  Description of Artificial Sequence: Synthetic oligonucleotide
  Antisense strand to SEQ ID NO: 142760
auacagaguaacauuuagu

SEQ ID NO: 142762 - RNA, 19 nt, Artificial Sequence
  Description of Artificial Sequence: Synthetic oligonucleotide
  Sense strand starting at position 580 of SEQ ID NO: 1832
uccaguauacucuguuauc

SEQ ID NO: 142763 - RNA, 19 nt, Artificial Sequence
  Description of Artificial Sequence: Synthetic oligonucleotide
  Antisense strand to SEQ ID NO: 142762
gauaacagaguauacugga

SEQ ID NO: 142764 - RNA, 19 nt, Artificial Sequence
  Description of Artificial Sequence: Synthetic oligonucleotide
  Sense strand starting at position 586 of SEQ ID NO: 1832
auacucuguuauccaguau

SEQ ID NO: 142765 - RNA, 19 nt, Artificial Sequence
  Description of Artificial Sequence: Synthetic oligonucleotide
  Antisense strand to SEQ ID NO: 142764
auacuggauaacagaguau

SEQ ID NO: 142766 - RNA, 19 nt, Artificial Sequence
  Description of Artificial Sequence: Synthetic oligonucleotide
  Sense strand starting at position 590 of SEQ ID NO: 1832
ucuguuauccaguauagua

SEQ ID NO: 142767 - RNA, 19 nt, Artificial Sequence
  Description of Artificial Sequence: Synthetic oligonucleotide
  Antisense strand to SEQ ID NO: 142766
uacuauacuggauaacaga

SEQ ID NO: 142768 - RNA, 19 nt, Artificial Sequence
  Description of Artificial Sequence: Synthetic oligonucleotide
  Sense strand starting at position 592 of SEQ ID NO: 1832
uguuauccaguauaguaca

SEQ ID NO: 142769 - RNA, 19 nt, Artificial Sequence
  Description of Artificial Sequence: Synthetic oligonucleotide
  Antisense strand to SEQ ID NO: 142768
uguacuauacuggauaaca

SEQ ID NO: 142770 - RNA, 19 nt, Artificial Sequence
  Description of Artificial Sequence: Synthetic oligonucleotide
  Sense strand starting at position 618 of SEQ ID NO: 1832
cugacacagggauguuauu

SEQ ID NO: 142771 - RNA, 19 nt, Artificial Sequence
  Description of Artificial Sequence: Synthetic oligonucleotide
  Antisense strand to SEQ ID NO: 142770
aauaacaucccugugucag

SEQ ID NO: 142772 - RNA, 19 nt, Artificial Sequence
  Description of Artificial Sequence: Synthetic oligonucleotide
  Sense strand starting at position 628 of SEQ ID NO: 1832
gauguuauuuaacaaacgu

SEQ ID NO: 142773 - RNA, 19 nt, Artificial Sequence
  Description of Artificial Sequence: Synthetic oligonucleotide
  Antisense strand to SEQ ID NO: 142772
acguuuguuaaauaacauc

SEQ ID NO: 142774 - RNA, 19 nt, Artificial Sequence
  Description of Artificial Sequence: Synthetic oligonucleotide
  Sense strand starting at position 702 of SEQ ID NO: 1832
ugacuacagucgucucaac

SEQ ID NO: 142775 - RNA, 19 nt, Artificial Sequence
  Description of Artificial Sequence: Synthetic oligonucleotide
  Antisense strand to SEQ ID NO: 142774
guugagacgacuguaguca

SEQ ID NO: 142776 - RNA, 19 nt, Artificial Sequence
  Description of Artificial Sequence: Synthetic oligonucleotide
  Sense strand starting at position 733 of SEQ ID NO: 1832
aguggcccauccuuugaaa

SEQ ID NO: 142777 - RNA, 19 nt, Artificial Sequence
  Description of Artificial Sequence: Synthetic oligonucleotide
  Antisense strand to SEQ ID NO: 142776
uuucaaaggaugggccacu

SEQ ID NO: 142778 - RNA, 19 nt, Artificial Sequence
  Description of Artificial Sequence: Synthetic oligonucleotide
  Sense strand starting at position 735 of SEQ ID NO: 1832
uggcccauccuuugaaaug

SEQ ID NO: 142779 - RNA, 19 nt, Artificial Sequence
  Description of Artificial Sequence: Synthetic oligonucleotide
  Antisense strand to SEQ ID NO: 142778
cauuucaaaggaugggcca

SEQ ID NO: 142780 - RNA, 19 nt, Artificial Sequence
  Description of Artificial Sequence: Synthetic oligonucleotide
  Sense strand starting at position 776 of SEQ ID NO: 1832
uacgauagguacuuacauu

SEQ ID NO: 142781 - RNA, 19 nt, Artificial Sequence
  Description of Artificial Sequence: Synthetic oligonucleotide
  Antisense strand to SEQ ID NO: 142780
aauguaaguaccuaucgua

SEQ ID NO: 142782 - RNA, 19 nt, Artificial Sequence
  Description of Artificial Sequence: Synthetic oligonucleotide
  Sense strand starting at position 818 of SEQ ID NO: 1832
agacauccaugcuuauguu

SEQ ID NO: 142783 - RNA, 19 nt, Artificial Sequence
  Description of Artificial Sequence: Synthetic oligonucleotide
  Antisense strand to SEQ ID NO: 142782
aacauaagcauggaugucu

SEQ ID NO: 142784 - RNA, 19 nt, Artificial Sequence
  Description of Artificial Sequence: Synthetic oligonucleotide
  Sense strand starting at position 946 of SEQ ID NO: 1832
uccugauugacugaguguu

SEQ ID NO: 142785 - RNA, 19 nt, Artificial Sequence
  Description of Artificial Sequence: Synthetic oligonucleotide
  Antisense strand to SEQ ID NO: 142784
aacacucagucaaucagga

SEQ ID NO: 142786 - RNA, 19 nt, Artificial Sequence
  Description of Artificial Sequence: Synthetic oligonucleotide
  Sense strand starting at position 1185 of SEQ ID NO: 1832
ucgauucccucugcagaca

SEQ ID NO: 142787 - RNA, 19 nt, Artificial Sequence
  Description of Artificial Sequence: Synthetic oligonucleotide
  Antisense strand to SEQ ID NO: 142786
ugucugcagagggaaucga

SEQ ID NO: 142788 - RNA, 19 nt, Artificial Sequence
  Description of Artificial Sequence: Synthetic oligonucleotide
  Sense strand starting at position 1278 of SEQ ID NO: 1832
ggcagaaacucauaauuua

SEQ ID NO: 142789 - RNA, 19 nt, Artificial Sequence
  Description of Artificial Sequence: Synthetic oligonucleotide
  Antisense strand to SEQ ID NO: 142788
uaaauuaugaguuucugcc

SEQ ID NO: 142790 - RNA, 19 nt, Artificial Sequence
  Description of Artificial Sequence: Synthetic oligonucleotide
  Sense strand starting at position 1285 of SEQ ID NO: 1832
acucauaauuuagggacaa

SEQ ID NO: 142791 - RNA, 19 nt, Artificial Sequence
  Description of Artificial Sequence: Synthetic oligonucleotide
  Antisense strand to SEQ ID NO: 142790
uugucccuaaauuaugagu

SEQ ID NO: 142792 - RNA, 19 nt, Artificial Sequence
  Description of Artificial Sequence: Synthetic oligonucleotide
  Sense strand starting at position 1286 of SEQ ID NO: 1832
cucauaauuuagggacaag

SEQ ID NO: 142793 - RNA, 19 nt, Artificial Sequence
  Description of Artificial Sequence: Synthetic oligonucleotide
  Antisense strand to SEQ ID NO: 142792
cuugucccuaaauuaugag

SEQ ID NO: 142794 - RNA, 19 nt, Artificial Sequence
  Description of Artificial Sequence: Synthetic oligonucleotide
  Sense strand starting at position 2143 of SEQ ID NO: 1832
gggagucugucugucccaa

SEQ ID NO: 142795 - RNA, 19 nt, Artificial Sequence
  Description of Artificial Sequence: Synthetic oligonucleotide
  Antisense strand to SEQ ID NO: 142794
uugggacagacagacuccc

SEQ ID NO: 142796 - RNA, 19 nt, Artificial Sequence
  Description of Artificial Sequence: Synthetic oligonucleotide
  Sense strand starting at position 2161 of SEQ ID NO: 1832
agccgcuuucguuccagaa

SEQ ID NO: 142797 - RNA, 19 nt, Artificial Sequence
  Description of Artificial Sequence: Synthetic oligonucleotide
  Antisense strand to SEQ ID NO: 142796
uucuggaacgaaagcggcu

SEQ ID NO: 142798 - RNA, 19 nt, Artificial Sequence
  Description of Artificial Sequence: Synthetic oligonucleotide
  Sense strand starting at position 2162 of SEQ ID NO: 1832
gccgcuuucguuccagaaa

SEQ ID NO: 142799 - RNA, 19 nt, Artificial Sequence
  Description of Artificial Sequence: Synthetic oligonucleotide
  Antisense strand to SEQ ID NO: 142798
uuucuggaacgaaagcggc

SEQ ID NO: 142800 - RNA, 19 nt, Artificial Sequence
  Description of Artificial Sequence: Synthetic oligonucleotide
  Sense strand starting at position 2197 of SEQ ID NO: 1832
gccgucuuaauacagugaa

SEQ ID NO: 142801 - RNA, 19 nt, Artificial Sequence
  Description of Artificial Sequence: Synthetic oligonucleotide
  Antisense strand to SEQ ID NO: 142800
uucacuguauuaagacggc

SEQ ID NO: 142802 - RNA, 19 nt, Artificial Sequence
  Description of Artificial Sequence: Synthetic oligonucleotide
  Sense strand starting at position 2200 of SEQ ID NO: 1832
gucuuaauacagugaaaga

SEQ ID NO: 142803 - RNA, 19 nt, Artificial Sequence
  Description of Artificial Sequence: Synthetic oligonucleotide
  Antisense strand to SEQ ID NO: 142802
ucuuucacuguauuaagac

SEQ ID NO: 142804 - RNA, 19 nt, Artificial Sequence
  Description of Artificial Sequence: Synthetic oligonucleotide
  Sense strand starting at position 2487 of SEQ ID NO: 1832
gaauguaggugcucauaag

SEQ ID NO: 142805 - RNA, 19 nt, Artificial Sequence
  Description of Artificial Sequence: Synthetic oligonucleotide
  Antisense strand to SEQ ID NO: 142804
cuuaugagcaccuacauuc

SEQ ID NO: 142806 - RNA, 19 nt, Artificial Sequence
  Description of Artificial Sequence: Synthetic oligonucleotide
  Sense strand starting at position 2577 of SEQ ID NO: 1832
ugcucuacugauggugauu

SEQ ID NO: 142807 - RNA, 19 nt, Artificial Sequence
  Description of Artificial Sequence: Synthetic oligonucleotide
  Antisense strand to SEQ ID NO: 142806
aaucaccaucaguagagca

SEQ ID NO: 142808 - RNA, 19 nt, Artificial Sequence
  Description of Artificial Sequence: Synthetic oligonucleotide
  Sense strand starting at position 2582 of SEQ ID NO: 1832
uacugauggugauuccaca

SEQ ID NO: 142809 - RNA, 19 nt, Artificial Sequence
  Description of Artificial Sequence: Synthetic oligonucleotide
  Antisense strand to SEQ ID NO: 142808
uguggaaucaccaucagua

SEQ ID NO: 142810 - RNA, 19 nt, Artificial Sequence
  Description of Artificial Sequence: Synthetic oligonucleotide
  Sense strand starting at position 2610 of SEQ ID NO: 1832
ggaauaaguuaagaugaag

SEQ ID NO: 142811 - RNA, 19 nt, Artificial Sequence
  Description of Artificial Sequence: Synthetic oligonucleotide
  Antisense strand to SEQ ID NO: 142810
cuucaucuuaacuuauucc

SEQ ID NO: 142812 - RNA, 19 nt, Artificial Sequence
  Description of Artificial Sequence: Synthetic oligonucleotide
  Sense strand starting at position 2621 of SEQ ID NO: 1832
agaugaagucagugaaguu

SEQ ID NO: 142813 - RNA, 19 nt, Artificial Sequence
  Description of Artificial Sequence: Synthetic oligonucleotide
  Antisense strand to SEQ ID NO: 142812
aacuucacugacuucaucu

SEQ ID NO: 142814 - RNA, 19 nt, Artificial Sequence
  Description of Artificial Sequence: Synthetic oligonucleotide
  Sense strand starting at position 2622 of SEQ ID NO: 1832
gaugaagucagugaaguuu

SEQ ID NO: 142815 - RNA, 19 nt, Artificial Sequence
  Description of Artificial Sequence: Synthetic oligonucleotide
  Antisense strand to SEQ ID NO: 142814
aaacuucacugacuucauc

SEQ ID NO: 142816 - RNA, 19 nt, Artificial Sequence
  Description of Artificial Sequence: Synthetic oligonucleotide
  Sense strand starting at position 2644 of SEQ ID NO: 1832
gcgaauugcaaacauugua

SEQ ID NO: 142817 - RNA, 19 nt, Artificial Sequence
  Description of Artificial Sequence: Synthetic oligonucleotide
  Antisense strand to SEQ ID NO: 142816
uacaauguuugcaauucgc

SEQ ID NO: 142818 - RNA, 19 nt, Artificial Sequence
  Description of Artificial Sequence: Synthetic oligonucleotide
  Sense strand starting at position 2736 of SEQ ID NO: 1832
acauaacaauaaugggaaa

SEQ ID NO: 142819 - RNA, 19 nt, Artificial Sequence
  Description of Artificial Sequence: Synthetic oligonucleotide
  Antisense strand to SEQ ID NO: 142818
uuucccauuauuguuaugu

SEQ ID NO: 142820 - RNA, 19 nt, Artificial Sequence
  Description of Artificial Sequence: Synthetic oligonucleotide
  Sense strand starting at position 2784 of SEQ ID NO: 1832
gucggaaccuagguuuauu

SEQ ID NO: 142821 - RNA, 19 nt, Artificial Sequence
  Description of Artificial Sequence: Synthetic oligonucleotide
  Antisense strand to SEQ ID NO: 142820
aauaaaccuagguuccgac

SEQ ID NO: 142822 - RNA, 19 nt, Artificial Sequence
  Description of Artificial Sequence: Synthetic oligonucleotide
  Sense strand starting at position 2794 of SEQ ID NO: 1832
agguuuauuguggaucuga

SEQ ID NO: 142823 - RNA, 19 nt, Artificial Sequence
  Description of Artificial Sequence: Synthetic oligonucleotide
  Antisense strand to SEQ ID NO: 142822
ucagauccacaauaaaccu

SEQ ID NO: 142824 - RNA, 19 nt, Artificial Sequence
  Description of Artificial Sequence: Synthetic oligonucleotide
  Sense strand starting at position 3252 of SEQ ID NO: 1832
guuagaaacaacuguguga

SEQ ID NO: 142825 - RNA, 19 nt, Artificial Sequence
  Description of Artificial Sequence: Synthetic oligonucleotide
  Antisense strand to SEQ ID NO: 142824
ucacacaguuguuucuaac

SEQ ID NO: 142826 - RNA, 19 nt, Artificial Sequence
  Description of Artificial Sequence: Synthetic oligonucleotide
  Sense strand starting at position 3254 of SEQ ID NO: 1832
uagaaacaacugugugauu

SEQ ID NO: 142827 - RNA, 19 nt, Artificial Sequence
  Description of Artificial Sequence: Synthetic oligonucleotide
  Antisense strand to SEQ ID NO: 142826
aaucacacaguuguuucua

SEQ ID NO: 142828 - RNA, 19 nt, Artificial Sequence
  Description of Artificial Sequence: Synthetic oligonucleotide
  Sense strand starting at position 3442 of SEQ ID NO: 1832
uauccuuggcuacgaagau

SEQ ID NO: 142829 - RNA, 19 nt, Artificial Sequence
  Description of Artificial Sequence: Synthetic oligonucleotide
  Antisense strand to SEQ ID NO: 142828
aucuucguagccaaggaua

SEQ ID NO: 142830 - RNA, 19 nt, Artificial Sequence
  Description of Artificial Sequence: Synthetic oligonucleotide
  Sense strand starting at position 3446 of SEQ ID NO: 1832
cuuggcuacgaagaucaau

SEQ ID NO: 142831 - RNA, 19 nt, Artificial Sequence
  Description of Artificial Sequence: Synthetic oligonucleotide
  Antisense strand to SEQ ID NO: 142830
auugaucuucguagccaag

SEQ ID NO: 142832 - RNA, 19 nt, Artificial Sequence
  Description of Artificial Sequence: Synthetic oligonucleotide
  Sense strand starting at position 3564 of SEQ ID NO: 1832
guggcugaggcccauaauu

SEQ ID NO: 142833 - RNA, 19 nt, Artificial Sequence
  Description of Artificial Sequence: Synthetic oligonucleotide
  Antisense strand to SEQ ID NO: 142832
aauuaugggccucagccac

SEQ ID NO: 142834 - RNA, 19 nt, Artificial Sequence
  Description of Artificial Sequence: Synthetic oligonucleotide
  Sense strand starting at position 365 of SEQ ID NO: 1833
ugaggagcccuauaggcua

SEQ ID NO: 142835 - RNA, 19 nt, Artificial Sequence
  Description of Artificial Sequence: Synthetic oligonucleotide
  Antisense strand to SEQ ID NO: 142834
uagccuauagggcuccuca

SEQ ID NO: 142836 - RNA, 19 nt, Artificial Sequence
  Description of Artificial Sequence: Synthetic oligonucleotide
  Sense strand starting at position 440 of SEQ ID NO: 1833
cuaugcaagugcucacaga

SEQ ID NO: 142837 - RNA, 19 nt, Artificial Sequence
  Description of Artificial Sequence: Synthetic oligonucleotide
  Antisense strand to SEQ ID NO: 142836
ucugugagcacuugcauag

SEQ ID NO: 142838 - RNA, 19 nt, Artificial Sequence
  Description of Artificial Sequence: Synthetic oligonucleotide
  Sense strand starting at position 759 of SEQ ID NO: 1833
ccagcaggugcucaagaau

SEQ ID NO: 142839 - RNA, 19 nt, Artificial Sequence
  Description of Artificial Sequence: Synthetic oligonucleotide
  Antisense strand to SEQ ID NO: 142838
auucuugagcaccugcugg

SEQ ID NO: 142840 - RNA, 19 nt, Artificial Sequence
  Description of Artificial Sequence: Synthetic oligonucleotide
  Sense strand starting at position 768 of SEQ ID NO: 1833
gcucaagaauugcuaccau

SEQ ID NO: 142841 - RNA, 19 nt, Artificial Sequence
  Description of Artificial Sequence: Synthetic oligonucleotide
  Antisense strand to SEQ ID NO: 142840
augguagcaauucuugagc

SEQ ID NO: 142842 - RNA, 19 nt, Artificial Sequence
  Description of Artificial Sequence: Synthetic oligonucleotide
  Sense strand starting at position 846 of SEQ ID NO: 1833
agugaagugcugcagggau

SEQ ID NO: 142843 - RNA, 19 nt, Artificial Sequence
  Description of Artificial Sequence: Synthetic oligonucleotide
  Antisense strand to SEQ ID NO: 142842
aucccugcagcacuucacu

SEQ ID NO: 142844 - RNA, 19 nt, Artificial Sequence
  Description of Artificial Sequence: Synthetic oligonucleotide
  Sense strand starting at position 896 of SEQ ID NO: 1833
ugugaugaguacuuacgaa

SEQ ID NO: 142845 - RNA, 19 nt, Artificial Sequence
  Description of Artificial Sequence: Synthetic oligonucleotide
  Antisense strand to SEQ ID NO: 142844
uucguaaguacucaucaca

SEQ ID NO: 142846 - RNA, 19 nt, Artificial Sequence
  Description of Artificial Sequence: Synthetic oligonucleotide
  Sense strand starting at position 1030 of SEQ ID NO: 1833
cggcaugagggcuagaauu

SEQ ID NO: 142847 - RNA, 19 nt, Artificial Sequence
  Description of Artificial Sequence: Synthetic oligonucleotide
  Antisense strand to SEQ ID NO: 142846
aauucuagcccucaugccg

SEQ ID NO: 142848 - RNA, 19 nt, Artificial Sequence
  Description of Artificial Sequence: Synthetic oligonucleotide
  Sense strand starting at position 1032 of SEQ ID NO: 1833
gcaugagggcuagaauuga

SEQ ID NO: 142849 - RNA, 19 nt, Artificial Sequence
  Description of Artificial Sequence: Synthetic oligonucleotide
  Antisense strand to SEQ ID NO: 142848
ucaauucuagcccucaugc

SEQ ID NO: 142850 - RNA, 19 nt, Artificial Sequence
  Description of Artificial Sequence: Synthetic oligonucleotide
  Sense strand starting at position 1235 of SEQ ID NO: 1833
gcccauauaugcccaaaga

SEQ ID NO: 142851 - RNA, 19 nt, Artificial Sequence
  Description of Artificial Sequence: Synthetic oligonucleotide
  Antisense strand to SEQ ID NO: 142850
ucuuugggcauauaugggc

SEQ ID NO: 142852 - RNA, 19 nt, Artificial Sequence
  Description of Artificial Sequence: Synthetic oligonucleotide
  Sense strand starting at position 1483 of SEQ ID NO: 1833
cagaaaggauacgaacaua

SEQ ID NO: 142853 - RNA, 19 nt, Artificial Sequence
  Description of Artificial Sequence: Synthetic oligonucleotide
  Antisense strand to SEQ ID NO: 142852
uauguucguauccuuucug

SEQ ID NO: 142854 - RNA, 19 nt, Artificial Sequence
  Description of Artificial Sequence: Synthetic oligonucleotide
  Sense strand starting at position 1549 of SEQ ID NO: 1833
acuuaaucucgccacgacu

SEQ ID NO: 142855 - RNA, 19 nt, Artificial Sequence
  Description of Artificial Sequence: Synthetic oligonucleotide
  Antisense strand to SEQ ID NO: 142854
agucguggcgagauuaagu

SEQ ID NO: 142856 - RNA, 19 nt, Artificial Sequence
  Description of Artificial Sequence: Synthetic oligonucleotide
  Sense strand starting at position 1722 of SEQ ID NO: 1833
augcgcugggcgucagaaa

SEQ ID NO: 142857 - RNA, 19 nt, Artificial Sequence
  Description of Artificial Sequence: Synthetic oligonucleotide
  Antisense strand to SEQ ID NO: 142856
uuucugacgcccagcgcau

SEQ ID NO: 142858 - RNA, 19 nt, Artificial Sequence
  Description of Artificial Sequence: Synthetic oligonucleotide
  Sense strand starting at position 1784 of SEQ ID NO: 1833
gggugaagaagcuguugaa

SEQ ID NO: 142859 - RNA, 19 nt, Artificial Sequence
  Description of Artificial Sequence: Synthetic oligonucleotide
  Antisense strand to SEQ ID NO: 142858
uucaacagcuucuucaccc

SEQ ID NO: 142860 - RNA, 19 nt, Artificial Sequence
  Description of Artificial Sequence: Synthetic oligonucleotide
  Sense strand starting at position 2103 of SEQ ID NO: 1833
cgcugaagucugccuggua

SEQ ID NO: 142861 - RNA, 19 nt, Artificial Sequence
  Description of Artificial Sequence: Synthetic oligonucleotide
  Antisense strand to SEQ ID NO: 142860
uaccaggcagacuucagcg

SEQ ID NO: 142862 - RNA, 19 nt, Artificial Sequence
  Description of Artificial Sequence: Synthetic oligonucleotide
  Sense strand starting at position 2106 of SEQ ID NO: 1833
ugaagucugccugguaaca

SEQ ID NO: 142863 - RNA, 19 nt, Artificial Sequence
  Description of Artificial Sequence: Synthetic oligonucleotide
  Antisense strand to SEQ ID NO: 142862
uguuaccaggcagacuuca

SEQ ID NO: 142864 - RNA, 19 nt, Artificial Sequence
  Description of Artificial Sequence: Synthetic oligonucleotide
  Sense strand starting at position 2121 of SEQ ID NO: 1833
aacagaaucugauugguca

SEQ ID NO: 142865 - RNA, 19 nt, Artificial Sequence
  Description of Artificial Sequence: Synthetic oligonucleotide
  Antisense strand to SEQ ID NO: 142864
ugaccaaucagauucuguu

SEQ ID NO: 142866 - RNA, 19 nt, Artificial Sequence
  Description of Artificial Sequence: Synthetic oligonucleotide
  Sense strand starting at position 2125 of SEQ ID NO: 1833
gaaucugauuggucaauag

SEQ ID NO: 142867 - RNA, 19 nt, Artificial Sequence
  Description of Artificial Sequence: Synthetic oligonucleotide
  Antisense strand to SEQ ID NO: 142866
cuauugaccaaucagauuc

SEQ ID NO: 142868 - RNA, 19 nt, Artificial Sequence
  Description of Artificial Sequence: Synthetic oligonucleotide
  Sense strand starting at position 2154 of SEQ ID NO: 1833
auccaaaguuggucuuauu

SEQ ID NO: 142869 - RNA, 19 nt, Artificial Sequence
  Description of Artificial Sequence: Synthetic oligonucleotide
  Antisense strand to SEQ ID NO: 142868
aauaagaccaacuuuggau

SEQ ID NO: 142870 - RNA, 19 nt, Artificial Sequence
  Description of Artificial Sequence: Synthetic oligonucleotide
  Sense strand starting at position 2157 of SEQ ID NO: 1833
caaaguuggucuuauuuga

SEQ ID NO: 142871 - RNA, 19 nt, Artificial Sequence
  Description of Artificial Sequence: Synthetic oligonucleotide
  Antisense strand to SEQ ID NO: 142870
ucaaauaagaccaacuuug

SEQ ID NO: 142872 - RNA, 19 nt, Artificial Sequence
  Description of Artificial Sequence: Synthetic oligonucleotide
  Sense strand starting at position 2161 of SEQ ID NO: 1833
guuggucuuauuugaguca

SEQ ID NO: 142873 - RNA, 19 nt, Artificial Sequence
  Description of Artificial Sequence: Synthetic oligonucleotide
  Antisense strand to SEQ ID NO: 142872
ugacucaaauaagaccaac

SEQ ID NO: 142874 - RNA, 19 nt, Artificial Sequence
  Description of Artificial Sequence: Synthetic oligonucleotide
  Sense strand starting at position 2239 of SEQ ID NO: 1833
ccaagagguucuucucuua

SEQ ID NO: 142875 - RNA, 19 nt, Artificial Sequence
  Description of Artificial Sequence: Synthetic oligonucleotide
  Antisense strand to SEQ ID NO: 142874
uaagagaagaaccucuugg

SEQ ID NO: 142876 - RNA, 19 nt, Artificial Sequence
  Description of Artificial Sequence: Synthetic oligonucleotide
  Sense strand starting at position 2242 of SEQ ID NO: 1833
agagguucuucucuuaaag

SEQ ID NO: 142877 - RNA, 19 nt, Artificial Sequence
  Description of Artificial Sequence: Synthetic oligonucleotide
  Antisense strand to SEQ ID NO: 142876
cuuuaagagaagaaccucu

SEQ ID NO: 142878 - RNA, 19 nt, Artificial Sequence
  Description of Artificial Sequence: Synthetic oligonucleotide
  Sense strand starting at position 2401 of SEQ ID NO: 1833
caaugauggguaggaguga

SEQ ID NO: 142879 - RNA, 19 nt, Artificial Sequence
  Description of Artificial Sequence: Synthetic oligonucleotide
  Antisense strand to SEQ ID NO: 142878
ucacuccuacccaucauug

SEQ ID NO: 142880 - RNA, 19 nt, Artificial Sequence
  Description of Artificial Sequence: Synthetic oligonucleotide
  Sense strand starting at position 2409 of SEQ ID NO: 1833
gguaggagugauggaaguu

SEQ ID NO: 142881 - RNA, 19 nt, Artificial Sequence
  Description of Artificial Sequence: Synthetic oligonucleotide
  Antisense strand to SEQ ID NO: 142880
aacuuccaucacuccuacc

SEQ ID NO: 142882 - RNA, 19 nt, Artificial Sequence
  Description of Artificial Sequence: Synthetic oligonucleotide
  Sense strand starting at position 2558 of SEQ ID NO: 1833
aguuguacccauuaaacua

SEQ ID NO: 142883 - RNA, 19 nt, Artificial Sequence
  Description of Artificial Sequence: Synthetic oligonucleotide
  Antisense strand to SEQ ID NO: 142882
uaguuuaauggguacaacu

SEQ ID NO: 142884 - RNA, 19 nt, Artificial Sequence
  Description of Artificial Sequence: Synthetic oligonucleotide
  Sense strand starting at position 2603 of SEQ ID NO: 1833
uugguuucccguguguacu

SEQ ID NO: 142885 - RNA, 19 nt, Artificial Sequence
  Description of Artificial Sequence: Synthetic oligonucleotide
  Antisense strand to SEQ ID NO: 142884
aguacacacgggaaaccaa

SEQ ID NO: 142886 - RNA, 19 nt, Artificial Sequence
  Description of Artificial Sequence: Synthetic oligonucleotide
  Sense strand starting at position 2614 of SEQ ID NO: 1833
uguguacuuuacuuccaaa

SEQ ID NO: 142887 - RNA, 19 nt, Artificial Sequence
  Description of Artificial Sequence: Synthetic oligonucleotide
  Antisense strand to SEQ ID NO: 142886
uuuggaaguaaaguacaca

SEQ ID NO: 142888 - RNA, 19 nt, Artificial Sequence
  Description of Artificial Sequence: Synthetic oligonucleotide
  Sense strand starting at position 2669 of SEQ ID NO: 1833
gucggugaacccuggaauu

SEQ ID NO: 142889 - RNA, 19 nt, Artificial Sequence
  Description of Artificial Sequence: Synthetic oligonucleotide
  Antisense strand to SEQ ID NO: 142888
aauuccaggguucaccgac

SEQ ID NO: 142890 - RNA, 19 nt, Artificial Sequence
  Description of Artificial Sequence: Synthetic oligonucleotide
  Sense strand starting at position 2744 of SEQ ID NO: 1833
cauuguacugaauagguca

SEQ ID NO: 142891 - RNA, 19 nt, Artificial Sequence
  Description of Artificial Sequence: Synthetic oligonucleotide
  Antisense strand to SEQ ID NO: 142890
ugaccuauucaguacaaug

SEQ ID NO: 142892 - RNA, 19 nt, Artificial Sequence
  Description of Artificial Sequence: Synthetic oligonucleotide
  Sense strand starting at position 2929 of SEQ ID NO: 1833
cgcagcggucauguuacaa

SEQ ID NO: 142893 - RNA, 19 nt, Artificial Sequence
  Description of Artificial Sequence: Synthetic oligonucleotide
  Antisense strand to SEQ ID NO: 142892
uuguaacaugaccgcugcg

SEQ ID NO: 142894 - RNA, 19 nt, Artificial Sequence
  Description of Artificial Sequence: Synthetic oligonucleotide
  Sense strand starting at position 2975 of SEQ ID NO: 1833
cuaauauguucuccaggcu

SEQ ID NO: 142895 - RNA, 19 nt, Artificial Sequence
  Description of Artificial Sequence: Synthetic oligonucleotide
  Antisense strand to SEQ ID NO: 142894
agccuggagaacauauuag

SEQ ID NO: 142896 - RNA, 19 nt, Artificial Sequence
  Description of Artificial Sequence: Synthetic oligonucleotide
  Sense strand starting at position 2987 of SEQ ID NO: 1833
ccaggcucaucauuaaugu

SEQ ID NO: 142897 - RNA, 19 nt, Artificial Sequence
  Description of Artificial Sequence: Synthetic oligonucleotide
  Antisense strand to SEQ ID NO: 142896
acauuaaugaugagccugg

SEQ ID NO: 142898 - RNA, 19 nt, Artificial Sequence
  Description of Artificial Sequence: Synthetic oligonucleotide
  Sense strand starting at position 3032 of SEQ ID NO: 1833
gccugagcucaucaccauu

SEQ ID NO: 142899 - RNA, 19 nt, Artificial Sequence
  Description of Artificial Sequence: Synthetic oligonucleotide
  Antisense strand to SEQ ID NO: 142898
aauggugaugagcucaggc

SEQ ID NO: 142900 - RNA, 19 nt, Artificial Sequence
  Description of Artificial Sequence: Synthetic oligonucleotide
  Sense strand starting at position 3806 of SEQ ID NO: 1833
gguguuuauuagguaucag

SEQ ID NO: 142901 - RNA, 19 nt, Artificial Sequence
  Description of Artificial Sequence: Synthetic oligonucleotide
  Antisense strand to SEQ ID NO: 142900
cugauaccuaauaaacacc

SEQ ID NO: 142902 - RNA, 19 nt, Artificial Sequence
  Description of Artificial Sequence: Synthetic oligonucleotide
  Sense strand starting at position 3807 of SEQ ID NO: 1833
guguuuauuagguaucaga

SEQ ID NO: 142903 - RNA, 19 nt, Artificial Sequence
  Description of Artificial Sequence: Synthetic oligonucleotide
  Antisense strand to SEQ ID NO: 142902
ucugauaccuaauaaacac

SEQ ID NO: 142904 - RNA, 19 nt, Artificial Sequence
  Description of Artificial Sequence: Synthetic oligonucleotide
  Sense strand starting at position 3929 of SEQ ID NO: 1833
ggugaagggacuuguccuu

SEQ ID NO: 142905 - RNA, 19 nt, Artificial Sequence
  Description of Artificial Sequence: Synthetic oligonucleotide
  Antisense strand to SEQ ID NO: 142904
aaggacaagucccuucacc

SEQ ID NO: 142906 - RNA, 19 nt, Artificial Sequence
  Description of Artificial Sequence: Synthetic oligonucleotide
  Sense strand starting at position 3934 of SEQ ID NO: 1833
agggacuuguccuuaguca

SEQ ID NO: 142907 - RNA, 19 nt, Artificial Sequence
  Description of Artificial Sequence: Synthetic oligonucleotide
  Antisense strand to SEQ ID NO: 142906
ugacuaaggacaagucccu

SEQ ID NO: 142908 - RNA, 19 nt, Artificial Sequence
  Description of Artificial Sequence: Synthetic oligonucleotide
  Sense strand starting at position 3935 of SEQ ID NO: 1833
gggacuuguccuuagucau

SEQ ID NO: 142909 - RNA, 19 nt, Artificial Sequence
  Description of Artificial Sequence: Synthetic oligonucleotide
  Antisense strand to SEQ ID NO: 142908
augacuaaggacaaguccc

SEQ ID NO: 142910 - RNA, 19 nt, Artificial Sequence
  Description of Artificial Sequence: Synthetic oligonucleotide
  Sense strand starting at position 3938 of SEQ ID NO: 1833
acuuguccuuagucauaua

SEQ ID NO: 142911 - RNA, 19 nt, Artificial Sequence
  Description of Artificial Sequence: Synthetic oligonucleotide
  Antisense strand to SEQ ID NO: 142910
uauaugacuaaggacaagu

SEQ ID NO: 142912 - RNA, 19 nt, Artificial Sequence
  Description of Artificial Sequence: Synthetic oligonucleotide
  Sense strand starting at position 3954 of SEQ ID NO: 1833
auauguagaaagugcuaga

SEQ ID NO: 142913 - RNA, 19 nt, Artificial Sequence
  Description of Artificial Sequence: Synthetic oligonucleotide
  Antisense strand to SEQ ID NO: 142912
ucuagcacuuucuacauau

SEQ ID NO: 142914 - RNA, 19 nt, Artificial Sequence
  Description of Artificial Sequence: Synthetic oligonucleotide
  Sense strand starting at position 3922 of SEQ ID NO: 1835
cauuauuugugauggauag

SEQ ID NO: 142915 - RNA, 19 nt, Artificial Sequence
  Description of Artificial Sequence: Synthetic oligonucleotide
  Antisense strand to SEQ ID NO: 142914
cuauccaucacaaauaaug

SEQ ID NO: 142916 - RNA, 19 nt, Artificial Sequence
  Description of Artificial Sequence: Synthetic oligonucleotide
  Sense strand starting at position 3920 of SEQ ID NO: 1835
aacauuauuugugauggau

SEQ ID NO: 142917 - RNA, 19 nt, Artificial Sequence
  Description of Artificial Sequence: Synthetic oligonucleotide
  Antisense strand to SEQ ID NO: 142916
auccaucacaaauaauguu

SEQ ID NO: 142918 - RNA, 19 nt, Artificial Sequence
  Description of Artificial Sequence: Synthetic oligonucleotide
  Sense strand starting at position 3919 of SEQ ID NO: 1835
aaacauuauuugugaugga

SEQ ID NO: 142919 - RNA, 19 nt, Artificial Sequence
  Description of Artificial Sequence: Synthetic oligonucleotide
  Antisense strand to SEQ ID NO: 142918
uccaucacaaauaauguuu

SEQ ID NO: 142920 - RNA, 19 nt, Artificial Sequence
  Description of Artificial Sequence: Synthetic oligonucleotide
  Sense strand starting at position 3809 of SEQ ID NO: 1835
aggcaugcuucucuagaaa

SEQ ID NO: 142921 - RNA, 19 nt, Artificial Sequence
  Description of Artificial Sequence: Synthetic oligonucleotide
  Antisense strand to SEQ ID NO: 142920
uuucuagagaagcaugccu

SEQ ID NO: 142922 - RNA, 19 nt, Artificial Sequence
  Description of Artificial Sequence: Synthetic oligonucleotide
  Sense strand starting at position 3767 of SEQ ID NO: 1835
acuuaagugcuuggaguua

SEQ ID NO: 142923 - RNA, 19 nt, Artificial Sequence
  Description of Artificial Sequence: Synthetic oligonucleotide
  Antisense strand to SEQ ID NO: 142922
uaacuccaagcacuuaagu

SEQ ID NO: 142924 - RNA, 19 nt, Artificial Sequence
  Description of Artificial Sequence: Synthetic oligonucleotide
  Sense strand starting at position 3765 of SEQ ID NO: 1835
auacuuaagugcuuggagu

SEQ ID NO: 142925 - RNA, 19 nt, Artificial Sequence
  Description of Artificial Sequence: Synthetic oligonucleotide
  Antisense strand to SEQ ID NO: 142924
acuccaagcacuuaaguau

SEQ ID NO: 142926 - RNA, 19 nt, Artificial Sequence
  Description of Artificial Sequence: Synthetic oligonucleotide
  Sense strand starting at position 3594 of SEQ ID NO: 1835
ucucaacaauguccuguua

SEQ ID NO: 142927 - RNA, 19 nt, Artificial Sequence
  Description of Artificial Sequence: Synthetic oligonucleotide
  Antisense strand to SEQ ID NO: 142926
uaacaggacauuguugaga

SEQ ID NO: 142928 - RNA, 19 nt, Artificial Sequence
  Description of Artificial Sequence: Synthetic oligonucleotide
  Sense strand starting at position 3564 of SEQ ID NO: 1835
cuaauucuuggguguauuc

SEQ ID NO: 142929 - RNA, 19 nt, Artificial Sequence
  Description of Artificial Sequence: Synthetic oligonucleotide
  Antisense strand to SEQ ID NO: 142928
gaauacacccaagaauuag

SEQ ID NO: 142930 - RNA, 19 nt, Artificial Sequence
  Description of Artificial Sequence: Synthetic oligonucleotide
  Sense strand starting at position 3563 of SEQ ID NO: 1835
ucuaauucuuggguguauu

SEQ ID NO: 142931 - RNA, 19 nt, Artificial Sequence
  Description of Artificial Sequence: Synthetic oligonucleotide
  Antisense strand to SEQ ID NO: 142930
aauacacccaagaauuaga

SEQ ID NO: 142932 - RNA, 19 nt, Artificial Sequence
  Description of Artificial Sequence: Synthetic oligonucleotide
  Sense strand starting at position 3561 of SEQ ID NO: 1835
uuucuaauucuugggugua

SEQ ID NO: 142933 - RNA, 19 nt, Artificial Sequence
  Description of Artificial Sequence: Synthetic oligonucleotide
  Antisense strand to SEQ ID NO: 142932
uacacccaagaauuagaaa

SEQ ID NO: 142934 - RNA, 19 nt, Artificial Sequence
  Description of Artificial Sequence: Synthetic oligonucleotide
  Sense strand starting at position 3414 of SEQ ID NO: 1835
gucaguucccgguuucugu

SEQ ID NO: 142935 - RNA, 19 nt, Artificial Sequence
  Description of Artificial Sequence: Synthetic oligonucleotide
  Antisense strand to SEQ ID NO: 142934
acagaaaccgggaacugac

SEQ ID NO: 142936 - RNA, 19 nt, Artificial Sequence
  Description of Artificial Sequence: Synthetic oligonucleotide
  Sense strand starting at position 3351 of SEQ ID NO: 1835
ucguauaaagcagaaucau

SEQ ID NO: 142937 - RNA, 19 nt, Artificial Sequence
  Description of Artificial Sequence: Synthetic oligonucleotide
  Antisense strand to SEQ ID NO: 142936
augauucugcuuuauacga

SEQ ID NO: 142938 - RNA, 19 nt, Artificial Sequence
  Description of Artificial Sequence: Synthetic oligonucleotide
  Sense strand starting at position 3344 of SEQ ID NO: 1835
gagucauucguauaaagca

SEQ ID NO: 142939 - RNA, 19 nt, Artificial Sequence
  Description of Artificial Sequence: Synthetic oligonucleotide
  Antisense strand to SEQ ID NO: 142938
ugcuuuauacgaaugacuc

SEQ ID NO: 142940 - RNA, 19 nt, Artificial Sequence
  Description of Artificial Sequence: Synthetic oligonucleotide
  Sense strand starting at position 3340 of SEQ ID NO: 1835
agaugagucauucguauaa

SEQ ID NO: 142941 - RNA, 19 nt, Artificial Sequence
  Description of Artificial Sequence: Synthetic oligonucleotide
  Antisense strand to SEQ ID NO: 142940
uuauacgaaugacucaucu

SEQ ID NO: 142942 - RNA, 19 nt, Artificial Sequence
  Description of Artificial Sequence: Synthetic oligonucleotide
  Sense strand starting at position 3338 of SEQ ID NO: 1835
gaagaugagucauucguau

SEQ ID NO: 142943 - RNA, 19 nt, Artificial Sequence
  Description of Artificial Sequence: Synthetic oligonucleotide
  Antisense strand to SEQ ID NO: 142942
auacgaaugacucaucuuc

SEQ ID NO: 142944 - RNA, 19 nt, Artificial Sequence
  Description of Artificial Sequence: Synthetic oligonucleotide
  Sense strand starting at position 3322 of SEQ ID NO: 1835
cccaaugaauaagauagaa

SEQ ID NO: 142945 - RNA, 19 nt, Artificial Sequence
  Description of Artificial Sequence: Synthetic oligonucleotide
  Antisense strand to SEQ ID NO: 142944
uucuaucuuauucauuggg

SEQ ID NO: 142946 - RNA, 19 nt, Artificial Sequence
  Description of Artificial Sequence: Synthetic oligonucleotide
  Sense strand starting at position 3059 of SEQ ID NO: 1835
gggagaugggacuguucga

SEQ ID NO: 142947 - RNA, 19 nt, Artificial Sequence
  Description of Artificial Sequence: Synthetic oligonucleotide
  Antisense strand to SEQ ID NO: 142946
ucgaacagucccaucuccc

SEQ ID NO: 142948 - RNA, 19 nt, Artificial Sequence
  Description of Artificial Sequence: Synthetic oligonucleotide
  Sense strand starting at position 2948 of SEQ ID NO: 1835
ccagaaauuucugauugug

SEQ ID NO: 142949 - RNA, 19 nt, Artificial Sequence
  Description of Artificial Sequence: Synthetic oligonucleotide
  Antisense strand to SEQ ID NO: 142948
cacaaucagaaauuucugg

SEQ ID NO: 142950 - RNA, 19 nt, Artificial Sequence
  Description of Artificial Sequence: Synthetic oligonucleotide
  Sense strand starting at position 2653 of SEQ ID NO: 1835
uaaccugucucuuugggau

SEQ ID NO: 142951 - RNA, 19 nt, Artificial Sequence
  Description of Artificial Sequence: Synthetic oligonucleotide
  Antisense strand to SEQ ID NO: 142950
aucccaaagagacagguua

SEQ ID NO: 142952 - RNA, 19 nt, Artificial Sequence
  Description of Artificial Sequence: Synthetic oligonucleotide
  Sense strand starting at position 2454 of SEQ ID NO: 1835
caaguucguggacgaagaa

SEQ ID NO: 142953 - RNA, 19 nt, Artificial Sequence
  Description of Artificial Sequence: Synthetic oligonucleotide
  Antisense strand to SEQ ID NO: 142952
uucuucguccacgaacuug

SEQ ID NO: 142954 - RNA, 19 nt, Artificial Sequence
  Description of Artificial Sequence: Synthetic oligonucleotide
  Sense strand starting at position 2451 of SEQ ID NO: 1835
gaacaaguucguggacgaa

SEQ ID NO: 142955 - RNA, 19 nt, Artificial Sequence
  Description of Artificial Sequence: Synthetic oligonucleotide
  Antisense strand to SEQ ID NO: 142954
uucguccacgaacuuguuc

SEQ ID NO: 142956 - RNA, 19 nt, Artificial Sequence
  Description of Artificial Sequence: Synthetic oligonucleotide
  Sense strand starting at position 2427 of SEQ ID NO: 1835
gguggacguggaugaauau

SEQ ID NO: 142957 - RNA, 19 nt, Artificial Sequence
  Description of Artificial Sequence: Synthetic oligonucleotide
  Antisense strand to SEQ ID NO: 142956
auauucauccacguccacc

SEQ ID NO: 142958 - RNA, 19 nt, Artificial Sequence
  Description of Artificial Sequence: Synthetic oligonucleotide
  Sense strand starting at position 2378 of SEQ ID NO: 1835
ucgggauugggaugucgaa

SEQ ID NO: 142959 - RNA, 19 nt, Artificial Sequence
  Description of Artificial Sequence: Synthetic oligonucleotide
  Antisense strand to SEQ ID NO: 142958
uucgacaucccaaucccga

SEQ ID NO: 142960 - RNA, 19 nt, Artificial Sequence
  Description of Artificial Sequence: Synthetic oligonucleotide
  Sense strand starting at position 1992 of SEQ ID NO: 1835
cgagaaucacgugacgcaa

SEQ ID NO: 142961 - RNA, 19 nt, Artificial Sequence
  Description of Artificial Sequence: Synthetic oligonucleotide
  Antisense strand to SEQ ID NO: 142960
uugcgucacgugauucucg

SEQ ID NO: 142962 - RNA, 19 nt, Artificial Sequence
  Description of Artificial Sequence: Synthetic oligonucleotide
  Sense strand starting at position 1438 of SEQ ID NO: 1835
uuaagaugucaaugacccu

SEQ ID NO: 142963 - RNA, 19 nt, Artificial Sequence
  Description of Artificial Sequence: Synthetic oligonucleotide
  Antisense strand to SEQ ID NO: 142962
agggucauugacaucuuaa

SEQ ID NO: 142964 - RNA, 19 nt, Artificial Sequence
  Description of Artificial Sequence: Synthetic oligonucleotide
  Sense strand starting at position 1410 of SEQ ID NO: 1835
gcauucuugcuccaaacga

SEQ ID NO: 142965 - RNA, 19 nt, Artificial Sequence
  Description of Artificial Sequence: Synthetic oligonucleotide
  Antisense strand to SEQ ID NO: 142964
ucguuuggagcaagaaugc

SEQ ID NO: 142966 - RNA, 19 nt, Artificial Sequence
  Description of Artificial Sequence: Synthetic oligonucleotide
  Sense strand starting at position 1222 of SEQ ID NO: 1835
cgucuuagugccuuuaucu

SEQ ID NO: 142967 - RNA, 19 nt, Artificial Sequence
  Description of Artificial Sequence: Synthetic oligonucleotide
  Antisense strand to SEQ ID NO: 142966
agauaaaggcacuaagacg

SEQ ID NO: 142968 - RNA, 19 nt, Artificial Sequence
  Description of Artificial Sequence: Synthetic oligonucleotide
  Sense strand starting at position 1212 of SEQ ID NO: 1835
ccauuuccuucgucuuagu

SEQ ID NO: 142969 - RNA, 19 nt, Artificial Sequence
  Description of Artificial Sequence: Synthetic oligonucleotide
  Antisense strand to SEQ ID NO: 142968
acuaagacgaaggaaaugg

SEQ ID NO: 142970 - RNA, 19 nt, Artificial Sequence
  Description of Artificial Sequence: Synthetic oligonucleotide
  Sense strand starting at position 1056 of SEQ ID NO: 1835
gaaaccaaagauuguggua

SEQ ID NO: 142971 - RNA, 19 nt, Artificial Sequence
  Description of Artificial Sequence: Synthetic oligonucleotide
  Antisense strand to SEQ ID NO: 142970
uaccacaaucuuugguuuc

SEQ ID NO: 142972 - RNA, 19 nt, Artificial Sequence
  Description of Artificial Sequence: Synthetic oligonucleotide
  Sense strand starting at position 1016 of SEQ ID NO: 1835
uucugauucuaagccuagu

SEQ ID NO: 142973 - RNA, 19 nt, Artificial Sequence
  Description of Artificial Sequence: Synthetic oligonucleotide
  Antisense strand to SEQ ID NO: 142972
acuaggcuuagaaucagaa

SEQ ID NO: 142974 - RNA, 19 nt, Artificial Sequence
  Description of Artificial Sequence: Synthetic oligonucleotide
  Sense strand starting at position 900 of SEQ ID NO: 1835
uuguaaagugcacauuauu

SEQ ID NO: 142975 - RNA, 19 nt, Artificial Sequence
  Description of Artificial Sequence: Synthetic oligonucleotide
  Antisense strand to SEQ ID NO: 142974
aauaaugugcacuuuacaa

SEQ ID NO: 142976 - RNA, 19 nt, Artificial Sequence
  Description of Artificial Sequence: Synthetic oligonucleotide
  Sense strand starting at position 898 of SEQ ID NO: 1835
ucuuguaaagugcacauua

SEQ ID NO: 142977 - RNA, 19 nt, Artificial Sequence
  Description of Artificial Sequence: Synthetic oligonucleotide
  Antisense strand to SEQ ID NO: 142976
uaaugugcacuuuacaaga

SEQ ID NO: 142978 - RNA, 19 nt, Artificial Sequence
  Description of Artificial Sequence: Synthetic oligonucleotide
  Sense strand starting at position 874 of SEQ ID NO: 1835
cgugauauauaauccuaag

SEQ ID NO: 142979 - RNA, 19 nt, Artificial Sequence
  Description of Artificial Sequence: Synthetic oligonucleotide
  Antisense strand to SEQ ID NO: 142978
cuuaggauuauauaucacg

SEQ ID NO: 142980 - RNA, 19 nt, Artificial Sequence
  Description of Artificial Sequence: Synthetic oligonucleotide
  Sense strand starting at position 863 of SEQ ID NO: 1835
ggaaacacuuucgugauau

SEQ ID NO: 142981 - RNA, 19 nt, Artificial Sequence
  Description of Artificial Sequence: Synthetic oligonucleotide
  Antisense strand to SEQ ID NO: 142980
auaucacgaaaguguuucc

SEQ ID NO: 142982 - RNA, 19 nt, Artificial Sequence
  Description of Artificial Sequence: Synthetic oligonucleotide
  Sense strand starting at position 745 of SEQ ID NO: 1835
ccaucucuucuaggaagga

SEQ ID NO: 142983 - RNA, 19 nt, Artificial Sequence
  Description of Artificial Sequence: Synthetic oligonucleotide
  Antisense strand to SEQ ID NO: 142982
uccuuccuagaagagaugg

SEQ ID NO: 142984 - RNA, 19 nt, Artificial Sequence
  Description of Artificial Sequence: Synthetic oligonucleotide
  Sense strand starting at position 363 of SEQ ID NO: 1835
agugguuuaauugggaaca

SEQ ID NO: 142985 - RNA, 19 nt, Artificial Sequence
  Description of Artificial Sequence: Synthetic oligonucleotide
  Antisense strand to SEQ ID NO: 142984
uguucccaauuaaaccacu

SEQ ID NO: 142986 - RNA, 19 nt, Artificial Sequence
  Description of Artificial Sequence: Synthetic oligonucleotide
  Sense strand starting at position 356 of SEQ ID NO: 1835
auagaagagugguuuaauu

SEQ ID NO: 142987 - RNA, 19 nt, Artificial Sequence
  Description of Artificial Sequence: Synthetic oligonucleotide
  Antisense strand to SEQ ID NO: 142986
aauuaaaccacucuucuau

SEQ ID NO: 142988 - RNA, 19 nt, Artificial Sequence
  Description of Artificial Sequence: Synthetic oligonucleotide
  Sense strand starting at position 353 of SEQ ID NO: 1835
cuuauagaagagugguuua

SEQ ID NO: 142989 - RNA, 19 nt, Artificial Sequence
  Description of Artificial Sequence: Synthetic oligonucleotide
  Antisense strand to SEQ ID NO: 142988
uaaaccacucuucuauaag

SEQ ID NO: 142990 - RNA, 19 nt, Artificial Sequence
  Description of Artificial Sequence: Synthetic oligonucleotide
  Sense strand starting at position 107 of SEQ ID NO: 1835
cuacuaaaguuagcaaaga

SEQ ID NO: 142991 - RNA, 19 nt, Artificial Sequence
  Description of Artificial Sequence: Synthetic oligonucleotide
  Antisense strand to SEQ ID NO: 142990
ucuuugcuaacuuuaguag

SEQ ID NO: 142992 - RNA, 19 nt, Artificial Sequence
  Description of Artificial Sequence: Synthetic oligonucleotide
  Sense strand starting at position 10 of SEQ ID NO: 1835
ugccucuaauguucgauuu

SEQ ID NO: 142993 - RNA, 19 nt, Artificial Sequence
  Description of Artificial Sequence: Synthetic oligonucleotide
  Antisense strand to SEQ ID NO: 142992
aaaucgaacauuagaggca

SEQ ID NO: 142994 - RNA, 19 nt, Artificial Sequence
  Description of Artificial Sequence: Synthetic oligonucleotide
  Sense strand starting at position 3957 of SEQ ID NO: 1834
ccucacaauguauguaauu

SEQ ID NO: 142995 - RNA, 19 nt, Artificial Sequence
  Description of Artificial Sequence: Synthetic oligonucleotide
  Antisense strand to SEQ ID NO: 142994
aauuacauacauugugagg

SEQ ID NO: 142996 - RNA, 19 nt, Artificial Sequence
  Description of Artificial Sequence: Synthetic oligonucleotide
  Sense strand starting at position 3890 of SEQ ID NO: 1834
augucuucucauggaauua

SEQ ID NO: 142997 - RNA, 19 nt, Artificial Sequence
  Description of Artificial Sequence: Synthetic oligonucleotide
  Antisense strand to SEQ ID NO: 142996
uaauuccaugagaagacau

SEQ ID NO: 142998 - RNA, 19 nt, Artificial Sequence
  Description of Artificial Sequence: Synthetic oligonucleotide
  Sense strand starting at position 3886 of SEQ ID NO: 1834
aaugaugucuucucaugga

SEQ ID NO: 142999 - RNA, 19 nt, Artificial Sequence
  Description of Artificial Sequence: Synthetic oligonucleotide
  Antisense strand to SEQ ID NO: 142998
uccaugagaagacaucauu

SEQ ID NO: 143000 - RNA, 19 nt, Artificial Sequence
  Description of Artificial Sequence: Synthetic oligonucleotide
  Sense strand starting at position 3882 of SEQ ID NO: 1834
cugaaaugaugucuucuca

SEQ ID NO: 143001 - RNA, 19 nt, Artificial Sequence
  Description of Artificial Sequence: Synthetic oligonucleotide
  Antisense strand to SEQ ID NO: 143000
ugagaagacaucauuucag

SEQ ID NO: 143002 - RNA, 19 nt, Artificial Sequence
  Description of Artificial Sequence: Synthetic oligonucleotide
  Sense strand starting at position 3651 of SEQ ID NO: 1834
gugagugaaccugaaugcu

SEQ ID NO: 143003 - RNA, 19 nt, Artificial Sequence
  Description of Artificial Sequence: Synthetic oligonucleotide
  Antisense strand to SEQ ID NO: 143002
agcauucagguucacucac

SEQ ID NO: 143004 - RNA, 19 nt, Artificial Sequence
  Description of Artificial Sequence: Synthetic oligonucleotide
  Sense strand starting at position 3641 of SEQ ID NO: 1834
cagccuugcagugagugaa

SEQ ID NO: 143005 - RNA, 19 nt, Artificial Sequence
  Description of Artificial Sequence: Synthetic oligonucleotide
  Antisense strand to SEQ ID NO: 143004
uucacucacugcaaggcug

SEQ ID NO: 143006 - RNA, 19 nt, Artificial Sequence
  Description of Artificial Sequence: Synthetic oligonucleotide
  Sense strand starting at position 3449 of SEQ ID NO: 1834
cagggauauuaagcaguuu

SEQ ID NO: 143007 - RNA, 19 nt, Artificial Sequence
  Description of Artificial Sequence: Synthetic oligonucleotide
  Antisense strand to SEQ ID NO: 143006
aaacugcuuaauaucccug

SEQ ID NO: 143008 - RNA, 19 nt, Artificial Sequence
  Description of Artificial Sequence: Synthetic oligonucleotide
  Sense strand starting at position 3413 of SEQ ID NO: 1834
gcuacacauuuggcaguaa

SEQ ID NO: 143009 - RNA, 19 nt, Artificial Sequence
  Description of Artificial Sequence: Synthetic oligonucleotide
  Antisense strand to SEQ ID NO: 143008
uuacugccaaauguguagc

SEQ ID NO: 143010 - RNA, 19 nt, Artificial Sequence
  Description of Artificial Sequence: Synthetic oligonucleotide
  Sense strand starting at position 3320 of SEQ ID NO: 1834
ccuauuaggugaucuugga

SEQ ID NO: 143011 - RNA, 19 nt, Artificial Sequence
  Description of Artificial Sequence: Synthetic oligonucleotide
  Antisense strand to SEQ ID NO: 143010
uccaagaucaccuaauagg

SEQ ID NO: 143012 - RNA, 19 nt, Artificial Sequence
  Description of Artificial Sequence: Synthetic oligonucleotide
  Sense strand starting at position 3317 of SEQ ID NO: 1834
ggaccuauuaggugaucuu

SEQ ID NO: 143013 - RNA, 19 nt, Artificial Sequence
  Description of Artificial Sequence: Synthetic oligonucleotide
  Antisense strand to SEQ ID NO: 143012
aagaucaccuaauaggucc

SEQ ID NO: 143014 - RNA, 19 nt, Artificial Sequence
  Description of Artificial Sequence: Synthetic oligonucleotide
  Sense strand starting at position 3223 of SEQ ID NO: 1834
ggcagaauguugcugggaa

SEQ ID NO: 143015 - RNA, 19 nt, Artificial Sequence
  Description of Artificial Sequence: Synthetic oligonucleotide
  Antisense strand to SEQ ID NO: 143014
uucccagcaacauucugcc

SEQ ID NO: 143016 - RNA, 19 nt, Artificial Sequence
  Description of Artificial Sequence: Synthetic oligonucleotide
  Sense strand starting at position 3149 of SEQ ID NO: 1834
ugaagugguuguucuauaa

SEQ ID NO: 143017 - RNA, 19 nt, Artificial Sequence
  Description of Artificial Sequence: Synthetic oligonucleotide
  Antisense strand to SEQ ID NO: 143016
uuauagaacaaccacuuca

SEQ ID NO: 143018 - RNA, 19 nt, Artificial Sequence
  Description of Artificial Sequence: Synthetic oligonucleotide
  Sense strand starting at position 3108 of SEQ ID NO: 1834
gcaccaucacuguauagag

SEQ ID NO: 143019 - RNA, 19 nt, Artificial Sequence
  Description of Artificial Sequence: Synthetic oligonucleotide
  Antisense strand to SEQ ID NO: 143018
cucuauacagugauggugc

SEQ ID NO: 143020 - RNA, 19 nt, Artificial Sequence
  Description of Artificial Sequence: Synthetic oligonucleotide
  Sense strand starting at position 2979 of SEQ ID NO: 1834
ugauguucccaggagagca

SEQ ID NO: 143021 - RNA, 19 nt, Artificial Sequence
  Description of Artificial Sequence: Synthetic oligonucleotide
  Antisense strand to SEQ ID NO: 143020
ugcucuccugggaacauca

SEQ ID NO: 143022 - RNA, 19 nt, Artificial Sequence
  Description of Artificial Sequence: Synthetic oligonucleotide
  Sense strand starting at position 2964 of SEQ ID NO: 1834
gcaaaucaaguguacugau

SEQ ID NO: 143023 - RNA, 19 nt, Artificial Sequence
  Description of Artificial Sequence: Synthetic oligonucleotide
  Antisense strand to SEQ ID NO: 143022
aucaguacacuugauuugc

SEQ ID NO: 143024 - RNA, 19 nt, Artificial Sequence
  Description of Artificial Sequence: Synthetic oligonucleotide
  Sense strand starting at position 2909 of SEQ ID NO: 1834
augacauaagccuggguuu

SEQ ID NO: 143025 - RNA, 19 nt, Artificial Sequence
  Description of Artificial Sequence: Synthetic oligonucleotide
  Antisense strand to SEQ ID NO: 143024
aaacccaggcuuaugucau

SEQ ID NO: 143026 - RNA, 19 nt, Artificial Sequence
  Description of Artificial Sequence: Synthetic oligonucleotide
  Sense strand starting at position 2787 of SEQ ID NO: 1834
gccagaauuccaugcaaau

SEQ ID NO: 143027 - RNA, 19 nt, Artificial Sequence
  Description of Artificial Sequence: Synthetic oligonucleotide
  Antisense strand to SEQ ID NO: 143026
auuugcauggaauucuggc

SEQ ID NO: 143028 - RNA, 19 nt, Artificial Sequence
  Description of Artificial Sequence: Synthetic oligonucleotide
  Sense strand starting at position 2687 of SEQ ID NO: 1834
agaucugcuauagggauaa

SEQ ID NO: 143029 - RNA, 19 nt, Artificial Sequence
  Description of Artificial Sequence: Synthetic oligonucleotide
  Antisense strand to SEQ ID NO: 143028
uuaucccuauagcagaucu

SEQ ID NO: 143030 - RNA, 19 nt, Artificial Sequence
  Description of Artificial Sequence: Synthetic oligonucleotide
  Sense strand starting at position 2681 of SEQ ID NO: 1834
auggaaagaucugcuauag

SEQ ID NO: 143031 - RNA, 19 nt, Artificial Sequence
  Description of Artificial Sequence: Synthetic oligonucleotide
  Antisense strand to SEQ ID NO: 143030
cuauagcagaucuuuccau

SEQ ID NO: 143032 - RNA, 19 nt, Artificial Sequence
  Description of Artificial Sequence: Synthetic oligonucleotide
  Sense strand starting at position 2318 of SEQ ID NO: 1834
cagugagagccgcaauacu

SEQ ID NO: 143033 - RNA, 19 nt, Artificial Sequence
  Description of Artificial Sequence: Synthetic oligonucleotide
  Antisense strand to SEQ ID NO: 143032
aguauugcggcucucacug

SEQ ID NO: 143034 - RNA, 19 nt, Artificial Sequence
  Description of Artificial Sequence: Synthetic oligonucleotide
  Sense strand starting at position 2116 of SEQ ID NO: 1834
gaaggugauugggaaacaa

SEQ ID NO: 143035 - RNA, 19 nt, Artificial Sequence
  Description of Artificial Sequence: Synthetic oligonucleotide
  Antisense strand to SEQ ID NO: 143034
uuguuucccaaucaccuuc

SEQ ID NO: 143036 - RNA, 19 nt, Artificial Sequence
  Description of Artificial Sequence: Synthetic oligonucleotide
  Sense strand starting at position 2107 of SEQ ID NO: 1834
uccaguucugaaggugauu

SEQ ID NO: 143037 - RNA, 19 nt, Artificial Sequence
  Description of Artificial Sequence: Synthetic oligonucleotide
  Antisense strand to SEQ ID NO: 143036
aaucaccuucagaacugga

SEQ ID NO: 143038 - RNA, 19 nt, Artificial Sequence
  Description of Artificial Sequence: Synthetic oligonucleotide
  Sense strand starting at position 2080 of SEQ ID NO: 1834
uggauaaagucagcaugaa

SEQ ID NO: 143039 - RNA, 19 nt, Artificial Sequence
  Description of Artificial Sequence: Synthetic oligonucleotide
  Antisense strand to SEQ ID NO: 143038
uucaugcugacuuuaucca

SEQ ID NO: 143040 - RNA, 19 nt, Artificial Sequence
  Description of Artificial Sequence: Synthetic oligonucleotide
  Sense strand starting at position 2038 of SEQ ID NO: 1834
cuguuugugcuugugagca

SEQ ID NO: 143041 - RNA, 19 nt, Artificial Sequence
  Description of Artificial Sequence: Synthetic oligonucleotide
  Antisense strand to SEQ ID NO: 143040
ugcucacaagcacaaacag

SEQ ID NO: 143042 - RNA, 19 nt, Artificial Sequence
  Description of Artificial Sequence: Synthetic oligonucleotide
  Sense strand starting at position 1743 of SEQ ID NO: 1834
gagagcucucguuaccauu

SEQ ID NO: 143043 - RNA, 19 nt, Artificial Sequence
  Description of Artificial Sequence: Synthetic oligonucleotide
  Antisense strand to SEQ ID NO: 143042
aaugguaacgagagcucuc

SEQ ID NO: 143044 - RNA, 19 nt, Artificial Sequence
  Description of Artificial Sequence: Synthetic oligonucleotide
  Sense strand starting at position 1720 of SEQ ID NO: 1834
cagagaagccucgggagaa

SEQ ID NO: 143045 - RNA, 19 nt, Artificial Sequence
  Description of Artificial Sequence: Synthetic oligonucleotide
  Antisense strand to SEQ ID NO: 143044
uucucccgaggcuucucug

SEQ ID NO: 143046 - RNA, 19 nt, Artificial Sequence
  Description of Artificial Sequence: Synthetic oligonucleotide
  Sense strand starting at position 1695 of SEQ ID NO: 1834
gcgaaagcgggagaagauu

SEQ ID NO: 143047 - RNA, 19 nt, Artificial Sequence
  Description of Artificial Sequence: Synthetic oligonucleotide
  Antisense strand to SEQ ID NO: 143046
aaucuucucccgcuuucgc

SEQ ID NO: 143048 - RNA, 19 nt, Artificial Sequence
  Description of Artificial Sequence: Synthetic oligonucleotide
  Sense strand starting at position 1627 of SEQ ID NO: 1834
agagcuuuagcucacaagu

SEQ ID NO: 143049 - RNA, 19 nt, Artificial Sequence
  Description of Artificial Sequence: Synthetic oligonucleotide
  Antisense strand to SEQ ID NO: 143048
acuugugagcuaaagcucu

SEQ ID NO: 143050 - RNA, 19 nt, Artificial Sequence
  Description of Artificial Sequence: Synthetic oligonucleotide
  Sense strand starting at position 1624 of SEQ ID NO: 1834
gagagagcuuuagcucaca

SEQ ID NO: 143051 - RNA, 19 nt, Artificial Sequence
  Description of Artificial Sequence: Synthetic oligonucleotide
  Antisense strand to SEQ ID NO: 143050
ugugagcuaaagcucucuc

SEQ ID NO: 143052 - RNA, 19 nt, Artificial Sequence
  Description of Artificial Sequence: Synthetic oligonucleotide
  Sense strand starting at position 1622 of SEQ ID NO: 1834
gugagagagcuuuagcuca

SEQ ID NO: 143053 - RNA, 19 nt, Artificial Sequence
  Description of Artificial Sequence: Synthetic oligonucleotide
  Antisense strand to SEQ ID NO: 143052
ugagcuaaagcucucucac

SEQ ID NO: 143054 - RNA, 19 nt, Artificial Sequence
  Description of Artificial Sequence: Synthetic oligonucleotide
  Sense strand starting at position 1235 of SEQ ID NO: 1834
uccucacuccuuuggaagu

SEQ ID NO: 143055 - RNA, 19 nt, Artificial Sequence
  Description of Artificial Sequence: Synthetic oligonucleotide
  Antisense strand to SEQ ID NO: 143054
acuuccaaaggagugagga

SEQ ID NO: 143056 - RNA, 19 nt, Artificial Sequence
  Description of Artificial Sequence: Synthetic oligonucleotide
  Sense strand starting at position 1233 of SEQ ID NO: 1834
aguccucacuccuuuggaa

SEQ ID NO: 143057 - RNA, 19 nt, Artificial Sequence
  Description of Artificial Sequence: Synthetic oligonucleotide
  Antisense strand to SEQ ID NO: 143056
uuccaaaggagugaggacu

SEQ ID NO: 143058 - RNA, 19 nt, Artificial Sequence
  Description of Artificial Sequence: Synthetic oligonucleotide
  Sense strand starting at position 1169 of SEQ ID NO: 1834
uggcucggucauugaagaa

SEQ ID NO: 143059 - RNA, 19 nt, Artificial Sequence
  Description of Artificial Sequence: Synthetic oligonucleotide
  Antisense strand to SEQ ID NO: 143058
uucuucaaugaccgagcca

SEQ ID NO: 143060 - RNA, 19 nt, Artificial Sequence
  Description of Artificial Sequence: Synthetic oligonucleotide
  Sense strand starting at position 1010 of SEQ ID NO: 1834
gaaacuagauuaguccuga

SEQ ID NO: 143061 - RNA, 19 nt, Artificial Sequence
  Description of Artificial Sequence: Synthetic oligonucleotide
  Antisense strand to SEQ ID NO: 143060
ucaggacuaaucuaguuuc

SEQ ID NO: 143062 - RNA, 19 nt, Artificial Sequence
  Description of Artificial Sequence: Synthetic oligonucleotide
  Sense strand starting at position 458 of SEQ ID NO: 1834
acacuuggucauuagcauu

SEQ ID NO: 143063 - RNA, 19 nt, Artificial Sequence
  Description of Artificial Sequence: Synthetic oligonucleotide
  Antisense strand to SEQ ID NO: 143062
aaugcuaaugaccaagugu

SEQ ID NO: 143064 - RNA, 19 nt, Artificial Sequence
  Description of Artificial Sequence: Synthetic oligonucleotide
  Sense strand starting at position 453 of SEQ ID NO: 1834
ugcaaacacuuggucauua

SEQ ID NO: 143065 - RNA, 19 nt, Artificial Sequence
  Description of Artificial Sequence: Synthetic oligonucleotide
  Antisense strand to SEQ ID NO: 143064
uaaugaccaaguguuugca

SEQ ID NO: 143066 - RNA, 19 nt, Artificial Sequence
  Description of Artificial Sequence: Synthetic oligonucleotide
  Sense strand starting at position 378 of SEQ ID NO: 1834
gguucugaauuauugacaa

SEQ ID NO: 143067 - RNA, 19 nt, Artificial Sequence
  Description of Artificial Sequence: Synthetic oligonucleotide
  Antisense strand to SEQ ID NO: 143066
uugucaauaauucagaacc

SEQ ID NO: 143068 - RNA, 19 nt, Artificial Sequence
  Description of Artificial Sequence: Synthetic oligonucleotide
  Sense strand starting at position 358 of SEQ ID NO: 1834
accucaagauguuucuaag

SEQ ID NO: 143069 - RNA, 19 nt, Artificial Sequence
  Description of Artificial Sequence: Synthetic oligonucleotide
  Antisense strand to SEQ ID NO: 143068
cuuagaaacaucuugaggu

SEQ ID NO: 143070 - RNA, 19 nt, Artificial Sequence
  Description of Artificial Sequence: Synthetic oligonucleotide
  Sense strand starting at position 306 of SEQ ID NO: 1834
uguauucugugugucauuu

SEQ ID NO: 143071 - RNA, 19 nt, Artificial Sequence
  Description of Artificial Sequence: Synthetic oligonucleotide
  Antisense strand to SEQ ID NO: 143070
aaaugacacacagaauaca

SEQ ID NO: 143072 - RNA, 19 nt, Artificial Sequence
  Description of Artificial Sequence: Synthetic oligonucleotide
  Sense strand starting at position 270 of SEQ ID NO: 1834
auggcucuugucuaagaga

SEQ ID NO: 143073 - RNA, 19 nt, Artificial Sequence
  Description of Artificial Sequence: Synthetic oligonucleotide
  Antisense strand to SEQ ID NO: 143072
ucucuuagacaagagccau

SEQ ID NO: 143074 - RNA, 19 nt, Artificial Sequence
  Description of Artificial Sequence: Synthetic oligonucleotide
  Sense strand starting at position 3928 of SEQ ID NO: 1836
gcuuccacacuugaauaga

SEQ ID NO: 143075 - RNA, 19 nt, Artificial Sequence
  Description of Artificial Sequence: Synthetic oligonucleotide
  Antisense strand to SEQ ID NO: 143074
ucuauucaaguguggaagc

SEQ ID NO: 143076 - RNA, 19 nt, Artificial Sequence
  Description of Artificial Sequence: Synthetic oligonucleotide
  Sense strand starting at position 3801 of SEQ ID NO: 1836
gaaacucuggucugagauc

SEQ ID NO: 143077 - RNA, 19 nt, Artificial Sequence
  Description of Artificial Sequence: Synthetic oligonucleotide
  Antisense strand to SEQ ID NO: 143076
gaucucagaccagaguuuc

SEQ ID NO: 143078 - RNA, 19 nt, Artificial Sequence
  Description of Artificial Sequence: Synthetic oligonucleotide
  Sense strand starting at position 3574 of SEQ ID NO: 1836
ugaguaaguuauguuagag

SEQ ID NO: 143079 - RNA, 19 nt, Artificial Sequence
  Description of Artificial Sequence: Synthetic oligonucleotide
  Antisense strand to SEQ ID NO: 143078
cucuaacauaacuuacuca

SEQ ID NO: 143080 - RNA, 19 nt, Artificial Sequence
  Description of Artificial Sequence: Synthetic oligonucleotide
  Sense strand starting at position 3421 of SEQ ID NO: 1836
cccuaaugagaccgaugaa

SEQ ID NO: 143081 - RNA, 19 nt, Artificial Sequence
  Description of Artificial Sequence: Synthetic oligonucleotide
  Antisense strand to SEQ ID NO: 143080
uucaucggucucauuaggg

SEQ ID NO: 143082 - RNA, 19 nt, Artificial Sequence
  Description of Artificial Sequence: Synthetic oligonucleotide
  Sense strand starting at position 3228 of SEQ ID NO: 1836
uucuaucgucaggauaaag

SEQ ID NO: 143083 - RNA, 19 nt, Artificial Sequence
  Description of Artificial Sequence: Synthetic oligonucleotide
  Antisense strand to SEQ ID NO: 143082
cuuuauccugacgauagaa

SEQ ID NO: 143084 - RNA, 19 nt, Artificial Sequence
  Description of Artificial Sequence: Synthetic oligonucleotide
  Sense strand starting at position 3225 of SEQ ID NO: 1836
ugguucuaucgucaggaua

SEQ ID NO: 143085 - RNA, 19 nt, Artificial Sequence
  Description of Artificial Sequence: Synthetic oligonucleotide
  Antisense strand to SEQ ID NO: 143084
uauccugacgauagaacca

SEQ ID NO: 143086 - RNA, 19 nt, Artificial Sequence
  Description of Artificial Sequence: Synthetic oligonucleotide
  Sense strand starting at position 3172 of SEQ ID NO: 1836
gaugguauuagguaaagcu

SEQ ID NO: 143087 - RNA, 19 nt, Artificial Sequence
  Description of Artificial Sequence: Synthetic oligonucleotide
  Antisense strand to SEQ ID NO: 143086
agcuuuaccuaauaccauc

SEQ ID NO: 143088 - RNA, 19 nt, Artificial Sequence
  Description of Artificial Sequence: Synthetic oligonucleotide
  Sense strand starting at position 3052 of SEQ ID NO: 1836
uaacaaguguggcuuauuu

SEQ ID NO: 143089 - RNA, 19 nt, Artificial Sequence
  Description of Artificial Sequence: Synthetic oligonucleotide
  Antisense strand to SEQ ID NO: 143088
aaauaagccacacuuguua

SEQ ID NO: 143090 - RNA, 19 nt, Artificial Sequence
  Description of Artificial Sequence: Synthetic oligonucleotide
  Sense strand starting at position 2913 of SEQ ID NO: 1836
gcaguaucucuggagagau

SEQ ID NO: 143091 - RNA, 19 nt, Artificial Sequence
  Description of Artificial Sequence: Synthetic oligonucleotide
  Antisense strand to SEQ ID NO: 143090
aucucuccagagauacugc

SEQ ID NO: 143092 - RNA, 19 nt, Artificial Sequence
  Description of Artificial Sequence: Synthetic oligonucleotide
  Sense strand starting at position 2880 of SEQ ID NO: 1836
uguacuucuuagguaauga

SEQ ID NO: 143093 - RNA, 19 nt, Artificial Sequence
  Description of Artificial Sequence: Synthetic oligonucleotide
  Antisense strand to SEQ ID NO: 143092
ucauuaccuaagaaguaca

SEQ ID NO: 143094 - RNA, 19 nt, Artificial Sequence
  Description of Artificial Sequence: Synthetic oligonucleotide
  Sense strand starting at position 2609 of SEQ ID NO: 1836
uggcaauacauaggaugau

SEQ ID NO: 143095 - RNA, 19 nt, Artificial Sequence
  Description of Artificial Sequence: Synthetic oligonucleotide
  Antisense strand to SEQ ID NO: 143094
aucauccuauguauugcca

SEQ ID NO: 143096 - RNA, 19 nt, Artificial Sequence
  Description of Artificial Sequence: Synthetic oligonucleotide
  Sense strand starting at position 2597 of SEQ ID NO: 1836
cuagacaucgacuggcaau

SEQ ID NO: 143097 - RNA, 19 nt, Artificial Sequence
  Description of Artificial Sequence: Synthetic oligonucleotide
  Antisense strand to SEQ ID NO: 143096
auugccagucgaugucuag

SEQ ID NO: 143098 - RNA, 19 nt, Artificial Sequence
  Description of Artificial Sequence: Synthetic oligonucleotide
  Sense strand starting at position 2369 of SEQ ID NO: 1836
uuggauaguccuugacuau

SEQ ID NO: 143099 - RNA, 19 nt, Artificial Sequence
  Description of Artificial Sequence: Synthetic oligonucleotide
  Antisense strand to SEQ ID NO: 143098
auagucaaggacuauccaa

SEQ ID NO: 143100 - RNA, 19 nt, Artificial Sequence
  Description of Artificial Sequence: Synthetic oligonucleotide
  Sense strand starting at position 2368 of SEQ ID NO: 1836
uuuggauaguccuugacua

SEQ ID NO: 143101 - RNA, 19 nt, Artificial Sequence
  Description of Artificial Sequence: Synthetic oligonucleotide
  Antisense strand to SEQ ID NO: 143100
uagucaaggacuauccaaa

SEQ ID NO: 143102 - RNA, 19 nt, Artificial Sequence
  Description of Artificial Sequence: Synthetic oligonucleotide
  Sense strand starting at position 2201 of SEQ ID NO: 1836
augucacaugucuaaagca

SEQ ID NO: 143103 - RNA, 19 nt, Artificial Sequence
  Description of Artificial Sequence: Synthetic oligonucleotide
  Antisense strand to SEQ ID NO: 143102
ugcuuuagacaugugacau

SEQ ID NO: 143104 - RNA, 19 nt, Artificial Sequence
  Description of Artificial Sequence: Synthetic oligonucleotide
  Sense strand starting at position 2147 of SEQ ID NO: 1836
caggucacuugauuagaaa

SEQ ID NO: 143105 - RNA, 19 nt, Artificial Sequence
  Description of Artificial Sequence: Synthetic oligonucleotide
  Antisense strand to SEQ ID NO: 143104
uuucuaaucaagugaccug

SEQ ID NO: 143106 - RNA, 19 nt, Artificial Sequence
  Description of Artificial Sequence: Synthetic oligonucleotide
  Sense strand starting at position 2142 of SEQ ID NO: 1836
gagaacaggucacuugauu

SEQ ID NO: 143107 - RNA, 19 nt, Artificial Sequence
  Description of Artificial Sequence: Synthetic oligonucleotide
  Antisense strand to SEQ ID NO: 143106
aaucaagugaccuguucuc

SEQ ID NO: 143108 - RNA, 19 nt, Artificial Sequence
  Description of Artificial Sequence: Synthetic oligonucleotide
  Sense strand starting at position 2013 of SEQ ID NO: 1836
aaaggagucuguuuaucaa

SEQ ID NO: 143109 - RNA, 19 nt, Artificial Sequence
  Description of Artificial Sequence: Synthetic oligonucleotide
  Antisense strand to SEQ ID NO: 143108
uugauaaacagacuccuuu

SEQ ID NO: 143110 - RNA, 19 nt, Artificial Sequence
  Description of Artificial Sequence: Synthetic oligonucleotide
  Sense strand starting at position 1688 of SEQ ID NO: 1836
cucugaucuggcuaaacua

SEQ ID NO: 143111 - RNA, 19 nt, Artificial Sequence
  Description of Artificial Sequence: Synthetic oligonucleotide
  Antisense strand to SEQ ID NO: 143110
uaguuuagccagaucagag

SEQ ID NO: 143112 - RNA, 19 nt, Artificial Sequence
  Description of Artificial Sequence: Synthetic oligonucleotide
  Sense strand starting at position 1640 of SEQ ID NO: 1836
uuuaaugcagcugaauauu

SEQ ID NO: 143113 - RNA, 19 nt, Artificial Sequence
  Description of Artificial Sequence: Synthetic oligonucleotide
  Antisense strand to SEQ ID NO: 143112
aauauucagcugcauuaaa

SEQ ID NO: 143114 - RNA, 19 nt, Artificial Sequence
  Description of Artificial Sequence: Synthetic oligonucleotide
  Sense strand starting at position 1329 of SEQ ID NO: 1836
ugauaaugauaguuuagug

SEQ ID NO: 143115 - RNA, 19 nt, Artificial Sequence
  Description of Artificial Sequence: Synthetic oligonucleotide
  Antisense strand to SEQ ID NO: 143114
cacuaaacuaucauuauca

SEQ ID NO: 143116 - RNA, 19 nt, Artificial Sequence
  Description of Artificial Sequence: Synthetic oligonucleotide
  Sense strand starting at position 1300 of SEQ ID NO: 1836
agagauaaugcauaggcuu

SEQ ID NO: 143117 - RNA, 19 nt, Artificial Sequence
  Description of Artificial Sequence: Synthetic oligonucleotide
  Antisense strand to SEQ ID NO: 143116
aagccuaugcauuaucucu

SEQ ID NO: 143118 - RNA, 19 nt, Artificial Sequence
  Description of Artificial Sequence: Synthetic oligonucleotide
  Sense strand starting at position 1266 of SEQ ID NO: 1836
uacugugcgcaguauuuau

SEQ ID NO: 143119 - RNA, 19 nt, Artificial Sequence
  Description of Artificial Sequence: Synthetic oligonucleotide
  Antisense strand to SEQ ID NO: 143118
auaaauacugcgcacagua

SEQ ID NO: 143120 - RNA, 19 nt, Artificial Sequence
  Description of Artificial Sequence: Synthetic oligonucleotide
  Sense strand starting at position 1214 of SEQ ID NO: 1836
ugguacugauagucuaauu

SEQ ID NO: 143121 - RNA, 19 nt, Artificial Sequence
  Description of Artificial Sequence: Synthetic oligonucleotide
  Antisense strand to SEQ ID NO: 143120
aauuagacuaucaguacca

SEQ ID NO: 143122 - RNA, 19 nt, Artificial Sequence
  Description of Artificial Sequence: Synthetic oligonucleotide
  Sense strand starting at position 1168 of SEQ ID NO: 1836
gauaaaguccaauaugugu

SEQ ID NO: 143123 - RNA, 19 nt, Artificial Sequence
  Description of Artificial Sequence: Synthetic oligonucleotide
  Antisense strand to SEQ ID NO: 143122
acacauauuggacuuuauc

SEQ ID NO: 143124 - RNA, 19 nt, Artificial Sequence
  Description of Artificial Sequence: Synthetic oligonucleotide
  Sense strand starting at position 1110 of SEQ ID NO: 1836
gaguuacuauaguuaugaa

SEQ ID NO: 143125 - RNA, 19 nt, Artificial Sequence
  Description of Artificial Sequence: Synthetic oligonucleotide
  Antisense strand to SEQ ID NO: 143124
uucauaacuauaguaacuc

SEQ ID NO: 143126 - RNA, 19 nt, Artificial Sequence
  Description of Artificial Sequence: Synthetic oligonucleotide
  Sense strand starting at position 1049 of SEQ ID NO: 1836
cugaaacuguaguucuaau

SEQ ID NO: 143127 - RNA, 19 nt, Artificial Sequence
  Description of Artificial Sequence: Synthetic oligonucleotide
  Antisense strand to SEQ ID NO: 143126
auuagaacuacaguuucag

SEQ ID NO: 143128 - RNA, 19 nt, Artificial Sequence
  Description of Artificial Sequence: Synthetic oligonucleotide
  Sense strand starting at position 971 of SEQ ID NO: 1836
guacauacauuagucaauu

SEQ ID NO: 143129 - RNA, 19 nt, Artificial Sequence
  Description of Artificial Sequence: Synthetic oligonucleotide
  Antisense strand to SEQ ID NO: 143128
aauugacuaauguauguac

SEQ ID NO: 143130 - RNA, 19 nt, Artificial Sequence
  Description of Artificial Sequence: Synthetic oligonucleotide
  Sense strand starting at position 758 of SEQ ID NO: 1836
aguuaucaguaacuacaga

SEQ ID NO: 143131 - RNA, 19 nt, Artificial Sequence
  Description of Artificial Sequence: Synthetic oligonucleotide
  Antisense strand to SEQ ID NO: 143130
ucuguaguuacugauaacu

SEQ ID NO: 143132 - RNA, 19 nt, Artificial Sequence
  Description of Artificial Sequence: Synthetic oligonucleotide
  Sense strand starting at position 755 of SEQ ID NO: 1836
ugaaguuaucaguaacuac

SEQ ID NO: 143133 - RNA, 19 nt, Artificial Sequence
  Description of Artificial Sequence: Synthetic oligonucleotide
  Antisense strand to SEQ ID NO: 143132
guaguuacugauaacuuca

SEQ ID NO: 143134 - RNA, 19 nt, Artificial Sequence
  Description of Artificial Sequence: Synthetic oligonucleotide
  Sense strand starting at position 744 of SEQ ID NO: 1836
gcauacuaugcugaaguua

SEQ ID NO: 143135 - RNA, 19 nt, Artificial Sequence
  Description of Artificial Sequence: Synthetic oligonucleotide
  Antisense strand to SEQ ID NO: 143134
uaacuucagcauaguaugc

SEQ ID NO: 143136 - RNA, 19 nt, Artificial Sequence
  Description of Artificial Sequence: Synthetic oligonucleotide
  Sense strand starting at position 740 of SEQ ID NO: 1836
agaggcauacuaugcugaa

SEQ ID NO: 143137 - RNA, 19 nt, Artificial Sequence
  Description of Artificial Sequence: Synthetic oligonucleotide
  Antisense strand to SEQ ID NO: 143136
uucagcauaguaugccucu

SEQ ID NO: 143138 - RNA, 19 nt, Artificial Sequence
  Description of Artificial Sequence: Synthetic oligonucleotide
  Sense strand starting at position 723 of SEQ ID NO: 1836
cuaagucagcauuauuaag

SEQ ID NO: 143139 - RNA, 19 nt, Artificial Sequence
  Description of Artificial Sequence: Synthetic oligonucleotide
  Antisense strand to SEQ ID NO: 143138
cuuaauaaugcugacuuag

SEQ ID NO: 143140 - RNA, 19 nt, Artificial Sequence
  Description of Artificial Sequence: Synthetic oligonucleotide
  Sense strand starting at position 404 of SEQ ID NO: 1836
guaagagacugucuuugau

SEQ ID NO: 143141 - RNA, 19 nt, Artificial Sequence
  Description of Artificial Sequence: Synthetic oligonucleotide
  Antisense strand to SEQ ID NO: 143140
aucaaagacagucucuuac

SEQ ID NO: 143142 - RNA, 19 nt, Artificial Sequence
  Description of Artificial Sequence: Synthetic oligonucleotide
  Sense strand starting at position 295 of SEQ ID NO: 1836
acaagacuauaugugcuua

SEQ ID NO: 143143 - RNA, 19 nt, Artificial Sequence
  Description of Artificial Sequence: Synthetic oligonucleotide
  Antisense strand to SEQ ID NO: 143142
uaagcacauauagucuugu

SEQ ID NO: 143144 - RNA, 19 nt, Artificial Sequence
  Description of Artificial Sequence: Synthetic oligonucleotide
  Sense strand starting at position 211 of SEQ ID NO: 1836
cuaaucucaguagaauugu

SEQ ID NO: 143145 - RNA, 19 nt, Artificial Sequence
  Description of Artificial Sequence: Synthetic oligonucleotide
  Antisense strand to SEQ ID NO: 143144
acaauucuacugagauuag

SEQ ID NO: 143146 - RNA, 19 nt, Artificial Sequence
  Description of Artificial Sequence: Synthetic oligonucleotide
  Sense strand starting at position 208 of SEQ ID NO: 1836
guccuaaucucaguagaau

SEQ ID NO: 143147 - RNA, 19 nt, Artificial Sequence
  Description of Artificial Sequence: Synthetic oligonucleotide
  Antisense strand to SEQ ID NO: 143146
auucuacugagauuaggac

SEQ ID NO: 143148 - RNA, 19 nt, Artificial Sequence
  Description of Artificial Sequence: Synthetic oligonucleotide
  Sense strand starting at position 98 of SEQ ID NO: 1836
ugaacaaugugauucccaa

SEQ ID NO: 143149 - RNA, 19 nt, Artificial Sequence
  Description of Artificial Sequence: Synthetic oligonucleotide
  Antisense strand to SEQ ID NO: 143148
uugggaaucacauuguuca

SEQ ID NO: 143150 - RNA, 19 nt, Artificial Sequence
  Description of Artificial Sequence: Synthetic oligonucleotide
  Sense strand starting at position 93 of SEQ ID NO: 1836
uagagugaacaaugugauu

SEQ ID NO: 143151 - RNA, 19 nt, Artificial Sequence
  Description of Artificial Sequence: Synthetic oligonucleotide
  Antisense strand to SEQ ID NO: 143150
aaucacauuguucacucua

SEQ ID NO: 143152 - RNA, 19 nt, Artificial Sequence
  Description of Artificial Sequence: Synthetic oligonucleotide
  Sense strand starting at position 36 of SEQ ID NO: 1836
gguccauaucuauaccauu

SEQ ID NO: 143153 - RNA, 19 nt, Artificial Sequence
  Description of Artificial Sequence: Synthetic oligonucleotide
  Antisense strand to SEQ ID NO: 143152
aaugguauagauauggacc

SEQ ID NO: 143154 - RNA, 19 nt, Artificial Sequence
  Description of Artificial Sequence: Synthetic oligonucleotide
  Sense strand starting at position 3917 of SEQ ID NO: 1837
guuugugccaguguuugga

SEQ ID NO: 143155 - RNA, 19 nt, Artificial Sequence
  Description of Artificial Sequence: Synthetic oligonucleotide
  Antisense strand to SEQ ID NO: 143154
uccaaacacuggcacaaac

SEQ ID NO: 143156 - RNA, 19 nt, Artificial Sequence
  Description of Artificial Sequence: Synthetic oligonucleotide
  Sense strand starting at position 3892 of SEQ ID NO: 1837
ggugaaauguauccaguag

SEQ ID NO: 143157 - RNA, 19 nt, Artificial Sequence
  Description of Artificial Sequence: Synthetic oligonucleotide
  Antisense strand to SEQ ID NO: 143156
cuacuggauacauuucacc

SEQ ID NO: 143158 - RNA, 19 nt, Artificial Sequence
  Description of Artificial Sequence: Synthetic oligonucleotide
  Sense strand starting at position 3879 of SEQ ID NO: 1837
gggugaauugucuggugaa

SEQ ID NO: 143159 - RNA, 19 nt, Artificial Sequence
  Description of Artificial Sequence: Synthetic oligonucleotide
  Antisense strand to SEQ ID NO: 143158
uucaccagacaauucaccc

SEQ ID NO: 143160 - RNA, 19 nt, Artificial Sequence
  Description of Artificial Sequence: Synthetic oligonucleotide
  Sense strand starting at position 3739 of SEQ ID NO: 1837
guuaauguucgugaugaca

SEQ ID NO: 143161 - RNA, 19 nt, Artificial Sequence
  Description of Artificial Sequence: Synthetic oligonucleotide
  Antisense strand to SEQ ID NO: 143160
ugucaucacgaacauuaac

SEQ ID NO: 143162 - RNA, 19 nt, Artificial Sequence
  Description of Artificial Sequence: Synthetic oligonucleotide
  Sense strand starting at position 3518 of SEQ ID NO: 1837
cugaucugcuuacucuaga

SEQ ID NO: 143163 - RNA, 19 nt, Artificial Sequence
  Description of Artificial Sequence: Synthetic oligonucleotide
  Antisense strand to SEQ ID NO: 143162
ucuagaguaagcagaucag

SEQ ID NO: 143164 - RNA, 19 nt, Artificial Sequence
  Description of Artificial Sequence: Synthetic oligonucleotide
  Sense strand starting at position 3503 of SEQ ID NO: 1837
uguccuucugaugaacuga

SEQ ID NO: 143165 - RNA, 19 nt, Artificial Sequence
  Description of Artificial Sequence: Synthetic oligonucleotide
  Antisense strand to SEQ ID NO: 143164
ucaguucaucagaaggaca

SEQ ID NO: 143166 - RNA, 19 nt, Artificial Sequence
  Description of Artificial Sequence: Synthetic oligonucleotide
  Sense strand starting at position 3302 of SEQ ID NO: 1837
agauauuuguggcagauuu

SEQ ID NO: 143167 - RNA, 19 nt, Artificial Sequence
  Description of Artificial Sequence: Synthetic oligonucleotide
  Antisense strand to SEQ ID NO: 143166
aaaucugccacaaauaucu

SEQ ID NO: 143168 - RNA, 19 nt, Artificial Sequence
  Description of Artificial Sequence: Synthetic oligonucleotide
  Sense strand starting at position 3297 of SEQ ID NO: 1837
uguguagauauuuguggca

SEQ ID NO: 143169 - RNA, 19 nt, Artificial Sequence
  Description of Artificial Sequence: Synthetic oligonucleotide
  Antisense strand to SEQ ID NO: 143168
ugccacaaauaucuacaca

SEQ ID NO: 143170 - RNA, 19 nt, Artificial Sequence
  Description of Artificial Sequence: Synthetic oligonucleotide
  Sense strand starting at position 3289 of SEQ ID NO: 1837
aagagcaauguguagauau

SEQ ID NO: 143171 - RNA, 19 nt, Artificial Sequence
  Description of Artificial Sequence: Synthetic oligonucleotide
  Antisense strand to SEQ ID NO: 143170
auaucuacacauugcucuu

SEQ ID NO: 143172 - RNA, 19 nt, Artificial Sequence
  Description of Artificial Sequence: Synthetic oligonucleotide
  Sense strand starting at position 3287 of SEQ ID NO: 1837
ucaagagcaauguguagau

SEQ ID NO: 143173 - RNA, 19 nt, Artificial Sequence
  Description of Artificial Sequence: Synthetic oligonucleotide
  Antisense strand to SEQ ID NO: 143172
aucuacacauugcucuuga

SEQ ID NO: 143174 - RNA, 19 nt, Artificial Sequence
  Description of Artificial Sequence: Synthetic oligonucleotide
  Sense strand starting at position 3157 of SEQ ID NO: 1837
gcuuguuuaauggagucaa

SEQ ID NO: 143175 - RNA, 19 nt, Artificial Sequence
  Description of Artificial Sequence: Synthetic oligonucleotide
  Antisense strand to SEQ ID NO: 143174
uugacuccauuaaacaagc

SEQ ID NO: 143176 - RNA, 19 nt, Artificial Sequence
  Description of Artificial Sequence: Synthetic oligonucleotide
  Sense strand starting at position 2905 of SEQ ID NO: 1837
gggaggaucuggguuguuu

SEQ ID NO: 143177 - RNA, 19 nt, Artificial Sequence
  Description of Artificial Sequence: Synthetic oligonucleotide
  Antisense strand to SEQ ID NO: 143176
aaacaacccagauccuccc

SEQ ID NO: 143178 - RNA, 19 nt, Artificial Sequence
  Description of Artificial Sequence: Synthetic oligonucleotide
  Sense strand starting at position 2537 of SEQ ID NO: 1837
ugcccuuguccuggauuua

SEQ ID NO: 143179 - RNA, 19 nt, Artificial Sequence
  Description of Artificial Sequence: Synthetic oligonucleotide
  Antisense strand to SEQ ID NO: 143178
uaaauccaggacaagggca

SEQ ID NO: 143180 - RNA, 19 nt, Artificial Sequence
  Description of Artificial Sequence: Synthetic oligonucleotide
  Sense strand starting at position 2481 of SEQ ID NO: 1837
ugaacacagugcuuaagau

SEQ ID NO: 143181 - RNA, 19 nt, Artificial Sequence
  Description of Artificial Sequence: Synthetic oligonucleotide
  Antisense strand to SEQ ID NO: 143180
aucuuaagcacuguguuca

SEQ ID NO: 143182 - RNA, 19 nt, Artificial Sequence
  Description of Artificial Sequence: Synthetic oligonucleotide
  Sense strand starting at position 2320 of SEQ ID NO: 1837
aucaaucuguuuguaauag

SEQ ID NO: 143183 - RNA, 19 nt, Artificial Sequence
  Description of Artificial Sequence: Synthetic oligonucleotide
  Antisense strand to SEQ ID NO: 143182
cuauuacaaacagauugau

SEQ ID NO: 143184 - RNA, 19 nt, Artificial Sequence
  Description of Artificial Sequence: Synthetic oligonucleotide
  Sense strand starting at position 2294 of SEQ ID NO: 1837
uuagcaaaugguugagaac

SEQ ID NO: 143185 - RNA, 19 nt, Artificial Sequence
  Description of Artificial Sequence: Synthetic oligonucleotide
  Antisense strand to SEQ ID NO: 143184
guucucaaccauuugcuaa

SEQ ID NO: 143186 - RNA, 19 nt, Artificial Sequence
  Description of Artificial Sequence: Synthetic oligonucleotide
  Sense strand starting at position 2293 of SEQ ID NO: 1837
guuagcaaaugguugagaa

SEQ ID NO: 143187 - RNA, 19 nt, Artificial Sequence
  Description of Artificial Sequence: Synthetic oligonucleotide
  Antisense strand to SEQ ID NO: 143186
uucucaaccauuugcuaac

SEQ ID NO: 143188 - RNA, 19 nt, Artificial Sequence
  Description of Artificial Sequence: Synthetic oligonucleotide
  Sense strand starting at position 2068 of SEQ ID NO: 1837
uccagugcauuacugauaa

SEQ ID NO: 143189 - RNA, 19 nt, Artificial Sequence
  Description of Artificial Sequence: Synthetic oligonucleotide
  Antisense strand to SEQ ID NO: 143188
uuaucaguaaugcacugga

SEQ ID NO: 143190 - RNA, 19 nt, Artificial Sequence
  Description of Artificial Sequence: Synthetic oligonucleotide
  Sense strand starting at position 2066 of SEQ ID NO: 1837
acuccagugcauuacugau

SEQ ID NO: 143191 - RNA, 19 nt, Artificial Sequence
  Description of Artificial Sequence: Synthetic oligonucleotide
  Antisense strand to SEQ ID NO: 143190
aucaguaaugcacuggagu

SEQ ID NO: 143192 - RNA, 19 nt, Artificial Sequence
  Description of Artificial Sequence: Synthetic oligonucleotide
  Sense strand starting at position 2050 of SEQ ID NO: 1837
aaaguagugcuguaggacu

SEQ ID NO: 143193 - RNA, 19 nt, Artificial Sequence
  Description of Artificial Sequence: Synthetic oligonucleotide
  Antisense strand to SEQ ID NO: 143192
aguccuacagcacuacuuu

SEQ ID NO: 143194 - RNA, 19 nt, Artificial Sequence
  Description of Artificial Sequence: Synthetic oligonucleotide
  Sense strand starting at position 2012 of SEQ ID NO: 1837
acacguaucuaugcaaaga

SEQ ID NO: 143195 - RNA, 19 nt, Artificial Sequence
  Description of Artificial Sequence: Synthetic oligonucleotide
  Antisense strand to SEQ ID NO: 143194
ucuuugcauagauacgugu

SEQ ID NO: 143196 - RNA, 19 nt, Artificial Sequence
  Description of Artificial Sequence: Synthetic oligonucleotide
  Sense strand starting at position 1669 of SEQ ID NO: 1837
aagaauauguguuuguuag

SEQ ID NO: 143197 - RNA, 19 nt, Artificial Sequence
  Description of Artificial Sequence: Synthetic oligonucleotide
  Antisense strand to SEQ ID NO: 143196
cuaacaaacacauauucuu

SEQ ID NO: 143198 - RNA, 19 nt, Artificial Sequence
  Description of Artificial Sequence: Synthetic oligonucleotide
  Sense strand starting at position 1314 of SEQ ID NO: 1837
ugugcuuaagcauaacaua

SEQ ID NO: 143199 - RNA, 19 nt, Artificial Sequence
  Description of Artificial Sequence: Synthetic oligonucleotide
  Antisense strand to SEQ ID NO: 143198
uauguuaugcuuaagcaca

SEQ ID NO: 143200 - RNA, 19 nt, Artificial Sequence
  Description of Artificial Sequence: Synthetic oligonucleotide
  Sense strand starting at position 1056 of SEQ ID NO: 1837
aguaguaugccagaauuag

SEQ ID NO: 143201 - RNA, 19 nt, Artificial Sequence
  Description of Artificial Sequence: Synthetic oligonucleotide
  Antisense strand to SEQ ID NO: 143200
cuaauucuggcauacuacu

SEQ ID NO: 143202 - RNA, 19 nt, Artificial Sequence
  Description of Artificial Sequence: Synthetic oligonucleotide
  Sense strand starting at position 1010 of SEQ ID NO: 1837
uucucagagugauuauaaa

SEQ ID NO: 143203 - RNA, 19 nt, Artificial Sequence
  Description of Artificial Sequence: Synthetic oligonucleotide
  Antisense strand to SEQ ID NO: 143202
uuuauaaucacucugagaa

SEQ ID NO: 143204 - RNA, 19 nt, Artificial Sequence
  Description of Artificial Sequence: Synthetic oligonucleotide
  Sense strand starting at position 1001 of SEQ ID NO: 1837
agaaucuaauucucagagu

SEQ ID NO: 143205 - RNA, 19 nt, Artificial Sequence
  Description of Artificial Sequence: Synthetic oligonucleotide
  Antisense strand to SEQ ID NO: 143204
acucugagaauuagauucu

SEQ ID NO: 143206 - RNA, 19 nt, Artificial Sequence
  Description of Artificial Sequence: Synthetic oligonucleotide
  Sense strand starting at position 928 of SEQ ID NO: 1837
uuaggucuccacgaugauu

SEQ ID NO: 143207 - RNA, 19 nt, Artificial Sequence
  Description of Artificial Sequence: Synthetic oligonucleotide
  Antisense strand to SEQ ID NO: 143206
aaucaucguggagaccuaa

SEQ ID NO: 143208 - RNA, 19 nt, Artificial Sequence
  Description of Artificial Sequence: Synthetic oligonucleotide
  Sense strand starting at position 911 of SEQ ID NO: 1837
gaguguuuagaacaaguuu

SEQ ID NO: 143209 - RNA, 19 nt, Artificial Sequence
  Description of Artificial Sequence: Synthetic oligonucleotide
  Antisense strand to SEQ ID NO: 143208
aaacuuguucuaaacacuc

SEQ ID NO: 143210 - RNA, 19 nt, Artificial Sequence
  Description of Artificial Sequence: Synthetic oligonucleotide
  Sense strand starting at position 905 of SEQ ID NO: 1837
aacauagaguguuuagaac

SEQ ID NO: 143211 - RNA, 19 nt, Artificial Sequence
  Description of Artificial Sequence: Synthetic oligonucleotide
  Antisense strand to SEQ ID NO: 143210
guucuaaacacucuauguu

SEQ ID NO: 143212 - RNA, 19 nt, Artificial Sequence
  Description of Artificial Sequence: Synthetic oligonucleotide
  Sense strand starting at position 686 of SEQ ID NO: 1837
ggauuaugguuauucccau

SEQ ID NO: 143213 - RNA, 19 nt, Artificial Sequence
  Description of Artificial Sequence: Synthetic oligonucleotide
  Antisense strand to SEQ ID NO: 143212
augggaauaaccauaaucc

SEQ ID NO: 143214 - RNA, 19 nt, Artificial Sequence
  Description of Artificial Sequence: Synthetic oligonucleotide
  Sense strand starting at position 675 of SEQ ID NO: 1837
ucggaaaugcuggauuaug

SEQ ID NO: 143215 - RNA, 19 nt, Artificial Sequence
  Description of Artificial Sequence: Synthetic oligonucleotide
  Antisense strand to SEQ ID NO: 143214
cauaauccagcauuuccga

SEQ ID NO: 143216 - RNA, 19 nt, Artificial Sequence
  Description of Artificial Sequence: Synthetic oligonucleotide
  Sense strand starting at position 674 of SEQ ID NO: 1837
cucggaaaugcuggauuau

SEQ ID NO: 143217 - RNA, 19 nt, Artificial Sequence
  Description of Artificial Sequence: Synthetic oligonucleotide
  Antisense strand to SEQ ID NO: 143216
auaauccagcauuuccgag

SEQ ID NO: 143218 - RNA, 19 nt, Artificial Sequence
  Description of Artificial Sequence: Synthetic oligonucleotide
  Sense strand starting at position 622 of SEQ ID NO: 1837
uggcaaagauuacuguaaa

SEQ ID NO: 143219 - RNA, 19 nt, Artificial Sequence
  Description of Artificial Sequence: Synthetic oligonucleotide
  Antisense strand to SEQ ID NO: 143218
uuuacaguaaucuuugcca

SEQ ID NO: 143220 - RNA, 19 nt, Artificial Sequence
  Description of Artificial Sequence: Synthetic oligonucleotide
  Sense strand starting at position 599 of SEQ ID NO: 1837
gugcuuccuggagaaugca

SEQ ID NO: 143221 - RNA, 19 nt, Artificial Sequence
  Description of Artificial Sequence: Synthetic oligonucleotide
  Antisense strand to SEQ ID NO: 143220
ugcauucuccaggaagcac

SEQ ID NO: 143222 - RNA, 19 nt, Artificial Sequence
  Description of Artificial Sequence: Synthetic oligonucleotide
  Sense strand starting at position 597 of SEQ ID NO: 1837
gugugcuuccuggagaaug

SEQ ID NO: 143223 - RNA, 19 nt, Artificial Sequence
  Description of Artificial Sequence: Synthetic oligonucleotide
  Antisense strand to SEQ ID NO: 143222
cauucuccaggaagcacac

SEQ ID NO: 143224 - RNA, 19 nt, Artificial Sequence
  Description of Artificial Sequence: Synthetic oligonucleotide
  Sense strand starting at position 419 of SEQ ID NO: 1837
gugaaacagugaucuaaau

SEQ ID NO: 143225 - RNA, 19 nt, Artificial Sequence
  Description of Artificial Sequence: Synthetic oligonucleotide
  Antisense strand to SEQ ID NO: 143224
auuuagaucacuguuucac

SEQ ID NO: 143226 - RNA, 19 nt, Artificial Sequence
  Description of Artificial Sequence: Synthetic oligonucleotide
  Sense strand starting at position 222 of SEQ ID NO: 1837
aaguaaaguucuuuaggau

SEQ ID NO: 143227 - RNA, 19 nt, Artificial Sequence
  Description of Artificial Sequence: Synthetic oligonucleotide
  Antisense strand to SEQ ID NO: 143226
auccuaaagaacuuuacuu

SEQ ID NO: 143228 - RNA, 19 nt, Artificial Sequence
  Description of Artificial Sequence: Synthetic oligonucleotide
  Sense strand starting at position 221 of SEQ ID NO: 1837
aaaguaaaguucuuuagga

SEQ ID NO: 143229 - RNA, 19 nt, Artificial Sequence
  Description of Artificial Sequence: Synthetic oligonucleotide
  Antisense strand to SEQ ID NO: 143228
uccuaaagaacuuuacuuu

SEQ ID NO: 143230 - RNA, 19 nt, Artificial Sequence
  Description of Artificial Sequence: Synthetic oligonucleotide
  Sense strand starting at position 192 of SEQ ID NO: 1837
ccauaaagggaauguucua

SEQ ID NO: 143231 - RNA, 19 nt, Artificial Sequence
  Description of Artificial Sequence: Synthetic oligonucleotide
  Antisense strand to SEQ ID NO: 143230
uagaacauucccuuuaugg

SEQ ID NO: 143232 - RNA, 19 nt, Artificial Sequence
  Description of Artificial Sequence: Synthetic oligonucleotide
  Sense strand starting at position 119 of SEQ ID NO: 1837
ccaauauagaguggcagaa

SEQ ID NO: 143233 - RNA, 19 nt, Artificial Sequence
  Description of Artificial Sequence: Synthetic oligonucleotide
  Antisense strand to SEQ ID NO: 143232
uucugccacucuauauugg

SEQ ID NO: 143234 - RNA, 19 nt, Artificial Sequence
  Description of Artificial Sequence: Synthetic oligonucleotide
  Sense strand starting at position 45 of SEQ ID NO: 1838
cccagcacaucuucugaga

SEQ ID NO: 143235 - RNA, 19 nt, Artificial Sequence
  Description of Artificial Sequence: Synthetic oligonucleotide
  Antisense strand to SEQ ID NO: 143234
ucucagaagaugugcuggg

SEQ ID NO: 143236 - RNA, 19 nt, Artificial Sequence
  Description of Artificial Sequence: Synthetic oligonucleotide
  Sense strand starting at position 139 of SEQ ID NO: 1838
uagccagaacucugaugga

SEQ ID NO: 143237 - RNA, 19 nt, Artificial Sequence
  Description of Artificial Sequence: Synthetic oligonucleotide
  Antisense strand to SEQ ID NO: 143236
uccaucagaguucuggcua

SEQ ID NO: 143238 - RNA, 19 nt, Artificial Sequence
  Description of Artificial Sequence: Synthetic oligonucleotide
  Sense strand starting at position 219 of SEQ ID NO: 1838
cuuaguuggacuuagggua

SEQ ID NO: 143239 - RNA, 19 nt, Artificial Sequence
  Description of Artificial Sequence: Synthetic oligonucleotide
  Antisense strand to SEQ ID NO: 143238
uacccuaaguccaacuaag

SEQ ID NO: 143240 - RNA, 19 nt, Artificial Sequence
  Description of Artificial Sequence: Synthetic oligonucleotide
  Sense strand starting at position 246 of SEQ ID NO: 1838
ugcuuucuagagcacaauu

SEQ ID NO: 143241 - RNA, 19 nt, Artificial Sequence
  Description of Artificial Sequence: Synthetic oligonucleotide
  Antisense strand to SEQ ID NO: 143240
aauugugcucuagaaagca

SEQ ID NO: 143242 - RNA, 19 nt, Artificial Sequence
  Description of Artificial Sequence: Synthetic oligonucleotide
  Sense strand starting at position 291 of SEQ ID NO: 1838
cucuuuaguccucagucaa

SEQ ID NO: 143243 - RNA, 19 nt, Artificial Sequence
  Description of Artificial Sequence: Synthetic oligonucleotide
  Antisense strand to SEQ ID NO: 143242
uugacugaggacuaaagag

SEQ ID NO: 143244 - RNA, 19 nt, Artificial Sequence
  Description of Artificial Sequence: Synthetic oligonucleotide
  Sense strand starting at position 438 of SEQ ID NO: 1838
cagaguuugguacaguuga

SEQ ID NO: 143245 - RNA, 19 nt, Artificial Sequence
  Description of Artificial Sequence: Synthetic oligonucleotide
  Antisense strand to SEQ ID NO: 143244
ucaacuguaccaaacucug

SEQ ID NO: 143246 - RNA, 19 nt, Artificial Sequence
  Description of Artificial Sequence: Synthetic oligonucleotide
  Sense strand starting at position 469 of SEQ ID NO: 1838
aagaguuucuaggcaaggu

SEQ ID NO: 143247 - RNA, 19 nt, Artificial Sequence
  Description of Artificial Sequence: Synthetic oligonucleotide
  Antisense strand to SEQ ID NO: 143246
accuugccuagaaacucuu

SEQ ID NO: 143248 - RNA, 19 nt, Artificial Sequence
  Description of Artificial Sequence: Synthetic oligonucleotide
  Sense strand starting at position 731 of SEQ ID NO: 1838
cuggcuucucccuguauuu

SEQ ID NO: 143249 - RNA, 19 nt, Artificial Sequence
  Description of Artificial Sequence: Synthetic oligonucleotide
  Antisense strand to SEQ ID NO: 143248
aaauacagggagaagccag

SEQ ID NO: 143250 - RNA, 19 nt, Artificial Sequence
  Description of Artificial Sequence: Synthetic oligonucleotide
  Sense strand starting at position 815 of SEQ ID NO: 1838
cuucucuuugcuguguuua

SEQ ID NO: 143251 - RNA, 19 nt, Artificial Sequence
  Description of Artificial Sequence: Synthetic oligonucleotide
  Antisense strand to SEQ ID NO: 143250
uaaacacagcaaagagaag

SEQ ID NO: 143252 - RNA, 19 nt, Artificial Sequence
  Description of Artificial Sequence: Synthetic oligonucleotide
  Sense strand starting at position 913 of SEQ ID NO: 1838
ugaacucuuuggcucugaa

SEQ ID NO: 143253 - RNA, 19 nt, Artificial Sequence
  Description of Artificial Sequence: Synthetic oligonucleotide
  Antisense strand to SEQ ID NO: 143252
uucagagccaaagaguuca

SEQ ID NO: 143254 - RNA, 19 nt, Artificial Sequence
  Description of Artificial Sequence: Synthetic oligonucleotide
  Sense strand starting at position 1035 of SEQ ID NO: 1838
ucaagaguuccuggaaacu

SEQ ID NO: 143255 - RNA, 19 nt, Artificial Sequence
  Description of Artificial Sequence: Synthetic oligonucleotide
  Antisense strand to SEQ ID NO: 143254
aguuuccaggaacucuuga

SEQ ID NO: 143256 - RNA, 19 nt, Artificial Sequence
  Description of Artificial Sequence: Synthetic oligonucleotide
  Sense strand starting at position 1146 of SEQ ID NO: 1838
uuacacuuucuggguaaua

SEQ ID NO: 143257 - RNA, 19 nt, Artificial Sequence
  Description of Artificial Sequence: Synthetic oligonucleotide
  Antisense strand to SEQ ID NO: 143256
uauuacccagaaaguguaa

SEQ ID NO: 143258 - RNA, 19 nt, Artificial Sequence
  Description of Artificial Sequence: Synthetic oligonucleotide
  Sense strand starting at position 1261 of SEQ ID NO: 1838
uucugaacugugugggaaa

SEQ ID NO: 143259 - RNA, 19 nt, Artificial Sequence
  Description of Artificial Sequence: Synthetic oligonucleotide
  Antisense strand to SEQ ID NO: 143258
uuucccacacaguucagaa

SEQ ID NO: 143260 - RNA, 19 nt, Artificial Sequence
  Description of Artificial Sequence: Synthetic oligonucleotide
  Sense strand starting at position 1263 of SEQ ID NO: 1838
cugaacugugugggaaacu

SEQ ID NO: 143261 - RNA, 19 nt, Artificial Sequence
  Description of Artificial Sequence: Synthetic oligonucleotide
  Antisense strand to SEQ ID NO: 143260
aguuucccacacaguucag

SEQ ID NO: 143262 - RNA, 19 nt, Artificial Sequence
  Description of Artificial Sequence: Synthetic oligonucleotide
  Sense strand starting at position 1338 of SEQ ID NO: 1838
ugaguagcucucuggaaua

SEQ ID NO: 143263 - RNA, 19 nt, Artificial Sequence
  Description of Artificial Sequence: Synthetic oligonucleotide
  Antisense strand to SEQ ID NO: 143262
uauuccagagagcuacuca

SEQ ID NO: 143264 - RNA, 19 nt, Artificial Sequence
  Description of Artificial Sequence: Synthetic oligonucleotide
  Sense strand starting at position 1340 of SEQ ID NO: 1838
aguagcucucuggaauaug

SEQ ID NO: 143265 - RNA, 19 nt, Artificial Sequence
  Description of Artificial Sequence: Synthetic oligonucleotide
  Antisense strand to SEQ ID NO: 143264
cauauuccagagagcuacu

SEQ ID NO: 143266 - RNA, 19 nt, Artificial Sequence
  Description of Artificial Sequence: Synthetic oligonucleotide
  Sense strand starting at position 1754 of SEQ ID NO: 1838
cuaagaguuggugggacuu

SEQ ID NO: 143267 - RNA, 19 nt, Artificial Sequence
  Description of Artificial Sequence: Synthetic oligonucleotide
  Antisense strand to SEQ ID NO: 143266
aagucccaccaacucuuag

SEQ ID NO: 143268 - RNA, 19 nt, Artificial Sequence
  Description of Artificial Sequence: Synthetic oligonucleotide
  Sense strand starting at position 2275 of SEQ ID NO: 1838
cagcggugucguguugaga

SEQ ID NO: 143269 - RNA, 19 nt, Artificial Sequence
  Description of Artificial Sequence: Synthetic oligonucleotide
  Antisense strand to SEQ ID NO: 143268
ucucaacacgacaccgcug

SEQ ID NO: 143270 - RNA, 19 nt, Artificial Sequence
  Description of Artificial Sequence: Synthetic oligonucleotide
  Sense strand starting at position 2276 of SEQ ID NO: 1838
agcggugucguguugagag

SEQ ID NO: 143271 - RNA, 19 nt, Artificial Sequence
  Description of Artificial Sequence: Synthetic oligonucleotide
  Antisense strand to SEQ ID NO: 143270
cucucaacacgacaccgcu

SEQ ID NO: 143272 - RNA, 19 nt, Artificial Sequence
  Description of Artificial Sequence: Synthetic oligonucleotide
  Sense strand starting at position 2281 of SEQ ID NO: 1838
ugucguguugagagaguuu

SEQ ID NO: 143273 - RNA, 19 nt, Artificial Sequence
  Description of Artificial Sequence: Synthetic oligonucleotide
  Antisense strand to SEQ ID NO: 143272
aaacucucucaacacgaca

SEQ ID NO: 143274 - RNA, 19 nt, Artificial Sequence
  Description of Artificial Sequence: Synthetic oligonucleotide
  Sense strand starting at position 2443 of SEQ ID NO: 1838
aggcucuuaccaugaugga

SEQ ID NO: 143275 - RNA, 19 nt, Artificial Sequence
  Description of Artificial Sequence: Synthetic oligonucleotide
  Antisense strand to SEQ ID NO: 143274
uccaucaugguaagagccu

SEQ ID NO: 143276 - RNA, 19 nt, Artificial Sequence
  Description of Artificial Sequence: Synthetic oligonucleotide
  Sense strand starting at position 2579 of SEQ ID NO: 1838
agggaugaguaguuuauug

SEQ ID NO: 143277 - RNA, 19 nt, Artificial Sequence
  Description of Artificial Sequence: Synthetic oligonucleotide
  Antisense strand to SEQ ID NO: 143276
caauaaacuacucaucccu

SEQ ID NO: 143278 - RNA, 19 nt, Artificial Sequence
  Description of Artificial Sequence: Synthetic oligonucleotide
  Sense strand starting at position 2583 of SEQ ID NO: 1838
augaguaguuuauugaaca

SEQ ID NO: 143279 - RNA, 19 nt, Artificial Sequence
  Description of Artificial Sequence: Synthetic oligonucleotide
  Antisense strand to SEQ ID NO: 143278
uguucaauaaacuacucau

SEQ ID NO: 143280 - RNA, 19 nt, Artificial Sequence
  Description of Artificial Sequence: Synthetic oligonucleotide
  Sense strand starting at position 2610 of SEQ ID NO: 1838
gugcuaggcacauaaguaa

SEQ ID NO: 143281 - RNA, 19 nt, Artificial Sequence
  Description of Artificial Sequence: Synthetic oligonucleotide
  Antisense strand to SEQ ID NO: 143280
uuacuuaugugccuagcac

SEQ ID NO: 143282 - RNA, 19 nt, Artificial Sequence
  Description of Artificial Sequence: Synthetic oligonucleotide
  Sense strand starting at position 2625 of SEQ ID NO: 1838
guaagacuugcucaaaguc

SEQ ID NO: 143283 - RNA, 19 nt, Artificial Sequence
  Description of Artificial Sequence: Synthetic oligonucleotide
  Antisense strand to SEQ ID NO: 143282
gacuuugagcaagucuuac

SEQ ID NO: 143284 - RNA, 19 nt, Artificial Sequence
  Description of Artificial Sequence: Synthetic oligonucleotide
  Sense strand starting at position 2635 of SEQ ID NO: 1838
cucaaagucuuaguuauua

SEQ ID NO: 143285 - RNA, 19 nt, Artificial Sequence
  Description of Artificial Sequence: Synthetic oligonucleotide
  Antisense strand to SEQ ID NO: 143284
uaauaacuaagacuuugag

SEQ ID NO: 143286 - RNA, 19 nt, Artificial Sequence
  Description of Artificial Sequence: Synthetic oligonucleotide
  Sense strand starting at position 2809 of SEQ ID NO: 1838
ggacgauccuggguuuaag

SEQ ID NO: 143287 - RNA, 19 nt, Artificial Sequence
  Description of Artificial Sequence: Synthetic oligonucleotide
  Antisense strand to SEQ ID NO: 143286
cuuaaacccaggaucgucc

SEQ ID NO: 143288 - RNA, 19 nt, Artificial Sequence
  Description of Artificial Sequence: Synthetic oligonucleotide
  Sense strand starting at position 2843 of SEQ ID NO: 1838
ugucuccaucucugacaua

SEQ ID NO: 143289 - RNA, 19 nt, Artificial Sequence
  Description of Artificial Sequence: Synthetic oligonucleotide
  Antisense strand to SEQ ID NO: 143288
uaugucagagauggagaca

SEQ ID NO: 143290 - RNA, 19 nt, Artificial Sequence
  Description of Artificial Sequence: Synthetic oligonucleotide
  Sense strand starting at position 2897 of SEQ ID NO: 1838
ccauaaaggcauugggauu

SEQ ID NO: 143291 - RNA, 19 nt, Artificial Sequence
  Description of Artificial Sequence: Synthetic oligonucleotide
  Antisense strand to SEQ ID NO: 143290
aaucccaaugccuuuaugg

SEQ ID NO: 143292 - RNA, 19 nt, Artificial Sequence
  Description of Artificial Sequence: Synthetic oligonucleotide
  Sense strand starting at position 3036 of SEQ ID NO: 1838
cuguuaacuggcuacugau

SEQ ID NO: 143293 - RNA, 19 nt, Artificial Sequence
  Description of Artificial Sequence: Synthetic oligonucleotide
  Antisense strand to SEQ ID NO: 143292
aucaguagccaguuaacag

SEQ ID NO: 143294 - RNA, 19 nt, Artificial Sequence
  Description of Artificial Sequence: Synthetic oligonucleotide
  Sense strand starting at position 3063 of SEQ ID NO: 1838
aggcaaacugcuuaaccuu

SEQ ID NO: 143295 - RNA, 19 nt, Artificial Sequence
  Description of Artificial Sequence: Synthetic oligonucleotide
  Antisense strand to SEQ ID NO: 143294
aagguuaagcaguuugccu

SEQ ID NO: 143296 - RNA, 19 nt, Artificial Sequence
  Description of Artificial Sequence: Synthetic oligonucleotide
  Sense strand starting at position 3163 of SEQ ID NO: 1838
uaguuugaguuccuaggaa

SEQ ID NO: 143297 - RNA, 19 nt, Artificial Sequence
  Description of Artificial Sequence: Synthetic oligonucleotide
  Antisense strand to SEQ ID NO: 143296
uuccuaggaacucaaacua

SEQ ID NO: 143298 - RNA, 19 nt, Artificial Sequence
  Description of Artificial Sequence: Synthetic oligonucleotide
  Sense strand starting at position 3178 of SEQ ID NO: 1838
ggaacuagacucggguaga

SEQ ID NO: 143299 - RNA, 19 nt, Artificial Sequence
  Description of Artificial Sequence: Synthetic oligonucleotide
  Antisense strand to SEQ ID NO: 143298
ucuacccgagucuaguucc

SEQ ID NO: 143300 - RNA, 19 nt, Artificial Sequence
  Description of Artificial Sequence: Synthetic oligonucleotide
  Sense strand starting at position 3351 of SEQ ID NO: 1838
ggaacuguccacugaagca

SEQ ID NO: 143301 - RNA, 19 nt, Artificial Sequence
  Description of Artificial Sequence: Synthetic oligonucleotide
  Antisense strand to SEQ ID NO: 143300
ugcuucaguggacaguucc

SEQ ID NO: 143302 - RNA, 19 nt, Artificial Sequence
  Description of Artificial Sequence: Synthetic oligonucleotide
  Sense strand starting at position 3539 of SEQ ID NO: 1838
cacagcauccgugacaaca

SEQ ID NO: 143303 - RNA, 19 nt, Artificial Sequence
  Description of Artificial Sequence: Synthetic oligonucleotide
  Antisense strand to SEQ ID NO: 143302
uguugucacggaugcugug

SEQ ID NO: 143304 - RNA, 19 nt, Artificial Sequence
  Description of Artificial Sequence: Synthetic oligonucleotide
  Sense strand starting at position 3556 of SEQ ID NO: 1838
cauauaaggugcuuauaug

SEQ ID NO: 143305 - RNA, 19 nt, Artificial Sequence
  Description of Artificial Sequence: Synthetic oligonucleotide
  Antisense strand to SEQ ID NO: 143304
cauauaagcaccuuauaug

SEQ ID NO: 143306 - RNA, 19 nt, Artificial Sequence
  Description of Artificial Sequence: Synthetic oligonucleotide
  Sense strand starting at position 3557 of SEQ ID NO: 1838
auauaaggugcuuauauga

SEQ ID NO: 143307 - RNA, 19 nt, Artificial Sequence
  Description of Artificial Sequence: Synthetic oligonucleotide
  Antisense strand to SEQ ID NO: 143306
ucauauaagcaccuuauau

SEQ ID NO: 143308 - RNA, 19 nt, Artificial Sequence
  Description of Artificial Sequence: Synthetic oligonucleotide
  Sense strand starting at position 3570 of SEQ ID NO: 1838
auaugacagugcucaacau

SEQ ID NO: 143309 - RNA, 19 nt, Artificial Sequence
  Description of Artificial Sequence: Synthetic oligonucleotide
  Antisense strand to SEQ ID NO: 143308
auguugagcacugucauau

SEQ ID NO: 143310 - RNA, 19 nt, Artificial Sequence
  Description of Artificial Sequence: Synthetic oligonucleotide
  Sense strand starting at position 3585 of SEQ ID NO: 1838
acauguagucagcagucaa

SEQ ID NO: 143311 - RNA, 19 nt, Artificial Sequence
  Description of Artificial Sequence: Synthetic oligonucleotide
  Antisense strand to SEQ ID NO: 143310
uugacugcugacuacaugu

SEQ ID NO: 143312 - RNA, 19 nt, Artificial Sequence
  Description of Artificial Sequence: Synthetic oligonucleotide
  Sense strand starting at position 3592 of SEQ ID NO: 1838
gucagcagucaauaaaugu

SEQ ID NO: 143313 - RNA, 19 nt, Artificial Sequence
  Description of Artificial Sequence: Synthetic oligonucleotide
  Antisense strand to SEQ ID NO: 143312
acauuuauugacugcugac

SEQ ID NO: 143314 - RNA, 19 nt, Artificial Sequence
  Description of Artificial Sequence: Synthetic oligonucleotide
  Sense strand starting at position 3793 of SEQ ID NO: 1839
ugcugauagaaccguggaa

SEQ ID NO: 143315 - RNA, 19 nt, Artificial Sequence
  Description of Artificial Sequence: Synthetic oligonucleotide
  Antisense strand to SEQ ID NO: 143314
uuccacgguucuaucagca

SEQ ID NO: 143316 - RNA, 19 nt, Artificial Sequence
  Description of Artificial Sequence: Synthetic oligonucleotide
  Sense strand starting at position 3774 of SEQ ID NO: 1839
ugaagugugcuauacacaa

SEQ ID NO: 143317 - RNA, 19 nt, Artificial Sequence
  Description of Artificial Sequence: Synthetic oligonucleotide
  Antisense strand to SEQ ID NO: 143316
uuguguauagcacacuuca

SEQ ID NO: 143318 - RNA, 19 nt, Artificial Sequence
  Description of Artificial Sequence: Synthetic oligonucleotide
  Sense strand starting at position 3620 of SEQ ID NO: 1839
aguuuaauccuaugaaggu

SEQ ID NO: 143319 - RNA, 19 nt, Artificial Sequence
  Description of Artificial Sequence: Synthetic oligonucleotide
  Antisense strand to SEQ ID NO: 143318
accuucauaggauuaaacu

SEQ ID NO: 143320 - RNA, 19 nt, Artificial Sequence
  Description of Artificial Sequence: Synthetic oligonucleotide
  Sense strand starting at position 3586 of SEQ ID NO: 1839
ccuaguaaugauuaguauc

SEQ ID NO: 143321 - RNA, 19 nt, Artificial Sequence
  Description of Artificial Sequence: Synthetic oligonucleotide
  Antisense strand to SEQ ID NO: 143320
gauacuaaucauuacuagg

SEQ ID NO: 143322 - RNA, 19 nt, Artificial Sequence
  Description of Artificial Sequence: Synthetic oligonucleotide
  Sense strand starting at position 3478 of SEQ ID NO: 1839
cucaccuuggcugagaauu

SEQ ID NO: 143323 - RNA, 19 nt, Artificial Sequence
  Description of Artificial Sequence: Synthetic oligonucleotide
  Antisense strand to SEQ ID NO: 143322
aauucucagccaaggugag

SEQ ID NO: 143324 - RNA, 19 nt, Artificial Sequence
  Description of Artificial Sequence: Synthetic oligonucleotide
  Sense strand starting at position 3477 of SEQ ID NO: 1839
ucucaccuuggcugagaau

SEQ ID NO: 143325 - RNA, 19 nt, Artificial Sequence
  Description of Artificial Sequence: Synthetic oligonucleotide
  Antisense strand to SEQ ID NO: 143324
auucucagccaaggugaga

SEQ ID NO: 143326 - RNA, 19 nt, Artificial Sequence
  Description of Artificial Sequence: Synthetic oligonucleotide
  Sense strand starting at position 3448 of SEQ ID NO: 1839
ugacuuguacuuugaacau

SEQ ID NO: 143327 - RNA, 19 nt, Artificial Sequence
  Description of Artificial Sequence: Synthetic oligonucleotide
  Antisense strand to SEQ ID NO: 143326
auguucaaaguacaaguca

SEQ ID NO: 143328 - RNA, 19 nt, Artificial Sequence
  Description of Artificial Sequence: Synthetic oligonucleotide
  Sense strand starting at position 3437 of SEQ ID NO: 1839
cccugauuccaugacuugu

SEQ ID NO: 143329 - RNA, 19 nt, Artificial Sequence
  Description of Artificial Sequence: Synthetic oligonucleotide
  Antisense strand to SEQ ID NO: 143328
acaagucauggaaucaggg

SEQ ID NO: 143330 - RNA, 19 nt, Artificial Sequence
  Description of Artificial Sequence: Synthetic oligonucleotide
  Sense strand starting at position 3278 of SEQ ID NO: 1839
auugaaagcugaguuauac

SEQ ID NO: 143331 - RNA, 19 nt, Artificial Sequence
  Description of Artificial Sequence: Synthetic oligonucleotide
  Antisense strand to SEQ ID NO: 143330
guauaacucagcuuucaau

SEQ ID NO: 143332 - RNA, 19 nt, Artificial Sequence
  Description of Artificial Sequence: Synthetic oligonucleotide
  Sense strand starting at position 3236 of SEQ ID NO: 1839
uuugaucuccaguagugaa

SEQ ID NO: 143333 - RNA, 19 nt, Artificial Sequence
  Description of Artificial Sequence: Synthetic oligonucleotide
  Antisense strand to SEQ ID NO: 143332
uucacuacuggagaucaaa

SEQ ID NO: 143334 - RNA, 19 nt, Artificial Sequence
  Description of Artificial Sequence: Synthetic oligonucleotide
  Sense strand starting at position 3233 of SEQ ID NO: 1839
aucuuugaucuccaguagu

SEQ ID NO: 143335 - RNA, 19 nt, Artificial Sequence
  Description of Artificial Sequence: Synthetic oligonucleotide
  Antisense strand to SEQ ID NO: 143334
acuacuggagaucaaagau

SEQ ID NO: 143336 - RNA, 19 nt, Artificial Sequence
  Description of Artificial Sequence: Synthetic oligonucleotide
  Sense strand starting at position 3076 of SEQ ID NO: 1839
gcaguucuaguccauaauu

SEQ ID NO: 143337 - RNA, 19 nt, Artificial Sequence
  Description of Artificial Sequence: Synthetic oligonucleotide
  Antisense strand to SEQ ID NO: 143336
aauuauggacuagaacugc

SEQ ID NO: 143338 - RNA, 19 nt, Artificial Sequence
  Description of Artificial Sequence: Synthetic oligonucleotide
  Sense strand starting at position 2957 of SEQ ID NO: 1839
uuaaguagagaugguaguu

SEQ ID NO: 143339 - RNA, 19 nt, Artificial Sequence
  Description of Artificial Sequence: Synthetic oligonucleotide
  Antisense strand to SEQ ID NO: 143338
aacuaccaucucuacuuaa

SEQ ID NO: 143340 - RNA, 19 nt, Artificial Sequence
  Description of Artificial Sequence: Synthetic oligonucleotide
  Sense strand starting at position 2789 of SEQ ID NO: 1839
uuuaucagucugugaugaa

SEQ ID NO: 143341 - RNA, 19 nt, Artificial Sequence
  Description of Artificial Sequence: Synthetic oligonucleotide
  Antisense strand to SEQ ID NO: 143340
uucaucacagacugauaaa

SEQ ID NO: 143342 - RNA, 19 nt, Artificial Sequence
  Description of Artificial Sequence: Synthetic oligonucleotide
  Sense strand starting at position 2473 of SEQ ID NO: 1839
cuguaaucuggaggcuaag

SEQ ID NO: 143343 - RNA, 19 nt, Artificial Sequence
  Description of Artificial Sequence: Synthetic oligonucleotide
  Antisense strand to SEQ ID NO: 143342
cuuagccuccagauuacag

SEQ ID NO: 143344 - RNA, 19 nt, Artificial Sequence
  Description of Artificial Sequence: Synthetic oligonucleotide
  Sense strand starting at position 2471 of SEQ ID NO: 1839
gccuguaaucuggaggcua

SEQ ID NO: 143345 - RNA, 19 nt, Artificial Sequence
  Description of Artificial Sequence: Synthetic oligonucleotide
  Antisense strand to SEQ ID NO: 143344
uagccuccagauuacaggc

SEQ ID NO: 143346 - RNA, 19 nt, Artificial Sequence
  Description of Artificial Sequence: Synthetic oligonucleotide
  Sense strand starting at position 2298 of SEQ ID NO: 1839
guuauuacaugaguuaagu

SEQ ID NO: 143347 - RNA, 19 nt, Artificial Sequence
  Description of Artificial Sequence: Synthetic oligonucleotide
  Antisense strand to SEQ ID NO: 143346
acuuaacucauguaauaac

SEQ ID NO: 143348 - RNA, 19 nt, Artificial Sequence
  Description of Artificial Sequence: Synthetic oligonucleotide
  Sense strand starting at position 2132 of SEQ ID NO: 1839
ccagaaugaugcuuuaaua

SEQ ID NO: 143349 - RNA, 19 nt, Artificial Sequence
  Description of Artificial Sequence: Synthetic oligonucleotide
  Antisense strand to SEQ ID NO: 143348
uauuaaagcaucauucugg

SEQ ID NO: 143350 - RNA, 19 nt, Artificial Sequence
  Description of Artificial Sequence: Synthetic oligonucleotide
  Sense strand starting at position 2087 of SEQ ID NO: 1839
agacuagucuuaccacagu

SEQ ID NO: 143351 - RNA, 19 nt, Artificial Sequence
  Description of Artificial Sequence: Synthetic oligonucleotide
  Antisense strand to SEQ ID NO: 143350
acugugguaagacuagucu

SEQ ID NO: 143352 - RNA, 19 nt, Artificial Sequence
  Description of Artificial Sequence: Synthetic oligonucleotide
  Sense strand starting at position 2067 of SEQ ID NO: 1839
acucuuggucucuaagaua

SEQ ID NO: 143353 - RNA, 19 nt, Artificial Sequence
  Description of Artificial Sequence: Synthetic oligonucleotide
  Antisense strand to SEQ ID NO: 143352
uaucuuagagaccaagagu

SEQ ID NO: 143354 - RNA, 19 nt, Artificial Sequence
  Description of Artificial Sequence: Synthetic oligonucleotide
  Sense strand starting at position 2066 of SEQ ID NO: 1839
gacucuuggucucuaagau

SEQ ID NO: 143355 - RNA, 19 nt, Artificial Sequence
  Description of Artificial Sequence: Synthetic oligonucleotide
  Antisense strand to SEQ ID NO: 143354
aucuuagagaccaagaguc

SEQ ID NO: 143356 - RNA, 19 nt, Artificial Sequence
  Description of Artificial Sequence: Synthetic oligonucleotide
  Sense strand starting at position 2024 of SEQ ID NO: 1839
uccuaaguuguuuagggaa

SEQ ID NO: 143357 - RNA, 19 nt, Artificial Sequence
  Description of Artificial Sequence: Synthetic oligonucleotide
  Antisense strand to SEQ ID NO: 143356
uucccuaaacaacuuagga

SEQ ID NO: 143358 - RNA, 19 nt, Artificial Sequence
  Description of Artificial Sequence: Synthetic oligonucleotide
  Sense strand starting at position 1671 of SEQ ID NO: 1839
aaaguauaaggcugacuua

SEQ ID NO: 143359 - RNA, 19 nt, Artificial Sequence
  Description of Artificial Sequence: Synthetic oligonucleotide
  Antisense strand to SEQ ID NO: 143358
uaagucagccuuauacuuu

SEQ ID NO: 143360 - RNA, 19 nt, Artificial Sequence
  Description of Artificial Sequence: Synthetic oligonucleotide
  Sense strand starting at position 1489 of SEQ ID NO: 1839
uguggcuaacauuauuaca

SEQ ID NO: 143361 - RNA, 19 nt, Artificial Sequence
  Description of Artificial Sequence: Synthetic oligonucleotide
  Antisense strand to SEQ ID NO: 143360
uguaauaauguuagccaca

SEQ ID NO: 143362 - RNA, 19 nt, Artificial Sequence
  Description of Artificial Sequence: Synthetic oligonucleotide
  Sense strand starting at position 1483 of SEQ ID NO: 1839
ccucuauguggcuaacauu

SEQ ID NO: 143363 - RNA, 19 nt, Artificial Sequence
  Description of Artificial Sequence: Synthetic oligonucleotide
  Antisense strand to SEQ ID NO: 143362
aauguuagccacauagagg

SEQ ID NO: 143364 - RNA, 19 nt, Artificial Sequence
  Description of Artificial Sequence: Synthetic oligonucleotide
  Sense strand starting at position 824 of SEQ ID NO: 1839
acaauauugcauugugaaa

SEQ ID NO: 143365 - RNA, 19 nt, Artificial Sequence
  Description of Artificial Sequence: Synthetic oligonucleotide
  Antisense strand to SEQ ID NO: 143364
uuucacaaugcaauauugu

SEQ ID NO: 143366 - RNA, 19 nt, Artificial Sequence
  Description of Artificial Sequence: Synthetic oligonucleotide
  Sense strand starting at position 816 of SEQ ID NO: 1839
cugcuaugacaauauugca

SEQ ID NO: 143367 - RNA, 19 nt, Artificial Sequence
  Description of Artificial Sequence: Synthetic oligonucleotide
  Antisense strand to SEQ ID NO: 143366
ugcaauauugucauagcag

SEQ ID NO: 143368 - RNA, 19 nt, Artificial Sequence
  Description of Artificial Sequence: Synthetic oligonucleotide
  Sense strand starting at position 805 of SEQ ID NO: 1839
ugaauaucucucugcuaug

SEQ ID NO: 143369 - RNA, 19 nt, Artificial Sequence
  Description of Artificial Sequence: Synthetic oligonucleotide
  Antisense strand to SEQ ID NO: 143368
cauagcagagagauauuca

SEQ ID NO: 143370 - RNA, 19 nt, Artificial Sequence
  Description of Artificial Sequence: Synthetic oligonucleotide
  Sense strand starting at position 802 of SEQ ID NO: 1839
agaugaauaucucucugcu

SEQ ID NO: 143371 - RNA, 19 nt, Artificial Sequence
  Description of Artificial Sequence: Synthetic oligonucleotide
  Antisense strand to SEQ ID NO: 143370
agcagagagauauucaucu

SEQ ID NO: 143372 - RNA, 19 nt, Artificial Sequence
  Description of Artificial Sequence: Synthetic oligonucleotide
  Sense strand starting at position 655 of SEQ ID NO: 1839
auacucuaauuuggaagaa

SEQ ID NO: 143373 - RNA, 19 nt, Artificial Sequence
  Description of Artificial Sequence: Synthetic oligonucleotide
  Antisense strand to SEQ ID NO: 143372
uucuuccaaauuagaguau

SEQ ID NO: 143374 - RNA, 19 nt, Artificial Sequence
  Description of Artificial Sequence: Synthetic oligonucleotide
  Sense strand starting at position 608 of SEQ ID NO: 1839
guugguaauguggagaauu

SEQ ID NO: 143375 - RNA, 19 nt, Artificial Sequence
  Description of Artificial Sequence: Synthetic oligonucleotide
  Antisense strand to SEQ ID NO: 143374
aauucuccacauuaccaac

SEQ ID NO: 143376 - RNA, 19 nt, Artificial Sequence
  Description of Artificial Sequence: Synthetic oligonucleotide
  Sense strand starting at position 599 of SEQ ID NO: 1839
ucuagagauguugguaaug

SEQ ID NO: 143377 - RNA, 19 nt, Artificial Sequence
  Description of Artificial Sequence: Synthetic oligonucleotide
  Antisense strand to SEQ ID NO: 143376
cauuaccaacaucucuaga

SEQ ID NO: 143378 - RNA, 19 nt, Artificial Sequence
  Description of Artificial Sequence: Synthetic oligonucleotide
  Sense strand starting at position 595 of SEQ ID NO: 1839
auauucuagagauguuggu

SEQ ID NO: 143379 - RNA, 19 nt, Artificial Sequence
  Description of Artificial Sequence: Synthetic oligonucleotide
  Antisense strand to SEQ ID NO: 143378
accaacaucucuagaauau

SEQ ID NO: 143380 - RNA, 19 nt, Artificial Sequence
  Description of Artificial Sequence: Synthetic oligonucleotide
  Sense strand starting at position 474 of SEQ ID NO: 1839
cugcaauuuccuugaagcu

SEQ ID NO: 143381 - RNA, 19 nt, Artificial Sequence
  Description of Artificial Sequence: Synthetic oligonucleotide
  Antisense strand to SEQ ID NO: 143380
agcuucaaggaaauugcag

SEQ ID NO: 143382 - RNA, 19 nt, Artificial Sequence
  Description of Artificial Sequence: Synthetic oligonucleotide
  Sense strand starting at position 398 of SEQ ID NO: 1839
ggucaacuaucuguuuaaa

SEQ ID NO: 143383 - RNA, 19 nt, Artificial Sequence
  Description of Artificial Sequence: Synthetic oligonucleotide
  Antisense strand to SEQ ID NO: 143382
uuuaaacagauaguugacc

SEQ ID NO: 143384 - RNA, 19 nt, Artificial Sequence
  Description of Artificial Sequence: Synthetic oligonucleotide
  Sense strand starting at position 310 of SEQ ID NO: 1839
uucucauggauaugugagu

SEQ ID NO: 143385 - RNA, 19 nt, Artificial Sequence
  Description of Artificial Sequence: Synthetic oligonucleotide
  Antisense strand to SEQ ID NO: 143384
acucacauauccaugagaa

SEQ ID NO: 143386 - RNA, 19 nt, Artificial Sequence
  Description of Artificial Sequence: Synthetic oligonucleotide
  Sense strand starting at position 277 of SEQ ID NO: 1839
guugaauaauguguugaaa

SEQ ID NO: 143387 - RNA, 19 nt, Artificial Sequence
  Description of Artificial Sequence: Synthetic oligonucleotide
  Antisense strand to SEQ ID NO: 143386
uuucaacacauuauucaac

SEQ ID NO: 143388 - RNA, 19 nt, Artificial Sequence
  Description of Artificial Sequence: Synthetic oligonucleotide
  Sense strand starting at position 276 of SEQ ID NO: 1839
uguugaauaauguguugaa

SEQ ID NO: 143389 - RNA, 19 nt, Artificial Sequence
  Description of Artificial Sequence: Synthetic oligonucleotide
  Antisense strand to SEQ ID NO: 143388
uucaacacauuauucaaca

SEQ ID NO: 143390 - RNA, 19 nt, Artificial Sequence
  Description of Artificial Sequence: Synthetic oligonucleotide
  Sense strand starting at position 132 of SEQ ID NO: 1839
guuuaugaaucuguucuaa

SEQ ID NO: 143391 - RNA, 19 nt, Artificial Sequence
  Description of Artificial Sequence: Synthetic oligonucleotide
  Antisense strand to SEQ ID NO: 143390
uuagaacagauucauaaac

SEQ ID NO: 143392 - RNA, 19 nt, Artificial Sequence
  Description of Artificial Sequence: Synthetic oligonucleotide
  Sense strand starting at position 108 of SEQ ID NO: 1839
uauaauggagugugcagaa

SEQ ID NO: 143393 - RNA, 19 nt, Artificial Sequence
  Description of Artificial Sequence: Synthetic oligonucleotide
  Antisense strand to SEQ ID NO: 143392
uucugcacacuccauuaua

SEQ ID NO: 143394 - RNA, 19 nt, Artificial Sequence
  Description of Artificial Sequence: Synthetic oligonucleotide
  Sense strand starting at position 3920 of SEQ ID NO: 1840
guuuauuacugauuugcau

SEQ ID NO: 143395 - RNA, 19 nt, Artificial Sequence
  Description of Artificial Sequence: Synthetic oligonucleotide
  Antisense strand to SEQ ID NO: 143394
augcaaaucaguaauaaac

SEQ ID NO: 143396 - RNA, 19 nt, Artificial Sequence
  Description of Artificial Sequence: Synthetic oligonucleotide
  Sense strand starting at position 3913 of SEQ ID NO: 1840
uacggaaguuuauuacuga

SEQ ID NO: 143397 - RNA, 19 nt, Artificial Sequence
  Description of Artificial Sequence: Synthetic oligonucleotide
  Antisense strand to SEQ ID NO: 143396
ucaguaauaaacuuccgua

SEQ ID NO: 143398 - RNA, 19 nt, Artificial Sequence
  Description of Artificial Sequence: Synthetic oligonucleotide
  Sense strand starting at position 3901 of SEQ ID NO: 1840
ucuaaaguacuguacggaa

SEQ ID NO: 143399 - RNA, 19 nt, Artificial Sequence
  Description of Artificial Sequence: Synthetic oligonucleotide
  Antisense strand to SEQ ID NO: 143398
uuccguacaguacuuuaga

SEQ ID NO: 143400 - RNA, 19 nt, Artificial Sequence
  Description of Artificial Sequence: Synthetic oligonucleotide
  Sense strand starting at position 3870 of SEQ ID NO: 1840
gugacucuuacaugaaagg

SEQ ID NO: 143401 - RNA, 19 nt, Artificial Sequence
  Description of Artificial Sequence: Synthetic oligonucleotide
  Antisense strand to SEQ ID NO: 143400
ccuuucauguaagagucac

SEQ ID NO: 143402 - RNA, 19 nt, Artificial Sequence
  Description of Artificial Sequence: Synthetic oligonucleotide
  Sense strand starting at position 3812 of SEQ ID NO: 1840
guuucucaucuguaauaag

SEQ ID NO: 143403 - RNA, 19 nt, Artificial Sequence
  Description of Artificial Sequence: Synthetic oligonucleotide
  Antisense strand to SEQ ID NO: 143402
cuuauuacagaugagaaac

SEQ ID NO: 143404 - RNA, 19 nt, Artificial Sequence
  Description of Artificial Sequence: Synthetic oligonucleotide
  Sense strand starting at position 3643 of SEQ ID NO: 1840
agaauuuacucauagacag

SEQ ID NO: 143405 - RNA, 19 nt, Artificial Sequence
  Description of Artificial Sequence: Synthetic oligonucleotide
  Antisense strand to SEQ ID NO: 143404
cugucuaugaguaaauucu

SEQ ID NO: 143406 - RNA, 19 nt, Artificial Sequence
  Description of Artificial Sequence: Synthetic oligonucleotide
  Sense strand starting at position 3568 of SEQ ID NO: 1840
cuguaauacgcagacacuu

SEQ ID NO: 143407 - RNA, 19 nt, Artificial Sequence
  Description of Artificial Sequence: Synthetic oligonucleotide
  Antisense strand to SEQ ID NO: 143406
aagugucugcguauuacag

SEQ ID NO: 143408 - RNA, 19 nt, Artificial Sequence
  Description of Artificial Sequence: Synthetic oligonucleotide
  Sense strand starting at position 3551 of SEQ ID NO: 1840
acguauuuaucagcugucu

SEQ ID NO: 143409 - RNA, 19 nt, Artificial Sequence
  Description of Artificial Sequence: Synthetic oligonucleotide
  Antisense strand to SEQ ID NO: 143408
agacagcugauaaauacgu

SEQ ID NO: 143410 - RNA, 19 nt, Artificial Sequence
  Description of Artificial Sequence: Synthetic oligonucleotide
  Sense strand starting at position 3447 of SEQ ID NO: 1840
gcuuguuaacucuaggaau

SEQ ID NO: 143411 - RNA, 19 nt, Artificial Sequence
  Description of Artificial Sequence: Synthetic oligonucleotide
  Antisense strand to SEQ ID NO: 143410
auuccuagaguuaacaagc

SEQ ID NO: 143412 - RNA, 19 nt, Artificial Sequence
  Description of Artificial Sequence: Synthetic oligonucleotide
  Sense strand starting at position 3378 of SEQ ID NO: 1840
acaacaguuguggacuuua

SEQ ID NO: 143413 - RNA, 19 nt, Artificial Sequence
  Description of Artificial Sequence: Synthetic oligonucleotide
  Antisense strand to SEQ ID NO: 143412
uaaaguccacaacuguugu

SEQ ID NO: 143414 - RNA, 19 nt, Artificial Sequence
  Description of Artificial Sequence: Synthetic oligonucleotide
  Sense strand starting at position 3339 of SEQ ID NO: 1840
guuugacuuggagggcaaa

SEQ ID NO: 143415 - RNA, 19 nt, Artificial Sequence
  Description of Artificial Sequence: Synthetic oligonucleotide
  Antisense strand to SEQ ID NO: 143414
uuugcccuccaagucaaac

SEQ ID NO: 143416 - RNA, 19 nt, Artificial Sequence
  Description of Artificial Sequence: Synthetic oligonucleotide
  Sense strand starting at position 3217 of SEQ ID NO: 1840
uguuuaagcggcuuugcaa

SEQ ID NO: 143417 - RNA, 19 nt, Artificial Sequence
  Description of Artificial Sequence: Synthetic oligonucleotide
  Antisense strand to SEQ ID NO: 143416
uugcaaagccgcuuaaaca

SEQ ID NO: 143418 - RNA, 19 nt, Artificial Sequence
  Description of Artificial Sequence: Synthetic oligonucleotide
  Sense strand starting at position 3200 of SEQ ID NO: 1840
agaacuagccagugaaaug

SEQ ID NO: 143419 - RNA, 19 nt, Artificial Sequence
  Description of Artificial Sequence: Synthetic oligonucleotide
  Antisense strand to SEQ ID NO: 143418
cauuucacuggcuaguucu

SEQ ID NO: 143420 - RNA, 19 nt, Artificial Sequence
  Description of Artificial Sequence: Synthetic oligonucleotide
  Sense strand starting at position 3131 of SEQ ID NO: 1840
acgacuugauugguaaaga

SEQ ID NO: 143421 - RNA, 19 nt, Artificial Sequence
  Description of Artificial Sequence: Synthetic oligonucleotide
  Antisense strand to SEQ ID NO: 143420
ucuuuaccaaucaagucgu

SEQ ID NO: 143422 - RNA, 19 nt, Artificial Sequence
  Description of Artificial Sequence: Synthetic oligonucleotide
  Sense strand starting at position 3129 of SEQ ID NO: 1840
aaacgacuugauugguaaa

SEQ ID NO: 143423 - RNA, 19 nt, Artificial Sequence
  Description of Artificial Sequence: Synthetic oligonucleotide
  Antisense strand to SEQ ID NO: 143422
uuuaccaaucaagucguuu

SEQ ID NO: 143424 - RNA, 19 nt, Artificial Sequence
  Description of Artificial Sequence: Synthetic oligonucleotide
  Sense strand starting at position 3107 of SEQ ID NO: 1840
aucucuacuccugaagguu

SEQ ID NO: 143425 - RNA, 19 nt, Artificial Sequence
  Description of Artificial Sequence: Synthetic oligonucleotide
  Antisense strand to SEQ ID NO: 143424
aaccuucaggaguagagau

SEQ ID NO: 143426 - RNA, 19 nt, Artificial Sequence
  Description of Artificial Sequence: Synthetic oligonucleotide
  Sense strand starting at position 3065 of SEQ ID NO: 1840
aguuuccuugauuaaguuu

SEQ ID NO: 143427 - RNA, 19 nt, Artificial Sequence
  Description of Artificial Sequence: Synthetic oligonucleotide
  Antisense strand to SEQ ID NO: 143426
aaacuuaaucaaggaaacu

SEQ ID NO: 143428 - RNA, 19 nt, Artificial Sequence
  Description of Artificial Sequence: Synthetic oligonucleotide
  Sense strand starting at position 2994 of SEQ ID NO: 1840
cauucuuguugaguuagga

SEQ ID NO: 143429 - RNA, 19 nt, Artificial Sequence
  Description of Artificial Sequence: Synthetic oligonucleotide
  Antisense strand to SEQ ID NO: 143428
uccuaacucaacaagaaug

SEQ ID NO: 143430 - RNA, 19 nt, Artificial Sequence
  Description of Artificial Sequence: Synthetic oligonucleotide
  Sense strand starting at position 2941 of SEQ ID NO: 1840
gcuguaaugcaccagaauc

SEQ ID NO: 143431 - RNA, 19 nt, Artificial Sequence
  Description of Artificial Sequence: Synthetic oligonucleotide
  Antisense strand to SEQ ID NO: 143430
gauucuggugcauuacagc

SEQ ID NO: 143432 - RNA, 19 nt, Artificial Sequence
  Description of Artificial Sequence: Synthetic oligonucleotide
  Sense strand starting at position 2897 of SEQ ID NO: 1840
uuccuuauggugggagaga

SEQ ID NO: 143433 - RNA, 19 nt, Artificial Sequence
  Description of Artificial Sequence: Synthetic oligonucleotide
  Antisense strand to SEQ ID NO: 143432
ucucucccaccauaaggaa

SEQ ID NO: 143434 - RNA, 19 nt, Artificial Sequence
  Description of Artificial Sequence: Synthetic oligonucleotide
  Sense strand starting at position 2840 of SEQ ID NO: 1840
agggucauuccucaggagu

SEQ ID NO: 143435 - RNA, 19 nt, Artificial Sequence
  Description of Artificial Sequence: Synthetic oligonucleotide
  Antisense strand to SEQ ID NO: 143434
acuccugaggaaugacccu

SEQ ID NO: 143436 - RNA, 19 nt, Artificial Sequence
  Description of Artificial Sequence: Synthetic oligonucleotide
  Sense strand starting at position 2773 of SEQ ID NO: 1840
agaagacagugcuuuaauu

SEQ ID NO: 143437 - RNA, 19 nt, Artificial Sequence
  Description of Artificial Sequence: Synthetic oligonucleotide
  Antisense strand to SEQ ID NO: 143436
aauuaaagcacugucuucu

SEQ ID NO: 143438 - RNA, 19 nt, Artificial Sequence
  Description of Artificial Sequence: Synthetic oligonucleotide
  Sense strand starting at position 2770 of SEQ ID NO: 1840
aucagaagacagugcuuua

SEQ ID NO: 143439 - RNA, 19 nt, Artificial Sequence
  Description of Artificial Sequence: Synthetic oligonucleotide
  Antisense strand to SEQ ID NO: 143438
uaaagcacugucuucugau

SEQ ID NO: 143440 - RNA, 19 nt, Artificial Sequence
  Description of Artificial Sequence: Synthetic oligonucleotide
  Sense strand starting at position 2483 of SEQ ID NO: 1840
ucgaaugaagagugggauu

SEQ ID NO: 143441 - RNA, 19 nt, Artificial Sequence
  Description of Artificial Sequence: Synthetic oligonucleotide
  Antisense strand to SEQ ID NO: 143440
aaucccacucuucauucga

SEQ ID NO: 143442 - RNA, 19 nt, Artificial Sequence
  Description of Artificial Sequence: Synthetic oligonucleotide
  Sense strand starting at position 2008 of SEQ ID NO: 1840
gcgugcgucgcagcauuua

SEQ ID NO: 143443 - RNA, 19 nt, Artificial Sequence
  Description of Artificial Sequence: Synthetic oligonucleotide
  Antisense strand to SEQ ID NO: 143442
uaaaugcugcgacgcacgc

SEQ ID NO: 143444 - RNA, 19 nt, Artificial Sequence
  Description of Artificial Sequence: Synthetic oligonucleotide
  Sense strand starting at position 1517 of SEQ ID NO: 1840
guguaagcugaugagaacu

SEQ ID NO: 143445 - RNA, 19 nt, Artificial Sequence
  Description of Artificial Sequence: Synthetic oligonucleotide
  Antisense strand to SEQ ID NO: 143444
aguucucaucagcuuacac

SEQ ID NO: 143446 - RNA, 19 nt, Artificial Sequence
  Description of Artificial Sequence: Synthetic oligonucleotide
  Sense strand starting at position 1432 of SEQ ID NO: 1840
ugagaucugcucuauaauu

SEQ ID NO: 143447 - RNA, 19 nt, Artificial Sequence
  Description of Artificial Sequence: Synthetic oligonucleotide
  Antisense strand to SEQ ID NO: 143446
aauuauagagcagaucuca

SEQ ID NO: 143448 - RNA, 19 nt, Artificial Sequence
  Description of Artificial Sequence: Synthetic oligonucleotide
  Sense strand starting at position 1212 of SEQ ID NO: 1840
uuacaauuccgagacguuu

SEQ ID NO: 143449 - RNA, 19 nt, Artificial Sequence
  Description of Artificial Sequence: Synthetic oligonucleotide
  Antisense strand to SEQ ID NO: 143448
aaacgucucggaauuguaa

SEQ ID NO: 143450 - RNA, 19 nt, Artificial Sequence
  Description of Artificial Sequence: Synthetic oligonucleotide
  Sense strand starting at position 1200 of SEQ ID NO: 1840
uugcaagguuaauuacaau

SEQ ID NO: 143451 - RNA, 19 nt, Artificial Sequence
  Description of Artificial Sequence: Synthetic oligonucleotide
  Antisense strand to SEQ ID NO: 143450
auuguaauuaaccuugcaa

SEQ ID NO: 143452 - RNA, 19 nt, Artificial Sequence
  Description of Artificial Sequence: Synthetic oligonucleotide
  Sense strand starting at position 1110 of SEQ ID NO: 1840
cuauaaucacuaggguauu

SEQ ID NO: 143453 - RNA, 19 nt, Artificial Sequence
  Description of Artificial Sequence: Synthetic oligonucleotide
  Antisense strand to SEQ ID NO: 143452
aauacccuagugauuauag

SEQ ID NO: 143454 - RNA, 19 nt, Artificial Sequence
  Description of Artificial Sequence: Synthetic oligonucleotide
  Sense strand starting at position 910 of SEQ ID NO: 1840
gcaacacuugaauaugcua

SEQ ID NO: 143455 - RNA, 19 nt, Artificial Sequence
  Description of Artificial Sequence: Synthetic oligonucleotide
  Antisense strand to SEQ ID NO: 143454
uagcauauucaaguguugc

SEQ ID NO: 143456 - RNA, 19 nt, Artificial Sequence
  Description of Artificial Sequence: Synthetic oligonucleotide
  Sense strand starting at position 685 of SEQ ID NO: 1840
cuguauguuagcuuacgca

SEQ ID NO: 143457 - RNA, 19 nt, Artificial Sequence
  Description of Artificial Sequence: Synthetic oligonucleotide
  Antisense strand to SEQ ID NO: 143456
ugcguaagcuaacauacag

SEQ ID NO: 143458 - RNA, 19 nt, Artificial Sequence
  Description of Artificial Sequence: Synthetic oligonucleotide
  Sense strand starting at position 585 of SEQ ID NO: 1840
gcucaagcucaagaguuaa

SEQ ID NO: 143459 - RNA, 19 nt, Artificial Sequence
  Description of Artificial Sequence: Synthetic oligonucleotide
  Antisense strand to SEQ ID NO: 143458
uuaacucuugagcuugagc

SEQ ID NO: 143460 - RNA, 19 nt, Artificial Sequence
  Description of Artificial Sequence: Synthetic oligonucleotide
  Sense strand starting at position 486 of SEQ ID NO: 1840
ggcuuuauccuauagugac

SEQ ID NO: 143461 - RNA, 19 nt, Artificial Sequence
  Description of Artificial Sequence: Synthetic oligonucleotide
  Antisense strand to SEQ ID NO: 143460
gucacuauaggauaaagcc

SEQ ID NO: 143462 - RNA, 19 nt, Artificial Sequence
  Description of Artificial Sequence: Synthetic oligonucleotide
  Sense strand starting at position 451 of SEQ ID NO: 1840
uuguuaaacccugggaaau

SEQ ID NO: 143463 - RNA, 19 nt, Artificial Sequence
  Description of Artificial Sequence: Synthetic oligonucleotide
  Antisense strand to SEQ ID NO: 143462
auuucccaggguuuaacaa

SEQ ID NO: 143464 - RNA, 19 nt, Artificial Sequence
  Description of Artificial Sequence: Synthetic oligonucleotide
  Sense strand starting at position 450 of SEQ ID NO: 1840
uuuguuaaacccugggaaa

SEQ ID NO: 143465 - RNA, 19 nt, Artificial Sequence
  Description of Artificial Sequence: Synthetic oligonucleotide
  Antisense strand to SEQ ID NO: 143464
uuucccaggguuuaacaaa

SEQ ID NO: 143466 - RNA, 19 nt, Artificial Sequence
  Description of Artificial Sequence: Synthetic oligonucleotide
  Sense strand starting at position 310 of SEQ ID NO: 1840
ccauaaauucucugggaac

SEQ ID NO: 143467 - RNA, 19 nt, Artificial Sequence
  Description of Artificial Sequence: Synthetic oligonucleotide
  Antisense strand to SEQ ID NO: 143466
guucccagagaauuuaugg

SEQ ID NO: 143468 - RNA, 19 nt, Artificial Sequence
  Description of Artificial Sequence: Synthetic oligonucleotide
  Sense strand starting at position 309 of SEQ ID NO: 1840
gccauaaauucucugggaa

SEQ ID NO: 143469 - RNA, 19 nt, Artificial Sequence
  Description of Artificial Sequence: Synthetic oligonucleotide
  Antisense strand to SEQ ID NO: 143468
uucccagagaauuuauggc

SEQ ID NO: 143470 - RNA, 19 nt, Artificial Sequence
  Description of Artificial Sequence: Synthetic oligonucleotide
  Sense strand starting at position 308 of SEQ ID NO: 1840
agccauaaauucucuggga

SEQ ID NO: 143471 - RNA, 19 nt, Artificial Sequence
  Description of Artificial Sequence: Synthetic oligonucleotide
  Antisense strand to SEQ ID NO: 143470
ucccagagaauuuauggcu

SEQ ID NO: 143472 - RNA, 19 nt, Artificial Sequence
  Description of Artificial Sequence: Synthetic oligonucleotide
  Sense strand starting at position 81 of SEQ ID NO: 1840
gcaugcagaaugugaagaa

SEQ ID NO: 143473 - RNA, 19 nt, Artificial Sequence
  Description of Artificial Sequence: Synthetic oligonucleotide
  Antisense strand to SEQ ID NO: 143472
uucuucacauucugcaugc

SEQ ID NO: 143474 - RNA, 19 nt, Artificial Sequence
  Description of Artificial Sequence: Synthetic oligonucleotide
  Sense strand starting at position 3983 of SEQ ID NO: 1841
gugcuuuggcuacuuuagu

SEQ ID NO: 143475 - RNA, 19 nt, Artificial Sequence
  Description of Artificial Sequence: Synthetic oligonucleotide
  Antisense strand to SEQ ID NO: 143474
acuaaaguagccaaagcac

SEQ ID NO: 143476 - RNA, 19 nt, Artificial Sequence
  Description of Artificial Sequence: Synthetic oligonucleotide
  Sense strand starting at position 3936 of SEQ ID NO: 1841
acgguaauuguuuagagaa

SEQ ID NO: 143477 - RNA, 19 nt, Artificial Sequence
  Description of Artificial Sequence: Synthetic oligonucleotide
  Antisense strand to SEQ ID NO: 143476
uucucuaaacaauuaccgu

SEQ ID NO: 143478 - RNA, 19 nt, Artificial Sequence
  Description of Artificial Sequence: Synthetic oligonucleotide
  Sense strand starting at position 3935 of SEQ ID NO: 1841
uacgguaauuguuuagaga

SEQ ID NO: 143479 - RNA, 19 nt, Artificial Sequence
  Description of Artificial Sequence: Synthetic oligonucleotide
  Antisense strand to SEQ ID NO: 143478
ucucuaaacaauuaccgua

SEQ ID NO: 143480 - RNA, 19 nt, Artificial Sequence
  Description of Artificial Sequence: Synthetic oligonucleotide
  Sense strand starting at position 3796 of SEQ ID NO: 1841
gcauauugaacguaaugaa

SEQ ID NO: 143481 - RNA, 19 nt, Artificial Sequence
  Description of Artificial Sequence: Synthetic oligonucleotide
  Antisense strand to SEQ ID NO: 143480
uucauuacguucaauaugc

SEQ ID NO: 143482 - RNA, 19 nt, Artificial Sequence
  Description of Artificial Sequence: Synthetic oligonucleotide
  Sense strand starting at position 3758 of SEQ ID NO: 1841
uuaaguucucuguaaugau

SEQ ID NO: 143483 - RNA, 19 nt, Artificial Sequence
  Description of Artificial Sequence: Synthetic oligonucleotide
  Antisense strand to SEQ ID NO: 143482
aucauuacagagaacuuaa

SEQ ID NO: 143484 - RNA, 19 nt, Artificial Sequence
  Description of Artificial Sequence: Synthetic oligonucleotide
  Sense strand starting at position 3632 of SEQ ID NO: 1841
uugauacaugacuguauaa

SEQ ID NO: 143485 - RNA, 19 nt, Artificial Sequence
  Description of Artificial Sequence: Synthetic oligonucleotide
  Antisense strand to SEQ ID NO: 143484
uuauacagucauguaucaa

SEQ ID NO: 143486 - RNA, 19 nt, Artificial Sequence
  Description of Artificial Sequence: Synthetic oligonucleotide
  Sense strand starting at position 3631 of SEQ ID NO: 1841
auugauacaugacuguaua

SEQ ID NO: 143487 - RNA, 19 nt, Artificial Sequence
  Description of Artificial Sequence: Synthetic oligonucleotide
  Antisense strand to SEQ ID NO: 143486
uauacagucauguaucaau

SEQ ID NO: 143488 - RNA, 19 nt, Artificial Sequence
  Description of Artificial Sequence: Synthetic oligonucleotide
  Sense strand starting at position 3475 of SEQ ID NO: 1841
aguacuugccuacaguauu

SEQ ID NO: 143489 - RNA, 19 nt, Artificial Sequence
  Description of Artificial Sequence: Synthetic oligonucleotide
  Antisense strand to SEQ ID NO: 143488
aauacuguaggcaaguacu

SEQ ID NO: 143490 - RNA, 19 nt, Artificial Sequence
  Description of Artificial Sequence: Synthetic oligonucleotide
  Sense strand starting at position 3420 of SEQ ID NO: 1841
guaagauuauaguccuuuc

SEQ ID NO: 143491 - RNA, 19 nt, Artificial Sequence
  Description of Artificial Sequence: Synthetic oligonucleotide
  Antisense strand to SEQ ID NO: 143490
gaaaggacuauaaucuuac

SEQ ID NO: 143492 - RNA, 19 nt, Artificial Sequence
  Description of Artificial Sequence: Synthetic oligonucleotide
  Sense strand starting at position 3304 of SEQ ID NO: 1841
gcugauacuguguaauaaa

SEQ ID NO: 143493 - RNA, 19 nt, Artificial Sequence
  Description of Artificial Sequence: Synthetic oligonucleotide
  Antisense strand to SEQ ID NO: 143492
uuuauuacacaguaucagc

SEQ ID NO: 143494 - RNA, 19 nt, Artificial Sequence
  Description of Artificial Sequence: Synthetic oligonucleotide
  Sense strand starting at position 2974 of SEQ ID NO: 1841
cucaaauguguuuaaguau

SEQ ID NO: 143495 - RNA, 19 nt, Artificial Sequence
  Description of Artificial Sequence: Synthetic oligonucleotide
  Antisense strand to SEQ ID NO: 143494
auacuuaaacacauuugag

SEQ ID NO: 143496 - RNA, 19 nt, Artificial Sequence
  Description of Artificial Sequence: Synthetic oligonucleotide
  Sense strand starting at position 2875 of SEQ ID NO: 1841
guaacacuggcauaucaaa

SEQ ID NO: 143497 - RNA, 19 nt, Artificial Sequence
  Description of Artificial Sequence: Synthetic oligonucleotide
  Antisense strand to SEQ ID NO: 143496
uuugauaugccaguguuac

SEQ ID NO: 143498 - RNA, 19 nt, Artificial Sequence
  Description of Artificial Sequence: Synthetic oligonucleotide
  Sense strand starting at position 2750 of SEQ ID NO: 1841
auuugagccuuuccuguau

SEQ ID NO: 143499 - RNA, 19 nt, Artificial Sequence
  Description of Artificial Sequence: Synthetic oligonucleotide
  Antisense strand to SEQ ID NO: 143498
auacaggaaaggcucaaau

SEQ ID NO: 143500 - RNA, 19 nt, Artificial Sequence
  Description of Artificial Sequence: Synthetic oligonucleotide
  Sense strand starting at position 2339 of SEQ ID NO: 1841
gcaauuguacucugauaaa

SEQ ID NO: 143501 - RNA, 19 nt, Artificial Sequence
  Description of Artificial Sequence: Synthetic oligonucleotide
  Antisense strand to SEQ ID NO: 143500
uuuaucagaguacaauugc

SEQ ID NO: 143502 - RNA, 19 nt, Artificial Sequence
  Description of Artificial Sequence: Synthetic oligonucleotide
  Sense strand starting at position 2284 of SEQ ID NO: 1841
auacaugugguauggaaau

SEQ ID NO: 143503 - RNA, 19 nt, Artificial Sequence
  Description of Artificial Sequence: Synthetic oligonucleotide
  Antisense strand to SEQ ID NO: 143502
auuuccauaccacauguau

SEQ ID NO: 143504 - RNA, 19 nt, Artificial Sequence
  Description of Artificial Sequence: Synthetic oligonucleotide
  Sense strand starting at position 2273 of SEQ ID NO: 1841
ugugaagucacauacaugu

SEQ ID NO: 143505 - RNA, 19 nt, Artificial Sequence
  Description of Artificial Sequence: Synthetic oligonucleotide
  Antisense strand to SEQ ID NO: 143504
acauguaugugacuucaca

SEQ ID NO: 143506 - RNA, 19 nt, Artificial Sequence
  Description of Artificial Sequence: Synthetic oligonucleotide
  Sense strand starting at position 2074 of SEQ ID NO: 1841
ugagguuaaguuuaauauc

SEQ ID NO: 143507 - RNA, 19 nt, Artificial Sequence
  Description of Artificial Sequence: Synthetic oligonucleotide
  Antisense strand to SEQ ID NO: 143506
gauauuaaacuuaaccuca

SEQ ID NO: 143508 - RNA, 19 nt, Artificial Sequence
  Description of Artificial Sequence: Synthetic oligonucleotide
  Sense strand starting at position 1821 of SEQ ID NO: 1841
augucaucaguuuaaucuu

SEQ ID NO: 143509 - RNA, 19 nt, Artificial Sequence
  Description of Artificial Sequence: Synthetic oligonucleotide
  Antisense strand to SEQ ID NO: 143508
aagauuaaacugaugacau

SEQ ID NO: 143510 - RNA, 19 nt, Artificial Sequence
  Description of Artificial Sequence: Synthetic oligonucleotide
  Sense strand starting at position 1816 of SEQ ID NO: 1841
ucuaaaugucaucaguuua

SEQ ID NO: 143511 - RNA, 19 nt, Artificial Sequence
  Description of Artificial Sequence: Synthetic oligonucleotide
  Antisense strand to SEQ ID NO: 143510
uaaacugaugacauuuaga

SEQ ID NO: 143512 - RNA, 19 nt, Artificial Sequence
  Description of Artificial Sequence: Synthetic oligonucleotide
  Sense strand starting at position 1815 of SEQ ID NO: 1841
cucuaaaugucaucaguuu

SEQ ID NO: 143513 - RNA, 19 nt, Artificial Sequence
  Description of Artificial Sequence: Synthetic oligonucleotide
  Antisense strand to SEQ ID NO: 143512
aaacugaugacauuuagag

SEQ ID NO: 143514 - RNA, 19 nt, Artificial Sequence
  Description of Artificial Sequence: Synthetic oligonucleotide
  Sense strand starting at position 1727 of SEQ ID NO: 1841
ccaaaugaauagcuaguaa

SEQ ID NO: 143515 - RNA, 19 nt, Artificial Sequence
  Description of Artificial Sequence: Synthetic oligonucleotide
  Antisense strand to SEQ ID NO: 143514
uuacuagcuauucauuugg

SEQ ID NO: 143516 - RNA, 19 nt, Artificial Sequence
  Description of Artificial Sequence: Synthetic oligonucleotide
  Sense strand starting at position 1715 of SEQ ID NO: 1841
cugcaaauguuaccaaaug

SEQ ID NO: 143517 - RNA, 19 nt, Artificial Sequence
  Description of Artificial Sequence: Synthetic oligonucleotide
  Antisense strand to SEQ ID NO: 143516
cauuugguaacauuugcag

SEQ ID NO: 143518 - RNA, 19 nt, Artificial Sequence
  Description of Artificial Sequence: Synthetic oligonucleotide
  Sense strand starting at position 1686 of SEQ ID NO: 1841
uuugacaaucugugauaau

SEQ ID NO: 143519 - RNA, 19 nt, Artificial Sequence
  Description of Artificial Sequence: Synthetic oligonucleotide
  Antisense strand to SEQ ID NO: 143518
auuaucacagauugucaaa

SEQ ID NO: 143520 - RNA, 19 nt, Artificial Sequence
  Description of Artificial Sequence: Synthetic oligonucleotide
  Sense strand starting at position 1685 of SEQ ID NO: 1841
cuuugacaaucugugauaa

SEQ ID NO: 143521 - RNA, 19 nt, Artificial Sequence
  Description of Artificial Sequence: Synthetic oligonucleotide
  Antisense strand to SEQ ID NO: 143520
uuaucacagauugucaaag

SEQ ID NO: 143522 - RNA, 19 nt, Artificial Sequence
  Description of Artificial Sequence: Synthetic oligonucleotide
  Sense strand starting at position 1265 of SEQ ID NO: 1841
cuguaaacauuguugaagu

SEQ ID NO: 143523 - RNA, 19 nt, Artificial Sequence
  Description of Artificial Sequence: Synthetic oligonucleotide
  Antisense strand to SEQ ID NO: 143522
acuucaacaauguuuacag

SEQ ID NO: 143524 - RNA, 19 nt, Artificial Sequence
  Description of Artificial Sequence: Synthetic oligonucleotide
  Sense strand starting at position 1168 of SEQ ID NO: 1841
cuuuacuuagagugacaug

SEQ ID NO: 143525 - RNA, 19 nt, Artificial Sequence
  Description of Artificial Sequence: Synthetic oligonucleotide
  Antisense strand to SEQ ID NO: 143524
caugucacucuaaguaaag

SEQ ID NO: 143526 - RNA, 19 nt, Artificial Sequence
  Description of Artificial Sequence: Synthetic oligonucleotide
  Sense strand starting at position 1162 of SEQ ID NO: 1841
auaagacuuuacuuagagu

SEQ ID NO: 143527 - RNA, 19 nt, Artificial Sequence
  Description of Artificial Sequence: Synthetic oligonucleotide
  Antisense strand to SEQ ID NO: 143526
acucuaaguaaagucuuau

SEQ ID NO: 143528 - RNA, 19 nt, Artificial Sequence
  Description of Artificial Sequence: Synthetic oligonucleotide
  Sense strand starting at position 940 of SEQ ID NO: 1841
gagaaagaguugccagcau

SEQ ID NO: 143529 - RNA, 19 nt, Artificial Sequence
  Description of Artificial Sequence: Synthetic oligonucleotide
  Antisense strand to SEQ ID NO: 143528
augcuggcaacucuuucuc

SEQ ID NO: 143530 - RNA, 19 nt, Artificial Sequence
  Description of Artificial Sequence: Synthetic oligonucleotide
  Sense strand starting at position 874 of SEQ ID NO: 1841
gcaauuauacgaugaauau

SEQ ID NO: 143531 - RNA, 19 nt, Artificial Sequence
  Description of Artificial Sequence: Synthetic oligonucleotide
  Antisense strand to SEQ ID NO: 143530
auauucaucguauaauugc

SEQ ID NO: 143532 - RNA, 19 nt, Artificial Sequence
  Description of Artificial Sequence: Synthetic oligonucleotide
  Sense strand starting at position 792 of SEQ ID NO: 1841
aaguuuaaugacuagguuu

SEQ ID NO: 143533 - RNA, 19 nt, Artificial Sequence
  Description of Artificial Sequence: Synthetic oligonucleotide
  Antisense strand to SEQ ID NO: 143532
aaaccuagucauuaaacuu

SEQ ID NO: 143534 - RNA, 19 nt, Artificial Sequence
  Description of Artificial Sequence: Synthetic oligonucleotide
  Sense strand starting at position 667 of SEQ ID NO: 1841
aggcaauuagcagaaguaa

SEQ ID NO: 143535 - RNA, 19 nt, Artificial Sequence
  Description of Artificial Sequence: Synthetic oligonucleotide
  Antisense strand to SEQ ID NO: 143534
uuacuucugcuaauugccu

SEQ ID NO: 143536 - RNA, 19 nt, Artificial Sequence
  Description of Artificial Sequence: Synthetic oligonucleotide
  Sense strand starting at position 633 of SEQ ID NO: 1841
aggagauugcuuuacuucu

SEQ ID NO: 143537 - RNA, 19 nt, Artificial Sequence
  Description of Artificial Sequence: Synthetic oligonucleotide
  Antisense strand to SEQ ID NO: 143536
agaaguaaagcaaucuccu

SEQ ID NO: 143538 - RNA, 19 nt, Artificial Sequence
  Description of Artificial Sequence: Synthetic oligonucleotide
  Sense strand starting at position 631 of SEQ ID NO: 1841
agaggagauugcuuuacuu

SEQ ID NO: 143539 - RNA, 19 nt, Artificial Sequence
  Description of Artificial Sequence: Synthetic oligonucleotide
  Antisense strand to SEQ ID NO: 143538
aaguaaagcaaucuccucu

SEQ ID NO: 143540 - RNA, 19 nt, Artificial Sequence
  Description of Artificial Sequence: Synthetic oligonucleotide
  Sense strand starting at position 628 of SEQ ID NO: 1841
accagaggagauugcuuua

SEQ ID NO: 143541 - RNA, 19 nt, Artificial Sequence
  Description of Artificial Sequence: Synthetic oligonucleotide
  Antisense strand to SEQ ID NO: 143540
uaaagcaaucuccucuggu

SEQ ID NO: 143542 - RNA, 19 nt, Artificial Sequence
  Description of Artificial Sequence: Synthetic oligonucleotide
  Sense strand starting at position 537 of SEQ ID NO: 1841
cuguucugggagggauaga

SEQ ID NO: 143543 - RNA, 19 nt, Artificial Sequence
  Description of Artificial Sequence: Synthetic oligonucleotide
  Antisense strand to SEQ ID NO: 143542
ucuaucccucccagaacag

SEQ ID NO: 143544 - RNA, 19 nt, Artificial Sequence
  Description of Artificial Sequence: Synthetic oligonucleotide
  Sense strand starting at position 456 of SEQ ID NO: 1841
gauaaaucuugggcgagga

SEQ ID NO: 143545 - RNA, 19 nt, Artificial Sequence
  Description of Artificial Sequence: Synthetic oligonucleotide
  Antisense strand to SEQ ID NO: 143544
uccucgcccaagauuuauc

SEQ ID NO: 143546 - RNA, 19 nt, Artificial Sequence
  Description of Artificial Sequence: Synthetic oligonucleotide
  Sense strand starting at position 389 of SEQ ID NO: 1841
aguaaaugauaucugaccu

SEQ ID NO: 143547 - RNA, 19 nt, Artificial Sequence
  Description of Artificial Sequence: Synthetic oligonucleotide
  Antisense strand to SEQ ID NO: 143546
aggucagauaucauuuacu

SEQ ID NO: 143548 - RNA, 19 nt, Artificial Sequence
  Description of Artificial Sequence: Synthetic oligonucleotide
  Sense strand starting at position 334 of SEQ ID NO: 1841
auggcuccugaaugauaaa

SEQ ID NO: 143549 - RNA, 19 nt, Artificial Sequence
  Description of Artificial Sequence: Synthetic oligonucleotide
  Antisense strand to SEQ ID NO: 143548
uuuaucauucaggagccau

SEQ ID NO: 143550 - RNA, 19 nt, Artificial Sequence
  Description of Artificial Sequence: Synthetic oligonucleotide
  Sense strand starting at position 286 of SEQ ID NO: 1841
gagcaaugaugaguaugaa

SEQ ID NO: 143551 - RNA, 19 nt, Artificial Sequence
  Description of Artificial Sequence: Synthetic oligonucleotide
  Antisense strand to SEQ ID NO: 143550
uucauacucaucauugcuc

SEQ ID NO: 143552 - RNA, 19 nt, Artificial Sequence
  Description of Artificial Sequence: Synthetic oligonucleotide
  Sense strand starting at position 194 of SEQ ID NO: 1841
cagcaauaguucuuggaag

SEQ ID NO: 143553 - RNA, 19 nt, Artificial Sequence
  Description of Artificial Sequence: Synthetic oligonucleotide
  Antisense strand to SEQ ID NO: 143552
cuuccaagaacuauugcug

SEQ ID NO: 143554 - RNA, 19 nt, Artificial Sequence
  Description of Artificial Sequence: Synthetic oligonucleotide
  Sense strand starting at position 3963 of SEQ ID NO: 1842
aaaucuccgcucuaguaga

SEQ ID NO: 143555 - RNA, 19 nt, Artificial Sequence
  Description of Artificial Sequence: Synthetic oligonucleotide
  Antisense strand to SEQ ID NO: 143554
ucuacuagagcggagauuu

SEQ ID NO: 143556 - RNA, 19 nt, Artificial Sequence
  Description of Artificial Sequence: Synthetic oligonucleotide
  Sense strand starting at position 3845 of SEQ ID NO: 1842
ggaagagcuuuacucucaa

SEQ ID NO: 143557 - RNA, 19 nt, Artificial Sequence
  Description of Artificial Sequence: Synthetic oligonucleotide
  Antisense strand to SEQ ID NO: 143556
uugagaguaaagcucuucc

SEQ ID NO: 143558 - RNA, 19 nt, Artificial Sequence
  Description of Artificial Sequence: Synthetic oligonucleotide
  Sense strand starting at position 3837 of SEQ ID NO: 1842
gguaguguggaagagcuuu

SEQ ID NO: 143559 - RNA, 19 nt, Artificial Sequence
  Description of Artificial Sequence: Synthetic oligonucleotide
  Antisense strand to SEQ ID NO: 143558
aaagcucuuccacacuacc

SEQ ID NO: 143560 - RNA, 19 nt, Artificial Sequence
  Description of Artificial Sequence: Synthetic oligonucleotide
  Sense strand starting at position 3824 of SEQ ID NO: 1842
ccugaaugacucugguagu

SEQ ID NO: 143561 - RNA, 19 nt, Artificial Sequence
  Description of Artificial Sequence: Synthetic oligonucleotide
  Antisense strand to SEQ ID NO: 143560
acuaccagagucauucagg

SEQ ID NO: 143562 - RNA, 19 nt, Artificial Sequence
  Description of Artificial Sequence: Synthetic oligonucleotide
  Sense strand starting at position 3775 of SEQ ID NO: 1842
cucugauaugcacaaagca

SEQ ID NO: 143563 - RNA, 19 nt, Artificial Sequence
  Description of Artificial Sequence: Synthetic oligonucleotide
  Antisense strand to SEQ ID NO: 143562
ugcuuugugcauaucagag

SEQ ID NO: 143564 - RNA, 19 nt, Artificial Sequence
  Description of Artificial Sequence: Synthetic oligonucleotide
  Sense strand starting at position 3491 of SEQ ID NO: 1842
auuuguucuugcuccuuga

SEQ ID NO: 143565 - RNA, 19 nt, Artificial Sequence
  Description of Artificial Sequence: Synthetic oligonucleotide
  Antisense strand to SEQ ID NO: 143564
ucaaggagcaagaacaaau

SEQ ID NO: 143566 - RNA, 19 nt, Artificial Sequence
  Description of Artificial Sequence: Synthetic oligonucleotide
  Sense strand starting at position 3352 of SEQ ID NO: 1842
aagguaaacuguguaaaua

SEQ ID NO: 143567 - RNA, 19 nt, Artificial Sequence
  Description of Artificial Sequence: Synthetic oligonucleotide
  Antisense strand to SEQ ID NO: 143566
uauuuacacaguuuaccuu

SEQ ID NO: 143568 - RNA, 19 nt, Artificial Sequence
  Description of Artificial Sequence: Synthetic oligonucleotide
  Sense strand starting at position 3351 of SEQ ID NO: 1842
uaagguaaacuguguaaau

SEQ ID NO: 143569 - RNA, 19 nt, Artificial Sequence
  Description of Artificial Sequence: Synthetic oligonucleotide
  Antisense strand to SEQ ID NO: 143568
auuuacacaguuuaccuua

SEQ ID NO: 143570 - RNA, 19 nt, Artificial Sequence
  Description of Artificial Sequence: Synthetic oligonucleotide
  Sense strand starting at position 3306 of SEQ ID NO: 1842
uggauuguccaccaugcua

SEQ ID NO: 143571 - RNA, 19 nt, Artificial Sequence
  Description of Artificial Sequence: Synthetic oligonucleotide
  Antisense strand to SEQ ID NO: 143570
uagcaugguggacaaucca

SEQ ID NO: 143572 - RNA, 19 nt, Artificial Sequence
  Description of Artificial Sequence: Synthetic oligonucleotide
  Sense strand starting at position 3293 of SEQ ID NO: 1842
auacucaguuauguggauu

SEQ ID NO: 143573 - RNA, 19 nt, Artificial Sequence
  Description of Artificial Sequence: Synthetic oligonucleotide
  Antisense strand to SEQ ID NO: 143572
aauccacauaacugaguau

SEQ ID NO: 143574 - RNA, 19 nt, Artificial Sequence
  Description of Artificial Sequence: Synthetic oligonucleotide
  Sense strand starting at position 3277 of SEQ ID NO: 1842
agauacaggugucucgaua

SEQ ID NO: 143575 - RNA, 19 nt, Artificial Sequence
  Description of Artificial Sequence: Synthetic oligonucleotide
  Antisense strand to SEQ ID NO: 143574
uaucgagacaccuguaucu

SEQ ID NO: 143576 - RNA, 19 nt, Artificial Sequence
  Description of Artificial Sequence: Synthetic oligonucleotide
  Sense strand starting at position 3231 of SEQ ID NO: 1842
aagugacuugcugagguua

SEQ ID NO: 143577 - RNA, 19 nt, Artificial Sequence
  Description of Artificial Sequence: Synthetic oligonucleotide
  Antisense strand to SEQ ID NO: 143576
uaaccucagcaagucacuu

SEQ ID NO: 143578 - RNA, 19 nt, Artificial Sequence
  Description of Artificial Sequence: Synthetic oligonucleotide
  Sense strand starting at position 3229 of SEQ ID NO: 1842
gaaagugacuugcugaggu

SEQ ID NO: 143579 - RNA, 19 nt, Artificial Sequence
  Description of Artificial Sequence: Synthetic oligonucleotide
  Antisense strand to SEQ ID NO: 143578
accucagcaagucacuuuc

SEQ ID NO: 143580 - RNA, 19 nt, Artificial Sequence
  Description of Artificial Sequence: Synthetic oligonucleotide
  Sense strand starting at position 3227 of SEQ ID NO: 1842
gagaaagugacuugcugag

SEQ ID NO: 143581 - RNA, 19 nt, Artificial Sequence
  Description of Artificial Sequence: Synthetic oligonucleotide
  Antisense strand to SEQ ID NO: 143580
cucagcaagucacuuucuc

SEQ ID NO: 143582 - RNA, 19 nt, Artificial Sequence
  Description of Artificial Sequence: Synthetic oligonucleotide
  Sense strand starting at position 3173 of SEQ ID NO: 1842
ggcaaucuagccuaacacu

SEQ ID NO: 143583 - RNA, 19 nt, Artificial Sequence
  Description of Artificial Sequence: Synthetic oligonucleotide
  Antisense strand to SEQ ID NO: 143582
aguguuaggcuagauugcc

SEQ ID NO: 143584 - RNA, 19 nt, Artificial Sequence
  Description of Artificial Sequence: Synthetic oligonucleotide
  Sense strand starting at position 3132 of SEQ ID NO: 1842
cugcaauagaugggacuuu

SEQ ID NO: 143585 - RNA, 19 nt, Artificial Sequence
  Description of Artificial Sequence: Synthetic oligonucleotide
  Antisense strand to SEQ ID NO: 143584
aaagucccaucuauugcag

SEQ ID NO: 143586 - RNA, 19 nt, Artificial Sequence
  Description of Artificial Sequence: Synthetic oligonucleotide
  Sense strand starting at position 3041 of SEQ ID NO: 1842
uuuacugaugccugaaauu

SEQ ID NO: 143587 - RNA, 19 nt, Artificial Sequence
  Description of Artificial Sequence: Synthetic oligonucleotide
  Antisense strand to SEQ ID NO: 143586
aauuucaggcaucaguaaa

SEQ ID NO: 143588 - RNA, 19 nt, Artificial Sequence
  Description of Artificial Sequence: Synthetic oligonucleotide
  Sense strand starting at position 2397 of SEQ ID NO: 1842
gcagauagguuccugauca

SEQ ID NO: 143589 - RNA, 19 nt, Artificial Sequence
  Description of Artificial Sequence: Synthetic oligonucleotide
  Antisense strand to SEQ ID NO: 143588
ugaucaggaaccuaucugc

SEQ ID NO: 143590 - RNA, 19 nt, Artificial Sequence
  Description of Artificial Sequence: Synthetic oligonucleotide
  Sense strand starting at position 2352 of SEQ ID NO: 1842
gggaauuaauugcuagauc

SEQ ID NO: 143591 - RNA, 19 nt, Artificial Sequence
  Description of Artificial Sequence: Synthetic oligonucleotide
  Antisense strand to SEQ ID NO: 143590
gaucuagcaauuaauuccc

SEQ ID NO: 143592 - RNA, 19 nt, Artificial Sequence
  Description of Artificial Sequence: Synthetic oligonucleotide
  Sense strand starting at position 2051 of SEQ ID NO: 1842
auguaauucuaagucucca

SEQ ID NO: 143593 - RNA, 19 nt, Artificial Sequence
  Description of Artificial Sequence: Synthetic oligonucleotide
  Antisense strand to SEQ ID NO: 143592
uggagacuuagaauuacau

SEQ ID NO: 143594 - RNA, 19 nt, Artificial Sequence
  Description of Artificial Sequence: Synthetic oligonucleotide
  Sense strand starting at position 2045 of SEQ ID NO: 1842
ugucuuauguaauucuaag

SEQ ID NO: 143595 - RNA, 19 nt, Artificial Sequence
  Description of Artificial Sequence: Synthetic oligonucleotide
  Antisense strand to SEQ ID NO: 143594
cuuagaauuacauaagaca

SEQ ID NO: 143596 - RNA, 19 nt, Artificial Sequence
  Description of Artificial Sequence: Synthetic oligonucleotide
  Sense strand starting at position 1053 of SEQ ID NO: 1842
ugguuaauggcugaaagca

SEQ ID NO: 143597 - RNA, 19 nt, Artificial Sequence
  Description of Artificial Sequence: Synthetic oligonucleotide
  Antisense strand to SEQ ID NO: 143596
ugcuuucagccauuaacca

SEQ ID NO: 143598 - RNA, 19 nt, Artificial Sequence
  Description of Artificial Sequence: Synthetic oligonucleotide
  Sense strand starting at position 992 of SEQ ID NO: 1842
agaacuagguuaguaagua

SEQ ID NO: 143599 - RNA, 19 nt, Artificial Sequence
  Description of Artificial Sequence: Synthetic oligonucleotide
  Antisense strand to SEQ ID NO: 143598
uacuuacuaaccuaguucu

SEQ ID NO: 143600 - RNA, 19 nt, Artificial Sequence
  Description of Artificial Sequence: Synthetic oligonucleotide
  Sense strand starting at position 932 of SEQ ID NO: 1842
cuagucuuggaggaaaguu

SEQ ID NO: 143601 - RNA, 19 nt, Artificial Sequence
  Description of Artificial Sequence: Synthetic oligonucleotide
  Antisense strand to SEQ ID NO: 143600
aacuuuccuccaagacuag

SEQ ID NO: 143602 - RNA, 19 nt, Artificial Sequence
  Description of Artificial Sequence: Synthetic oligonucleotide
  Sense strand starting at position 931 of SEQ ID NO: 1842
gcuagucuuggaggaaagu

SEQ ID NO: 143603 - RNA, 19 nt, Artificial Sequence
  Description of Artificial Sequence: Synthetic oligonucleotide
  Antisense strand to SEQ ID NO: 143602
acuuuccuccaagacuagc

SEQ ID NO: 143604 - RNA, 19 nt, Artificial Sequence
  Description of Artificial Sequence: Synthetic oligonucleotide
  Sense strand starting at position 928 of SEQ ID NO: 1842
cuagcuagucuuggaggaa

SEQ ID NO: 143605 - RNA, 19 nt, Artificial Sequence
  Description of Artificial Sequence: Synthetic oligonucleotide
  Antisense strand to SEQ ID NO: 143604
uuccuccaagacuagcuag

SEQ ID NO: 143606 - RNA, 19 nt, Artificial Sequence
  Description of Artificial Sequence: Synthetic oligonucleotide
  Sense strand starting at position 924 of SEQ ID NO: 1842
auaucuagcuagucuugga

SEQ ID NO: 143607 - RNA, 19 nt, Artificial Sequence
  Description of Artificial Sequence: Synthetic oligonucleotide
  Antisense strand to SEQ ID NO: 143606
uccaagacuagcuagauau

SEQ ID NO: 143608 - RNA, 19 nt, Artificial Sequence
  Description of Artificial Sequence: Synthetic oligonucleotide
  Sense strand starting at position 822 of SEQ ID NO: 1842
uuucuuagaccuggcuuaa

SEQ ID NO: 143609 - RNA, 19 nt, Artificial Sequence
  Description of Artificial Sequence: Synthetic oligonucleotide
  Antisense strand to SEQ ID NO: 143608
uuaagccaggucuaagaaa

SEQ ID NO: 143610 - RNA, 19 nt, Artificial Sequence
  Description of Artificial Sequence: Synthetic oligonucleotide
  Sense strand starting at position 765 of SEQ ID NO: 1842
auuacagaucacuguacau

SEQ ID NO: 143611 - RNA, 19 nt, Artificial Sequence
  Description of Artificial Sequence: Synthetic oligonucleotide
  Antisense strand to SEQ ID NO: 143610
auguacagugaucuguaau

SEQ ID NO: 143612 - RNA, 19 nt, Artificial Sequence
  Description of Artificial Sequence: Synthetic oligonucleotide
  Sense strand starting at position 733 of SEQ ID NO: 1842
cucaaauagcaguaguaau

SEQ ID NO: 143613 - RNA, 19 nt, Artificial Sequence
  Description of Artificial Sequence: Synthetic oligonucleotide
  Antisense strand to SEQ ID NO: 143612
auuacuacugcuauuugag

SEQ ID NO: 143614 - RNA, 19 nt, Artificial Sequence
  Description of Artificial Sequence: Synthetic oligonucleotide
  Sense strand starting at position 713 of SEQ ID NO: 1842
uucuauguacuccagggau

SEQ ID NO: 143615 - RNA, 19 nt, Artificial Sequence
  Description of Artificial Sequence: Synthetic oligonucleotide
  Antisense strand to SEQ ID NO: 143614
aucccuggaguacauagaa

SEQ ID NO: 143616 - RNA, 19 nt, Artificial Sequence
  Description of Artificial Sequence: Synthetic oligonucleotide
  Sense strand starting at position 353 of SEQ ID NO: 1842
aaugaauagcuguaugucu

SEQ ID NO: 143617 - RNA, 19 nt, Artificial Sequence
  Description of Artificial Sequence: Synthetic oligonucleotide
  Antisense strand to SEQ ID NO: 143616
agacauacagcuauucauu

SEQ ID NO: 143618 - RNA, 19 nt, Artificial Sequence
  Description of Artificial Sequence: Synthetic oligonucleotide
  Sense strand starting at position 238 of SEQ ID NO: 1842
cugcaagauuaaguaaugu

SEQ ID NO: 143619 - RNA, 19 nt, Artificial Sequence
  Description of Artificial Sequence: Synthetic oligonucleotide
  Antisense strand to SEQ ID NO: 143618
acauuacuuaaucuugcag

SEQ ID NO: 143620 - RNA, 19 nt, Artificial Sequence
  Description of Artificial Sequence: Synthetic oligonucleotide
  Sense strand starting at position 227 of SEQ ID NO: 1842
uuuaccuuugacugcaaga

SEQ ID NO: 143621 - RNA, 19 nt, Artificial Sequence
  Description of Artificial Sequence: Synthetic oligonucleotide
  Antisense strand to SEQ ID NO: 143620
ucuugcagucaaagguaaa

SEQ ID NO: 143622 - RNA, 19 nt, Artificial Sequence
  Description of Artificial Sequence: Synthetic oligonucleotide
  Sense strand starting at position 204 of SEQ ID NO: 1842
guaguauaccuuuagguug

SEQ ID NO: 143623 - RNA, 19 nt, Artificial Sequence
  Description of Artificial Sequence: Synthetic oligonucleotide
  Antisense strand to SEQ ID NO: 143622
caaccuaaagguauacuac

SEQ ID NO: 143624 - RNA, 19 nt, Artificial Sequence
  Description of Artificial Sequence: Synthetic oligonucleotide
  Sense strand starting at position 181 of SEQ ID NO: 1842
uuugcagugcgauaagaaa

SEQ ID NO: 143625 - RNA, 19 nt, Artificial Sequence
  Description of Artificial Sequence: Synthetic oligonucleotide
  Antisense strand to SEQ ID NO: 143624
uuucuuaucgcacugcaaa

SEQ ID NO: 143626 - RNA, 19 nt, Artificial Sequence
  Description of Artificial Sequence: Synthetic oligonucleotide
  Sense strand starting at position 178 of SEQ ID NO: 1842
cuauuugcagugcgauaag

SEQ ID NO: 143627 - RNA, 19 nt, Artificial Sequence
  Description of Artificial Sequence: Synthetic oligonucleotide
  Antisense strand to SEQ ID NO: 143626
cuuaucgcacugcaaauag

SEQ ID NO: 143628 - RNA, 19 nt, Artificial Sequence
  Description of Artificial Sequence: Synthetic oligonucleotide
  Sense strand starting at position 176 of SEQ ID NO: 1842
uucuauuugcagugcgaua

SEQ ID NO: 143629 - RNA, 19 nt, Artificial Sequence
  Description of Artificial Sequence: Synthetic oligonucleotide
  Antisense strand to SEQ ID NO: 143628
uaucgcacugcaaauagaa

SEQ ID NO: 143630 - RNA, 19 nt, Artificial Sequence
  Description of Artificial Sequence: Synthetic oligonucleotide
  Sense strand starting at position 89 of SEQ ID NO: 1842
gacagaauauuuggaaagu

SEQ ID NO: 143631 - RNA, 19 nt, Artificial Sequence
  Description of Artificial Sequence: Synthetic oligonucleotide
  Antisense strand to SEQ ID NO: 143630
acuuuccaaauauucuguc

SEQ ID NO: 143632 - RNA, 19 nt, Artificial Sequence
  Description of Artificial Sequence: Synthetic oligonucleotide
  Sense strand starting at position 20 of SEQ ID NO: 1842
auagauacucucugccaga

SEQ ID NO: 143633 - RNA, 19 nt, Artificial Sequence
  Description of Artificial Sequence: Synthetic oligonucleotide
  Antisense strand to SEQ ID NO: 143632
ucuggcagagaguaucuau

SEQ ID NO: 143634 - RNA, 19 nt, Artificial Sequence
  Description of Artificial Sequence: Synthetic oligonucleotide
  Sense strand starting at position 3652 of SEQ ID NO: 1845
aaugaauagcuguaugucu

SEQ ID NO: 143635 - RNA, 19 nt, Artificial Sequence
  Description of Artificial Sequence: Synthetic oligonucleotide
  Antisense strand to SEQ ID NO: 143634
agacauacagcuauucauu

SEQ ID NO: 143636 - RNA, 19 nt, Artificial Sequence
  Description of Artificial Sequence: Synthetic oligonucleotide
  Sense strand starting at position 3526 of SEQ ID NO: 1845
uuuaccuuugacugcaaga

SEQ ID NO: 143637 - RNA, 19 nt, Artificial Sequence
  Description of Artificial Sequence: Synthetic oligonucleotide
  Antisense strand to SEQ ID NO: 143636
ucuugcagucaaagguaaa

SEQ ID NO: 143638 - RNA, 19 nt, Artificial Sequence
  Description of Artificial Sequence: Synthetic oligonucleotide
  Sense strand starting at position 3503 of SEQ ID NO: 1845
guaguauaccuuuagguug

SEQ ID NO: 143639 - RNA, 19 nt, Artificial Sequence
  Description of Artificial Sequence: Synthetic oligonucleotide
  Antisense strand to SEQ ID NO: 143638
caaccuaaagguauacuac

SEQ ID NO: 143640 - RNA, 19 nt, Artificial Sequence
  Description of Artificial Sequence: Synthetic oligonucleotide
  Sense strand starting at position 3477 of SEQ ID NO: 1845
cuauuugcagugcgauaag

SEQ ID NO: 143641 - RNA, 19 nt, Artificial Sequence
  Description of Artificial Sequence: Synthetic oligonucleotide
  Antisense strand to SEQ ID NO: 143640
cuuaucgcacugcaaauag

SEQ ID NO: 143642 - RNA, 19 nt, Artificial Sequence
  Description of Artificial Sequence: Synthetic oligonucleotide
  Sense strand starting at position 3388 of SEQ ID NO: 1845
gacagaauauuuggaaagu

SEQ ID NO: 143643 - RNA, 19 nt, Artificial Sequence
  Description of Artificial Sequence: Synthetic oligonucleotide
  Antisense strand to SEQ ID NO: 143642
acuuuccaaauauucuguc

SEQ ID NO: 143644 - RNA, 19 nt, Artificial Sequence
  Description of Artificial Sequence: Synthetic oligonucleotide
  Sense strand starting at position 3319 of SEQ ID NO: 1845
auagauacucucugccaga

SEQ ID NO: 143645 - RNA, 19 nt, Artificial Sequence
  Description of Artificial Sequence: Synthetic oligonucleotide
  Antisense strand to SEQ ID NO: 143644
ucuggcagagaguaucuau

SEQ ID NO: 143646 - RNA, 19 nt, Artificial Sequence
  Description of Artificial Sequence: Synthetic oligonucleotide
  Sense strand starting at position 3139 of SEQ ID NO: 1845
aggacagagcucuaguauu

SEQ ID NO: 143647 - RNA, 19 nt, Artificial Sequence
  Description of Artificial Sequence: Synthetic oligonucleotide
  Antisense strand to SEQ ID NO: 143646
aauacuagagcucuguccu

SEQ ID NO: 143648 - RNA, 19 nt, Artificial Sequence
  Description of Artificial Sequence: Synthetic oligonucleotide
  Sense strand starting at position 3125 of SEQ ID NO: 1845
ugcuuaacucuuugaggac

SEQ ID NO: 143649 - RNA, 19 nt, Artificial Sequence
  Description of Artificial Sequence: Synthetic oligonucleotide
  Antisense strand to SEQ ID NO: 143648
guccucaaagaguuaagca

SEQ ID NO: 143650 - RNA, 19 nt, Artificial Sequence
  Description of Artificial Sequence: Synthetic oligonucleotide
  Sense strand starting at position 3124 of SEQ ID NO: 1845
cugcuuaacucuuugagga

SEQ ID NO: 143651 - RNA, 19 nt, Artificial Sequence
  Description of Artificial Sequence: Synthetic oligonucleotide
  Antisense strand to SEQ ID NO: 143650
uccucaaagaguuaagcag

SEQ ID NO: 143652 - RNA, 19 nt, Artificial Sequence
  Description of Artificial Sequence: Synthetic oligonucleotide
  Sense strand starting at position 3117 of SEQ ID NO: 1845
agauuagcugcuuaacucu

SEQ ID NO: 143653 - RNA, 19 nt, Artificial Sequence
  Description of Artificial Sequence: Synthetic oligonucleotide
  Antisense strand to SEQ ID NO: 143652
agaguuaagcagcuaaucu

SEQ ID NO: 143654 - RNA, 19 nt, Artificial Sequence
  Description of Artificial Sequence: Synthetic oligonucleotide
  Sense strand starting at position 3104 of SEQ ID NO: 1845
aguuuaccuccuuagauua

SEQ ID NO: 143655 - RNA, 19 nt, Artificial Sequence
  Description of Artificial Sequence: Synthetic oligonucleotide
  Antisense strand to SEQ ID NO: 143654
uaaucuaaggagguaaacu

SEQ ID NO: 143656 - RNA, 19 nt, Artificial Sequence
  Description of Artificial Sequence: Synthetic oligonucleotide
  Sense strand starting at position 2926 of SEQ ID NO: 1845
ucagaaguuacuggaguca

SEQ ID NO: 143657 - RNA, 19 nt, Artificial Sequence
  Description of Artificial Sequence: Synthetic oligonucleotide
  Antisense strand to SEQ ID NO: 143656
ugacuccaguaacuucuga

SEQ ID NO: 143658 - RNA, 19 nt, Artificial Sequence
  Description of Artificial Sequence: Synthetic oligonucleotide
  Sense strand starting at position 2822 of SEQ ID NO: 1845
gcuggauccaccugagauc

SEQ ID NO: 143659 - RNA, 19 nt, Artificial Sequence
  Description of Artificial Sequence: Synthetic oligonucleotide
  Antisense strand to SEQ ID NO: 143658
gaucucagguggauccagc

SEQ ID NO: 143660 - RNA, 19 nt, Artificial Sequence
  Description of Artificial Sequence: Synthetic oligonucleotide
  Sense strand starting at position 2755 of SEQ ID NO: 1845
gugauuccaaggugauaau

SEQ ID NO: 143661 - RNA, 19 nt, Artificial Sequence
  Description of Artificial Sequence: Synthetic oligonucleotide
  Antisense strand to SEQ ID NO: 143660
auuaucaccuuggaaucac

SEQ ID NO: 143662 - RNA, 19 nt, Artificial Sequence
  Description of Artificial Sequence: Synthetic oligonucleotide
  Sense strand starting at position 2753 of SEQ ID NO: 1845
gggugauuccaaggugaua

SEQ ID NO: 143663 - RNA, 19 nt, Artificial Sequence
  Description of Artificial Sequence: Synthetic oligonucleotide
  Antisense strand to SEQ ID NO: 143662
uaucaccuuggaaucaccc

SEQ ID NO: 143664 - RNA, 19 nt, Artificial Sequence
  Description of Artificial Sequence: Synthetic oligonucleotide
  Sense strand starting at position 2745 of SEQ ID NO: 1845
gaauguuagggugauucca

SEQ ID NO: 143665 - RNA, 19 nt, Artificial Sequence
  Description of Artificial Sequence: Synthetic oligonucleotide
  Antisense strand to SEQ ID NO: 143664
uggaaucacccuaacauuc

SEQ ID NO: 143666 - RNA, 19 nt, Artificial Sequence
  Description of Artificial Sequence: Synthetic oligonucleotide
  Sense strand starting at position 2675 of SEQ ID NO: 1845
cucugcuucccugacugau

SEQ ID NO: 143667 - RNA, 19 nt, Artificial Sequence
  Description of Artificial Sequence: Synthetic oligonucleotide
  Antisense strand to SEQ ID NO: 143666
aucagucagggaagcagag

SEQ ID NO: 143668 - RNA, 19 nt, Artificial Sequence
  Description of Artificial Sequence: Synthetic oligonucleotide
  Sense strand starting at position 2623 of SEQ ID NO: 1845
cugacugucccuuaaauag

SEQ ID NO: 143669 - RNA, 19 nt, Artificial Sequence
  Description of Artificial Sequence: Synthetic oligonucleotide
  Antisense strand to SEQ ID NO: 143668
cuauuuaagggacagucag

SEQ ID NO: 143670 - RNA, 19 nt, Artificial Sequence
  Description of Artificial Sequence: Synthetic oligonucleotide
  Sense strand starting at position 2348 of SEQ ID NO: 1845
gcuccugacuaacuagaaa

SEQ ID NO: 143671 - RNA, 19 nt, Artificial Sequence
  Description of Artificial Sequence: Synthetic oligonucleotide
  Antisense strand to SEQ ID NO: 143670
uuucuaguuagucaggagc

SEQ ID NO: 143672 - RNA, 19 nt, Artificial Sequence
  Description of Artificial Sequence: Synthetic oligonucleotide
  Sense strand starting at position 2342 of SEQ ID NO: 1845
auuagagcuccugacuaac

SEQ ID NO: 143673 - RNA, 19 nt, Artificial Sequence
  Description of Artificial Sequence: Synthetic oligonucleotide
  Antisense strand to SEQ ID NO: 143672
guuagucaggagcucuaau

SEQ ID NO: 143674 - RNA, 19 nt, Artificial Sequence
  Description of Artificial Sequence: Synthetic oligonucleotide
  Sense strand starting at position 2281 of SEQ ID NO: 1845
aggcuagagucaucacuga

SEQ ID NO: 143675 - RNA, 19 nt, Artificial Sequence
  Description of Artificial Sequence: Synthetic oligonucleotide
  Antisense strand to SEQ ID NO: 143674
ucagugaugacucuagccu

SEQ ID NO: 143676 - RNA, 19 nt, Artificial Sequence
  Description of Artificial Sequence: Synthetic oligonucleotide
  Sense strand starting at position 2171 of SEQ ID NO: 1845
ggcuucuuucuagacaaua

SEQ ID NO: 143677 - RNA, 19 nt, Artificial Sequence
  Description of Artificial Sequence: Synthetic oligonucleotide
  Antisense strand to SEQ ID NO: 143676
uauugucuagaaagaagcc

SEQ ID NO: 143678 - RNA, 19 nt, Artificial Sequence
  Description of Artificial Sequence: Synthetic oligonucleotide
  Sense strand starting at position 1642 of SEQ ID NO: 1845
uggcaugaccucugaggaa

SEQ ID NO: 143679 - RNA, 19 nt, Artificial Sequence
  Description of Artificial Sequence: Synthetic oligonucleotide
  Antisense strand to SEQ ID NO: 143678
uuccucagaggucaugcca

SEQ ID NO: 143680 - RNA, 19 nt, Artificial Sequence
  Description of Artificial Sequence: Synthetic oligonucleotide
  Sense strand starting at position 1584 of SEQ ID NO: 1845
ugaagaguccauuacuagu

SEQ ID NO: 143681 - RNA, 19 nt, Artificial Sequence
  Description of Artificial Sequence: Synthetic oligonucleotide
  Antisense strand to SEQ ID NO: 143680
acuaguaauggacucuuca

SEQ ID NO: 143682 - RNA, 19 nt, Artificial Sequence
  Description of Artificial Sequence: Synthetic oligonucleotide
  Sense strand starting at position 1581 of SEQ ID NO: 1845
gcuugaagaguccauuacu

SEQ ID NO: 143683 - RNA, 19 nt, Artificial Sequence
  Description of Artificial Sequence: Synthetic oligonucleotide
  Antisense strand to SEQ ID NO: 143682
aguaauggacucuucaagc

SEQ ID NO: 143684 - RNA, 19 nt, Artificial Sequence
  Description of Artificial Sequence: Synthetic oligonucleotide
  Sense strand starting at position 1573 of SEQ ID NO: 1845
augguagagcuugaagagu

SEQ ID NO: 143685 - RNA, 19 nt, Artificial Sequence
  Description of Artificial Sequence: Synthetic oligonucleotide
  Antisense strand to SEQ ID NO: 143684
acucuucaagcucuaccau

SEQ ID NO: 143686 - RNA, 19 nt, Artificial Sequence
  Description of Artificial Sequence: Synthetic oligonucleotide
  Sense strand starting at position 1305 of SEQ ID NO: 1845
ccaaaucuggcuuaacuag

SEQ ID NO: 143687 - RNA, 19 nt, Artificial Sequence
  Description of Artificial Sequence: Synthetic oligonucleotide
  Antisense strand to SEQ ID NO: 143686
cuaguuaagccagauuugg

SEQ ID NO: 143688 - RNA, 19 nt, Artificial Sequence
  Description of Artificial Sequence: Synthetic oligonucleotide
  Sense strand starting at position 1292 of SEQ ID NO: 1845
aggcuaucuugauccaaau

SEQ ID NO: 143689 - RNA, 19 nt, Artificial Sequence
  Description of Artificial Sequence: Synthetic oligonucleotide
  Antisense strand to SEQ ID NO: 143688
auuuggaucaagauagccu

SEQ ID NO: 143690 - RNA, 19 nt, Artificial Sequence
  Description of Artificial Sequence: Synthetic oligonucleotide
  Sense strand starting at position 1129 of SEQ ID NO: 1845
auuggaaugccaugguaaa

SEQ ID NO: 143691 - RNA, 19 nt, Artificial Sequence
  Description of Artificial Sequence: Synthetic oligonucleotide
  Antisense strand to SEQ ID NO: 143690
uuuaccauggcauuccaau

SEQ ID NO: 143692 - RNA, 19 nt, Artificial Sequence
  Description of Artificial Sequence: Synthetic oligonucleotide
  Sense strand starting at position 1124 of SEQ ID NO: 1845
gaauaauuggaaugccaug

SEQ ID NO: 143693 - RNA, 19 nt, Artificial Sequence
  Description of Artificial Sequence: Synthetic oligonucleotide
  Antisense strand to SEQ ID NO: 143692
cauggcauuccaauuauuc

SEQ ID NO: 143694 - RNA, 19 nt, Artificial Sequence
  Description of Artificial Sequence: Synthetic oligonucleotide
  Sense strand starting at position 995 of SEQ ID NO: 1845
uugucuuauccagaguacc

SEQ ID NO: 143695 - RNA, 19 nt, Artificial Sequence
  Description of Artificial Sequence: Synthetic oligonucleotide
  Antisense strand to SEQ ID NO: 143694
gguacucuggauaagacaa

SEQ ID NO: 143696 - RNA, 19 nt, Artificial Sequence
  Description of Artificial Sequence: Synthetic oligonucleotide
  Sense strand starting at position 921 of SEQ ID NO: 1845
agagucuccugagucugaa

SEQ ID NO: 143697 - RNA, 19 nt, Artificial Sequence
  Description of Artificial Sequence: Synthetic oligonucleotide
  Antisense strand to SEQ ID NO: 143696
uucagacucaggagacucu

SEQ ID NO: 143698 - RNA, 19 nt, Artificial Sequence
  Description of Artificial Sequence: Synthetic oligonucleotide
  Sense strand starting at position 916 of SEQ ID NO: 1845
ccuaaagagucuccugagu

SEQ ID NO: 143699 - RNA, 19 nt, Artificial Sequence
  Description of Artificial Sequence: Synthetic oligonucleotide
  Antisense strand to SEQ ID NO: 143698
acucaggagacucuuuagg

SEQ ID NO: 143700 - RNA, 19 nt, Artificial Sequence
  Description of Artificial Sequence: Synthetic oligonucleotide
  Sense strand starting at position 873 of SEQ ID NO: 1845
agcucuagggcauauuaaa

SEQ ID NO: 143701 - RNA, 19 nt, Artificial Sequence
  Description of Artificial Sequence: Synthetic oligonucleotide
  Antisense strand to SEQ ID NO: 143700
uuuaauaugcccuagagcu

SEQ ID NO: 143702 - RNA, 19 nt, Artificial Sequence
  Description of Artificial Sequence: Synthetic oligonucleotide
  Sense strand starting at position 837 of SEQ ID NO: 1845
augguuccugcauaaacuu

SEQ ID NO: 143703 - RNA, 19 nt, Artificial Sequence
  Description of Artificial Sequence: Synthetic oligonucleotide
  Antisense strand to SEQ ID NO: 143702
aaguuuaugcaggaaccau

SEQ ID NO: 143704 - RNA, 19 nt, Artificial Sequence
  Description of Artificial Sequence: Synthetic oligonucleotide
  Sense strand starting at position 759 of SEQ ID NO: 1845
uuugcaagaagguauugau

SEQ ID NO: 143705 - RNA, 19 nt, Artificial Sequence
  Description of Artificial Sequence: Synthetic oligonucleotide
  Antisense strand to SEQ ID NO: 143704
aucaauaccuucuugcaaa

SEQ ID NO: 143706 - RNA, 19 nt, Artificial Sequence
  Description of Artificial Sequence: Synthetic oligonucleotide
  Sense strand starting at position 165 of SEQ ID NO: 1845
uugagauauguauauagca

SEQ ID NO: 143707 - RNA, 19 nt, Artificial Sequence
  Description of Artificial Sequence: Synthetic oligonucleotide
  Antisense strand to SEQ ID NO: 143706
ugcuauauacauaucucaa

SEQ ID NO: 143708 - RNA, 19 nt, Artificial Sequence
  Description of Artificial Sequence: Synthetic oligonucleotide
  Sense strand starting at position 133 of SEQ ID NO: 1845
gaauguucucaacacguag

SEQ ID NO: 143709 - RNA, 19 nt, Artificial Sequence
  Description of Artificial Sequence: Synthetic oligonucleotide
  Antisense strand to SEQ ID NO: 143708
cuacguguugagaacauuc

SEQ ID NO: 143710 - RNA, 19 nt, Artificial Sequence
  Description of Artificial Sequence: Synthetic oligonucleotide
  Sense strand starting at position 75 of SEQ ID NO: 1845
gugauauaguuaucaauag

SEQ ID NO: 143711 - RNA, 19 nt, Artificial Sequence
  Description of Artificial Sequence: Synthetic oligonucleotide
  Antisense strand to SEQ ID NO: 143710
cuauugauaacuauaucac

SEQ ID NO: 143712 - RNA, 19 nt, Artificial Sequence
  Description of Artificial Sequence: Synthetic oligonucleotide
  Sense strand starting at position 64 of SEQ ID NO: 1845
agcacauuagggugauaua

SEQ ID NO: 143713 - RNA, 19 nt, Artificial Sequence
  Description of Artificial Sequence: Synthetic oligonucleotide
  Antisense strand to SEQ ID NO: 143712
uauaucacccuaaugugcu

SEQ ID NO: 143714 - RNA, 19 nt, Artificial Sequence
  Description of Artificial Sequence: Synthetic oligonucleotide
  Sense strand starting at position 3954 of SEQ ID NO: 1844
uggauuguccaccaugcua

SEQ ID NO: 143715 - RNA, 19 nt, Artificial Sequence
  Description of Artificial Sequence: Synthetic oligonucleotide
  Antisense strand to SEQ ID NO: 143714
uagcaugguggacaaucca

SEQ ID NO: 143716 - RNA, 19 nt, Artificial Sequence
  Description of Artificial Sequence: Synthetic oligonucleotide
  Sense strand starting at position 3941 of SEQ ID NO: 1844
auacucaguuauguggauu

SEQ ID NO: 143717 - RNA, 19 nt, Artificial Sequence
  Description of Artificial Sequence: Synthetic oligonucleotide
  Antisense strand to SEQ ID NO: 143716
aauccacauaacugaguau

SEQ ID NO: 143718 - RNA, 19 nt, Artificial Sequence
  Description of Artificial Sequence: Synthetic oligonucleotide
  Sense strand starting at position 3925 of SEQ ID NO: 1844
agauacaggugucucgaua

SEQ ID NO: 143719 - RNA, 19 nt, Artificial Sequence
  Description of Artificial Sequence: Synthetic oligonucleotide
  Antisense strand to SEQ ID NO: 143718
uaucgagacaccuguaucu

SEQ ID NO: 143720 - RNA, 19 nt, Artificial Sequence
  Description of Artificial Sequence: Synthetic oligonucleotide
  Sense strand starting at position 3879 of SEQ ID NO: 1844
aagugacuugcugagguua

SEQ ID NO: 143721 - RNA, 19 nt, Artificial Sequence
  Description of Artificial Sequence: Synthetic oligonucleotide
  Antisense strand to SEQ ID NO: 143720
uaaccucagcaagucacuu

SEQ ID NO: 143722 - RNA, 19 nt, Artificial Sequence
  Description of Artificial Sequence: Synthetic oligonucleotide
  Sense strand starting at position 3877 of SEQ ID NO: 1844
gaaagugacuugcugaggu

SEQ ID NO: 143723 - RNA, 19 nt, Artificial Sequence
  Description of Artificial Sequence: Synthetic oligonucleotide
  Antisense strand to SEQ ID NO: 143722
accucagcaagucacuuuc

SEQ ID NO: 143724 - RNA, 19 nt, Artificial Sequence
  Description of Artificial Sequence: Synthetic oligonucleotide
  Sense strand starting at position 3875 of SEQ ID NO: 1844
gagaaagugacuugcugag

SEQ ID NO: 143725 - RNA, 19 nt, Artificial Sequence
  Description of Artificial Sequence: Synthetic oligonucleotide
  Antisense strand to SEQ ID NO: 143724
cucagcaagucacuuucuc

SEQ ID NO: 143726 - RNA, 19 nt, Artificial Sequence
  Description of Artificial Sequence: Synthetic oligonucleotide
  Sense strand starting at position 3821 of SEQ ID NO: 1844
ggcaaucuagccuaacacu

SEQ ID NO: 143727 - RNA, 19 nt, Artificial Sequence
  Description of Artificial Sequence: Synthetic oligonucleotide
  Antisense strand to SEQ ID NO: 143726
aguguuaggcuagauugcc

SEQ ID NO: 143728 - RNA, 19 nt, Artificial Sequence
  Description of Artificial Sequence: Synthetic oligonucleotide
  Sense strand starting at position 3780 of SEQ ID NO: 1844
cugcaauagaugggacuuu

SEQ ID NO: 143729 - RNA, 19 nt, Artificial Sequence
  Description of Artificial Sequence: Synthetic oligonucleotide
  Antisense strand to SEQ ID NO: 143728
aaagucccaucuauugcag

SEQ ID NO: 143730 - RNA, 19 nt, Artificial Sequence
  Description of Artificial Sequence: Synthetic oligonucleotide
  Sense strand starting at position 3689 of SEQ ID NO: 1844
uuuacugaugccugaaauu

SEQ ID NO: 143731 - RNA, 19 nt, Artificial Sequence
  Description of Artificial Sequence: Synthetic oligonucleotide
  Antisense strand to SEQ ID NO: 143730
aauuucaggcaucaguaaa

SEQ ID NO: 143732 - RNA, 19 nt, Artificial Sequence
  Description of Artificial Sequence: Synthetic oligonucleotide
  Sense strand starting at position 3045 of SEQ ID NO: 1844
gcagauagguuccugauca

SEQ ID NO: 143733 - RNA, 19 nt, Artificial Sequence
  Description of Artificial Sequence: Synthetic oligonucleotide
  Antisense strand to SEQ ID NO: 143732
ugaucaggaaccuaucugc

SEQ ID NO: 143734 - RNA, 19 nt, Artificial Sequence
  Description of Artificial Sequence: Synthetic oligonucleotide
  Sense strand starting at position 3000 of SEQ ID NO: 1844
gggaauuaauugcuagauc

SEQ ID NO: 143735 - RNA, 19 nt, Artificial Sequence
  Description of Artificial Sequence: Synthetic oligonucleotide
  Antisense strand to SEQ ID NO: 143734
gaucuagcaauuaauuccc

SEQ ID NO: 143736 - RNA, 19 nt, Artificial Sequence
  Description of Artificial Sequence: Synthetic oligonucleotide
  Sense strand starting at position 2699 of SEQ ID NO: 1844
auguaauucuaagucucca

SEQ ID NO: 143737 - RNA, 19 nt, Artificial Sequence
  Description of Artificial Sequence: Synthetic oligonucleotide
  Antisense strand to SEQ ID NO: 143736
uggagacuuagaauuacau

SEQ ID NO: 143738 - RNA, 19 nt, Artificial Sequence
  Description of Artificial Sequence: Synthetic oligonucleotide
  Sense strand starting at position 2693 of SEQ ID NO: 1844
ugucuuauguaauucuaag

SEQ ID NO: 143739 - RNA, 19 nt, Artificial Sequence
  Description of Artificial Sequence: Synthetic oligonucleotide
  Antisense strand to SEQ ID NO: 143738
cuuagaauuacauaagaca

SEQ ID NO: 143740 - RNA, 19 nt, Artificial Sequence
  Description of Artificial Sequence: Synthetic oligonucleotide
  Sense strand starting at position 1701 of SEQ ID NO: 1844
ugguuaauggcugaaagca

SEQ ID NO: 143741 - RNA, 19 nt, Artificial Sequence
  Description of Artificial Sequence: Synthetic oligonucleotide
  Antisense strand to SEQ ID NO: 143740
ugcuuucagccauuaacca

SEQ ID NO: 143742 - RNA, 19 nt, Artificial Sequence
  Description of Artificial Sequence: Synthetic oligonucleotide
  Sense strand starting at position 1640 of SEQ ID NO: 1844
agaacuagguuaguaagua

SEQ ID NO: 143743 - RNA, 19 nt, Artificial Sequence
  Description of Artificial Sequence: Synthetic oligonucleotide
  Antisense strand to SEQ ID NO: 143742
uacuuacuaaccuaguucu

SEQ ID NO: 143744 - RNA, 19 nt, Artificial Sequence
  Description of Artificial Sequence: Synthetic oligonucleotide
  Sense strand starting at position 1580 of SEQ ID NO: 1844
cuagucuuggaggaaaguu

SEQ ID NO: 143745 - RNA, 19 nt, Artificial Sequence
  Description of Artificial Sequence: Synthetic oligonucleotide
  Antisense strand to SEQ ID NO: 143744
aacuuuccuccaagacuag

SEQ ID NO: 143746 - RNA, 19 nt, Artificial Sequence
  Description of Artificial Sequence: Synthetic oligonucleotide
  Sense strand starting at position 1576 of SEQ ID NO: 1844
cuagcuagucuuggaggaa

SEQ ID NO: 143747 - RNA, 19 nt, Artificial Sequence
  Description of Artificial Sequence: Synthetic oligonucleotide
  Antisense strand to SEQ ID NO: 143746
uuccuccaagacuagcuag

SEQ ID NO: 143748 - RNA, 19 nt, Artificial Sequence
  Description of Artificial Sequence: Synthetic oligonucleotide
  Sense strand starting at position 1413 of SEQ ID NO: 1844
auuacagaucacuguacau

SEQ ID NO: 143749 - RNA, 19 nt, Artificial Sequence
  Description of Artificial Sequence: Synthetic oligonucleotide
  Antisense strand to SEQ ID NO: 143748
auguacagugaucuguaau

SEQ ID NO: 143750 - RNA, 19 nt, Artificial Sequence
  Description of Artificial Sequence: Synthetic oligonucleotide
  Sense strand starting at position 1381 of SEQ ID NO: 1844
cucaaauagcaguaguaau

SEQ ID NO: 143751 - RNA, 19 nt, Artificial Sequence
  Description of Artificial Sequence: Synthetic oligonucleotide
  Antisense strand to SEQ ID NO: 143750
auuacuacugcuauuugag

SEQ ID NO: 143752 - RNA, 19 nt, Artificial Sequence
  Description of Artificial Sequence: Synthetic oligonucleotide
  Sense strand starting at position 1361 of SEQ ID NO: 1844
uucuauguacuccagggau

SEQ ID NO: 143753 - RNA, 19 nt, Artificial Sequence
  Description of Artificial Sequence: Synthetic oligonucleotide
  Antisense strand to SEQ ID NO: 143752
aucccuggaguacauagaa

SEQ ID NO: 143754 - RNA, 19 nt, Artificial Sequence
  Description of Artificial Sequence: Synthetic oligonucleotide
  Sense strand starting at position 1001 of SEQ ID NO: 1844
aaugaauagcuguaugucu

SEQ ID NO: 143755 - RNA, 19 nt, Artificial Sequence
  Description of Artificial Sequence: Synthetic oligonucleotide
  Antisense strand to SEQ ID NO: 143754
agacauacagcuauucauu

SEQ ID NO: 143756 - RNA, 19 nt, Artificial Sequence
  Description of Artificial Sequence: Synthetic oligonucleotide
  Sense strand starting at position 875 of SEQ ID NO: 1844
uuuaccuuugacugcaaga

SEQ ID NO: 143757 - RNA, 19 nt, Artificial Sequence
  Description of Artificial Sequence: Synthetic oligonucleotide
  Antisense strand to SEQ ID NO: 143756
ucuugcagucaaagguaaa

SEQ ID NO: 143758 - RNA, 19 nt, Artificial Sequence
  Description of Artificial Sequence: Synthetic oligonucleotide
  Sense strand starting at position 852 of SEQ ID NO: 1844
guaguauaccuuuagguug

SEQ ID NO: 143759 - RNA, 19 nt, Artificial Sequence
  Description of Artificial Sequence: Synthetic oligonucleotide
  Antisense strand to SEQ ID NO: 143758
caaccuaaagguauacuac

SEQ ID NO: 143760 - RNA, 19 nt, Artificial Sequence
  Description of Artificial Sequence: Synthetic oligonucleotide
  Sense strand starting at position 829 of SEQ ID NO: 1844
uuugcagugcgauaagaaa

SEQ ID NO: 143761 - RNA, 19 nt, Artificial Sequence
  Description of Artificial Sequence: Synthetic oligonucleotide
  Antisense strand to SEQ ID NO: 143760
uuucuuaucgcacugcaaa

SEQ ID NO: 143762 - RNA, 19 nt, Artificial Sequence
  Description of Artificial Sequence: Synthetic oligonucleotide
  Sense strand starting at position 826 of SEQ ID NO: 1844
cuauuugcagugcgauaag

SEQ ID NO: 143763 - RNA, 19 nt, Artificial Sequence
  Description of Artificial Sequence: Synthetic oligonucleotide
  Antisense strand to SEQ ID NO: 143762
cuuaucgcacugcaaauag

SEQ ID NO: 143764 - RNA, 19 nt, Artificial Sequence
  Description of Artificial Sequence: Synthetic oligonucleotide
  Sense strand starting at position 824 of SEQ ID NO: 1844
uucuauuugcagugcgaua

SEQ ID NO: 143765 - RNA, 19 nt, Artificial Sequence
  Description of Artificial Sequence: Synthetic oligonucleotide
  Antisense strand to SEQ ID NO: 143764
uaucgcacugcaaauagaa

SEQ ID NO: 143766 - RNA, 19 nt, Artificial Sequence
  Description of Artificial Sequence: Synthetic oligonucleotide
  Sense strand starting at position 737 of SEQ ID NO: 1844
gacagaauauuuggaaagu

SEQ ID NO: 143767 - RNA, 19 nt, Artificial Sequence
  Description of Artificial Sequence: Synthetic oligonucleotide
  Antisense strand to SEQ ID NO: 143766
acuuuccaaauauucuguc

SEQ ID NO: 143768 - RNA, 19 nt, Artificial Sequence
  Description of Artificial Sequence: Synthetic oligonucleotide
  Sense strand starting at position 668 of SEQ ID NO: 1844
auagauacucucugccaga

SEQ ID NO: 143769 - RNA, 19 nt, Artificial Sequence
  Description of Artificial Sequence: Synthetic oligonucleotide
  Antisense strand to SEQ ID NO: 143768
ucuggcagagaguaucuau

SEQ ID NO: 143770 - RNA, 19 nt, Artificial Sequence
  Description of Artificial Sequence: Synthetic oligonucleotide
  Sense strand starting at position 595 of SEQ ID NO: 1844
uuaagugaagcuugaagua

SEQ ID NO: 143771 - RNA, 19 nt, Artificial Sequence
  Description of Artificial Sequence: Synthetic oligonucleotide
  Antisense strand to SEQ ID NO: 143770
uacuucaagcuucacuuaa

SEQ ID NO: 143772 - RNA, 19 nt, Artificial Sequence
  Description of Artificial Sequence: Synthetic oligonucleotide
  Sense strand starting at position 488 of SEQ ID NO: 1844
aggacagagcucuaguauu

SEQ ID NO: 143773 - RNA, 19 nt, Artificial Sequence
  Description of Artificial Sequence: Synthetic oligonucleotide
  Antisense strand to SEQ ID NO: 143772
aauacuagagcucuguccu

SEQ ID NO: 143774 - RNA, 19 nt, Artificial Sequence
  Description of Artificial Sequence: Synthetic oligonucleotide
  Sense strand starting at position 474 of SEQ ID NO: 1844
ugcuuaacucuuugaggac

SEQ ID NO: 143775 - RNA, 19 nt, Artificial Sequence
  Description of Artificial Sequence: Synthetic oligonucleotide
  Antisense strand to SEQ ID NO: 143774
guccucaaagaguuaagca

SEQ ID NO: 143776 - RNA, 19 nt, Artificial Sequence
  Description of Artificial Sequence: Synthetic oligonucleotide
  Sense strand starting at position 473 of SEQ ID NO: 1844
cugcuuaacucuuugagga

SEQ ID NO: 143777 - RNA, 19 nt, Artificial Sequence
  Description of Artificial Sequence: Synthetic oligonucleotide
  Antisense strand to SEQ ID NO: 143776
uccucaaagaguuaagcag

SEQ ID NO: 143778 - RNA, 19 nt, Artificial Sequence
  Description of Artificial Sequence: Synthetic oligonucleotide
  Sense strand starting at position 466 of SEQ ID NO: 1844
agauuagcugcuuaacucu

SEQ ID NO: 143779 - RNA, 19 nt, Artificial Sequence
  Description of Artificial Sequence: Synthetic oligonucleotide
  Antisense strand to SEQ ID NO: 143778
agaguuaagcagcuaaucu

SEQ ID NO: 143780 - RNA, 19 nt, Artificial Sequence
  Description of Artificial Sequence: Synthetic oligonucleotide
  Sense strand starting at position 453 of SEQ ID NO: 1844
aguuuaccuccuuagauua

SEQ ID NO: 143781 - RNA, 19 nt, Artificial Sequence
  Description of Artificial Sequence: Synthetic oligonucleotide
  Antisense strand to SEQ ID NO: 143780
uaaucuaaggagguaaacu

SEQ ID NO: 143782 - RNA, 19 nt, Artificial Sequence
  Description of Artificial Sequence: Synthetic oligonucleotide
  Sense strand starting at position 275 of SEQ ID NO: 1844
ucagaaguuacuggaguca

SEQ ID NO: 143783 - RNA, 19 nt, Artificial Sequence
  Description of Artificial Sequence: Synthetic oligonucleotide
  Antisense strand to SEQ ID NO: 143782
ugacuccaguaacuucuga

SEQ ID NO: 143784 - RNA, 19 nt, Artificial Sequence
  Description of Artificial Sequence: Synthetic oligonucleotide
  Sense strand starting at position 171 of SEQ ID NO: 1844
gcuggauccaccugagauc

SEQ ID NO: 143785 - RNA, 19 nt, Artificial Sequence
  Description of Artificial Sequence: Synthetic oligonucleotide
  Antisense strand to SEQ ID NO: 143784
gaucucagguggauccagc

SEQ ID NO: 143786 - RNA, 19 nt, Artificial Sequence
  Description of Artificial Sequence: Synthetic oligonucleotide
  Sense strand starting at position 104 of SEQ ID NO: 1844
gugauuccaaggugauaau

SEQ ID NO: 143787 - RNA, 19 nt, Artificial Sequence
  Description of Artificial Sequence: Synthetic oligonucleotide
  Antisense strand to SEQ ID NO: 143786
auuaucaccuuggaaucac

SEQ ID NO: 143788 - RNA, 19 nt, Artificial Sequence
  Description of Artificial Sequence: Synthetic oligonucleotide
  Sense strand starting at position 102 of SEQ ID NO: 1844
gggugauuccaaggugaua

SEQ ID NO: 143789 - RNA, 19 nt, Artificial Sequence
  Description of Artificial Sequence: Synthetic oligonucleotide
  Antisense strand to SEQ ID NO: 143788
uaucaccuuggaaucaccc

SEQ ID NO: 143790 - RNA, 19 nt, Artificial Sequence
  Description of Artificial Sequence: Synthetic oligonucleotide
  Sense strand starting at position 94 of SEQ ID NO: 1844
gaauguuagggugauucca

SEQ ID NO: 143791 - RNA, 19 nt, Artificial Sequence
  Description of Artificial Sequence: Synthetic oligonucleotide
  Antisense strand to SEQ ID NO: 143790
uggaaucacccuaacauuc

SEQ ID NO: 143792 - RNA, 19 nt, Artificial Sequence
  Description of Artificial Sequence: Synthetic oligonucleotide
  Sense strand starting at position 24 of SEQ ID NO: 1844
cucugcuucccugacugau

SEQ ID NO: 143793 - RNA, 19 nt, Artificial Sequence
  Description of Artificial Sequence: Synthetic oligonucleotide
  Antisense strand to SEQ ID NO: 143792
aucagucagggaagcagag

SEQ ID NO: 143794 - RNA, 19 nt, Artificial Sequence
  Description of Artificial Sequence: Synthetic oligonucleotide
  Sense strand starting at position 3859 of SEQ ID NO: 1843
auuuguucuugcuccuuga

SEQ ID NO: 143795 - RNA, 19 nt, Artificial Sequence
  Description of Artificial Sequence: Synthetic oligonucleotide
  Antisense strand to SEQ ID NO: 143794
ucaaggagcaagaacaaau

SEQ ID NO: 143796 - RNA, 19 nt, Artificial Sequence
  Description of Artificial Sequence: Synthetic oligonucleotide
  Sense strand starting at position 3720 of SEQ ID NO: 1843
aagguaaacuguguaaaua

SEQ ID NO: 143797 - RNA, 19 nt, Artificial Sequence
  Description of Artificial Sequence: Synthetic oligonucleotide
  Antisense strand to SEQ ID NO: 143796
uauuuacacaguuuaccuu

SEQ ID NO: 143798 - RNA, 19 nt, Artificial Sequence
  Description of Artificial Sequence: Synthetic oligonucleotide
  Sense strand starting at position 3719 of SEQ ID NO: 1843
uaagguaaacuguguaaau

SEQ ID NO: 143799 - RNA, 19 nt, Artificial Sequence
  Description of Artificial Sequence: Synthetic oligonucleotide
  Antisense strand to SEQ ID NO: 143798
auuuacacaguuuaccuua

SEQ ID NO: 143800 - RNA, 19 nt, Artificial Sequence
  Description of Artificial Sequence: Synthetic oligonucleotide
  Sense strand starting at position 3674 of SEQ ID NO: 1843
uggauuguccaccaugcua

SEQ ID NO: 143801 - RNA, 19 nt, Artificial Sequence
  Description of Artificial Sequence: Synthetic oligonucleotide
  Antisense strand to SEQ ID NO: 143800
uagcaugguggacaaucca

SEQ ID NO: 143802 - RNA, 19 nt, Artificial Sequence
  Description of Artificial Sequence: Synthetic oligonucleotide
  Sense strand starting at position 3661 of SEQ ID NO: 1843
auacucaguuauguggauu

SEQ ID NO: 143803 - RNA, 19 nt, Artificial Sequence
  Description of Artificial Sequence: Synthetic oligonucleotide
  Antisense strand to SEQ ID NO: 143802
aauccacauaacugaguau

SEQ ID NO: 143804 - RNA, 19 nt, Artificial Sequence
  Description of Artificial Sequence: Synthetic oligonucleotide
  Sense strand starting at position 3645 of SEQ ID NO: 1843
agauacaggugucucgaua

SEQ ID NO: 143805 - RNA, 19 nt, Artificial Sequence
  Description of Artificial Sequence: Synthetic oligonucleotide
  Antisense strand to SEQ ID NO: 143804
uaucgagacaccuguaucu

SEQ ID NO: 143806 - RNA, 19 nt, Artificial Sequence
  Description of Artificial Sequence: Synthetic oligonucleotide
  Sense strand starting at position 3599 of SEQ ID NO: 1843
aagugacuugcugagguua

SEQ ID NO: 143807 - RNA, 19 nt, Artificial Sequence
  Description of Artificial Sequence: Synthetic oligonucleotide
  Antisense strand to SEQ ID NO: 143806
uaaccucagcaagucacuu

SEQ ID NO: 143808 - RNA, 19 nt, Artificial Sequence
  Description of Artificial Sequence: Synthetic oligonucleotide
  Sense strand starting at position 3597 of SEQ ID NO: 1843
gaaagugacuugcugaggu

SEQ ID NO: 143809 - RNA, 19 nt, Artificial Sequence
  Description of Artificial Sequence: Synthetic oligonucleotide
  Antisense strand to SEQ ID NO: 143808
accucagcaagucacuuuc

SEQ ID NO: 143810 - RNA, 19 nt, Artificial Sequence
  Description of Artificial Sequence: Synthetic oligonucleotide
  Sense strand starting at position 3595 of SEQ ID NO: 1843
gagaaagugacuugcugag

SEQ ID NO: 143811 - RNA, 19 nt, Artificial Sequence
  Description of Artificial Sequence: Synthetic oligonucleotide
  Antisense strand to SEQ ID NO: 143810
cucagcaagucacuuucuc

SEQ ID NO: 143812 - RNA, 19 nt, Artificial Sequence
  Description of Artificial Sequence: Synthetic oligonucleotide
  Sense strand starting at position 3541 of SEQ ID NO: 1843
ggcaaucuagccuaacacu

SEQ ID NO: 143813 - RNA, 19 nt, Artificial Sequence
  Description of Artificial Sequence: Synthetic oligonucleotide
  Antisense strand to SEQ ID NO: 143812
aguguuaggcuagauugcc

SEQ ID NO: 143814 - RNA, 19 nt, Artificial Sequence
  Description of Artificial Sequence: Synthetic oligonucleotide
  Sense strand starting at position 3500 of SEQ ID NO: 1843
cugcaauagaugggacuuu

SEQ ID NO: 143815 - RNA, 19 nt, Artificial Sequence
  Description of Artificial Sequence: Synthetic oligonucleotide
  Antisense strand to SEQ ID NO: 143814
aaagucccaucuauugcag

SEQ ID NO: 143816 - RNA, 19 nt, Artificial Sequence
  Description of Artificial Sequence: Synthetic oligonucleotide
  Sense strand starting at position 3409 of SEQ ID NO: 1843
uuuacugaugccugaaauu

SEQ ID NO: 143817 - RNA, 19 nt, Artificial Sequence
  Description of Artificial Sequence: Synthetic oligonucleotide
  Antisense strand to SEQ ID NO: 143816
aauuucaggcaucaguaaa

SEQ ID NO: 143818 - RNA, 19 nt, Artificial Sequence
  Description of Artificial Sequence: Synthetic oligonucleotide
  Sense strand starting at position 2765 of SEQ ID NO: 1843
gcagauagguuccugauca

SEQ ID NO: 143819 - RNA, 19 nt, Artificial Sequence
  Description of Artificial Sequence: Synthetic oligonucleotide
  Antisense strand to SEQ ID NO: 143818
ugaucaggaaccuaucugc

SEQ ID NO: 143820 - RNA, 19 nt, Artificial Sequence
  Description of Artificial Sequence: Synthetic oligonucleotide
  Sense strand starting at position 2720 of SEQ ID NO: 1843
gggaauuaauugcuagauc

SEQ ID NO: 143821 - RNA, 19 nt, Artificial Sequence
  Description of Artificial Sequence: Synthetic oligonucleotide
  Antisense strand to SEQ ID NO: 143820
gaucuagcaauuaauuccc

SEQ ID NO: 143822 - RNA, 19 nt, Artificial Sequence
  Description of Artificial Sequence: Synthetic oligonucleotide
  Sense strand starting at position 2419 of SEQ ID NO: 1843
auguaauucuaagucucca

SEQ ID NO: 143823 - RNA, 19 nt, Artificial Sequence
  Description of Artificial Sequence: Synthetic oligonucleotide
  Antisense strand to SEQ ID NO: 143822
uggagacuuagaauuacau

SEQ ID NO: 143824 - RNA, 19 nt, Artificial Sequence
  Description of Artificial Sequence: Synthetic oligonucleotide
  Sense strand starting at position 2413 of SEQ ID NO: 1843
ugucuuauguaauucuaag

SEQ ID NO: 143825 - RNA, 19 nt, Artificial Sequence
  Description of Artificial Sequence: Synthetic oligonucleotide
  Antisense strand to SEQ ID NO: 143824
cuuagaauuacauaagaca

SEQ ID NO: 143826 - RNA, 19 nt, Artificial Sequence
  Description of Artificial Sequence: Synthetic oligonucleotide
  Sense strand starting at position 1421 of SEQ ID NO: 1843
ugguuaauggcugaaagca

SEQ ID NO: 143827 - RNA, 19 nt, Artificial Sequence
  Description of Artificial Sequence: Synthetic oligonucleotide
  Antisense strand to SEQ ID NO: 143826
ugcuuucagccauuaacca

SEQ ID NO: 143828 - RNA, 19 nt, Artificial Sequence
  Description of Artificial Sequence: Synthetic oligonucleotide
  Sense strand starting at position 1360 of SEQ ID NO: 1843
agaacuagguuaguaagua

SEQ ID NO: 143829 - RNA, 19 nt, Artificial Sequence
  Description of Artificial Sequence: Synthetic oligonucleotide
  Antisense strand to SEQ ID NO: 143828
uacuuacuaaccuaguucu

SEQ ID NO: 143830 - RNA, 19 nt, Artificial Sequence
  Description of Artificial Sequence: Synthetic oligonucleotide
  Sense strand starting at position 1300 of SEQ ID NO: 1843
cuagucuuggaggaaaguu

SEQ ID NO: 143831 - RNA, 19 nt, Artificial Sequence
  Description of Artificial Sequence: Synthetic oligonucleotide
  Antisense strand to SEQ ID NO: 143830
aacuuuccuccaagacuag

SEQ ID NO: 143832 - RNA, 19 nt, Artificial Sequence
  Description of Artificial Sequence: Synthetic oligonucleotide
  Sense strand starting at position 1296 of SEQ ID NO: 1843
cuagcuagucuuggaggaa

SEQ ID NO: 143833 - RNA, 19 nt, Artificial Sequence
  Description of Artificial Sequence: Synthetic oligonucleotide
  Antisense strand to SEQ ID NO: 143832
uuccuccaagacuagcuag

SEQ ID NO: 143834 - RNA, 19 nt, Artificial Sequence
  Description of Artificial Sequence: Synthetic oligonucleotide
  Sense strand starting at position 1292 of SEQ ID NO: 1843
auaucuagcuagucuugga

SEQ ID NO: 143835 - RNA, 19 nt, Artificial Sequence
  Description of Artificial Sequence: Synthetic oligonucleotide
  Antisense strand to SEQ ID NO: 143834
uccaagacuagcuagauau

SEQ ID NO: 143836 - RNA, 19 nt, Artificial Sequence
  Description of Artificial Sequence: Synthetic oligonucleotide
  Sense strand starting at position 1133 of SEQ ID NO: 1843
auuacagaucacuguacau

SEQ ID NO: 143837 - RNA, 19 nt, Artificial Sequence
  Description of Artificial Sequence: Synthetic oligonucleotide
  Antisense strand to SEQ ID NO: 143836
auguacagugaucuguaau

SEQ ID NO: 143838 - RNA, 19 nt, Artificial Sequence
  Description of Artificial Sequence: Synthetic oligonucleotide
  Sense strand starting at position 1101 of SEQ ID NO: 1843
cucaaauagcaguaguaau

SEQ ID NO: 143839 - RNA, 19 nt, Artificial Sequence
  Description of Artificial Sequence: Synthetic oligonucleotide
  Antisense strand to SEQ ID NO: 143838
auuacuacugcuauuugag

SEQ ID NO: 143840 - RNA, 19 nt, Artificial Sequence
  Description of Artificial Sequence: Synthetic oligonucleotide
  Sense strand starting at position 1081 of SEQ ID NO: 1843
uucuauguacuccagggau

SEQ ID NO: 143841 - RNA, 19 nt, Artificial Sequence
  Description of Artificial Sequence: Synthetic oligonucleotide
  Antisense strand to SEQ ID NO: 143840
aucccuggaguacauagaa

SEQ ID NO: 143842 - RNA, 19 nt, Artificial Sequence
  Description of Artificial Sequence: Synthetic oligonucleotide
  Sense strand starting at position 721 of SEQ ID NO: 1843
aaugaauagcuguaugucu

SEQ ID NO: 143843 - RNA, 19 nt, Artificial Sequence
  Description of Artificial Sequence: Synthetic oligonucleotide
  Antisense strand to SEQ ID NO: 143842
agacauacagcuauucauu

SEQ ID NO: 143844 - RNA, 19 nt, Artificial Sequence
  Description of Artificial Sequence: Synthetic oligonucleotide
  Sense strand starting at position 606 of SEQ ID NO: 1843
cugcaagauuaaguaaugu

SEQ ID NO: 143845 - RNA, 19 nt, Artificial Sequence
  Description of Artificial Sequence: Synthetic oligonucleotide
  Antisense strand to SEQ ID NO: 143844
acauuacuuaaucuugcag

SEQ ID NO: 143846 - RNA, 19 nt, Artificial Sequence
  Description of Artificial Sequence: Synthetic oligonucleotide
  Sense strand starting at position 595 of SEQ ID NO: 1843
uuuaccuuugacugcaaga

SEQ ID NO: 143847 - RNA, 19 nt, Artificial Sequence
  Description of Artificial Sequence: Synthetic oligonucleotide
  Antisense strand to SEQ ID NO: 143846
ucuugcagucaaagguaaa

SEQ ID NO: 143848 - RNA, 19 nt, Artificial Sequence
  Description of Artificial Sequence: Synthetic oligonucleotide
  Sense strand starting at position 572 of SEQ ID NO: 1843
guaguauaccuuuagguug

SEQ ID NO: 143849 - RNA, 19 nt, Artificial Sequence
  Description of Artificial Sequence: Synthetic oligonucleotide
  Antisense strand to SEQ ID NO: 143848
caaccuaaagguauacuac

SEQ ID NO: 143850 - RNA, 19 nt, Artificial Sequence
  Description of Artificial Sequence: Synthetic oligonucleotide
  Sense strand starting at position 549 of SEQ ID NO: 1843
uuugcagugcgauaagaaa

SEQ ID NO: 143851 - RNA, 19 nt, Artificial Sequence
  Description of Artificial Sequence: Synthetic oligonucleotide
  Antisense strand to SEQ ID NO: 143850
uuucuuaucgcacugcaaa

SEQ ID NO: 143852 - RNA, 19 nt, Artificial Sequence
  Description of Artificial Sequence: Synthetic oligonucleotide
  Sense strand starting at position 546 of SEQ ID NO: 1843
cuauuugcagugcgauaag

SEQ ID NO: 143853 - RNA, 19 nt, Artificial Sequence
  Description of Artificial Sequence: Synthetic oligonucleotide
  Antisense strand to SEQ ID NO: 143852
cuuaucgcacugcaaauag

SEQ ID NO: 143854 - RNA, 19 nt, Artificial Sequence
  Description of Artificial Sequence: Synthetic oligonucleotide
  Sense strand starting at position 544 of SEQ ID NO: 1843
uucuauuugcagugcgaua

SEQ ID NO: 143855 - RNA, 19 nt, Artificial Sequence
  Description of Artificial Sequence: Synthetic oligonucleotide
  Antisense strand to SEQ ID NO: 143854
uaucgcacugcaaauagaa

SEQ ID NO: 143856 - RNA, 19 nt, Artificial Sequence
  Description of Artificial Sequence: Synthetic oligonucleotide
  Sense strand starting at position 457 of SEQ ID NO: 1843
gacagaauauuuggaaagu

SEQ ID NO: 143857 - RNA, 19 nt, Artificial Sequence
  Description of Artificial Sequence: Synthetic oligonucleotide
  Antisense strand to SEQ ID NO: 143856
acuuuccaaauauucuguc

SEQ ID NO: 143858 - RNA, 19 nt, Artificial Sequence
  Description of Artificial Sequence: Synthetic oligonucleotide
  Sense strand starting at position 388 of SEQ ID NO: 1843
auagauacucucugccaga

SEQ ID NO: 143859 - RNA, 19 nt, Artificial Sequence
  Description of Artificial Sequence: Synthetic oligonucleotide
  Antisense strand to SEQ ID NO: 143858
ucuggcagagaguaucuau

SEQ ID NO: 143860 - RNA, 19 nt, Artificial Sequence
  Description of Artificial Sequence: Synthetic oligonucleotide
  Sense strand starting at position 315 of SEQ ID NO: 1843
uuaagugaagcuugaagua

SEQ ID NO: 143861 - RNA, 19 nt, Artificial Sequence
  Description of Artificial Sequence: Synthetic oligonucleotide
  Antisense strand to SEQ ID NO: 143860
uacuucaagcuucacuuaa

SEQ ID NO: 143862 - RNA, 19 nt, Artificial Sequence
  Description of Artificial Sequence: Synthetic oligonucleotide
  Sense strand starting at position 208 of SEQ ID NO: 1843
aggacagagcucuaguauu

SEQ ID NO: 143863 - RNA, 19 nt, Artificial Sequence
  Description of Artificial Sequence: Synthetic oligonucleotide
  Antisense strand to SEQ ID NO: 143862
aauacuagagcucuguccu

SEQ ID NO: 143864 - RNA, 19 nt, Artificial Sequence
  Description of Artificial Sequence: Synthetic oligonucleotide
  Sense strand starting at position 194 of SEQ ID NO: 1843
ugcuuaacucuuugaggac

SEQ ID NO: 143865 - RNA, 19 nt, Artificial Sequence
  Description of Artificial Sequence: Synthetic oligonucleotide
  Antisense strand to SEQ ID NO: 143864
guccucaaagaguuaagca

SEQ ID NO: 143866 - RNA, 19 nt, Artificial Sequence
  Description of Artificial Sequence: Synthetic oligonucleotide
  Sense strand starting at position 193 of SEQ ID NO: 1843
cugcuuaacucuuugagga

SEQ ID NO: 143867 - RNA, 19 nt, Artificial Sequence
  Description of Artificial Sequence: Synthetic oligonucleotide
  Antisense strand to SEQ ID NO: 143866
uccucaaagaguuaagcag

SEQ ID NO: 143868 - RNA, 19 nt, Artificial Sequence
  Description of Artificial Sequence: Synthetic oligonucleotide
  Sense strand starting at position 186 of SEQ ID NO: 1843
agauuagcugcuuaacucu

SEQ ID NO: 143869 - RNA, 19 nt, Artificial Sequence
  Description of Artificial Sequence: Synthetic oligonucleotide
  Antisense strand to SEQ ID NO: 143868
agaguuaagcagcuaaucu

SEQ ID NO: 143870 - RNA, 19 nt, Artificial Sequence
  Description of Artificial Sequence: Synthetic oligonucleotide
  Sense strand starting at position 173 of SEQ ID NO: 1843
aguuuaccuccuuagauua

SEQ ID NO: 143871 - RNA, 19 nt, Artificial Sequence
  Description of Artificial Sequence: Synthetic oligonucleotide
  Antisense strand to SEQ ID NO: 143870
uaaucuaaggagguaaacu

SEQ ID NO: 143872 - RNA, 19 nt, Artificial Sequence
  Description of Artificial Sequence: Synthetic oligonucleotide
  Sense strand starting at position 124 of SEQ ID NO: 1843
gcaauuuauugaggaggaa

SEQ ID NO: 143873 - RNA, 19 nt, Artificial Sequence
  Description of Artificial Sequence: Synthetic oligonucleotide
  Antisense strand to SEQ ID NO: 143872
uuccuccucaauaaauugc

SEQ ID NO: 143874 - RNA, 19 nt, Artificial Sequence
  Description of Artificial Sequence: Synthetic oligonucleotide
  Sense strand starting at position 145 of SEQ ID NO: 1846
uucuauauacuagguaaga

SEQ ID NO: 143875 - RNA, 19 nt, Artificial Sequence
  Description of Artificial Sequence: Synthetic oligonucleotide
  Antisense strand to SEQ ID NO: 143874
ucuuaccuaguauauagaa

SEQ ID NO: 143876 - RNA, 19 nt, Artificial Sequence
  Description of Artificial Sequence: Synthetic oligonucleotide
  Sense strand starting at position 146 of SEQ ID NO: 1846
ucuauauacuagguaagag

SEQ ID NO: 143877 - RNA, 19 nt, Artificial Sequence
  Description of Artificial Sequence: Synthetic oligonucleotide
  Antisense strand to SEQ ID NO: 143876
cucuuaccuaguauauaga

SEQ ID NO: 143878 - RNA, 19 nt, Artificial Sequence
  Description of Artificial Sequence: Synthetic oligonucleotide
  Sense strand starting at position 363 of SEQ ID NO: 1846
gcacaaggucauuagguaa

SEQ ID NO: 143879 - RNA, 19 nt, Artificial Sequence
  Description of Artificial Sequence: Synthetic oligonucleotide
  Antisense strand to SEQ ID NO: 143878
uuaccuaaugaccuugugc

SEQ ID NO: 143880 - RNA, 19 nt, Artificial Sequence
  Description of Artificial Sequence: Synthetic oligonucleotide
  Sense strand starting at position 366 of SEQ ID NO: 1846
caaggucauuagguaaacu

SEQ ID NO: 143881 - RNA, 19 nt, Artificial Sequence
  Description of Artificial Sequence: Synthetic oligonucleotide
  Antisense strand to SEQ ID NO: 143880
aguuuaccuaaugaccuug

SEQ ID NO: 143882 - RNA, 19 nt, Artificial Sequence
  Description of Artificial Sequence: Synthetic oligonucleotide
  Sense strand starting at position 436 of SEQ ID NO: 1846
gagaguaagucucccugga

SEQ ID NO: 143883 - RNA, 19 nt, Artificial Sequence
  Description of Artificial Sequence: Synthetic oligonucleotide
  Antisense strand to SEQ ID NO: 143882
uccagggagacuuacucuc

SEQ ID NO: 143884 - RNA, 19 nt, Artificial Sequence
  Description of Artificial Sequence: Synthetic oligonucleotide
  Sense strand starting at position 475 of SEQ ID NO: 1846
gauaguauuguugggagaa

SEQ ID NO: 143885 - RNA, 19 nt, Artificial Sequence
  Description of Artificial Sequence: Synthetic oligonucleotide
  Antisense strand to SEQ ID NO: 143884
uucucccaacaauacuauc

SEQ ID NO: 143886 - RNA, 19 nt, Artificial Sequence
  Description of Artificial Sequence: Synthetic oligonucleotide
  Sense strand starting at position 627 of SEQ ID NO: 1846
cgagacaaacacugcuaau

SEQ ID NO: 143887 - RNA, 19 nt, Artificial Sequence
  Description of Artificial Sequence: Synthetic oligonucleotide
  Antisense strand to SEQ ID NO: 143886
auuagcaguguuugucucg

SEQ ID NO: 143888 - RNA, 19 nt, Artificial Sequence
  Description of Artificial Sequence: Synthetic oligonucleotide
  Sense strand starting at position 657 of SEQ ID NO: 1846
ugaacaucugugcaaggau

SEQ ID NO: 143889 - RNA, 19 nt, Artificial Sequence
  Description of Artificial Sequence: Synthetic oligonucleotide
  Antisense strand to SEQ ID NO: 143888
auccuugcacagauguuca

SEQ ID NO: 143890 - RNA, 19 nt, Artificial Sequence
  Description of Artificial Sequence: Synthetic oligonucleotide
  Sense strand starting at position 768 of SEQ ID NO: 1846
agagaggaugguuggguua

SEQ ID NO: 143891 - RNA, 19 nt, Artificial Sequence
  Description of Artificial Sequence: Synthetic oligonucleotide
  Antisense strand to SEQ ID NO: 143890
uaacccaaccauccucucu

SEQ ID NO: 143892 - RNA, 19 nt, Artificial Sequence
  Description of Artificial Sequence: Synthetic oligonucleotide
  Sense strand starting at position 809 of SEQ ID NO: 1846
uuguucuucuauuugcuua

SEQ ID NO: 143893 - RNA, 19 nt, Artificial Sequence
  Description of Artificial Sequence: Synthetic oligonucleotide
  Antisense strand to SEQ ID NO: 143892
uaagcaaauagaagaacaa

SEQ ID NO: 143894 - RNA, 19 nt, Artificial Sequence
  Description of Artificial Sequence: Synthetic oligonucleotide
  Sense strand starting at position 816 of SEQ ID NO: 1846
ucuauuugcuuagccuaga

SEQ ID NO: 143895 - RNA, 19 nt, Artificial Sequence
  Description of Artificial Sequence: Synthetic oligonucleotide
  Antisense strand to SEQ ID NO: 143894
ucuaggcuaagcaaauaga

SEQ ID NO: 143896 - RNA, 19 nt, Artificial Sequence
  Description of Artificial Sequence: Synthetic oligonucleotide
  Sense strand starting at position 817 of SEQ ID NO: 1846
cuauuugcuuagccuagau

SEQ ID NO: 143897 - RNA, 19 nt, Artificial Sequence
  Description of Artificial Sequence: Synthetic oligonucleotide
  Antisense strand to SEQ ID NO: 143896
aucuaggcuaagcaaauag

SEQ ID NO: 143898 - RNA, 19 nt, Artificial Sequence
  Description of Artificial Sequence: Synthetic oligonucleotide
  Sense strand starting at position 829 of SEQ ID NO: 1846
ccuagauaccuaggauucu

SEQ ID NO: 143899 - RNA, 19 nt, Artificial Sequence
  Description of Artificial Sequence: Synthetic oligonucleotide
  Antisense strand to SEQ ID NO: 143898
agaauccuagguaucuagg

SEQ ID NO: 143900 - RNA, 19 nt, Artificial Sequence
  Description of Artificial Sequence: Synthetic oligonucleotide
  Sense strand starting at position 838 of SEQ ID NO: 1846
cuaggauucucuccagaau

SEQ ID NO: 143901 - RNA, 19 nt, Artificial Sequence
  Description of Artificial Sequence: Synthetic oligonucleotide
  Antisense strand to SEQ ID NO: 143900
auucuggagagaauccuag

SEQ ID NO: 143902 - RNA, 19 nt, Artificial Sequence
  Description of Artificial Sequence: Synthetic oligonucleotide
  Sense strand starting at position 1060 of SEQ ID NO: 1846
gucccuguacauuaauaaa

SEQ ID NO: 143903 - RNA, 19 nt, Artificial Sequence
  Description of Artificial Sequence: Synthetic oligonucleotide
  Antisense strand to SEQ ID NO: 143902
uuuauuaauguacagggac

SEQ ID NO: 143904 - RNA, 19 nt, Artificial Sequence
  Description of Artificial Sequence: Synthetic oligonucleotide
  Sense strand starting at position 1160 of SEQ ID NO: 1846
cagccugugagguagagaa

SEQ ID NO: 143905 - RNA, 19 nt, Artificial Sequence
  Description of Artificial Sequence: Synthetic oligonucleotide
  Antisense strand to SEQ ID NO: 143904
uucucuaccucacaggcug

SEQ ID NO: 143906 - RNA, 19 nt, Artificial Sequence
  Description of Artificial Sequence: Synthetic oligonucleotide
  Sense strand starting at position 1279 of SEQ ID NO: 1846
gguucuaaucuagacaguu

SEQ ID NO: 143907 - RNA, 19 nt, Artificial Sequence
  Description of Artificial Sequence: Synthetic oligonucleotide
  Antisense strand to SEQ ID NO: 143906
aacugucuagauuagaacc

SEQ ID NO: 143908 - RNA, 19 nt, Artificial Sequence
  Description of Artificial Sequence: Synthetic oligonucleotide
  Sense strand starting at position 1358 of SEQ ID NO: 1846
uaggcaucuccuugaagga

SEQ ID NO: 143909 - RNA, 19 nt, Artificial Sequence
  Description of Artificial Sequence: Synthetic oligonucleotide
  Antisense strand to SEQ ID NO: 143908
uccuucaaggagaugccua

SEQ ID NO: 143910 - RNA, 19 nt, Artificial Sequence
  Description of Artificial Sequence: Synthetic oligonucleotide
  Sense strand starting at position 1367 of SEQ ID NO: 1846
ccuugaaggaaaugauguu

SEQ ID NO: 143911 - RNA, 19 nt, Artificial Sequence
  Description of Artificial Sequence: Synthetic oligonucleotide
  Antisense strand to SEQ ID NO: 143910
aacaucauuuccuucaagg

SEQ ID NO: 143912 - RNA, 19 nt, Artificial Sequence
  Description of Artificial Sequence: Synthetic oligonucleotide
  Sense strand starting at position 1556 of SEQ ID NO: 1846
gccucccuugaguaaagau

SEQ ID NO: 143913 - RNA, 19 nt, Artificial Sequence
  Description of Artificial Sequence: Synthetic oligonucleotide
  Antisense strand to SEQ ID NO: 143912
aucuuuacucaagggaggc

SEQ ID NO: 143914 - RNA, 19 nt, Artificial Sequence
  Description of Artificial Sequence: Synthetic oligonucleotide
  Sense strand starting at position 2075 of SEQ ID NO: 1846
aucggucaaagucauagau

SEQ ID NO: 143915 - RNA, 19 nt, Artificial Sequence
  Description of Artificial Sequence: Synthetic oligonucleotide
  Antisense strand to SEQ ID NO: 143914
aucuaugacuuugaccgau

SEQ ID NO: 143916 - RNA, 19 nt, Artificial Sequence
  Description of Artificial Sequence: Synthetic oligonucleotide
  Sense strand starting at position 2173 of SEQ ID NO: 1846
aaggaauguguaugugaau

SEQ ID NO: 143917 - RNA, 19 nt, Artificial Sequence
  Description of Artificial Sequence: Synthetic oligonucleotide
  Antisense strand to SEQ ID NO: 143916
auucacauacacauuccuu

SEQ ID NO: 143918 - RNA, 19 nt, Artificial Sequence
  Description of Artificial Sequence: Synthetic oligonucleotide
  Sense strand starting at position 2182 of SEQ ID NO: 1846
guaugugaauacuuaccaa

SEQ ID NO: 143919 - RNA, 19 nt, Artificial Sequence
  Description of Artificial Sequence: Synthetic oligonucleotide
  Antisense strand to SEQ ID NO: 143918
uugguaaguauucacauac

SEQ ID NO: 143920 - RNA, 19 nt, Artificial Sequence
  Description of Artificial Sequence: Synthetic oligonucleotide
  Sense strand starting at position 2185 of SEQ ID NO: 1846
ugugaauacuuaccaagug

SEQ ID NO: 143921 - RNA, 19 nt, Artificial Sequence
  Description of Artificial Sequence: Synthetic oligonucleotide
  Antisense strand to SEQ ID NO: 143920
cacuugguaaguauucaca

SEQ ID NO: 143922 - RNA, 19 nt, Artificial Sequence
  Description of Artificial Sequence: Synthetic oligonucleotide
  Sense strand starting at position 2277 of SEQ ID NO: 1846
auuauaaguaagugaugga

SEQ ID NO: 143923 - RNA, 19 nt, Artificial Sequence
  Description of Artificial Sequence: Synthetic oligonucleotide
  Antisense strand to SEQ ID NO: 143922
uccaucacuuacuuauaau

SEQ ID NO: 143924 - RNA, 19 nt, Artificial Sequence
  Description of Artificial Sequence: Synthetic oligonucleotide
  Sense strand starting at position 2355 of SEQ ID NO: 1846
gagacaagauuacuguuua

SEQ ID NO: 143925 - RNA, 19 nt, Artificial Sequence
  Description of Artificial Sequence: Synthetic oligonucleotide
  Antisense strand to SEQ ID NO: 143924
uaaacaguaaucuugucuc

SEQ ID NO: 143926 - RNA, 19 nt, Artificial Sequence
  Description of Artificial Sequence: Synthetic oligonucleotide
  Sense strand starting at position 2418 of SEQ ID NO: 1846
aauccauaugucugugaag

SEQ ID NO: 143927 - RNA, 19 nt, Artificial Sequence
  Description of Artificial Sequence: Synthetic oligonucleotide
  Antisense strand to SEQ ID NO: 143926
cuucacagacauauggauu

SEQ ID NO: 143928 - RNA, 19 nt, Artificial Sequence
  Description of Artificial Sequence: Synthetic oligonucleotide
  Sense strand starting at position 2475 of SEQ ID NO: 1846
cuuaguagggauugaguau

SEQ ID NO: 143929 - RNA, 19 nt, Artificial Sequence
  Description of Artificial Sequence: Synthetic oligonucleotide
  Antisense strand to SEQ ID NO: 143928
auacucaaucccuacuaag

SEQ ID NO: 143930 - RNA, 19 nt, Artificial Sequence
  Description of Artificial Sequence: Synthetic oligonucleotide
  Sense strand starting at position 2530 of SEQ ID NO: 1846
uggucuucugauuauacuu

SEQ ID NO: 143931 - RNA, 19 nt, Artificial Sequence
  Description of Artificial Sequence: Synthetic oligonucleotide
  Antisense strand to SEQ ID NO: 143930
aaguauaaucagaagacca

SEQ ID NO: 143932 - RNA, 19 nt, Artificial Sequence
  Description of Artificial Sequence: Synthetic oligonucleotide
  Sense strand starting at position 2546 of SEQ ID NO: 1846
cuuugcuuggaugacuaau

SEQ ID NO: 143933 - RNA, 19 nt, Artificial Sequence
  Description of Artificial Sequence: Synthetic oligonucleotide
  Antisense strand to SEQ ID NO: 143932
auuagucauccaagcaaag

SEQ ID NO: 143934 - RNA, 19 nt, Artificial Sequence
  Description of Artificial Sequence: Synthetic oligonucleotide
  Sense strand starting at position 2715 of SEQ ID NO: 1846
cugauaaguuaaucuguaa

SEQ ID NO: 143935 - RNA, 19 nt, Artificial Sequence
  Description of Artificial Sequence: Synthetic oligonucleotide
  Antisense strand to SEQ ID NO: 143934
uuacagauuaacuuaucag

SEQ ID NO: 143936 - RNA, 19 nt, Artificial Sequence
  Description of Artificial Sequence: Synthetic oligonucleotide
  Sense strand starting at position 2782 of SEQ ID NO: 1846
acugaauaauccguaagaa

SEQ ID NO: 143937 - RNA, 19 nt, Artificial Sequence
  Description of Artificial Sequence: Synthetic oligonucleotide
  Antisense strand to SEQ ID NO: 143936
uucuuacggauuauucagu

SEQ ID NO: 143938 - RNA, 19 nt, Artificial Sequence
  Description of Artificial Sequence: Synthetic oligonucleotide
  Sense strand starting at position 2945 of SEQ ID NO: 1846
gcauuaugaccugauguuu

SEQ ID NO: 143939 - RNA, 19 nt, Artificial Sequence
  Description of Artificial Sequence: Synthetic oligonucleotide
  Antisense strand to SEQ ID NO: 143938
aaacaucaggucauaaugc

SEQ ID NO: 143940 - RNA, 19 nt, Artificial Sequence
  Description of Artificial Sequence: Synthetic oligonucleotide
  Sense strand starting at position 3472 of SEQ ID NO: 1846
guaaauacugaaugaguua

SEQ ID NO: 143941 - RNA, 19 nt, Artificial Sequence
  Description of Artificial Sequence: Synthetic oligonucleotide
  Antisense strand to SEQ ID NO: 143940
uaacucauucaguauuuac

SEQ ID NO: 143942 - RNA, 19 nt, Artificial Sequence
  Description of Artificial Sequence: Synthetic oligonucleotide
  Sense strand starting at position 3514 of SEQ ID NO: 1846
ucuauugacugaguaaaca

SEQ ID NO: 143943 - RNA, 19 nt, Artificial Sequence
  Description of Artificial Sequence: Synthetic oligonucleotide
  Antisense strand to SEQ ID NO: 143942
uguuuacucagucaauaga

SEQ ID NO: 143944 - RNA, 19 nt, Artificial Sequence
  Description of Artificial Sequence: Synthetic oligonucleotide
  Sense strand starting at position 3570 of SEQ ID NO: 1846
gacacuguuguugacuauu

SEQ ID NO: 143945 - RNA, 19 nt, Artificial Sequence
  Description of Artificial Sequence: Synthetic oligonucleotide
  Antisense strand to SEQ ID NO: 143944
aauagucaacaacaguguc

SEQ ID NO: 143946 - RNA, 19 nt, Artificial Sequence
  Description of Artificial Sequence: Synthetic oligonucleotide
  Sense strand starting at position 3573 of SEQ ID NO: 1846
acuguuguugacuauuaaa

SEQ ID NO: 143947 - RNA, 19 nt, Artificial Sequence
  Description of Artificial Sequence: Synthetic oligonucleotide
  Antisense strand to SEQ ID NO: 143946
uuuaauagucaacaacagu

SEQ ID NO: 143948 - RNA, 19 nt, Artificial Sequence
  Description of Artificial Sequence: Synthetic oligonucleotide
  Sense strand starting at position 3704 of SEQ ID NO: 1846
aaguuuaacguagagcaau

SEQ ID NO: 143949 - RNA, 19 nt, Artificial Sequence
  Description of Artificial Sequence: Synthetic oligonucleotide
  Antisense strand to SEQ ID NO: 143948
auugcucuacguuaaacuu

SEQ ID NO: 143950 - RNA, 19 nt, Artificial Sequence
  Description of Artificial Sequence: Synthetic oligonucleotide
  Sense strand starting at position 3946 of SEQ ID NO: 1846
gcucuagaggcagaaagua

SEQ ID NO: 143951 - RNA, 19 nt, Artificial Sequence
  Description of Artificial Sequence: Synthetic oligonucleotide
  Antisense strand to SEQ ID NO: 143950
uacuuucugccucuagagc

SEQ ID NO: 143952 - RNA, 19 nt, Artificial Sequence
  Description of Artificial Sequence: Synthetic oligonucleotide
  Sense strand starting at position 3968 of SEQ ID NO: 1846
uagugauugcuagagguua

SEQ ID NO: 143953 - RNA, 19 nt, Artificial Sequence
  Description of Artificial Sequence: Synthetic oligonucleotide
  Antisense strand to SEQ ID NO: 143952
uaaccucuagcaaucacua

SEQ ID NO: 143954 - RNA, 19 nt, Artificial Sequence
  Description of Artificial Sequence: Synthetic oligonucleotide
  Sense strand starting at position 73 of SEQ ID NO: 1847
gacuaaugucuagguugag

SEQ ID NO: 143955 - RNA, 19 nt, Artificial Sequence
  Description of Artificial Sequence: Synthetic oligonucleotide
  Antisense strand to SEQ ID NO: 143954
cucaaccuagacauuaguc

SEQ ID NO: 143956 - RNA, 19 nt, Artificial Sequence
  Description of Artificial Sequence: Synthetic oligonucleotide
  Sense strand starting at position 74 of SEQ ID NO: 1847
acuaaugucuagguugaga

SEQ ID NO: 143957 - RNA, 19 nt, Artificial Sequence
  Description of Artificial Sequence: Synthetic oligonucleotide
  Antisense strand to SEQ ID NO: 143956
ucucaaccuagacauuagu

SEQ ID NO: 143958 - RNA, 19 nt, Artificial Sequence
  Description of Artificial Sequence: Synthetic oligonucleotide
  Sense strand starting at position 76 of SEQ ID NO: 1847
uaaugucuagguugagaau

SEQ ID NO: 143959 - RNA, 19 nt, Artificial Sequence
  Description of Artificial Sequence: Synthetic oligonucleotide
  Antisense strand to SEQ ID NO: 143958
auucucaaccuagacauua

SEQ ID NO: 143960 - RNA, 19 nt, Artificial Sequence
  Description of Artificial Sequence: Synthetic oligonucleotide
  Sense strand starting at position 394 of SEQ ID NO: 1847
cuagauucucaacgacaau

SEQ ID NO: 143961 - RNA, 19 nt, Artificial Sequence
  Description of Artificial Sequence: Synthetic oligonucleotide
  Antisense strand to SEQ ID NO: 143960
auugucguugagaaucuag

SEQ ID NO: 143962 - RNA, 19 nt, Artificial Sequence
  Description of Artificial Sequence: Synthetic oligonucleotide
  Sense strand starting at position 569 of SEQ ID NO: 1847
caugauaccguauaaagca

SEQ ID NO: 143963 - RNA, 19 nt, Artificial Sequence
  Description of Artificial Sequence: Synthetic oligonucleotide
  Antisense strand to SEQ ID NO: 143962
ugcuuuauacgguaucaug

SEQ ID NO: 143964 - RNA, 19 nt, Artificial Sequence
  Description of Artificial Sequence: Synthetic oligonucleotide
  Sense strand starting at position 576 of SEQ ID NO: 1847
ccguauaaagcagauagaa

SEQ ID NO: 143965 - RNA, 19 nt, Artificial Sequence
  Description of Artificial Sequence: Synthetic oligonucleotide
  Antisense strand to SEQ ID NO: 143964
uucuaucugcuuuauacgg

SEQ ID NO: 143966 - RNA, 19 nt, Artificial Sequence
  Description of Artificial Sequence: Synthetic oligonucleotide
  Sense strand starting at position 699 of SEQ ID NO: 1847
ucccuuugaccguagagau

SEQ ID NO: 143967 - RNA, 19 nt, Artificial Sequence
  Description of Artificial Sequence: Synthetic oligonucleotide
  Antisense strand to SEQ ID NO: 143966
aucucuacggucaaaggga

SEQ ID NO: 143968 - RNA, 19 nt, Artificial Sequence
  Description of Artificial Sequence: Synthetic oligonucleotide
  Sense strand starting at position 775 of SEQ ID NO: 1847
guggaaauuaugcauguau

SEQ ID NO: 143969 - RNA, 19 nt, Artificial Sequence
  Description of Artificial Sequence: Synthetic oligonucleotide
  Antisense strand to SEQ ID NO: 143968
auacaugcauaauuuccac

SEQ ID NO: 143970 - RNA, 19 nt, Artificial Sequence
  Description of Artificial Sequence: Synthetic oligonucleotide
  Sense strand starting at position 777 of SEQ ID NO: 1847
ggaaauuaugcauguauca

SEQ ID NO: 143971 - RNA, 19 nt, Artificial Sequence
  Description of Artificial Sequence: Synthetic oligonucleotide
  Antisense strand to SEQ ID NO: 143970
ugauacaugcauaauuucc

SEQ ID NO: 143972 - RNA, 19 nt, Artificial Sequence
  Description of Artificial Sequence: Synthetic oligonucleotide
  Sense strand starting at position 813 of SEQ ID NO: 1847
gcaagugucaaugagacag

SEQ ID NO: 143973 - RNA, 19 nt, Artificial Sequence
  Description of Artificial Sequence: Synthetic oligonucleotide
  Antisense strand to SEQ ID NO: 143972
cugucucauugacacuugc

SEQ ID NO: 143974 - RNA, 19 nt, Artificial Sequence
  Description of Artificial Sequence: Synthetic oligonucleotide
  Sense strand starting at position 817 of SEQ ID NO: 1847
gugucaaugagacaggucu

SEQ ID NO: 143975 - RNA, 19 nt, Artificial Sequence
  Description of Artificial Sequence: Synthetic oligonucleotide
  Antisense strand to SEQ ID NO: 143974
agaccugucucauugacac

SEQ ID NO: 143976 - RNA, 19 nt, Artificial Sequence
  Description of Artificial Sequence: Synthetic oligonucleotide
  Sense strand starting at position 1056 of SEQ ID NO: 1847
agcggaauuugugucuaca

SEQ ID NO: 143977 - RNA, 19 nt, Artificial Sequence
  Description of Artificial Sequence: Synthetic oligonucleotide
  Antisense strand to SEQ ID NO: 143976
uguagacacaaauuccgcu

SEQ ID NO: 143978 - RNA, 19 nt, Artificial Sequence
  Description of Artificial Sequence: Synthetic oligonucleotide
  Sense strand starting at position 1058 of SEQ ID NO: 1847
cggaauuugugucuacauu

SEQ ID NO: 143979 - RNA, 19 nt, Artificial Sequence
  Description of Artificial Sequence: Synthetic oligonucleotide
  Antisense strand to SEQ ID NO: 143978
aauguagacacaaauuccg

SEQ ID NO: 143980 - RNA, 19 nt, Artificial Sequence
  Description of Artificial Sequence: Synthetic oligonucleotide
  Sense strand starting at position 1157 of SEQ ID NO: 1847
ucuacucugugaccagaua

SEQ ID NO: 143981 - RNA, 19 nt, Artificial Sequence
  Description of Artificial Sequence: Synthetic oligonucleotide
  Antisense strand to SEQ ID NO: 143980
uaucuggucacagaguaga

SEQ ID NO: 143982 - RNA, 19 nt, Artificial Sequence
  Description of Artificial Sequence: Synthetic oligonucleotide
  Sense strand starting at position 1344 of SEQ ID NO: 1847
cccuuaucugaagaaugca

SEQ ID NO: 143983 - RNA, 19 nt, Artificial Sequence
  Description of Artificial Sequence: Synthetic oligonucleotide
  Antisense strand to SEQ ID NO: 143982
ugcauucuucagauaaggg

SEQ ID NO: 143984 - RNA, 19 nt, Artificial Sequence
  Description of Artificial Sequence: Synthetic oligonucleotide
  Sense strand starting at position 1522 of SEQ ID NO: 1847
cggugaaagcgagaggauu

SEQ ID NO: 143985 - RNA, 19 nt, Artificial Sequence
  Description of Artificial Sequence: Synthetic oligonucleotide
  Antisense strand to SEQ ID NO: 143984
aauccucucgcuuucaccg

SEQ ID NO: 143986 - RNA, 19 nt, Artificial Sequence
  Description of Artificial Sequence: Synthetic oligonucleotide
  Sense strand starting at position 1692 of SEQ ID NO: 1847
ggaugauaguaucucucca

SEQ ID NO: 143987 - RNA, 19 nt, Artificial Sequence
  Description of Artificial Sequence: Synthetic oligonucleotide
  Antisense strand to SEQ ID NO: 143986
uggagagauacuaucaucc

SEQ ID NO: 143988 - RNA, 19 nt, Artificial Sequence
  Description of Artificial Sequence: Synthetic oligonucleotide
  Sense strand starting at position 1744 of SEQ ID NO: 1847
ugagaugaugcuuauaagc

SEQ ID NO: 143989 - RNA, 19 nt, Artificial Sequence
  Description of Artificial Sequence: Synthetic oligonucleotide
  Antisense strand to SEQ ID NO: 143988
gcuuauaagcaucaucuca

SEQ ID NO: 143990 - RNA, 19 nt, Artificial Sequence
  Description of Artificial Sequence: Synthetic oligonucleotide
  Sense strand starting at position 1799 of SEQ ID NO: 1847
aguuauuauuacucuggaa

SEQ ID NO: 143991 - RNA, 19 nt, Artificial Sequence
  Description of Artificial Sequence: Synthetic oligonucleotide
  Antisense strand to SEQ ID NO: 143990
uuccagaguaauaauaacu

SEQ ID NO: 143992 - RNA, 19 nt, Artificial Sequence
  Description of Artificial Sequence: Synthetic oligonucleotide
  Sense strand starting at position 2564 of SEQ ID NO: 1847
gcauacauuuaugugugau

SEQ ID NO: 143993 - RNA, 19 nt, Artificial Sequence
  Description of Artificial Sequence: Synthetic oligonucleotide
  Antisense strand to SEQ ID NO: 143992
aucacacauaaauguaugc

SEQ ID NO: 143994 - RNA, 19 nt, Artificial Sequence
  Description of Artificial Sequence: Synthetic oligonucleotide
  Sense strand starting at position 2596 of SEQ ID NO: 1847
gugguaaugugguuuauuu

SEQ ID NO: 143995 - RNA, 19 nt, Artificial Sequence
  Description of Artificial Sequence: Synthetic oligonucleotide
  Antisense strand to SEQ ID NO: 143994
aaauaaaccacauuaccac

SEQ ID NO: 143996 - RNA, 19 nt, Artificial Sequence
  Description of Artificial Sequence: Synthetic oligonucleotide
  Sense strand starting at position 2605 of SEQ ID NO: 1847
ugguuuauuuggcugcaga

SEQ ID NO: 143997 - RNA, 19 nt, Artificial Sequence
  Description of Artificial Sequence: Synthetic oligonucleotide
  Antisense strand to SEQ ID NO: 143996
ucugcagccaaauaaacca

SEQ ID NO: 143998 - RNA, 19 nt, Artificial Sequence
  Description of Artificial Sequence: Synthetic oligonucleotide
  Sense strand starting at position 2606 of SEQ ID NO: 1847
gguuuauuuggcugcagau

SEQ ID NO: 143999 - RNA, 19 nt, Artificial Sequence
  Description of Artificial Sequence: Synthetic oligonucleotide
  Antisense strand to SEQ ID NO: 143998
aucugcagccaaauaaacc

SEQ ID NO: 144000 - RNA, 19 nt, Artificial Sequence
  Description of Artificial Sequence: Synthetic oligonucleotide
  Sense strand starting at position 2649 of SEQ ID NO: 1847
cguugccaaacguuucuua

SEQ ID NO: 144001 - RNA, 19 nt, Artificial Sequence
  Description of Artificial Sequence: Synthetic oligonucleotide
  Antisense strand to SEQ ID NO: 144000
uaagaaacguuuggcaacg

SEQ ID NO: 144002 - RNA, 19 nt, Artificial Sequence
  Description of Artificial Sequence: Synthetic oligonucleotide
  Sense strand starting at position 2824 of SEQ ID NO: 1847
ggagccauuucuguuuauu

SEQ ID NO: 144003 - RNA, 19 nt, Artificial Sequence
  Description of Artificial Sequence: Synthetic oligonucleotide
  Antisense strand to SEQ ID NO: 144002
aauaaacagaaauggcucc

SEQ ID NO: 144004 - RNA, 19 nt, Artificial Sequence
  Description of Artificial Sequence: Synthetic oligonucleotide
  Sense strand starting at position 2868 of SEQ ID NO: 1847
cugugauguccacaaauag

SEQ ID NO: 144005 - RNA, 19 nt, Artificial Sequence
  Description of Artificial Sequence: Synthetic oligonucleotide
  Antisense strand to SEQ ID NO: 144004
cuauuuguggacaucacag

SEQ ID NO: 144006 - RNA, 19 nt, Artificial Sequence
  Description of Artificial Sequence: Synthetic oligonucleotide
  Sense strand starting at position 2960 of SEQ ID NO: 1847
uggugcugcaaauaaauga

SEQ ID NO: 144007 - RNA, 19 nt, Artificial Sequence
  Description of Artificial Sequence: Synthetic oligonucleotide
  Antisense strand to SEQ ID NO: 144006
ucauuuauuugcagcacca

SEQ ID NO: 144008 - RNA, 19 nt, Artificial Sequence
  Description of Artificial Sequence: Synthetic oligonucleotide
  Sense strand starting at position 2989 of SEQ ID NO: 1847
gaguaauuauagguuaauc

SEQ ID NO: 144009 - RNA, 19 nt, Artificial Sequence
  Description of Artificial Sequence: Synthetic oligonucleotide
  Antisense strand to SEQ ID NO: 144008
gauuaaccuauaauuacuc

SEQ ID NO: 144010 - RNA, 19 nt, Artificial Sequence
  Description of Artificial Sequence: Synthetic oligonucleotide
  Sense strand starting at position 3012 of SEQ ID NO: 1847
cuacucguuagacagagua

SEQ ID NO: 144011 - RNA, 19 nt, Artificial Sequence
  Description of Artificial Sequence: Synthetic oligonucleotide
  Antisense strand to SEQ ID NO: 144010
uacucugucuaacgaguag

SEQ ID NO: 144012 - RNA, 19 nt, Artificial Sequence
  Description of Artificial Sequence: Synthetic oligonucleotide
  Sense strand starting at position 3014 of SEQ ID NO: 1847
acucguuagacagaguauu

SEQ ID NO: 144013 - RNA, 19 nt, Artificial Sequence
  Description of Artificial Sequence: Synthetic oligonucleotide
  Antisense strand to SEQ ID NO: 144012
aauacucugucuaacgagu

SEQ ID NO: 144014 - RNA, 19 nt, Artificial Sequence
  Description of Artificial Sequence: Synthetic oligonucleotide
  Sense strand starting at position 3022 of SEQ ID NO: 1847
gacagaguauuacugcaua

SEQ ID NO: 144015 - RNA, 19 nt, Artificial Sequence
  Description of Artificial Sequence: Synthetic oligonucleotide
  Antisense strand to SEQ ID NO: 144014
uaugcaguaauacucuguc

SEQ ID NO: 144016 - RNA, 19 nt, Artificial Sequence
  Description of Artificial Sequence: Synthetic oligonucleotide
  Sense strand starting at position 3025 of SEQ ID NO: 1847
agaguauuacugcauauau

SEQ ID NO: 144017 - RNA, 19 nt, Artificial Sequence
  Description of Artificial Sequence: Synthetic oligonucleotide
  Antisense strand to SEQ ID NO: 144016
auauaugcaguaauacucu

SEQ ID NO: 144018 - RNA, 19 nt, Artificial Sequence
  Description of Artificial Sequence: Synthetic oligonucleotide
  Sense strand starting at position 3081 of SEQ ID NO: 1847
caaacuauguaguuggaaa

SEQ ID NO: 144019 - RNA, 19 nt, Artificial Sequence
  Description of Artificial Sequence: Synthetic oligonucleotide
  Antisense strand to SEQ ID NO: 144018
uuuccaacuacauaguuug

SEQ ID NO: 144020 - RNA, 19 nt, Artificial Sequence
  Description of Artificial Sequence: Synthetic oligonucleotide
  Sense strand starting at position 3134 of SEQ ID NO: 1847
cugaaauuguacuucgaaa

SEQ ID NO: 144021 - RNA, 19 nt, Artificial Sequence
  Description of Artificial Sequence: Synthetic oligonucleotide
  Antisense strand to SEQ ID NO: 144020
uuucgaaguacaauuucag

SEQ ID NO: 144022 - RNA, 19 nt, Artificial Sequence
  Description of Artificial Sequence: Synthetic oligonucleotide
  Sense strand starting at position 3136 of SEQ ID NO: 1847
gaaauuguacuucgaaaga

SEQ ID NO: 144023 - RNA, 19 nt, Artificial Sequence
  Description of Artificial Sequence: Synthetic oligonucleotide
  Antisense strand to SEQ ID NO: 144022
ucuuucgaaguacaauuuc

SEQ ID NO: 144024 - RNA, 19 nt, Artificial Sequence
  Description of Artificial Sequence: Synthetic oligonucleotide
  Sense strand starting at position 3161 of SEQ ID NO: 1847
gaauuuggauauuggagga

SEQ ID NO: 144025 - RNA, 19 nt, Artificial Sequence
  Description of Artificial Sequence: Synthetic oligonucleotide
  Antisense strand to SEQ ID NO: 144024
uccuccaauauccaaauuc

SEQ ID NO: 144026 - RNA, 19 nt, Artificial Sequence
  Description of Artificial Sequence: Synthetic oligonucleotide
  Sense strand starting at position 3258 of SEQ ID NO: 1847
gguuuagaagccuagcaga

SEQ ID NO: 144027 - RNA, 19 nt, Artificial Sequence
  Description of Artificial Sequence: Synthetic oligonucleotide
  Antisense strand to SEQ ID NO: 144026
ucugcuaggcuucuaaacc

SEQ ID NO: 144028 - RNA, 19 nt, Artificial Sequence
  Description of Artificial Sequence: Synthetic oligonucleotide
  Sense strand starting at position 3295 of SEQ ID NO: 1847
gguggguaaggugaguaau

SEQ ID NO: 144029 - RNA, 19 nt, Artificial Sequence
  Description of Artificial Sequence: Synthetic oligonucleotide
  Antisense strand to SEQ ID NO: 144028
auuacucaccuuacccacc

SEQ ID NO: 144030 - RNA, 19 nt, Artificial Sequence
  Description of Artificial Sequence: Synthetic oligonucleotide
  Sense strand starting at position 3301 of SEQ ID NO: 1847
uaaggugaguaauugaagu

SEQ ID NO: 144031 - RNA, 19 nt, Artificial Sequence
  Description of Artificial Sequence: Synthetic oligonucleotide
  Antisense strand to SEQ ID NO: 144030
acuucaauuacucaccuua

SEQ ID NO: 144032 - RNA, 19 nt, Artificial Sequence
  Description of Artificial Sequence: Synthetic oligonucleotide
  Sense strand starting at position 3303 of SEQ ID NO: 1847
aggugaguaauugaaguau

SEQ ID NO: 144033 - RNA, 19 nt, Artificial Sequence
  Description of Artificial Sequence: Synthetic oligonucleotide
  Antisense strand to SEQ ID NO: 144032
auacuucaauuacucaccu

SEQ ID NO: 144034 - RNA, 19 nt, Artificial Sequence
  Description of Artificial Sequence: Synthetic oligonucleotide
  Sense strand starting at position 52 of SEQ ID NO: 1848
auugcaaaguggucuacuu

SEQ ID NO: 144035 - RNA, 19 nt, Artificial Sequence
  Description of Artificial Sequence: Synthetic oligonucleotide
  Antisense strand to SEQ ID NO: 144034
aaguagaccacuuugcaau

SEQ ID NO: 144036 - RNA, 19 nt, Artificial Sequence
  Description of Artificial Sequence: Synthetic oligonucleotide
  Sense strand starting at position 82 of SEQ ID NO: 1848
augugauaugcuuauauca

SEQ ID NO: 144037 - RNA, 19 nt, Artificial Sequence
  Description of Artificial Sequence: Synthetic oligonucleotide
  Antisense strand to SEQ ID NO: 144036
ugauauaagcauaucacau

SEQ ID NO: 144038 - RNA, 19 nt, Artificial Sequence
  Description of Artificial Sequence: Synthetic oligonucleotide
  Sense strand starting at position 164 of SEQ ID NO: 1848
acuaaaucauguguauaac

SEQ ID NO: 144039 - RNA, 19 nt, Artificial Sequence
  Description of Artificial Sequence: Synthetic oligonucleotide
  Antisense strand to SEQ ID NO: 144038
guuauacacaugauuuagu

SEQ ID NO: 144040 - RNA, 19 nt, Artificial Sequence
  Description of Artificial Sequence: Synthetic oligonucleotide
  Sense strand starting at position 211 of SEQ ID NO: 1848
gcugucauugcucaggaca

SEQ ID NO: 144041 - RNA, 19 nt, Artificial Sequence
  Description of Artificial Sequence: Synthetic oligonucleotide
  Antisense strand to SEQ ID NO: 144040
uguccugagcaaugacagc

SEQ ID NO: 144042 - RNA, 19 nt, Artificial Sequence
  Description of Artificial Sequence: Synthetic oligonucleotide
  Sense strand starting at position 214 of SEQ ID NO: 1848
gucauugcucaggacagaa

SEQ ID NO: 144043 - RNA, 19 nt, Artificial Sequence
  Description of Artificial Sequence: Synthetic oligonucleotide
  Antisense strand to SEQ ID NO: 144042
uucuguccugagcaaugac

SEQ ID NO: 144044 - RNA, 19 nt, Artificial Sequence
  Description of Artificial Sequence: Synthetic oligonucleotide
  Sense strand starting at position 307 of SEQ ID NO: 1848
auuugagaaugucagauca

SEQ ID NO: 144045 - RNA, 19 nt, Artificial Sequence
  Description of Artificial Sequence: Synthetic oligonucleotide
  Antisense strand to SEQ ID NO: 144044
ugaucugacauucucaaau

SEQ ID NO: 144046 - RNA, 19 nt, Artificial Sequence
  Description of Artificial Sequence: Synthetic oligonucleotide
  Sense strand starting at position 340 of SEQ ID NO: 1848
guacauaaucacugaugau

SEQ ID NO: 144047 - RNA, 19 nt, Artificial Sequence
  Description of Artificial Sequence: Synthetic oligonucleotide
  Antisense strand to SEQ ID NO: 144046
aucaucagugauuauguac

SEQ ID NO: 144048 - RNA, 19 nt, Artificial Sequence
  Description of Artificial Sequence: Synthetic oligonucleotide
  Sense strand starting at position 383 of SEQ ID NO: 1848
guugauacauacucugauc

SEQ ID NO: 144049 - RNA, 19 nt, Artificial Sequence
  Description of Artificial Sequence: Synthetic oligonucleotide
  Antisense strand to SEQ ID NO: 144048
gaucagaguauguaucaac

SEQ ID NO: 144050 - RNA, 19 nt, Artificial Sequence
  Description of Artificial Sequence: Synthetic oligonucleotide
  Sense strand starting at position 418 of SEQ ID NO: 1848
ucgagaaagccggaaguuu

SEQ ID NO: 144051 - RNA, 19 nt, Artificial Sequence
  Description of Artificial Sequence: Synthetic oligonucleotide
  Antisense strand to SEQ ID NO: 144050
aaacuuccggcuuucucga

SEQ ID NO: 144052 - RNA, 19 nt, Artificial Sequence
  Description of Artificial Sequence: Synthetic oligonucleotide
  Sense strand starting at position 488 of SEQ ID NO: 1848
uugggugauucaucggcca

SEQ ID NO: 144053 - RNA, 19 nt, Artificial Sequence
  Description of Artificial Sequence: Synthetic oligonucleotide
  Antisense strand to SEQ ID NO: 144052
uggccgaugaaucacccaa

SEQ ID NO: 144054 - RNA, 19 nt, Artificial Sequence
  Description of Artificial Sequence: Synthetic oligonucleotide
  Sense strand starting at position 515 of SEQ ID NO: 1848
cuggucugcccauaauuau

SEQ ID NO: 144055 - RNA, 19 nt, Artificial Sequence
  Description of Artificial Sequence: Synthetic oligonucleotide
  Antisense strand to SEQ ID NO: 144054
auaauuaugggcagaccag

SEQ ID NO: 144056 - RNA, 19 nt, Artificial Sequence
  Description of Artificial Sequence: Synthetic oligonucleotide
  Sense strand starting at position 575 of SEQ ID NO: 1848
auacaagaauuaucagugu

SEQ ID NO: 144057 - RNA, 19 nt, Artificial Sequence
  Description of Artificial Sequence: Synthetic oligonucleotide
  Antisense strand to SEQ ID NO: 144056
acacugauaauucuuguau

SEQ ID NO: 144058 - RNA, 19 nt, Artificial Sequence
  Description of Artificial Sequence: Synthetic oligonucleotide
  Sense strand starting at position 621 of SEQ ID NO: 1848
gugagaucccagugggacu

SEQ ID NO: 144059 - RNA, 19 nt, Artificial Sequence
  Description of Artificial Sequence: Synthetic oligonucleotide
  Antisense strand to SEQ ID NO: 144058
agucccacugggaucucac

SEQ ID NO: 144060 - RNA, 19 nt, Artificial Sequence
  Description of Artificial Sequence: Synthetic oligonucleotide
  Sense strand starting at position 855 of SEQ ID NO: 1848
uugagaaguguuugaugcu

SEQ ID NO: 144061 - RNA, 19 nt, Artificial Sequence
  Description of Artificial Sequence: Synthetic oligonucleotide
  Antisense strand to SEQ ID NO: 144060
agcaucaaacacuucucaa

SEQ ID NO: 144062 - RNA, 19 nt, Artificial Sequence
  Description of Artificial Sequence: Synthetic oligonucleotide
  Sense strand starting at position 862 of SEQ ID NO: 1848
guguuugaugcucacccua

SEQ ID NO: 144063 - RNA, 19 nt, Artificial Sequence
  Description of Artificial Sequence: Synthetic oligonucleotide
  Antisense strand to SEQ ID NO: 144062
uagggugagcaucaaacac

SEQ ID NO: 144064 - RNA, 19 nt, Artificial Sequence
  Description of Artificial Sequence: Synthetic oligonucleotide
  Sense strand starting at position 864 of SEQ ID NO: 1848
guuugaugcucacccuaaa

SEQ ID NO: 144065 - RNA, 19 nt, Artificial Sequence
  Description of Artificial Sequence: Synthetic oligonucleotide
  Antisense strand to SEQ ID NO: 144064
uuuagggugagcaucaaac

SEQ ID NO: 144066 - RNA, 19 nt, Artificial Sequence
  Description of Artificial Sequence: Synthetic oligonucleotide
  Sense strand starting at position 910 of SEQ ID NO: 1848
agaguucucuucucuccca

SEQ ID NO: 144067 - RNA, 19 nt, Artificial Sequence
  Description of Artificial Sequence: Synthetic oligonucleotide
  Antisense strand to SEQ ID NO: 144066
ugggagagaagagaacucu

SEQ ID NO: 144068 - RNA, 19 nt, Artificial Sequence
  Description of Artificial Sequence: Synthetic oligonucleotide
  Sense strand starting at position 1216 of SEQ ID NO: 1848
uucggaaguccggagguaa

SEQ ID NO: 144069 - RNA, 19 nt, Artificial Sequence
  Description of Artificial Sequence: Synthetic oligonucleotide
  Antisense strand to SEQ ID NO: 144068
uuaccuccggacuuccgaa

SEQ ID NO: 144070 - RNA, 19 nt, Artificial Sequence
  Description of Artificial Sequence: Synthetic oligonucleotide
  Sense strand starting at position 1263 of SEQ ID NO: 1848
agaauaugucccggcaaca

SEQ ID NO: 144071 - RNA, 19 nt, Artificial Sequence
  Description of Artificial Sequence: Synthetic oligonucleotide
  Antisense strand to SEQ ID NO: 144070
uguugccgggacauauucu

SEQ ID NO: 144072 - RNA, 19 nt, Artificial Sequence
  Description of Artificial Sequence: Synthetic oligonucleotide
  Sense strand starting at position 2303 of SEQ ID NO: 1848
ggguggguggucuagugaa

SEQ ID NO: 144073 - RNA, 19 nt, Artificial Sequence
  Description of Artificial Sequence: Synthetic oligonucleotide
  Antisense strand to SEQ ID NO: 144072
uucacuagaccacccaccc

SEQ ID NO: 144074 - RNA, 19 nt, Artificial Sequence
  Description of Artificial Sequence: Synthetic oligonucleotide
  Sense strand starting at position 2340 of SEQ ID NO: 1848
gacggaugcacggaugaau

SEQ ID NO: 144075 - RNA, 19 nt, Artificial Sequence
  Description of Artificial Sequence: Synthetic oligonucleotide
  Antisense strand to SEQ ID NO: 144074
auucauccgugcauccguc

SEQ ID NO: 144076 - RNA, 19 nt, Artificial Sequence
  Description of Artificial Sequence: Synthetic oligonucleotide
  Sense strand starting at position 2518 of SEQ ID NO: 1848
gagacacccuaggaaugaa

SEQ ID NO: 144077 - RNA, 19 nt, Artificial Sequence
  Description of Artificial Sequence: Synthetic oligonucleotide
  Antisense strand to SEQ ID NO: 144076
uucauuccuagggugucuc

SEQ ID NO: 144078 - RNA, 19 nt, Artificial Sequence
  Description of Artificial Sequence: Synthetic oligonucleotide
  Sense strand starting at position 2595 of SEQ ID NO: 1848
ucuuccuaaguuggagaaa

SEQ ID NO: 144079 - RNA, 19 nt, Artificial Sequence
  Description of Artificial Sequence: Synthetic oligonucleotide
  Antisense strand to SEQ ID NO: 144078
uuucuccaacuuaggaaga

SEQ ID NO: 144080 - RNA, 19 nt, Artificial Sequence
  Description of Artificial Sequence: Synthetic oligonucleotide
  Sense strand starting at position 2784 of SEQ ID NO: 1848
ugauccuccuagcuauagu

SEQ ID NO: 144081 - RNA, 19 nt, Artificial Sequence
  Description of Artificial Sequence: Synthetic oligonucleotide
  Antisense strand to SEQ ID NO: 144080
acuauagcuaggaggauca

SEQ ID NO: 144082 - RNA, 19 nt, Artificial Sequence
  Description of Artificial Sequence: Synthetic oligonucleotide
  Sense strand starting at position 2818 of SEQ ID NO: 1848
acaaauucuucuguaagga

SEQ ID NO: 144083 - RNA, 19 nt, Artificial Sequence
  Description of Artificial Sequence: Synthetic oligonucleotide
  Antisense strand to SEQ ID NO: 144082
uccuuacagaagaauuugu

SEQ ID NO: 144084 - RNA, 19 nt, Artificial Sequence
  Description of Artificial Sequence: Synthetic oligonucleotide
  Sense strand starting at position 2834 of SEQ ID NO: 1848
ggauuagaaugacauaaag

SEQ ID NO: 144085 - RNA, 19 nt, Artificial Sequence
  Description of Artificial Sequence: Synthetic oligonucleotide
  Antisense strand to SEQ ID NO: 144084
cuuuaugucauucuaaucc

SEQ ID NO: 144086 - RNA, 19 nt, Artificial Sequence
  Description of Artificial Sequence: Synthetic oligonucleotide
  Sense strand starting at position 3156 of SEQ ID NO: 1848
guccauguggaccaaugua

SEQ ID NO: 144087 - RNA, 19 nt, Artificial Sequence
  Description of Artificial Sequence: Synthetic oligonucleotide
  Antisense strand to SEQ ID NO: 144086
uacauugguccacauggac

SEQ ID NO: 144088 - RNA, 19 nt, Artificial Sequence
  Description of Artificial Sequence: Synthetic oligonucleotide
  Sense strand starting at position 3196 of SEQ ID NO: 1848
cuugucagguuucucucaa

SEQ ID NO: 144089 - RNA, 19 nt, Artificial Sequence
  Description of Artificial Sequence: Synthetic oligonucleotide
  Antisense strand to SEQ ID NO: 144088
uugagagaaaccugacaag

SEQ ID NO: 144090 - RNA, 19 nt, Artificial Sequence
  Description of Artificial Sequence: Synthetic oligonucleotide
  Sense strand starting at position 3197 of SEQ ID NO: 1848
uugucagguuucucucaag

SEQ ID NO: 144091 - RNA, 19 nt, Artificial Sequence
  Description of Artificial Sequence: Synthetic oligonucleotide
  Antisense strand to SEQ ID NO: 144090
cuugagagaaaccugacaa

SEQ ID NO: 144092 - RNA, 19 nt, Artificial Sequence
  Description of Artificial Sequence: Synthetic oligonucleotide
  Sense strand starting at position 3203 of SEQ ID NO: 1848
gguuucucucaaggaacaa

SEQ ID NO: 144093 - RNA, 19 nt, Artificial Sequence
  Description of Artificial Sequence: Synthetic oligonucleotide
  Antisense strand to SEQ ID NO: 144092
uuguuccuugagagaaacc

SEQ ID NO: 144094 - RNA, 19 nt, Artificial Sequence
  Description of Artificial Sequence: Synthetic oligonucleotide
  Sense strand starting at position 3382 of SEQ ID NO: 1848
uuucgacuucucgaaauau

SEQ ID NO: 144095 - RNA, 19 nt, Artificial Sequence
  Description of Artificial Sequence: Synthetic oligonucleotide
  Antisense strand to SEQ ID NO: 144094
auauuucgagaagucgaaa

SEQ ID NO: 144096 - RNA, 19 nt, Artificial Sequence
  Description of Artificial Sequence: Synthetic oligonucleotide
  Sense strand starting at position 3471 of SEQ ID NO: 1848
cagucugcuccugagaagu

SEQ ID NO: 144097 - RNA, 19 nt, Artificial Sequence
  Description of Artificial Sequence: Synthetic oligonucleotide
  Antisense strand to SEQ ID NO: 144096
acuucucaggagcagacug

SEQ ID NO: 144098 - RNA, 19 nt, Artificial Sequence
  Description of Artificial Sequence: Synthetic oligonucleotide
  Sense strand starting at position 3479 of SEQ ID NO: 1848
uccugagaaguugauguga

SEQ ID NO: 144099 - RNA, 19 nt, Artificial Sequence
  Description of Artificial Sequence: Synthetic oligonucleotide
  Antisense strand to SEQ ID NO: 144098
ucacaucaacuucucagga

SEQ ID NO: 144100 - RNA, 19 nt, Artificial Sequence
  Description of Artificial Sequence: Synthetic oligonucleotide
  Sense strand starting at position 3498 of SEQ ID NO: 1848
cuugcaugacuuggauuaa

SEQ ID NO: 144101 - RNA, 19 nt, Artificial Sequence
  Description of Artificial Sequence: Synthetic oligonucleotide
  Antisense strand to SEQ ID NO: 144100
uuaauccaagucaugcaag

SEQ ID NO: 144102 - RNA, 19 nt, Artificial Sequence
  Description of Artificial Sequence: Synthetic oligonucleotide
  Sense strand starting at position 3572 of SEQ ID NO: 1848
gagagaaccgccugaagga

SEQ ID NO: 144103 - RNA, 19 nt, Artificial Sequence
  Description of Artificial Sequence: Synthetic oligonucleotide
  Antisense strand to SEQ ID NO: 144102
uccuucaggcgguucucuc

SEQ ID NO: 144104 - RNA, 19 nt, Artificial Sequence
  Description of Artificial Sequence: Synthetic oligonucleotide
  Sense strand starting at position 3608 of SEQ ID NO: 1848
uuugcaucucuggguaaag

SEQ ID NO: 144105 - RNA, 19 nt, Artificial Sequence
  Description of Artificial Sequence: Synthetic oligonucleotide
  Antisense strand to SEQ ID NO: 144104
cuuuacccagagaugcaaa

SEQ ID NO: 144106 - RNA, 19 nt, Artificial Sequence
  Description of Artificial Sequence: Synthetic oligonucleotide
  Sense strand starting at position 3609 of SEQ ID NO: 1848
uugcaucucuggguaaagu

SEQ ID NO: 144107 - RNA, 19 nt, Artificial Sequence
  Description of Artificial Sequence: Synthetic oligonucleotide
  Antisense strand to SEQ ID NO: 144106
acuuuacccagagaugcaa

SEQ ID NO: 144108 - RNA, 19 nt, Artificial Sequence
  Description of Artificial Sequence: Synthetic oligonucleotide
  Sense strand starting at position 3610 of SEQ ID NO: 1848
ugcaucucuggguaaaguu

SEQ ID NO: 144109 - RNA, 19 nt, Artificial Sequence
  Description of Artificial Sequence: Synthetic oligonucleotide
  Antisense strand to SEQ ID NO: 144108
aacuuuacccagagaugca

SEQ ID NO: 144110 - RNA, 19 nt, Artificial Sequence
  Description of Artificial Sequence: Synthetic oligonucleotide
  Sense strand starting at position 3853 of SEQ ID NO: 1848
ccuguuccacuuuggcaaa

SEQ ID NO: 144111 - RNA, 19 nt, Artificial Sequence
  Description of Artificial Sequence: Synthetic oligonucleotide
  Antisense strand to SEQ ID NO: 144110
uuugccaaaguggaacagg

SEQ ID NO: 144112 - RNA, 19 nt, Artificial Sequence
  Description of Artificial Sequence: Synthetic oligonucleotide
  Sense strand starting at position 3893 of SEQ ID NO: 1848
gauggucaauucucaauug

SEQ ID NO: 144113 - RNA, 19 nt, Artificial Sequence
  Description of Artificial Sequence: Synthetic oligonucleotide
  Antisense strand to SEQ ID NO: 144112
caauugagaauugaccauc

SEQ ID NO: 144114 - RNA, 19 nt, Artificial Sequence
  Description of Artificial Sequence: Synthetic oligonucleotide
  Sense strand starting at position 63 of SEQ ID NO: 1849
ggaccuuuauuauccuaga

SEQ ID NO: 144115 - RNA, 19 nt, Artificial Sequence
  Description of Artificial Sequence: Synthetic oligonucleotide
  Antisense strand to SEQ ID NO: 144114
ucuaggauaauaaaggucc

SEQ ID NO: 144116 - RNA, 19 nt, Artificial Sequence
  Description of Artificial Sequence: Synthetic oligonucleotide
  Sense strand starting at position 396 of SEQ ID NO: 1849
acuucugagaguuaggagu

SEQ ID NO: 144117 - RNA, 19 nt, Artificial Sequence
  Description of Artificial Sequence: Synthetic oligonucleotide
  Antisense strand to SEQ ID NO: 144116
acuccuaacucucagaagu

SEQ ID NO: 144118 - RNA, 19 nt, Artificial Sequence
  Description of Artificial Sequence: Synthetic oligonucleotide
  Sense strand starting at position 712 of SEQ ID NO: 1849
aggcaauacucacugucuu

SEQ ID NO: 144119 - RNA, 19 nt, Artificial Sequence
  Description of Artificial Sequence: Synthetic oligonucleotide
  Antisense strand to SEQ ID NO: 144118
aagacagugaguauugccu

SEQ ID NO: 144120 - RNA, 19 nt, Artificial Sequence
  Description of Artificial Sequence: Synthetic oligonucleotide
  Sense strand starting at position 973 of SEQ ID NO: 1849
ugucacauccaguaaauac

SEQ ID NO: 144121 - RNA, 19 nt, Artificial Sequence
  Description of Artificial Sequence: Synthetic oligonucleotide
  Antisense strand to SEQ ID NO: 144120
guauuuacuggaugugaca

SEQ ID NO: 144122 - RNA, 19 nt, Artificial Sequence
  Description of Artificial Sequence: Synthetic oligonucleotide
  Sense strand starting at position 1407 of SEQ ID NO: 1849
ugugaugugaugugauaaa

SEQ ID NO: 144123 - RNA, 19 nt, Artificial Sequence
  Description of Artificial Sequence: Synthetic oligonucleotide
  Antisense strand to SEQ ID NO: 144122
uuuaucacaucacaucaca

SEQ ID NO: 144124 - RNA, 19 nt, Artificial Sequence
  Description of Artificial Sequence: Synthetic oligonucleotide
  Sense strand starting at position 1418 of SEQ ID NO: 1849
gugauaaaugcagagagca

SEQ ID NO: 144125 - RNA, 19 nt, Artificial Sequence
  Description of Artificial Sequence: Synthetic oligonucleotide
  Antisense strand to SEQ ID NO: 144124
ugcucucugcauuuaucac

SEQ ID NO: 144126 - RNA, 19 nt, Artificial Sequence
  Description of Artificial Sequence: Synthetic oligonucleotide
  Sense strand starting at position 1787 of SEQ ID NO: 1849
uuuguuauggagugagacu

SEQ ID NO: 144127 - RNA, 19 nt, Artificial Sequence
  Description of Artificial Sequence: Synthetic oligonucleotide
  Antisense strand to SEQ ID NO: 144126
agucucacuccauaacaaa

SEQ ID NO: 144128 - RNA, 19 nt, Artificial Sequence
  Description of Artificial Sequence: Synthetic oligonucleotide
  Sense strand starting at position 1788 of SEQ ID NO: 1849
uuguuauggagugagacuu

SEQ ID NO: 144129 - RNA, 19 nt, Artificial Sequence
  Description of Artificial Sequence: Synthetic oligonucleotide
  Antisense strand to SEQ ID NO: 144128
aagucucacuccauaacaa

SEQ ID NO: 144130 - RNA, 19 nt, Artificial Sequence
  Description of Artificial Sequence: Synthetic oligonucleotide
  Sense strand starting at position 1910 of SEQ ID NO: 1849
gcuucaguuccagaaggag

SEQ ID NO: 144131 - RNA, 19 nt, Artificial Sequence
  Description of Artificial Sequence: Synthetic oligonucleotide
  Antisense strand to SEQ ID NO: 144130
cuccuucuggaacugaagc

SEQ ID NO: 144132 - RNA, 19 nt, Artificial Sequence
  Description of Artificial Sequence: Synthetic oligonucleotide
  Sense strand starting at position 2129 of SEQ ID NO: 1849
ggagaaagcuugucuucuc

SEQ ID NO: 144133 - RNA, 19 nt, Artificial Sequence
  Description of Artificial Sequence: Synthetic oligonucleotide
  Antisense strand to SEQ ID NO: 144132
gagaagacaagcuuucucc

SEQ ID NO: 144134 - RNA, 19 nt, Artificial Sequence
  Description of Artificial Sequence: Synthetic oligonucleotide
  Sense strand starting at position 2153 of SEQ ID NO: 1849
gcucuaggucccuaagguu

SEQ ID NO: 144135 - RNA, 19 nt, Artificial Sequence
  Description of Artificial Sequence: Synthetic oligonucleotide
  Antisense strand to SEQ ID NO: 144134
aaccuuagggaccuagagc

SEQ ID NO: 144136 - RNA, 19 nt, Artificial Sequence
  Description of Artificial Sequence: Synthetic oligonucleotide
  Sense strand starting at position 2160 of SEQ ID NO: 1849
gucccuaagguugagucua

SEQ ID NO: 144137 - RNA, 19 nt, Artificial Sequence
  Description of Artificial Sequence: Synthetic oligonucleotide
  Antisense strand to SEQ ID NO: 144136
uagacucaaccuuagggac

SEQ ID NO: 144138 - RNA, 19 nt, Artificial Sequence
  Description of Artificial Sequence: Synthetic oligonucleotide
  Sense strand starting at position 2263 of SEQ ID NO: 1849
acagaaagugauggcuuua

SEQ ID NO: 144139 - RNA, 19 nt, Artificial Sequence
  Description of Artificial Sequence: Synthetic oligonucleotide
  Antisense strand to SEQ ID NO: 144138
uaaagccaucacuuucugu

SEQ ID NO: 144140 - RNA, 19 nt, Artificial Sequence
  Description of Artificial Sequence: Synthetic oligonucleotide
  Sense strand starting at position 2268 of SEQ ID NO: 1849
aagugauggcuuuauaaua

SEQ ID NO: 144141 - RNA, 19 nt, Artificial Sequence
  Description of Artificial Sequence: Synthetic oligonucleotide
  Antisense strand to SEQ ID NO: 144140
uauuauaaagccaucacuu

SEQ ID NO: 144142 - RNA, 19 nt, Artificial Sequence
  Description of Artificial Sequence: Synthetic oligonucleotide
  Sense strand starting at position 2366 of SEQ ID NO: 1849
acagucagagaggguauua

SEQ ID NO: 144143 - RNA, 19 nt, Artificial Sequence
  Description of Artificial Sequence: Synthetic oligonucleotide
  Antisense strand to SEQ ID NO: 144142
uaauacccucucugacugu

SEQ ID NO: 144144 - RNA, 19 nt, Artificial Sequence
  Description of Artificial Sequence: Synthetic oligonucleotide
  Sense strand starting at position 2376 of SEQ ID NO: 1849
aggguauuauuauucccau

SEQ ID NO: 144145 - RNA, 19 nt, Artificial Sequence
  Description of Artificial Sequence: Synthetic oligonucleotide
  Antisense strand to SEQ ID NO: 144144
augggaauaauaauacccu

SEQ ID NO: 144146 - RNA, 19 nt, Artificial Sequence
  Description of Artificial Sequence: Synthetic oligonucleotide
  Sense strand starting at position 2377 of SEQ ID NO: 1849
ggguauuauuauucccaug

SEQ ID NO: 144147 - RNA, 19 nt, Artificial Sequence
  Description of Artificial Sequence: Synthetic oligonucleotide
  Antisense strand to SEQ ID NO: 144146
caugggaauaauaauaccc

SEQ ID NO: 144148 - RNA, 19 nt, Artificial Sequence
  Description of Artificial Sequence: Synthetic oligonucleotide
  Sense strand starting at position 2473 of SEQ ID NO: 1849
ggaccagaauuugagucuu

SEQ ID NO: 144149 - RNA, 19 nt, Artificial Sequence
  Description of Artificial Sequence: Synthetic oligonucleotide
  Antisense strand to SEQ ID NO: 144148
aagacucaaauucuggucc

SEQ ID NO: 144150 - RNA, 19 nt, Artificial Sequence
  Description of Artificial Sequence: Synthetic oligonucleotide
  Sense strand starting at position 2484 of SEQ ID NO: 1849
ugagucuuaugacucuaac

SEQ ID NO: 144151 - RNA, 19 nt, Artificial Sequence
  Description of Artificial Sequence: Synthetic oligonucleotide
  Antisense strand to SEQ ID NO: 144150
guuagagucauaagacuca

SEQ ID NO: 144152 - RNA, 19 nt, Artificial Sequence
  Description of Artificial Sequence: Synthetic oligonucleotide
  Sense strand starting at position 2487 of SEQ ID NO: 1849
gucuuaugacucuaacagc

SEQ ID NO: 144153 - RNA, 19 nt, Artificial Sequence
  Description of Artificial Sequence: Synthetic oligonucleotide
  Antisense strand to SEQ ID NO: 144152
gcuguuagagucauaagac

SEQ ID NO: 144154 - RNA, 19 nt, Artificial Sequence
  Description of Artificial Sequence: Synthetic oligonucleotide
  Sense strand starting at position 2538 of SEQ ID NO: 1849
agucuuucugggcagaucu

SEQ ID NO: 144155 - RNA, 19 nt, Artificial Sequence
  Description of Artificial Sequence: Synthetic oligonucleotide
  Antisense strand to SEQ ID NO: 144154
agaucugcccagaaagacu

SEQ ID NO: 144156 - RNA, 19 nt, Artificial Sequence
  Description of Artificial Sequence: Synthetic oligonucleotide
  Sense strand starting at position 2540 of SEQ ID NO: 1849
ucuuucugggcagaucuau

SEQ ID NO: 144157 - RNA, 19 nt, Artificial Sequence
  Description of Artificial Sequence: Synthetic oligonucleotide
  Antisense strand to SEQ ID NO: 144156
auagaucugcccagaaaga

SEQ ID NO: 144158 - RNA, 19 nt, Artificial Sequence
  Description of Artificial Sequence: Synthetic oligonucleotide
  Sense strand starting at position 2560 of SEQ ID NO: 1849
ggugcauaaccugaauucu

SEQ ID NO: 144159 - RNA, 19 nt, Artificial Sequence
  Description of Artificial Sequence: Synthetic oligonucleotide
  Antisense strand to SEQ ID NO: 144158
agaauucagguuaugcacc

SEQ ID NO: 144160 - RNA, 19 nt, Artificial Sequence
  Description of Artificial Sequence: Synthetic oligonucleotide
  Sense strand starting at position 2570 of SEQ ID NO: 1849
cugaauucucucggugaaa

SEQ ID NO: 144161 - RNA, 19 nt, Artificial Sequence
  Description of Artificial Sequence: Synthetic oligonucleotide
  Antisense strand to SEQ ID NO: 144160
uuucaccgagagaauucag

SEQ ID NO: 144162 - RNA, 19 nt, Artificial Sequence
  Description of Artificial Sequence: Synthetic oligonucleotide
  Sense strand starting at position 2571 of SEQ ID NO: 1849
ugaauucucucggugaaau

SEQ ID NO: 144163 - RNA, 19 nt, Artificial Sequence
  Description of Artificial Sequence: Synthetic oligonucleotide
  Antisense strand to SEQ ID NO: 144162
auuucaccgagagaauuca

SEQ ID NO: 144164 - RNA, 19 nt, Artificial Sequence
  Description of Artificial Sequence: Synthetic oligonucleotide
  Sense strand starting at position 2572 of SEQ ID NO: 1849
gaauucucucggugaaaug

SEQ ID NO: 144165 - RNA, 19 nt, Artificial Sequence
  Description of Artificial Sequence: Synthetic oligonucleotide
  Antisense strand to SEQ ID NO: 144164
cauuucaccgagagaauuc

SEQ ID NO: 144166 - RNA, 19 nt, Artificial Sequence
  Description of Artificial Sequence: Synthetic oligonucleotide
  Sense strand starting at position 2573 of SEQ ID NO: 1849
aauucucucggugaaauga

SEQ ID NO: 144167 - RNA, 19 nt, Artificial Sequence
  Description of Artificial Sequence: Synthetic oligonucleotide
  Antisense strand to SEQ ID NO: 144166
ucauuucaccgagagaauu

SEQ ID NO: 144168 - RNA, 19 nt, Artificial Sequence
  Description of Artificial Sequence: Synthetic oligonucleotide
  Sense strand starting at position 2584 of SEQ ID NO: 1849
ugaaaugauucugccacaa

SEQ ID NO: 144169 - RNA, 19 nt, Artificial Sequence
  Description of Artificial Sequence: Synthetic oligonucleotide
  Antisense strand to SEQ ID NO: 144168
uuguggcagaaucauuuca

SEQ ID NO: 144170 - RNA, 19 nt, Artificial Sequence
  Description of Artificial Sequence: Synthetic oligonucleotide
  Sense strand starting at position 2708 of SEQ ID NO: 1849
agggaacuuuguguuauaa

SEQ ID NO: 144171 - RNA, 19 nt, Artificial Sequence
  Description of Artificial Sequence: Synthetic oligonucleotide
  Antisense strand to SEQ ID NO: 144170
uuauaacacaaaguucccu

SEQ ID NO: 144172 - RNA, 19 nt, Artificial Sequence
  Description of Artificial Sequence: Synthetic oligonucleotide
  Sense strand starting at position 2957 of SEQ ID NO: 1849
aauguuuaaugagcaguua

SEQ ID NO: 144173 - RNA, 19 nt, Artificial Sequence
  Description of Artificial Sequence: Synthetic oligonucleotide
  Antisense strand to SEQ ID NO: 144172
uaacugcucauuaaacauu

SEQ ID NO: 144174 - RNA, 19 nt, Artificial Sequence
  Description of Artificial Sequence: Synthetic oligonucleotide
  Sense strand starting at position 3000 of SEQ ID NO: 1849
caucguauuugaguuaucu

SEQ ID NO: 144175 - RNA, 19 nt, Artificial Sequence
  Description of Artificial Sequence: Synthetic oligonucleotide
  Antisense strand to SEQ ID NO: 144174
agauaacucaaauacgaug

SEQ ID NO: 144176 - RNA, 19 nt, Artificial Sequence
  Description of Artificial Sequence: Synthetic oligonucleotide
  Sense strand starting at position 3308 of SEQ ID NO: 1849
gccugagucgcaaguggaa

SEQ ID NO: 144177 - RNA, 19 nt, Artificial Sequence
  Description of Artificial Sequence: Synthetic oligonucleotide
  Antisense strand to SEQ ID NO: 144176
uuccacuugcgacucaggc

SEQ ID NO: 144178 - RNA, 19 nt, Artificial Sequence
  Description of Artificial Sequence: Synthetic oligonucleotide
  Sense strand starting at position 3320 of SEQ ID NO: 1849
aguggaagcuaaucaauau

SEQ ID NO: 144179 - RNA, 19 nt, Artificial Sequence
  Description of Artificial Sequence: Synthetic oligonucleotide
  Antisense strand to SEQ ID NO: 144178
auauugauuagcuuccacu

SEQ ID NO: 144180 - RNA, 19 nt, Artificial Sequence
  Description of Artificial Sequence: Synthetic oligonucleotide
  Sense strand starting at position 3358 of SEQ ID NO: 1849
ucaauuagccuuugggaaa

SEQ ID NO: 144181 - RNA, 19 nt, Artificial Sequence
  Description of Artificial Sequence: Synthetic oligonucleotide
  Antisense strand to SEQ ID NO: 144180
uuucccaaaggcuaauuga

SEQ ID NO: 144182 - RNA, 19 nt, Artificial Sequence
  Description of Artificial Sequence: Synthetic oligonucleotide
  Sense strand starting at position 3394 of SEQ ID NO: 1849
agucaauaaguccaauguu

SEQ ID NO: 144183 - RNA, 19 nt, Artificial Sequence
  Description of Artificial Sequence: Synthetic oligonucleotide
  Antisense strand to SEQ ID NO: 144182
aacauuggacuuauugacu

SEQ ID NO: 144184 - RNA, 19 nt, Artificial Sequence
  Description of Artificial Sequence: Synthetic oligonucleotide
  Sense strand starting at position 3483 of SEQ ID NO: 1849
guguguggacaugaauaac

SEQ ID NO: 144185 - RNA, 19 nt, Artificial Sequence
  Description of Artificial Sequence: Synthetic oligonucleotide
  Antisense strand to SEQ ID NO: 144184
guuauucauguccacacac

SEQ ID NO: 144186 - RNA, 19 nt, Artificial Sequence
  Description of Artificial Sequence: Synthetic oligonucleotide
  Sense strand starting at position 3664 of SEQ ID NO: 1849
ggcauaauuucagggagga

SEQ ID NO: 144187 - RNA, 19 nt, Artificial Sequence
  Description of Artificial Sequence: Synthetic oligonucleotide
  Antisense strand to SEQ ID NO: 144186
uccucccugaaauuaugcc

SEQ ID NO: 144188 - RNA, 19 nt, Artificial Sequence
  Description of Artificial Sequence: Synthetic oligonucleotide
  Sense strand starting at position 3762 of SEQ ID NO: 1849
uuaagugcucgugagaaag

SEQ ID NO: 144189 - RNA, 19 nt, Artificial Sequence
  Description of Artificial Sequence: Synthetic oligonucleotide
  Antisense strand to SEQ ID NO: 144188
cuuucucacgagcacuuaa

SEQ ID NO: 144190 - RNA, 19 nt, Artificial Sequence
  Description of Artificial Sequence: Synthetic oligonucleotide
  Sense strand starting at position 3817 of SEQ ID NO: 1849
agagcucuggcccaggaau

SEQ ID NO: 144191 - RNA, 19 nt, Artificial Sequence
  Description of Artificial Sequence: Synthetic oligonucleotide
  Antisense strand to SEQ ID NO: 144190
auuccugggccagagcucu

SEQ ID NO: 144192 - RNA, 19 nt, Artificial Sequence
  Description of Artificial Sequence: Synthetic oligonucleotide
  Sense strand starting at position 3920 of SEQ ID NO: 1849
cguuucuuacaggaacaca

SEQ ID NO: 144193 - RNA, 19 nt, Artificial Sequence
  Description of Artificial Sequence: Synthetic oligonucleotide
  Antisense strand to SEQ ID NO: 144192
uguguuccuguaagaaacg

SEQ ID NO: 144194 - RNA, 19 nt, Artificial Sequence
  Description of Artificial Sequence: Synthetic oligonucleotide
  Sense strand starting at position 3449 of SEQ ID NO: 1850
accuuauugacaggguugu

SEQ ID NO: 144195 - RNA, 19 nt, Artificial Sequence
  Description of Artificial Sequence: Synthetic oligonucleotide
  Antisense strand to SEQ ID NO: 144194
acaacccugucaauaaggu

SEQ ID NO: 144196 - RNA, 19 nt, Artificial Sequence
  Description of Artificial Sequence: Synthetic oligonucleotide
  Sense strand starting at position 3362 of SEQ ID NO: 1850
ugguuagaucccugacccu

SEQ ID NO: 144197 - RNA, 19 nt, Artificial Sequence
  Description of Artificial Sequence: Synthetic oligonucleotide
  Antisense strand to SEQ ID NO: 144196
agggucagggaucuaacca

SEQ ID NO: 144198 - RNA, 19 nt, Artificial Sequence
  Description of Artificial Sequence: Synthetic oligonucleotide
  Sense strand starting at position 3353 of SEQ ID NO: 1850
aaugcauaaugguuagauc

SEQ ID NO: 144199 - RNA, 19 nt, Artificial Sequence
  Description of Artificial Sequence: Synthetic oligonucleotide
  Antisense strand to SEQ ID NO: 144198
gaucuaaccauuaugcauu

SEQ ID NO: 144200 - RNA, 19 nt, Artificial Sequence
  Description of Artificial Sequence: Synthetic oligonucleotide
  Sense strand starting at position 3347 of SEQ ID NO: 1850
ucuugaaaugcauaauggu

SEQ ID NO: 144201 - RNA, 19 nt, Artificial Sequence
  Description of Artificial Sequence: Synthetic oligonucleotide
  Antisense strand to SEQ ID NO: 144200
accauuaugcauuucaaga

SEQ ID NO: 144202 - RNA, 19 nt, Artificial Sequence
  Description of Artificial Sequence: Synthetic oligonucleotide
  Sense strand starting at position 3158 of SEQ ID NO: 1850
gcucacauuccuuaagaug

SEQ ID NO: 144203 - RNA, 19 nt, Artificial Sequence
  Description of Artificial Sequence: Synthetic oligonucleotide
  Antisense strand to SEQ ID NO: 144202
caucuuaaggaaugugagc

SEQ ID NO: 144204 - RNA, 19 nt, Artificial Sequence
  Description of Artificial Sequence: Synthetic oligonucleotide
  Sense strand starting at position 3135 of SEQ ID NO: 1850
uggcauauacaguaguaau

SEQ ID NO: 144205 - RNA, 19 nt, Artificial Sequence
  Description of Artificial Sequence: Synthetic oligonucleotide
  Antisense strand to SEQ ID NO: 144204
auuacuacuguauaugcca

SEQ ID NO: 144206 - RNA, 19 nt, Artificial Sequence
  Description of Artificial Sequence: Synthetic oligonucleotide
  Sense strand starting at position 3040 of SEQ ID NO: 1850
ugugaagcacugcaugauu

SEQ ID NO: 144207 - RNA, 19 nt, Artificial Sequence
  Description of Artificial Sequence: Synthetic oligonucleotide
  Antisense strand to SEQ ID NO: 144206
aaucaugcagugcuucaca

SEQ ID NO: 144208 - RNA, 19 nt, Artificial Sequence
  Description of Artificial Sequence: Synthetic oligonucleotide
  Sense strand starting at position 3028 of SEQ ID NO: 1850
aagagaguucagugugaag

SEQ ID NO: 144209 - RNA, 19 nt, Artificial Sequence
  Description of Artificial Sequence: Synthetic oligonucleotide
  Antisense strand to SEQ ID NO: 144208
cuucacacugaacucucuu

SEQ ID NO: 144210 - RNA, 19 nt, Artificial Sequence
  Description of Artificial Sequence: Synthetic oligonucleotide
  Sense strand starting at position 2941 of SEQ ID NO: 1850
gagauuguagcuuaccaua

SEQ ID NO: 144211 - RNA, 19 nt, Artificial Sequence
  Description of Artificial Sequence: Synthetic oligonucleotide
  Antisense strand to SEQ ID NO: 144210
uaugguaagcuacaaucuc

SEQ ID NO: 144212 - RNA, 19 nt, Artificial Sequence
  Description of Artificial Sequence: Synthetic oligonucleotide
  Sense strand starting at position 2939 of SEQ ID NO: 1850
augagauuguagcuuacca

SEQ ID NO: 144213 - RNA, 19 nt, Artificial Sequence
  Description of Artificial Sequence: Synthetic oligonucleotide
  Antisense strand to SEQ ID NO: 144212
ugguaagcuacaaucucau

SEQ ID NO: 144214 - RNA, 19 nt, Artificial Sequence
  Description of Artificial Sequence: Synthetic oligonucleotide
  Sense strand starting at position 2928 of SEQ ID NO: 1850
uguauugcaagaugagauu

SEQ ID NO: 144215 - RNA, 19 nt, Artificial Sequence
  Description of Artificial Sequence: Synthetic oligonucleotide
  Antisense strand to SEQ ID NO: 144214
aaucucaucuugcaauaca

SEQ ID NO: 144216 - RNA, 19 nt, Artificial Sequence
  Description of Artificial Sequence: Synthetic oligonucleotide
  Sense strand starting at position 2897 of SEQ ID NO: 1850
agagauucuugcuuuacau

SEQ ID NO: 144217 - RNA, 19 nt, Artificial Sequence
  Description of Artificial Sequence: Synthetic oligonucleotide
  Antisense strand to SEQ ID NO: 144216
auguaaagcaagaaucucu

SEQ ID NO: 144218 - RNA, 19 nt, Artificial Sequence
  Description of Artificial Sequence: Synthetic oligonucleotide
  Sense strand starting at position 2775 of SEQ ID NO: 1850
cuggaaggauuauuguuaa

SEQ ID NO: 144219 - RNA, 19 nt, Artificial Sequence
  Description of Artificial Sequence: Synthetic oligonucleotide
  Antisense strand to SEQ ID NO: 144218
uuaacaauaauccuuccag

SEQ ID NO: 144220 - RNA, 19 nt, Artificial Sequence
  Description of Artificial Sequence: Synthetic oligonucleotide
  Sense strand starting at position 2493 of SEQ ID NO: 1850
aucagcuuccaagagguuu

SEQ ID NO: 144221 - RNA, 19 nt, Artificial Sequence
  Description of Artificial Sequence: Synthetic oligonucleotide
  Antisense strand to SEQ ID NO: 144220
aaaccucuuggaagcugau

SEQ ID NO: 144222 - RNA, 19 nt, Artificial Sequence
  Description of Artificial Sequence: Synthetic oligonucleotide
  Sense strand starting at position 2219 of SEQ ID NO: 1850
uuauaauugugcccaagau

SEQ ID NO: 144223 - RNA, 19 nt, Artificial Sequence
  Description of Artificial Sequence: Synthetic oligonucleotide
  Antisense strand to SEQ ID NO: 144222
aucuugggcacaauuauaa

SEQ ID NO: 144224 - RNA, 19 nt, Artificial Sequence
  Description of Artificial Sequence: Synthetic oligonucleotide
  Sense strand starting at position 2111 of SEQ ID NO: 1850
aucugaagauaagucuuua

SEQ ID NO: 144225 - RNA, 19 nt, Artificial Sequence
  Description of Artificial Sequence: Synthetic oligonucleotide
  Antisense strand to SEQ ID NO: 144224
uaaagacuuaucuucagau

SEQ ID NO: 144226 - RNA, 19 nt, Artificial Sequence
  Description of Artificial Sequence: Synthetic oligonucleotide
  Sense strand starting at position 2024 of SEQ ID NO: 1850
auccauugugaacacguaa

SEQ ID NO: 144227 - RNA, 19 nt, Artificial Sequence
  Description of Artificial Sequence: Synthetic oligonucleotide
  Antisense strand to SEQ ID NO: 144226
uuacguguucacaauggau

SEQ ID NO: 144228 - RNA, 19 nt, Artificial Sequence
  Description of Artificial Sequence: Synthetic oligonucleotide
  Sense strand starting at position 1880 of SEQ ID NO: 1850
agaugaaugguuugccuua

SEQ ID NO: 144229 - RNA, 19 nt, Artificial Sequence
  Description of Artificial Sequence: Synthetic oligonucleotide
  Antisense strand to SEQ ID NO: 144228
uaaggcaaaccauucaucu

SEQ ID NO: 144230 - RNA, 19 nt, Artificial Sequence
  Description of Artificial Sequence: Synthetic oligonucleotide
  Sense strand starting at position 1847 of SEQ ID NO: 1850
cccugaauggcucagaucu

SEQ ID NO: 144231 - RNA, 19 nt, Artificial Sequence
  Description of Artificial Sequence: Synthetic oligonucleotide
  Antisense strand to SEQ ID NO: 144230
agaucugagccauucaggg

SEQ ID NO: 144232 - RNA, 19 nt, Artificial Sequence
  Description of Artificial Sequence: Synthetic oligonucleotide
  Sense strand starting at position 1754 of SEQ ID NO: 1850
caaagaucugguggcagaa

SEQ ID NO: 144233 - RNA, 19 nt, Artificial Sequence
  Description of Artificial Sequence: Synthetic oligonucleotide
  Antisense strand to SEQ ID NO: 144232
uucugccaccagaucuuug

SEQ ID NO: 144234 - RNA, 19 nt, Artificial Sequence
  Description of Artificial Sequence: Synthetic oligonucleotide
  Sense strand starting at position 1731 of SEQ ID NO: 1850
ugaauaaggcccuguacua

SEQ ID NO: 144235 - RNA, 19 nt, Artificial Sequence
  Description of Artificial Sequence: Synthetic oligonucleotide
  Antisense strand to SEQ ID NO: 144234
uaguacagggccuuauuca

SEQ ID NO: 144236 - RNA, 19 nt, Artificial Sequence
  Description of Artificial Sequence: Synthetic oligonucleotide
  Sense strand starting at position 1663 of SEQ ID NO: 1850
gucuucucucuggaggaga

SEQ ID NO: 144237 - RNA, 19 nt, Artificial Sequence
  Description of Artificial Sequence: Synthetic oligonucleotide
  Antisense strand to SEQ ID NO: 144236
ucuccuccagagagaagac

SEQ ID NO: 144238 - RNA, 19 nt, Artificial Sequence
  Description of Artificial Sequence: Synthetic oligonucleotide
  Sense strand starting at position 1661 of SEQ ID NO: 1850
cagucuucucucuggagga

SEQ ID NO: 144239 - RNA, 19 nt, Artificial Sequence
  Description of Artificial Sequence: Synthetic oligonucleotide
  Antisense strand to SEQ ID NO: 144238
uccuccagagagaagacug

SEQ ID NO: 144240 - RNA, 19 nt, Artificial Sequence
  Description of Artificial Sequence: Synthetic oligonucleotide
  Sense strand starting at position 1566 of SEQ ID NO: 1850
cuaauaauuugagaaggcu

SEQ ID NO: 144241 - RNA, 19 nt, Artificial Sequence
  Description of Artificial Sequence: Synthetic oligonucleotide
  Antisense strand to SEQ ID NO: 144240
agccuucucaaauuauuag

SEQ ID NO: 144242 - RNA, 19 nt, Artificial Sequence
  Description of Artificial Sequence: Synthetic oligonucleotide
  Sense strand starting at position 1477 of SEQ ID NO: 1850
gagacaaggcucuguacau

SEQ ID NO: 144243 - RNA, 19 nt, Artificial Sequence
  Description of Artificial Sequence: Synthetic oligonucleotide
  Antisense strand to SEQ ID NO: 144242
auguacagagccuugucuc

SEQ ID NO: 144244 - RNA, 19 nt, Artificial Sequence
  Description of Artificial Sequence: Synthetic oligonucleotide
  Sense strand starting at position 1370 of SEQ ID NO: 1850
gcagaaauucccuagugau

SEQ ID NO: 144245 - RNA, 19 nt, Artificial Sequence
  Description of Artificial Sequence: Synthetic oligonucleotide
  Antisense strand to SEQ ID NO: 144244
aucacuagggaauuucugc

SEQ ID NO: 144246 - RNA, 19 nt, Artificial Sequence
  Description of Artificial Sequence: Synthetic oligonucleotide
  Sense strand starting at position 1369 of SEQ ID NO: 1850
ggcagaaauucccuaguga

SEQ ID NO: 144247 - RNA, 19 nt, Artificial Sequence
  Description of Artificial Sequence: Synthetic oligonucleotide
  Antisense strand to SEQ ID NO: 144246
ucacuagggaauuucugcc

SEQ ID NO: 144248 - RNA, 19 nt, Artificial Sequence
  Description of Artificial Sequence: Synthetic oligonucleotide
  Sense strand starting at position 1319 of SEQ ID NO: 1850
guugaaugaguauauuacu

SEQ ID NO: 144249 - RNA, 19 nt, Artificial Sequence
  Description of Artificial Sequence: Synthetic oligonucleotide
  Antisense strand to SEQ ID NO: 144248
aguaauauacucauucaac

SEQ ID NO: 144250 - RNA, 19 nt, Artificial Sequence
  Description of Artificial Sequence: Synthetic oligonucleotide
  Sense strand starting at position 815 of SEQ ID NO: 1850
aucugucuuccucaucaga

SEQ ID NO: 144251 - RNA, 19 nt, Artificial Sequence
  Description of Artificial Sequence: Synthetic oligonucleotide
  Antisense strand to SEQ ID NO: 144250
ucugaugaggaagacagau

SEQ ID NO: 144252 - RNA, 19 nt, Artificial Sequence
  Description of Artificial Sequence: Synthetic oligonucleotide
  Sense strand starting at position 759 of SEQ ID NO: 1850
acguauauccuccauuauu

SEQ ID NO: 144253 - RNA, 19 nt, Artificial Sequence
  Description of Artificial Sequence: Synthetic oligonucleotide
  Antisense strand to SEQ ID NO: 144252
aauaauggaggauauacgu

SEQ ID NO: 144254 - RNA, 19 nt, Artificial Sequence
  Description of Artificial Sequence: Synthetic oligonucleotide
  Sense strand starting at position 746 of SEQ ID NO: 1850
ucccuauaccaucacguau

SEQ ID NO: 144255 - RNA, 19 nt, Artificial Sequence
  Description of Artificial Sequence: Synthetic oligonucleotide
  Antisense strand to SEQ ID NO: 144254
auacgugaugguauaggga

SEQ ID NO: 144256 - RNA, 19 nt, Artificial Sequence
  Description of Artificial Sequence: Synthetic oligonucleotide
  Sense strand starting at position 714 of SEQ ID NO: 1850
aaucuacugcaaugguaga

SEQ ID NO: 144257 - RNA, 19 nt, Artificial Sequence
  Description of Artificial Sequence: Synthetic oligonucleotide
  Antisense strand to SEQ ID NO: 144256
ucuaccauugcaguagauu

SEQ ID NO: 144258 - RNA, 19 nt, Artificial Sequence
  Description of Artificial Sequence: Synthetic oligonucleotide
  Sense strand starting at position 688 of SEQ ID NO: 1850
uaaucuuggugagccaaga

SEQ ID NO: 144259 - RNA, 19 nt, Artificial Sequence
  Description of Artificial Sequence: Synthetic oligonucleotide
  Antisense strand to SEQ ID NO: 144258
ucuuggcucaccaagauua

SEQ ID NO: 144260 - RNA, 19 nt, Artificial Sequence
  Description of Artificial Sequence: Synthetic oligonucleotide
  Sense strand starting at position 686 of SEQ ID NO: 1850
uauaaucuuggugagccaa

SEQ ID NO: 144261 - RNA, 19 nt, Artificial Sequence
  Description of Artificial Sequence: Synthetic oligonucleotide
  Antisense strand to SEQ ID NO: 144260
uuggcucaccaagauuaua

SEQ ID NO: 144262 - RNA, 19 nt, Artificial Sequence
  Description of Artificial Sequence: Synthetic oligonucleotide
  Sense strand starting at position 429 of SEQ ID NO: 1850
guccaaacucucuaguaua

SEQ ID NO: 144263 - RNA, 19 nt, Artificial Sequence
  Description of Artificial Sequence: Synthetic oligonucleotide
  Antisense strand to SEQ ID NO: 144262
uauacuagagaguuuggac

SEQ ID NO: 144264 - RNA, 19 nt, Artificial Sequence
  Description of Artificial Sequence: Synthetic oligonucleotide
  Sense strand starting at position 428 of SEQ ID NO: 1850
aguccaaacucucuaguau

SEQ ID NO: 144265 - RNA, 19 nt, Artificial Sequence
  Description of Artificial Sequence: Synthetic oligonucleotide
  Antisense strand to SEQ ID NO: 144264
auacuagagaguuuggacu

SEQ ID NO: 144266 - RNA, 19 nt, Artificial Sequence
  Description of Artificial Sequence: Synthetic oligonucleotide
  Sense strand starting at position 408 of SEQ ID NO: 1850
cuugauguccuagaaggua

SEQ ID NO: 144267 - RNA, 19 nt, Artificial Sequence
  Description of Artificial Sequence: Synthetic oligonucleotide
  Antisense strand to SEQ ID NO: 144266
uaccuucuaggacaucaag

SEQ ID NO: 144268 - RNA, 19 nt, Artificial Sequence
  Description of Artificial Sequence: Synthetic oligonucleotide
  Sense strand starting at position 404 of SEQ ID NO: 1850
ucuccuugauguccuagaa

SEQ ID NO: 144269 - RNA, 19 nt, Artificial Sequence
  Description of Artificial Sequence: Synthetic oligonucleotide
  Antisense strand to SEQ ID NO: 144268
uucuaggacaucaaggaga

SEQ ID NO: 144270 - RNA, 19 nt, Artificial Sequence
  Description of Artificial Sequence: Synthetic oligonucleotide
  Sense strand starting at position 203 of SEQ ID NO: 1850
uuguaccuaucucuggaau

SEQ ID NO: 144271 - RNA, 19 nt, Artificial Sequence
  Description of Artificial Sequence: Synthetic oligonucleotide
  Antisense strand to SEQ ID NO: 144270
auuccagagauagguacaa

SEQ ID NO: 144272 - RNA, 19 nt, Artificial Sequence
  Description of Artificial Sequence: Synthetic oligonucleotide
  Sense strand starting at position 179 of SEQ ID NO: 1850
gggaucaugcuguaugguu

SEQ ID NO: 144273 - RNA, 19 nt, Artificial Sequence
  Description of Artificial Sequence: Synthetic oligonucleotide
  Antisense strand to SEQ ID NO: 144272
aaccauacagcaugauccc

SEQ ID NO: 144274 - RNA, 19 nt, Artificial Sequence
  Description of Artificial Sequence: Synthetic oligonucleotide
  Sense strand starting at position 186 of SEQ ID NO: 1851
ccagccuggucuuucuaau

SEQ ID NO: 144275 - RNA, 19 nt, Artificial Sequence
  Description of Artificial Sequence: Synthetic oligonucleotide
  Antisense strand to SEQ ID NO: 144274
auuagaaagaccaggcugg

SEQ ID NO: 144276 - RNA, 19 nt, Artificial Sequence
  Description of Artificial Sequence: Synthetic oligonucleotide
  Sense strand starting at position 249 of SEQ ID NO: 1851
gaguuuagagucugaccua

SEQ ID NO: 144277 - RNA, 19 nt, Artificial Sequence
  Description of Artificial Sequence: Synthetic oligonucleotide
  Antisense strand to SEQ ID NO: 144276
uaggucagacucuaaacuc

SEQ ID NO: 144278 - RNA, 19 nt, Artificial Sequence
  Description of Artificial Sequence: Synthetic oligonucleotide
  Sense strand starting at position 318 of SEQ ID NO: 1851
cccuuaaccuguuuguauc

SEQ ID NO: 144279 - RNA, 19 nt, Artificial Sequence
  Description of Artificial Sequence: Synthetic oligonucleotide
  Antisense strand to SEQ ID NO: 144278
gauacaaacagguuaaggg

SEQ ID NO: 144280 - RNA, 19 nt, Artificial Sequence
  Description of Artificial Sequence: Synthetic oligonucleotide
  Sense strand starting at position 427 of SEQ ID NO: 1851
gcauccauaguuuaggaau

SEQ ID NO: 144281 - RNA, 19 nt, Artificial Sequence
  Description of Artificial Sequence: Synthetic oligonucleotide
  Antisense strand to SEQ ID NO: 144280
auuccuaaacuauggaugc

SEQ ID NO: 144282 - RNA, 19 nt, Artificial Sequence
  Description of Artificial Sequence: Synthetic oligonucleotide
  Sense strand starting at position 440 of SEQ ID NO: 1851
aggaauuggugguucccau

SEQ ID NO: 144283 - RNA, 19 nt, Artificial Sequence
  Description of Artificial Sequence: Synthetic oligonucleotide
  Antisense strand to SEQ ID NO: 144282
augggaaccaccaauuccu

SEQ ID NO: 144284 - RNA, 19 nt, Artificial Sequence
  Description of Artificial Sequence: Synthetic oligonucleotide
  Sense strand starting at position 455 of SEQ ID NO: 1851
ccaucacuugcucaguguu

SEQ ID NO: 144285 - RNA, 19 nt, Artificial Sequence
  Description of Artificial Sequence: Synthetic oligonucleotide
  Antisense strand to SEQ ID NO: 144284
aacacugagcaagugaugg

SEQ ID NO: 144286 - RNA, 19 nt, Artificial Sequence
  Description of Artificial Sequence: Synthetic oligonucleotide
  Sense strand starting at position 791 of SEQ ID NO: 1851
gguugucuagcauaucuuu

SEQ ID NO: 144287 - RNA, 19 nt, Artificial Sequence
  Description of Artificial Sequence: Synthetic oligonucleotide
  Antisense strand to SEQ ID NO: 144286
aaagauaugcuagacaacc

SEQ ID NO: 144288 - RNA, 19 nt, Artificial Sequence
  Description of Artificial Sequence: Synthetic oligonucleotide
  Sense strand starting at position 794 of SEQ ID NO: 1851
ugucuagcauaucuuuaca

SEQ ID NO: 144289 - RNA, 19 nt, Artificial Sequence
  Description of Artificial Sequence: Synthetic oligonucleotide
  Antisense strand to SEQ ID NO: 144288
uguaaagauaugcuagaca

SEQ ID NO: 144290 - RNA, 19 nt, Artificial Sequence
  Description of Artificial Sequence: Synthetic oligonucleotide
  Sense strand starting at position 825 of SEQ ID NO: 1851
gggaguugcugguuaggga

SEQ ID NO: 144291 - RNA, 19 nt, Artificial Sequence
  Description of Artificial Sequence: Synthetic oligonucleotide
  Antisense strand to SEQ ID NO: 144290
ucccuaaccagcaacuccc

SEQ ID NO: 144292 - RNA, 19 nt, Artificial Sequence
  Description of Artificial Sequence: Synthetic oligonucleotide
  Sense strand starting at position 1017 of SEQ ID NO: 1851
caagaagacugcuugagca

SEQ ID NO: 144293 - RNA, 19 nt, Artificial Sequence
  Description of Artificial Sequence: Synthetic oligonucleotide
  Antisense strand to SEQ ID NO: 144292
ugcucaagcagucuucuug

SEQ ID NO: 144294 - RNA, 19 nt, Artificial Sequence
  Description of Artificial Sequence: Synthetic oligonucleotide
  Sense strand starting at position 1019 of SEQ ID NO: 1851
agaagacugcuugagcaca

SEQ ID NO: 144295 - RNA, 19 nt, Artificial Sequence
  Description of Artificial Sequence: Synthetic oligonucleotide
  Antisense strand to SEQ ID NO: 144294
ugugcucaagcagucuucu

SEQ ID NO: 144296 - RNA, 19 nt, Artificial Sequence
  Description of Artificial Sequence: Synthetic oligonucleotide
  Sense strand starting at position 1038 of SEQ ID NO: 1851
ggaguuugaaguuguagua

SEQ ID NO: 144297 - RNA, 19 nt, Artificial Sequence
  Description of Artificial Sequence: Synthetic oligonucleotide
  Antisense strand to SEQ ID NO: 144296
uacuacaacuucaaacucc

SEQ ID NO: 144298 - RNA, 19 nt, Artificial Sequence
  Description of Artificial Sequence: Synthetic oligonucleotide
  Sense strand starting at position 1050 of SEQ ID NO: 1851
uguaguaagcuaugaucag

SEQ ID NO: 144299 - RNA, 19 nt, Artificial Sequence
  Description of Artificial Sequence: Synthetic oligonucleotide
  Antisense strand to SEQ ID NO: 144298
cugaucauagcuuacuaca

SEQ ID NO: 144300 - RNA, 19 nt, Artificial Sequence
  Description of Artificial Sequence: Synthetic oligonucleotide
  Sense strand starting at position 1182 of SEQ ID NO: 1851
gugucuuugugacuccaaa

SEQ ID NO: 144301 - RNA, 19 nt, Artificial Sequence
  Description of Artificial Sequence: Synthetic oligonucleotide
  Antisense strand to SEQ ID NO: 144300
uuuggagucacaaagacac

SEQ ID NO: 144302 - RNA, 19 nt, Artificial Sequence
  Description of Artificial Sequence: Synthetic oligonucleotide
  Sense strand starting at position 1232 of SEQ ID NO: 1851
gcuuguagaugaccaucaa

SEQ ID NO: 144303 - RNA, 19 nt, Artificial Sequence
  Description of Artificial Sequence: Synthetic oligonucleotide
  Antisense strand to SEQ ID NO: 144302
uugauggucaucuacaagc

SEQ ID NO: 144304 - RNA, 19 nt, Artificial Sequence
  Description of Artificial Sequence: Synthetic oligonucleotide
  Sense strand starting at position 1244 of SEQ ID NO: 1851
ccaucaaauguuugagcaa

SEQ ID NO: 144305 - RNA, 19 nt, Artificial Sequence
  Description of Artificial Sequence: Synthetic oligonucleotide
  Antisense strand to SEQ ID NO: 144304
uugcucaaacauuugaugg

SEQ ID NO: 144306 - RNA, 19 nt, Artificial Sequence
  Description of Artificial Sequence: Synthetic oligonucleotide
  Sense strand starting at position 1247 of SEQ ID NO: 1851
ucaaauguuugagcaauaa

SEQ ID NO: 144307 - RNA, 19 nt, Artificial Sequence
  Description of Artificial Sequence: Synthetic oligonucleotide
  Antisense strand to SEQ ID NO: 144306
uuauugcucaaacauuuga

SEQ ID NO: 144308 - RNA, 19 nt, Artificial Sequence
  Description of Artificial Sequence: Synthetic oligonucleotide
  Sense strand starting at position 1251 of SEQ ID NO: 1851
auguuugagcaauaaguuu

SEQ ID NO: 144309 - RNA, 19 nt, Artificial Sequence
  Description of Artificial Sequence: Synthetic oligonucleotide
  Antisense strand to SEQ ID NO: 144308
aaacuuauugcucaaacau

SEQ ID NO: 144310 - RNA, 19 nt, Artificial Sequence
  Description of Artificial Sequence: Synthetic oligonucleotide
  Sense strand starting at position 1325 of SEQ ID NO: 1851
ccagguauaugcucaaaca

SEQ ID NO: 144311 - RNA, 19 nt, Artificial Sequence
  Description of Artificial Sequence: Synthetic oligonucleotide
  Antisense strand to SEQ ID NO: 144310
uguuugagcauauaccugg

SEQ ID NO: 144312 - RNA, 19 nt, Artificial Sequence
  Description of Artificial Sequence: Synthetic oligonucleotide
  Sense strand starting at position 1326 of SEQ ID NO: 1851
cagguauaugcucaaacag

SEQ ID NO: 144313 - RNA, 19 nt, Artificial Sequence
  Description of Artificial Sequence: Synthetic oligonucleotide
  Antisense strand to SEQ ID NO: 144312
cuguuugagcauauaccug

SEQ ID NO: 144314 - RNA, 19 nt, Artificial Sequence
  Description of Artificial Sequence: Synthetic oligonucleotide
  Sense strand starting at position 1333 of SEQ ID NO: 1851
augcucaaacagugaugaa

SEQ ID NO: 144315 - RNA, 19 nt, Artificial Sequence
  Description of Artificial Sequence: Synthetic oligonucleotide
  Antisense strand to SEQ ID NO: 144314
uucaucacuguuugagcau

SEQ ID NO: 144316 - RNA, 19 nt, Artificial Sequence
  Description of Artificial Sequence: Synthetic oligonucleotide
  Sense strand starting at position 1388 of SEQ ID NO: 1851
agugaaaucucucugauac

SEQ ID NO: 144317 - RNA, 19 nt, Artificial Sequence
  Description of Artificial Sequence: Synthetic oligonucleotide
  Antisense strand to SEQ ID NO: 144316
guaucagagagauuucacu

SEQ ID NO: 144318 - RNA, 19 nt, Artificial Sequence
  Description of Artificial Sequence: Synthetic oligonucleotide
  Sense strand starting at position 1389 of SEQ ID NO: 1851
gugaaaucucucugauacc

SEQ ID NO: 144319 - RNA, 19 nt, Artificial Sequence
  Description of Artificial Sequence: Synthetic oligonucleotide
  Antisense strand to SEQ ID NO: 144318
gguaucagagagauuucac

SEQ ID NO: 144320 - RNA, 19 nt, Artificial Sequence
  Description of Artificial Sequence: Synthetic oligonucleotide
  Sense strand starting at position 1519 of SEQ ID NO: 1851
acuggcuuaguuggaguua

SEQ ID NO: 144321 - RNA, 19 nt, Artificial Sequence
  Description of Artificial Sequence: Synthetic oligonucleotide
  Antisense strand to SEQ ID NO: 144320
uaacuccaacuaagccagu

SEQ ID NO: 144322 - RNA, 19 nt, Artificial Sequence
  Description of Artificial Sequence: Synthetic oligonucleotide
  Sense strand starting at position 1572 of SEQ ID NO: 1851
acgugauggcuggagggaa

SEQ ID NO: 144323 - RNA, 19 nt, Artificial Sequence
  Description of Artificial Sequence: Synthetic oligonucleotide
  Antisense strand to SEQ ID NO: 144322
uucccuccagccaucacgu

SEQ ID NO: 144324 - RNA, 19 nt, Artificial Sequence
  Description of Artificial Sequence: Synthetic oligonucleotide
  Sense strand starting at position 1573 of SEQ ID NO: 1851
cgugauggcuggagggaaa

SEQ ID NO: 144325 - RNA, 19 nt, Artificial Sequence
  Description of Artificial Sequence: Synthetic oligonucleotide
  Antisense strand to SEQ ID NO: 144324
uuucccuccagccaucacg

SEQ ID NO: 144326 - RNA, 19 nt, Artificial Sequence
  Description of Artificial Sequence: Synthetic oligonucleotide
  Sense strand starting at position 1619 of SEQ ID NO: 1851
uggaauuacucuguccuca

SEQ ID NO: 144327 - RNA, 19 nt, Artificial Sequence
  Description of Artificial Sequence: Synthetic oligonucleotide
  Antisense strand to SEQ ID NO: 144326
ugaggacagaguaauucca

SEQ ID NO: 144328 - RNA, 19 nt, Artificial Sequence
  Description of Artificial Sequence: Synthetic oligonucleotide
  Sense strand starting at position 2149 of SEQ ID NO: 1851
augaaugaguccuccucuu

SEQ ID NO: 144329 - RNA, 19 nt, Artificial Sequence
  Description of Artificial Sequence: Synthetic oligonucleotide
  Antisense strand to SEQ ID NO: 144328
aagaggaggacucauucau

SEQ ID NO: 144330 - RNA, 19 nt, Artificial Sequence
  Description of Artificial Sequence: Synthetic oligonucleotide
  Sense strand starting at position 2207 of SEQ ID NO: 1851
cugcucuuucuccaggaca

SEQ ID NO: 144331 - RNA, 19 nt, Artificial Sequence
  Description of Artificial Sequence: Synthetic oligonucleotide
  Antisense strand to SEQ ID NO: 144330
uguccuggagaaagagcag

SEQ ID NO: 144332 - RNA, 19 nt, Artificial Sequence
  Description of Artificial Sequence: Synthetic oligonucleotide
  Sense strand starting at position 2312 of SEQ ID NO: 1851
ccggguggucucuaucacu

SEQ ID NO: 144333 - RNA, 19 nt, Artificial Sequence
  Description of Artificial Sequence: Synthetic oligonucleotide
  Antisense strand to SEQ ID NO: 144332
agugauagagaccacccgg

SEQ ID NO: 144334 - RNA, 19 nt, Artificial Sequence
  Description of Artificial Sequence: Synthetic oligonucleotide
  Sense strand starting at position 2392 of SEQ ID NO: 1851
ugacgauccucagcagaga

SEQ ID NO: 144335 - RNA, 19 nt, Artificial Sequence
  Description of Artificial Sequence: Synthetic oligonucleotide
  Antisense strand to SEQ ID NO: 144334
ucucugcugaggaucguca

SEQ ID NO: 144336 - RNA, 19 nt, Artificial Sequence
  Description of Artificial Sequence: Synthetic oligonucleotide
  Sense strand starting at position 2393 of SEQ ID NO: 1851
gacgauccucagcagagau

SEQ ID NO: 144337 - RNA, 19 nt, Artificial Sequence
  Description of Artificial Sequence: Synthetic oligonucleotide
  Antisense strand to SEQ ID NO: 144336
aucucugcugaggaucguc

SEQ ID NO: 144338 - RNA, 19 nt, Artificial Sequence
  Description of Artificial Sequence: Synthetic oligonucleotide
  Sense strand starting at position 2496 of SEQ ID NO: 1851
aauaacuggccuuguguga

SEQ ID NO: 144339 - RNA, 19 nt, Artificial Sequence
  Description of Artificial Sequence: Synthetic oligonucleotide
  Antisense strand to SEQ ID NO: 144338
ucacacaaggccaguuauu

SEQ ID NO: 144340 - RNA, 19 nt, Artificial Sequence
  Description of Artificial Sequence: Synthetic oligonucleotide
  Sense strand starting at position 2593 of SEQ ID NO: 1851
guagacgcugcucaagauu

SEQ ID NO: 144341 - RNA, 19 nt, Artificial Sequence
  Description of Artificial Sequence: Synthetic oligonucleotide
  Antisense strand to SEQ ID NO: 144340
aaucuugagcagcgucuac

SEQ ID NO: 144342 - RNA, 19 nt, Artificial Sequence
  Description of Artificial Sequence: Synthetic oligonucleotide
  Sense strand starting at position 3129 of SEQ ID NO: 1851
ucagaauugugagcaggga

SEQ ID NO: 144343 - RNA, 19 nt, Artificial Sequence
  Description of Artificial Sequence: Synthetic oligonucleotide
  Antisense strand to SEQ ID NO: 144342
ucccugcucacaauucuga

SEQ ID NO: 144344 - RNA, 19 nt, Artificial Sequence
  Description of Artificial Sequence: Synthetic oligonucleotide
  Sense strand starting at position 3192 of SEQ ID NO: 1851
gacuguguccuauagguuc

SEQ ID NO: 144345 - RNA, 19 nt, Artificial Sequence
  Description of Artificial Sequence: Synthetic oligonucleotide
  Antisense strand to SEQ ID NO: 144344
gaaccuauaggacacaguc

SEQ ID NO: 144346 - RNA, 19 nt, Artificial Sequence
  Description of Artificial Sequence: Synthetic oligonucleotide
  Sense strand starting at position 3619 of SEQ ID NO: 1851
ugggauuacaggugguaca

SEQ ID NO: 144347 - RNA, 19 nt, Artificial Sequence
  Description of Artificial Sequence: Synthetic oligonucleotide
  Antisense strand to SEQ ID NO: 144346
uguaccaccuguaauccca

SEQ ID NO: 144348 - RNA, 19 nt, Artificial Sequence
  Description of Artificial Sequence: Synthetic oligonucleotide
  Sense strand starting at position 3817 of SEQ ID NO: 1851
uggcaccugucucuacaaa

SEQ ID NO: 144349 - RNA, 19 nt, Artificial Sequence
  Description of Artificial Sequence: Synthetic oligonucleotide
  Antisense strand to SEQ ID NO: 144348
uuuguagagacaggugcca

SEQ ID NO: 144350 - RNA, 19 nt, Artificial Sequence
  Description of Artificial Sequence: Synthetic oligonucleotide
  Sense strand starting at position 3846 of SEQ ID NO: 1851
uuuaauuauccgggcaaug

SEQ ID NO: 144351 - RNA, 19 nt, Artificial Sequence
  Description of Artificial Sequence: Synthetic oligonucleotide
  Antisense strand to SEQ ID NO: 144350
cauugcccggauaauuaaa

SEQ ID NO: 144352 - RNA, 19 nt, Artificial Sequence
  Description of Artificial Sequence: Synthetic oligonucleotide
  Sense strand starting at position 3848 of SEQ ID NO: 1851
uaauuauccgggcaauggu

SEQ ID NO: 144353 - RNA, 19 nt, Artificial Sequence
  Description of Artificial Sequence: Synthetic oligonucleotide
  Antisense strand to SEQ ID NO: 144352
accauugcccggauaauua

SEQ ID NO: 144354 - RNA, 19 nt, Artificial Sequence
  Description of Artificial Sequence: Synthetic oligonucleotide
  Sense strand starting at position 3849 of SEQ ID NO: 1852
uagggcugcuucucaggaa

SEQ ID NO: 144355 - RNA, 19 nt, Artificial Sequence
  Description of Artificial Sequence: Synthetic oligonucleotide
  Antisense strand to SEQ ID NO: 144354
uuccugagaagcagcccua

SEQ ID NO: 144356 - RNA, 19 nt, Artificial Sequence
  Description of Artificial Sequence: Synthetic oligonucleotide
  Sense strand starting at position 3784 of SEQ ID NO: 1852
cugccacucccaugaguau

SEQ ID NO: 144357 - RNA, 19 nt, Artificial Sequence
  Description of Artificial Sequence: Synthetic oligonucleotide
  Antisense strand to SEQ ID NO: 144356
auacucaugggaguggcag

SEQ ID NO: 144358 - RNA, 19 nt, Artificial Sequence
  Description of Artificial Sequence: Synthetic oligonucleotide
  Sense strand starting at position 3704 of SEQ ID NO: 1852
gccugucugagggagucau

SEQ ID NO: 144359 - RNA, 19 nt, Artificial Sequence
  Description of Artificial Sequence: Synthetic oligonucleotide
  Antisense strand to SEQ ID NO: 144358
augacucccucagacaggc

SEQ ID NO: 144360 - RNA, 19 nt, Artificial Sequence
  Description of Artificial Sequence: Synthetic oligonucleotide
  Sense strand starting at position 3567 of SEQ ID NO: 1852
guucuaaauagguguggaa

SEQ ID NO: 144361 - RNA, 19 nt, Artificial Sequence
  Description of Artificial Sequence: Synthetic oligonucleotide
  Antisense strand to SEQ ID NO: 144360
uuccacaccuauuuagaac

SEQ ID NO: 144362 - RNA, 19 nt, Artificial Sequence
  Description of Artificial Sequence: Synthetic oligonucleotide
  Sense strand starting at position 3559 of SEQ ID NO: 1852
acugaaggguucuaaauag

SEQ ID NO: 144363 - RNA, 19 nt, Artificial Sequence
  Description of Artificial Sequence: Synthetic oligonucleotide
  Antisense strand to SEQ ID NO: 144362
cuauuuagaacccuucagu

SEQ ID NO: 144364 - RNA, 19 nt, Artificial Sequence
  Description of Artificial Sequence: Synthetic oligonucleotide
  Sense strand starting at position 3456 of SEQ ID NO: 1852
ccguguguucaggaacuca

SEQ ID NO: 144365 - RNA, 19 nt, Artificial Sequence
  Description of Artificial Sequence: Synthetic oligonucleotide
  Antisense strand to SEQ ID NO: 144364
ugaguuccugaacacacgg

SEQ ID NO: 144366 - RNA, 19 nt, Artificial Sequence
  Description of Artificial Sequence: Synthetic oligonucleotide
  Sense strand starting at position 3346 of SEQ ID NO: 1852
guaugaaggugaucuggaa

SEQ ID NO: 144367 - RNA, 19 nt, Artificial Sequence
  Description of Artificial Sequence: Synthetic oligonucleotide
  Antisense strand to SEQ ID NO: 144366
uuccagaucaccuucauac

SEQ ID NO: 144368 - RNA, 19 nt, Artificial Sequence
  Description of Artificial Sequence: Synthetic oligonucleotide
  Sense strand starting at position 3317 of SEQ ID NO: 1852
gagaauugcuuccugagaa

SEQ ID NO: 144369 - RNA, 19 nt, Artificial Sequence
  Description of Artificial Sequence: Synthetic oligonucleotide
  Antisense strand to SEQ ID NO: 144368
uucucaggaagcaauucuc

SEQ ID NO: 144370 - RNA, 19 nt, Artificial Sequence
  Description of Artificial Sequence: Synthetic oligonucleotide
  Sense strand starting at position 3205 of SEQ ID NO: 1852
uugauuaccagugggauaa

SEQ ID NO: 144371 - RNA, 19 nt, Artificial Sequence
  Description of Artificial Sequence: Synthetic oligonucleotide
  Antisense strand to SEQ ID NO: 144370
uuaucccacugguaaucaa

SEQ ID NO: 144372 - RNA, 19 nt, Artificial Sequence
  Description of Artificial Sequence: Synthetic oligonucleotide
  Sense strand starting at position 3204 of SEQ ID NO: 1852
uuugauuaccagugggaua

SEQ ID NO: 144373 - RNA, 19 nt, Artificial Sequence
  Description of Artificial Sequence: Synthetic oligonucleotide
  Antisense strand to SEQ ID NO: 144372
uaucccacugguaaucaaa

SEQ ID NO: 144374 - RNA, 19 nt, Artificial Sequence
  Description of Artificial Sequence: Synthetic oligonucleotide
  Sense strand starting at position 3109 of SEQ ID NO: 1852
gaacacuuacugugaggca

SEQ ID NO: 144375 - RNA, 19 nt, Artificial Sequence
  Description of Artificial Sequence: Synthetic oligonucleotide
  Antisense strand to SEQ ID NO: 144374
ugccucacaguaaguguuc

SEQ ID NO: 144376 - RNA, 19 nt, Artificial Sequence
  Description of Artificial Sequence: Synthetic oligonucleotide
  Sense strand starting at position 3026 of SEQ ID NO: 1852
aguccagaguuccucauua

SEQ ID NO: 144377 - RNA, 19 nt, Artificial Sequence
  Description of Artificial Sequence: Synthetic oligonucleotide
  Antisense strand to SEQ ID NO: 144376
uaaugaggaacucuggacu

SEQ ID NO: 144378 - RNA, 19 nt, Artificial Sequence
  Description of Artificial Sequence: Synthetic oligonucleotide
  Sense strand starting at position 2753 of SEQ ID NO: 1852
gauaaauagugcucuccag

SEQ ID NO: 144379 - RNA, 19 nt, Artificial Sequence
  Description of Artificial Sequence: Synthetic oligonucleotide
  Antisense strand to SEQ ID NO: 144378
cuggagagcacuauuuauc

SEQ ID NO: 144380 - RNA, 19 nt, Artificial Sequence
  Description of Artificial Sequence: Synthetic oligonucleotide
  Sense strand starting at position 2300 of SEQ ID NO: 1852
uuuagagugucucccaaag

SEQ ID NO: 144381 - RNA, 19 nt, Artificial Sequence
  Description of Artificial Sequence: Synthetic oligonucleotide
  Antisense strand to SEQ ID NO: 144380
cuuugggagacacucuaaa

SEQ ID NO: 144382 - RNA, 19 nt, Artificial Sequence
  Description of Artificial Sequence: Synthetic oligonucleotide
  Sense strand starting at position 2298 of SEQ ID NO: 1852
acuuuagagugucucccaa

SEQ ID NO: 144383 - RNA, 19 nt, Artificial Sequence
  Description of Artificial Sequence: Synthetic oligonucleotide
  Antisense strand to SEQ ID NO: 144382
uugggagacacucuaaagu

SEQ ID NO: 144384 - RNA, 19 nt, Artificial Sequence
  Description of Artificial Sequence: Synthetic oligonucleotide
  Sense strand starting at position 2288 of SEQ ID NO: 1852
acaugauguuacuuuagag

SEQ ID NO: 144385 - RNA, 19 nt, Artificial Sequence
  Description of Artificial Sequence: Synthetic oligonucleotide
  Antisense strand to SEQ ID NO: 144384
cucuaaaguaacaucaugu

SEQ ID NO: 144386 - RNA, 19 nt, Artificial Sequence
  Description of Artificial Sequence: Synthetic oligonucleotide
  Sense strand starting at position 1692 of SEQ ID NO: 1852
accggagggucuuugcaaa

SEQ ID NO: 144387 - RNA, 19 nt, Artificial Sequence
  Description of Artificial Sequence: Synthetic oligonucleotide
  Antisense strand to SEQ ID NO: 144386
uuugcaaagacccuccggu

SEQ ID NO: 144388 - RNA, 19 nt, Artificial Sequence
  Description of Artificial Sequence: Synthetic oligonucleotide
  Sense strand starting at position 1568 of SEQ ID NO: 1852
cacgguacccuggaucaua

SEQ ID NO: 144389 - RNA, 19 nt, Artificial Sequence
  Description of Artificial Sequence: Synthetic oligonucleotide
  Antisense strand to SEQ ID NO: 144388
uaugauccaggguaccgug

SEQ ID NO: 144390 - RNA, 19 nt, Artificial Sequence
  Description of Artificial Sequence: Synthetic oligonucleotide
  Sense strand starting at position 1533 of SEQ ID NO: 1852
cucauagacuaagugagau

SEQ ID NO: 144391 - RNA, 19 nt, Artificial Sequence
  Description of Artificial Sequence: Synthetic oligonucleotide
  Antisense strand to SEQ ID NO: 144390
aucucacuuagucuaugag

SEQ ID NO: 144392 - RNA, 19 nt, Artificial Sequence
  Description of Artificial Sequence: Synthetic oligonucleotide
  Sense strand starting at position 1465 of SEQ ID NO: 1852
cugacuugugacuguguga

SEQ ID NO: 144393 - RNA, 19 nt, Artificial Sequence
  Description of Artificial Sequence: Synthetic oligonucleotide
  Antisense strand to SEQ ID NO: 144392
ucacacagucacaagucag

SEQ ID NO: 144394 - RNA, 19 nt, Artificial Sequence
  Description of Artificial Sequence: Synthetic oligonucleotide
  Sense strand starting at position 1316 of SEQ ID NO: 1852
gcaggauucucuuucccau

SEQ ID NO: 144395 - RNA, 19 nt, Artificial Sequence
  Description of Artificial Sequence: Synthetic oligonucleotide
  Antisense strand to SEQ ID NO: 144394
augggaaagagaauccugc

SEQ ID NO: 144396 - RNA, 19 nt, Artificial Sequence
  Description of Artificial Sequence: Synthetic oligonucleotide
  Sense strand starting at position 1242 of SEQ ID NO: 1852
acacgugugggcgauucau

SEQ ID NO: 144397 - RNA, 19 nt, Artificial Sequence
  Description of Artificial Sequence: Synthetic oligonucleotide
  Antisense strand to SEQ ID NO: 144396
augaaucgcccacacgugu

SEQ ID NO: 144398 - RNA, 19 nt, Artificial Sequence
  Description of Artificial Sequence: Synthetic oligonucleotide
  Sense strand starting at position 1208 of SEQ ID NO: 1852
agaaaugccugaucccaac

SEQ ID NO: 144399 - RNA, 19 nt, Artificial Sequence
  Description of Artificial Sequence: Synthetic oligonucleotide
  Antisense strand to SEQ ID NO: 144398
guugggaucaggcauuucu

SEQ ID NO: 144400 - RNA, 19 nt, Artificial Sequence
  Description of Artificial Sequence: Synthetic oligonucleotide
  Sense strand starting at position 1167 of SEQ ID NO: 1852
ucucuuugucucugaaagg

SEQ ID NO: 144401 - RNA, 19 nt, Artificial Sequence
  Description of Artificial Sequence: Synthetic oligonucleotide
  Antisense strand to SEQ ID NO: 144400
ccuuucagagacaaagaga

SEQ ID NO: 144402 - RNA, 19 nt, Artificial Sequence
  Description of Artificial Sequence: Synthetic oligonucleotide
  Sense strand starting at position 1166 of SEQ ID NO: 1852
uucucuuugucucugaaag

SEQ ID NO: 144403 - RNA, 19 nt, Artificial Sequence
  Description of Artificial Sequence: Synthetic oligonucleotide
  Antisense strand to SEQ ID NO: 144402
cuuucagagacaaagagaa

SEQ ID NO: 144404 - RNA, 19 nt, Artificial Sequence
  Description of Artificial Sequence: Synthetic oligonucleotide
  Sense strand starting at position 525 of SEQ ID NO: 1852
gguagauggugcuucauuu

SEQ ID NO: 144405 - RNA, 19 nt, Artificial Sequence
  Description of Artificial Sequence: Synthetic oligonucleotide
  Antisense strand to SEQ ID NO: 144404
aaaugaagcaccaucuacc

SEQ ID NO: 144406 - RNA, 19 nt, Artificial Sequence
  Description of Artificial Sequence: Synthetic oligonucleotide
  Sense strand starting at position 513 of SEQ ID NO: 1852
cugugauuagcagguagau

SEQ ID NO: 144407 - RNA, 19 nt, Artificial Sequence
  Description of Artificial Sequence: Synthetic oligonucleotide
  Antisense strand to SEQ ID NO: 144406
aucuaccugcuaaucacag

SEQ ID NO: 144408 - RNA, 19 nt, Artificial Sequence
  Description of Artificial Sequence: Synthetic oligonucleotide
  Sense strand starting at position 447 of SEQ ID NO: 1852
cuucuccuucugugaaaug

SEQ ID NO: 144409 - RNA, 19 nt, Artificial Sequence
  Description of Artificial Sequence: Synthetic oligonucleotide
  Antisense strand to SEQ ID NO: 144408
cauuucacagaaggagaag

SEQ ID NO: 144410 - RNA, 19 nt, Artificial Sequence
  Description of Artificial Sequence: Synthetic oligonucleotide
  Sense strand starting at position 446 of SEQ ID NO: 1852
gcuucuccuucugugaaau

SEQ ID NO: 144411 - RNA, 19 nt, Artificial Sequence
  Description of Artificial Sequence: Synthetic oligonucleotide
  Antisense strand to SEQ ID NO: 144410
auuucacagaaggagaagc

SEQ ID NO: 144412 - RNA, 19 nt, Artificial Sequence
  Description of Artificial Sequence: Synthetic oligonucleotide
  Sense strand starting at position 406 of SEQ ID NO: 1852
augggugaucgugaacaac

SEQ ID NO: 144413 - RNA, 19 nt, Artificial Sequence
  Description of Artificial Sequence: Synthetic oligonucleotide
  Antisense strand to SEQ ID NO: 144412
guuguucacgaucacccau

SEQ ID NO: 144414 - RNA, 19 nt, Artificial Sequence
  Description of Artificial Sequence: Synthetic oligonucleotide
  Sense strand starting at position 402 of SEQ ID NO: 1852
caugaugggugaucgugaa

SEQ ID NO: 144415 - RNA, 19 nt, Artificial Sequence
  Description of Artificial Sequence: Synthetic oligonucleotide
  Antisense strand to SEQ ID NO: 144414
uucacgaucacccaucaug

SEQ ID NO: 144416 - RNA, 19 nt, Artificial Sequence
  Description of Artificial Sequence: Synthetic oligonucleotide
  Sense strand starting at position 361 of SEQ ID NO: 1852
aguuuaggaugccugaguu

SEQ ID NO: 144417 - RNA, 19 nt, Artificial Sequence
  Description of Artificial Sequence: Synthetic oligonucleotide
  Antisense strand to SEQ ID NO: 144416
aacucaggcauccuaaacu

SEQ ID NO: 144418 - RNA, 19 nt, Artificial Sequence
  Description of Artificial Sequence: Synthetic oligonucleotide
  Sense strand starting at position 320 of SEQ ID NO: 1852
uauugaaacuugucagcag

SEQ ID NO: 144419 - RNA, 19 nt, Artificial Sequence
  Description of Artificial Sequence: Synthetic oligonucleotide
  Antisense strand to SEQ ID NO: 144418
cugcugacaaguuucaaua

SEQ ID NO: 144420 - RNA, 19 nt, Artificial Sequence
  Description of Artificial Sequence: Synthetic oligonucleotide
  Sense strand starting at position 305 of SEQ ID NO: 1852
gguuaacucugucuuuauu

SEQ ID NO: 144421 - RNA, 19 nt, Artificial Sequence
  Description of Artificial Sequence: Synthetic oligonucleotide
  Antisense strand to SEQ ID NO: 144420
aauaaagacagaguuaacc

SEQ ID NO: 144422 - RNA, 19 nt, Artificial Sequence
  Description of Artificial Sequence: Synthetic oligonucleotide
  Sense strand starting at position 303 of SEQ ID NO: 1852
gagguuaacucugucuuua

SEQ ID NO: 144423 - RNA, 19 nt, Artificial Sequence
  Description of Artificial Sequence: Synthetic oligonucleotide
  Antisense strand to SEQ ID NO: 144422
uaaagacagaguuaaccuc

SEQ ID NO: 144424 - RNA, 19 nt, Artificial Sequence
  Description of Artificial Sequence: Synthetic oligonucleotide
  Sense strand starting at position 302 of SEQ ID NO: 1852
ggagguuaacucugucuuu

SEQ ID NO: 144425 - RNA, 19 nt, Artificial Sequence
  Description of Artificial Sequence: Synthetic oligonucleotide
  Antisense strand to SEQ ID NO: 144424
aaagacagaguuaaccucc

SEQ ID NO: 144426 - RNA, 19 nt, Artificial Sequence
  Description of Artificial Sequence: Synthetic oligonucleotide
  Sense strand starting at position 184 of SEQ ID NO: 1852
gauaaauucugggagaucu

SEQ ID NO: 144427 - RNA, 19 nt, Artificial Sequence
  Description of Artificial Sequence: Synthetic oligonucleotide
  Antisense strand to SEQ ID NO: 144426
agaucucccagaauuuauc

SEQ ID NO: 144428 - RNA, 19 nt, Artificial Sequence
  Description of Artificial Sequence: Synthetic oligonucleotide
  Sense strand starting at position 89 of SEQ ID NO: 1852
guuugaauguaucuccuuu

SEQ ID NO: 144429 - RNA, 19 nt, Artificial Sequence
  Description of Artificial Sequence: Synthetic oligonucleotide
  Antisense strand to SEQ ID NO: 144428
aaaggagauacauucaaac

SEQ ID NO: 144430 - RNA, 19 nt, Artificial Sequence
  Description of Artificial Sequence: Synthetic oligonucleotide
  Sense strand starting at position 76 of SEQ ID NO: 1852
cacucuaggccuuguuuga

SEQ ID NO: 144431 - RNA, 19 nt, Artificial Sequence
  Description of Artificial Sequence: Synthetic oligonucleotide
  Antisense strand to SEQ ID NO: 144430
ucaaacaaggccuagagug

SEQ ID NO: 144432 - RNA, 19 nt, Artificial Sequence
  Description of Artificial Sequence: Synthetic oligonucleotide
  Sense strand starting at position 38 of SEQ ID NO: 1852
gguaaugagagcuggaaau

SEQ ID NO: 144433 - RNA, 19 nt, Artificial Sequence
  Description of Artificial Sequence: Synthetic oligonucleotide
  Antisense strand to SEQ ID NO: 144432
auuuccagcucucauuacc

SEQ ID NO: 144434 - RNA, 19 nt, Artificial Sequence
  Description of Artificial Sequence: Synthetic oligonucleotide
  Sense strand starting at position 123 of SEQ ID NO: 1853
ggccaugaugcauaauggu

SEQ ID NO: 144435 - RNA, 19 nt, Artificial Sequence
  Description of Artificial Sequence: Synthetic oligonucleotide
  Antisense strand to SEQ ID NO: 144434
accauuaugcaucauggcc

SEQ ID NO: 144436 - RNA, 19 nt, Artificial Sequence
  Description of Artificial Sequence: Synthetic oligonucleotide
  Sense strand starting at position 175 of SEQ ID NO: 1853
auuuaaauacgcugugcua

SEQ ID NO: 144437 - RNA, 19 nt, Artificial Sequence
  Description of Artificial Sequence: Synthetic oligonucleotide
  Antisense strand to SEQ ID NO: 144436
uagcacagcguauuuaaau

SEQ ID NO: 144438 - RNA, 19 nt, Artificial Sequence
  Description of Artificial Sequence: Synthetic oligonucleotide
  Sense strand starting at position 289 of SEQ ID NO: 1853
gguuauugugaggguucaa

SEQ ID NO: 144439 - RNA, 19 nt, Artificial Sequence
  Description of Artificial Sequence: Synthetic oligonucleotide
  Antisense strand to SEQ ID NO: 144438
uugaacccucacaauaacc

SEQ ID NO: 144440 - RNA, 19 nt, Artificial Sequence
  Description of Artificial Sequence: Synthetic oligonucleotide
  Sense strand starting at position 305 of SEQ ID NO: 1853
caauguaaagcauguagaa

SEQ ID NO: 144441 - RNA, 19 nt, Artificial Sequence
  Description of Artificial Sequence: Synthetic oligonucleotide
  Antisense strand to SEQ ID NO: 144440
uucuacaugcuuuacauug

SEQ ID NO: 144442 - RNA, 19 nt, Artificial Sequence
  Description of Artificial Sequence: Synthetic oligonucleotide
  Sense strand starting at position 359 of SEQ ID NO: 1853
aguucuaaucaucaugugu

SEQ ID NO: 144443 - RNA, 19 nt, Artificial Sequence
  Description of Artificial Sequence: Synthetic oligonucleotide
  Antisense strand to SEQ ID NO: 144442
acacaugaugauuagaacu

SEQ ID NO: 144444 - RNA, 19 nt, Artificial Sequence
  Description of Artificial Sequence: Synthetic oligonucleotide
  Sense strand starting at position 383 of SEQ ID NO: 1853
ucccacauuggaugucaua

SEQ ID NO: 144445 - RNA, 19 nt, Artificial Sequence
  Description of Artificial Sequence: Synthetic oligonucleotide
  Antisense strand to SEQ ID NO: 144444
uaugacauccaauguggga

SEQ ID NO: 144446 - RNA, 19 nt, Artificial Sequence
  Description of Artificial Sequence: Synthetic oligonucleotide
  Sense strand starting at position 390 of SEQ ID NO: 1853
uuggaugucauacaugguu

SEQ ID NO: 144447 - RNA, 19 nt, Artificial Sequence
  Description of Artificial Sequence: Synthetic oligonucleotide
  Antisense strand to SEQ ID NO: 144446
aaccauguaugacauccaa

SEQ ID NO: 144448 - RNA, 19 nt, Artificial Sequence
  Description of Artificial Sequence: Synthetic oligonucleotide
  Sense strand starting at position 392 of SEQ ID NO: 1853
ggaugucauacaugguuga

SEQ ID NO: 144449 - RNA, 19 nt, Artificial Sequence
  Description of Artificial Sequence: Synthetic oligonucleotide
  Antisense strand to SEQ ID NO: 144448
ucaaccauguaugacaucc

SEQ ID NO: 144450 - RNA, 19 nt, Artificial Sequence
  Description of Artificial Sequence: Synthetic oligonucleotide
  Sense strand starting at position 393 of SEQ ID NO: 1853
gaugucauacaugguugaa

SEQ ID NO: 144451 - RNA, 19 nt, Artificial Sequence
  Description of Artificial Sequence: Synthetic oligonucleotide
  Antisense strand to SEQ ID NO: 144450
uucaaccauguaugacauc

SEQ ID NO: 144452 - RNA, 19 nt, Artificial Sequence
  Description of Artificial Sequence: Synthetic oligonucleotide
  Sense strand starting at position 395 of SEQ ID NO: 1853
ugucauacaugguugaaug

SEQ ID NO: 144453 - RNA, 19 nt, Artificial Sequence
  Description of Artificial Sequence: Synthetic oligonucleotide
  Antisense strand to SEQ ID NO: 144452
cauucaaccauguaugaca

SEQ ID NO: 144454 - RNA, 19 nt, Artificial Sequence
  Description of Artificial Sequence: Synthetic oligonucleotide
  Sense strand starting at position 396 of SEQ ID NO: 1853
gucauacaugguugaauga

SEQ ID NO: 144455 - RNA, 19 nt, Artificial Sequence
  Description of Artificial Sequence: Synthetic oligonucleotide
  Antisense strand to SEQ ID NO: 144454
ucauucaaccauguaugac

SEQ ID NO: 144456 - RNA, 19 nt, Artificial Sequence
  Description of Artificial Sequence: Synthetic oligonucleotide
  Sense strand starting at position 425 of SEQ ID NO: 1853
uugaauuguauuggauuga

SEQ ID NO: 144457 - RNA, 19 nt, Artificial Sequence
  Description of Artificial Sequence: Synthetic oligonucleotide
  Antisense strand to SEQ ID NO: 144456
ucaauccaauacaauucaa

SEQ ID NO: 144458 - RNA, 19 nt, Artificial Sequence
  Description of Artificial Sequence: Synthetic oligonucleotide
  Sense strand starting at position 429 of SEQ ID NO: 1853
auuguauuggauugaaaug

SEQ ID NO: 144459 - RNA, 19 nt, Artificial Sequence
  Description of Artificial Sequence: Synthetic oligonucleotide
  Antisense strand to SEQ ID NO: 144458
cauuucaauccaauacaau

SEQ ID NO: 144460 - RNA, 19 nt, Artificial Sequence
  Description of Artificial Sequence: Synthetic oligonucleotide
  Sense strand starting at position 697 of SEQ ID NO: 1853
ggcccuguccauuaucaac

SEQ ID NO: 144461 - RNA, 19 nt, Artificial Sequence
  Description of Artificial Sequence: Synthetic oligonucleotide
  Antisense strand to SEQ ID NO: 144460
guugauaauggacagggcc

SEQ ID NO: 144462 - RNA, 19 nt, Artificial Sequence
  Description of Artificial Sequence: Synthetic oligonucleotide
  Sense strand starting at position 813 of SEQ ID NO: 1853
caucacagucugggaauau

SEQ ID NO: 144463 - RNA, 19 nt, Artificial Sequence
  Description of Artificial Sequence: Synthetic oligonucleotide
  Antisense strand to SEQ ID NO: 144462
auauucccagacugugaug

SEQ ID NO: 144464 - RNA, 19 nt, Artificial Sequence
  Description of Artificial Sequence: Synthetic oligonucleotide
  Sense strand starting at position 1371 of SEQ ID NO: 1853
acaugaaauugcuugcaua

SEQ ID NO: 144465 - RNA, 19 nt, Artificial Sequence
  Description of Artificial Sequence: Synthetic oligonucleotide
  Antisense strand to SEQ ID NO: 144464
uaugcaagcaauuucaugu

SEQ ID NO: 144466 - RNA, 19 nt, Artificial Sequence
  Description of Artificial Sequence: Synthetic oligonucleotide
  Sense strand starting at position 1600 of SEQ ID NO: 1853
gcuuacauuguugacugaa

SEQ ID NO: 144467 - RNA, 19 nt, Artificial Sequence
  Description of Artificial Sequence: Synthetic oligonucleotide
  Antisense strand to SEQ ID NO: 144466
uucagucaacaauguaagc

SEQ ID NO: 144468 - RNA, 19 nt, Artificial Sequence
  Description of Artificial Sequence: Synthetic oligonucleotide
  Sense strand starting at position 1602 of SEQ ID NO: 1853
uuacauuguugacugaauu

SEQ ID NO: 144469 - RNA, 19 nt, Artificial Sequence
  Description of Artificial Sequence: Synthetic oligonucleotide
  Antisense strand to SEQ ID NO: 144468
aauucagucaacaauguaa

SEQ ID NO: 144470 - RNA, 19 nt, Artificial Sequence
  Description of Artificial Sequence: Synthetic oligonucleotide
  Sense strand starting at position 1613 of SEQ ID NO: 1853
acugaauuucggugcaauc

SEQ ID NO: 144471 - RNA, 19 nt, Artificial Sequence
  Description of Artificial Sequence: Synthetic oligonucleotide
  Antisense strand to SEQ ID NO: 144470
gauugcaccgaaauucagu

SEQ ID NO: 144472 - RNA, 19 nt, Artificial Sequence
  Description of Artificial Sequence: Synthetic oligonucleotide
  Sense strand starting at position 1624 of SEQ ID NO: 1853
gugcaaucuacggaagaag

SEQ ID NO: 144473 - RNA, 19 nt, Artificial Sequence
  Description of Artificial Sequence: Synthetic oligonucleotide
  Antisense strand to SEQ ID NO: 144472
cuucuuccguagauugcac

SEQ ID NO: 144474 - RNA, 19 nt, Artificial Sequence
  Description of Artificial Sequence: Synthetic oligonucleotide
  Sense strand starting at position 2013 of SEQ ID NO: 1853
cgccaaaggccuuaucuca

SEQ ID NO: 144475 - RNA, 19 nt, Artificial Sequence
  Description of Artificial Sequence: Synthetic oligonucleotide
  Antisense strand to SEQ ID NO: 144474
ugagauaaggccuuuggcg

SEQ ID NO: 144476 - RNA, 19 nt, Artificial Sequence
  Description of Artificial Sequence: Synthetic oligonucleotide
  Sense strand starting at position 2063 of SEQ ID NO: 1853
uggaguuaacacggaagca

SEQ ID NO: 144477 - RNA, 19 nt, Artificial Sequence
  Description of Artificial Sequence: Synthetic oligonucleotide
  Antisense strand to SEQ ID NO: 144476
ugcuuccguguuaacucca

SEQ ID NO: 144478 - RNA, 19 nt, Artificial Sequence
  Description of Artificial Sequence: Synthetic oligonucleotide
  Sense strand starting at position 2143 of SEQ ID NO: 1853
aguugcuguguuccuguua

SEQ ID NO: 144479 - RNA, 19 nt, Artificial Sequence
  Description of Artificial Sequence: Synthetic oligonucleotide
  Antisense strand to SEQ ID NO: 144478
uaacaggaacacagcaacu

SEQ ID NO: 144480 - RNA, 19 nt, Artificial Sequence
  Description of Artificial Sequence: Synthetic oligonucleotide
  Sense strand starting at position 2252 of SEQ ID NO: 1853
ucagcauauccuuguaaga

SEQ ID NO: 144481 - RNA, 19 nt, Artificial Sequence
  Description of Artificial Sequence: Synthetic oligonucleotide
  Antisense strand to SEQ ID NO: 144480
ucuuacaaggauaugcuga

SEQ ID NO: 144482 - RNA, 19 nt, Artificial Sequence
  Description of Artificial Sequence: Synthetic oligonucleotide
  Sense strand starting at position 2281 of SEQ ID NO: 1853
acggaucaauacuccuauu

SEQ ID NO: 144483 - RNA, 19 nt, Artificial Sequence
  Description of Artificial Sequence: Synthetic oligonucleotide
  Antisense strand to SEQ ID NO: 144482
aauaggaguauugauccgu

SEQ ID NO: 144484 - RNA, 19 nt, Artificial Sequence
  Description of Artificial Sequence: Synthetic oligonucleotide
  Sense strand starting at position 2464 of SEQ ID NO: 1853
agaauugacuccucauagu

SEQ ID NO: 144485 - RNA, 19 nt, Artificial Sequence
  Description of Artificial Sequence: Synthetic oligonucleotide
  Antisense strand to SEQ ID NO: 144484
acuaugaggagucaauucu

SEQ ID NO: 144486 - RNA, 19 nt, Artificial Sequence
  Description of Artificial Sequence: Synthetic oligonucleotide
  Sense strand starting at position 2575 of SEQ ID NO: 1853
uggguuuggcucuaguaaa

SEQ ID NO: 144487 - RNA, 19 nt, Artificial Sequence
  Description of Artificial Sequence: Synthetic oligonucleotide
  Antisense strand to SEQ ID NO: 144486
uuuacuagagccaaaccca

SEQ ID NO: 144488 - RNA, 19 nt, Artificial Sequence
  Description of Artificial Sequence: Synthetic oligonucleotide
  Sense strand starting at position 2841 of SEQ ID NO: 1853
gaaggucugguacauggua

SEQ ID NO: 144489 - RNA, 19 nt, Artificial Sequence
  Description of Artificial Sequence: Synthetic oligonucleotide
  Antisense strand to SEQ ID NO: 144488
uaccauguaccagaccuuc

SEQ ID NO: 144490 - RNA, 19 nt, Artificial Sequence
  Description of Artificial Sequence: Synthetic oligonucleotide
  Sense strand starting at position 2849 of SEQ ID NO: 1853
gguacaugguaagugucaa

SEQ ID NO: 144491 - RNA, 19 nt, Artificial Sequence
  Description of Artificial Sequence: Synthetic oligonucleotide
  Antisense strand to SEQ ID NO: 144490
uugacacuuaccauguacc

SEQ ID NO: 144492 - RNA, 19 nt, Artificial Sequence
  Description of Artificial Sequence: Synthetic oligonucleotide
  Sense strand starting at position 3059 of SEQ ID NO: 1853
guggauacuuuauugacca

SEQ ID NO: 144493 - RNA, 19 nt, Artificial Sequence
  Description of Artificial Sequence: Synthetic oligonucleotide
  Antisense strand to SEQ ID NO: 144492
uggucaauaaaguauccac

SEQ ID NO: 144494 - RNA, 19 nt, Artificial Sequence
  Description of Artificial Sequence: Synthetic oligonucleotide
  Sense strand starting at position 3067 of SEQ ID NO: 1853
uuuauugaccauuacaguu

SEQ ID NO: 144495 - RNA, 19 nt, Artificial Sequence
  Description of Artificial Sequence: Synthetic oligonucleotide
  Antisense strand to SEQ ID NO: 144494
aacuguaauggucaauaaa

SEQ ID NO: 144496 - RNA, 19 nt, Artificial Sequence
  Description of Artificial Sequence: Synthetic oligonucleotide
  Sense strand starting at position 3077 of SEQ ID NO: 1853
auuacaguuguccacugaa

SEQ ID NO: 144497 - RNA, 19 nt, Artificial Sequence
  Description of Artificial Sequence: Synthetic oligonucleotide
  Antisense strand to SEQ ID NO: 144496
uucaguggacaacuguaau

SEQ ID NO: 144498 - RNA, 19 nt, Artificial Sequence
  Description of Artificial Sequence: Synthetic oligonucleotide
  Sense strand starting at position 3080 of SEQ ID NO: 1853
acaguuguccacugaaaua

SEQ ID NO: 144499 - RNA, 19 nt, Artificial Sequence
  Description of Artificial Sequence: Synthetic oligonucleotide
  Antisense strand to SEQ ID NO: 144498
uauuucaguggacaacugu

SEQ ID NO: 144500 - RNA, 19 nt, Artificial Sequence
  Description of Artificial Sequence: Synthetic oligonucleotide
  Sense strand starting at position 3284 of SEQ ID NO: 1853
ugcucagugcagcuuuauu

SEQ ID NO: 144501 - RNA, 19 nt, Artificial Sequence
  Description of Artificial Sequence: Synthetic oligonucleotide
  Antisense strand to SEQ ID NO: 144500
aauaaagcugcacugagca

SEQ ID NO: 144502 - RNA, 19 nt, Artificial Sequence
  Description of Artificial Sequence: Synthetic oligonucleotide
  Sense strand starting at position 3386 of SEQ ID NO: 1853
ccaauaugaugguucugaa

SEQ ID NO: 144503 - RNA, 19 nt, Artificial Sequence
  Description of Artificial Sequence: Synthetic oligonucleotide
  Antisense strand to SEQ ID NO: 144502
uucagaaccaucauauugg

SEQ ID NO: 144504 - RNA, 19 nt, Artificial Sequence
  Description of Artificial Sequence: Synthetic oligonucleotide
  Sense strand starting at position 3454 of SEQ ID NO: 1853
aggauagacuguuuaguga

SEQ ID NO: 144505 - RNA, 19 nt, Artificial Sequence
  Description of Artificial Sequence: Synthetic oligonucleotide
  Antisense strand to SEQ ID NO: 144504
ucacuaaacagucuauccu

SEQ ID NO: 144506 - RNA, 19 nt, Artificial Sequence
  Description of Artificial Sequence: Synthetic oligonucleotide
  Sense strand starting at position 3603 of SEQ ID NO: 1853
agcuaacuguuacuaagua

SEQ ID NO: 144507 - RNA, 19 nt, Artificial Sequence
  Description of Artificial Sequence: Synthetic oligonucleotide
  Antisense strand to SEQ ID NO: 144506
uacuuaguaacaguuagcu

SEQ ID NO: 144508 - RNA, 19 nt, Artificial Sequence
  Description of Artificial Sequence: Synthetic oligonucleotide
  Sense strand starting at position 3809 of SEQ ID NO: 1853
cuggguguuugaccacuua

SEQ ID NO: 144509 - RNA, 19 nt, Artificial Sequence
  Description of Artificial Sequence: Synthetic oligonucleotide
  Antisense strand to SEQ ID NO: 144508
uaaguggucaaacacccag

SEQ ID NO: 144510 - RNA, 19 nt, Artificial Sequence
  Description of Artificial Sequence: Synthetic oligonucleotide
  Sense strand starting at position 3823 of SEQ ID NO: 1853
acuuaacuguagccuagau

SEQ ID NO: 144511 - RNA, 19 nt, Artificial Sequence
  Description of Artificial Sequence: Synthetic oligonucleotide
  Antisense strand to SEQ ID NO: 144510
aucuaggcuacaguuaagu

SEQ ID NO: 144512 - RNA, 19 nt, Artificial Sequence
  Description of Artificial Sequence: Synthetic oligonucleotide
  Sense strand starting at position 3825 of SEQ ID NO: 1853
uuaacuguagccuagauca

SEQ ID NO: 144513 - RNA, 19 nt, Artificial Sequence
  Description of Artificial Sequence: Synthetic oligonucleotide
  Antisense strand to SEQ ID NO: 144512
ugaucuaggcuacaguuaa

SEQ ID NO: 144514 - RNA, 19 nt, Artificial Sequence
  Description of Artificial Sequence: Synthetic oligonucleotide
  Sense strand starting at position 3838 of SEQ ID NO: 1854
uuaacuguagccuagauca

SEQ ID NO: 144515 - RNA, 19 nt, Artificial Sequence
  Description of Artificial Sequence: Synthetic oligonucleotide
  Antisense strand to SEQ ID NO: 144514
ugaucuaggcuacaguuaa

SEQ ID NO: 144516 - RNA, 19 nt, Artificial Sequence
  Description of Artificial Sequence: Synthetic oligonucleotide
  Sense strand starting at position 3836 of SEQ ID NO: 1854
acuuaacuguagccuagau

SEQ ID NO: 144517 - RNA, 19 nt, Artificial Sequence
  Description of Artificial Sequence: Synthetic oligonucleotide
  Antisense strand to SEQ ID NO: 144516
aucuaggcuacaguuaagu

SEQ ID NO: 144518 - RNA, 19 nt, Artificial Sequence
  Description of Artificial Sequence: Synthetic oligonucleotide
  Sense strand starting at position 3822 of SEQ ID NO: 1854
cuggguguuugaccacuua

SEQ ID NO: 144519 - RNA, 19 nt, Artificial Sequence
  Description of Artificial Sequence: Synthetic oligonucleotide
  Antisense strand to SEQ ID NO: 144518
uaaguggucaaacacccag

SEQ ID NO: 144520 - RNA, 19 nt, Artificial Sequence
  Description of Artificial Sequence: Synthetic oligonucleotide
  Sense strand starting at position 3695 of SEQ ID NO: 1854
ggguacuauuaggauuuau

SEQ ID NO: 144521 - RNA, 19 nt, Artificial Sequence
  Description of Artificial Sequence: Synthetic oligonucleotide
  Antisense strand to SEQ ID NO: 144520
auaaauccuaauaguaccc

SEQ ID NO: 144522 - RNA, 19 nt, Artificial Sequence
  Description of Artificial Sequence: Synthetic oligonucleotide
  Sense strand starting at position 3617 of SEQ ID NO: 1854
agcuaacuguuauuaagua

SEQ ID NO: 144523 - RNA, 19 nt, Artificial Sequence
  Description of Artificial Sequence: Synthetic oligonucleotide
  Antisense strand to SEQ ID NO: 144522
uacuuaauaacaguuagcu

SEQ ID NO: 144524 - RNA, 19 nt, Artificial Sequence
  Description of Artificial Sequence: Synthetic oligonucleotide
  Sense strand starting at position 3468 of SEQ ID NO: 1854
aggauagacuguuuaguga

SEQ ID NO: 144525 - RNA, 19 nt, Artificial Sequence
  Description of Artificial Sequence: Synthetic oligonucleotide
  Antisense strand to SEQ ID NO: 144524
ucacuaaacagucuauccu

SEQ ID NO: 144526 - RNA, 19 nt, Artificial Sequence
  Description of Artificial Sequence: Synthetic oligonucleotide
  Sense strand starting at position 3400 of SEQ ID NO: 1854
ccaauaugaugguucugaa

SEQ ID NO: 144527 - RNA, 19 nt, Artificial Sequence
  Description of Artificial Sequence: Synthetic oligonucleotide
  Antisense strand to SEQ ID NO: 144526
uucagaaccaucauauugg

SEQ ID NO: 144528 - RNA, 19 nt, Artificial Sequence
  Description of Artificial Sequence: Synthetic oligonucleotide
  Sense strand starting at position 3298 of SEQ ID NO: 1854
ugcucagugcagcuuuauu

SEQ ID NO: 144529 - RNA, 19 nt, Artificial Sequence
  Description of Artificial Sequence: Synthetic oligonucleotide
  Antisense strand to SEQ ID NO: 144528
aauaaagcugcacugagca

SEQ ID NO: 144530 - RNA, 19 nt, Artificial Sequence
  Description of Artificial Sequence: Synthetic oligonucleotide
  Sense strand starting at position 3094 of SEQ ID NO: 1854
acaguuguccacugaaaua

SEQ ID NO: 144531 - RNA, 19 nt, Artificial Sequence
  Description of Artificial Sequence: Synthetic oligonucleotide
  Antisense strand to SEQ ID NO: 144530
uauuucaguggacaacugu

SEQ ID NO: 144532 - RNA, 19 nt, Artificial Sequence
  Description of Artificial Sequence: Synthetic oligonucleotide
  Sense strand starting at position 3091 of SEQ ID NO: 1854
auuacaguuguccacugaa

SEQ ID NO: 144533 - RNA, 19 nt, Artificial Sequence
  Description of Artificial Sequence: Synthetic oligonucleotide
  Antisense strand to SEQ ID NO: 144532
uucaguggacaacuguaau

SEQ ID NO: 144534 - RNA, 19 nt, Artificial Sequence
  Description of Artificial Sequence: Synthetic oligonucleotide
  Sense strand starting at position 3081 of SEQ ID NO: 1854
uuuauugaccauuacaguu

SEQ ID NO: 144535 - RNA, 19 nt, Artificial Sequence
  Description of Artificial Sequence: Synthetic oligonucleotide
  Antisense strand to SEQ ID NO: 144534
aacuguaauggucaauaaa

SEQ ID NO: 144536 - RNA, 19 nt, Artificial Sequence
  Description of Artificial Sequence: Synthetic oligonucleotide
  Sense strand starting at position 3073 of SEQ ID NO: 1854
guggauacuuuauugacca

SEQ ID NO: 144537 - RNA, 19 nt, Artificial Sequence
  Description of Artificial Sequence: Synthetic oligonucleotide
  Antisense strand to SEQ ID NO: 144536
uggucaauaaaguauccac

SEQ ID NO: 144538 - RNA, 19 nt, Artificial Sequence
  Description of Artificial Sequence: Synthetic oligonucleotide
  Sense strand starting at position 2878 of SEQ ID NO: 1854
guaagugucgaggaaggaa

SEQ ID NO: 144539 - RNA, 19 nt, Artificial Sequence
  Description of Artificial Sequence: Synthetic oligonucleotide
  Antisense strand to SEQ ID NO: 144538
uuccuuccucgacacuuac

SEQ ID NO: 144540 - RNA, 19 nt, Artificial Sequence
  Description of Artificial Sequence: Synthetic oligonucleotide
  Sense strand starting at position 2877 of SEQ ID NO: 1854
gguaagugucgaggaagga

SEQ ID NO: 144541 - RNA, 19 nt, Artificial Sequence
  Description of Artificial Sequence: Synthetic oligonucleotide
  Antisense strand to SEQ ID NO: 144540
uccuuccucgacacuuacc

SEQ ID NO: 144542 - RNA, 19 nt, Artificial Sequence
  Description of Artificial Sequence: Synthetic oligonucleotide
  Sense strand starting at position 2862 of SEQ ID NO: 1854
gaaggucugguacauggua

SEQ ID NO: 144543 - RNA, 19 nt, Artificial Sequence
  Description of Artificial Sequence: Synthetic oligonucleotide
  Antisense strand to SEQ ID NO: 144542
uaccauguaccagaccuuc

SEQ ID NO: 144544 - RNA, 19 nt, Artificial Sequence
  Description of Artificial Sequence: Synthetic oligonucleotide
  Sense strand starting at position 2489 of SEQ ID NO: 1854
agaacugacuccucauagu

SEQ ID NO: 144545 - RNA, 19 nt, Artificial Sequence
  Description of Artificial Sequence: Synthetic oligonucleotide
  Antisense strand to SEQ ID NO: 144544
acuaugaggagucaguucu

SEQ ID NO: 144546 - RNA, 19 nt, Artificial Sequence
  Description of Artificial Sequence: Synthetic oligonucleotide
  Sense strand starting at position 2277 of SEQ ID NO: 1854
ucagcauauccuuguaaga

SEQ ID NO: 144547 - RNA, 19 nt, Artificial Sequence
  Description of Artificial Sequence: Synthetic oligonucleotide
  Antisense strand to SEQ ID NO: 144546
ucuuacaaggauaugcuga

SEQ ID NO: 144548 - RNA, 19 nt, Artificial Sequence
  Description of Artificial Sequence: Synthetic oligonucleotide
  Sense strand starting at position 2168 of SEQ ID NO: 1854
aguugcuguguuccuguua

SEQ ID NO: 144549 - RNA, 19 nt, Artificial Sequence
  Description of Artificial Sequence: Synthetic oligonucleotide
  Antisense strand to SEQ ID NO: 144548
uaacaggaacacagcaacu

SEQ ID NO: 144550 - RNA, 19 nt, Artificial Sequence
  Description of Artificial Sequence: Synthetic oligonucleotide
  Sense strand starting at position 2088 of SEQ ID NO: 1854
uggaguuaacacggaagca

SEQ ID NO: 144551 - RNA, 19 nt, Artificial Sequence
  Description of Artificial Sequence: Synthetic oligonucleotide
  Antisense strand to SEQ ID NO: 144550
ugcuuccguguuaacucca

SEQ ID NO: 144552 - RNA, 19 nt, Artificial Sequence
  Description of Artificial Sequence: Synthetic oligonucleotide
  Sense strand starting at position 2078 of SEQ ID NO: 1854
ggccucucuauggaguuaa

SEQ ID NO: 144553 - RNA, 19 nt, Artificial Sequence
  Description of Artificial Sequence: Synthetic oligonucleotide
  Antisense strand to SEQ ID NO: 144552
uuaacuccauagagaggcc

SEQ ID NO: 144554 - RNA, 19 nt, Artificial Sequence
  Description of Artificial Sequence: Synthetic oligonucleotide
  Sense strand starting at position 2038 of SEQ ID NO: 1854
cgccaaaggccuuaucuca

SEQ ID NO: 144555 - RNA, 19 nt, Artificial Sequence
  Description of Artificial Sequence: Synthetic oligonucleotide
  Antisense strand to SEQ ID NO: 144554
ugagauaaggccuuuggcg

SEQ ID NO: 144556 - RNA, 19 nt, Artificial Sequence
  Description of Artificial Sequence: Synthetic oligonucleotide
  Sense strand starting at position 1648 of SEQ ID NO: 1854
gugcaaucuacggaagaag

SEQ ID NO: 144557 - RNA, 19 nt, Artificial Sequence
  Description of Artificial Sequence: Synthetic oligonucleotide
  Antisense strand to SEQ ID NO: 144556
cuucuuccguagauugcac

SEQ ID NO: 144558 - RNA, 19 nt, Artificial Sequence
  Description of Artificial Sequence: Synthetic oligonucleotide
  Sense strand starting at position 1637 of SEQ ID NO: 1854
gcugaauuucggugcaauc

SEQ ID NO: 144559 - RNA, 19 nt, Artificial Sequence
  Description of Artificial Sequence: Synthetic oligonucleotide
  Antisense strand to SEQ ID NO: 144558
gauugcaccgaaauucagc

SEQ ID NO: 144560 - RNA, 19 nt, Artificial Sequence
  Description of Artificial Sequence: Synthetic oligonucleotide
  Sense strand starting at position 1636 of SEQ ID NO: 1854
ggcugaauuucggugcaau

SEQ ID NO: 144561 - RNA, 19 nt, Artificial Sequence
  Description of Artificial Sequence: Synthetic oligonucleotide
  Antisense strand to SEQ ID NO: 144560
auugcaccgaaauucagcc

SEQ ID NO: 144562 - RNA, 19 nt, Artificial Sequence
  Description of Artificial Sequence: Synthetic oligonucleotide
  Sense strand starting at position 1395 of SEQ ID NO: 1854
acaugaaauugcuugcaua

SEQ ID NO: 144563 - RNA, 19 nt, Artificial Sequence
  Description of Artificial Sequence: Synthetic oligonucleotide
  Antisense strand to SEQ ID NO: 144562
uaugcaagcaauuucaugu

SEQ ID NO: 144564 - RNA, 19 nt, Artificial Sequence
  Description of Artificial Sequence: Synthetic oligonucleotide
  Sense strand starting at position 449 of SEQ ID NO: 1854
auuguauuggauugaaaug

SEQ ID NO: 144565 - RNA, 19 nt, Artificial Sequence
  Description of Artificial Sequence: Synthetic oligonucleotide
  Antisense strand to SEQ ID NO: 144564
cauuucaauccaauacaau

SEQ ID NO: 144566 - RNA, 19 nt, Artificial Sequence
  Description of Artificial Sequence: Synthetic oligonucleotide
  Sense strand starting at position 445 of SEQ ID NO: 1854
uugaauuguauuggauuga

SEQ ID NO: 144567 - RNA, 19 nt, Artificial Sequence
  Description of Artificial Sequence: Synthetic oligonucleotide
  Antisense strand to SEQ ID NO: 144566
ucaauccaauacaauucaa

SEQ ID NO: 144568 - RNA, 19 nt, Artificial Sequence
  Description of Artificial Sequence: Synthetic oligonucleotide
  Sense strand starting at position 416 of SEQ ID NO: 1854
gucauacaugguugaauga

SEQ ID NO: 144569 - RNA, 19 nt, Artificial Sequence
  Description of Artificial Sequence: Synthetic oligonucleotide
  Antisense strand to SEQ ID NO: 144568
ucauucaaccauguaugac

SEQ ID NO: 144570 - RNA, 19 nt, Artificial Sequence
  Description of Artificial Sequence: Synthetic oligonucleotide
  Sense strand starting at position 415 of SEQ ID NO: 1854
ugucauacaugguugaaug

SEQ ID NO: 144571 - RNA, 19 nt, Artificial Sequence
  Description of Artificial Sequence: Synthetic oligonucleotide
  Antisense strand to SEQ ID NO: 144570
cauucaaccauguaugaca

SEQ ID NO: 144572 - RNA, 19 nt, Artificial Sequence
  Description of Artificial Sequence: Synthetic oligonucleotide
  Sense strand starting at position 413 of SEQ ID NO: 1854
gaugucauacaugguugaa

SEQ ID NO: 144573 - RNA, 19 nt, Artificial Sequence
  Description of Artificial Sequence: Synthetic oligonucleotide
  Antisense strand to SEQ ID NO: 144572
uucaaccauguaugacauc

SEQ ID NO: 144574 - RNA, 19 nt, Artificial Sequence
  Description of Artificial Sequence: Synthetic oligonucleotide
  Sense strand starting at position 412 of SEQ ID NO: 1854
ggaugucauacaugguuga

SEQ ID NO: 144575 - RNA, 19 nt, Artificial Sequence
  Description of Artificial Sequence: Synthetic oligonucleotide
  Antisense strand to SEQ ID NO: 144574
ucaaccauguaugacaucc

SEQ ID NO: 144576 - RNA, 19 nt, Artificial Sequence
  Description of Artificial Sequence: Synthetic oligonucleotide
  Sense strand starting at position 410 of SEQ ID NO: 1854
uuggaugucauacaugguu

SEQ ID NO: 144577 - RNA, 19 nt, Artificial Sequence
  Description of Artificial Sequence: Synthetic oligonucleotide
  Antisense strand to SEQ ID NO: 144576
aaccauguaugacauccaa

SEQ ID NO: 144578 - RNA, 19 nt, Artificial Sequence
  Description of Artificial Sequence: Synthetic oligonucleotide
  Sense strand starting at position 403 of SEQ ID NO: 1854
ucccacauuggaugucaua

SEQ ID NO: 144579 - RNA, 19 nt, Artificial Sequence
  Description of Artificial Sequence: Synthetic oligonucleotide
  Antisense strand to SEQ ID NO: 144578
uaugacauccaauguggga

SEQ ID NO: 144580 - RNA, 19 nt, Artificial Sequence
  Description of Artificial Sequence: Synthetic oligonucleotide
  Sense strand starting at position 379 of SEQ ID NO: 1854
agcucuaaucaucaugagu

SEQ ID NO: 144581 - RNA, 19 nt, Artificial Sequence
  Description of Artificial Sequence: Synthetic oligonucleotide
  Antisense strand to SEQ ID NO: 144580
acucaugaugauuagagcu

SEQ ID NO: 144582 - RNA, 19 nt, Artificial Sequence
  Description of Artificial Sequence: Synthetic oligonucleotide
  Sense strand starting at position 357 of SEQ ID NO: 1854
auaguaagugcucauaaau

SEQ ID NO: 144583 - RNA, 19 nt, Artificial Sequence
  Description of Artificial Sequence: Synthetic oligonucleotide
  Antisense strand to SEQ ID NO: 144582
auuuaugagcacuuacuau

SEQ ID NO: 144584 - RNA, 19 nt, Artificial Sequence
  Description of Artificial Sequence: Synthetic oligonucleotide
  Sense strand starting at position 325 of SEQ ID NO: 1854
caauguaaagcauguagaa

SEQ ID NO: 144585 - RNA, 19 nt, Artificial Sequence
  Description of Artificial Sequence: Synthetic oligonucleotide
  Antisense strand to SEQ ID NO: 144584
uucuacaugcuuuacauug

SEQ ID NO: 144586 - RNA, 19 nt, Artificial Sequence
  Description of Artificial Sequence: Synthetic oligonucleotide
  Sense strand starting at position 195 of SEQ ID NO: 1854
auuuaaauacgcugugcua

SEQ ID NO: 144587 - RNA, 19 nt, Artificial Sequence
  Description of Artificial Sequence: Synthetic oligonucleotide
  Antisense strand to SEQ ID NO: 144586
uagcacagcguauuuaaau

SEQ ID NO: 144588 - RNA, 19 nt, Artificial Sequence
  Description of Artificial Sequence: Synthetic oligonucleotide
  Sense strand starting at position 143 of SEQ ID NO: 1854
ggccaugaugcauaauggu

SEQ ID NO: 144589 - RNA, 19 nt, Artificial Sequence
  Description of Artificial Sequence: Synthetic oligonucleotide
  Antisense strand to SEQ ID NO: 144588
accauuaugcaucauggcc

SEQ ID NO: 144590 - RNA, 19 nt, Artificial Sequence
  Description of Artificial Sequence: Synthetic oligonucleotide
  Sense strand starting at position 95 of SEQ ID NO: 1854
cuaaccuacuggguuauau

SEQ ID NO: 144591 - RNA, 19 nt, Artificial Sequence
  Description of Artificial Sequence: Synthetic oligonucleotide
  Antisense strand to SEQ ID NO: 144590
auauaacccaguagguuag

SEQ ID NO: 144592 - RNA, 19 nt, Artificial Sequence
  Description of Artificial Sequence: Synthetic oligonucleotide
  Sense strand starting at position 94 of SEQ ID NO: 1854
gcuaaccuacuggguuaua

SEQ ID NO: 144593 - RNA, 19 nt, Artificial Sequence
  Description of Artificial Sequence: Synthetic oligonucleotide
  Antisense strand to SEQ ID NO: 144592
uauaacccaguagguuagc

SEQ ID NO: 144594 - RNA, 19 nt, Artificial Sequence
  Description of Artificial Sequence: Synthetic oligonucleotide
  Sense strand starting at position 94 of SEQ ID NO: 1855
ggacaugagucagagaauu

SEQ ID NO: 144595 - RNA, 19 nt, Artificial Sequence
  Description of Artificial Sequence: Synthetic oligonucleotide
  Antisense strand to SEQ ID NO: 144594
aauucucugacucaugucc

SEQ ID NO: 144596 - RNA, 19 nt, Artificial Sequence
  Description of Artificial Sequence: Synthetic oligonucleotide
  Sense strand starting at position 209 of SEQ ID NO: 1855
gcagaucgccuccagaaau

SEQ ID NO: 144597 - RNA, 19 nt, Artificial Sequence
  Description of Artificial Sequence: Synthetic oligonucleotide
  Antisense strand to SEQ ID NO: 144596
auuucuggaggcgaucugc

SEQ ID NO: 144598 - RNA, 19 nt, Artificial Sequence
  Description of Artificial Sequence: Synthetic oligonucleotide
  Sense strand starting at position 260 of SEQ ID NO: 1855
gaauucuaucccggugacu

SEQ ID NO: 144599 - RNA, 19 nt, Artificial Sequence
  Description of Artificial Sequence: Synthetic oligonucleotide
  Antisense strand to SEQ ID NO: 144598
agucaccgggauagaauuc

SEQ ID NO: 144600 - RNA, 19 nt, Artificial Sequence
  Description of Artificial Sequence: Synthetic oligonucleotide
  Sense strand starting at position 262 of SEQ ID NO: 1855
auucuaucccggugacuga

SEQ ID NO: 144601 - RNA, 19 nt, Artificial Sequence
  Description of Artificial Sequence: Synthetic oligonucleotide
  Antisense strand to SEQ ID NO: 144600
ucagucaccgggauagaau

SEQ ID NO: 144602 - RNA, 19 nt, Artificial Sequence
  Description of Artificial Sequence: Synthetic oligonucleotide
  Sense strand starting at position 272 of SEQ ID NO: 1855
ggugacugacgcugggauu

SEQ ID NO: 144603 - RNA, 19 nt, Artificial Sequence
  Description of Artificial Sequence: Synthetic oligonucleotide
  Antisense strand to SEQ ID NO: 144602
aaucccagcgucagucacc

SEQ ID NO: 144604 - RNA, 19 nt, Artificial Sequence
  Description of Artificial Sequence: Synthetic oligonucleotide
  Sense strand starting at position 273 of SEQ ID NO: 1855
gugacugacgcugggauuu

SEQ ID NO: 144605 - RNA, 19 nt, Artificial Sequence
  Description of Artificial Sequence: Synthetic oligonucleotide
  Antisense strand to SEQ ID NO: 144604
aaaucccagcgucagucac

SEQ ID NO: 144606 - RNA, 19 nt, Artificial Sequence
  Description of Artificial Sequence: Synthetic oligonucleotide
  Sense strand starting at position 376 of SEQ ID NO: 1855
aguguugauggagggcaau

SEQ ID NO: 144607 - RNA, 19 nt, Artificial Sequence
  Description of Artificial Sequence: Synthetic oligonucleotide
  Antisense strand to SEQ ID NO: 144606
auugcccuccaucaacacu

SEQ ID NO: 144608 - RNA, 19 nt, Artificial Sequence
  Description of Artificial Sequence: Synthetic oligonucleotide
  Sense strand starting at position 415 of SEQ ID NO: 1855
gucacuuaggcaugaguau

SEQ ID NO: 144609 - RNA, 19 nt, Artificial Sequence
  Description of Artificial Sequence: Synthetic oligonucleotide
  Antisense strand to SEQ ID NO: 144608
auacucaugccuaagugac

SEQ ID NO: 144610 - RNA, 19 nt, Artificial Sequence
  Description of Artificial Sequence: Synthetic oligonucleotide
  Sense strand starting at position 552 of SEQ ID NO: 1855
agacuuucccuccaggcua

SEQ ID NO: 144611 - RNA, 19 nt, Artificial Sequence
  Description of Artificial Sequence: Synthetic oligonucleotide
  Antisense strand to SEQ ID NO: 144610
uagccuggagggaaagucu

SEQ ID NO: 144612 - RNA, 19 nt, Artificial Sequence
  Description of Artificial Sequence: Synthetic oligonucleotide
  Sense strand starting at position 566 of SEQ ID NO: 1855
ggcuaugauugggccagaa

SEQ ID NO: 144613 - RNA, 19 nt, Artificial Sequence
  Description of Artificial Sequence: Synthetic oligonucleotide
  Antisense strand to SEQ ID NO: 144612
uucuggcccaaucauagcc

SEQ ID NO: 144614 - RNA, 19 nt, Artificial Sequence
  Description of Artificial Sequence: Synthetic oligonucleotide
  Sense strand starting at position 632 of SEQ ID NO: 1855
uggacaacucccugugaga

SEQ ID NO: 144615 - RNA, 19 nt, Artificial Sequence
  Description of Artificial Sequence: Synthetic oligonucleotide
  Antisense strand to SEQ ID NO: 144614
ucucacagggaguugucca

SEQ ID NO: 144616 - RNA, 19 nt, Artificial Sequence
  Description of Artificial Sequence: Synthetic oligonucleotide
  Sense strand starting at position 782 of SEQ ID NO: 1855
uccaaucgcucucuugaau

SEQ ID NO: 144617 - RNA, 19 nt, Artificial Sequence
  Description of Artificial Sequence: Synthetic oligonucleotide
  Antisense strand to SEQ ID NO: 144616
auucaagagagcgauugga

SEQ ID NO: 144618 - RNA, 19 nt, Artificial Sequence
  Description of Artificial Sequence: Synthetic oligonucleotide
  Sense strand starting at position 861 of SEQ ID NO: 1855
auccguucuggagauacca

SEQ ID NO: 144619 - RNA, 19 nt, Artificial Sequence
  Description of Artificial Sequence: Synthetic oligonucleotide
  Antisense strand to SEQ ID NO: 144618
ugguaucuccagaacggau

SEQ ID NO: 144620 - RNA, 19 nt, Artificial Sequence
  Description of Artificial Sequence: Synthetic oligonucleotide
  Sense strand starting at position 954 of SEQ ID NO: 1855
aggauacucuuucuugguu

SEQ ID NO: 144621 - RNA, 19 nt, Artificial Sequence
  Description of Artificial Sequence: Synthetic oligonucleotide
  Antisense strand to SEQ ID NO: 144620
aaccaagaaagaguauccu

SEQ ID NO: 144622 - RNA, 19 nt, Artificial Sequence
  Description of Artificial Sequence: Synthetic oligonucleotide
  Sense strand starting at position 959 of SEQ ID NO: 1855
acucuuucuugguucgagu

SEQ ID NO: 144623 - RNA, 19 nt, Artificial Sequence
  Description of Artificial Sequence: Synthetic oligonucleotide
  Antisense strand to SEQ ID NO: 144622
acucgaaccaagaaagagu

SEQ ID NO: 144624 - RNA, 19 nt, Artificial Sequence
  Description of Artificial Sequence: Synthetic oligonucleotide
  Sense strand starting at position 961 of SEQ ID NO: 1855
ucuuucuugguucgaguau

SEQ ID NO: 144625 - RNA, 19 nt, Artificial Sequence
  Description of Artificial Sequence: Synthetic oligonucleotide
  Antisense strand to SEQ ID NO: 144624
auacucgaaccaagaaaga

SEQ ID NO: 144626 - RNA, 19 nt, Artificial Sequence
  Description of Artificial Sequence: Synthetic oligonucleotide
  Sense strand starting at position 967 of SEQ ID NO: 1855
uugguucgaguaugaagaa

SEQ ID NO: 144627 - RNA, 19 nt, Artificial Sequence
  Description of Artificial Sequence: Synthetic oligonucleotide
  Antisense strand to SEQ ID NO: 144626
uucuucauacucgaaccaa

SEQ ID NO: 144628 - RNA, 19 nt, Artificial Sequence
  Description of Artificial Sequence: Synthetic oligonucleotide
  Sense strand starting at position 2014 of SEQ ID NO: 1855
accggcgucgggaaaguua

SEQ ID NO: 144629 - RNA, 19 nt, Artificial Sequence
  Description of Artificial Sequence: Synthetic oligonucleotide
  Antisense strand to SEQ ID NO: 144628
uaacuuucccgacgccggu

SEQ ID NO: 144630 - RNA, 19 nt, Artificial Sequence
  Description of Artificial Sequence: Synthetic oligonucleotide
  Sense strand starting at position 2388 of SEQ ID NO: 1855
ugugaauucuguucccacu

SEQ ID NO: 144631 - RNA, 19 nt, Artificial Sequence
  Description of Artificial Sequence: Synthetic oligonucleotide
  Antisense strand to SEQ ID NO: 144630
agugggaacagaauucaca

SEQ ID NO: 144632 - RNA, 19 nt, Artificial Sequence
  Description of Artificial Sequence: Synthetic oligonucleotide
  Sense strand starting at position 2410 of SEQ ID NO: 1855
aggucugacuuggcgcaua

SEQ ID NO: 144633 - RNA, 19 nt, Artificial Sequence
  Description of Artificial Sequence: Synthetic oligonucleotide
  Antisense strand to SEQ ID NO: 144632
uaugcgccaagucagaccu

SEQ ID NO: 144634 - RNA, 19 nt, Artificial Sequence
  Description of Artificial Sequence: Synthetic oligonucleotide
  Sense strand starting at position 2415 of SEQ ID NO: 1855
ugacuuggcgcauaggaua

SEQ ID NO: 144635 - RNA, 19 nt, Artificial Sequence
  Description of Artificial Sequence: Synthetic oligonucleotide
  Antisense strand to SEQ ID NO: 144634
uauccuaugcgccaaguca

SEQ ID NO: 144636 - RNA, 19 nt, Artificial Sequence
  Description of Artificial Sequence: Synthetic oligonucleotide
  Sense strand starting at position 2447 of SEQ ID NO: 1855
guaucuccuuucccuguaa

SEQ ID NO: 144637 - RNA, 19 nt, Artificial Sequence
  Description of Artificial Sequence: Synthetic oligonucleotide
  Antisense strand to SEQ ID NO: 144636
uuacagggaaaggagauac

SEQ ID NO: 144638 - RNA, 19 nt, Artificial Sequence
  Description of Artificial Sequence: Synthetic oligonucleotide
  Sense strand starting at position 2451 of SEQ ID NO: 1855
cuccuuucccuguaaggga

SEQ ID NO: 144639 - RNA, 19 nt, Artificial Sequence
  Description of Artificial Sequence: Synthetic oligonucleotide
  Antisense strand to SEQ ID NO: 144638
ucccuuacagggaaaggag

SEQ ID NO: 144640 - RNA, 19 nt, Artificial Sequence
  Description of Artificial Sequence: Synthetic oligonucleotide
  Sense strand starting at position 2514 of SEQ ID NO: 1855
uuggcuugugcuugggaca

SEQ ID NO: 144641 - RNA, 19 nt, Artificial Sequence
  Description of Artificial Sequence: Synthetic oligonucleotide
  Antisense strand to SEQ ID NO: 144640
ugucccaagcacaagccaa

SEQ ID NO: 144642 - RNA, 19 nt, Artificial Sequence
  Description of Artificial Sequence: Synthetic oligonucleotide
  Sense strand starting at position 2620 of SEQ ID NO: 1855
agagaaaucaaguggcuua

SEQ ID NO: 144643 - RNA, 19 nt, Artificial Sequence
  Description of Artificial Sequence: Synthetic oligonucleotide
  Antisense strand to SEQ ID NO: 144642
uaagccacuugauuucucu

SEQ ID NO: 144644 - RNA, 19 nt, Artificial Sequence
  Description of Artificial Sequence: Synthetic oligonucleotide
  Sense strand starting at position 2753 of SEQ ID NO: 1855
guugucuagcagagugagu

SEQ ID NO: 144645 - RNA, 19 nt, Artificial Sequence
  Description of Artificial Sequence: Synthetic oligonucleotide
  Antisense strand to SEQ ID NO: 144644
acucacucugcuagacaac

SEQ ID NO: 144646 - RNA, 19 nt, Artificial Sequence
  Description of Artificial Sequence: Synthetic oligonucleotide
  Sense strand starting at position 2764 of SEQ ID NO: 1855
gagugaguggcacauaaua

SEQ ID NO: 144647 - RNA, 19 nt, Artificial Sequence
  Description of Artificial Sequence: Synthetic oligonucleotide
  Antisense strand to SEQ ID NO: 144646
uauuaugugccacucacuc

SEQ ID NO: 144648 - RNA, 19 nt, Artificial Sequence
  Description of Artificial Sequence: Synthetic oligonucleotide
  Sense strand starting at position 2806 of SEQ ID NO: 1855
augaaugaauguuaggagu

SEQ ID NO: 144649 - RNA, 19 nt, Artificial Sequence
  Description of Artificial Sequence: Synthetic oligonucleotide
  Antisense strand to SEQ ID NO: 144648
acuccuaacauucauucau

SEQ ID NO: 144650 - RNA, 19 nt, Artificial Sequence
  Description of Artificial Sequence: Synthetic oligonucleotide
  Sense strand starting at position 2855 of SEQ ID NO: 1855
ccagacauuugacaaaugu

SEQ ID NO: 144651 - RNA, 19 nt, Artificial Sequence
  Description of Artificial Sequence: Synthetic oligonucleotide
  Antisense strand to SEQ ID NO: 144650
acauuugucaaaugucugg

SEQ ID NO: 144652 - RNA, 19 nt, Artificial Sequence
  Description of Artificial Sequence: Synthetic oligonucleotide
  Sense strand starting at position 2921 of SEQ ID NO: 1855
augaacauuucucgagggu

SEQ ID NO: 144653 - RNA, 19 nt, Artificial Sequence
  Description of Artificial Sequence: Synthetic oligonucleotide
  Antisense strand to SEQ ID NO: 144652
acccucgagaaauguucau

SEQ ID NO: 144654 - RNA, 19 nt, Artificial Sequence
  Description of Artificial Sequence: Synthetic oligonucleotide
  Sense strand starting at position 2945 of SEQ ID NO: 1855
gagagcuauguucggaaga

SEQ ID NO: 144655 - RNA, 19 nt, Artificial Sequence
  Description of Artificial Sequence: Synthetic oligonucleotide
  Antisense strand to SEQ ID NO: 144654
ucuuccgaacauagcucuc

SEQ ID NO: 144656 - RNA, 19 nt, Artificial Sequence
  Description of Artificial Sequence: Synthetic oligonucleotide
  Sense strand starting at position 2950 of SEQ ID NO: 1855
cuauguucggaagauccau

SEQ ID NO: 144657 - RNA, 19 nt, Artificial Sequence
  Description of Artificial Sequence: Synthetic oligonucleotide
  Antisense strand to SEQ ID NO: 144656
auggaucuuccgaacauag

SEQ ID NO: 144658 - RNA, 19 nt, Artificial Sequence
  Description of Artificial Sequence: Synthetic oligonucleotide
  Sense strand starting at position 2993 of SEQ ID NO: 1855
cuaaaugaggaaugcaauu

SEQ ID NO: 144659 - RNA, 19 nt, Artificial Sequence
  Description of Artificial Sequence: Synthetic oligonucleotide
  Antisense strand to SEQ ID NO: 144658
aauugcauuccucauuuag

SEQ ID NO: 144660 - RNA, 19 nt, Artificial Sequence
  Description of Artificial Sequence: Synthetic oligonucleotide
  Sense strand starting at position 3085 of SEQ ID NO: 1855
ugagguagcuaucuccauu

SEQ ID NO: 144661 - RNA, 19 nt, Artificial Sequence
  Description of Artificial Sequence: Synthetic oligonucleotide
  Antisense strand to SEQ ID NO: 144660
aauggagauagcuaccuca

SEQ ID NO: 144662 - RNA, 19 nt, Artificial Sequence
  Description of Artificial Sequence: Synthetic oligonucleotide
  Sense strand starting at position 3236 of SEQ ID NO: 1855
uacaauaccggaggucauu

SEQ ID NO: 144663 - RNA, 19 nt, Artificial Sequence
  Description of Artificial Sequence: Synthetic oligonucleotide
  Antisense strand to SEQ ID NO: 144662
aaugaccuccgguauugua

SEQ ID NO: 144664 - RNA, 19 nt, Artificial Sequence
  Description of Artificial Sequence: Synthetic oligonucleotide
  Sense strand starting at position 3242 of SEQ ID NO: 1855
accggaggucauugcugua

SEQ ID NO: 144665 - RNA, 19 nt, Artificial Sequence
  Description of Artificial Sequence: Synthetic oligonucleotide
  Antisense strand to SEQ ID NO: 144664
uacagcaaugaccuccggu

SEQ ID NO: 144666 - RNA, 19 nt, Artificial Sequence
  Description of Artificial Sequence: Synthetic oligonucleotide
  Sense strand starting at position 3632 of SEQ ID NO: 1855
gccucuuaagguggaaaca

SEQ ID NO: 144667 - RNA, 19 nt, Artificial Sequence
  Description of Artificial Sequence: Synthetic oligonucleotide
  Antisense strand to SEQ ID NO: 144666
uguuuccaccuuaagaggc

SEQ ID NO: 144668 - RNA, 19 nt, Artificial Sequence
  Description of Artificial Sequence: Synthetic oligonucleotide
  Sense strand starting at position 3875 of SEQ ID NO: 1855
cguguccagcaguagauuu

SEQ ID NO: 144669 - RNA, 19 nt, Artificial Sequence
  Description of Artificial Sequence: Synthetic oligonucleotide
  Antisense strand to SEQ ID NO: 144668
aaaucuacugcuggacacg

SEQ ID NO: 144670 - RNA, 19 nt, Artificial Sequence
  Description of Artificial Sequence: Synthetic oligonucleotide
  Sense strand starting at position 3892 of SEQ ID NO: 1855
uuugaauaaguuggagcua

SEQ ID NO: 144671 - RNA, 19 nt, Artificial Sequence
  Description of Artificial Sequence: Synthetic oligonucleotide
  Antisense strand to SEQ ID NO: 144670
uagcuccaacuuauucaaa

SEQ ID NO: 144672 - RNA, 19 nt, Artificial Sequence
  Description of Artificial Sequence: Synthetic oligonucleotide
  Sense strand starting at position 3978 of SEQ ID NO: 1855
gaagcaguggcuggaucau

SEQ ID NO: 144673 - RNA, 19 nt, Artificial Sequence
  Description of Artificial Sequence: Synthetic oligonucleotide
  Antisense strand to SEQ ID NO: 144672
augauccagccacugcuuc

SEQ ID NO: 144674 - RNA, 19 nt, Artificial Sequence
  Description of Artificial Sequence: Synthetic oligonucleotide
  Sense strand starting at position 441 of SEQ ID NO: 1856
ggacaugagucagagaauu

SEQ ID NO: 144675 - RNA, 19 nt, Artificial Sequence
  Description of Artificial Sequence: Synthetic oligonucleotide
  Antisense strand to SEQ ID NO: 144674
aauucucugacucaugucc

SEQ ID NO: 144676 - RNA, 19 nt, Artificial Sequence
  Description of Artificial Sequence: Synthetic oligonucleotide
  Sense strand starting at position 556 of SEQ ID NO: 1856
gcagaucgccuccagaaau

SEQ ID NO: 144677 - RNA, 19 nt, Artificial Sequence
  Description of Artificial Sequence: Synthetic oligonucleotide
  Antisense strand to SEQ ID NO: 144676
auuucuggaggcgaucugc

SEQ ID NO: 144678 - RNA, 19 nt, Artificial Sequence
  Description of Artificial Sequence: Synthetic oligonucleotide
  Sense strand starting at position 607 of SEQ ID NO: 1856
gaauucuaucccggugacu

SEQ ID NO: 144679 - RNA, 19 nt, Artificial Sequence
  Description of Artificial Sequence: Synthetic oligonucleotide
  Antisense strand to SEQ ID NO: 144678
agucaccgggauagaauuc

SEQ ID NO: 144680 - RNA, 19 nt, Artificial Sequence
  Description of Artificial Sequence: Synthetic oligonucleotide
  Sense strand starting at position 609 of SEQ ID NO: 1856
auucuaucccggugacuga

SEQ ID NO: 144681 - RNA, 19 nt, Artificial Sequence
  Description of Artificial Sequence: Synthetic oligonucleotide
  Antisense strand to SEQ ID NO: 144680
ucagucaccgggauagaau

SEQ ID NO: 144682 - RNA, 19 nt, Artificial Sequence
  Description of Artificial Sequence: Synthetic oligonucleotide
  Sense strand starting at position 619 of SEQ ID NO: 1856
ggugacugacgcugggauu

SEQ ID NO: 144683 - RNA, 19 nt, Artificial Sequence
  Description of Artificial Sequence: Synthetic oligonucleotide
  Antisense strand to SEQ ID NO: 144682
aaucccagcgucagucacc

SEQ ID NO: 144684 - RNA, 19 nt, Artificial Sequence
  Description of Artificial Sequence: Synthetic oligonucleotide
  Sense strand starting at position 620 of SEQ ID NO: 1856
gugacugacgcugggauuu

SEQ ID NO: 144685 - RNA, 19 nt, Artificial Sequence
  Description of Artificial Sequence: Synthetic oligonucleotide
  Antisense strand to SEQ ID NO: 144684
aaaucccagcgucagucac

SEQ ID NO: 144686 - RNA, 19 nt, Artificial Sequence
  Description of Artificial Sequence: Synthetic oligonucleotide
  Sense strand starting at position 723 of SEQ ID NO: 1856
aguguugauggagggcaau

SEQ ID NO: 144687 - RNA, 19 nt, Artificial Sequence
  Description of Artificial Sequence: Synthetic oligonucleotide
  Antisense strand to SEQ ID NO: 144686
auugcccuccaucaacacu

SEQ ID NO: 144688 - RNA, 19 nt, Artificial Sequence
  Description of Artificial Sequence: Synthetic oligonucleotide
  Sense strand starting at position 762 of SEQ ID NO: 1856
gucacuuaggcaugaguau

SEQ ID NO: 144689 - RNA, 19 nt, Artificial Sequence
  Description of Artificial Sequence: Synthetic oligonucleotide
  Antisense strand to SEQ ID NO: 144688
auacucaugccuaagugac

SEQ ID NO: 144690 - RNA, 19 nt, Artificial Sequence
  Description of Artificial Sequence: Synthetic oligonucleotide
  Sense strand starting at position 853 of SEQ ID NO: 1856
gguugaggcaugcguuaag

SEQ ID NO: 144691 - RNA, 19 nt, Artificial Sequence
  Description of Artificial Sequence: Synthetic oligonucleotide
  Antisense strand to SEQ ID NO: 144690
cuuaacgcaugccucaacc

SEQ ID NO: 144692 - RNA, 19 nt, Artificial Sequence
  Description of Artificial Sequence: Synthetic oligonucleotide
  Sense strand starting at position 899 of SEQ ID NO: 1856
agacuuucccuccaggcua

SEQ ID NO: 144693 - RNA, 19 nt, Artificial Sequence
  Description of Artificial Sequence: Synthetic oligonucleotide
  Antisense strand to SEQ ID NO: 144692
uagccuggagggaaagucu

SEQ ID NO: 144694 - RNA, 19 nt, Artificial Sequence
  Description of Artificial Sequence: Synthetic oligonucleotide
  Sense strand starting at position 913 of SEQ ID NO: 1856
ggcuaugauugggccagaa

SEQ ID NO: 144695 - RNA, 19 nt, Artificial Sequence
  Description of Artificial Sequence: Synthetic oligonucleotide
  Antisense strand to SEQ ID NO: 144694
uucuggcccaaucauagcc

SEQ ID NO: 144696 - RNA, 19 nt, Artificial Sequence
  Description of Artificial Sequence: Synthetic oligonucleotide
  Sense strand starting at position 979 of SEQ ID NO: 1856
uggacaacucccugugaga

SEQ ID NO: 144697 - RNA, 19 nt, Artificial Sequence
  Description of Artificial Sequence: Synthetic oligonucleotide
  Antisense strand to SEQ ID NO: 144696
ucucacagggaguugucca

SEQ ID NO: 144698 - RNA, 19 nt, Artificial Sequence
  Description of Artificial Sequence: Synthetic oligonucleotide
  Sense strand starting at position 1129 of SEQ ID NO: 1856
uccaaucgcucucuugaau

SEQ ID NO: 144699 - RNA, 19 nt, Artificial Sequence
  Description of Artificial Sequence: Synthetic oligonucleotide
  Antisense strand to SEQ ID NO: 144698
auucaagagagcgauugga

SEQ ID NO: 144700 - RNA, 19 nt, Artificial Sequence
  Description of Artificial Sequence: Synthetic oligonucleotide
  Sense strand starting at position 1208 of SEQ ID NO: 1856
auccguucuggagauacca

SEQ ID NO: 144701 - RNA, 19 nt, Artificial Sequence
  Description of Artificial Sequence: Synthetic oligonucleotide
  Antisense strand to SEQ ID NO: 144700
ugguaucuccagaacggau

SEQ ID NO: 144702 - RNA, 19 nt, Artificial Sequence
  Description of Artificial Sequence: Synthetic oligonucleotide
  Sense strand starting at position 1301 of SEQ ID NO: 1856
aggauacucuuucuugguu

SEQ ID NO: 144703 - RNA, 19 nt, Artificial Sequence
  Description of Artificial Sequence: Synthetic oligonucleotide
  Antisense strand to SEQ ID NO: 144702
aaccaagaaagaguauccu

SEQ ID NO: 144704 - RNA, 19 nt, Artificial Sequence
  Description of Artificial Sequence: Synthetic oligonucleotide
  Sense strand starting at position 1306 of SEQ ID NO: 1856
acucuuucuugguucgagu

SEQ ID NO: 144705 - RNA, 19 nt, Artificial Sequence
  Description of Artificial Sequence: Synthetic oligonucleotide
  Antisense strand to SEQ ID NO: 144704
acucgaaccaagaaagagu

SEQ ID NO: 144706 - RNA, 19 nt, Artificial Sequence
  Description of Artificial Sequence: Synthetic oligonucleotide
  Sense strand starting at position 1308 of SEQ ID NO: 1856
ucuuucuugguucgaguau

SEQ ID NO: 144707 - RNA, 19 nt, Artificial Sequence
  Description of Artificial Sequence: Synthetic oligonucleotide
  Antisense strand to SEQ ID NO: 144706
auacucgaaccaagaaaga

SEQ ID NO: 144708 - RNA, 19 nt, Artificial Sequence
  Description of Artificial Sequence: Synthetic oligonucleotide
  Sense strand starting at position 1314 of SEQ ID NO: 1856
uugguucgaguaugaagaa

SEQ ID NO: 144709 - RNA, 19 nt, Artificial Sequence
  Description of Artificial Sequence: Synthetic oligonucleotide
  Antisense strand to SEQ ID NO: 144708
uucuucauacucgaaccaa

SEQ ID NO: 144710 - RNA, 19 nt, Artificial Sequence
  Description of Artificial Sequence: Synthetic oligonucleotide
  Sense strand starting at position 1687 of SEQ ID NO: 1856
gggcgucugaguugaaguu

SEQ ID NO: 144711 - RNA, 19 nt, Artificial Sequence
  Description of Artificial Sequence: Synthetic oligonucleotide
  Antisense strand to SEQ ID NO: 144710
aacuucaacucagacgccc

SEQ ID NO: 144712 - RNA, 19 nt, Artificial Sequence
  Description of Artificial Sequence: Synthetic oligonucleotide
  Sense strand starting at position 2361 of SEQ ID NO: 1856
accggcgucgggaaaguua

SEQ ID NO: 144713 - RNA, 19 nt, Artificial Sequence
  Description of Artificial Sequence: Synthetic oligonucleotide
  Antisense strand to SEQ ID NO: 144712
uaacuuucccgacgccggu

SEQ ID NO: 144714 - RNA, 19 nt, Artificial Sequence
  Description of Artificial Sequence: Synthetic oligonucleotide
  Sense strand starting at position 2735 of SEQ ID NO: 1856
ugugaauucuguucccacu

SEQ ID NO: 144715 - RNA, 19 nt, Artificial Sequence
  Description of Artificial Sequence: Synthetic oligonucleotide
  Antisense strand to SEQ ID NO: 144714
agugggaacagaauucaca

SEQ ID NO: 144716 - RNA, 19 nt, Artificial Sequence
  Description of Artificial Sequence: Synthetic oligonucleotide
  Sense strand starting at position 2757 of SEQ ID NO: 1856
aggucugacuuggcgcaua

SEQ ID NO: 144717 - RNA, 19 nt, Artificial Sequence
  Description of Artificial Sequence: Synthetic oligonucleotide
  Antisense strand to SEQ ID NO: 144716
uaugcgccaagucagaccu

SEQ ID NO: 144718 - RNA, 19 nt, Artificial Sequence
  Description of Artificial Sequence: Synthetic oligonucleotide
  Sense strand starting at position 2762 of SEQ ID NO: 1856
ugacuuggcgcauaggaua

SEQ ID NO: 144719 - RNA, 19 nt, Artificial Sequence
  Description of Artificial Sequence: Synthetic oligonucleotide
  Antisense strand to SEQ ID NO: 144718
uauccuaugcgccaaguca

SEQ ID NO: 144720 - RNA, 19 nt, Artificial Sequence
  Description of Artificial Sequence: Synthetic oligonucleotide
  Sense strand starting at position 2794 of SEQ ID NO: 1856
guaucuccuuucccuguaa

SEQ ID NO: 144721 - RNA, 19 nt, Artificial Sequence
  Description of Artificial Sequence: Synthetic oligonucleotide
  Antisense strand to SEQ ID NO: 144720
uuacagggaaaggagauac

SEQ ID NO: 144722 - RNA, 19 nt, Artificial Sequence
  Description of Artificial Sequence: Synthetic oligonucleotide
  Sense strand starting at position 2798 of SEQ ID NO: 1856
cuccuuucccuguaaggga

SEQ ID NO: 144723 - RNA, 19 nt, Artificial Sequence
  Description of Artificial Sequence: Synthetic oligonucleotide
  Antisense strand to SEQ ID NO: 144722
ucccuuacagggaaaggag

SEQ ID NO: 144724 - RNA, 19 nt, Artificial Sequence
  Description of Artificial Sequence: Synthetic oligonucleotide
  Sense strand starting at position 2861 of SEQ ID NO: 1856
uuggcuugugcuugggaca

SEQ ID NO: 144725 - RNA, 19 nt, Artificial Sequence
  Description of Artificial Sequence: Synthetic oligonucleotide
  Antisense strand to SEQ ID NO: 144724
ugucccaagcacaagccaa

SEQ ID NO: 144726 - RNA, 19 nt, Artificial Sequence
  Description of Artificial Sequence: Synthetic oligonucleotide
  Sense strand starting at position 2967 of SEQ ID NO: 1856
agagaaaucaaguggcuua

SEQ ID NO: 144727 - RNA, 19 nt, Artificial Sequence
  Description of Artificial Sequence: Synthetic oligonucleotide
  Antisense strand to SEQ ID NO: 144726
uaagccacuugauuucucu

SEQ ID NO: 144728 - RNA, 19 nt, Artificial Sequence
  Description of Artificial Sequence: Synthetic oligonucleotide
  Sense strand starting at position 3100 of SEQ ID NO: 1856
guugucuagcagagugagu

SEQ ID NO: 144729 - RNA, 19 nt, Artificial Sequence
  Description of Artificial Sequence: Synthetic oligonucleotide
  Antisense strand to SEQ ID NO: 144728
acucacucugcuagacaac

SEQ ID NO: 144730 - RNA, 19 nt, Artificial Sequence
  Description of Artificial Sequence: Synthetic oligonucleotide
  Sense strand starting at position 3111 of SEQ ID NO: 1856
gagugaguggcacauaaua

SEQ ID NO: 144731 - RNA, 19 nt, Artificial Sequence
  Description of Artificial Sequence: Synthetic oligonucleotide
  Antisense strand to SEQ ID NO: 144730
uauuaugugccacucacuc

SEQ ID NO: 144732 - RNA, 19 nt, Artificial Sequence
  Description of Artificial Sequence: Synthetic oligonucleotide
  Sense strand starting at position 3124 of SEQ ID NO: 1856
auaauagguugucaacaaa

SEQ ID NO: 144733 - RNA, 19 nt, Artificial Sequence
  Description of Artificial Sequence: Synthetic oligonucleotide
  Antisense strand to SEQ ID NO: 144732
uuuguugacaaccuauuau

SEQ ID NO: 144734 - RNA, 19 nt, Artificial Sequence
  Description of Artificial Sequence: Synthetic oligonucleotide
  Sense strand starting at position 3153 of SEQ ID NO: 1856
augaaugaauguuaggagu

SEQ ID NO: 144735 - RNA, 19 nt, Artificial Sequence
  Description of Artificial Sequence: Synthetic oligonucleotide
  Antisense strand to SEQ ID NO: 144734
acuccuaacauucauucau

SEQ ID NO: 144736 - RNA, 19 nt, Artificial Sequence
  Description of Artificial Sequence: Synthetic oligonucleotide
  Sense strand starting at position 3202 of SEQ ID NO: 1856
ccagacauuugacaaaugu

SEQ ID NO: 144737 - RNA, 19 nt, Artificial Sequence
  Description of Artificial Sequence: Synthetic oligonucleotide
  Antisense strand to SEQ ID NO: 144736
acauuugucaaaugucugg

SEQ ID NO: 144738 - RNA, 19 nt, Artificial Sequence
  Description of Artificial Sequence: Synthetic oligonucleotide
  Sense strand starting at position 3268 of SEQ ID NO: 1856
augaacauuucucgagggu

SEQ ID NO: 144739 - RNA, 19 nt, Artificial Sequence
  Description of Artificial Sequence: Synthetic oligonucleotide
  Antisense strand to SEQ ID NO: 144738
acccucgagaaauguucau

SEQ ID NO: 144740 - RNA, 19 nt, Artificial Sequence
  Description of Artificial Sequence: Synthetic oligonucleotide
  Sense strand starting at position 3292 of SEQ ID NO: 1856
gagagcuauguucggaaga

SEQ ID NO: 144741 - RNA, 19 nt, Artificial Sequence
  Description of Artificial Sequence: Synthetic oligonucleotide
  Antisense strand to SEQ ID NO: 144740
ucuuccgaacauagcucuc

SEQ ID NO: 144742 - RNA, 19 nt, Artificial Sequence
  Description of Artificial Sequence: Synthetic oligonucleotide
  Sense strand starting at position 3297 of SEQ ID NO: 1856
cuauguucggaagauccau

SEQ ID NO: 144743 - RNA, 19 nt, Artificial Sequence
  Description of Artificial Sequence: Synthetic oligonucleotide
  Antisense strand to SEQ ID NO: 144742
auggaucuuccgaacauag

SEQ ID NO: 144744 - RNA, 19 nt, Artificial Sequence
  Description of Artificial Sequence: Synthetic oligonucleotide
  Sense strand starting at position 3340 of SEQ ID NO: 1856
cuaaaugaggaaugcaauu

SEQ ID NO: 144745 - RNA, 19 nt, Artificial Sequence
  Description of Artificial Sequence: Synthetic oligonucleotide
  Antisense strand to SEQ ID NO: 144744
aauugcauuccucauuuag

SEQ ID NO: 144746 - RNA, 19 nt, Artificial Sequence
  Description of Artificial Sequence: Synthetic oligonucleotide
  Sense strand starting at position 3432 of SEQ ID NO: 1856
ugagguagcuaucuccauu

SEQ ID NO: 144747 - RNA, 19 nt, Artificial Sequence
  Description of Artificial Sequence: Synthetic oligonucleotide
  Antisense strand to SEQ ID NO: 144746
aauggagauagcuaccuca

SEQ ID NO: 144748 - RNA, 19 nt, Artificial Sequence
  Description of Artificial Sequence: Synthetic oligonucleotide
  Sense strand starting at position 3583 of SEQ ID NO: 1856
uacaauaccggaggucauu

SEQ ID NO: 144749 - RNA, 19 nt, Artificial Sequence
  Description of Artificial Sequence: Synthetic oligonucleotide
  Antisense strand to SEQ ID NO: 144748
aaugaccuccgguauugua

SEQ ID NO: 144750 - RNA, 19 nt, Artificial Sequence
  Description of Artificial Sequence: Synthetic oligonucleotide
  Sense strand starting at position 3589 of SEQ ID NO: 1856
accggaggucauugcugua

SEQ ID NO: 144751 - RNA, 19 nt, Artificial Sequence
  Description of Artificial Sequence: Synthetic oligonucleotide
  Antisense strand to SEQ ID NO: 144750
uacagcaaugaccuccggu

SEQ ID NO: 144752 - RNA, 19 nt, Artificial Sequence
  Description of Artificial Sequence: Synthetic oligonucleotide
  Sense strand starting at position 3979 of SEQ ID NO: 1856
gccucuuaagguggaaaca

SEQ ID NO: 144753 - RNA, 19 nt, Artificial Sequence
  Description of Artificial Sequence: Synthetic oligonucleotide
  Antisense strand to SEQ ID NO: 144752
uguuuccaccuuaagaggc

SEQ ID NO: 144754 - RNA, 19 nt, Artificial Sequence
  Description of Artificial Sequence: Synthetic oligonucleotide
  Sense strand starting at position 3947 of SEQ ID NO: 1857
aggacaugaggcuguagua

SEQ ID NO: 144755 - RNA, 19 nt, Artificial Sequence
  Description of Artificial Sequence: Synthetic oligonucleotide
  Antisense strand to SEQ ID NO: 144754
uacuacagccucauguccu

SEQ ID NO: 144756 - RNA, 19 nt, Artificial Sequence
  Description of Artificial Sequence: Synthetic oligonucleotide
  Sense strand starting at position 3927 of SEQ ID NO: 1857
ucugaauucccauguuugu

SEQ ID NO: 144757 - RNA, 19 nt, Artificial Sequence
  Description of Artificial Sequence: Synthetic oligonucleotide
  Antisense strand to SEQ ID NO: 144756
acaaacaugggaauucaga

SEQ ID NO: 144758 - RNA, 19 nt, Artificial Sequence
  Description of Artificial Sequence: Synthetic oligonucleotide
  Sense strand starting at position 3924 of SEQ ID NO: 1857
ugaucugaauucccauguu

SEQ ID NO: 144759 - RNA, 19 nt, Artificial Sequence
  Description of Artificial Sequence: Synthetic oligonucleotide
  Antisense strand to SEQ ID NO: 144758
aacaugggaauucagauca

SEQ ID NO: 144760 - RNA, 19 nt, Artificial Sequence
  Description of Artificial Sequence: Synthetic oligonucleotide
  Sense strand starting at position 3846 of SEQ ID NO: 1857
auguaccuguacucuaaau

SEQ ID NO: 144761 - RNA, 19 nt, Artificial Sequence
  Description of Artificial Sequence: Synthetic oligonucleotide
  Antisense strand to SEQ ID NO: 144760
auuuagaguacagguacau

SEQ ID NO: 144762 - RNA, 19 nt, Artificial Sequence
  Description of Artificial Sequence: Synthetic oligonucleotide
  Sense strand starting at position 3840 of SEQ ID NO: 1857
ucagaaauguaccuguacu

SEQ ID NO: 144763 - RNA, 19 nt, Artificial Sequence
  Description of Artificial Sequence: Synthetic oligonucleotide
  Antisense strand to SEQ ID NO: 144762
aguacagguacauuucuga

SEQ ID NO: 144764 - RNA, 19 nt, Artificial Sequence
  Description of Artificial Sequence: Synthetic oligonucleotide
  Sense strand starting at position 3693 of SEQ ID NO: 1857
cagugagcccuugaucaac

SEQ ID NO: 144765 - RNA, 19 nt, Artificial Sequence
  Description of Artificial Sequence: Synthetic oligonucleotide
  Antisense strand to SEQ ID NO: 144764
guugaucaagggcucacug

SEQ ID NO: 144766 - RNA, 19 nt, Artificial Sequence
  Description of Artificial Sequence: Synthetic oligonucleotide
  Sense strand starting at position 3254 of SEQ ID NO: 1857
acaguucuccuauguagau

SEQ ID NO: 144767 - RNA, 19 nt, Artificial Sequence
  Description of Artificial Sequence: Synthetic oligonucleotide
  Antisense strand to SEQ ID NO: 144766
aucuacauaggagaacugu

SEQ ID NO: 144768 - RNA, 19 nt, Artificial Sequence
  Description of Artificial Sequence: Synthetic oligonucleotide
  Sense strand starting at position 3249 of SEQ ID NO: 1857
gguuuacaguucuccuaug

SEQ ID NO: 144769 - RNA, 19 nt, Artificial Sequence
  Description of Artificial Sequence: Synthetic oligonucleotide
  Antisense strand to SEQ ID NO: 144768
cauaggagaacuguaaacc

SEQ ID NO: 144770 - RNA, 19 nt, Artificial Sequence
  Description of Artificial Sequence: Synthetic oligonucleotide
  Sense strand starting at position 3039 of SEQ ID NO: 1857
gauacagaaucaggaugaa

SEQ ID NO: 144771 - RNA, 19 nt, Artificial Sequence
  Description of Artificial Sequence: Synthetic oligonucleotide
  Antisense strand to SEQ ID NO: 144770
uucauccugauucuguauc

SEQ ID NO: 144772 - RNA, 19 nt, Artificial Sequence
  Description of Artificial Sequence: Synthetic oligonucleotide
  Sense strand starting at position 3026 of SEQ ID NO: 1857
uuggguguaaugggauaca

SEQ ID NO: 144773 - RNA, 19 nt, Artificial Sequence
  Description of Artificial Sequence: Synthetic oligonucleotide
  Antisense strand to SEQ ID NO: 144772
uguaucccauuacacccaa

SEQ ID NO: 144774 - RNA, 19 nt, Artificial Sequence
  Description of Artificial Sequence: Synthetic oligonucleotide
  Sense strand starting at position 3022 of SEQ ID NO: 1857
uuguuuggguguaauggga

SEQ ID NO: 144775 - RNA, 19 nt, Artificial Sequence
  Description of Artificial Sequence: Synthetic oligonucleotide
  Antisense strand to SEQ ID NO: 144774
ucccauuacacccaaacaa

SEQ ID NO: 144776 - RNA, 19 nt, Artificial Sequence
  Description of Artificial Sequence: Synthetic oligonucleotide
  Sense strand starting at position 2943 of SEQ ID NO: 1857
cauauugagugacuuugaa

SEQ ID NO: 144777 - RNA, 19 nt, Artificial Sequence
  Description of Artificial Sequence: Synthetic oligonucleotide
  Antisense strand to SEQ ID NO: 144776
uucaaagucacucaauaug

SEQ ID NO: 144778 - RNA, 19 nt, Artificial Sequence
  Description of Artificial Sequence: Synthetic oligonucleotide
  Sense strand starting at position 2940 of SEQ ID NO: 1857
ccucauauugagugacuuu

SEQ ID NO: 144779 - RNA, 19 nt, Artificial Sequence
  Description of Artificial Sequence: Synthetic oligonucleotide
  Antisense strand to SEQ ID NO: 144778
aaagucacucaauaugagg

SEQ ID NO: 144780 - RNA, 19 nt, Artificial Sequence
  Description of Artificial Sequence: Synthetic oligonucleotide
  Sense strand starting at position 2939 of SEQ ID NO: 1857
cccucauauugagugacuu

SEQ ID NO: 144781 - RNA, 19 nt, Artificial Sequence
  Description of Artificial Sequence: Synthetic oligonucleotide
  Antisense strand to SEQ ID NO: 144780
aagucacucaauaugaggg

SEQ ID NO: 144782 - RNA, 19 nt, Artificial Sequence
  Description of Artificial Sequence: Synthetic oligonucleotide
  Sense strand starting at position 2852 of SEQ ID NO: 1857
gguaauauguuucuguaaa

SEQ ID NO: 144783 - RNA, 19 nt, Artificial Sequence
  Description of Artificial Sequence: Synthetic oligonucleotide
  Antisense strand to SEQ ID NO: 144782
uuuacagaaacauauuacc

SEQ ID NO: 144784 - RNA, 19 nt, Artificial Sequence
  Description of Artificial Sequence: Synthetic oligonucleotide
  Sense strand starting at position 2719 of SEQ ID NO: 1857
aaacguaaucuugaacgua

SEQ ID NO: 144785 - RNA, 19 nt, Artificial Sequence
  Description of Artificial Sequence: Synthetic oligonucleotide
  Antisense strand to SEQ ID NO: 144784
uacguucaagauuacguuu

SEQ ID NO: 144786 - RNA, 19 nt, Artificial Sequence
  Description of Artificial Sequence: Synthetic oligonucleotide
  Sense strand starting at position 2715 of SEQ ID NO: 1857
ugauaaacguaaucuugaa

SEQ ID NO: 144787 - RNA, 19 nt, Artificial Sequence
  Description of Artificial Sequence: Synthetic oligonucleotide
  Antisense strand to SEQ ID NO: 144786
uucaagauuacguuuauca

SEQ ID NO: 144788 - RNA, 19 nt, Artificial Sequence
  Description of Artificial Sequence: Synthetic oligonucleotide
  Sense strand starting at position 2587 of SEQ ID NO: 1857
agagauauuaaguaacguu

SEQ ID NO: 144789 - RNA, 19 nt, Artificial Sequence
  Description of Artificial Sequence: Synthetic oligonucleotide
  Antisense strand to SEQ ID NO: 144788
aacguuacuuaauaucucu

SEQ ID NO: 144790 - RNA, 19 nt, Artificial Sequence
  Description of Artificial Sequence: Synthetic oligonucleotide
  Sense strand starting at position 2586 of SEQ ID NO: 1857
cagagauauuaaguaacgu

SEQ ID NO: 144791 - RNA, 19 nt, Artificial Sequence
  Description of Artificial Sequence: Synthetic oligonucleotide
  Antisense strand to SEQ ID NO: 144790
acguuacuuaauaucucug

SEQ ID NO: 144792 - RNA, 19 nt, Artificial Sequence
  Description of Artificial Sequence: Synthetic oligonucleotide
  Sense strand starting at position 2451 of SEQ ID NO: 1857
auugauacuagugguagua

SEQ ID NO: 144793 - RNA, 19 nt, Artificial Sequence
  Description of Artificial Sequence: Synthetic oligonucleotide
  Antisense strand to SEQ ID NO: 144792
uacuaccacuaguaucaau

SEQ ID NO: 144794 - RNA, 19 nt, Artificial Sequence
  Description of Artificial Sequence: Synthetic oligonucleotide
  Sense strand starting at position 2338 of SEQ ID NO: 1857
acauguggucaacagucua

SEQ ID NO: 144795 - RNA, 19 nt, Artificial Sequence
  Description of Artificial Sequence: Synthetic oligonucleotide
  Antisense strand to SEQ ID NO: 144794
uagacuguugaccacaugu

SEQ ID NO: 144796 - RNA, 19 nt, Artificial Sequence
  Description of Artificial Sequence: Synthetic oligonucleotide
  Sense strand starting at position 2335 of SEQ ID NO: 1857
ucuacauguggucaacagu

SEQ ID NO: 144797 - RNA, 19 nt, Artificial Sequence
  Description of Artificial Sequence: Synthetic oligonucleotide
  Antisense strand to SEQ ID NO: 144796
acuguugaccacauguaga

SEQ ID NO: 144798 - RNA, 19 nt, Artificial Sequence
  Description of Artificial Sequence: Synthetic oligonucleotide
  Sense strand starting at position 2208 of SEQ ID NO: 1857
acauguaugcuccagaaau

SEQ ID NO: 144799 - RNA, 19 nt, Artificial Sequence
  Description of Artificial Sequence: Synthetic oligonucleotide
  Antisense strand to SEQ ID NO: 144798
auuucuggagcauacaugu

SEQ ID NO: 144800 - RNA, 19 nt, Artificial Sequence
  Description of Artificial Sequence: Synthetic oligonucleotide
  Sense strand starting at position 2206 of SEQ ID NO: 1857
auacauguaugcuccagaa

SEQ ID NO: 144801 - RNA, 19 nt, Artificial Sequence
  Description of Artificial Sequence: Synthetic oligonucleotide
  Antisense strand to SEQ ID NO: 144800
uucuggagcauacauguau

SEQ ID NO: 144802 - RNA, 19 nt, Artificial Sequence
  Description of Artificial Sequence: Synthetic oligonucleotide
  Sense strand starting at position 2160 of SEQ ID NO: 1857
ugugaaugcuccuuugacu

SEQ ID NO: 144803 - RNA, 19 nt, Artificial Sequence
  Description of Artificial Sequence: Synthetic oligonucleotide
  Antisense strand to SEQ ID NO: 144802
agucaaaggagcauucaca

SEQ ID NO: 144804 - RNA, 19 nt, Artificial Sequence
  Description of Artificial Sequence: Synthetic oligonucleotide
  Sense strand starting at position 2058 of SEQ ID NO: 1857
ugcgaaugagauugaauua

SEQ ID NO: 144805 - RNA, 19 nt, Artificial Sequence
  Description of Artificial Sequence: Synthetic oligonucleotide
  Antisense strand to SEQ ID NO: 144804
uaauucaaucucauucgca

SEQ ID NO: 144806 - RNA, 19 nt, Artificial Sequence
  Description of Artificial Sequence: Synthetic oligonucleotide
  Sense strand starting at position 871 of SEQ ID NO: 1857
gguccuuucguguuagcuc

SEQ ID NO: 144807 - RNA, 19 nt, Artificial Sequence
  Description of Artificial Sequence: Synthetic oligonucleotide
  Antisense strand to SEQ ID NO: 144806
gagcuaacacgaaaggacc

SEQ ID NO: 144808 - RNA, 19 nt, Artificial Sequence
  Description of Artificial Sequence: Synthetic oligonucleotide
  Sense strand starting at position 782 of SEQ ID NO: 1857
ugcuuaaauugugagauuu

SEQ ID NO: 144809 - RNA, 19 nt, Artificial Sequence
  Description of Artificial Sequence: Synthetic oligonucleotide
  Antisense strand to SEQ ID NO: 144808
aaaucucacaauuuaagca

SEQ ID NO: 144810 - RNA, 19 nt, Artificial Sequence
  Description of Artificial Sequence: Synthetic oligonucleotide
  Sense strand starting at position 779 of SEQ ID NO: 1857
uguugcuuaaauugugaga

SEQ ID NO: 144811 - RNA, 19 nt, Artificial Sequence
  Description of Artificial Sequence: Synthetic oligonucleotide
  Antisense strand to SEQ ID NO: 144810
ucucacaauuuaagcaaca

SEQ ID NO: 144812 - RNA, 19 nt, Artificial Sequence
  Description of Artificial Sequence: Synthetic oligonucleotide
  Sense strand starting at position 774 of SEQ ID NO: 1857
uuaucuguugcuuaaauug

SEQ ID NO: 144813 - RNA, 19 nt, Artificial Sequence
  Description of Artificial Sequence: Synthetic oligonucleotide
  Antisense strand to SEQ ID NO: 144812
caauuuaagcaacagauaa

SEQ ID NO: 144814 - RNA, 19 nt, Artificial Sequence
  Description of Artificial Sequence: Synthetic oligonucleotide
  Sense strand starting at position 708 of SEQ ID NO: 1857
ucaggaaacuuugcucuau

SEQ ID NO: 144815 - RNA, 19 nt, Artificial Sequence
  Description of Artificial Sequence: Synthetic oligonucleotide
  Antisense strand to SEQ ID NO: 144814
auagagcaaaguuuccuga

SEQ ID NO: 144816 - RNA, 19 nt, Artificial Sequence
  Description of Artificial Sequence: Synthetic oligonucleotide
  Sense strand starting at position 662 of SEQ ID NO: 1857
gucaccuucugauugaaac

SEQ ID NO: 144817 - RNA, 19 nt, Artificial Sequence
  Description of Artificial Sequence: Synthetic oligonucleotide
  Antisense strand to SEQ ID NO: 144816
guuucaaucagaaggugac

SEQ ID NO: 144818 - RNA, 19 nt, Artificial Sequence
  Description of Artificial Sequence: Synthetic oligonucleotide
  Sense strand starting at position 482 of SEQ ID NO: 1857
agaaaugguguuuacucuu

SEQ ID NO: 144819 - RNA, 19 nt, Artificial Sequence
  Description of Artificial Sequence: Synthetic oligonucleotide
  Antisense strand to SEQ ID NO: 144818
aagaguaaacaccauuucu

SEQ ID NO: 144820 - RNA, 19 nt, Artificial Sequence
  Description of Artificial Sequence: Synthetic oligonucleotide
  Sense strand starting at position 481 of SEQ ID NO: 1857
aagaaaugguguuuacucu

SEQ ID NO: 144821 - RNA, 19 nt, Artificial Sequence
  Description of Artificial Sequence: Synthetic oligonucleotide
  Antisense strand to SEQ ID NO: 144820
agaguaaacaccauuucuu

SEQ ID NO: 144822 - RNA, 19 nt, Artificial Sequence
  Description of Artificial Sequence: Synthetic oligonucleotide
  Sense strand starting at position 388 of SEQ ID NO: 1857
aggagcuuuaaguagcuua

SEQ ID NO: 144823 - RNA, 19 nt, Artificial Sequence
  Description of Artificial Sequence: Synthetic oligonucleotide
  Antisense strand to SEQ ID NO: 144822
uaagcuacuuaaagcuccu

SEQ ID NO: 144824 - RNA, 19 nt, Artificial Sequence
  Description of Artificial Sequence: Synthetic oligonucleotide
  Sense strand starting at position 350 of SEQ ID NO: 1857
uguaucuaccaagggaaau

SEQ ID NO: 144825 - RNA, 19 nt, Artificial Sequence
  Description of Artificial Sequence: Synthetic oligonucleotide
  Antisense strand to SEQ ID NO: 144824
auuucccuugguagauaca

SEQ ID NO: 144826 - RNA, 19 nt, Artificial Sequence
  Description of Artificial Sequence: Synthetic oligonucleotide
  Sense strand starting at position 271 of SEQ ID NO: 1857
auacuaguuucugugaauu

SEQ ID NO: 144827 - RNA, 19 nt, Artificial Sequence
  Description of Artificial Sequence: Synthetic oligonucleotide
  Antisense strand to SEQ ID NO: 144826
aauucacagaaacuaguau

SEQ ID NO: 144828 - RNA, 19 nt, Artificial Sequence
  Description of Artificial Sequence: Synthetic oligonucleotide
  Sense strand starting at position 269 of SEQ ID NO: 1857
ucauacuaguuucugugaa

SEQ ID NO: 144829 - RNA, 19 nt, Artificial Sequence
  Description of Artificial Sequence: Synthetic oligonucleotide
  Antisense strand to SEQ ID NO: 144828
uucacagaaacuaguauga

SEQ ID NO: 144830 - RNA, 19 nt, Artificial Sequence
  Description of Artificial Sequence: Synthetic oligonucleotide
  Sense strand starting at position 184 of SEQ ID NO: 1857
gcacccauuucucuaaggu

SEQ ID NO: 144831 - RNA, 19 nt, Artificial Sequence
  Description of Artificial Sequence: Synthetic oligonucleotide
  Antisense strand to SEQ ID NO: 144830
accuuagagaaaugggugc

SEQ ID NO: 144832 - RNA, 19 nt, Artificial Sequence
  Description of Artificial Sequence: Synthetic oligonucleotide
  Sense strand starting at position 26 of SEQ ID NO: 1857
ggacauguuguggagguuu

SEQ ID NO: 144833 - RNA, 19 nt, Artificial Sequence
  Description of Artificial Sequence: Synthetic oligonucleotide
  Antisense strand to SEQ ID NO: 144832
aaaccuccacaacaugucc

SEQ ID NO: 144834 - RNA, 19 nt, Artificial Sequence
  Description of Artificial Sequence: Synthetic oligonucleotide
  Sense strand starting at position 3892 of SEQ ID NO: 1858
agaaucaauucuuugugca

SEQ ID NO: 144835 - RNA, 19 nt, Artificial Sequence
  Description of Artificial Sequence: Synthetic oligonucleotide
  Antisense strand to SEQ ID NO: 144834
ugcacaaagaauugauucu

SEQ ID NO: 144836 - RNA, 19 nt, Artificial Sequence
  Description of Artificial Sequence: Synthetic oligonucleotide
  Sense strand starting at position 3810 of SEQ ID NO: 1858
cucaguacucacuauuaug

SEQ ID NO: 144837 - RNA, 19 nt, Artificial Sequence
  Description of Artificial Sequence: Synthetic oligonucleotide
  Antisense strand to SEQ ID NO: 144836
cauaauagugaguacugag

SEQ ID NO: 144838 - RNA, 19 nt, Artificial Sequence
  Description of Artificial Sequence: Synthetic oligonucleotide
  Sense strand starting at position 3712 of SEQ ID NO: 1858
gugcuuugauaaucaauca

SEQ ID NO: 144839 - RNA, 19 nt, Artificial Sequence
  Description of Artificial Sequence: Synthetic oligonucleotide
  Antisense strand to SEQ ID NO: 144838
ugauugauuaucaaagcac

SEQ ID NO: 144840 - RNA, 19 nt, Artificial Sequence
  Description of Artificial Sequence: Synthetic oligonucleotide
  Sense strand starting at position 3527 of SEQ ID NO: 1858
uuuauauauggcuacuaga

SEQ ID NO: 144841 - RNA, 19 nt, Artificial Sequence
  Description of Artificial Sequence: Synthetic oligonucleotide
  Antisense strand to SEQ ID NO: 144840
ucuaguagccauauauaaa

SEQ ID NO: 144842 - RNA, 19 nt, Artificial Sequence
  Description of Artificial Sequence: Synthetic oligonucleotide
  Sense strand starting at position 3362 of SEQ ID NO: 1858
uuaaaugugcagcaaauau

SEQ ID NO: 144843 - RNA, 19 nt, Artificial Sequence
  Description of Artificial Sequence: Synthetic oligonucleotide
  Antisense strand to SEQ ID NO: 144842
auauuugcugcacauuuaa

SEQ ID NO: 144844 - RNA, 19 nt, Artificial Sequence
  Description of Artificial Sequence: Synthetic oligonucleotide
  Sense strand starting at position 3220 of SEQ ID NO: 1858
gguuccucuuggccaagau

SEQ ID NO: 144845 - RNA, 19 nt, Artificial Sequence
  Description of Artificial Sequence: Synthetic oligonucleotide
  Antisense strand to SEQ ID NO: 144844
aucuuggccaagaggaacc

SEQ ID NO: 144846 - RNA, 19 nt, Artificial Sequence
  Description of Artificial Sequence: Synthetic oligonucleotide
  Sense strand starting at position 3210 of SEQ ID NO: 1858
cagagauaaugguuccucu

SEQ ID NO: 144847 - RNA, 19 nt, Artificial Sequence
  Description of Artificial Sequence: Synthetic oligonucleotide
  Antisense strand to SEQ ID NO: 144846
agaggaaccauuaucucug

SEQ ID NO: 144848 - RNA, 19 nt, Artificial Sequence
  Description of Artificial Sequence: Synthetic oligonucleotide
  Sense strand starting at position 3197 of SEQ ID NO: 1858
gcaagagguuaaccagaga

SEQ ID NO: 144849 - RNA, 19 nt, Artificial Sequence
  Description of Artificial Sequence: Synthetic oligonucleotide
  Antisense strand to SEQ ID NO: 144848
ucucugguuaaccucuugc

SEQ ID NO: 144850 - RNA, 19 nt, Artificial Sequence
  Description of Artificial Sequence: Synthetic oligonucleotide
  Sense strand starting at position 3081 of SEQ ID NO: 1858
ccaucuugguuagugauca

SEQ ID NO: 144851 - RNA, 19 nt, Artificial Sequence
  Description of Artificial Sequence: Synthetic oligonucleotide
  Antisense strand to SEQ ID NO: 144850
ugaucacuaaccaagaugg

SEQ ID NO: 144852 - RNA, 19 nt, Artificial Sequence
  Description of Artificial Sequence: Synthetic oligonucleotide
  Sense strand starting at position 2967 of SEQ ID NO: 1858
uguccuuuccagcaaagac

SEQ ID NO: 144853 - RNA, 19 nt, Artificial Sequence
  Description of Artificial Sequence: Synthetic oligonucleotide
  Antisense strand to SEQ ID NO: 144852
gucuuugcuggaaaggaca

SEQ ID NO: 144854 - RNA, 19 nt, Artificial Sequence
  Description of Artificial Sequence: Synthetic oligonucleotide
  Sense strand starting at position 2808 of SEQ ID NO: 1858
agagaucgugcucagcaga

SEQ ID NO: 144855 - RNA, 19 nt, Artificial Sequence
  Description of Artificial Sequence: Synthetic oligonucleotide
  Antisense strand to SEQ ID NO: 144854
ucugcugagcacgaucucu

SEQ ID NO: 144856 - RNA, 19 nt, Artificial Sequence
  Description of Artificial Sequence: Synthetic oligonucleotide
  Sense strand starting at position 2481 of SEQ ID NO: 1858
gaguucugcaaaggaagga

SEQ ID NO: 144857 - RNA, 19 nt, Artificial Sequence
  Description of Artificial Sequence: Synthetic oligonucleotide
  Antisense strand to SEQ ID NO: 144856
uccuuccuuugcagaacuc

SEQ ID NO: 144858 - RNA, 19 nt, Artificial Sequence
  Description of Artificial Sequence: Synthetic oligonucleotide
  Sense strand starting at position 2477 of SEQ ID NO: 1858
agcugaguucugcaaagga

SEQ ID NO: 144859 - RNA, 19 nt, Artificial Sequence
  Description of Artificial Sequence: Synthetic oligonucleotide
  Antisense strand to SEQ ID NO: 144858
uccuuugcagaacucagcu

SEQ ID NO: 144860 - RNA, 19 nt, Artificial Sequence
  Description of Artificial Sequence: Synthetic oligonucleotide
  Sense strand starting at position 2253 of SEQ ID NO: 1858
uuguuagcucuagaguaaa

SEQ ID NO: 144861 - RNA, 19 nt, Artificial Sequence
  Description of Artificial Sequence: Synthetic oligonucleotide
  Antisense strand to SEQ ID NO: 144860
uuuacucuagagcuaacaa

SEQ ID NO: 144862 - RNA, 19 nt, Artificial Sequence
  Description of Artificial Sequence: Synthetic oligonucleotide
  Sense strand starting at position 2199 of SEQ ID NO: 1858
cuuaauuguauguggaaug

SEQ ID NO: 144863 - RNA, 19 nt, Artificial Sequence
  Description of Artificial Sequence: Synthetic oligonucleotide
  Antisense strand to SEQ ID NO: 144862
cauuccacauacaauuaag

SEQ ID NO: 144864 - RNA, 19 nt, Artificial Sequence
  Description of Artificial Sequence: Synthetic oligonucleotide
  Sense strand starting at position 2198 of SEQ ID NO: 1858
acuuaauuguauguggaau

SEQ ID NO: 144865 - RNA, 19 nt, Artificial Sequence
  Description of Artificial Sequence: Synthetic oligonucleotide
  Antisense strand to SEQ ID NO: 144864
auuccacauacaauuaagu

SEQ ID NO: 144866 - RNA, 19 nt, Artificial Sequence
  Description of Artificial Sequence: Synthetic oligonucleotide
  Sense strand starting at position 2197 of SEQ ID NO: 1858
gacuuaauuguauguggaa

SEQ ID NO: 144867 - RNA, 19 nt, Artificial Sequence
  Description of Artificial Sequence: Synthetic oligonucleotide
  Antisense strand to SEQ ID NO: 144866
uuccacauacaauuaaguc

SEQ ID NO: 144868 - RNA, 19 nt, Artificial Sequence
  Description of Artificial Sequence: Synthetic oligonucleotide
  Sense strand starting at position 2183 of SEQ ID NO: 1858
gggacugauuucuggacuu

SEQ ID NO: 144869 - RNA, 19 nt, Artificial Sequence
  Description of Artificial Sequence: Synthetic oligonucleotide
  Antisense strand to SEQ ID NO: 144868
aaguccagaaaucaguccc

SEQ ID NO: 144870 - RNA, 19 nt, Artificial Sequence
  Description of Artificial Sequence: Synthetic oligonucleotide
  Sense strand starting at position 1749 of SEQ ID NO: 1858
ggaucagacgccuagaggu

SEQ ID NO: 144871 - RNA, 19 nt, Artificial Sequence
  Description of Artificial Sequence: Synthetic oligonucleotide
  Antisense strand to SEQ ID NO: 144870
accucuaggcgucugaucc

SEQ ID NO: 144872 - RNA, 19 nt, Artificial Sequence
  Description of Artificial Sequence: Synthetic oligonucleotide
  Sense strand starting at position 1677 of SEQ ID NO: 1858
ggcccauuucucuggccga

SEQ ID NO: 144873 - RNA, 19 nt, Artificial Sequence
  Description of Artificial Sequence: Synthetic oligonucleotide
  Antisense strand to SEQ ID NO: 144872
ucggccagagaaaugggcc

SEQ ID NO: 144874 - RNA, 19 nt, Artificial Sequence
  Description of Artificial Sequence: Synthetic oligonucleotide
  Sense strand starting at position 1666 of SEQ ID NO: 1858
gcaguaauuucggcccauu

SEQ ID NO: 144875 - RNA, 19 nt, Artificial Sequence
  Description of Artificial Sequence: Synthetic oligonucleotide
  Antisense strand to SEQ ID NO: 144874
aaugggccgaaauuacugc

SEQ ID NO: 144876 - RNA, 19 nt, Artificial Sequence
  Description of Artificial Sequence: Synthetic oligonucleotide
  Sense strand starting at position 1500 of SEQ ID NO: 1858
gguucagcccuggagaugu

SEQ ID NO: 144877 - RNA, 19 nt, Artificial Sequence
  Description of Artificial Sequence: Synthetic oligonucleotide
  Antisense strand to SEQ ID NO: 144876
acaucuccagggcugaacc

SEQ ID NO: 144878 - RNA, 19 nt, Artificial Sequence
  Description of Artificial Sequence: Synthetic oligonucleotide
  Sense strand starting at position 1498 of SEQ ID NO: 1858
aggguucagcccuggagau

SEQ ID NO: 144879 - RNA, 19 nt, Artificial Sequence
  Description of Artificial Sequence: Synthetic oligonucleotide
  Antisense strand to SEQ ID NO: 144878
aucuccagggcugaacccu

SEQ ID NO: 144880 - RNA, 19 nt, Artificial Sequence
  Description of Artificial Sequence: Synthetic oligonucleotide
  Sense strand starting at position 1248 of SEQ ID NO: 1858
uuauccuuaugguuaaagu

SEQ ID NO: 144881 - RNA, 19 nt, Artificial Sequence
  Description of Artificial Sequence: Synthetic oligonucleotide
  Antisense strand to SEQ ID NO: 144880
acuuuaaccauaaggauaa

SEQ ID NO: 144882 - RNA, 19 nt, Artificial Sequence
  Description of Artificial Sequence: Synthetic oligonucleotide
  Sense strand starting at position 1229 of SEQ ID NO: 1858
agugucauaagguauguau

SEQ ID NO: 144883 - RNA, 19 nt, Artificial Sequence
  Description of Artificial Sequence: Synthetic oligonucleotide
  Antisense strand to SEQ ID NO: 144882
auacauaccuuaugacacu

SEQ ID NO: 144884 - RNA, 19 nt, Artificial Sequence
  Description of Artificial Sequence: Synthetic oligonucleotide
  Sense strand starting at position 1164 of SEQ ID NO: 1858
ugagaauaguguucuacac

SEQ ID NO: 144885 - RNA, 19 nt, Artificial Sequence
  Description of Artificial Sequence: Synthetic oligonucleotide
  Antisense strand to SEQ ID NO: 144884
guguagaacacuauucuca

SEQ ID NO: 144886 - RNA, 19 nt, Artificial Sequence
  Description of Artificial Sequence: Synthetic oligonucleotide
  Sense strand starting at position 1158 of SEQ ID NO: 1858
uaugguugagaauaguguu

SEQ ID NO: 144887 - RNA, 19 nt, Artificial Sequence
  Description of Artificial Sequence: Synthetic oligonucleotide
  Antisense strand to SEQ ID NO: 144886
aacacuauucucaaccaua

SEQ ID NO: 144888 - RNA, 19 nt, Artificial Sequence
  Description of Artificial Sequence: Synthetic oligonucleotide
  Sense strand starting at position 1153 of SEQ ID NO: 1858
gcuccuaugguugagaaua

SEQ ID NO: 144889 - RNA, 19 nt, Artificial Sequence
  Description of Artificial Sequence: Synthetic oligonucleotide
  Antisense strand to SEQ ID NO: 144888
uauucucaaccauaggagc

SEQ ID NO: 144890 - RNA, 19 nt, Artificial Sequence
  Description of Artificial Sequence: Synthetic oligonucleotide
  Sense strand starting at position 1152 of SEQ ID NO: 1858
agcuccuaugguugagaau

SEQ ID NO: 144891 - RNA, 19 nt, Artificial Sequence
  Description of Artificial Sequence: Synthetic oligonucleotide
  Antisense strand to SEQ ID NO: 144890
auucucaaccauaggagcu

SEQ ID NO: 144892 - RNA, 19 nt, Artificial Sequence
  Description of Artificial Sequence: Synthetic oligonucleotide
  Sense strand starting at position 1151 of SEQ ID NO: 1858
aagcuccuaugguugagaa

SEQ ID NO: 144893 - RNA, 19 nt, Artificial Sequence
  Description of Artificial Sequence: Synthetic oligonucleotide
  Antisense strand to SEQ ID NO: 144892
uucucaaccauaggagcuu

SEQ ID NO: 144894 - RNA, 19 nt, Artificial Sequence
  Description of Artificial Sequence: Synthetic oligonucleotide
  Sense strand starting at position 1052 of SEQ ID NO: 1858
gcuuccaacccuuggaauu

SEQ ID NO: 144895 - RNA, 19 nt, Artificial Sequence
  Description of Artificial Sequence: Synthetic oligonucleotide
  Antisense strand to SEQ ID NO: 144894
aauuccaaggguuggaagc

SEQ ID NO: 144896 - RNA, 19 nt, Artificial Sequence
  Description of Artificial Sequence: Synthetic oligonucleotide
  Sense strand starting at position 1006 of SEQ ID NO: 1858
ccaggauacgcugguaaau

SEQ ID NO: 144897 - RNA, 19 nt, Artificial Sequence
  Description of Artificial Sequence: Synthetic oligonucleotide
  Antisense strand to SEQ ID NO: 144896
auuuaccagcguauccugg

SEQ ID NO: 144898 - RNA, 19 nt, Artificial Sequence
  Description of Artificial Sequence: Synthetic oligonucleotide
  Sense strand starting at position 997 of SEQ ID NO: 1858
gaacauauuccaggauacg

SEQ ID NO: 144899 - RNA, 19 nt, Artificial Sequence
  Description of Artificial Sequence: Synthetic oligonucleotide
  Antisense strand to SEQ ID NO: 144898
cguauccuggaauauguuc

SEQ ID NO: 144900 - RNA, 19 nt, Artificial Sequence
  Description of Artificial Sequence: Synthetic oligonucleotide
  Sense strand starting at position 933 of SEQ ID NO: 1858
aucccauuaggauauguuu

SEQ ID NO: 144901 - RNA, 19 nt, Artificial Sequence
  Description of Artificial Sequence: Synthetic oligonucleotide
  Antisense strand to SEQ ID NO: 144900
aaacauauccuaaugggau

SEQ ID NO: 144902 - RNA, 19 nt, Artificial Sequence
  Description of Artificial Sequence: Synthetic oligonucleotide
  Sense strand starting at position 892 of SEQ ID NO: 1858
cacugaugcuccgugauuu

SEQ ID NO: 144903 - RNA, 19 nt, Artificial Sequence
  Description of Artificial Sequence: Synthetic oligonucleotide
  Antisense strand to SEQ ID NO: 144902
aaaucacggagcaucagug

SEQ ID NO: 144904 - RNA, 19 nt, Artificial Sequence
  Description of Artificial Sequence: Synthetic oligonucleotide
  Sense strand starting at position 867 of SEQ ID NO: 1858
uugagauagcucuauuguu

SEQ ID NO: 144905 - RNA, 19 nt, Artificial Sequence
  Description of Artificial Sequence: Synthetic oligonucleotide
  Antisense strand to SEQ ID NO: 144904
aacaauagagcuaucucaa

SEQ ID NO: 144906 - RNA, 19 nt, Artificial Sequence
  Description of Artificial Sequence: Synthetic oligonucleotide
  Sense strand starting at position 836 of SEQ ID NO: 1858
ccuugucuauuugucuaua

SEQ ID NO: 144907 - RNA, 19 nt, Artificial Sequence
  Description of Artificial Sequence: Synthetic oligonucleotide
  Antisense strand to SEQ ID NO: 144906
uauagacaaauagacaagg

SEQ ID NO: 144908 - RNA, 19 nt, Artificial Sequence
  Description of Artificial Sequence: Synthetic oligonucleotide
  Sense strand starting at position 794 of SEQ ID NO: 1858
cagcacaaugccuggagau

SEQ ID NO: 144909 - RNA, 19 nt, Artificial Sequence
  Description of Artificial Sequence: Synthetic oligonucleotide
  Antisense strand to SEQ ID NO: 144908
aucuccaggcauugugcug

SEQ ID NO: 144910 - RNA, 19 nt, Artificial Sequence
  Description of Artificial Sequence: Synthetic oligonucleotide
  Sense strand starting at position 721 of SEQ ID NO: 1858
ggagcuuuggaccaguaac

SEQ ID NO: 144911 - RNA, 19 nt, Artificial Sequence
  Description of Artificial Sequence: Synthetic oligonucleotide
  Antisense strand to SEQ ID NO: 144910
guuacugguccaaagcucc

SEQ ID NO: 144912 - RNA, 19 nt, Artificial Sequence
  Description of Artificial Sequence: Synthetic oligonucleotide
  Sense strand starting at position 511 of SEQ ID NO: 1858
agcacaauacagugggaaa

SEQ ID NO: 144913 - RNA, 19 nt, Artificial Sequence
  Description of Artificial Sequence: Synthetic oligonucleotide
  Antisense strand to SEQ ID NO: 144912
uuucccacuguauugugcu

SEQ ID NO: 144914 - RNA, 19 nt, Artificial Sequence
  Description of Artificial Sequence: Synthetic oligonucleotide
  Sense strand starting at position 3950 of SEQ ID NO: 1859
cgauuugguuuggucuauu

SEQ ID NO: 144915 - RNA, 19 nt, Artificial Sequence
  Description of Artificial Sequence: Synthetic oligonucleotide
  Antisense strand to SEQ ID NO: 144914
aauagaccaaaccaaaucg

SEQ ID NO: 144916 - RNA, 19 nt, Artificial Sequence
  Description of Artificial Sequence: Synthetic oligonucleotide
  Sense strand starting at position 3948 of SEQ ID NO: 1859
cucgauuugguuuggucua

SEQ ID NO: 144917 - RNA, 19 nt, Artificial Sequence
  Description of Artificial Sequence: Synthetic oligonucleotide
  Antisense strand to SEQ ID NO: 144916
uagaccaaaccaaaucgag

SEQ ID NO: 144918 - RNA, 19 nt, Artificial Sequence
  Description of Artificial Sequence: Synthetic oligonucleotide
  Sense strand starting at position 3909 of SEQ ID NO: 1859
guaccucaaguuugauuau

SEQ ID NO: 144919 - RNA, 19 nt, Artificial Sequence
  Description of Artificial Sequence: Synthetic oligonucleotide
  Antisense strand to SEQ ID NO: 144918
auaaucaaacuugagguac

SEQ ID NO: 144920 - RNA, 19 nt, Artificial Sequence
  Description of Artificial Sequence: Synthetic oligonucleotide
  Sense strand starting at position 3903 of SEQ ID NO: 1859
ugggauguaccucaaguuu

SEQ ID NO: 144921 - RNA, 19 nt, Artificial Sequence
  Description of Artificial Sequence: Synthetic oligonucleotide
  Antisense strand to SEQ ID NO: 144920
aaacuugagguacauccca

SEQ ID NO: 144922 - RNA, 19 nt, Artificial Sequence
  Description of Artificial Sequence: Synthetic oligonucleotide
  Sense strand starting at position 3776 of SEQ ID NO: 1859
agagcugauugcuuaacau

SEQ ID NO: 144923 - RNA, 19 nt, Artificial Sequence
  Description of Artificial Sequence: Synthetic oligonucleotide
  Antisense strand to SEQ ID NO: 144922
auguuaagcaaucagcucu

SEQ ID NO: 144924 - RNA, 19 nt, Artificial Sequence
  Description of Artificial Sequence: Synthetic oligonucleotide
  Sense strand starting at position 3773 of SEQ ID NO: 1859
agaagagcugauugcuuaa

SEQ ID NO: 144925 - RNA, 19 nt, Artificial Sequence
  Description of Artificial Sequence: Synthetic oligonucleotide
  Antisense strand to SEQ ID NO: 144924
uuaagcaaucagcucuucu

SEQ ID NO: 144926 - RNA, 19 nt, Artificial Sequence
  Description of Artificial Sequence: Synthetic oligonucleotide
  Sense strand starting at position 3575 of SEQ ID NO: 1859
gcccuauggauugguaacu

SEQ ID NO: 144927 - RNA, 19 nt, Artificial Sequence
  Description of Artificial Sequence: Synthetic oligonucleotide
  Antisense strand to SEQ ID NO: 144926
aguuaccaauccauagggc

SEQ ID NO: 144928 - RNA, 19 nt, Artificial Sequence
  Description of Artificial Sequence: Synthetic oligonucleotide
  Sense strand starting at position 3567 of SEQ ID NO: 1859
acaauagugcccuauggau

SEQ ID NO: 144929 - RNA, 19 nt, Artificial Sequence
  Description of Artificial Sequence: Synthetic oligonucleotide
  Antisense strand to SEQ ID NO: 144928
auccauagggcacuauugu

SEQ ID NO: 144930 - RNA, 19 nt, Artificial Sequence
  Description of Artificial Sequence: Synthetic oligonucleotide
  Sense strand starting at position 3538 of SEQ ID NO: 1859
ccguucuaugaauguauuu

SEQ ID NO: 144931 - RNA, 19 nt, Artificial Sequence
  Description of Artificial Sequence: Synthetic oligonucleotide
  Antisense strand to SEQ ID NO: 144930
aaauacauucauagaacgg

SEQ ID NO: 144932 - RNA, 19 nt, Artificial Sequence
  Description of Artificial Sequence: Synthetic oligonucleotide
  Sense strand starting at position 3126 of SEQ ID NO: 1859
uaggaaaguucuguauacu

SEQ ID NO: 144933 - RNA, 19 nt, Artificial Sequence
  Description of Artificial Sequence: Synthetic oligonucleotide
  Antisense strand to SEQ ID NO: 144932
aguauacagaacuuuccua

SEQ ID NO: 144934 - RNA, 19 nt, Artificial Sequence
  Description of Artificial Sequence: Synthetic oligonucleotide
  Sense strand starting at position 3097 of SEQ ID NO: 1859
gugugcauuuacucacuaa

SEQ ID NO: 144935 - RNA, 19 nt, Artificial Sequence
  Description of Artificial Sequence: Synthetic oligonucleotide
  Antisense strand to SEQ ID NO: 144934
uuagugaguaaaugcacac

SEQ ID NO: 144936 - RNA, 19 nt, Artificial Sequence
  Description of Artificial Sequence: Synthetic oligonucleotide
  Sense strand starting at position 3068 of SEQ ID NO: 1859
acaggcuucucuguaaaua

SEQ ID NO: 144937 - RNA, 19 nt, Artificial Sequence
  Description of Artificial Sequence: Synthetic oligonucleotide
  Antisense strand to SEQ ID NO: 144936
uauuuacagagaagccugu

SEQ ID NO: 144938 - RNA, 19 nt, Artificial Sequence
  Description of Artificial Sequence: Synthetic oligonucleotide
  Sense strand starting at position 3050 of SEQ ID NO: 1859
aguugucucagggaaggca

SEQ ID NO: 144939 - RNA, 19 nt, Artificial Sequence
  Description of Artificial Sequence: Synthetic oligonucleotide
  Antisense strand to SEQ ID NO: 144938
ugccuucccugagacaacu

SEQ ID NO: 144940 - RNA, 19 nt, Artificial Sequence
  Description of Artificial Sequence: Synthetic oligonucleotide
  Sense strand starting at position 2542 of SEQ ID NO: 1859
ccgaaauccuagccugaag

SEQ ID NO: 144941 - RNA, 19 nt, Artificial Sequence
  Description of Artificial Sequence: Synthetic oligonucleotide
  Antisense strand to SEQ ID NO: 144940
cuucaggcuaggauuucgg

SEQ ID NO: 144942 - RNA, 19 nt, Artificial Sequence
  Description of Artificial Sequence: Synthetic oligonucleotide
  Sense strand starting at position 2448 of SEQ ID NO: 1859
ggacgucccaaaggagauu

SEQ ID NO: 144943 - RNA, 19 nt, Artificial Sequence
  Description of Artificial Sequence: Synthetic oligonucleotide
  Antisense strand to SEQ ID NO: 144942
aaucuccuuugggacgucc

SEQ ID NO: 144944 - RNA, 19 nt, Artificial Sequence
  Description of Artificial Sequence: Synthetic oligonucleotide
  Sense strand starting at position 1436 of SEQ ID NO: 1859
gaauucggguuucucacaa

SEQ ID NO: 144945 - RNA, 19 nt, Artificial Sequence
  Description of Artificial Sequence: Synthetic oligonucleotide
  Antisense strand to SEQ ID NO: 144944
uugugagaaacccgaauuc

SEQ ID NO: 144946 - RNA, 19 nt, Artificial Sequence
  Description of Artificial Sequence: Synthetic oligonucleotide
  Sense strand starting at position 1368 of SEQ ID NO: 1859
gcgagcaggauuugcaaau

SEQ ID NO: 144947 - RNA, 19 nt, Artificial Sequence
  Description of Artificial Sequence: Synthetic oligonucleotide
  Antisense strand to SEQ ID NO: 144946
auuugcaaauccugcucgc

SEQ ID NO: 144948 - RNA, 19 nt, Artificial Sequence
  Description of Artificial Sequence: Synthetic oligonucleotide
  Sense strand starting at position 1361 of SEQ ID NO: 1859
uauugaugcgagcaggauu

SEQ ID NO: 144949 - RNA, 19 nt, Artificial Sequence
  Description of Artificial Sequence: Synthetic oligonucleotide
  Antisense strand to SEQ ID NO: 144948
aauccugcucgcaucaaua

SEQ ID NO: 144950 - RNA, 19 nt, Artificial Sequence
  Description of Artificial Sequence: Synthetic oligonucleotide
  Sense strand starting at position 1212 of SEQ ID NO: 1859
ggcuuucuaguuuggaaau

SEQ ID NO: 144951 - RNA, 19 nt, Artificial Sequence
  Description of Artificial Sequence: Synthetic oligonucleotide
  Antisense strand to SEQ ID NO: 144950
auuuccaaacuagaaagcc

SEQ ID NO: 144952 - RNA, 19 nt, Artificial Sequence
  Description of Artificial Sequence: Synthetic oligonucleotide
  Sense strand starting at position 1162 of SEQ ID NO: 1859
cuuuacacucgagaaguga

SEQ ID NO: 144953 - RNA, 19 nt, Artificial Sequence
  Description of Artificial Sequence: Synthetic oligonucleotide
  Antisense strand to SEQ ID NO: 144952
ucacuucucgaguguaaag

SEQ ID NO: 144954 - RNA, 19 nt, Artificial Sequence
  Description of Artificial Sequence: Synthetic oligonucleotide
  Sense strand starting at position 1160 of SEQ ID NO: 1859
cacuuuacacucgagaagu

SEQ ID NO: 144955 - RNA, 19 nt, Artificial Sequence
  Description of Artificial Sequence: Synthetic oligonucleotide
  Antisense strand to SEQ ID NO: 144954
acuucucgaguguaaagug

SEQ ID NO: 144956 - RNA, 19 nt, Artificial Sequence
  Description of Artificial Sequence: Synthetic oligonucleotide
  Sense strand starting at position 1076 of SEQ ID NO: 1859
accugaaaucccggcucuu

SEQ ID NO: 144957 - RNA, 19 nt, Artificial Sequence
  Description of Artificial Sequence: Synthetic oligonucleotide
  Antisense strand to SEQ ID NO: 144956
aagagccgggauuucaggu

SEQ ID NO: 144958 - RNA, 19 nt, Artificial Sequence
  Description of Artificial Sequence: Synthetic oligonucleotide
  Sense strand starting at position 1061 of SEQ ID NO: 1859
gccagaacugucugaaccu

SEQ ID NO: 144959 - RNA, 19 nt, Artificial Sequence
  Description of Artificial Sequence: Synthetic oligonucleotide
  Antisense strand to SEQ ID NO: 144958
agguucagacaguucuggc

SEQ ID NO: 144960 - RNA, 19 nt, Artificial Sequence
  Description of Artificial Sequence: Synthetic oligonucleotide
  Sense strand starting at position 999 of SEQ ID NO: 1859
agaugacaaccaugucuua

SEQ ID NO: 144961 - RNA, 19 nt, Artificial Sequence
  Description of Artificial Sequence: Synthetic oligonucleotide
  Antisense strand to SEQ ID NO: 144960
uaagacaugguugucaucu

SEQ ID NO: 144962 - RNA, 19 nt, Artificial Sequence
  Description of Artificial Sequence: Synthetic oligonucleotide
  Sense strand starting at position 937 of SEQ ID NO: 1859
aucagagaggccuguauua

SEQ ID NO: 144963 - RNA, 19 nt, Artificial Sequence
  Description of Artificial Sequence: Synthetic oligonucleotide
  Antisense strand to SEQ ID NO: 144962
uaauacaggccucucugau

SEQ ID NO: 144964 - RNA, 19 nt, Artificial Sequence
  Description of Artificial Sequence: Synthetic oligonucleotide
  Sense strand starting at position 862 of SEQ ID NO: 1859
guuggaugccuccagugga

SEQ ID NO: 144965 - RNA, 19 nt, Artificial Sequence
  Description of Artificial Sequence: Synthetic oligonucleotide
  Antisense strand to SEQ ID NO: 144964
uccacuggaggcauccaac

SEQ ID NO: 144966 - RNA, 19 nt, Artificial Sequence
  Description of Artificial Sequence: Synthetic oligonucleotide
  Sense strand starting at position 700 of SEQ ID NO: 1859
uaaguagucuuuccgaauu

SEQ ID NO: 144967 - RNA, 19 nt, Artificial Sequence
  Description of Artificial Sequence: Synthetic oligonucleotide
  Antisense strand to SEQ ID NO: 144966
aauucggaaagacuacuua

SEQ ID NO: 144968 - RNA, 19 nt, Artificial Sequence
  Description of Artificial Sequence: Synthetic oligonucleotide
  Sense strand starting at position 622 of SEQ ID NO: 1859
cuucgauaaacuuggagau

SEQ ID NO: 144969 - RNA, 19 nt, Artificial Sequence
  Description of Artificial Sequence: Synthetic oligonucleotide
  Antisense strand to SEQ ID NO: 144968
aucuccaaguuuaucgaag

SEQ ID NO: 144970 - RNA, 19 nt, Artificial Sequence
  Description of Artificial Sequence: Synthetic oligonucleotide
  Sense strand starting at position 559 of SEQ ID NO: 1859
guaccuaauguuuauggua

SEQ ID NO: 144971 - RNA, 19 nt, Artificial Sequence
  Description of Artificial Sequence: Synthetic oligonucleotide
  Antisense strand to SEQ ID NO: 144970
uaccauaaacauuagguac

SEQ ID NO: 144972 - RNA, 19 nt, Artificial Sequence
  Description of Artificial Sequence: Synthetic oligonucleotide
  Sense strand starting at position 534 of SEQ ID NO: 1859
gucauuguuguagauuaaa

SEQ ID NO: 144973 - RNA, 19 nt, Artificial Sequence
  Description of Artificial Sequence: Synthetic oligonucleotide
  Antisense strand to SEQ ID NO: 144972
uuuaaucuacaacaaugac

SEQ ID NO: 144974 - RNA, 19 nt, Artificial Sequence
  Description of Artificial Sequence: Synthetic oligonucleotide
  Sense strand starting at position 470 of SEQ ID NO: 1859
cuacauuaacugugacagu

SEQ ID NO: 144975 - RNA, 19 nt, Artificial Sequence
  Description of Artificial Sequence: Synthetic oligonucleotide
  Antisense strand to SEQ ID NO: 144974
acugucacaguuaauguag

SEQ ID NO: 144976 - RNA, 19 nt, Artificial Sequence
  Description of Artificial Sequence: Synthetic oligonucleotide
  Sense strand starting at position 257 of SEQ ID NO: 1859
aaucuaggucggugaaaua

SEQ ID NO: 144977 - RNA, 19 nt, Artificial Sequence
  Description of Artificial Sequence: Synthetic oligonucleotide
  Antisense strand to SEQ ID NO: 144976
uauuucaccgaccuagauu

SEQ ID NO: 144978 - RNA, 19 nt, Artificial Sequence
  Description of Artificial Sequence: Synthetic oligonucleotide
  Sense strand starting at position 256 of SEQ ID NO: 1859
uaaucuaggucggugaaau

SEQ ID NO: 144979 - RNA, 19 nt, Artificial Sequence
  Description of Artificial Sequence: Synthetic oligonucleotide
  Antisense strand to SEQ ID NO: 144978
auuucaccgaccuagauua

SEQ ID NO: 144980 - RNA, 19 nt, Artificial Sequence
  Description of Artificial Sequence: Synthetic oligonucleotide
  Sense strand starting at position 255 of SEQ ID NO: 1859
uuaaucuaggucggugaaa

SEQ ID NO: 144981 - RNA, 19 nt, Artificial Sequence
  Description of Artificial Sequence: Synthetic oligonucleotide
  Antisense strand to SEQ ID NO: 144980
uuucaccgaccuagauuaa

SEQ ID NO: 144982 - RNA, 19 nt, Artificial Sequence
  Description of Artificial Sequence: Synthetic oligonucleotide
  Sense strand starting at position 254 of SEQ ID NO: 1859
cuuaaucuaggucggugaa

SEQ ID NO: 144983 - RNA, 19 nt, Artificial Sequence
  Description of Artificial Sequence: Synthetic oligonucleotide
  Antisense strand to SEQ ID NO: 144982
uucaccgaccuagauuaag

SEQ ID NO: 144984 - RNA, 19 nt, Artificial Sequence
  Description of Artificial Sequence: Synthetic oligonucleotide
  Sense strand starting at position 239 of SEQ ID NO: 1859
uguacauguuaacuacuua

SEQ ID NO: 144985 - RNA, 19 nt, Artificial Sequence
  Description of Artificial Sequence: Synthetic oligonucleotide
  Antisense strand to SEQ ID NO: 144984
uaaguaguuaacauguaca

SEQ ID NO: 144986 - RNA, 19 nt, Artificial Sequence
  Description of Artificial Sequence: Synthetic oligonucleotide
  Sense strand starting at position 229 of SEQ ID NO: 1859
gguagaaagauguacaugu

SEQ ID NO: 144987 - RNA, 19 nt, Artificial Sequence
  Description of Artificial Sequence: Synthetic oligonucleotide
  Antisense strand to SEQ ID NO: 144986
acauguacaucuuucuacc

SEQ ID NO: 144988 - RNA, 19 nt, Artificial Sequence
  Description of Artificial Sequence: Synthetic oligonucleotide
  Sense strand starting at position 227 of SEQ ID NO: 1859
uggguagaaagauguacau

SEQ ID NO: 144989 - RNA, 19 nt, Artificial Sequence
  Description of Artificial Sequence: Synthetic oligonucleotide
  Antisense strand to SEQ ID NO: 144988
auguacaucuuucuaccca

SEQ ID NO: 144990 - RNA, 19 nt, Artificial Sequence
  Description of Artificial Sequence: Synthetic oligonucleotide
  Sense strand starting at position 151 of SEQ ID NO: 1859
uguggaauuuggcuacugu

SEQ ID NO: 144991 - RNA, 19 nt, Artificial Sequence
  Description of Artificial Sequence: Synthetic oligonucleotide
  Antisense strand to SEQ ID NO: 144990
acaguagccaaauuccaca

SEQ ID NO: 144992 - RNA, 19 nt, Artificial Sequence
  Description of Artificial Sequence: Synthetic oligonucleotide
  Sense strand starting at position 141 of SEQ ID NO: 1859
cuaaaugugauguggaauu

SEQ ID NO: 144993 - RNA, 19 nt, Artificial Sequence
  Description of Artificial Sequence: Synthetic oligonucleotide
  Antisense strand to SEQ ID NO: 144992
aauuccacaucacauuuag

SEQ ID NO: 144994 - RNA, 19 nt, Artificial Sequence
  Description of Artificial Sequence: Synthetic oligonucleotide
  Sense strand starting at position 78 of SEQ ID NO: 1860
uaguuaagacagugacaca

SEQ ID NO: 144995 - RNA, 19 nt, Artificial Sequence
  Description of Artificial Sequence: Synthetic oligonucleotide
  Antisense strand to SEQ ID NO: 144994
ugugucacugucuuaacua

SEQ ID NO: 144996 - RNA, 19 nt, Artificial Sequence
  Description of Artificial Sequence: Synthetic oligonucleotide
  Sense strand starting at position 370 of SEQ ID NO: 1860
ggcagagcuuggguuugaa

SEQ ID NO: 144997 - RNA, 19 nt, Artificial Sequence
  Description of Artificial Sequence: Synthetic oligonucleotide
  Antisense strand to SEQ ID NO: 144996
uucaaacccaagcucugcc

SEQ ID NO: 144998 - RNA, 19 nt, Artificial Sequence
  Description of Artificial Sequence: Synthetic oligonucleotide
  Sense strand starting at position 453 of SEQ ID NO: 1860
gcuggaagucccuaagcaa

SEQ ID NO: 144999 - RNA, 19 nt, Artificial Sequence
  Description of Artificial Sequence: Synthetic oligonucleotide
  Antisense strand to SEQ ID NO: 144998
uugcuuagggacuuccagc

SEQ ID NO: 145000 - RNA, 19 nt, Artificial Sequence
  Description of Artificial Sequence: Synthetic oligonucleotide
  Sense strand starting at position 501 of SEQ ID NO: 1860
gucugugggcccuaaacaa

SEQ ID NO: 145001 - RNA, 19 nt, Artificial Sequence
  Description of Artificial Sequence: Synthetic oligonucleotide
  Antisense strand to SEQ ID NO: 145000
uuguuuagggcccacagac

SEQ ID NO: 145002 - RNA, 19 nt, Artificial Sequence
  Description of Artificial Sequence: Synthetic oligonucleotide
  Sense strand starting at position 657 of SEQ ID NO: 1860
gcagcugccugauuacaga

SEQ ID NO: 145003 - RNA, 19 nt, Artificial Sequence
  Description of Artificial Sequence: Synthetic oligonucleotide
  Antisense strand to SEQ ID NO: 145002
ucuguaaucaggcagcugc

SEQ ID NO: 145004 - RNA, 19 nt, Artificial Sequence
  Description of Artificial Sequence: Synthetic oligonucleotide
  Sense strand starting at position 963 of SEQ ID NO: 1860
guucuccagccuugauaug

SEQ ID NO: 145005 - RNA, 19 nt, Artificial Sequence
  Description of Artificial Sequence: Synthetic oligonucleotide
  Antisense strand to SEQ ID NO: 145004
cauaucaaggcuggagaac

SEQ ID NO: 145006 - RNA, 19 nt, Artificial Sequence
  Description of Artificial Sequence: Synthetic oligonucleotide
  Sense strand starting at position 1054 of SEQ ID NO: 1860
ggcugaguuguccagaggu

SEQ ID NO: 145007 - RNA, 19 nt, Artificial Sequence
  Description of Artificial Sequence: Synthetic oligonucleotide
  Antisense strand to SEQ ID NO: 145006
accucuggacaacucagcc

SEQ ID NO: 145008 - RNA, 19 nt, Artificial Sequence
  Description of Artificial Sequence: Synthetic oligonucleotide
  Sense strand starting at position 1116 of SEQ ID NO: 1860
agagcuccucccuaugaau

SEQ ID NO: 145009 - RNA, 19 nt, Artificial Sequence
  Description of Artificial Sequence: Synthetic oligonucleotide
  Antisense strand to SEQ ID NO: 145008
auucauagggaggagcucu

SEQ ID NO: 145010 - RNA, 19 nt, Artificial Sequence
  Description of Artificial Sequence: Synthetic oligonucleotide
  Sense strand starting at position 1118 of SEQ ID NO: 1860
agcuccucccuaugaauga

SEQ ID NO: 145011 - RNA, 19 nt, Artificial Sequence
  Description of Artificial Sequence: Synthetic oligonucleotide
  Antisense strand to SEQ ID NO: 145010
ucauucauagggaggagcu

SEQ ID NO: 145012 - RNA, 19 nt, Artificial Sequence
  Description of Artificial Sequence: Synthetic oligonucleotide
  Sense strand starting at position 1316 of SEQ ID NO: 1860
acggugucacguugaggaa

SEQ ID NO: 145013 - RNA, 19 nt, Artificial Sequence
  Description of Artificial Sequence: Synthetic oligonucleotide
  Antisense strand to SEQ ID NO: 145012
uuccucaacgugacaccgu

SEQ ID NO: 145014 - RNA, 19 nt, Artificial Sequence
  Description of Artificial Sequence: Synthetic oligonucleotide
  Sense strand starting at position 1317 of SEQ ID NO: 1860
cggugucacguugaggaaa

SEQ ID NO: 145015 - RNA, 19 nt, Artificial Sequence
  Description of Artificial Sequence: Synthetic oligonucleotide
  Antisense strand to SEQ ID NO: 145014
uuuccucaacgugacaccg

SEQ ID NO: 145016 - RNA, 19 nt, Artificial Sequence
  Description of Artificial Sequence: Synthetic oligonucleotide
  Sense strand starting at position 2395 of SEQ ID NO: 1860
gucagaugguaagagaaga

SEQ ID NO: 145017 - RNA, 19 nt, Artificial Sequence
  Description of Artificial Sequence: Synthetic oligonucleotide
  Antisense strand to SEQ ID NO: 145016
ucuucucuuaccaucugac

SEQ ID NO: 145018 - RNA, 19 nt, Artificial Sequence
  Description of Artificial Sequence: Synthetic oligonucleotide
  Sense strand starting at position 2638 of SEQ ID NO: 1860
ggaacauucgaccaugucu

SEQ ID NO: 145019 - RNA, 19 nt, Artificial Sequence
  Description of Artificial Sequence: Synthetic oligonucleotide
  Antisense strand to SEQ ID NO: 145018
agacauggucgaauguucc

SEQ ID NO: 145020 - RNA, 19 nt, Artificial Sequence
  Description of Artificial Sequence: Synthetic oligonucleotide
  Sense strand starting at position 2646 of SEQ ID NO: 1860
cgaccaugucuggagacau

SEQ ID NO: 145021 - RNA, 19 nt, Artificial Sequence
  Description of Artificial Sequence: Synthetic oligonucleotide
  Antisense strand to SEQ ID NO: 145020
augucuccagacauggucg

SEQ ID NO: 145022 - RNA, 19 nt, Artificial Sequence
  Description of Artificial Sequence: Synthetic oligonucleotide
  Sense strand starting at position 2767 of SEQ ID NO: 1860
aauugucaggcccgaaaug

SEQ ID NO: 145023 - RNA, 19 nt, Artificial Sequence
  Description of Artificial Sequence: Synthetic oligonucleotide
  Antisense strand to SEQ ID NO: 145022
cauuucgggccugacaauu

SEQ ID NO: 145024 - RNA, 19 nt, Artificial Sequence
  Description of Artificial Sequence: Synthetic oligonucleotide
  Sense strand starting at position 2777 of SEQ ID NO: 1860
cccgaaaugucagcagguu

SEQ ID NO: 145025 - RNA, 19 nt, Artificial Sequence
  Description of Artificial Sequence: Synthetic oligonucleotide
  Antisense strand to SEQ ID NO: 145024
aaccugcugacauuucggg

SEQ ID NO: 145026 - RNA, 19 nt, Artificial Sequence
  Description of Artificial Sequence: Synthetic oligonucleotide
  Sense strand starting at position 2778 of SEQ ID NO: 1860
ccgaaaugucagcagguuu

SEQ ID NO: 145027 - RNA, 19 nt, Artificial Sequence
  Description of Artificial Sequence: Synthetic oligonucleotide
  Antisense strand to SEQ ID NO: 145026
aaaccugcugacauuucgg

SEQ ID NO: 145028 - RNA, 19 nt, Artificial Sequence
  Description of Artificial Sequence: Synthetic oligonucleotide
  Sense strand starting at position 2792 of SEQ ID NO: 1860
gguuucugagguugagaaa

SEQ ID NO: 145029 - RNA, 19 nt, Artificial Sequence
  Description of Artificial Sequence: Synthetic oligonucleotide
  Antisense strand to SEQ ID NO: 145028
uuucucaaccucagaaacc

SEQ ID NO: 145030 - RNA, 19 nt, Artificial Sequence
  Description of Artificial Sequence: Synthetic oligonucleotide
  Sense strand starting at position 2793 of SEQ ID NO: 1860
guuucugagguugagaaac

SEQ ID NO: 145031 - RNA, 19 nt, Artificial Sequence
  Description of Artificial Sequence: Synthetic oligonucleotide
  Antisense strand to SEQ ID NO: 145030
guuucucaaccucagaaac

SEQ ID NO: 145032 - RNA, 19 nt, Artificial Sequence
  Description of Artificial Sequence: Synthetic oligonucleotide
  Sense strand starting at position 2824 of SEQ ID NO: 1860
ccuggcaucugccuauaua

SEQ ID NO: 145033 - RNA, 19 nt, Artificial Sequence
  Description of Artificial Sequence: Synthetic oligonucleotide
  Antisense strand to SEQ ID NO: 145032
uauauaggcagaugccagg

SEQ ID NO: 145034 - RNA, 19 nt, Artificial Sequence
  Description of Artificial Sequence: Synthetic oligonucleotide
  Sense strand starting at position 2825 of SEQ ID NO: 1860
cuggcaucugccuauauaa

SEQ ID NO: 145035 - RNA, 19 nt, Artificial Sequence
  Description of Artificial Sequence: Synthetic oligonucleotide
  Antisense strand to SEQ ID NO: 145034
uuauauaggcagaugccag

SEQ ID NO: 145036 - RNA, 19 nt, Artificial Sequence
  Description of Artificial Sequence: Synthetic oligonucleotide
  Sense strand starting at position 2827 of SEQ ID NO: 1860
ggcaucugccuauauaaac

SEQ ID NO: 145037 - RNA, 19 nt, Artificial Sequence
  Description of Artificial Sequence: Synthetic oligonucleotide
  Antisense strand to SEQ ID NO: 145036
guuuauauaggcagaugcc

SEQ ID NO: 145038 - RNA, 19 nt, Artificial Sequence
  Description of Artificial Sequence: Synthetic oligonucleotide
  Sense strand starting at position 2859 of SEQ ID NO: 1860
ccuggaguccuggguucuu

SEQ ID NO: 145039 - RNA, 19 nt, Artificial Sequence
  Description of Artificial Sequence: Synthetic oligonucleotide
  Antisense strand to SEQ ID NO: 145038
aagaacccaggacuccagg

SEQ ID NO: 145040 - RNA, 19 nt, Artificial Sequence
  Description of Artificial Sequence: Synthetic oligonucleotide
  Sense strand starting at position 2889 of SEQ ID NO: 1860
gaggauacuguaugaaguc

SEQ ID NO: 145041 - RNA, 19 nt, Artificial Sequence
  Description of Artificial Sequence: Synthetic oligonucleotide
  Antisense strand to SEQ ID NO: 145040
gacuucauacaguauccuc

SEQ ID NO: 145042 - RNA, 19 nt, Artificial Sequence
  Description of Artificial Sequence: Synthetic oligonucleotide
  Sense strand starting at position 2948 of SEQ ID NO: 1860
uugcuuaggacuggucagu

SEQ ID NO: 145043 - RNA, 19 nt, Artificial Sequence
  Description of Artificial Sequence: Synthetic oligonucleotide
  Antisense strand to SEQ ID NO: 145042
acugaccaguccuaagcaa

SEQ ID NO: 145044 - RNA, 19 nt, Artificial Sequence
  Description of Artificial Sequence: Synthetic oligonucleotide
  Sense strand starting at position 3063 of SEQ ID NO: 1860
ugcugagggcaugaauuaa

SEQ ID NO: 145045 - RNA, 19 nt, Artificial Sequence
  Description of Artificial Sequence: Synthetic oligonucleotide
  Antisense strand to SEQ ID NO: 145044
uuaauucaugcccucagca

SEQ ID NO: 145046 - RNA, 19 nt, Artificial Sequence
  Description of Artificial Sequence: Synthetic oligonucleotide
  Sense strand starting at position 3482 of SEQ ID NO: 1860
cucaccuggucugugagaa

SEQ ID NO: 145047 - RNA, 19 nt, Artificial Sequence
  Description of Artificial Sequence: Synthetic oligonucleotide
  Antisense strand to SEQ ID NO: 145046
uucucacagaccaggugag

SEQ ID NO: 145048 - RNA, 19 nt, Artificial Sequence
  Description of Artificial Sequence: Synthetic oligonucleotide
  Sense strand starting at position 3483 of SEQ ID NO: 1860
ucaccuggucugugagaag

SEQ ID NO: 145049 - RNA, 19 nt, Artificial Sequence
  Description of Artificial Sequence: Synthetic oligonucleotide
  Antisense strand to SEQ ID NO: 145048
cuucucacagaccagguga

SEQ ID NO: 145050 - RNA, 19 nt, Artificial Sequence
  Description of Artificial Sequence: Synthetic oligonucleotide
  Sense strand starting at position 3490 of SEQ ID NO: 1860
gucugugagaagcauaaac

SEQ ID NO: 145051 - RNA, 19 nt, Artificial Sequence
  Description of Artificial Sequence: Synthetic oligonucleotide
  Antisense strand to SEQ ID NO: 145050
guuuaugcuucucacagac

SEQ ID NO: 145052 - RNA, 19 nt, Artificial Sequence
  Description of Artificial Sequence: Synthetic oligonucleotide
  Sense strand starting at position 3854 of SEQ ID NO: 1860
agcacuaucucucuggaga

SEQ ID NO: 145053 - RNA, 19 nt, Artificial Sequence
  Description of Artificial Sequence: Synthetic oligonucleotide
  Antisense strand to SEQ ID NO: 145052
ucuccagagagauagugcu

SEQ ID NO: 145054 - RNA, 19 nt, Artificial Sequence
  Description of Artificial Sequence: Synthetic oligonucleotide
  Sense strand starting at position 3855 of SEQ ID NO: 1860
gcacuaucucucuggagau

SEQ ID NO: 145055 - RNA, 19 nt, Artificial Sequence
  Description of Artificial Sequence: Synthetic oligonucleotide
  Antisense strand to SEQ ID NO: 145054
aucuccagagagauagugc

SEQ ID NO: 145056 - RNA, 19 nt, Artificial Sequence
  Description of Artificial Sequence: Synthetic oligonucleotide
  Sense strand starting at position 3857 of SEQ ID NO: 1860
acuaucucucuggagaugu

SEQ ID NO: 145057 - RNA, 19 nt, Artificial Sequence
  Description of Artificial Sequence: Synthetic oligonucleotide
  Antisense strand to SEQ ID NO: 145056
acaucuccagagagauagu

SEQ ID NO: 145058 - RNA, 19 nt, Artificial Sequence
  Description of Artificial Sequence: Synthetic oligonucleotide
  Sense strand starting at position 3865 of SEQ ID NO: 1860
ucuggagaugugcaaugua

SEQ ID NO: 145059 - RNA, 19 nt, Artificial Sequence
  Description of Artificial Sequence: Synthetic oligonucleotide
  Antisense strand to SEQ ID NO: 145058
uacauugcacaucuccaga

SEQ ID NO: 145060 - RNA, 19 nt, Artificial Sequence
  Description of Artificial Sequence: Synthetic oligonucleotide
  Sense strand starting at position 3868 of SEQ ID NO: 1860
ggagaugugcaauguauau

SEQ ID NO: 145061 - RNA, 19 nt, Artificial Sequence
  Description of Artificial Sequence: Synthetic oligonucleotide
  Antisense strand to SEQ ID NO: 145060
auauacauugcacaucucc

SEQ ID NO: 145062 - RNA, 19 nt, Artificial Sequence
  Description of Artificial Sequence: Synthetic oligonucleotide
  Sense strand starting at position 3913 of SEQ ID NO: 1860
aguucuauauugguuacca

SEQ ID NO: 145063 - RNA, 19 nt, Artificial Sequence
  Description of Artificial Sequence: Synthetic oligonucleotide
  Antisense strand to SEQ ID NO: 145062
ugguaaccaauauagaacu

SEQ ID NO: 145064 - RNA, 19 nt, Artificial Sequence
  Description of Artificial Sequence: Synthetic oligonucleotide
  Sense strand starting at position 3914 of SEQ ID NO: 1860
guucuauauugguuaccag

SEQ ID NO: 145065 - RNA, 19 nt, Artificial Sequence
  Description of Artificial Sequence: Synthetic oligonucleotide
  Antisense strand to SEQ ID NO: 145064
cugguaaccaauauagaac

SEQ ID NO: 145066 - RNA, 19 nt, Artificial Sequence
  Description of Artificial Sequence: Synthetic oligonucleotide
  Sense strand starting at position 3915 of SEQ ID NO: 1860
uucuauauugguuaccaga

SEQ ID NO: 145067 - RNA, 19 nt, Artificial Sequence
  Description of Artificial Sequence: Synthetic oligonucleotide
  Antisense strand to SEQ ID NO: 145066
ucugguaaccaauauagaa

SEQ ID NO: 145068 - RNA, 19 nt, Artificial Sequence
  Description of Artificial Sequence: Synthetic oligonucleotide
  Sense strand starting at position 3917 of SEQ ID NO: 1860
cuauauugguuaccagaag

SEQ ID NO: 145069 - RNA, 19 nt, Artificial Sequence
  Description of Artificial Sequence: Synthetic oligonucleotide
  Antisense strand to SEQ ID NO: 145068
cuucugguaaccaauauag

SEQ ID NO: 145070 - RNA, 19 nt, Artificial Sequence
  Description of Artificial Sequence: Synthetic oligonucleotide
  Sense strand starting at position 3964 of SEQ ID NO: 1860
guugauucuuaaguguaua

SEQ ID NO: 145071 - RNA, 19 nt, Artificial Sequence
  Description of Artificial Sequence: Synthetic oligonucleotide
  Antisense strand to SEQ ID NO: 145070
uauacacuuaagaaucaac

SEQ ID NO: 145072 - RNA, 19 nt, Artificial Sequence
  Description of Artificial Sequence: Synthetic oligonucleotide
  Sense strand starting at position 3967 of SEQ ID NO: 1860
gauucuuaaguguauauag

SEQ ID NO: 145073 - RNA, 19 nt, Artificial Sequence
  Description of Artificial Sequence: Synthetic oligonucleotide
  Antisense strand to SEQ ID NO: 145072
cuauauacacuuaagaauc

SEQ ID NO: 145074 - RNA, 19 nt, Artificial Sequence
  Description of Artificial Sequence: Synthetic oligonucleotide
  Sense strand starting at position 89 of SEQ ID NO: 1861
gcuuccuuaugguuuagga

SEQ ID NO: 145075 - RNA, 19 nt, Artificial Sequence
  Description of Artificial Sequence: Synthetic oligonucleotide
  Antisense strand to SEQ ID NO: 145074
uccuaaaccauaaggaagc

SEQ ID NO: 145076 - RNA, 19 nt, Artificial Sequence
  Description of Artificial Sequence: Synthetic oligonucleotide
  Sense strand starting at position 91 of SEQ ID NO: 1861
uuccuuaugguuuaggaau

SEQ ID NO: 145077 - RNA, 19 nt, Artificial Sequence
  Description of Artificial Sequence: Synthetic oligonucleotide
  Antisense strand to SEQ ID NO: 145076
auuccuaaaccauaaggaa

SEQ ID NO: 145078 - RNA, 19 nt, Artificial Sequence
  Description of Artificial Sequence: Synthetic oligonucleotide
  Sense strand starting at position 97 of SEQ ID NO: 1861
augguuuaggaaugacagu

SEQ ID NO: 145079 - RNA, 19 nt, Artificial Sequence
  Description of Artificial Sequence: Synthetic oligonucleotide
  Antisense strand to SEQ ID NO: 145078
acugucauuccuaaaccau

SEQ ID NO: 145080 - RNA, 19 nt, Artificial Sequence
  Description of Artificial Sequence: Synthetic oligonucleotide
  Sense strand starting at position 118 of SEQ ID NO: 1861
uguucuuagucuuuguaga

SEQ ID NO: 145081 - RNA, 19 nt, Artificial Sequence
  Description of Artificial Sequence: Synthetic oligonucleotide
  Antisense strand to SEQ ID NO: 145080
ucuacaaagacuaagaaca

SEQ ID NO: 145082 - RNA, 19 nt, Artificial Sequence
  Description of Artificial Sequence: Synthetic oligonucleotide
  Sense strand starting at position 119 of SEQ ID NO: 1861
guucuuagucuuuguagag

SEQ ID NO: 145083 - RNA, 19 nt, Artificial Sequence
  Description of Artificial Sequence: Synthetic oligonucleotide
  Antisense strand to SEQ ID NO: 145082
cucuacaaagacuaagaac

SEQ ID NO: 145084 - RNA, 19 nt, Artificial Sequence
  Description of Artificial Sequence: Synthetic oligonucleotide
  Sense strand starting at position 120 of SEQ ID NO: 1861
uucuuagucuuuguagaga

SEQ ID NO: 145085 - RNA, 19 nt, Artificial Sequence
  Description of Artificial Sequence: Synthetic oligonucleotide
  Antisense strand to SEQ ID NO: 145084
ucucuacaaagacuaagaa

SEQ ID NO: 145086 - RNA, 19 nt, Artificial Sequence
  Description of Artificial Sequence: Synthetic oligonucleotide
  Sense strand starting at position 123 of SEQ ID NO: 1861
uuagucuuuguagagauua

SEQ ID NO: 145087 - RNA, 19 nt, Artificial Sequence
  Description of Artificial Sequence: Synthetic oligonucleotide
  Antisense strand to SEQ ID NO: 145086
uaaucucuacaaagacuaa

SEQ ID NO: 145088 - RNA, 19 nt, Artificial Sequence
  Description of Artificial Sequence: Synthetic oligonucleotide
  Sense strand starting at position 128 of SEQ ID NO: 1861
cuuuguagagauuagcaau

SEQ ID NO: 145089 - RNA, 19 nt, Artificial Sequence
  Description of Artificial Sequence: Synthetic oligonucleotide
  Antisense strand to SEQ ID NO: 145088
auugcuaaucucuacaaag

SEQ ID NO: 145090 - RNA, 19 nt, Artificial Sequence
  Description of Artificial Sequence: Synthetic oligonucleotide
  Sense strand starting at position 195 of SEQ ID NO: 1861
agcguucugcaacaagagu

SEQ ID NO: 145091 - RNA, 19 nt, Artificial Sequence
  Description of Artificial Sequence: Synthetic oligonucleotide
  Antisense strand to SEQ ID NO: 145090
acucuuguugcagaacgcu

SEQ ID NO: 145092 - RNA, 19 nt, Artificial Sequence
  Description of Artificial Sequence: Synthetic oligonucleotide
  Sense strand starting at position 553 of SEQ ID NO: 1861
agaagacauuacuacguaa

SEQ ID NO: 145093 - RNA, 19 nt, Artificial Sequence
  Description of Artificial Sequence: Synthetic oligonucleotide
  Antisense strand to SEQ ID NO: 145092
uuacguaguaaugucuucu

SEQ ID NO: 145094 - RNA, 19 nt, Artificial Sequence
  Description of Artificial Sequence: Synthetic oligonucleotide
  Sense strand starting at position 555 of SEQ ID NO: 1861
aagacauuacuacguaaug

SEQ ID NO: 145095 - RNA, 19 nt, Artificial Sequence
  Description of Artificial Sequence: Synthetic oligonucleotide
  Antisense strand to SEQ ID NO: 145094
cauuacguaguaaugucuu

SEQ ID NO: 145096 - RNA, 19 nt, Artificial Sequence
  Description of Artificial Sequence: Synthetic oligonucleotide
  Sense strand starting at position 556 of SEQ ID NO: 1861
agacauuacuacguaauga

SEQ ID NO: 145097 - RNA, 19 nt, Artificial Sequence
  Description of Artificial Sequence: Synthetic oligonucleotide
  Antisense strand to SEQ ID NO: 145096
ucauuacguaguaaugucu

SEQ ID NO: 145098 - RNA, 19 nt, Artificial Sequence
  Description of Artificial Sequence: Synthetic oligonucleotide
  Sense strand starting at position 566 of SEQ ID NO: 1861
acguaaugaacuuaaggua

SEQ ID NO: 145099 - RNA, 19 nt, Artificial Sequence
  Description of Artificial Sequence: Synthetic oligonucleotide
  Antisense strand to SEQ ID NO: 145098
uaccuuaaguucauuacgu

SEQ ID NO: 145100 - RNA, 19 nt, Artificial Sequence
  Description of Artificial Sequence: Synthetic oligonucleotide
  Sense strand starting at position 610 of SEQ ID NO: 1861
gugcaagauguccaggcuu

SEQ ID NO: 145101 - RNA, 19 nt, Artificial Sequence
  Description of Artificial Sequence: Synthetic oligonucleotide
  Antisense strand to SEQ ID NO: 145100
aagccuggacaucuugcac

SEQ ID NO: 145102 - RNA, 19 nt, Artificial Sequence
  Description of Artificial Sequence: Synthetic oligonucleotide
  Sense strand starting at position 628 of SEQ ID NO: 1861
uggcaugucuggguuguaa

SEQ ID NO: 145103 - RNA, 19 nt, Artificial Sequence
  Description of Artificial Sequence: Synthetic oligonucleotide
  Antisense strand to SEQ ID NO: 145102
uuacaacccagacaugcca

SEQ ID NO: 145104 - RNA, 19 nt, Artificial Sequence
  Description of Artificial Sequence: Synthetic oligonucleotide
  Sense strand starting at position 630 of SEQ ID NO: 1861
gcaugucuggguuguaaga

SEQ ID NO: 145105 - RNA, 19 nt, Artificial Sequence
  Description of Artificial Sequence: Synthetic oligonucleotide
  Antisense strand to SEQ ID NO: 145104
ucuuacaacccagacaugc

SEQ ID NO: 145106 - RNA, 19 nt, Artificial Sequence
  Description of Artificial Sequence: Synthetic oligonucleotide
  Sense strand starting at position 774 of SEQ ID NO: 1861
uuaaguggccuguauacaa

SEQ ID NO: 145107 - RNA, 19 nt, Artificial Sequence
  Description of Artificial Sequence: Synthetic oligonucleotide
  Antisense strand to SEQ ID NO: 145106
uuguauacaggccacuuaa

SEQ ID NO: 145108 - RNA, 19 nt, Artificial Sequence
  Description of Artificial Sequence: Synthetic oligonucleotide
  Sense strand starting at position 809 of SEQ ID NO: 1861
caaagagaguugucccauu

SEQ ID NO: 145109 - RNA, 19 nt, Artificial Sequence
  Description of Artificial Sequence: Synthetic oligonucleotide
  Antisense strand to SEQ ID NO: 145108
aaugggacaacucucuuug

SEQ ID NO: 145110 - RNA, 19 nt, Artificial Sequence
  Description of Artificial Sequence: Synthetic oligonucleotide
  Sense strand starting at position 848 of SEQ ID NO: 1861
gacuaaagauggcuuauga

SEQ ID NO: 145111 - RNA, 19 nt, Artificial Sequence
  Description of Artificial Sequence: Synthetic oligonucleotide
  Antisense strand to SEQ ID NO: 145110
ucauaagccaucuuuaguc

SEQ ID NO: 145112 - RNA, 19 nt, Artificial Sequence
  Description of Artificial Sequence: Synthetic oligonucleotide
  Sense strand starting at position 855 of SEQ ID NO: 1861
gauggcuuaugacauaaag

SEQ ID NO: 145113 - RNA, 19 nt, Artificial Sequence
  Description of Artificial Sequence: Synthetic oligonucleotide
  Antisense strand to SEQ ID NO: 145112
cuuuaugucauaagccauc

SEQ ID NO: 145114 - RNA, 19 nt, Artificial Sequence
  Description of Artificial Sequence: Synthetic oligonucleotide
  Sense strand starting at position 910 of SEQ ID NO: 1861
ugcugauacccuuguuucu

SEQ ID NO: 145115 - RNA, 19 nt, Artificial Sequence
  Description of Artificial Sequence: Synthetic oligonucleotide
  Antisense strand to SEQ ID NO: 145114
agaaacaaggguaucagca

SEQ ID NO: 145116 - RNA, 19 nt, Artificial Sequence
  Description of Artificial Sequence: Synthetic oligonucleotide
  Sense strand starting at position 1044 of SEQ ID NO: 1861
uuaccaauggugggaucau

SEQ ID NO: 145117 - RNA, 19 nt, Artificial Sequence
  Description of Artificial Sequence: Synthetic oligonucleotide
  Antisense strand to SEQ ID NO: 145116
augaucccaccauugguaa

SEQ ID NO: 145118 - RNA, 19 nt, Artificial Sequence
  Description of Artificial Sequence: Synthetic oligonucleotide
  Sense strand starting at position 1069 of SEQ ID NO: 1861
cugggaaucgguggcugau

SEQ ID NO: 145119 - RNA, 19 nt, Artificial Sequence
  Description of Artificial Sequence: Synthetic oligonucleotide
  Antisense strand to SEQ ID NO: 145118
aucagccaccgauucccag

SEQ ID NO: 145120 - RNA, 19 nt, Artificial Sequence
  Description of Artificial Sequence: Synthetic oligonucleotide
  Sense strand starting at position 1072 of SEQ ID NO: 1861
ggaaucgguggcugaugaa

SEQ ID NO: 145121 - RNA, 19 nt, Artificial Sequence
  Description of Artificial Sequence: Synthetic oligonucleotide
  Antisense strand to SEQ ID NO: 145120
uucaucagccaccgauucc

SEQ ID NO: 145122 - RNA, 19 nt, Artificial Sequence
  Description of Artificial Sequence: Synthetic oligonucleotide
  Sense strand starting at position 1084 of SEQ ID NO: 1861
ugaugaacugcauggucau

SEQ ID NO: 145123 - RNA, 19 nt, Artificial Sequence
  Description of Artificial Sequence: Synthetic oligonucleotide
  Antisense strand to SEQ ID NO: 145122
augaccaugcaguucauca

SEQ ID NO: 145124 - RNA, 19 nt, Artificial Sequence
  Description of Artificial Sequence: Synthetic oligonucleotide
  Sense strand starting at position 1168 of SEQ ID NO: 1861
uuaacauugcaagauagca

SEQ ID NO: 145125 - RNA, 19 nt, Artificial Sequence
  Description of Artificial Sequence: Synthetic oligonucleotide
  Antisense strand to SEQ ID NO: 145124
ugcuaucuugcaauguuaa

SEQ ID NO: 145126 - RNA, 19 nt, Artificial Sequence
  Description of Artificial Sequence: Synthetic oligonucleotide
  Sense strand starting at position 1340 of SEQ ID NO: 1861
gggcgaguuccagaaucca

SEQ ID NO: 145127 - RNA, 19 nt, Artificial Sequence
  Description of Artificial Sequence: Synthetic oligonucleotide
  Antisense strand to SEQ ID NO: 145126
uggauucuggaacucgccc

SEQ ID NO: 145128 - RNA, 19 nt, Artificial Sequence
  Description of Artificial Sequence: Synthetic oligonucleotide
  Sense strand starting at position 1417 of SEQ ID NO: 1861
ggaaaugcuuaauccagga

SEQ ID NO: 145129 - RNA, 19 nt, Artificial Sequence
  Description of Artificial Sequence: Synthetic oligonucleotide
  Antisense strand to SEQ ID NO: 145128
uccuggauuaagcauuucc

SEQ ID NO: 145130 - RNA, 19 nt, Artificial Sequence
  Description of Artificial Sequence: Synthetic oligonucleotide
  Sense strand starting at position 1421 of SEQ ID NO: 1861
augcuuaauccaggaugga

SEQ ID NO: 145131 - RNA, 19 nt, Artificial Sequence
  Description of Artificial Sequence: Synthetic oligonucleotide
  Antisense strand to SEQ ID NO: 145130
uccauccuggauuaagcau

SEQ ID NO: 145132 - RNA, 19 nt, Artificial Sequence
  Description of Artificial Sequence: Synthetic oligonucleotide
  Sense strand starting at position 2131 of SEQ ID NO: 1861
gguguaugcacucacagac

SEQ ID NO: 145133 - RNA, 19 nt, Artificial Sequence
  Description of Artificial Sequence: Synthetic oligonucleotide
  Antisense strand to SEQ ID NO: 145132
gucugugagugcauacacc

SEQ ID NO: 145134 - RNA, 19 nt, Artificial Sequence
  Description of Artificial Sequence: Synthetic oligonucleotide
  Sense strand starting at position 2153 of SEQ ID NO: 1861
gguauuuaaucacgaguag

SEQ ID NO: 145135 - RNA, 19 nt, Artificial Sequence
  Description of Artificial Sequence: Synthetic oligonucleotide
  Antisense strand to SEQ ID NO: 145134
cuacucgugauuaaauacc

SEQ ID NO: 145136 - RNA, 19 nt, Artificial Sequence
  Description of Artificial Sequence: Synthetic oligonucleotide
  Sense strand starting at position 2380 of SEQ ID NO: 1861
gaugacuacucauaggaga

SEQ ID NO: 145137 - RNA, 19 nt, Artificial Sequence
  Description of Artificial Sequence: Synthetic oligonucleotide
  Antisense strand to SEQ ID NO: 145136
ucuccuaugaguagucauc

SEQ ID NO: 145138 - RNA, 19 nt, Artificial Sequence
  Description of Artificial Sequence: Synthetic oligonucleotide
  Sense strand starting at position 2490 of SEQ ID NO: 1861
aucagaguucuguauguau

SEQ ID NO: 145139 - RNA, 19 nt, Artificial Sequence
  Description of Artificial Sequence: Synthetic oligonucleotide
  Antisense strand to SEQ ID NO: 145138
auacauacagaacucugau

SEQ ID NO: 145140 - RNA, 19 nt, Artificial Sequence
  Description of Artificial Sequence: Synthetic oligonucleotide
  Sense strand starting at position 3034 of SEQ ID NO: 1861
agucuuucuggccaggagu

SEQ ID NO: 145141 - RNA, 19 nt, Artificial Sequence
  Description of Artificial Sequence: Synthetic oligonucleotide
  Antisense strand to SEQ ID NO: 145140
acuccuggccagaaagacu

SEQ ID NO: 145142 - RNA, 19 nt, Artificial Sequence
  Description of Artificial Sequence: Synthetic oligonucleotide
  Sense strand starting at position 3493 of SEQ ID NO: 1861
guuacauaacucugggaac

SEQ ID NO: 145143 - RNA, 19 nt, Artificial Sequence
  Description of Artificial Sequence: Synthetic oligonucleotide
  Antisense strand to SEQ ID NO: 145142
guucccagaguuauguaac

SEQ ID NO: 145144 - RNA, 19 nt, Artificial Sequence
  Description of Artificial Sequence: Synthetic oligonucleotide
  Sense strand starting at position 3496 of SEQ ID NO: 1861
acauaacucugggaacuau

SEQ ID NO: 145145 - RNA, 19 nt, Artificial Sequence
  Description of Artificial Sequence: Synthetic oligonucleotide
  Antisense strand to SEQ ID NO: 145144
auaguucccagaguuaugu

SEQ ID NO: 145146 - RNA, 19 nt, Artificial Sequence
  Description of Artificial Sequence: Synthetic oligonucleotide
  Sense strand starting at position 3563 of SEQ ID NO: 1861
ugcauugugcuaugaguaa

SEQ ID NO: 145147 - RNA, 19 nt, Artificial Sequence
  Description of Artificial Sequence: Synthetic oligonucleotide
  Antisense strand to SEQ ID NO: 145146
uuacucauagcacaaugca

SEQ ID NO: 145148 - RNA, 19 nt, Artificial Sequence
  Description of Artificial Sequence: Synthetic oligonucleotide
  Sense strand starting at position 3602 of SEQ ID NO: 1861
guauggauggguuguggaa

SEQ ID NO: 145149 - RNA, 19 nt, Artificial Sequence
  Description of Artificial Sequence: Synthetic oligonucleotide
  Antisense strand to SEQ ID NO: 145148
uuccacaacccauccauac

SEQ ID NO: 145150 - RNA, 19 nt, Artificial Sequence
  Description of Artificial Sequence: Synthetic oligonucleotide
  Sense strand starting at position 3708 of SEQ ID NO: 1861
aggauaaguuuauacaaag

SEQ ID NO: 145151 - RNA, 19 nt, Artificial Sequence
  Description of Artificial Sequence: Synthetic oligonucleotide
  Antisense strand to SEQ ID NO: 145150
cuuuguauaaacuuauccu

SEQ ID NO: 145152 - RNA, 19 nt, Artificial Sequence
  Description of Artificial Sequence: Synthetic oligonucleotide
  Sense strand starting at position 3917 of SEQ ID NO: 1861
gcagucagaucucucuguu

SEQ ID NO: 145153 - RNA, 19 nt, Artificial Sequence
  Description of Artificial Sequence: Synthetic oligonucleotide
  Antisense strand to SEQ ID NO: 145152
aacagagagaucugacugc

SEQ ID NO: 145154 - RNA, 19 nt, Artificial Sequence
  Description of Artificial Sequence: Synthetic oligonucleotide
  Sense strand starting at position 21 of SEQ ID NO: 1862
cuggaaucaugugcucuau

SEQ ID NO: 145155 - RNA, 19 nt, Artificial Sequence
  Description of Artificial Sequence: Synthetic oligonucleotide
  Antisense strand to SEQ ID NO: 145154
auagagcacaugauuccag

SEQ ID NO: 145156 - RNA, 19 nt, Artificial Sequence
  Description of Artificial Sequence: Synthetic oligonucleotide
  Sense strand starting at position 23 of SEQ ID NO: 1862
ggaaucaugugcucuauga

SEQ ID NO: 145157 - RNA, 19 nt, Artificial Sequence
  Description of Artificial Sequence: Synthetic oligonucleotide
  Antisense strand to SEQ ID NO: 145156
ucauagagcacaugauucc

SEQ ID NO: 145158 - RNA, 19 nt, Artificial Sequence
  Description of Artificial Sequence: Synthetic oligonucleotide
  Sense strand starting at position 27 of SEQ ID NO: 1862
ucaugugcucuaugaaaug

SEQ ID NO: 145159 - RNA, 19 nt, Artificial Sequence
  Description of Artificial Sequence: Synthetic oligonucleotide
  Antisense strand to SEQ ID NO: 145158
cauuucauagagcacauga

SEQ ID NO: 145160 - RNA, 19 nt, Artificial Sequence
  Description of Artificial Sequence: Synthetic oligonucleotide
  Sense strand starting at position 78 of SEQ ID NO: 1862
auuggcuuugcgggaaaca

SEQ ID NO: 145161 - RNA, 19 nt, Artificial Sequence
  Description of Artificial Sequence: Synthetic oligonucleotide
  Antisense strand to SEQ ID NO: 145160
uguuucccgcaaagccaau

SEQ ID NO: 145162 - RNA, 19 nt, Artificial Sequence
  Description of Artificial Sequence: Synthetic oligonucleotide
  Sense strand starting at position 120 of SEQ ID NO: 1862
ggaaauccuuccuagagaa

SEQ ID NO: 145163 - RNA, 19 nt, Artificial Sequence
  Description of Artificial Sequence: Synthetic oligonucleotide
  Antisense strand to SEQ ID NO: 145162
uucucuaggaaggauuucc

SEQ ID NO: 145164 - RNA, 19 nt, Artificial Sequence
  Description of Artificial Sequence: Synthetic oligonucleotide
  Sense strand starting at position 576 of SEQ ID NO: 1862
gcuuccuuaugguuuagga

SEQ ID NO: 145165 - RNA, 19 nt, Artificial Sequence
  Description of Artificial Sequence: Synthetic oligonucleotide
  Antisense strand to SEQ ID NO: 145164
uccuaaaccauaaggaagc

SEQ ID NO: 145166 - RNA, 19 nt, Artificial Sequence
  Description of Artificial Sequence: Synthetic oligonucleotide
  Sense strand starting at position 578 of SEQ ID NO: 1862
uuccuuaugguuuaggaau

SEQ ID NO: 145167 - RNA, 19 nt, Artificial Sequence
  Description of Artificial Sequence: Synthetic oligonucleotide
  Antisense strand to SEQ ID NO: 145166
auuccuaaaccauaaggaa

SEQ ID NO: 145168 - RNA, 19 nt, Artificial Sequence
  Description of Artificial Sequence: Synthetic oligonucleotide
  Sense strand starting at position 584 of SEQ ID NO: 1862
augguuuaggaaugacagu

SEQ ID NO: 145169 - RNA, 19 nt, Artificial Sequence
  Description of Artificial Sequence: Synthetic oligonucleotide
  Antisense strand to SEQ ID NO: 145168
acugucauuccuaaaccau

SEQ ID NO: 145170 - RNA, 19 nt, Artificial Sequence
  Description of Artificial Sequence: Synthetic oligonucleotide
  Sense strand starting at position 605 of SEQ ID NO: 1862
uguucuuagucuuuguaga

SEQ ID NO: 145171 - RNA, 19 nt, Artificial Sequence
  Description of Artificial Sequence: Synthetic oligonucleotide
  Antisense strand to SEQ ID NO: 145170
ucuacaaagacuaagaaca

SEQ ID NO: 145172 - RNA, 19 nt, Artificial Sequence
  Description of Artificial Sequence: Synthetic oligonucleotide
  Sense strand starting at position 606 of SEQ ID NO: 1862
guucuuagucuuuguagag

SEQ ID NO: 145173 - RNA, 19 nt, Artificial Sequence
  Description of Artificial Sequence: Synthetic oligonucleotide
  Antisense strand to SEQ ID NO: 145172
cucuacaaagacuaagaac

SEQ ID NO: 145174 - RNA, 19 nt, Artificial Sequence
  Description of Artificial Sequence: Synthetic oligonucleotide
  Sense strand starting at position 607 of SEQ ID NO: 1862
uucuuagucuuuguagaga

SEQ ID NO: 145175 - RNA, 19 nt, Artificial Sequence
  Description of Artificial Sequence: Synthetic oligonucleotide
  Antisense strand to SEQ ID NO: 145174
ucucuacaaagacuaagaa

SEQ ID NO: 145176 - RNA, 19 nt, Artificial Sequence
  Description of Artificial Sequence: Synthetic oligonucleotide
  Sense strand starting at position 610 of SEQ ID NO: 1862
uuagucuuuguagagauua

SEQ ID NO: 145177 - RNA, 19 nt, Artificial Sequence
  Description of Artificial Sequence: Synthetic oligonucleotide
  Antisense strand to SEQ ID NO: 145176
uaaucucuacaaagacuaa

SEQ ID NO: 145178 - RNA, 19 nt, Artificial Sequence
  Description of Artificial Sequence: Synthetic oligonucleotide
  Sense strand starting at position 615 of SEQ ID NO: 1862
cuuuguagagauuagcaau

SEQ ID NO: 145179 - RNA, 19 nt, Artificial Sequence
  Description of Artificial Sequence: Synthetic oligonucleotide
  Antisense strand to SEQ ID NO: 145178
auugcuaaucucuacaaag

SEQ ID NO: 145180 - RNA, 19 nt, Artificial Sequence
  Description of Artificial Sequence: Synthetic oligonucleotide
  Sense strand starting at position 682 of SEQ ID NO: 1862
agcguucugcaacaagagu

SEQ ID NO: 145181 - RNA, 19 nt, Artificial Sequence
  Description of Artificial Sequence: Synthetic oligonucleotide
  Antisense strand to SEQ ID NO: 145180
acucuuguugcagaacgcu

SEQ ID NO: 145182 - RNA, 19 nt, Artificial Sequence
  Description of Artificial Sequence: Synthetic oligonucleotide
  Sense strand starting at position 1042 of SEQ ID NO: 1862
aagacauuacuacguaaug

SEQ ID NO: 145183 - RNA, 19 nt, Artificial Sequence
  Description of Artificial Sequence: Synthetic oligonucleotide
  Antisense strand to SEQ ID NO: 145182
cauuacguaguaaugucuu

SEQ ID NO: 145184 - RNA, 19 nt, Artificial Sequence
  Description of Artificial Sequence: Synthetic oligonucleotide
  Sense strand starting at position 1043 of SEQ ID NO: 1862
agacauuacuacguaauga

SEQ ID NO: 145185 - RNA, 19 nt, Artificial Sequence
  Description of Artificial Sequence: Synthetic oligonucleotide
  Antisense strand to SEQ ID NO: 145184
ucauuacguaguaaugucu

SEQ ID NO: 145186 - RNA, 19 nt, Artificial Sequence
  Description of Artificial Sequence: Synthetic oligonucleotide
  Sense strand starting at position 1053 of SEQ ID NO: 1862
acguaaugaacuuaaggua

SEQ ID NO: 145187 - RNA, 19 nt, Artificial Sequence
  Description of Artificial Sequence: Synthetic oligonucleotide
  Antisense strand to SEQ ID NO: 145186
uaccuuaaguucauuacgu

SEQ ID NO: 145188 - RNA, 19 nt, Artificial Sequence
  Description of Artificial Sequence: Synthetic oligonucleotide
  Sense strand starting at position 1097 of SEQ ID NO: 1862
gugcaagauguccaggcuu

SEQ ID NO: 145189 - RNA, 19 nt, Artificial Sequence
  Description of Artificial Sequence: Synthetic oligonucleotide
  Antisense strand to SEQ ID NO: 145188
aagccuggacaucuugcac

SEQ ID NO: 145190 - RNA, 19 nt, Artificial Sequence
  Description of Artificial Sequence: Synthetic oligonucleotide
  Sense strand starting at position 1115 of SEQ ID NO: 1862
uggcaugucuggguuguaa

SEQ ID NO: 145191 - RNA, 19 nt, Artificial Sequence
  Description of Artificial Sequence: Synthetic oligonucleotide
  Antisense strand to SEQ ID NO: 145190
uuacaacccagacaugcca

SEQ ID NO: 145192 - RNA, 19 nt, Artificial Sequence
  Description of Artificial Sequence: Synthetic oligonucleotide
  Sense strand starting at position 1117 of SEQ ID NO: 1862
gcaugucuggguuguaaga

SEQ ID NO: 145193 - RNA, 19 nt, Artificial Sequence
  Description of Artificial Sequence: Synthetic oligonucleotide
  Antisense strand to SEQ ID NO: 145192
ucuuacaacccagacaugc

SEQ ID NO: 145194 - RNA, 19 nt, Artificial Sequence
  Description of Artificial Sequence: Synthetic oligonucleotide
  Sense strand starting at position 1261 of SEQ ID NO: 1862
uuaaguggccuguauacaa

SEQ ID NO: 145195 - RNA, 19 nt, Artificial Sequence
  Description of Artificial Sequence: Synthetic oligonucleotide
  Antisense strand to SEQ ID NO: 145194
uuguauacaggccacuuaa

SEQ ID NO: 145196 - RNA, 19 nt, Artificial Sequence
  Description of Artificial Sequence: Synthetic oligonucleotide
  Sense strand starting at position 1296 of SEQ ID NO: 1862
caaagagaguugucccauu

SEQ ID NO: 145197 - RNA, 19 nt, Artificial Sequence
  Description of Artificial Sequence: Synthetic oligonucleotide
  Antisense strand to SEQ ID NO: 145196
aaugggacaacucucuuug

SEQ ID NO: 145198 - RNA, 19 nt, Artificial Sequence
  Description of Artificial Sequence: Synthetic oligonucleotide
  Sense strand starting at position 1335 of SEQ ID NO: 1862
gacuaaagauggcuuauga

SEQ ID NO: 145199 - RNA, 19 nt, Artificial Sequence
  Description of Artificial Sequence: Synthetic oligonucleotide
  Antisense strand to SEQ ID NO: 145198
ucauaagccaucuuuaguc

SEQ ID NO: 145200 - RNA, 19 nt, Artificial Sequence
  Description of Artificial Sequence: Synthetic oligonucleotide
  Sense strand starting at position 1342 of SEQ ID NO: 1862
gauggcuuaugacauaaag

SEQ ID NO: 145201 - RNA, 19 nt, Artificial Sequence
  Description of Artificial Sequence: Synthetic oligonucleotide
  Antisense strand to SEQ ID NO: 145200
cuuuaugucauaagccauc

SEQ ID NO: 145202 - RNA, 19 nt, Artificial Sequence
  Description of Artificial Sequence: Synthetic oligonucleotide
  Sense strand starting at position 1397 of SEQ ID NO: 1862
ugcugauacccuuguuucu

SEQ ID NO: 145203 - RNA, 19 nt, Artificial Sequence
  Description of Artificial Sequence: Synthetic oligonucleotide
  Antisense strand to SEQ ID NO: 145202
agaaacaaggguaucagca

SEQ ID NO: 145204 - RNA, 19 nt, Artificial Sequence
  Description of Artificial Sequence: Synthetic oligonucleotide
  Sense strand starting at position 1531 of SEQ ID NO: 1862
uuaccaauggugggaucau

SEQ ID NO: 145205 - RNA, 19 nt, Artificial Sequence
  Description of Artificial Sequence: Synthetic oligonucleotide
  Antisense strand to SEQ ID NO: 145204
augaucccaccauugguaa

SEQ ID NO: 145206 - RNA, 19 nt, Artificial Sequence
  Description of Artificial Sequence: Synthetic oligonucleotide
  Sense strand starting at position 1556 of SEQ ID NO: 1862
cugggaaucgguggcugau

SEQ ID NO: 145207 - RNA, 19 nt, Artificial Sequence
  Description of Artificial Sequence: Synthetic oligonucleotide
  Antisense strand to SEQ ID NO: 145206
aucagccaccgauucccag

SEQ ID NO: 145208 - RNA, 19 nt, Artificial Sequence
  Description of Artificial Sequence: Synthetic oligonucleotide
  Sense strand starting at position 1559 of SEQ ID NO: 1862
ggaaucgguggcugaugaa

SEQ ID NO: 145209 - RNA, 19 nt, Artificial Sequence
  Description of Artificial Sequence: Synthetic oligonucleotide
  Antisense strand to SEQ ID NO: 145208
uucaucagccaccgauucc

SEQ ID NO: 145210 - RNA, 19 nt, Artificial Sequence
  Description of Artificial Sequence: Synthetic oligonucleotide
  Sense strand starting at position 1571 of SEQ ID NO: 1862
ugaugaacugcauggucau

SEQ ID NO: 145211 - RNA, 19 nt, Artificial Sequence
  Description of Artificial Sequence: Synthetic oligonucleotide
  Antisense strand to SEQ ID NO: 145210
augaccaugcaguucauca

SEQ ID NO: 145212 - RNA, 19 nt, Artificial Sequence
  Description of Artificial Sequence: Synthetic oligonucleotide
  Sense strand starting at position 1655 of SEQ ID NO: 1862
uuaacauugcaagauagca

SEQ ID NO: 145213 - RNA, 19 nt, Artificial Sequence
  Description of Artificial Sequence: Synthetic oligonucleotide
  Antisense strand to SEQ ID NO: 145212
ugcuaucuugcaauguuaa

SEQ ID NO: 145214 - RNA, 19 nt, Artificial Sequence
  Description of Artificial Sequence: Synthetic oligonucleotide
  Sense strand starting at position 1827 of SEQ ID NO: 1862
gggcgaguuccagaaucca

SEQ ID NO: 145215 - RNA, 19 nt, Artificial Sequence
  Description of Artificial Sequence: Synthetic oligonucleotide
  Antisense strand to SEQ ID NO: 145214
uggauucuggaacucgccc

SEQ ID NO: 145216 - RNA, 19 nt, Artificial Sequence
  Description of Artificial Sequence: Synthetic oligonucleotide
  Sense strand starting at position 1904 of SEQ ID NO: 1862
ggaaaugcuuaauccagga

SEQ ID NO: 145217 - RNA, 19 nt, Artificial Sequence
  Description of Artificial Sequence: Synthetic oligonucleotide
  Antisense strand to SEQ ID NO: 145216
uccuggauuaagcauuucc

SEQ ID NO: 145218 - RNA, 19 nt, Artificial Sequence
  Description of Artificial Sequence: Synthetic oligonucleotide
  Sense strand starting at position 1908 of SEQ ID NO: 1862
augcuuaauccaggaugga

SEQ ID NO: 145219 - RNA, 19 nt, Artificial Sequence
  Description of Artificial Sequence: Synthetic oligonucleotide
  Antisense strand to SEQ ID NO: 145218
uccauccuggauuaagcau

SEQ ID NO: 145220 - RNA, 19 nt, Artificial Sequence
  Description of Artificial Sequence: Synthetic oligonucleotide
  Sense strand starting at position 2618 of SEQ ID NO: 1862
gguguaugcacucacagac

SEQ ID NO: 145221 - RNA, 19 nt, Artificial Sequence
  Description of Artificial Sequence: Synthetic oligonucleotide
  Antisense strand to SEQ ID NO: 145220
gucugugagugcauacacc

SEQ ID NO: 145222 - RNA, 19 nt, Artificial Sequence
  Description of Artificial Sequence: Synthetic oligonucleotide
  Sense strand starting at position 2640 of SEQ ID NO: 1862
gguauuuaaucacgaguag

SEQ ID NO: 145223 - RNA, 19 nt, Artificial Sequence
  Description of Artificial Sequence: Synthetic oligonucleotide
  Antisense strand to SEQ ID NO: 145222
cuacucgugauuaaauacc

SEQ ID NO: 145224 - RNA, 19 nt, Artificial Sequence
  Description of Artificial Sequence: Synthetic oligonucleotide
  Sense strand starting at position 2867 of SEQ ID NO: 1862
gaugacuacucauaggaga

SEQ ID NO: 145225 - RNA, 19 nt, Artificial Sequence
  Description of Artificial Sequence: Synthetic oligonucleotide
  Antisense strand to SEQ ID NO: 145224
ucuccuaugaguagucauc

SEQ ID NO: 145226 - RNA, 19 nt, Artificial Sequence
  Description of Artificial Sequence: Synthetic oligonucleotide
  Sense strand starting at position 2977 of SEQ ID NO: 1862
aucagaguucuguauguau

SEQ ID NO: 145227 - RNA, 19 nt, Artificial Sequence
  Description of Artificial Sequence: Synthetic oligonucleotide
  Antisense strand to SEQ ID NO: 145226
auacauacagaacucugau

SEQ ID NO: 145228 - RNA, 19 nt, Artificial Sequence
  Description of Artificial Sequence: Synthetic oligonucleotide
  Sense strand starting at position 3521 of SEQ ID NO: 1862
agucuuucuggccaggagu

SEQ ID NO: 145229 - RNA, 19 nt, Artificial Sequence
  Description of Artificial Sequence: Synthetic oligonucleotide
  Antisense strand to SEQ ID NO: 145228
acuccuggccagaaagacu

SEQ ID NO: 145230 - RNA, 19 nt, Artificial Sequence
  Description of Artificial Sequence: Synthetic oligonucleotide
  Sense strand starting at position 3980 of SEQ ID NO: 1862
guuacauaacucugggaac

SEQ ID NO: 145231 - RNA, 19 nt, Artificial Sequence
  Description of Artificial Sequence: Synthetic oligonucleotide
  Antisense strand to SEQ ID NO: 145230
guucccagaguuauguaac

SEQ ID NO: 145232 - RNA, 19 nt, Artificial Sequence
  Description of Artificial Sequence: Synthetic oligonucleotide
  Sense strand starting at position 3983 of SEQ ID NO: 1862
acauaacucugggaacuau

SEQ ID NO: 145233 - RNA, 19 nt, Artificial Sequence
  Description of Artificial Sequence: Synthetic oligonucleotide
  Antisense strand to SEQ ID NO: 145232
auaguucccagaguuaugu

SEQ ID NO: 145234 - RNA, 19 nt, Artificial Sequence
  Description of Artificial Sequence: Synthetic oligonucleotide
  Sense strand starting at position 3979 of SEQ ID NO: 1863
guggcaucacugcauucua

SEQ ID NO: 145235 - RNA, 19 nt, Artificial Sequence
  Description of Artificial Sequence: Synthetic oligonucleotide
  Antisense strand to SEQ ID NO: 145234
uagaaugcagugaugccac

SEQ ID NO: 145236 - RNA, 19 nt, Artificial Sequence
  Description of Artificial Sequence: Synthetic oligonucleotide
  Sense strand starting at position 3937 of SEQ ID NO: 1863
gcuugagcucuggaaauca

SEQ ID NO: 145237 - RNA, 19 nt, Artificial Sequence
  Description of Artificial Sequence: Synthetic oligonucleotide
  Antisense strand to SEQ ID NO: 145236
ugauuuccagagcucaagc

SEQ ID NO: 145238 - RNA, 19 nt, Artificial Sequence
  Description of Artificial Sequence: Synthetic oligonucleotide
  Sense strand starting at position 3935 of SEQ ID NO: 1863
ucgcuugagcucuggaaau

SEQ ID NO: 145239 - RNA, 19 nt, Artificial Sequence
  Description of Artificial Sequence: Synthetic oligonucleotide
  Antisense strand to SEQ ID NO: 145238
auuuccagagcucaagcga

SEQ ID NO: 145240 - RNA, 19 nt, Artificial Sequence
  Description of Artificial Sequence: Synthetic oligonucleotide
  Sense strand starting at position 3838 of SEQ ID NO: 1863
augagaucuugugucuaca

SEQ ID NO: 145241 - RNA, 19 nt, Artificial Sequence
  Description of Artificial Sequence: Synthetic oligonucleotide
  Antisense strand to SEQ ID NO: 145240
uguagacacaagaucucau

SEQ ID NO: 145242 - RNA, 19 nt, Artificial Sequence
  Description of Artificial Sequence: Synthetic oligonucleotide
  Sense strand starting at position 2958 of SEQ ID NO: 1863
guuacuuccguauaacaag

SEQ ID NO: 145243 - RNA, 19 nt, Artificial Sequence
  Description of Artificial Sequence: Synthetic oligonucleotide
  Antisense strand to SEQ ID NO: 145242
cuuguuauacggaaguaac

SEQ ID NO: 145244 - RNA, 19 nt, Artificial Sequence
  Description of Artificial Sequence: Synthetic oligonucleotide
  Sense strand starting at position 2956 of SEQ ID NO: 1863
guguuacuuccguauaaca

SEQ ID NO: 145245 - RNA, 19 nt, Artificial Sequence
  Description of Artificial Sequence: Synthetic oligonucleotide
  Antisense strand to SEQ ID NO: 145244
uguuauacggaaguaacac

SEQ ID NO: 145246 - RNA, 19 nt, Artificial Sequence
  Description of Artificial Sequence: Synthetic oligonucleotide
  Sense strand starting at position 2955 of SEQ ID NO: 1863
uguguuacuuccguauaac

SEQ ID NO: 145247 - RNA, 19 nt, Artificial Sequence
  Description of Artificial Sequence: Synthetic oligonucleotide
  Antisense strand to SEQ ID NO: 145246
guuauacggaaguaacaca

SEQ ID NO: 145248 - RNA, 19 nt, Artificial Sequence
  Description of Artificial Sequence: Synthetic oligonucleotide
  Sense strand starting at position 2433 of SEQ ID NO: 1863
aauaaauggcgaugagaca

SEQ ID NO: 145249 - RNA, 19 nt, Artificial Sequence
  Description of Artificial Sequence: Synthetic oligonucleotide
  Antisense strand to SEQ ID NO: 145248
ugucucaucgccauuuauu

SEQ ID NO: 145250 - RNA, 19 nt, Artificial Sequence
  Description of Artificial Sequence: Synthetic oligonucleotide
  Sense strand starting at position 2383 of SEQ ID NO: 1863
uuaugauacagacggcauu

SEQ ID NO: 145251 - RNA, 19 nt, Artificial Sequence
  Description of Artificial Sequence: Synthetic oligonucleotide
  Antisense strand to SEQ ID NO: 145250
aaugccgucuguaucauaa

SEQ ID NO: 145252 - RNA, 19 nt, Artificial Sequence
  Description of Artificial Sequence: Synthetic oligonucleotide
  Sense strand starting at position 2377 of SEQ ID NO: 1863
cuugguuuaugauacagac

SEQ ID NO: 145253 - RNA, 19 nt, Artificial Sequence
  Description of Artificial Sequence: Synthetic oligonucleotide
  Antisense strand to SEQ ID NO: 145252
gucuguaucauaaaccaag

SEQ ID NO: 145254 - RNA, 19 nt, Artificial Sequence
  Description of Artificial Sequence: Synthetic oligonucleotide
  Sense strand starting at position 2340 of SEQ ID NO: 1863
gauugugaggccgaaauga

SEQ ID NO: 145255 - RNA, 19 nt, Artificial Sequence
  Description of Artificial Sequence: Synthetic oligonucleotide
  Antisense strand to SEQ ID NO: 145254
ucauuucggccucacaauc

SEQ ID NO: 145256 - RNA, 19 nt, Artificial Sequence
  Description of Artificial Sequence: Synthetic oligonucleotide
  Sense strand starting at position 2258 of SEQ ID NO: 1863
cugcgaucugaagggacaa

SEQ ID NO: 145257 - RNA, 19 nt, Artificial Sequence
  Description of Artificial Sequence: Synthetic oligonucleotide
  Antisense strand to SEQ ID NO: 145256
uugucccuucagaucgcag

SEQ ID NO: 145258 - RNA, 19 nt, Artificial Sequence
  Description of Artificial Sequence: Synthetic oligonucleotide
  Sense strand starting at position 2210 of SEQ ID NO: 1863
cagaaaugccuguagagca

SEQ ID NO: 145259 - RNA, 19 nt, Artificial Sequence
  Description of Artificial Sequence: Synthetic oligonucleotide
  Antisense strand to SEQ ID NO: 145258
ugcucuacaggcauuucug

SEQ ID NO: 145260 - RNA, 19 nt, Artificial Sequence
  Description of Artificial Sequence: Synthetic oligonucleotide
  Sense strand starting at position 2208 of SEQ ID NO: 1863
gccagaaaugccuguagag

SEQ ID NO: 145261 - RNA, 19 nt, Artificial Sequence
  Description of Artificial Sequence: Synthetic oligonucleotide
  Antisense strand to SEQ ID NO: 145260
cucuacaggcauuucuggc

SEQ ID NO: 145262 - RNA, 19 nt, Artificial Sequence
  Description of Artificial Sequence: Synthetic oligonucleotide
  Sense strand starting at position 2185 of SEQ ID NO: 1863
cuuugaggucaugggauca

SEQ ID NO: 145263 - RNA, 19 nt, Artificial Sequence
  Description of Artificial Sequence: Synthetic oligonucleotide
  Antisense strand to SEQ ID NO: 145262
ugaucccaugaccucaaag

SEQ ID NO: 145264 - RNA, 19 nt, Artificial Sequence
  Description of Artificial Sequence: Synthetic oligonucleotide
  Sense strand starting at position 1503 of SEQ ID NO: 1863
ccgggaucucaguaaggcu

SEQ ID NO: 145265 - RNA, 19 nt, Artificial Sequence
  Description of Artificial Sequence: Synthetic oligonucleotide
  Antisense strand to SEQ ID NO: 145264
agccuuacugagaucccgg

SEQ ID NO: 145266 - RNA, 19 nt, Artificial Sequence
  Description of Artificial Sequence: Synthetic oligonucleotide
  Sense strand starting at position 1346 of SEQ ID NO: 1863
gguuuaccaguucggagau

SEQ ID NO: 145267 - RNA, 19 nt, Artificial Sequence
  Description of Artificial Sequence: Synthetic oligonucleotide
  Antisense strand to SEQ ID NO: 145266
aucuccgaacugguaaacc

SEQ ID NO: 145268 - RNA, 19 nt, Artificial Sequence
  Description of Artificial Sequence: Synthetic oligonucleotide
  Sense strand starting at position 1212 of SEQ ID NO: 1863
cgcaaucccuaaucagaaa

SEQ ID NO: 145269 - RNA, 19 nt, Artificial Sequence
  Description of Artificial Sequence: Synthetic oligonucleotide
  Antisense strand to SEQ ID NO: 145268
uuucugauuagggauugcg

SEQ ID NO: 145270 - RNA, 19 nt, Artificial Sequence
  Description of Artificial Sequence: Synthetic oligonucleotide
  Sense strand starting at position 1154 of SEQ ID NO: 1863
gaaagaacggcuuaaacgu

SEQ ID NO: 145271 - RNA, 19 nt, Artificial Sequence
  Description of Artificial Sequence: Synthetic oligonucleotide
  Antisense strand to SEQ ID NO: 145270
acguuuaagccguucuuuc

SEQ ID NO: 145272 - RNA, 19 nt, Artificial Sequence
  Description of Artificial Sequence: Synthetic oligonucleotide
  Sense strand starting at position 1108 of SEQ ID NO: 1863
ccuuauucucgguagcaca

SEQ ID NO: 145273 - RNA, 19 nt, Artificial Sequence
  Description of Artificial Sequence: Synthetic oligonucleotide
  Antisense strand to SEQ ID NO: 145272
ugugcuaccgagaauaagg

SEQ ID NO: 145274 - RNA, 19 nt, Artificial Sequence
  Description of Artificial Sequence: Synthetic oligonucleotide
  Sense strand starting at position 1107 of SEQ ID NO: 1863
gccuuauucucgguagcac

SEQ ID NO: 145275 - RNA, 19 nt, Artificial Sequence
  Description of Artificial Sequence: Synthetic oligonucleotide
  Antisense strand to SEQ ID NO: 145274
gugcuaccgagaauaaggc

SEQ ID NO: 145276 - RNA, 19 nt, Artificial Sequence
  Description of Artificial Sequence: Synthetic oligonucleotide
  Sense strand starting at position 1106 of SEQ ID NO: 1863
agccuuauucucgguagca

SEQ ID NO: 145277 - RNA, 19 nt, Artificial Sequence
  Description of Artificial Sequence: Synthetic oligonucleotide
  Antisense strand to SEQ ID NO: 145276
ugcuaccgagaauaaggcu

SEQ ID NO: 145278 - RNA, 19 nt, Artificial Sequence
  Description of Artificial Sequence: Synthetic oligonucleotide
  Sense strand starting at position 1095 of SEQ ID NO: 1863
cucaaagagucagccuuau

SEQ ID NO: 145279 - RNA, 19 nt, Artificial Sequence
  Description of Artificial Sequence: Synthetic oligonucleotide
  Antisense strand to SEQ ID NO: 145278
auaaggcugacucuuugag

SEQ ID NO: 145280 - RNA, 19 nt, Artificial Sequence
  Description of Artificial Sequence: Synthetic oligonucleotide
  Sense strand starting at position 1037 of SEQ ID NO: 1863
ugaucauacgacugccaaa

SEQ ID NO: 145281 - RNA, 19 nt, Artificial Sequence
  Description of Artificial Sequence: Synthetic oligonucleotide
  Antisense strand to SEQ ID NO: 145280
uuuggcagucguaugauca

SEQ ID NO: 145282 - RNA, 19 nt, Artificial Sequence
  Description of Artificial Sequence: Synthetic oligonucleotide
  Sense strand starting at position 1000 of SEQ ID NO: 1863
auguaaucauagguuagga

SEQ ID NO: 145283 - RNA, 19 nt, Artificial Sequence
  Description of Artificial Sequence: Synthetic oligonucleotide
  Antisense strand to SEQ ID NO: 145282
uccuaaccuaugauuacau

SEQ ID NO: 145284 - RNA, 19 nt, Artificial Sequence
  Description of Artificial Sequence: Synthetic oligonucleotide
  Sense strand starting at position 960 of SEQ ID NO: 1863
cggaguggucauggagacu

SEQ ID NO: 145285 - RNA, 19 nt, Artificial Sequence
  Description of Artificial Sequence: Synthetic oligonucleotide
  Antisense strand to SEQ ID NO: 145284
agucuccaugaccacuccg

SEQ ID NO: 145286 - RNA, 19 nt, Artificial Sequence
  Description of Artificial Sequence: Synthetic oligonucleotide
  Sense strand starting at position 869 of SEQ ID NO: 1863
ucugaaaccugacagaaca

SEQ ID NO: 145287 - RNA, 19 nt, Artificial Sequence
  Description of Artificial Sequence: Synthetic oligonucleotide
  Antisense strand to SEQ ID NO: 145286
uguucugucagguuucaga

SEQ ID NO: 145288 - RNA, 19 nt, Artificial Sequence
  Description of Artificial Sequence: Synthetic oligonucleotide
  Sense strand starting at position 807 of SEQ ID NO: 1863
ccaacaugccacgauuauu

SEQ ID NO: 145289 - RNA, 19 nt, Artificial Sequence
  Description of Artificial Sequence: Synthetic oligonucleotide
  Antisense strand to SEQ ID NO: 145288
aauaaucguggcauguugg

SEQ ID NO: 145290 - RNA, 19 nt, Artificial Sequence
  Description of Artificial Sequence: Synthetic oligonucleotide
  Sense strand starting at position 781 of SEQ ID NO: 1863
cuggacuacuuauuagacu

SEQ ID NO: 145291 - RNA, 19 nt, Artificial Sequence
  Description of Artificial Sequence: Synthetic oligonucleotide
  Antisense strand to SEQ ID NO: 145290
agucuaauaaguaguccag

SEQ ID NO: 145292 - RNA, 19 nt, Artificial Sequence
  Description of Artificial Sequence: Synthetic oligonucleotide
  Sense strand starting at position 753 of SEQ ID NO: 1863
uuuagaacgccgcaauuua

SEQ ID NO: 145293 - RNA, 19 nt, Artificial Sequence
  Description of Artificial Sequence: Synthetic oligonucleotide
  Antisense strand to SEQ ID NO: 145292
uaaauugcggcguucuaaa

SEQ ID NO: 145294 - RNA, 19 nt, Artificial Sequence
  Description of Artificial Sequence: Synthetic oligonucleotide
  Sense strand starting at position 654 of SEQ ID NO: 1863
gcuucugccucggcagaga

SEQ ID NO: 145295 - RNA, 19 nt, Artificial Sequence
  Description of Artificial Sequence: Synthetic oligonucleotide
  Antisense strand to SEQ ID NO: 145294
ucucugccgaggcagaagc

SEQ ID NO: 145296 - RNA, 19 nt, Artificial Sequence
  Description of Artificial Sequence: Synthetic oligonucleotide
  Sense strand starting at position 562 of SEQ ID NO: 1863
ggcaauguugcagguugua

SEQ ID NO: 145297 - RNA, 19 nt, Artificial Sequence
  Description of Artificial Sequence: Synthetic oligonucleotide
  Antisense strand to SEQ ID NO: 145296
uacaaccugcaacauugcc

SEQ ID NO: 145298 - RNA, 19 nt, Artificial Sequence
  Description of Artificial Sequence: Synthetic oligonucleotide
  Sense strand starting at position 503 of SEQ ID NO: 1863
agggaugacuacuacuaag

SEQ ID NO: 145299 - RNA, 19 nt, Artificial Sequence
  Description of Artificial Sequence: Synthetic oligonucleotide
  Antisense strand to SEQ ID NO: 145298
cuuaguaguagucaucccu

SEQ ID NO: 145300 - RNA, 19 nt, Artificial Sequence
  Description of Artificial Sequence: Synthetic oligonucleotide
  Sense strand starting at position 449 of SEQ ID NO: 1863
ggcacuauccuaugaaguc

SEQ ID NO: 145301 - RNA, 19 nt, Artificial Sequence
  Description of Artificial Sequence: Synthetic oligonucleotide
  Antisense strand to SEQ ID NO: 145300
gacuucauaggauagugcc

SEQ ID NO: 145302 - RNA, 19 nt, Artificial Sequence
  Description of Artificial Sequence: Synthetic oligonucleotide
  Sense strand starting at position 437 of SEQ ID NO: 1863
gguaaagucccuggcacua

SEQ ID NO: 145303 - RNA, 19 nt, Artificial Sequence
  Description of Artificial Sequence: Synthetic oligonucleotide
  Antisense strand to SEQ ID NO: 145302
uagugccagggacuuuacc

SEQ ID NO: 145304 - RNA, 19 nt, Artificial Sequence
  Description of Artificial Sequence: Synthetic oligonucleotide
  Sense strand starting at position 436 of SEQ ID NO: 1863
ugguaaagucccuggcacu

SEQ ID NO: 145305 - RNA, 19 nt, Artificial Sequence
  Description of Artificial Sequence: Synthetic oligonucleotide
  Antisense strand to SEQ ID NO: 145304
agugccagggacuuuacca

SEQ ID NO: 145306 - RNA, 19 nt, Artificial Sequence
  Description of Artificial Sequence: Synthetic oligonucleotide
  Sense strand starting at position 263 of SEQ ID NO: 1863
ugucuuucccaucaggaua

SEQ ID NO: 145307 - RNA, 19 nt, Artificial Sequence
  Description of Artificial Sequence: Synthetic oligonucleotide
  Antisense strand to SEQ ID NO: 145306
uauccugaugggaaagaca

SEQ ID NO: 145308 - RNA, 19 nt, Artificial Sequence
  Description of Artificial Sequence: Synthetic oligonucleotide
  Sense strand starting at position 256 of SEQ ID NO: 1863
aguuaauugucuuucccau

SEQ ID NO: 145309 - RNA, 19 nt, Artificial Sequence
  Description of Artificial Sequence: Synthetic oligonucleotide
  Antisense strand to SEQ ID NO: 145308
augggaaagacaauuaacu

SEQ ID NO: 145310 - RNA, 19 nt, Artificial Sequence
  Description of Artificial Sequence: Synthetic oligonucleotide
  Sense strand starting at position 168 of SEQ ID NO: 1863
gggucuuacuaacuaaagu

SEQ ID NO: 145311 - RNA, 19 nt, Artificial Sequence
  Description of Artificial Sequence: Synthetic oligonucleotide
  Antisense strand to SEQ ID NO: 145310
acuuuaguuaguaagaccc

SEQ ID NO: 145312 - RNA, 19 nt, Artificial Sequence
  Description of Artificial Sequence: Synthetic oligonucleotide
  Sense strand starting at position 70 of SEQ ID NO: 1863
auagcauucuggguccuua

SEQ ID NO: 145313 - RNA, 19 nt, Artificial Sequence
  Description of Artificial Sequence: Synthetic oligonucleotide
  Antisense strand to SEQ ID NO: 145312
uaaggacccagaaugcuau

SEQ ID NO: 145314 - RNA, 19 nt, Artificial Sequence
  Description of Artificial Sequence: Synthetic oligonucleotide
  Sense strand starting at position 8 of SEQ ID NO: 1864
auaagucauuuccuguguu

SEQ ID NO: 145315 - RNA, 19 nt, Artificial Sequence
  Description of Artificial Sequence: Synthetic oligonucleotide
  Antisense strand to SEQ ID NO: 145314
aacacaggaaaugacuuau

SEQ ID NO: 145316 - RNA, 19 nt, Artificial Sequence
  Description of Artificial Sequence: Synthetic oligonucleotide
  Sense strand starting at position 11 of SEQ ID NO: 1864
agucauuuccuguguuauu

SEQ ID NO: 145317 - RNA, 19 nt, Artificial Sequence
  Description of Artificial Sequence: Synthetic oligonucleotide
  Antisense strand to SEQ ID NO: 145316
aauaacacaggaaaugacu

SEQ ID NO: 145318 - RNA, 19 nt, Artificial Sequence
  Description of Artificial Sequence: Synthetic oligonucleotide
  Sense strand starting at position 12 of SEQ ID NO: 1864
gucauuuccuguguuauug

SEQ ID NO: 145319 - RNA, 19 nt, Artificial Sequence
  Description of Artificial Sequence: Synthetic oligonucleotide
  Antisense strand to SEQ ID NO: 145318
caauaacacaggaaaugac

SEQ ID NO: 145320 - RNA, 19 nt, Artificial Sequence
  Description of Artificial Sequence: Synthetic oligonucleotide
  Sense strand starting at position 470 of SEQ ID NO: 1864
uuucuuaugucaccaggaa

SEQ ID NO: 145321 - RNA, 19 nt, Artificial Sequence
  Description of Artificial Sequence: Synthetic oligonucleotide
  Antisense strand to SEQ ID NO: 145320
uuccuggugacauaagaaa

SEQ ID NO: 145322 - RNA, 19 nt, Artificial Sequence
  Description of Artificial Sequence: Synthetic oligonucleotide
  Sense strand starting at position 514 of SEQ ID NO: 1864
ugugcauguccucuuugua

SEQ ID NO: 145323 - RNA, 19 nt, Artificial Sequence
  Description of Artificial Sequence: Synthetic oligonucleotide
  Antisense strand to SEQ ID NO: 145322
uacaaagaggacaugcaca

SEQ ID NO: 145324 - RNA, 19 nt, Artificial Sequence
  Description of Artificial Sequence: Synthetic oligonucleotide
  Sense strand starting at position 739 of SEQ ID NO: 1864
agcuuugagcuagaugauu

SEQ ID NO: 145325 - RNA, 19 nt, Artificial Sequence
  Description of Artificial Sequence: Synthetic oligonucleotide
  Antisense strand to SEQ ID NO: 145324
aaucaucuagcucaaagcu

SEQ ID NO: 145326 - RNA, 19 nt, Artificial Sequence
  Description of Artificial Sequence: Synthetic oligonucleotide
  Sense strand starting at position 762 of SEQ ID NO: 1864
ccaacuguagccuaaugua

SEQ ID NO: 145327 - RNA, 19 nt, Artificial Sequence
  Description of Artificial Sequence: Synthetic oligonucleotide
  Antisense strand to SEQ ID NO: 145326
uacauuaggcuacaguugg

SEQ ID NO: 145328 - RNA, 19 nt, Artificial Sequence
  Description of Artificial Sequence: Synthetic oligonucleotide
  Sense strand starting at position 815 of SEQ ID NO: 1864
agcuaugacguucaguaga

SEQ ID NO: 145329 - RNA, 19 nt, Artificial Sequence
  Description of Artificial Sequence: Synthetic oligonucleotide
  Antisense strand to SEQ ID NO: 145328
ucuacugaacgucauagcu

SEQ ID NO: 145330 - RNA, 19 nt, Artificial Sequence
  Description of Artificial Sequence: Synthetic oligonucleotide
  Sense strand starting at position 876 of SEQ ID NO: 1864
uuaggauggguuuaucugu

SEQ ID NO: 145331 - RNA, 19 nt, Artificial Sequence
  Description of Artificial Sequence: Synthetic oligonucleotide
  Antisense strand to SEQ ID NO: 145330
acagauaaacccauccuaa

SEQ ID NO: 145332 - RNA, 19 nt, Artificial Sequence
  Description of Artificial Sequence: Synthetic oligonucleotide
  Sense strand starting at position 882 of SEQ ID NO: 1864
uggguuuaucuguauguaa

SEQ ID NO: 145333 - RNA, 19 nt, Artificial Sequence
  Description of Artificial Sequence: Synthetic oligonucleotide
  Antisense strand to SEQ ID NO: 145332
uuacauacagauaaaccca

SEQ ID NO: 145334 - RNA, 19 nt, Artificial Sequence
  Description of Artificial Sequence: Synthetic oligonucleotide
  Sense strand starting at position 918 of SEQ ID NO: 1864
gaguaucugcaguagugaa

SEQ ID NO: 145335 - RNA, 19 nt, Artificial Sequence
  Description of Artificial Sequence: Synthetic oligonucleotide
  Antisense strand to SEQ ID NO: 145334
uucacuacugcagauacuc

SEQ ID NO: 145336 - RNA, 19 nt, Artificial Sequence
  Description of Artificial Sequence: Synthetic oligonucleotide
  Sense strand starting at position 961 of SEQ ID NO: 1864
gagaucuaaguuugagcuu

SEQ ID NO: 145337 - RNA, 19 nt, Artificial Sequence
  Description of Artificial Sequence: Synthetic oligonucleotide
  Antisense strand to SEQ ID NO: 145336
aagcucaaacuuagaucuc

SEQ ID NO: 145338 - RNA, 19 nt, Artificial Sequence
  Description of Artificial Sequence: Synthetic oligonucleotide
  Sense strand starting at position 1076 of SEQ ID NO: 1864
auguguguaaaguacauua

SEQ ID NO: 145339 - RNA, 19 nt, Artificial Sequence
  Description of Artificial Sequence: Synthetic oligonucleotide
  Antisense strand to SEQ ID NO: 145338
uaauguacuuuacacacau

SEQ ID NO: 145340 - RNA, 19 nt, Artificial Sequence
  Description of Artificial Sequence: Synthetic oligonucleotide
  Sense strand starting at position 1078 of SEQ ID NO: 1864
guguguaaaguacauuaaa

SEQ ID NO: 145341 - RNA, 19 nt, Artificial Sequence
  Description of Artificial Sequence: Synthetic oligonucleotide
  Antisense strand to SEQ ID NO: 145340
uuuaauguacuuuacacac

SEQ ID NO: 145342 - RNA, 19 nt, Artificial Sequence
  Description of Artificial Sequence: Synthetic oligonucleotide
  Sense strand starting at position 1120 of SEQ ID NO: 1864
ccacucaaugaauguuaga

SEQ ID NO: 145343 - RNA, 19 nt, Artificial Sequence
  Description of Artificial Sequence: Synthetic oligonucleotide
  Antisense strand to SEQ ID NO: 145342
ucuaacauucauugagugg

SEQ ID NO: 145344 - RNA, 19 nt, Artificial Sequence
  Description of Artificial Sequence: Synthetic oligonucleotide
  Sense strand starting at position 1143 of SEQ ID NO: 1864
auuauaucccguuaugaaa

SEQ ID NO: 145345 - RNA, 19 nt, Artificial Sequence
  Description of Artificial Sequence: Synthetic oligonucleotide
  Antisense strand to SEQ ID NO: 145344
uuucauaacgggauauaau

SEQ ID NO: 145346 - RNA, 19 nt, Artificial Sequence
  Description of Artificial Sequence: Synthetic oligonucleotide
  Sense strand starting at position 1302 of SEQ ID NO: 1864
ccgaaacuguuaccugaau

SEQ ID NO: 145347 - RNA, 19 nt, Artificial Sequence
  Description of Artificial Sequence: Synthetic oligonucleotide
  Antisense strand to SEQ ID NO: 145346
auucagguaacaguuucgg

SEQ ID NO: 145348 - RNA, 19 nt, Artificial Sequence
  Description of Artificial Sequence: Synthetic oligonucleotide
  Sense strand starting at position 1303 of SEQ ID NO: 1864
cgaaacuguuaccugaaua

SEQ ID NO: 145349 - RNA, 19 nt, Artificial Sequence
  Description of Artificial Sequence: Synthetic oligonucleotide
  Antisense strand to SEQ ID NO: 145348
uauucagguaacaguuucg

SEQ ID NO: 145350 - RNA, 19 nt, Artificial Sequence
  Description of Artificial Sequence: Synthetic oligonucleotide
  Sense strand starting at position 1331 of SEQ ID NO: 1864
cugcaucugcuauagaauu

SEQ ID NO: 145351 - RNA, 19 nt, Artificial Sequence
  Description of Artificial Sequence: Synthetic oligonucleotide
  Antisense strand to SEQ ID NO: 145350
aauucuauagcagaugcag

SEQ ID NO: 145352 - RNA, 19 nt, Artificial Sequence
  Description of Artificial Sequence: Synthetic oligonucleotide
  Sense strand starting at position 1400 of SEQ ID NO: 1864
cucagagguuaauugauua

SEQ ID NO: 145353 - RNA, 19 nt, Artificial Sequence
  Description of Artificial Sequence: Synthetic oligonucleotide
  Antisense strand to SEQ ID NO: 145352
uaaucaauuaaccucugag

SEQ ID NO: 145354 - RNA, 19 nt, Artificial Sequence
  Description of Artificial Sequence: Synthetic oligonucleotide
  Sense strand starting at position 1404 of SEQ ID NO: 1864
gagguuaauugauuagccu

SEQ ID NO: 145355 - RNA, 19 nt, Artificial Sequence
  Description of Artificial Sequence: Synthetic oligonucleotide
  Antisense strand to SEQ ID NO: 145354
aggcuaaucaauuaaccuc

SEQ ID NO: 145356 - RNA, 19 nt, Artificial Sequence
  Description of Artificial Sequence: Synthetic oligonucleotide
  Sense strand starting at position 1578 of SEQ ID NO: 1864
cccugagugacgcaucaga

SEQ ID NO: 145357 - RNA, 19 nt, Artificial Sequence
  Description of Artificial Sequence: Synthetic oligonucleotide
  Antisense strand to SEQ ID NO: 145356
ucugaugcgucacucaggg

SEQ ID NO: 145358 - RNA, 19 nt, Artificial Sequence
  Description of Artificial Sequence: Synthetic oligonucleotide
  Sense strand starting at position 1616 of SEQ ID NO: 1864
gcggaaguacuccaacaga

SEQ ID NO: 145359 - RNA, 19 nt, Artificial Sequence
  Description of Artificial Sequence: Synthetic oligonucleotide
  Antisense strand to SEQ ID NO: 145358
ucuguuggaguacuuccgc

SEQ ID NO: 145360 - RNA, 19 nt, Artificial Sequence
  Description of Artificial Sequence: Synthetic oligonucleotide
  Sense strand starting at position 1711 of SEQ ID NO: 1864
ggauaaaugacguguggac

SEQ ID NO: 145361 - RNA, 19 nt, Artificial Sequence
  Description of Artificial Sequence: Synthetic oligonucleotide
  Antisense strand to SEQ ID NO: 145360
guccacacgucauuuaucc

SEQ ID NO: 145362 - RNA, 19 nt, Artificial Sequence
  Description of Artificial Sequence: Synthetic oligonucleotide
  Sense strand starting at position 1856 of SEQ ID NO: 1864
ucaggaucgacuuaucgag

SEQ ID NO: 145363 - RNA, 19 nt, Artificial Sequence
  Description of Artificial Sequence: Synthetic oligonucleotide
  Antisense strand to SEQ ID NO: 145362
cucgauaagucgauccuga

SEQ ID NO: 145364 - RNA, 19 nt, Artificial Sequence
  Description of Artificial Sequence: Synthetic oligonucleotide
  Sense strand starting at position 1860 of SEQ ID NO: 1864
gaucgacuuaucgagguuu

SEQ ID NO: 145365 - RNA, 19 nt, Artificial Sequence
  Description of Artificial Sequence: Synthetic oligonucleotide
  Antisense strand to SEQ ID NO: 145364
aaaccucgauaagucgauc

SEQ ID NO: 145366 - RNA, 19 nt, Artificial Sequence
  Description of Artificial Sequence: Synthetic oligonucleotide
  Sense strand starting at position 2127 of SEQ ID NO: 1864
cugucugcugaugaggaau

SEQ ID NO: 145367 - RNA, 19 nt, Artificial Sequence
  Description of Artificial Sequence: Synthetic oligonucleotide
  Antisense strand to SEQ ID NO: 145366
auuccucaucagcagacag

SEQ ID NO: 145368 - RNA, 19 nt, Artificial Sequence
  Description of Artificial Sequence: Synthetic oligonucleotide
  Sense strand starting at position 2251 of SEQ ID NO: 1864
ucuggucuucuuggaagaa

SEQ ID NO: 145369 - RNA, 19 nt, Artificial Sequence
  Description of Artificial Sequence: Synthetic oligonucleotide
  Antisense strand to SEQ ID NO: 145368
uucuuccaagaagaccaga

SEQ ID NO: 145370 - RNA, 19 nt, Artificial Sequence
  Description of Artificial Sequence: Synthetic oligonucleotide
  Sense strand starting at position 2352 of SEQ ID NO: 1864
cugacaaucuuguugauua

SEQ ID NO: 145371 - RNA, 19 nt, Artificial Sequence
  Description of Artificial Sequence: Synthetic oligonucleotide
  Antisense strand to SEQ ID NO: 145370
uaaucaacaagauugucag

SEQ ID NO: 145372 - RNA, 19 nt, Artificial Sequence
  Description of Artificial Sequence: Synthetic oligonucleotide
  Sense strand starting at position 2888 of SEQ ID NO: 1864
ucuugaauaugugucaaau

SEQ ID NO: 145373 - RNA, 19 nt, Artificial Sequence
  Description of Artificial Sequence: Synthetic oligonucleotide
  Antisense strand to SEQ ID NO: 145372
auuugacacauauucaaga

SEQ ID NO: 145374 - RNA, 19 nt, Artificial Sequence
  Description of Artificial Sequence: Synthetic oligonucleotide
  Sense strand starting at position 3497 of SEQ ID NO: 1864
uugagcacugacuauguua

SEQ ID NO: 145375 - RNA, 19 nt, Artificial Sequence
  Description of Artificial Sequence: Synthetic oligonucleotide
  Antisense strand to SEQ ID NO: 145374
uaacauagucagugcucaa

SEQ ID NO: 145376 - RNA, 19 nt, Artificial Sequence
  Description of Artificial Sequence: Synthetic oligonucleotide
  Sense strand starting at position 3504 of SEQ ID NO: 1864
cugacuauguuaccaguga

SEQ ID NO: 145377 - RNA, 19 nt, Artificial Sequence
  Description of Artificial Sequence: Synthetic oligonucleotide
  Antisense strand to SEQ ID NO: 145376
ucacugguaacauagucag

SEQ ID NO: 145378 - RNA, 19 nt, Artificial Sequence
  Description of Artificial Sequence: Synthetic oligonucleotide
  Sense strand starting at position 3519 of SEQ ID NO: 1864
gugacuauucugcauaucu

SEQ ID NO: 145379 - RNA, 19 nt, Artificial Sequence
  Description of Artificial Sequence: Synthetic oligonucleotide
  Antisense strand to SEQ ID NO: 145378
agauaugcagaauagucac

SEQ ID NO: 145380 - RNA, 19 nt, Artificial Sequence
  Description of Artificial Sequence: Synthetic oligonucleotide
  Sense strand starting at position 3530 of SEQ ID NO: 1864
gcauaucuggcauagaaug

SEQ ID NO: 145381 - RNA, 19 nt, Artificial Sequence
  Description of Artificial Sequence: Synthetic oligonucleotide
  Antisense strand to SEQ ID NO: 145380
cauucuaugccagauaugc

SEQ ID NO: 145382 - RNA, 19 nt, Artificial Sequence
  Description of Artificial Sequence: Synthetic oligonucleotide
  Sense strand starting at position 3590 of SEQ ID NO: 1864
gcaucuuaauaggcagaaa

SEQ ID NO: 145383 - RNA, 19 nt, Artificial Sequence
  Description of Artificial Sequence: Synthetic oligonucleotide
  Antisense strand to SEQ ID NO: 145382
uuucugccuauuaagaugc

SEQ ID NO: 145384 - RNA, 19 nt, Artificial Sequence
  Description of Artificial Sequence: Synthetic oligonucleotide
  Sense strand starting at position 3604 of SEQ ID NO: 1864
agaaauagaucauaaacag

SEQ ID NO: 145385 - RNA, 19 nt, Artificial Sequence
  Description of Artificial Sequence: Synthetic oligonucleotide
  Antisense strand to SEQ ID NO: 145384
cuguuuaugaucuauuucu

SEQ ID NO: 145386 - RNA, 19 nt, Artificial Sequence
  Description of Artificial Sequence: Synthetic oligonucleotide
  Sense strand starting at position 3809 of SEQ ID NO: 1864
guggaugauucuguuaaua

SEQ ID NO: 145387 - RNA, 19 nt, Artificial Sequence
  Description of Artificial Sequence: Synthetic oligonucleotide
  Antisense strand to SEQ ID NO: 145386
uauuaacagaaucauccac

SEQ ID NO: 145388 - RNA, 19 nt, Artificial Sequence
  Description of Artificial Sequence: Synthetic oligonucleotide
  Sense strand starting at position 3848 of SEQ ID NO: 1864
ucuuuaauaugguccagga

SEQ ID NO: 145389 - RNA, 19 nt, Artificial Sequence
  Description of Artificial Sequence: Synthetic oligonucleotide
  Antisense strand to SEQ ID NO: 145388
uccuggaccauauuaaaga

SEQ ID NO: 145390 - RNA, 19 nt, Artificial Sequence
  Description of Artificial Sequence: Synthetic oligonucleotide
  Sense strand starting at position 3961 of SEQ ID NO: 1864
ugaagcauaaagugguuaa

SEQ ID NO: 145391 - RNA, 19 nt, Artificial Sequence
  Description of Artificial Sequence: Synthetic oligonucleotide
  Antisense strand to SEQ ID NO: 145390
uuaaccacuuuaugcuuca

SEQ ID NO: 145392 - RNA, 19 nt, Artificial Sequence
  Description of Artificial Sequence: Synthetic oligonucleotide
  Sense strand starting at position 3979 of SEQ ID NO: 1864
aguaacuugcucuaaggau

SEQ ID NO: 145393 - RNA, 19 nt, Artificial Sequence
  Description of Artificial Sequence: Synthetic oligonucleotide
  Antisense strand to SEQ ID NO: 145392
auccuuagagcaaguuacu

SEQ ID NO: 145394 - RNA, 19 nt, Artificial Sequence
  Description of Artificial Sequence: Synthetic oligonucleotide
  Sense strand starting at position 3628 of SEQ ID NO: 1865
aggucagggauucgagagu

SEQ ID NO: 145395 - RNA, 19 nt, Artificial Sequence
  Description of Artificial Sequence: Synthetic oligonucleotide
  Antisense strand to SEQ ID NO: 145394
acucucgaaucccugaccu

SEQ ID NO: 145396 - RNA, 19 nt, Artificial Sequence
  Description of Artificial Sequence: Synthetic oligonucleotide
  Sense strand starting at position 3469 of SEQ ID NO: 1865
cuacgaagucacuaucuua

SEQ ID NO: 145397 - RNA, 19 nt, Artificial Sequence
  Description of Artificial Sequence: Synthetic oligonucleotide
  Antisense strand to SEQ ID NO: 145396
uaagauagugacuucguag

SEQ ID NO: 145398 - RNA, 19 nt, Artificial Sequence
  Description of Artificial Sequence: Synthetic oligonucleotide
  Sense strand starting at position 3453 of SEQ ID NO: 1865
cucugcagucccuauucua

SEQ ID NO: 145399 - RNA, 19 nt, Artificial Sequence
  Description of Artificial Sequence: Synthetic oligonucleotide
  Antisense strand to SEQ ID NO: 145398
uagaauagggacugcagag

SEQ ID NO: 145400 - RNA, 19 nt, Artificial Sequence
  Description of Artificial Sequence: Synthetic oligonucleotide
  Sense strand starting at position 3398 of SEQ ID NO: 1865
aaaggauucuuagagguag

SEQ ID NO: 145401 - RNA, 19 nt, Artificial Sequence
  Description of Artificial Sequence: Synthetic oligonucleotide
  Antisense strand to SEQ ID NO: 145400
cuaccucuaagaauccuuu

SEQ ID NO: 145402 - RNA, 19 nt, Artificial Sequence
  Description of Artificial Sequence: Synthetic oligonucleotide
  Sense strand starting at position 3302 of SEQ ID NO: 1865
guaaucaggugaguccuaa

SEQ ID NO: 145403 - RNA, 19 nt, Artificial Sequence
  Description of Artificial Sequence: Synthetic oligonucleotide
  Antisense strand to SEQ ID NO: 145402
uuaggacucaccugauuac

SEQ ID NO: 145404 - RNA, 19 nt, Artificial Sequence
  Description of Artificial Sequence: Synthetic oligonucleotide
  Sense strand starting at position 3259 of SEQ ID NO: 1865
uggcuuguuccugauagag

SEQ ID NO: 145405 - RNA, 19 nt, Artificial Sequence
  Description of Artificial Sequence: Synthetic oligonucleotide
  Antisense strand to SEQ ID NO: 145404
cucuaucaggaacaagcca

SEQ ID NO: 145406 - RNA, 19 nt, Artificial Sequence
  Description of Artificial Sequence: Synthetic oligonucleotide
  Sense strand starting at position 3246 of SEQ ID NO: 1865
ggaugaucauaccuggcuu

SEQ ID NO: 145407 - RNA, 19 nt, Artificial Sequence
  Description of Artificial Sequence: Synthetic oligonucleotide
  Antisense strand to SEQ ID NO: 145406
aagccagguaugaucaucc

SEQ ID NO: 145408 - RNA, 19 nt, Artificial Sequence
  Description of Artificial Sequence: Synthetic oligonucleotide
  Sense strand starting at position 3123 of SEQ ID NO: 1865
gacagugcuccugauagac

SEQ ID NO: 145409 - RNA, 19 nt, Artificial Sequence
  Description of Artificial Sequence: Synthetic oligonucleotide
  Antisense strand to SEQ ID NO: 145408
gucuaucaggagcacuguc

SEQ ID NO: 145410 - RNA, 19 nt, Artificial Sequence
  Description of Artificial Sequence: Synthetic oligonucleotide
  Sense strand starting at position 3119 of SEQ ID NO: 1865
ggaugacagugcuccugau

SEQ ID NO: 145411 - RNA, 19 nt, Artificial Sequence
  Description of Artificial Sequence: Synthetic oligonucleotide
  Antisense strand to SEQ ID NO: 145410
aucaggagcacugucaucc

SEQ ID NO: 145412 - RNA, 19 nt, Artificial Sequence
  Description of Artificial Sequence: Synthetic oligonucleotide
  Sense strand starting at position 2997 of SEQ ID NO: 1865
ccugaucaagcugaaucau

SEQ ID NO: 145413 - RNA, 19 nt, Artificial Sequence
  Description of Artificial Sequence: Synthetic oligonucleotide
  Antisense strand to SEQ ID NO: 145412
augauucagcuugaucagg

SEQ ID NO: 145414 - RNA, 19 nt, Artificial Sequence
  Description of Artificial Sequence: Synthetic oligonucleotide
  Sense strand starting at position 2987 of SEQ ID NO: 1865
ucugucacagccugaucaa

SEQ ID NO: 145415 - RNA, 19 nt, Artificial Sequence
  Description of Artificial Sequence: Synthetic oligonucleotide
  Antisense strand to SEQ ID NO: 145414
uugaucaggcugugacaga

SEQ ID NO: 145416 - RNA, 19 nt, Artificial Sequence
  Description of Artificial Sequence: Synthetic oligonucleotide
  Sense strand starting at position 2797 of SEQ ID NO: 1865
ggccuuuguccauauuguu

SEQ ID NO: 145417 - RNA, 19 nt, Artificial Sequence
  Description of Artificial Sequence: Synthetic oligonucleotide
  Antisense strand to SEQ ID NO: 145416
aacaauauggacaaaggcc

SEQ ID NO: 145418 - RNA, 19 nt, Artificial Sequence
  Description of Artificial Sequence: Synthetic oligonucleotide
  Sense strand starting at position 2766 of SEQ ID NO: 1865
cguuaucuggaauacuauu

SEQ ID NO: 145419 - RNA, 19 nt, Artificial Sequence
  Description of Artificial Sequence: Synthetic oligonucleotide
  Antisense strand to SEQ ID NO: 145418
aauaguauuccagauaacg

SEQ ID NO: 145420 - RNA, 19 nt, Artificial Sequence
  Description of Artificial Sequence: Synthetic oligonucleotide
  Sense strand starting at position 2763 of SEQ ID NO: 1865
uuucguuaucuggaauacu

SEQ ID NO: 145421 - RNA, 19 nt, Artificial Sequence
  Description of Artificial Sequence: Synthetic oligonucleotide
  Antisense strand to SEQ ID NO: 145420
aguauuccagauaacgaaa

SEQ ID NO: 145422 - RNA, 19 nt, Artificial Sequence
  Description of Artificial Sequence: Synthetic oligonucleotide
  Sense strand starting at position 2649 of SEQ ID NO: 1865
caaggcuguccuuaagaca

SEQ ID NO: 145423 - RNA, 19 nt, Artificial Sequence
  Description of Artificial Sequence: Synthetic oligonucleotide
  Antisense strand to SEQ ID NO: 145422
ugucuuaaggacagccuug

SEQ ID NO: 145424 - RNA, 19 nt, Artificial Sequence
  Description of Artificial Sequence: Synthetic oligonucleotide
  Sense strand starting at position 2612 of SEQ ID NO: 1865
ucaugucauucuccuguua

SEQ ID NO: 145425 - RNA, 19 nt, Artificial Sequence
  Description of Artificial Sequence: Synthetic oligonucleotide
  Antisense strand to SEQ ID NO: 145424
uaacaggagaaugacauga

SEQ ID NO: 145426 - RNA, 19 nt, Artificial Sequence
  Description of Artificial Sequence: Synthetic oligonucleotide
  Sense strand starting at position 2601 of SEQ ID NO: 1865
uuuaaaucggaucauguca

SEQ ID NO: 145427 - RNA, 19 nt, Artificial Sequence
  Description of Artificial Sequence: Synthetic oligonucleotide
  Antisense strand to SEQ ID NO: 145426
ugacaugauccgauuuaaa

SEQ ID NO: 145428 - RNA, 19 nt, Artificial Sequence
  Description of Artificial Sequence: Synthetic oligonucleotide
  Sense strand starting at position 2431 of SEQ ID NO: 1865
cuuccaguuguauaucaga

SEQ ID NO: 145429 - RNA, 19 nt, Artificial Sequence
  Description of Artificial Sequence: Synthetic oligonucleotide
  Antisense strand to SEQ ID NO: 145428
ucugauauacaacuggaag

SEQ ID NO: 145430 - RNA, 19 nt, Artificial Sequence
  Description of Artificial Sequence: Synthetic oligonucleotide
  Sense strand starting at position 2421 of SEQ ID NO: 1865
agagauuauucuuccaguu

SEQ ID NO: 145431 - RNA, 19 nt, Artificial Sequence
  Description of Artificial Sequence: Synthetic oligonucleotide
  Antisense strand to SEQ ID NO: 145430
aacuggaagaauaaucucu

SEQ ID NO: 145432 - RNA, 19 nt, Artificial Sequence
  Description of Artificial Sequence: Synthetic oligonucleotide
  Sense strand starting at position 2420 of SEQ ID NO: 1865
gagagauuauucuuccagu

SEQ ID NO: 145433 - RNA, 19 nt, Artificial Sequence
  Description of Artificial Sequence: Synthetic oligonucleotide
  Antisense strand to SEQ ID NO: 145432
acuggaagaauaaucucuc

SEQ ID NO: 145434 - RNA, 19 nt, Artificial Sequence
  Description of Artificial Sequence: Synthetic oligonucleotide
  Sense strand starting at position 2353 of SEQ ID NO: 1865
guccuagcucguuacugaa

SEQ ID NO: 145435 - RNA, 19 nt, Artificial Sequence
  Description of Artificial Sequence: Synthetic oligonucleotide
  Antisense strand to SEQ ID NO: 145434
uucaguaacgagcuaggac

SEQ ID NO: 145436 - RNA, 19 nt, Artificial Sequence
  Description of Artificial Sequence: Synthetic oligonucleotide
  Sense strand starting at position 2297 of SEQ ID NO: 1865
ggaucagucccaugauuaa

SEQ ID NO: 145437 - RNA, 19 nt, Artificial Sequence
  Description of Artificial Sequence: Synthetic oligonucleotide
  Antisense strand to SEQ ID NO: 145436
uuaaucaugggacugaucc

SEQ ID NO: 145438 - RNA, 19 nt, Artificial Sequence
  Description of Artificial Sequence: Synthetic oligonucleotide
  Sense strand starting at position 2284 of SEQ ID NO: 1865
cccauaucggaauggauca

SEQ ID NO: 145439 - RNA, 19 nt, Artificial Sequence
  Description of Artificial Sequence: Synthetic oligonucleotide
  Antisense strand to SEQ ID NO: 145438
ugauccauuccgauauggg

SEQ ID NO: 145440 - RNA, 19 nt, Artificial Sequence
  Description of Artificial Sequence: Synthetic oligonucleotide
  Sense strand starting at position 2260 of SEQ ID NO: 1865
cgccaagcggucuauuuau

SEQ ID NO: 145441 - RNA, 19 nt, Artificial Sequence
  Description of Artificial Sequence: Synthetic oligonucleotide
  Antisense strand to SEQ ID NO: 145440
auaaauagaccgcuuggcg

SEQ ID NO: 145442 - RNA, 19 nt, Artificial Sequence
  Description of Artificial Sequence: Synthetic oligonucleotide
  Sense strand starting at position 1050 of SEQ ID NO: 1865
ggcggugcgaugaggaaau

SEQ ID NO: 145443 - RNA, 19 nt, Artificial Sequence
  Description of Artificial Sequence: Synthetic oligonucleotide
  Antisense strand to SEQ ID NO: 145442
auuuccucaucgcaccgcc

SEQ ID NO: 145444 - RNA, 19 nt, Artificial Sequence
  Description of Artificial Sequence: Synthetic oligonucleotide
  Sense strand starting at position 867 of SEQ ID NO: 1865
cucgaugucgcuaggguua

SEQ ID NO: 145445 - RNA, 19 nt, Artificial Sequence
  Description of Artificial Sequence: Synthetic oligonucleotide
  Antisense strand to SEQ ID NO: 145444
uaacccuagcgacaucgag

SEQ ID NO: 145446 - RNA, 19 nt, Artificial Sequence
  Description of Artificial Sequence: Synthetic oligonucleotide
  Sense strand starting at position 766 of SEQ ID NO: 1865
gucauauggguggagcaaa

SEQ ID NO: 145447 - RNA, 19 nt, Artificial Sequence
  Description of Artificial Sequence: Synthetic oligonucleotide
  Antisense strand to SEQ ID NO: 145446
uuugcuccacccauaugac

SEQ ID NO: 145448 - RNA, 19 nt, Artificial Sequence
  Description of Artificial Sequence: Synthetic oligonucleotide
  Sense strand starting at position 765 of SEQ ID NO: 1865
ugucauauggguggagcaa

SEQ ID NO: 145449 - RNA, 19 nt, Artificial Sequence
  Description of Artificial Sequence: Synthetic oligonucleotide
  Antisense strand to SEQ ID NO: 145448
uugcuccacccauaugaca

SEQ ID NO: 145450 - RNA, 19 nt, Artificial Sequence
  Description of Artificial Sequence: Synthetic oligonucleotide
  Sense strand starting at position 764 of SEQ ID NO: 1865
gugucauauggguggagca

SEQ ID NO: 145451 - RNA, 19 nt, Artificial Sequence
  Description of Artificial Sequence: Synthetic oligonucleotide
  Antisense strand to SEQ ID NO: 145450
ugcuccacccauaugacac

SEQ ID NO: 145452 - RNA, 19 nt, Artificial Sequence
  Description of Artificial Sequence: Synthetic oligonucleotide
  Sense strand starting at position 703 of SEQ ID NO: 1865
guuuaaagguuuccaaagu

SEQ ID NO: 145453 - RNA, 19 nt, Artificial Sequence
  Description of Artificial Sequence: Synthetic oligonucleotide
  Antisense strand to SEQ ID NO: 145452
acuuuggaaaccuuuaaac

SEQ ID NO: 145454 - RNA, 19 nt, Artificial Sequence
  Description of Artificial Sequence: Synthetic oligonucleotide
  Sense strand starting at position 643 of SEQ ID NO: 1865
uuaggagagucuuugauac

SEQ ID NO: 145455 - RNA, 19 nt, Artificial Sequence
  Description of Artificial Sequence: Synthetic oligonucleotide
  Antisense strand to SEQ ID NO: 145454
guaucaaagacucuccuaa

SEQ ID NO: 145456 - RNA, 19 nt, Artificial Sequence
  Description of Artificial Sequence: Synthetic oligonucleotide
  Sense strand starting at position 582 of SEQ ID NO: 1865
acucgaauucugcaacaca

SEQ ID NO: 145457 - RNA, 19 nt, Artificial Sequence
  Description of Artificial Sequence: Synthetic oligonucleotide
  Antisense strand to SEQ ID NO: 145456
uguguugcagaauucgagu

SEQ ID NO: 145458 - RNA, 19 nt, Artificial Sequence
  Description of Artificial Sequence: Synthetic oligonucleotide
  Sense strand starting at position 337 of SEQ ID NO: 1865
uugguuuacacaggaauga

SEQ ID NO: 145459 - RNA, 19 nt, Artificial Sequence
  Description of Artificial Sequence: Synthetic oligonucleotide
  Antisense strand to SEQ ID NO: 145458
ucauuccuguguaaaccaa

SEQ ID NO: 145460 - RNA, 19 nt, Artificial Sequence
  Description of Artificial Sequence: Synthetic oligonucleotide
  Sense strand starting at position 329 of SEQ ID NO: 1865
augagacauugguuuacac

SEQ ID NO: 145461 - RNA, 19 nt, Artificial Sequence
  Description of Artificial Sequence: Synthetic oligonucleotide
  Antisense strand to SEQ ID NO: 145460
guguaaaccaaugucucau

SEQ ID NO: 145462 - RNA, 19 nt, Artificial Sequence
  Description of Artificial Sequence: Synthetic oligonucleotide
  Sense strand starting at position 327 of SEQ ID NO: 1865
ugaugagacauugguuuac

SEQ ID NO: 145463 - RNA, 19 nt, Artificial Sequence
  Description of Artificial Sequence: Synthetic oligonucleotide
  Antisense strand to SEQ ID NO: 145462
guaaaccaaugucucauca

SEQ ID NO: 145464 - RNA, 19 nt, Artificial Sequence
  Description of Artificial Sequence: Synthetic oligonucleotide
  Sense strand starting at position 203 of SEQ ID NO: 1865
gggagaagucauggaggcu

SEQ ID NO: 145465 - RNA, 19 nt, Artificial Sequence
  Description of Artificial Sequence: Synthetic oligonucleotide
  Antisense strand to SEQ ID NO: 145464
agccuccaugacuucuccc

SEQ ID NO: 145466 - RNA, 19 nt, Artificial Sequence
  Description of Artificial Sequence: Synthetic oligonucleotide
  Sense strand starting at position 174 of SEQ ID NO: 1865
uugguaggccuggaauaua

SEQ ID NO: 145467 - RNA, 19 nt, Artificial Sequence
  Description of Artificial Sequence: Synthetic oligonucleotide
  Antisense strand to SEQ ID NO: 145466
uauauuccaggccuaccaa

SEQ ID NO: 145468 - RNA, 19 nt, Artificial Sequence
  Description of Artificial Sequence: Synthetic oligonucleotide
  Sense strand starting at position 173 of SEQ ID NO: 1865
uuugguaggccuggaauau

SEQ ID NO: 145469 - RNA, 19 nt, Artificial Sequence
  Description of Artificial Sequence: Synthetic oligonucleotide
  Antisense strand to SEQ ID NO: 145468
auauuccaggccuaccaaa

SEQ ID NO: 145470 - RNA, 19 nt, Artificial Sequence
  Description of Artificial Sequence: Synthetic oligonucleotide
  Sense strand starting at position 66 of SEQ ID NO: 1865
aaagcugaguucucaaaga

SEQ ID NO: 145471 - RNA, 19 nt, Artificial Sequence
  Description of Artificial Sequence: Synthetic oligonucleotide
  Antisense strand to SEQ ID NO: 145470
ucuuugagaacucagcuuu

SEQ ID NO: 145472 - RNA, 19 nt, Artificial Sequence
  Description of Artificial Sequence: Synthetic oligonucleotide
  Sense strand starting at position 62 of SEQ ID NO: 1865
caugaaagcugaguucuca

SEQ ID NO: 145473 - RNA, 19 nt, Artificial Sequence
  Description of Artificial Sequence: Synthetic oligonucleotide
  Antisense strand to SEQ ID NO: 145472
ugagaacucagcuuucaug

SEQ ID NO: 145474 - RNA, 19 nt, Artificial Sequence
  Description of Artificial Sequence: Synthetic oligonucleotide
  Sense strand starting at position 1542 of SEQ ID NO: 1866
cgaugucgggcgagucaau

SEQ ID NO: 145475 - RNA, 19 nt, Artificial Sequence
  Description of Artificial Sequence: Synthetic oligonucleotide
  Antisense strand to SEQ ID NO: 145474
auugacucgcccgacaucg

SEQ ID NO: 145476 - RNA, 19 nt, Artificial Sequence
  Description of Artificial Sequence: Synthetic oligonucleotide
  Sense strand starting at position 2018 of SEQ ID NO: 1866
ccagucuuccagcgagaag

SEQ ID NO: 145477 - RNA, 19 nt, Artificial Sequence
  Description of Artificial Sequence: Synthetic oligonucleotide
  Antisense strand to SEQ ID NO: 145476
cuucucgcuggaagacugg

SEQ ID NO: 145478 - RNA, 19 nt, Artificial Sequence
  Description of Artificial Sequence: Synthetic oligonucleotide
  Sense strand starting at position 2385 of SEQ ID NO: 1866
ugggaaugcuucuccaaag

SEQ ID NO: 145479 - RNA, 19 nt, Artificial Sequence
  Description of Artificial Sequence: Synthetic oligonucleotide
  Antisense strand to SEQ ID NO: 145478
cuuuggagaagcauuccca

SEQ ID NO: 145480 - RNA, 19 nt, Artificial Sequence
  Description of Artificial Sequence: Synthetic oligonucleotide
  Sense strand starting at position 2386 of SEQ ID NO: 1866
gggaaugcuucuccaaaga

SEQ ID NO: 145481 - RNA, 19 nt, Artificial Sequence
  Description of Artificial Sequence: Synthetic oligonucleotide
  Antisense strand to SEQ ID NO: 145480
ucuuuggagaagcauuccc

SEQ ID NO: 145482 - RNA, 19 nt, Artificial Sequence
  Description of Artificial Sequence: Synthetic oligonucleotide
  Sense strand starting at position 2401 of SEQ ID NO: 1866
aagauauguggauggacga

SEQ ID NO: 145483 - RNA, 19 nt, Artificial Sequence
  Description of Artificial Sequence: Synthetic oligonucleotide
  Antisense strand to SEQ ID NO: 145482
ucguccauccacauaucuu

SEQ ID NO: 145484 - RNA, 19 nt, Artificial Sequence
  Description of Artificial Sequence: Synthetic oligonucleotide
  Sense strand starting at position 2402 of SEQ ID NO: 1866
agauauguggauggacgaa

SEQ ID NO: 145485 - RNA, 19 nt, Artificial Sequence
  Description of Artificial Sequence: Synthetic oligonucleotide
  Antisense strand to SEQ ID NO: 145484
uucguccauccacauaucu

SEQ ID NO: 145486 - RNA, 19 nt, Artificial Sequence
  Description of Artificial Sequence: Synthetic oligonucleotide
  Sense strand starting at position 2417 of SEQ ID NO: 1866
cgaaauaggucucugguga

SEQ ID NO: 145487 - RNA, 19 nt, Artificial Sequence
  Description of Artificial Sequence: Synthetic oligonucleotide
  Antisense strand to SEQ ID NO: 145486
ucaccagagaccuauuucg

SEQ ID NO: 145488 - RNA, 19 nt, Artificial Sequence
  Description of Artificial Sequence: Synthetic oligonucleotide
  Sense strand starting at position 2418 of SEQ ID NO: 1866
gaaauaggucucuggugau

SEQ ID NO: 145489 - RNA, 19 nt, Artificial Sequence
  Description of Artificial Sequence: Synthetic oligonucleotide
  Antisense strand to SEQ ID NO: 145488
aucaccagagaccuauuuc

SEQ ID NO: 145490 - RNA, 19 nt, Artificial Sequence
  Description of Artificial Sequence: Synthetic oligonucleotide
  Sense strand starting at position 2461 of SEQ ID NO: 1866
ggcaaagacuuggcuucuu

SEQ ID NO: 145491 - RNA, 19 nt, Artificial Sequence
  Description of Artificial Sequence: Synthetic oligonucleotide
  Antisense strand to SEQ ID NO: 145490
aagaagccaagucuuugcc

SEQ ID NO: 145492 - RNA, 19 nt, Artificial Sequence
  Description of Artificial Sequence: Synthetic oligonucleotide
  Sense strand starting at position 2466 of SEQ ID NO: 1866
agacuuggcuucuuaggaa

SEQ ID NO: 145493 - RNA, 19 nt, Artificial Sequence
  Description of Artificial Sequence: Synthetic oligonucleotide
  Antisense strand to SEQ ID NO: 145492
uuccuaagaagccaagucu

SEQ ID NO: 145494 - RNA, 19 nt, Artificial Sequence
  Description of Artificial Sequence: Synthetic oligonucleotide
  Sense strand starting at position 2500 of SEQ ID NO: 1866
aaacaauguuugguagcaa

SEQ ID NO: 145495 - RNA, 19 nt, Artificial Sequence
  Description of Artificial Sequence: Synthetic oligonucleotide
  Antisense strand to SEQ ID NO: 145494
uugcuaccaaacauuguuu

SEQ ID NO: 145496 - RNA, 19 nt, Artificial Sequence
  Description of Artificial Sequence: Synthetic oligonucleotide
  Sense strand starting at position 2511 of SEQ ID NO: 1866
gguagcaauuuguaauaag

SEQ ID NO: 145497 - RNA, 19 nt, Artificial Sequence
  Description of Artificial Sequence: Synthetic oligonucleotide
  Antisense strand to SEQ ID NO: 145496
cuuauuacaaauugcuacc

SEQ ID NO: 145498 - RNA, 19 nt, Artificial Sequence
  Description of Artificial Sequence: Synthetic oligonucleotide
  Sense strand starting at position 2514 of SEQ ID NO: 1866
agcaauuuguaauaaggaa

SEQ ID NO: 145499 - RNA, 19 nt, Artificial Sequence
  Description of Artificial Sequence: Synthetic oligonucleotide
  Antisense strand to SEQ ID NO: 145498
uuccuuauuacaaauugcu

SEQ ID NO: 145500 - RNA, 19 nt, Artificial Sequence
  Description of Artificial Sequence: Synthetic oligonucleotide
  Sense strand starting at position 2565 of SEQ ID NO: 1866
uugugucaacuuugucaag

SEQ ID NO: 145501 - RNA, 19 nt, Artificial Sequence
  Description of Artificial Sequence: Synthetic oligonucleotide
  Antisense strand to SEQ ID NO: 145500
cuugacaaaguugacacaa

SEQ ID NO: 145502 - RNA, 19 nt, Artificial Sequence
  Description of Artificial Sequence: Synthetic oligonucleotide
  Sense strand starting at position 2567 of SEQ ID NO: 1866
gugucaacuuugucaagga

SEQ ID NO: 145503 - RNA, 19 nt, Artificial Sequence
  Description of Artificial Sequence: Synthetic oligonucleotide
  Antisense strand to SEQ ID NO: 145502
uccuugacaaaguugacac

SEQ ID NO: 145504 - RNA, 19 nt, Artificial Sequence
  Description of Artificial Sequence: Synthetic oligonucleotide
  Sense strand starting at position 2571 of SEQ ID NO: 1866
caacuuugucaaggaguag

SEQ ID NO: 145505 - RNA, 19 nt, Artificial Sequence
  Description of Artificial Sequence: Synthetic oligonucleotide
  Antisense strand to SEQ ID NO: 145504
cuacuccuugacaaaguug

SEQ ID NO: 145506 - RNA, 19 nt, Artificial Sequence
  Description of Artificial Sequence: Synthetic oligonucleotide
  Sense strand starting at position 2600 of SEQ ID NO: 1866
auugaauacuguccugcaa

SEQ ID NO: 145507 - RNA, 19 nt, Artificial Sequence
  Description of Artificial Sequence: Synthetic oligonucleotide
  Antisense strand to SEQ ID NO: 145506
uugcaggacaguauucaau

SEQ ID NO: 145508 - RNA, 19 nt, Artificial Sequence
  Description of Artificial Sequence: Synthetic oligonucleotide
  Sense strand starting at position 2630 of SEQ ID NO: 1866
ucaucuccuguuugacaca

SEQ ID NO: 145509 - RNA, 19 nt, Artificial Sequence
  Description of Artificial Sequence: Synthetic oligonucleotide
  Antisense strand to SEQ ID NO: 145508
ugugucaaacaggagauga

SEQ ID NO: 145510 - RNA, 19 nt, Artificial Sequence
  Description of Artificial Sequence: Synthetic oligonucleotide
  Sense strand starting at position 2749 of SEQ ID NO: 1866
ugugaacagugaccuuaau

SEQ ID NO: 145511 - RNA, 19 nt, Artificial Sequence
  Description of Artificial Sequence: Synthetic oligonucleotide
  Antisense strand to SEQ ID NO: 145510
auuaaggucacuguucaca

SEQ ID NO: 145512 - RNA, 19 nt, Artificial Sequence
  Description of Artificial Sequence: Synthetic oligonucleotide
  Sense strand starting at position 2773 of SEQ ID NO: 1866
caagcagugaaguguagaa

SEQ ID NO: 145513 - RNA, 19 nt, Artificial Sequence
  Description of Artificial Sequence: Synthetic oligonucleotide
  Antisense strand to SEQ ID NO: 145512
uucuacacuucacugcuug

SEQ ID NO: 145514 - RNA, 19 nt, Artificial Sequence
  Description of Artificial Sequence: Synthetic oligonucleotide
  Sense strand starting at position 2789 of SEQ ID NO: 1866
gaaacuaaggucugugaca

SEQ ID NO: 145515 - RNA, 19 nt, Artificial Sequence
  Description of Artificial Sequence: Synthetic oligonucleotide
  Antisense strand to SEQ ID NO: 145514
ugucacagaccuuaguuuc

SEQ ID NO: 145516 - RNA, 19 nt, Artificial Sequence
  Description of Artificial Sequence: Synthetic oligonucleotide
  Sense strand starting at position 2791 of SEQ ID NO: 1866
aacuaaggucugugacaga

SEQ ID NO: 145517 - RNA, 19 nt, Artificial Sequence
  Description of Artificial Sequence: Synthetic oligonucleotide
  Antisense strand to SEQ ID NO: 145516
ucugucacagaccuuaguu

SEQ ID NO: 145518 - RNA, 19 nt, Artificial Sequence
  Description of Artificial Sequence: Synthetic oligonucleotide
  Sense strand starting at position 2851 of SEQ ID NO: 1866
cgcauaaucccauagagau

SEQ ID NO: 145519 - RNA, 19 nt, Artificial Sequence
  Description of Artificial Sequence: Synthetic oligonucleotide
  Antisense strand to SEQ ID NO: 145518
aucucuaugggauuaugcg

SEQ ID NO: 145520 - RNA, 19 nt, Artificial Sequence
  Description of Artificial Sequence: Synthetic oligonucleotide
  Sense strand starting at position 2864 of SEQ ID NO: 1866
agagauaaauuugaugcau

SEQ ID NO: 145521 - RNA, 19 nt, Artificial Sequence
  Description of Artificial Sequence: Synthetic oligonucleotide
  Antisense strand to SEQ ID NO: 145520
augcaucaaauuuaucucu

SEQ ID NO: 145522 - RNA, 19 nt, Artificial Sequence
  Description of Artificial Sequence: Synthetic oligonucleotide
  Sense strand starting at position 3277 of SEQ ID NO: 1866
cgcgccagccuauuaugaa

SEQ ID NO: 145523 - RNA, 19 nt, Artificial Sequence
  Description of Artificial Sequence: Synthetic oligonucleotide
  Antisense strand to SEQ ID NO: 145522
uucauaauaggcuggcgcg

SEQ ID NO: 145524 - RNA, 19 nt, Artificial Sequence
  Description of Artificial Sequence: Synthetic oligonucleotide
  Sense strand starting at position 3307 of SEQ ID NO: 1866
augaauacgcaucguacua

SEQ ID NO: 145525 - RNA, 19 nt, Artificial Sequence
  Description of Artificial Sequence: Synthetic oligonucleotide
  Antisense strand to SEQ ID NO: 145524
uaguacgaugcguauucau

SEQ ID NO: 145526 - RNA, 19 nt, Artificial Sequence
  Description of Artificial Sequence: Synthetic oligonucleotide
  Sense strand starting at position 3375 of SEQ ID NO: 1866
uuuauuguuagacguuaga

SEQ ID NO: 145527 - RNA, 19 nt, Artificial Sequence
  Description of Artificial Sequence: Synthetic oligonucleotide
  Antisense strand to SEQ ID NO: 145526
ucuaacgucuaacaauaaa

SEQ ID NO: 145528 - RNA, 19 nt, Artificial Sequence
  Description of Artificial Sequence: Synthetic oligonucleotide
  Sense strand starting at position 3378 of SEQ ID NO: 1866
auuguuagacguuagauug

SEQ ID NO: 145529 - RNA, 19 nt, Artificial Sequence
  Description of Artificial Sequence: Synthetic oligonucleotide
  Antisense strand to SEQ ID NO: 145528
caaucuaacgucuaacaau

SEQ ID NO: 145530 - RNA, 19 nt, Artificial Sequence
  Description of Artificial Sequence: Synthetic oligonucleotide
  Sense strand starting at position 3386 of SEQ ID NO: 1866
acguuagauuguuuccacu

SEQ ID NO: 145531 - RNA, 19 nt, Artificial Sequence
  Description of Artificial Sequence: Synthetic oligonucleotide
  Antisense strand to SEQ ID NO: 145530
aguggaaacaaucuaacgu

SEQ ID NO: 145532 - RNA, 19 nt, Artificial Sequence
  Description of Artificial Sequence: Synthetic oligonucleotide
  Sense strand starting at position 3388 of SEQ ID NO: 1866
guuagauuguuuccacuaa

SEQ ID NO: 145533 - RNA, 19 nt, Artificial Sequence
  Description of Artificial Sequence: Synthetic oligonucleotide
  Antisense strand to SEQ ID NO: 145532
uuaguggaaacaaucuaac

SEQ ID NO: 145534 - RNA, 19 nt, Artificial Sequence
  Description of Artificial Sequence: Synthetic oligonucleotide
  Sense strand starting at position 3398 of SEQ ID NO: 1866
uuccacuaagucgguauua

SEQ ID NO: 145535 - RNA, 19 nt, Artificial Sequence
  Description of Artificial Sequence: Synthetic oligonucleotide
  Antisense strand to SEQ ID NO: 145534
uaauaccgacuuaguggaa

SEQ ID NO: 145536 - RNA, 19 nt, Artificial Sequence
  Description of Artificial Sequence: Synthetic oligonucleotide
  Sense strand starting at position 3399 of SEQ ID NO: 1866
uccacuaagucgguauuau

SEQ ID NO: 145537 - RNA, 19 nt, Artificial Sequence
  Description of Artificial Sequence: Synthetic oligonucleotide
  Antisense strand to SEQ ID NO: 145536
auaauaccgacuuagugga

SEQ ID NO: 145538 - RNA, 19 nt, Artificial Sequence
  Description of Artificial Sequence: Synthetic oligonucleotide
  Sense strand starting at position 3400 of SEQ ID NO: 1866
ccacuaagucgguauuaua

SEQ ID NO: 145539 - RNA, 19 nt, Artificial Sequence
  Description of Artificial Sequence: Synthetic oligonucleotide
  Antisense strand to SEQ ID NO: 145538
uauaauaccgacuuagugg

SEQ ID NO: 145540 - RNA, 19 nt, Artificial Sequence
  Description of Artificial Sequence: Synthetic oligonucleotide
  Sense strand starting at position 3591 of SEQ ID NO: 1866
gugaaagacuuucuauugu

SEQ ID NO: 145541 - RNA, 19 nt, Artificial Sequence
  Description of Artificial Sequence: Synthetic oligonucleotide
  Antisense strand to SEQ ID NO: 145540
acaauagaaagucuuucac

SEQ ID NO: 145542 - RNA, 19 nt, Artificial Sequence
  Description of Artificial Sequence: Synthetic oligonucleotide
  Sense strand starting at position 3792 of SEQ ID NO: 1866
cuggaucagguaugucuaa

SEQ ID NO: 145543 - RNA, 19 nt, Artificial Sequence
  Description of Artificial Sequence: Synthetic oligonucleotide
  Antisense strand to SEQ ID NO: 145542
uuagacauaccugauccag

SEQ ID NO: 145544 - RNA, 19 nt, Artificial Sequence
  Description of Artificial Sequence: Synthetic oligonucleotide
  Sense strand starting at position 3793 of SEQ ID NO: 1866
uggaucagguaugucuaaa

SEQ ID NO: 145545 - RNA, 19 nt, Artificial Sequence
  Description of Artificial Sequence: Synthetic oligonucleotide
  Antisense strand to SEQ ID NO: 145544
uuuagacauaccugaucca

SEQ ID NO: 145546 - RNA, 19 nt, Artificial Sequence
  Description of Artificial Sequence: Synthetic oligonucleotide
  Sense strand starting at position 3908 of SEQ ID NO: 1866
gcccuuggagcagaacaau

SEQ ID NO: 145547 - RNA, 19 nt, Artificial Sequence
  Description of Artificial Sequence: Synthetic oligonucleotide
  Antisense strand to SEQ ID NO: 145546
auuguucugcuccaagggc

SEQ ID NO: 145548 - RNA, 19 nt, Artificial Sequence
  Description of Artificial Sequence: Synthetic oligonucleotide
  Sense strand starting at position 3914 of SEQ ID NO: 1866
ggagcagaacaauguuauu

SEQ ID NO: 145549 - RNA, 19 nt, Artificial Sequence
  Description of Artificial Sequence: Synthetic oligonucleotide
  Antisense strand to SEQ ID NO: 145548
aauaacauuguucugcucc

SEQ ID NO: 145550 - RNA, 19 nt, Artificial Sequence
  Description of Artificial Sequence: Synthetic oligonucleotide
  Sense strand starting at position 3945 of SEQ ID NO: 1866
ggaugagacuuagacauca

SEQ ID NO: 145551 - RNA, 19 nt, Artificial Sequence
  Description of Artificial Sequence: Synthetic oligonucleotide
  Antisense strand to SEQ ID NO: 145550
ugaugucuaagucucaucc

SEQ ID NO: 145552 - RNA, 19 nt, Artificial Sequence
  Description of Artificial Sequence: Synthetic oligonucleotide
  Sense strand starting at position 3973 of SEQ ID NO: 1866
uucucaaaguguuccuagu

SEQ ID NO: 145553 - RNA, 19 nt, Artificial Sequence
  Description of Artificial Sequence: Synthetic oligonucleotide
  Antisense strand to SEQ ID NO: 145552
acuaggaacacuuugagaa

SEQ ID NO: 145554 - RNA, 19 nt, Artificial Sequence
  Description of Artificial Sequence: Synthetic oligonucleotide
  Sense strand starting at position 232 of SEQ ID NO: 1867
cuuaacuaguacuugagau

SEQ ID NO: 145555 - RNA, 19 nt, Artificial Sequence
  Description of Artificial Sequence: Synthetic oligonucleotide
  Antisense strand to SEQ ID NO: 145554
aucucaaguacuaguuaag

SEQ ID NO: 145556 - RNA, 19 nt, Artificial Sequence
  Description of Artificial Sequence: Synthetic oligonucleotide
  Sense strand starting at position 283 of SEQ ID NO: 1867
cuaguucuaccguguggga

SEQ ID NO: 145557 - RNA, 19 nt, Artificial Sequence
  Description of Artificial Sequence: Synthetic oligonucleotide
  Antisense strand to SEQ ID NO: 145556
ucccacacgguagaacuag

SEQ ID NO: 145558 - RNA, 19 nt, Artificial Sequence
  Description of Artificial Sequence: Synthetic oligonucleotide
  Sense strand starting at position 411 of SEQ ID NO: 1867
ugaggauacugggagcaau

SEQ ID NO: 145559 - RNA, 19 nt, Artificial Sequence
  Description of Artificial Sequence: Synthetic oligonucleotide
  Antisense strand to SEQ ID NO: 145558
auugcucccaguauccuca

SEQ ID NO: 145560 - RNA, 19 nt, Artificial Sequence
  Description of Artificial Sequence: Synthetic oligonucleotide
  Sense strand starting at position 542 of SEQ ID NO: 1867
gggucaacuccaugggaga

SEQ ID NO: 145561 - RNA, 19 nt, Artificial Sequence
  Description of Artificial Sequence: Synthetic oligonucleotide
  Antisense strand to SEQ ID NO: 145560
ucucccauggaguugaccc

SEQ ID NO: 145562 - RNA, 19 nt, Artificial Sequence
  Description of Artificial Sequence: Synthetic oligonucleotide
  Sense strand starting at position 597 of SEQ ID NO: 1867
gcaugagaugcucaguguu

SEQ ID NO: 145563 - RNA, 19 nt, Artificial Sequence
  Description of Artificial Sequence: Synthetic oligonucleotide
  Antisense strand to SEQ ID NO: 145562
aacacugagcaucucaugc

SEQ ID NO: 145564 - RNA, 19 nt, Artificial Sequence
  Description of Artificial Sequence: Synthetic oligonucleotide
  Sense strand starting at position 599 of SEQ ID NO: 1867
augagaugcucaguguuag

SEQ ID NO: 145565 - RNA, 19 nt, Artificial Sequence
  Description of Artificial Sequence: Synthetic oligonucleotide
  Antisense strand to SEQ ID NO: 145564
cuaacacugagcaucucau

SEQ ID NO: 145566 - RNA, 19 nt, Artificial Sequence
  Description of Artificial Sequence: Synthetic oligonucleotide
  Sense strand starting at position 600 of SEQ ID NO: 1867
ugagaugcucaguguuaga

SEQ ID NO: 145567 - RNA, 19 nt, Artificial Sequence
  Description of Artificial Sequence: Synthetic oligonucleotide
  Antisense strand to SEQ ID NO: 145566
ucuaacacugagcaucuca

SEQ ID NO: 145568 - RNA, 19 nt, Artificial Sequence
  Description of Artificial Sequence: Synthetic oligonucleotide
  Sense strand starting at position 956 of SEQ ID NO: 1867
ccugucauccaagcgugua

SEQ ID NO: 145569 - RNA, 19 nt, Artificial Sequence
  Description of Artificial Sequence: Synthetic oligonucleotide
  Antisense strand to SEQ ID NO: 145568
uacacgcuuggaugacagg

SEQ ID NO: 145570 - RNA, 19 nt, Artificial Sequence
  Description of Artificial Sequence: Synthetic oligonucleotide
  Sense strand starting at position 961 of SEQ ID NO: 1867
cauccaagcguguaauucu

SEQ ID NO: 145571 - RNA, 19 nt, Artificial Sequence
  Description of Artificial Sequence: Synthetic oligonucleotide
  Antisense strand to SEQ ID NO: 145570
agaauuacacgcuuggaug

SEQ ID NO: 145572 - RNA, 19 nt, Artificial Sequence
  Description of Artificial Sequence: Synthetic oligonucleotide
  Sense strand starting at position 969 of SEQ ID NO: 1867
cguguaauucuugacccag

SEQ ID NO: 145573 - RNA, 19 nt, Artificial Sequence
  Description of Artificial Sequence: Synthetic oligonucleotide
  Antisense strand to SEQ ID NO: 145572
cugggucaagaauuacacg

SEQ ID NO: 145574 - RNA, 19 nt, Artificial Sequence
  Description of Artificial Sequence: Synthetic oligonucleotide
  Sense strand starting at position 1151 of SEQ ID NO: 1867
aagagauguggcuguguuu

SEQ ID NO: 145575 - RNA, 19 nt, Artificial Sequence
  Description of Artificial Sequence: Synthetic oligonucleotide
  Antisense strand to SEQ ID NO: 145574
aaacacagccacaucucuu

SEQ ID NO: 145576 - RNA, 19 nt, Artificial Sequence
  Description of Artificial Sequence: Synthetic oligonucleotide
  Sense strand starting at position 1168 of SEQ ID NO: 1867
uucugcucucugcagaaga

SEQ ID NO: 145577 - RNA, 19 nt, Artificial Sequence
  Description of Artificial Sequence: Synthetic oligonucleotide
  Antisense strand to SEQ ID NO: 145576
ucuucugcagagagcagaa

SEQ ID NO: 145578 - RNA, 19 nt, Artificial Sequence
  Description of Artificial Sequence: Synthetic oligonucleotide
  Sense strand starting at position 1170 of SEQ ID NO: 1867
cugcucucugcagaagaga

SEQ ID NO: 145579 - RNA, 19 nt, Artificial Sequence
  Description of Artificial Sequence: Synthetic oligonucleotide
  Antisense strand to SEQ ID NO: 145578
ucucuucugcagagagcag

SEQ ID NO: 145580 - RNA, 19 nt, Artificial Sequence
  Description of Artificial Sequence: Synthetic oligonucleotide
  Sense strand starting at position 1276 of SEQ ID NO: 1867
gugagcacccaucguaaga

SEQ ID NO: 145581 - RNA, 19 nt, Artificial Sequence
  Description of Artificial Sequence: Synthetic oligonucleotide
  Antisense strand to SEQ ID NO: 145580
ucuuacgaugggugcucac

SEQ ID NO: 145582 - RNA, 19 nt, Artificial Sequence
  Description of Artificial Sequence: Synthetic oligonucleotide
  Sense strand starting at position 1289 of SEQ ID NO: 1867
guaagacacccggguagau

SEQ ID NO: 145583 - RNA, 19 nt, Artificial Sequence
  Description of Artificial Sequence: Synthetic oligonucleotide
  Antisense strand to SEQ ID NO: 145582
aucuacccgggugucuuac

SEQ ID NO: 145584 - RNA, 19 nt, Artificial Sequence
  Description of Artificial Sequence: Synthetic oligonucleotide
  Sense strand starting at position 1592 of SEQ ID NO: 1867
agguguuguccugcacgca

SEQ ID NO: 145585 - RNA, 19 nt, Artificial Sequence
  Description of Artificial Sequence: Synthetic oligonucleotide
  Antisense strand to SEQ ID NO: 145584
ugcgugcaggacaacaccu

SEQ ID NO: 145586 - RNA, 19 nt, Artificial Sequence
  Description of Artificial Sequence: Synthetic oligonucleotide
  Sense strand starting at position 2047 of SEQ ID NO: 1867
uaggguuaaucaguaacuu

SEQ ID NO: 145587 - RNA, 19 nt, Artificial Sequence
  Description of Artificial Sequence: Synthetic oligonucleotide
  Antisense strand to SEQ ID NO: 145586
aaguuacugauuaacccua

SEQ ID NO: 145588 - RNA, 19 nt, Artificial Sequence
  Description of Artificial Sequence: Synthetic oligonucleotide
  Sense strand starting at position 2079 of SEQ ID NO: 1867
cuuugaauugccugauagg

SEQ ID NO: 145589 - RNA, 19 nt, Artificial Sequence
  Description of Artificial Sequence: Synthetic oligonucleotide
  Antisense strand to SEQ ID NO: 145588
ccuaucaggcaauucaaag

SEQ ID NO: 145590 - RNA, 19 nt, Artificial Sequence
  Description of Artificial Sequence: Synthetic oligonucleotide
  Sense strand starting at position 2107 of SEQ ID NO: 1867
ugggcaagggucuagugaa

SEQ ID NO: 145591 - RNA, 19 nt, Artificial Sequence
  Description of Artificial Sequence: Synthetic oligonucleotide
  Antisense strand to SEQ ID NO: 145590
uucacuagacccuugccca

SEQ ID NO: 145592 - RNA, 19 nt, Artificial Sequence
  Description of Artificial Sequence: Synthetic oligonucleotide
  Sense strand starting at position 2108 of SEQ ID NO: 1867
gggcaagggucuagugaau

SEQ ID NO: 145593 - RNA, 19 nt, Artificial Sequence
  Description of Artificial Sequence: Synthetic oligonucleotide
  Antisense strand to SEQ ID NO: 145592
auucacuagacccuugccc

SEQ ID NO: 145594 - RNA, 19 nt, Artificial Sequence
  Description of Artificial Sequence: Synthetic oligonucleotide
  Sense strand starting at position 2115 of SEQ ID NO: 1867
ggucuagugaaucaggacu

SEQ ID NO: 145595 - RNA, 19 nt, Artificial Sequence
  Description of Artificial Sequence: Synthetic oligonucleotide
  Antisense strand to SEQ ID NO: 145594
aguccugauucacuagacc

SEQ ID NO: 145596 - RNA, 19 nt, Artificial Sequence
  Description of Artificial Sequence: Synthetic oligonucleotide
  Sense strand starting at position 2169 of SEQ ID NO: 1867
agaacuguggcucaagcuu

SEQ ID NO: 145597 - RNA, 19 nt, Artificial Sequence
  Description of Artificial Sequence: Synthetic oligonucleotide
  Antisense strand to SEQ ID NO: 145596
aagcuugagccacaguucu

SEQ ID NO: 145598 - RNA, 19 nt, Artificial Sequence
  Description of Artificial Sequence: Synthetic oligonucleotide
  Sense strand starting at position 2359 of SEQ ID NO: 1867
aacagacagcccuaugagu

SEQ ID NO: 145599 - RNA, 19 nt, Artificial Sequence
  Description of Artificial Sequence: Synthetic oligonucleotide
  Antisense strand to SEQ ID NO: 145598
acucauagggcugucuguu

SEQ ID NO: 145600 - RNA, 19 nt, Artificial Sequence
  Description of Artificial Sequence: Synthetic oligonucleotide
  Sense strand starting at position 2366 of SEQ ID NO: 1867
agcccuaugagucggacau

SEQ ID NO: 145601 - RNA, 19 nt, Artificial Sequence
  Description of Artificial Sequence: Synthetic oligonucleotide
  Antisense strand to SEQ ID NO: 145600
auguccgacucauagggcu

SEQ ID NO: 145602 - RNA, 19 nt, Artificial Sequence
  Description of Artificial Sequence: Synthetic oligonucleotide
  Sense strand starting at position 2367 of SEQ ID NO: 1867
gcccuaugagucggacaua

SEQ ID NO: 145603 - RNA, 19 nt, Artificial Sequence
  Description of Artificial Sequence: Synthetic oligonucleotide
  Antisense strand to SEQ ID NO: 145602
uauguccgacucauagggc

SEQ ID NO: 145604 - RNA, 19 nt, Artificial Sequence
  Description of Artificial Sequence: Synthetic oligonucleotide
  Sense strand starting at position 2370 of SEQ ID NO: 1867
cuaugagucggacauaggu

SEQ ID NO: 145605 - RNA, 19 nt, Artificial Sequence
  Description of Artificial Sequence: Synthetic oligonucleotide
  Antisense strand to SEQ ID NO: 145604
accuauguccgacucauag

SEQ ID NO: 145606 - RNA, 19 nt, Artificial Sequence
  Description of Artificial Sequence: Synthetic oligonucleotide
  Sense strand starting at position 2423 of SEQ ID NO: 1867
uuuggaugucaggaugagu

SEQ ID NO: 145607 - RNA, 19 nt, Artificial Sequence
  Description of Artificial Sequence: Synthetic oligonucleotide
  Antisense strand to SEQ ID NO: 145606
acucauccugacauccaaa

SEQ ID NO: 145608 - RNA, 19 nt, Artificial Sequence
  Description of Artificial Sequence: Synthetic oligonucleotide
  Sense strand starting at position 2479 of SEQ ID NO: 1867
gcagguggccuuggaaaga

SEQ ID NO: 145609 - RNA, 19 nt, Artificial Sequence
  Description of Artificial Sequence: Synthetic oligonucleotide
  Antisense strand to SEQ ID NO: 145608
ucuuuccaaggccaccugc

SEQ ID NO: 145610 - RNA, 19 nt, Artificial Sequence
  Description of Artificial Sequence: Synthetic oligonucleotide
  Sense strand starting at position 2634 of SEQ ID NO: 1867
cacaguuacggguguauga

SEQ ID NO: 145611 - RNA, 19 nt, Artificial Sequence
  Description of Artificial Sequence: Synthetic oligonucleotide
  Antisense strand to SEQ ID NO: 145610
ucauacacccguaacugug

SEQ ID NO: 145612 - RNA, 19 nt, Artificial Sequence
  Description of Artificial Sequence: Synthetic oligonucleotide
  Sense strand starting at position 2923 of SEQ ID NO: 1867
ggaaucuaccagcguccaa

SEQ ID NO: 145613 - RNA, 19 nt, Artificial Sequence
  Description of Artificial Sequence: Synthetic oligonucleotide
  Antisense strand to SEQ ID NO: 145612
uuggacgcugguagauucc

SEQ ID NO: 145614 - RNA, 19 nt, Artificial Sequence
  Description of Artificial Sequence: Synthetic oligonucleotide
  Sense strand starting at position 3148 of SEQ ID NO: 1867
cucagaagcccgugugaag

SEQ ID NO: 145615 - RNA, 19 nt, Artificial Sequence
  Description of Artificial Sequence: Synthetic oligonucleotide
  Antisense strand to SEQ ID NO: 145614
cuucacacgggcuucugag

SEQ ID NO: 145616 - RNA, 19 nt, Artificial Sequence
  Description of Artificial Sequence: Synthetic oligonucleotide
  Sense strand starting at position 3307 of SEQ ID NO: 1867
ccuugugggaucgguaacu

SEQ ID NO: 145617 - RNA, 19 nt, Artificial Sequence
  Description of Artificial Sequence: Synthetic oligonucleotide
  Antisense strand to SEQ ID NO: 145616
aguuaccgaucccacaagg

SEQ ID NO: 145618 - RNA, 19 nt, Artificial Sequence
  Description of Artificial Sequence: Synthetic oligonucleotide
  Sense strand starting at position 3347 of SEQ ID NO: 1867
ggcccucuaucucugaaau

SEQ ID NO: 145619 - RNA, 19 nt, Artificial Sequence
  Description of Artificial Sequence: Synthetic oligonucleotide
  Antisense strand to SEQ ID NO: 145618
auuucagagauagagggcc

SEQ ID NO: 145620 - RNA, 19 nt, Artificial Sequence
  Description of Artificial Sequence: Synthetic oligonucleotide
  Sense strand starting at position 3416 of SEQ ID NO: 1867
aucaguuaccucugugaaa

SEQ ID NO: 145621 - RNA, 19 nt, Artificial Sequence
  Description of Artificial Sequence: Synthetic oligonucleotide
  Antisense strand to SEQ ID NO: 145620
uuucacagagguaacugau

SEQ ID NO: 145622 - RNA, 19 nt, Artificial Sequence
  Description of Artificial Sequence: Synthetic oligonucleotide
  Sense strand starting at position 3417 of SEQ ID NO: 1867
ucaguuaccucugugaaag

SEQ ID NO: 145623 - RNA, 19 nt, Artificial Sequence
  Description of Artificial Sequence: Synthetic oligonucleotide
  Antisense strand to SEQ ID NO: 145622
cuuucacagagguaacuga

SEQ ID NO: 145624 - RNA, 19 nt, Artificial Sequence
  Description of Artificial Sequence: Synthetic oligonucleotide
  Sense strand starting at position 3418 of SEQ ID NO: 1867
caguuaccucugugaaagg

SEQ ID NO: 145625 - RNA, 19 nt, Artificial Sequence
  Description of Artificial Sequence: Synthetic oligonucleotide
  Antisense strand to SEQ ID NO: 145624
ccuuucacagagguaacug

SEQ ID NO: 145626 - RNA, 19 nt, Artificial Sequence
  Description of Artificial Sequence: Synthetic oligonucleotide
  Sense strand starting at position 3808 of SEQ ID NO: 1867
ggcugugucacggacaugu

SEQ ID NO: 145627 - RNA, 19 nt, Artificial Sequence
  Description of Artificial Sequence: Synthetic oligonucleotide
  Antisense strand to SEQ ID NO: 145626
acauguccgugacacagcc

SEQ ID NO: 145628 - RNA, 19 nt, Artificial Sequence
  Description of Artificial Sequence: Synthetic oligonucleotide
  Sense strand starting at position 3819 of SEQ ID NO: 1867
ggacauguguccucaaccu

SEQ ID NO: 145629 - RNA, 19 nt, Artificial Sequence
  Description of Artificial Sequence: Synthetic oligonucleotide
  Antisense strand to SEQ ID NO: 145628
agguugaggacacaugucc

SEQ ID NO: 145630 - RNA, 19 nt, Artificial Sequence
  Description of Artificial Sequence: Synthetic oligonucleotide
  Sense strand starting at position 3930 of SEQ ID NO: 1867
gaagguggccuuggaucua

SEQ ID NO: 145631 - RNA, 19 nt, Artificial Sequence
  Description of Artificial Sequence: Synthetic oligonucleotide
  Antisense strand to SEQ ID NO: 145630
uagauccaaggccaccuuc

SEQ ID NO: 145632 - RNA, 19 nt, Artificial Sequence
  Description of Artificial Sequence: Synthetic oligonucleotide
  Sense strand starting at position 3939 of SEQ ID NO: 1867
cuuggaucuaggcauguuu

SEQ ID NO: 145633 - RNA, 19 nt, Artificial Sequence
  Description of Artificial Sequence: Synthetic oligonucleotide
  Antisense strand to SEQ ID NO: 145632
aaacaugccuagauccaag

SEQ ID NO: 145634 - RNA, 19 nt, Artificial Sequence
  Description of Artificial Sequence: Synthetic oligonucleotide
  Sense strand starting at position 3766 of SEQ ID NO: 1868
uugagucaacuaggaacuu

SEQ ID NO: 145635 - RNA, 19 nt, Artificial Sequence
  Description of Artificial Sequence: Synthetic oligonucleotide
  Antisense strand to SEQ ID NO: 145634
aaguuccuaguugacucaa

SEQ ID NO: 145636 - RNA, 19 nt, Artificial Sequence
  Description of Artificial Sequence: Synthetic oligonucleotide
  Sense strand starting at position 3758 of SEQ ID NO: 1868
ugauauuguugagucaacu

SEQ ID NO: 145637 - RNA, 19 nt, Artificial Sequence
  Description of Artificial Sequence: Synthetic oligonucleotide
  Antisense strand to SEQ ID NO: 145636
aguugacucaacaauauca

SEQ ID NO: 145638 - RNA, 19 nt, Artificial Sequence
  Description of Artificial Sequence: Synthetic oligonucleotide
  Sense strand starting at position 3756 of SEQ ID NO: 1868
gcugauauuguugagucaa

SEQ ID NO: 145639 - RNA, 19 nt, Artificial Sequence
  Description of Artificial Sequence: Synthetic oligonucleotide
  Antisense strand to SEQ ID NO: 145638
uugacucaacaauaucagc

SEQ ID NO: 145640 - RNA, 19 nt, Artificial Sequence
  Description of Artificial Sequence: Synthetic oligonucleotide
  Sense strand starting at position 3719 of SEQ ID NO: 1868
cuguguaguaaagauuaga

SEQ ID NO: 145641 - RNA, 19 nt, Artificial Sequence
  Description of Artificial Sequence: Synthetic oligonucleotide
  Antisense strand to SEQ ID NO: 145640
ucuaaucuuuacuacacag

SEQ ID NO: 145642 - RNA, 19 nt, Artificial Sequence
  Description of Artificial Sequence: Synthetic oligonucleotide
  Sense strand starting at position 3715 of SEQ ID NO: 1868
auuucuguguaguaaagau

SEQ ID NO: 145643 - RNA, 19 nt, Artificial Sequence
  Description of Artificial Sequence: Synthetic oligonucleotide
  Antisense strand to SEQ ID NO: 145642
aucuuuacuacacagaaau

SEQ ID NO: 145644 - RNA, 19 nt, Artificial Sequence
  Description of Artificial Sequence: Synthetic oligonucleotide
  Sense strand starting at position 3711 of SEQ ID NO: 1868
gguuauuucuguguaguaa

SEQ ID NO: 145645 - RNA, 19 nt, Artificial Sequence
  Description of Artificial Sequence: Synthetic oligonucleotide
  Antisense strand to SEQ ID NO: 145644
uuacuacacagaaauaacc

SEQ ID NO: 145646 - RNA, 19 nt, Artificial Sequence
  Description of Artificial Sequence: Synthetic oligonucleotide
  Sense strand starting at position 3709 of SEQ ID NO: 1868
gagguuauuucuguguagu

SEQ ID NO: 145647 - RNA, 19 nt, Artificial Sequence
  Description of Artificial Sequence: Synthetic oligonucleotide
  Antisense strand to SEQ ID NO: 145646
acuacacagaaauaaccuc

SEQ ID NO: 145648 - RNA, 19 nt, Artificial Sequence
  Description of Artificial Sequence: Synthetic oligonucleotide
  Sense strand starting at position 3699 of SEQ ID NO: 1868
auaguaaaccgagguuauu

SEQ ID NO: 145649 - RNA, 19 nt, Artificial Sequence
  Description of Artificial Sequence: Synthetic oligonucleotide
  Antisense strand to SEQ ID NO: 145648
aauaaccucgguuuacuau

SEQ ID NO: 145650 - RNA, 19 nt, Artificial Sequence
  Description of Artificial Sequence: Synthetic oligonucleotide
  Sense strand starting at position 3696 of SEQ ID NO: 1868
ugaauaguaaaccgagguu

SEQ ID NO: 145651 - RNA, 19 nt, Artificial Sequence
  Description of Artificial Sequence: Synthetic oligonucleotide
  Antisense strand to SEQ ID NO: 145650
aaccucgguuuacuauuca

SEQ ID NO: 145652 - RNA, 19 nt, Artificial Sequence
  Description of Artificial Sequence: Synthetic oligonucleotide
  Sense strand starting at position 3682 of SEQ ID NO: 1868
gcccgugggaaacaugaau

SEQ ID NO: 145653 - RNA, 19 nt, Artificial Sequence
  Description of Artificial Sequence: Synthetic oligonucleotide
  Antisense strand to SEQ ID NO: 145652
auucauguuucccacgggc

SEQ ID NO: 145654 - RNA, 19 nt, Artificial Sequence
  Description of Artificial Sequence: Synthetic oligonucleotide
  Sense strand starting at position 3675 of SEQ ID NO: 1868
acuagaugcccgugggaaa

SEQ ID NO: 145655 - RNA, 19 nt, Artificial Sequence
  Description of Artificial Sequence: Synthetic oligonucleotide
  Antisense strand to SEQ ID NO: 145654
uuucccacgggcaucuagu

SEQ ID NO: 145656 - RNA, 19 nt, Artificial Sequence
  Description of Artificial Sequence: Synthetic oligonucleotide
  Sense strand starting at position 3655 of SEQ ID NO: 1868
uuaaaucgacuuggaaaug

SEQ ID NO: 145657 - RNA, 19 nt, Artificial Sequence
  Description of Artificial Sequence: Synthetic oligonucleotide
  Antisense strand to SEQ ID NO: 145656
cauuuccaagucgauuuaa

SEQ ID NO: 145658 - RNA, 19 nt, Artificial Sequence
  Description of Artificial Sequence: Synthetic oligonucleotide
  Sense strand starting at position 3617 of SEQ ID NO: 1868
aggaucuaaugagguauuu

SEQ ID NO: 145659 - RNA, 19 nt, Artificial Sequence
  Description of Artificial Sequence: Synthetic oligonucleotide
  Antisense strand to SEQ ID NO: 145658
aaauaccucauuagauccu

SEQ ID NO: 145660 - RNA, 19 nt, Artificial Sequence
  Description of Artificial Sequence: Synthetic oligonucleotide
  Sense strand starting at position 3247 of SEQ ID NO: 1868
aaauaagauugugcaaguu

SEQ ID NO: 145661 - RNA, 19 nt, Artificial Sequence
  Description of Artificial Sequence: Synthetic oligonucleotide
  Antisense strand to SEQ ID NO: 145660
aacuugcacaaucuuauuu

SEQ ID NO: 145662 - RNA, 19 nt, Artificial Sequence
  Description of Artificial Sequence: Synthetic oligonucleotide
  Sense strand starting at position 3230 of SEQ ID NO: 1868
acaagcaagcaugguuaaa

SEQ ID NO: 145663 - RNA, 19 nt, Artificial Sequence
  Description of Artificial Sequence: Synthetic oligonucleotide
  Antisense strand to SEQ ID NO: 145662
uuuaaccaugcuugcuugu

SEQ ID NO: 145664 - RNA, 19 nt, Artificial Sequence
  Description of Artificial Sequence: Synthetic oligonucleotide
  Sense strand starting at position 3180 of SEQ ID NO: 1868
agccuuugggaagagcaau

SEQ ID NO: 145665 - RNA, 19 nt, Artificial Sequence
  Description of Artificial Sequence: Synthetic oligonucleotide
  Antisense strand to SEQ ID NO: 145664
auugcucuucccaaaggcu

SEQ ID NO: 145666 - RNA, 19 nt, Artificial Sequence
  Description of Artificial Sequence: Synthetic oligonucleotide
  Sense strand starting at position 2802 of SEQ ID NO: 1868
gaugaugcaugacagaaga

SEQ ID NO: 145667 - RNA, 19 nt, Artificial Sequence
  Description of Artificial Sequence: Synthetic oligonucleotide
  Antisense strand to SEQ ID NO: 145666
ucuucugucaugcaucauc

SEQ ID NO: 145668 - RNA, 19 nt, Artificial Sequence
  Description of Artificial Sequence: Synthetic oligonucleotide
  Sense strand starting at position 2799 of SEQ ID NO: 1868
ugugaugaugcaugacaga

SEQ ID NO: 145669 - RNA, 19 nt, Artificial Sequence
  Description of Artificial Sequence: Synthetic oligonucleotide
  Antisense strand to SEQ ID NO: 145668
ucugucaugcaucaucaca

SEQ ID NO: 145670 - RNA, 19 nt, Artificial Sequence
  Description of Artificial Sequence: Synthetic oligonucleotide
  Sense strand starting at position 2793 of SEQ ID NO: 1868
ugauucugugaugaugcau

SEQ ID NO: 145671 - RNA, 19 nt, Artificial Sequence
  Description of Artificial Sequence: Synthetic oligonucleotide
  Antisense strand to SEQ ID NO: 145670
augcaucaucacagaauca

SEQ ID NO: 145672 - RNA, 19 nt, Artificial Sequence
  Description of Artificial Sequence: Synthetic oligonucleotide
  Sense strand starting at position 2788 of SEQ ID NO: 1868
cucauugauucugugauga

SEQ ID NO: 145673 - RNA, 19 nt, Artificial Sequence
  Description of Artificial Sequence: Synthetic oligonucleotide
  Antisense strand to SEQ ID NO: 145672
ucaucacagaaucaaugag

SEQ ID NO: 145674 - RNA, 19 nt, Artificial Sequence
  Description of Artificial Sequence: Synthetic oligonucleotide
  Sense strand starting at position 2781 of SEQ ID NO: 1868
gggagcucucauugauucu

SEQ ID NO: 145675 - RNA, 19 nt, Artificial Sequence
  Description of Artificial Sequence: Synthetic oligonucleotide
  Antisense strand to SEQ ID NO: 145674
agaaucaaugagagcuccc

SEQ ID NO: 145676 - RNA, 19 nt, Artificial Sequence
  Description of Artificial Sequence: Synthetic oligonucleotide
  Sense strand starting at position 2358 of SEQ ID NO: 1868
caguaacuccugcgaaaga

SEQ ID NO: 145677 - RNA, 19 nt, Artificial Sequence
  Description of Artificial Sequence: Synthetic oligonucleotide
  Antisense strand to SEQ ID NO: 145676
ucuuucgcaggaguuacug

SEQ ID NO: 145678 - RNA, 19 nt, Artificial Sequence
  Description of Artificial Sequence: Synthetic oligonucleotide
  Sense strand starting at position 2325 of SEQ ID NO: 1868
ccugaaaucuuacugggcu

SEQ ID NO: 145679 - RNA, 19 nt, Artificial Sequence
  Description of Artificial Sequence: Synthetic oligonucleotide
  Antisense strand to SEQ ID NO: 145678
agcccaguaagauuucagg

SEQ ID NO: 145680 - RNA, 19 nt, Artificial Sequence
  Description of Artificial Sequence: Synthetic oligonucleotide
  Sense strand starting at position 2045 of SEQ ID NO: 1868
gagcgcucugccgauaaga

SEQ ID NO: 145681 - RNA, 19 nt, Artificial Sequence
  Description of Artificial Sequence: Synthetic oligonucleotide
  Antisense strand to SEQ ID NO: 145680
ucuuaucggcagagcgcuc

SEQ ID NO: 145682 - RNA, 19 nt, Artificial Sequence
  Description of Artificial Sequence: Synthetic oligonucleotide
  Sense strand starting at position 1261 of SEQ ID NO: 1868
cgaagagacgcaggaaaua

SEQ ID NO: 145683 - RNA, 19 nt, Artificial Sequence
  Description of Artificial Sequence: Synthetic oligonucleotide
  Antisense strand to SEQ ID NO: 145682
uauuuccugcgucucuucg

SEQ ID NO: 145684 - RNA, 19 nt, Artificial Sequence
  Description of Artificial Sequence: Synthetic oligonucleotide
  Sense strand starting at position 1250 of SEQ ID NO: 1868
ggaccagacuccgaagaga

SEQ ID NO: 145685 - RNA, 19 nt, Artificial Sequence
  Description of Artificial Sequence: Synthetic oligonucleotide
  Antisense strand to SEQ ID NO: 145684
ucucuucggagucuggucc

SEQ ID NO: 145686 - RNA, 19 nt, Artificial Sequence
  Description of Artificial Sequence: Synthetic oligonucleotide
  Sense strand starting at position 1179 of SEQ ID NO: 1868
aaggacuucguagaaggua

SEQ ID NO: 145687 - RNA, 19 nt, Artificial Sequence
  Description of Artificial Sequence: Synthetic oligonucleotide
  Antisense strand to SEQ ID NO: 145686
uaccuucuacgaaguccuu

SEQ ID NO: 145688 - RNA, 19 nt, Artificial Sequence
  Description of Artificial Sequence: Synthetic oligonucleotide
  Sense strand starting at position 1091 of SEQ ID NO: 1868
agucaaucuguaggaacua

SEQ ID NO: 145689 - RNA, 19 nt, Artificial Sequence
  Description of Artificial Sequence: Synthetic oligonucleotide
  Antisense strand to SEQ ID NO: 145688
uaguuccuacagauugacu

SEQ ID NO: 145690 - RNA, 19 nt, Artificial Sequence
  Description of Artificial Sequence: Synthetic oligonucleotide
  Sense strand starting at position 1088 of SEQ ID NO: 1868
aggagucaaucuguaggaa

SEQ ID NO: 145691 - RNA, 19 nt, Artificial Sequence
  Description of Artificial Sequence: Synthetic oligonucleotide
  Antisense strand to SEQ ID NO: 145690
uuccuacagauugacuccu

SEQ ID NO: 145692 - RNA, 19 nt, Artificial Sequence
  Description of Artificial Sequence: Synthetic oligonucleotide
  Sense strand starting at position 936 of SEQ ID NO: 1868
gcggguuucugaaagaugg

SEQ ID NO: 145693 - RNA, 19 nt, Artificial Sequence
  Description of Artificial Sequence: Synthetic oligonucleotide
  Antisense strand to SEQ ID NO: 145692
ccaucuuucagaaacccgc

SEQ ID NO: 145694 - RNA, 19 nt, Artificial Sequence
  Description of Artificial Sequence: Synthetic oligonucleotide
  Sense strand starting at position 863 of SEQ ID NO: 1868
uucugugucccacaaccaa

SEQ ID NO: 145695 - RNA, 19 nt, Artificial Sequence
  Description of Artificial Sequence: Synthetic oligonucleotide
  Antisense strand to SEQ ID NO: 145694
uugguugugggacacagaa

SEQ ID NO: 145696 - RNA, 19 nt, Artificial Sequence
  Description of Artificial Sequence: Synthetic oligonucleotide
  Sense strand starting at position 859 of SEQ ID NO: 1868
ccuauucugugucccacaa

SEQ ID NO: 145697 - RNA, 19 nt, Artificial Sequence
  Description of Artificial Sequence: Synthetic oligonucleotide
  Antisense strand to SEQ ID NO: 145696
uugugggacacagaauagg

SEQ ID NO: 145698 - RNA, 19 nt, Artificial Sequence
  Description of Artificial Sequence: Synthetic oligonucleotide
  Sense strand starting at position 679 of SEQ ID NO: 1868
gaguucggccuguaccaaa

SEQ ID NO: 145699 - RNA, 19 nt, Artificial Sequence
  Description of Artificial Sequence: Synthetic oligonucleotide
  Antisense strand to SEQ ID NO: 145698
uuugguacaggccgaacuc

SEQ ID NO: 145700 - RNA, 19 nt, Artificial Sequence
  Description of Artificial Sequence: Synthetic oligonucleotide
  Sense strand starting at position 675 of SEQ ID NO: 1868
gugugaguucggccuguac

SEQ ID NO: 145701 - RNA, 19 nt, Artificial Sequence
  Description of Artificial Sequence: Synthetic oligonucleotide
  Antisense strand to SEQ ID NO: 145700
guacaggccgaacucacac

SEQ ID NO: 145702 - RNA, 19 nt, Artificial Sequence
  Description of Artificial Sequence: Synthetic oligonucleotide
  Sense strand starting at position 644 of SEQ ID NO: 1868
ggaguucugugucuguaag

SEQ ID NO: 145703 - RNA, 19 nt, Artificial Sequence
  Description of Artificial Sequence: Synthetic oligonucleotide
  Antisense strand to SEQ ID NO: 145702
cuuacagacacagaacucc

SEQ ID NO: 145704 - RNA, 19 nt, Artificial Sequence
  Description of Artificial Sequence: Synthetic oligonucleotide
  Sense strand starting at position 400 of SEQ ID NO: 1868
cuuguucuccuguaaagaa

SEQ ID NO: 145705 - RNA, 19 nt, Artificial Sequence
  Description of Artificial Sequence: Synthetic oligonucleotide
  Antisense strand to SEQ ID NO: 145704
uucuuuacaggagaacaag

SEQ ID NO: 145706 - RNA, 19 nt, Artificial Sequence
  Description of Artificial Sequence: Synthetic oligonucleotide
  Sense strand starting at position 244 of SEQ ID NO: 1868
gguggucccuuugucuaga

SEQ ID NO: 145707 - RNA, 19 nt, Artificial Sequence
  Description of Artificial Sequence: Synthetic oligonucleotide
  Antisense strand to SEQ ID NO: 145706
ucuagacaaagggaccacc

SEQ ID NO: 145708 - RNA, 19 nt, Artificial Sequence
  Description of Artificial Sequence: Synthetic oligonucleotide
  Sense strand starting at position 165 of SEQ ID NO: 1868
cccugaagcucacuuaagu

SEQ ID NO: 145709 - RNA, 19 nt, Artificial Sequence
  Description of Artificial Sequence: Synthetic oligonucleotide
  Antisense strand to SEQ ID NO: 145708
acuuaagugagcuucaggg

SEQ ID NO: 145710 - RNA, 19 nt, Artificial Sequence
  Description of Artificial Sequence: Synthetic oligonucleotide
  Sense strand starting at position 118 of SEQ ID NO: 1868
uuggcuagauucuauuuga

SEQ ID NO: 145711 - RNA, 19 nt, Artificial Sequence
  Description of Artificial Sequence: Synthetic oligonucleotide
  Antisense strand to SEQ ID NO: 145710
ucaaauagaaucuagccaa

SEQ ID NO: 145712 - RNA, 19 nt, Artificial Sequence
  Description of Artificial Sequence: Synthetic oligonucleotide
  Sense strand starting at position 113 of SEQ ID NO: 1868
uggcuuuggcuagauucua

SEQ ID NO: 145713 - RNA, 19 nt, Artificial Sequence
  Description of Artificial Sequence: Synthetic oligonucleotide
  Antisense strand to SEQ ID NO: 145712
uagaaucuagccaaagcca

SEQ ID NO: 145714 - RNA, 19 nt, Artificial Sequence
  Description of Artificial Sequence: Synthetic oligonucleotide
  Sense strand starting at position 51 of SEQ ID NO: 1869
gggauauacugacaguaac

SEQ ID NO: 145715 - RNA, 19 nt, Artificial Sequence
  Description of Artificial Sequence: Synthetic oligonucleotide
  Antisense strand to SEQ ID NO: 145714
guuacugucaguauauccc

SEQ ID NO: 145716 - RNA, 19 nt, Artificial Sequence
  Description of Artificial Sequence: Synthetic oligonucleotide
  Sense strand starting at position 96 of SEQ ID NO: 1869
cgaggaaggucuccacuga

SEQ ID NO: 145717 - RNA, 19 nt, Artificial Sequence
  Description of Artificial Sequence: Synthetic oligonucleotide
  Antisense strand to SEQ ID NO: 145716
ucaguggagaccuuccucg

SEQ ID NO: 145718 - RNA, 19 nt, Artificial Sequence
  Description of Artificial Sequence: Synthetic oligonucleotide
  Sense strand starting at position 136 of SEQ ID NO: 1869
gguguauuaugucucugca

SEQ ID NO: 145719 - RNA, 19 nt, Artificial Sequence
  Description of Artificial Sequence: Synthetic oligonucleotide
  Antisense strand to SEQ ID NO: 145718
ugcagagacauaauacacc

SEQ ID NO: 145720 - RNA, 19 nt, Artificial Sequence
  Description of Artificial Sequence: Synthetic oligonucleotide
  Sense strand starting at position 138 of SEQ ID NO: 1869
uguauuaugucucugcaga

SEQ ID NO: 145721 - RNA, 19 nt, Artificial Sequence
  Description of Artificial Sequence: Synthetic oligonucleotide
  Antisense strand to SEQ ID NO: 145720
ucugcagagacauaauaca

SEQ ID NO: 145722 - RNA, 19 nt, Artificial Sequence
  Description of Artificial Sequence: Synthetic oligonucleotide
  Sense strand starting at position 139 of SEQ ID NO: 1869
guauuaugucucugcagau

SEQ ID NO: 145723 - RNA, 19 nt, Artificial Sequence
  Description of Artificial Sequence: Synthetic oligonucleotide
  Antisense strand to SEQ ID NO: 145722
aucugcagagacauaauac

SEQ ID NO: 145724 - RNA, 19 nt, Artificial Sequence
  Description of Artificial Sequence: Synthetic oligonucleotide
  Sense strand starting at position 193 of SEQ ID NO: 1869
gccuacauggugcauuaaa

SEQ ID NO: 145725 - RNA, 19 nt, Artificial Sequence
  Description of Artificial Sequence: Synthetic oligonucleotide
  Antisense strand to SEQ ID NO: 145724
uuuaaugcaccauguaggc

SEQ ID NO: 145726 - RNA, 19 nt, Artificial Sequence
  Description of Artificial Sequence: Synthetic oligonucleotide
  Sense strand starting at position 401 of SEQ ID NO: 1869
acacauagugcucagggua

SEQ ID NO: 145727 - RNA, 19 nt, Artificial Sequence
  Description of Artificial Sequence: Synthetic oligonucleotide
  Antisense strand to SEQ ID NO: 145726
uacccugagcacuaugugu

SEQ ID NO: 145728 - RNA, 19 nt, Artificial Sequence
  Description of Artificial Sequence: Synthetic oligonucleotide
  Sense strand starting at position 463 of SEQ ID NO: 1869
ggugguugucagggagaac

SEQ ID NO: 145729 - RNA, 19 nt, Artificial Sequence
  Description of Artificial Sequence: Synthetic oligonucleotide
  Antisense strand to SEQ ID NO: 145728
guucucccugacaaccacc

SEQ ID NO: 145730 - RNA, 19 nt, Artificial Sequence
  Description of Artificial Sequence: Synthetic oligonucleotide
  Sense strand starting at position 464 of SEQ ID NO: 1869
gugguugucagggagaaca

SEQ ID NO: 145731 - RNA, 19 nt, Artificial Sequence
  Description of Artificial Sequence: Synthetic oligonucleotide
  Antisense strand to SEQ ID NO: 145730
uguucucccugacaaccac

SEQ ID NO: 145732 - RNA, 19 nt, Artificial Sequence
  Description of Artificial Sequence: Synthetic oligonucleotide
  Sense strand starting at position 1073 of SEQ ID NO: 1869
gugcguucacaccacuagu

SEQ ID NO: 145733 - RNA, 19 nt, Artificial Sequence
  Description of Artificial Sequence: Synthetic oligonucleotide
  Antisense strand to SEQ ID NO: 145732
acuaguggugugaacgcac

SEQ ID NO: 145734 - RNA, 19 nt, Artificial Sequence
  Description of Artificial Sequence: Synthetic oligonucleotide
  Sense strand starting at position 1296 of SEQ ID NO: 1869
gcaugaacuccucguacuu

SEQ ID NO: 145735 - RNA, 19 nt, Artificial Sequence
  Description of Artificial Sequence: Synthetic oligonucleotide
  Antisense strand to SEQ ID NO: 145734
aaguacgaggaguucaugc

SEQ ID NO: 145736 - RNA, 19 nt, Artificial Sequence
  Description of Artificial Sequence: Synthetic oligonucleotide
  Sense strand starting at position 2007 of SEQ ID NO: 1869
cggcaacgacgaagugauu

SEQ ID NO: 145737 - RNA, 19 nt, Artificial Sequence
  Description of Artificial Sequence: Synthetic oligonucleotide
  Antisense strand to SEQ ID NO: 145736
aaucacuucgucguugccg

SEQ ID NO: 145738 - RNA, 19 nt, Artificial Sequence
  Description of Artificial Sequence: Synthetic oligonucleotide
  Sense strand starting at position 2199 of SEQ ID NO: 1869
ugcggagacucucagagau

SEQ ID NO: 145739 - RNA, 19 nt, Artificial Sequence
  Description of Artificial Sequence: Synthetic oligonucleotide
  Antisense strand to SEQ ID NO: 145738
aucucugagagucuccgca

SEQ ID NO: 145740 - RNA, 19 nt, Artificial Sequence
  Description of Artificial Sequence: Synthetic oligonucleotide
  Sense strand starting at position 2311 of SEQ ID NO: 1869
ugccacuuccaguaaauga

SEQ ID NO: 145741 - RNA, 19 nt, Artificial Sequence
  Description of Artificial Sequence: Synthetic oligonucleotide
  Antisense strand to SEQ ID NO: 145740
ucauuuacuggaaguggca

SEQ ID NO: 145742 - RNA, 19 nt, Artificial Sequence
  Description of Artificial Sequence: Synthetic oligonucleotide
  Sense strand starting at position 2365 of SEQ ID NO: 1869
gguugaucagauggugacu

SEQ ID NO: 145743 - RNA, 19 nt, Artificial Sequence
  Description of Artificial Sequence: Synthetic oligonucleotide
  Antisense strand to SEQ ID NO: 145742
agucaccaucugaucaacc

SEQ ID NO: 145744 - RNA, 19 nt, Artificial Sequence
  Description of Artificial Sequence: Synthetic oligonucleotide
  Sense strand starting at position 2414 of SEQ ID NO: 1869
uuauuaagcagacggcaua

SEQ ID NO: 145745 - RNA, 19 nt, Artificial Sequence
  Description of Artificial Sequence: Synthetic oligonucleotide
  Antisense strand to SEQ ID NO: 145744
uaugccgucugcuuaauaa

SEQ ID NO: 145746 - RNA, 19 nt, Artificial Sequence
  Description of Artificial Sequence: Synthetic oligonucleotide
  Sense strand starting at position 2467 of SEQ ID NO: 1869
uacaaagugcgaggcauua

SEQ ID NO: 145747 - RNA, 19 nt, Artificial Sequence
  Description of Artificial Sequence: Synthetic oligonucleotide
  Antisense strand to SEQ ID NO: 145746
uaaugccucgcacuuugua

SEQ ID NO: 145748 - RNA, 19 nt, Artificial Sequence
  Description of Artificial Sequence: Synthetic oligonucleotide
  Sense strand starting at position 2469 of SEQ ID NO: 1869
caaagugcgaggcauuaga

SEQ ID NO: 145749 - RNA, 19 nt, Artificial Sequence
  Description of Artificial Sequence: Synthetic oligonucleotide
  Antisense strand to SEQ ID NO: 145748
ucuaaugccucgcacuuug

SEQ ID NO: 145750 - RNA, 19 nt, Artificial Sequence
  Description of Artificial Sequence: Synthetic oligonucleotide
  Sense strand starting at position 2535 of SEQ ID NO: 1869
guccaaauuucuuagucua

SEQ ID NO: 145751 - RNA, 19 nt, Artificial Sequence
  Description of Artificial Sequence: Synthetic oligonucleotide
  Antisense strand to SEQ ID NO: 145750
uagacuaagaaauuuggac

SEQ ID NO: 145752 - RNA, 19 nt, Artificial Sequence
  Description of Artificial Sequence: Synthetic oligonucleotide
  Sense strand starting at position 2600 of SEQ ID NO: 1869
gucuauuucuaggcucacu

SEQ ID NO: 145753 - RNA, 19 nt, Artificial Sequence
  Description of Artificial Sequence: Synthetic oligonucleotide
  Antisense strand to SEQ ID NO: 145752
agugagccuagaaauagac

SEQ ID NO: 145754 - RNA, 19 nt, Artificial Sequence
  Description of Artificial Sequence: Synthetic oligonucleotide
  Sense strand starting at position 2633 of SEQ ID NO: 1869
ccugguaucuugcuuacuu

SEQ ID NO: 145755 - RNA, 19 nt, Artificial Sequence
  Description of Artificial Sequence: Synthetic oligonucleotide
  Antisense strand to SEQ ID NO: 145754
aaguaagcaagauaccagg

SEQ ID NO: 145756 - RNA, 19 nt, Artificial Sequence
  Description of Artificial Sequence: Synthetic oligonucleotide
  Sense strand starting at position 2634 of SEQ ID NO: 1869
cugguaucuugcuuacuua

SEQ ID NO: 145757 - RNA, 19 nt, Artificial Sequence
  Description of Artificial Sequence: Synthetic oligonucleotide
  Antisense strand to SEQ ID NO: 145756
uaaguaagcaagauaccag

SEQ ID NO: 145758 - RNA, 19 nt, Artificial Sequence
  Description of Artificial Sequence: Synthetic oligonucleotide
  Sense strand starting at position 2637 of SEQ ID NO: 1869
guaucuugcuuacuuacca

SEQ ID NO: 145759 - RNA, 19 nt, Artificial Sequence
  Description of Artificial Sequence: Synthetic oligonucleotide
  Antisense strand to SEQ ID NO: 145758
ugguaaguaagcaagauac

SEQ ID NO: 145760 - RNA, 19 nt, Artificial Sequence
  Description of Artificial Sequence: Synthetic oligonucleotide
  Sense strand starting at position 2793 of SEQ ID NO: 1869
acaggaauguaucaggauu

SEQ ID NO: 145761 - RNA, 19 nt, Artificial Sequence
  Description of Artificial Sequence: Synthetic oligonucleotide
  Antisense strand to SEQ ID NO: 145760
aauccugauacauuccugu

SEQ ID NO: 145762 - RNA, 19 nt, Artificial Sequence
  Description of Artificial Sequence: Synthetic oligonucleotide
  Sense strand starting at position 2842 of SEQ ID NO: 1869
auagcuuacgauugaaauu

SEQ ID NO: 145763 - RNA, 19 nt, Artificial Sequence
  Description of Artificial Sequence: Synthetic oligonucleotide
  Antisense strand to SEQ ID NO: 145762
aauuucaaucguaagcuau

SEQ ID NO: 145764 - RNA, 19 nt, Artificial Sequence
  Description of Artificial Sequence: Synthetic oligonucleotide
  Sense strand starting at position 3044 of SEQ ID NO: 1869
gaugaaaucucccuguguu

SEQ ID NO: 145765 - RNA, 19 nt, Artificial Sequence
  Description of Artificial Sequence: Synthetic oligonucleotide
  Antisense strand to SEQ ID NO: 145764
aacacagggagauuucauc

SEQ ID NO: 145766 - RNA, 19 nt, Artificial Sequence
  Description of Artificial Sequence: Synthetic oligonucleotide
  Sense strand starting at position 3045 of SEQ ID NO: 1869
augaaaucucccuguguug

SEQ ID NO: 145767 - RNA, 19 nt, Artificial Sequence
  Description of Artificial Sequence: Synthetic oligonucleotide
  Antisense strand to SEQ ID NO: 145766
caacacagggagauuucau

SEQ ID NO: 145768 - RNA, 19 nt, Artificial Sequence
  Description of Artificial Sequence: Synthetic oligonucleotide
  Sense strand starting at position 3047 of SEQ ID NO: 1869
gaaaucucccuguguugcu

SEQ ID NO: 145769 - RNA, 19 nt, Artificial Sequence
  Description of Artificial Sequence: Synthetic oligonucleotide
  Antisense strand to SEQ ID NO: 145768
agcaacacagggagauuuc

SEQ ID NO: 145770 - RNA, 19 nt, Artificial Sequence
  Description of Artificial Sequence: Synthetic oligonucleotide
  Sense strand starting at position 3230 of SEQ ID NO: 1869
uuuggcuuccaguguuaag

SEQ ID NO: 145771 - RNA, 19 nt, Artificial Sequence
  Description of Artificial Sequence: Synthetic oligonucleotide
  Antisense strand to SEQ ID NO: 145770
cuuaacacuggaagccaaa

SEQ ID NO: 145772 - RNA, 19 nt, Artificial Sequence
  Description of Artificial Sequence: Synthetic oligonucleotide
  Sense strand starting at position 3241 of SEQ ID NO: 1869
guguuaaggucaccucacu

SEQ ID NO: 145773 - RNA, 19 nt, Artificial Sequence
  Description of Artificial Sequence: Synthetic oligonucleotide
  Antisense strand to SEQ ID NO: 145772
agugaggugaccuuaacac

SEQ ID NO: 145774 - RNA, 19 nt, Artificial Sequence
  Description of Artificial Sequence: Synthetic oligonucleotide
  Sense strand starting at position 3658 of SEQ ID NO: 1869
aaaggacugccucgaaagu

SEQ ID NO: 145775 - RNA, 19 nt, Artificial Sequence
  Description of Artificial Sequence: Synthetic oligonucleotide
  Antisense strand to SEQ ID NO: 145774
acuuucgaggcaguccuuu

SEQ ID NO: 145776 - RNA, 19 nt, Artificial Sequence
  Description of Artificial Sequence: Synthetic oligonucleotide
  Sense strand starting at position 3669 of SEQ ID NO: 1869
ucgaaagucccgcacauuu

SEQ ID NO: 145777 - RNA, 19 nt, Artificial Sequence
  Description of Artificial Sequence: Synthetic oligonucleotide
  Antisense strand to SEQ ID NO: 145776
aaaugugcgggacuuucga

SEQ ID NO: 145778 - RNA, 19 nt, Artificial Sequence
  Description of Artificial Sequence: Synthetic oligonucleotide
  Sense strand starting at position 3746 of SEQ ID NO: 1869
uucucuuaacuggguacaa

SEQ ID NO: 145779 - RNA, 19 nt, Artificial Sequence
  Description of Artificial Sequence: Synthetic oligonucleotide
  Antisense strand to SEQ ID NO: 145778
uuguacccaguuaagagaa

SEQ ID NO: 145780 - RNA, 19 nt, Artificial Sequence
  Description of Artificial Sequence: Synthetic oligonucleotide
  Sense strand starting at position 3747 of SEQ ID NO: 1869
ucucuuaacuggguacaau

SEQ ID NO: 145781 - RNA, 19 nt, Artificial Sequence
  Description of Artificial Sequence: Synthetic oligonucleotide
  Antisense strand to SEQ ID NO: 145780
auuguacccaguuaagaga

SEQ ID NO: 145782 - RNA, 19 nt, Artificial Sequence
  Description of Artificial Sequence: Synthetic oligonucleotide
  Sense strand starting at position 3759 of SEQ ID NO: 1869
guacaaugugcccagcuaa

SEQ ID NO: 145783 - RNA, 19 nt, Artificial Sequence
  Description of Artificial Sequence: Synthetic oligonucleotide
  Antisense strand to SEQ ID NO: 145782
uuagcugggcacauuguac

SEQ ID NO: 145784 - RNA, 19 nt, Artificial Sequence
  Description of Artificial Sequence: Synthetic oligonucleotide
  Sense strand starting at position 3776 of SEQ ID NO: 1869
aacaaugagugcucuguua

SEQ ID NO: 145785 - RNA, 19 nt, Artificial Sequence
  Description of Artificial Sequence: Synthetic oligonucleotide
  Antisense strand to SEQ ID NO: 145784
uaacagagcacucauuguu

SEQ ID NO: 145786 - RNA, 19 nt, Artificial Sequence
  Description of Artificial Sequence: Synthetic oligonucleotide
  Sense strand starting at position 3778 of SEQ ID NO: 1869
caaugagugcucuguuauu

SEQ ID NO: 145787 - RNA, 19 nt, Artificial Sequence
  Description of Artificial Sequence: Synthetic oligonucleotide
  Antisense strand to SEQ ID NO: 145786
aauaacagagcacucauug

SEQ ID NO: 145788 - RNA, 19 nt, Artificial Sequence
  Description of Artificial Sequence: Synthetic oligonucleotide
  Sense strand starting at position 3783 of SEQ ID NO: 1869
agugcucuguuauuaauaa

SEQ ID NO: 145789 - RNA, 19 nt, Artificial Sequence
  Description of Artificial Sequence: Synthetic oligonucleotide
  Antisense strand to SEQ ID NO: 145788
uuauuaauaacagagcacu

SEQ ID NO: 145790 - RNA, 19 nt, Artificial Sequence
  Description of Artificial Sequence: Synthetic oligonucleotide
  Sense strand starting at position 3787 of SEQ ID NO: 1869
cucuguuauuaauaaggaa

SEQ ID NO: 145791 - RNA, 19 nt, Artificial Sequence
  Description of Artificial Sequence: Synthetic oligonucleotide
  Antisense strand to SEQ ID NO: 145790
uuccuuauuaauaacagag

SEQ ID NO: 145792 - RNA, 19 nt, Artificial Sequence
  Description of Artificial Sequence: Synthetic oligonucleotide
  Sense strand starting at position 3858 of SEQ ID NO: 1869
gagaccuaggcuggugaau

SEQ ID NO: 145793 - RNA, 19 nt, Artificial Sequence
  Description of Artificial Sequence: Synthetic oligonucleotide
  Antisense strand to SEQ ID NO: 145792
auucaccagccuaggucuc

SEQ ID NO: 145794 - RNA, 19 nt, Artificial Sequence
  Description of Artificial Sequence: Synthetic oligonucleotide
  Sense strand starting at position 3978 of SEQ ID NO: 1870
ggcuaacauccuuaauaug

SEQ ID NO: 145795 - RNA, 19 nt, Artificial Sequence
  Description of Artificial Sequence: Synthetic oligonucleotide
  Antisense strand to SEQ ID NO: 145794
cauauuaaggauguuagcc

SEQ ID NO: 145796 - RNA, 19 nt, Artificial Sequence
  Description of Artificial Sequence: Synthetic oligonucleotide
  Sense strand starting at position 3837 of SEQ ID NO: 1870
agugaugauuuguagaaag

SEQ ID NO: 145797 - RNA, 19 nt, Artificial Sequence
  Description of Artificial Sequence: Synthetic oligonucleotide
  Antisense strand to SEQ ID NO: 145796
cuuucuacaaaucaucacu

SEQ ID NO: 145798 - RNA, 19 nt, Artificial Sequence
  Description of Artificial Sequence: Synthetic oligonucleotide
  Sense strand starting at position 3802 of SEQ ID NO: 1870
ugguuagauuaagcaauuc

SEQ ID NO: 145799 - RNA, 19 nt, Artificial Sequence
  Description of Artificial Sequence: Synthetic oligonucleotide
  Antisense strand to SEQ ID NO: 145798
gaauugcuuaaucuaacca

SEQ ID NO: 145800 - RNA, 19 nt, Artificial Sequence
  Description of Artificial Sequence: Synthetic oligonucleotide
  Sense strand starting at position 3789 of SEQ ID NO: 1870
aaaucaugaugugugguua

SEQ ID NO: 145801 - RNA, 19 nt, Artificial Sequence
  Description of Artificial Sequence: Synthetic oligonucleotide
  Antisense strand to SEQ ID NO: 145800
uaaccacacaucaugauuu

SEQ ID NO: 145802 - RNA, 19 nt, Artificial Sequence
  Description of Artificial Sequence: Synthetic oligonucleotide
  Sense strand starting at position 3233 of SEQ ID NO: 1870
acaguuaucugacucuaca

SEQ ID NO: 145803 - RNA, 19 nt, Artificial Sequence
  Description of Artificial Sequence: Synthetic oligonucleotide
  Antisense strand to SEQ ID NO: 145802
uguagagucagauaacugu

SEQ ID NO: 145804 - RNA, 19 nt, Artificial Sequence
  Description of Artificial Sequence: Synthetic oligonucleotide
  Sense strand starting at position 3228 of SEQ ID NO: 1870
aagugacaguuaucugacu

SEQ ID NO: 145805 - RNA, 19 nt, Artificial Sequence
  Description of Artificial Sequence: Synthetic oligonucleotide
  Antisense strand to SEQ ID NO: 145804
agucagauaacugucacuu

SEQ ID NO: 145806 - RNA, 19 nt, Artificial Sequence
  Description of Artificial Sequence: Synthetic oligonucleotide
  Sense strand starting at position 2847 of SEQ ID NO: 1870
augugacuuacguagauug

SEQ ID NO: 145807 - RNA, 19 nt, Artificial Sequence
  Description of Artificial Sequence: Synthetic oligonucleotide
  Antisense strand to SEQ ID NO: 145806
caaucuacguaagucacau

SEQ ID NO: 145808 - RNA, 19 nt, Artificial Sequence
  Description of Artificial Sequence: Synthetic oligonucleotide
  Sense strand starting at position 2750 of SEQ ID NO: 1870
gcaauaccagaccguaaau

SEQ ID NO: 145809 - RNA, 19 nt, Artificial Sequence
  Description of Artificial Sequence: Synthetic oligonucleotide
  Antisense strand to SEQ ID NO: 145808
auuuacggucugguauugc

SEQ ID NO: 145810 - RNA, 19 nt, Artificial Sequence
  Description of Artificial Sequence: Synthetic oligonucleotide
  Sense strand starting at position 2722 of SEQ ID NO: 1870
augucauguucucuugaga

SEQ ID NO: 145811 - RNA, 19 nt, Artificial Sequence
  Description of Artificial Sequence: Synthetic oligonucleotide
  Antisense strand to SEQ ID NO: 145810
ucucaagagaacaugacau

SEQ ID NO: 145812 - RNA, 19 nt, Artificial Sequence
  Description of Artificial Sequence: Synthetic oligonucleotide
  Sense strand starting at position 2707 of SEQ ID NO: 1870
uguacuauuguugagaugu

SEQ ID NO: 145813 - RNA, 19 nt, Artificial Sequence
  Description of Artificial Sequence: Synthetic oligonucleotide
  Antisense strand to SEQ ID NO: 145812
acaucucaacaauaguaca

SEQ ID NO: 145814 - RNA, 19 nt, Artificial Sequence
  Description of Artificial Sequence: Synthetic oligonucleotide
  Sense strand starting at position 2705 of SEQ ID NO: 1870
uauguacuauuguugagau

SEQ ID NO: 145815 - RNA, 19 nt, Artificial Sequence
  Description of Artificial Sequence: Synthetic oligonucleotide
  Antisense strand to SEQ ID NO: 145814
aucucaacaauaguacaua

SEQ ID NO: 145816 - RNA, 19 nt, Artificial Sequence
  Description of Artificial Sequence: Synthetic oligonucleotide
  Sense strand starting at position 2693 of SEQ ID NO: 1870
cccugaucucuauauguac

SEQ ID NO: 145817 - RNA, 19 nt, Artificial Sequence
  Description of Artificial Sequence: Synthetic oligonucleotide
  Antisense strand to SEQ ID NO: 145816
guacauauagagaucaggg

SEQ ID NO: 145818 - RNA, 19 nt, Artificial Sequence
  Description of Artificial Sequence: Synthetic oligonucleotide
  Sense strand starting at position 2691 of SEQ ID NO: 1870
uucccugaucucuauaugu

SEQ ID NO: 145819 - RNA, 19 nt, Artificial Sequence
  Description of Artificial Sequence: Synthetic oligonucleotide
  Antisense strand to SEQ ID NO: 145818
acauauagagaucagggaa

SEQ ID NO: 145820 - RNA, 19 nt, Artificial Sequence
  Description of Artificial Sequence: Synthetic oligonucleotide
  Sense strand starting at position 2684 of SEQ ID NO: 1870
uugaaaguucccugaucuc

SEQ ID NO: 145821 - RNA, 19 nt, Artificial Sequence
  Description of Artificial Sequence: Synthetic oligonucleotide
  Antisense strand to SEQ ID NO: 145820
gagaucagggaacuuucaa

SEQ ID NO: 145822 - RNA, 19 nt, Artificial Sequence
  Description of Artificial Sequence: Synthetic oligonucleotide
  Sense strand starting at position 2683 of SEQ ID NO: 1870
auugaaaguucccugaucu

SEQ ID NO: 145823 - RNA, 19 nt, Artificial Sequence
  Description of Artificial Sequence: Synthetic oligonucleotide
  Antisense strand to SEQ ID NO: 145822
agaucagggaacuuucaau

SEQ ID NO: 145824 - RNA, 19 nt, Artificial Sequence
  Description of Artificial Sequence: Synthetic oligonucleotide
  Sense strand starting at position 2625 of SEQ ID NO: 1870
ccaguaaauuauccgacau

SEQ ID NO: 145825 - RNA, 19 nt, Artificial Sequence
  Description of Artificial Sequence: Synthetic oligonucleotide
  Antisense strand to SEQ ID NO: 145824
augucggauaauuuacugg

SEQ ID NO: 145826 - RNA, 19 nt, Artificial Sequence
  Description of Artificial Sequence: Synthetic oligonucleotide
  Sense strand starting at position 2624 of SEQ ID NO: 1870
uccaguaaauuauccgaca

SEQ ID NO: 145827 - RNA, 19 nt, Artificial Sequence
  Description of Artificial Sequence: Synthetic oligonucleotide
  Antisense strand to SEQ ID NO: 145826
ugucggauaauuuacugga

SEQ ID NO: 145828 - RNA, 19 nt, Artificial Sequence
  Description of Artificial Sequence: Synthetic oligonucleotide
  Sense strand starting at position 2617 of SEQ ID NO: 1870
guuagucuccaguaaauua

SEQ ID NO: 145829 - RNA, 19 nt, Artificial Sequence
  Description of Artificial Sequence: Synthetic oligonucleotide
  Antisense strand to SEQ ID NO: 145828
uaauuuacuggagacuaac

SEQ ID NO: 145830 - RNA, 19 nt, Artificial Sequence
  Description of Artificial Sequence: Synthetic oligonucleotide
  Sense strand starting at position 2614 of SEQ ID NO: 1870
ccaguuagucuccaguaaa

SEQ ID NO: 145831 - RNA, 19 nt, Artificial Sequence
  Description of Artificial Sequence: Synthetic oligonucleotide
  Antisense strand to SEQ ID NO: 145830
uuuacuggagacuaacugg

SEQ ID NO: 145832 - RNA, 19 nt, Artificial Sequence
  Description of Artificial Sequence: Synthetic oligonucleotide
  Sense strand starting at position 2466 of SEQ ID NO: 1870
uuaacauucugauuguggu

SEQ ID NO: 145833 - RNA, 19 nt, Artificial Sequence
  Description of Artificial Sequence: Synthetic oligonucleotide
  Antisense strand to SEQ ID NO: 145832
accacaaucagaauguuaa

SEQ ID NO: 145834 - RNA, 19 nt, Artificial Sequence
  Description of Artificial Sequence: Synthetic oligonucleotide
  Sense strand starting at position 2314 of SEQ ID NO: 1870
ggaaauccucaucaggcuu

SEQ ID NO: 145835 - RNA, 19 nt, Artificial Sequence
  Description of Artificial Sequence: Synthetic oligonucleotide
  Antisense strand to SEQ ID NO: 145834
aagccugaugaggauuucc

SEQ ID NO: 145836 - RNA, 19 nt, Artificial Sequence
  Description of Artificial Sequence: Synthetic oligonucleotide
  Sense strand starting at position 2313 of SEQ ID NO: 1870
cggaaauccucaucaggcu

SEQ ID NO: 145837 - RNA, 19 nt, Artificial Sequence
  Description of Artificial Sequence: Synthetic oligonucleotide
  Antisense strand to SEQ ID NO: 145836
agccugaugaggauuuccg

SEQ ID NO: 145838 - RNA, 19 nt, Artificial Sequence
  Description of Artificial Sequence: Synthetic oligonucleotide
  Sense strand starting at position 1268 of SEQ ID NO: 1870
gagcgauaucugcacaaag

SEQ ID NO: 145839 - RNA, 19 nt, Artificial Sequence
  Description of Artificial Sequence: Synthetic oligonucleotide
  Antisense strand to SEQ ID NO: 145838
cuuugugcagauaucgcuc

SEQ ID NO: 145840 - RNA, 19 nt, Artificial Sequence
  Description of Artificial Sequence: Synthetic oligonucleotide
  Sense strand starting at position 1059 of SEQ ID NO: 1870
cgaaucuucccgcagaaac

SEQ ID NO: 145841 - RNA, 19 nt, Artificial Sequence
  Description of Artificial Sequence: Synthetic oligonucleotide
  Antisense strand to SEQ ID NO: 145840
guuucugcgggaagauucg

SEQ ID NO: 145842 - RNA, 19 nt, Artificial Sequence
  Description of Artificial Sequence: Synthetic oligonucleotide
  Sense strand starting at position 880 of SEQ ID NO: 1870
gaucuuagcgggcaaauaa

SEQ ID NO: 145843 - RNA, 19 nt, Artificial Sequence
  Description of Artificial Sequence: Synthetic oligonucleotide
  Antisense strand to SEQ ID NO: 145842
uuauuugcccgcuaagauc

SEQ ID NO: 145844 - RNA, 19 nt, Artificial Sequence
  Description of Artificial Sequence: Synthetic oligonucleotide
  Sense strand starting at position 866 of SEQ ID NO: 1870
augagucuauaauugaucu

SEQ ID NO: 145845 - RNA, 19 nt, Artificial Sequence
  Description of Artificial Sequence: Synthetic oligonucleotide
  Antisense strand to SEQ ID NO: 145844
agaucaauuauagacucau

SEQ ID NO: 145846 - RNA, 19 nt, Artificial Sequence
  Description of Artificial Sequence: Synthetic oligonucleotide
  Sense strand starting at position 666 of SEQ ID NO: 1870
cucgguuuagaacacugaa

SEQ ID NO: 145847 - RNA, 19 nt, Artificial Sequence
  Description of Artificial Sequence: Synthetic oligonucleotide
  Antisense strand to SEQ ID NO: 145846
uucaguguucuaaaccgag

SEQ ID NO: 145848 - RNA, 19 nt, Artificial Sequence
  Description of Artificial Sequence: Synthetic oligonucleotide
  Sense strand starting at position 661 of SEQ ID NO: 1870
auauccucgguuuagaaca

SEQ ID NO: 145849 - RNA, 19 nt, Artificial Sequence
  Description of Artificial Sequence: Synthetic oligonucleotide
  Antisense strand to SEQ ID NO: 145848
uguucuaaaccgaggauau

SEQ ID NO: 145850 - RNA, 19 nt, Artificial Sequence
  Description of Artificial Sequence: Synthetic oligonucleotide
  Sense strand starting at position 658 of SEQ ID NO: 1870
aacauauccucgguuuaga

SEQ ID NO: 145851 - RNA, 19 nt, Artificial Sequence
  Description of Artificial Sequence: Synthetic oligonucleotide
  Antisense strand to SEQ ID NO: 145850
ucuaaaccgaggauauguu

SEQ ID NO: 145852 - RNA, 19 nt, Artificial Sequence
  Description of Artificial Sequence: Synthetic oligonucleotide
  Sense strand starting at position 657 of SEQ ID NO: 1870
aaacauauccucgguuuag

SEQ ID NO: 145853 - RNA, 19 nt, Artificial Sequence
  Description of Artificial Sequence: Synthetic oligonucleotide
  Antisense strand to SEQ ID NO: 145852
cuaaaccgaggauauguuu

SEQ ID NO: 145854 - RNA, 19 nt, Artificial Sequence
  Description of Artificial Sequence: Synthetic oligonucleotide
  Sense strand starting at position 632 of SEQ ID NO: 1870
ugcaaaucgcucguacauu

SEQ ID NO: 145855 - RNA, 19 nt, Artificial Sequence
  Description of Artificial Sequence: Synthetic oligonucleotide
  Antisense strand to SEQ ID NO: 145854
aauguacgagcgauuugca

SEQ ID NO: 145856 - RNA, 19 nt, Artificial Sequence
  Description of Artificial Sequence: Synthetic oligonucleotide
  Sense strand starting at position 594 of SEQ ID NO: 1870
gcugaucaucuuggaauua

SEQ ID NO: 145857 - RNA, 19 nt, Artificial Sequence
  Description of Artificial Sequence: Synthetic oligonucleotide
  Antisense strand to SEQ ID NO: 145856
uaauuccaagaugaucagc

SEQ ID NO: 145858 - RNA, 19 nt, Artificial Sequence
  Description of Artificial Sequence: Synthetic oligonucleotide
  Sense strand starting at position 385 of SEQ ID NO: 1870
auacuuguugauugugaaa

SEQ ID NO: 145859 - RNA, 19 nt, Artificial Sequence
  Description of Artificial Sequence: Synthetic oligonucleotide
  Antisense strand to SEQ ID NO: 145858
uuucacaaucaacaaguau

SEQ ID NO: 145860 - RNA, 19 nt, Artificial Sequence
  Description of Artificial Sequence: Synthetic oligonucleotide
  Sense strand starting at position 384 of SEQ ID NO: 1870
gauacuuguugauugugaa

SEQ ID NO: 145861 - RNA, 19 nt, Artificial Sequence
  Description of Artificial Sequence: Synthetic oligonucleotide
  Antisense strand to SEQ ID NO: 145860
uucacaaucaacaaguauc

SEQ ID NO: 145862 - RNA, 19 nt, Artificial Sequence
  Description of Artificial Sequence: Synthetic oligonucleotide
  Sense strand starting at position 380 of SEQ ID NO: 1870
uaaagauacuuguugauug

SEQ ID NO: 145863 - RNA, 19 nt, Artificial Sequence
  Description of Artificial Sequence: Synthetic oligonucleotide
  Antisense strand to SEQ ID NO: 145862
caaucaacaaguaucuuua

SEQ ID NO: 145864 - RNA, 19 nt, Artificial Sequence
  Description of Artificial Sequence: Synthetic oligonucleotide
  Sense strand starting at position 353 of SEQ ID NO: 1870
guaguuuaagaguacaauc

SEQ ID NO: 145865 - RNA, 19 nt, Artificial Sequence
  Description of Artificial Sequence: Synthetic oligonucleotide
  Antisense strand to SEQ ID NO: 145864
gauuguacucuuaaacuac

SEQ ID NO: 145866 - RNA, 19 nt, Artificial Sequence
  Description of Artificial Sequence: Synthetic oligonucleotide
  Sense strand starting at position 96 of SEQ ID NO: 1870
gugauuguaacuggaaauu

SEQ ID NO: 145867 - RNA, 19 nt, Artificial Sequence
  Description of Artificial Sequence: Synthetic oligonucleotide
  Antisense strand to SEQ ID NO: 145866
aauuuccaguuacaaucac

SEQ ID NO: 145868 - RNA, 19 nt, Artificial Sequence
  Description of Artificial Sequence: Synthetic oligonucleotide
  Sense strand starting at position 95 of SEQ ID NO: 1870
agugauuguaacuggaaau

SEQ ID NO: 145869 - RNA, 19 nt, Artificial Sequence
  Description of Artificial Sequence: Synthetic oligonucleotide
  Antisense strand to SEQ ID NO: 145868
auuuccaguuacaaucacu

SEQ ID NO: 145870 - RNA, 19 nt, Artificial Sequence
  Description of Artificial Sequence: Synthetic oligonucleotide
  Sense strand starting at position 94 of SEQ ID NO: 1870
uagugauuguaacuggaaa

SEQ ID NO: 145871 - RNA, 19 nt, Artificial Sequence
  Description of Artificial Sequence: Synthetic oligonucleotide
  Antisense strand to SEQ ID NO: 145870
uuuccaguuacaaucacua

SEQ ID NO: 145872 - RNA, 19 nt, Artificial Sequence
  Description of Artificial Sequence: Synthetic oligonucleotide
  Sense strand starting at position 84 of SEQ ID NO: 1870
uacauuauguuagugauug

SEQ ID NO: 145873 - RNA, 19 nt, Artificial Sequence
  Description of Artificial Sequence: Synthetic oligonucleotide
  Antisense strand to SEQ ID NO: 145872
caaucacuaacauaaugua

SEQ ID NO: 145874 - RNA, 19 nt, Artificial Sequence
  Description of Artificial Sequence: Synthetic oligonucleotide
  Sense strand starting at position 3815 of SEQ ID NO: 1871
gagagaaacuagcuguucu

SEQ ID NO: 145875 - RNA, 19 nt, Artificial Sequence
  Description of Artificial Sequence: Synthetic oligonucleotide
  Antisense strand to SEQ ID NO: 145874
agaacagcuaguuucucuc

SEQ ID NO: 145876 - RNA, 19 nt, Artificial Sequence
  Description of Artificial Sequence: Synthetic oligonucleotide
  Sense strand starting at position 3801 of SEQ ID NO: 1871
ggaagugaauucuagagag

SEQ ID NO: 145877 - RNA, 19 nt, Artificial Sequence
  Description of Artificial Sequence: Synthetic oligonucleotide
  Antisense strand to SEQ ID NO: 145876
cucucuagaauucacuucc

SEQ ID NO: 145878 - RNA, 19 nt, Artificial Sequence
  Description of Artificial Sequence: Synthetic oligonucleotide
  Sense strand starting at position 3783 of SEQ ID NO: 1871
aggaguuugcuaggagaag

SEQ ID NO: 145879 - RNA, 19 nt, Artificial Sequence
  Description of Artificial Sequence: Synthetic oligonucleotide
  Antisense strand to SEQ ID NO: 145878
cuucuccuagcaaacuccu

SEQ ID NO: 145880 - RNA, 19 nt, Artificial Sequence
  Description of Artificial Sequence: Synthetic oligonucleotide
  Sense strand starting at position 3781 of SEQ ID NO: 1871
guaggaguuugcuaggaga

SEQ ID NO: 145881 - RNA, 19 nt, Artificial Sequence
  Description of Artificial Sequence: Synthetic oligonucleotide
  Antisense strand to SEQ ID NO: 145880
ucuccuagcaaacuccuac

SEQ ID NO: 145882 - RNA, 19 nt, Artificial Sequence
  Description of Artificial Sequence: Synthetic oligonucleotide
  Sense strand starting at position 3348 of SEQ ID NO: 1871
gcgugaucauaucuaacug

SEQ ID NO: 145883 - RNA, 19 nt, Artificial Sequence
  Description of Artificial Sequence: Synthetic oligonucleotide
  Antisense strand to SEQ ID NO: 145882
caguuagauaugaucacgc

SEQ ID NO: 145884 - RNA, 19 nt, Artificial Sequence
  Description of Artificial Sequence: Synthetic oligonucleotide
  Sense strand starting at position 3216 of SEQ ID NO: 1871
cccucuugcgauuacaaag

SEQ ID NO: 145885 - RNA, 19 nt, Artificial Sequence
  Description of Artificial Sequence: Synthetic oligonucleotide
  Antisense strand to SEQ ID NO: 145884
cuuuguaaucgcaagaggg

SEQ ID NO: 145886 - RNA, 19 nt, Artificial Sequence
  Description of Artificial Sequence: Synthetic oligonucleotide
  Sense strand starting at position 3182 of SEQ ID NO: 1871
ucuccugaguguccugaga

SEQ ID NO: 145887 - RNA, 19 nt, Artificial Sequence
  Description of Artificial Sequence: Synthetic oligonucleotide
  Antisense strand to SEQ ID NO: 145886
ucucaggacacucaggaga

SEQ ID NO: 145888 - RNA, 19 nt, Artificial Sequence
  Description of Artificial Sequence: Synthetic oligonucleotide
  Sense strand starting at position 3150 of SEQ ID NO: 1871
cgacgugaucagugagcuu

SEQ ID NO: 145889 - RNA, 19 nt, Artificial Sequence
  Description of Artificial Sequence: Synthetic oligonucleotide
  Antisense strand to SEQ ID NO: 145888
aagcucacugaucacgucg

SEQ ID NO: 145890 - RNA, 19 nt, Artificial Sequence
  Description of Artificial Sequence: Synthetic oligonucleotide
  Sense strand starting at position 3146 of SEQ ID NO: 1871
aggucgacgugaucaguga

SEQ ID NO: 145891 - RNA, 19 nt, Artificial Sequence
  Description of Artificial Sequence: Synthetic oligonucleotide
  Antisense strand to SEQ ID NO: 145890
ucacugaucacgucgaccu

SEQ ID NO: 145892 - RNA, 19 nt, Artificial Sequence
  Description of Artificial Sequence: Synthetic oligonucleotide
  Sense strand starting at position 3140 of SEQ ID NO: 1871
cuugcuaggucgacgugau

SEQ ID NO: 145893 - RNA, 19 nt, Artificial Sequence
  Description of Artificial Sequence: Synthetic oligonucleotide
  Antisense strand to SEQ ID NO: 145892
aucacgucgaccuagcaag

SEQ ID NO: 145894 - RNA, 19 nt, Artificial Sequence
  Description of Artificial Sequence: Synthetic oligonucleotide
  Sense strand starting at position 3104 of SEQ ID NO: 1871
cguguugaucccagcguuu

SEQ ID NO: 145895 - RNA, 19 nt, Artificial Sequence
  Description of Artificial Sequence: Synthetic oligonucleotide
  Antisense strand to SEQ ID NO: 145894
aaacgcugggaucaacacg

SEQ ID NO: 145896 - RNA, 19 nt, Artificial Sequence
  Description of Artificial Sequence: Synthetic oligonucleotide
  Sense strand starting at position 3103 of SEQ ID NO: 1871
gcguguugaucccagcguu

SEQ ID NO: 145897 - RNA, 19 nt, Artificial Sequence
  Description of Artificial Sequence: Synthetic oligonucleotide
  Antisense strand to SEQ ID NO: 145896
aacgcugggaucaacacgc

SEQ ID NO: 145898 - RNA, 19 nt, Artificial Sequence
  Description of Artificial Sequence: Synthetic oligonucleotide
  Sense strand starting at position 3094 of SEQ ID NO: 1871
cuggcagaugcguguugau

SEQ ID NO: 145899 - RNA, 19 nt, Artificial Sequence
  Description of Artificial Sequence: Synthetic oligonucleotide
  Antisense strand to SEQ ID NO: 145898
aucaacacgcaucugccag

SEQ ID NO: 145900 - RNA, 19 nt, Artificial Sequence
  Description of Artificial Sequence: Synthetic oligonucleotide
  Sense strand starting at position 2937 of SEQ ID NO: 1871
uggaauaacgcacgugaaa

SEQ ID NO: 145901 - RNA, 19 nt, Artificial Sequence
  Description of Artificial Sequence: Synthetic oligonucleotide
  Antisense strand to SEQ ID NO: 145900
uuucacgugcguuauucca

SEQ ID NO: 145902 - RNA, 19 nt, Artificial Sequence
  Description of Artificial Sequence: Synthetic oligonucleotide
  Sense strand starting at position 2902 of SEQ ID NO: 1871
uagaacugguguccugaua

SEQ ID NO: 145903 - RNA, 19 nt, Artificial Sequence
  Description of Artificial Sequence: Synthetic oligonucleotide
  Antisense strand to SEQ ID NO: 145902
uaucaggacaccaguucua

SEQ ID NO: 145904 - RNA, 19 nt, Artificial Sequence
  Description of Artificial Sequence: Synthetic oligonucleotide
  Sense strand starting at position 2882 of SEQ ID NO: 1871
gccucagcgcuggguuaaa

SEQ ID NO: 145905 - RNA, 19 nt, Artificial Sequence
  Description of Artificial Sequence: Synthetic oligonucleotide
  Antisense strand to SEQ ID NO: 145904
uuuaacccagcgcugaggc

SEQ ID NO: 145906 - RNA, 19 nt, Artificial Sequence
  Description of Artificial Sequence: Synthetic oligonucleotide
  Sense strand starting at position 2861 of SEQ ID NO: 1871
ccauguuacugaccucuca

SEQ ID NO: 145907 - RNA, 19 nt, Artificial Sequence
  Description of Artificial Sequence: Synthetic oligonucleotide
  Antisense strand to SEQ ID NO: 145906
ugagaggucaguaacaugg

SEQ ID NO: 145908 - RNA, 19 nt, Artificial Sequence
  Description of Artificial Sequence: Synthetic oligonucleotide
  Sense strand starting at position 2852 of SEQ ID NO: 1871
agcucuuggccauguuacu

SEQ ID NO: 145909 - RNA, 19 nt, Artificial Sequence
  Description of Artificial Sequence: Synthetic oligonucleotide
  Antisense strand to SEQ ID NO: 145908
aguaacauggccaagagcu

SEQ ID NO: 145910 - RNA, 19 nt, Artificial Sequence
  Description of Artificial Sequence: Synthetic oligonucleotide
  Sense strand starting at position 2850 of SEQ ID NO: 1871
ugagcucuuggccauguua

SEQ ID NO: 145911 - RNA, 19 nt, Artificial Sequence
  Description of Artificial Sequence: Synthetic oligonucleotide
  Antisense strand to SEQ ID NO: 145910
uaacauggccaagagcuca

SEQ ID NO: 145912 - RNA, 19 nt, Artificial Sequence
  Description of Artificial Sequence: Synthetic oligonucleotide
  Sense strand starting at position 2715 of SEQ ID NO: 1871
aggucaucgccgccucauu

SEQ ID NO: 145913 - RNA, 19 nt, Artificial Sequence
  Description of Artificial Sequence: Synthetic oligonucleotide
  Antisense strand to SEQ ID NO: 145912
aaugaggcggcgaugaccu

SEQ ID NO: 145914 - RNA, 19 nt, Artificial Sequence
  Description of Artificial Sequence: Synthetic oligonucleotide
  Sense strand starting at position 1283 of SEQ ID NO: 1871
agucguucugccugaaguu

SEQ ID NO: 145915 - RNA, 19 nt, Artificial Sequence
  Description of Artificial Sequence: Synthetic oligonucleotide
  Antisense strand to SEQ ID NO: 145914
aacuucaggcagaacgacu

SEQ ID NO: 145916 - RNA, 19 nt, Artificial Sequence
  Description of Artificial Sequence: Synthetic oligonucleotide
  Sense strand starting at position 1280 of SEQ ID NO: 1871
cccagucguucugccugaa

SEQ ID NO: 145917 - RNA, 19 nt, Artificial Sequence
  Description of Artificial Sequence: Synthetic oligonucleotide
  Antisense strand to SEQ ID NO: 145916
uucaggcagaacgacuggg

SEQ ID NO: 145918 - RNA, 19 nt, Artificial Sequence
  Description of Artificial Sequence: Synthetic oligonucleotide
  Sense strand starting at position 1167 of SEQ ID NO: 1871
gggaggucuugggccagua

SEQ ID NO: 145919 - RNA, 19 nt, Artificial Sequence
  Description of Artificial Sequence: Synthetic oligonucleotide
  Antisense strand to SEQ ID NO: 145918
uacuggcccaagaccuccc

SEQ ID NO: 145920 - RNA, 19 nt, Artificial Sequence
  Description of Artificial Sequence: Synthetic oligonucleotide
  Sense strand starting at position 1042 of SEQ ID NO: 1871
guuccuugagcccacauaa

SEQ ID NO: 145921 - RNA, 19 nt, Artificial Sequence
  Description of Artificial Sequence: Synthetic oligonucleotide
  Antisense strand to SEQ ID NO: 145920
uuaugugggcucaaggaac

SEQ ID NO: 145922 - RNA, 19 nt, Artificial Sequence
  Description of Artificial Sequence: Synthetic oligonucleotide
  Sense strand starting at position 1000 of SEQ ID NO: 1871
gacaucuucucacggcauu

SEQ ID NO: 145923 - RNA, 19 nt, Artificial Sequence
  Description of Artificial Sequence: Synthetic oligonucleotide
  Antisense strand to SEQ ID NO: 145922
aaugccgugagaagauguc

SEQ ID NO: 145924 - RNA, 19 nt, Artificial Sequence
  Description of Artificial Sequence: Synthetic oligonucleotide
  Sense strand starting at position 82 of SEQ ID NO: 1871
guacgucugggucacacau

SEQ ID NO: 145925 - RNA, 19 nt, Artificial Sequence
  Description of Artificial Sequence: Synthetic oligonucleotide
  Antisense strand to SEQ ID NO: 145924
augugugacccagacguac

SEQ ID NO: 145926 - RNA, 19 nt, Artificial Sequence
  Description of Artificial Sequence: Synthetic oligonucleotide
  Sense strand starting at position 21 of SEQ ID NO: 1871
gcaugcaaugauggacaua

SEQ ID NO: 145927 - RNA, 19 nt, Artificial Sequence
  Description of Artificial Sequence: Synthetic oligonucleotide
  Antisense strand to SEQ ID NO: 145926
uauguccaucauugcaugc

SEQ ID NO: 145928 - RNA, 19 nt, Artificial Sequence
  Description of Artificial Sequence: Synthetic oligonucleotide
  Sense strand starting at position 3961 of SEQ ID NO: 1872
uuauuauguuaggcucuau

SEQ ID NO: 145929 - RNA, 19 nt, Artificial Sequence
  Description of Artificial Sequence: Synthetic oligonucleotide
  Antisense strand to SEQ ID NO: 145928
auagagccuaacauaauaa

SEQ ID NO: 145930 - RNA, 19 nt, Artificial Sequence
  Description of Artificial Sequence: Synthetic oligonucleotide
  Sense strand starting at position 3596 of SEQ ID NO: 1872
auuauuuguugaggaacuu

SEQ ID NO: 145931 - RNA, 19 nt, Artificial Sequence
  Description of Artificial Sequence: Synthetic oligonucleotide
  Antisense strand to SEQ ID NO: 145930
aaguuccucaacaaauaau

SEQ ID NO: 145932 - RNA, 19 nt, Artificial Sequence
  Description of Artificial Sequence: Synthetic oligonucleotide
  Sense strand starting at position 3593 of SEQ ID NO: 1872
aggauuauuuguugaggaa

SEQ ID NO: 145933 - RNA, 19 nt, Artificial Sequence
  Description of Artificial Sequence: Synthetic oligonucleotide
  Antisense strand to SEQ ID NO: 145932
uuccucaacaaauaauccu

SEQ ID NO: 145934 - RNA, 19 nt, Artificial Sequence
  Description of Artificial Sequence: Synthetic oligonucleotide
  Sense strand starting at position 3583 of SEQ ID NO: 1872
ucgugauaucaggauuauu

SEQ ID NO: 145935 - RNA, 19 nt, Artificial Sequence
  Description of Artificial Sequence: Synthetic oligonucleotide
  Antisense strand to SEQ ID NO: 145934
aauaauccugauaucacga

SEQ ID NO: 145936 - RNA, 19 nt, Artificial Sequence
  Description of Artificial Sequence: Synthetic oligonucleotide
  Sense strand starting at position 3575 of SEQ ID NO: 1872
ucuauaauucgugauauca

SEQ ID NO: 145937 - RNA, 19 nt, Artificial Sequence
  Description of Artificial Sequence: Synthetic oligonucleotide
  Antisense strand to SEQ ID NO: 145936
ugauaucacgaauuauaga

SEQ ID NO: 145938 - RNA, 19 nt, Artificial Sequence
  Description of Artificial Sequence: Synthetic oligonucleotide
  Sense strand starting at position 3446 of SEQ ID NO: 1872
acauuaagguagcaucuaa

SEQ ID NO: 145939 - RNA, 19 nt, Artificial Sequence
  Description of Artificial Sequence: Synthetic oligonucleotide
  Antisense strand to SEQ ID NO: 145938
uuagaugcuaccuuaaugu

SEQ ID NO: 145940 - RNA, 19 nt, Artificial Sequence
  Description of Artificial Sequence: Synthetic oligonucleotide
  Sense strand starting at position 3325 of SEQ ID NO: 1872
uggaguacacacugauaau

SEQ ID NO: 145941 - RNA, 19 nt, Artificial Sequence
  Description of Artificial Sequence: Synthetic oligonucleotide
  Antisense strand to SEQ ID NO: 145940
auuaucaguguguacucca

SEQ ID NO: 145942 - RNA, 19 nt, Artificial Sequence
  Description of Artificial Sequence: Synthetic oligonucleotide
  Sense strand starting at position 3258 of SEQ ID NO: 1872
uuuguaguuaagugucuaa

SEQ ID NO: 145943 - RNA, 19 nt, Artificial Sequence
  Description of Artificial Sequence: Synthetic oligonucleotide
  Antisense strand to SEQ ID NO: 145942
uuagacacuuaacuacaaa

SEQ ID NO: 145944 - RNA, 19 nt, Artificial Sequence
  Description of Artificial Sequence: Synthetic oligonucleotide
  Sense strand starting at position 2811 of SEQ ID NO: 1872
accacuaguuuauagaaga

SEQ ID NO: 145945 - RNA, 19 nt, Artificial Sequence
  Description of Artificial Sequence: Synthetic oligonucleotide
  Antisense strand to SEQ ID NO: 145944
ucuucuauaaacuaguggu

SEQ ID NO: 145946 - RNA, 19 nt, Artificial Sequence
  Description of Artificial Sequence: Synthetic oligonucleotide
  Sense strand starting at position 2581 of SEQ ID NO: 1872
gcauccagaugugagaaua

SEQ ID NO: 145947 - RNA, 19 nt, Artificial Sequence
  Description of Artificial Sequence: Synthetic oligonucleotide
  Antisense strand to SEQ ID NO: 145946
uauucucacaucuggaugc

SEQ ID NO: 145948 - RNA, 19 nt, Artificial Sequence
  Description of Artificial Sequence: Synthetic oligonucleotide
  Sense strand starting at position 2580 of SEQ ID NO: 1872
agcauccagaugugagaau

SEQ ID NO: 145949 - RNA, 19 nt, Artificial Sequence
  Description of Artificial Sequence: Synthetic oligonucleotide
  Antisense strand to SEQ ID NO: 145948
auucucacaucuggaugcu

SEQ ID NO: 145950 - RNA, 19 nt, Artificial Sequence
  Description of Artificial Sequence: Synthetic oligonucleotide
  Sense strand starting at position 2578 of SEQ ID NO: 1872
auagcauccagaugugaga

SEQ ID NO: 145951 - RNA, 19 nt, Artificial Sequence
  Description of Artificial Sequence: Synthetic oligonucleotide
  Antisense strand to SEQ ID NO: 145950
ucucacaucuggaugcuau

SEQ ID NO: 145952 - RNA, 19 nt, Artificial Sequence
  Description of Artificial Sequence: Synthetic oligonucleotide
  Sense strand starting at position 2500 of SEQ ID NO: 1872
cugggucuuugacuauaau

SEQ ID NO: 145953 - RNA, 19 nt, Artificial Sequence
  Description of Artificial Sequence: Synthetic oligonucleotide
  Antisense strand to SEQ ID NO: 145952
auuauagucaaagacccag

SEQ ID NO: 145954 - RNA, 19 nt, Artificial Sequence
  Description of Artificial Sequence: Synthetic oligonucleotide
  Sense strand starting at position 2496 of SEQ ID NO: 1872
uucucugggucuuugacua

SEQ ID NO: 145955 - RNA, 19 nt, Artificial Sequence
  Description of Artificial Sequence: Synthetic oligonucleotide
  Antisense strand to SEQ ID NO: 145954
uagucaaagacccagagaa

SEQ ID NO: 145956 - RNA, 19 nt, Artificial Sequence
  Description of Artificial Sequence: Synthetic oligonucleotide
  Sense strand starting at position 2475 of SEQ ID NO: 1872
gcugcuuuguuccuggaau

SEQ ID NO: 145957 - RNA, 19 nt, Artificial Sequence
  Description of Artificial Sequence: Synthetic oligonucleotide
  Antisense strand to SEQ ID NO: 145956
auuccaggaacaaagcagc

SEQ ID NO: 145958 - RNA, 19 nt, Artificial Sequence
  Description of Artificial Sequence: Synthetic oligonucleotide
  Sense strand starting at position 2401 of SEQ ID NO: 1872
uccacugcugcuuaaauga

SEQ ID NO: 145959 - RNA, 19 nt, Artificial Sequence
  Description of Artificial Sequence: Synthetic oligonucleotide
  Antisense strand to SEQ ID NO: 145958
ucauuuaagcagcagugga

SEQ ID NO: 145960 - RNA, 19 nt, Artificial Sequence
  Description of Artificial Sequence: Synthetic oligonucleotide
  Sense strand starting at position 2309 of SEQ ID NO: 1872
aaaggucucagugaauggu

SEQ ID NO: 145961 - RNA, 19 nt, Artificial Sequence
  Description of Artificial Sequence: Synthetic oligonucleotide
  Antisense strand to SEQ ID NO: 145960
accauucacugagaccuuu

SEQ ID NO: 145962 - RNA, 19 nt, Artificial Sequence
  Description of Artificial Sequence: Synthetic oligonucleotide
  Sense strand starting at position 2263 of SEQ ID NO: 1872
uaaagagagcguuggcuuu

SEQ ID NO: 145963 - RNA, 19 nt, Artificial Sequence
  Description of Artificial Sequence: Synthetic oligonucleotide
  Antisense strand to SEQ ID NO: 145962
aaagccaacgcucucuuua

SEQ ID NO: 145964 - RNA, 19 nt, Artificial Sequence
  Description of Artificial Sequence: Synthetic oligonucleotide
  Sense strand starting at position 2243 of SEQ ID NO: 1872
ggucgcgagccauugugaa

SEQ ID NO: 145965 - RNA, 19 nt, Artificial Sequence
  Description of Artificial Sequence: Synthetic oligonucleotide
  Antisense strand to SEQ ID NO: 145964
uucacaauggcucgcgacc

SEQ ID NO: 145966 - RNA, 19 nt, Artificial Sequence
  Description of Artificial Sequence: Synthetic oligonucleotide
  Sense strand starting at position 2219 of SEQ ID NO: 1872
caccaaagagcuuggaagu

SEQ ID NO: 145967 - RNA, 19 nt, Artificial Sequence
  Description of Artificial Sequence: Synthetic oligonucleotide
  Antisense strand to SEQ ID NO: 145966
acuuccaagcucuuuggug

SEQ ID NO: 145968 - RNA, 19 nt, Artificial Sequence
  Description of Artificial Sequence: Synthetic oligonucleotide
  Sense strand starting at position 2156 of SEQ ID NO: 1872
aagggacucugggaaauga

SEQ ID NO: 145969 - RNA, 19 nt, Artificial Sequence
  Description of Artificial Sequence: Synthetic oligonucleotide
  Antisense strand to SEQ ID NO: 145968
ucauuucccagagucccuu

SEQ ID NO: 145970 - RNA, 19 nt, Artificial Sequence
  Description of Artificial Sequence: Synthetic oligonucleotide
  Sense strand starting at position 2017 of SEQ ID NO: 1872
uggaucuaaucagugaaug

SEQ ID NO: 145971 - RNA, 19 nt, Artificial Sequence
  Description of Artificial Sequence: Synthetic oligonucleotide
  Antisense strand to SEQ ID NO: 145970
cauucacugauuagaucca

SEQ ID NO: 145972 - RNA, 19 nt, Artificial Sequence
  Description of Artificial Sequence: Synthetic oligonucleotide
  Sense strand starting at position 2015 of SEQ ID NO: 1872
gcuggaucuaaucagugaa

SEQ ID NO: 145973 - RNA, 19 nt, Artificial Sequence
  Description of Artificial Sequence: Synthetic oligonucleotide
  Antisense strand to SEQ ID NO: 145972
uucacugauuagauccagc

SEQ ID NO: 145974 - RNA, 19 nt, Artificial Sequence
  Description of Artificial Sequence: Synthetic oligonucleotide
  Sense strand starting at position 1754 of SEQ ID NO: 1872
cauacuugccguggaaauu

SEQ ID NO: 145975 - RNA, 19 nt, Artificial Sequence
  Description of Artificial Sequence: Synthetic oligonucleotide
  Antisense strand to SEQ ID NO: 145974
aauuuccacggcaaguaug

SEQ ID NO: 145976 - RNA, 19 nt, Artificial Sequence
  Description of Artificial Sequence: Synthetic oligonucleotide
  Sense strand starting at position 1753 of SEQ ID NO: 1872
ccauacuugccguggaaau

SEQ ID NO: 145977 - RNA, 19 nt, Artificial Sequence
  Description of Artificial Sequence: Synthetic oligonucleotide
  Antisense strand to SEQ ID NO: 145976
auuuccacggcaaguaugg

SEQ ID NO: 145978 - RNA, 19 nt, Artificial Sequence
  Description of Artificial Sequence: Synthetic oligonucleotide
  Sense strand starting at position 1665 of SEQ ID NO: 1872
gaaaguuagccagguuccu

SEQ ID NO: 145979 - RNA, 19 nt, Artificial Sequence
  Description of Artificial Sequence: Synthetic oligonucleotide
  Antisense strand to SEQ ID NO: 145978
aggaaccuggcuaacuuuc

SEQ ID NO: 145980 - RNA, 19 nt, Artificial Sequence
  Description of Artificial Sequence: Synthetic oligonucleotide
  Sense strand starting at position 1662 of SEQ ID NO: 1872
ccggaaaguuagccagguu

SEQ ID NO: 145981 - RNA, 19 nt, Artificial Sequence
  Description of Artificial Sequence: Synthetic oligonucleotide
  Antisense strand to SEQ ID NO: 145980
aaccuggcuaacuuuccgg

SEQ ID NO: 145982 - RNA, 19 nt, Artificial Sequence
  Description of Artificial Sequence: Synthetic oligonucleotide
  Sense strand starting at position 1343 of SEQ ID NO: 1872
cgauaucgacccgaacaaa

SEQ ID NO: 145983 - RNA, 19 nt, Artificial Sequence
  Description of Artificial Sequence: Synthetic oligonucleotide
  Antisense strand to SEQ ID NO: 145982
uuuguucgggucgauaucg

SEQ ID NO: 145984 - RNA, 19 nt, Artificial Sequence
  Description of Artificial Sequence: Synthetic oligonucleotide
  Sense strand starting at position 1342 of SEQ ID NO: 1872
ucgauaucgacccgaacaa

SEQ ID NO: 145985 - RNA, 19 nt, Artificial Sequence
  Description of Artificial Sequence: Synthetic oligonucleotide
  Antisense strand to SEQ ID NO: 145984
uuguucgggucgauaucga

SEQ ID NO: 145986 - RNA, 19 nt, Artificial Sequence
  Description of Artificial Sequence: Synthetic oligonucleotide
  Sense strand starting at position 1334 of SEQ ID NO: 1872
aggcauucucgauaucgac

SEQ ID NO: 145987 - RNA, 19 nt, Artificial Sequence
  Description of Artificial Sequence: Synthetic oligonucleotide
  Antisense strand to SEQ ID NO: 145986
gucgauaucgagaaugccu

SEQ ID NO: 145988 - RNA, 19 nt, Artificial Sequence
  Description of Artificial Sequence: Synthetic oligonucleotide
  Sense strand starting at position 1180 of SEQ ID NO: 1872
gguaguuucucauucggcu

SEQ ID NO: 145989 - RNA, 19 nt, Artificial Sequence
  Description of Artificial Sequence: Synthetic oligonucleotide
  Antisense strand to SEQ ID NO: 145988
agccgaaugagaaacuacc

SEQ ID NO: 145990 - RNA, 19 nt, Artificial Sequence
  Description of Artificial Sequence: Synthetic oligonucleotide
  Sense strand starting at position 805 of SEQ ID NO: 1872
caaguagaguagucaagua

SEQ ID NO: 145991 - RNA, 19 nt, Artificial Sequence
  Description of Artificial Sequence: Synthetic oligonucleotide
  Antisense strand to SEQ ID NO: 145990
uacuugacuacucuacuug

SEQ ID NO: 145992 - RNA, 19 nt, Artificial Sequence
  Description of Artificial Sequence: Synthetic oligonucleotide
  Sense strand starting at position 802 of SEQ ID NO: 1872
cuacaaguagaguagucaa

SEQ ID NO: 145993 - RNA, 19 nt, Artificial Sequence
  Description of Artificial Sequence: Synthetic oligonucleotide
  Antisense strand to SEQ ID NO: 145992
uugacuacucuacuuguag

SEQ ID NO: 145994 - RNA, 19 nt, Artificial Sequence
  Description of Artificial Sequence: Synthetic oligonucleotide
  Sense strand starting at position 757 of SEQ ID NO: 1872
agaaauuguuacucaguuu

SEQ ID NO: 145995 - RNA, 19 nt, Artificial Sequence
  Description of Artificial Sequence: Synthetic oligonucleotide
  Antisense strand to SEQ ID NO: 145994
aaacugaguaacaauuucu

SEQ ID NO: 145996 - RNA, 19 nt, Artificial Sequence
  Description of Artificial Sequence: Synthetic oligonucleotide
  Sense strand starting at position 756 of SEQ ID NO: 1872
gagaaauuguuacucaguu

SEQ ID NO: 145997 - RNA, 19 nt, Artificial Sequence
  Description of Artificial Sequence: Synthetic oligonucleotide
  Antisense strand to SEQ ID NO: 145996
aacugaguaacaauuucuc

SEQ ID NO: 145998 - RNA, 19 nt, Artificial Sequence
  Description of Artificial Sequence: Synthetic oligonucleotide
  Sense strand starting at position 754 of SEQ ID NO: 1872
aagagaaauuguuacucag

SEQ ID NO: 145999 - RNA, 19 nt, Artificial Sequence
  Description of Artificial Sequence: Synthetic oligonucleotide
  Antisense strand to SEQ ID NO: 145998
cugaguaacaauuucucuu

SEQ ID NO: 146000 - RNA, 19 nt, Artificial Sequence
  Description of Artificial Sequence: Synthetic oligonucleotide
  Sense strand starting at position 741 of SEQ ID NO: 1872
guucuuaagucagaagaga

SEQ ID NO: 146001 - RNA, 19 nt, Artificial Sequence
  Description of Artificial Sequence: Synthetic oligonucleotide
  Antisense strand to SEQ ID NO: 146000
ucucuucugacuuaagaac

SEQ ID NO: 146002 - RNA, 19 nt, Artificial Sequence
  Description of Artificial Sequence: Synthetic oligonucleotide
  Sense strand starting at position 643 of SEQ ID NO: 1872
cuggguuccgggcagagaa

SEQ ID NO: 146003 - RNA, 19 nt, Artificial Sequence
  Description of Artificial Sequence: Synthetic oligonucleotide
  Antisense strand to SEQ ID NO: 146002
uucucugcccggaacccag

SEQ ID NO: 146004 - RNA, 19 nt, Artificial Sequence
  Description of Artificial Sequence: Synthetic oligonucleotide
  Sense strand starting at position 507 of SEQ ID NO: 1872
uguugugcccuggaagaaa

SEQ ID NO: 146005 - RNA, 19 nt, Artificial Sequence
  Description of Artificial Sequence: Synthetic oligonucleotide
  Antisense strand to SEQ ID NO: 146004
uuucuuccagggcacaaca

SEQ ID NO: 146006 - RNA, 19 nt, Artificial Sequence
  Description of Artificial Sequence: Synthetic oligonucleotide
  Sense strand starting at position 505 of SEQ ID NO: 1872
uuuguugugcccuggaaga

SEQ ID NO: 146007 - RNA, 19 nt, Artificial Sequence
  Description of Artificial Sequence: Synthetic oligonucleotide
  Antisense strand to SEQ ID NO: 146006
ucuuccagggcacaacaaa

SEQ ID NO: 146008 - RNA, 19 nt, Artificial Sequence
  Description of Artificial Sequence: Synthetic oligonucleotide
  Sense strand starting at position 52 of SEQ ID NO: 1873
aggagagcuccuugggugu

SEQ ID NO: 146009 - RNA, 19 nt, Artificial Sequence
  Description of Artificial Sequence: Synthetic oligonucleotide
  Antisense strand to SEQ ID NO: 146008
acacccaaggagcucuccu

SEQ ID NO: 146010 - RNA, 19 nt, Artificial Sequence
  Description of Artificial Sequence: Synthetic oligonucleotide
  Sense strand starting at position 80 of SEQ ID NO: 1873
guugucauagccugagaaa

SEQ ID NO: 146011 - RNA, 19 nt, Artificial Sequence
  Description of Artificial Sequence: Synthetic oligonucleotide
  Antisense strand to SEQ ID NO: 146010
uuucucaggcuaugacaac

SEQ ID NO: 146012 - RNA, 19 nt, Artificial Sequence
  Description of Artificial Sequence: Synthetic oligonucleotide
  Sense strand starting at position 81 of SEQ ID NO: 1873
uugucauagccugagaaac

SEQ ID NO: 146013 - RNA, 19 nt, Artificial Sequence
  Description of Artificial Sequence: Synthetic oligonucleotide
  Antisense strand to SEQ ID NO: 146012
guuucucaggcuaugacaa

SEQ ID NO: 146014 - RNA, 19 nt, Artificial Sequence
  Description of Artificial Sequence: Synthetic oligonucleotide
  Sense strand starting at position 253 of SEQ ID NO: 1873
acgacaugucucugagcug

SEQ ID NO: 146015 - RNA, 19 nt, Artificial Sequence
  Description of Artificial Sequence: Synthetic oligonucleotide
  Antisense strand to SEQ ID NO: 146014
cagcucagagacaugucgu

SEQ ID NO: 146016 - RNA, 19 nt, Artificial Sequence
  Description of Artificial Sequence: Synthetic oligonucleotide
  Sense strand starting at position 254 of SEQ ID NO: 1873
cgacaugucucugagcugu

SEQ ID NO: 146017 - RNA, 19 nt, Artificial Sequence
  Description of Artificial Sequence: Synthetic oligonucleotide
  Antisense strand to SEQ ID NO: 146016
acagcucagagacaugucg

SEQ ID NO: 146018 - RNA, 19 nt, Artificial Sequence
  Description of Artificial Sequence: Synthetic oligonucleotide
  Sense strand starting at position 601 of SEQ ID NO: 1873
cagaaauaauggugaggau

SEQ ID NO: 146019 - RNA, 19 nt, Artificial Sequence
  Description of Artificial Sequence: Synthetic oligonucleotide
  Antisense strand to SEQ ID NO: 146018
auccucaccauuauuucug

SEQ ID NO: 146020 - RNA, 19 nt, Artificial Sequence
  Description of Artificial Sequence: Synthetic oligonucleotide
  Sense strand starting at position 629 of SEQ ID NO: 1873
cacagucgucacuguuuau

SEQ ID NO: 146021 - RNA, 19 nt, Artificial Sequence
  Description of Artificial Sequence: Synthetic oligonucleotide
  Antisense strand to SEQ ID NO: 146020
auaaacagugacgacugug

SEQ ID NO: 146022 - RNA, 19 nt, Artificial Sequence
  Description of Artificial Sequence: Synthetic oligonucleotide
  Sense strand starting at position 810 of SEQ ID NO: 1873
agucaagugaagugaguuu

SEQ ID NO: 146023 - RNA, 19 nt, Artificial Sequence
  Description of Artificial Sequence: Synthetic oligonucleotide
  Antisense strand to SEQ ID NO: 146022
aaacucacuucacuugacu

SEQ ID NO: 146024 - RNA, 19 nt, Artificial Sequence
  Description of Artificial Sequence: Synthetic oligonucleotide
  Sense strand starting at position 817 of SEQ ID NO: 1873
ugaagugaguuugaacuca

SEQ ID NO: 146025 - RNA, 19 nt, Artificial Sequence
  Description of Artificial Sequence: Synthetic oligonucleotide
  Antisense strand to SEQ ID NO: 146024
ugaguucaaacucacuuca

SEQ ID NO: 146026 - RNA, 19 nt, Artificial Sequence
  Description of Artificial Sequence: Synthetic oligonucleotide
  Sense strand starting at position 871 of SEQ ID NO: 1873
gccugauuuguaggcagcu

SEQ ID NO: 146027 - RNA, 19 nt, Artificial Sequence
  Description of Artificial Sequence: Synthetic oligonucleotide
  Antisense strand to SEQ ID NO: 146026
agcugccuacaaaucaggc

SEQ ID NO: 146028 - RNA, 19 nt, Artificial Sequence
  Description of Artificial Sequence: Synthetic oligonucleotide
  Sense strand starting at position 872 of SEQ ID NO: 1873
ccugauuuguaggcagcua

SEQ ID NO: 146029 - RNA, 19 nt, Artificial Sequence
  Description of Artificial Sequence: Synthetic oligonucleotide
  Antisense strand to SEQ ID NO: 146028
uagcugccuacaaaucagg

SEQ ID NO: 146030 - RNA, 19 nt, Artificial Sequence
  Description of Artificial Sequence: Synthetic oligonucleotide
  Sense strand starting at position 1171 of SEQ ID NO: 1873
ggguguuucuucucccuga

SEQ ID NO: 146031 - RNA, 19 nt, Artificial Sequence
  Description of Artificial Sequence: Synthetic oligonucleotide
  Antisense strand to SEQ ID NO: 146030
ucagggagaagaaacaccc

SEQ ID NO: 146032 - RNA, 19 nt, Artificial Sequence
  Description of Artificial Sequence: Synthetic oligonucleotide
  Sense strand starting at position 1175 of SEQ ID NO: 1873
guuucuucucccugaccca

SEQ ID NO: 146033 - RNA, 19 nt, Artificial Sequence
  Description of Artificial Sequence: Synthetic oligonucleotide
  Antisense strand to SEQ ID NO: 146032
ugggucagggagaagaaac

SEQ ID NO: 146034 - RNA, 19 nt, Artificial Sequence
  Description of Artificial Sequence: Synthetic oligonucleotide
  Sense strand starting at position 1435 of SEQ ID NO: 1873
agaagugacuccuggcacu

SEQ ID NO: 146035 - RNA, 19 nt, Artificial Sequence
  Description of Artificial Sequence: Synthetic oligonucleotide
  Antisense strand to SEQ ID NO: 146034
agugccaggagucacuucu

SEQ ID NO: 146036 - RNA, 19 nt, Artificial Sequence
  Description of Artificial Sequence: Synthetic oligonucleotide
  Sense strand starting at position 1912 of SEQ ID NO: 1873
uucugcucuguccaagaca

SEQ ID NO: 146037 - RNA, 19 nt, Artificial Sequence
  Description of Artificial Sequence: Synthetic oligonucleotide
  Antisense strand to SEQ ID NO: 146036
ugucuuggacagagcagaa

SEQ ID NO: 146038 - RNA, 19 nt, Artificial Sequence
  Description of Artificial Sequence: Synthetic oligonucleotide
  Sense strand starting at position 2188 of SEQ ID NO: 1873
gggugugugcuuggacaaa

SEQ ID NO: 146039 - RNA, 19 nt, Artificial Sequence
  Description of Artificial Sequence: Synthetic oligonucleotide
  Antisense strand to SEQ ID NO: 146038
uuuguccaagcacacaccc

SEQ ID NO: 146040 - RNA, 19 nt, Artificial Sequence
  Description of Artificial Sequence: Synthetic oligonucleotide
  Sense strand starting at position 2691 of SEQ ID NO: 1873
acaggacuggucugugcaa

SEQ ID NO: 146041 - RNA, 19 nt, Artificial Sequence
  Description of Artificial Sequence: Synthetic oligonucleotide
  Antisense strand to SEQ ID NO: 146040
uugcacagaccaguccugu

SEQ ID NO: 146042 - RNA, 19 nt, Artificial Sequence
  Description of Artificial Sequence: Synthetic oligonucleotide
  Sense strand starting at position 2692 of SEQ ID NO: 1873
caggacuggucugugcaaa

SEQ ID NO: 146043 - RNA, 19 nt, Artificial Sequence
  Description of Artificial Sequence: Synthetic oligonucleotide
  Antisense strand to SEQ ID NO: 146042
uuugcacagaccaguccug

SEQ ID NO: 146044 - RNA, 19 nt, Artificial Sequence
  Description of Artificial Sequence: Synthetic oligonucleotide
  Sense strand starting at position 2693 of SEQ ID NO: 1873
aggacuggucugugcaaag

SEQ ID NO: 146045 - RNA, 19 nt, Artificial Sequence
  Description of Artificial Sequence: Synthetic oligonucleotide
  Antisense strand to SEQ ID NO: 146044
cuuugcacagaccaguccu

SEQ ID NO: 146046 - RNA, 19 nt, Artificial Sequence
  Description of Artificial Sequence: Synthetic oligonucleotide
  Sense strand starting at position 2766 of SEQ ID NO: 1873
ggaggaugugugggucuca

SEQ ID NO: 146047 - RNA, 19 nt, Artificial Sequence
  Description of Artificial Sequence: Synthetic oligonucleotide
  Antisense strand to SEQ ID NO: 146046
ugagacccacacauccucc

SEQ ID NO: 146048 - RNA, 19 nt, Artificial Sequence
  Description of Artificial Sequence: Synthetic oligonucleotide
  Sense strand starting at position 3929 of SEQ ID NO: 1874
agucaugggacaugcagau

SEQ ID NO: 146049 - RNA, 19 nt, Artificial Sequence
  Description of Artificial Sequence: Synthetic oligonucleotide
  Antisense strand to SEQ ID NO: 146048
aucugcaugucccaugacu

SEQ ID NO: 146050 - RNA, 19 nt, Artificial Sequence
  Description of Artificial Sequence: Synthetic oligonucleotide
  Sense strand starting at position 3909 of SEQ ID NO: 1874
uagaauugugcccauaaug

SEQ ID NO: 146051 - RNA, 19 nt, Artificial Sequence
  Description of Artificial Sequence: Synthetic oligonucleotide
  Antisense strand to SEQ ID NO: 146050
cauuaugggcacaauucua

SEQ ID NO: 146052 - RNA, 19 nt, Artificial Sequence
  Description of Artificial Sequence: Synthetic oligonucleotide
  Sense strand starting at position 3908 of SEQ ID NO: 1874
auagaauugugcccauaau

SEQ ID NO: 146053 - RNA, 19 nt, Artificial Sequence
  Description of Artificial Sequence: Synthetic oligonucleotide
  Antisense strand to SEQ ID NO: 146052
auuaugggcacaauucuau

SEQ ID NO: 146054 - RNA, 19 nt, Artificial Sequence
  Description of Artificial Sequence: Synthetic oligonucleotide
  Sense strand starting at position 3859 of SEQ ID NO: 1874
ggcaucaaccuauauggua

SEQ ID NO: 146055 - RNA, 19 nt, Artificial Sequence
  Description of Artificial Sequence: Synthetic oligonucleotide
  Antisense strand to SEQ ID NO: 146054
uaccauauagguugaugcc

SEQ ID NO: 146056 - RNA, 19 nt, Artificial Sequence
  Description of Artificial Sequence: Synthetic oligonucleotide
  Sense strand starting at position 3852 of SEQ ID NO: 1874
gagguauggcaucaaccua

SEQ ID NO: 146057 - RNA, 19 nt, Artificial Sequence
  Description of Artificial Sequence: Synthetic oligonucleotide
  Antisense strand to SEQ ID NO: 146056
uagguugaugccauaccuc

SEQ ID NO: 146058 - RNA, 19 nt, Artificial Sequence
  Description of Artificial Sequence: Synthetic oligonucleotide
  Sense strand starting at position 3840 of SEQ ID NO: 1874
aaagguuaccacgagguau

SEQ ID NO: 146059 - RNA, 19 nt, Artificial Sequence
  Description of Artificial Sequence: Synthetic oligonucleotide
  Antisense strand to SEQ ID NO: 146058
auaccucgugguaaccuuu

SEQ ID NO: 146060 - RNA, 19 nt, Artificial Sequence
  Description of Artificial Sequence: Synthetic oligonucleotide
  Sense strand starting at position 3729 of SEQ ID NO: 1874
gaaacuguagugggacauu

SEQ ID NO: 146061 - RNA, 19 nt, Artificial Sequence
  Description of Artificial Sequence: Synthetic oligonucleotide
  Antisense strand to SEQ ID NO: 146060
aaugucccacuacaguuuc

SEQ ID NO: 146062 - RNA, 19 nt, Artificial Sequence
  Description of Artificial Sequence: Synthetic oligonucleotide
  Sense strand starting at position 3713 of SEQ ID NO: 1874
aaguauagcuagguuagaa

SEQ ID NO: 146063 - RNA, 19 nt, Artificial Sequence
  Description of Artificial Sequence: Synthetic oligonucleotide
  Antisense strand to SEQ ID NO: 146062
uucuaaccuagcuauacuu

SEQ ID NO: 146064 - RNA, 19 nt, Artificial Sequence
  Description of Artificial Sequence: Synthetic oligonucleotide
  Sense strand starting at position 3654 of SEQ ID NO: 1874
gcuagauauuauccaucug

SEQ ID NO: 146065 - RNA, 19 nt, Artificial Sequence
  Description of Artificial Sequence: Synthetic oligonucleotide
  Antisense strand to SEQ ID NO: 146064
cagauggauaauaucuagc

SEQ ID NO: 146066 - RNA, 19 nt, Artificial Sequence
  Description of Artificial Sequence: Synthetic oligonucleotide
  Sense strand starting at position 3646 of SEQ ID NO: 1874
uggcuuaagcuagauauua

SEQ ID NO: 146067 - RNA, 19 nt, Artificial Sequence
  Description of Artificial Sequence: Synthetic oligonucleotide
  Antisense strand to SEQ ID NO: 146066
uaauaucuagcuuaagcca

SEQ ID NO: 146068 - RNA, 19 nt, Artificial Sequence
  Description of Artificial Sequence: Synthetic oligonucleotide
  Sense strand starting at position 3593 of SEQ ID NO: 1874
uugauaggaacuugcagau

SEQ ID NO: 146069 - RNA, 19 nt, Artificial Sequence
  Description of Artificial Sequence: Synthetic oligonucleotide
  Antisense strand to SEQ ID NO: 146068
aucugcaaguuccuaucaa

SEQ ID NO: 146070 - RNA, 19 nt, Artificial Sequence
  Description of Artificial Sequence: Synthetic oligonucleotide
  Sense strand starting at position 3565 of SEQ ID NO: 1874
cuggaauugagauacguuu

SEQ ID NO: 146071 - RNA, 19 nt, Artificial Sequence
  Description of Artificial Sequence: Synthetic oligonucleotide
  Antisense strand to SEQ ID NO: 146070
aaacguaucucaauuccag

SEQ ID NO: 146072 - RNA, 19 nt, Artificial Sequence
  Description of Artificial Sequence: Synthetic oligonucleotide
  Sense strand starting at position 3527 of SEQ ID NO: 1874
cauaauaguuuggugaaag

SEQ ID NO: 146073 - RNA, 19 nt, Artificial Sequence
  Description of Artificial Sequence: Synthetic oligonucleotide
  Antisense strand to SEQ ID NO: 146072
cuuucaccaaacuauuaug

SEQ ID NO: 146074 - RNA, 19 nt, Artificial Sequence
  Description of Artificial Sequence: Synthetic oligonucleotide
  Sense strand starting at position 3525 of SEQ ID NO: 1874
accauaauaguuuggugaa

SEQ ID NO: 146075 - RNA, 19 nt, Artificial Sequence
  Description of Artificial Sequence: Synthetic oligonucleotide
  Antisense strand to SEQ ID NO: 146074
uucaccaaacuauuauggu

SEQ ID NO: 146076 - RNA, 19 nt, Artificial Sequence
  Description of Artificial Sequence: Synthetic oligonucleotide
  Sense strand starting at position 3499 of SEQ ID NO: 1874
acuguagaagucuggagaa

SEQ ID NO: 146077 - RNA, 19 nt, Artificial Sequence
  Description of Artificial Sequence: Synthetic oligonucleotide
  Antisense strand to SEQ ID NO: 146076
uucuccagacuucuacagu

SEQ ID NO: 146078 - RNA, 19 nt, Artificial Sequence
  Description of Artificial Sequence: Synthetic oligonucleotide
  Sense strand starting at position 3429 of SEQ ID NO: 1874
aucaaaguuuagguaugaa

SEQ ID NO: 146079 - RNA, 19 nt, Artificial Sequence
  Description of Artificial Sequence: Synthetic oligonucleotide
  Antisense strand to SEQ ID NO: 146078
uucauaccuaaacuuugau

SEQ ID NO: 146080 - RNA, 19 nt, Artificial Sequence
  Description of Artificial Sequence: Synthetic oligonucleotide
  Sense strand starting at position 3341 of SEQ ID NO: 1874
cgcuguagauuuguuagga

SEQ ID NO: 146081 - RNA, 19 nt, Artificial Sequence
  Description of Artificial Sequence: Synthetic oligonucleotide
  Antisense strand to SEQ ID NO: 146080
uccuaacaaaucuacagcg

SEQ ID NO: 146082 - RNA, 19 nt, Artificial Sequence
  Description of Artificial Sequence: Synthetic oligonucleotide
  Sense strand starting at position 3244 of SEQ ID NO: 1874
agagacagauauuaaugaa

SEQ ID NO: 146083 - RNA, 19 nt, Artificial Sequence
  Description of Artificial Sequence: Synthetic oligonucleotide
  Antisense strand to SEQ ID NO: 146082
uucauuaauaucugucucu

SEQ ID NO: 146084 - RNA, 19 nt, Artificial Sequence
  Description of Artificial Sequence: Synthetic oligonucleotide
  Sense strand starting at position 3068 of SEQ ID NO: 1874
cagagagggccuugaggau

SEQ ID NO: 146085 - RNA, 19 nt, Artificial Sequence
  Description of Artificial Sequence: Synthetic oligonucleotide
  Antisense strand to SEQ ID NO: 146084
auccucaaggcccucucug

SEQ ID NO: 146086 - RNA, 19 nt, Artificial Sequence
  Description of Artificial Sequence: Synthetic oligonucleotide
  Sense strand starting at position 2887 of SEQ ID NO: 1874
agcugaggacacugaugua

SEQ ID NO: 146087 - RNA, 19 nt, Artificial Sequence
  Description of Artificial Sequence: Synthetic oligonucleotide
  Antisense strand to SEQ ID NO: 146086
uacaucaguguccucagcu

SEQ ID NO: 146088 - RNA, 19 nt, Artificial Sequence
  Description of Artificial Sequence: Synthetic oligonucleotide
  Sense strand starting at position 2551 of SEQ ID NO: 1874
ggaaauaccggguauguuc

SEQ ID NO: 146089 - RNA, 19 nt, Artificial Sequence
  Description of Artificial Sequence: Synthetic oligonucleotide
  Antisense strand to SEQ ID NO: 146088
gaacauacccgguauuucc

SEQ ID NO: 146090 - RNA, 19 nt, Artificial Sequence
  Description of Artificial Sequence: Synthetic oligonucleotide
  Sense strand starting at position 2538 of SEQ ID NO: 1874
agaacuuggguguggaaau

SEQ ID NO: 146091 - RNA, 19 nt, Artificial Sequence
  Description of Artificial Sequence: Synthetic oligonucleotide
  Antisense strand to SEQ ID NO: 146090
auuuccacacccaaguucu

SEQ ID NO: 146092 - RNA, 19 nt, Artificial Sequence
  Description of Artificial Sequence: Synthetic oligonucleotide
  Sense strand starting at position 2536 of SEQ ID NO: 1874
ggagaacuuggguguggaa

SEQ ID NO: 146093 - RNA, 19 nt, Artificial Sequence
  Description of Artificial Sequence: Synthetic oligonucleotide
  Antisense strand to SEQ ID NO: 146092
uuccacacccaaguucucc

SEQ ID NO: 146094 - RNA, 19 nt, Artificial Sequence
  Description of Artificial Sequence: Synthetic oligonucleotide
  Sense strand starting at position 2512 of SEQ ID NO: 1874
gugaauuggccugaauagc

SEQ ID NO: 146095 - RNA, 19 nt, Artificial Sequence
  Description of Artificial Sequence: Synthetic oligonucleotide
  Antisense strand to SEQ ID NO: 146094
gcuauucaggccaauucac

SEQ ID NO: 146096 - RNA, 19 nt, Artificial Sequence
  Description of Artificial Sequence: Synthetic oligonucleotide
  Sense strand starting at position 2511 of SEQ ID NO: 1874
agugaauuggccugaauag

SEQ ID NO: 146097 - RNA, 19 nt, Artificial Sequence
  Description of Artificial Sequence: Synthetic oligonucleotide
  Antisense strand to SEQ ID NO: 146096
cuauucaggccaauucacu

SEQ ID NO: 146098 - RNA, 19 nt, Artificial Sequence
  Description of Artificial Sequence: Synthetic oligonucleotide
  Sense strand starting at position 2508 of SEQ ID NO: 1874
gaaagugaauuggccugaa

SEQ ID NO: 146099 - RNA, 19 nt, Artificial Sequence
  Description of Artificial Sequence: Synthetic oligonucleotide
  Antisense strand to SEQ ID NO: 146098
uucaggccaauucacuuuc

SEQ ID NO: 146100 - RNA, 19 nt, Artificial Sequence
  Description of Artificial Sequence: Synthetic oligonucleotide
  Sense strand starting at position 2493 of SEQ ID NO: 1874
aaucccuggccuugggaaa

SEQ ID NO: 146101 - RNA, 19 nt, Artificial Sequence
  Description of Artificial Sequence: Synthetic oligonucleotide
  Antisense strand to SEQ ID NO: 146100
uuucccaaggccagggauu

SEQ ID NO: 146102 - RNA, 19 nt, Artificial Sequence
  Description of Artificial Sequence: Synthetic oligonucleotide
  Sense strand starting at position 2088 of SEQ ID NO: 1874
cgcggugcuaaugauuuaa

SEQ ID NO: 146103 - RNA, 19 nt, Artificial Sequence
  Description of Artificial Sequence: Synthetic oligonucleotide
  Antisense strand to SEQ ID NO: 146102
uuaaaucauuagcaccgcg

SEQ ID NO: 146104 - RNA, 19 nt, Artificial Sequence
  Description of Artificial Sequence: Synthetic oligonucleotide
  Sense strand starting at position 2085 of SEQ ID NO: 1874
gggcgcggugcuaaugauu

SEQ ID NO: 146105 - RNA, 19 nt, Artificial Sequence
  Description of Artificial Sequence: Synthetic oligonucleotide
  Antisense strand to SEQ ID NO: 146104
aaucauuagcaccgcgccc

SEQ ID NO: 146106 - RNA, 19 nt, Artificial Sequence
  Description of Artificial Sequence: Synthetic oligonucleotide
  Sense strand starting at position 1506 of SEQ ID NO: 1874
cagacucgagccgauuaaa

SEQ ID NO: 146107 - RNA, 19 nt, Artificial Sequence
  Description of Artificial Sequence: Synthetic oligonucleotide
  Antisense strand to SEQ ID NO: 146106
uuuaaucggcucgagucug

SEQ ID NO: 146108 - RNA, 19 nt, Artificial Sequence
  Description of Artificial Sequence: Synthetic oligonucleotide
  Sense strand starting at position 1492 of SEQ ID NO: 1874
ugcuaugacuaauccagac

SEQ ID NO: 146109 - RNA, 19 nt, Artificial Sequence
  Description of Artificial Sequence: Synthetic oligonucleotide
  Antisense strand to SEQ ID NO: 146108
gucuggauuagucauagca

SEQ ID NO: 146110 - RNA, 19 nt, Artificial Sequence
  Description of Artificial Sequence: Synthetic oligonucleotide
  Sense strand starting at position 1458 of SEQ ID NO: 1874
cugcuuugucguucucacu

SEQ ID NO: 146111 - RNA, 19 nt, Artificial Sequence
  Description of Artificial Sequence: Synthetic oligonucleotide
  Antisense strand to SEQ ID NO: 146110
agugagaacgacaaagcag

SEQ ID NO: 146112 - RNA, 19 nt, Artificial Sequence
  Description of Artificial Sequence: Synthetic oligonucleotide
  Sense strand starting at position 1266 of SEQ ID NO: 1874
uguagcuucuccucuauuu

SEQ ID NO: 146113 - RNA, 19 nt, Artificial Sequence
  Description of Artificial Sequence: Synthetic oligonucleotide
  Antisense strand to SEQ ID NO: 146112
aaauagaggagaagcuaca

SEQ ID NO: 146114 - RNA, 19 nt, Artificial Sequence
  Description of Artificial Sequence: Synthetic oligonucleotide
  Sense strand starting at position 1137 of SEQ ID NO: 1874
uguaaauuccuacacaggu

SEQ ID NO: 146115 - RNA, 19 nt, Artificial Sequence
  Description of Artificial Sequence: Synthetic oligonucleotide
  Antisense strand to SEQ ID NO: 146114
accuguguaggaauuuaca

SEQ ID NO: 146116 - RNA, 19 nt, Artificial Sequence
  Description of Artificial Sequence: Synthetic oligonucleotide
  Sense strand starting at position 819 of SEQ ID NO: 1874
cuggucaaugcuuauuaaa

SEQ ID NO: 146117 - RNA, 19 nt, Artificial Sequence
  Description of Artificial Sequence: Synthetic oligonucleotide
  Antisense strand to SEQ ID NO: 146116
uuuaauaagcauugaccag

SEQ ID NO: 146118 - RNA, 19 nt, Artificial Sequence
  Description of Artificial Sequence: Synthetic oligonucleotide
  Sense strand starting at position 808 of SEQ ID NO: 1874
aaggaagagcucuggucaa

SEQ ID NO: 146119 - RNA, 19 nt, Artificial Sequence
  Description of Artificial Sequence: Synthetic oligonucleotide
  Antisense strand to SEQ ID NO: 146118
uugaccagagcucuuccuu

SEQ ID NO: 146120 - RNA, 19 nt, Artificial Sequence
  Description of Artificial Sequence: Synthetic oligonucleotide
  Sense strand starting at position 710 of SEQ ID NO: 1874
uguucaaugggagaagucu

SEQ ID NO: 146121 - RNA, 19 nt, Artificial Sequence
  Description of Artificial Sequence: Synthetic oligonucleotide
  Antisense strand to SEQ ID NO: 146120
agacuucucccauugaaca

SEQ ID NO: 146122 - RNA, 19 nt, Artificial Sequence
  Description of Artificial Sequence: Synthetic oligonucleotide
  Sense strand starting at position 436 of SEQ ID NO: 1874
uugagucagacuugagaug

SEQ ID NO: 146123 - RNA, 19 nt, Artificial Sequence
  Description of Artificial Sequence: Synthetic oligonucleotide
  Antisense strand to SEQ ID NO: 146122
caucucaagucugacucaa

SEQ ID NO: 146124 - RNA, 19 nt, Artificial Sequence
  Description of Artificial Sequence: Synthetic oligonucleotide
  Sense strand starting at position 336 of SEQ ID NO: 1874
aguggaguaaugugacaug

SEQ ID NO: 146125 - RNA, 19 nt, Artificial Sequence
  Description of Artificial Sequence: Synthetic oligonucleotide
  Antisense strand to SEQ ID NO: 146124
caugucacauuacuccacu

SEQ ID NO: 146126 - RNA, 19 nt, Artificial Sequence
  Description of Artificial Sequence: Synthetic oligonucleotide
  Sense strand starting at position 183 of SEQ ID NO: 1874
ugacaacuuuaaucgucaa

SEQ ID NO: 146127 - RNA, 19 nt, Artificial Sequence
  Description of Artificial Sequence: Synthetic oligonucleotide
  Antisense strand to SEQ ID NO: 146126
uugacgauuaaaguuguca

SEQ ID NO: 146128 - RNA, 19 nt, Artificial Sequence
  Description of Artificial Sequence: Synthetic oligonucleotide
  Sense strand starting at position 3922 of SEQ ID NO: 1875
gcaacauauguuggacauu

SEQ ID NO: 146129 - RNA, 19 nt, Artificial Sequence
  Description of Artificial Sequence: Synthetic oligonucleotide
  Antisense strand to SEQ ID NO: 146128
aauguccaacauauguugc

SEQ ID NO: 146130 - RNA, 19 nt, Artificial Sequence
  Description of Artificial Sequence: Synthetic oligonucleotide
  Sense strand starting at position 3914 of SEQ ID NO: 1875
cuuagaaugcaacauaugu

SEQ ID NO: 146131 - RNA, 19 nt, Artificial Sequence
  Description of Artificial Sequence: Synthetic oligonucleotide
  Antisense strand to SEQ ID NO: 146130
acauauguugcauucuaag

SEQ ID NO: 146132 - RNA, 19 nt, Artificial Sequence
  Description of Artificial Sequence: Synthetic oligonucleotide
  Sense strand starting at position 3779 of SEQ ID NO: 1875
guagauggccuguaauaac

SEQ ID NO: 146133 - RNA, 19 nt, Artificial Sequence
  Description of Artificial Sequence: Synthetic oligonucleotide
  Antisense strand to SEQ ID NO: 146132
guuauuacaggccaucuac

SEQ ID NO: 146134 - RNA, 19 nt, Artificial Sequence
  Description of Artificial Sequence: Synthetic oligonucleotide
  Sense strand starting at position 3766 of SEQ ID NO: 1875
ucagaacuggccuguagau

SEQ ID NO: 146135 - RNA, 19 nt, Artificial Sequence
  Description of Artificial Sequence: Synthetic oligonucleotide
  Antisense strand to SEQ ID NO: 146134
aucuacaggccaguucuga

SEQ ID NO: 146136 - RNA, 19 nt, Artificial Sequence
  Description of Artificial Sequence: Synthetic oligonucleotide
  Sense strand starting at position 3755 of SEQ ID NO: 1875
ucuaguuugccucagaacu

SEQ ID NO: 146137 - RNA, 19 nt, Artificial Sequence
  Description of Artificial Sequence: Synthetic oligonucleotide
  Antisense strand to SEQ ID NO: 146136
aguucugaggcaaacuaga

SEQ ID NO: 146138 - RNA, 19 nt, Artificial Sequence
  Description of Artificial Sequence: Synthetic oligonucleotide
  Sense strand starting at position 3688 of SEQ ID NO: 1875
uuacuucuuccugggaaua

SEQ ID NO: 146139 - RNA, 19 nt, Artificial Sequence
  Description of Artificial Sequence: Synthetic oligonucleotide
  Antisense strand to SEQ ID NO: 146138
uauucccaggaagaaguaa

SEQ ID NO: 146140 - RNA, 19 nt, Artificial Sequence
  Description of Artificial Sequence: Synthetic oligonucleotide
  Sense strand starting at position 3686 of SEQ ID NO: 1875
ccuuacuucuuccugggaa

SEQ ID NO: 146141 - RNA, 19 nt, Artificial Sequence
  Description of Artificial Sequence: Synthetic oligonucleotide
  Antisense strand to SEQ ID NO: 146140
uucccaggaagaaguaagg

SEQ ID NO: 146142 - RNA, 19 nt, Artificial Sequence
  Description of Artificial Sequence: Synthetic oligonucleotide
  Sense strand starting at position 3319 of SEQ ID NO: 1875
augucauccuuagcuaaag

SEQ ID NO: 146143 - RNA, 19 nt, Artificial Sequence
  Description of Artificial Sequence: Synthetic oligonucleotide
  Antisense strand to SEQ ID NO: 146142
cuuuagcuaaggaugacau

SEQ ID NO: 146144 - RNA, 19 nt, Artificial Sequence
  Description of Artificial Sequence: Synthetic oligonucleotide
  Sense strand starting at position 3317 of SEQ ID NO: 1875
ggaugucauccuuagcuaa

SEQ ID NO: 146145 - RNA, 19 nt, Artificial Sequence
  Description of Artificial Sequence: Synthetic oligonucleotide
  Antisense strand to SEQ ID NO: 146144
uuagcuaaggaugacaucc

SEQ ID NO: 146146 - RNA, 19 nt, Artificial Sequence
  Description of Artificial Sequence: Synthetic oligonucleotide
  Sense strand starting at position 3219 of SEQ ID NO: 1875
ccacgugcugcgcuugaua

SEQ ID NO: 146147 - RNA, 19 nt, Artificial Sequence
  Description of Artificial Sequence: Synthetic oligonucleotide
  Antisense strand to SEQ ID NO: 146146
uaucaagcgcagcacgugg

SEQ ID NO: 146148 - RNA, 19 nt, Artificial Sequence
  Description of Artificial Sequence: Synthetic oligonucleotide
  Sense strand starting at position 3130 of SEQ ID NO: 1875
gaauaaguccggcacaauu

SEQ ID NO: 146149 - RNA, 19 nt, Artificial Sequence
  Description of Artificial Sequence: Synthetic oligonucleotide
  Antisense strand to SEQ ID NO: 146148
aauugugccggacuuauuc

SEQ ID NO: 146150 - RNA, 19 nt, Artificial Sequence
  Description of Artificial Sequence: Synthetic oligonucleotide
  Sense strand starting at position 3017 of SEQ ID NO: 1875
auauuagacguugaauacu

SEQ ID NO: 146151 - RNA, 19 nt, Artificial Sequence
  Description of Artificial Sequence: Synthetic oligonucleotide
  Antisense strand to SEQ ID NO: 146150
aguauucaacgucuaauau

SEQ ID NO: 146152 - RNA, 19 nt, Artificial Sequence
  Description of Artificial Sequence: Synthetic oligonucleotide
  Sense strand starting at position 3016 of SEQ ID NO: 1875
cauauuagacguugaauac

SEQ ID NO: 146153 - RNA, 19 nt, Artificial Sequence
  Description of Artificial Sequence: Synthetic oligonucleotide
  Antisense strand to SEQ ID NO: 146152
guauucaacgucuaauaug

SEQ ID NO: 146154 - RNA, 19 nt, Artificial Sequence
  Description of Artificial Sequence: Synthetic oligonucleotide
  Sense strand starting at position 3013 of SEQ ID NO: 1875
guacauauuagacguugaa

SEQ ID NO: 146155 - RNA, 19 nt, Artificial Sequence
  Description of Artificial Sequence: Synthetic oligonucleotide
  Antisense strand to SEQ ID NO: 146154
uucaacgucuaauauguac

SEQ ID NO: 146156 - RNA, 19 nt, Artificial Sequence
  Description of Artificial Sequence: Synthetic oligonucleotide
  Sense strand starting at position 2906 of SEQ ID NO: 1875
gguagauaaugacuuuaau

SEQ ID NO: 146157 - RNA, 19 nt, Artificial Sequence
  Description of Artificial Sequence: Synthetic oligonucleotide
  Antisense strand to SEQ ID NO: 146156
auuaaagucauuaucuacc

SEQ ID NO: 146158 - RNA, 19 nt, Artificial Sequence
  Description of Artificial Sequence: Synthetic oligonucleotide
  Sense strand starting at position 2891 of SEQ ID NO: 1875
ugaaauaaugcuuauggua

SEQ ID NO: 146159 - RNA, 19 nt, Artificial Sequence
  Description of Artificial Sequence: Synthetic oligonucleotide
  Antisense strand to SEQ ID NO: 146158
uaccauaagcauuauuuca

SEQ ID NO: 146160 - RNA, 19 nt, Artificial Sequence
  Description of Artificial Sequence: Synthetic oligonucleotide
  Sense strand starting at position 2890 of SEQ ID NO: 1875
augaaauaaugcuuauggu

SEQ ID NO: 146161 - RNA, 19 nt, Artificial Sequence
  Description of Artificial Sequence: Synthetic oligonucleotide
  Antisense strand to SEQ ID NO: 146160
accauaagcauuauuucau

SEQ ID NO: 146162 - RNA, 19 nt, Artificial Sequence
  Description of Artificial Sequence: Synthetic oligonucleotide
  Sense strand starting at position 2845 of SEQ ID NO: 1875
cguucugugcuuccuaguu

SEQ ID NO: 146163 - RNA, 19 nt, Artificial Sequence
  Description of Artificial Sequence: Synthetic oligonucleotide
  Antisense strand to SEQ ID NO: 146162
aacuaggaagcacagaacg

SEQ ID NO: 146164 - RNA, 19 nt, Artificial Sequence
  Description of Artificial Sequence: Synthetic oligonucleotide
  Sense strand starting at position 2831 of SEQ ID NO: 1875
gggaaauaguauuccguuc

SEQ ID NO: 146165 - RNA, 19 nt, Artificial Sequence
  Description of Artificial Sequence: Synthetic oligonucleotide
  Antisense strand to SEQ ID NO: 146164
gaacggaauacuauuuccc

SEQ ID NO: 146166 - RNA, 19 nt, Artificial Sequence
  Description of Artificial Sequence: Synthetic oligonucleotide
  Sense strand starting at position 2748 of SEQ ID NO: 1875
ggagcuaaucaaugaugau

SEQ ID NO: 146167 - RNA, 19 nt, Artificial Sequence
  Description of Artificial Sequence: Synthetic oligonucleotide
  Antisense strand to SEQ ID NO: 146166
aucaucauugauuagcucc

SEQ ID NO: 146168 - RNA, 19 nt, Artificial Sequence
  Description of Artificial Sequence: Synthetic oligonucleotide
  Sense strand starting at position 2668 of SEQ ID NO: 1875
cuuauugagcuaggguauu

SEQ ID NO: 146169 - RNA, 19 nt, Artificial Sequence
  Description of Artificial Sequence: Synthetic oligonucleotide
  Antisense strand to SEQ ID NO: 146168
aauacccuagcucaauaag

SEQ ID NO: 146170 - RNA, 19 nt, Artificial Sequence
  Description of Artificial Sequence: Synthetic oligonucleotide
  Sense strand starting at position 2464 of SEQ ID NO: 1875
agguaaccugucuaacaca

SEQ ID NO: 146171 - RNA, 19 nt, Artificial Sequence
  Description of Artificial Sequence: Synthetic oligonucleotide
  Antisense strand to SEQ ID NO: 146170
uguguuagacagguuaccu

SEQ ID NO: 146172 - RNA, 19 nt, Artificial Sequence
  Description of Artificial Sequence: Synthetic oligonucleotide
  Sense strand starting at position 2430 of SEQ ID NO: 1875
uguguaucucacgaaguaa

SEQ ID NO: 146173 - RNA, 19 nt, Artificial Sequence
  Description of Artificial Sequence: Synthetic oligonucleotide
  Antisense strand to SEQ ID NO: 146172
uuacuucgugagauacaca

SEQ ID NO: 146174 - RNA, 19 nt, Artificial Sequence
  Description of Artificial Sequence: Synthetic oligonucleotide
  Sense strand starting at position 2422 of SEQ ID NO: 1875
auaauaucuguguaucuca

SEQ ID NO: 146175 - RNA, 19 nt, Artificial Sequence
  Description of Artificial Sequence: Synthetic oligonucleotide
  Antisense strand to SEQ ID NO: 146174
ugagauacacagauauuau

SEQ ID NO: 146176 - RNA, 19 nt, Artificial Sequence
  Description of Artificial Sequence: Synthetic oligonucleotide
  Sense strand starting at position 2420 of SEQ ID NO: 1875
ucauaauaucuguguaucu

SEQ ID NO: 146177 - RNA, 19 nt, Artificial Sequence
  Description of Artificial Sequence: Synthetic oligonucleotide
  Antisense strand to SEQ ID NO: 146176
agauacacagauauuauga

SEQ ID NO: 146178 - RNA, 19 nt, Artificial Sequence
  Description of Artificial Sequence: Synthetic oligonucleotide
  Sense strand starting at position 2417 of SEQ ID NO: 1875
gagucauaauaucugugua

SEQ ID NO: 146179 - RNA, 19 nt, Artificial Sequence
  Description of Artificial Sequence: Synthetic oligonucleotide
  Antisense strand to SEQ ID NO: 146178
uacacagauauuaugacuc

SEQ ID NO: 146180 - RNA, 19 nt, Artificial Sequence
  Description of Artificial Sequence: Synthetic oligonucleotide
  Sense strand starting at position 2379 of SEQ ID NO: 1875
augaaucuucccgagccuu

SEQ ID NO: 146181 - RNA, 19 nt, Artificial Sequence
  Description of Artificial Sequence: Synthetic oligonucleotide
  Antisense strand to SEQ ID NO: 146180
aaggcucgggaagauucau

SEQ ID NO: 146182 - RNA, 19 nt, Artificial Sequence
  Description of Artificial Sequence: Synthetic oligonucleotide
  Sense strand starting at position 2359 of SEQ ID NO: 1875
gggcaagucgcacaagaaa

SEQ ID NO: 146183 - RNA, 19 nt, Artificial Sequence
  Description of Artificial Sequence: Synthetic oligonucleotide
  Antisense strand to SEQ ID NO: 146182
uuucuugugcgacuugccc

SEQ ID NO: 146184 - RNA, 19 nt, Artificial Sequence
  Description of Artificial Sequence: Synthetic oligonucleotide
  Sense strand starting at position 2299 of SEQ ID NO: 1875
gucugaguuccagaucuca

SEQ ID NO: 146185 - RNA, 19 nt, Artificial Sequence
  Description of Artificial Sequence: Synthetic oligonucleotide
  Antisense strand to SEQ ID NO: 146184
ugagaucuggaacucagac

SEQ ID NO: 146186 - RNA, 19 nt, Artificial Sequence
  Description of Artificial Sequence: Synthetic oligonucleotide
  Sense strand starting at position 1150 of SEQ ID NO: 1875
aagugaagugcaugaacaa

SEQ ID NO: 146187 - RNA, 19 nt, Artificial Sequence
  Description of Artificial Sequence: Synthetic oligonucleotide
  Antisense strand to SEQ ID NO: 146186
uuguucaugcacuucacuu

SEQ ID NO: 146188 - RNA, 19 nt, Artificial Sequence
  Description of Artificial Sequence: Synthetic oligonucleotide
  Sense strand starting at position 1103 of SEQ ID NO: 1875
gguggcugauaaucaggua

SEQ ID NO: 146189 - RNA, 19 nt, Artificial Sequence
  Description of Artificial Sequence: Synthetic oligonucleotide
  Antisense strand to SEQ ID NO: 146188
uaccugauuaucagccacc

SEQ ID NO: 146190 - RNA, 19 nt, Artificial Sequence
  Description of Artificial Sequence: Synthetic oligonucleotide
  Sense strand starting at position 1097 of SEQ ID NO: 1875
agauaagguggcugauaau

SEQ ID NO: 146191 - RNA, 19 nt, Artificial Sequence
  Description of Artificial Sequence: Synthetic oligonucleotide
  Antisense strand to SEQ ID NO: 146190
auuaucagccaccuuaucu

SEQ ID NO: 146192 - RNA, 19 nt, Artificial Sequence
  Description of Artificial Sequence: Synthetic oligonucleotide
  Sense strand starting at position 1094 of SEQ ID NO: 1875
cagagauaagguggcugau

SEQ ID NO: 146193 - RNA, 19 nt, Artificial Sequence
  Description of Artificial Sequence: Synthetic oligonucleotide
  Antisense strand to SEQ ID NO: 146192
aucagccaccuuaucucug

SEQ ID NO: 146194 - RNA, 19 nt, Artificial Sequence
  Description of Artificial Sequence: Synthetic oligonucleotide
  Sense strand starting at position 1063 of SEQ ID NO: 1875
acaucuggcuaauucuaga

SEQ ID NO: 146195 - RNA, 19 nt, Artificial Sequence
  Description of Artificial Sequence: Synthetic oligonucleotide
  Antisense strand to SEQ ID NO: 146194
ucuagaauuagccagaugu

SEQ ID NO: 146196 - RNA, 19 nt, Artificial Sequence
  Description of Artificial Sequence: Synthetic oligonucleotide
  Sense strand starting at position 1007 of SEQ ID NO: 1875
agauaagagcuuuaaccgu

SEQ ID NO: 146197 - RNA, 19 nt, Artificial Sequence
  Description of Artificial Sequence: Synthetic oligonucleotide
  Antisense strand to SEQ ID NO: 146196
acgguuaaagcucuuaucu

SEQ ID NO: 146198 - RNA, 19 nt, Artificial Sequence
  Description of Artificial Sequence: Synthetic oligonucleotide
  Sense strand starting at position 721 of SEQ ID NO: 1875
agcaguuuacuaugaaacu

SEQ ID NO: 146199 - RNA, 19 nt, Artificial Sequence
  Description of Artificial Sequence: Synthetic oligonucleotide
  Antisense strand to SEQ ID NO: 146198
aguuucauaguaaacugcu

SEQ ID NO: 146200 - RNA, 19 nt, Artificial Sequence
  Description of Artificial Sequence: Synthetic oligonucleotide
  Sense strand starting at position 718 of SEQ ID NO: 1875
gcaagcaguuuacuaugaa

SEQ ID NO: 146201 - RNA, 19 nt, Artificial Sequence
  Description of Artificial Sequence: Synthetic oligonucleotide
  Antisense strand to SEQ ID NO: 146200
uucauaguaaacugcuugc

SEQ ID NO: 146202 - RNA, 19 nt, Artificial Sequence
  Description of Artificial Sequence: Synthetic oligonucleotide
  Sense strand starting at position 355 of SEQ ID NO: 1875
acauauacugacugaugua

SEQ ID NO: 146203 - RNA, 19 nt, Artificial Sequence
  Description of Artificial Sequence: Synthetic oligonucleotide
  Antisense strand to SEQ ID NO: 146202
uacaucagucaguauaugu

SEQ ID NO: 146204 - RNA, 19 nt, Artificial Sequence
  Description of Artificial Sequence: Synthetic oligonucleotide
  Sense strand starting at position 267 of SEQ ID NO: 1875
accuaucugugauccggaa

SEQ ID NO: 146205 - RNA, 19 nt, Artificial Sequence
  Description of Artificial Sequence: Synthetic oligonucleotide
  Antisense strand to SEQ ID NO: 146204
uuccggaucacagauaggu

SEQ ID NO: 146206 - RNA, 19 nt, Artificial Sequence
  Description of Artificial Sequence: Synthetic oligonucleotide
  Sense strand starting at position 176 of SEQ ID NO: 1875
cuacucugcucacugagau

SEQ ID NO: 146207 - RNA, 19 nt, Artificial Sequence
  Description of Artificial Sequence: Synthetic oligonucleotide
  Antisense strand to SEQ ID NO: 146206
aucucagugagcagaguag

SEQ ID NO: 146208 - RNA, 19 nt, Artificial Sequence
  Description of Artificial Sequence: Synthetic oligonucleotide
  Sense strand starting at position 3963 of SEQ ID NO: 1876
cucuguugucuacagucaa

SEQ ID NO: 146209 - RNA, 19 nt, Artificial Sequence
  Description of Artificial Sequence: Synthetic oligonucleotide
  Antisense strand to SEQ ID NO: 146208
uugacuguagacaacagag

SEQ ID NO: 146210 - RNA, 19 nt, Artificial Sequence
  Description of Artificial Sequence: Synthetic oligonucleotide
  Sense strand starting at position 3925 of SEQ ID NO: 1876
agaggauacucaguuacac

SEQ ID NO: 146211 - RNA, 19 nt, Artificial Sequence
  Description of Artificial Sequence: Synthetic oligonucleotide
  Antisense strand to SEQ ID NO: 146210
guguaacugaguauccucu

SEQ ID NO: 146212 - RNA, 19 nt, Artificial Sequence
  Description of Artificial Sequence: Synthetic oligonucleotide
  Sense strand starting at position 3922 of SEQ ID NO: 1876
aucagaggauacucaguua

SEQ ID NO: 146213 - RNA, 19 nt, Artificial Sequence
  Description of Artificial Sequence: Synthetic oligonucleotide
  Antisense strand to SEQ ID NO: 146212
uaacugaguauccucugau

SEQ ID NO: 146214 - RNA, 19 nt, Artificial Sequence
  Description of Artificial Sequence: Synthetic oligonucleotide
  Sense strand starting at position 3895 of SEQ ID NO: 1876
ucagucuuaguauaucaca

SEQ ID NO: 146215 - RNA, 19 nt, Artificial Sequence
  Description of Artificial Sequence: Synthetic oligonucleotide
  Antisense strand to SEQ ID NO: 146214
ugugauauacuaagacuga

SEQ ID NO: 146216 - RNA, 19 nt, Artificial Sequence
  Description of Artificial Sequence: Synthetic oligonucleotide
  Sense strand starting at position 3877 of SEQ ID NO: 1876
ggaaacagucuuugauggu

SEQ ID NO: 146217 - RNA, 19 nt, Artificial Sequence
  Description of Artificial Sequence: Synthetic oligonucleotide
  Antisense strand to SEQ ID NO: 146216
accaucaaagacuguuucc

SEQ ID NO: 146218 - RNA, 19 nt, Artificial Sequence
  Description of Artificial Sequence: Synthetic oligonucleotide
  Sense strand starting at position 3864 of SEQ ID NO: 1876
gguucucuuguugggaaac

SEQ ID NO: 146219 - RNA, 19 nt, Artificial Sequence
  Description of Artificial Sequence: Synthetic oligonucleotide
  Antisense strand to SEQ ID NO: 146218
guuucccaacaagagaacc

SEQ ID NO: 146220 - RNA, 19 nt, Artificial Sequence
  Description of Artificial Sequence: Synthetic oligonucleotide
  Sense strand starting at position 3862 of SEQ ID NO: 1876
aagguucucuuguugggaa

SEQ ID NO: 146221 - RNA, 19 nt, Artificial Sequence
  Description of Artificial Sequence: Synthetic oligonucleotide
  Antisense strand to SEQ ID NO: 146220
uucccaacaagagaaccuu

SEQ ID NO: 146222 - RNA, 19 nt, Artificial Sequence
  Description of Artificial Sequence: Synthetic oligonucleotide
  Sense strand starting at position 3849 of SEQ ID NO: 1876
gaacuuacugcacaagguu

SEQ ID NO: 146223 - RNA, 19 nt, Artificial Sequence
  Description of Artificial Sequence: Synthetic oligonucleotide
  Antisense strand to SEQ ID NO: 146222
aaccuugugcaguaaguuc

SEQ ID NO: 146224 - RNA, 19 nt, Artificial Sequence
  Description of Artificial Sequence: Synthetic oligonucleotide
  Sense strand starting at position 3740 of SEQ ID NO: 1876
cagagaggccuugggucaa

SEQ ID NO: 146225 - RNA, 19 nt, Artificial Sequence
  Description of Artificial Sequence: Synthetic oligonucleotide
  Antisense strand to SEQ ID NO: 146224
uugacccaaggccucucug

SEQ ID NO: 146226 - RNA, 19 nt, Artificial Sequence
  Description of Artificial Sequence: Synthetic oligonucleotide
  Sense strand starting at position 3381 of SEQ ID NO: 1876
gcaauaggagcucaauuaa

SEQ ID NO: 146227 - RNA, 19 nt, Artificial Sequence
  Description of Artificial Sequence: Synthetic oligonucleotide
  Antisense strand to SEQ ID NO: 146226
uuaauugagcuccuauugc

SEQ ID NO: 146228 - RNA, 19 nt, Artificial Sequence
  Description of Artificial Sequence: Synthetic oligonucleotide
  Sense strand starting at position 3324 of SEQ ID NO: 1876
cgaggacucugucucaauc

SEQ ID NO: 146229 - RNA, 19 nt, Artificial Sequence
  Description of Artificial Sequence: Synthetic oligonucleotide
  Antisense strand to SEQ ID NO: 146228
gauugagacagaguccucg

SEQ ID NO: 146230 - RNA, 19 nt, Artificial Sequence
  Description of Artificial Sequence: Synthetic oligonucleotide
  Sense strand starting at position 3263 of SEQ ID NO: 1876
ugcaguagccucuaagaac

SEQ ID NO: 146231 - RNA, 19 nt, Artificial Sequence
  Description of Artificial Sequence: Synthetic oligonucleotide
  Antisense strand to SEQ ID NO: 146230
guucuuagaggcuacugca

SEQ ID NO: 146232 - RNA, 19 nt, Artificial Sequence
  Description of Artificial Sequence: Synthetic oligonucleotide
  Sense strand starting at position 3185 of SEQ ID NO: 1876
gcuguuuccacugagagag

SEQ ID NO: 146233 - RNA, 19 nt, Artificial Sequence
  Description of Artificial Sequence: Synthetic oligonucleotide
  Antisense strand to SEQ ID NO: 146232
cucucucaguggaaacagc

SEQ ID NO: 146234 - RNA, 19 nt, Artificial Sequence
  Description of Artificial Sequence: Synthetic oligonucleotide
  Sense strand starting at position 3184 of SEQ ID NO: 1876
ggcuguuuccacugagaga

SEQ ID NO: 146235 - RNA, 19 nt, Artificial Sequence
  Description of Artificial Sequence: Synthetic oligonucleotide
  Antisense strand to SEQ ID NO: 146234
ucucucaguggaaacagcc

SEQ ID NO: 146236 - RNA, 19 nt, Artificial Sequence
  Description of Artificial Sequence: Synthetic oligonucleotide
  Sense strand starting at position 2887 of SEQ ID NO: 1876
ugaagaugcaaggguaaua

SEQ ID NO: 146237 - RNA, 19 nt, Artificial Sequence
  Description of Artificial Sequence: Synthetic oligonucleotide
  Antisense strand to SEQ ID NO: 146236
uauuacccuugcaucuuca

SEQ ID NO: 146238 - RNA, 19 nt, Artificial Sequence
  Description of Artificial Sequence: Synthetic oligonucleotide
  Sense strand starting at position 2822 of SEQ ID NO: 1876
agagacugccuuugaucau

SEQ ID NO: 146239 - RNA, 19 nt, Artificial Sequence
  Description of Artificial Sequence: Synthetic oligonucleotide
  Antisense strand to SEQ ID NO: 146238
augaucaaaggcagucucu

SEQ ID NO: 146240 - RNA, 19 nt, Artificial Sequence
  Description of Artificial Sequence: Synthetic oligonucleotide
  Sense strand starting at position 2819 of SEQ ID NO: 1876
uguagagacugccuuugau

SEQ ID NO: 146241 - RNA, 19 nt, Artificial Sequence
  Description of Artificial Sequence: Synthetic oligonucleotide
  Antisense strand to SEQ ID NO: 146240
aucaaaggcagucucuaca

SEQ ID NO: 146242 - RNA, 19 nt, Artificial Sequence
  Description of Artificial Sequence: Synthetic oligonucleotide
  Sense strand starting at position 2809 of SEQ ID NO: 1876
ugacuuucccuguagagac

SEQ ID NO: 146243 - RNA, 19 nt, Artificial Sequence
  Description of Artificial Sequence: Synthetic oligonucleotide
  Antisense strand to SEQ ID NO: 146242
gucucuacagggaaaguca

SEQ ID NO: 146244 - RNA, 19 nt, Artificial Sequence
  Description of Artificial Sequence: Synthetic oligonucleotide
  Sense strand starting at position 2807 of SEQ ID NO: 1876
uuugacuuucccuguagag

SEQ ID NO: 146245 - RNA, 19 nt, Artificial Sequence
  Description of Artificial Sequence: Synthetic oligonucleotide
  Antisense strand to SEQ ID NO: 146244
cucuacagggaaagucaaa

SEQ ID NO: 146246 - RNA, 19 nt, Artificial Sequence
  Description of Artificial Sequence: Synthetic oligonucleotide
  Sense strand starting at position 2761 of SEQ ID NO: 1876
cugguuuaacuuuauggau

SEQ ID NO: 146247 - RNA, 19 nt, Artificial Sequence
  Description of Artificial Sequence: Synthetic oligonucleotide
  Antisense strand to SEQ ID NO: 146246
auccauaaaguuaaaccag

SEQ ID NO: 146248 - RNA, 19 nt, Artificial Sequence
  Description of Artificial Sequence: Synthetic oligonucleotide
  Sense strand starting at position 2703 of SEQ ID NO: 1876
ccaugagccaagggaucau

SEQ ID NO: 146249 - RNA, 19 nt, Artificial Sequence
  Description of Artificial Sequence: Synthetic oligonucleotide
  Antisense strand to SEQ ID NO: 146248
augaucccuuggcucaugg

SEQ ID NO: 146250 - RNA, 19 nt, Artificial Sequence
  Description of Artificial Sequence: Synthetic oligonucleotide
  Sense strand starting at position 2613 of SEQ ID NO: 1876
cgauuuaucuucuuuguau

SEQ ID NO: 146251 - RNA, 19 nt, Artificial Sequence
  Description of Artificial Sequence: Synthetic oligonucleotide
  Antisense strand to SEQ ID NO: 146250
auacaaagaagauaaaucg

SEQ ID NO: 146252 - RNA, 19 nt, Artificial Sequence
  Description of Artificial Sequence: Synthetic oligonucleotide
  Sense strand starting at position 2611 of SEQ ID NO: 1876
aucgauuuaucuucuuugu

SEQ ID NO: 146253 - RNA, 19 nt, Artificial Sequence
  Description of Artificial Sequence: Synthetic oligonucleotide
  Antisense strand to SEQ ID NO: 146252
acaaagaagauaaaucgau

SEQ ID NO: 146254 - RNA, 19 nt, Artificial Sequence
  Description of Artificial Sequence: Synthetic oligonucleotide
  Sense strand starting at position 2525 of SEQ ID NO: 1876
gaggauuaucugugguuau

SEQ ID NO: 146255 - RNA, 19 nt, Artificial Sequence
  Description of Artificial Sequence: Synthetic oligonucleotide
  Antisense strand to SEQ ID NO: 146254
auaaccacagauaauccuc

SEQ ID NO: 146256 - RNA, 19 nt, Artificial Sequence
  Description of Artificial Sequence: Synthetic oligonucleotide
  Sense strand starting at position 2524 of SEQ ID NO: 1876
ugaggauuaucugugguua

SEQ ID NO: 146257 - RNA, 19 nt, Artificial Sequence
  Description of Artificial Sequence: Synthetic oligonucleotide
  Antisense strand to SEQ ID NO: 146256
uaaccacagauaauccuca

SEQ ID NO: 146258 - RNA, 19 nt, Artificial Sequence
  Description of Artificial Sequence: Synthetic oligonucleotide
  Sense strand starting at position 2420 of SEQ ID NO: 1876
uugagagaguucuuacaca

SEQ ID NO: 146259 - RNA, 19 nt, Artificial Sequence
  Description of Artificial Sequence: Synthetic oligonucleotide
  Antisense strand to SEQ ID NO: 146258
uguguaagaacucucucaa

SEQ ID NO: 146260 - RNA, 19 nt, Artificial Sequence
  Description of Artificial Sequence: Synthetic oligonucleotide
  Sense strand starting at position 2261 of SEQ ID NO: 1876
gagacuuauccgggaucuc

SEQ ID NO: 146261 - RNA, 19 nt, Artificial Sequence
  Description of Artificial Sequence: Synthetic oligonucleotide
  Antisense strand to SEQ ID NO: 146260
gagaucccggauaagucuc

SEQ ID NO: 146262 - RNA, 19 nt, Artificial Sequence
  Description of Artificial Sequence: Synthetic oligonucleotide
  Sense strand starting at position 2259 of SEQ ID NO: 1876
gagagacuuauccgggauc

SEQ ID NO: 146263 - RNA, 19 nt, Artificial Sequence
  Description of Artificial Sequence: Synthetic oligonucleotide
  Antisense strand to SEQ ID NO: 146262
gaucccggauaagucucuc

SEQ ID NO: 146264 - RNA, 19 nt, Artificial Sequence
  Description of Artificial Sequence: Synthetic oligonucleotide
  Sense strand starting at position 1125 of SEQ ID NO: 1876
aggauagacuugccugaac

SEQ ID NO: 146265 - RNA, 19 nt, Artificial Sequence
  Description of Artificial Sequence: Synthetic oligonucleotide
  Antisense strand to SEQ ID NO: 146264
guucaggcaagucuauccu

SEQ ID NO: 146266 - RNA, 19 nt, Artificial Sequence
  Description of Artificial Sequence: Synthetic oligonucleotide
  Sense strand starting at position 1123 of SEQ ID NO: 1876
gcaggauagacuugccuga

SEQ ID NO: 146267 - RNA, 19 nt, Artificial Sequence
  Description of Artificial Sequence: Synthetic oligonucleotide
  Antisense strand to SEQ ID NO: 146266
ucaggcaagucuauccugc

SEQ ID NO: 146268 - RNA, 19 nt, Artificial Sequence
  Description of Artificial Sequence: Synthetic oligonucleotide
  Sense strand starting at position 749 of SEQ ID NO: 1876
ugcgauugucuuuagagau

SEQ ID NO: 146269 - RNA, 19 nt, Artificial Sequence
  Description of Artificial Sequence: Synthetic oligonucleotide
  Antisense strand to SEQ ID NO: 146268
aucucuaaagacaaucgca

SEQ ID NO: 146270 - RNA, 19 nt, Artificial Sequence
  Description of Artificial Sequence: Synthetic oligonucleotide
  Sense strand starting at position 729 of SEQ ID NO: 1876
ugaagucuuucucuaacug

SEQ ID NO: 146271 - RNA, 19 nt, Artificial Sequence
  Description of Artificial Sequence: Synthetic oligonucleotide
  Antisense strand to SEQ ID NO: 146270
caguuagagaaagacuuca

SEQ ID NO: 146272 - RNA, 19 nt, Artificial Sequence
  Description of Artificial Sequence: Synthetic oligonucleotide
  Sense strand starting at position 727 of SEQ ID NO: 1876
ggugaagucuuucucuaac

SEQ ID NO: 146273 - RNA, 19 nt, Artificial Sequence
  Description of Artificial Sequence: Synthetic oligonucleotide
  Antisense strand to SEQ ID NO: 146272
guuagagaaagacuucacc

SEQ ID NO: 146274 - RNA, 19 nt, Artificial Sequence
  Description of Artificial Sequence: Synthetic oligonucleotide
  Sense strand starting at position 575 of SEQ ID NO: 1876
cggagacuuuaaucaacuu

SEQ ID NO: 146275 - RNA, 19 nt, Artificial Sequence
  Description of Artificial Sequence: Synthetic oligonucleotide
  Antisense strand to SEQ ID NO: 146274
aaguugauuaaagucuccg

SEQ ID NO: 146276 - RNA, 19 nt, Artificial Sequence
  Description of Artificial Sequence: Synthetic oligonucleotide
  Sense strand starting at position 537 of SEQ ID NO: 1876
ccucaagggaugcauguua

SEQ ID NO: 146277 - RNA, 19 nt, Artificial Sequence
  Description of Artificial Sequence: Synthetic oligonucleotide
  Antisense strand to SEQ ID NO: 146276
uaacaugcaucccuugagg

SEQ ID NO: 146278 - RNA, 19 nt, Artificial Sequence
  Description of Artificial Sequence: Synthetic oligonucleotide
  Sense strand starting at position 474 of SEQ ID NO: 1876
uauuuauccgcucagguuu

SEQ ID NO: 146279 - RNA, 19 nt, Artificial Sequence
  Description of Artificial Sequence: Synthetic oligonucleotide
  Antisense strand to SEQ ID NO: 146278
aaaccugagcggauaaaua

SEQ ID NO: 146280 - RNA, 19 nt, Artificial Sequence
  Description of Artificial Sequence: Synthetic oligonucleotide
  Sense strand starting at position 359 of SEQ ID NO: 1876
cuauguagugaauacaucu

SEQ ID NO: 146281 - RNA, 19 nt, Artificial Sequence
  Description of Artificial Sequence: Synthetic oligonucleotide
  Antisense strand to SEQ ID NO: 146280
agauguauucacuacauag

SEQ ID NO: 146282 - RNA, 19 nt, Artificial Sequence
  Description of Artificial Sequence: Synthetic oligonucleotide
  Sense strand starting at position 356 of SEQ ID NO: 1876
agucuauguagugaauaca

SEQ ID NO: 146283 - RNA, 19 nt, Artificial Sequence
  Description of Artificial Sequence: Synthetic oligonucleotide
  Antisense strand to SEQ ID NO: 146282
uguauucacuacauagacu

SEQ ID NO: 146284 - RNA, 19 nt, Artificial Sequence
  Description of Artificial Sequence: Synthetic oligonucleotide
  Sense strand starting at position 347 of SEQ ID NO: 1876
ugcauucguagucuaugua

SEQ ID NO: 146285 - RNA, 19 nt, Artificial Sequence
  Description of Artificial Sequence: Synthetic oligonucleotide
  Antisense strand to SEQ ID NO: 146284
uacauagacuacgaaugca

SEQ ID NO: 146286 - RNA, 19 nt, Artificial Sequence
  Description of Artificial Sequence: Synthetic oligonucleotide
  Sense strand starting at position 310 of SEQ ID NO: 1876
ccaagaaagucagcuaacu

SEQ ID NO: 146287 - RNA, 19 nt, Artificial Sequence
  Description of Artificial Sequence: Synthetic oligonucleotide
  Antisense strand to SEQ ID NO: 146286
aguuagcugacuuucuugg

SEQ ID NO: 146288 - RNA, 19 nt, Artificial Sequence
  Description of Artificial Sequence: Synthetic oligonucleotide
  Sense strand starting at position 129 of SEQ ID NO: 1878
ccuguaaauguccaaguga

SEQ ID NO: 146289 - RNA, 19 nt, Artificial Sequence
  Description of Artificial Sequence: Synthetic oligonucleotide
  Antisense strand to SEQ ID NO: 146288
ucacuuggacauuuacagg

SEQ ID NO: 146290 - RNA, 19 nt, Artificial Sequence
  Description of Artificial Sequence: Synthetic oligonucleotide
  Sense strand starting at position 380 of SEQ ID NO: 1878
cagcguuugcugcuaauag

SEQ ID NO: 146291 - RNA, 19 nt, Artificial Sequence
  Description of Artificial Sequence: Synthetic oligonucleotide
  Antisense strand to SEQ ID NO: 146290
cuauuagcagcaaacgcug

SEQ ID NO: 146292 - RNA, 19 nt, Artificial Sequence
  Description of Artificial Sequence: Synthetic oligonucleotide
  Sense strand starting at position 434 of SEQ ID NO: 1878
cccuuuccucuguguagaa

SEQ ID NO: 146293 - RNA, 19 nt, Artificial Sequence
  Description of Artificial Sequence: Synthetic oligonucleotide
  Antisense strand to SEQ ID NO: 146292
uucuacacagaggaaaggg

SEQ ID NO: 146294 - RNA, 19 nt, Artificial Sequence
  Description of Artificial Sequence: Synthetic oligonucleotide
  Sense strand starting at position 522 of SEQ ID NO: 1878
cugucacagaaguggaauu

SEQ ID NO: 146295 - RNA, 19 nt, Artificial Sequence
  Description of Artificial Sequence: Synthetic oligonucleotide
  Antisense strand to SEQ ID NO: 146294
aauuccacuucugugacag

SEQ ID NO: 146296 - RNA, 19 nt, Artificial Sequence
  Description of Artificial Sequence: Synthetic oligonucleotide
  Sense strand starting at position 564 of SEQ ID NO: 1878
ccuucuaaccucugggaga

SEQ ID NO: 146297 - RNA, 19 nt, Artificial Sequence
  Description of Artificial Sequence: Synthetic oligonucleotide
  Antisense strand to SEQ ID NO: 146296
ucucccagagguuagaagg

SEQ ID NO: 146298 - RNA, 19 nt, Artificial Sequence
  Description of Artificial Sequence: Synthetic oligonucleotide
  Sense strand starting at position 580 of SEQ ID NO: 1878
agagcugagucuccaucau

SEQ ID NO: 146299 - RNA, 19 nt, Artificial Sequence
  Description of Artificial Sequence: Synthetic oligonucleotide
  Antisense strand to SEQ ID NO: 146298
augauggagacucagcucu

SEQ ID NO: 146300 - RNA, 19 nt, Artificial Sequence
  Description of Artificial Sequence: Synthetic oligonucleotide
  Sense strand starting at position 647 of SEQ ID NO: 1878
gggccuuuggaaugggaga

SEQ ID NO: 146301 - RNA, 19 nt, Artificial Sequence
  Description of Artificial Sequence: Synthetic oligonucleotide
  Antisense strand to SEQ ID NO: 146300
ucucccauuccaaaggccc

SEQ ID NO: 146302 - RNA, 19 nt, Artificial Sequence
  Description of Artificial Sequence: Synthetic oligonucleotide
  Sense strand starting at position 658 of SEQ ID NO: 1878
augggagacucuccauagu

SEQ ID NO: 146303 - RNA, 19 nt, Artificial Sequence
  Description of Artificial Sequence: Synthetic oligonucleotide
  Antisense strand to SEQ ID NO: 146302
acuauggagagucucccau

SEQ ID NO: 146304 - RNA, 19 nt, Artificial Sequence
  Description of Artificial Sequence: Synthetic oligonucleotide
  Sense strand starting at position 739 of SEQ ID NO: 1878
agugacuuggcuugucuaa

SEQ ID NO: 146305 - RNA, 19 nt, Artificial Sequence
  Description of Artificial Sequence: Synthetic oligonucleotide
  Antisense strand to SEQ ID NO: 146304
uuagacaagccaagucacu

SEQ ID NO: 146306 - RNA, 19 nt, Artificial Sequence
  Description of Artificial Sequence: Synthetic oligonucleotide
  Sense strand starting at position 741 of SEQ ID NO: 1878
ugacuuggcuugucuaagu

SEQ ID NO: 146307 - RNA, 19 nt, Artificial Sequence
  Description of Artificial Sequence: Synthetic oligonucleotide
  Antisense strand to SEQ ID NO: 146306
acuuagacaagccaaguca

SEQ ID NO: 146308 - RNA, 19 nt, Artificial Sequence
  Description of Artificial Sequence: Synthetic oligonucleotide
  Sense strand starting at position 746 of SEQ ID NO: 1878
uggcuugucuaagucuaua

SEQ ID NO: 146309 - RNA, 19 nt, Artificial Sequence
  Description of Artificial Sequence: Synthetic oligonucleotide
  Antisense strand to SEQ ID NO: 146308
uauagacuuagacaagcca

SEQ ID NO: 146310 - RNA, 19 nt, Artificial Sequence
  Description of Artificial Sequence: Synthetic oligonucleotide
  Sense strand starting at position 787 of SEQ ID NO: 1878
acaagugccuggucuuaca

SEQ ID NO: 146311 - RNA, 19 nt, Artificial Sequence
  Description of Artificial Sequence: Synthetic oligonucleotide
  Antisense strand to SEQ ID NO: 146310
uguaagaccaggcacuugu

SEQ ID NO: 146312 - RNA, 19 nt, Artificial Sequence
  Description of Artificial Sequence: Synthetic oligonucleotide
  Sense strand starting at position 947 of SEQ ID NO: 1878
cugagagcuucucuggcuu

SEQ ID NO: 146313 - RNA, 19 nt, Artificial Sequence
  Description of Artificial Sequence: Synthetic oligonucleotide
  Antisense strand to SEQ ID NO: 146312
aagccagagaagcucucag

SEQ ID NO: 146314 - RNA, 19 nt, Artificial Sequence
  Description of Artificial Sequence: Synthetic oligonucleotide
  Sense strand starting at position 1141 of SEQ ID NO: 1878
cggucaaaugggugacuga

SEQ ID NO: 146315 - RNA, 19 nt, Artificial Sequence
  Description of Artificial Sequence: Synthetic oligonucleotide
  Antisense strand to SEQ ID NO: 146314
ucagucacccauuugaccg

SEQ ID NO: 146316 - RNA, 19 nt, Artificial Sequence
  Description of Artificial Sequence: Synthetic oligonucleotide
  Sense strand starting at position 1151 of SEQ ID NO: 1878
ggugacugacccuggagaa

SEQ ID NO: 146317 - RNA, 19 nt, Artificial Sequence
  Description of Artificial Sequence: Synthetic oligonucleotide
  Antisense strand to SEQ ID NO: 146316
uucuccagggucagucacc

SEQ ID NO: 146318 - RNA, 19 nt, Artificial Sequence
  Description of Artificial Sequence: Synthetic oligonucleotide
  Sense strand starting at position 1272 of SEQ ID NO: 1878
guccucaugucccuggauu

SEQ ID NO: 146319 - RNA, 19 nt, Artificial Sequence
  Description of Artificial Sequence: Synthetic oligonucleotide
  Antisense strand to SEQ ID NO: 146318
aauccagggacaugaggac

SEQ ID NO: 146320 - RNA, 19 nt, Artificial Sequence
  Description of Artificial Sequence: Synthetic oligonucleotide
  Sense strand starting at position 1516 of SEQ ID NO: 1878
agauaccagcuguguaaca

SEQ ID NO: 146321 - RNA, 19 nt, Artificial Sequence
  Description of Artificial Sequence: Synthetic oligonucleotide
  Antisense strand to SEQ ID NO: 146320
uguuacacagcugguaucu

SEQ ID NO: 146322 - RNA, 19 nt, Artificial Sequence
  Description of Artificial Sequence: Synthetic oligonucleotide
  Sense strand starting at position 1517 of SEQ ID NO: 1878
gauaccagcuguguaacau

SEQ ID NO: 146323 - RNA, 19 nt, Artificial Sequence
  Description of Artificial Sequence: Synthetic oligonucleotide
  Antisense strand to SEQ ID NO: 146322
auguuacacagcugguauc

SEQ ID NO: 146324 - RNA, 19 nt, Artificial Sequence
  Description of Artificial Sequence: Synthetic oligonucleotide
  Sense strand starting at position 1518 of SEQ ID NO: 1878
auaccagcuguguaacauu

SEQ ID NO: 146325 - RNA, 19 nt, Artificial Sequence
  Description of Artificial Sequence: Synthetic oligonucleotide
  Antisense strand to SEQ ID NO: 146324
aauguuacacagcugguau

SEQ ID NO: 146326 - RNA, 19 nt, Artificial Sequence
  Description of Artificial Sequence: Synthetic oligonucleotide
  Sense strand starting at position 1525 of SEQ ID NO: 1878
cuguguaacauugggccaa

SEQ ID NO: 146327 - RNA, 19 nt, Artificial Sequence
  Description of Artificial Sequence: Synthetic oligonucleotide
  Antisense strand to SEQ ID NO: 146326
uuggcccaauguuacacag

SEQ ID NO: 146328 - RNA, 19 nt, Artificial Sequence
  Description of Artificial Sequence: Synthetic oligonucleotide
  Sense strand starting at position 1745 of SEQ ID NO: 1878
cccugcuuugcucagauuu

SEQ ID NO: 146329 - RNA, 19 nt, Artificial Sequence
  Description of Artificial Sequence: Synthetic oligonucleotide
  Antisense strand to SEQ ID NO: 146328
aaaucugagcaaagcaggg

SEQ ID NO: 146330 - RNA, 19 nt, Artificial Sequence
  Description of Artificial Sequence: Synthetic oligonucleotide
  Sense strand starting at position 2025 of SEQ ID NO: 1878
guuuaagcucugcaccaca

SEQ ID NO: 146331 - RNA, 19 nt, Artificial Sequence
  Description of Artificial Sequence: Synthetic oligonucleotide
  Antisense strand to SEQ ID NO: 146330
uguggugcagagcuuaaac

SEQ ID NO: 146332 - RNA, 19 nt, Artificial Sequence
  Description of Artificial Sequence: Synthetic oligonucleotide
  Sense strand starting at position 2511 of SEQ ID NO: 1878
uauaucuugcgcuagggaa

SEQ ID NO: 146333 - RNA, 19 nt, Artificial Sequence
  Description of Artificial Sequence: Synthetic oligonucleotide
  Antisense strand to SEQ ID NO: 146332
uucccuagcgcaagauaua

SEQ ID NO: 146334 - RNA, 19 nt, Artificial Sequence
  Description of Artificial Sequence: Synthetic oligonucleotide
  Sense strand starting at position 2513 of SEQ ID NO: 1878
uaucuugcgcuagggaaua

SEQ ID NO: 146335 - RNA, 19 nt, Artificial Sequence
  Description of Artificial Sequence: Synthetic oligonucleotide
  Antisense strand to SEQ ID NO: 146334
uauucccuagcgcaagaua

SEQ ID NO: 146336 - RNA, 19 nt, Artificial Sequence
  Description of Artificial Sequence: Synthetic oligonucleotide
  Sense strand starting at position 2620 of SEQ ID NO: 1878
cugaaauuggaguguagau

SEQ ID NO: 146337 - RNA, 19 nt, Artificial Sequence
  Description of Artificial Sequence: Synthetic oligonucleotide
  Antisense strand to SEQ ID NO: 146336
aucuacacuccaauuucag

SEQ ID NO: 146338 - RNA, 19 nt, Artificial Sequence
  Description of Artificial Sequence: Synthetic oligonucleotide
  Sense strand starting at position 2632 of SEQ ID NO: 1878
uguagauaaugaucaucau

SEQ ID NO: 146339 - RNA, 19 nt, Artificial Sequence
  Description of Artificial Sequence: Synthetic oligonucleotide
  Antisense strand to SEQ ID NO: 146338
augaugaucauuaucuaca

SEQ ID NO: 146340 - RNA, 19 nt, Artificial Sequence
  Description of Artificial Sequence: Synthetic oligonucleotide
  Sense strand starting at position 2686 of SEQ ID NO: 1878
uuacuauuaugugucagaa

SEQ ID NO: 146341 - RNA, 19 nt, Artificial Sequence
  Description of Artificial Sequence: Synthetic oligonucleotide
  Antisense strand to SEQ ID NO: 146340
uucugacacauaauaguaa

SEQ ID NO: 146342 - RNA, 19 nt, Artificial Sequence
  Description of Artificial Sequence: Synthetic oligonucleotide
  Sense strand starting at position 2700 of SEQ ID NO: 1878
cagaaaugguucucgaugu

SEQ ID NO: 146343 - RNA, 19 nt, Artificial Sequence
  Description of Artificial Sequence: Synthetic oligonucleotide
  Antisense strand to SEQ ID NO: 146342
acaucgagaaccauuucug

SEQ ID NO: 146344 - RNA, 19 nt, Artificial Sequence
  Description of Artificial Sequence: Synthetic oligonucleotide
  Sense strand starting at position 3214 of SEQ ID NO: 1878
ggguuucucugguucaagu

SEQ ID NO: 146345 - RNA, 19 nt, Artificial Sequence
  Description of Artificial Sequence: Synthetic oligonucleotide
  Antisense strand to SEQ ID NO: 146344
acuugaaccagagaaaccc

SEQ ID NO: 146346 - RNA, 19 nt, Artificial Sequence
  Description of Artificial Sequence: Synthetic oligonucleotide
  Sense strand starting at position 3270 of SEQ ID NO: 1878
guaugugagucucucugga

SEQ ID NO: 146347 - RNA, 19 nt, Artificial Sequence
  Description of Artificial Sequence: Synthetic oligonucleotide
  Antisense strand to SEQ ID NO: 146346
uccagagagacucacauac

SEQ ID NO: 146348 - RNA, 19 nt, Artificial Sequence
  Description of Artificial Sequence: Synthetic oligonucleotide
  Sense strand starting at position 3272 of SEQ ID NO: 1878
augugagucucucuggagu

SEQ ID NO: 146349 - RNA, 19 nt, Artificial Sequence
  Description of Artificial Sequence: Synthetic oligonucleotide
  Antisense strand to SEQ ID NO: 146348
acuccagagagacucacau

SEQ ID NO: 146350 - RNA, 19 nt, Artificial Sequence
  Description of Artificial Sequence: Synthetic oligonucleotide
  Sense strand starting at position 3275 of SEQ ID NO: 1878
ugagucucucuggaguguu

SEQ ID NO: 146351 - RNA, 19 nt, Artificial Sequence
  Description of Artificial Sequence: Synthetic oligonucleotide
  Antisense strand to SEQ ID NO: 146350
aacacuccagagagacuca

SEQ ID NO: 146352 - RNA, 19 nt, Artificial Sequence
  Description of Artificial Sequence: Synthetic oligonucleotide
  Sense strand starting at position 3374 of SEQ ID NO: 1878
guacauuggcuuugagagu

SEQ ID NO: 146353 - RNA, 19 nt, Artificial Sequence
  Description of Artificial Sequence: Synthetic oligonucleotide
  Antisense strand to SEQ ID NO: 146352
acucucaaagccaauguac

SEQ ID NO: 146354 - RNA, 19 nt, Artificial Sequence
  Description of Artificial Sequence: Synthetic oligonucleotide
  Sense strand starting at position 3527 of SEQ ID NO: 1878
gccuuaaugucuccuggau

SEQ ID NO: 146355 - RNA, 19 nt, Artificial Sequence
  Description of Artificial Sequence: Synthetic oligonucleotide
  Antisense strand to SEQ ID NO: 146354
auccaggagacauuaaggc

SEQ ID NO: 146356 - RNA, 19 nt, Artificial Sequence
  Description of Artificial Sequence: Synthetic oligonucleotide
  Sense strand starting at position 3552 of SEQ ID NO: 1878
gggcaaacuccugagaggu

SEQ ID NO: 146357 - RNA, 19 nt, Artificial Sequence
  Description of Artificial Sequence: Synthetic oligonucleotide
  Antisense strand to SEQ ID NO: 146356
accucucaggaguuugccc

SEQ ID NO: 146358 - RNA, 19 nt, Artificial Sequence
  Description of Artificial Sequence: Synthetic oligonucleotide
  Sense strand starting at position 3558 of SEQ ID NO: 1878
acuccugagaggugucuga

SEQ ID NO: 146359 - RNA, 19 nt, Artificial Sequence
  Description of Artificial Sequence: Synthetic oligonucleotide
  Antisense strand to SEQ ID NO: 146358
ucagacaccucucaggagu

SEQ ID NO: 146360 - RNA, 19 nt, Artificial Sequence
  Description of Artificial Sequence: Synthetic oligonucleotide
  Sense strand starting at position 3562 of SEQ ID NO: 1878
cugagaggugucugaucuu

SEQ ID NO: 146361 - RNA, 19 nt, Artificial Sequence
  Description of Artificial Sequence: Synthetic oligonucleotide
  Antisense strand to SEQ ID NO: 146360
aagaucagacaccucucag

SEQ ID NO: 146362 - RNA, 19 nt, Artificial Sequence
  Description of Artificial Sequence: Synthetic oligonucleotide
  Sense strand starting at position 3565 of SEQ ID NO: 1878
agaggugucugaucuugcu

SEQ ID NO: 146363 - RNA, 19 nt, Artificial Sequence
  Description of Artificial Sequence: Synthetic oligonucleotide
  Antisense strand to SEQ ID NO: 146362
agcaagaucagacaccucu

SEQ ID NO: 146364 - RNA, 19 nt, Artificial Sequence
  Description of Artificial Sequence: Synthetic oligonucleotide
  Sense strand starting at position 3970 of SEQ ID NO: 1878
gcgagacacugaucaggau

SEQ ID NO: 146365 - RNA, 19 nt, Artificial Sequence
  Description of Artificial Sequence: Synthetic oligonucleotide
  Antisense strand to SEQ ID NO: 146364
auccugaucagugucucgc

SEQ ID NO: 146366 - RNA, 19 nt, Artificial Sequence
  Description of Artificial Sequence: Synthetic oligonucleotide
  Sense strand starting at position 3983 of SEQ ID NO: 1878
caggauuaugcugagcaaa

SEQ ID NO: 146367 - RNA, 19 nt, Artificial Sequence
  Description of Artificial Sequence: Synthetic oligonucleotide
  Antisense strand to SEQ ID NO: 146366
uuugcucagcauaauccug

SEQ ID NO: 146368 - RNA, 19 nt, Artificial Sequence
  Description of Artificial Sequence: Synthetic oligonucleotide
  Sense strand starting at position 12 of SEQ ID NO: 1877
accuaacugcuguaauugu

SEQ ID NO: 146369 - RNA, 19 nt, Artificial Sequence
  Description of Artificial Sequence: Synthetic oligonucleotide
  Antisense strand to SEQ ID NO: 146368
acaauuacagcaguuaggu

SEQ ID NO: 146370 - RNA, 19 nt, Artificial Sequence
  Description of Artificial Sequence: Synthetic oligonucleotide
  Sense strand starting at position 20 of SEQ ID NO: 1877
gcuguaauugugucauugu

SEQ ID NO: 146371 - RNA, 19 nt, Artificial Sequence
  Description of Artificial Sequence: Synthetic oligonucleotide
  Antisense strand to SEQ ID NO: 146370
acaaugacacaauuacagc

SEQ ID NO: 146372 - RNA, 19 nt, Artificial Sequence
  Description of Artificial Sequence: Synthetic oligonucleotide
  Sense strand starting at position 30 of SEQ ID NO: 1877
ugucauugucuaugaaaug

SEQ ID NO: 146373 - RNA, 19 nt, Artificial Sequence
  Description of Artificial Sequence: Synthetic oligonucleotide
  Antisense strand to SEQ ID NO: 146372
cauuucauagacaaugaca

SEQ ID NO: 146374 - RNA, 19 nt, Artificial Sequence
  Description of Artificial Sequence: Synthetic oligonucleotide
  Sense strand starting at position 37 of SEQ ID NO: 1877
gucuaugaaaugggucuuu

SEQ ID NO: 146375 - RNA, 19 nt, Artificial Sequence
  Description of Artificial Sequence: Synthetic oligonucleotide
  Antisense strand to SEQ ID NO: 146374
aaagacccauuucauagac

SEQ ID NO: 146376 - RNA, 19 nt, Artificial Sequence
  Description of Artificial Sequence: Synthetic oligonucleotide
  Sense strand starting at position 64 of SEQ ID NO: 1877
auuguaaagcccugugaag

SEQ ID NO: 146377 - RNA, 19 nt, Artificial Sequence
  Description of Artificial Sequence: Synthetic oligonucleotide
  Antisense strand to SEQ ID NO: 146376
cuucacagggcuuuacaau

SEQ ID NO: 146378 - RNA, 19 nt, Artificial Sequence
  Description of Artificial Sequence: Synthetic oligonucleotide
  Sense strand starting at position 96 of SEQ ID NO: 1877
uggucuuauuuacuuugua

SEQ ID NO: 146379 - RNA, 19 nt, Artificial Sequence
  Description of Artificial Sequence: Synthetic oligonucleotide
  Antisense strand to SEQ ID NO: 146378
uacaaaguaaauaagacca

SEQ ID NO: 146380 - RNA, 19 nt, Artificial Sequence
  Description of Artificial Sequence: Synthetic oligonucleotide
  Sense strand starting at position 140 of SEQ ID NO: 1877
auccuacagccagaguuaa

SEQ ID NO: 146381 - RNA, 19 nt, Artificial Sequence
  Description of Artificial Sequence: Synthetic oligonucleotide
  Antisense strand to SEQ ID NO: 146380
uuaacucuggcuguaggau

SEQ ID NO: 146382 - RNA, 19 nt, Artificial Sequence
  Description of Artificial Sequence: Synthetic oligonucleotide
  Sense strand starting at position 152 of SEQ ID NO: 1877
gaguuaaaucucuguggga

SEQ ID NO: 146383 - RNA, 19 nt, Artificial Sequence
  Description of Artificial Sequence: Synthetic oligonucleotide
  Antisense strand to SEQ ID NO: 146382
ucccacagagauuuaacuc

SEQ ID NO: 146384 - RNA, 19 nt, Artificial Sequence
  Description of Artificial Sequence: Synthetic oligonucleotide
  Sense strand starting at position 153 of SEQ ID NO: 1877
aguuaaaucucugugggac

SEQ ID NO: 146385 - RNA, 19 nt, Artificial Sequence
  Description of Artificial Sequence: Synthetic oligonucleotide
  Antisense strand to SEQ ID NO: 146384
gucccacagagauuuaacu

SEQ ID NO: 146386 - RNA, 19 nt, Artificial Sequence
  Description of Artificial Sequence: Synthetic oligonucleotide
  Sense strand starting at position 154 of SEQ ID NO: 1877
guuaaaucucugugggacu

SEQ ID NO: 146387 - RNA, 19 nt, Artificial Sequence
  Description of Artificial Sequence: Synthetic oligonucleotide
  Antisense strand to SEQ ID NO: 146386
agucccacagagauuuaac

SEQ ID NO: 146388 - RNA, 19 nt, Artificial Sequence
  Description of Artificial Sequence: Synthetic oligonucleotide
  Sense strand starting at position 156 of SEQ ID NO: 1877
uaaaucucugugggacuga

SEQ ID NO: 146389 - RNA, 19 nt, Artificial Sequence
  Description of Artificial Sequence: Synthetic oligonucleotide
  Antisense strand to SEQ ID NO: 146388
ucagucccacagagauuua

SEQ ID NO: 146390 - RNA, 19 nt, Artificial Sequence
  Description of Artificial Sequence: Synthetic oligonucleotide
  Sense strand starting at position 172 of SEQ ID NO: 1877
ugaaaucucuugguugcuu

SEQ ID NO: 146391 - RNA, 19 nt, Artificial Sequence
  Description of Artificial Sequence: Synthetic oligonucleotide
  Antisense strand to SEQ ID NO: 146390
aagcaaccaagagauuuca

SEQ ID NO: 146392 - RNA, 19 nt, Artificial Sequence
  Description of Artificial Sequence: Synthetic oligonucleotide
  Sense strand starting at position 173 of SEQ ID NO: 1877
gaaaucucuugguugcuua

SEQ ID NO: 146393 - RNA, 19 nt, Artificial Sequence
  Description of Artificial Sequence: Synthetic oligonucleotide
  Antisense strand to SEQ ID NO: 146392
uaagcaaccaagagauuuc

SEQ ID NO: 146394 - RNA, 19 nt, Artificial Sequence
  Description of Artificial Sequence: Synthetic oligonucleotide
  Sense strand starting at position 693 of SEQ ID NO: 1877
cucugacucuauucuguua

SEQ ID NO: 146395 - RNA, 19 nt, Artificial Sequence
  Description of Artificial Sequence: Synthetic oligonucleotide
  Antisense strand to SEQ ID NO: 146394
uaacagaauagagucagag

SEQ ID NO: 146396 - RNA, 19 nt, Artificial Sequence
  Description of Artificial Sequence: Synthetic oligonucleotide
  Sense strand starting at position 1101 of SEQ ID NO: 1877
ggcucuggcccucaaacuu

SEQ ID NO: 146397 - RNA, 19 nt, Artificial Sequence
  Description of Artificial Sequence: Synthetic oligonucleotide
  Antisense strand to SEQ ID NO: 146396
aaguuugagggccagagcc

SEQ ID NO: 146398 - RNA, 19 nt, Artificial Sequence
  Description of Artificial Sequence: Synthetic oligonucleotide
  Sense strand starting at position 1251 of SEQ ID NO: 1877
cccacauucucugcagaga

SEQ ID NO: 146399 - RNA, 19 nt, Artificial Sequence
  Description of Artificial Sequence: Synthetic oligonucleotide
  Antisense strand to SEQ ID NO: 146398
ucucugcagagaauguggg

SEQ ID NO: 146400 - RNA, 19 nt, Artificial Sequence
  Description of Artificial Sequence: Synthetic oligonucleotide
  Sense strand starting at position 1252 of SEQ ID NO: 1877
ccacauucucugcagagau

SEQ ID NO: 146401 - RNA, 19 nt, Artificial Sequence
  Description of Artificial Sequence: Synthetic oligonucleotide
  Antisense strand to SEQ ID NO: 146400
aucucugcagagaaugugg

SEQ ID NO: 146402 - RNA, 19 nt, Artificial Sequence
  Description of Artificial Sequence: Synthetic oligonucleotide
  Sense strand starting at position 1276 of SEQ ID NO: 1877
cccacaucccugggugagu

SEQ ID NO: 146403 - RNA, 19 nt, Artificial Sequence
  Description of Artificial Sequence: Synthetic oligonucleotide
  Antisense strand to SEQ ID NO: 146402
acucacccagggauguggg

SEQ ID NO: 146404 - RNA, 19 nt, Artificial Sequence
  Description of Artificial Sequence: Synthetic oligonucleotide
  Sense strand starting at position 1363 of SEQ ID NO: 1877
ccaagucugucacuccuua

SEQ ID NO: 146405 - RNA, 19 nt, Artificial Sequence
  Description of Artificial Sequence: Synthetic oligonucleotide
  Antisense strand to SEQ ID NO: 146404
uaaggagugacagacuugg

SEQ ID NO: 146406 - RNA, 19 nt, Artificial Sequence
  Description of Artificial Sequence: Synthetic oligonucleotide
  Sense strand starting at position 1368 of SEQ ID NO: 1877
ucugucacuccuuaaagga

SEQ ID NO: 146407 - RNA, 19 nt, Artificial Sequence
  Description of Artificial Sequence: Synthetic oligonucleotide
  Antisense strand to SEQ ID NO: 146406
uccuuuaaggagugacaga

SEQ ID NO: 146408 - RNA, 19 nt, Artificial Sequence
  Description of Artificial Sequence: Synthetic oligonucleotide
  Sense strand starting at position 1388 of SEQ ID NO: 1877
agguuucuccacuggugaa

SEQ ID NO: 146409 - RNA, 19 nt, Artificial Sequence
  Description of Artificial Sequence: Synthetic oligonucleotide
  Antisense strand to SEQ ID NO: 146408
uucaccaguggagaaaccu

SEQ ID NO: 146410 - RNA, 19 nt, Artificial Sequence
  Description of Artificial Sequence: Synthetic oligonucleotide
  Sense strand starting at position 1389 of SEQ ID NO: 1877
gguuucuccacuggugaau

SEQ ID NO: 146411 - RNA, 19 nt, Artificial Sequence
  Description of Artificial Sequence: Synthetic oligonucleotide
  Antisense strand to SEQ ID NO: 146410
auucaccaguggagaaacc

SEQ ID NO: 146412 - RNA, 19 nt, Artificial Sequence
  Description of Artificial Sequence: Synthetic oligonucleotide
  Sense strand starting at position 1650 of SEQ ID NO: 1877
gcgauuucuucuccucugu

SEQ ID NO: 146413 - RNA, 19 nt, Artificial Sequence
  Description of Artificial Sequence: Synthetic oligonucleotide
  Antisense strand to SEQ ID NO: 146412
acagaggagaagaaaucgc

SEQ ID NO: 146414 - RNA, 19 nt, Artificial Sequence
  Description of Artificial Sequence: Synthetic oligonucleotide
  Sense strand starting at position 2168 of SEQ ID NO: 1877
aggacacuuuauguaaauc

SEQ ID NO: 146415 - RNA, 19 nt, Artificial Sequence
  Description of Artificial Sequence: Synthetic oligonucleotide
  Antisense strand to SEQ ID NO: 146414
gauuuacauaaaguguccu

SEQ ID NO: 146416 - RNA, 19 nt, Artificial Sequence
  Description of Artificial Sequence: Synthetic oligonucleotide
  Sense strand starting at position 2241 of SEQ ID NO: 1877
auuccagauugaucaguga

SEQ ID NO: 146417 - RNA, 19 nt, Artificial Sequence
  Description of Artificial Sequence: Synthetic oligonucleotide
  Antisense strand to SEQ ID NO: 146416
ucacugaucaaucuggaau

SEQ ID NO: 146418 - RNA, 19 nt, Artificial Sequence
  Description of Artificial Sequence: Synthetic oligonucleotide
  Sense strand starting at position 2263 of SEQ ID NO: 1877
gagggauucucagagauau

SEQ ID NO: 146419 - RNA, 19 nt, Artificial Sequence
  Description of Artificial Sequence: Synthetic oligonucleotide
  Antisense strand to SEQ ID NO: 146418
auaucucugagaaucccuc

SEQ ID NO: 146420 - RNA, 19 nt, Artificial Sequence
  Description of Artificial Sequence: Synthetic oligonucleotide
  Sense strand starting at position 2312 of SEQ ID NO: 1877
acaauaaaugggugagcua

SEQ ID NO: 146421 - RNA, 19 nt, Artificial Sequence
  Description of Artificial Sequence: Synthetic oligonucleotide
  Antisense strand to SEQ ID NO: 146420
uagcucacccauuuauugu

SEQ ID NO: 146422 - RNA, 19 nt, Artificial Sequence
  Description of Artificial Sequence: Synthetic oligonucleotide
  Sense strand starting at position 2326 of SEQ ID NO: 1877
agcuaugauuuggacccaa

SEQ ID NO: 146423 - RNA, 19 nt, Artificial Sequence
  Description of Artificial Sequence: Synthetic oligonucleotide
  Antisense strand to SEQ ID NO: 146422
uuggguccaaaucauagcu

SEQ ID NO: 146424 - RNA, 19 nt, Artificial Sequence
  Description of Artificial Sequence: Synthetic oligonucleotide
  Sense strand starting at position 2338 of SEQ ID NO: 1877
gacccaagucuuugugacu

SEQ ID NO: 146425 - RNA, 19 nt, Artificial Sequence
  Description of Artificial Sequence: Synthetic oligonucleotide
  Antisense strand to SEQ ID NO: 146424
agucacaaagacuuggguc

SEQ ID NO: 146426 - RNA, 19 nt, Artificial Sequence
  Description of Artificial Sequence: Synthetic oligonucleotide
  Sense strand starting at position 2339 of SEQ ID NO: 1877
acccaagucuuugugacuu

SEQ ID NO: 146427 - RNA, 19 nt, Artificial Sequence
  Description of Artificial Sequence: Synthetic oligonucleotide
  Antisense strand to SEQ ID NO: 146426
aagucacaaagacuugggu

SEQ ID NO: 146428 - RNA, 19 nt, Artificial Sequence
  Description of Artificial Sequence: Synthetic oligonucleotide
  Sense strand starting at position 2343 of SEQ ID NO: 1877
aagucuuugugacuuuaga

SEQ ID NO: 146429 - RNA, 19 nt, Artificial Sequence
  Description of Artificial Sequence: Synthetic oligonucleotide
  Antisense strand to SEQ ID NO: 146428
ucuaaagucacaaagacuu

SEQ ID NO: 146430 - RNA, 19 nt, Artificial Sequence
  Description of Artificial Sequence: Synthetic oligonucleotide
  Sense strand starting at position 2357 of SEQ ID NO: 1877
uuagaauccugugauuucu

SEQ ID NO: 146431 - RNA, 19 nt, Artificial Sequence
  Description of Artificial Sequence: Synthetic oligonucleotide
  Antisense strand to SEQ ID NO: 146430
agaaaucacaggauucuaa

SEQ ID NO: 146432 - RNA, 19 nt, Artificial Sequence
  Description of Artificial Sequence: Synthetic oligonucleotide
  Sense strand starting at position 2919 of SEQ ID NO: 1877
aggagucagccaugccaca

SEQ ID NO: 146433 - RNA, 19 nt, Artificial Sequence
  Description of Artificial Sequence: Synthetic oligonucleotide
  Antisense strand to SEQ ID NO: 146432
uguggcauggcugacuccu

SEQ ID NO: 146434 - RNA, 19 nt, Artificial Sequence
  Description of Artificial Sequence: Synthetic oligonucleotide
  Sense strand starting at position 3178 of SEQ ID NO: 1877
ggucauugacaguggauga

SEQ ID NO: 146435 - RNA, 19 nt, Artificial Sequence
  Description of Artificial Sequence: Synthetic oligonucleotide
  Antisense strand to SEQ ID NO: 146434
ucauccacugucaaugacc

SEQ ID NO: 146436 - RNA, 19 nt, Artificial Sequence
  Description of Artificial Sequence: Synthetic oligonucleotide
  Sense strand starting at position 3341 of SEQ ID NO: 1877
acaggauguuggucuguuu

SEQ ID NO: 146437 - RNA, 19 nt, Artificial Sequence
  Description of Artificial Sequence: Synthetic oligonucleotide
  Antisense strand to SEQ ID NO: 146436
aaacagaccaacauccugu

SEQ ID NO: 146438 - RNA, 19 nt, Artificial Sequence
  Description of Artificial Sequence: Synthetic oligonucleotide
  Sense strand starting at position 3898 of SEQ ID NO: 1877
gcccuaagcauggauaguu

SEQ ID NO: 146439 - RNA, 19 nt, Artificial Sequence
  Description of Artificial Sequence: Synthetic oligonucleotide
  Antisense strand to SEQ ID NO: 146438
aacuauccaugcuuagggc

SEQ ID NO: 146440 - RNA, 19 nt, Artificial Sequence
  Description of Artificial Sequence: Synthetic oligonucleotide
  Sense strand starting at position 3938 of SEQ ID NO: 1877
gcaagaagaucccuugguu

SEQ ID NO: 146441 - RNA, 19 nt, Artificial Sequence
  Description of Artificial Sequence: Synthetic oligonucleotide
  Antisense strand to SEQ ID NO: 146440
aaccaagggaucuucuugc

SEQ ID NO: 146442 - RNA, 19 nt, Artificial Sequence
  Description of Artificial Sequence: Synthetic oligonucleotide
  Sense strand starting at position 3941 of SEQ ID NO: 1877
agaagaucccuugguuauc

SEQ ID NO: 146443 - RNA, 19 nt, Artificial Sequence
  Description of Artificial Sequence: Synthetic oligonucleotide
  Antisense strand to SEQ ID NO: 146442
gauaaccaagggaucuucu

SEQ ID NO: 146444 - RNA, 19 nt, Artificial Sequence
  Description of Artificial Sequence: Synthetic oligonucleotide
  Sense strand starting at position 3950 of SEQ ID NO: 1877
cuugguuauccuuauggga

SEQ ID NO: 146445 - RNA, 19 nt, Artificial Sequence
  Description of Artificial Sequence: Synthetic oligonucleotide
  Antisense strand to SEQ ID NO: 146444
ucccauaaggauaaccaag

SEQ ID NO: 146446 - RNA, 19 nt, Artificial Sequence
  Description of Artificial Sequence: Synthetic oligonucleotide
  Sense strand starting at position 3954 of SEQ ID NO: 1877
guuauccuuaugggaaguu

SEQ ID NO: 146447 - RNA, 19 nt, Artificial Sequence
  Description of Artificial Sequence: Synthetic oligonucleotide
  Antisense strand to SEQ ID NO: 146446
aacuucccauaaggauaac

SEQ ID NO: 146448 - RNA, 19 nt, Artificial Sequence
  Description of Artificial Sequence: Synthetic oligonucleotide
  Sense strand starting at position 79 of SEQ ID NO: 1879
uaagaaauguguccaguga

SEQ ID NO: 146449 - RNA, 19 nt, Artificial Sequence
  Description of Artificial Sequence: Synthetic oligonucleotide
  Antisense strand to SEQ ID NO: 146448
ucacuggacacauuucuua

SEQ ID NO: 146450 - RNA, 19 nt, Artificial Sequence
  Description of Artificial Sequence: Synthetic oligonucleotide
  Sense strand starting at position 80 of SEQ ID NO: 1879
aagaaauguguccagugac

SEQ ID NO: 146451 - RNA, 19 nt, Artificial Sequence
  Description of Artificial Sequence: Synthetic oligonucleotide
  Antisense strand to SEQ ID NO: 146450
gucacuggacacauuucuu

SEQ ID NO: 146452 - RNA, 19 nt, Artificial Sequence
  Description of Artificial Sequence: Synthetic oligonucleotide
  Sense strand starting at position 129 of SEQ ID NO: 1879
agaacacacgucuaugacu

SEQ ID NO: 146453 - RNA, 19 nt, Artificial Sequence
  Description of Artificial Sequence: Synthetic oligonucleotide
  Antisense strand to SEQ ID NO: 146452
agucauagacguguguucu

SEQ ID NO: 146454 - RNA, 19 nt, Artificial Sequence
  Description of Artificial Sequence: Synthetic oligonucleotide
  Sense strand starting at position 177 of SEQ ID NO: 1879
gucugcucuugcucuauca

SEQ ID NO: 146455 - RNA, 19 nt, Artificial Sequence
  Description of Artificial Sequence: Synthetic oligonucleotide
  Antisense strand to SEQ ID NO: 146454
ugauagagcaagagcagac

SEQ ID NO: 146456 - RNA, 19 nt, Artificial Sequence
  Description of Artificial Sequence: Synthetic oligonucleotide
  Sense strand starting at position 232 of SEQ ID NO: 1879
ugcaaucucugucuccaga

SEQ ID NO: 146457 - RNA, 19 nt, Artificial Sequence
  Description of Artificial Sequence: Synthetic oligonucleotide
  Antisense strand to SEQ ID NO: 146456
ucuggagacagagauugca

SEQ ID NO: 146458 - RNA, 19 nt, Artificial Sequence
  Description of Artificial Sequence: Synthetic oligonucleotide
  Sense strand starting at position 475 of SEQ ID NO: 1879
gucgccucaucccauuuaa

SEQ ID NO: 146459 - RNA, 19 nt, Artificial Sequence
  Description of Artificial Sequence: Synthetic oligonucleotide
  Antisense strand to SEQ ID NO: 146458
uuaaaugggaugaggcgac

SEQ ID NO: 146460 - RNA, 19 nt, Artificial Sequence
  Description of Artificial Sequence: Synthetic oligonucleotide
  Sense strand starting at position 1115 of SEQ ID NO: 1879
agcacuuaauuauaagaga

SEQ ID NO: 146461 - RNA, 19 nt, Artificial Sequence
  Description of Artificial Sequence: Synthetic oligonucleotide
  Antisense strand to SEQ ID NO: 146460
ucucuuauaauuaagugcu

SEQ ID NO: 146462 - RNA, 19 nt, Artificial Sequence
  Description of Artificial Sequence: Synthetic oligonucleotide
  Sense strand starting at position 1131 of SEQ ID NO: 1879
agaugcagauaauaauaga

SEQ ID NO: 146463 - RNA, 19 nt, Artificial Sequence
  Description of Artificial Sequence: Synthetic oligonucleotide
  Antisense strand to SEQ ID NO: 146462
ucuauuauuaucugcaucu

SEQ ID NO: 146464 - RNA, 19 nt, Artificial Sequence
  Description of Artificial Sequence: Synthetic oligonucleotide
  Sense strand starting at position 1142 of SEQ ID NO: 1879
auaauagaucauuaucgca

SEQ ID NO: 146465 - RNA, 19 nt, Artificial Sequence
  Description of Artificial Sequence: Synthetic oligonucleotide
  Antisense strand to SEQ ID NO: 146464
ugcgauaaugaucuauuau

SEQ ID NO: 146466 - RNA, 19 nt, Artificial Sequence
  Description of Artificial Sequence: Synthetic oligonucleotide
  Sense strand starting at position 1188 of SEQ ID NO: 1879
agcauaaaguuucugucau

SEQ ID NO: 146467 - RNA, 19 nt, Artificial Sequence
  Description of Artificial Sequence: Synthetic oligonucleotide
  Antisense strand to SEQ ID NO: 146466
augacagaaacuuuaugcu

SEQ ID NO: 146468 - RNA, 19 nt, Artificial Sequence
  Description of Artificial Sequence: Synthetic oligonucleotide
  Sense strand starting at position 1194 of SEQ ID NO: 1879
aaguuucugucauagauga

SEQ ID NO: 146469 - RNA, 19 nt, Artificial Sequence
  Description of Artificial Sequence: Synthetic oligonucleotide
  Antisense strand to SEQ ID NO: 146468
ucaucuaugacagaaacuu

SEQ ID NO: 146470 - RNA, 19 nt, Artificial Sequence
  Description of Artificial Sequence: Synthetic oligonucleotide
  Sense strand starting at position 1205 of SEQ ID NO: 1879
auagaugacucagggacuu

SEQ ID NO: 146471 - RNA, 19 nt, Artificial Sequence
  Description of Artificial Sequence: Synthetic oligonucleotide
  Antisense strand to SEQ ID NO: 146470
aagucccugagucaucuau

SEQ ID NO: 146472 - RNA, 19 nt, Artificial Sequence
  Description of Artificial Sequence: Synthetic oligonucleotide
  Sense strand starting at position 1387 of SEQ ID NO: 1879
aggauuagugccugugcca

SEQ ID NO: 146473 - RNA, 19 nt, Artificial Sequence
  Description of Artificial Sequence: Synthetic oligonucleotide
  Antisense strand to SEQ ID NO: 146472
uggcacaggcacuaauccu

SEQ ID NO: 146474 - RNA, 19 nt, Artificial Sequence
  Description of Artificial Sequence: Synthetic oligonucleotide
  Sense strand starting at position 1407 of SEQ ID NO: 1879
gucccacgccuccgagaaa

SEQ ID NO: 146475 - RNA, 19 nt, Artificial Sequence
  Description of Artificial Sequence: Synthetic oligonucleotide
  Antisense strand to SEQ ID NO: 146474
uuucucggaggcgugggac

SEQ ID NO: 146476 - RNA, 19 nt, Artificial Sequence
  Description of Artificial Sequence: Synthetic oligonucleotide
  Sense strand starting at position 1640 of SEQ ID NO: 1879
uccacaucuuggucacgau

SEQ ID NO: 146477 - RNA, 19 nt, Artificial Sequence
  Description of Artificial Sequence: Synthetic oligonucleotide
  Antisense strand to SEQ ID NO: 146476
aucgugaccaagaugugga

SEQ ID NO: 146478 - RNA, 19 nt, Artificial Sequence
  Description of Artificial Sequence: Synthetic oligonucleotide
  Sense strand starting at position 1641 of SEQ ID NO: 1879
ccacaucuuggucacgauu

SEQ ID NO: 146479 - RNA, 19 nt, Artificial Sequence
  Description of Artificial Sequence: Synthetic oligonucleotide
  Antisense strand to SEQ ID NO: 146478
aaucgugaccaagaugugg

SEQ ID NO: 146480 - RNA, 19 nt, Artificial Sequence
  Description of Artificial Sequence: Synthetic oligonucleotide
  Sense strand starting at position 1650 of SEQ ID NO: 1879
ggucacgauucuccgcaaa

SEQ ID NO: 146481 - RNA, 19 nt, Artificial Sequence
  Description of Artificial Sequence: Synthetic oligonucleotide
  Antisense strand to SEQ ID NO: 146480
uuugcggagaaucgugacc

SEQ ID NO: 146482 - RNA, 19 nt, Artificial Sequence
  Description of Artificial Sequence: Synthetic oligonucleotide
  Sense strand starting at position 1652 of SEQ ID NO: 1879
ucacgauucuccgcaaaga

SEQ ID NO: 146483 - RNA, 19 nt, Artificial Sequence
  Description of Artificial Sequence: Synthetic oligonucleotide
  Antisense strand to SEQ ID NO: 146482
ucuuugcggagaaucguga

SEQ ID NO: 146484 - RNA, 19 nt, Artificial Sequence
  Description of Artificial Sequence: Synthetic oligonucleotide
  Sense strand starting at position 1653 of SEQ ID NO: 1879
cacgauucuccgcaaagag

SEQ ID NO: 146485 - RNA, 19 nt, Artificial Sequence
  Description of Artificial Sequence: Synthetic oligonucleotide
  Antisense strand to SEQ ID NO: 146484
cucuuugcggagaaucgug

SEQ ID NO: 146486 - RNA, 19 nt, Artificial Sequence
  Description of Artificial Sequence: Synthetic oligonucleotide
  Sense strand starting at position 1916 of SEQ ID NO: 1879
caucuuuacgaagggcaaa

SEQ ID NO: 146487 - RNA, 19 nt, Artificial Sequence
  Description of Artificial Sequence: Synthetic oligonucleotide
  Antisense strand to SEQ ID NO: 146486
uuugcccuucguaaagaug

SEQ ID NO: 146488 - RNA, 19 nt, Artificial Sequence
  Description of Artificial Sequence: Synthetic oligonucleotide
  Sense strand starting at position 1970 of SEQ ID NO: 1879
gcgguaucgcaagaaauca

SEQ ID NO: 146489 - RNA, 19 nt, Artificial Sequence
  Description of Artificial Sequence: Synthetic oligonucleotide
  Antisense strand to SEQ ID NO: 146488
ugauuucuugcgauaccgc

SEQ ID NO: 146490 - RNA, 19 nt, Artificial Sequence
  Description of Artificial Sequence: Synthetic oligonucleotide
  Sense strand starting at position 2048 of SEQ ID NO: 1879
gcgacuucugccgucacuu

SEQ ID NO: 146491 - RNA, 19 nt, Artificial Sequence
  Description of Artificial Sequence: Synthetic oligonucleotide
  Antisense strand to SEQ ID NO: 146490
aagugacggcagaagucgc

SEQ ID NO: 146492 - RNA, 19 nt, Artificial Sequence
  Description of Artificial Sequence: Synthetic oligonucleotide
  Sense strand starting at position 2083 of SEQ ID NO: 1879
ucagguucgcgccaaacua

SEQ ID NO: 146493 - RNA, 19 nt, Artificial Sequence
  Description of Artificial Sequence: Synthetic oligonucleotide
  Antisense strand to SEQ ID NO: 146492
uaguuuggcgcgaaccuga

SEQ ID NO: 146494 - RNA, 19 nt, Artificial Sequence
  Description of Artificial Sequence: Synthetic oligonucleotide
  Sense strand starting at position 2177 of SEQ ID NO: 1879
gcgggaauugcgcaccuca

SEQ ID NO: 146495 - RNA, 19 nt, Artificial Sequence
  Description of Artificial Sequence: Synthetic oligonucleotide
  Antisense strand to SEQ ID NO: 146494
ugaggugcgcaauucccgc

SEQ ID NO: 146496 - RNA, 19 nt, Artificial Sequence
  Description of Artificial Sequence: Synthetic oligonucleotide
  Sense strand starting at position 2226 of SEQ ID NO: 1879
cguggaguugcuuguucuu

SEQ ID NO: 146497 - RNA, 19 nt, Artificial Sequence
  Description of Artificial Sequence: Synthetic oligonucleotide
  Antisense strand to SEQ ID NO: 146496
aagaacaagcaacuccacg

SEQ ID NO: 146498 - RNA, 19 nt, Artificial Sequence
  Description of Artificial Sequence: Synthetic oligonucleotide
  Sense strand starting at position 2256 of SEQ ID NO: 1879
gucacauucucuucgugua

SEQ ID NO: 146499 - RNA, 19 nt, Artificial Sequence
  Description of Artificial Sequence: Synthetic oligonucleotide
  Antisense strand to SEQ ID NO: 146498
uacacgaagagaaugugac

SEQ ID NO: 146500 - RNA, 19 nt, Artificial Sequence
  Description of Artificial Sequence: Synthetic oligonucleotide
  Sense strand starting at position 2257 of SEQ ID NO: 1879
ucacauucucuucguguaa

SEQ ID NO: 146501 - RNA, 19 nt, Artificial Sequence
  Description of Artificial Sequence: Synthetic oligonucleotide
  Antisense strand to SEQ ID NO: 146500
uuacacgaagagaauguga

SEQ ID NO: 146502 - RNA, 19 nt, Artificial Sequence
  Description of Artificial Sequence: Synthetic oligonucleotide
  Sense strand starting at position 2270 of SEQ ID NO: 1879
guguaaugccaccaauggu

SEQ ID NO: 146503 - RNA, 19 nt, Artificial Sequence
  Description of Artificial Sequence: Synthetic oligonucleotide
  Antisense strand to SEQ ID NO: 146502
accauugguggcauuacac

SEQ ID NO: 146504 - RNA, 19 nt, Artificial Sequence
  Description of Artificial Sequence: Synthetic oligonucleotide
  Sense strand starting at position 2323 of SEQ ID NO: 1879
cgcccucuugccuaugaca

SEQ ID NO: 146505 - RNA, 19 nt, Artificial Sequence
  Description of Artificial Sequence: Synthetic oligonucleotide
  Antisense strand to SEQ ID NO: 146504
ugucauaggcaagagggcg

SEQ ID NO: 146506 - RNA, 19 nt, Artificial Sequence
  Description of Artificial Sequence: Synthetic oligonucleotide
  Sense strand starting at position 2336 of SEQ ID NO: 1879
augacagacuugugaaaga

SEQ ID NO: 146507 - RNA, 19 nt, Artificial Sequence
  Description of Artificial Sequence: Synthetic oligonucleotide
  Antisense strand to SEQ ID NO: 146506
ucuuucacaagucugucau

SEQ ID NO: 146508 - RNA, 19 nt, Artificial Sequence
  Description of Artificial Sequence: Synthetic oligonucleotide
  Sense strand starting at position 2345 of SEQ ID NO: 1879
uugugaaagaugugagggu

SEQ ID NO: 146509 - RNA, 19 nt, Artificial Sequence
  Description of Artificial Sequence: Synthetic oligonucleotide
  Antisense strand to SEQ ID NO: 146508
acccucacaucuuucacaa

SEQ ID NO: 146510 - RNA, 19 nt, Artificial Sequence
  Description of Artificial Sequence: Synthetic oligonucleotide
  Sense strand starting at position 2418 of SEQ ID NO: 1879
uccagucauuucgaccauu

SEQ ID NO: 146511 - RNA, 19 nt, Artificial Sequence
  Description of Artificial Sequence: Synthetic oligonucleotide
  Antisense strand to SEQ ID NO: 146510
aauggucgaaaugacugga

SEQ ID NO: 146512 - RNA, 19 nt, Artificial Sequence
  Description of Artificial Sequence: Synthetic oligonucleotide
  Sense strand starting at position 2504 of SEQ ID NO: 1879
auacucaugcauuguuaga

SEQ ID NO: 146513 - RNA, 19 nt, Artificial Sequence
  Description of Artificial Sequence: Synthetic oligonucleotide
  Antisense strand to SEQ ID NO: 146512
ucuaacaaugcaugaguau

SEQ ID NO: 146514 - RNA, 19 nt, Artificial Sequence
  Description of Artificial Sequence: Synthetic oligonucleotide
  Sense strand starting at position 2506 of SEQ ID NO: 1879
acucaugcauuguuagaau

SEQ ID NO: 146515 - RNA, 19 nt, Artificial Sequence
  Description of Artificial Sequence: Synthetic oligonucleotide
  Antisense strand to SEQ ID NO: 146514
auucuaacaaugcaugagu

SEQ ID NO: 146516 - RNA, 19 nt, Artificial Sequence
  Description of Artificial Sequence: Synthetic oligonucleotide
  Sense strand starting at position 2860 of SEQ ID NO: 1879
uuguuuaugccuucuuugu

SEQ ID NO: 146517 - RNA, 19 nt, Artificial Sequence
  Description of Artificial Sequence: Synthetic oligonucleotide
  Antisense strand to SEQ ID NO: 146516
acaaagaaggcauaaacaa

SEQ ID NO: 146518 - RNA, 19 nt, Artificial Sequence
  Description of Artificial Sequence: Synthetic oligonucleotide
  Sense strand starting at position 2861 of SEQ ID NO: 1879
uguuuaugccuucuuuguu

SEQ ID NO: 146519 - RNA, 19 nt, Artificial Sequence
  Description of Artificial Sequence: Synthetic oligonucleotide
  Antisense strand to SEQ ID NO: 146518
aacaaagaaggcauaaaca

SEQ ID NO: 146520 - RNA, 19 nt, Artificial Sequence
  Description of Artificial Sequence: Synthetic oligonucleotide
  Sense strand starting at position 2901 of SEQ ID NO: 1879
gggauucaaugguuaagua

SEQ ID NO: 146521 - RNA, 19 nt, Artificial Sequence
  Description of Artificial Sequence: Synthetic oligonucleotide
  Antisense strand to SEQ ID NO: 146520
uacuuaaccauugaauccc

SEQ ID NO: 146522 - RNA, 19 nt, Artificial Sequence
  Description of Artificial Sequence: Synthetic oligonucleotide
  Sense strand starting at position 2917 of SEQ ID NO: 1879
guaagauagacauggccuu

SEQ ID NO: 146523 - RNA, 19 nt, Artificial Sequence
  Description of Artificial Sequence: Synthetic oligonucleotide
  Antisense strand to SEQ ID NO: 146522
aaggccaugucuaucuuac

SEQ ID NO: 146524 - RNA, 19 nt, Artificial Sequence
  Description of Artificial Sequence: Synthetic oligonucleotide
  Sense strand starting at position 3878 of SEQ ID NO: 1879
uggcgcgaucucugggauu

SEQ ID NO: 146525 - RNA, 19 nt, Artificial Sequence
  Description of Artificial Sequence: Synthetic oligonucleotide
  Antisense strand to SEQ ID NO: 146524
aaucccagagaucgcgcca

SEQ ID NO: 146526 - RNA, 19 nt, Artificial Sequence
  Description of Artificial Sequence: Synthetic oligonucleotide
  Sense strand starting at position 3880 of SEQ ID NO: 1879
gcgcgaucucugggauuac

SEQ ID NO: 146527 - RNA, 19 nt, Artificial Sequence
  Description of Artificial Sequence: Synthetic oligonucleotide
  Antisense strand to SEQ ID NO: 146526
guaaucccagagaucgcgc

SEQ ID NO: 146528 - RNA, 19 nt, Artificial Sequence
  Description of Artificial Sequence: Synthetic oligonucleotide
  Sense strand starting at position 3940 of SEQ ID NO: 1880
auugcuauaguugaaguaa

SEQ ID NO: 146529 - RNA, 19 nt, Artificial Sequence
  Description of Artificial Sequence: Synthetic oligonucleotide
  Antisense strand to SEQ ID NO: 146528
uuacuucaacuauagcaau

SEQ ID NO: 146530 - RNA, 19 nt, Artificial Sequence
  Description of Artificial Sequence: Synthetic oligonucleotide
  Sense strand starting at position 3861 of SEQ ID NO: 1880
agucauauacuugaagguu

SEQ ID NO: 146531 - RNA, 19 nt, Artificial Sequence
  Description of Artificial Sequence: Synthetic oligonucleotide
  Antisense strand to SEQ ID NO: 146530
aaccuucaaguauaugacu

SEQ ID NO: 146532 - RNA, 19 nt, Artificial Sequence
  Description of Artificial Sequence: Synthetic oligonucleotide
  Sense strand starting at position 3740 of SEQ ID NO: 1880
uaaucacagcguuauggga

SEQ ID NO: 146533 - RNA, 19 nt, Artificial Sequence
  Description of Artificial Sequence: Synthetic oligonucleotide
  Antisense strand to SEQ ID NO: 146532
ucccauaacgcugugauua

SEQ ID NO: 146534 - RNA, 19 nt, Artificial Sequence
  Description of Artificial Sequence: Synthetic oligonucleotide
  Sense strand starting at position 3601 of SEQ ID NO: 1880
agagaauaaucacaugaug

SEQ ID NO: 146535 - RNA, 19 nt, Artificial Sequence
  Description of Artificial Sequence: Synthetic oligonucleotide
  Antisense strand to SEQ ID NO: 146534
caucaugugauuauucucu

SEQ ID NO: 146536 - RNA, 19 nt, Artificial Sequence
  Description of Artificial Sequence: Synthetic oligonucleotide
  Sense strand starting at position 3556 of SEQ ID NO: 1880
gaauaaggugcguacaauc

SEQ ID NO: 146537 - RNA, 19 nt, Artificial Sequence
  Description of Artificial Sequence: Synthetic oligonucleotide
  Antisense strand to SEQ ID NO: 146536
gauuguacgcaccuuauuc

SEQ ID NO: 146538 - RNA, 19 nt, Artificial Sequence
  Description of Artificial Sequence: Synthetic oligonucleotide
  Sense strand starting at position 3555 of SEQ ID NO: 1880
agaauaaggugcguacaau

SEQ ID NO: 146539 - RNA, 19 nt, Artificial Sequence
  Description of Artificial Sequence: Synthetic oligonucleotide
  Antisense strand to SEQ ID NO: 146538
auuguacgcaccuuauucu

SEQ ID NO: 146540 - RNA, 19 nt, Artificial Sequence
  Description of Artificial Sequence: Synthetic oligonucleotide
  Sense strand starting at position 3554 of SEQ ID NO: 1880
aagaauaaggugcguacaa

SEQ ID NO: 146541 - RNA, 19 nt, Artificial Sequence
  Description of Artificial Sequence: Synthetic oligonucleotide
  Antisense strand to SEQ ID NO: 146540
uuguacgcaccuuauucuu

SEQ ID NO: 146542 - RNA, 19 nt, Artificial Sequence
  Description of Artificial Sequence: Synthetic oligonucleotide
  Sense strand starting at position 3485 of SEQ ID NO: 1880
caguuagcugggcaaagau

SEQ ID NO: 146543 - RNA, 19 nt, Artificial Sequence
  Description of Artificial Sequence: Synthetic oligonucleotide
  Antisense strand to SEQ ID NO: 146542
aucuuugcccagcuaacug

SEQ ID NO: 146544 - RNA, 19 nt, Artificial Sequence
  Description of Artificial Sequence: Synthetic oligonucleotide
  Sense strand starting at position 3484 of SEQ ID NO: 1880
ucaguuagcugggcaaaga

SEQ ID NO: 146545 - RNA, 19 nt, Artificial Sequence
  Description of Artificial Sequence: Synthetic oligonucleotide
  Antisense strand to SEQ ID NO: 146544
ucuuugcccagcuaacuga

SEQ ID NO: 146546 - RNA, 19 nt, Artificial Sequence
  Description of Artificial Sequence: Synthetic oligonucleotide
  Sense strand starting at position 3298 of SEQ ID NO: 1880
uguguuauuuacguuacau

SEQ ID NO: 146547 - RNA, 19 nt, Artificial Sequence
  Description of Artificial Sequence: Synthetic oligonucleotide
  Antisense strand to SEQ ID NO: 146546
auguaacguaaauaacaca

SEQ ID NO: 146548 - RNA, 19 nt, Artificial Sequence
  Description of Artificial Sequence: Synthetic oligonucleotide
  Sense strand starting at position 3295 of SEQ ID NO: 1880
acguguguuauuuacguua

SEQ ID NO: 146549 - RNA, 19 nt, Artificial Sequence
  Description of Artificial Sequence: Synthetic oligonucleotide
  Antisense strand to SEQ ID NO: 146548
uaacguaaauaacacacgu

SEQ ID NO: 146550 - RNA, 19 nt, Artificial Sequence
  Description of Artificial Sequence: Synthetic oligonucleotide
  Sense strand starting at position 3289 of SEQ ID NO: 1880
uuugauacguguguuauuu

SEQ ID NO: 146551 - RNA, 19 nt, Artificial Sequence
  Description of Artificial Sequence: Synthetic oligonucleotide
  Antisense strand to SEQ ID NO: 146550
aaauaacacacguaucaaa

SEQ ID NO: 146552 - RNA, 19 nt, Artificial Sequence
  Description of Artificial Sequence: Synthetic oligonucleotide
  Sense strand starting at position 3270 of SEQ ID NO: 1880
uuauuaggguaauccuaau

SEQ ID NO: 146553 - RNA, 19 nt, Artificial Sequence
  Description of Artificial Sequence: Synthetic oligonucleotide
  Antisense strand to SEQ ID NO: 146552
auuaggauuacccuaauaa

SEQ ID NO: 146554 - RNA, 19 nt, Artificial Sequence
  Description of Artificial Sequence: Synthetic oligonucleotide
  Sense strand starting at position 2959 of SEQ ID NO: 1880
aaauaagaauggcuguaga

SEQ ID NO: 146555 - RNA, 19 nt, Artificial Sequence
  Description of Artificial Sequence: Synthetic oligonucleotide
  Antisense strand to SEQ ID NO: 146554
ucuacagccauucuuauuu

SEQ ID NO: 146556 - RNA, 19 nt, Artificial Sequence
  Description of Artificial Sequence: Synthetic oligonucleotide
  Sense strand starting at position 2957 of SEQ ID NO: 1880
agaaauaagaauggcugua

SEQ ID NO: 146557 - RNA, 19 nt, Artificial Sequence
  Description of Artificial Sequence: Synthetic oligonucleotide
  Antisense strand to SEQ ID NO: 146556
uacagccauucuuauuucu

SEQ ID NO: 146558 - RNA, 19 nt, Artificial Sequence
  Description of Artificial Sequence: Synthetic oligonucleotide
  Sense strand starting at position 2956 of SEQ ID NO: 1880
gagaaauaagaauggcugu

SEQ ID NO: 146559 - RNA, 19 nt, Artificial Sequence
  Description of Artificial Sequence: Synthetic oligonucleotide
  Antisense strand to SEQ ID NO: 146558
acagccauucuuauuucuc

SEQ ID NO: 146560 - RNA, 19 nt, Artificial Sequence
  Description of Artificial Sequence: Synthetic oligonucleotide
  Sense strand starting at position 2895 of SEQ ID NO: 1880
uguaauaucacggauaguu

SEQ ID NO: 146561 - RNA, 19 nt, Artificial Sequence
  Description of Artificial Sequence: Synthetic oligonucleotide
  Antisense strand to SEQ ID NO: 146560
aacuauccgugauauuaca

SEQ ID NO: 146562 - RNA, 19 nt, Artificial Sequence
  Description of Artificial Sequence: Synthetic oligonucleotide
  Sense strand starting at position 2614 of SEQ ID NO: 1880
gggagugcucgagagguuu

SEQ ID NO: 146563 - RNA, 19 nt, Artificial Sequence
  Description of Artificial Sequence: Synthetic oligonucleotide
  Antisense strand to SEQ ID NO: 146562
aaaccucucgagcacuccc

SEQ ID NO: 146564 - RNA, 19 nt, Artificial Sequence
  Description of Artificial Sequence: Synthetic oligonucleotide
  Sense strand starting at position 1799 of SEQ ID NO: 1880
ggaagagauccuugcuccu

SEQ ID NO: 146565 - RNA, 19 nt, Artificial Sequence
  Description of Artificial Sequence: Synthetic oligonucleotide
  Antisense strand to SEQ ID NO: 146564
aggagcaaggaucucuucc

SEQ ID NO: 146566 - RNA, 19 nt, Artificial Sequence
  Description of Artificial Sequence: Synthetic oligonucleotide
  Sense strand starting at position 1692 of SEQ ID NO: 1880
ccuacucuaccugggagaa

SEQ ID NO: 146567 - RNA, 19 nt, Artificial Sequence
  Description of Artificial Sequence: Synthetic oligonucleotide
  Antisense strand to SEQ ID NO: 146566
uucucccagguagaguagg

SEQ ID NO: 146568 - RNA, 19 nt, Artificial Sequence
  Description of Artificial Sequence: Synthetic oligonucleotide
  Sense strand starting at position 1691 of SEQ ID NO: 1880
gccuacucuaccugggaga

SEQ ID NO: 146569 - RNA, 19 nt, Artificial Sequence
  Description of Artificial Sequence: Synthetic oligonucleotide
  Antisense strand to SEQ ID NO: 146568
ucucccagguagaguaggc

SEQ ID NO: 146570 - RNA, 19 nt, Artificial Sequence
  Description of Artificial Sequence: Synthetic oligonucleotide
  Sense strand starting at position 1254 of SEQ ID NO: 1880
gcaaauugauuacugucua

SEQ ID NO: 146571 - RNA, 19 nt, Artificial Sequence
  Description of Artificial Sequence: Synthetic oligonucleotide
  Antisense strand to SEQ ID NO: 146570
uagacaguaaucaauuugc

SEQ ID NO: 146572 - RNA, 19 nt, Artificial Sequence
  Description of Artificial Sequence: Synthetic oligonucleotide
  Sense strand starting at position 1202 of SEQ ID NO: 1880
uccaaucguguguaaauca

SEQ ID NO: 146573 - RNA, 19 nt, Artificial Sequence
  Description of Artificial Sequence: Synthetic oligonucleotide
  Antisense strand to SEQ ID NO: 146572
ugauuuacacacgauugga

SEQ ID NO: 146574 - RNA, 19 nt, Artificial Sequence
  Description of Artificial Sequence: Synthetic oligonucleotide
  Sense strand starting at position 1105 of SEQ ID NO: 1880
guaggucaggucuacacaa

SEQ ID NO: 146575 - RNA, 19 nt, Artificial Sequence
  Description of Artificial Sequence: Synthetic oligonucleotide
  Antisense strand to SEQ ID NO: 146574
uuguguagaccugaccuac

SEQ ID NO: 146576 - RNA, 19 nt, Artificial Sequence
  Description of Artificial Sequence: Synthetic oligonucleotide
  Sense strand starting at position 1019 of SEQ ID NO: 1880
acucgaugauggucacaca

SEQ ID NO: 146577 - RNA, 19 nt, Artificial Sequence
  Description of Artificial Sequence: Synthetic oligonucleotide
  Antisense strand to SEQ ID NO: 146576
ugugugaccaucaucgagu

SEQ ID NO: 146578 - RNA, 19 nt, Artificial Sequence
  Description of Artificial Sequence: Synthetic oligonucleotide
  Sense strand starting at position 761 of SEQ ID NO: 1880
ucuguuuaguaccuacaau

SEQ ID NO: 146579 - RNA, 19 nt, Artificial Sequence
  Description of Artificial Sequence: Synthetic oligonucleotide
  Antisense strand to SEQ ID NO: 146578
auuguagguacuaaacaga

SEQ ID NO: 146580 - RNA, 19 nt, Artificial Sequence
  Description of Artificial Sequence: Synthetic oligonucleotide
  Sense strand starting at position 567 of SEQ ID NO: 1880
cagucuaugugagaauuua

SEQ ID NO: 146581 - RNA, 19 nt, Artificial Sequence
  Description of Artificial Sequence: Synthetic oligonucleotide
  Antisense strand to SEQ ID NO: 146580
uaaauucucacauagacug

SEQ ID NO: 146582 - RNA, 19 nt, Artificial Sequence
  Description of Artificial Sequence: Synthetic oligonucleotide
  Sense strand starting at position 563 of SEQ ID NO: 1880
guaacagucuaugugagaa

SEQ ID NO: 146583 - RNA, 19 nt, Artificial Sequence
  Description of Artificial Sequence: Synthetic oligonucleotide
  Antisense strand to SEQ ID NO: 146582
uucucacauagacuguuac

SEQ ID NO: 146584 - RNA, 19 nt, Artificial Sequence
  Description of Artificial Sequence: Synthetic oligonucleotide
  Sense strand starting at position 562 of SEQ ID NO: 1880
uguaacagucuaugugaga

SEQ ID NO: 146585 - RNA, 19 nt, Artificial Sequence
  Description of Artificial Sequence: Synthetic oligonucleotide
  Antisense strand to SEQ ID NO: 146584
ucucacauagacuguuaca

SEQ ID NO: 146586 - RNA, 19 nt, Artificial Sequence
  Description of Artificial Sequence: Synthetic oligonucleotide
  Sense strand starting at position 560 of SEQ ID NO: 1880
aauguaacagucuauguga

SEQ ID NO: 146587 - RNA, 19 nt, Artificial Sequence
  Description of Artificial Sequence: Synthetic oligonucleotide
  Antisense strand to SEQ ID NO: 146586
ucacauagacuguuacauu

SEQ ID NO: 146588 - RNA, 19 nt, Artificial Sequence
  Description of Artificial Sequence: Synthetic oligonucleotide
  Sense strand starting at position 539 of SEQ ID NO: 1880
ucuuaaagccuggaguaga

SEQ ID NO: 146589 - RNA, 19 nt, Artificial Sequence
  Description of Artificial Sequence: Synthetic oligonucleotide
  Antisense strand to SEQ ID NO: 146588
ucuacuccaggcuuuaaga

SEQ ID NO: 146590 - RNA, 19 nt, Artificial Sequence
  Description of Artificial Sequence: Synthetic oligonucleotide
  Sense strand starting at position 537 of SEQ ID NO: 1880
uuucuuaaagccuggagua

SEQ ID NO: 146591 - RNA, 19 nt, Artificial Sequence
  Description of Artificial Sequence: Synthetic oligonucleotide
  Antisense strand to SEQ ID NO: 146590
uacuccaggcuuuaagaaa

SEQ ID NO: 146592 - RNA, 19 nt, Artificial Sequence
  Description of Artificial Sequence: Synthetic oligonucleotide
  Sense strand starting at position 514 of SEQ ID NO: 1880
gcagucugagugcuuaguu

SEQ ID NO: 146593 - RNA, 19 nt, Artificial Sequence
  Description of Artificial Sequence: Synthetic oligonucleotide
  Antisense strand to SEQ ID NO: 146592
aacuaagcacucagacugc

SEQ ID NO: 146594 - RNA, 19 nt, Artificial Sequence
  Description of Artificial Sequence: Synthetic oligonucleotide
  Sense strand starting at position 426 of SEQ ID NO: 1880
gagucucuggcauauaaag

SEQ ID NO: 146595 - RNA, 19 nt, Artificial Sequence
  Description of Artificial Sequence: Synthetic oligonucleotide
  Antisense strand to SEQ ID NO: 146594
cuuuauaugccagagacuc

SEQ ID NO: 146596 - RNA, 19 nt, Artificial Sequence
  Description of Artificial Sequence: Synthetic oligonucleotide
  Sense strand starting at position 400 of SEQ ID NO: 1880
uggagugacagcgaaacuu

SEQ ID NO: 146597 - RNA, 19 nt, Artificial Sequence
  Description of Artificial Sequence: Synthetic oligonucleotide
  Antisense strand to SEQ ID NO: 146596
aaguuucgcugucacucca

SEQ ID NO: 146598 - RNA, 19 nt, Artificial Sequence
  Description of Artificial Sequence: Synthetic oligonucleotide
  Sense strand starting at position 286 of SEQ ID NO: 1880
agaaacucugugugauaug

SEQ ID NO: 146599 - RNA, 19 nt, Artificial Sequence
  Description of Artificial Sequence: Synthetic oligonucleotide
  Antisense strand to SEQ ID NO: 146598
cauaucacacagaguuucu

SEQ ID NO: 146600 - RNA, 19 nt, Artificial Sequence
  Description of Artificial Sequence: Synthetic oligonucleotide
  Sense strand starting at position 285 of SEQ ID NO: 1880
uagaaacucugugugauau

SEQ ID NO: 146601 - RNA, 19 nt, Artificial Sequence
  Description of Artificial Sequence: Synthetic oligonucleotide
  Antisense strand to SEQ ID NO: 146600
auaucacacagaguuucua

SEQ ID NO: 146602 - RNA, 19 nt, Artificial Sequence
  Description of Artificial Sequence: Synthetic oligonucleotide
  Sense strand starting at position 284 of SEQ ID NO: 1880
cuagaaacucugugugaua

SEQ ID NO: 146603 - RNA, 19 nt, Artificial Sequence
  Description of Artificial Sequence: Synthetic oligonucleotide
  Antisense strand to SEQ ID NO: 146602
uaucacacagaguuucuag

SEQ ID NO: 146604 - RNA, 19 nt, Artificial Sequence
  Description of Artificial Sequence: Synthetic oligonucleotide
  Sense strand starting at position 283 of SEQ ID NO: 1880
ucuagaaacucugugugau

SEQ ID NO: 146605 - RNA, 19 nt, Artificial Sequence
  Description of Artificial Sequence: Synthetic oligonucleotide
  Antisense strand to SEQ ID NO: 146604
aucacacagaguuucuaga

SEQ ID NO: 146606 - RNA, 19 nt, Artificial Sequence
  Description of Artificial Sequence: Synthetic oligonucleotide
  Sense strand starting at position 90 of SEQ ID NO: 1880
aggcaagaacugugucuau

SEQ ID NO: 146607 - RNA, 19 nt, Artificial Sequence
  Description of Artificial Sequence: Synthetic oligonucleotide
  Antisense strand to SEQ ID NO: 146606
auagacacaguucuugccu

SEQ ID NO: 146608 - RNA, 19 nt, Artificial Sequence
  Description of Artificial Sequence: Synthetic oligonucleotide
  Sense strand starting at position 60 of SEQ ID NO: 1881
acugucuauugaucacuuu

SEQ ID NO: 146609 - RNA, 19 nt, Artificial Sequence
  Description of Artificial Sequence: Synthetic oligonucleotide
  Antisense strand to SEQ ID NO: 146608
aaagugaucaauagacagu

SEQ ID NO: 146610 - RNA, 19 nt, Artificial Sequence
  Description of Artificial Sequence: Synthetic oligonucleotide
  Sense strand starting at position 69 of SEQ ID NO: 1881
ugaucacuuuguguuggau

SEQ ID NO: 146611 - RNA, 19 nt, Artificial Sequence
  Description of Artificial Sequence: Synthetic oligonucleotide
  Antisense strand to SEQ ID NO: 146610
auccaacacaaagugauca

SEQ ID NO: 146612 - RNA, 19 nt, Artificial Sequence
  Description of Artificial Sequence: Synthetic oligonucleotide
  Sense strand starting at position 82 of SEQ ID NO: 1881
uuggauagugggugaauca

SEQ ID NO: 146613 - RNA, 19 nt, Artificial Sequence
  Description of Artificial Sequence: Synthetic oligonucleotide
  Antisense strand to SEQ ID NO: 146612
ugauucacccacuauccaa

SEQ ID NO: 146614 - RNA, 19 nt, Artificial Sequence
  Description of Artificial Sequence: Synthetic oligonucleotide
  Sense strand starting at position 89 of SEQ ID NO: 1881
gugggugaaucauucuauu

SEQ ID NO: 146615 - RNA, 19 nt, Artificial Sequence
  Description of Artificial Sequence: Synthetic oligonucleotide
  Antisense strand to SEQ ID NO: 146614
aauagaaugauucacccac

SEQ ID NO: 146616 - RNA, 19 nt, Artificial Sequence
  Description of Artificial Sequence: Synthetic oligonucleotide
  Sense strand starting at position 92 of SEQ ID NO: 1881
ggugaaucauucuauuuac

SEQ ID NO: 146617 - RNA, 19 nt, Artificial Sequence
  Description of Artificial Sequence: Synthetic oligonucleotide
  Antisense strand to SEQ ID NO: 146616
guaaauagaaugauucacc

SEQ ID NO: 146618 - RNA, 19 nt, Artificial Sequence
  Description of Artificial Sequence: Synthetic oligonucleotide
  Sense strand starting at position 177 of SEQ ID NO: 1881
ugaggcucagaacguuuaa

SEQ ID NO: 146619 - RNA, 19 nt, Artificial Sequence
  Description of Artificial Sequence: Synthetic oligonucleotide
  Antisense strand to SEQ ID NO: 146618
uuaaacguucugagccuca

SEQ ID NO: 146620 - RNA, 19 nt, Artificial Sequence
  Description of Artificial Sequence: Synthetic oligonucleotide
  Sense strand starting at position 423 of SEQ ID NO: 1881
agaugacaaagguguaauc

SEQ ID NO: 146621 - RNA, 19 nt, Artificial Sequence
  Description of Artificial Sequence: Synthetic oligonucleotide
  Antisense strand to SEQ ID NO: 146620
gauuacaccuuugucaucu

SEQ ID NO: 146622 - RNA, 19 nt, Artificial Sequence
  Description of Artificial Sequence: Synthetic oligonucleotide
  Sense strand starting at position 432 of SEQ ID NO: 1881
agguguaauccugauccuu

SEQ ID NO: 146623 - RNA, 19 nt, Artificial Sequence
  Description of Artificial Sequence: Synthetic oligonucleotide
  Antisense strand to SEQ ID NO: 146622
aaggaucaggauuacaccu

SEQ ID NO: 146624 - RNA, 19 nt, Artificial Sequence
  Description of Artificial Sequence: Synthetic oligonucleotide
  Sense strand starting at position 434 of SEQ ID NO: 1881
guguaauccugauccuuag

SEQ ID NO: 146625 - RNA, 19 nt, Artificial Sequence
  Description of Artificial Sequence: Synthetic oligonucleotide
  Antisense strand to SEQ ID NO: 146624
cuaaggaucaggauuacac

SEQ ID NO: 146626 - RNA, 19 nt, Artificial Sequence
  Description of Artificial Sequence: Synthetic oligonucleotide
  Sense strand starting at position 495 of SEQ ID NO: 1881
aguaaaggcgaaugaaaga

SEQ ID NO: 146627 - RNA, 19 nt, Artificial Sequence
  Description of Artificial Sequence: Synthetic oligonucleotide
  Antisense strand to SEQ ID NO: 146626
ucuuucauucgccuuuacu

SEQ ID NO: 146628 - RNA, 19 nt, Artificial Sequence
  Description of Artificial Sequence: Synthetic oligonucleotide
  Sense strand starting at position 574 of SEQ ID NO: 1881
gggagucugcacugagaga

SEQ ID NO: 146629 - RNA, 19 nt, Artificial Sequence
  Description of Artificial Sequence: Synthetic oligonucleotide
  Antisense strand to SEQ ID NO: 146628
ucucucagugcagacuccc

SEQ ID NO: 146630 - RNA, 19 nt, Artificial Sequence
  Description of Artificial Sequence: Synthetic oligonucleotide
  Sense strand starting at position 768 of SEQ ID NO: 1881
ggaagaagcccauguugau

SEQ ID NO: 146631 - RNA, 19 nt, Artificial Sequence
  Description of Artificial Sequence: Synthetic oligonucleotide
  Antisense strand to SEQ ID NO: 146630
aucaacaugggcuucuucc

SEQ ID NO: 146632 - RNA, 19 nt, Artificial Sequence
  Description of Artificial Sequence: Synthetic oligonucleotide
  Sense strand starting at position 787 of SEQ ID NO: 1881
gcucaaaguccgcagagau

SEQ ID NO: 146633 - RNA, 19 nt, Artificial Sequence
  Description of Artificial Sequence: Synthetic oligonucleotide
  Antisense strand to SEQ ID NO: 146632
aucucugcggacuuugagc

SEQ ID NO: 146634 - RNA, 19 nt, Artificial Sequence
  Description of Artificial Sequence: Synthetic oligonucleotide
  Sense strand starting at position 979 of SEQ ID NO: 1881
ccagaucacugcucugaug

SEQ ID NO: 146635 - RNA, 19 nt, Artificial Sequence
  Description of Artificial Sequence: Synthetic oligonucleotide
  Antisense strand to SEQ ID NO: 146634
caucagagcagugaucugg

SEQ ID NO: 146636 - RNA, 19 nt, Artificial Sequence
  Description of Artificial Sequence: Synthetic oligonucleotide
  Sense strand starting at position 1020 of SEQ ID NO: 1881
uaaugucaaugguuacagu

SEQ ID NO: 146637 - RNA, 19 nt, Artificial Sequence
  Description of Artificial Sequence: Synthetic oligonucleotide
  Antisense strand to SEQ ID NO: 146636
acuguaaccauugacauua

SEQ ID NO: 146638 - RNA, 19 nt, Artificial Sequence
  Description of Artificial Sequence: Synthetic oligonucleotide
  Sense strand starting at position 1137 of SEQ ID NO: 1881
ggguccuucccacaguauu

SEQ ID NO: 146639 - RNA, 19 nt, Artificial Sequence
  Description of Artificial Sequence: Synthetic oligonucleotide
  Antisense strand to SEQ ID NO: 146638
aauacugugggaaggaccc

SEQ ID NO: 146640 - RNA, 19 nt, Artificial Sequence
  Description of Artificial Sequence: Synthetic oligonucleotide
  Sense strand starting at position 1178 of SEQ ID NO: 1881
agcucacagcaucauugau

SEQ ID NO: 146641 - RNA, 19 nt, Artificial Sequence
  Description of Artificial Sequence: Synthetic oligonucleotide
  Antisense strand to SEQ ID NO: 146640
aucaaugaugcugugagcu

SEQ ID NO: 146642 - RNA, 19 nt, Artificial Sequence
  Description of Artificial Sequence: Synthetic oligonucleotide
  Sense strand starting at position 1449 of SEQ ID NO: 1881
uggaaucucugaccagacu

SEQ ID NO: 146643 - RNA, 19 nt, Artificial Sequence
  Description of Artificial Sequence: Synthetic oligonucleotide
  Antisense strand to SEQ ID NO: 146642
agucuggucagagauucca

SEQ ID NO: 146644 - RNA, 19 nt, Artificial Sequence
  Description of Artificial Sequence: Synthetic oligonucleotide
  Sense strand starting at position 1522 of SEQ ID NO: 1881
aagaacuuugcaugguauu

SEQ ID NO: 146645 - RNA, 19 nt, Artificial Sequence
  Description of Artificial Sequence: Synthetic oligonucleotide
  Antisense strand to SEQ ID NO: 146644
aauaccaugcaaaguucuu

SEQ ID NO: 146646 - RNA, 19 nt, Artificial Sequence
  Description of Artificial Sequence: Synthetic oligonucleotide
  Sense strand starting at position 1523 of SEQ ID NO: 1881
agaacuuugcaugguauua

SEQ ID NO: 146647 - RNA, 19 nt, Artificial Sequence
  Description of Artificial Sequence: Synthetic oligonucleotide
  Antisense strand to SEQ ID NO: 146646
uaauaccaugcaaaguucu

SEQ ID NO: 146648 - RNA, 19 nt, Artificial Sequence
  Description of Artificial Sequence: Synthetic oligonucleotide
  Sense strand starting at position 1584 of SEQ ID NO: 1881
ugugacaucuuucuauaua

SEQ ID NO: 146649 - RNA, 19 nt, Artificial Sequence
  Description of Artificial Sequence: Synthetic oligonucleotide
  Antisense strand to SEQ ID NO: 146648
uauauagaaagaugucaca

SEQ ID NO: 146650 - RNA, 19 nt, Artificial Sequence
  Description of Artificial Sequence: Synthetic oligonucleotide
  Sense strand starting at position 2214 of SEQ ID NO: 1881
gagaacagauuagaaagaa

SEQ ID NO: 146651 - RNA, 19 nt, Artificial Sequence
  Description of Artificial Sequence: Synthetic oligonucleotide
  Antisense strand to SEQ ID NO: 146650
uucuuucuaaucuguucuc

SEQ ID NO: 146652 - RNA, 19 nt, Artificial Sequence
  Description of Artificial Sequence: Synthetic oligonucleotide
  Sense strand starting at position 2448 of SEQ ID NO: 1881
ucuuauaacucuguaagag

SEQ ID NO: 146653 - RNA, 19 nt, Artificial Sequence
  Description of Artificial Sequence: Synthetic oligonucleotide
  Antisense strand to SEQ ID NO: 146652
cucuuacagaguuauaaga

SEQ ID NO: 146654 - RNA, 19 nt, Artificial Sequence
  Description of Artificial Sequence: Synthetic oligonucleotide
  Sense strand starting at position 2449 of SEQ ID NO: 1881
cuuauaacucuguaagagu

SEQ ID NO: 146655 - RNA, 19 nt, Artificial Sequence
  Description of Artificial Sequence: Synthetic oligonucleotide
  Antisense strand to SEQ ID NO: 146654
acucuuacagaguuauaag

SEQ ID NO: 146656 - RNA, 19 nt, Artificial Sequence
  Description of Artificial Sequence: Synthetic oligonucleotide
  Sense strand starting at position 2456 of SEQ ID NO: 1881
cucuguaagaguuauagua

SEQ ID NO: 146657 - RNA, 19 nt, Artificial Sequence
  Description of Artificial Sequence: Synthetic oligonucleotide
  Antisense strand to SEQ ID NO: 146656
uacuauaacucuuacagag

SEQ ID NO: 146658 - RNA, 19 nt, Artificial Sequence
  Description of Artificial Sequence: Synthetic oligonucleotide
  Sense strand starting at position 2500 of SEQ ID NO: 1881
uagugcuaagauuggagaa

SEQ ID NO: 146659 - RNA, 19 nt, Artificial Sequence
  Description of Artificial Sequence: Synthetic oligonucleotide
  Antisense strand to SEQ ID NO: 146658
uucuccaaucuuagcacua

SEQ ID NO: 146660 - RNA, 19 nt, Artificial Sequence
  Description of Artificial Sequence: Synthetic oligonucleotide
  Sense strand starting at position 2891 of SEQ ID NO: 1881
uuaaauuuagugugcaguu

SEQ ID NO: 146661 - RNA, 19 nt, Artificial Sequence
  Description of Artificial Sequence: Synthetic oligonucleotide
  Antisense strand to SEQ ID NO: 146660
aacugcacacuaaauuuaa

SEQ ID NO: 146662 - RNA, 19 nt, Artificial Sequence
  Description of Artificial Sequence: Synthetic oligonucleotide
  Sense strand starting at position 2892 of SEQ ID NO: 1881
uaaauuuagugugcaguua

SEQ ID NO: 146663 - RNA, 19 nt, Artificial Sequence
  Description of Artificial Sequence: Synthetic oligonucleotide
  Antisense strand to SEQ ID NO: 146662
uaacugcacacuaaauuua

SEQ ID NO: 146664 - RNA, 19 nt, Artificial Sequence
  Description of Artificial Sequence: Synthetic oligonucleotide
  Sense strand starting at position 2964 of SEQ ID NO: 1881
agugcuucccaagauauac

SEQ ID NO: 146665 - RNA, 19 nt, Artificial Sequence
  Description of Artificial Sequence: Synthetic oligonucleotide
  Antisense strand to SEQ ID NO: 146664
guauaucuugggaagcacu

SEQ ID NO: 146666 - RNA, 19 nt, Artificial Sequence
  Description of Artificial Sequence: Synthetic oligonucleotide
  Sense strand starting at position 3111 of SEQ ID NO: 1881
gcaguuguagugucuccau

SEQ ID NO: 146667 - RNA, 19 nt, Artificial Sequence
  Description of Artificial Sequence: Synthetic oligonucleotide
  Antisense strand to SEQ ID NO: 146666
auggagacacuacaacugc

SEQ ID NO: 146668 - RNA, 19 nt, Artificial Sequence
  Description of Artificial Sequence: Synthetic oligonucleotide
  Sense strand starting at position 3197 of SEQ ID NO: 1881
agagauuguuagcucucua

SEQ ID NO: 146669 - RNA, 19 nt, Artificial Sequence
  Description of Artificial Sequence: Synthetic oligonucleotide
  Antisense strand to SEQ ID NO: 146668
uagagagcuaacaaucucu

SEQ ID NO: 146670 - RNA, 19 nt, Artificial Sequence
  Description of Artificial Sequence: Synthetic oligonucleotide
  Sense strand starting at position 3229 of SEQ ID NO: 1881
uugcguucugcuuuauuag

SEQ ID NO: 146671 - RNA, 19 nt, Artificial Sequence
  Description of Artificial Sequence: Synthetic oligonucleotide
  Antisense strand to SEQ ID NO: 146670
cuaauaaagcagaacgcaa

SEQ ID NO: 146672 - RNA, 19 nt, Artificial Sequence
  Description of Artificial Sequence: Synthetic oligonucleotide
  Sense strand starting at position 3241 of SEQ ID NO: 1881
uuauuagaguuaguuccau

SEQ ID NO: 146673 - RNA, 19 nt, Artificial Sequence
  Description of Artificial Sequence: Synthetic oligonucleotide
  Antisense strand to SEQ ID NO: 146672
auggaacuaacucuaauaa

SEQ ID NO: 146674 - RNA, 19 nt, Artificial Sequence
  Description of Artificial Sequence: Synthetic oligonucleotide
  Sense strand starting at position 3253 of SEQ ID NO: 1881
guuccauuauuugcagcua

SEQ ID NO: 146675 - RNA, 19 nt, Artificial Sequence
  Description of Artificial Sequence: Synthetic oligonucleotide
  Antisense strand to SEQ ID NO: 146674
uagcugcaaauaauggaac

SEQ ID NO: 146676 - RNA, 19 nt, Artificial Sequence
  Description of Artificial Sequence: Synthetic oligonucleotide
  Sense strand starting at position 3272 of SEQ ID NO: 1881
agagcccuaugccuauaaa

SEQ ID NO: 146677 - RNA, 19 nt, Artificial Sequence
  Description of Artificial Sequence: Synthetic oligonucleotide
  Antisense strand to SEQ ID NO: 146676
uuuauaggcauagggcucu

SEQ ID NO: 146678 - RNA, 19 nt, Artificial Sequence
  Description of Artificial Sequence: Synthetic oligonucleotide
  Sense strand starting at position 3571 of SEQ ID NO: 1881
gugagcacuuauuugcaca

SEQ ID NO: 146679 - RNA, 19 nt, Artificial Sequence
  Description of Artificial Sequence: Synthetic oligonucleotide
  Antisense strand to SEQ ID NO: 146678
ugugcaaauaagugcucac

SEQ ID NO: 146680 - RNA, 19 nt, Artificial Sequence
  Description of Artificial Sequence: Synthetic oligonucleotide
  Sense strand starting at position 3698 of SEQ ID NO: 1881
ugccuagugacacauggau

SEQ ID NO: 146681 - RNA, 19 nt, Artificial Sequence
  Description of Artificial Sequence: Synthetic oligonucleotide
  Antisense strand to SEQ ID NO: 146680
auccaugugucacuaggca

SEQ ID NO: 146682 - RNA, 19 nt, Artificial Sequence
  Description of Artificial Sequence: Synthetic oligonucleotide
  Sense strand starting at position 3869 of SEQ ID NO: 1881
ggaaguaucuaagcugaga

SEQ ID NO: 146683 - RNA, 19 nt, Artificial Sequence
  Description of Artificial Sequence: Synthetic oligonucleotide
  Antisense strand to SEQ ID NO: 146682
ucucagcuuagauacuucc

SEQ ID NO: 146684 - RNA, 19 nt, Artificial Sequence
  Description of Artificial Sequence: Synthetic oligonucleotide
  Sense strand starting at position 3926 of SEQ ID NO: 1881
guagaagaguguucaggca

SEQ ID NO: 146685 - RNA, 19 nt, Artificial Sequence
  Description of Artificial Sequence: Synthetic oligonucleotide
  Antisense strand to SEQ ID NO: 146684
ugccugaacacucuucuac

SEQ ID NO: 146686 - RNA, 19 nt, Artificial Sequence
  Description of Artificial Sequence: Synthetic oligonucleotide
  Sense strand starting at position 3941 of SEQ ID NO: 1881
ggcacagcuuguguuauuu

SEQ ID NO: 146687 - RNA, 19 nt, Artificial Sequence
  Description of Artificial Sequence: Synthetic oligonucleotide
  Antisense strand to SEQ ID NO: 146686
aaauaacacaagcugugcc

SEQ ID NO: 146688 - RNA, 19 nt, Artificial Sequence
  Description of Artificial Sequence: Synthetic oligonucleotide
  Sense strand starting at position 3833 of SEQ ID NO: 1882
ugguuaaauuugcuguauu

SEQ ID NO: 146689 - RNA, 19 nt, Artificial Sequence
  Description of Artificial Sequence: Synthetic oligonucleotide
  Antisense strand to SEQ ID NO: 146688
aauacagcaaauuuaacca

SEQ ID NO: 146690 - RNA, 19 nt, Artificial Sequence
  Description of Artificial Sequence: Synthetic oligonucleotide
  Sense strand starting at position 3832 of SEQ ID NO: 1882
gugguuaaauuugcuguau

SEQ ID NO: 146691 - RNA, 19 nt, Artificial Sequence
  Description of Artificial Sequence: Synthetic oligonucleotide
  Antisense strand to SEQ ID NO: 146690
auacagcaaauuuaaccac

SEQ ID NO: 146692 - RNA, 19 nt, Artificial Sequence
  Description of Artificial Sequence: Synthetic oligonucleotide
  Sense strand starting at position 3831 of SEQ ID NO: 1882
agugguuaaauuugcugua

SEQ ID NO: 146693 - RNA, 19 nt, Artificial Sequence
  Description of Artificial Sequence: Synthetic oligonucleotide
  Antisense strand to SEQ ID NO: 146692
uacagcaaauuuaaccacu

SEQ ID NO: 146694 - RNA, 19 nt, Artificial Sequence
  Description of Artificial Sequence: Synthetic oligonucleotide
  Sense strand starting at position 3718 of SEQ ID NO: 1882
aggaguccugcaugaagag

SEQ ID NO: 146695 - RNA, 19 nt, Artificial Sequence
  Description of Artificial Sequence: Synthetic oligonucleotide
  Antisense strand to SEQ ID NO: 146694
cucuucaugcaggacuccu

SEQ ID NO: 146696 - RNA, 19 nt, Artificial Sequence
  Description of Artificial Sequence: Synthetic oligonucleotide
  Sense strand starting at position 3660 of SEQ ID NO: 1882
ccauuagaaugaguguaga

SEQ ID NO: 146697 - RNA, 19 nt, Artificial Sequence
  Description of Artificial Sequence: Synthetic oligonucleotide
  Antisense strand to SEQ ID NO: 146696
ucuacacucauucuaaugg

SEQ ID NO: 146698 - RNA, 19 nt, Artificial Sequence
  Description of Artificial Sequence: Synthetic oligonucleotide
  Sense strand starting at position 3657 of SEQ ID NO: 1882
aaaccauuagaaugagugu

SEQ ID NO: 146699 - RNA, 19 nt, Artificial Sequence
  Description of Artificial Sequence: Synthetic oligonucleotide
  Antisense strand to SEQ ID NO: 146698
acacucauucuaaugguuu

SEQ ID NO: 146700 - RNA, 19 nt, Artificial Sequence
  Description of Artificial Sequence: Synthetic oligonucleotide
  Sense strand starting at position 3630 of SEQ ID NO: 1882
aaguaauuggcacauaggu

SEQ ID NO: 146701 - RNA, 19 nt, Artificial Sequence
  Description of Artificial Sequence: Synthetic oligonucleotide
  Antisense strand to SEQ ID NO: 146700
accuaugugccaauuacuu

SEQ ID NO: 146702 - RNA, 19 nt, Artificial Sequence
  Description of Artificial Sequence: Synthetic oligonucleotide
  Sense strand starting at position 3601 of SEQ ID NO: 1882
agaggugugggcuaaagau

SEQ ID NO: 146703 - RNA, 19 nt, Artificial Sequence
  Description of Artificial Sequence: Synthetic oligonucleotide
  Antisense strand to SEQ ID NO: 146702
aucuuuagcccacaccucu

SEQ ID NO: 146704 - RNA, 19 nt, Artificial Sequence
  Description of Artificial Sequence: Synthetic oligonucleotide
  Sense strand starting at position 3568 of SEQ ID NO: 1882
ucaguugggauguaugauu

SEQ ID NO: 146705 - RNA, 19 nt, Artificial Sequence
  Description of Artificial Sequence: Synthetic oligonucleotide
  Antisense strand to SEQ ID NO: 146704
aaucauacaucccaacuga

SEQ ID NO: 146706 - RNA, 19 nt, Artificial Sequence
  Description of Artificial Sequence: Synthetic oligonucleotide
  Sense strand starting at position 3561 of SEQ ID NO: 1882
caacuagucaguugggaug

SEQ ID NO: 146707 - RNA, 19 nt, Artificial Sequence
  Description of Artificial Sequence: Synthetic oligonucleotide
  Antisense strand to SEQ ID NO: 146706
caucccaacugacuaguug

SEQ ID NO: 146708 - RNA, 19 nt, Artificial Sequence
  Description of Artificial Sequence: Synthetic oligonucleotide
  Sense strand starting at position 3452 of SEQ ID NO: 1882
ggugaaaugcgggaaaguu

SEQ ID NO: 146709 - RNA, 19 nt, Artificial Sequence
  Description of Artificial Sequence: Synthetic oligonucleotide
  Antisense strand to SEQ ID NO: 146708
aacuuucccgcauuucacc

SEQ ID NO: 146710 - RNA, 19 nt, Artificial Sequence
  Description of Artificial Sequence: Synthetic oligonucleotide
  Sense strand starting at position 3442 of SEQ ID NO: 1882
guuaccaucaggugaaaug

SEQ ID NO: 146711 - RNA, 19 nt, Artificial Sequence
  Description of Artificial Sequence: Synthetic oligonucleotide
  Antisense strand to SEQ ID NO: 146710
cauuucaccugaugguaac

SEQ ID NO: 146712 - RNA, 19 nt, Artificial Sequence
  Description of Artificial Sequence: Synthetic oligonucleotide
  Sense strand starting at position 3438 of SEQ ID NO: 1882
uggaguuaccaucagguga

SEQ ID NO: 146713 - RNA, 19 nt, Artificial Sequence
  Description of Artificial Sequence: Synthetic oligonucleotide
  Antisense strand to SEQ ID NO: 146712
ucaccugaugguaacucca

SEQ ID NO: 146714 - RNA, 19 nt, Artificial Sequence
  Description of Artificial Sequence: Synthetic oligonucleotide
  Sense strand starting at position 3417 of SEQ ID NO: 1882
cgaccugagugauucaaag

SEQ ID NO: 146715 - RNA, 19 nt, Artificial Sequence
  Description of Artificial Sequence: Synthetic oligonucleotide
  Antisense strand to SEQ ID NO: 146714
cuuugaaucacucaggucg

SEQ ID NO: 146716 - RNA, 19 nt, Artificial Sequence
  Description of Artificial Sequence: Synthetic oligonucleotide
  Sense strand starting at position 3411 of SEQ ID NO: 1882
gacuuucgaccugagugau

SEQ ID NO: 146717 - RNA, 19 nt, Artificial Sequence
  Description of Artificial Sequence: Synthetic oligonucleotide
  Antisense strand to SEQ ID NO: 146716
aucacucaggucgaaaguc

SEQ ID NO: 146718 - RNA, 19 nt, Artificial Sequence
  Description of Artificial Sequence: Synthetic oligonucleotide
  Sense strand starting at position 3339 of SEQ ID NO: 1882
gugauuccucuggaaggua

SEQ ID NO: 146719 - RNA, 19 nt, Artificial Sequence
  Description of Artificial Sequence: Synthetic oligonucleotide
  Antisense strand to SEQ ID NO: 146718
uaccuuccagaggaaucac

SEQ ID NO: 146720 - RNA, 19 nt, Artificial Sequence
  Description of Artificial Sequence: Synthetic oligonucleotide
  Sense strand starting at position 3337 of SEQ ID NO: 1882
aagugauuccucuggaagg

SEQ ID NO: 146721 - RNA, 19 nt, Artificial Sequence
  Description of Artificial Sequence: Synthetic oligonucleotide
  Antisense strand to SEQ ID NO: 146720
ccuuccagaggaaucacuu

SEQ ID NO: 146722 - RNA, 19 nt, Artificial Sequence
  Description of Artificial Sequence: Synthetic oligonucleotide
  Sense strand starting at position 3335 of SEQ ID NO: 1882
agaagugauuccucuggaa

SEQ ID NO: 146723 - RNA, 19 nt, Artificial Sequence
  Description of Artificial Sequence: Synthetic oligonucleotide
  Antisense strand to SEQ ID NO: 146722
uuccagaggaaucacuucu

SEQ ID NO: 146724 - RNA, 19 nt, Artificial Sequence
  Description of Artificial Sequence: Synthetic oligonucleotide
  Sense strand starting at position 3290 of SEQ ID NO: 1882
aaaugauaguggccugaac

SEQ ID NO: 146725 - RNA, 19 nt, Artificial Sequence
  Description of Artificial Sequence: Synthetic oligonucleotide
  Antisense strand to SEQ ID NO: 146724
guucaggccacuaucauuu

SEQ ID NO: 146726 - RNA, 19 nt, Artificial Sequence
  Description of Artificial Sequence: Synthetic oligonucleotide
  Sense strand starting at position 2781 of SEQ ID NO: 1882
gcaagaaguguugagauug

SEQ ID NO: 146727 - RNA, 19 nt, Artificial Sequence
  Description of Artificial Sequence: Synthetic oligonucleotide
  Antisense strand to SEQ ID NO: 146726
caaucucaacacuucuugc

SEQ ID NO: 146728 - RNA, 19 nt, Artificial Sequence
  Description of Artificial Sequence: Synthetic oligonucleotide
  Sense strand starting at position 2678 of SEQ ID NO: 1882
aagagcuguuaaucugaga

SEQ ID NO: 146729 - RNA, 19 nt, Artificial Sequence
  Description of Artificial Sequence: Synthetic oligonucleotide
  Antisense strand to SEQ ID NO: 146728
ucucagauuaacagcucuu

SEQ ID NO: 146730 - RNA, 19 nt, Artificial Sequence
  Description of Artificial Sequence: Synthetic oligonucleotide
  Sense strand starting at position 2594 of SEQ ID NO: 1882
ggauucucagaguaggcuu

SEQ ID NO: 146731 - RNA, 19 nt, Artificial Sequence
  Description of Artificial Sequence: Synthetic oligonucleotide
  Antisense strand to SEQ ID NO: 146730
aagccuacucugagaaucc

SEQ ID NO: 146732 - RNA, 19 nt, Artificial Sequence
  Description of Artificial Sequence: Synthetic oligonucleotide
  Sense strand starting at position 2588 of SEQ ID NO: 1882
uaaauaggauucucagagu

SEQ ID NO: 146733 - RNA, 19 nt, Artificial Sequence
  Description of Artificial Sequence: Synthetic oligonucleotide
  Antisense strand to SEQ ID NO: 146732
acucugagaauccuauuua

SEQ ID NO: 146734 - RNA, 19 nt, Artificial Sequence
  Description of Artificial Sequence: Synthetic oligonucleotide
  Sense strand starting at position 2293 of SEQ ID NO: 1882
cagaguaagacaugguaug

SEQ ID NO: 146735 - RNA, 19 nt, Artificial Sequence
  Description of Artificial Sequence: Synthetic oligonucleotide
  Antisense strand to SEQ ID NO: 146734
cauaccaugucuuacucug

SEQ ID NO: 146736 - RNA, 19 nt, Artificial Sequence
  Description of Artificial Sequence: Synthetic oligonucleotide
  Sense strand starting at position 2281 of SEQ ID NO: 1882
uauggugagcuacagagua

SEQ ID NO: 146737 - RNA, 19 nt, Artificial Sequence
  Description of Artificial Sequence: Synthetic oligonucleotide
  Antisense strand to SEQ ID NO: 146736
uacucuguagcucaccaua

SEQ ID NO: 146738 - RNA, 19 nt, Artificial Sequence
  Description of Artificial Sequence: Synthetic oligonucleotide
  Sense strand starting at position 2122 of SEQ ID NO: 1882
gcaguuugcccagcuguau

SEQ ID NO: 146739 - RNA, 19 nt, Artificial Sequence
  Description of Artificial Sequence: Synthetic oligonucleotide
  Antisense strand to SEQ ID NO: 146738
auacagcugggcaaacugc

SEQ ID NO: 146740 - RNA, 19 nt, Artificial Sequence
  Description of Artificial Sequence: Synthetic oligonucleotide
  Sense strand starting at position 2110 of SEQ ID NO: 1882
aggaaacuuuaggcaguuu

SEQ ID NO: 146741 - RNA, 19 nt, Artificial Sequence
  Description of Artificial Sequence: Synthetic oligonucleotide
  Antisense strand to SEQ ID NO: 146740
aaacugccuaaaguuuccu

SEQ ID NO: 146742 - RNA, 19 nt, Artificial Sequence
  Description of Artificial Sequence: Synthetic oligonucleotide
  Sense strand starting at position 2096 of SEQ ID NO: 1882
aaagcugaggcuugaggaa

SEQ ID NO: 146743 - RNA, 19 nt, Artificial Sequence
  Description of Artificial Sequence: Synthetic oligonucleotide
  Antisense strand to SEQ ID NO: 146742
uuccucaagccucagcuuu

SEQ ID NO: 146744 - RNA, 19 nt, Artificial Sequence
  Description of Artificial Sequence: Synthetic oligonucleotide
  Sense strand starting at position 1115 of SEQ ID NO: 1882
uacgaugugcaagaauaag

SEQ ID NO: 146745 - RNA, 19 nt, Artificial Sequence
  Description of Artificial Sequence: Synthetic oligonucleotide
  Antisense strand to SEQ ID NO: 146744
cuuauucuugcacaucgua

SEQ ID NO: 146746 - RNA, 19 nt, Artificial Sequence
  Description of Artificial Sequence: Synthetic oligonucleotide
  Sense strand starting at position 1019 of SEQ ID NO: 1882
gcaccuugacacugaacau

SEQ ID NO: 146747 - RNA, 19 nt, Artificial Sequence
  Description of Artificial Sequence: Synthetic oligonucleotide
  Antisense strand to SEQ ID NO: 146746
auguucagugucaaggugc

SEQ ID NO: 146748 - RNA, 19 nt, Artificial Sequence
  Description of Artificial Sequence: Synthetic oligonucleotide
  Sense strand starting at position 975 of SEQ ID NO: 1882
ugcauaccagaaugaguua

SEQ ID NO: 146749 - RNA, 19 nt, Artificial Sequence
  Description of Artificial Sequence: Synthetic oligonucleotide
  Antisense strand to SEQ ID NO: 146748
uaacucauucugguaugca

SEQ ID NO: 146750 - RNA, 19 nt, Artificial Sequence
  Description of Artificial Sequence: Synthetic oligonucleotide
  Sense strand starting at position 943 of SEQ ID NO: 1882
auaagucuuccaggacauc

SEQ ID NO: 146751 - RNA, 19 nt, Artificial Sequence
  Description of Artificial Sequence: Synthetic oligonucleotide
  Antisense strand to SEQ ID NO: 146750
gauguccuggaagacuuau

SEQ ID NO: 146752 - RNA, 19 nt, Artificial Sequence
  Description of Artificial Sequence: Synthetic oligonucleotide
  Sense strand starting at position 939 of SEQ ID NO: 1882
uccaauaagucuuccagga

SEQ ID NO: 146753 - RNA, 19 nt, Artificial Sequence
  Description of Artificial Sequence: Synthetic oligonucleotide
  Antisense strand to SEQ ID NO: 146752
uccuggaagacuuauugga

SEQ ID NO: 146754 - RNA, 19 nt, Artificial Sequence
  Description of Artificial Sequence: Synthetic oligonucleotide
  Sense strand starting at position 835 of SEQ ID NO: 1882
ucuggagauuucuagauag

SEQ ID NO: 146755 - RNA, 19 nt, Artificial Sequence
  Description of Artificial Sequence: Synthetic oligonucleotide
  Antisense strand to SEQ ID NO: 146754
cuaucuagaaaucuccaga

SEQ ID NO: 146756 - RNA, 19 nt, Artificial Sequence
  Description of Artificial Sequence: Synthetic oligonucleotide
  Sense strand starting at position 823 of SEQ ID NO: 1882
ucuauauauucuucuggag

SEQ ID NO: 146757 - RNA, 19 nt, Artificial Sequence
  Description of Artificial Sequence: Synthetic oligonucleotide
  Antisense strand to SEQ ID NO: 146756
cuccagaagaauauauaga

SEQ ID NO: 146758 - RNA, 19 nt, Artificial Sequence
  Description of Artificial Sequence: Synthetic oligonucleotide
  Sense strand starting at position 807 of SEQ ID NO: 1882
guauuuguauugucaaucu

SEQ ID NO: 146759 - RNA, 19 nt, Artificial Sequence
  Description of Artificial Sequence: Synthetic oligonucleotide
  Antisense strand to SEQ ID NO: 146758
agauugacaauacaaauac

SEQ ID NO: 146760 - RNA, 19 nt, Artificial Sequence
  Description of Artificial Sequence: Synthetic oligonucleotide
  Sense strand starting at position 684 of SEQ ID NO: 1882
aggaaugggagcugaguuu

SEQ ID NO: 146761 - RNA, 19 nt, Artificial Sequence
  Description of Artificial Sequence: Synthetic oligonucleotide
  Antisense strand to SEQ ID NO: 146760
aaacucagcucccauuccu

SEQ ID NO: 146762 - RNA, 19 nt, Artificial Sequence
  Description of Artificial Sequence: Synthetic oligonucleotide
  Sense strand starting at position 633 of SEQ ID NO: 1882
uaaagacgaccaugguuau

SEQ ID NO: 146763 - RNA, 19 nt, Artificial Sequence
  Description of Artificial Sequence: Synthetic oligonucleotide
  Antisense strand to SEQ ID NO: 146762
auaaccauggucgucuuua

SEQ ID NO: 146764 - RNA, 19 nt, Artificial Sequence
  Description of Artificial Sequence: Synthetic oligonucleotide
  Sense strand starting at position 59 of SEQ ID NO: 1882
ucuuaagcuggguaaauga

SEQ ID NO: 146765 - RNA, 19 nt, Artificial Sequence
  Description of Artificial Sequence: Synthetic oligonucleotide
  Antisense strand to SEQ ID NO: 146764
ucauuuacccagcuuaaga

SEQ ID NO: 146766 - RNA, 19 nt, Artificial Sequence
  Description of Artificial Sequence: Synthetic oligonucleotide
  Sense strand starting at position 7 of SEQ ID NO: 1882
gcaauuaugaagcagacga

SEQ ID NO: 146767 - RNA, 19 nt, Artificial Sequence
  Description of Artificial Sequence: Synthetic oligonucleotide
  Antisense strand to SEQ ID NO: 146766
ucgucugcuucauaauugc

SEQ ID NO: 146768 - RNA, 19 nt, Artificial Sequence
  Description of Artificial Sequence: Synthetic oligonucleotide
  Sense strand starting at position 3078 of SEQ ID NO: 1883
acuguaaauguauaugcua

SEQ ID NO: 146769 - RNA, 19 nt, Artificial Sequence
  Description of Artificial Sequence: Synthetic oligonucleotide
  Antisense strand to SEQ ID NO: 146768
uagcauauacauuuacagu

SEQ ID NO: 146770 - RNA, 19 nt, Artificial Sequence
  Description of Artificial Sequence: Synthetic oligonucleotide
  Sense strand starting at position 2874 of SEQ ID NO: 1883
ggaacccaagucugaauau

SEQ ID NO: 146771 - RNA, 19 nt, Artificial Sequence
  Description of Artificial Sequence: Synthetic oligonucleotide
  Antisense strand to SEQ ID NO: 146770
auauucagacuuggguucc

SEQ ID NO: 146772 - RNA, 19 nt, Artificial Sequence
  Description of Artificial Sequence: Synthetic oligonucleotide
  Sense strand starting at position 2836 of SEQ ID NO: 1883
ggaauauucgcauaaacau

SEQ ID NO: 146773 - RNA, 19 nt, Artificial Sequence
  Description of Artificial Sequence: Synthetic oligonucleotide
  Antisense strand to SEQ ID NO: 146772
auguuuaugcgaauauucc

SEQ ID NO: 146774 - RNA, 19 nt, Artificial Sequence
  Description of Artificial Sequence: Synthetic oligonucleotide
  Sense strand starting at position 2771 of SEQ ID NO: 1883
gcguauuccuaaccugaaa

SEQ ID NO: 146775 - RNA, 19 nt, Artificial Sequence
  Description of Artificial Sequence: Synthetic oligonucleotide
  Antisense strand to SEQ ID NO: 146774
uuucagguuaggaauacgc

SEQ ID NO: 146776 - RNA, 19 nt, Artificial Sequence
  Description of Artificial Sequence: Synthetic oligonucleotide
  Sense strand starting at position 2729 of SEQ ID NO: 1883
ccagcuaguagcuauguga

SEQ ID NO: 146777 - RNA, 19 nt, Artificial Sequence
  Description of Artificial Sequence: Synthetic oligonucleotide
  Antisense strand to SEQ ID NO: 146776
ucacauagcuacuagcugg

SEQ ID NO: 146778 - RNA, 19 nt, Artificial Sequence
  Description of Artificial Sequence: Synthetic oligonucleotide
  Sense strand starting at position 2672 of SEQ ID NO: 1883
ggaguggugguuuaagagu

SEQ ID NO: 146779 - RNA, 19 nt, Artificial Sequence
  Description of Artificial Sequence: Synthetic oligonucleotide
  Antisense strand to SEQ ID NO: 146778
acucuuaaaccaccacucc

SEQ ID NO: 146780 - RNA, 19 nt, Artificial Sequence
  Description of Artificial Sequence: Synthetic oligonucleotide
  Sense strand starting at position 2505 of SEQ ID NO: 1883
ggucuaauuuguuuguauu

SEQ ID NO: 146781 - RNA, 19 nt, Artificial Sequence
  Description of Artificial Sequence: Synthetic oligonucleotide
  Antisense strand to SEQ ID NO: 146780
aauacaaacaaauuagacc

SEQ ID NO: 146782 - RNA, 19 nt, Artificial Sequence
  Description of Artificial Sequence: Synthetic oligonucleotide
  Sense strand starting at position 2504 of SEQ ID NO: 1883
cggucuaauuuguuuguau

SEQ ID NO: 146783 - RNA, 19 nt, Artificial Sequence
  Description of Artificial Sequence: Synthetic oligonucleotide
  Antisense strand to SEQ ID NO: 146782
auacaaacaaauuagaccg

SEQ ID NO: 146784 - RNA, 19 nt, Artificial Sequence
  Description of Artificial Sequence: Synthetic oligonucleotide
  Sense strand starting at position 2256 of SEQ ID NO: 1883
gugugaugagaacgccaaa

SEQ ID NO: 146785 - RNA, 19 nt, Artificial Sequence
  Description of Artificial Sequence: Synthetic oligonucleotide
  Antisense strand to SEQ ID NO: 146784
uuuggcguucucaucacac

SEQ ID NO: 146786 - RNA, 19 nt, Artificial Sequence
  Description of Artificial Sequence: Synthetic oligonucleotide
  Sense strand starting at position 1902 of SEQ ID NO: 1883
auggauggcgacggauaaa

SEQ ID NO: 146787 - RNA, 19 nt, Artificial Sequence
  Description of Artificial Sequence: Synthetic oligonucleotide
  Antisense strand to SEQ ID NO: 146786
uuuauccgucgccauccau

SEQ ID NO: 146788 - RNA, 19 nt, Artificial Sequence
  Description of Artificial Sequence: Synthetic oligonucleotide
  Sense strand starting at position 1901 of SEQ ID NO: 1883
cauggauggcgacggauaa

SEQ ID NO: 146789 - RNA, 19 nt, Artificial Sequence
  Description of Artificial Sequence: Synthetic oligonucleotide
  Antisense strand to SEQ ID NO: 146788
uuauccgucgccauccaug

SEQ ID NO: 146790 - RNA, 19 nt, Artificial Sequence
  Description of Artificial Sequence: Synthetic oligonucleotide
  Sense strand starting at position 1772 of SEQ ID NO: 1883
cagggaaagugacagaauu

SEQ ID NO: 146791 - RNA, 19 nt, Artificial Sequence
  Description of Artificial Sequence: Synthetic oligonucleotide
  Antisense strand to SEQ ID NO: 146790
aauucugucacuuucccug

SEQ ID NO: 146792 - RNA, 19 nt, Artificial Sequence
  Description of Artificial Sequence: Synthetic oligonucleotide
  Sense strand starting at position 1763 of SEQ ID NO: 1883
aaacgauggcagggaaagu

SEQ ID NO: 146793 - RNA, 19 nt, Artificial Sequence
  Description of Artificial Sequence: Synthetic oligonucleotide
  Antisense strand to SEQ ID NO: 146792
acuuucccugccaucguuu

SEQ ID NO: 146794 - RNA, 19 nt, Artificial Sequence
  Description of Artificial Sequence: Synthetic oligonucleotide
  Sense strand starting at position 1602 of SEQ ID NO: 1883
cgacuaagguuuccuagca

SEQ ID NO: 146795 - RNA, 19 nt, Artificial Sequence
  Description of Artificial Sequence: Synthetic oligonucleotide
  Antisense strand to SEQ ID NO: 146794
ugcuaggaaaccuuagucg

SEQ ID NO: 146796 - RNA, 19 nt, Artificial Sequence
  Description of Artificial Sequence: Synthetic oligonucleotide
  Sense strand starting at position 1594 of SEQ ID NO: 1883
ggagcaaccgacuaagguu

SEQ ID NO: 146797 - RNA, 19 nt, Artificial Sequence
  Description of Artificial Sequence: Synthetic oligonucleotide
  Antisense strand to SEQ ID NO: 146796
aaccuuagucgguugcucc

SEQ ID NO: 146798 - RNA, 19 nt, Artificial Sequence
  Description of Artificial Sequence: Synthetic oligonucleotide
  Sense strand starting at position 1554 of SEQ ID NO: 1883
cuauucggaagcugucuaa

SEQ ID NO: 146799 - RNA, 19 nt, Artificial Sequence
  Description of Artificial Sequence: Synthetic oligonucleotide
  Antisense strand to SEQ ID NO: 146798
uuagacagcuuccgaauag

SEQ ID NO: 146800 - RNA, 19 nt, Artificial Sequence
  Description of Artificial Sequence: Synthetic oligonucleotide
  Sense strand starting at position 1520 of SEQ ID NO: 1883
acaggaaacacgugguuau

SEQ ID NO: 146801 - RNA, 19 nt, Artificial Sequence
  Description of Artificial Sequence: Synthetic oligonucleotide
  Antisense strand to SEQ ID NO: 146800
auaaccacguguuuccugu

SEQ ID NO: 146802 - RNA, 19 nt, Artificial Sequence
  Description of Artificial Sequence: Synthetic oligonucleotide
  Sense strand starting at position 1389 of SEQ ID NO: 1883
acaguuauugaguguuaaa

SEQ ID NO: 146803 - RNA, 19 nt, Artificial Sequence
  Description of Artificial Sequence: Synthetic oligonucleotide
  Antisense strand to SEQ ID NO: 146802
uuuaacacucaauaacugu

SEQ ID NO: 146804 - RNA, 19 nt, Artificial Sequence
  Description of Artificial Sequence: Synthetic oligonucleotide
  Sense strand starting at position 1388 of SEQ ID NO: 1883
gacaguuauugaguguuaa

SEQ ID NO: 146805 - RNA, 19 nt, Artificial Sequence
  Description of Artificial Sequence: Synthetic oligonucleotide
  Antisense strand to SEQ ID NO: 146804
uuaacacucaauaacuguc

SEQ ID NO: 146806 - RNA, 19 nt, Artificial Sequence
  Description of Artificial Sequence: Synthetic oligonucleotide
  Sense strand starting at position 1386 of SEQ ID NO: 1883
aggacaguuauugaguguu

SEQ ID NO: 146807 - RNA, 19 nt, Artificial Sequence
  Description of Artificial Sequence: Synthetic oligonucleotide
  Antisense strand to SEQ ID NO: 146806
aacacucaauaacuguccu

SEQ ID NO: 146808 - RNA, 19 nt, Artificial Sequence
  Description of Artificial Sequence: Synthetic oligonucleotide
  Sense strand starting at position 1275 of SEQ ID NO: 1883
uaacgaagacccugaaugu

SEQ ID NO: 146809 - RNA, 19 nt, Artificial Sequence
  Description of Artificial Sequence: Synthetic oligonucleotide
  Antisense strand to SEQ ID NO: 146808
acauucagggucuucguua

SEQ ID NO: 146810 - RNA, 19 nt, Artificial Sequence
  Description of Artificial Sequence: Synthetic oligonucleotide
  Sense strand starting at position 1005 of SEQ ID NO: 1883
ccuugugacuacucaccuu

SEQ ID NO: 146811 - RNA, 19 nt, Artificial Sequence
  Description of Artificial Sequence: Synthetic oligonucleotide
  Antisense strand to SEQ ID NO: 146810
aaggugaguagucacaagg

SEQ ID NO: 146812 - RNA, 19 nt, Artificial Sequence
  Description of Artificial Sequence: Synthetic oligonucleotide
  Sense strand starting at position 848 of SEQ ID NO: 1883
acacgccaucuugaauaaa

SEQ ID NO: 146813 - RNA, 19 nt, Artificial Sequence
  Description of Artificial Sequence: Synthetic oligonucleotide
  Antisense strand to SEQ ID NO: 146812
uuuauucaagauggcgugu

SEQ ID NO: 146814 - RNA, 19 nt, Artificial Sequence
  Description of Artificial Sequence: Synthetic oligonucleotide
  Sense strand starting at position 807 of SEQ ID NO: 1883
agcuuaagaucugcucaaa

SEQ ID NO: 146815 - RNA, 19 nt, Artificial Sequence
  Description of Artificial Sequence: Synthetic oligonucleotide
  Antisense strand to SEQ ID NO: 146814
uuugagcagaucuuaagcu

SEQ ID NO: 146816 - RNA, 19 nt, Artificial Sequence
  Description of Artificial Sequence: Synthetic oligonucleotide
  Sense strand starting at position 799 of SEQ ID NO: 1883
cuagucuuagcuuaagauc

SEQ ID NO: 146817 - RNA, 19 nt, Artificial Sequence
  Description of Artificial Sequence: Synthetic oligonucleotide
  Antisense strand to SEQ ID NO: 146816
gaucuuaagcuaagacuag

SEQ ID NO: 146818 - RNA, 19 nt, Artificial Sequence
  Description of Artificial Sequence: Synthetic oligonucleotide
  Sense strand starting at position 796 of SEQ ID NO: 1883
gggcuagucuuagcuuaag

SEQ ID NO: 146819 - RNA, 19 nt, Artificial Sequence
  Description of Artificial Sequence: Synthetic oligonucleotide
  Antisense strand to SEQ ID NO: 146818
cuuaagcuaagacuagccc

SEQ ID NO: 146820 - RNA, 19 nt, Artificial Sequence
  Description of Artificial Sequence: Synthetic oligonucleotide
  Sense strand starting at position 732 of SEQ ID NO: 1883
uuuacuucguuccugacau

SEQ ID NO: 146821 - RNA, 19 nt, Artificial Sequence
  Description of Artificial Sequence: Synthetic oligonucleotide
  Antisense strand to SEQ ID NO: 146820
augucaggaacgaaguaaa

SEQ ID NO: 146822 - RNA, 19 nt, Artificial Sequence
  Description of Artificial Sequence: Synthetic oligonucleotide
  Sense strand starting at position 729 of SEQ ID NO: 1883
aucuuuacuucguuccuga

SEQ ID NO: 146823 - RNA, 19 nt, Artificial Sequence
  Description of Artificial Sequence: Synthetic oligonucleotide
  Antisense strand to SEQ ID NO: 146822
ucaggaacgaaguaaagau

SEQ ID NO: 146824 - RNA, 19 nt, Artificial Sequence
  Description of Artificial Sequence: Synthetic oligonucleotide
  Sense strand starting at position 585 of SEQ ID NO: 1883
aggcaaucuguauacaacu

SEQ ID NO: 146825 - RNA, 19 nt, Artificial Sequence
  Description of Artificial Sequence: Synthetic oligonucleotide
  Antisense strand to SEQ ID NO: 146824
aguuguauacagauugccu

SEQ ID NO: 146826 - RNA, 19 nt, Artificial Sequence
  Description of Artificial Sequence: Synthetic oligonucleotide
  Sense strand starting at position 583 of SEQ ID NO: 1883
ccaggcaaucuguauacaa

SEQ ID NO: 146827 - RNA, 19 nt, Artificial Sequence
  Description of Artificial Sequence: Synthetic oligonucleotide
  Antisense strand to SEQ ID NO: 146826
uuguauacagauugccugg

SEQ ID NO: 146828 - RNA, 19 nt, Artificial Sequence
  Description of Artificial Sequence: Synthetic oligonucleotide
  Sense strand starting at position 562 of SEQ ID NO: 1883
uggugaagccaucacucaa

SEQ ID NO: 146829 - RNA, 19 nt, Artificial Sequence
  Description of Artificial Sequence: Synthetic oligonucleotide
  Antisense strand to SEQ ID NO: 146828
uugagugauggcuucacca

SEQ ID NO: 146830 - RNA, 19 nt, Artificial Sequence
  Description of Artificial Sequence: Synthetic oligonucleotide
  Sense strand starting at position 498 of SEQ ID NO: 1883
guauuacccucuuuaugca

SEQ ID NO: 146831 - RNA, 19 nt, Artificial Sequence
  Description of Artificial Sequence: Synthetic oligonucleotide
  Antisense strand to SEQ ID NO: 146830
ugcauaaagaggguaauac

SEQ ID NO: 146832 - RNA, 19 nt, Artificial Sequence
  Description of Artificial Sequence: Synthetic oligonucleotide
  Sense strand starting at position 368 of SEQ ID NO: 1883
gagguuuauuaacuugcca

SEQ ID NO: 146833 - RNA, 19 nt, Artificial Sequence
  Description of Artificial Sequence: Synthetic oligonucleotide
  Antisense strand to SEQ ID NO: 146832
uggcaaguuaauaaaccuc

SEQ ID NO: 146834 - RNA, 19 nt, Artificial Sequence
  Description of Artificial Sequence: Synthetic oligonucleotide
  Sense strand starting at position 364 of SEQ ID NO: 1883
uugagagguuuauuaacuu

SEQ ID NO: 146835 - RNA, 19 nt, Artificial Sequence
  Description of Artificial Sequence: Synthetic oligonucleotide
  Antisense strand to SEQ ID NO: 146834
aaguuaauaaaccucucaa

SEQ ID NO: 146836 - RNA, 19 nt, Artificial Sequence
  Description of Artificial Sequence: Synthetic oligonucleotide
  Sense strand starting at position 331 of SEQ ID NO: 1883
uuguacuguuauccauauu

SEQ ID NO: 146837 - RNA, 19 nt, Artificial Sequence
  Description of Artificial Sequence: Synthetic oligonucleotide
  Antisense strand to SEQ ID NO: 146836
aauauggauaacaguacaa

SEQ ID NO: 146838 - RNA, 19 nt, Artificial Sequence
  Description of Artificial Sequence: Synthetic oligonucleotide
  Sense strand starting at position 330 of SEQ ID NO: 1883
auuguacuguuauccauau

SEQ ID NO: 146839 - RNA, 19 nt, Artificial Sequence
  Description of Artificial Sequence: Synthetic oligonucleotide
  Antisense strand to SEQ ID NO: 146838
auauggauaacaguacaau

SEQ ID NO: 146840 - RNA, 19 nt, Artificial Sequence
  Description of Artificial Sequence: Synthetic oligonucleotide
  Sense strand starting at position 319 of SEQ ID NO: 1883
gcugaaaccuuauuguacu

SEQ ID NO: 146841 - RNA, 19 nt, Artificial Sequence
  Description of Artificial Sequence: Synthetic oligonucleotide
  Antisense strand to SEQ ID NO: 146840
aguacaauaagguuucagc

SEQ ID NO: 146842 - RNA, 19 nt, Artificial Sequence
  Description of Artificial Sequence: Synthetic oligonucleotide
  Sense strand starting at position 267 of SEQ ID NO: 1883
agauuaucauguuccaaag

SEQ ID NO: 146843 - RNA, 19 nt, Artificial Sequence
  Description of Artificial Sequence: Synthetic oligonucleotide
  Antisense strand to SEQ ID NO: 146842
cuuuggaacaugauaaucu

SEQ ID NO: 146844 - RNA, 19 nt, Artificial Sequence
  Description of Artificial Sequence: Synthetic oligonucleotide
  Sense strand starting at position 261 of SEQ ID NO: 1883
cuaguaagauuaucauguu

SEQ ID NO: 146845 - RNA, 19 nt, Artificial Sequence
  Description of Artificial Sequence: Synthetic oligonucleotide
  Antisense strand to SEQ ID NO: 146844
aacaugauaaucuuacuag

SEQ ID NO: 146846 - RNA, 19 nt, Artificial Sequence
  Description of Artificial Sequence: Synthetic oligonucleotide
  Sense strand starting at position 238 of SEQ ID NO: 1883
accagaauaggccgaagaa

SEQ ID NO: 146847 - RNA, 19 nt, Artificial Sequence
  Description of Artificial Sequence: Synthetic oligonucleotide
  Antisense strand to SEQ ID NO: 146846
uucuucggccuauucuggu

SEQ ID NO: 146848 - RNA, 19 nt, Artificial Sequence
  Description of Artificial Sequence: Synthetic oligonucleotide
  Sense strand starting at position 11 of SEQ ID NO: 1884
uggcaauaaggauguaacu

SEQ ID NO: 146849 - RNA, 19 nt, Artificial Sequence
  Description of Artificial Sequence: Synthetic oligonucleotide
  Antisense strand to SEQ ID NO: 146848
aguuacauccuuauugcca

SEQ ID NO: 146850 - RNA, 19 nt, Artificial Sequence
  Description of Artificial Sequence: Synthetic oligonucleotide
  Sense strand starting at position 207 of SEQ ID NO: 1884
agaaacgucauagguauaa

SEQ ID NO: 146851 - RNA, 19 nt, Artificial Sequence
  Description of Artificial Sequence: Synthetic oligonucleotide
  Antisense strand to SEQ ID NO: 146850
uuauaccuaugacguuucu

SEQ ID NO: 146852 - RNA, 19 nt, Artificial Sequence
  Description of Artificial Sequence: Synthetic oligonucleotide
  Sense strand starting at position 253 of SEQ ID NO: 1884
aagugugcucccuuugcca

SEQ ID NO: 146853 - RNA, 19 nt, Artificial Sequence
  Description of Artificial Sequence: Synthetic oligonucleotide
  Antisense strand to SEQ ID NO: 146852
uggcaaagggagcacacuu

SEQ ID NO: 146854 - RNA, 19 nt, Artificial Sequence
  Description of Artificial Sequence: Synthetic oligonucleotide
  Sense strand starting at position 292 of SEQ ID NO: 1884
gccugagugccagagguau

SEQ ID NO: 146855 - RNA, 19 nt, Artificial Sequence
  Description of Artificial Sequence: Synthetic oligonucleotide
  Antisense strand to SEQ ID NO: 146854
auaccucuggcacucaggc

SEQ ID NO: 146856 - RNA, 19 nt, Artificial Sequence
  Description of Artificial Sequence: Synthetic oligonucleotide
  Sense strand starting at position 294 of SEQ ID NO: 1884
cugagugccagagguauaa

SEQ ID NO: 146857 - RNA, 19 nt, Artificial Sequence
  Description of Artificial Sequence: Synthetic oligonucleotide
  Antisense strand to SEQ ID NO: 146856
uuauaccucuggcacucag

SEQ ID NO: 146858 - RNA, 19 nt, Artificial Sequence
  Description of Artificial Sequence: Synthetic oligonucleotide
  Sense strand starting at position 426 of SEQ ID NO: 1884
gcaugaaggucucuuaguu

SEQ ID NO: 146859 - RNA, 19 nt, Artificial Sequence
  Description of Artificial Sequence: Synthetic oligonucleotide
  Antisense strand to SEQ ID NO: 146858
aacuaagagaccuucaugc

SEQ ID NO: 146860 - RNA, 19 nt, Artificial Sequence
  Description of Artificial Sequence: Synthetic oligonucleotide
  Sense strand starting at position 430 of SEQ ID NO: 1884
gaaggucucuuaguuuaug

SEQ ID NO: 146861 - RNA, 19 nt, Artificial Sequence
  Description of Artificial Sequence: Synthetic oligonucleotide
  Antisense strand to SEQ ID NO: 146860
cauaaacuaagagaccuuc

SEQ ID NO: 146862 - RNA, 19 nt, Artificial Sequence
  Description of Artificial Sequence: Synthetic oligonucleotide
  Sense strand starting at position 431 of SEQ ID NO: 1884
aaggucucuuaguuuauga

SEQ ID NO: 146863 - RNA, 19 nt, Artificial Sequence
  Description of Artificial Sequence: Synthetic oligonucleotide
  Antisense strand to SEQ ID NO: 146862
ucauaaacuaagagaccuu

SEQ ID NO: 146864 - RNA, 19 nt, Artificial Sequence
  Description of Artificial Sequence: Synthetic oligonucleotide
  Sense strand starting at position 433 of SEQ ID NO: 1884
ggucucuuaguuuaugaac

SEQ ID NO: 146865 - RNA, 19 nt, Artificial Sequence
  Description of Artificial Sequence: Synthetic oligonucleotide
  Antisense strand to SEQ ID NO: 146864
guucauaaacuaagagacc

SEQ ID NO: 146866 - RNA, 19 nt, Artificial Sequence
  Description of Artificial Sequence: Synthetic oligonucleotide
  Sense strand starting at position 664 of SEQ ID NO: 1884
ggaguugcaaaguauucua

SEQ ID NO: 146867 - RNA, 19 nt, Artificial Sequence
  Description of Artificial Sequence: Synthetic oligonucleotide
  Antisense strand to SEQ ID NO: 146866
uagaauacuuugcaacucc

SEQ ID NO: 146868 - RNA, 19 nt, Artificial Sequence
  Description of Artificial Sequence: Synthetic oligonucleotide
  Sense strand starting at position 667 of SEQ ID NO: 1884
guugcaaaguauucuaggu

SEQ ID NO: 146869 - RNA, 19 nt, Artificial Sequence
  Description of Artificial Sequence: Synthetic oligonucleotide
  Antisense strand to SEQ ID NO: 146868
accuagaauacuuugcaac

SEQ ID NO: 146870 - RNA, 19 nt, Artificial Sequence
  Description of Artificial Sequence: Synthetic oligonucleotide
  Sense strand starting at position 778 of SEQ ID NO: 1884
ucaucuaugcauuaguacu

SEQ ID NO: 146871 - RNA, 19 nt, Artificial Sequence
  Description of Artificial Sequence: Synthetic oligonucleotide
  Antisense strand to SEQ ID NO: 146870
aguacuaaugcauagauga

SEQ ID NO: 146872 - RNA, 19 nt, Artificial Sequence
  Description of Artificial Sequence: Synthetic oligonucleotide
  Sense strand starting at position 848 of SEQ ID NO: 1884
uacgaagaagcuuguguua

SEQ ID NO: 146873 - RNA, 19 nt, Artificial Sequence
  Description of Artificial Sequence: Synthetic oligonucleotide
  Antisense strand to SEQ ID NO: 146872
uaacacaagcuucuucgua

SEQ ID NO: 146874 - RNA, 19 nt, Artificial Sequence
  Description of Artificial Sequence: Synthetic oligonucleotide
  Sense strand starting at position 851 of SEQ ID NO: 1884
gaagaagcuuguguuaauc

SEQ ID NO: 146875 - RNA, 19 nt, Artificial Sequence
  Description of Artificial Sequence: Synthetic oligonucleotide
  Antisense strand to SEQ ID NO: 146874
gauuaacacaagcuucuuc

SEQ ID NO: 146876 - RNA, 19 nt, Artificial Sequence
  Description of Artificial Sequence: Synthetic oligonucleotide
  Sense strand starting at position 861 of SEQ ID NO: 1884
guguuaaucuuaucucucu

SEQ ID NO: 146877 - RNA, 19 nt, Artificial Sequence
  Description of Artificial Sequence: Synthetic oligonucleotide
  Antisense strand to SEQ ID NO: 146876
agagagauaagauuaacac

SEQ ID NO: 146878 - RNA, 19 nt, Artificial Sequence
  Description of Artificial Sequence: Synthetic oligonucleotide
  Sense strand starting at position 1020 of SEQ ID NO: 1884
uguuaacuggaucaacuuu

SEQ ID NO: 146879 - RNA, 19 nt, Artificial Sequence
  Description of Artificial Sequence: Synthetic oligonucleotide
  Antisense strand to SEQ ID NO: 146878
aaaguugauccaguuaaca

SEQ ID NO: 146880 - RNA, 19 nt, Artificial Sequence
  Description of Artificial Sequence: Synthetic oligonucleotide
  Sense strand starting at position 1085 of SEQ ID NO: 1884
gucucuucgcaguaauaau

SEQ ID NO: 146881 - RNA, 19 nt, Artificial Sequence
  Description of Artificial Sequence: Synthetic oligonucleotide
  Antisense strand to SEQ ID NO: 146880
auuauuacugcgaagagac

SEQ ID NO: 146882 - RNA, 19 nt, Artificial Sequence
  Description of Artificial Sequence: Synthetic oligonucleotide
  Sense strand starting at position 1245 of SEQ ID NO: 1884
cggaaauguuaaccaggga

SEQ ID NO: 146883 - RNA, 19 nt, Artificial Sequence
  Description of Artificial Sequence: Synthetic oligonucleotide
  Antisense strand to SEQ ID NO: 146882
ucccugguuaacauuuccg

SEQ ID NO: 146884 - RNA, 19 nt, Artificial Sequence
  Description of Artificial Sequence: Synthetic oligonucleotide
  Sense strand starting at position 1428 of SEQ ID NO: 1884
uguacagugcgcccugaua

SEQ ID NO: 146885 - RNA, 19 nt, Artificial Sequence
  Description of Artificial Sequence: Synthetic oligonucleotide
  Antisense strand to SEQ ID NO: 146884
uaucagggcgcacuguaca

SEQ ID NO: 146886 - RNA, 19 nt, Artificial Sequence
  Description of Artificial Sequence: Synthetic oligonucleotide
  Sense strand starting at position 1430 of SEQ ID NO: 1884
uacagugcgcccugauaaa

SEQ ID NO: 146887 - RNA, 19 nt, Artificial Sequence
  Description of Artificial Sequence: Synthetic oligonucleotide
  Antisense strand to SEQ ID NO: 146886
uuuaucagggcgcacugua

SEQ ID NO: 146888 - RNA, 19 nt, Artificial Sequence
  Description of Artificial Sequence: Synthetic oligonucleotide
  Sense strand starting at position 1543 of SEQ ID NO: 1884
gagucuuggccguggacuu

SEQ ID NO: 146889 - RNA, 19 nt, Artificial Sequence
  Description of Artificial Sequence: Synthetic oligonucleotide
  Antisense strand to SEQ ID NO: 146888
aaguccacggccaagacuc

SEQ ID NO: 146890 - RNA, 19 nt, Artificial Sequence
  Description of Artificial Sequence: Synthetic oligonucleotide
  Sense strand starting at position 2318 of SEQ ID NO: 1884
cagcuagugggauggaaau

SEQ ID NO: 146891 - RNA, 19 nt, Artificial Sequence
  Description of Artificial Sequence: Synthetic oligonucleotide
  Antisense strand to SEQ ID NO: 146890
auuuccaucccacuagcug

SEQ ID NO: 146892 - RNA, 19 nt, Artificial Sequence
  Description of Artificial Sequence: Synthetic oligonucleotide
  Sense strand starting at position 2370 of SEQ ID NO: 1884
cuuguagccaccgggaaau

SEQ ID NO: 146893 - RNA, 19 nt, Artificial Sequence
  Description of Artificial Sequence: Synthetic oligonucleotide
  Antisense strand to SEQ ID NO: 146892
auuucccgguggcuacaag

SEQ ID NO: 146894 - RNA, 19 nt, Artificial Sequence
  Description of Artificial Sequence: Synthetic oligonucleotide
  Sense strand starting at position 2565 of SEQ ID NO: 1884
accaguaaguaguugagga

SEQ ID NO: 146895 - RNA, 19 nt, Artificial Sequence
  Description of Artificial Sequence: Synthetic oligonucleotide
  Antisense strand to SEQ ID NO: 146894
uccucaacuacuuacuggu

SEQ ID NO: 146896 - RNA, 19 nt, Artificial Sequence
  Description of Artificial Sequence: Synthetic oligonucleotide
  Sense strand starting at position 2622 of SEQ ID NO: 1884
cggucucaguggccugaaa

SEQ ID NO: 146897 - RNA, 19 nt, Artificial Sequence
  Description of Artificial Sequence: Synthetic oligonucleotide
  Antisense strand to SEQ ID NO: 146896
uuucaggccacugagaccg

SEQ ID NO: 146898 - RNA, 19 nt, Artificial Sequence
  Description of Artificial Sequence: Synthetic oligonucleotide
  Sense strand starting at position 2624 of SEQ ID NO: 1884
gucucaguggccugaaauu

SEQ ID NO: 146899 - RNA, 19 nt, Artificial Sequence
  Description of Artificial Sequence: Synthetic oligonucleotide
  Antisense strand to SEQ ID NO: 146898
aauuucaggccacugagac

SEQ ID NO: 146900 - RNA, 19 nt, Artificial Sequence
  Description of Artificial Sequence: Synthetic oligonucleotide
  Sense strand starting at position 2772 of SEQ ID NO: 1884
cugcguccucacggaauua

SEQ ID NO: 146901 - RNA, 19 nt, Artificial Sequence
  Description of Artificial Sequence: Synthetic oligonucleotide
  Antisense strand to SEQ ID NO: 146900
uaauuccgugaggacgcag

SEQ ID NO: 146902 - RNA, 19 nt, Artificial Sequence
  Description of Artificial Sequence: Synthetic oligonucleotide
  Sense strand starting at position 2773 of SEQ ID NO: 1884
ugcguccucacggaauuau

SEQ ID NO: 146903 - RNA, 19 nt, Artificial Sequence
  Description of Artificial Sequence: Synthetic oligonucleotide
  Antisense strand to SEQ ID NO: 146902
auaauuccgugaggacgca

SEQ ID NO: 146904 - RNA, 19 nt, Artificial Sequence
  Description of Artificial Sequence: Synthetic oligonucleotide
  Sense strand starting at position 2782 of SEQ ID NO: 1884
acggaauuauauuccagga

SEQ ID NO: 146905 - RNA, 19 nt, Artificial Sequence
  Description of Artificial Sequence: Synthetic oligonucleotide
  Antisense strand to SEQ ID NO: 146904
uccuggaauauaauuccgu

SEQ ID NO: 146906 - RNA, 19 nt, Artificial Sequence
  Description of Artificial Sequence: Synthetic oligonucleotide
  Sense strand starting at position 2784 of SEQ ID NO: 1884
ggaauuauauuccaggauc

SEQ ID NO: 146907 - RNA, 19 nt, Artificial Sequence
  Description of Artificial Sequence: Synthetic oligonucleotide
  Antisense strand to SEQ ID NO: 146906
gauccuggaauauaauucc

SEQ ID NO: 146908 - RNA, 19 nt, Artificial Sequence
  Description of Artificial Sequence: Synthetic oligonucleotide
  Sense strand starting at position 2901 of SEQ ID NO: 1884
ugcugaugggucuagcuuu

SEQ ID NO: 146909 - RNA, 19 nt, Artificial Sequence
  Description of Artificial Sequence: Synthetic oligonucleotide
  Antisense strand to SEQ ID NO: 146908
aaagcuagacccaucagca

SEQ ID NO: 146910 - RNA, 19 nt, Artificial Sequence
  Description of Artificial Sequence: Synthetic oligonucleotide
  Sense strand starting at position 2965 of SEQ ID NO: 1884
uguucuuggcucuauaaug

SEQ ID NO: 146911 - RNA, 19 nt, Artificial Sequence
  Description of Artificial Sequence: Synthetic oligonucleotide
  Antisense strand to SEQ ID NO: 146910
cauuauagagccaagaaca

SEQ ID NO: 146912 - RNA, 19 nt, Artificial Sequence
  Description of Artificial Sequence: Synthetic oligonucleotide
  Sense strand starting at position 2973 of SEQ ID NO: 1884
gcucuauaaugaucaggcu

SEQ ID NO: 146913 - RNA, 19 nt, Artificial Sequence
  Description of Artificial Sequence: Synthetic oligonucleotide
  Antisense strand to SEQ ID NO: 146912
agccugaucauuauagagc

SEQ ID NO: 146914 - RNA, 19 nt, Artificial Sequence
  Description of Artificial Sequence: Synthetic oligonucleotide
  Sense strand starting at position 3027 of SEQ ID NO: 1884
ccgguuuggcucuaucaau

SEQ ID NO: 146915 - RNA, 19 nt, Artificial Sequence
  Description of Artificial Sequence: Synthetic oligonucleotide
  Antisense strand to SEQ ID NO: 146914
auugauagagccaaaccgg

SEQ ID NO: 146916 - RNA, 19 nt, Artificial Sequence
  Description of Artificial Sequence: Synthetic oligonucleotide
  Sense strand starting at position 3146 of SEQ ID NO: 1884
ggaauccagucugcacuua

SEQ ID NO: 146917 - RNA, 19 nt, Artificial Sequence
  Description of Artificial Sequence: Synthetic oligonucleotide
  Antisense strand to SEQ ID NO: 146916
uaagugcagacuggauucc

SEQ ID NO: 146918 - RNA, 19 nt, Artificial Sequence
  Description of Artificial Sequence: Synthetic oligonucleotide
  Sense strand starting at position 3233 of SEQ ID NO: 1884
uccucagaugucugaguuu

SEQ ID NO: 146919 - RNA, 19 nt, Artificial Sequence
  Description of Artificial Sequence: Synthetic oligonucleotide
  Antisense strand to SEQ ID NO: 146918
aaacucagacaucugagga

SEQ ID NO: 146920 - RNA, 19 nt, Artificial Sequence
  Description of Artificial Sequence: Synthetic oligonucleotide
  Sense strand starting at position 3321 of SEQ ID NO: 1884
gcaguugcuacuguuagua

SEQ ID NO: 146921 - RNA, 19 nt, Artificial Sequence
  Description of Artificial Sequence: Synthetic oligonucleotide
  Antisense strand to SEQ ID NO: 146920
uacuaacaguagcaacugc

SEQ ID NO: 146922 - RNA, 19 nt, Artificial Sequence
  Description of Artificial Sequence: Synthetic oligonucleotide
  Sense strand starting at position 3325 of SEQ ID NO: 1884
uugcuacuguuaguauuau

SEQ ID NO: 146923 - RNA, 19 nt, Artificial Sequence
  Description of Artificial Sequence: Synthetic oligonucleotide
  Antisense strand to SEQ ID NO: 146922
auaauacuaacaguagcaa

SEQ ID NO: 146924 - RNA, 19 nt, Artificial Sequence
  Description of Artificial Sequence: Synthetic oligonucleotide
  Sense strand starting at position 3847 of SEQ ID NO: 1884
gcgaauacggcucacugaa

SEQ ID NO: 146925 - RNA, 19 nt, Artificial Sequence
  Description of Artificial Sequence: Synthetic oligonucleotide
  Antisense strand to SEQ ID NO: 146924
uucagugagccguauucgc

SEQ ID NO: 146926 - RNA, 19 nt, Artificial Sequence
  Description of Artificial Sequence: Synthetic oligonucleotide
  Sense strand starting at position 3975 of SEQ ID NO: 1884
uuugcuguuguagagaguu

SEQ ID NO: 146927 - RNA, 19 nt, Artificial Sequence
  Description of Artificial Sequence: Synthetic oligonucleotide
  Antisense strand to SEQ ID NO: 146926
aacucucuacaacagcaaa

SEQ ID NO: 146928 - RNA, 19 nt, Artificial Sequence
  Description of Artificial Sequence: Synthetic oligonucleotide
  Sense strand starting at position 3969 of SEQ ID NO: 1885
uuauaugccuccugaugca

SEQ ID NO: 146929 - RNA, 19 nt, Artificial Sequence
  Description of Artificial Sequence: Synthetic oligonucleotide
  Antisense strand to SEQ ID NO: 146928
ugcaucaggaggcauauaa

SEQ ID NO: 146930 - RNA, 19 nt, Artificial Sequence
  Description of Artificial Sequence: Synthetic oligonucleotide
  Sense strand starting at position 3794 of SEQ ID NO: 1885
caccaauagugggaugaau

SEQ ID NO: 146931 - RNA, 19 nt, Artificial Sequence
  Description of Artificial Sequence: Synthetic oligonucleotide
  Antisense strand to SEQ ID NO: 146930
auucaucccacuauuggug

SEQ ID NO: 146932 - RNA, 19 nt, Artificial Sequence
  Description of Artificial Sequence: Synthetic oligonucleotide
  Sense strand starting at position 2973 of SEQ ID NO: 1885
gaaagucugccuggaaaca

SEQ ID NO: 146933 - RNA, 19 nt, Artificial Sequence
  Description of Artificial Sequence: Synthetic oligonucleotide
  Antisense strand to SEQ ID NO: 146932
uguuuccaggcagacuuuc

SEQ ID NO: 146934 - RNA, 19 nt, Artificial Sequence
  Description of Artificial Sequence: Synthetic oligonucleotide
  Sense strand starting at position 2884 of SEQ ID NO: 1885
uuugguggauuaucaaguu

SEQ ID NO: 146935 - RNA, 19 nt, Artificial Sequence
  Description of Artificial Sequence: Synthetic oligonucleotide
  Antisense strand to SEQ ID NO: 146934
aacuugauaauccaccaaa

SEQ ID NO: 146936 - RNA, 19 nt, Artificial Sequence
  Description of Artificial Sequence: Synthetic oligonucleotide
  Sense strand starting at position 2788 of SEQ ID NO: 1885
caggaagugugauucuacu

SEQ ID NO: 146937 - RNA, 19 nt, Artificial Sequence
  Description of Artificial Sequence: Synthetic oligonucleotide
  Antisense strand to SEQ ID NO: 146936
aguagaaucacacuuccug

SEQ ID NO: 146938 - RNA, 19 nt, Artificial Sequence
  Description of Artificial Sequence: Synthetic oligonucleotide
  Sense strand starting at position 2661 of SEQ ID NO: 1885
ucaggauuaggaugccaau

SEQ ID NO: 146939 - RNA, 19 nt, Artificial Sequence
  Description of Artificial Sequence: Synthetic oligonucleotide
  Antisense strand to SEQ ID NO: 146938
auuggcauccuaauccuga

SEQ ID NO: 146940 - RNA, 19 nt, Artificial Sequence
  Description of Artificial Sequence: Synthetic oligonucleotide
  Sense strand starting at position 2623 of SEQ ID NO: 1885
aggguuaagugacuccaaa

SEQ ID NO: 146941 - RNA, 19 nt, Artificial Sequence
  Description of Artificial Sequence: Synthetic oligonucleotide
  Antisense strand to SEQ ID NO: 146940
uuuggagucacuuaacccu

SEQ ID NO: 146942 - RNA, 19 nt, Artificial Sequence
  Description of Artificial Sequence: Synthetic oligonucleotide
  Sense strand starting at position 2583 of SEQ ID NO: 1885
accguuagagcugggagaa

SEQ ID NO: 146943 - RNA, 19 nt, Artificial Sequence
  Description of Artificial Sequence: Synthetic oligonucleotide
  Antisense strand to SEQ ID NO: 146942
uucucccagcucuaacggu

SEQ ID NO: 146944 - RNA, 19 nt, Artificial Sequence
  Description of Artificial Sequence: Synthetic oligonucleotide
  Sense strand starting at position 2582 of SEQ ID NO: 1885
caccguuagagcugggaga

SEQ ID NO: 146945 - RNA, 19 nt, Artificial Sequence
  Description of Artificial Sequence: Synthetic oligonucleotide
  Antisense strand to SEQ ID NO: 146944
ucucccagcucuaacggug

SEQ ID NO: 146946 - RNA, 19 nt, Artificial Sequence
  Description of Artificial Sequence: Synthetic oligonucleotide
  Sense strand starting at position 2367 of SEQ ID NO: 1885
gcuacucauucugguccaa

SEQ ID NO: 146947 - RNA, 19 nt, Artificial Sequence
  Description of Artificial Sequence: Synthetic oligonucleotide
  Antisense strand to SEQ ID NO: 146946
uuggaccagaaugaguagc

SEQ ID NO: 146948 - RNA, 19 nt, Artificial Sequence
  Description of Artificial Sequence: Synthetic oligonucleotide
  Sense strand starting at position 2330 of SEQ ID NO: 1885
ggacaaguuugcuugggag

SEQ ID NO: 146949 - RNA, 19 nt, Artificial Sequence
  Description of Artificial Sequence: Synthetic oligonucleotide
  Antisense strand to SEQ ID NO: 146948
cucccaagcaaacuugucc

SEQ ID NO: 146950 - RNA, 19 nt, Artificial Sequence
  Description of Artificial Sequence: Synthetic oligonucleotide
  Sense strand starting at position 2329 of SEQ ID NO: 1885
aggacaaguuugcuuggga

SEQ ID NO: 146951 - RNA, 19 nt, Artificial Sequence
  Description of Artificial Sequence: Synthetic oligonucleotide
  Antisense strand to SEQ ID NO: 146950
ucccaagcaaacuuguccu

SEQ ID NO: 146952 - RNA, 19 nt, Artificial Sequence
  Description of Artificial Sequence: Synthetic oligonucleotide
  Sense strand starting at position 2043 of SEQ ID NO: 1885
gccagugacgugugaaaga

SEQ ID NO: 146953 - RNA, 19 nt, Artificial Sequence
  Description of Artificial Sequence: Synthetic oligonucleotide
  Antisense strand to SEQ ID NO: 146952
ucuuucacacgucacuggc

SEQ ID NO: 146954 - RNA, 19 nt, Artificial Sequence
  Description of Artificial Sequence: Synthetic oligonucleotide
  Sense strand starting at position 2041 of SEQ ID NO: 1885
acgccagugacgugugaaa

SEQ ID NO: 146955 - RNA, 19 nt, Artificial Sequence
  Description of Artificial Sequence: Synthetic oligonucleotide
  Antisense strand to SEQ ID NO: 146954
uuucacacgucacuggcgu

SEQ ID NO: 146956 - RNA, 19 nt, Artificial Sequence
  Description of Artificial Sequence: Synthetic oligonucleotide
  Sense strand starting at position 1854 of SEQ ID NO: 1885
cuggcauacgggcaagaaa

SEQ ID NO: 146957 - RNA, 19 nt, Artificial Sequence
  Description of Artificial Sequence: Synthetic oligonucleotide
  Antisense strand to SEQ ID NO: 146956
uuucuugcccguaugccag

SEQ ID NO: 146958 - RNA, 19 nt, Artificial Sequence
  Description of Artificial Sequence: Synthetic oligonucleotide
  Sense strand starting at position 1498 of SEQ ID NO: 1885
ccacgaaguacucgguacu

SEQ ID NO: 146959 - RNA, 19 nt, Artificial Sequence
  Description of Artificial Sequence: Synthetic oligonucleotide
  Antisense strand to SEQ ID NO: 146958
aguaccgaguacuucgugg

SEQ ID NO: 146960 - RNA, 19 nt, Artificial Sequence
  Description of Artificial Sequence: Synthetic oligonucleotide
  Sense strand starting at position 1476 of SEQ ID NO: 1885
cuccgacauucuccuggaa

SEQ ID NO: 146961 - RNA, 19 nt, Artificial Sequence
  Description of Artificial Sequence: Synthetic oligonucleotide
  Antisense strand to SEQ ID NO: 146960
uuccaggagaaugucggag

SEQ ID NO: 146962 - RNA, 19 nt, Artificial Sequence
  Description of Artificial Sequence: Synthetic oligonucleotide
  Sense strand starting at position 1444 of SEQ ID NO: 1885
ggcacaagcuuccuaaauc

SEQ ID NO: 146963 - RNA, 19 nt, Artificial Sequence
  Description of Artificial Sequence: Synthetic oligonucleotide
  Antisense strand to SEQ ID NO: 146962
gauuuaggaagcuugugcc

SEQ ID NO: 146964 - RNA, 19 nt, Artificial Sequence
  Description of Artificial Sequence: Synthetic oligonucleotide
  Sense strand starting at position 1347 of SEQ ID NO: 1885
cguauuccauguuaaagga

SEQ ID NO: 146965 - RNA, 19 nt, Artificial Sequence
  Description of Artificial Sequence: Synthetic oligonucleotide
  Antisense strand to SEQ ID NO: 146964
uccuuuaacauggaauacg

SEQ ID NO: 146966 - RNA, 19 nt, Artificial Sequence
  Description of Artificial Sequence: Synthetic oligonucleotide
  Sense strand starting at position 1344 of SEQ ID NO: 1885
gcacguauuccauguuaaa

SEQ ID NO: 146967 - RNA, 19 nt, Artificial Sequence
  Description of Artificial Sequence: Synthetic oligonucleotide
  Antisense strand to SEQ ID NO: 146966
uuuaacauggaauacgugc

SEQ ID NO: 146968 - RNA, 19 nt, Artificial Sequence
  Description of Artificial Sequence: Synthetic oligonucleotide
  Sense strand starting at position 1342 of SEQ ID NO: 1885
aggcacguauuccauguua

SEQ ID NO: 146969 - RNA, 19 nt, Artificial Sequence
  Description of Artificial Sequence: Synthetic oligonucleotide
  Antisense strand to SEQ ID NO: 146968
uaacauggaauacgugccu

SEQ ID NO: 146970 - RNA, 19 nt, Artificial Sequence
  Description of Artificial Sequence: Synthetic oligonucleotide
  Sense strand starting at position 1188 of SEQ ID NO: 1885
aaagcuuaacugggcaaga

SEQ ID NO: 146971 - RNA, 19 nt, Artificial Sequence
  Description of Artificial Sequence: Synthetic oligonucleotide
  Antisense strand to SEQ ID NO: 146970
ucuugcccaguuaagcuuu

SEQ ID NO: 146972 - RNA, 19 nt, Artificial Sequence
  Description of Artificial Sequence: Synthetic oligonucleotide
  Sense strand starting at position 1073 of SEQ ID NO: 1885
gucgguuuguucggaacac

SEQ ID NO: 146973 - RNA, 19 nt, Artificial Sequence
  Description of Artificial Sequence: Synthetic oligonucleotide
  Antisense strand to SEQ ID NO: 146972
guguuccgaacaaaccgac

SEQ ID NO: 146974 - RNA, 19 nt, Artificial Sequence
  Description of Artificial Sequence: Synthetic oligonucleotide
  Sense strand starting at position 1072 of SEQ ID NO: 1885
cgucgguuuguucggaaca

SEQ ID NO: 146975 - RNA, 19 nt, Artificial Sequence
  Description of Artificial Sequence: Synthetic oligonucleotide
  Antisense strand to SEQ ID NO: 146974
uguuccgaacaaaccgacg

SEQ ID NO: 146976 - RNA, 19 nt, Artificial Sequence
  Description of Artificial Sequence: Synthetic oligonucleotide
  Sense strand starting at position 1065 of SEQ ID NO: 1885
ugccaaacgucgguuuguu

SEQ ID NO: 146977 - RNA, 19 nt, Artificial Sequence
  Description of Artificial Sequence: Synthetic oligonucleotide
  Antisense strand to SEQ ID NO: 146976
aacaaaccgacguuuggca

SEQ ID NO: 146978 - RNA, 19 nt, Artificial Sequence
  Description of Artificial Sequence: Synthetic oligonucleotide
  Sense strand starting at position 1053 of SEQ ID NO: 1885
agcaaucagugaugccaaa

SEQ ID NO: 146979 - RNA, 19 nt, Artificial Sequence
  Description of Artificial Sequence: Synthetic oligonucleotide
  Antisense strand to SEQ ID NO: 146978
uuuggcaucacugauugcu

SEQ ID NO: 146980 - RNA, 19 nt, Artificial Sequence
  Description of Artificial Sequence: Synthetic oligonucleotide
  Sense strand starting at position 1013 of SEQ ID NO: 1885
cgguaauugugccaaacuu

SEQ ID NO: 146981 - RNA, 19 nt, Artificial Sequence
  Description of Artificial Sequence: Synthetic oligonucleotide
  Antisense strand to SEQ ID NO: 146980
aaguuuggcacaauuaccg

SEQ ID NO: 146982 - RNA, 19 nt, Artificial Sequence
  Description of Artificial Sequence: Synthetic oligonucleotide
  Sense strand starting at position 767 of SEQ ID NO: 1885
cuuguagaaucccagguuu

SEQ ID NO: 146983 - RNA, 19 nt, Artificial Sequence
  Description of Artificial Sequence: Synthetic oligonucleotide
  Antisense strand to SEQ ID NO: 146982
aaaccugggauucuacaag

SEQ ID NO: 146984 - RNA, 19 nt, Artificial Sequence
  Description of Artificial Sequence: Synthetic oligonucleotide
  Sense strand starting at position 684 of SEQ ID NO: 1885
gucuuagccuaugauacuu

SEQ ID NO: 146985 - RNA, 19 nt, Artificial Sequence
  Description of Artificial Sequence: Synthetic oligonucleotide
  Antisense strand to SEQ ID NO: 146984
aaguaucauaggcuaagac

SEQ ID NO: 146986 - RNA, 19 nt, Artificial Sequence
  Description of Artificial Sequence: Synthetic oligonucleotide
  Sense strand starting at position 683 of SEQ ID NO: 1885
ugucuuagccuaugauacu

SEQ ID NO: 146987 - RNA, 19 nt, Artificial Sequence
  Description of Artificial Sequence: Synthetic oligonucleotide
  Antisense strand to SEQ ID NO: 146986
aguaucauaggcuaagaca

SEQ ID NO: 146988 - RNA, 19 nt, Artificial Sequence
  Description of Artificial Sequence: Synthetic oligonucleotide
  Sense strand starting at position 681 of SEQ ID NO: 1885
gaugucuuagccuaugaua

SEQ ID NO: 146989 - RNA, 19 nt, Artificial Sequence
  Description of Artificial Sequence: Synthetic oligonucleotide
  Antisense strand to SEQ ID NO: 146988
uaucauaggcuaagacauc

SEQ ID NO: 146990 - RNA, 19 nt, Artificial Sequence
  Description of Artificial Sequence: Synthetic oligonucleotide
  Sense strand starting at position 576 of SEQ ID NO: 1885
guaccucgucgucuucuaa

SEQ ID NO: 146991 - RNA, 19 nt, Artificial Sequence
  Description of Artificial Sequence: Synthetic oligonucleotide
  Antisense strand to SEQ ID NO: 146990
uuagaagacgacgagguac

SEQ ID NO: 146992 - RNA, 19 nt, Artificial Sequence
  Description of Artificial Sequence: Synthetic oligonucleotide
  Sense strand starting at position 543 of SEQ ID NO: 1885
gcagauuaauauuguaaac

SEQ ID NO: 146993 - RNA, 19 nt, Artificial Sequence
  Description of Artificial Sequence: Synthetic oligonucleotide
  Antisense strand to SEQ ID NO: 146992
guuuacaauauuaaucugc

SEQ ID NO: 146994 - RNA, 19 nt, Artificial Sequence
  Description of Artificial Sequence: Synthetic oligonucleotide
  Sense strand starting at position 537 of SEQ ID NO: 1885
ugcaaagcagauuaauauu

SEQ ID NO: 146995 - RNA, 19 nt, Artificial Sequence
  Description of Artificial Sequence: Synthetic oligonucleotide
  Antisense strand to SEQ ID NO: 146994
aauauuaaucugcuuugca

SEQ ID NO: 146996 - RNA, 19 nt, Artificial Sequence
  Description of Artificial Sequence: Synthetic oligonucleotide
  Sense strand starting at position 534 of SEQ ID NO: 1885
aucugcaaagcagauuaau

SEQ ID NO: 146997 - RNA, 19 nt, Artificial Sequence
  Description of Artificial Sequence: Synthetic oligonucleotide
  Antisense strand to SEQ ID NO: 146996
auuaaucugcuuugcagau

SEQ ID NO: 146998 - RNA, 19 nt, Artificial Sequence
  Description of Artificial Sequence: Synthetic oligonucleotide
  Sense strand starting at position 311 of SEQ ID NO: 1885
gugcuuugcuucccaagca

SEQ ID NO: 146999 - RNA, 19 nt, Artificial Sequence
  Description of Artificial Sequence: Synthetic oligonucleotide
  Antisense strand to SEQ ID NO: 146998
ugcuugggaagcaaagcac

SEQ ID NO: 147000 - RNA, 19 nt, Artificial Sequence
  Description of Artificial Sequence: Synthetic oligonucleotide
  Sense strand starting at position 149 of SEQ ID NO: 1885
aagcaaucuucccgaagug

SEQ ID NO: 147001 - RNA, 19 nt, Artificial Sequence
  Description of Artificial Sequence: Synthetic oligonucleotide
  Antisense strand to SEQ ID NO: 147000
cacuucgggaagauugcuu

SEQ ID NO: 147002 - RNA, 19 nt, Artificial Sequence
  Description of Artificial Sequence: Synthetic oligonucleotide
  Sense strand starting at position 3970 of SEQ ID NO: 1886
aaugucauauaggugaaau

SEQ ID NO: 147003 - RNA, 19 nt, Artificial Sequence
  Description of Artificial Sequence: Synthetic oligonucleotide
  Antisense strand to SEQ ID NO: 147002
auuucaccuauaugacauu

SEQ ID NO: 147004 - RNA, 19 nt, Artificial Sequence
  Description of Artificial Sequence: Synthetic oligonucleotide
  Sense strand starting at position 3967 of SEQ ID NO: 1886
ccgaaugucauauagguga

SEQ ID NO: 147005 - RNA, 19 nt, Artificial Sequence
  Description of Artificial Sequence: Synthetic oligonucleotide
  Antisense strand to SEQ ID NO: 147004
ucaccuauaugacauucgg

SEQ ID NO: 147006 - RNA, 19 nt, Artificial Sequence
  Description of Artificial Sequence: Synthetic oligonucleotide
  Sense strand starting at position 3800 of SEQ ID NO: 1886
guuauaccuugaguuugga

SEQ ID NO: 147007 - RNA, 19 nt, Artificial Sequence
  Description of Artificial Sequence: Synthetic oligonucleotide
  Antisense strand to SEQ ID NO: 147006
uccaaacucaagguauaac

SEQ ID NO: 147008 - RNA, 19 nt, Artificial Sequence
  Description of Artificial Sequence: Synthetic oligonucleotide
  Sense strand starting at position 3798 of SEQ ID NO: 1886
guguuauaccuugaguuug

SEQ ID NO: 147009 - RNA, 19 nt, Artificial Sequence
  Description of Artificial Sequence: Synthetic oligonucleotide
  Antisense strand to SEQ ID NO: 147008
caaacucaagguauaacac

SEQ ID NO: 147010 - RNA, 19 nt, Artificial Sequence
  Description of Artificial Sequence: Synthetic oligonucleotide
  Sense strand starting at position 3627 of SEQ ID NO: 1886
ggcaauuguguggaaagca

SEQ ID NO: 147011 - RNA, 19 nt, Artificial Sequence
  Description of Artificial Sequence: Synthetic oligonucleotide
  Antisense strand to SEQ ID NO: 147010
ugcuuuccacacaauugcc

SEQ ID NO: 147012 - RNA, 19 nt, Artificial Sequence
  Description of Artificial Sequence: Synthetic oligonucleotide
  Sense strand starting at position 3565 of SEQ ID NO: 1886
cuguaacucuagccaaaga

SEQ ID NO: 147013 - RNA, 19 nt, Artificial Sequence
  Description of Artificial Sequence: Synthetic oligonucleotide
  Antisense strand to SEQ ID NO: 147012
ucuuuggcuagaguuacag

SEQ ID NO: 147014 - RNA, 19 nt, Artificial Sequence
  Description of Artificial Sequence: Synthetic oligonucleotide
  Sense strand starting at position 3121 of SEQ ID NO: 1886
caggaagucuucucgaaag

SEQ ID NO: 147015 - RNA, 19 nt, Artificial Sequence
  Description of Artificial Sequence: Synthetic oligonucleotide
  Antisense strand to SEQ ID NO: 147014
cuuucgagaagacuuccug

SEQ ID NO: 147016 - RNA, 19 nt, Artificial Sequence
  Description of Artificial Sequence: Synthetic oligonucleotide
  Sense strand starting at position 3094 of SEQ ID NO: 1886
caguauaagaaugguggua

SEQ ID NO: 147017 - RNA, 19 nt, Artificial Sequence
  Description of Artificial Sequence: Synthetic oligonucleotide
  Antisense strand to SEQ ID NO: 147016
uaccaccauucuuauacug

SEQ ID NO: 147018 - RNA, 19 nt, Artificial Sequence
  Description of Artificial Sequence: Synthetic oligonucleotide
  Sense strand starting at position 2957 of SEQ ID NO: 1886
gggauuuaguggcaggaca

SEQ ID NO: 147019 - RNA, 19 nt, Artificial Sequence
  Description of Artificial Sequence: Synthetic oligonucleotide
  Antisense strand to SEQ ID NO: 147018
uguccugccacuaaauccc

SEQ ID NO: 147020 - RNA, 19 nt, Artificial Sequence
  Description of Artificial Sequence: Synthetic oligonucleotide
  Sense strand starting at position 2946 of SEQ ID NO: 1886
ccguucccuccgggauuua

SEQ ID NO: 147021 - RNA, 19 nt, Artificial Sequence
  Description of Artificial Sequence: Synthetic oligonucleotide
  Antisense strand to SEQ ID NO: 147020
uaaaucccggagggaacgg

SEQ ID NO: 147022 - RNA, 19 nt, Artificial Sequence
  Description of Artificial Sequence: Synthetic oligonucleotide
  Sense strand starting at position 2764 of SEQ ID NO: 1886
cuguguucccacuaaacau

SEQ ID NO: 147023 - RNA, 19 nt, Artificial Sequence
  Description of Artificial Sequence: Synthetic oligonucleotide
  Antisense strand to SEQ ID NO: 147022
auguuuagugggaacacag

SEQ ID NO: 147024 - RNA, 19 nt, Artificial Sequence
  Description of Artificial Sequence: Synthetic oligonucleotide
  Sense strand starting at position 2733 of SEQ ID NO: 1886
auguaaauccucugagcua

SEQ ID NO: 147025 - RNA, 19 nt, Artificial Sequence
  Description of Artificial Sequence: Synthetic oligonucleotide
  Antisense strand to SEQ ID NO: 147024
uagcucagaggauuuacau

SEQ ID NO: 147026 - RNA, 19 nt, Artificial Sequence
  Description of Artificial Sequence: Synthetic oligonucleotide
  Sense strand starting at position 2720 of SEQ ID NO: 1886
aucgcagguaucuauguaa

SEQ ID NO: 147027 - RNA, 19 nt, Artificial Sequence
  Description of Artificial Sequence: Synthetic oligonucleotide
  Antisense strand to SEQ ID NO: 147026
uuacauagauaccugcgau

SEQ ID NO: 147028 - RNA, 19 nt, Artificial Sequence
  Description of Artificial Sequence: Synthetic oligonucleotide
  Sense strand starting at position 2523 of SEQ ID NO: 1886
ccauuuagguuacaggaaa

SEQ ID NO: 147029 - RNA, 19 nt, Artificial Sequence
  Description of Artificial Sequence: Synthetic oligonucleotide
  Antisense strand to SEQ ID NO: 147028
uuuccuguaaccuaaaugg

SEQ ID NO: 147030 - RNA, 19 nt, Artificial Sequence
  Description of Artificial Sequence: Synthetic oligonucleotide
  Sense strand starting at position 2482 of SEQ ID NO: 1886
uuuauugcugcccauagaa

SEQ ID NO: 147031 - RNA, 19 nt, Artificial Sequence
  Description of Artificial Sequence: Synthetic oligonucleotide
  Antisense strand to SEQ ID NO: 147030
uucuaugggcagcaauaaa

SEQ ID NO: 147032 - RNA, 19 nt, Artificial Sequence
  Description of Artificial Sequence: Synthetic oligonucleotide
  Sense strand starting at position 2433 of SEQ ID NO: 1886
gccagauccagugagccau

SEQ ID NO: 147033 - RNA, 19 nt, Artificial Sequence
  Description of Artificial Sequence: Synthetic oligonucleotide
  Antisense strand to SEQ ID NO: 147032
auggcucacuggaucuggc

SEQ ID NO: 147034 - RNA, 19 nt, Artificial Sequence
  Description of Artificial Sequence: Synthetic oligonucleotide
  Sense strand starting at position 2191 of SEQ ID NO: 1886
gggugagggagcugguaua

SEQ ID NO: 147035 - RNA, 19 nt, Artificial Sequence
  Description of Artificial Sequence: Synthetic oligonucleotide
  Antisense strand to SEQ ID NO: 147034
uauaccagcucccucaccc

SEQ ID NO: 147036 - RNA, 19 nt, Artificial Sequence
  Description of Artificial Sequence: Synthetic oligonucleotide
  Sense strand starting at position 1065 of SEQ ID NO: 1886
gggucaaaccuuuaaugug

SEQ ID NO: 147037 - RNA, 19 nt, Artificial Sequence
  Description of Artificial Sequence: Synthetic oligonucleotide
  Antisense strand to SEQ ID NO: 147036
cacauuaaagguuugaccc

SEQ ID NO: 147038 - RNA, 19 nt, Artificial Sequence
  Description of Artificial Sequence: Synthetic oligonucleotide
  Sense strand starting at position 1022 of SEQ ID NO: 1886
ggacaauccuggcuaggaa

SEQ ID NO: 147039 - RNA, 19 nt, Artificial Sequence
  Description of Artificial Sequence: Synthetic oligonucleotide
  Antisense strand to SEQ ID NO: 147038
uuccuagccaggauugucc

SEQ ID NO: 147040 - RNA, 19 nt, Artificial Sequence
  Description of Artificial Sequence: Synthetic oligonucleotide
  Sense strand starting at position 999 of SEQ ID NO: 1886
agaaaugagucuccugcaa

SEQ ID NO: 147041 - RNA, 19 nt, Artificial Sequence
  Description of Artificial Sequence: Synthetic oligonucleotide
  Antisense strand to SEQ ID NO: 147040
uugcaggagacucauuucu

SEQ ID NO: 147042 - RNA, 19 nt, Artificial Sequence
  Description of Artificial Sequence: Synthetic oligonucleotide
  Sense strand starting at position 933 of SEQ ID NO: 1886
cguaaaucuccauggaucu

SEQ ID NO: 147043 - RNA, 19 nt, Artificial Sequence
  Description of Artificial Sequence: Synthetic oligonucleotide
  Antisense strand to SEQ ID NO: 147042
agauccauggagauuuacg

SEQ ID NO: 147044 - RNA, 19 nt, Artificial Sequence
  Description of Artificial Sequence: Synthetic oligonucleotide
  Sense strand starting at position 931 of SEQ ID NO: 1886
uacguaaaucuccauggau

SEQ ID NO: 147045 - RNA, 19 nt, Artificial Sequence
  Description of Artificial Sequence: Synthetic oligonucleotide
  Antisense strand to SEQ ID NO: 147044
auccauggagauuuacgua

SEQ ID NO: 147046 - RNA, 19 nt, Artificial Sequence
  Description of Artificial Sequence: Synthetic oligonucleotide
  Sense strand starting at position 930 of SEQ ID NO: 1886
auacguaaaucuccaugga

SEQ ID NO: 147047 - RNA, 19 nt, Artificial Sequence
  Description of Artificial Sequence: Synthetic oligonucleotide
  Antisense strand to SEQ ID NO: 147046
uccauggagauuuacguau

SEQ ID NO: 147048 - RNA, 19 nt, Artificial Sequence
  Description of Artificial Sequence: Synthetic oligonucleotide
  Sense strand starting at position 900 of SEQ ID NO: 1886
cuuacaaggcucugaaaua

SEQ ID NO: 147049 - RNA, 19 nt, Artificial Sequence
  Description of Artificial Sequence: Synthetic oligonucleotide
  Antisense strand to SEQ ID NO: 147048
uauuucagagccuuguaag

SEQ ID NO: 147050 - RNA, 19 nt, Artificial Sequence
  Description of Artificial Sequence: Synthetic oligonucleotide
  Sense strand starting at position 863 of SEQ ID NO: 1886
cuacaauuuccgcgaaggu

SEQ ID NO: 147051 - RNA, 19 nt, Artificial Sequence
  Description of Artificial Sequence: Synthetic oligonucleotide
  Antisense strand to SEQ ID NO: 147050
accuucgcggaaauuguag

SEQ ID NO: 147052 - RNA, 19 nt, Artificial Sequence
  Description of Artificial Sequence: Synthetic oligonucleotide
  Sense strand starting at position 834 of SEQ ID NO: 1886
cgucaaggccuguaagaaa

SEQ ID NO: 147053 - RNA, 19 nt, Artificial Sequence
  Description of Artificial Sequence: Synthetic oligonucleotide
  Antisense strand to SEQ ID NO: 147052
uuucuuacaggccuugacg

SEQ ID NO: 147054 - RNA, 19 nt, Artificial Sequence
  Description of Artificial Sequence: Synthetic oligonucleotide
  Sense strand starting at position 817 of SEQ ID NO: 1886
gccagaaaucauuaacacg

SEQ ID NO: 147055 - RNA, 19 nt, Artificial Sequence
  Description of Artificial Sequence: Synthetic oligonucleotide
  Antisense strand to SEQ ID NO: 147054
cguguuaaugauuucuggc

SEQ ID NO: 147056 - RNA, 19 nt, Artificial Sequence
  Description of Artificial Sequence: Synthetic oligonucleotide
  Sense strand starting at position 649 of SEQ ID NO: 1886
gccucagaucuauguagag

SEQ ID NO: 147057 - RNA, 19 nt, Artificial Sequence
  Description of Artificial Sequence: Synthetic oligonucleotide
  Antisense strand to SEQ ID NO: 147056
cucuacauagaucugaggc

SEQ ID NO: 147058 - RNA, 19 nt, Artificial Sequence
  Description of Artificial Sequence: Synthetic oligonucleotide
  Sense strand starting at position 586 of SEQ ID NO: 1886
gucaguauccaagaaaccu

SEQ ID NO: 147059 - RNA, 19 nt, Artificial Sequence
  Description of Artificial Sequence: Synthetic oligonucleotide
  Antisense strand to SEQ ID NO: 147058
agguuucuuggauacugac

SEQ ID NO: 147060 - RNA, 19 nt, Artificial Sequence
  Description of Artificial Sequence: Synthetic oligonucleotide
  Sense strand starting at position 582 of SEQ ID NO: 1886
ucuggucaguauccaagaa

SEQ ID NO: 147061 - RNA, 19 nt, Artificial Sequence
  Description of Artificial Sequence: Synthetic oligonucleotide
  Antisense strand to SEQ ID NO: 147060
uucuuggauacugaccaga

SEQ ID NO: 147062 - RNA, 19 nt, Artificial Sequence
  Description of Artificial Sequence: Synthetic oligonucleotide
  Sense strand starting at position 579 of SEQ ID NO: 1886
guuucuggucaguauccaa

SEQ ID NO: 147063 - RNA, 19 nt, Artificial Sequence
  Description of Artificial Sequence: Synthetic oligonucleotide
  Antisense strand to SEQ ID NO: 147062
uuggauacugaccagaaac

SEQ ID NO: 147064 - RNA, 19 nt, Artificial Sequence
  Description of Artificial Sequence: Synthetic oligonucleotide
  Sense strand starting at position 564 of SEQ ID NO: 1886
uacuguaucgcaguuguuu

SEQ ID NO: 147065 - RNA, 19 nt, Artificial Sequence
  Description of Artificial Sequence: Synthetic oligonucleotide
  Antisense strand to SEQ ID NO: 147064
aaacaacugcgauacagua

SEQ ID NO: 147066 - RNA, 19 nt, Artificial Sequence
  Description of Artificial Sequence: Synthetic oligonucleotide
  Sense strand starting at position 551 of SEQ ID NO: 1886
cgaugauacugacuacugu

SEQ ID NO: 147067 - RNA, 19 nt, Artificial Sequence
  Description of Artificial Sequence: Synthetic oligonucleotide
  Antisense strand to SEQ ID NO: 147066
acaguagucaguaucaucg

SEQ ID NO: 147068 - RNA, 19 nt, Artificial Sequence
  Description of Artificial Sequence: Synthetic oligonucleotide
  Sense strand starting at position 542 of SEQ ID NO: 1886
agguauuaacgaugauacu

SEQ ID NO: 147069 - RNA, 19 nt, Artificial Sequence
  Description of Artificial Sequence: Synthetic oligonucleotide
  Antisense strand to SEQ ID NO: 147068
aguaucaucguuaauaccu

SEQ ID NO: 147070 - RNA, 19 nt, Artificial Sequence
  Description of Artificial Sequence: Synthetic oligonucleotide
  Sense strand starting at position 536 of SEQ ID NO: 1886
auuugaagguauuaacgau

SEQ ID NO: 147071 - RNA, 19 nt, Artificial Sequence
  Description of Artificial Sequence: Synthetic oligonucleotide
  Antisense strand to SEQ ID NO: 147070
aucguuaauaccuucaaau

SEQ ID NO: 147072 - RNA, 19 nt, Artificial Sequence
  Description of Artificial Sequence: Synthetic oligonucleotide
  Sense strand starting at position 527 of SEQ ID NO: 1886
acgcuuuauauuugaaggu

SEQ ID NO: 147073 - RNA, 19 nt, Artificial Sequence
  Description of Artificial Sequence: Synthetic oligonucleotide
  Antisense strand to SEQ ID NO: 147072
accuucaaauauaaagcgu

SEQ ID NO: 147074 - RNA, 19 nt, Artificial Sequence
  Description of Artificial Sequence: Synthetic oligonucleotide
  Sense strand starting at position 156 of SEQ ID NO: 1886
gcacauuacccaugagauc

SEQ ID NO: 147075 - RNA, 19 nt, Artificial Sequence
  Description of Artificial Sequence: Synthetic oligonucleotide
  Antisense strand to SEQ ID NO: 147074
gaucucauggguaaugugc

SEQ ID NO: 147076 - RNA, 19 nt, Artificial Sequence
  Description of Artificial Sequence: Synthetic oligonucleotide
  Sense strand starting at position 143 of SEQ ID NO: 1886
gcacauuuccugugcacau

SEQ ID NO: 147077 - RNA, 19 nt, Artificial Sequence
  Description of Artificial Sequence: Synthetic oligonucleotide
  Antisense strand to SEQ ID NO: 147076
augugcacaggaaaugugc

SEQ ID NO: 147078 - RNA, 19 nt, Artificial Sequence
  Description of Artificial Sequence: Synthetic oligonucleotide
  Sense strand starting at position 14 of SEQ ID NO: 1886
ugaaacguucugcaaacaa

SEQ ID NO: 147079 - RNA, 19 nt, Artificial Sequence
  Description of Artificial Sequence: Synthetic oligonucleotide
  Antisense strand to SEQ ID NO: 147078
uuguuugcagaacguuuca

SEQ ID NO: 147080 - RNA, 19 nt, Artificial Sequence
  Description of Artificial Sequence: Synthetic oligonucleotide
  Sense strand starting at position 3 of SEQ ID NO: 1886
ccuauaagauuugaaacgu

SEQ ID NO: 147081 - RNA, 19 nt, Artificial Sequence
  Description of Artificial Sequence: Synthetic oligonucleotide
  Antisense strand to SEQ ID NO: 147080
acguuucaaaucuuauagg

SEQ ID NO: 147082 - RNA, 19 nt, Artificial Sequence
  Description of Artificial Sequence: Synthetic oligonucleotide
  Sense strand starting at position 3173 of SEQ ID NO: 1887
ccagaauaggcucgagaga

SEQ ID NO: 147083 - RNA, 19 nt, Artificial Sequence
  Description of Artificial Sequence: Synthetic oligonucleotide
  Antisense strand to SEQ ID NO: 147082
ucucucgagccuauucugg

SEQ ID NO: 147084 - RNA, 19 nt, Artificial Sequence
  Description of Artificial Sequence: Synthetic oligonucleotide
  Sense strand starting at position 3142 of SEQ ID NO: 1887
ccgcguccggccuuuaauu

SEQ ID NO: 147085 - RNA, 19 nt, Artificial Sequence
  Description of Artificial Sequence: Synthetic oligonucleotide
  Antisense strand to SEQ ID NO: 147084
aauuaaaggccggacgcgg

SEQ ID NO: 147086 - RNA, 19 nt, Artificial Sequence
  Description of Artificial Sequence: Synthetic oligonucleotide
  Sense strand starting at position 3123 of SEQ ID NO: 1887
agaauacaggcgugagaca

SEQ ID NO: 147087 - RNA, 19 nt, Artificial Sequence
  Description of Artificial Sequence: Synthetic oligonucleotide
  Antisense strand to SEQ ID NO: 147086
ugucucacgccuguauucu

SEQ ID NO: 147088 - RNA, 19 nt, Artificial Sequence
  Description of Artificial Sequence: Synthetic oligonucleotide
  Sense strand starting at position 3121 of SEQ ID NO: 1887
ugagaauacaggcgugaga

SEQ ID NO: 147089 - RNA, 19 nt, Artificial Sequence
  Description of Artificial Sequence: Synthetic oligonucleotide
  Antisense strand to SEQ ID NO: 147088
ucucacgccuguauucuca

SEQ ID NO: 147090 - RNA, 19 nt, Artificial Sequence
  Description of Artificial Sequence: Synthetic oligonucleotide
  Sense strand starting at position 2825 of SEQ ID NO: 1887
agugaaagaugccuucuuu

SEQ ID NO: 147091 - RNA, 19 nt, Artificial Sequence
  Description of Artificial Sequence: Synthetic oligonucleotide
  Antisense strand to SEQ ID NO: 147090
aaagaaggcaucuuucacu

SEQ ID NO: 147092 - RNA, 19 nt, Artificial Sequence
  Description of Artificial Sequence: Synthetic oligonucleotide
  Sense strand starting at position 2773 of SEQ ID NO: 1887
aauaguuuagcuugagaag

SEQ ID NO: 147093 - RNA, 19 nt, Artificial Sequence
  Description of Artificial Sequence: Synthetic oligonucleotide
  Antisense strand to SEQ ID NO: 147092
cuucucaagcuaaacuauu

SEQ ID NO: 147094 - RNA, 19 nt, Artificial Sequence
  Description of Artificial Sequence: Synthetic oligonucleotide
  Sense strand starting at position 2771 of SEQ ID NO: 1887
ugaauaguuuagcuugaga

SEQ ID NO: 147095 - RNA, 19 nt, Artificial Sequence
  Description of Artificial Sequence: Synthetic oligonucleotide
  Antisense strand to SEQ ID NO: 147094
ucucaagcuaaacuauuca

SEQ ID NO: 147096 - RNA, 19 nt, Artificial Sequence
  Description of Artificial Sequence: Synthetic oligonucleotide
  Sense strand starting at position 2766 of SEQ ID NO: 1887
gagauugaauaguuuagcu

SEQ ID NO: 147097 - RNA, 19 nt, Artificial Sequence
  Description of Artificial Sequence: Synthetic oligonucleotide
  Antisense strand to SEQ ID NO: 147096
agcuaaacuauucaaucuc

SEQ ID NO: 147098 - RNA, 19 nt, Artificial Sequence
  Description of Artificial Sequence: Synthetic oligonucleotide
  Sense strand starting at position 2732 of SEQ ID NO: 1887
aggagauaaugagagguga

SEQ ID NO: 147099 - RNA, 19 nt, Artificial Sequence
  Description of Artificial Sequence: Synthetic oligonucleotide
  Antisense strand to SEQ ID NO: 147098
ucaccucucauuaucuccu

SEQ ID NO: 147100 - RNA, 19 nt, Artificial Sequence
  Description of Artificial Sequence: Synthetic oligonucleotide
  Sense strand starting at position 2317 of SEQ ID NO: 1887
gagccauauccaggacuuc

SEQ ID NO: 147101 - RNA, 19 nt, Artificial Sequence
  Description of Artificial Sequence: Synthetic oligonucleotide
  Antisense strand to SEQ ID NO: 147100
gaaguccuggauauggcuc

SEQ ID NO: 147102 - RNA, 19 nt, Artificial Sequence
  Description of Artificial Sequence: Synthetic oligonucleotide
  Sense strand starting at position 2253 of SEQ ID NO: 1887
gugccauaccuugacaguu

SEQ ID NO: 147103 - RNA, 19 nt, Artificial Sequence
  Description of Artificial Sequence: Synthetic oligonucleotide
  Antisense strand to SEQ ID NO: 147102
aacugucaagguauggcac

SEQ ID NO: 147104 - RNA, 19 nt, Artificial Sequence
  Description of Artificial Sequence: Synthetic oligonucleotide
  Sense strand starting at position 2208 of SEQ ID NO: 1887
gcguuugaucacuauccag

SEQ ID NO: 147105 - RNA, 19 nt, Artificial Sequence
  Description of Artificial Sequence: Synthetic oligonucleotide
  Antisense strand to SEQ ID NO: 147104
cuggauagugaucaaacgc

SEQ ID NO: 147106 - RNA, 19 nt, Artificial Sequence
  Description of Artificial Sequence: Synthetic oligonucleotide
  Sense strand starting at position 2207 of SEQ ID NO: 1887
agcguuugaucacuaucca

SEQ ID NO: 147107 - RNA, 19 nt, Artificial Sequence
  Description of Artificial Sequence: Synthetic oligonucleotide
  Antisense strand to SEQ ID NO: 147106
uggauagugaucaaacgcu

SEQ ID NO: 147108 - RNA, 19 nt, Artificial Sequence
  Description of Artificial Sequence: Synthetic oligonucleotide
  Sense strand starting at position 2197 of SEQ ID NO: 1887
auuugaggucagcguuuga

SEQ ID NO: 147109 - RNA, 19 nt, Artificial Sequence
  Description of Artificial Sequence: Synthetic oligonucleotide
  Antisense strand to SEQ ID NO: 147108
ucaaacgcugaccucaaau

SEQ ID NO: 147110 - RNA, 19 nt, Artificial Sequence
  Description of Artificial Sequence: Synthetic oligonucleotide
  Sense strand starting at position 2183 of SEQ ID NO: 1887
ggguuaccuugcuaauuug

SEQ ID NO: 147111 - RNA, 19 nt, Artificial Sequence
  Description of Artificial Sequence: Synthetic oligonucleotide
  Antisense strand to SEQ ID NO: 147110
caaauuagcaagguaaccc

SEQ ID NO: 147112 - RNA, 19 nt, Artificial Sequence
  Description of Artificial Sequence: Synthetic oligonucleotide
  Sense strand starting at position 2160 of SEQ ID NO: 1887
acauaugcgucaccauguu

SEQ ID NO: 147113 - RNA, 19 nt, Artificial Sequence
  Description of Artificial Sequence: Synthetic oligonucleotide
  Antisense strand to SEQ ID NO: 147112
aacauggugacgcauaugu

SEQ ID NO: 147114 - RNA, 19 nt, Artificial Sequence
  Description of Artificial Sequence: Synthetic oligonucleotide
  Sense strand starting at position 2142 of SEQ ID NO: 1887
uuaacuguuaguugugaca

SEQ ID NO: 147115 - RNA, 19 nt, Artificial Sequence
  Description of Artificial Sequence: Synthetic oligonucleotide
  Antisense strand to SEQ ID NO: 147114
ugucacaacuaacaguuaa

SEQ ID NO: 147116 - RNA, 19 nt, Artificial Sequence
  Description of Artificial Sequence: Synthetic oligonucleotide
  Sense strand starting at position 2131 of SEQ ID NO: 1887
ucggaaggucuuuaacugu

SEQ ID NO: 147117 - RNA, 19 nt, Artificial Sequence
  Description of Artificial Sequence: Synthetic oligonucleotide
  Antisense strand to SEQ ID NO: 147116
acaguuaaagaccuuccga

SEQ ID NO: 147118 - RNA, 19 nt, Artificial Sequence
  Description of Artificial Sequence: Synthetic oligonucleotide
  Sense strand starting at position 2130 of SEQ ID NO: 1887
uucggaaggucuuuaacug

SEQ ID NO: 147119 - RNA, 19 nt, Artificial Sequence
  Description of Artificial Sequence: Synthetic oligonucleotide
  Antisense strand to SEQ ID NO: 147118
caguuaaagaccuuccgaa

SEQ ID NO: 147120 - RNA, 19 nt, Artificial Sequence
  Description of Artificial Sequence: Synthetic oligonucleotide
  Sense strand starting at position 2078 of SEQ ID NO: 1887
uggaacgucuuacuuugau

SEQ ID NO: 147121 - RNA, 19 nt, Artificial Sequence
  Description of Artificial Sequence: Synthetic oligonucleotide
  Antisense strand to SEQ ID NO: 147120
aucaaaguaagacguucca

SEQ ID NO: 147122 - RNA, 19 nt, Artificial Sequence
  Description of Artificial Sequence: Synthetic oligonucleotide
  Sense strand starting at position 2071 of SEQ ID NO: 1887
ccauguuuggaacgucuua

SEQ ID NO: 147123 - RNA, 19 nt, Artificial Sequence
  Description of Artificial Sequence: Synthetic oligonucleotide
  Antisense strand to SEQ ID NO: 147122
uaagacguuccaaacaugg

SEQ ID NO: 147124 - RNA, 19 nt, Artificial Sequence
  Description of Artificial Sequence: Synthetic oligonucleotide
  Sense strand starting at position 1935 of SEQ ID NO: 1887
cgccgaaaccuggaccaaa

SEQ ID NO: 147125 - RNA, 19 nt, Artificial Sequence
  Description of Artificial Sequence: Synthetic oligonucleotide
  Antisense strand to SEQ ID NO: 147124
uuugguccagguuucggcg

SEQ ID NO: 147126 - RNA, 19 nt, Artificial Sequence
  Description of Artificial Sequence: Synthetic oligonucleotide
  Sense strand starting at position 1838 of SEQ ID NO: 1887
uggaguuaauguccuaaga

SEQ ID NO: 147127 - RNA, 19 nt, Artificial Sequence
  Description of Artificial Sequence: Synthetic oligonucleotide
  Antisense strand to SEQ ID NO: 147126
ucuuaggacauuaacucca

SEQ ID NO: 147128 - RNA, 19 nt, Artificial Sequence
  Description of Artificial Sequence: Synthetic oligonucleotide
  Sense strand starting at position 1666 of SEQ ID NO: 1887
ugcagagauuuagaaacca

SEQ ID NO: 147129 - RNA, 19 nt, Artificial Sequence
  Description of Artificial Sequence: Synthetic oligonucleotide
  Antisense strand to SEQ ID NO: 147128
ugguuucuaaaucucugca

SEQ ID NO: 147130 - RNA, 19 nt, Artificial Sequence
  Description of Artificial Sequence: Synthetic oligonucleotide
  Sense strand starting at position 1327 of SEQ ID NO: 1887
gagagaucacggugaaaug

SEQ ID NO: 147131 - RNA, 19 nt, Artificial Sequence
  Description of Artificial Sequence: Synthetic oligonucleotide
  Antisense strand to SEQ ID NO: 147130
cauuucaccgugaucucuc

SEQ ID NO: 147132 - RNA, 19 nt, Artificial Sequence
  Description of Artificial Sequence: Synthetic oligonucleotide
  Sense strand starting at position 1311 of SEQ ID NO: 1887
guaugugaaaugugaugag

SEQ ID NO: 147133 - RNA, 19 nt, Artificial Sequence
  Description of Artificial Sequence: Synthetic oligonucleotide
  Antisense strand to SEQ ID NO: 147132
cucaucacauuucacauac

SEQ ID NO: 147134 - RNA, 19 nt, Artificial Sequence
  Description of Artificial Sequence: Synthetic oligonucleotide
  Sense strand starting at position 1309 of SEQ ID NO: 1887
uuguaugugaaaugugaug

SEQ ID NO: 147135 - RNA, 19 nt, Artificial Sequence
  Description of Artificial Sequence: Synthetic oligonucleotide
  Antisense strand to SEQ ID NO: 147134
caucacauuucacauacaa

SEQ ID NO: 147136 - RNA, 19 nt, Artificial Sequence
  Description of Artificial Sequence: Synthetic oligonucleotide
  Sense strand starting at position 1239 of SEQ ID NO: 1887
ccgucuuuccugcacuuau

SEQ ID NO: 147137 - RNA, 19 nt, Artificial Sequence
  Description of Artificial Sequence: Synthetic oligonucleotide
  Antisense strand to SEQ ID NO: 147136
auaagugcaggaaagacgg

SEQ ID NO: 147138 - RNA, 19 nt, Artificial Sequence
  Description of Artificial Sequence: Synthetic oligonucleotide
  Sense strand starting at position 991 of SEQ ID NO: 1887
ugaucccugucacuguuaa

SEQ ID NO: 147139 - RNA, 19 nt, Artificial Sequence
  Description of Artificial Sequence: Synthetic oligonucleotide
  Antisense strand to SEQ ID NO: 147138
uuaacagugacagggauca

SEQ ID NO: 147140 - RNA, 19 nt, Artificial Sequence
  Description of Artificial Sequence: Synthetic oligonucleotide
  Sense strand starting at position 986 of SEQ ID NO: 1887
auagaugaucccugucacu

SEQ ID NO: 147141 - RNA, 19 nt, Artificial Sequence
  Description of Artificial Sequence: Synthetic oligonucleotide
  Antisense strand to SEQ ID NO: 147140
agugacagggaucaucuau

SEQ ID NO: 147142 - RNA, 19 nt, Artificial Sequence
  Description of Artificial Sequence: Synthetic oligonucleotide
  Sense strand starting at position 927 of SEQ ID NO: 1887
uuugguaguaucuaguuaa

SEQ ID NO: 147143 - RNA, 19 nt, Artificial Sequence
  Description of Artificial Sequence: Synthetic oligonucleotide
  Antisense strand to SEQ ID NO: 147142
uuaacuagauacuaccaaa

SEQ ID NO: 147144 - RNA, 19 nt, Artificial Sequence
  Description of Artificial Sequence: Synthetic oligonucleotide
  Sense strand starting at position 906 of SEQ ID NO: 1887
cuuugagauuaauacauag

SEQ ID NO: 147145 - RNA, 19 nt, Artificial Sequence
  Description of Artificial Sequence: Synthetic oligonucleotide
  Antisense strand to SEQ ID NO: 147144
cuauguauuaaucucaaag

SEQ ID NO: 147146 - RNA, 19 nt, Artificial Sequence
  Description of Artificial Sequence: Synthetic oligonucleotide
  Sense strand starting at position 903 of SEQ ID NO: 1887
gugcuuugagauuaauaca

SEQ ID NO: 147147 - RNA, 19 nt, Artificial Sequence
  Description of Artificial Sequence: Synthetic oligonucleotide
  Antisense strand to SEQ ID NO: 147146
uguauuaaucucaaagcac

SEQ ID NO: 147148 - RNA, 19 nt, Artificial Sequence
  Description of Artificial Sequence: Synthetic oligonucleotide
  Sense strand starting at position 897 of SEQ ID NO: 1887
acaguagugcuuugagauu

SEQ ID NO: 147149 - RNA, 19 nt, Artificial Sequence
  Description of Artificial Sequence: Synthetic oligonucleotide
  Antisense strand to SEQ ID NO: 147148
aaucucaaagcacuacugu

SEQ ID NO: 147150 - RNA, 19 nt, Artificial Sequence
  Description of Artificial Sequence: Synthetic oligonucleotide
  Sense strand starting at position 830 of SEQ ID NO: 1887
gcauuuguaucacugguua

SEQ ID NO: 147151 - RNA, 19 nt, Artificial Sequence
  Description of Artificial Sequence: Synthetic oligonucleotide
  Antisense strand to SEQ ID NO: 147150
uaaccagugauacaaaugc

SEQ ID NO: 147152 - RNA, 19 nt, Artificial Sequence
  Description of Artificial Sequence: Synthetic oligonucleotide
  Sense strand starting at position 764 of SEQ ID NO: 1887
aaagcagaugcaugaugau

SEQ ID NO: 147153 - RNA, 19 nt, Artificial Sequence
  Description of Artificial Sequence: Synthetic oligonucleotide
  Antisense strand to SEQ ID NO: 147152
aucaucaugcaucugcuuu

SEQ ID NO: 147154 - RNA, 19 nt, Artificial Sequence
  Description of Artificial Sequence: Synthetic oligonucleotide
  Sense strand starting at position 726 of SEQ ID NO: 1887
cugucaucaguacagguau

SEQ ID NO: 147155 - RNA, 19 nt, Artificial Sequence
  Description of Artificial Sequence: Synthetic oligonucleotide
  Antisense strand to SEQ ID NO: 147154
auaccuguacugaugacag

SEQ ID NO: 147156 - RNA, 19 nt, Artificial Sequence
  Description of Artificial Sequence: Synthetic oligonucleotide
  Sense strand starting at position 721 of SEQ ID NO: 1887
auuagcugucaucaguaca

SEQ ID NO: 147157 - RNA, 19 nt, Artificial Sequence
  Description of Artificial Sequence: Synthetic oligonucleotide
  Antisense strand to SEQ ID NO: 147156
uguacugaugacagcuaau

SEQ ID NO: 147158 - RNA, 19 nt, Artificial Sequence
  Description of Artificial Sequence: Synthetic oligonucleotide
  Sense strand starting at position 561 of SEQ ID NO: 1887
cagaauacuugagacagga

SEQ ID NO: 147159 - RNA, 19 nt, Artificial Sequence
  Description of Artificial Sequence: Synthetic oligonucleotide
  Antisense strand to SEQ ID NO: 147158
uccugucucaaguauucug

SEQ ID NO: 147160 - RNA, 19 nt, Artificial Sequence
  Description of Artificial Sequence: Synthetic oligonucleotide
  Sense strand starting at position 79 of SEQ ID NO: 1887
uaugucagacuguauugua

SEQ ID NO: 147161 - RNA, 19 nt, Artificial Sequence
  Description of Artificial Sequence: Synthetic oligonucleotide
  Antisense strand to SEQ ID NO: 147160
uacaauacagucugacaua

SEQ ID NO: 147162 - RNA, 19 nt, Artificial Sequence
  Description of Artificial Sequence: Synthetic oligonucleotide
  Sense strand starting at position 3963 of SEQ ID NO: 1889
gucuuugacucugaucaua

SEQ ID NO: 147163 - RNA, 19 nt, Artificial Sequence
  Description of Artificial Sequence: Synthetic oligonucleotide
  Antisense strand to SEQ ID NO: 147162
uaugaucagagucaaagac

SEQ ID NO: 147164 - RNA, 19 nt, Artificial Sequence
  Description of Artificial Sequence: Synthetic oligonucleotide
  Sense strand starting at position 3962 of SEQ ID NO: 1889
ugucuuugacucugaucau

SEQ ID NO: 147165 - RNA, 19 nt, Artificial Sequence
  Description of Artificial Sequence: Synthetic oligonucleotide
  Antisense strand to SEQ ID NO: 147164
augaucagagucaaagaca

SEQ ID NO: 147166 - RNA, 19 nt, Artificial Sequence
  Description of Artificial Sequence: Synthetic oligonucleotide
  Sense strand starting at position 3959 of SEQ ID NO: 1889
ugaugucuuugacucugau

SEQ ID NO: 147167 - RNA, 19 nt, Artificial Sequence
  Description of Artificial Sequence: Synthetic oligonucleotide
  Antisense strand to SEQ ID NO: 147166
aucagagucaaagacauca

SEQ ID NO: 147168 - RNA, 19 nt, Artificial Sequence
  Description of Artificial Sequence: Synthetic oligonucleotide
  Sense strand starting at position 3956 of SEQ ID NO: 1889
aucugaugucuuugacucu

SEQ ID NO: 147169 - RNA, 19 nt, Artificial Sequence
  Description of Artificial Sequence: Synthetic oligonucleotide
  Antisense strand to SEQ ID NO: 147168
agagucaaagacaucagau

SEQ ID NO: 147170 - RNA, 19 nt, Artificial Sequence
  Description of Artificial Sequence: Synthetic oligonucleotide
  Sense strand starting at position 3950 of SEQ ID NO: 1889
agugcaaucugaugucuuu

SEQ ID NO: 147171 - RNA, 19 nt, Artificial Sequence
  Description of Artificial Sequence: Synthetic oligonucleotide
  Antisense strand to SEQ ID NO: 147170
aaagacaucagauugcacu

SEQ ID NO: 147172 - RNA, 19 nt, Artificial Sequence
  Description of Artificial Sequence: Synthetic oligonucleotide
  Sense strand starting at position 3939 of SEQ ID NO: 1889
acuaucuccugagugcaau

SEQ ID NO: 147173 - RNA, 19 nt, Artificial Sequence
  Description of Artificial Sequence: Synthetic oligonucleotide
  Antisense strand to SEQ ID NO: 147172
auugcacucaggagauagu

SEQ ID NO: 147174 - RNA, 19 nt, Artificial Sequence
  Description of Artificial Sequence: Synthetic oligonucleotide
  Sense strand starting at position 3937 of SEQ ID NO: 1889
ggacuaucuccugagugca

SEQ ID NO: 147175 - RNA, 19 nt, Artificial Sequence
  Description of Artificial Sequence: Synthetic oligonucleotide
  Antisense strand to SEQ ID NO: 147174
ugcacucaggagauagucc

SEQ ID NO: 147176 - RNA, 19 nt, Artificial Sequence
  Description of Artificial Sequence: Synthetic oligonucleotide
  Sense strand starting at position 3934 of SEQ ID NO: 1889
agaggacuaucuccugagu

SEQ ID NO: 147177 - RNA, 19 nt, Artificial Sequence
  Description of Artificial Sequence: Synthetic oligonucleotide
  Antisense strand to SEQ ID NO: 147176
acucaggagauaguccucu

SEQ ID NO: 147178 - RNA, 19 nt, Artificial Sequence
  Description of Artificial Sequence: Synthetic oligonucleotide
  Sense strand starting at position 3840 of SEQ ID NO: 1889
ucucguauuucuugcagac

SEQ ID NO: 147179 - RNA, 19 nt, Artificial Sequence
  Description of Artificial Sequence: Synthetic oligonucleotide
  Antisense strand to SEQ ID NO: 147178
gucugcaagaaauacgaga

SEQ ID NO: 147180 - RNA, 19 nt, Artificial Sequence
  Description of Artificial Sequence: Synthetic oligonucleotide
  Sense strand starting at position 3833 of SEQ ID NO: 1889
agaggacucucguauuucu

SEQ ID NO: 147181 - RNA, 19 nt, Artificial Sequence
  Description of Artificial Sequence: Synthetic oligonucleotide
  Antisense strand to SEQ ID NO: 147180
agaaauacgagaguccucu

SEQ ID NO: 147182 - RNA, 19 nt, Artificial Sequence
  Description of Artificial Sequence: Synthetic oligonucleotide
  Sense strand starting at position 3801 of SEQ ID NO: 1889
gggagacaaucugcaaacu

SEQ ID NO: 147183 - RNA, 19 nt, Artificial Sequence
  Description of Artificial Sequence: Synthetic oligonucleotide
  Antisense strand to SEQ ID NO: 147182
aguuugcagauugucuccc

SEQ ID NO: 147184 - RNA, 19 nt, Artificial Sequence
  Description of Artificial Sequence: Synthetic oligonucleotide
  Sense strand starting at position 3759 of SEQ ID NO: 1889
guggguucuugcugcugua

SEQ ID NO: 147185 - RNA, 19 nt, Artificial Sequence
  Description of Artificial Sequence: Synthetic oligonucleotide
  Antisense strand to SEQ ID NO: 147184
uacagcagcaagaacccac

SEQ ID NO: 147186 - RNA, 19 nt, Artificial Sequence
  Description of Artificial Sequence: Synthetic oligonucleotide
  Sense strand starting at position 3686 of SEQ ID NO: 1889
aggucugacaccuggcaga

SEQ ID NO: 147187 - RNA, 19 nt, Artificial Sequence
  Description of Artificial Sequence: Synthetic oligonucleotide
  Antisense strand to SEQ ID NO: 147186
ucugccaggugucagaccu

SEQ ID NO: 147188 - RNA, 19 nt, Artificial Sequence
  Description of Artificial Sequence: Synthetic oligonucleotide
  Sense strand starting at position 3680 of SEQ ID NO: 1889
gcagauaggucugacaccu

SEQ ID NO: 147189 - RNA, 19 nt, Artificial Sequence
  Description of Artificial Sequence: Synthetic oligonucleotide
  Antisense strand to SEQ ID NO: 147188
aggugucagaccuaucugc

SEQ ID NO: 147190 - RNA, 19 nt, Artificial Sequence
  Description of Artificial Sequence: Synthetic oligonucleotide
  Sense strand starting at position 3667 of SEQ ID NO: 1889
gacaauaccuagggcagau

SEQ ID NO: 147191 - RNA, 19 nt, Artificial Sequence
  Description of Artificial Sequence: Synthetic oligonucleotide
  Antisense strand to SEQ ID NO: 147190
aucugcccuagguauuguc

SEQ ID NO: 147192 - RNA, 19 nt, Artificial Sequence
  Description of Artificial Sequence: Synthetic oligonucleotide
  Sense strand starting at position 3666 of SEQ ID NO: 1889
ugacaauaccuagggcaga

SEQ ID NO: 147193 - RNA, 19 nt, Artificial Sequence
  Description of Artificial Sequence: Synthetic oligonucleotide
  Antisense strand to SEQ ID NO: 147192
ucugcccuagguauuguca

SEQ ID NO: 147194 - RNA, 19 nt, Artificial Sequence
  Description of Artificial Sequence: Synthetic oligonucleotide
  Sense strand starting at position 3570 of SEQ ID NO: 1889
gcacuuaucaaguggagac

SEQ ID NO: 147195 - RNA, 19 nt, Artificial Sequence
  Description of Artificial Sequence: Synthetic oligonucleotide
  Antisense strand to SEQ ID NO: 147194
gucuccacuugauaagugc

SEQ ID NO: 147196 - RNA, 19 nt, Artificial Sequence
  Description of Artificial Sequence: Synthetic oligonucleotide
  Sense strand starting at position 3559 of SEQ ID NO: 1889
ggugaagucaggcacuuau

SEQ ID NO: 147197 - RNA, 19 nt, Artificial Sequence
  Description of Artificial Sequence: Synthetic oligonucleotide
  Antisense strand to SEQ ID NO: 147196
auaagugccugacuucacc

SEQ ID NO: 147198 - RNA, 19 nt, Artificial Sequence
  Description of Artificial Sequence: Synthetic oligonucleotide
  Sense strand starting at position 2886 of SEQ ID NO: 1889
caauguguguaggcagaua

SEQ ID NO: 147199 - RNA, 19 nt, Artificial Sequence
  Description of Artificial Sequence: Synthetic oligonucleotide
  Antisense strand to SEQ ID NO: 147198
uaucugccuacacacauug

SEQ ID NO: 147200 - RNA, 19 nt, Artificial Sequence
  Description of Artificial Sequence: Synthetic oligonucleotide
  Sense strand starting at position 2376 of SEQ ID NO: 1889
agguaagaauggcauccau

SEQ ID NO: 147201 - RNA, 19 nt, Artificial Sequence
  Description of Artificial Sequence: Synthetic oligonucleotide
  Antisense strand to SEQ ID NO: 147200
auggaugccauucuuaccu

SEQ ID NO: 147202 - RNA, 19 nt, Artificial Sequence
  Description of Artificial Sequence: Synthetic oligonucleotide
  Sense strand starting at position 2298 of SEQ ID NO: 1889
aagacaggugccugauaug

SEQ ID NO: 147203 - RNA, 19 nt, Artificial Sequence
  Description of Artificial Sequence: Synthetic oligonucleotide
  Antisense strand to SEQ ID NO: 147202
cauaucaggcaccugucuu

SEQ ID NO: 147204 - RNA, 19 nt, Artificial Sequence
  Description of Artificial Sequence: Synthetic oligonucleotide
  Sense strand starting at position 2297 of SEQ ID NO: 1889
aaagacaggugccugauau

SEQ ID NO: 147205 - RNA, 19 nt, Artificial Sequence
  Description of Artificial Sequence: Synthetic oligonucleotide
  Antisense strand to SEQ ID NO: 147204
auaucaggcaccugucuuu

SEQ ID NO: 147206 - RNA, 19 nt, Artificial Sequence
  Description of Artificial Sequence: Synthetic oligonucleotide
  Sense strand starting at position 1386 of SEQ ID NO: 1889
cuucguuccuggucaggau

SEQ ID NO: 147207 - RNA, 19 nt, Artificial Sequence
  Description of Artificial Sequence: Synthetic oligonucleotide
  Antisense strand to SEQ ID NO: 147206
auccugaccaggaacgaag

SEQ ID NO: 147208 - RNA, 19 nt, Artificial Sequence
  Description of Artificial Sequence: Synthetic oligonucleotide
  Sense strand starting at position 1350 of SEQ ID NO: 1889
guaggcuuguucucauaug

SEQ ID NO: 147209 - RNA, 19 nt, Artificial Sequence
  Description of Artificial Sequence: Synthetic oligonucleotide
  Antisense strand to SEQ ID NO: 147208
cauaugagaacaagccuac

SEQ ID NO: 147210 - RNA, 19 nt, Artificial Sequence
  Description of Artificial Sequence: Synthetic oligonucleotide
  Sense strand starting at position 1347 of SEQ ID NO: 1889
gaaguaggcuuguucucau

SEQ ID NO: 147211 - RNA, 19 nt, Artificial Sequence
  Description of Artificial Sequence: Synthetic oligonucleotide
  Antisense strand to SEQ ID NO: 147210
augagaacaagccuacuuc

SEQ ID NO: 147212 - RNA, 19 nt, Artificial Sequence
  Description of Artificial Sequence: Synthetic oligonucleotide
  Sense strand starting at position 848 of SEQ ID NO: 1889
cagcuaugggcucaugacu

SEQ ID NO: 147213 - RNA, 19 nt, Artificial Sequence
  Description of Artificial Sequence: Synthetic oligonucleotide
  Antisense strand to SEQ ID NO: 147212
agucaugagcccauagcug

SEQ ID NO: 147214 - RNA, 19 nt, Artificial Sequence
  Description of Artificial Sequence: Synthetic oligonucleotide
  Sense strand starting at position 490 of SEQ ID NO: 1889
agcugucucccuugccaga

SEQ ID NO: 147215 - RNA, 19 nt, Artificial Sequence
  Description of Artificial Sequence: Synthetic oligonucleotide
  Antisense strand to SEQ ID NO: 147214
ucuggcaagggagacagcu

SEQ ID NO: 147216 - RNA, 19 nt, Artificial Sequence
  Description of Artificial Sequence: Synthetic oligonucleotide
  Sense strand starting at position 470 of SEQ ID NO: 1889
cuaggugcuccugaagaca

SEQ ID NO: 147217 - RNA, 19 nt, Artificial Sequence
  Description of Artificial Sequence: Synthetic oligonucleotide
  Antisense strand to SEQ ID NO: 147216
ugucuucaggagcaccuag

SEQ ID NO: 147218 - RNA, 19 nt, Artificial Sequence
  Description of Artificial Sequence: Synthetic oligonucleotide
  Sense strand starting at position 440 of SEQ ID NO: 1889
gagaaauaggccuguuucu

SEQ ID NO: 147219 - RNA, 19 nt, Artificial Sequence
  Description of Artificial Sequence: Synthetic oligonucleotide
  Antisense strand to SEQ ID NO: 147218
agaaacaggccuauuucuc

SEQ ID NO: 147220 - RNA, 19 nt, Artificial Sequence
  Description of Artificial Sequence: Synthetic oligonucleotide
  Sense strand starting at position 430 of SEQ ID NO: 1889
agggauagcugagaaauag

SEQ ID NO: 147221 - RNA, 19 nt, Artificial Sequence
  Description of Artificial Sequence: Synthetic oligonucleotide
  Antisense strand to SEQ ID NO: 147220
cuauuucucagcuaucccu

SEQ ID NO: 147222 - RNA, 19 nt, Artificial Sequence
  Description of Artificial Sequence: Synthetic oligonucleotide
  Sense strand starting at position 289 of SEQ ID NO: 1889
ucagaaugccucugcuuga

SEQ ID NO: 147223 - RNA, 19 nt, Artificial Sequence
  Description of Artificial Sequence: Synthetic oligonucleotide
  Antisense strand to SEQ ID NO: 147222
ucaagcagaggcauucuga

SEQ ID NO: 147224 - RNA, 19 nt, Artificial Sequence
  Description of Artificial Sequence: Synthetic oligonucleotide
  Sense strand starting at position 31 of SEQ ID NO: 1889
ccaaguggucaguauccaa

SEQ ID NO: 147225 - RNA, 19 nt, Artificial Sequence
  Description of Artificial Sequence: Synthetic oligonucleotide
  Antisense strand to SEQ ID NO: 147224
uuggauacugaccacuugg

SEQ ID NO: 147226 - RNA, 19 nt, Artificial Sequence
  Description of Artificial Sequence: Synthetic oligonucleotide
  Sense strand starting at position 3834 of SEQ ID NO: 1888
ucagguauauaggacaaga

SEQ ID NO: 147227 - RNA, 19 nt, Artificial Sequence
  Description of Artificial Sequence: Synthetic oligonucleotide
  Antisense strand to SEQ ID NO: 147226
ucuuguccuauauaccuga

SEQ ID NO: 147228 - RNA, 19 nt, Artificial Sequence
  Description of Artificial Sequence: Synthetic oligonucleotide
  Sense strand starting at position 3717 of SEQ ID NO: 1888
ccaacaauucuggguuuga

SEQ ID NO: 147229 - RNA, 19 nt, Artificial Sequence
  Description of Artificial Sequence: Synthetic oligonucleotide
  Antisense strand to SEQ ID NO: 147228
ucaaacccagaauuguugg

SEQ ID NO: 147230 - RNA, 19 nt, Artificial Sequence
  Description of Artificial Sequence: Synthetic oligonucleotide
  Sense strand starting at position 3655 of SEQ ID NO: 1888
uggcuuucccaggguagga

SEQ ID NO: 147231 - RNA, 19 nt, Artificial Sequence
  Description of Artificial Sequence: Synthetic oligonucleotide
  Antisense strand to SEQ ID NO: 147230
uccuacccugggaaagcca

SEQ ID NO: 147232 - RNA, 19 nt, Artificial Sequence
  Description of Artificial Sequence: Synthetic oligonucleotide
  Sense strand starting at position 3249 of SEQ ID NO: 1888
gaaacaagcucggaaagau

SEQ ID NO: 147233 - RNA, 19 nt, Artificial Sequence
  Description of Artificial Sequence: Synthetic oligonucleotide
  Antisense strand to SEQ ID NO: 147232
aucuuuccgagcuuguuuc

SEQ ID NO: 147234 - RNA, 19 nt, Artificial Sequence
  Description of Artificial Sequence: Synthetic oligonucleotide
  Sense strand starting at position 3198 of SEQ ID NO: 1888
cgagccaugugauuuccuu

SEQ ID NO: 147235 - RNA, 19 nt, Artificial Sequence
  Description of Artificial Sequence: Synthetic oligonucleotide
  Antisense strand to SEQ ID NO: 147234
aaggaaaucacauggcucg

SEQ ID NO: 147236 - RNA, 19 nt, Artificial Sequence
  Description of Artificial Sequence: Synthetic oligonucleotide
  Sense strand starting at position 3195 of SEQ ID NO: 1888
cugcgagccaugugauuuc

SEQ ID NO: 147237 - RNA, 19 nt, Artificial Sequence
  Description of Artificial Sequence: Synthetic oligonucleotide
  Antisense strand to SEQ ID NO: 147236
gaaaucacauggcucgcag

SEQ ID NO: 147238 - RNA, 19 nt, Artificial Sequence
  Description of Artificial Sequence: Synthetic oligonucleotide
  Sense strand starting at position 3193 of SEQ ID NO: 1888
uccugcgagccaugugauu

SEQ ID NO: 147239 - RNA, 19 nt, Artificial Sequence
  Description of Artificial Sequence: Synthetic oligonucleotide
  Antisense strand to SEQ ID NO: 147238
aaucacauggcucgcagga

SEQ ID NO: 147240 - RNA, 19 nt, Artificial Sequence
  Description of Artificial Sequence: Synthetic oligonucleotide
  Sense strand starting at position 3129 of SEQ ID NO: 1888
cuggucaguuauuugcaaa

SEQ ID NO: 147241 - RNA, 19 nt, Artificial Sequence
  Description of Artificial Sequence: Synthetic oligonucleotide
  Antisense strand to SEQ ID NO: 147240
uuugcaaauaacugaccag

SEQ ID NO: 147242 - RNA, 19 nt, Artificial Sequence
  Description of Artificial Sequence: Synthetic oligonucleotide
  Sense strand starting at position 3128 of SEQ ID NO: 1888
acuggucaguuauuugcaa

SEQ ID NO: 147243 - RNA, 19 nt, Artificial Sequence
  Description of Artificial Sequence: Synthetic oligonucleotide
  Antisense strand to SEQ ID NO: 147242
uugcaaauaacugaccagu

SEQ ID NO: 147244 - RNA, 19 nt, Artificial Sequence
  Description of Artificial Sequence: Synthetic oligonucleotide
  Sense strand starting at position 3121 of SEQ ID NO: 1888
caggaagacuggucaguua

SEQ ID NO: 147245 - RNA, 19 nt, Artificial Sequence
  Description of Artificial Sequence: Synthetic oligonucleotide
  Antisense strand to SEQ ID NO: 147244
uaacugaccagucuuccug

SEQ ID NO: 147246 - RNA, 19 nt, Artificial Sequence
  Description of Artificial Sequence: Synthetic oligonucleotide
  Sense strand starting at position 3112 of SEQ ID NO: 1888
cugguuucgcaggaagacu

SEQ ID NO: 147247 - RNA, 19 nt, Artificial Sequence
  Description of Artificial Sequence: Synthetic oligonucleotide
  Antisense strand to SEQ ID NO: 147246
agucuuccugcgaaaccag

SEQ ID NO: 147248 - RNA, 19 nt, Artificial Sequence
  Description of Artificial Sequence: Synthetic oligonucleotide
  Sense strand starting at position 3111 of SEQ ID NO: 1888
gcugguuucgcaggaagac

SEQ ID NO: 147249 - RNA, 19 nt, Artificial Sequence
  Description of Artificial Sequence: Synthetic oligonucleotide
  Antisense strand to SEQ ID NO: 147248
gucuuccugcgaaaccagc

SEQ ID NO: 147250 - RNA, 19 nt, Artificial Sequence
  Description of Artificial Sequence: Synthetic oligonucleotide
  Sense strand starting at position 3100 of SEQ ID NO: 1888
gggacaagcuugcugguuu

SEQ ID NO: 147251 - RNA, 19 nt, Artificial Sequence
  Description of Artificial Sequence: Synthetic oligonucleotide
  Antisense strand to SEQ ID NO: 147250
aaaccagcaagcuuguccc

SEQ ID NO: 147252 - RNA, 19 nt, Artificial Sequence
  Description of Artificial Sequence: Synthetic oligonucleotide
  Sense strand starting at position 3069 of SEQ ID NO: 1888
guauucacaugugaggagu

SEQ ID NO: 147253 - RNA, 19 nt, Artificial Sequence
  Description of Artificial Sequence: Synthetic oligonucleotide
  Antisense strand to SEQ ID NO: 147252
acuccucacaugugaauac

SEQ ID NO: 147254 - RNA, 19 nt, Artificial Sequence
  Description of Artificial Sequence: Synthetic oligonucleotide
  Sense strand starting at position 3054 of SEQ ID NO: 1888
cgggugugcugagauguau

SEQ ID NO: 147255 - RNA, 19 nt, Artificial Sequence
  Description of Artificial Sequence: Synthetic oligonucleotide
  Antisense strand to SEQ ID NO: 147254
auacaucucagcacacccg

SEQ ID NO: 147256 - RNA, 19 nt, Artificial Sequence
  Description of Artificial Sequence: Synthetic oligonucleotide
  Sense strand starting at position 3053 of SEQ ID NO: 1888
ccgggugugcugagaugua

SEQ ID NO: 147257 - RNA, 19 nt, Artificial Sequence
  Description of Artificial Sequence: Synthetic oligonucleotide
  Antisense strand to SEQ ID NO: 147256
uacaucucagcacacccgg

SEQ ID NO: 147258 - RNA, 19 nt, Artificial Sequence
  Description of Artificial Sequence: Synthetic oligonucleotide
  Sense strand starting at position 2810 of SEQ ID NO: 1888
gugauuucuuaauaugcgu

SEQ ID NO: 147259 - RNA, 19 nt, Artificial Sequence
  Description of Artificial Sequence: Synthetic oligonucleotide
  Antisense strand to SEQ ID NO: 147258
acgcauauuaagaaaucac

SEQ ID NO: 147260 - RNA, 19 nt, Artificial Sequence
  Description of Artificial Sequence: Synthetic oligonucleotide
  Sense strand starting at position 2694 of SEQ ID NO: 1888
cgaaguuucgcuuuguuac

SEQ ID NO: 147261 - RNA, 19 nt, Artificial Sequence
  Description of Artificial Sequence: Synthetic oligonucleotide
  Antisense strand to SEQ ID NO: 147260
guaacaaagcgaaacuucg

SEQ ID NO: 147262 - RNA, 19 nt, Artificial Sequence
  Description of Artificial Sequence: Synthetic oligonucleotide
  Sense strand starting at position 2692 of SEQ ID NO: 1888
cacgaaguuucgcuuuguu

SEQ ID NO: 147263 - RNA, 19 nt, Artificial Sequence
  Description of Artificial Sequence: Synthetic oligonucleotide
  Antisense strand to SEQ ID NO: 147262
aacaaagcgaaacuucgug

SEQ ID NO: 147264 - RNA, 19 nt, Artificial Sequence
  Description of Artificial Sequence: Synthetic oligonucleotide
  Sense strand starting at position 2665 of SEQ ID NO: 1888
guguguauauagugagaga

SEQ ID NO: 147265 - RNA, 19 nt, Artificial Sequence
  Description of Artificial Sequence: Synthetic oligonucleotide
  Antisense strand to SEQ ID NO: 147264
ucucucacuauauacacac

SEQ ID NO: 147266 - RNA, 19 nt, Artificial Sequence
  Description of Artificial Sequence: Synthetic oligonucleotide
  Sense strand starting at position 2560 of SEQ ID NO: 1888
gagugauugauugaucgau

SEQ ID NO: 147267 - RNA, 19 nt, Artificial Sequence
  Description of Artificial Sequence: Synthetic oligonucleotide
  Antisense strand to SEQ ID NO: 147266
aucgaucaaucaaucacuc

SEQ ID NO: 147268 - RNA, 19 nt, Artificial Sequence
  Description of Artificial Sequence: Synthetic oligonucleotide
  Sense strand starting at position 2474 of SEQ ID NO: 1888
cugugaucuccgggcgauc

SEQ ID NO: 147269 - RNA, 19 nt, Artificial Sequence
  Description of Artificial Sequence: Synthetic oligonucleotide
  Antisense strand to SEQ ID NO: 147268
gaucgcccggagaucacag

SEQ ID NO: 147270 - RNA, 19 nt, Artificial Sequence
  Description of Artificial Sequence: Synthetic oligonucleotide
  Sense strand starting at position 2349 of SEQ ID NO: 1888
gguuccugggccugaucua

SEQ ID NO: 147271 - RNA, 19 nt, Artificial Sequence
  Description of Artificial Sequence: Synthetic oligonucleotide
  Antisense strand to SEQ ID NO: 147270
uagaucaggcccaggaacc

SEQ ID NO: 147272 - RNA, 19 nt, Artificial Sequence
  Description of Artificial Sequence: Synthetic oligonucleotide
  Sense strand starting at position 1471 of SEQ ID NO: 1888
ccgacagcucuggacagau

SEQ ID NO: 147273 - RNA, 19 nt, Artificial Sequence
  Description of Artificial Sequence: Synthetic oligonucleotide
  Antisense strand to SEQ ID NO: 147272
aucuguccagagcugucgg

SEQ ID NO: 147274 - RNA, 19 nt, Artificial Sequence
  Description of Artificial Sequence: Synthetic oligonucleotide
  Sense strand starting at position 1449 of SEQ ID NO: 1888
gucugcauuaauggaggaa

SEQ ID NO: 147275 - RNA, 19 nt, Artificial Sequence
  Description of Artificial Sequence: Synthetic oligonucleotide
  Antisense strand to SEQ ID NO: 147274
uuccuccauuaaugcagac

SEQ ID NO: 147276 - RNA, 19 nt, Artificial Sequence
  Description of Artificial Sequence: Synthetic oligonucleotide
  Sense strand starting at position 1424 of SEQ ID NO: 1888
gacaucuggcacugaagau

SEQ ID NO: 147277 - RNA, 19 nt, Artificial Sequence
  Description of Artificial Sequence: Synthetic oligonucleotide
  Antisense strand to SEQ ID NO: 147276
aucuucagugccagauguc

SEQ ID NO: 147278 - RNA, 19 nt, Artificial Sequence
  Description of Artificial Sequence: Synthetic oligonucleotide
  Sense strand starting at position 1421 of SEQ ID NO: 1888
ccagacaucuggcacugaa

SEQ ID NO: 147279 - RNA, 19 nt, Artificial Sequence
  Description of Artificial Sequence: Synthetic oligonucleotide
  Antisense strand to SEQ ID NO: 147278
uucagugccagaugucugg

SEQ ID NO: 147280 - RNA, 19 nt, Artificial Sequence
  Description of Artificial Sequence: Synthetic oligonucleotide
  Sense strand starting at position 1410 of SEQ ID NO: 1888
cugguagaaucccagacau

SEQ ID NO: 147281 - RNA, 19 nt, Artificial Sequence
  Description of Artificial Sequence: Synthetic oligonucleotide
  Antisense strand to SEQ ID NO: 147280
augucugggauucuaccag

SEQ ID NO: 147282 - RNA, 19 nt, Artificial Sequence
  Description of Artificial Sequence: Synthetic oligonucleotide
  Sense strand starting at position 1402 of SEQ ID NO: 1888
cccugucucugguagaauc

SEQ ID NO: 147283 - RNA, 19 nt, Artificial Sequence
  Description of Artificial Sequence: Synthetic oligonucleotide
  Antisense strand to SEQ ID NO: 147282
gauucuaccagagacaggg

SEQ ID NO: 147284 - RNA, 19 nt, Artificial Sequence
  Description of Artificial Sequence: Synthetic oligonucleotide
  Sense strand starting at position 1004 of SEQ ID NO: 1888
aggagcugcuucugagaga

SEQ ID NO: 147285 - RNA, 19 nt, Artificial Sequence
  Description of Artificial Sequence: Synthetic oligonucleotide
  Antisense strand to SEQ ID NO: 147284
ucucucagaagcagcuccu

SEQ ID NO: 147286 - RNA, 19 nt, Artificial Sequence
  Description of Artificial Sequence: Synthetic oligonucleotide
  Sense strand starting at position 844 of SEQ ID NO: 1888
aggagaauaucaccugcuu

SEQ ID NO: 147287 - RNA, 19 nt, Artificial Sequence
  Description of Artificial Sequence: Synthetic oligonucleotide
  Antisense strand to SEQ ID NO: 147286
aagcaggugauauucuccu

SEQ ID NO: 147288 - RNA, 19 nt, Artificial Sequence
  Description of Artificial Sequence: Synthetic oligonucleotide
  Sense strand starting at position 655 of SEQ ID NO: 1888
ggugcucacccugaucuaa

SEQ ID NO: 147289 - RNA, 19 nt, Artificial Sequence
  Description of Artificial Sequence: Synthetic oligonucleotide
  Antisense strand to SEQ ID NO: 147288
uuagaucagggugagcacc

SEQ ID NO: 147290 - RNA, 19 nt, Artificial Sequence
  Description of Artificial Sequence: Synthetic oligonucleotide
  Sense strand starting at position 654 of SEQ ID NO: 1888
gggugcucacccugaucua

SEQ ID NO: 147291 - RNA, 19 nt, Artificial Sequence
  Description of Artificial Sequence: Synthetic oligonucleotide
  Antisense strand to SEQ ID NO: 147290
uagaucagggugagcaccc

SEQ ID NO: 147292 - RNA, 19 nt, Artificial Sequence
  Description of Artificial Sequence: Synthetic oligonucleotide
  Sense strand starting at position 521 of SEQ ID NO: 1888
gcaggaaucccagagcaau

SEQ ID NO: 147293 - RNA, 19 nt, Artificial Sequence
  Description of Artificial Sequence: Synthetic oligonucleotide
  Antisense strand to SEQ ID NO: 147292
auugcucugggauuccugc

SEQ ID NO: 147294 - RNA, 19 nt, Artificial Sequence
  Description of Artificial Sequence: Synthetic oligonucleotide
  Sense strand starting at position 464 of SEQ ID NO: 1888
gggugagucagcgagagaa

SEQ ID NO: 147295 - RNA, 19 nt, Artificial Sequence
  Description of Artificial Sequence: Synthetic oligonucleotide
  Antisense strand to SEQ ID NO: 147294
uucucucgcugacucaccc

SEQ ID NO: 147296 - RNA, 19 nt, Artificial Sequence
  Description of Artificial Sequence: Synthetic oligonucleotide
  Sense strand starting at position 443 of SEQ ID NO: 1888
ggcaguguuccucaccuca

SEQ ID NO: 147297 - RNA, 19 nt, Artificial Sequence
  Description of Artificial Sequence: Synthetic oligonucleotide
  Antisense strand to SEQ ID NO: 147296
ugaggugaggaacacugcc

SEQ ID NO: 147298 - RNA, 19 nt, Artificial Sequence
  Description of Artificial Sequence: Synthetic oligonucleotide
  Sense strand starting at position 164 of SEQ ID NO: 1888
agaugaguuucccaguuaa

SEQ ID NO: 147299 - RNA, 19 nt, Artificial Sequence
  Description of Artificial Sequence: Synthetic oligonucleotide
  Antisense strand to SEQ ID NO: 147298
uuaacugggaaacucaucu

SEQ ID NO: 147300 - RNA, 19 nt, Artificial Sequence
  Description of Artificial Sequence: Synthetic oligonucleotide
  Sense strand starting at position 63 of SEQ ID NO: 1888
cgaagcuccugaggaaauu

SEQ ID NO: 147301 - RNA, 19 nt, Artificial Sequence
  Description of Artificial Sequence: Synthetic oligonucleotide
  Antisense strand to SEQ ID NO: 147300
aauuuccucaggagcuucg

SEQ ID NO: 147302 - RNA, 19 nt, Artificial Sequence
  Description of Artificial Sequence: Synthetic oligonucleotide
  Sense strand starting at position 61 of SEQ ID NO: 1888
agcgaagcuccugaggaaa

SEQ ID NO: 147303 - RNA, 19 nt, Artificial Sequence
  Description of Artificial Sequence: Synthetic oligonucleotide
  Antisense strand to SEQ ID NO: 147302
uuuccucaggagcuucgcu

SEQ ID NO: 147304 - RNA, 19 nt, Artificial Sequence
  Description of Artificial Sequence: Synthetic oligonucleotide
  Sense strand starting at position 60 of SEQ ID NO: 1888
gagcgaagcuccugaggaa

SEQ ID NO: 147305 - RNA, 19 nt, Artificial Sequence
  Description of Artificial Sequence: Synthetic oligonucleotide
  Antisense strand to SEQ ID NO: 147304
uuccucaggagcuucgcuc

SEQ ID NO: 147306 - RNA, 19 nt, Artificial Sequence
  Description of Artificial Sequence: Synthetic oligonucleotide
  Sense strand starting at position 3962 of SEQ ID NO: 1890
gguuucuauuccuuccaag

SEQ ID NO: 147307 - RNA, 19 nt, Artificial Sequence
  Description of Artificial Sequence: Synthetic oligonucleotide
  Antisense strand to SEQ ID NO: 147306
cuuggaaggaauagaaacc

SEQ ID NO: 147308 - RNA, 19 nt, Artificial Sequence
  Description of Artificial Sequence: Synthetic oligonucleotide
  Sense strand starting at position 3888 of SEQ ID NO: 1890
gcauaugagucagcauuau

SEQ ID NO: 147309 - RNA, 19 nt, Artificial Sequence
  Description of Artificial Sequence: Synthetic oligonucleotide
  Antisense strand to SEQ ID NO: 147308
auaaugcugacucauaugc

SEQ ID NO: 147310 - RNA, 19 nt, Artificial Sequence
  Description of Artificial Sequence: Synthetic oligonucleotide
  Sense strand starting at position 3879 of SEQ ID NO: 1890
auauucuuagcauaugagu

SEQ ID NO: 147311 - RNA, 19 nt, Artificial Sequence
  Description of Artificial Sequence: Synthetic oligonucleotide
  Antisense strand to SEQ ID NO: 147310
acucauaugcuaagaauau

SEQ ID NO: 147312 - RNA, 19 nt, Artificial Sequence
  Description of Artificial Sequence: Synthetic oligonucleotide
  Sense strand starting at position 3820 of SEQ ID NO: 1890
gcccaauauuucuggauuu

SEQ ID NO: 147313 - RNA, 19 nt, Artificial Sequence
  Description of Artificial Sequence: Synthetic oligonucleotide
  Antisense strand to SEQ ID NO: 147312
aaauccagaaauauugggc

SEQ ID NO: 147314 - RNA, 19 nt, Artificial Sequence
  Description of Artificial Sequence: Synthetic oligonucleotide
  Sense strand starting at position 3778 of SEQ ID NO: 1890
cucugaaacugcucugaaa

SEQ ID NO: 147315 - RNA, 19 nt, Artificial Sequence
  Description of Artificial Sequence: Synthetic oligonucleotide
  Antisense strand to SEQ ID NO: 147314
uuucagagcaguuucagag

SEQ ID NO: 147316 - RNA, 19 nt, Artificial Sequence
  Description of Artificial Sequence: Synthetic oligonucleotide
  Sense strand starting at position 3674 of SEQ ID NO: 1890
gucaaaguuguuuaaguug

SEQ ID NO: 147317 - RNA, 19 nt, Artificial Sequence
  Description of Artificial Sequence: Synthetic oligonucleotide
  Antisense strand to SEQ ID NO: 147316
caacuuaaacaacuuugac

SEQ ID NO: 147318 - RNA, 19 nt, Artificial Sequence
  Description of Artificial Sequence: Synthetic oligonucleotide
  Sense strand starting at position 3664 of SEQ ID NO: 1890
uccacucaccgucaaaguu

SEQ ID NO: 147319 - RNA, 19 nt, Artificial Sequence
  Description of Artificial Sequence: Synthetic oligonucleotide
  Antisense strand to SEQ ID NO: 147318
aacuuugacggugagugga

SEQ ID NO: 147320 - RNA, 19 nt, Artificial Sequence
  Description of Artificial Sequence: Synthetic oligonucleotide
  Sense strand starting at position 3592 of SEQ ID NO: 1890
gggaguuagccaggagaga

SEQ ID NO: 147321 - RNA, 19 nt, Artificial Sequence
  Description of Artificial Sequence: Synthetic oligonucleotide
  Antisense strand to SEQ ID NO: 147320
ucucuccuggcuaacuccc

SEQ ID NO: 147322 - RNA, 19 nt, Artificial Sequence
  Description of Artificial Sequence: Synthetic oligonucleotide
  Sense strand starting at position 3549 of SEQ ID NO: 1890
gccuaaggcuuucugauag

SEQ ID NO: 147323 - RNA, 19 nt, Artificial Sequence
  Description of Artificial Sequence: Synthetic oligonucleotide
  Antisense strand to SEQ ID NO: 147322
cuaucagaaagccuuaggc

SEQ ID NO: 147324 - RNA, 19 nt, Artificial Sequence
  Description of Artificial Sequence: Synthetic oligonucleotide
  Sense strand starting at position 3490 of SEQ ID NO: 1890
uaccauggugaauguauau

SEQ ID NO: 147325 - RNA, 19 nt, Artificial Sequence
  Description of Artificial Sequence: Synthetic oligonucleotide
  Antisense strand to SEQ ID NO: 147324
auauacauucaccauggua

SEQ ID NO: 147326 - RNA, 19 nt, Artificial Sequence
  Description of Artificial Sequence: Synthetic oligonucleotide
  Sense strand starting at position 3483 of SEQ ID NO: 1890
ugauaaguaccauggugaa

SEQ ID NO: 147327 - RNA, 19 nt, Artificial Sequence
  Description of Artificial Sequence: Synthetic oligonucleotide
  Antisense strand to SEQ ID NO: 147326
uucaccaugguacuuauca

SEQ ID NO: 147328 - RNA, 19 nt, Artificial Sequence
  Description of Artificial Sequence: Synthetic oligonucleotide
  Sense strand starting at position 3425 of SEQ ID NO: 1890
gauagucccuguucucaag

SEQ ID NO: 147329 - RNA, 19 nt, Artificial Sequence
  Description of Artificial Sequence: Synthetic oligonucleotide
  Antisense strand to SEQ ID NO: 147328
cuugagaacagggacuauc

SEQ ID NO: 147330 - RNA, 19 nt, Artificial Sequence
  Description of Artificial Sequence: Synthetic oligonucleotide
  Sense strand starting at position 3421 of SEQ ID NO: 1890
gguagauagucccuguucu

SEQ ID NO: 147331 - RNA, 19 nt, Artificial Sequence
  Description of Artificial Sequence: Synthetic oligonucleotide
  Antisense strand to SEQ ID NO: 147330
agaacagggacuaucuacc

SEQ ID NO: 147332 - RNA, 19 nt, Artificial Sequence
  Description of Artificial Sequence: Synthetic oligonucleotide
  Sense strand starting at position 2873 of SEQ ID NO: 1890
agcuaaugacuccacaugu

SEQ ID NO: 147333 - RNA, 19 nt, Artificial Sequence
  Description of Artificial Sequence: Synthetic oligonucleotide
  Antisense strand to SEQ ID NO: 147332
acauguggagucauuagcu

SEQ ID NO: 147334 - RNA, 19 nt, Artificial Sequence
  Description of Artificial Sequence: Synthetic oligonucleotide
  Sense strand starting at position 2837 of SEQ ID NO: 1890
gucugaaacguacacauau

SEQ ID NO: 147335 - RNA, 19 nt, Artificial Sequence
  Description of Artificial Sequence: Synthetic oligonucleotide
  Antisense strand to SEQ ID NO: 147334
auauguguacguuucagac

SEQ ID NO: 147336 - RNA, 19 nt, Artificial Sequence
  Description of Artificial Sequence: Synthetic oligonucleotide
  Sense strand starting at position 2820 of SEQ ID NO: 1890
cucacauuuccaugccagu

SEQ ID NO: 147337 - RNA, 19 nt, Artificial Sequence
  Description of Artificial Sequence: Synthetic oligonucleotide
  Antisense strand to SEQ ID NO: 147336
acuggcauggaaaugugag

SEQ ID NO: 147338 - RNA, 19 nt, Artificial Sequence
  Description of Artificial Sequence: Synthetic oligonucleotide
  Sense strand starting at position 2686 of SEQ ID NO: 1890
agucuuugccauuauccua

SEQ ID NO: 147339 - RNA, 19 nt, Artificial Sequence
  Description of Artificial Sequence: Synthetic oligonucleotide
  Antisense strand to SEQ ID NO: 147338
uaggauaauggcaaagacu

SEQ ID NO: 147340 - RNA, 19 nt, Artificial Sequence
  Description of Artificial Sequence: Synthetic oligonucleotide
  Sense strand starting at position 2574 of SEQ ID NO: 1890
cgagucacucacuacaguu

SEQ ID NO: 147341 - RNA, 19 nt, Artificial Sequence
  Description of Artificial Sequence: Synthetic oligonucleotide
  Antisense strand to SEQ ID NO: 147340
aacuguagugagugacucg

SEQ ID NO: 147342 - RNA, 19 nt, Artificial Sequence
  Description of Artificial Sequence: Synthetic oligonucleotide
  Sense strand starting at position 2533 of SEQ ID NO: 1890
cgccucuggcuagaagaaa

SEQ ID NO: 147343 - RNA, 19 nt, Artificial Sequence
  Description of Artificial Sequence: Synthetic oligonucleotide
  Antisense strand to SEQ ID NO: 147342
uuucuucuagccagaggcg

SEQ ID NO: 147344 - RNA, 19 nt, Artificial Sequence
  Description of Artificial Sequence: Synthetic oligonucleotide
  Sense strand starting at position 2423 of SEQ ID NO: 1890
cauugagcgccuuucugua

SEQ ID NO: 147345 - RNA, 19 nt, Artificial Sequence
  Description of Artificial Sequence: Synthetic oligonucleotide
  Antisense strand to SEQ ID NO: 147344
uacagaaaggcgcucaaug

SEQ ID NO: 147346 - RNA, 19 nt, Artificial Sequence
  Description of Artificial Sequence: Synthetic oligonucleotide
  Sense strand starting at position 2279 of SEQ ID NO: 1890
aguggaguguugaagggau

SEQ ID NO: 147347 - RNA, 19 nt, Artificial Sequence
  Description of Artificial Sequence: Synthetic oligonucleotide
  Antisense strand to SEQ ID NO: 147346
aucccuucaacacuccacu

SEQ ID NO: 147348 - RNA, 19 nt, Artificial Sequence
  Description of Artificial Sequence: Synthetic oligonucleotide
  Sense strand starting at position 2274 of SEQ ID NO: 1890
acuuaaguggaguguugaa

SEQ ID NO: 147349 - RNA, 19 nt, Artificial Sequence
  Description of Artificial Sequence: Synthetic oligonucleotide
  Antisense strand to SEQ ID NO: 147348
uucaacacuccacuuaagu

SEQ ID NO: 147350 - RNA, 19 nt, Artificial Sequence
  Description of Artificial Sequence: Synthetic oligonucleotide
  Sense strand starting at position 2041 of SEQ ID NO: 1890
ggagacuccuccuuagauu

SEQ ID NO: 147351 - RNA, 19 nt, Artificial Sequence
  Description of Artificial Sequence: Synthetic oligonucleotide
  Antisense strand to SEQ ID NO: 147350
aaucuaaggaggagucucc

SEQ ID NO: 147352 - RNA, 19 nt, Artificial Sequence
  Description of Artificial Sequence: Synthetic oligonucleotide
  Sense strand starting at position 1527 of SEQ ID NO: 1890
cagugaagcccugggcaua

SEQ ID NO: 147353 - RNA, 19 nt, Artificial Sequence
  Description of Artificial Sequence: Synthetic oligonucleotide
  Antisense strand to SEQ ID NO: 147352
uaugcccagggcuucacug

SEQ ID NO: 147354 - RNA, 19 nt, Artificial Sequence
  Description of Artificial Sequence: Synthetic oligonucleotide
  Sense strand starting at position 1373 of SEQ ID NO: 1890
ucugcauuaucuuccugga

SEQ ID NO: 147355 - RNA, 19 nt, Artificial Sequence
  Description of Artificial Sequence: Synthetic oligonucleotide
  Antisense strand to SEQ ID NO: 147354
uccaggaagauaaugcaga

SEQ ID NO: 147356 - RNA, 19 nt, Artificial Sequence
  Description of Artificial Sequence: Synthetic oligonucleotide
  Sense strand starting at position 1261 of SEQ ID NO: 1890
acugacaucugucccaaga

SEQ ID NO: 147357 - RNA, 19 nt, Artificial Sequence
  Description of Artificial Sequence: Synthetic oligonucleotide
  Antisense strand to SEQ ID NO: 147356
ucuugggacagaugucagu

SEQ ID NO: 147358 - RNA, 19 nt, Artificial Sequence
  Description of Artificial Sequence: Synthetic oligonucleotide
  Sense strand starting at position 1093 of SEQ ID NO: 1890
ggaccaguuaguugaugua

SEQ ID NO: 147359 - RNA, 19 nt, Artificial Sequence
  Description of Artificial Sequence: Synthetic oligonucleotide
  Antisense strand to SEQ ID NO: 147358
uacaucaacuaacuggucc

SEQ ID NO: 147360 - RNA, 19 nt, Artificial Sequence
  Description of Artificial Sequence: Synthetic oligonucleotide
  Sense strand starting at position 917 of SEQ ID NO: 1890
gaauuaaauugggugaugu

SEQ ID NO: 147361 - RNA, 19 nt, Artificial Sequence
  Description of Artificial Sequence: Synthetic oligonucleotide
  Antisense strand to SEQ ID NO: 147360
acaucacccaauuuaauuc

SEQ ID NO: 147362 - RNA, 19 nt, Artificial Sequence
  Description of Artificial Sequence: Synthetic oligonucleotide
  Sense strand starting at position 471 of SEQ ID NO: 1890
ucgaaaugagccugagcaa

SEQ ID NO: 147363 - RNA, 19 nt, Artificial Sequence
  Description of Artificial Sequence: Synthetic oligonucleotide
  Antisense strand to SEQ ID NO: 147362
uugcucaggcucauuucga

SEQ ID NO: 147364 - RNA, 19 nt, Artificial Sequence
  Description of Artificial Sequence: Synthetic oligonucleotide
  Sense strand starting at position 460 of SEQ ID NO: 1890
aggucaggacuucgaaaug

SEQ ID NO: 147365 - RNA, 19 nt, Artificial Sequence
  Description of Artificial Sequence: Synthetic oligonucleotide
  Antisense strand to SEQ ID NO: 147364
cauuucgaaguccugaccu

SEQ ID NO: 147366 - RNA, 19 nt, Artificial Sequence
  Description of Artificial Sequence: Synthetic oligonucleotide
  Sense strand starting at position 378 of SEQ ID NO: 1890
uuaagauucuucucaggcu

SEQ ID NO: 147367 - RNA, 19 nt, Artificial Sequence
  Description of Artificial Sequence: Synthetic oligonucleotide
  Antisense strand to SEQ ID NO: 147366
agccugagaagaaucuuaa

SEQ ID NO: 147368 - RNA, 19 nt, Artificial Sequence
  Description of Artificial Sequence: Synthetic oligonucleotide
  Sense strand starting at position 310 of SEQ ID NO: 1890
aucugaauugugcaccauu

SEQ ID NO: 147369 - RNA, 19 nt, Artificial Sequence
  Description of Artificial Sequence: Synthetic oligonucleotide
  Antisense strand to SEQ ID NO: 147368
aauggugcacaauucagau

SEQ ID NO: 147370 - RNA, 19 nt, Artificial Sequence
  Description of Artificial Sequence: Synthetic oligonucleotide
  Sense strand starting at position 254 of SEQ ID NO: 1890
aggucuucucauuaucuuu

SEQ ID NO: 147371 - RNA, 19 nt, Artificial Sequence
  Description of Artificial Sequence: Synthetic oligonucleotide
  Antisense strand to SEQ ID NO: 147370
aaagauaaugagaagaccu

SEQ ID NO: 147372 - RNA, 19 nt, Artificial Sequence
  Description of Artificial Sequence: Synthetic oligonucleotide
  Sense strand starting at position 248 of SEQ ID NO: 1890
caggucaggucuucucauu

SEQ ID NO: 147373 - RNA, 19 nt, Artificial Sequence
  Description of Artificial Sequence: Synthetic oligonucleotide
  Antisense strand to SEQ ID NO: 147372
aaugagaagaccugaccug

SEQ ID NO: 147374 - RNA, 19 nt, Artificial Sequence
  Description of Artificial Sequence: Synthetic oligonucleotide
  Sense strand starting at position 220 of SEQ ID NO: 1890
cuauucuccgaacagcaau

SEQ ID NO: 147375 - RNA, 19 nt, Artificial Sequence
  Description of Artificial Sequence: Synthetic oligonucleotide
  Antisense strand to SEQ ID NO: 147374
auugcuguucggagaauag

SEQ ID NO: 147376 - RNA, 19 nt, Artificial Sequence
  Description of Artificial Sequence: Synthetic oligonucleotide
  Sense strand starting at position 100 of SEQ ID NO: 1890
agguuucaagagugguaua

SEQ ID NO: 147377 - RNA, 19 nt, Artificial Sequence
  Description of Artificial Sequence: Synthetic oligonucleotide
  Antisense strand to SEQ ID NO: 147376
uauaccacucuugaaaccu

SEQ ID NO: 147378 - RNA, 19 nt, Artificial Sequence
  Description of Artificial Sequence: Synthetic oligonucleotide
  Sense strand starting at position 40 of SEQ ID NO: 1890
uuccauacacuauguguua

SEQ ID NO: 147379 - RNA, 19 nt, Artificial Sequence
  Description of Artificial Sequence: Synthetic oligonucleotide
  Antisense strand to SEQ ID NO: 147378
uaacacauaguguauggaa

SEQ ID NO: 147380 - RNA, 19 nt, Artificial Sequence
  Description of Artificial Sequence: Synthetic oligonucleotide
  Sense strand starting at position 11 of SEQ ID NO: 1890
aacauuacguauguugaaa

SEQ ID NO: 147381 - RNA, 19 nt, Artificial Sequence
  Description of Artificial Sequence: Synthetic oligonucleotide
  Antisense strand to SEQ ID NO: 147380
uuucaacauacguaauguu

SEQ ID NO: 147382 - RNA, 19 nt, Artificial Sequence
  Description of Artificial Sequence: Synthetic oligonucleotide
  Sense strand starting at position 10 of SEQ ID NO: 1890
aaacauuacguauguugaa

SEQ ID NO: 147383 - RNA, 19 nt, Artificial Sequence
  Description of Artificial Sequence: Synthetic oligonucleotide
  Antisense strand to SEQ ID NO: 147382
uucaacauacguaauguuu

SEQ ID NO: 147384 - RNA, 19 nt, Artificial Sequence
  Description of Artificial Sequence: Synthetic oligonucleotide
  Sense strand starting at position 7 of SEQ ID NO: 1890
gagaaacauuacguauguu

SEQ ID NO: 147385 - RNA, 19 nt, Artificial Sequence
  Description of Artificial Sequence: Synthetic oligonucleotide
  Antisense strand to SEQ ID NO: 147384
aacauacguaauguuucuc

SEQ ID NO: 147386 - RNA, 19 nt, Artificial Sequence
  Description of Artificial Sequence: Synthetic oligonucleotide
  Sense strand starting at position 3441 of SEQ ID NO: 1891
auucucuuugcauaagugu

SEQ ID NO: 147387 - RNA, 19 nt, Artificial Sequence
  Description of Artificial Sequence: Synthetic oligonucleotide
  Antisense strand to SEQ ID NO: 147386
acacuuaugcaaagagaau

SEQ ID NO: 147388 - RNA, 19 nt, Artificial Sequence
  Description of Artificial Sequence: Synthetic oligonucleotide
  Sense strand starting at position 3438 of SEQ ID NO: 1891
gcgauucucuuugcauaag

SEQ ID NO: 147389 - RNA, 19 nt, Artificial Sequence
  Description of Artificial Sequence: Synthetic oligonucleotide
  Antisense strand to SEQ ID NO: 147388
cuuaugcaaagagaaucgc

SEQ ID NO: 147390 - RNA, 19 nt, Artificial Sequence
  Description of Artificial Sequence: Synthetic oligonucleotide
  Sense strand starting at position 3437 of SEQ ID NO: 1891
ugcgauucucuuugcauaa

SEQ ID NO: 147391 - RNA, 19 nt, Artificial Sequence
  Description of Artificial Sequence: Synthetic oligonucleotide
  Antisense strand to SEQ ID NO: 147390
uuaugcaaagagaaucgca

SEQ ID NO: 147392 - RNA, 19 nt, Artificial Sequence
  Description of Artificial Sequence: Synthetic oligonucleotide
  Sense strand starting at position 3436 of SEQ ID NO: 1891
augcgauucucuuugcaua

SEQ ID NO: 147393 - RNA, 19 nt, Artificial Sequence
  Description of Artificial Sequence: Synthetic oligonucleotide
  Antisense strand to SEQ ID NO: 147392
uaugcaaagagaaucgcau

SEQ ID NO: 147394 - RNA, 19 nt, Artificial Sequence
  Description of Artificial Sequence: Synthetic oligonucleotide
  Sense strand starting at position 3267 of SEQ ID NO: 1891
ggucuuauuuaugaugaua

SEQ ID NO: 147395 - RNA, 19 nt, Artificial Sequence
  Description of Artificial Sequence: Synthetic oligonucleotide
  Antisense strand to SEQ ID NO: 147394
uaucaucauaaauaagacc

SEQ ID NO: 147396 - RNA, 19 nt, Artificial Sequence
  Description of Artificial Sequence: Synthetic oligonucleotide
  Sense strand starting at position 3266 of SEQ ID NO: 1891
aggucuuauuuaugaugau

SEQ ID NO: 147397 - RNA, 19 nt, Artificial Sequence
  Description of Artificial Sequence: Synthetic oligonucleotide
  Antisense strand to SEQ ID NO: 147396
aucaucauaaauaagaccu

SEQ ID NO: 147398 - RNA, 19 nt, Artificial Sequence
  Description of Artificial Sequence: Synthetic oligonucleotide
  Sense strand starting at position 2606 of SEQ ID NO: 1891
gggaaucguuggcuuauaa

SEQ ID NO: 147399 - RNA, 19 nt, Artificial Sequence
  Description of Artificial Sequence: Synthetic oligonucleotide
  Antisense strand to SEQ ID NO: 147398
uuauaagccaacgauuccc

SEQ ID NO: 147400 - RNA, 19 nt, Artificial Sequence
  Description of Artificial Sequence: Synthetic oligonucleotide
  Sense strand starting at position 2605 of SEQ ID NO: 1891
ugggaaucguuggcuuaua

SEQ ID NO: 147401 - RNA, 19 nt, Artificial Sequence
  Description of Artificial Sequence: Synthetic oligonucleotide
  Antisense strand to SEQ ID NO: 147400
uauaagccaacgauuccca

SEQ ID NO: 147402 - RNA, 19 nt, Artificial Sequence
  Description of Artificial Sequence: Synthetic oligonucleotide
  Sense strand starting at position 2604 of SEQ ID NO: 1891
uugggaaucguuggcuuau

SEQ ID NO: 147403 - RNA, 19 nt, Artificial Sequence
  Description of Artificial Sequence: Synthetic oligonucleotide
  Antisense strand to SEQ ID NO: 147402
auaagccaacgauucccaa

SEQ ID NO: 147404 - RNA, 19 nt, Artificial Sequence
  Description of Artificial Sequence: Synthetic oligonucleotide
  Sense strand starting at position 2579 of SEQ ID NO: 1891
agggaucugcaccgaagau

SEQ ID NO: 147405 - RNA, 19 nt, Artificial Sequence
  Description of Artificial Sequence: Synthetic oligonucleotide
  Antisense strand to SEQ ID NO: 147404
aucuucggugcagaucccu

SEQ ID NO: 147406 - RNA, 19 nt, Artificial Sequence
  Description of Artificial Sequence: Synthetic oligonucleotide
  Sense strand starting at position 2565 of SEQ ID NO: 1891
uggucauccuuauaaggga

SEQ ID NO: 147407 - RNA, 19 nt, Artificial Sequence
  Description of Artificial Sequence: Synthetic oligonucleotide
  Antisense strand to SEQ ID NO: 147406
ucccuuauaaggaugacca

SEQ ID NO: 147408 - RNA, 19 nt, Artificial Sequence
  Description of Artificial Sequence: Synthetic oligonucleotide
  Sense strand starting at position 2552 of SEQ ID NO: 1891
gaauauuaaugacugguca

SEQ ID NO: 147409 - RNA, 19 nt, Artificial Sequence
  Description of Artificial Sequence: Synthetic oligonucleotide
  Antisense strand to SEQ ID NO: 147408
ugaccagucauuaauauuc

SEQ ID NO: 147410 - RNA, 19 nt, Artificial Sequence
  Description of Artificial Sequence: Synthetic oligonucleotide
  Sense strand starting at position 2520 of SEQ ID NO: 1891
ucauguugagugggacuaa

SEQ ID NO: 147411 - RNA, 19 nt, Artificial Sequence
  Description of Artificial Sequence: Synthetic oligonucleotide
  Antisense strand to SEQ ID NO: 147410
uuagucccacucaacauga

SEQ ID NO: 147412 - RNA, 19 nt, Artificial Sequence
  Description of Artificial Sequence: Synthetic oligonucleotide
  Sense strand starting at position 2518 of SEQ ID NO: 1891
agucauguugagugggacu

SEQ ID NO: 147413 - RNA, 19 nt, Artificial Sequence
  Description of Artificial Sequence: Synthetic oligonucleotide
  Antisense strand to SEQ ID NO: 147412
agucccacucaacaugacu

SEQ ID NO: 147414 - RNA, 19 nt, Artificial Sequence
  Description of Artificial Sequence: Synthetic oligonucleotide
  Sense strand starting at position 2507 of SEQ ID NO: 1891
agaucuugcuaagucaugu

SEQ ID NO: 147415 - RNA, 19 nt, Artificial Sequence
  Description of Artificial Sequence: Synthetic oligonucleotide
  Antisense strand to SEQ ID NO: 147414
acaugacuuagcaagaucu

SEQ ID NO: 147416 - RNA, 19 nt, Artificial Sequence
  Description of Artificial Sequence: Synthetic oligonucleotide
  Sense strand starting at position 2424 of SEQ ID NO: 1891
cuugaucaaucggauaaau

SEQ ID NO: 147417 - RNA, 19 nt, Artificial Sequence
  Description of Artificial Sequence: Synthetic oligonucleotide
  Antisense strand to SEQ ID NO: 147416
auuuauccgauugaucaag

SEQ ID NO: 147418 - RNA, 19 nt, Artificial Sequence
  Description of Artificial Sequence: Synthetic oligonucleotide
  Sense strand starting at position 2412 of SEQ ID NO: 1891
cuaagauugucacuugauc

SEQ ID NO: 147419 - RNA, 19 nt, Artificial Sequence
  Description of Artificial Sequence: Synthetic oligonucleotide
  Antisense strand to SEQ ID NO: 147418
gaucaagugacaaucuuag

SEQ ID NO: 147420 - RNA, 19 nt, Artificial Sequence
  Description of Artificial Sequence: Synthetic oligonucleotide
  Sense strand starting at position 2410 of SEQ ID NO: 1891
uccuaagauugucacuuga

SEQ ID NO: 147421 - RNA, 19 nt, Artificial Sequence
  Description of Artificial Sequence: Synthetic oligonucleotide
  Antisense strand to SEQ ID NO: 147420
ucaagugacaaucuuagga

SEQ ID NO: 147422 - RNA, 19 nt, Artificial Sequence
  Description of Artificial Sequence: Synthetic oligonucleotide
  Sense strand starting at position 2404 of SEQ ID NO: 1891
aaggauuccuaagauuguc

SEQ ID NO: 147423 - RNA, 19 nt, Artificial Sequence
  Description of Artificial Sequence: Synthetic oligonucleotide
  Antisense strand to SEQ ID NO: 147422
gacaaucuuaggaauccuu

SEQ ID NO: 147424 - RNA, 19 nt, Artificial Sequence
  Description of Artificial Sequence: Synthetic oligonucleotide
  Sense strand starting at position 2400 of SEQ ID NO: 1891
ugucaaggauuccuaagau

SEQ ID NO: 147425 - RNA, 19 nt, Artificial Sequence
  Description of Artificial Sequence: Synthetic oligonucleotide
  Antisense strand to SEQ ID NO: 147424
aucuuaggaauccuugaca

SEQ ID NO: 147426 - RNA, 19 nt, Artificial Sequence
  Description of Artificial Sequence: Synthetic oligonucleotide
  Sense strand starting at position 2263 of SEQ ID NO: 1891
gucguuuaggaugagaugu

SEQ ID NO: 147427 - RNA, 19 nt, Artificial Sequence
  Description of Artificial Sequence: Synthetic oligonucleotide
  Antisense strand to SEQ ID NO: 147426
acaucucauccuaaacgac

SEQ ID NO: 147428 - RNA, 19 nt, Artificial Sequence
  Description of Artificial Sequence: Synthetic oligonucleotide
  Sense strand starting at position 2262 of SEQ ID NO: 1891
ggucguuuaggaugagaug

SEQ ID NO: 147429 - RNA, 19 nt, Artificial Sequence
  Description of Artificial Sequence: Synthetic oligonucleotide
  Antisense strand to SEQ ID NO: 147428
caucucauccuaaacgacc

SEQ ID NO: 147430 - RNA, 19 nt, Artificial Sequence
  Description of Artificial Sequence: Synthetic oligonucleotide
  Sense strand starting at position 2231 of SEQ ID NO: 1891
gcguguuuagacuaguuuc

SEQ ID NO: 147431 - RNA, 19 nt, Artificial Sequence
  Description of Artificial Sequence: Synthetic oligonucleotide
  Antisense strand to SEQ ID NO: 147430
gaaacuagucuaaacacgc

SEQ ID NO: 147432 - RNA, 19 nt, Artificial Sequence
  Description of Artificial Sequence: Synthetic oligonucleotide
  Sense strand starting at position 2229 of SEQ ID NO: 1891
gggcguguuuagacuaguu

SEQ ID NO: 147433 - RNA, 19 nt, Artificial Sequence
  Description of Artificial Sequence: Synthetic oligonucleotide
  Antisense strand to SEQ ID NO: 147432
aacuagucuaaacacgccc

SEQ ID NO: 147434 - RNA, 19 nt, Artificial Sequence
  Description of Artificial Sequence: Synthetic oligonucleotide
  Sense strand starting at position 2062 of SEQ ID NO: 1891
guuucugagcgccgaaaca

SEQ ID NO: 147435 - RNA, 19 nt, Artificial Sequence
  Description of Artificial Sequence: Synthetic oligonucleotide
  Antisense strand to SEQ ID NO: 147434
uguuucggcgcucagaaac

SEQ ID NO: 147436 - RNA, 19 nt, Artificial Sequence
  Description of Artificial Sequence: Synthetic oligonucleotide
  Sense strand starting at position 2060 of SEQ ID NO: 1891
uuguuucugagcgccgaaa

SEQ ID NO: 147437 - RNA, 19 nt, Artificial Sequence
  Description of Artificial Sequence: Synthetic oligonucleotide
  Antisense strand to SEQ ID NO: 147436
uuucggcgcucagaaacaa

SEQ ID NO: 147438 - RNA, 19 nt, Artificial Sequence
  Description of Artificial Sequence: Synthetic oligonucleotide
  Sense strand starting at position 1636 of SEQ ID NO: 1891
cgcucagcucuccaagguu

SEQ ID NO: 147439 - RNA, 19 nt, Artificial Sequence
  Description of Artificial Sequence: Synthetic oligonucleotide
  Antisense strand to SEQ ID NO: 147438
aaccuuggagagcugagcg

SEQ ID NO: 147440 - RNA, 19 nt, Artificial Sequence
  Description of Artificial Sequence: Synthetic oligonucleotide
  Sense strand starting at position 1531 of SEQ ID NO: 1891
ccgagagaugccugcaugu

SEQ ID NO: 147441 - RNA, 19 nt, Artificial Sequence
  Description of Artificial Sequence: Synthetic oligonucleotide
  Antisense strand to SEQ ID NO: 147440
acaugcaggcaucucucgg

SEQ ID NO: 147442 - RNA, 19 nt, Artificial Sequence
  Description of Artificial Sequence: Synthetic oligonucleotide
  Sense strand starting at position 1262 of SEQ ID NO: 1891
ccucuuugguacuuacuua

SEQ ID NO: 147443 - RNA, 19 nt, Artificial Sequence
  Description of Artificial Sequence: Synthetic oligonucleotide
  Antisense strand to SEQ ID NO: 147442
uaaguaaguaccaaagagg

SEQ ID NO: 147444 - RNA, 19 nt, Artificial Sequence
  Description of Artificial Sequence: Synthetic oligonucleotide
  Sense strand starting at position 1250 of SEQ ID NO: 1891
gagggagcauucccucuuu

SEQ ID NO: 147445 - RNA, 19 nt, Artificial Sequence
  Description of Artificial Sequence: Synthetic oligonucleotide
  Antisense strand to SEQ ID NO: 147444
aaagagggaaugcucccuc

SEQ ID NO: 147446 - RNA, 19 nt, Artificial Sequence
  Description of Artificial Sequence: Synthetic oligonucleotide
  Sense strand starting at position 1204 of SEQ ID NO: 1891
acaguauccuucucucuga

SEQ ID NO: 147447 - RNA, 19 nt, Artificial Sequence
  Description of Artificial Sequence: Synthetic oligonucleotide
  Antisense strand to SEQ ID NO: 147446
ucagagagaaggauacugu

SEQ ID NO: 147448 - RNA, 19 nt, Artificial Sequence
  Description of Artificial Sequence: Synthetic oligonucleotide
  Sense strand starting at position 980 of SEQ ID NO: 1891
ggcaacagucaguguaacu

SEQ ID NO: 147449 - RNA, 19 nt, Artificial Sequence
  Description of Artificial Sequence: Synthetic oligonucleotide
  Antisense strand to SEQ ID NO: 147448
aguuacacugacuguugcc

SEQ ID NO: 147450 - RNA, 19 nt, Artificial Sequence
  Description of Artificial Sequence: Synthetic oligonucleotide
  Sense strand starting at position 622 of SEQ ID NO: 1891
cugagagucucgcucuguu

SEQ ID NO: 147451 - RNA, 19 nt, Artificial Sequence
  Description of Artificial Sequence: Synthetic oligonucleotide
  Antisense strand to SEQ ID NO: 147450
aacagagcgagacucucag

SEQ ID NO: 147452 - RNA, 19 nt, Artificial Sequence
  Description of Artificial Sequence: Synthetic oligonucleotide
  Sense strand starting at position 580 of SEQ ID NO: 1891
gccacagacuacuugcuaa

SEQ ID NO: 147453 - RNA, 19 nt, Artificial Sequence
  Description of Artificial Sequence: Synthetic oligonucleotide
  Antisense strand to SEQ ID NO: 147452
uuagcaaguagucuguggc

SEQ ID NO: 147454 - RNA, 19 nt, Artificial Sequence
  Description of Artificial Sequence: Synthetic oligonucleotide
  Sense strand starting at position 572 of SEQ ID NO: 1891
uggucuaagccacagacua

SEQ ID NO: 147455 - RNA, 19 nt, Artificial Sequence
  Description of Artificial Sequence: Synthetic oligonucleotide
  Antisense strand to SEQ ID NO: 147454
uagucuguggcuuagacca

SEQ ID NO: 147456 - RNA, 19 nt, Artificial Sequence
  Description of Artificial Sequence: Synthetic oligonucleotide
  Sense strand starting at position 129 of SEQ ID NO: 1891
ucuaguuauguuuggcaac

SEQ ID NO: 147457 - RNA, 19 nt, Artificial Sequence
  Description of Artificial Sequence: Synthetic oligonucleotide
  Antisense strand to SEQ ID NO: 147456
guugccaaacauaacuaga

SEQ ID NO: 147458 - RNA, 19 nt, Artificial Sequence
  Description of Artificial Sequence: Synthetic oligonucleotide
  Sense strand starting at position 122 of SEQ ID NO: 1891
ccacguuucuaguuauguu

SEQ ID NO: 147459 - RNA, 19 nt, Artificial Sequence
  Description of Artificial Sequence: Synthetic oligonucleotide
  Antisense strand to SEQ ID NO: 147458
aacauaacuagaaacgugg

SEQ ID NO: 147460 - RNA, 19 nt, Artificial Sequence
  Description of Artificial Sequence: Synthetic oligonucleotide
  Sense strand starting at position 94 of SEQ ID NO: 1891
aucaguucgucuuccacaa

SEQ ID NO: 147461 - RNA, 19 nt, Artificial Sequence
  Description of Artificial Sequence: Synthetic oligonucleotide
  Antisense strand to SEQ ID NO: 147460
uuguggaagacgaacugau

SEQ ID NO: 147462 - RNA, 19 nt, Artificial Sequence
  Description of Artificial Sequence: Synthetic oligonucleotide
  Sense strand starting at position 91 of SEQ ID NO: 1891
ggcaucaguucgucuucca

SEQ ID NO: 147463 - RNA, 19 nt, Artificial Sequence
  Description of Artificial Sequence: Synthetic oligonucleotide
  Antisense strand to SEQ ID NO: 147462
uggaagacgaacugaugcc

SEQ ID NO: 147464 - RNA, 19 nt, Artificial Sequence
  Description of Artificial Sequence: Synthetic oligonucleotide
  Sense strand starting at position 62 of SEQ ID NO: 1891
agggaacucucagccuuua

SEQ ID NO: 147465 - RNA, 19 nt, Artificial Sequence
  Description of Artificial Sequence: Synthetic oligonucleotide
  Antisense strand to SEQ ID NO: 147464
uaaaggcugagaguucccu

SEQ ID NO: 147466 - RNA, 19 nt, Artificial Sequence
  Description of Artificial Sequence: Synthetic oligonucleotide
  Sense strand starting at position 142 of SEQ ID NO: 1892
gacucuuuauugguugaau

SEQ ID NO: 147467 - RNA, 19 nt, Artificial Sequence
  Description of Artificial Sequence: Synthetic oligonucleotide
  Antisense strand to SEQ ID NO: 147466
auucaaccaauaaagaguc

SEQ ID NO: 147468 - RNA, 19 nt, Artificial Sequence
  Description of Artificial Sequence: Synthetic oligonucleotide
  Sense strand starting at position 143 of SEQ ID NO: 1892
acucuuuauugguugaaug

SEQ ID NO: 147469 - RNA, 19 nt, Artificial Sequence
  Description of Artificial Sequence: Synthetic oligonucleotide
  Antisense strand to SEQ ID NO: 147468
cauucaaccaauaaagagu

SEQ ID NO: 147470 - RNA, 19 nt, Artificial Sequence
  Description of Artificial Sequence: Synthetic oligonucleotide
  Sense strand starting at position 216 of SEQ ID NO: 1892
uguggauagcacuaaauau

SEQ ID NO: 147471 - RNA, 19 nt, Artificial Sequence
  Description of Artificial Sequence: Synthetic oligonucleotide
  Antisense strand to SEQ ID NO: 147470
auauuuagugcuauccaca

SEQ ID NO: 147472 - RNA, 19 nt, Artificial Sequence
  Description of Artificial Sequence: Synthetic oligonucleotide
  Sense strand starting at position 266 of SEQ ID NO: 1892
cugagaaauuauucccugu

SEQ ID NO: 147473 - RNA, 19 nt, Artificial Sequence
  Description of Artificial Sequence: Synthetic oligonucleotide
  Antisense strand to SEQ ID NO: 147472
acagggaauaauuucucag

SEQ ID NO: 147474 - RNA, 19 nt, Artificial Sequence
  Description of Artificial Sequence: Synthetic oligonucleotide
  Sense strand starting at position 514 of SEQ ID NO: 1892
uguaucuuaccuggaggau

SEQ ID NO: 147475 - RNA, 19 nt, Artificial Sequence
  Description of Artificial Sequence: Synthetic oligonucleotide
  Antisense strand to SEQ ID NO: 147474
auccuccagguaagauaca

SEQ ID NO: 147476 - RNA, 19 nt, Artificial Sequence
  Description of Artificial Sequence: Synthetic oligonucleotide
  Sense strand starting at position 523 of SEQ ID NO: 1892
ccuggaggaugucuccaaa

SEQ ID NO: 147477 - RNA, 19 nt, Artificial Sequence
  Description of Artificial Sequence: Synthetic oligonucleotide
  Antisense strand to SEQ ID NO: 147476
uuuggagacauccuccagg

SEQ ID NO: 147478 - RNA, 19 nt, Artificial Sequence
  Description of Artificial Sequence: Synthetic oligonucleotide
  Sense strand starting at position 613 of SEQ ID NO: 1892
uguggaauacgucaaucac

SEQ ID NO: 147479 - RNA, 19 nt, Artificial Sequence
  Description of Artificial Sequence: Synthetic oligonucleotide
  Antisense strand to SEQ ID NO: 147478
gugauugacguauuccaca

SEQ ID NO: 147480 - RNA, 19 nt, Artificial Sequence
  Description of Artificial Sequence: Synthetic oligonucleotide
  Sense strand starting at position 1037 of SEQ ID NO: 1892
aauagaagccagcauagua

SEQ ID NO: 147481 - RNA, 19 nt, Artificial Sequence
  Description of Artificial Sequence: Synthetic oligonucleotide
  Antisense strand to SEQ ID NO: 147480
uacuaugcuggcuucuauu

SEQ ID NO: 147482 - RNA, 19 nt, Artificial Sequence
  Description of Artificial Sequence: Synthetic oligonucleotide
  Sense strand starting at position 1047 of SEQ ID NO: 1892
agcauaguagggcauaauu

SEQ ID NO: 147483 - RNA, 19 nt, Artificial Sequence
  Description of Artificial Sequence: Synthetic oligonucleotide
  Antisense strand to SEQ ID NO: 147482
aauuaugcccuacuaugcu

SEQ ID NO: 147484 - RNA, 19 nt, Artificial Sequence
  Description of Artificial Sequence: Synthetic oligonucleotide
  Sense strand starting at position 1729 of SEQ ID NO: 1892
uugggaugccuaggacaca

SEQ ID NO: 147485 - RNA, 19 nt, Artificial Sequence
  Description of Artificial Sequence: Synthetic oligonucleotide
  Antisense strand to SEQ ID NO: 147484
uguguccuaggcaucccaa

SEQ ID NO: 147486 - RNA, 19 nt, Artificial Sequence
  Description of Artificial Sequence: Synthetic oligonucleotide
  Sense strand starting at position 1800 of SEQ ID NO: 1892
auugucauauucucagaua

SEQ ID NO: 147487 - RNA, 19 nt, Artificial Sequence
  Description of Artificial Sequence: Synthetic oligonucleotide
  Antisense strand to SEQ ID NO: 147486
uaucugagaauaugacaau

SEQ ID NO: 147488 - RNA, 19 nt, Artificial Sequence
  Description of Artificial Sequence: Synthetic oligonucleotide
  Sense strand starting at position 1850 of SEQ ID NO: 1892
agcuguuacccacaggaau

SEQ ID NO: 147489 - RNA, 19 nt, Artificial Sequence
  Description of Artificial Sequence: Synthetic oligonucleotide
  Antisense strand to SEQ ID NO: 147488
auuccuguggguaacagcu

SEQ ID NO: 147490 - RNA, 19 nt, Artificial Sequence
  Description of Artificial Sequence: Synthetic oligonucleotide
  Sense strand starting at position 1911 of SEQ ID NO: 1892
gagagccuuguagauacua

SEQ ID NO: 147491 - RNA, 19 nt, Artificial Sequence
  Description of Artificial Sequence: Synthetic oligonucleotide
  Antisense strand to SEQ ID NO: 147490
uaguaucuacaaggcucuc

SEQ ID NO: 147492 - RNA, 19 nt, Artificial Sequence
  Description of Artificial Sequence: Synthetic oligonucleotide
  Sense strand starting at position 2224 of SEQ ID NO: 1892
ccauuuaauuaagagaaug

SEQ ID NO: 147493 - RNA, 19 nt, Artificial Sequence
  Description of Artificial Sequence: Synthetic oligonucleotide
  Antisense strand to SEQ ID NO: 147492
cauucucuuaauuaaaugg

SEQ ID NO: 147494 - RNA, 19 nt, Artificial Sequence
  Description of Artificial Sequence: Synthetic oligonucleotide
  Sense strand starting at position 2362 of SEQ ID NO: 1892
gaagaaugcuaucuaugug

SEQ ID NO: 147495 - RNA, 19 nt, Artificial Sequence
  Description of Artificial Sequence: Synthetic oligonucleotide
  Antisense strand to SEQ ID NO: 147494
cacauagauagcauucuuc

SEQ ID NO: 147496 - RNA, 19 nt, Artificial Sequence
  Description of Artificial Sequence: Synthetic oligonucleotide
  Sense strand starting at position 2483 of SEQ ID NO: 1892
gcugguagauauuuggcua

SEQ ID NO: 147497 - RNA, 19 nt, Artificial Sequence
  Description of Artificial Sequence: Synthetic oligonucleotide
  Antisense strand to SEQ ID NO: 147496
uagccaaauaucuaccagc

SEQ ID NO: 147498 - RNA, 19 nt, Artificial Sequence
  Description of Artificial Sequence: Synthetic oligonucleotide
  Sense strand starting at position 2657 of SEQ ID NO: 1892
guuugaauugagggacauc

SEQ ID NO: 147499 - RNA, 19 nt, Artificial Sequence
  Description of Artificial Sequence: Synthetic oligonucleotide
  Antisense strand to SEQ ID NO: 147498
gaugucccucaauucaaac

SEQ ID NO: 147500 - RNA, 19 nt, Artificial Sequence
  Description of Artificial Sequence: Synthetic oligonucleotide
  Sense strand starting at position 2684 of SEQ ID NO: 1892
uuaugauaucugugagaga

SEQ ID NO: 147501 - RNA, 19 nt, Artificial Sequence
  Description of Artificial Sequence: Synthetic oligonucleotide
  Antisense strand to SEQ ID NO: 147500
ucucucacagauaucauaa

SEQ ID NO: 147502 - RNA, 19 nt, Artificial Sequence
  Description of Artificial Sequence: Synthetic oligonucleotide
  Sense strand starting at position 2837 of SEQ ID NO: 1892
ugaagaauuguauguaagg

SEQ ID NO: 147503 - RNA, 19 nt, Artificial Sequence
  Description of Artificial Sequence: Synthetic oligonucleotide
  Antisense strand to SEQ ID NO: 147502
ccuuacauacaauucuuca

SEQ ID NO: 147504 - RNA, 19 nt, Artificial Sequence
  Description of Artificial Sequence: Synthetic oligonucleotide
  Sense strand starting at position 2838 of SEQ ID NO: 1892
gaagaauuguauguaaggu

SEQ ID NO: 147505 - RNA, 19 nt, Artificial Sequence
  Description of Artificial Sequence: Synthetic oligonucleotide
  Antisense strand to SEQ ID NO: 147504
accuuacauacaauucuuc

SEQ ID NO: 147506 - RNA, 19 nt, Artificial Sequence
  Description of Artificial Sequence: Synthetic oligonucleotide
  Sense strand starting at position 3091 of SEQ ID NO: 1892
cuaagugcugaguauuaga

SEQ ID NO: 147507 - RNA, 19 nt, Artificial Sequence
  Description of Artificial Sequence: Synthetic oligonucleotide
  Antisense strand to SEQ ID NO: 147506
ucuaauacucagcacuuag

SEQ ID NO: 147508 - RNA, 19 nt, Artificial Sequence
  Description of Artificial Sequence: Synthetic oligonucleotide
  Sense strand starting at position 3170 of SEQ ID NO: 1892
cauguuguuccugaaagga

SEQ ID NO: 147509 - RNA, 19 nt, Artificial Sequence
  Description of Artificial Sequence: Synthetic oligonucleotide
  Antisense strand to SEQ ID NO: 147508
uccuuucaggaacaacaug

SEQ ID NO: 147510 - RNA, 19 nt, Artificial Sequence
  Description of Artificial Sequence: Synthetic oligonucleotide
  Sense strand starting at position 3289 of SEQ ID NO: 1892
cuguguugagcagagggau

SEQ ID NO: 147511 - RNA, 19 nt, Artificial Sequence
  Description of Artificial Sequence: Synthetic oligonucleotide
  Antisense strand to SEQ ID NO: 147510
aucccucugcucaacacag

SEQ ID NO: 147512 - RNA, 19 nt, Artificial Sequence
  Description of Artificial Sequence: Synthetic oligonucleotide
  Sense strand starting at position 3361 of SEQ ID NO: 1892
agggaaaucuagccucuua

SEQ ID NO: 147513 - RNA, 19 nt, Artificial Sequence
  Description of Artificial Sequence: Synthetic oligonucleotide
  Antisense strand to SEQ ID NO: 147512
uaagaggcuagauuucccu

SEQ ID NO: 147514 - RNA, 19 nt, Artificial Sequence
  Description of Artificial Sequence: Synthetic oligonucleotide
  Sense strand starting at position 3480 of SEQ ID NO: 1892
acuccagaccgauaugcuu

SEQ ID NO: 147515 - RNA, 19 nt, Artificial Sequence
  Description of Artificial Sequence: Synthetic oligonucleotide
  Antisense strand to SEQ ID NO: 147514
aagcauaucggucuggagu

SEQ ID NO: 147516 - RNA, 19 nt, Artificial Sequence
  Description of Artificial Sequence: Synthetic oligonucleotide
  Sense strand starting at position 3501 of SEQ ID NO: 1892
ugagacauucucugaggca

SEQ ID NO: 147517 - RNA, 19 nt, Artificial Sequence
  Description of Artificial Sequence: Synthetic oligonucleotide
  Antisense strand to SEQ ID NO: 147516
ugccucagagaaugucuca

SEQ ID NO: 147518 - RNA, 19 nt, Artificial Sequence
  Description of Artificial Sequence: Synthetic oligonucleotide
  Sense strand starting at position 3597 of SEQ ID NO: 1892
aagcauuauuuagaggaag

SEQ ID NO: 147519 - RNA, 19 nt, Artificial Sequence
  Description of Artificial Sequence: Synthetic oligonucleotide
  Antisense strand to SEQ ID NO: 147518
cuuccucuaaauaaugcuu

SEQ ID NO: 147520 - RNA, 19 nt, Artificial Sequence
  Description of Artificial Sequence: Synthetic oligonucleotide
  Sense strand starting at position 3668 of SEQ ID NO: 1892
aggaguuucccaggacaug

SEQ ID NO: 147521 - RNA, 19 nt, Artificial Sequence
  Description of Artificial Sequence: Synthetic oligonucleotide
  Antisense strand to SEQ ID NO: 147520
cauguccugggaaacuccu

SEQ ID NO: 147522 - RNA, 19 nt, Artificial Sequence
  Description of Artificial Sequence: Synthetic oligonucleotide
  Sense strand starting at position 3684 of SEQ ID NO: 1892
augagacuuucagugggau

SEQ ID NO: 147523 - RNA, 19 nt, Artificial Sequence
  Description of Artificial Sequence: Synthetic oligonucleotide
  Antisense strand to SEQ ID NO: 147522
aucccacugaaagucucau

SEQ ID NO: 147524 - RNA, 19 nt, Artificial Sequence
  Description of Artificial Sequence: Synthetic oligonucleotide
  Sense strand starting at position 3685 of SEQ ID NO: 1892
ugagacuuucagugggaua

SEQ ID NO: 147525 - RNA, 19 nt, Artificial Sequence
  Description of Artificial Sequence: Synthetic oligonucleotide
  Antisense strand to SEQ ID NO: 147524
uaucccacugaaagucuca

SEQ ID NO: 147526 - RNA, 19 nt, Artificial Sequence
  Description of Artificial Sequence: Synthetic oligonucleotide
  Sense strand starting at position 3698 of SEQ ID NO: 1892
gggauaauucugggcaauc

SEQ ID NO: 147527 - RNA, 19 nt, Artificial Sequence
  Description of Artificial Sequence: Synthetic oligonucleotide
  Antisense strand to SEQ ID NO: 147526
gauugcccagaauuauccc

SEQ ID NO: 147528 - RNA, 19 nt, Artificial Sequence
  Description of Artificial Sequence: Synthetic oligonucleotide
  Sense strand starting at position 3699 of SEQ ID NO: 1892
ggauaauucugggcaaucu

SEQ ID NO: 147529 - RNA, 19 nt, Artificial Sequence
  Description of Artificial Sequence: Synthetic oligonucleotide
  Antisense strand to SEQ ID NO: 147528
agauugcccagaauuaucc

SEQ ID NO: 147530 - RNA, 19 nt, Artificial Sequence
  Description of Artificial Sequence: Synthetic oligonucleotide
  Sense strand starting at position 3736 of SEQ ID NO: 1892
uaaacugugguguacaaga

SEQ ID NO: 147531 - RNA, 19 nt, Artificial Sequence
  Description of Artificial Sequence: Synthetic oligonucleotide
  Antisense strand to SEQ ID NO: 147530
ucuuguacaccacaguuua

SEQ ID NO: 147532 - RNA, 19 nt, Artificial Sequence
  Description of Artificial Sequence: Synthetic oligonucleotide
  Sense strand starting at position 3738 of SEQ ID NO: 1892
aacugugguguacaagaua

SEQ ID NO: 147533 - RNA, 19 nt, Artificial Sequence
  Description of Artificial Sequence: Synthetic oligonucleotide
  Antisense strand to SEQ ID NO: 147532
uaucuuguacaccacaguu

SEQ ID NO: 147534 - RNA, 19 nt, Artificial Sequence
  Description of Artificial Sequence: Synthetic oligonucleotide
  Sense strand starting at position 3741 of SEQ ID NO: 1892
ugugguguacaagauaaau

SEQ ID NO: 147535 - RNA, 19 nt, Artificial Sequence
  Description of Artificial Sequence: Synthetic oligonucleotide
  Antisense strand to SEQ ID NO: 147534
auuuaucuuguacaccaca

SEQ ID NO: 147536 - RNA, 19 nt, Artificial Sequence
  Description of Artificial Sequence: Synthetic oligonucleotide
  Sense strand starting at position 3788 of SEQ ID NO: 1892
caguuaggagucuauuaua

SEQ ID NO: 147537 - RNA, 19 nt, Artificial Sequence
  Description of Artificial Sequence: Synthetic oligonucleotide
  Antisense strand to SEQ ID NO: 147536
uauaauagacuccuaacug

SEQ ID NO: 147538 - RNA, 19 nt, Artificial Sequence
  Description of Artificial Sequence: Synthetic oligonucleotide
  Sense strand starting at position 3802 of SEQ ID NO: 1892
uuauauggcaugggugaga

SEQ ID NO: 147539 - RNA, 19 nt, Artificial Sequence
  Description of Artificial Sequence: Synthetic oligonucleotide
  Antisense strand to SEQ ID NO: 147538
ucucacccaugccauauaa

SEQ ID NO: 147540 - RNA, 19 nt, Artificial Sequence
  Description of Artificial Sequence: Synthetic oligonucleotide
  Sense strand starting at position 3953 of SEQ ID NO: 1892
auuccaagucuuuaagucu

SEQ ID NO: 147541 - RNA, 19 nt, Artificial Sequence
  Description of Artificial Sequence: Synthetic oligonucleotide
  Antisense strand to SEQ ID NO: 147540
agacuuaaagacuuggaau

SEQ ID NO: 147542 - RNA, 19 nt, Artificial Sequence
  Description of Artificial Sequence: Synthetic oligonucleotide
  Sense strand starting at position 3959 of SEQ ID NO: 1892
agucuuuaagucuagauaa

SEQ ID NO: 147543 - RNA, 19 nt, Artificial Sequence
  Description of Artificial Sequence: Synthetic oligonucleotide
  Antisense strand to SEQ ID NO: 147542
uuaucuagacuuaaagacu

SEQ ID NO: 147544 - RNA, 19 nt, Artificial Sequence
  Description of Artificial Sequence: Synthetic oligonucleotide
  Sense strand starting at position 3978 of SEQ ID NO: 1892
cuaguagaacuaugguaca

SEQ ID NO: 147545 - RNA, 19 nt, Artificial Sequence
  Description of Artificial Sequence: Synthetic oligonucleotide
  Antisense strand to SEQ ID NO: 147544
uguaccauaguucuacuag

SEQ ID NO: 147546 - RNA, 19 nt, Artificial Sequence
  Description of Artificial Sequence: Synthetic oligonucleotide
  Sense strand starting at position 201 of SEQ ID NO: 1893
gccucuuacugucuagaag

SEQ ID NO: 147547 - RNA, 19 nt, Artificial Sequence
  Description of Artificial Sequence: Synthetic oligonucleotide
  Antisense strand to SEQ ID NO: 147546
cuucuagacaguaagaggc

SEQ ID NO: 147548 - RNA, 19 nt, Artificial Sequence
  Description of Artificial Sequence: Synthetic oligonucleotide
  Sense strand starting at position 202 of SEQ ID NO: 1893
ccucuuacugucuagaaga

SEQ ID NO: 147549 - RNA, 19 nt, Artificial Sequence
  Description of Artificial Sequence: Synthetic oligonucleotide
  Antisense strand to SEQ ID NO: 147548
ucuucuagacaguaagagg

SEQ ID NO: 147550 - RNA, 19 nt, Artificial Sequence
  Description of Artificial Sequence: Synthetic oligonucleotide
  Sense strand starting at position 448 of SEQ ID NO: 1893
uggauaggccuuugcaaca

SEQ ID NO: 147551 - RNA, 19 nt, Artificial Sequence
  Description of Artificial Sequence: Synthetic oligonucleotide
  Antisense strand to SEQ ID NO: 147550
uguugcaaaggccuaucca

SEQ ID NO: 147552 - RNA, 19 nt, Artificial Sequence
  Description of Artificial Sequence: Synthetic oligonucleotide
  Sense strand starting at position 517 of SEQ ID NO: 1893
agcucacuccgcguauaau

SEQ ID NO: 147553 - RNA, 19 nt, Artificial Sequence
  Description of Artificial Sequence: Synthetic oligonucleotide
  Antisense strand to SEQ ID NO: 147552
auuauacgcggagugagcu

SEQ ID NO: 147554 - RNA, 19 nt, Artificial Sequence
  Description of Artificial Sequence: Synthetic oligonucleotide
  Sense strand starting at position 529 of SEQ ID NO: 1893
guauaauggguuuggcuga

SEQ ID NO: 147555 - RNA, 19 nt, Artificial Sequence
  Description of Artificial Sequence: Synthetic oligonucleotide
  Antisense strand to SEQ ID NO: 147554
ucagccaaacccauuauac

SEQ ID NO: 147556 - RNA, 19 nt, Artificial Sequence
  Description of Artificial Sequence: Synthetic oligonucleotide
  Sense strand starting at position 1054 of SEQ ID NO: 1893
ggugcaaucucacuaccca

SEQ ID NO: 147557 - RNA, 19 nt, Artificial Sequence
  Description of Artificial Sequence: Synthetic oligonucleotide
  Antisense strand to SEQ ID NO: 147556
uggguagugagauugcacc

SEQ ID NO: 147558 - RNA, 19 nt, Artificial Sequence
  Description of Artificial Sequence: Synthetic oligonucleotide
  Sense strand starting at position 1077 of SEQ ID NO: 1893
ccaguaaugcuacagcgaa

SEQ ID NO: 147559 - RNA, 19 nt, Artificial Sequence
  Description of Artificial Sequence: Synthetic oligonucleotide
  Antisense strand to SEQ ID NO: 147558
uucgcuguagcauuacugg

SEQ ID NO: 147560 - RNA, 19 nt, Artificial Sequence
  Description of Artificial Sequence: Synthetic oligonucleotide
  Sense strand starting at position 1236 of SEQ ID NO: 1893
ggagggaguccacgaaguu

SEQ ID NO: 147561 - RNA, 19 nt, Artificial Sequence
  Description of Artificial Sequence: Synthetic oligonucleotide
  Antisense strand to SEQ ID NO: 147560
aacuucguggacucccucc

SEQ ID NO: 147562 - RNA, 19 nt, Artificial Sequence
  Description of Artificial Sequence: Synthetic oligonucleotide
  Sense strand starting at position 1246 of SEQ ID NO: 1893
cacgaaguucuccaaguga

SEQ ID NO: 147563 - RNA, 19 nt, Artificial Sequence
  Description of Artificial Sequence: Synthetic oligonucleotide
  Antisense strand to SEQ ID NO: 147562
ucacuuggagaacuucgug

SEQ ID NO: 147564 - RNA, 19 nt, Artificial Sequence
  Description of Artificial Sequence: Synthetic oligonucleotide
  Sense strand starting at position 1275 of SEQ ID NO: 1893
guacgucucaguuucguaa

SEQ ID NO: 147565 - RNA, 19 nt, Artificial Sequence
  Description of Artificial Sequence: Synthetic oligonucleotide
  Antisense strand to SEQ ID NO: 147564
uuacgaaacugagacguac

SEQ ID NO: 147566 - RNA, 19 nt, Artificial Sequence
  Description of Artificial Sequence: Synthetic oligonucleotide
  Sense strand starting at position 2061 of SEQ ID NO: 1893
gccggaaucaccugacuca

SEQ ID NO: 147567 - RNA, 19 nt, Artificial Sequence
  Description of Artificial Sequence: Synthetic oligonucleotide
  Antisense strand to SEQ ID NO: 147566
ugagucaggugauuccggc

SEQ ID NO: 147568 - RNA, 19 nt, Artificial Sequence
  Description of Artificial Sequence: Synthetic oligonucleotide
  Sense strand starting at position 2254 of SEQ ID NO: 1893
ggaagaauugauuguccuc

SEQ ID NO: 147569 - RNA, 19 nt, Artificial Sequence
  Description of Artificial Sequence: Synthetic oligonucleotide
  Antisense strand to SEQ ID NO: 147568
gaggacaaucaauucuucc

SEQ ID NO: 147570 - RNA, 19 nt, Artificial Sequence
  Description of Artificial Sequence: Synthetic oligonucleotide
  Sense strand starting at position 2257 of SEQ ID NO: 1893
agaauugauuguccucauc

SEQ ID NO: 147571 - RNA, 19 nt, Artificial Sequence
  Description of Artificial Sequence: Synthetic oligonucleotide
  Antisense strand to SEQ ID NO: 147570
gaugaggacaaucaauucu

SEQ ID NO: 147572 - RNA, 19 nt, Artificial Sequence
  Description of Artificial Sequence: Synthetic oligonucleotide
  Sense strand starting at position 2419 of SEQ ID NO: 1893
aaguaaccucgcuacgaaa

SEQ ID NO: 147573 - RNA, 19 nt, Artificial Sequence
  Description of Artificial Sequence: Synthetic oligonucleotide
  Antisense strand to SEQ ID NO: 147572
uuucguagcgagguuacuu

SEQ ID NO: 147574 - RNA, 19 nt, Artificial Sequence
  Description of Artificial Sequence: Synthetic oligonucleotide
  Sense strand starting at position 2432 of SEQ ID NO: 1893
acgaaauauuaugugggaa

SEQ ID NO: 147575 - RNA, 19 nt, Artificial Sequence
  Description of Artificial Sequence: Synthetic oligonucleotide
  Antisense strand to SEQ ID NO: 147574
uucccacauaauauuucgu

SEQ ID NO: 147576 - RNA, 19 nt, Artificial Sequence
  Description of Artificial Sequence: Synthetic oligonucleotide
  Sense strand starting at position 2433 of SEQ ID NO: 1893
cgaaauauuaugugggaag

SEQ ID NO: 147577 - RNA, 19 nt, Artificial Sequence
  Description of Artificial Sequence: Synthetic oligonucleotide
  Antisense strand to SEQ ID NO: 147576
cuucccacauaauauuucg

SEQ ID NO: 147578 - RNA, 19 nt, Artificial Sequence
  Description of Artificial Sequence: Synthetic oligonucleotide
  Sense strand starting at position 2435 of SEQ ID NO: 1893
aaauauuaugugggaaggu

SEQ ID NO: 147579 - RNA, 19 nt, Artificial Sequence
  Description of Artificial Sequence: Synthetic oligonucleotide
  Antisense strand to SEQ ID NO: 147578
accuucccacauaauauuu

SEQ ID NO: 147580 - RNA, 19 nt, Artificial Sequence
  Description of Artificial Sequence: Synthetic oligonucleotide
  Sense strand starting at position 2445 of SEQ ID NO: 1893
ugggaaggucacggauaaa

SEQ ID NO: 147581 - RNA, 19 nt, Artificial Sequence
  Description of Artificial Sequence: Synthetic oligonucleotide
  Antisense strand to SEQ ID NO: 147580
uuuauccgugaccuuccca

SEQ ID NO: 147582 - RNA, 19 nt, Artificial Sequence
  Description of Artificial Sequence: Synthetic oligonucleotide
  Sense strand starting at position 2458 of SEQ ID NO: 1893
gauaaauaaugcucgggag

SEQ ID NO: 147583 - RNA, 19 nt, Artificial Sequence
  Description of Artificial Sequence: Synthetic oligonucleotide
  Antisense strand to SEQ ID NO: 147582
cucccgagcauuauuuauc

SEQ ID NO: 147584 - RNA, 19 nt, Artificial Sequence
  Description of Artificial Sequence: Synthetic oligonucleotide
  Sense strand starting at position 2459 of SEQ ID NO: 1893
auaaauaaugcucgggagu

SEQ ID NO: 147585 - RNA, 19 nt, Artificial Sequence
  Description of Artificial Sequence: Synthetic oligonucleotide
  Antisense strand to SEQ ID NO: 147584
acucccgagcauuauuuau

SEQ ID NO: 147586 - RNA, 19 nt, Artificial Sequence
  Description of Artificial Sequence: Synthetic oligonucleotide
  Sense strand starting at position 2460 of SEQ ID NO: 1893
uaaauaaugcucgggaguu

SEQ ID NO: 147587 - RNA, 19 nt, Artificial Sequence
  Description of Artificial Sequence: Synthetic oligonucleotide
  Antisense strand to SEQ ID NO: 147586
aacucccgagcauuauuua

SEQ ID NO: 147588 - RNA, 19 nt, Artificial Sequence
  Description of Artificial Sequence: Synthetic oligonucleotide
  Sense strand starting at position 2462 of SEQ ID NO: 1893
aauaaugcucgggaguuga

SEQ ID NO: 147589 - RNA, 19 nt, Artificial Sequence
  Description of Artificial Sequence: Synthetic oligonucleotide
  Antisense strand to SEQ ID NO: 147588
ucaacucccgagcauuauu

SEQ ID NO: 147590 - RNA, 19 nt, Artificial Sequence
  Description of Artificial Sequence: Synthetic oligonucleotide
  Sense strand starting at position 2470 of SEQ ID NO: 1893
ucgggaguugaaugagaaa

SEQ ID NO: 147591 - RNA, 19 nt, Artificial Sequence
  Description of Artificial Sequence: Synthetic oligonucleotide
  Antisense strand to SEQ ID NO: 147590
uuucucauucaacucccga

SEQ ID NO: 147592 - RNA, 19 nt, Artificial Sequence
  Description of Artificial Sequence: Synthetic oligonucleotide
  Sense strand starting at position 2494 of SEQ ID NO: 1893
ugagcagaucuagguggau

SEQ ID NO: 147593 - RNA, 19 nt, Artificial Sequence
  Description of Artificial Sequence: Synthetic oligonucleotide
  Antisense strand to SEQ ID NO: 147592
auccaccuagaucugcuca

SEQ ID NO: 147594 - RNA, 19 nt, Artificial Sequence
  Description of Artificial Sequence: Synthetic oligonucleotide
  Sense strand starting at position 2514 of SEQ ID NO: 1893
gauagauugggaugugcaa

SEQ ID NO: 147595 - RNA, 19 nt, Artificial Sequence
  Description of Artificial Sequence: Synthetic oligonucleotide
  Antisense strand to SEQ ID NO: 147594
uugcacaucccaaucuauc

SEQ ID NO: 147596 - RNA, 19 nt, Artificial Sequence
  Description of Artificial Sequence: Synthetic oligonucleotide
  Sense strand starting at position 2585 of SEQ ID NO: 1893
augggucaccgugauaguu

SEQ ID NO: 147597 - RNA, 19 nt, Artificial Sequence
  Description of Artificial Sequence: Synthetic oligonucleotide
  Antisense strand to SEQ ID NO: 147596
aacuaucacggugacccau

SEQ ID NO: 147598 - RNA, 19 nt, Artificial Sequence
  Description of Artificial Sequence: Synthetic oligonucleotide
  Sense strand starting at position 2750 of SEQ ID NO: 1893
gucaaagucuacucuagga

SEQ ID NO: 147599 - RNA, 19 nt, Artificial Sequence
  Description of Artificial Sequence: Synthetic oligonucleotide
  Antisense strand to SEQ ID NO: 147598
uccuagaguagacuuugac

SEQ ID NO: 147600 - RNA, 19 nt, Artificial Sequence
  Description of Artificial Sequence: Synthetic oligonucleotide
  Sense strand starting at position 2865 of SEQ ID NO: 1893
caccaaauauguccgagaa

SEQ ID NO: 147601 - RNA, 19 nt, Artificial Sequence
  Description of Artificial Sequence: Synthetic oligonucleotide
  Antisense strand to SEQ ID NO: 147600
uucucggacauauuuggug

SEQ ID NO: 147602 - RNA, 19 nt, Artificial Sequence
  Description of Artificial Sequence: Synthetic oligonucleotide
  Sense strand starting at position 2866 of SEQ ID NO: 1893
accaaauauguccgagaaa

SEQ ID NO: 147603 - RNA, 19 nt, Artificial Sequence
  Description of Artificial Sequence: Synthetic oligonucleotide
  Antisense strand to SEQ ID NO: 147602
uuucucggacauauuuggu

SEQ ID NO: 147604 - RNA, 19 nt, Artificial Sequence
  Description of Artificial Sequence: Synthetic oligonucleotide
  Sense strand starting at position 2914 of SEQ ID NO: 1893
ggcucuagaacuggaaguu

SEQ ID NO: 147605 - RNA, 19 nt, Artificial Sequence
  Description of Artificial Sequence: Synthetic oligonucleotide
  Antisense strand to SEQ ID NO: 147604
aacuuccaguucuagagcc

SEQ ID NO: 147606 - RNA, 19 nt, Artificial Sequence
  Description of Artificial Sequence: Synthetic oligonucleotide
  Sense strand starting at position 2915 of SEQ ID NO: 1893
gcucuagaacuggaaguuu

SEQ ID NO: 147607 - RNA, 19 nt, Artificial Sequence
  Description of Artificial Sequence: Synthetic oligonucleotide
  Antisense strand to SEQ ID NO: 147606
aaacuuccaguucuagagc

SEQ ID NO: 147608 - RNA, 19 nt, Artificial Sequence
  Description of Artificial Sequence: Synthetic oligonucleotide
  Sense strand starting at position 3011 of SEQ ID NO: 1893
gagacugacuucuugauua

SEQ ID NO: 147609 - RNA, 19 nt, Artificial Sequence
  Description of Artificial Sequence: Synthetic oligonucleotide
  Antisense strand to SEQ ID NO: 147608
uaaucaagaagucagucuc

SEQ ID NO: 147610 - RNA, 19 nt, Artificial Sequence
  Description of Artificial Sequence: Synthetic oligonucleotide
  Sense strand starting at position 3015 of SEQ ID NO: 1893
cugacuucuugauuaugaa

SEQ ID NO: 147611 - RNA, 19 nt, Artificial Sequence
  Description of Artificial Sequence: Synthetic oligonucleotide
  Antisense strand to SEQ ID NO: 147610
uucauaaucaagaagucag

SEQ ID NO: 147612 - RNA, 19 nt, Artificial Sequence
  Description of Artificial Sequence: Synthetic oligonucleotide
  Sense strand starting at position 3151 of SEQ ID NO: 1893
acucuauagugucuaauag

SEQ ID NO: 147613 - RNA, 19 nt, Artificial Sequence
  Description of Artificial Sequence: Synthetic oligonucleotide
  Antisense strand to SEQ ID NO: 147612
cuauuagacacuauagagu

SEQ ID NO: 147614 - RNA, 19 nt, Artificial Sequence
  Description of Artificial Sequence: Synthetic oligonucleotide
  Sense strand starting at position 3152 of SEQ ID NO: 1893
cucuauagugucuaauaga

SEQ ID NO: 147615 - RNA, 19 nt, Artificial Sequence
  Description of Artificial Sequence: Synthetic oligonucleotide
  Antisense strand to SEQ ID NO: 147614
ucuauuagacacuauagag

SEQ ID NO: 147616 - RNA, 19 nt, Artificial Sequence
  Description of Artificial Sequence: Synthetic oligonucleotide
  Sense strand starting at position 3183 of SEQ ID NO: 1893
acuuaaauaguucgaaggu

SEQ ID NO: 147617 - RNA, 19 nt, Artificial Sequence
  Description of Artificial Sequence: Synthetic oligonucleotide
  Antisense strand to SEQ ID NO: 147616
accuucgaacuauuuaagu

SEQ ID NO: 147618 - RNA, 19 nt, Artificial Sequence
  Description of Artificial Sequence: Synthetic oligonucleotide
  Sense strand starting at position 3229 of SEQ ID NO: 1893
ccaacuccacugugguaaa

SEQ ID NO: 147619 - RNA, 19 nt, Artificial Sequence
  Description of Artificial Sequence: Synthetic oligonucleotide
  Antisense strand to SEQ ID NO: 147618
uuuaccacaguggaguugg

SEQ ID NO: 147620 - RNA, 19 nt, Artificial Sequence
  Description of Artificial Sequence: Synthetic oligonucleotide
  Sense strand starting at position 3240 of SEQ ID NO: 1893
gugguaaaccuuuguuuaa

SEQ ID NO: 147621 - RNA, 19 nt, Artificial Sequence
  Description of Artificial Sequence: Synthetic oligonucleotide
  Antisense strand to SEQ ID NO: 147620
uuaaacaaagguuuaccac

SEQ ID NO: 147622 - RNA, 19 nt, Artificial Sequence
  Description of Artificial Sequence: Synthetic oligonucleotide
  Sense strand starting at position 3241 of SEQ ID NO: 1893
ugguaaaccuuuguuuaaa

SEQ ID NO: 147623 - RNA, 19 nt, Artificial Sequence
  Description of Artificial Sequence: Synthetic oligonucleotide
  Antisense strand to SEQ ID NO: 147622
uuuaaacaaagguuuacca

SEQ ID NO: 147624 - RNA, 19 nt, Artificial Sequence
  Description of Artificial Sequence: Synthetic oligonucleotide
  Sense strand starting at position 3760 of SEQ ID NO: 1893
auagacauguucuuuaucu

SEQ ID NO: 147625 - RNA, 19 nt, Artificial Sequence
  Description of Artificial Sequence: Synthetic oligonucleotide
  Antisense strand to SEQ ID NO: 147624
agauaaagaacaugucuau

SEQ ID NO: 147626 - RNA, 19 nt, Artificial Sequence
  Description of Artificial Sequence: Synthetic oligonucleotide
  Sense strand starting at position 3684 of SEQ ID NO: 1894
aucuaucaguuguugaaga

SEQ ID NO: 147627 - RNA, 19 nt, Artificial Sequence
  Description of Artificial Sequence: Synthetic oligonucleotide
  Antisense strand to SEQ ID NO: 147626
ucuucaacaacugauagau

SEQ ID NO: 147628 - RNA, 19 nt, Artificial Sequence
  Description of Artificial Sequence: Synthetic oligonucleotide
  Sense strand starting at position 3680 of SEQ ID NO: 1894
gagaaucuaucaguuguug

SEQ ID NO: 147629 - RNA, 19 nt, Artificial Sequence
  Description of Artificial Sequence: Synthetic oligonucleotide
  Antisense strand to SEQ ID NO: 147628
caacaacugauagauucuc

SEQ ID NO: 147630 - RNA, 19 nt, Artificial Sequence
  Description of Artificial Sequence: Synthetic oligonucleotide
  Sense strand starting at position 3447 of SEQ ID NO: 1894
gugcuuuaugacgaguaca

SEQ ID NO: 147631 - RNA, 19 nt, Artificial Sequence
  Description of Artificial Sequence: Synthetic oligonucleotide
  Antisense strand to SEQ ID NO: 147630
uguacucgucauaaagcac

SEQ ID NO: 147632 - RNA, 19 nt, Artificial Sequence
  Description of Artificial Sequence: Synthetic oligonucleotide
  Sense strand starting at position 3441 of SEQ ID NO: 1894
ggagaugugcuuuaugacg

SEQ ID NO: 147633 - RNA, 19 nt, Artificial Sequence
  Description of Artificial Sequence: Synthetic oligonucleotide
  Antisense strand to SEQ ID NO: 147632
cgucauaaagcacaucucc

SEQ ID NO: 147634 - RNA, 19 nt, Artificial Sequence
  Description of Artificial Sequence: Synthetic oligonucleotide
  Sense strand starting at position 3418 of SEQ ID NO: 1894
gauguagcauugucaacua

SEQ ID NO: 147635 - RNA, 19 nt, Artificial Sequence
  Description of Artificial Sequence: Synthetic oligonucleotide
  Antisense strand to SEQ ID NO: 147634
uaguugacaaugcuacauc

SEQ ID NO: 147636 - RNA, 19 nt, Artificial Sequence
  Description of Artificial Sequence: Synthetic oligonucleotide
  Sense strand starting at position 3359 of SEQ ID NO: 1894
ggcaauugacugugagaug

SEQ ID NO: 147637 - RNA, 19 nt, Artificial Sequence
  Description of Artificial Sequence: Synthetic oligonucleotide
  Antisense strand to SEQ ID NO: 147636
caucucacagucaauugcc

SEQ ID NO: 147638 - RNA, 19 nt, Artificial Sequence
  Description of Artificial Sequence: Synthetic oligonucleotide
  Sense strand starting at position 3357 of SEQ ID NO: 1894
guggcaauugacugugaga

SEQ ID NO: 147639 - RNA, 19 nt, Artificial Sequence
  Description of Artificial Sequence: Synthetic oligonucleotide
  Antisense strand to SEQ ID NO: 147638
ucucacagucaauugccac

SEQ ID NO: 147640 - RNA, 19 nt, Artificial Sequence
  Description of Artificial Sequence: Synthetic oligonucleotide
  Sense strand starting at position 3337 of SEQ ID NO: 1894
agaaguugccacggaagau

SEQ ID NO: 147641 - RNA, 19 nt, Artificial Sequence
  Description of Artificial Sequence: Synthetic oligonucleotide
  Antisense strand to SEQ ID NO: 147640
aucuuccguggcaacuucu

SEQ ID NO: 147642 - RNA, 19 nt, Artificial Sequence
  Description of Artificial Sequence: Synthetic oligonucleotide
  Sense strand starting at position 3314 of SEQ ID NO: 1894
gaauaaaugcuccggagca

SEQ ID NO: 147643 - RNA, 19 nt, Artificial Sequence
  Description of Artificial Sequence: Synthetic oligonucleotide
  Antisense strand to SEQ ID NO: 147642
ugcuccggagcauuuauuc

SEQ ID NO: 147644 - RNA, 19 nt, Artificial Sequence
  Description of Artificial Sequence: Synthetic oligonucleotide
  Sense strand starting at position 3018 of SEQ ID NO: 1894
gucgauggcacuuggaaga

SEQ ID NO: 147645 - RNA, 19 nt, Artificial Sequence
  Description of Artificial Sequence: Synthetic oligonucleotide
  Antisense strand to SEQ ID NO: 147644
ucuuccaagugccaucgac

SEQ ID NO: 147646 - RNA, 19 nt, Artificial Sequence
  Description of Artificial Sequence: Synthetic oligonucleotide
  Sense strand starting at position 2928 of SEQ ID NO: 1894
cggagaggcuuucugagua

SEQ ID NO: 147647 - RNA, 19 nt, Artificial Sequence
  Description of Artificial Sequence: Synthetic oligonucleotide
  Antisense strand to SEQ ID NO: 147646
uacucagaaagccucuccg

SEQ ID NO: 147648 - RNA, 19 nt, Artificial Sequence
  Description of Artificial Sequence: Synthetic oligonucleotide
  Sense strand starting at position 2813 of SEQ ID NO: 1894
ugucccuaugucuacuuua

SEQ ID NO: 147649 - RNA, 19 nt, Artificial Sequence
  Description of Artificial Sequence: Synthetic oligonucleotide
  Antisense strand to SEQ ID NO: 147648
uaaaguagacauagggaca

SEQ ID NO: 147650 - RNA, 19 nt, Artificial Sequence
  Description of Artificial Sequence: Synthetic oligonucleotide
  Sense strand starting at position 2722 of SEQ ID NO: 1894
cauguuggacaguaggauu

SEQ ID NO: 147651 - RNA, 19 nt, Artificial Sequence
  Description of Artificial Sequence: Synthetic oligonucleotide
  Antisense strand to SEQ ID NO: 147650
aauccuacuguccaacaug

SEQ ID NO: 147652 - RNA, 19 nt, Artificial Sequence
  Description of Artificial Sequence: Synthetic oligonucleotide
  Sense strand starting at position 2636 of SEQ ID NO: 1894
gaucgagcuuaccucauuu

SEQ ID NO: 147653 - RNA, 19 nt, Artificial Sequence
  Description of Artificial Sequence: Synthetic oligonucleotide
  Antisense strand to SEQ ID NO: 147652
aaaugagguaagcucgauc

SEQ ID NO: 147654 - RNA, 19 nt, Artificial Sequence
  Description of Artificial Sequence: Synthetic oligonucleotide
  Sense strand starting at position 2620 of SEQ ID NO: 1894
ccauaaguccuacggagau

SEQ ID NO: 147655 - RNA, 19 nt, Artificial Sequence
  Description of Artificial Sequence: Synthetic oligonucleotide
  Antisense strand to SEQ ID NO: 147654
aucuccguaggacuuaugg

SEQ ID NO: 147656 - RNA, 19 nt, Artificial Sequence
  Description of Artificial Sequence: Synthetic oligonucleotide
  Sense strand starting at position 2606 of SEQ ID NO: 1894
ugaugucuuuccuuccaua

SEQ ID NO: 147657 - RNA, 19 nt, Artificial Sequence
  Description of Artificial Sequence: Synthetic oligonucleotide
  Antisense strand to SEQ ID NO: 147656
uauggaaggaaagacauca

SEQ ID NO: 147658 - RNA, 19 nt, Artificial Sequence
  Description of Artificial Sequence: Synthetic oligonucleotide
  Sense strand starting at position 2592 of SEQ ID NO: 1894
cugagagauugcucugaug

SEQ ID NO: 147659 - RNA, 19 nt, Artificial Sequence
  Description of Artificial Sequence: Synthetic oligonucleotide
  Antisense strand to SEQ ID NO: 147658
caucagagcaaucucucag

SEQ ID NO: 147660 - RNA, 19 nt, Artificial Sequence
  Description of Artificial Sequence: Synthetic oligonucleotide
  Sense strand starting at position 2490 of SEQ ID NO: 1894
gaccaaauggcuggugaau

SEQ ID NO: 147661 - RNA, 19 nt, Artificial Sequence
  Description of Artificial Sequence: Synthetic oligonucleotide
  Antisense strand to SEQ ID NO: 147660
auucaccagccauuugguc

SEQ ID NO: 147662 - RNA, 19 nt, Artificial Sequence
  Description of Artificial Sequence: Synthetic oligonucleotide
  Sense strand starting at position 2489 of SEQ ID NO: 1894
agaccaaauggcuggugaa

SEQ ID NO: 147663 - RNA, 19 nt, Artificial Sequence
  Description of Artificial Sequence: Synthetic oligonucleotide
  Antisense strand to SEQ ID NO: 147662
uucaccagccauuuggucu

SEQ ID NO: 147664 - RNA, 19 nt, Artificial Sequence
  Description of Artificial Sequence: Synthetic oligonucleotide
  Sense strand starting at position 2357 of SEQ ID NO: 1894
cuuuccuaggcggaguaua

SEQ ID NO: 147665 - RNA, 19 nt, Artificial Sequence
  Description of Artificial Sequence: Synthetic oligonucleotide
  Antisense strand to SEQ ID NO: 147664
uauacuccgccuaggaaag

SEQ ID NO: 147666 - RNA, 19 nt, Artificial Sequence
  Description of Artificial Sequence: Synthetic oligonucleotide
  Sense strand starting at position 2346 of SEQ ID NO: 1894
ccuagauguuccuuuccua

SEQ ID NO: 147667 - RNA, 19 nt, Artificial Sequence
  Description of Artificial Sequence: Synthetic oligonucleotide
  Antisense strand to SEQ ID NO: 147666
uaggaaaggaacaucuagg

SEQ ID NO: 147668 - RNA, 19 nt, Artificial Sequence
  Description of Artificial Sequence: Synthetic oligonucleotide
  Sense strand starting at position 2308 of SEQ ID NO: 1894
gguuaucuacgccauacuu

SEQ ID NO: 147669 - RNA, 19 nt, Artificial Sequence
  Description of Artificial Sequence: Synthetic oligonucleotide
  Antisense strand to SEQ ID NO: 147668
aaguauggcguagauaacc

SEQ ID NO: 147670 - RNA, 19 nt, Artificial Sequence
  Description of Artificial Sequence: Synthetic oligonucleotide
  Sense strand starting at position 2305 of SEQ ID NO: 1894
agagguuaucuacgccaua

SEQ ID NO: 147671 - RNA, 19 nt, Artificial Sequence
  Description of Artificial Sequence: Synthetic oligonucleotide
  Antisense strand to SEQ ID NO: 147670
uauggcguagauaaccucu

SEQ ID NO: 147672 - RNA, 19 nt, Artificial Sequence
  Description of Artificial Sequence: Synthetic oligonucleotide
  Sense strand starting at position 2294 of SEQ ID NO: 1894
cuggguagcccagagguua

SEQ ID NO: 147673 - RNA, 19 nt, Artificial Sequence
  Description of Artificial Sequence: Synthetic oligonucleotide
  Antisense strand to SEQ ID NO: 147672
uaaccucugggcuacccag

SEQ ID NO: 147674 - RNA, 19 nt, Artificial Sequence
  Description of Artificial Sequence: Synthetic oligonucleotide
  Sense strand starting at position 2254 of SEQ ID NO: 1894
cuggauuugugucucuauu

SEQ ID NO: 147675 - RNA, 19 nt, Artificial Sequence
  Description of Artificial Sequence: Synthetic oligonucleotide
  Antisense strand to SEQ ID NO: 147674
aauagagacacaaauccag

SEQ ID NO: 147676 - RNA, 19 nt, Artificial Sequence
  Description of Artificial Sequence: Synthetic oligonucleotide
  Sense strand starting at position 2102 of SEQ ID NO: 1894
gaaguaugcuuauccaggu

SEQ ID NO: 147677 - RNA, 19 nt, Artificial Sequence
  Description of Artificial Sequence: Synthetic oligonucleotide
  Antisense strand to SEQ ID NO: 147676
accuggauaagcauacuuc

SEQ ID NO: 147678 - RNA, 19 nt, Artificial Sequence
  Description of Artificial Sequence: Synthetic oligonucleotide
  Sense strand starting at position 1169 of SEQ ID NO: 1894
aggcuaauucuccagauuc

SEQ ID NO: 147679 - RNA, 19 nt, Artificial Sequence
  Description of Artificial Sequence: Synthetic oligonucleotide
  Antisense strand to SEQ ID NO: 147678
gaaucuggagaauuagccu

SEQ ID NO: 147680 - RNA, 19 nt, Artificial Sequence
  Description of Artificial Sequence: Synthetic oligonucleotide
  Sense strand starting at position 1167 of SEQ ID NO: 1894
agaggcuaauucuccagau

SEQ ID NO: 147681 - RNA, 19 nt, Artificial Sequence
  Description of Artificial Sequence: Synthetic oligonucleotide
  Antisense strand to SEQ ID NO: 147680
aucuggagaauuagccucu

SEQ ID NO: 147682 - RNA, 19 nt, Artificial Sequence
  Description of Artificial Sequence: Synthetic oligonucleotide
  Sense strand starting at position 1139 of SEQ ID NO: 1894
gacugaaacucauagaagg

SEQ ID NO: 147683 - RNA, 19 nt, Artificial Sequence
  Description of Artificial Sequence: Synthetic oligonucleotide
  Antisense strand to SEQ ID NO: 147682
ccuucuaugaguuucaguc

SEQ ID NO: 147684 - RNA, 19 nt, Artificial Sequence
  Description of Artificial Sequence: Synthetic oligonucleotide
  Sense strand starting at position 885 of SEQ ID NO: 1894
uuccaauguccacgcauuu

SEQ ID NO: 147685 - RNA, 19 nt, Artificial Sequence
  Description of Artificial Sequence: Synthetic oligonucleotide
  Antisense strand to SEQ ID NO: 147684
aaaugcguggacauuggaa

SEQ ID NO: 147686 - RNA, 19 nt, Artificial Sequence
  Description of Artificial Sequence: Synthetic oligonucleotide
  Sense strand starting at position 654 of SEQ ID NO: 1894
ggauccauuguauagcuga

SEQ ID NO: 147687 - RNA, 19 nt, Artificial Sequence
  Description of Artificial Sequence: Synthetic oligonucleotide
  Antisense strand to SEQ ID NO: 147686
ucagcuauacaauggaucc

SEQ ID NO: 147688 - RNA, 19 nt, Artificial Sequence
  Description of Artificial Sequence: Synthetic oligonucleotide
  Sense strand starting at position 570 of SEQ ID NO: 1894
ggguuuguggucuaaacaa

SEQ ID NO: 147689 - RNA, 19 nt, Artificial Sequence
  Description of Artificial Sequence: Synthetic oligonucleotide
  Antisense strand to SEQ ID NO: 147688
uuguuuagaccacaaaccc

SEQ ID NO: 147690 - RNA, 19 nt, Artificial Sequence
  Description of Artificial Sequence: Synthetic oligonucleotide
  Sense strand starting at position 469 of SEQ ID NO: 1894
ggaugaauuugggaucuau

SEQ ID NO: 147691 - RNA, 19 nt, Artificial Sequence
  Description of Artificial Sequence: Synthetic oligonucleotide
  Antisense strand to SEQ ID NO: 147690
auagaucccaaauucaucc

SEQ ID NO: 147692 - RNA, 19 nt, Artificial Sequence
  Description of Artificial Sequence: Synthetic oligonucleotide
  Sense strand starting at position 385 of SEQ ID NO: 1894
acagcaagaucgguuagga

SEQ ID NO: 147693 - RNA, 19 nt, Artificial Sequence
  Description of Artificial Sequence: Synthetic oligonucleotide
  Antisense strand to SEQ ID NO: 147692
uccuaaccgaucuugcugu

SEQ ID NO: 147694 - RNA, 19 nt, Artificial Sequence
  Description of Artificial Sequence: Synthetic oligonucleotide
  Sense strand starting at position 338 of SEQ ID NO: 1894
cuagcugcucagugaagaa

SEQ ID NO: 147695 - RNA, 19 nt, Artificial Sequence
  Description of Artificial Sequence: Synthetic oligonucleotide
  Antisense strand to SEQ ID NO: 147694
uucuucacugagcagcuag

SEQ ID NO: 147696 - RNA, 19 nt, Artificial Sequence
  Description of Artificial Sequence: Synthetic oligonucleotide
  Sense strand starting at position 335 of SEQ ID NO: 1894
aaucuagcugcucagugaa

SEQ ID NO: 147697 - RNA, 19 nt, Artificial Sequence
  Description of Artificial Sequence: Synthetic oligonucleotide
  Antisense strand to SEQ ID NO: 147696
uucacugagcagcuagauu

SEQ ID NO: 147698 - RNA, 19 nt, Artificial Sequence
  Description of Artificial Sequence: Synthetic oligonucleotide
  Sense strand starting at position 297 of SEQ ID NO: 1894
agggauugucgugaucaga

SEQ ID NO: 147699 - RNA, 19 nt, Artificial Sequence
  Description of Artificial Sequence: Synthetic oligonucleotide
  Antisense strand to SEQ ID NO: 147698
ucugaucacgacaaucccu

SEQ ID NO: 147700 - RNA, 19 nt, Artificial Sequence
  Description of Artificial Sequence: Synthetic oligonucleotide
  Sense strand starting at position 180 of SEQ ID NO: 1894
cagugaaaugugugagaga

SEQ ID NO: 147701 - RNA, 19 nt, Artificial Sequence
  Description of Artificial Sequence: Synthetic oligonucleotide
  Antisense strand to SEQ ID NO: 147700
ucucucacacauuucacug

SEQ ID NO: 147702 - RNA, 19 nt, Artificial Sequence
  Description of Artificial Sequence: Synthetic oligonucleotide
  Sense strand starting at position 171 of SEQ ID NO: 1894
gguauagcacagugaaaug

SEQ ID NO: 147703 - RNA, 19 nt, Artificial Sequence
  Description of Artificial Sequence: Synthetic oligonucleotide
  Antisense strand to SEQ ID NO: 147702
cauuucacugugcuauacc

SEQ ID NO: 147704 - RNA, 19 nt, Artificial Sequence
  Description of Artificial Sequence: Synthetic oligonucleotide
  Sense strand starting at position 137 of SEQ ID NO: 1894
gccauauuggcagaacaga

SEQ ID NO: 147705 - RNA, 19 nt, Artificial Sequence
  Description of Artificial Sequence: Synthetic oligonucleotide
  Antisense strand to SEQ ID NO: 147704
ucuguucugccaauauggc

SEQ ID NO: 147706 - RNA, 19 nt, Artificial Sequence
  Description of Artificial Sequence: Synthetic oligonucleotide
  Sense strand starting at position 3508 of SEQ ID NO: 1895
guugguaagagaugagauu

SEQ ID NO: 147707 - RNA, 19 nt, Artificial Sequence
  Description of Artificial Sequence: Synthetic oligonucleotide
  Antisense strand to SEQ ID NO: 147706
aaucucaucucuuaccaac

SEQ ID NO: 147708 - RNA, 19 nt, Artificial Sequence
  Description of Artificial Sequence: Synthetic oligonucleotide
  Sense strand starting at position 3499 of SEQ ID NO: 1895
uugaauacaguugguaaga

SEQ ID NO: 147709 - RNA, 19 nt, Artificial Sequence
  Description of Artificial Sequence: Synthetic oligonucleotide
  Antisense strand to SEQ ID NO: 147708
ucuuaccaacuguauucaa

SEQ ID NO: 147710 - RNA, 19 nt, Artificial Sequence
  Description of Artificial Sequence: Synthetic oligonucleotide
  Sense strand starting at position 3498 of SEQ ID NO: 1895
uuugaauacaguugguaag

SEQ ID NO: 147711 - RNA, 19 nt, Artificial Sequence
  Description of Artificial Sequence: Synthetic oligonucleotide
  Antisense strand to SEQ ID NO: 147710
cuuaccaacuguauucaaa

SEQ ID NO: 147712 - RNA, 19 nt, Artificial Sequence
  Description of Artificial Sequence: Synthetic oligonucleotide
  Sense strand starting at position 3042 of SEQ ID NO: 1895
gauguuuauguaggaaaua

SEQ ID NO: 147713 - RNA, 19 nt, Artificial Sequence
  Description of Artificial Sequence: Synthetic oligonucleotide
  Antisense strand to SEQ ID NO: 147712
uauuuccuacauaaacauc

SEQ ID NO: 147714 - RNA, 19 nt, Artificial Sequence
  Description of Artificial Sequence: Synthetic oligonucleotide
  Sense strand starting at position 3039 of SEQ ID NO: 1895
guagauguuuauguaggaa

SEQ ID NO: 147715 - RNA, 19 nt, Artificial Sequence
  Description of Artificial Sequence: Synthetic oligonucleotide
  Antisense strand to SEQ ID NO: 147714
uuccuacauaaacaucuac

SEQ ID NO: 147716 - RNA, 19 nt, Artificial Sequence
  Description of Artificial Sequence: Synthetic oligonucleotide
  Sense strand starting at position 3028 of SEQ ID NO: 1895
gacauauuccaguagaugu

SEQ ID NO: 147717 - RNA, 19 nt, Artificial Sequence
  Description of Artificial Sequence: Synthetic oligonucleotide
  Antisense strand to SEQ ID NO: 147716
acaucuacuggaauauguc

SEQ ID NO: 147718 - RNA, 19 nt, Artificial Sequence
  Description of Artificial Sequence: Synthetic oligonucleotide
  Sense strand starting at position 2983 of SEQ ID NO: 1895
uugugauacccauaaguca

SEQ ID NO: 147719 - RNA, 19 nt, Artificial Sequence
  Description of Artificial Sequence: Synthetic oligonucleotide
  Antisense strand to SEQ ID NO: 147718
ugacuuauggguaucacaa

SEQ ID NO: 147720 - RNA, 19 nt, Artificial Sequence
  Description of Artificial Sequence: Synthetic oligonucleotide
  Sense strand starting at position 2911 of SEQ ID NO: 1895
uggcuagacuuguucuaaa

SEQ ID NO: 147721 - RNA, 19 nt, Artificial Sequence
  Description of Artificial Sequence: Synthetic oligonucleotide
  Antisense strand to SEQ ID NO: 147720
uuuagaacaagucuagcca

SEQ ID NO: 147722 - RNA, 19 nt, Artificial Sequence
  Description of Artificial Sequence: Synthetic oligonucleotide
  Sense strand starting at position 2903 of SEQ ID NO: 1895
accuuuacuggcuagacuu

SEQ ID NO: 147723 - RNA, 19 nt, Artificial Sequence
  Description of Artificial Sequence: Synthetic oligonucleotide
  Antisense strand to SEQ ID NO: 147722
aagucuagccaguaaaggu

SEQ ID NO: 147724 - RNA, 19 nt, Artificial Sequence
  Description of Artificial Sequence: Synthetic oligonucleotide
  Sense strand starting at position 2788 of SEQ ID NO: 1895
guuggccugaagugaauuu

SEQ ID NO: 147725 - RNA, 19 nt, Artificial Sequence
  Description of Artificial Sequence: Synthetic oligonucleotide
  Antisense strand to SEQ ID NO: 147724
aaauucacuucaggccaac

SEQ ID NO: 147726 - RNA, 19 nt, Artificial Sequence
  Description of Artificial Sequence: Synthetic oligonucleotide
  Sense strand starting at position 2784 of SEQ ID NO: 1895
agaaguuggccugaaguga

SEQ ID NO: 147727 - RNA, 19 nt, Artificial Sequence
  Description of Artificial Sequence: Synthetic oligonucleotide
  Antisense strand to SEQ ID NO: 147726
ucacuucaggccaacuucu

SEQ ID NO: 147728 - RNA, 19 nt, Artificial Sequence
  Description of Artificial Sequence: Synthetic oligonucleotide
  Sense strand starting at position 2771 of SEQ ID NO: 1895
caagguuagcaacagaagu

SEQ ID NO: 147729 - RNA, 19 nt, Artificial Sequence
  Description of Artificial Sequence: Synthetic oligonucleotide
  Antisense strand to SEQ ID NO: 147728
acuucuguugcuaaccuug

SEQ ID NO: 147730 - RNA, 19 nt, Artificial Sequence
  Description of Artificial Sequence: Synthetic oligonucleotide
  Sense strand starting at position 2468 of SEQ ID NO: 1895
cgaauagacucaccuucuu

SEQ ID NO: 147731 - RNA, 19 nt, Artificial Sequence
  Description of Artificial Sequence: Synthetic oligonucleotide
  Antisense strand to SEQ ID NO: 147730
aagaaggugagucuauucg

SEQ ID NO: 147732 - RNA, 19 nt, Artificial Sequence
  Description of Artificial Sequence: Synthetic oligonucleotide
  Sense strand starting at position 2408 of SEQ ID NO: 1895
uuagaauacgaucguauca

SEQ ID NO: 147733 - RNA, 19 nt, Artificial Sequence
  Description of Artificial Sequence: Synthetic oligonucleotide
  Antisense strand to SEQ ID NO: 147732
ugauacgaucguauucuaa

SEQ ID NO: 147734 - RNA, 19 nt, Artificial Sequence
  Description of Artificial Sequence: Synthetic oligonucleotide
  Sense strand starting at position 2131 of SEQ ID NO: 1895
cucgguguguuuacgcgaa

SEQ ID NO: 147735 - RNA, 19 nt, Artificial Sequence
  Description of Artificial Sequence: Synthetic oligonucleotide
  Antisense strand to SEQ ID NO: 147734
uucgcguaaacacaccgag

SEQ ID NO: 147736 - RNA, 19 nt, Artificial Sequence
  Description of Artificial Sequence: Synthetic oligonucleotide
  Sense strand starting at position 2031 of SEQ ID NO: 1895
gcauuuagugccgguaaca

SEQ ID NO: 147737 - RNA, 19 nt, Artificial Sequence
  Description of Artificial Sequence: Synthetic oligonucleotide
  Antisense strand to SEQ ID NO: 147736
uguuaccggcacuaaaugc

SEQ ID NO: 147738 - RNA, 19 nt, Artificial Sequence
  Description of Artificial Sequence: Synthetic oligonucleotide
  Sense strand starting at position 1312 of SEQ ID NO: 1895
gucucugagagacauaguu

SEQ ID NO: 147739 - RNA, 19 nt, Artificial Sequence
  Description of Artificial Sequence: Synthetic oligonucleotide
  Antisense strand to SEQ ID NO: 147738
aacuaugucucucagagac

SEQ ID NO: 147740 - RNA, 19 nt, Artificial Sequence
  Description of Artificial Sequence: Synthetic oligonucleotide
  Sense strand starting at position 1228 of SEQ ID NO: 1895
caagaaugaugguaaagag

SEQ ID NO: 147741 - RNA, 19 nt, Artificial Sequence
  Description of Artificial Sequence: Synthetic oligonucleotide
  Antisense strand to SEQ ID NO: 147740
cucuuuaccaucauucuug

SEQ ID NO: 147742 - RNA, 19 nt, Artificial Sequence
  Description of Artificial Sequence: Synthetic oligonucleotide
  Sense strand starting at position 1177 of SEQ ID NO: 1895
guaggaagucagggauuac

SEQ ID NO: 147743 - RNA, 19 nt, Artificial Sequence
  Description of Artificial Sequence: Synthetic oligonucleotide
  Antisense strand to SEQ ID NO: 147742
guaaucccugacuuccuac

SEQ ID NO: 147744 - RNA, 19 nt, Artificial Sequence
  Description of Artificial Sequence: Synthetic oligonucleotide
  Sense strand starting at position 1161 of SEQ ID NO: 1895
gagcaauaacugggcagua

SEQ ID NO: 147745 - RNA, 19 nt, Artificial Sequence
  Description of Artificial Sequence: Synthetic oligonucleotide
  Antisense strand to SEQ ID NO: 147744
uacugcccaguuauugcuc

SEQ ID NO: 147746 - RNA, 19 nt, Artificial Sequence
  Description of Artificial Sequence: Synthetic oligonucleotide
  Sense strand starting at position 1140 of SEQ ID NO: 1895
uggguaucagcugguacaa

SEQ ID NO: 147747 - RNA, 19 nt, Artificial Sequence
  Description of Artificial Sequence: Synthetic oligonucleotide
  Antisense strand to SEQ ID NO: 147746
uuguaccagcugauaccca

SEQ ID NO: 147748 - RNA, 19 nt, Artificial Sequence
  Description of Artificial Sequence: Synthetic oligonucleotide
  Sense strand starting at position 1139 of SEQ ID NO: 1895
uuggguaucagcugguaca

SEQ ID NO: 147749 - RNA, 19 nt, Artificial Sequence
  Description of Artificial Sequence: Synthetic oligonucleotide
  Antisense strand to SEQ ID NO: 147748
uguaccagcugauacccaa

SEQ ID NO: 147750 - RNA, 19 nt, Artificial Sequence
  Description of Artificial Sequence: Synthetic oligonucleotide
  Sense strand starting at position 1118 of SEQ ID NO: 1895
aagaauagcucugucuguu

SEQ ID NO: 147751 - RNA, 19 nt, Artificial Sequence
  Description of Artificial Sequence: Synthetic oligonucleotide
  Antisense strand to SEQ ID NO: 147750
aacagacagagcuauucuu

SEQ ID NO: 147752 - RNA, 19 nt, Artificial Sequence
  Description of Artificial Sequence: Synthetic oligonucleotide
  Sense strand starting at position 1117 of SEQ ID NO: 1895
aaagaauagcucugucugu

SEQ ID NO: 147753 - RNA, 19 nt, Artificial Sequence
  Description of Artificial Sequence: Synthetic oligonucleotide
  Antisense strand to SEQ ID NO: 147752
acagacagagcuauucuuu

SEQ ID NO: 147754 - RNA, 19 nt, Artificial Sequence
  Description of Artificial Sequence: Synthetic oligonucleotide
  Sense strand starting at position 1084 of SEQ ID NO: 1895
acagacagcgggcauaauu

SEQ ID NO: 147755 - RNA, 19 nt, Artificial Sequence
  Description of Artificial Sequence: Synthetic oligonucleotide
  Antisense strand to SEQ ID NO: 147754
aauuaugcccgcugucugu

SEQ ID NO: 147756 - RNA, 19 nt, Artificial Sequence
  Description of Artificial Sequence: Synthetic oligonucleotide
  Sense strand starting at position 1066 of SEQ ID NO: 1895
gccacuggaucaucucaaa

SEQ ID NO: 147757 - RNA, 19 nt, Artificial Sequence
  Description of Artificial Sequence: Synthetic oligonucleotide
  Antisense strand to SEQ ID NO: 147756
uuugagaugauccaguggc

SEQ ID NO: 147758 - RNA, 19 nt, Artificial Sequence
  Description of Artificial Sequence: Synthetic oligonucleotide
  Sense strand starting at position 1060 of SEQ ID NO: 1895
ugagaagccacuggaucau

SEQ ID NO: 147759 - RNA, 19 nt, Artificial Sequence
  Description of Artificial Sequence: Synthetic oligonucleotide
  Antisense strand to SEQ ID NO: 147758
augauccaguggcuucuca

SEQ ID NO: 147760 - RNA, 19 nt, Artificial Sequence
  Description of Artificial Sequence: Synthetic oligonucleotide
  Sense strand starting at position 1059 of SEQ ID NO: 1895
augagaagccacuggauca

SEQ ID NO: 147761 - RNA, 19 nt, Artificial Sequence
  Description of Artificial Sequence: Synthetic oligonucleotide
  Antisense strand to SEQ ID NO: 147760
ugauccaguggcuucucau

SEQ ID NO: 147762 - RNA, 19 nt, Artificial Sequence
  Description of Artificial Sequence: Synthetic oligonucleotide
  Sense strand starting at position 1046 of SEQ ID NO: 1895
auuauauacugagaugaga

SEQ ID NO: 147763 - RNA, 19 nt, Artificial Sequence
  Description of Artificial Sequence: Synthetic oligonucleotide
  Antisense strand to SEQ ID NO: 147762
ucucaucucaguauauaau

SEQ ID NO: 147764 - RNA, 19 nt, Artificial Sequence
  Description of Artificial Sequence: Synthetic oligonucleotide
  Sense strand starting at position 989 of SEQ ID NO: 1895
cauauuggccuaugacaga

SEQ ID NO: 147765 - RNA, 19 nt, Artificial Sequence
  Description of Artificial Sequence: Synthetic oligonucleotide
  Antisense strand to SEQ ID NO: 147764
ucugucauaggccaauaug

SEQ ID NO: 147766 - RNA, 19 nt, Artificial Sequence
  Description of Artificial Sequence: Synthetic oligonucleotide
  Sense strand starting at position 987 of SEQ ID NO: 1895
ggcauauuggccuaugaca

SEQ ID NO: 147767 - RNA, 19 nt, Artificial Sequence
  Description of Artificial Sequence: Synthetic oligonucleotide
  Antisense strand to SEQ ID NO: 147766
ugucauaggccaauaugcc

SEQ ID NO: 147768 - RNA, 19 nt, Artificial Sequence
  Description of Artificial Sequence: Synthetic oligonucleotide
  Sense strand starting at position 962 of SEQ ID NO: 1895
ugauuacaguuagugguuu

SEQ ID NO: 147769 - RNA, 19 nt, Artificial Sequence
  Description of Artificial Sequence: Synthetic oligonucleotide
  Antisense strand to SEQ ID NO: 147768
aaaccacuaacuguaauca

SEQ ID NO: 147770 - RNA, 19 nt, Artificial Sequence
  Description of Artificial Sequence: Synthetic oligonucleotide
  Sense strand starting at position 951 of SEQ ID NO: 1895
ccgguauggcaugauuaca

SEQ ID NO: 147771 - RNA, 19 nt, Artificial Sequence
  Description of Artificial Sequence: Synthetic oligonucleotide
  Antisense strand to SEQ ID NO: 147770
uguaaucaugccauaccgg

SEQ ID NO: 147772 - RNA, 19 nt, Artificial Sequence
  Description of Artificial Sequence: Synthetic oligonucleotide
  Sense strand starting at position 922 of SEQ ID NO: 1895
gcauguuuaagguguuaaa

SEQ ID NO: 147773 - RNA, 19 nt, Artificial Sequence
  Description of Artificial Sequence: Synthetic oligonucleotide
  Antisense strand to SEQ ID NO: 147772
uuuaacaccuuaaacaugc

SEQ ID NO: 147774 - RNA, 19 nt, Artificial Sequence
  Description of Artificial Sequence: Synthetic oligonucleotide
  Sense strand starting at position 806 of SEQ ID NO: 1895
ggacaagucucucugguaa

SEQ ID NO: 147775 - RNA, 19 nt, Artificial Sequence
  Description of Artificial Sequence: Synthetic oligonucleotide
  Antisense strand to SEQ ID NO: 147774
uuaccagagagacuugucc

SEQ ID NO: 147776 - RNA, 19 nt, Artificial Sequence
  Description of Artificial Sequence: Synthetic oligonucleotide
  Sense strand starting at position 560 of SEQ ID NO: 1895
ccuggaaguccagguuaau

SEQ ID NO: 147777 - RNA, 19 nt, Artificial Sequence
  Description of Artificial Sequence: Synthetic oligonucleotide
  Antisense strand to SEQ ID NO: 147776
auuaaccuggacuuccagg

SEQ ID NO: 147778 - RNA, 19 nt, Artificial Sequence
  Description of Artificial Sequence: Synthetic oligonucleotide
  Sense strand starting at position 523 of SEQ ID NO: 1895
uaggaauugcaguagcaua

SEQ ID NO: 147779 - RNA, 19 nt, Artificial Sequence
  Description of Artificial Sequence: Synthetic oligonucleotide
  Antisense strand to SEQ ID NO: 147778
uaugcuacugcaauuccua

SEQ ID NO: 147780 - RNA, 19 nt, Artificial Sequence
  Description of Artificial Sequence: Synthetic oligonucleotide
  Sense strand starting at position 513 of SEQ ID NO: 1895
ucuaauuaccuaggaauug

SEQ ID NO: 147781 - RNA, 19 nt, Artificial Sequence
  Description of Artificial Sequence: Synthetic oligonucleotide
  Antisense strand to SEQ ID NO: 147780
caauuccuagguaauuaga

SEQ ID NO: 147782 - RNA, 19 nt, Artificial Sequence
  Description of Artificial Sequence: Synthetic oligonucleotide
  Sense strand starting at position 399 of SEQ ID NO: 1895
gaacaauaguguuugaacu

SEQ ID NO: 147783 - RNA, 19 nt, Artificial Sequence
  Description of Artificial Sequence: Synthetic oligonucleotide
  Antisense strand to SEQ ID NO: 147782
aguucaaacacuauuguuc

SEQ ID NO: 147784 - RNA, 19 nt, Artificial Sequence
  Description of Artificial Sequence: Synthetic oligonucleotide
  Sense strand starting at position 393 of SEQ ID NO: 1895
cuucuugaacaauaguguu

SEQ ID NO: 147785 - RNA, 19 nt, Artificial Sequence
  Description of Artificial Sequence: Synthetic oligonucleotide
  Antisense strand to SEQ ID NO: 147784
aacacuauuguucaagaag

SEQ ID NO: 147786 - RNA, 19 nt, Artificial Sequence
  Description of Artificial Sequence: Synthetic oligonucleotide
  Sense strand starting at position 7 of SEQ ID NO: 1896
agagcaagaucauugcaua

SEQ ID NO: 147787 - RNA, 19 nt, Artificial Sequence
  Description of Artificial Sequence: Synthetic oligonucleotide
  Antisense strand to SEQ ID NO: 147786
uaugcaaugaucuugcucu

SEQ ID NO: 147788 - RNA, 19 nt, Artificial Sequence
  Description of Artificial Sequence: Synthetic oligonucleotide
  Sense strand starting at position 77 of SEQ ID NO: 1896
agauuuggaugccaccaaa

SEQ ID NO: 147789 - RNA, 19 nt, Artificial Sequence
  Description of Artificial Sequence: Synthetic oligonucleotide
  Antisense strand to SEQ ID NO: 147788
uuugguggcauccaaaucu

SEQ ID NO: 147790 - RNA, 19 nt, Artificial Sequence
  Description of Artificial Sequence: Synthetic oligonucleotide
  Sense strand starting at position 150 of SEQ ID NO: 1896
gaacuacaguauucggaaa

SEQ ID NO: 147791 - RNA, 19 nt, Artificial Sequence
  Description of Artificial Sequence: Synthetic oligonucleotide
  Antisense strand to SEQ ID NO: 147790
uuuccgaauacuguaguuc

SEQ ID NO: 147792 - RNA, 19 nt, Artificial Sequence
  Description of Artificial Sequence: Synthetic oligonucleotide
  Sense strand starting at position 200 of SEQ ID NO: 1896
gacucaauacguggaaaga

SEQ ID NO: 147793 - RNA, 19 nt, Artificial Sequence
  Description of Artificial Sequence: Synthetic oligonucleotide
  Antisense strand to SEQ ID NO: 147792
ucuuuccacguauugaguc

SEQ ID NO: 147794 - RNA, 19 nt, Artificial Sequence
  Description of Artificial Sequence: Synthetic oligonucleotide
  Sense strand starting at position 242 of SEQ ID NO: 1896
guugaaagauugucucauu

SEQ ID NO: 147795 - RNA, 19 nt, Artificial Sequence
  Description of Artificial Sequence: Synthetic oligonucleotide
  Antisense strand to SEQ ID NO: 147794
aaugagacaaucuuucaac

SEQ ID NO: 147796 - RNA, 19 nt, Artificial Sequence
  Description of Artificial Sequence: Synthetic oligonucleotide
  Sense strand starting at position 243 of SEQ ID NO: 1896
uugaaagauugucucauua

SEQ ID NO: 147797 - RNA, 19 nt, Artificial Sequence
  Description of Artificial Sequence: Synthetic oligonucleotide
  Antisense strand to SEQ ID NO: 147796
uaaugagacaaucuuucaa

SEQ ID NO: 147798 - RNA, 19 nt, Artificial Sequence
  Description of Artificial Sequence: Synthetic oligonucleotide
  Sense strand starting at position 445 of SEQ ID NO: 1896
aucaguucuggccaaucua

SEQ ID NO: 147799 - RNA, 19 nt, Artificial Sequence
  Description of Artificial Sequence: Synthetic oligonucleotide
  Antisense strand to SEQ ID NO: 147798
uagauuggccagaacugau

SEQ ID NO: 147800 - RNA, 19 nt, Artificial Sequence
  Description of Artificial Sequence: Synthetic oligonucleotide
  Sense strand starting at position 486 of SEQ ID NO: 1896
auuggauacucugacauuu

SEQ ID NO: 147801 - RNA, 19 nt, Artificial Sequence
  Description of Artificial Sequence: Synthetic oligonucleotide
  Antisense strand to SEQ ID NO: 147800
aaaugucagaguauccaau

SEQ ID NO: 147802 - RNA, 19 nt, Artificial Sequence
  Description of Artificial Sequence: Synthetic oligonucleotide
  Sense strand starting at position 516 of SEQ ID NO: 1896
auucuugagggcuauugga

SEQ ID NO: 147803 - RNA, 19 nt, Artificial Sequence
  Description of Artificial Sequence: Synthetic oligonucleotide
  Antisense strand to SEQ ID NO: 147802
uccaauagcccucaagaau

SEQ ID NO: 147804 - RNA, 19 nt, Artificial Sequence
  Description of Artificial Sequence: Synthetic oligonucleotide
  Sense strand starting at position 548 of SEQ ID NO: 1896
caaagugugcuagacagaa

SEQ ID NO: 147805 - RNA, 19 nt, Artificial Sequence
  Description of Artificial Sequence: Synthetic oligonucleotide
  Antisense strand to SEQ ID NO: 147804
uucugucuagcacacuuug

SEQ ID NO: 147806 - RNA, 19 nt, Artificial Sequence
  Description of Artificial Sequence: Synthetic oligonucleotide
  Sense strand starting at position 552 of SEQ ID NO: 1896
gugugcuagacagaaucaa

SEQ ID NO: 147807 - RNA, 19 nt, Artificial Sequence
  Description of Artificial Sequence: Synthetic oligonucleotide
  Antisense strand to SEQ ID NO: 147806
uugauucugucuagcacac

SEQ ID NO: 147808 - RNA, 19 nt, Artificial Sequence
  Description of Artificial Sequence: Synthetic oligonucleotide
  Sense strand starting at position 634 of SEQ ID NO: 1896
ugguccuauuuccuaguau

SEQ ID NO: 147809 - RNA, 19 nt, Artificial Sequence
  Description of Artificial Sequence: Synthetic oligonucleotide
  Antisense strand to SEQ ID NO: 147808
auacuaggaaauaggacca

SEQ ID NO: 147810 - RNA, 19 nt, Artificial Sequence
  Description of Artificial Sequence: Synthetic oligonucleotide
  Sense strand starting at position 645 of SEQ ID NO: 1896
ccuaguaucaaaggguaga

SEQ ID NO: 147811 - RNA, 19 nt, Artificial Sequence
  Description of Artificial Sequence: Synthetic oligonucleotide
  Antisense strand to SEQ ID NO: 147810
ucuacccuuugauacuagg

SEQ ID NO: 147812 - RNA, 19 nt, Artificial Sequence
  Description of Artificial Sequence: Synthetic oligonucleotide
  Sense strand starting at position 751 of SEQ ID NO: 1896
aagauaaacugcgucugau

SEQ ID NO: 147813 - RNA, 19 nt, Artificial Sequence
  Description of Artificial Sequence: Synthetic oligonucleotide
  Antisense strand to SEQ ID NO: 147812
aucagacgcaguuuaucuu

SEQ ID NO: 147814 - RNA, 19 nt, Artificial Sequence
  Description of Artificial Sequence: Synthetic oligonucleotide
  Sense strand starting at position 804 of SEQ ID NO: 1896
ucguguaaccuuuauauga

SEQ ID NO: 147815 - RNA, 19 nt, Artificial Sequence
  Description of Artificial Sequence: Synthetic oligonucleotide
  Antisense strand to SEQ ID NO: 147814
ucauauaaagguuacacga

SEQ ID NO: 147816 - RNA, 19 nt, Artificial Sequence
  Description of Artificial Sequence: Synthetic oligonucleotide
  Sense strand starting at position 1174 of SEQ ID NO: 1896
ggguuuggcgucuuucagu

SEQ ID NO: 147817 - RNA, 19 nt, Artificial Sequence
  Description of Artificial Sequence: Synthetic oligonucleotide
  Antisense strand to SEQ ID NO: 147816
acugaaagacgccaaaccc

SEQ ID NO: 147818 - RNA, 19 nt, Artificial Sequence
  Description of Artificial Sequence: Synthetic oligonucleotide
  Sense strand starting at position 1191 of SEQ ID NO: 1896
guccuaaagaugcgggaua

SEQ ID NO: 147819 - RNA, 19 nt, Artificial Sequence
  Description of Artificial Sequence: Synthetic oligonucleotide
  Antisense strand to SEQ ID NO: 147818
uaucccgcaucuuuaggac

SEQ ID NO: 147820 - RNA, 19 nt, Artificial Sequence
  Description of Artificial Sequence: Synthetic oligonucleotide
  Sense strand starting at position 1193 of SEQ ID NO: 1896
ccuaaagaugcgggauauc

SEQ ID NO: 147821 - RNA, 19 nt, Artificial Sequence
  Description of Artificial Sequence: Synthetic oligonucleotide
  Antisense strand to SEQ ID NO: 147820
gauaucccgcaucuuuagg

SEQ ID NO: 147822 - RNA, 19 nt, Artificial Sequence
  Description of Artificial Sequence: Synthetic oligonucleotide
  Sense strand starting at position 1242 of SEQ ID NO: 1896
ggcaguuugccugcucuca

SEQ ID NO: 147823 - RNA, 19 nt, Artificial Sequence
  Description of Artificial Sequence: Synthetic oligonucleotide
  Antisense strand to SEQ ID NO: 147822
ugagagcaggcaaacugcc

SEQ ID NO: 147824 - RNA, 19 nt, Artificial Sequence
  Description of Artificial Sequence: Synthetic oligonucleotide
  Sense strand starting at position 1328 of SEQ ID NO: 1896
gcuugagaucgguuccgca

SEQ ID NO: 147825 - RNA, 19 nt, Artificial Sequence
  Description of Artificial Sequence: Synthetic oligonucleotide
  Antisense strand to SEQ ID NO: 147824
ugcggaaccgaucucaagc

SEQ ID NO: 147826 - RNA, 19 nt, Artificial Sequence
  Description of Artificial Sequence: Synthetic oligonucleotide
  Sense strand starting at position 1939 of SEQ ID NO: 1896
gccguucuucguccagaga

SEQ ID NO: 147827 - RNA, 19 nt, Artificial Sequence
  Description of Artificial Sequence: Synthetic oligonucleotide
  Antisense strand to SEQ ID NO: 147826
ucucuggacgaagaacggc

SEQ ID NO: 147828 - RNA, 19 nt, Artificial Sequence
  Description of Artificial Sequence: Synthetic oligonucleotide
  Sense strand starting at position 1942 of SEQ ID NO: 1896
guucuucguccagagauga

SEQ ID NO: 147829 - RNA, 19 nt, Artificial Sequence
  Description of Artificial Sequence: Synthetic oligonucleotide
  Antisense strand to SEQ ID NO: 147828
ucaucucuggacgaagaac

SEQ ID NO: 147830 - RNA, 19 nt, Artificial Sequence
  Description of Artificial Sequence: Synthetic oligonucleotide
  Sense strand starting at position 2046 of SEQ ID NO: 1896
gcgucaugggagcuguagu

SEQ ID NO: 147831 - RNA, 19 nt, Artificial Sequence
  Description of Artificial Sequence: Synthetic oligonucleotide
  Antisense strand to SEQ ID NO: 147830
acuacagcucccaugacgc

SEQ ID NO: 147832 - RNA, 19 nt, Artificial Sequence
  Description of Artificial Sequence: Synthetic oligonucleotide
  Sense strand starting at position 2313 of SEQ ID NO: 1896
ucucauaaccuuugugaga

SEQ ID NO: 147833 - RNA, 19 nt, Artificial Sequence
  Description of Artificial Sequence: Synthetic oligonucleotide
  Antisense strand to SEQ ID NO: 147832
ucucacaaagguuaugaga

SEQ ID NO: 147834 - RNA, 19 nt, Artificial Sequence
  Description of Artificial Sequence: Synthetic oligonucleotide
  Sense strand starting at position 2569 of SEQ ID NO: 1896
cccucuaaugccuggaaau

SEQ ID NO: 147835 - RNA, 19 nt, Artificial Sequence
  Description of Artificial Sequence: Synthetic oligonucleotide
  Antisense strand to SEQ ID NO: 147834
auuuccaggcauuagaggg

SEQ ID NO: 147836 - RNA, 19 nt, Artificial Sequence
  Description of Artificial Sequence: Synthetic oligonucleotide
  Sense strand starting at position 2570 of SEQ ID NO: 1896
ccucuaaugccuggaaaug

SEQ ID NO: 147837 - RNA, 19 nt, Artificial Sequence
  Description of Artificial Sequence: Synthetic oligonucleotide
  Antisense strand to SEQ ID NO: 147836
cauuuccaggcauuagagg

SEQ ID NO: 147838 - RNA, 19 nt, Artificial Sequence
  Description of Artificial Sequence: Synthetic oligonucleotide
  Sense strand starting at position 2571 of SEQ ID NO: 1896
cucuaaugccuggaaaugu

SEQ ID NO: 147839 - RNA, 19 nt, Artificial Sequence
  Description of Artificial Sequence: Synthetic oligonucleotide
  Antisense strand to SEQ ID NO: 147838
acauuuccaggcauuagag

SEQ ID NO: 147840 - RNA, 19 nt, Artificial Sequence
  Description of Artificial Sequence: Synthetic oligonucleotide
  Sense strand starting at position 2579 of SEQ ID NO: 1896
ccuggaaauguccagcauu

SEQ ID NO: 147841 - RNA, 19 nt, Artificial Sequence
  Description of Artificial Sequence: Synthetic oligonucleotide
  Antisense strand to SEQ ID NO: 147840
aaugcuggacauuuccagg

SEQ ID NO: 147842 - RNA, 19 nt, Artificial Sequence
  Description of Artificial Sequence: Synthetic oligonucleotide
  Sense strand starting at position 2760 of SEQ ID NO: 1896
auaguuguugcucagaaau

SEQ ID NO: 147843 - RNA, 19 nt, Artificial Sequence
  Description of Artificial Sequence: Synthetic oligonucleotide
  Antisense strand to SEQ ID NO: 147842
auuucugagcaacaacuau

SEQ ID NO: 147844 - RNA, 19 nt, Artificial Sequence
  Description of Artificial Sequence: Synthetic oligonucleotide
  Sense strand starting at position 3202 of SEQ ID NO: 1896
aguaacucaugguuaccua

SEQ ID NO: 147845 - RNA, 19 nt, Artificial Sequence
  Description of Artificial Sequence: Synthetic oligonucleotide
  Antisense strand to SEQ ID NO: 147844
uagguaaccaugaguuacu

SEQ ID NO: 147846 - RNA, 19 nt, Artificial Sequence
  Description of Artificial Sequence: Synthetic oligonucleotide
  Sense strand starting at position 3206 of SEQ ID NO: 1896
acucaugguuaccuagaau

SEQ ID NO: 147847 - RNA, 19 nt, Artificial Sequence
  Description of Artificial Sequence: Synthetic oligonucleotide
  Antisense strand to SEQ ID NO: 147846
auucuagguaaccaugagu

SEQ ID NO: 147848 - RNA, 19 nt, Artificial Sequence
  Description of Artificial Sequence: Synthetic oligonucleotide
  Sense strand starting at position 3298 of SEQ ID NO: 1896
aaauuacugugguuugauu

SEQ ID NO: 147849 - RNA, 19 nt, Artificial Sequence
  Description of Artificial Sequence: Synthetic oligonucleotide
  Antisense strand to SEQ ID NO: 147848
aaucaaaccacaguaauuu

SEQ ID NO: 147850 - RNA, 19 nt, Artificial Sequence
  Description of Artificial Sequence: Synthetic oligonucleotide
  Sense strand starting at position 3320 of SEQ ID NO: 1896
cuaguuucuggagaaguau

SEQ ID NO: 147851 - RNA, 19 nt, Artificial Sequence
  Description of Artificial Sequence: Synthetic oligonucleotide
  Antisense strand to SEQ ID NO: 147850
auacuucuccagaaacuag

SEQ ID NO: 147852 - RNA, 19 nt, Artificial Sequence
  Description of Artificial Sequence: Synthetic oligonucleotide
  Sense strand starting at position 3393 of SEQ ID NO: 1896
gucuguuggauacauugua

SEQ ID NO: 147853 - RNA, 19 nt, Artificial Sequence
  Description of Artificial Sequence: Synthetic oligonucleotide
  Antisense strand to SEQ ID NO: 147852
uacaauguauccaacagac

SEQ ID NO: 147854 - RNA, 19 nt, Artificial Sequence
  Description of Artificial Sequence: Synthetic oligonucleotide
  Sense strand starting at position 3565 of SEQ ID NO: 1896
ggaagucagguggauucuu

SEQ ID NO: 147855 - RNA, 19 nt, Artificial Sequence
  Description of Artificial Sequence: Synthetic oligonucleotide
  Antisense strand to SEQ ID NO: 147854
aagaauccaccugacuucc

SEQ ID NO: 147856 - RNA, 19 nt, Artificial Sequence
  Description of Artificial Sequence: Synthetic oligonucleotide
  Sense strand starting at position 3570 of SEQ ID NO: 1896
ucagguggauucuuuguaa

SEQ ID NO: 147857 - RNA, 19 nt, Artificial Sequence
  Description of Artificial Sequence: Synthetic oligonucleotide
  Antisense strand to SEQ ID NO: 147856
uuacaaagaauccaccuga

SEQ ID NO: 147858 - RNA, 19 nt, Artificial Sequence
  Description of Artificial Sequence: Synthetic oligonucleotide
  Sense strand starting at position 3641 of SEQ ID NO: 1896
uuucuuauggcagauccau

SEQ ID NO: 147859 - RNA, 19 nt, Artificial Sequence
  Description of Artificial Sequence: Synthetic oligonucleotide
  Antisense strand to SEQ ID NO: 147858
auggaucugccauaagaaa

SEQ ID NO: 147860 - RNA, 19 nt, Artificial Sequence
  Description of Artificial Sequence: Synthetic oligonucleotide
  Sense strand starting at position 3878 of SEQ ID NO: 1896
uugucauuauuugcacauu

SEQ ID NO: 147861 - RNA, 19 nt, Artificial Sequence
  Description of Artificial Sequence: Synthetic oligonucleotide
  Antisense strand to SEQ ID NO: 147860
aaugugcaaauaaugacaa

SEQ ID NO: 147862 - RNA, 19 nt, Artificial Sequence
  Description of Artificial Sequence: Synthetic oligonucleotide
  Sense strand starting at position 3943 of SEQ ID NO: 1896
ccacaacauuugggaagau

SEQ ID NO: 147863 - RNA, 19 nt, Artificial Sequence
  Description of Artificial Sequence: Synthetic oligonucleotide
  Antisense strand to SEQ ID NO: 147862
aucuucccaaauguugugg

SEQ ID NO: 147864 - RNA, 19 nt, Artificial Sequence
  Description of Artificial Sequence: Synthetic oligonucleotide
  Sense strand starting at position 3953 of SEQ ID NO: 1896
ugggaagauuuacaaggua

SEQ ID NO: 147865 - RNA, 19 nt, Artificial Sequence
  Description of Artificial Sequence: Synthetic oligonucleotide
  Antisense strand to SEQ ID NO: 147864
uaccuuguaaaucuuccca

SEQ ID NO: 147866 - RNA, 19 nt, Artificial Sequence
  Description of Artificial Sequence: Synthetic oligonucleotide
  Sense strand starting at position 3970 of SEQ ID NO: 1897
cuuacacuuuaggaguaaa

SEQ ID NO: 147867 - RNA, 19 nt, Artificial Sequence
  Description of Artificial Sequence: Synthetic oligonucleotide
  Antisense strand to SEQ ID NO: 147866
uuuacuccuaaaguguaag

SEQ ID NO: 147868 - RNA, 19 nt, Artificial Sequence
  Description of Artificial Sequence: Synthetic oligonucleotide
  Sense strand starting at position 3967 of SEQ ID NO: 1897
uuacuuacacuuuaggagu

SEQ ID NO: 147869 - RNA, 19 nt, Artificial Sequence
  Description of Artificial Sequence: Synthetic oligonucleotide
  Antisense strand to SEQ ID NO: 147868
acuccuaaaguguaaguaa

SEQ ID NO: 147870 - RNA, 19 nt, Artificial Sequence
  Description of Artificial Sequence: Synthetic oligonucleotide
  Sense strand starting at position 3937 of SEQ ID NO: 1897
gcuauugacuucccaugaa

SEQ ID NO: 147871 - RNA, 19 nt, Artificial Sequence
  Description of Artificial Sequence: Synthetic oligonucleotide
  Antisense strand to SEQ ID NO: 147870
uucaugggaagucaauagc

SEQ ID NO: 147872 - RNA, 19 nt, Artificial Sequence
  Description of Artificial Sequence: Synthetic oligonucleotide
  Sense strand starting at position 3898 of SEQ ID NO: 1897
ugguuaacagcaugagaag

SEQ ID NO: 147873 - RNA, 19 nt, Artificial Sequence
  Description of Artificial Sequence: Synthetic oligonucleotide
  Antisense strand to SEQ ID NO: 147872
cuucucaugcuguuaacca

SEQ ID NO: 147874 - RNA, 19 nt, Artificial Sequence
  Description of Artificial Sequence: Synthetic oligonucleotide
  Sense strand starting at position 3770 of SEQ ID NO: 1897
aucuauuauuaggacagau

SEQ ID NO: 147875 - RNA, 19 nt, Artificial Sequence
  Description of Artificial Sequence: Synthetic oligonucleotide
  Antisense strand to SEQ ID NO: 147874
aucuguccuaauaauagau

SEQ ID NO: 147876 - RNA, 19 nt, Artificial Sequence
  Description of Artificial Sequence: Synthetic oligonucleotide
  Sense strand starting at position 3380 of SEQ ID NO: 1897
gcacccgaccauuguaaga

SEQ ID NO: 147877 - RNA, 19 nt, Artificial Sequence
  Description of Artificial Sequence: Synthetic oligonucleotide
  Antisense strand to SEQ ID NO: 147876
ucuuacaauggucgggugc

SEQ ID NO: 147878 - RNA, 19 nt, Artificial Sequence
  Description of Artificial Sequence: Synthetic oligonucleotide
  Sense strand starting at position 3150 of SEQ ID NO: 1897
guacaauggcgccaucuga

SEQ ID NO: 147879 - RNA, 19 nt, Artificial Sequence
  Description of Artificial Sequence: Synthetic oligonucleotide
  Antisense strand to SEQ ID NO: 147878
ucagauggcgccauuguac

SEQ ID NO: 147880 - RNA, 19 nt, Artificial Sequence
  Description of Artificial Sequence: Synthetic oligonucleotide
  Sense strand starting at position 3081 of SEQ ID NO: 1897
uacgcauguaaguguaaga

SEQ ID NO: 147881 - RNA, 19 nt, Artificial Sequence
  Description of Artificial Sequence: Synthetic oligonucleotide
  Antisense strand to SEQ ID NO: 147880
ucuuacacuuacaugcgua

SEQ ID NO: 147882 - RNA, 19 nt, Artificial Sequence
  Description of Artificial Sequence: Synthetic oligonucleotide
  Sense strand starting at position 3075 of SEQ ID NO: 1897
gaccucuacgcauguaagu

SEQ ID NO: 147883 - RNA, 19 nt, Artificial Sequence
  Description of Artificial Sequence: Synthetic oligonucleotide
  Antisense strand to SEQ ID NO: 147882
acuuacaugcguagagguc

SEQ ID NO: 147884 - RNA, 19 nt, Artificial Sequence
  Description of Artificial Sequence: Synthetic oligonucleotide
  Sense strand starting at position 3004 of SEQ ID NO: 1897
caguguaagcaucauagua

SEQ ID NO: 147885 - RNA, 19 nt, Artificial Sequence
  Description of Artificial Sequence: Synthetic oligonucleotide
  Antisense strand to SEQ ID NO: 147884
uacuaugaugcuuacacug

SEQ ID NO: 147886 - RNA, 19 nt, Artificial Sequence
  Description of Artificial Sequence: Synthetic oligonucleotide
  Sense strand starting at position 2997 of SEQ ID NO: 1897
gacggcucaguguaagcau

SEQ ID NO: 147887 - RNA, 19 nt, Artificial Sequence
  Description of Artificial Sequence: Synthetic oligonucleotide
  Antisense strand to SEQ ID NO: 147886
augcuuacacugagccguc

SEQ ID NO: 147888 - RNA, 19 nt, Artificial Sequence
  Description of Artificial Sequence: Synthetic oligonucleotide
  Sense strand starting at position 2868 of SEQ ID NO: 1897
gugugcaacuaaguuaaga

SEQ ID NO: 147889 - RNA, 19 nt, Artificial Sequence
  Description of Artificial Sequence: Synthetic oligonucleotide
  Antisense strand to SEQ ID NO: 147888
ucuuaacuuaguugcacac

SEQ ID NO: 147890 - RNA, 19 nt, Artificial Sequence
  Description of Artificial Sequence: Synthetic oligonucleotide
  Sense strand starting at position 2861 of SEQ ID NO: 1897
aucaauagugugcaacuaa

SEQ ID NO: 147891 - RNA, 19 nt, Artificial Sequence
  Description of Artificial Sequence: Synthetic oligonucleotide
  Antisense strand to SEQ ID NO: 147890
uuaguugcacacuauugau

SEQ ID NO: 147892 - RNA, 19 nt, Artificial Sequence
  Description of Artificial Sequence: Synthetic oligonucleotide
  Sense strand starting at position 2859 of SEQ ID NO: 1897
acaucaauagugugcaacu

SEQ ID NO: 147893 - RNA, 19 nt, Artificial Sequence
  Description of Artificial Sequence: Synthetic oligonucleotide
  Antisense strand to SEQ ID NO: 147892
aguugcacacuauugaugu

SEQ ID NO: 147894 - RNA, 19 nt, Artificial Sequence
  Description of Artificial Sequence: Synthetic oligonucleotide
  Sense strand starting at position 2746 of SEQ ID NO: 1897
gugagcaucugacucagaa

SEQ ID NO: 147895 - RNA, 19 nt, Artificial Sequence
  Description of Artificial Sequence: Synthetic oligonucleotide
  Antisense strand to SEQ ID NO: 147894
uucugagucagaugcucac

SEQ ID NO: 147896 - RNA, 19 nt, Artificial Sequence
  Description of Artificial Sequence: Synthetic oligonucleotide
  Sense strand starting at position 2620 of SEQ ID NO: 1897
ccagguauaccuggacaga

SEQ ID NO: 147897 - RNA, 19 nt, Artificial Sequence
  Description of Artificial Sequence: Synthetic oligonucleotide
  Antisense strand to SEQ ID NO: 147896
ucuguccagguauaccugg

SEQ ID NO: 147898 - RNA, 19 nt, Artificial Sequence
  Description of Artificial Sequence: Synthetic oligonucleotide
  Sense strand starting at position 2611 of SEQ ID NO: 1897
agucuuaaaccagguauac

SEQ ID NO: 147899 - RNA, 19 nt, Artificial Sequence
  Description of Artificial Sequence: Synthetic oligonucleotide
  Antisense strand to SEQ ID NO: 147898
guauaccugguuuaagacu

SEQ ID NO: 147900 - RNA, 19 nt, Artificial Sequence
  Description of Artificial Sequence: Synthetic oligonucleotide
  Sense strand starting at position 2582 of SEQ ID NO: 1897
aaaugugaacacugagguu

SEQ ID NO: 147901 - RNA, 19 nt, Artificial Sequence
  Description of Artificial Sequence: Synthetic oligonucleotide
  Antisense strand to SEQ ID NO: 147900
aaccucaguguucacauuu

SEQ ID NO: 147902 - RNA, 19 nt, Artificial Sequence
  Description of Artificial Sequence: Synthetic oligonucleotide
  Sense strand starting at position 2544 of SEQ ID NO: 1897
ccagaaugauucucauguu

SEQ ID NO: 147903 - RNA, 19 nt, Artificial Sequence
  Description of Artificial Sequence: Synthetic oligonucleotide
  Antisense strand to SEQ ID NO: 147902
aacaugagaaucauucugg

SEQ ID NO: 147904 - RNA, 19 nt, Artificial Sequence
  Description of Artificial Sequence: Synthetic oligonucleotide
  Sense strand starting at position 2541 of SEQ ID NO: 1897
gcaccagaaugauucucau

SEQ ID NO: 147905 - RNA, 19 nt, Artificial Sequence
  Description of Artificial Sequence: Synthetic oligonucleotide
  Antisense strand to SEQ ID NO: 147904
augagaaucauucuggugc

SEQ ID NO: 147906 - RNA, 19 nt, Artificial Sequence
  Description of Artificial Sequence: Synthetic oligonucleotide
  Sense strand starting at position 2535 of SEQ ID NO: 1897
aucuuugcaccagaaugau

SEQ ID NO: 147907 - RNA, 19 nt, Artificial Sequence
  Description of Artificial Sequence: Synthetic oligonucleotide
  Antisense strand to SEQ ID NO: 147906
aucauucuggugcaaagau

SEQ ID NO: 147908 - RNA, 19 nt, Artificial Sequence
  Description of Artificial Sequence: Synthetic oligonucleotide
  Sense strand starting at position 2529 of SEQ ID NO: 1897
cugagaaucuuugcaccag

SEQ ID NO: 147909 - RNA, 19 nt, Artificial Sequence
  Description of Artificial Sequence: Synthetic oligonucleotide
  Antisense strand to SEQ ID NO: 147908
cuggugcaaagauucucag

SEQ ID NO: 147910 - RNA, 19 nt, Artificial Sequence
  Description of Artificial Sequence: Synthetic oligonucleotide
  Sense strand starting at position 2496 of SEQ ID NO: 1897
cuccuugggugauucuuaa

SEQ ID NO: 147911 - RNA, 19 nt, Artificial Sequence
  Description of Artificial Sequence: Synthetic oligonucleotide
  Antisense strand to SEQ ID NO: 147910
uuaagaaucacccaaggag

SEQ ID NO: 147912 - RNA, 19 nt, Artificial Sequence
  Description of Artificial Sequence: Synthetic oligonucleotide
  Sense strand starting at position 2489 of SEQ ID NO: 1897
caauaagcuccuuggguga

SEQ ID NO: 147913 - RNA, 19 nt, Artificial Sequence
  Description of Artificial Sequence: Synthetic oligonucleotide
  Antisense strand to SEQ ID NO: 147912
ucacccaaggagcuuauug

SEQ ID NO: 147914 - RNA, 19 nt, Artificial Sequence
  Description of Artificial Sequence: Synthetic oligonucleotide
  Sense strand starting at position 2449 of SEQ ID NO: 1897
ggguaccauacuugagagu

SEQ ID NO: 147915 - RNA, 19 nt, Artificial Sequence
  Description of Artificial Sequence: Synthetic oligonucleotide
  Antisense strand to SEQ ID NO: 147914
acucucaaguaugguaccc

SEQ ID NO: 147916 - RNA, 19 nt, Artificial Sequence
  Description of Artificial Sequence: Synthetic oligonucleotide
  Sense strand starting at position 2370 of SEQ ID NO: 1897
agaauaguuucuccaagug

SEQ ID NO: 147917 - RNA, 19 nt, Artificial Sequence
  Description of Artificial Sequence: Synthetic oligonucleotide
  Antisense strand to SEQ ID NO: 147916
cacuuggagaaacuauucu

SEQ ID NO: 147918 - RNA, 19 nt, Artificial Sequence
  Description of Artificial Sequence: Synthetic oligonucleotide
  Sense strand starting at position 2368 of SEQ ID NO: 1897
cuagaauaguuucuccaag

SEQ ID NO: 147919 - RNA, 19 nt, Artificial Sequence
  Description of Artificial Sequence: Synthetic oligonucleotide
  Antisense strand to SEQ ID NO: 147918
cuuggagaaacuauucuag

SEQ ID NO: 147920 - RNA, 19 nt, Artificial Sequence
  Description of Artificial Sequence: Synthetic oligonucleotide
  Sense strand starting at position 2347 of SEQ ID NO: 1897
ucccuagucuagucuacaa

SEQ ID NO: 147921 - RNA, 19 nt, Artificial Sequence
  Description of Artificial Sequence: Synthetic oligonucleotide
  Antisense strand to SEQ ID NO: 147920
uuguagacuagacuaggga

SEQ ID NO: 147922 - RNA, 19 nt, Artificial Sequence
  Description of Artificial Sequence: Synthetic oligonucleotide
  Sense strand starting at position 2324 of SEQ ID NO: 1897
gaaggacauuuauguuucu

SEQ ID NO: 147923 - RNA, 19 nt, Artificial Sequence
  Description of Artificial Sequence: Synthetic oligonucleotide
  Antisense strand to SEQ ID NO: 147922
agaaacauaaauguccuuc

SEQ ID NO: 147924 - RNA, 19 nt, Artificial Sequence
  Description of Artificial Sequence: Synthetic oligonucleotide
  Sense strand starting at position 2308 of SEQ ID NO: 1897
guuagugcucaggaaugaa

SEQ ID NO: 147925 - RNA, 19 nt, Artificial Sequence
  Description of Artificial Sequence: Synthetic oligonucleotide
  Antisense strand to SEQ ID NO: 147924
uucauuccugagcacuaac

SEQ ID NO: 147926 - RNA, 19 nt, Artificial Sequence
  Description of Artificial Sequence: Synthetic oligonucleotide
  Sense strand starting at position 2267 of SEQ ID NO: 1897
gugauuaaguauccauuaa

SEQ ID NO: 147927 - RNA, 19 nt, Artificial Sequence
  Description of Artificial Sequence: Synthetic oligonucleotide
  Antisense strand to SEQ ID NO: 147926
uuaauggauacuuaaucac

SEQ ID NO: 147928 - RNA, 19 nt, Artificial Sequence
  Description of Artificial Sequence: Synthetic oligonucleotide
  Sense strand starting at position 2226 of SEQ ID NO: 1897
guagacauguucuuaauaa

SEQ ID NO: 147929 - RNA, 19 nt, Artificial Sequence
  Description of Artificial Sequence: Synthetic oligonucleotide
  Antisense strand to SEQ ID NO: 147928
uuauuaagaacaugucuac

SEQ ID NO: 147930 - RNA, 19 nt, Artificial Sequence
  Description of Artificial Sequence: Synthetic oligonucleotide
  Sense strand starting at position 2182 of SEQ ID NO: 1897
uuacuuucucauuguggua

SEQ ID NO: 147931 - RNA, 19 nt, Artificial Sequence
  Description of Artificial Sequence: Synthetic oligonucleotide
  Antisense strand to SEQ ID NO: 147930
uaccacaaugagaaaguaa

SEQ ID NO: 147932 - RNA, 19 nt, Artificial Sequence
  Description of Artificial Sequence: Synthetic oligonucleotide
  Sense strand starting at position 2109 of SEQ ID NO: 1897
aucuaaacagcguagaaua

SEQ ID NO: 147933 - RNA, 19 nt, Artificial Sequence
  Description of Artificial Sequence: Synthetic oligonucleotide
  Antisense strand to SEQ ID NO: 147932
uauucuacgcuguuuagau

SEQ ID NO: 147934 - RNA, 19 nt, Artificial Sequence
  Description of Artificial Sequence: Synthetic oligonucleotide
  Sense strand starting at position 2085 of SEQ ID NO: 1897
ccacuaaauuaccagagga

SEQ ID NO: 147935 - RNA, 19 nt, Artificial Sequence
  Description of Artificial Sequence: Synthetic oligonucleotide
  Antisense strand to SEQ ID NO: 147934
uccucugguaauuuagugg

SEQ ID NO: 147936 - RNA, 19 nt, Artificial Sequence
  Description of Artificial Sequence: Synthetic oligonucleotide
  Sense strand starting at position 2062 of SEQ ID NO: 1897
gauuaauuagcaggugacu

SEQ ID NO: 147937 - RNA, 19 nt, Artificial Sequence
  Description of Artificial Sequence: Synthetic oligonucleotide
  Antisense strand to SEQ ID NO: 147936
agucaccugcuaauuaauc

SEQ ID NO: 147938 - RNA, 19 nt, Artificial Sequence
  Description of Artificial Sequence: Synthetic oligonucleotide
  Sense strand starting at position 143 of SEQ ID NO: 1897
cacagucauguaggaacua

SEQ ID NO: 147939 - RNA, 19 nt, Artificial Sequence
  Description of Artificial Sequence: Synthetic oligonucleotide
  Antisense strand to SEQ ID NO: 147938
uaguuccuacaugacugug

SEQ ID NO: 147940 - RNA, 19 nt, Artificial Sequence
  Description of Artificial Sequence: Synthetic oligonucleotide
  Sense strand starting at position 73 of SEQ ID NO: 1897
augugugcguguauauaga

SEQ ID NO: 147941 - RNA, 19 nt, Artificial Sequence
  Description of Artificial Sequence: Synthetic oligonucleotide
  Antisense strand to SEQ ID NO: 147940
ucuauauacacgcacacau

SEQ ID NO: 147942 - RNA, 19 nt, Artificial Sequence
  Description of Artificial Sequence: Synthetic oligonucleotide
  Sense strand starting at position 56 of SEQ ID NO: 1897
auauguggugaguguguau

SEQ ID NO: 147943 - RNA, 19 nt, Artificial Sequence
  Description of Artificial Sequence: Synthetic oligonucleotide
  Antisense strand to SEQ ID NO: 147942
auacacacucaccacauau

SEQ ID NO: 147944 - RNA, 19 nt, Artificial Sequence
  Description of Artificial Sequence: Synthetic oligonucleotide
  Sense strand starting at position 31 of SEQ ID NO: 1897
gcuugcagguuucuauaua

SEQ ID NO: 147945 - RNA, 19 nt, Artificial Sequence
  Description of Artificial Sequence: Synthetic oligonucleotide
  Antisense strand to SEQ ID NO: 147944
uauauagaaaccugcaagc

SEQ ID NO: 147946 - RNA, 19 nt, Artificial Sequence
  Description of Artificial Sequence: Synthetic oligonucleotide
  Sense strand starting at position 44 of SEQ ID NO: 1898
acccaaaugucugcaguua

SEQ ID NO: 147947 - RNA, 19 nt, Artificial Sequence
  Description of Artificial Sequence: Synthetic oligonucleotide
  Antisense strand to SEQ ID NO: 147946
uaacugcagacauuugggu

SEQ ID NO: 147948 - RNA, 19 nt, Artificial Sequence
  Description of Artificial Sequence: Synthetic oligonucleotide
  Sense strand starting at position 45 of SEQ ID NO: 1898
cccaaaugucugcaguuaa

SEQ ID NO: 147949 - RNA, 19 nt, Artificial Sequence
  Description of Artificial Sequence: Synthetic oligonucleotide
  Antisense strand to SEQ ID NO: 147948
uuaacugcagacauuuggg

SEQ ID NO: 147950 - RNA, 19 nt, Artificial Sequence
  Description of Artificial Sequence: Synthetic oligonucleotide
  Sense strand starting at position 125 of SEQ ID NO: 1898
cuaucuguggcauagauaa

SEQ ID NO: 147951 - RNA, 19 nt, Artificial Sequence
  Description of Artificial Sequence: Synthetic oligonucleotide
  Antisense strand to SEQ ID NO: 147950
uuaucuaugccacagauag

SEQ ID NO: 147952 - RNA, 19 nt, Artificial Sequence
  Description of Artificial Sequence: Synthetic oligonucleotide
  Sense strand starting at position 140 of SEQ ID NO: 1898
auaauauggucaguggauu

SEQ ID NO: 147953 - RNA, 19 nt, Artificial Sequence
  Description of Artificial Sequence: Synthetic oligonucleotide
  Antisense strand to SEQ ID NO: 147952
aauccacugaccauauuau

SEQ ID NO: 147954 - RNA, 19 nt, Artificial Sequence
  Description of Artificial Sequence: Synthetic oligonucleotide
  Sense strand starting at position 333 of SEQ ID NO: 1898
ggguaaauacugugauuau

SEQ ID NO: 147955 - RNA, 19 nt, Artificial Sequence
  Description of Artificial Sequence: Synthetic oligonucleotide
  Antisense strand to SEQ ID NO: 147954
auaaucacaguauuuaccc

SEQ ID NO: 147956 - RNA, 19 nt, Artificial Sequence
  Description of Artificial Sequence: Synthetic oligonucleotide
  Sense strand starting at position 369 of SEQ ID NO: 1898
gggacuugaggcuagaguu

SEQ ID NO: 147957 - RNA, 19 nt, Artificial Sequence
  Description of Artificial Sequence: Synthetic oligonucleotide
  Antisense strand to SEQ ID NO: 147956
aacucuagccucaaguccc

SEQ ID NO: 147958 - RNA, 19 nt, Artificial Sequence
  Description of Artificial Sequence: Synthetic oligonucleotide
  Sense strand starting at position 468 of SEQ ID NO: 1898
gccagccaucaugggauua

SEQ ID NO: 147959 - RNA, 19 nt, Artificial Sequence
  Description of Artificial Sequence: Synthetic oligonucleotide
  Antisense strand to SEQ ID NO: 147958
uaaucccaugauggcuggc

SEQ ID NO: 147960 - RNA, 19 nt, Artificial Sequence
  Description of Artificial Sequence: Synthetic oligonucleotide
  Sense strand starting at position 487 of SEQ ID NO: 1898
gagggacaguggccauauu

SEQ ID NO: 147961 - RNA, 19 nt, Artificial Sequence
  Description of Artificial Sequence: Synthetic oligonucleotide
  Antisense strand to SEQ ID NO: 147960
aauauggccacugucccuc

SEQ ID NO: 147962 - RNA, 19 nt, Artificial Sequence
  Description of Artificial Sequence: Synthetic oligonucleotide
  Sense strand starting at position 497 of SEQ ID NO: 1898
ggccauauuagagggucuu

SEQ ID NO: 147963 - RNA, 19 nt, Artificial Sequence
  Description of Artificial Sequence: Synthetic oligonucleotide
  Antisense strand to SEQ ID NO: 147962
aagacccucuaauauggcc

SEQ ID NO: 147964 - RNA, 19 nt, Artificial Sequence
  Description of Artificial Sequence: Synthetic oligonucleotide
  Sense strand starting at position 498 of SEQ ID NO: 1898
gccauauuagagggucuuu

SEQ ID NO: 147965 - RNA, 19 nt, Artificial Sequence
  Description of Artificial Sequence: Synthetic oligonucleotide
  Antisense strand to SEQ ID NO: 147964
aaagacccucuaauauggc

SEQ ID NO: 147966 - RNA, 19 nt, Artificial Sequence
  Description of Artificial Sequence: Synthetic oligonucleotide
  Sense strand starting at position 567 of SEQ ID NO: 1898
aaugcaauggcucgaucua

SEQ ID NO: 147967 - RNA, 19 nt, Artificial Sequence
  Description of Artificial Sequence: Synthetic oligonucleotide
  Antisense strand to SEQ ID NO: 147966
uagaucgagccauugcauu

SEQ ID NO: 147968 - RNA, 19 nt, Artificial Sequence
  Description of Artificial Sequence: Synthetic oligonucleotide
  Sense strand starting at position 807 of SEQ ID NO: 1898
agccuucuagagggucauu

SEQ ID NO: 147969 - RNA, 19 nt, Artificial Sequence
  Description of Artificial Sequence: Synthetic oligonucleotide
  Antisense strand to SEQ ID NO: 147968
aaugacccucuagaaggcu

SEQ ID NO: 147970 - RNA, 19 nt, Artificial Sequence
  Description of Artificial Sequence: Synthetic oligonucleotide
  Sense strand starting at position 1067 of SEQ ID NO: 1898
ggaagaggcucaccucuau

SEQ ID NO: 147971 - RNA, 19 nt, Artificial Sequence
  Description of Artificial Sequence: Synthetic oligonucleotide
  Antisense strand to SEQ ID NO: 147970
auagaggugagccucuucc

SEQ ID NO: 147972 - RNA, 19 nt, Artificial Sequence
  Description of Artificial Sequence: Synthetic oligonucleotide
  Sense strand starting at position 1255 of SEQ ID NO: 1898
uggcucugacgauggaauu

SEQ ID NO: 147973 - RNA, 19 nt, Artificial Sequence
  Description of Artificial Sequence: Synthetic oligonucleotide
  Antisense strand to SEQ ID NO: 147972
aauuccaucgucagagcca

SEQ ID NO: 147974 - RNA, 19 nt, Artificial Sequence
  Description of Artificial Sequence: Synthetic oligonucleotide
  Sense strand starting at position 1256 of SEQ ID NO: 1898
ggcucugacgauggaauua

SEQ ID NO: 147975 - RNA, 19 nt, Artificial Sequence
  Description of Artificial Sequence: Synthetic oligonucleotide
  Antisense strand to SEQ ID NO: 147974
uaauuccaucgucagagcc

SEQ ID NO: 147976 - RNA, 19 nt, Artificial Sequence
  Description of Artificial Sequence: Synthetic oligonucleotide
  Sense strand starting at position 2100 of SEQ ID NO: 1898
gcguucgucccuccuacaa

SEQ ID NO: 147977 - RNA, 19 nt, Artificial Sequence
  Description of Artificial Sequence: Synthetic oligonucleotide
  Antisense strand to SEQ ID NO: 147976
uuguaggagggacgaacgc

SEQ ID NO: 147978 - RNA, 19 nt, Artificial Sequence
  Description of Artificial Sequence: Synthetic oligonucleotide
  Sense strand starting at position 2172 of SEQ ID NO: 1898
uguggauccucuucucuau

SEQ ID NO: 147979 - RNA, 19 nt, Artificial Sequence
  Description of Artificial Sequence: Synthetic oligonucleotide
  Antisense strand to SEQ ID NO: 147978
auagagaagaggauccaca

SEQ ID NO: 147980 - RNA, 19 nt, Artificial Sequence
  Description of Artificial Sequence: Synthetic oligonucleotide
  Sense strand starting at position 2302 of SEQ ID NO: 1898
uguuauucccuccauagca

SEQ ID NO: 147981 - RNA, 19 nt, Artificial Sequence
  Description of Artificial Sequence: Synthetic oligonucleotide
  Antisense strand to SEQ ID NO: 147980
ugcuauggagggaauaaca

SEQ ID NO: 147982 - RNA, 19 nt, Artificial Sequence
  Description of Artificial Sequence: Synthetic oligonucleotide
  Sense strand starting at position 2323 of SEQ ID NO: 1898
gcuccauauguuuaguuau

SEQ ID NO: 147983 - RNA, 19 nt, Artificial Sequence
  Description of Artificial Sequence: Synthetic oligonucleotide
  Antisense strand to SEQ ID NO: 147982
auaacuaaacauauggagc

SEQ ID NO: 147984 - RNA, 19 nt, Artificial Sequence
  Description of Artificial Sequence: Synthetic oligonucleotide
  Sense strand starting at position 2325 of SEQ ID NO: 1898
uccauauguuuaguuauga

SEQ ID NO: 147985 - RNA, 19 nt, Artificial Sequence
  Description of Artificial Sequence: Synthetic oligonucleotide
  Antisense strand to SEQ ID NO: 147984
ucauaacuaaacauaugga

SEQ ID NO: 147986 - RNA, 19 nt, Artificial Sequence
  Description of Artificial Sequence: Synthetic oligonucleotide
  Sense strand starting at position 2326 of SEQ ID NO: 1898
ccauauguuuaguuaugau

SEQ ID NO: 147987 - RNA, 19 nt, Artificial Sequence
  Description of Artificial Sequence: Synthetic oligonucleotide
  Antisense strand to SEQ ID NO: 147986
aucauaacuaaacauaugg

SEQ ID NO: 147988 - RNA, 19 nt, Artificial Sequence
  Description of Artificial Sequence: Synthetic oligonucleotide
  Sense strand starting at position 2456 of SEQ ID NO: 1898
agggacuuggcucaaguuu

SEQ ID NO: 147989 - RNA, 19 nt, Artificial Sequence
  Description of Artificial Sequence: Synthetic oligonucleotide
  Antisense strand to SEQ ID NO: 147988
aaacuugagccaagucccu

SEQ ID NO: 147990 - RNA, 19 nt, Artificial Sequence
  Description of Artificial Sequence: Synthetic oligonucleotide
  Sense strand starting at position 2663 of SEQ ID NO: 1898
gaaggugggugcucaguaa

SEQ ID NO: 147991 - RNA, 19 nt, Artificial Sequence
  Description of Artificial Sequence: Synthetic oligonucleotide
  Antisense strand to SEQ ID NO: 147990
uuacugagcacccaccuuc

SEQ ID NO: 147992 - RNA, 19 nt, Artificial Sequence
  Description of Artificial Sequence: Synthetic oligonucleotide
  Sense strand starting at position 2704 of SEQ ID NO: 1898
gcaggugggucauuacuga

SEQ ID NO: 147993 - RNA, 19 nt, Artificial Sequence
  Description of Artificial Sequence: Synthetic oligonucleotide
  Antisense strand to SEQ ID NO: 147992
ucaguaaugacccaccugc

SEQ ID NO: 147994 - RNA, 19 nt, Artificial Sequence
  Description of Artificial Sequence: Synthetic oligonucleotide
  Sense strand starting at position 2709 of SEQ ID NO: 1898
ugggucauuacugagaguu

SEQ ID NO: 147995 - RNA, 19 nt, Artificial Sequence
  Description of Artificial Sequence: Synthetic oligonucleotide
  Antisense strand to SEQ ID NO: 147994
aacucucaguaaugaccca

SEQ ID NO: 147996 - RNA, 19 nt, Artificial Sequence
  Description of Artificial Sequence: Synthetic oligonucleotide
  Sense strand starting at position 2717 of SEQ ID NO: 1898
uacugagaguuugucuauu

SEQ ID NO: 147997 - RNA, 19 nt, Artificial Sequence
  Description of Artificial Sequence: Synthetic oligonucleotide
  Antisense strand to SEQ ID NO: 147996
aauagacaaacucucagua

SEQ ID NO: 147998 - RNA, 19 nt, Artificial Sequence
  Description of Artificial Sequence: Synthetic oligonucleotide
  Sense strand starting at position 2719 of SEQ ID NO: 1898
cugagaguuugucuauuac

SEQ ID NO: 147999 - RNA, 19 nt, Artificial Sequence
  Description of Artificial Sequence: Synthetic oligonucleotide
  Antisense strand to SEQ ID NO: 147998
guaauagacaaacucucag

SEQ ID NO: 148000 - RNA, 19 nt, Artificial Sequence
  Description of Artificial Sequence: Synthetic oligonucleotide
  Sense strand starting at position 2799 of SEQ ID NO: 1898
aggaauaauuuaggaguua

SEQ ID NO: 148001 - RNA, 19 nt, Artificial Sequence
  Description of Artificial Sequence: Synthetic oligonucleotide
  Antisense strand to SEQ ID NO: 148000
uaacuccuaaauuauuccu

SEQ ID NO: 148002 - RNA, 19 nt, Artificial Sequence
  Description of Artificial Sequence: Synthetic oligonucleotide
  Sense strand starting at position 2800 of SEQ ID NO: 1898
ggaauaauuuaggaguuaa

SEQ ID NO: 148003 - RNA, 19 nt, Artificial Sequence
  Description of Artificial Sequence: Synthetic oligonucleotide
  Antisense strand to SEQ ID NO: 148002
uuaacuccuaaauuauucc

SEQ ID NO: 148004 - RNA, 19 nt, Artificial Sequence
  Description of Artificial Sequence: Synthetic oligonucleotide
  Sense strand starting at position 2811 of SEQ ID NO: 1898
ggaguuaagcuuuaccuaa

SEQ ID NO: 148005 - RNA, 19 nt, Artificial Sequence
  Description of Artificial Sequence: Synthetic oligonucleotide
  Antisense strand to SEQ ID NO: 148004
uuagguaaagcuuaacucc

SEQ ID NO: 148006 - RNA, 19 nt, Artificial Sequence
  Description of Artificial Sequence: Synthetic oligonucleotide
  Sense strand starting at position 2915 of SEQ ID NO: 1898
ucuuguacugacgaagacu

SEQ ID NO: 148007 - RNA, 19 nt, Artificial Sequence
  Description of Artificial Sequence: Synthetic oligonucleotide
  Antisense strand to SEQ ID NO: 148006
agucuucgucaguacaaga

SEQ ID NO: 148008 - RNA, 19 nt, Artificial Sequence
  Description of Artificial Sequence: Synthetic oligonucleotide
  Sense strand starting at position 2938 of SEQ ID NO: 1898
gaaacauaacgugacuugu

SEQ ID NO: 148009 - RNA, 19 nt, Artificial Sequence
  Description of Artificial Sequence: Synthetic oligonucleotide
  Antisense strand to SEQ ID NO: 148008
acaagucacguuauguuuc

SEQ ID NO: 148010 - RNA, 19 nt, Artificial Sequence
  Description of Artificial Sequence: Synthetic oligonucleotide
  Sense strand starting at position 2972 of SEQ ID NO: 1898
acagcuagucagugugaaa

SEQ ID NO: 148011 - RNA, 19 nt, Artificial Sequence
  Description of Artificial Sequence: Synthetic oligonucleotide
  Antisense strand to SEQ ID NO: 148010
uuucacacugacuagcugu

SEQ ID NO: 148012 - RNA, 19 nt, Artificial Sequence
  Description of Artificial Sequence: Synthetic oligonucleotide
  Sense strand starting at position 3279 of SEQ ID NO: 1898
agagcuaggcccugucaaa

SEQ ID NO: 148013 - RNA, 19 nt, Artificial Sequence
  Description of Artificial Sequence: Synthetic oligonucleotide
  Antisense strand to SEQ ID NO: 148012
uuugacagggccuagcucu

SEQ ID NO: 148014 - RNA, 19 nt, Artificial Sequence
  Description of Artificial Sequence: Synthetic oligonucleotide
  Sense strand starting at position 3466 of SEQ ID NO: 1898
ggcccauuaugucuaagag

SEQ ID NO: 148015 - RNA, 19 nt, Artificial Sequence
  Description of Artificial Sequence: Synthetic oligonucleotide
  Antisense strand to SEQ ID NO: 148014
cucuuagacauaaugggcc

SEQ ID NO: 148016 - RNA, 19 nt, Artificial Sequence
  Description of Artificial Sequence: Synthetic oligonucleotide
  Sense strand starting at position 3467 of SEQ ID NO: 1898
gcccauuaugucuaagaga

SEQ ID NO: 148017 - RNA, 19 nt, Artificial Sequence
  Description of Artificial Sequence: Synthetic oligonucleotide
  Antisense strand to SEQ ID NO: 148016
ucucuuagacauaaugggc

SEQ ID NO: 148018 - RNA, 19 nt, Artificial Sequence
  Description of Artificial Sequence: Synthetic oligonucleotide
  Sense strand starting at position 3574 of SEQ ID NO: 1898
caggauucugcagguggaa

SEQ ID NO: 148019 - RNA, 19 nt, Artificial Sequence
  Description of Artificial Sequence: Synthetic oligonucleotide
  Antisense strand to SEQ ID NO: 148018
uuccaccugcagaauccug

SEQ ID NO: 148020 - RNA, 19 nt, Artificial Sequence
  Description of Artificial Sequence: Synthetic oligonucleotide
  Sense strand starting at position 3586 of SEQ ID NO: 1898
gguggaauccuuugcccau

SEQ ID NO: 148021 - RNA, 19 nt, Artificial Sequence
  Description of Artificial Sequence: Synthetic oligonucleotide
  Antisense strand to SEQ ID NO: 148020
augggcaaaggauuccacc

SEQ ID NO: 148022 - RNA, 19 nt, Artificial Sequence
  Description of Artificial Sequence: Synthetic oligonucleotide
  Sense strand starting at position 3587 of SEQ ID NO: 1898
guggaauccuuugcccaua

SEQ ID NO: 148023 - RNA, 19 nt, Artificial Sequence
  Description of Artificial Sequence: Synthetic oligonucleotide
  Antisense strand to SEQ ID NO: 148022
uaugggcaaaggauuccac

SEQ ID NO: 148024 - RNA, 19 nt, Artificial Sequence
  Description of Artificial Sequence: Synthetic oligonucleotide
  Sense strand starting at position 3712 of SEQ ID NO: 1898
agggcucugaucugaauua

SEQ ID NO: 148025 - RNA, 19 nt, Artificial Sequence
  Description of Artificial Sequence: Synthetic oligonucleotide
  Antisense strand to SEQ ID NO: 148024
uaauucagaucagagcccu

SEQ ID NO: 148026 - RNA, 19 nt, Artificial Sequence
  Description of Artificial Sequence: Synthetic oligonucleotide
  Sense strand starting at position 107 of SEQ ID NO: 1899
ggcauuucucucugccacu

SEQ ID NO: 148027 - RNA, 19 nt, Artificial Sequence
  Description of Artificial Sequence: Synthetic oligonucleotide
  Antisense strand to SEQ ID NO: 148026
aguggcagagagaaaugcc

SEQ ID NO: 148028 - RNA, 19 nt, Artificial Sequence
  Description of Artificial Sequence: Synthetic oligonucleotide
  Sense strand starting at position 186 of SEQ ID NO: 1899
ucguuuacuccucacaaug

SEQ ID NO: 148029 - RNA, 19 nt, Artificial Sequence
  Description of Artificial Sequence: Synthetic oligonucleotide
  Antisense strand to SEQ ID NO: 148028
cauugugaggaguaaacga

SEQ ID NO: 148030 - RNA, 19 nt, Artificial Sequence
  Description of Artificial Sequence: Synthetic oligonucleotide
  Sense strand starting at position 576 of SEQ ID NO: 1899
cugcaauaccgucagaaua

SEQ ID NO: 148031 - RNA, 19 nt, Artificial Sequence
  Description of Artificial Sequence: Synthetic oligonucleotide
  Antisense strand to SEQ ID NO: 148030
uauucugacgguauugcag

SEQ ID NO: 148032 - RNA, 19 nt, Artificial Sequence
  Description of Artificial Sequence: Synthetic oligonucleotide
  Sense strand starting at position 586 of SEQ ID NO: 1899
gucagaauaaagugguacu

SEQ ID NO: 148033 - RNA, 19 nt, Artificial Sequence
  Description of Artificial Sequence: Synthetic oligonucleotide
  Antisense strand to SEQ ID NO: 148032
aguaccacuuuauucugac

SEQ ID NO: 148034 - RNA, 19 nt, Artificial Sequence
  Description of Artificial Sequence: Synthetic oligonucleotide
  Sense strand starting at position 989 of SEQ ID NO: 1899
gagagcuguccacgucuga

SEQ ID NO: 148035 - RNA, 19 nt, Artificial Sequence
  Description of Artificial Sequence: Synthetic oligonucleotide
  Antisense strand to SEQ ID NO: 148034
ucagacguggacagcucuc

SEQ ID NO: 148036 - RNA, 19 nt, Artificial Sequence
  Description of Artificial Sequence: Synthetic oligonucleotide
  Sense strand starting at position 1350 of SEQ ID NO: 1899
ggaauucaggacugcgagu

SEQ ID NO: 148037 - RNA, 19 nt, Artificial Sequence
  Description of Artificial Sequence: Synthetic oligonucleotide
  Antisense strand to SEQ ID NO: 148036
acucgcaguccugaauucc

SEQ ID NO: 148038 - RNA, 19 nt, Artificial Sequence
  Description of Artificial Sequence: Synthetic oligonucleotide
  Sense strand starting at position 2376 of SEQ ID NO: 1899
gucaaaucuucugugcauc

SEQ ID NO: 148039 - RNA, 19 nt, Artificial Sequence
  Description of Artificial Sequence: Synthetic oligonucleotide
  Antisense strand to SEQ ID NO: 148038
gaugcacagaagauuugac

SEQ ID NO: 148040 - RNA, 19 nt, Artificial Sequence
  Description of Artificial Sequence: Synthetic oligonucleotide
  Sense strand starting at position 2537 of SEQ ID NO: 1899
uguggucaugccuagguua

SEQ ID NO: 148041 - RNA, 19 nt, Artificial Sequence
  Description of Artificial Sequence: Synthetic oligonucleotide
  Antisense strand to SEQ ID NO: 148040
uaaccuaggcaugaccaca

SEQ ID NO: 148042 - RNA, 19 nt, Artificial Sequence
  Description of Artificial Sequence: Synthetic oligonucleotide
  Sense strand starting at position 2539 of SEQ ID NO: 1899
uggucaugccuagguuacu

SEQ ID NO: 148043 - RNA, 19 nt, Artificial Sequence
  Description of Artificial Sequence: Synthetic oligonucleotide
  Antisense strand to SEQ ID NO: 148042
aguaaccuaggcaugacca

SEQ ID NO: 148044 - RNA, 19 nt, Artificial Sequence
  Description of Artificial Sequence: Synthetic oligonucleotide
  Sense strand starting at position 2641 of SEQ ID NO: 1899
cccauacauguuuguggaa

SEQ ID NO: 148045 - RNA, 19 nt, Artificial Sequence
  Description of Artificial Sequence: Synthetic oligonucleotide
  Antisense strand to SEQ ID NO: 148044
uuccacaaacauguauggg

SEQ ID NO: 148046 - RNA, 19 nt, Artificial Sequence
  Description of Artificial Sequence: Synthetic oligonucleotide
  Sense strand starting at position 2642 of SEQ ID NO: 1899
ccauacauguuuguggaau

SEQ ID NO: 148047 - RNA, 19 nt, Artificial Sequence
  Description of Artificial Sequence: Synthetic oligonucleotide
  Antisense strand to SEQ ID NO: 148046
auuccacaaacauguaugg

SEQ ID NO: 148048 - RNA, 19 nt, Artificial Sequence
  Description of Artificial Sequence: Synthetic oligonucleotide
  Sense strand starting at position 2705 of SEQ ID NO: 1899
ugaagucaagcccgaagaa

SEQ ID NO: 148049 - RNA, 19 nt, Artificial Sequence
  Description of Artificial Sequence: Synthetic oligonucleotide
  Antisense strand to SEQ ID NO: 148048
uucuucgggcuugacuuca

SEQ ID NO: 148050 - RNA, 19 nt, Artificial Sequence
  Description of Artificial Sequence: Synthetic oligonucleotide
  Sense strand starting at position 2734 of SEQ ID NO: 1899
gagacucacuucuuagagu

SEQ ID NO: 148051 - RNA, 19 nt, Artificial Sequence
  Description of Artificial Sequence: Synthetic oligonucleotide
  Antisense strand to SEQ ID NO: 148050
acucuaagaagugagucuc

SEQ ID NO: 148052 - RNA, 19 nt, Artificial Sequence
  Description of Artificial Sequence: Synthetic oligonucleotide
  Sense strand starting at position 2808 of SEQ ID NO: 1899
acuguaguuagugggaguu

SEQ ID NO: 148053 - RNA, 19 nt, Artificial Sequence
  Description of Artificial Sequence: Synthetic oligonucleotide
  Antisense strand to SEQ ID NO: 148052
aacucccacuaacuacagu

SEQ ID NO: 148054 - RNA, 19 nt, Artificial Sequence
  Description of Artificial Sequence: Synthetic oligonucleotide
  Sense strand starting at position 2814 of SEQ ID NO: 1899
guuagugggaguuaagcua

SEQ ID NO: 148055 - RNA, 19 nt, Artificial Sequence
  Description of Artificial Sequence: Synthetic oligonucleotide
  Antisense strand to SEQ ID NO: 148054
uagcuuaacucccacuaac

SEQ ID NO: 148056 - RNA, 19 nt, Artificial Sequence
  Description of Artificial Sequence: Synthetic oligonucleotide
  Sense strand starting at position 2821 of SEQ ID NO: 1899
ggaguuaagcuagagcaga

SEQ ID NO: 148057 - RNA, 19 nt, Artificial Sequence
  Description of Artificial Sequence: Synthetic oligonucleotide
  Antisense strand to SEQ ID NO: 148056
ucugcucuagcuuaacucc

SEQ ID NO: 148058 - RNA, 19 nt, Artificial Sequence
  Description of Artificial Sequence: Synthetic oligonucleotide
  Sense strand starting at position 2842 of SEQ ID NO: 1899
agauguacugauugugugu

SEQ ID NO: 148059 - RNA, 19 nt, Artificial Sequence
  Description of Artificial Sequence: Synthetic oligonucleotide
  Antisense strand to SEQ ID NO: 148058
acacacaaucaguacaucu

SEQ ID NO: 148060 - RNA, 19 nt, Artificial Sequence
  Description of Artificial Sequence: Synthetic oligonucleotide
  Sense strand starting at position 2893 of SEQ ID NO: 1899
uguggaaucucccucuuag

SEQ ID NO: 148061 - RNA, 19 nt, Artificial Sequence
  Description of Artificial Sequence: Synthetic oligonucleotide
  Antisense strand to SEQ ID NO: 148060
cuaagagggagauuccaca

SEQ ID NO: 148062 - RNA, 19 nt, Artificial Sequence
  Description of Artificial Sequence: Synthetic oligonucleotide
  Sense strand starting at position 2946 of SEQ ID NO: 1899
ggcacagggucguuuacaa

SEQ ID NO: 148063 - RNA, 19 nt, Artificial Sequence
  Description of Artificial Sequence: Synthetic oligonucleotide
  Antisense strand to SEQ ID NO: 148062
uuguaaacgacccugugcc

SEQ ID NO: 148064 - RNA, 19 nt, Artificial Sequence
  Description of Artificial Sequence: Synthetic oligonucleotide
  Sense strand starting at position 2954 of SEQ ID NO: 1899
gucguuuacaaugacagga

SEQ ID NO: 148065 - RNA, 19 nt, Artificial Sequence
  Description of Artificial Sequence: Synthetic oligonucleotide
  Antisense strand to SEQ ID NO: 148064
uccugucauuguaaacgac

SEQ ID NO: 148066 - RNA, 19 nt, Artificial Sequence
  Description of Artificial Sequence: Synthetic oligonucleotide
  Sense strand starting at position 3045 of SEQ ID NO: 1899
agcaguuggguccgaaaug

SEQ ID NO: 148067 - RNA, 19 nt, Artificial Sequence
  Description of Artificial Sequence: Synthetic oligonucleotide
  Antisense strand to SEQ ID NO: 148066
cauuucggacccaacugcu

SEQ ID NO: 148068 - RNA, 19 nt, Artificial Sequence
  Description of Artificial Sequence: Synthetic oligonucleotide
  Sense strand starting at position 3097 of SEQ ID NO: 1899
ccaaguuugcaggaggcaa

SEQ ID NO: 148069 - RNA, 19 nt, Artificial Sequence
  Description of Artificial Sequence: Synthetic oligonucleotide
  Antisense strand to SEQ ID NO: 148068
uugccuccugcaaacuugg

SEQ ID NO: 148070 - RNA, 19 nt, Artificial Sequence
  Description of Artificial Sequence: Synthetic oligonucleotide
  Sense strand starting at position 3228 of SEQ ID NO: 1899
augcucugugucuaaucaa

SEQ ID NO: 148071 - RNA, 19 nt, Artificial Sequence
  Description of Artificial Sequence: Synthetic oligonucleotide
  Antisense strand to SEQ ID NO: 148070
uugauuagacacagagcau

SEQ ID NO: 148072 - RNA, 19 nt, Artificial Sequence
  Description of Artificial Sequence: Synthetic oligonucleotide
  Sense strand starting at position 3231 of SEQ ID NO: 1899
cucugugucuaaucaaaca

SEQ ID NO: 148073 - RNA, 19 nt, Artificial Sequence
  Description of Artificial Sequence: Synthetic oligonucleotide
  Antisense strand to SEQ ID NO: 148072
uguuugauuagacacagag

SEQ ID NO: 148074 - RNA, 19 nt, Artificial Sequence
  Description of Artificial Sequence: Synthetic oligonucleotide
  Sense strand starting at position 3302 of SEQ ID NO: 1899
ugcauaacucucugacaag

SEQ ID NO: 148075 - RNA, 19 nt, Artificial Sequence
  Description of Artificial Sequence: Synthetic oligonucleotide
  Antisense strand to SEQ ID NO: 148074
cuugucagagaguuaugca

SEQ ID NO: 148076 - RNA, 19 nt, Artificial Sequence
  Description of Artificial Sequence: Synthetic oligonucleotide
  Sense strand starting at position 3457 of SEQ ID NO: 1899
cggguuuccugccugagga

SEQ ID NO: 148077 - RNA, 19 nt, Artificial Sequence
  Description of Artificial Sequence: Synthetic oligonucleotide
  Antisense strand to SEQ ID NO: 148076
uccucaggcaggaaacccg

SEQ ID NO: 148078 - RNA, 19 nt, Artificial Sequence
  Description of Artificial Sequence: Synthetic oligonucleotide
  Sense strand starting at position 3458 of SEQ ID NO: 1899
ggguuuccugccugaggaa

SEQ ID NO: 148079 - RNA, 19 nt, Artificial Sequence
  Description of Artificial Sequence: Synthetic oligonucleotide
  Antisense strand to SEQ ID NO: 148078
uuccucaggcaggaaaccc

SEQ ID NO: 148080 - RNA, 19 nt, Artificial Sequence
  Description of Artificial Sequence: Synthetic oligonucleotide
  Sense strand starting at position 3459 of SEQ ID NO: 1899
gguuuccugccugaggaaa

SEQ ID NO: 148081 - RNA, 19 nt, Artificial Sequence
  Description of Artificial Sequence: Synthetic oligonucleotide
  Antisense strand to SEQ ID NO: 148080
uuuccucaggcaggaaacc

SEQ ID NO: 148082 - RNA, 19 nt, Artificial Sequence
  Description of Artificial Sequence: Synthetic oligonucleotide
  Sense strand starting at position 3501 of SEQ ID NO: 1899
cguuacuaggcucaggaau

SEQ ID NO: 148083 - RNA, 19 nt, Artificial Sequence
  Description of Artificial Sequence: Synthetic oligonucleotide
  Antisense strand to SEQ ID NO: 148082
auuccugagccuaguaacg

SEQ ID NO: 148084 - RNA, 19 nt, Artificial Sequence
  Description of Artificial Sequence: Synthetic oligonucleotide
  Sense strand starting at position 3566 of SEQ ID NO: 1899
uuagaaccaugugacaaua

SEQ ID NO: 148085 - RNA, 19 nt, Artificial Sequence
  Description of Artificial Sequence: Synthetic oligonucleotide
  Antisense strand to SEQ ID NO: 148084
uauugucacaugguucuaa

SEQ ID NO: 148086 - RNA, 19 nt, Artificial Sequence
  Description of Artificial Sequence: Synthetic oligonucleotide
  Sense strand starting at position 3568 of SEQ ID NO: 1899
agaaccaugugacaauaau

SEQ ID NO: 148087 - RNA, 19 nt, Artificial Sequence
  Description of Artificial Sequence: Synthetic oligonucleotide
  Antisense strand to SEQ ID NO: 148086
auuauugucacaugguucu

SEQ ID NO: 148088 - RNA, 19 nt, Artificial Sequence
  Description of Artificial Sequence: Synthetic oligonucleotide
  Sense strand starting at position 3576 of SEQ ID NO: 1899
gugacaauaaugggugaau

SEQ ID NO: 148089 - RNA, 19 nt, Artificial Sequence
  Description of Artificial Sequence: Synthetic oligonucleotide
  Antisense strand to SEQ ID NO: 148088
auucacccauuauugucac

SEQ ID NO: 148090 - RNA, 19 nt, Artificial Sequence
  Description of Artificial Sequence: Synthetic oligonucleotide
  Sense strand starting at position 3713 of SEQ ID NO: 1899
uguaaauucugauccucag

SEQ ID NO: 148091 - RNA, 19 nt, Artificial Sequence
  Description of Artificial Sequence: Synthetic oligonucleotide
  Antisense strand to SEQ ID NO: 148090
cugaggaucagaauuuaca

SEQ ID NO: 148092 - RNA, 19 nt, Artificial Sequence
  Description of Artificial Sequence: Synthetic oligonucleotide
  Sense strand starting at position 3738 of SEQ ID NO: 1899
caagucaauugcucagaga

SEQ ID NO: 148093 - RNA, 19 nt, Artificial Sequence
  Description of Artificial Sequence: Synthetic oligonucleotide
  Antisense strand to SEQ ID NO: 148092
ucucugagcaauugacuug

SEQ ID NO: 148094 - RNA, 19 nt, Artificial Sequence
  Description of Artificial Sequence: Synthetic oligonucleotide
  Sense strand starting at position 3739 of SEQ ID NO: 1899
aagucaauugcucagagac

SEQ ID NO: 148095 - RNA, 19 nt, Artificial Sequence
  Description of Artificial Sequence: Synthetic oligonucleotide
  Antisense strand to SEQ ID NO: 148094
gucucugagcaauugacuu

SEQ ID NO: 148096 - RNA, 19 nt, Artificial Sequence
  Description of Artificial Sequence: Synthetic oligonucleotide
  Sense strand starting at position 3788 of SEQ ID NO: 1899
gguuaugccaaaugaguug

SEQ ID NO: 148097 - RNA, 19 nt, Artificial Sequence
  Description of Artificial Sequence: Synthetic oligonucleotide
  Antisense strand to SEQ ID NO: 148096
caacucauuuggcauaacc

SEQ ID NO: 148098 - RNA, 19 nt, Artificial Sequence
  Description of Artificial Sequence: Synthetic oligonucleotide
  Sense strand starting at position 3799 of SEQ ID NO: 1899
augaguuguuucccuggga

SEQ ID NO: 148099 - RNA, 19 nt, Artificial Sequence
  Description of Artificial Sequence: Synthetic oligonucleotide
  Antisense strand to SEQ ID NO: 148098
ucccagggaaacaacucau

SEQ ID NO: 148100 - RNA, 19 nt, Artificial Sequence
  Description of Artificial Sequence: Synthetic oligonucleotide
  Sense strand starting at position 3800 of SEQ ID NO: 1899
ugaguuguuucccugggaa

SEQ ID NO: 148101 - RNA, 19 nt, Artificial Sequence
  Description of Artificial Sequence: Synthetic oligonucleotide
  Antisense strand to SEQ ID NO: 148100
uucccagggaaacaacuca

SEQ ID NO: 148102 - RNA, 19 nt, Artificial Sequence
  Description of Artificial Sequence: Synthetic oligonucleotide
  Sense strand starting at position 3802 of SEQ ID NO: 1899
aguuguuucccugggaaag

SEQ ID NO: 148103 - RNA, 19 nt, Artificial Sequence
  Description of Artificial Sequence: Synthetic oligonucleotide
  Antisense strand to SEQ ID NO: 148102
cuuucccagggaaacaacu

SEQ ID NO: 148104 - RNA, 19 nt, Artificial Sequence
  Description of Artificial Sequence: Synthetic oligonucleotide
  Sense strand starting at position 3803 of SEQ ID NO: 1899
guuguuucccugggaaagc

SEQ ID NO: 148105 - RNA, 19 nt, Artificial Sequence
  Description of Artificial Sequence: Synthetic oligonucleotide
  Antisense strand to SEQ ID NO: 148104
gcuuucccagggaaacaac

SEQ ID NO: 148106 - RNA, 19 nt, Artificial Sequence
  Description of Artificial Sequence: Synthetic oligonucleotide
  Sense strand starting at position 27 of SEQ ID NO: 1900
uaccacaguguuugagaga

SEQ ID NO: 148107 - RNA, 19 nt, Artificial Sequence
  Description of Artificial Sequence: Synthetic oligonucleotide
  Antisense strand to SEQ ID NO: 148106
ucucucaaacacuguggua

SEQ ID NO: 148108 - RNA, 19 nt, Artificial Sequence
  Description of Artificial Sequence: Synthetic oligonucleotide
  Sense strand starting at position 32 of SEQ ID NO: 1900
caguguuugagagacugua

SEQ ID NO: 148109 - RNA, 19 nt, Artificial Sequence
  Description of Artificial Sequence: Synthetic oligonucleotide
  Antisense strand to SEQ ID NO: 148108
uacagucucucaaacacug

SEQ ID NO: 148110 - RNA, 19 nt, Artificial Sequence
  Description of Artificial Sequence: Synthetic oligonucleotide
  Sense strand starting at position 110 of SEQ ID NO: 1900
gagggacaacuguguaacu

SEQ ID NO: 148111 - RNA, 19 nt, Artificial Sequence
  Description of Artificial Sequence: Synthetic oligonucleotide
  Antisense strand to SEQ ID NO: 148110
aguuacacaguugucccuc

SEQ ID NO: 148112 - RNA, 19 nt, Artificial Sequence
  Description of Artificial Sequence: Synthetic oligonucleotide
  Sense strand starting at position 112 of SEQ ID NO: 1900
gggacaacuguguaacuuu

SEQ ID NO: 148113 - RNA, 19 nt, Artificial Sequence
  Description of Artificial Sequence: Synthetic oligonucleotide
  Antisense strand to SEQ ID NO: 148112
aaaguuacacaguuguccc

SEQ ID NO: 148114 - RNA, 19 nt, Artificial Sequence
  Description of Artificial Sequence: Synthetic oligonucleotide
  Sense strand starting at position 115 of SEQ ID NO: 1900
acaacuguguaacuuuauu

SEQ ID NO: 148115 - RNA, 19 nt, Artificial Sequence
  Description of Artificial Sequence: Synthetic oligonucleotide
  Antisense strand to SEQ ID NO: 148114
aauaaaguuacacaguugu

SEQ ID NO: 148116 - RNA, 19 nt, Artificial Sequence
  Description of Artificial Sequence: Synthetic oligonucleotide
  Sense strand starting at position 336 of SEQ ID NO: 1900
ugcuguagauucuuuauau

SEQ ID NO: 148117 - RNA, 19 nt, Artificial Sequence
  Description of Artificial Sequence: Synthetic oligonucleotide
  Antisense strand to SEQ ID NO: 148116
auauaaagaaucuacagca

SEQ ID NO: 148118 - RNA, 19 nt, Artificial Sequence
  Description of Artificial Sequence: Synthetic oligonucleotide
  Sense strand starting at position 337 of SEQ ID NO: 1900
gcuguagauucuuuauaua

SEQ ID NO: 148119 - RNA, 19 nt, Artificial Sequence
  Description of Artificial Sequence: Synthetic oligonucleotide
  Antisense strand to SEQ ID NO: 148118
uauauaaagaaucuacagc

SEQ ID NO: 148120 - RNA, 19 nt, Artificial Sequence
  Description of Artificial Sequence: Synthetic oligonucleotide
  Sense strand starting at position 437 of SEQ ID NO: 1900
acuagauagugagcuaugu

SEQ ID NO: 148121 - RNA, 19 nt, Artificial Sequence
  Description of Artificial Sequence: Synthetic oligonucleotide
  Antisense strand to SEQ ID NO: 148120
acauagcucacuaucuagu

SEQ ID NO: 148122 - RNA, 19 nt, Artificial Sequence
  Description of Artificial Sequence: Synthetic oligonucleotide
  Sense strand starting at position 439 of SEQ ID NO: 1900
uagauagugagcuauguug

SEQ ID NO: 148123 - RNA, 19 nt, Artificial Sequence
  Description of Artificial Sequence: Synthetic oligonucleotide
  Antisense strand to SEQ ID NO: 148122
caacauagcucacuaucua

SEQ ID NO: 148124 - RNA, 19 nt, Artificial Sequence
  Description of Artificial Sequence: Synthetic oligonucleotide
  Sense strand starting at position 780 of SEQ ID NO: 1900
agagaaugcuguccacuua

SEQ ID NO: 148125 - RNA, 19 nt, Artificial Sequence
  Description of Artificial Sequence: Synthetic oligonucleotide
  Antisense strand to SEQ ID NO: 148124
uaaguggacagcauucucu

SEQ ID NO: 148126 - RNA, 19 nt, Artificial Sequence
  Description of Artificial Sequence: Synthetic oligonucleotide
  Sense strand starting at position 781 of SEQ ID NO: 1900
gagaaugcuguccacuuaa

SEQ ID NO: 148127 - RNA, 19 nt, Artificial Sequence
  Description of Artificial Sequence: Synthetic oligonucleotide
  Antisense strand to SEQ ID NO: 148126
uuaaguggacagcauucuc

SEQ ID NO: 148128 - RNA, 19 nt, Artificial Sequence
  Description of Artificial Sequence: Synthetic oligonucleotide
  Sense strand starting at position 1144 of SEQ ID NO: 1900
gaaggagaccgguaguauc

SEQ ID NO: 148129 - RNA, 19 nt, Artificial Sequence
  Description of Artificial Sequence: Synthetic oligonucleotide
  Antisense strand to SEQ ID NO: 148128
gauacuaccggucuccuuc

SEQ ID NO: 148130 - RNA, 19 nt, Artificial Sequence
  Description of Artificial Sequence: Synthetic oligonucleotide
  Sense strand starting at position 1155 of SEQ ID NO: 1900
guaguaucuccuggugaac

SEQ ID NO: 148131 - RNA, 19 nt, Artificial Sequence
  Description of Artificial Sequence: Synthetic oligonucleotide
  Antisense strand to SEQ ID NO: 148130
guucaccaggagauacuac

SEQ ID NO: 148132 - RNA, 19 nt, Artificial Sequence
  Description of Artificial Sequence: Synthetic oligonucleotide
  Sense strand starting at position 1223 of SEQ ID NO: 1900
gcgaguaugaccgcgagua

SEQ ID NO: 148133 - RNA, 19 nt, Artificial Sequence
  Description of Artificial Sequence: Synthetic oligonucleotide
  Antisense strand to SEQ ID NO: 148132
uacucgcggucauacucgc

SEQ ID NO: 148134 - RNA, 19 nt, Artificial Sequence
  Description of Artificial Sequence: Synthetic oligonucleotide
  Sense strand starting at position 1294 of SEQ ID NO: 1900
cuccgacuccuggacgaaa

SEQ ID NO: 148135 - RNA, 19 nt, Artificial Sequence
  Description of Artificial Sequence: Synthetic oligonucleotide
  Antisense strand to SEQ ID NO: 148134
uuucguccaggagucggag

SEQ ID NO: 148136 - RNA, 19 nt, Artificial Sequence
  Description of Artificial Sequence: Synthetic oligonucleotide
  Sense strand starting at position 1442 of SEQ ID NO: 1900
gccacaugucguucacgua

SEQ ID NO: 148137 - RNA, 19 nt, Artificial Sequence
  Description of Artificial Sequence: Synthetic oligonucleotide
  Antisense strand to SEQ ID NO: 148136
uacgugaacgacauguggc

SEQ ID NO: 148138 - RNA, 19 nt, Artificial Sequence
  Description of Artificial Sequence: Synthetic oligonucleotide
  Sense strand starting at position 1491 of SEQ ID NO: 1900
gcgcuuucuccggaaagga

SEQ ID NO: 148139 - RNA, 19 nt, Artificial Sequence
  Description of Artificial Sequence: Synthetic oligonucleotide
  Antisense strand to SEQ ID NO: 148138
uccuuuccggagaaagcgc

SEQ ID NO: 148140 - RNA, 19 nt, Artificial Sequence
  Description of Artificial Sequence: Synthetic oligonucleotide
  Sense strand starting at position 1867 of SEQ ID NO: 1900
uuccuuucggaacguaaga

SEQ ID NO: 148141 - RNA, 19 nt, Artificial Sequence
  Description of Artificial Sequence: Synthetic oligonucleotide
  Antisense strand to SEQ ID NO: 148140
ucuuacguuccgaaaggaa

SEQ ID NO: 148142 - RNA, 19 nt, Artificial Sequence
  Description of Artificial Sequence: Synthetic oligonucleotide
  Sense strand starting at position 2202 of SEQ ID NO: 1900
gagauaauugcgggaccga

SEQ ID NO: 148143 - RNA, 19 nt, Artificial Sequence
  Description of Artificial Sequence: Synthetic oligonucleotide
  Antisense strand to SEQ ID NO: 148142
ucggucccgcaauuaucuc

SEQ ID NO: 148144 - RNA, 19 nt, Artificial Sequence
  Description of Artificial Sequence: Synthetic oligonucleotide
  Sense strand starting at position 2585 of SEQ ID NO: 1900
cuggaaaugcaguauuaac

SEQ ID NO: 148145 - RNA, 19 nt, Artificial Sequence
  Description of Artificial Sequence: Synthetic oligonucleotide
  Antisense strand to SEQ ID NO: 148144
guuaauacugcauuuccag

SEQ ID NO: 148146 - RNA, 19 nt, Artificial Sequence
  Description of Artificial Sequence: Synthetic oligonucleotide
  Sense strand starting at position 2698 of SEQ ID NO: 1900
aauaaugaagucugcgaua

SEQ ID NO: 148147 - RNA, 19 nt, Artificial Sequence
  Description of Artificial Sequence: Synthetic oligonucleotide
  Antisense strand to SEQ ID NO: 148146
uaucgcagacuucauuauu

SEQ ID NO: 148148 - RNA, 19 nt, Artificial Sequence
  Description of Artificial Sequence: Synthetic oligonucleotide
  Sense strand starting at position 2700 of SEQ ID NO: 1900
uaaugaagucugcgauauc

SEQ ID NO: 148149 - RNA, 19 nt, Artificial Sequence
  Description of Artificial Sequence: Synthetic oligonucleotide
  Antisense strand to SEQ ID NO: 148148
gauaucgcagacuucauua

SEQ ID NO: 148150 - RNA, 19 nt, Artificial Sequence
  Description of Artificial Sequence: Synthetic oligonucleotide
  Sense strand starting at position 2703 of SEQ ID NO: 1900
ugaagucugcgauaucucu

SEQ ID NO: 148151 - RNA, 19 nt, Artificial Sequence
  Description of Artificial Sequence: Synthetic oligonucleotide
  Antisense strand to SEQ ID NO: 148150
agagauaucgcagacuuca

SEQ ID NO: 148152 - RNA, 19 nt, Artificial Sequence
  Description of Artificial Sequence: Synthetic oligonucleotide
  Sense strand starting at position 2732 of SEQ ID NO: 1900
guguuuggugugaguguaa

SEQ ID NO: 148153 - RNA, 19 nt, Artificial Sequence
  Description of Artificial Sequence: Synthetic oligonucleotide
  Antisense strand to SEQ ID NO: 148152
uuacacucacaccaaacac

SEQ ID NO: 148154 - RNA, 19 nt, Artificial Sequence
  Description of Artificial Sequence: Synthetic oligonucleotide
  Sense strand starting at position 2819 of SEQ ID NO: 1900
gcauaacaauugccuugaa

SEQ ID NO: 148155 - RNA, 19 nt, Artificial Sequence
  Description of Artificial Sequence: Synthetic oligonucleotide
  Antisense strand to SEQ ID NO: 148154
uucaaggcaauuguuaugc

SEQ ID NO: 148156 - RNA, 19 nt, Artificial Sequence
  Description of Artificial Sequence: Synthetic oligonucleotide
  Sense strand starting at position 3237 of SEQ ID NO: 1900
augcaucaugauggaagua

SEQ ID NO: 148157 - RNA, 19 nt, Artificial Sequence
  Description of Artificial Sequence: Synthetic oligonucleotide
  Antisense strand to SEQ ID NO: 148156
uacuuccaucaugaugcau

SEQ ID NO: 148158 - RNA, 19 nt, Artificial Sequence
  Description of Artificial Sequence: Synthetic oligonucleotide
  Sense strand starting at position 3312 of SEQ ID NO: 1900
aucagaaaccuuugccgaa

SEQ ID NO: 148159 - RNA, 19 nt, Artificial Sequence
  Description of Artificial Sequence: Synthetic oligonucleotide
  Antisense strand to SEQ ID NO: 148158
uucggcaaagguuucugau

SEQ ID NO: 148160 - RNA, 19 nt, Artificial Sequence
  Description of Artificial Sequence: Synthetic oligonucleotide
  Sense strand starting at position 3313 of SEQ ID NO: 1900
ucagaaaccuuugccgaaa

SEQ ID NO: 148161 - RNA, 19 nt, Artificial Sequence
  Description of Artificial Sequence: Synthetic oligonucleotide
  Antisense strand to SEQ ID NO: 148160
uuucggcaaagguuucuga

SEQ ID NO: 148162 - RNA, 19 nt, Artificial Sequence
  Description of Artificial Sequence: Synthetic oligonucleotide
  Sense strand starting at position 3316 of SEQ ID NO: 1900
gaaaccuuugccgaaaguu

SEQ ID NO: 148163 - RNA, 19 nt, Artificial Sequence
  Description of Artificial Sequence: Synthetic oligonucleotide
  Antisense strand to SEQ ID NO: 148162
aacuuucggcaaagguuuc

SEQ ID NO: 148164 - RNA, 19 nt, Artificial Sequence
  Description of Artificial Sequence: Synthetic oligonucleotide
  Sense strand starting at position 3324 of SEQ ID NO: 1900
ugccgaaaguucucauaaa

SEQ ID NO: 148165 - RNA, 19 nt, Artificial Sequence
  Description of Artificial Sequence: Synthetic oligonucleotide
  Antisense strand to SEQ ID NO: 148164
uuuaugagaacuuucggca

SEQ ID NO: 148166 - RNA, 19 nt, Artificial Sequence
  Description of Artificial Sequence: Synthetic oligonucleotide
  Sense strand starting at position 3424 of SEQ ID NO: 1900
gcgggaagaucaccuaaga

SEQ ID NO: 148167 - RNA, 19 nt, Artificial Sequence
  Description of Artificial Sequence: Synthetic oligonucleotide
  Antisense strand to SEQ ID NO: 148166
ucuuaggugaucuucccgc

SEQ ID NO: 148168 - RNA, 19 nt, Artificial Sequence
  Description of Artificial Sequence: Synthetic oligonucleotide
  Sense strand starting at position 3723 of SEQ ID NO: 1900
acuaaaguauacuuacgau

SEQ ID NO: 148169 - RNA, 19 nt, Artificial Sequence
  Description of Artificial Sequence: Synthetic oligonucleotide
  Antisense strand to SEQ ID NO: 148168
aucguaaguauacuuuagu

SEQ ID NO: 148170 - RNA, 19 nt, Artificial Sequence
  Description of Artificial Sequence: Synthetic oligonucleotide
  Sense strand starting at position 3729 of SEQ ID NO: 1900
guauacuuacgauacaguu

SEQ ID NO: 148171 - RNA, 19 nt, Artificial Sequence
  Description of Artificial Sequence: Synthetic oligonucleotide
  Antisense strand to SEQ ID NO: 148170
aacuguaucguaaguauac

SEQ ID NO: 148172 - RNA, 19 nt, Artificial Sequence
  Description of Artificial Sequence: Synthetic oligonucleotide
  Sense strand starting at position 3748 of SEQ ID NO: 1900
uugagcucuugguuaugaa

SEQ ID NO: 148173 - RNA, 19 nt, Artificial Sequence
  Description of Artificial Sequence: Synthetic oligonucleotide
  Antisense strand to SEQ ID NO: 148172
uucauaaccaagagcucaa

SEQ ID NO: 148174 - RNA, 19 nt, Artificial Sequence
  Description of Artificial Sequence: Synthetic oligonucleotide
  Sense strand starting at position 3749 of SEQ ID NO: 1900
ugagcucuugguuaugaau

SEQ ID NO: 148175 - RNA, 19 nt, Artificial Sequence
  Description of Artificial Sequence: Synthetic oligonucleotide
  Antisense strand to SEQ ID NO: 148174
auucauaaccaagagcuca

SEQ ID NO: 148176 - RNA, 19 nt, Artificial Sequence
  Description of Artificial Sequence: Synthetic oligonucleotide
  Sense strand starting at position 3758 of SEQ ID NO: 1900
gguuaugaauaggaaagga

SEQ ID NO: 148177 - RNA, 19 nt, Artificial Sequence
  Description of Artificial Sequence: Synthetic oligonucleotide
  Antisense strand to SEQ ID NO: 148176
uccuuuccuauucauaacc

SEQ ID NO: 148178 - RNA, 19 nt, Artificial Sequence
  Description of Artificial Sequence: Synthetic oligonucleotide
  Sense strand starting at position 3777 of SEQ ID NO: 1900
uggaacaagucuccguaga

SEQ ID NO: 148179 - RNA, 19 nt, Artificial Sequence
  Description of Artificial Sequence: Synthetic oligonucleotide
  Antisense strand to SEQ ID NO: 148178
ucuacggagacuuguucca

SEQ ID NO: 148180 - RNA, 19 nt, Artificial Sequence
  Description of Artificial Sequence: Synthetic oligonucleotide
  Sense strand starting at position 3778 of SEQ ID NO: 1900
ggaacaagucuccguagac

SEQ ID NO: 148181 - RNA, 19 nt, Artificial Sequence
  Description of Artificial Sequence: Synthetic oligonucleotide
  Antisense strand to SEQ ID NO: 148180
gucuacggagacuuguucc

SEQ ID NO: 148182 - RNA, 19 nt, Artificial Sequence
  Description of Artificial Sequence: Synthetic oligonucleotide
  Sense strand starting at position 3779 of SEQ ID NO: 1900
gaacaagucuccguagaca

SEQ ID NO: 148183 - RNA, 19 nt, Artificial Sequence
  Description of Artificial Sequence: Synthetic oligonucleotide
  Antisense strand to SEQ ID NO: 148182
ugucuacggagacuuguuc

SEQ ID NO: 148184 - RNA, 19 nt, Artificial Sequence
  Description of Artificial Sequence: Synthetic oligonucleotide
  Sense strand starting at position 3782 of SEQ ID NO: 1900
caagucuccguagacaguu

SEQ ID NO: 148185 - RNA, 19 nt, Artificial Sequence
  Description of Artificial Sequence: Synthetic oligonucleotide
  Antisense strand to SEQ ID NO: 148184
aacugucuacggagacuug

SEQ ID NO: 148186 - RNA, 19 nt, Artificial Sequence
  Description of Artificial Sequence: Synthetic oligonucleotide
  Sense strand starting at position 3950 of SEQ ID NO: 1901
auuuauauuccuugcuagu

SEQ ID NO: 148187 - RNA, 19 nt, Artificial Sequence
  Description of Artificial Sequence: Synthetic oligonucleotide
  Antisense strand to SEQ ID NO: 148186
acuagcaaggaauauaaau

SEQ ID NO: 148188 - RNA, 19 nt, Artificial Sequence
  Description of Artificial Sequence: Synthetic oligonucleotide
  Sense strand starting at position 3685 of SEQ ID NO: 1901
gcuacugauaagggucuau

SEQ ID NO: 148189 - RNA, 19 nt, Artificial Sequence
  Description of Artificial Sequence: Synthetic oligonucleotide
  Antisense strand to SEQ ID NO: 148188
auagacccuuaucaguagc

SEQ ID NO: 148190 - RNA, 19 nt, Artificial Sequence
  Description of Artificial Sequence: Synthetic oligonucleotide
  Sense strand starting at position 3232 of SEQ ID NO: 1901
guugaaguaaggcaaugau

SEQ ID NO: 148191 - RNA, 19 nt, Artificial Sequence
  Description of Artificial Sequence: Synthetic oligonucleotide
  Antisense strand to SEQ ID NO: 148190
aucauugccuuacuucaac

SEQ ID NO: 148192 - RNA, 19 nt, Artificial Sequence
  Description of Artificial Sequence: Synthetic oligonucleotide
  Sense strand starting at position 3158 of SEQ ID NO: 1901
gggugaauaagaggcuuaa

SEQ ID NO: 148193 - RNA, 19 nt, Artificial Sequence
  Description of Artificial Sequence: Synthetic oligonucleotide
  Antisense strand to SEQ ID NO: 148192
uuaagccucuuauucaccc

SEQ ID NO: 148194 - RNA, 19 nt, Artificial Sequence
  Description of Artificial Sequence: Synthetic oligonucleotide
  Sense strand starting at position 3138 of SEQ ID NO: 1901
aggcuuuggcaguaggaga

SEQ ID NO: 148195 - RNA, 19 nt, Artificial Sequence
  Description of Artificial Sequence: Synthetic oligonucleotide
  Antisense strand to SEQ ID NO: 148194
ucuccuacugccaaagccu

SEQ ID NO: 148196 - RNA, 19 nt, Artificial Sequence
  Description of Artificial Sequence: Synthetic oligonucleotide
  Sense strand starting at position 3132 of SEQ ID NO: 1901
aaaugaaggcuuuggcagu

SEQ ID NO: 148197 - RNA, 19 nt, Artificial Sequence
  Description of Artificial Sequence: Synthetic oligonucleotide
  Antisense strand to SEQ ID NO: 148196
acugccaaagccuucauuu

SEQ ID NO: 148198 - RNA, 19 nt, Artificial Sequence
  Description of Artificial Sequence: Synthetic oligonucleotide
  Sense strand starting at position 3095 of SEQ ID NO: 1901
agauauuaaucagagaagu

SEQ ID NO: 148199 - RNA, 19 nt, Artificial Sequence
  Description of Artificial Sequence: Synthetic oligonucleotide
  Antisense strand to SEQ ID NO: 148198
acuucucugauuaauaucu

SEQ ID NO: 148200 - RNA, 19 nt, Artificial Sequence
  Description of Artificial Sequence: Synthetic oligonucleotide
  Sense strand starting at position 3025 of SEQ ID NO: 1901
ugcuuugcgacagagaaug

SEQ ID NO: 148201 - RNA, 19 nt, Artificial Sequence
  Description of Artificial Sequence: Synthetic oligonucleotide
  Antisense strand to SEQ ID NO: 148200
cauucucugucgcaaagca

SEQ ID NO: 148202 - RNA, 19 nt, Artificial Sequence
  Description of Artificial Sequence: Synthetic oligonucleotide
  Sense strand starting at position 2979 of SEQ ID NO: 1901
gguggucugaugugaacac

SEQ ID NO: 148203 - RNA, 19 nt, Artificial Sequence
  Description of Artificial Sequence: Synthetic oligonucleotide
  Antisense strand to SEQ ID NO: 148202
guguucacaucagaccacc

SEQ ID NO: 148204 - RNA, 19 nt, Artificial Sequence
  Description of Artificial Sequence: Synthetic oligonucleotide
  Sense strand starting at position 2955 of SEQ ID NO: 1901
cuagaagacugagauguga

SEQ ID NO: 148205 - RNA, 19 nt, Artificial Sequence
  Description of Artificial Sequence: Synthetic oligonucleotide
  Antisense strand to SEQ ID NO: 148204
ucacaucucagucuucuag

SEQ ID NO: 148206 - RNA, 19 nt, Artificial Sequence
  Description of Artificial Sequence: Synthetic oligonucleotide
  Sense strand starting at position 2908 of SEQ ID NO: 1901
acagcuuccuguguuaaac

SEQ ID NO: 148207 - RNA, 19 nt, Artificial Sequence
  Description of Artificial Sequence: Synthetic oligonucleotide
  Antisense strand to SEQ ID NO: 148206
guuuaacacaggaagcugu

SEQ ID NO: 148208 - RNA, 19 nt, Artificial Sequence
  Description of Artificial Sequence: Synthetic oligonucleotide
  Sense strand starting at position 2709 of SEQ ID NO: 1901
gagagacugagacguaauc

SEQ ID NO: 148209 - RNA, 19 nt, Artificial Sequence
  Description of Artificial Sequence: Synthetic oligonucleotide
  Antisense strand to SEQ ID NO: 148208
gauuacgucucagucucuc

SEQ ID NO: 148210 - RNA, 19 nt, Artificial Sequence
  Description of Artificial Sequence: Synthetic oligonucleotide
  Sense strand starting at position 2688 of SEQ ID NO: 1901
gaaguuauuggagguauaa

SEQ ID NO: 148211 - RNA, 19 nt, Artificial Sequence
  Description of Artificial Sequence: Synthetic oligonucleotide
  Antisense strand to SEQ ID NO: 148210
uuauaccuccaauaacuuc

SEQ ID NO: 148212 - RNA, 19 nt, Artificial Sequence
  Description of Artificial Sequence: Synthetic oligonucleotide
  Sense strand starting at position 2685 of SEQ ID NO: 1901
cccgaaguuauuggaggua

SEQ ID NO: 148213 - RNA, 19 nt, Artificial Sequence
  Description of Artificial Sequence: Synthetic oligonucleotide
  Antisense strand to SEQ ID NO: 148212
uaccuccaauaacuucggg

SEQ ID NO: 148214 - RNA, 19 nt, Artificial Sequence
  Description of Artificial Sequence: Synthetic oligonucleotide
  Sense strand starting at position 2612 of SEQ ID NO: 1901
guuccuacauaauugagua

SEQ ID NO: 148215 - RNA, 19 nt, Artificial Sequence
  Description of Artificial Sequence: Synthetic oligonucleotide
  Antisense strand to SEQ ID NO: 148214
uacucaauuauguaggaac

SEQ ID NO: 148216 - RNA, 19 nt, Artificial Sequence
  Description of Artificial Sequence: Synthetic oligonucleotide
  Sense strand starting at position 2604 of SEQ ID NO: 1901
guggcucaguuccuacaua

SEQ ID NO: 148217 - RNA, 19 nt, Artificial Sequence
  Description of Artificial Sequence: Synthetic oligonucleotide
  Antisense strand to SEQ ID NO: 148216
uauguaggaacugagccac

SEQ ID NO: 148218 - RNA, 19 nt, Artificial Sequence
  Description of Artificial Sequence: Synthetic oligonucleotide
  Sense strand starting at position 2484 of SEQ ID NO: 1901
agccaaaguuaugccauuu

SEQ ID NO: 148219 - RNA, 19 nt, Artificial Sequence
  Description of Artificial Sequence: Synthetic oligonucleotide
  Antisense strand to SEQ ID NO: 148218
aaauggcauaacuuuggcu

SEQ ID NO: 148220 - RNA, 19 nt, Artificial Sequence
  Description of Artificial Sequence: Synthetic oligonucleotide
  Sense strand starting at position 2453 of SEQ ID NO: 1901
aaggcagaaucacuaguuu

SEQ ID NO: 148221 - RNA, 19 nt, Artificial Sequence
  Description of Artificial Sequence: Synthetic oligonucleotide
  Antisense strand to SEQ ID NO: 148220
aaacuagugauucugccuu

SEQ ID NO: 148222 - RNA, 19 nt, Artificial Sequence
  Description of Artificial Sequence: Synthetic oligonucleotide
  Sense strand starting at position 2413 of SEQ ID NO: 1901
uucuuucuagggugacaca

SEQ ID NO: 148223 - RNA, 19 nt, Artificial Sequence
  Description of Artificial Sequence: Synthetic oligonucleotide
  Antisense strand to SEQ ID NO: 148222
ugugucacccuagaaagaa

SEQ ID NO: 148224 - RNA, 19 nt, Artificial Sequence
  Description of Artificial Sequence: Synthetic oligonucleotide
  Sense strand starting at position 2209 of SEQ ID NO: 1901
ggguaaauauguguuuaua

SEQ ID NO: 148225 - RNA, 19 nt, Artificial Sequence
  Description of Artificial Sequence: Synthetic oligonucleotide
  Antisense strand to SEQ ID NO: 148224
uauaaacacauauuuaccc

SEQ ID NO: 148226 - RNA, 19 nt, Artificial Sequence
  Description of Artificial Sequence: Synthetic oligonucleotide
  Sense strand starting at position 2208 of SEQ ID NO: 1901
uggguaaauauguguuuau

SEQ ID NO: 148227 - RNA, 19 nt, Artificial Sequence
  Description of Artificial Sequence: Synthetic oligonucleotide
  Antisense strand to SEQ ID NO: 148226
auaaacacauauuuaccca

SEQ ID NO: 148228 - RNA, 19 nt, Artificial Sequence
  Description of Artificial Sequence: Synthetic oligonucleotide
  Sense strand starting at position 2207 of SEQ ID NO: 1901
guggguaaauauguguuua

SEQ ID NO: 148229 - RNA, 19 nt, Artificial Sequence
  Description of Artificial Sequence: Synthetic oligonucleotide
  Antisense strand to SEQ ID NO: 148228
uaaacacauauuuacccac

SEQ ID NO: 148230 - RNA, 19 nt, Artificial Sequence
  Description of Artificial Sequence: Synthetic oligonucleotide
  Sense strand starting at position 2170 of SEQ ID NO: 1901
ccaguuaucccgcaggcuu

SEQ ID NO: 148231 - RNA, 19 nt, Artificial Sequence
  Description of Artificial Sequence: Synthetic oligonucleotide
  Antisense strand to SEQ ID NO: 148230
aagccugcgggauaacugg

SEQ ID NO: 148232 - RNA, 19 nt, Artificial Sequence
  Description of Artificial Sequence: Synthetic oligonucleotide
  Sense strand starting at position 1150 of SEQ ID NO: 1901
accagaaugcacugguuau

SEQ ID NO: 148233 - RNA, 19 nt, Artificial Sequence
  Description of Artificial Sequence: Synthetic oligonucleotide
  Antisense strand to SEQ ID NO: 148232
auaaccagugcauucuggu

SEQ ID NO: 148234 - RNA, 19 nt, Artificial Sequence
  Description of Artificial Sequence: Synthetic oligonucleotide
  Sense strand starting at position 1107 of SEQ ID NO: 1901
ucaggauucuuuccuguuu

SEQ ID NO: 148235 - RNA, 19 nt, Artificial Sequence
  Description of Artificial Sequence: Synthetic oligonucleotide
  Antisense strand to SEQ ID NO: 148234
aaacaggaaagaauccuga

SEQ ID NO: 148236 - RNA, 19 nt, Artificial Sequence
  Description of Artificial Sequence: Synthetic oligonucleotide
  Sense strand starting at position 1068 of SEQ ID NO: 1901
gcucucuggagguaugaau

SEQ ID NO: 148237 - RNA, 19 nt, Artificial Sequence
  Description of Artificial Sequence: Synthetic oligonucleotide
  Antisense strand to SEQ ID NO: 148236
auucauaccuccagagagc

SEQ ID NO: 148238 - RNA, 19 nt, Artificial Sequence
  Description of Artificial Sequence: Synthetic oligonucleotide
  Sense strand starting at position 1066 of SEQ ID NO: 1901
cagcucucuggagguauga

SEQ ID NO: 148239 - RNA, 19 nt, Artificial Sequence
  Description of Artificial Sequence: Synthetic oligonucleotide
  Antisense strand to SEQ ID NO: 148238
ucauaccuccagagagcug

SEQ ID NO: 148240 - RNA, 19 nt, Artificial Sequence
  Description of Artificial Sequence: Synthetic oligonucleotide
  Sense strand starting at position 1064 of SEQ ID NO: 1901
aacagcucucuggagguau

SEQ ID NO: 148241 - RNA, 19 nt, Artificial Sequence
  Description of Artificial Sequence: Synthetic oligonucleotide
  Antisense strand to SEQ ID NO: 148240
auaccuccagagagcuguu

SEQ ID NO: 148242 - RNA, 19 nt, Artificial Sequence
  Description of Artificial Sequence: Synthetic oligonucleotide
  Sense strand starting at position 1048 of SEQ ID NO: 1901
agauaauucuggucauaac

SEQ ID NO: 148243 - RNA, 19 nt, Artificial Sequence
  Description of Artificial Sequence: Synthetic oligonucleotide
  Antisense strand to SEQ ID NO: 148242
guuaugaccagaauuaucu

SEQ ID NO: 148244 - RNA, 19 nt, Artificial Sequence
  Description of Artificial Sequence: Synthetic oligonucleotide
  Sense strand starting at position 1016 of SEQ ID NO: 1901
gucaaaugucaagguguuu

SEQ ID NO: 148245 - RNA, 19 nt, Artificial Sequence
  Description of Artificial Sequence: Synthetic oligonucleotide
  Antisense strand to SEQ ID NO: 148244
aaacaccuugacauuugac

SEQ ID NO: 148246 - RNA, 19 nt, Artificial Sequence
  Description of Artificial Sequence: Synthetic oligonucleotide
  Sense strand starting at position 787 of SEQ ID NO: 1901
ggcugcaaacuaugacaaa

SEQ ID NO: 148247 - RNA, 19 nt, Artificial Sequence
  Description of Artificial Sequence: Synthetic oligonucleotide
  Antisense strand to SEQ ID NO: 148246
uuugucauaguuugcagcc

SEQ ID NO: 148248 - RNA, 19 nt, Artificial Sequence
  Description of Artificial Sequence: Synthetic oligonucleotide
  Sense strand starting at position 369 of SEQ ID NO: 1901
cuaaauuaauaugcugaga

SEQ ID NO: 148249 - RNA, 19 nt, Artificial Sequence
  Description of Artificial Sequence: Synthetic oligonucleotide
  Antisense strand to SEQ ID NO: 148248
ucucagcauauuaauuuag

SEQ ID NO: 148250 - RNA, 19 nt, Artificial Sequence
  Description of Artificial Sequence: Synthetic oligonucleotide
  Sense strand starting at position 343 of SEQ ID NO: 1901
ccuguaugggcugaacuau

SEQ ID NO: 148251 - RNA, 19 nt, Artificial Sequence
  Description of Artificial Sequence: Synthetic oligonucleotide
  Antisense strand to SEQ ID NO: 148250
auaguucagcccauacagg

SEQ ID NO: 148252 - RNA, 19 nt, Artificial Sequence
  Description of Artificial Sequence: Synthetic oligonucleotide
  Sense strand starting at position 342 of SEQ ID NO: 1901
gccuguaugggcugaacua

SEQ ID NO: 148253 - RNA, 19 nt, Artificial Sequence
  Description of Artificial Sequence: Synthetic oligonucleotide
  Antisense strand to SEQ ID NO: 148252
uaguucagcccauacaggc

SEQ ID NO: 148254 - RNA, 19 nt, Artificial Sequence
  Description of Artificial Sequence: Synthetic oligonucleotide
  Sense strand starting at position 315 of SEQ ID NO: 1901
cuugcacuugacugaacaa

SEQ ID NO: 148255 - RNA, 19 nt, Artificial Sequence
  Description of Artificial Sequence: Synthetic oligonucleotide
  Antisense strand to SEQ ID NO: 148254
uuguucagucaagugcaag

SEQ ID NO: 148256 - RNA, 19 nt, Artificial Sequence
  Description of Artificial Sequence: Synthetic oligonucleotide
  Sense strand starting at position 258 of SEQ ID NO: 1901
aaauuagaagugugcuaaa

SEQ ID NO: 148257 - RNA, 19 nt, Artificial Sequence
  Description of Artificial Sequence: Synthetic oligonucleotide
  Antisense strand to SEQ ID NO: 148256
uuuagcacacuucuaauuu

SEQ ID NO: 148258 - RNA, 19 nt, Artificial Sequence
  Description of Artificial Sequence: Synthetic oligonucleotide
  Sense strand starting at position 256 of SEQ ID NO: 1901
gcaaauuagaagugugcua

SEQ ID NO: 148259 - RNA, 19 nt, Artificial Sequence
  Description of Artificial Sequence: Synthetic oligonucleotide
  Antisense strand to SEQ ID NO: 148258
uagcacacuucuaauuugc

SEQ ID NO: 148260 - RNA, 19 nt, Artificial Sequence
  Description of Artificial Sequence: Synthetic oligonucleotide
  Sense strand starting at position 242 of SEQ ID NO: 1901
ccugauauauugcugcaaa

SEQ ID NO: 148261 - RNA, 19 nt, Artificial Sequence
  Description of Artificial Sequence: Synthetic oligonucleotide
  Antisense strand to SEQ ID NO: 148260
uuugcagcaauauaucagg

SEQ ID NO: 148262 - RNA, 19 nt, Artificial Sequence
  Description of Artificial Sequence: Synthetic oligonucleotide
  Sense strand starting at position 214 of SEQ ID NO: 1901
ccaguuauuucugacuaua

SEQ ID NO: 148263 - RNA, 19 nt, Artificial Sequence
  Description of Artificial Sequence: Synthetic oligonucleotide
  Antisense strand to SEQ ID NO: 148262
uauagucagaaauaacugg

SEQ ID NO: 148264 - RNA, 19 nt, Artificial Sequence
  Description of Artificial Sequence: Synthetic oligonucleotide
  Sense strand starting at position 213 of SEQ ID NO: 1901
accaguuauuucugacuau

SEQ ID NO: 148265 - RNA, 19 nt, Artificial Sequence
  Description of Artificial Sequence: Synthetic oligonucleotide
  Antisense strand to SEQ ID NO: 148264
auagucagaaauaacuggu

SEQ ID NO: 148266 - RNA, 19 nt, Artificial Sequence
  Description of Artificial Sequence: Synthetic oligonucleotide
  Sense strand starting at position 423 of SEQ ID NO: 1902
ccugaaguucuagaucuca

SEQ ID NO: 148267 - RNA, 19 nt, Artificial Sequence
  Description of Artificial Sequence: Synthetic oligonucleotide
  Antisense strand to SEQ ID NO: 148266
ugagaucuagaacuucagg

SEQ ID NO: 148268 - RNA, 19 nt, Artificial Sequence
  Description of Artificial Sequence: Synthetic oligonucleotide
  Sense strand starting at position 444 of SEQ ID NO: 1902
cagccucucuguucuggaa

SEQ ID NO: 148269 - RNA, 19 nt, Artificial Sequence
  Description of Artificial Sequence: Synthetic oligonucleotide
  Antisense strand to SEQ ID NO: 148268
uuccagaacagagaggcug

SEQ ID NO: 148270 - RNA, 19 nt, Artificial Sequence
  Description of Artificial Sequence: Synthetic oligonucleotide
  Sense strand starting at position 448 of SEQ ID NO: 1902
cucucuguucuggaaccau

SEQ ID NO: 148271 - RNA, 19 nt, Artificial Sequence
  Description of Artificial Sequence: Synthetic oligonucleotide
  Antisense strand to SEQ ID NO: 148270
augguuccagaacagagag

SEQ ID NO: 148272 - RNA, 19 nt, Artificial Sequence
  Description of Artificial Sequence: Synthetic oligonucleotide
  Sense strand starting at position 471 of SEQ ID NO: 1902
aggcacugcccuuauacau

SEQ ID NO: 148273 - RNA, 19 nt, Artificial Sequence
  Description of Artificial Sequence: Synthetic oligonucleotide
  Antisense strand to SEQ ID NO: 148272
auguauaagggcagugccu

SEQ ID NO: 148274 - RNA, 19 nt, Artificial Sequence
  Description of Artificial Sequence: Synthetic oligonucleotide
  Sense strand starting at position 576 of SEQ ID NO: 1902
uaaggucucucagcaagga

SEQ ID NO: 148275 - RNA, 19 nt, Artificial Sequence
  Description of Artificial Sequence: Synthetic oligonucleotide
  Antisense strand to SEQ ID NO: 148274
uccuugcugagagaccuua

SEQ ID NO: 148276 - RNA, 19 nt, Artificial Sequence
  Description of Artificial Sequence: Synthetic oligonucleotide
  Sense strand starting at position 636 of SEQ ID NO: 1902
cccagucucaggugucaca

SEQ ID NO: 148277 - RNA, 19 nt, Artificial Sequence
  Description of Artificial Sequence: Synthetic oligonucleotide
  Antisense strand to SEQ ID NO: 148276
ugugacaccugagacuggg

SEQ ID NO: 148278 - RNA, 19 nt, Artificial Sequence
  Description of Artificial Sequence: Synthetic oligonucleotide
  Sense strand starting at position 804 of SEQ ID NO: 1902
cccuauccuugcugggaga

SEQ ID NO: 148279 - RNA, 19 nt, Artificial Sequence
  Description of Artificial Sequence: Synthetic oligonucleotide
  Antisense strand to SEQ ID NO: 148278
ucucccagcaaggauaggg

SEQ ID NO: 148280 - RNA, 19 nt, Artificial Sequence
  Description of Artificial Sequence: Synthetic oligonucleotide
  Sense strand starting at position 899 of SEQ ID NO: 1902
ggccaaauccacgaacuuu

SEQ ID NO: 148281 - RNA, 19 nt, Artificial Sequence
  Description of Artificial Sequence: Synthetic oligonucleotide
  Antisense strand to SEQ ID NO: 148280
aaaguucguggauuuggcc

SEQ ID NO: 148282 - RNA, 19 nt, Artificial Sequence
  Description of Artificial Sequence: Synthetic oligonucleotide
  Sense strand starting at position 907 of SEQ ID NO: 1902
ccacgaacuuucucgaggu

SEQ ID NO: 148283 - RNA, 19 nt, Artificial Sequence
  Description of Artificial Sequence: Synthetic oligonucleotide
  Antisense strand to SEQ ID NO: 148282
accucgagaaaguucgugg

SEQ ID NO: 148284 - RNA, 19 nt, Artificial Sequence
  Description of Artificial Sequence: Synthetic oligonucleotide
  Sense strand starting at position 911 of SEQ ID NO: 1902
gaacuuucucgaggucugu

SEQ ID NO: 148285 - RNA, 19 nt, Artificial Sequence
  Description of Artificial Sequence: Synthetic oligonucleotide
  Antisense strand to SEQ ID NO: 148284
acagaccucgagaaaguuc

SEQ ID NO: 148286 - RNA, 19 nt, Artificial Sequence
  Description of Artificial Sequence: Synthetic oligonucleotide
  Sense strand starting at position 1248 of SEQ ID NO: 1902
ucuugaggucuuggaguau

SEQ ID NO: 148287 - RNA, 19 nt, Artificial Sequence
  Description of Artificial Sequence: Synthetic oligonucleotide
  Antisense strand to SEQ ID NO: 148286
auacuccaagaccucaaga

SEQ ID NO: 148288 - RNA, 19 nt, Artificial Sequence
  Description of Artificial Sequence: Synthetic oligonucleotide
  Sense strand starting at position 1252 of SEQ ID NO: 1902
gaggucuuggaguauccau

SEQ ID NO: 148289 - RNA, 19 nt, Artificial Sequence
  Description of Artificial Sequence: Synthetic oligonucleotide
  Antisense strand to SEQ ID NO: 148288
auggauacuccaagaccuc

SEQ ID NO: 148290 - RNA, 19 nt, Artificial Sequence
  Description of Artificial Sequence: Synthetic oligonucleotide
  Sense strand starting at position 1495 of SEQ ID NO: 1902
guuacucaccgcggaugaa

SEQ ID NO: 148291 - RNA, 19 nt, Artificial Sequence
  Description of Artificial Sequence: Synthetic oligonucleotide
  Antisense strand to SEQ ID NO: 148290
uucauccgcggugaguaac

SEQ ID NO: 148292 - RNA, 19 nt, Artificial Sequence
  Description of Artificial Sequence: Synthetic oligonucleotide
  Sense strand starting at position 1528 of SEQ ID NO: 1902
ucgggaaggagucgaagau

SEQ ID NO: 148293 - RNA, 19 nt, Artificial Sequence
  Description of Artificial Sequence: Synthetic oligonucleotide
  Antisense strand to SEQ ID NO: 148292
aucuucgacuccuucccga

SEQ ID NO: 148294 - RNA, 19 nt, Artificial Sequence
  Description of Artificial Sequence: Synthetic oligonucleotide
  Sense strand starting at position 1804 of SEQ ID NO: 1902
gaaaguaaguuucuguuug

SEQ ID NO: 148295 - RNA, 19 nt, Artificial Sequence
  Description of Artificial Sequence: Synthetic oligonucleotide
  Antisense strand to SEQ ID NO: 148294
caaacagaaacuuacuuuc

SEQ ID NO: 148296 - RNA, 19 nt, Artificial Sequence
  Description of Artificial Sequence: Synthetic oligonucleotide
  Sense strand starting at position 1806 of SEQ ID NO: 1902
aaguaaguuucuguuugua

SEQ ID NO: 148297 - RNA, 19 nt, Artificial Sequence
  Description of Artificial Sequence: Synthetic oligonucleotide
  Antisense strand to SEQ ID NO: 148296
uacaaacagaaacuuacuu

SEQ ID NO: 148298 - RNA, 19 nt, Artificial Sequence
  Description of Artificial Sequence: Synthetic oligonucleotide
  Sense strand starting at position 1814 of SEQ ID NO: 1902
uucuguuuguacccaagaa

SEQ ID NO: 148299 - RNA, 19 nt, Artificial Sequence
  Description of Artificial Sequence: Synthetic oligonucleotide
  Antisense strand to SEQ ID NO: 148298
uucuuggguacaaacagaa

SEQ ID NO: 148300 - RNA, 19 nt, Artificial Sequence
  Description of Artificial Sequence: Synthetic oligonucleotide
  Sense strand starting at position 1852 of SEQ ID NO: 1902
aggaaugucuagccacaaa

SEQ ID NO: 148301 - RNA, 19 nt, Artificial Sequence
  Description of Artificial Sequence: Synthetic oligonucleotide
  Antisense strand to SEQ ID NO: 148300
uuuguggcuagacauuccu

SEQ ID NO: 148302 - RNA, 19 nt, Artificial Sequence
  Description of Artificial Sequence: Synthetic oligonucleotide
  Sense strand starting at position 1885 of SEQ ID NO: 1902
guaugcagaguguaucauu

SEQ ID NO: 148303 - RNA, 19 nt, Artificial Sequence
  Description of Artificial Sequence: Synthetic oligonucleotide
  Antisense strand to SEQ ID NO: 148302
aaugauacacucugcauac

SEQ ID NO: 148304 - RNA, 19 nt, Artificial Sequence
  Description of Artificial Sequence: Synthetic oligonucleotide
  Sense strand starting at position 1888 of SEQ ID NO: 1902
ugcagaguguaucauuaga

SEQ ID NO: 148305 - RNA, 19 nt, Artificial Sequence
  Description of Artificial Sequence: Synthetic oligonucleotide
  Antisense strand to SEQ ID NO: 148304
ucuaaugauacacucugca

SEQ ID NO: 148306 - RNA, 19 nt, Artificial Sequence
  Description of Artificial Sequence: Synthetic oligonucleotide
  Sense strand starting at position 1890 of SEQ ID NO: 1902
cagaguguaucauuagaug

SEQ ID NO: 148307 - RNA, 19 nt, Artificial Sequence
  Description of Artificial Sequence: Synthetic oligonucleotide
  Antisense strand to SEQ ID NO: 148306
caucuaaugauacacucug

SEQ ID NO: 148308 - RNA, 19 nt, Artificial Sequence
  Description of Artificial Sequence: Synthetic oligonucleotide
  Sense strand starting at position 1997 of SEQ ID NO: 1902
gaaugaggcuuacccuuga

SEQ ID NO: 148309 - RNA, 19 nt, Artificial Sequence
  Description of Artificial Sequence: Synthetic oligonucleotide
  Antisense strand to SEQ ID NO: 148308
ucaaggguaagccucauuc

SEQ ID NO: 148310 - RNA, 19 nt, Artificial Sequence
  Description of Artificial Sequence: Synthetic oligonucleotide
  Sense strand starting at position 2001 of SEQ ID NO: 1902
gaggcuuacccuugacaga

SEQ ID NO: 148311 - RNA, 19 nt, Artificial Sequence
  Description of Artificial Sequence: Synthetic oligonucleotide
  Antisense strand to SEQ ID NO: 148310
ucugucaaggguaagccuc

SEQ ID NO: 148312 - RNA, 19 nt, Artificial Sequence
  Description of Artificial Sequence: Synthetic oligonucleotide
  Sense strand starting at position 2120 of SEQ ID NO: 1902
ugguucugugguugaggga

SEQ ID NO: 148313 - RNA, 19 nt, Artificial Sequence
  Description of Artificial Sequence: Synthetic oligonucleotide
  Antisense strand to SEQ ID NO: 148312
ucccucaaccacagaacca

SEQ ID NO: 148314 - RNA, 19 nt, Artificial Sequence
  Description of Artificial Sequence: Synthetic oligonucleotide
  Sense strand starting at position 2233 of SEQ ID NO: 1902
ccgugaugucacggccuuu

SEQ ID NO: 148315 - RNA, 19 nt, Artificial Sequence
  Description of Artificial Sequence: Synthetic oligonucleotide
  Antisense strand to SEQ ID NO: 148314
aaaggccgugacaucacgg

SEQ ID NO: 148316 - RNA, 19 nt, Artificial Sequence
  Description of Artificial Sequence: Synthetic oligonucleotide
  Sense strand starting at position 2433 of SEQ ID NO: 1902
gugggagacuccuucuuaa

SEQ ID NO: 148317 - RNA, 19 nt, Artificial Sequence
  Description of Artificial Sequence: Synthetic oligonucleotide
  Antisense strand to SEQ ID NO: 148316
uuaagaaggagucucccac

SEQ ID NO: 148318 - RNA, 19 nt, Artificial Sequence
  Description of Artificial Sequence: Synthetic oligonucleotide
  Sense strand starting at position 2436 of SEQ ID NO: 1902
ggagacuccuucuuaauua

SEQ ID NO: 148319 - RNA, 19 nt, Artificial Sequence
  Description of Artificial Sequence: Synthetic oligonucleotide
  Antisense strand to SEQ ID NO: 148318
uaauuaagaaggagucucc

SEQ ID NO: 148320 - RNA, 19 nt, Artificial Sequence
  Description of Artificial Sequence: Synthetic oligonucleotide
  Sense strand starting at position 2610 of SEQ ID NO: 1902
gggagagguguccacaugu

SEQ ID NO: 148321 - RNA, 19 nt, Artificial Sequence
  Description of Artificial Sequence: Synthetic oligonucleotide
  Antisense strand to SEQ ID NO: 148320
acauguggacaccucuccc

SEQ ID NO: 148322 - RNA, 19 nt, Artificial Sequence
  Description of Artificial Sequence: Synthetic oligonucleotide
  Sense strand starting at position 3190 of SEQ ID NO: 1902
gguauucuggaaugggauu

SEQ ID NO: 148323 - RNA, 19 nt, Artificial Sequence
  Description of Artificial Sequence: Synthetic oligonucleotide
  Antisense strand to SEQ ID NO: 148322
aaucccauuccagaauacc

SEQ ID NO: 148324 - RNA, 19 nt, Artificial Sequence
  Description of Artificial Sequence: Synthetic oligonucleotide
  Sense strand starting at position 3521 of SEQ ID NO: 1902
ucucaagccucaugaagau

SEQ ID NO: 148325 - RNA, 19 nt, Artificial Sequence
  Description of Artificial Sequence: Synthetic oligonucleotide
  Antisense strand to SEQ ID NO: 148324
aucuucaugaggcuugaga

SEQ ID NO: 148326 - RNA, 19 nt, Artificial Sequence
  Description of Artificial Sequence: Synthetic oligonucleotide
  Sense strand starting at position 3540 of SEQ ID NO: 1902
ucagucuucugucccugaa

SEQ ID NO: 148327 - RNA, 19 nt, Artificial Sequence
  Description of Artificial Sequence: Synthetic oligonucleotide
  Antisense strand to SEQ ID NO: 148326
uucagggacagaagacuga

SEQ ID NO: 148328 - RNA, 19 nt, Artificial Sequence
  Description of Artificial Sequence: Synthetic oligonucleotide
  Sense strand starting at position 3542 of SEQ ID NO: 1902
agucuucugucccugaaug

SEQ ID NO: 148329 - RNA, 19 nt, Artificial Sequence
  Description of Artificial Sequence: Synthetic oligonucleotide
  Antisense strand to SEQ ID NO: 148328
cauucagggacagaagacu

SEQ ID NO: 148330 - RNA, 19 nt, Artificial Sequence
  Description of Artificial Sequence: Synthetic oligonucleotide
  Sense strand starting at position 3544 of SEQ ID NO: 1902
ucuucugucccugaauggu

SEQ ID NO: 148331 - RNA, 19 nt, Artificial Sequence
  Description of Artificial Sequence: Synthetic oligonucleotide
  Antisense strand to SEQ ID NO: 148330
accauucagggacagaaga

SEQ ID NO: 148332 - RNA, 19 nt, Artificial Sequence
  Description of Artificial Sequence: Synthetic oligonucleotide
  Sense strand starting at position 3552 of SEQ ID NO: 1902
cccugaauggugggucaau

SEQ ID NO: 148333 - RNA, 19 nt, Artificial Sequence
  Description of Artificial Sequence: Synthetic oligonucleotide
  Antisense strand to SEQ ID NO: 148332
auugacccaccauucaggg

SEQ ID NO: 148334 - RNA, 19 nt, Artificial Sequence
  Description of Artificial Sequence: Synthetic oligonucleotide
  Sense strand starting at position 3553 of SEQ ID NO: 1902
ccugaauggugggucaauu

SEQ ID NO: 148335 - RNA, 19 nt, Artificial Sequence
  Description of Artificial Sequence: Synthetic oligonucleotide
  Antisense strand to SEQ ID NO: 148334
aauugacccaccauucagg

SEQ ID NO: 148336 - RNA, 19 nt, Artificial Sequence
  Description of Artificial Sequence: Synthetic oligonucleotide
  Sense strand starting at position 3595 of SEQ ID NO: 1902
ggacaagaguucuaauuug

SEQ ID NO: 148337 - RNA, 19 nt, Artificial Sequence
  Description of Artificial Sequence: Synthetic oligonucleotide
  Antisense strand to SEQ ID NO: 148336
caaauuagaacucuugucc

SEQ ID NO: 148338 - RNA, 19 nt, Artificial Sequence
  Description of Artificial Sequence: Synthetic oligonucleotide
  Sense strand starting at position 3601 of SEQ ID NO: 1902
gaguucuaauuuggccaga

SEQ ID NO: 148339 - RNA, 19 nt, Artificial Sequence
  Description of Artificial Sequence: Synthetic oligonucleotide
  Antisense strand to SEQ ID NO: 148338
ucuggccaaauuagaacuc

SEQ ID NO: 148340 - RNA, 19 nt, Artificial Sequence
  Description of Artificial Sequence: Synthetic oligonucleotide
  Sense strand starting at position 3853 of SEQ ID NO: 1902
uccguuaugagucagcuca

SEQ ID NO: 148341 - RNA, 19 nt, Artificial Sequence
  Description of Artificial Sequence: Synthetic oligonucleotide
  Antisense strand to SEQ ID NO: 148340
ugagcugacucauaacgga

SEQ ID NO: 148342 - RNA, 19 nt, Artificial Sequence
  Description of Artificial Sequence: Synthetic oligonucleotide
  Sense strand starting at position 3855 of SEQ ID NO: 1902
cguuaugagucagcucaag

SEQ ID NO: 148343 - RNA, 19 nt, Artificial Sequence
  Description of Artificial Sequence: Synthetic oligonucleotide
  Antisense strand to SEQ ID NO: 148342
cuugagcugacucauaacg

SEQ ID NO: 148344 - RNA, 19 nt, Artificial Sequence
  Description of Artificial Sequence: Synthetic oligonucleotide
  Sense strand starting at position 3927 of SEQ ID NO: 1902
guuguaaacucaucagcug

SEQ ID NO: 148345 - RNA, 19 nt, Artificial Sequence
  Description of Artificial Sequence: Synthetic oligonucleotide
  Antisense strand to SEQ ID NO: 148344
cagcugaugaguuuacaac

SEQ ID NO: 148346 - RNA, 19 nt, Artificial Sequence
  Description of Artificial Sequence: Synthetic oligonucleotide
  Sense strand starting at position 278 of SEQ ID NO: 1903
auguuugggaucugauuaa

SEQ ID NO: 148347 - RNA, 19 nt, Artificial Sequence
  Description of Artificial Sequence: Synthetic oligonucleotide
  Antisense strand to SEQ ID NO: 148346
uuaaucagaucccaaacau

SEQ ID NO: 148348 - RNA, 19 nt, Artificial Sequence
  Description of Artificial Sequence: Synthetic oligonucleotide
  Sense strand starting at position 375 of SEQ ID NO: 1903
cuccgaucugacgauuaaa

SEQ ID NO: 148349 - RNA, 19 nt, Artificial Sequence
  Description of Artificial Sequence: Synthetic oligonucleotide
  Antisense strand to SEQ ID NO: 148348
uuuaaucgucagaucggag

SEQ ID NO: 148350 - RNA, 19 nt, Artificial Sequence
  Description of Artificial Sequence: Synthetic oligonucleotide
  Sense strand starting at position 378 of SEQ ID NO: 1903
cgaucugacgauuaaaguc

SEQ ID NO: 148351 - RNA, 19 nt, Artificial Sequence
  Description of Artificial Sequence: Synthetic oligonucleotide
  Antisense strand to SEQ ID NO: 148350
gacuuuaaucgucagaucg

SEQ ID NO: 148352 - RNA, 19 nt, Artificial Sequence
  Description of Artificial Sequence: Synthetic oligonucleotide
  Sense strand starting at position 444 of SEQ ID NO: 1903
uaagaugucacccgggaga

SEQ ID NO: 148353 - RNA, 19 nt, Artificial Sequence
  Description of Artificial Sequence: Synthetic oligonucleotide
  Antisense strand to SEQ ID NO: 148352
ucucccgggugacaucuua

SEQ ID NO: 148354 - RNA, 19 nt, Artificial Sequence
  Description of Artificial Sequence: Synthetic oligonucleotide
  Sense strand starting at position 492 of SEQ ID NO: 1903
cauuuagagucgucuuaau

SEQ ID NO: 148355 - RNA, 19 nt, Artificial Sequence
  Description of Artificial Sequence: Synthetic oligonucleotide
  Antisense strand to SEQ ID NO: 148354
auuaagacgacucuaaaug

SEQ ID NO: 148356 - RNA, 19 nt, Artificial Sequence
  Description of Artificial Sequence: Synthetic oligonucleotide
  Sense strand starting at position 596 of SEQ ID NO: 1903
ggcagcugugagagguuua

SEQ ID NO: 148357 - RNA, 19 nt, Artificial Sequence
  Description of Artificial Sequence: Synthetic oligonucleotide
  Antisense strand to SEQ ID NO: 148356
uaaaccucucacagcugcc

SEQ ID NO: 148358 - RNA, 19 nt, Artificial Sequence
  Description of Artificial Sequence: Synthetic oligonucleotide
  Sense strand starting at position 678 of SEQ ID NO: 1903
ucgccuacucccuggcaua

SEQ ID NO: 148359 - RNA, 19 nt, Artificial Sequence
  Description of Artificial Sequence: Synthetic oligonucleotide
  Antisense strand to SEQ ID NO: 148358
uaugccagggaguaggcga

SEQ ID NO: 148360 - RNA, 19 nt, Artificial Sequence
  Description of Artificial Sequence: Synthetic oligonucleotide
  Sense strand starting at position 679 of SEQ ID NO: 1903
cgccuacucccuggcauaa

SEQ ID NO: 148361 - RNA, 19 nt, Artificial Sequence
  Description of Artificial Sequence: Synthetic oligonucleotide
  Antisense strand to SEQ ID NO: 148360
uuaugccagggaguaggcg

SEQ ID NO: 148362 - RNA, 19 nt, Artificial Sequence
  Description of Artificial Sequence: Synthetic oligonucleotide
  Sense strand starting at position 758 of SEQ ID NO: 1903
cgccauucgggacgcauaa

SEQ ID NO: 148363 - RNA, 19 nt, Artificial Sequence
  Description of Artificial Sequence: Synthetic oligonucleotide
  Antisense strand to SEQ ID NO: 148362
uuaugcgucccgaauggcg

SEQ ID NO: 148364 - RNA, 19 nt, Artificial Sequence
  Description of Artificial Sequence: Synthetic oligonucleotide
  Sense strand starting at position 760 of SEQ ID NO: 1903
ccauucgggacgcauaaua

SEQ ID NO: 148365 - RNA, 19 nt, Artificial Sequence
  Description of Artificial Sequence: Synthetic oligonucleotide
  Antisense strand to SEQ ID NO: 148364
uauuaugcgucccgaaugg

SEQ ID NO: 148366 - RNA, 19 nt, Artificial Sequence
  Description of Artificial Sequence: Synthetic oligonucleotide
  Sense strand starting at position 964 of SEQ ID NO: 1903
gggauccucuucuccguua

SEQ ID NO: 148367 - RNA, 19 nt, Artificial Sequence
  Description of Artificial Sequence: Synthetic oligonucleotide
  Antisense strand to SEQ ID NO: 148366
uaacggagaagaggauccc

SEQ ID NO: 148368 - RNA, 19 nt, Artificial Sequence
  Description of Artificial Sequence: Synthetic oligonucleotide
  Sense strand starting at position 988 of SEQ ID NO: 1903
agggcuguaucugagcgau

SEQ ID NO: 148369 - RNA, 19 nt, Artificial Sequence
  Description of Artificial Sequence: Synthetic oligonucleotide
  Antisense strand to SEQ ID NO: 148368
aucgcucagauacagcccu

SEQ ID NO: 148370 - RNA, 19 nt, Artificial Sequence
  Description of Artificial Sequence: Synthetic oligonucleotide
  Sense strand starting at position 996 of SEQ ID NO: 1903
aucugagcgauccggguua

SEQ ID NO: 148371 - RNA, 19 nt, Artificial Sequence
  Description of Artificial Sequence: Synthetic oligonucleotide
  Antisense strand to SEQ ID NO: 148370
uaacccggaucgcucagau

SEQ ID NO: 148372 - RNA, 19 nt, Artificial Sequence
  Description of Artificial Sequence: Synthetic oligonucleotide
  Sense strand starting at position 2244 of SEQ ID NO: 1903
gaaauuugcuuagaacguc

SEQ ID NO: 148373 - RNA, 19 nt, Artificial Sequence
  Description of Artificial Sequence: Synthetic oligonucleotide
  Antisense strand to SEQ ID NO: 148372
gacguucuaagcaaauuuc

SEQ ID NO: 148374 - RNA, 19 nt, Artificial Sequence
  Description of Artificial Sequence: Synthetic oligonucleotide
  Sense strand starting at position 2490 of SEQ ID NO: 1903
cgcacauuauucugaccca

SEQ ID NO: 148375 - RNA, 19 nt, Artificial Sequence
  Description of Artificial Sequence: Synthetic oligonucleotide
  Antisense strand to SEQ ID NO: 148374
ugggucagaauaaugugcg

SEQ ID NO: 148376 - RNA, 19 nt, Artificial Sequence
  Description of Artificial Sequence: Synthetic oligonucleotide
  Sense strand starting at position 2828 of SEQ ID NO: 1903
acgguccugcaucgugaaa

SEQ ID NO: 148377 - RNA, 19 nt, Artificial Sequence
  Description of Artificial Sequence: Synthetic oligonucleotide
  Antisense strand to SEQ ID NO: 148376
uuucacgaugcaggaccgu

SEQ ID NO: 148378 - RNA, 19 nt, Artificial Sequence
  Description of Artificial Sequence: Synthetic oligonucleotide
  Sense strand starting at position 3374 of SEQ ID NO: 1903
gccgcaagaucucaucaug

SEQ ID NO: 148379 - RNA, 19 nt, Artificial Sequence
  Description of Artificial Sequence: Synthetic oligonucleotide
  Antisense strand to SEQ ID NO: 148378
caugaugagaucuugcggc

SEQ ID NO: 148380 - RNA, 19 nt, Artificial Sequence
  Description of Artificial Sequence: Synthetic oligonucleotide
  Sense strand starting at position 3417 of SEQ ID NO: 1903
ccauuucgucguugccaaa

SEQ ID NO: 148381 - RNA, 19 nt, Artificial Sequence
  Description of Artificial Sequence: Synthetic oligonucleotide
  Antisense strand to SEQ ID NO: 148380
uuuggcaacgacgaaaugg

SEQ ID NO: 148382 - RNA, 19 nt, Artificial Sequence
  Description of Artificial Sequence: Synthetic oligonucleotide
  Sense strand starting at position 3424 of SEQ ID NO: 1903
gucguugccaaacgaaauc

SEQ ID NO: 148383 - RNA, 19 nt, Artificial Sequence
  Description of Artificial Sequence: Synthetic oligonucleotide
  Antisense strand to SEQ ID NO: 148382
gauuucguuuggcaacgac

SEQ ID NO: 148384 - RNA, 19 nt, Artificial Sequence
  Description of Artificial Sequence: Synthetic oligonucleotide
  Sense strand starting at position 3605 of SEQ ID NO: 1903
ggcaguugucgauugcgga

SEQ ID NO: 148385 - RNA, 19 nt, Artificial Sequence
  Description of Artificial Sequence: Synthetic oligonucleotide
  Antisense strand to SEQ ID NO: 148384
uccgcaaucgacaacugcc

SEQ ID NO: 148386 - RNA, 19 nt, Artificial Sequence
  Description of Artificial Sequence: Synthetic oligonucleotide
  Sense strand starting at position 3671 of SEQ ID NO: 1903
gaggaaagcgagugaucca

SEQ ID NO: 148387 - RNA, 19 nt, Artificial Sequence
  Description of Artificial Sequence: Synthetic oligonucleotide
  Antisense strand to SEQ ID NO: 148386
uggaucacucgcuuuccuc

SEQ ID NO: 148388 - RNA, 19 nt, Artificial Sequence
  Description of Artificial Sequence: Synthetic oligonucleotide
  Sense strand starting at position 3708 of SEQ ID NO: 1903
ccgggaacgucuccgagaa

SEQ ID NO: 148389 - RNA, 19 nt, Artificial Sequence
  Description of Artificial Sequence: Synthetic oligonucleotide
  Antisense strand to SEQ ID NO: 148388
uucucggagacguucccgg

SEQ ID NO: 148390 - RNA, 19 nt, Artificial Sequence
  Description of Artificial Sequence: Synthetic oligonucleotide
  Sense strand starting at position 3814 of SEQ ID NO: 1903
uguuucagguggugguaaa

SEQ ID NO: 148391 - RNA, 19 nt, Artificial Sequence
  Description of Artificial Sequence: Synthetic oligonucleotide
  Antisense strand to SEQ ID NO: 148390
uuuaccaccaccugaaaca

SEQ ID NO: 148392 - RNA, 19 nt, Artificial Sequence
  Description of Artificial Sequence: Synthetic oligonucleotide
  Sense strand starting at position 3815 of SEQ ID NO: 1903
guuucagguggugguaaau

SEQ ID NO: 148393 - RNA, 19 nt, Artificial Sequence
  Description of Artificial Sequence: Synthetic oligonucleotide
  Antisense strand to SEQ ID NO: 148392
auuuaccaccaccugaaac

SEQ ID NO: 148394 - RNA, 19 nt, Artificial Sequence
  Description of Artificial Sequence: Synthetic oligonucleotide
  Sense strand starting at position 3824 of SEQ ID NO: 1903
ggugguaaauuccauuugu

SEQ ID NO: 148395 - RNA, 19 nt, Artificial Sequence
  Description of Artificial Sequence: Synthetic oligonucleotide
  Antisense strand to SEQ ID NO: 148394
acaaauggaauuuaccacc

SEQ ID NO: 148396 - RNA, 19 nt, Artificial Sequence
  Description of Artificial Sequence: Synthetic oligonucleotide
  Sense strand starting at position 3835 of SEQ ID NO: 1903
ccauuugucgaaugguuuc

SEQ ID NO: 148397 - RNA, 19 nt, Artificial Sequence
  Description of Artificial Sequence: Synthetic oligonucleotide
  Antisense strand to SEQ ID NO: 148396
gaaaccauucgacaaaugg

SEQ ID NO: 148398 - RNA, 19 nt, Artificial Sequence
  Description of Artificial Sequence: Synthetic oligonucleotide
  Sense strand starting at position 3840 of SEQ ID NO: 1903
ugucgaaugguuucgguuu

SEQ ID NO: 148399 - RNA, 19 nt, Artificial Sequence
  Description of Artificial Sequence: Synthetic oligonucleotide
  Antisense strand to SEQ ID NO: 148398
aaaccgaaaccauucgaca

SEQ ID NO: 148400 - RNA, 19 nt, Artificial Sequence
  Description of Artificial Sequence: Synthetic oligonucleotide
  Sense strand starting at position 3873 of SEQ ID NO: 1903
gcuuguuccuccgccugau

SEQ ID NO: 148401 - RNA, 19 nt, Artificial Sequence
  Description of Artificial Sequence: Synthetic oligonucleotide
  Antisense strand to SEQ ID NO: 148400
aucaggcggaggaacaagc

SEQ ID NO: 148402 - RNA, 19 nt, Artificial Sequence
  Description of Artificial Sequence: Synthetic oligonucleotide
  Sense strand starting at position 3920 of SEQ ID NO: 1903
cagacaaguuuccagagaa

SEQ ID NO: 148403 - RNA, 19 nt, Artificial Sequence
  Description of Artificial Sequence: Synthetic oligonucleotide
  Antisense strand to SEQ ID NO: 148402
uucucuggaaacuugucug

SEQ ID NO: 148404 - RNA, 19 nt, Artificial Sequence
  Description of Artificial Sequence: Synthetic oligonucleotide
  Sense strand starting at position 3980 of SEQ ID NO: 1905
acaauagauuuguaccuga

SEQ ID NO: 148405 - RNA, 19 nt, Artificial Sequence
  Description of Artificial Sequence: Synthetic oligonucleotide
  Antisense strand to SEQ ID NO: 148404
ucagguacaaaucuauugu

SEQ ID NO: 148406 - RNA, 19 nt, Artificial Sequence
  Description of Artificial Sequence: Synthetic oligonucleotide
  Sense strand starting at position 3834 of SEQ ID NO: 1905
gguagcaguguucacguuu

SEQ ID NO: 148407 - RNA, 19 nt, Artificial Sequence
  Description of Artificial Sequence: Synthetic oligonucleotide
  Antisense strand to SEQ ID NO: 148406
aaacgugaacacugcuacc

SEQ ID NO: 148408 - RNA, 19 nt, Artificial Sequence
  Description of Artificial Sequence: Synthetic oligonucleotide
  Sense strand starting at position 3793 of SEQ ID NO: 1905
gcgagaccgacuugcucaa

SEQ ID NO: 148409 - RNA, 19 nt, Artificial Sequence
  Description of Artificial Sequence: Synthetic oligonucleotide
  Antisense strand to SEQ ID NO: 148408
uugagcaagucggucucgc

SEQ ID NO: 148410 - RNA, 19 nt, Artificial Sequence
  Description of Artificial Sequence: Synthetic oligonucleotide
  Sense strand starting at position 3746 of SEQ ID NO: 1905
aguccugugaaguaggaau

SEQ ID NO: 148411 - RNA, 19 nt, Artificial Sequence
  Description of Artificial Sequence: Synthetic oligonucleotide
  Antisense strand to SEQ ID NO: 148410
auuccuacuucacaggacu

SEQ ID NO: 148412 - RNA, 19 nt, Artificial Sequence
  Description of Artificial Sequence: Synthetic oligonucleotide
  Sense strand starting at position 3741 of SEQ ID NO: 1905
uuuacaguccugugaagua

SEQ ID NO: 148413 - RNA, 19 nt, Artificial Sequence
  Description of Artificial Sequence: Synthetic oligonucleotide
  Antisense strand to SEQ ID NO: 148412
uacuucacaggacuguaaa

SEQ ID NO: 148414 - RNA, 19 nt, Artificial Sequence
  Description of Artificial Sequence: Synthetic oligonucleotide
  Sense strand starting at position 3739 of SEQ ID NO: 1905
ucuuuacaguccugugaag

SEQ ID NO: 148415 - RNA, 19 nt, Artificial Sequence
  Description of Artificial Sequence: Synthetic oligonucleotide
  Antisense strand to SEQ ID NO: 148414
cuucacaggacuguaaaga

SEQ ID NO: 148416 - RNA, 19 nt, Artificial Sequence
  Description of Artificial Sequence: Synthetic oligonucleotide
  Sense strand starting at position 3643 of SEQ ID NO: 1905
ccuggaugaucuccacacu

SEQ ID NO: 148417 - RNA, 19 nt, Artificial Sequence
  Description of Artificial Sequence: Synthetic oligonucleotide
  Antisense strand to SEQ ID NO: 148416
aguguggagaucauccagg

SEQ ID NO: 148418 - RNA, 19 nt, Artificial Sequence
  Description of Artificial Sequence: Synthetic oligonucleotide
  Sense strand starting at position 3373 of SEQ ID NO: 1905
ccuagacaguccugacuga

SEQ ID NO: 148419 - RNA, 19 nt, Artificial Sequence
  Description of Artificial Sequence: Synthetic oligonucleotide
  Antisense strand to SEQ ID NO: 148418
ucagucaggacugucuagg

SEQ ID NO: 148420 - RNA, 19 nt, Artificial Sequence
  Description of Artificial Sequence: Synthetic oligonucleotide
  Sense strand starting at position 3158 of SEQ ID NO: 1905
uuaccugaaucugaaagaa

SEQ ID NO: 148421 - RNA, 19 nt, Artificial Sequence
  Description of Artificial Sequence: Synthetic oligonucleotide
  Antisense strand to SEQ ID NO: 148420
uucuuucagauucagguaa

SEQ ID NO: 148422 - RNA, 19 nt, Artificial Sequence
  Description of Artificial Sequence: Synthetic oligonucleotide
  Sense strand starting at position 2848 of SEQ ID NO: 1905
aacugccucuaguugagaa

SEQ ID NO: 148423 - RNA, 19 nt, Artificial Sequence
  Description of Artificial Sequence: Synthetic oligonucleotide
  Antisense strand to SEQ ID NO: 148422
uucucaacuagaggcaguu

SEQ ID NO: 148424 - RNA, 19 nt, Artificial Sequence
  Description of Artificial Sequence: Synthetic oligonucleotide
  Sense strand starting at position 2815 of SEQ ID NO: 1905
ugcugacauugccaaaugu

SEQ ID NO: 148425 - RNA, 19 nt, Artificial Sequence
  Description of Artificial Sequence: Synthetic oligonucleotide
  Antisense strand to SEQ ID NO: 148424
acauuuggcaaugucagca

SEQ ID NO: 148426 - RNA, 19 nt, Artificial Sequence
  Description of Artificial Sequence: Synthetic oligonucleotide
  Sense strand starting at position 2812 of SEQ ID NO: 1905
gucugcugacauugccaaa

SEQ ID NO: 148427 - RNA, 19 nt, Artificial Sequence
  Description of Artificial Sequence: Synthetic oligonucleotide
  Antisense strand to SEQ ID NO: 148426
uuuggcaaugucagcagac

SEQ ID NO: 148428 - RNA, 19 nt, Artificial Sequence
  Description of Artificial Sequence: Synthetic oligonucleotide
  Sense strand starting at position 2789 of SEQ ID NO: 1905
uuguaaugacaauggcaaa

SEQ ID NO: 148429 - RNA, 19 nt, Artificial Sequence
  Description of Artificial Sequence: Synthetic oligonucleotide
  Antisense strand to SEQ ID NO: 148428
uuugccauugucauuacaa

SEQ ID NO: 148430 - RNA, 19 nt, Artificial Sequence
  Description of Artificial Sequence: Synthetic oligonucleotide
  Sense strand starting at position 2755 of SEQ ID NO: 1905
acuagaugucuguaccaca

SEQ ID NO: 148431 - RNA, 19 nt, Artificial Sequence
  Description of Artificial Sequence: Synthetic oligonucleotide
  Antisense strand to SEQ ID NO: 148430
ugugguacagacaucuagu

SEQ ID NO: 148432 - RNA, 19 nt, Artificial Sequence
  Description of Artificial Sequence: Synthetic oligonucleotide
  Sense strand starting at position 2721 of SEQ ID NO: 1905
acuacauguuuggcaacau

SEQ ID NO: 148433 - RNA, 19 nt, Artificial Sequence
  Description of Artificial Sequence: Synthetic oligonucleotide
  Antisense strand to SEQ ID NO: 148432
auguugccaaacauguagu

SEQ ID NO: 148434 - RNA, 19 nt, Artificial Sequence
  Description of Artificial Sequence: Synthetic oligonucleotide
  Sense strand starting at position 2708 of SEQ ID NO: 1905
agcuguucuguguacuaca

SEQ ID NO: 148435 - RNA, 19 nt, Artificial Sequence
  Description of Artificial Sequence: Synthetic oligonucleotide
  Antisense strand to SEQ ID NO: 148434
uguaguacacagaacagcu

SEQ ID NO: 148436 - RNA, 19 nt, Artificial Sequence
  Description of Artificial Sequence: Synthetic oligonucleotide
  Sense strand starting at position 2706 of SEQ ID NO: 1905
ggagcuguucuguguacua

SEQ ID NO: 148437 - RNA, 19 nt, Artificial Sequence
  Description of Artificial Sequence: Synthetic oligonucleotide
  Antisense strand to SEQ ID NO: 148436
uaguacacagaacagcucc

SEQ ID NO: 148438 - RNA, 19 nt, Artificial Sequence
  Description of Artificial Sequence: Synthetic oligonucleotide
  Sense strand starting at position 2705 of SEQ ID NO: 1905
gggagcuguucuguguacu

SEQ ID NO: 148439 - RNA, 19 nt, Artificial Sequence
  Description of Artificial Sequence: Synthetic oligonucleotide
  Antisense strand to SEQ ID NO: 148438
aguacacagaacagcuccc

SEQ ID NO: 148440 - RNA, 19 nt, Artificial Sequence
  Description of Artificial Sequence: Synthetic oligonucleotide
  Sense strand starting at position 2660 of SEQ ID NO: 1905
ccaccuuggcacuauugaa

SEQ ID NO: 148441 - RNA, 19 nt, Artificial Sequence
  Description of Artificial Sequence: Synthetic oligonucleotide
  Antisense strand to SEQ ID NO: 148440
uucaauagugccaaggugg

SEQ ID NO: 148442 - RNA, 19 nt, Artificial Sequence
  Description of Artificial Sequence: Synthetic oligonucleotide
  Sense strand starting at position 2573 of SEQ ID NO: 1905
agugucucuacguagcuaa

SEQ ID NO: 148443 - RNA, 19 nt, Artificial Sequence
  Description of Artificial Sequence: Synthetic oligonucleotide
  Antisense strand to SEQ ID NO: 148442
uuagcuacguagagacacu

SEQ ID NO: 148444 - RNA, 19 nt, Artificial Sequence
  Description of Artificial Sequence: Synthetic oligonucleotide
  Sense strand starting at position 2572 of SEQ ID NO: 1905
aagugucucuacguagcua

SEQ ID NO: 148445 - RNA, 19 nt, Artificial Sequence
  Description of Artificial Sequence: Synthetic oligonucleotide
  Antisense strand to SEQ ID NO: 148444
uagcuacguagagacacuu

SEQ ID NO: 148446 - RNA, 19 nt, Artificial Sequence
  Description of Artificial Sequence: Synthetic oligonucleotide
  Sense strand starting at position 2180 of SEQ ID NO: 1905
acaagaagguuacacgauu

SEQ ID NO: 148447 - RNA, 19 nt, Artificial Sequence
  Description of Artificial Sequence: Synthetic oligonucleotide
  Antisense strand to SEQ ID NO: 148446
aaucguguaaccuucuugu

SEQ ID NO: 148448 - RNA, 19 nt, Artificial Sequence
  Description of Artificial Sequence: Synthetic oligonucleotide
  Sense strand starting at position 2126 of SEQ ID NO: 1905
ccugcacauucuggaaaga

SEQ ID NO: 148449 - RNA, 19 nt, Artificial Sequence
  Description of Artificial Sequence: Synthetic oligonucleotide
  Antisense strand to SEQ ID NO: 148448
ucuuuccagaaugugcagg

SEQ ID NO: 148450 - RNA, 19 nt, Artificial Sequence
  Description of Artificial Sequence: Synthetic oligonucleotide
  Sense strand starting at position 2049 of SEQ ID NO: 1905
ccuagaggguuugauauau

SEQ ID NO: 148451 - RNA, 19 nt, Artificial Sequence
  Description of Artificial Sequence: Synthetic oligonucleotide
  Antisense strand to SEQ ID NO: 148450
auauaucaaacccucuagg

SEQ ID NO: 148452 - RNA, 19 nt, Artificial Sequence
  Description of Artificial Sequence: Synthetic oligonucleotide
  Sense strand starting at position 1719 of SEQ ID NO: 1905
uguccauucucuccgcauu

SEQ ID NO: 148453 - RNA, 19 nt, Artificial Sequence
  Description of Artificial Sequence: Synthetic oligonucleotide
  Antisense strand to SEQ ID NO: 148452
aaugcggagagaauggaca

SEQ ID NO: 148454 - RNA, 19 nt, Artificial Sequence
  Description of Artificial Sequence: Synthetic oligonucleotide
  Sense strand starting at position 1580 of SEQ ID NO: 1905
gaguuugucuggugaaugc

SEQ ID NO: 148455 - RNA, 19 nt, Artificial Sequence
  Description of Artificial Sequence: Synthetic oligonucleotide
  Antisense strand to SEQ ID NO: 148454
gcauucaccagacaaacuc

SEQ ID NO: 148456 - RNA, 19 nt, Artificial Sequence
  Description of Artificial Sequence: Synthetic oligonucleotide
  Sense strand starting at position 1578 of SEQ ID NO: 1905
cagaguuugucuggugaau

SEQ ID NO: 148457 - RNA, 19 nt, Artificial Sequence
  Description of Artificial Sequence: Synthetic oligonucleotide
  Antisense strand to SEQ ID NO: 148456
auucaccagacaaacucug

SEQ ID NO: 148458 - RNA, 19 nt, Artificial Sequence
  Description of Artificial Sequence: Synthetic oligonucleotide
  Sense strand starting at position 1332 of SEQ ID NO: 1905
gcagauggagucgaaugua

SEQ ID NO: 148459 - RNA, 19 nt, Artificial Sequence
  Description of Artificial Sequence: Synthetic oligonucleotide
  Antisense strand to SEQ ID NO: 148458
uacauucgacuccaucugc

SEQ ID NO: 148460 - RNA, 19 nt, Artificial Sequence
  Description of Artificial Sequence: Synthetic oligonucleotide
  Sense strand starting at position 1294 of SEQ ID NO: 1905
ucgcaaucgacugaccauu

SEQ ID NO: 148461 - RNA, 19 nt, Artificial Sequence
  Description of Artificial Sequence: Synthetic oligonucleotide
  Antisense strand to SEQ ID NO: 148460
aauggucagucgauugcga

SEQ ID NO: 148462 - RNA, 19 nt, Artificial Sequence
  Description of Artificial Sequence: Synthetic oligonucleotide
  Sense strand starting at position 1293 of SEQ ID NO: 1905
aucgcaaucgacugaccau

SEQ ID NO: 148463 - RNA, 19 nt, Artificial Sequence
  Description of Artificial Sequence: Synthetic oligonucleotide
  Antisense strand to SEQ ID NO: 148462
auggucagucgauugcgau

SEQ ID NO: 148464 - RNA, 19 nt, Artificial Sequence
  Description of Artificial Sequence: Synthetic oligonucleotide
  Sense strand starting at position 1258 of SEQ ID NO: 1905
cuggcugcuuuggaagaua

SEQ ID NO: 148465 - RNA, 19 nt, Artificial Sequence
  Description of Artificial Sequence: Synthetic oligonucleotide
  Antisense strand to SEQ ID NO: 148464
uaucuuccaaagcagccag

SEQ ID NO: 148466 - RNA, 19 nt, Artificial Sequence
  Description of Artificial Sequence: Synthetic oligonucleotide
  Sense strand starting at position 2788 of SEQ ID NO: 1904
cgcuucuugcgaccucuua

SEQ ID NO: 148467 - RNA, 19 nt, Artificial Sequence
  Description of Artificial Sequence: Synthetic oligonucleotide
  Antisense strand to SEQ ID NO: 148466
uaagaggucgcaagaagcg

SEQ ID NO: 148468 - RNA, 19 nt, Artificial Sequence
  Description of Artificial Sequence: Synthetic oligonucleotide
  Sense strand starting at position 2625 of SEQ ID NO: 1904
gcaaacaguuagucccaua

SEQ ID NO: 148469 - RNA, 19 nt, Artificial Sequence
  Description of Artificial Sequence: Synthetic oligonucleotide
  Antisense strand to SEQ ID NO: 148468
uaugggacuaacuguuugc

SEQ ID NO: 148470 - RNA, 19 nt, Artificial Sequence
  Description of Artificial Sequence: Synthetic oligonucleotide
  Sense strand starting at position 2243 of SEQ ID NO: 1904
ugcuacuucugggaaagag

SEQ ID NO: 148471 - RNA, 19 nt, Artificial Sequence
  Description of Artificial Sequence: Synthetic oligonucleotide
  Antisense strand to SEQ ID NO: 148470
cucuuucccagaaguagca

SEQ ID NO: 148472 - RNA, 19 nt, Artificial Sequence
  Description of Artificial Sequence: Synthetic oligonucleotide
  Sense strand starting at position 2242 of SEQ ID NO: 1904
gugcuacuucugggaaaga

SEQ ID NO: 148473 - RNA, 19 nt, Artificial Sequence
  Description of Artificial Sequence: Synthetic oligonucleotide
  Antisense strand to SEQ ID NO: 148472
ucuuucccagaaguagcac

SEQ ID NO: 148474 - RNA, 19 nt, Artificial Sequence
  Description of Artificial Sequence: Synthetic oligonucleotide
  Sense strand starting at position 2241 of SEQ ID NO: 1904
ggugcuacuucugggaaag

SEQ ID NO: 148475 - RNA, 19 nt, Artificial Sequence
  Description of Artificial Sequence: Synthetic oligonucleotide
  Antisense strand to SEQ ID NO: 148474
cuuucccagaaguagcacc

SEQ ID NO: 148476 - RNA, 19 nt, Artificial Sequence
  Description of Artificial Sequence: Synthetic oligonucleotide
  Sense strand starting at position 2240 of SEQ ID NO: 1904
aggugcuacuucugggaaa

SEQ ID NO: 148477 - RNA, 19 nt, Artificial Sequence
  Description of Artificial Sequence: Synthetic oligonucleotide
  Antisense strand to SEQ ID NO: 148476
uuucccagaaguagcaccu

SEQ ID NO: 148478 - RNA, 19 nt, Artificial Sequence
  Description of Artificial Sequence: Synthetic oligonucleotide
  Sense strand starting at position 3246 of SEQ ID NO: 1906
cgcuucuugcgaccucuua

SEQ ID NO: 148479 - RNA, 19 nt, Artificial Sequence
  Description of Artificial Sequence: Synthetic oligonucleotide
  Antisense strand to SEQ ID NO: 148478
uaagaggucgcaagaagcg

SEQ ID NO: 148480 - RNA, 19 nt, Artificial Sequence
  Description of Artificial Sequence: Synthetic oligonucleotide
  Sense strand starting at position 3083 of SEQ ID NO: 1906
gcaaacaguuagucccaua

SEQ ID NO: 148481 - RNA, 19 nt, Artificial Sequence
  Description of Artificial Sequence: Synthetic oligonucleotide
  Antisense strand to SEQ ID NO: 148480
uaugggacuaacuguuugc

SEQ ID NO: 148482 - RNA, 19 nt, Artificial Sequence
  Description of Artificial Sequence: Synthetic oligonucleotide
  Sense strand starting at position 2701 of SEQ ID NO: 1906
ugcuacuucugggaaagag

SEQ ID NO: 148483 - RNA, 19 nt, Artificial Sequence
  Description of Artificial Sequence: Synthetic oligonucleotide
  Antisense strand to SEQ ID NO: 148482
cucuuucccagaaguagca

SEQ ID NO: 148484 - RNA, 19 nt, Artificial Sequence
  Description of Artificial Sequence: Synthetic oligonucleotide
  Sense strand starting at position 2700 of SEQ ID NO: 1906
gugcuacuucugggaaaga

SEQ ID NO: 148485 - RNA, 19 nt, Artificial Sequence
  Description of Artificial Sequence: Synthetic oligonucleotide
  Antisense strand to SEQ ID NO: 148484
ucuuucccagaaguagcac

SEQ ID NO: 148486 - RNA, 19 nt, Artificial Sequence
  Description of Artificial Sequence: Synthetic oligonucleotide
  Sense strand starting at position 2699 of SEQ ID NO: 1906
ggugcuacuucugggaaag

SEQ ID NO: 148487 - RNA, 19 nt, Artificial Sequence
  Description of Artificial Sequence: Synthetic oligonucleotide
  Antisense strand to SEQ ID NO: 148486
cuuucccagaaguagcacc

SEQ ID NO: 148488 - RNA, 19 nt, Artificial Sequence
  Description of Artificial Sequence: Synthetic oligonucleotide
  Sense strand starting at position 2698 of SEQ ID NO: 1906
aggugcuacuucugggaaa

SEQ ID NO: 148489 - RNA, 19 nt, Artificial Sequence
  Description of Artificial Sequence: Synthetic oligonucleotide
  Antisense strand to SEQ ID NO: 148488
uuucccagaaguagcaccu

SEQ ID NO: 148490 - RNA, 19 nt, Artificial Sequence
  Description of Artificial Sequence: Synthetic oligonucleotide
  Sense strand starting at position 363 of SEQ ID NO: 1906
guaauaagaucggagaucu

SEQ ID NO: 148491 - RNA, 19 nt, Artificial Sequence
  Description of Artificial Sequence: Synthetic oligonucleotide
  Antisense strand to SEQ ID NO: 148490
agaucuccgaucuuauuac

SEQ ID NO: 148492 - RNA, 19 nt, Artificial Sequence
  Description of Artificial Sequence: Synthetic oligonucleotide
  Sense strand starting at position 362 of SEQ ID NO: 1906
aguaauaagaucggagauc

SEQ ID NO: 148493 - RNA, 19 nt, Artificial Sequence
  Description of Artificial Sequence: Synthetic oligonucleotide
  Antisense strand to SEQ ID NO: 148492
gaucuccgaucuuauuacu

SEQ ID NO: 148494 - RNA, 19 nt, Artificial Sequence
  Description of Artificial Sequence: Synthetic oligonucleotide
  Sense strand starting at position 355 of SEQ ID NO: 1906
uuagaagaguaauaagauc

SEQ ID NO: 148495 - RNA, 19 nt, Artificial Sequence
  Description of Artificial Sequence: Synthetic oligonucleotide
  Antisense strand to SEQ ID NO: 148494
gaucuuauuacucuucuaa

SEQ ID NO: 148496 - RNA, 19 nt, Artificial Sequence
  Description of Artificial Sequence: Synthetic oligonucleotide
  Sense strand starting at position 332 of SEQ ID NO: 1906
ugggccuccuuagaaaguu

SEQ ID NO: 148497 - RNA, 19 nt, Artificial Sequence
  Description of Artificial Sequence: Synthetic oligonucleotide
  Antisense strand to SEQ ID NO: 148496
aacuuucuaaggaggccca

SEQ ID NO: 148498 - RNA, 19 nt, Artificial Sequence
  Description of Artificial Sequence: Synthetic oligonucleotide
  Sense strand starting at position 111 of SEQ ID NO: 1906
ggccuaguccgaggguaga

SEQ ID NO: 148499 - RNA, 19 nt, Artificial Sequence
  Description of Artificial Sequence: Synthetic oligonucleotide
  Antisense strand to SEQ ID NO: 148498
ucuacccucggacuaggcc

SEQ ID NO: 148500 - RNA, 19 nt, Artificial Sequence
  Description of Artificial Sequence: Synthetic oligonucleotide
  Sense strand starting at position 1136 of SEQ ID NO: 1907
gggucauuggguuauggga

SEQ ID NO: 148501 - RNA, 19 nt, Artificial Sequence
  Description of Artificial Sequence: Synthetic oligonucleotide
  Antisense strand to SEQ ID NO: 148500
ucccauaacccaaugaccc

SEQ ID NO: 148502 - RNA, 19 nt, Artificial Sequence
  Description of Artificial Sequence: Synthetic oligonucleotide
  Sense strand starting at position 1144 of SEQ ID NO: 1907
ggguuaugggacuaacugu

SEQ ID NO: 148503 - RNA, 19 nt, Artificial Sequence
  Description of Artificial Sequence: Synthetic oligonucleotide
  Antisense strand to SEQ ID NO: 148502
acaguuagucccauaaccc

SEQ ID NO: 148504 - RNA, 19 nt, Artificial Sequence
  Description of Artificial Sequence: Synthetic oligonucleotide
  Sense strand starting at position 1526 of SEQ ID NO: 1907
cccgcucuuucccagaagu

SEQ ID NO: 148505 - RNA, 19 nt, Artificial Sequence
  Description of Artificial Sequence: Synthetic oligonucleotide
  Antisense strand to SEQ ID NO: 148504
acuucugggaaagagcggg

SEQ ID NO: 148506 - RNA, 19 nt, Artificial Sequence
  Description of Artificial Sequence: Synthetic oligonucleotide
  Sense strand starting at position 1528 of SEQ ID NO: 1907
cgcucuuucccagaaguag

SEQ ID NO: 148507 - RNA, 19 nt, Artificial Sequence
  Description of Artificial Sequence: Synthetic oligonucleotide
  Antisense strand to SEQ ID NO: 148506
cuacuucugggaaagagcg

SEQ ID NO: 148508 - RNA, 19 nt, Artificial Sequence
  Description of Artificial Sequence: Synthetic oligonucleotide
  Sense strand starting at position 2947 of SEQ ID NO: 1907
ccucccaggucuucugaua

SEQ ID NO: 148509 - RNA, 19 nt, Artificial Sequence
  Description of Artificial Sequence: Synthetic oligonucleotide
  Antisense strand to SEQ ID NO: 148508
uaucagaagaccugggagg

SEQ ID NO: 148510 - RNA, 19 nt, Artificial Sequence
  Description of Artificial Sequence: Synthetic oligonucleotide
  Sense strand starting at position 3764 of SEQ ID NO: 1907
gucagagguucagauggua

SEQ ID NO: 148511 - RNA, 19 nt, Artificial Sequence
  Description of Artificial Sequence: Synthetic oligonucleotide
  Antisense strand to SEQ ID NO: 148510
uaccaucugaaccucugac

SEQ ID NO: 148512 - RNA, 19 nt, Artificial Sequence
  Description of Artificial Sequence: Synthetic oligonucleotide
  Sense strand starting at position 3847 of SEQ ID NO: 1907
cugccagaaugccauuaau

SEQ ID NO: 148513 - RNA, 19 nt, Artificial Sequence
  Description of Artificial Sequence: Synthetic oligonucleotide
  Antisense strand to SEQ ID NO: 148512
auuaauggcauucuggcag

SEQ ID NO: 148514 - RNA, 19 nt, Artificial Sequence
  Description of Artificial Sequence: Synthetic oligonucleotide
  Sense strand starting at position 3667 of SEQ ID NO: 1908
uucgaaauccaguguuacu

SEQ ID NO: 148515 - RNA, 19 nt, Artificial Sequence
  Description of Artificial Sequence: Synthetic oligonucleotide
  Antisense strand to SEQ ID NO: 148514
aguaacacuggauuucgaa

SEQ ID NO: 148516 - RNA, 19 nt, Artificial Sequence
  Description of Artificial Sequence: Synthetic oligonucleotide
  Sense strand starting at position 3597 of SEQ ID NO: 1908
auaauuaacugcuaaagag

SEQ ID NO: 148517 - RNA, 19 nt, Artificial Sequence
  Description of Artificial Sequence: Synthetic oligonucleotide
  Antisense strand to SEQ ID NO: 148516
cucuuuagcaguuaauuau

SEQ ID NO: 148518 - RNA, 19 nt, Artificial Sequence
  Description of Artificial Sequence: Synthetic oligonucleotide
  Sense strand starting at position 3524 of SEQ ID NO: 1908
gccaauuggcuugaagaaa

SEQ ID NO: 148519 - RNA, 19 nt, Artificial Sequence
  Description of Artificial Sequence: Synthetic oligonucleotide
  Antisense strand to SEQ ID NO: 148518
uuucuucaagccaauuggc

SEQ ID NO: 148520 - RNA, 19 nt, Artificial Sequence
  Description of Artificial Sequence: Synthetic oligonucleotide
  Sense strand starting at position 3523 of SEQ ID NO: 1908
ggccaauuggcuugaagaa

SEQ ID NO: 148521 - RNA, 19 nt, Artificial Sequence
  Description of Artificial Sequence: Synthetic oligonucleotide
  Antisense strand to SEQ ID NO: 148520
uucuucaagccaauuggcc

SEQ ID NO: 148522 - RNA, 19 nt, Artificial Sequence
  Description of Artificial Sequence: Synthetic oligonucleotide
  Sense strand starting at position 3505 of SEQ ID NO: 1908
ugcaguuaucucugauaug

SEQ ID NO: 148523 - RNA, 19 nt, Artificial Sequence
  Description of Artificial Sequence: Synthetic oligonucleotide
  Antisense strand to SEQ ID NO: 148522
cauaucagagauaacugca

SEQ ID NO: 148524 - RNA, 19 nt, Artificial Sequence
  Description of Artificial Sequence: Synthetic oligonucleotide
  Sense strand starting at position 3472 of SEQ ID NO: 1908
gcacauaauugggaagaug

SEQ ID NO: 148525 - RNA, 19 nt, Artificial Sequence
  Description of Artificial Sequence: Synthetic oligonucleotide
  Antisense strand to SEQ ID NO: 148524
caucuucccaauuaugugc

SEQ ID NO: 148526 - RNA, 19 nt, Artificial Sequence
  Description of Artificial Sequence: Synthetic oligonucleotide
  Sense strand starting at position 3471 of SEQ ID NO: 1908
agcacauaauugggaagau

SEQ ID NO: 148527 - RNA, 19 nt, Artificial Sequence
  Description of Artificial Sequence: Synthetic oligonucleotide
  Antisense strand to SEQ ID NO: 148526
aucuucccaauuaugugcu

SEQ ID NO: 148528 - RNA, 19 nt, Artificial Sequence
  Description of Artificial Sequence: Synthetic oligonucleotide
  Sense strand starting at position 3458 of SEQ ID NO: 1908
ccgaguaauuaggagcaca

SEQ ID NO: 148529 - RNA, 19 nt, Artificial Sequence
  Description of Artificial Sequence: Synthetic oligonucleotide
  Antisense strand to SEQ ID NO: 148528
ugugcuccuaauuacucgg

SEQ ID NO: 148530 - RNA, 19 nt, Artificial Sequence
  Description of Artificial Sequence: Synthetic oligonucleotide
  Sense strand starting at position 3371 of SEQ ID NO: 1908
acuggcuucccggaacaga

SEQ ID NO: 148531 - RNA, 19 nt, Artificial Sequence
  Description of Artificial Sequence: Synthetic oligonucleotide
  Antisense strand to SEQ ID NO: 148530
ucuguuccgggaagccagu

SEQ ID NO: 148532 - RNA, 19 nt, Artificial Sequence
  Description of Artificial Sequence: Synthetic oligonucleotide
  Sense strand starting at position 3346 of SEQ ID NO: 1908
aaaggaaucugauaaagga

SEQ ID NO: 148533 - RNA, 19 nt, Artificial Sequence
  Description of Artificial Sequence: Synthetic oligonucleotide
  Antisense strand to SEQ ID NO: 148532
uccuuuaucagauuccuuu

SEQ ID NO: 148534 - RNA, 19 nt, Artificial Sequence
  Description of Artificial Sequence: Synthetic oligonucleotide
  Sense strand starting at position 3280 of SEQ ID NO: 1908
agaacaaaguuggcugauu

SEQ ID NO: 148535 - RNA, 19 nt, Artificial Sequence
  Description of Artificial Sequence: Synthetic oligonucleotide
  Antisense strand to SEQ ID NO: 148534
aaucagccaacuuuguucu

SEQ ID NO: 148536 - RNA, 19 nt, Artificial Sequence
  Description of Artificial Sequence: Synthetic oligonucleotide
  Sense strand starting at position 3218 of SEQ ID NO: 1908
ugagauaaaucugggaauu

SEQ ID NO: 148537 - RNA, 19 nt, Artificial Sequence
  Description of Artificial Sequence: Synthetic oligonucleotide
  Antisense strand to SEQ ID NO: 148536
aauucccagauuuaucuca

SEQ ID NO: 148538 - RNA, 19 nt, Artificial Sequence
  Description of Artificial Sequence: Synthetic oligonucleotide
  Sense strand starting at position 3009 of SEQ ID NO: 1908
ccaauaggguaacagaaua

SEQ ID NO: 148539 - RNA, 19 nt, Artificial Sequence
  Description of Artificial Sequence: Synthetic oligonucleotide
  Antisense strand to SEQ ID NO: 148538
uauucuguuacccuauugg

SEQ ID NO: 148540 - RNA, 19 nt, Artificial Sequence
  Description of Artificial Sequence: Synthetic oligonucleotide
  Sense strand starting at position 2875 of SEQ ID NO: 1908
gaauguaaacgcuagcuuu

SEQ ID NO: 148541 - RNA, 19 nt, Artificial Sequence
  Description of Artificial Sequence: Synthetic oligonucleotide
  Antisense strand to SEQ ID NO: 148540
aaagcuagcguuuacauuc

SEQ ID NO: 148542 - RNA, 19 nt, Artificial Sequence
  Description of Artificial Sequence: Synthetic oligonucleotide
  Sense strand starting at position 2841 of SEQ ID NO: 1908
gugggaauccuuggccuuu

SEQ ID NO: 148543 - RNA, 19 nt, Artificial Sequence
  Description of Artificial Sequence: Synthetic oligonucleotide
  Antisense strand to SEQ ID NO: 148542
aaaggccaaggauucccac

SEQ ID NO: 148544 - RNA, 19 nt, Artificial Sequence
  Description of Artificial Sequence: Synthetic oligonucleotide
  Sense strand starting at position 2780 of SEQ ID NO: 1908
gucauaacgcuccucguuu

SEQ ID NO: 148545 - RNA, 19 nt, Artificial Sequence
  Description of Artificial Sequence: Synthetic oligonucleotide
  Antisense strand to SEQ ID NO: 148544
aaacgaggagcguuaugac

SEQ ID NO: 148546 - RNA, 19 nt, Artificial Sequence
  Description of Artificial Sequence: Synthetic oligonucleotide
  Sense strand starting at position 2767 of SEQ ID NO: 1908
cugggagcaaagugucaua

SEQ ID NO: 148547 - RNA, 19 nt, Artificial Sequence
  Description of Artificial Sequence: Synthetic oligonucleotide
  Antisense strand to SEQ ID NO: 148546
uaugacacuuugcucccag

SEQ ID NO: 148548 - RNA, 19 nt, Artificial Sequence
  Description of Artificial Sequence: Synthetic oligonucleotide
  Sense strand starting at position 2758 of SEQ ID NO: 1908
gccaaaguccugggagcaa

SEQ ID NO: 148549 - RNA, 19 nt, Artificial Sequence
  Description of Artificial Sequence: Synthetic oligonucleotide
  Antisense strand to SEQ ID NO: 148548
uugcucccaggacuuuggc

SEQ ID NO: 148550 - RNA, 19 nt, Artificial Sequence
  Description of Artificial Sequence: Synthetic oligonucleotide
  Sense strand starting at position 2745 of SEQ ID NO: 1908
augggaacugugcgccaaa

SEQ ID NO: 148551 - RNA, 19 nt, Artificial Sequence
  Description of Artificial Sequence: Synthetic oligonucleotide
  Antisense strand to SEQ ID NO: 148550
uuuggcgcacaguucccau

SEQ ID NO: 148552 - RNA, 19 nt, Artificial Sequence
  Description of Artificial Sequence: Synthetic oligonucleotide
  Sense strand starting at position 2483 of SEQ ID NO: 1908
aacugaguguuggagauaa

SEQ ID NO: 148553 - RNA, 19 nt, Artificial Sequence
  Description of Artificial Sequence: Synthetic oligonucleotide
  Antisense strand to SEQ ID NO: 148552
uuaucuccaacacucaguu

SEQ ID NO: 148554 - RNA, 19 nt, Artificial Sequence
  Description of Artificial Sequence: Synthetic oligonucleotide
  Sense strand starting at position 2481 of SEQ ID NO: 1908
ugaacugaguguuggagau

SEQ ID NO: 148555 - RNA, 19 nt, Artificial Sequence
  Description of Artificial Sequence: Synthetic oligonucleotide
  Antisense strand to SEQ ID NO: 148554
aucuccaacacucaguuca

SEQ ID NO: 148556 - RNA, 19 nt, Artificial Sequence
  Description of Artificial Sequence: Synthetic oligonucleotide
  Sense strand starting at position 2478 of SEQ ID NO: 1908
gucugaacugaguguugga

SEQ ID NO: 148557 - RNA, 19 nt, Artificial Sequence
  Description of Artificial Sequence: Synthetic oligonucleotide
  Antisense strand to SEQ ID NO: 148556
uccaacacucaguucagac

SEQ ID NO: 148558 - RNA, 19 nt, Artificial Sequence
  Description of Artificial Sequence: Synthetic oligonucleotide
  Sense strand starting at position 2399 of SEQ ID NO: 1908
gaaagacacuugggaguua

SEQ ID NO: 148559 - RNA, 19 nt, Artificial Sequence
  Description of Artificial Sequence: Synthetic oligonucleotide
  Antisense strand to SEQ ID NO: 148558
uaacucccaagugucuuuc

SEQ ID NO: 148560 - RNA, 19 nt, Artificial Sequence
  Description of Artificial Sequence: Synthetic oligonucleotide
  Sense strand starting at position 2397 of SEQ ID NO: 1908
gcgaaagacacuugggagu

SEQ ID NO: 148561 - RNA, 19 nt, Artificial Sequence
  Description of Artificial Sequence: Synthetic oligonucleotide
  Antisense strand to SEQ ID NO: 148560
acucccaagugucuuucgc

SEQ ID NO: 148562 - RNA, 19 nt, Artificial Sequence
  Description of Artificial Sequence: Synthetic oligonucleotide
  Sense strand starting at position 2312 of SEQ ID NO: 1908
gccugaacccucuaaguuu

SEQ ID NO: 148563 - RNA, 19 nt, Artificial Sequence
  Description of Artificial Sequence: Synthetic oligonucleotide
  Antisense strand to SEQ ID NO: 148562
aaacuuagaggguucaggc

SEQ ID NO: 148564 - RNA, 19 nt, Artificial Sequence
  Description of Artificial Sequence: Synthetic oligonucleotide
  Sense strand starting at position 2196 of SEQ ID NO: 1908
agccucucgguuugggaau

SEQ ID NO: 148565 - RNA, 19 nt, Artificial Sequence
  Description of Artificial Sequence: Synthetic oligonucleotide
  Antisense strand to SEQ ID NO: 148564
auucccaaaccgagaggcu

SEQ ID NO: 148566 - RNA, 19 nt, Artificial Sequence
  Description of Artificial Sequence: Synthetic oligonucleotide
  Sense strand starting at position 2160 of SEQ ID NO: 1908
agaagcuccugcucaguaa

SEQ ID NO: 148567 - RNA, 19 nt, Artificial Sequence
  Description of Artificial Sequence: Synthetic oligonucleotide
  Antisense strand to SEQ ID NO: 148566
uuacugagcaggagcuucu

SEQ ID NO: 148568 - RNA, 19 nt, Artificial Sequence
  Description of Artificial Sequence: Synthetic oligonucleotide
  Sense strand starting at position 2144 of SEQ ID NO: 1908
cuuagaaguuccgcccaga

SEQ ID NO: 148569 - RNA, 19 nt, Artificial Sequence
  Description of Artificial Sequence: Synthetic oligonucleotide
  Antisense strand to SEQ ID NO: 148568
ucugggcggaacuucuaag

SEQ ID NO: 148570 - RNA, 19 nt, Artificial Sequence
  Description of Artificial Sequence: Synthetic oligonucleotide
  Sense strand starting at position 1516 of SEQ ID NO: 1908
uucuuuauagggugagauc

SEQ ID NO: 148571 - RNA, 19 nt, Artificial Sequence
  Description of Artificial Sequence: Synthetic oligonucleotide
  Antisense strand to SEQ ID NO: 148570
gaucucacccuauaaagaa

SEQ ID NO: 148572 - RNA, 19 nt, Artificial Sequence
  Description of Artificial Sequence: Synthetic oligonucleotide
  Sense strand starting at position 1464 of SEQ ID NO: 1908
gggcauagugcuuaggaag

SEQ ID NO: 148573 - RNA, 19 nt, Artificial Sequence
  Description of Artificial Sequence: Synthetic oligonucleotide
  Antisense strand to SEQ ID NO: 148572
cuuccuaagcacuaugccc

SEQ ID NO: 148574 - RNA, 19 nt, Artificial Sequence
  Description of Artificial Sequence: Synthetic oligonucleotide
  Sense strand starting at position 1415 of SEQ ID NO: 1908
caaauacccguguagaguu

SEQ ID NO: 148575 - RNA, 19 nt, Artificial Sequence
  Description of Artificial Sequence: Synthetic oligonucleotide
  Antisense strand to SEQ ID NO: 148574
aacucuacacggguauuug

SEQ ID NO: 148576 - RNA, 19 nt, Artificial Sequence
  Description of Artificial Sequence: Synthetic oligonucleotide
  Sense strand starting at position 1413 of SEQ ID NO: 1908
uacaaauacccguguagag

SEQ ID NO: 148577 - RNA, 19 nt, Artificial Sequence
  Description of Artificial Sequence: Synthetic oligonucleotide
  Antisense strand to SEQ ID NO: 148576
cucuacacggguauuugua

SEQ ID NO: 148578 - RNA, 19 nt, Artificial Sequence
  Description of Artificial Sequence: Synthetic oligonucleotide
  Sense strand starting at position 1301 of SEQ ID NO: 1908
gagguugagcacuggauaa

SEQ ID NO: 148579 - RNA, 19 nt, Artificial Sequence
  Description of Artificial Sequence: Synthetic oligonucleotide
  Antisense strand to SEQ ID NO: 148578
uuauccagugcucaaccuc

SEQ ID NO: 148580 - RNA, 19 nt, Artificial Sequence
  Description of Artificial Sequence: Synthetic oligonucleotide
  Sense strand starting at position 1288 of SEQ ID NO: 1908
ugcagauaaaguugagguu

SEQ ID NO: 148581 - RNA, 19 nt, Artificial Sequence
  Description of Artificial Sequence: Synthetic oligonucleotide
  Antisense strand to SEQ ID NO: 148580
aaccucaacuuuaucugca

SEQ ID NO: 148582 - RNA, 19 nt, Artificial Sequence
  Description of Artificial Sequence: Synthetic oligonucleotide
  Sense strand starting at position 464 of SEQ ID NO: 1908
cccucaagagcuuguuuaa

SEQ ID NO: 148583 - RNA, 19 nt, Artificial Sequence
  Description of Artificial Sequence: Synthetic oligonucleotide
  Antisense strand to SEQ ID NO: 148582
uuaaacaagcucuugaggg

SEQ ID NO: 148584 - RNA, 19 nt, Artificial Sequence
  Description of Artificial Sequence: Synthetic oligonucleotide
  Sense strand starting at position 433 of SEQ ID NO: 1908
ucaauaaaugugggcuaaa

SEQ ID NO: 148585 - RNA, 19 nt, Artificial Sequence
  Description of Artificial Sequence: Synthetic oligonucleotide
  Antisense strand to SEQ ID NO: 148584
uuuagcccacauuuauuga

SEQ ID NO: 148586 - RNA, 19 nt, Artificial Sequence
  Description of Artificial Sequence: Synthetic oligonucleotide
  Sense strand starting at position 245 of SEQ ID NO: 1908
ugagucacuuucucauaca

SEQ ID NO: 148587 - RNA, 19 nt, Artificial Sequence
  Description of Artificial Sequence: Synthetic oligonucleotide
  Antisense strand to SEQ ID NO: 148586
uguaugagaaagugacuca

SEQ ID NO: 148588 - RNA, 19 nt, Artificial Sequence
  Description of Artificial Sequence: Synthetic oligonucleotide
  Sense strand starting at position 222 of SEQ ID NO: 1908
guaucugaaagcuaaguga

SEQ ID NO: 148589 - RNA, 19 nt, Artificial Sequence
  Description of Artificial Sequence: Synthetic oligonucleotide
  Antisense strand to SEQ ID NO: 148588
ucacuuagcuuucagauac

SEQ ID NO: 148590 - RNA, 19 nt, Artificial Sequence
  Description of Artificial Sequence: Synthetic oligonucleotide
  Sense strand starting at position 113 of SEQ ID NO: 1908
agacuaccuucuuaaaggu

SEQ ID NO: 148591 - RNA, 19 nt, Artificial Sequence
  Description of Artificial Sequence: Synthetic oligonucleotide
  Antisense strand to SEQ ID NO: 148590
accuuuaagaagguagucu

SEQ ID NO: 148592 - RNA, 19 nt, Artificial Sequence
  Description of Artificial Sequence: Synthetic oligonucleotide
  Sense strand starting at position 108 of SEQ ID NO: 1908
ggccuagacuaccuucuua

SEQ ID NO: 148593 - RNA, 19 nt, Artificial Sequence
  Description of Artificial Sequence: Synthetic oligonucleotide
  Antisense strand to SEQ ID NO: 148592
uaagaagguagucuaggcc

SEQ ID NO: 148594 - RNA, 19 nt, Artificial Sequence
  Description of Artificial Sequence: Synthetic oligonucleotide
  Sense strand starting at position 3605 of SEQ ID NO: 1909
agauaacugcuuggccaga

SEQ ID NO: 148595 - RNA, 19 nt, Artificial Sequence
  Description of Artificial Sequence: Synthetic oligonucleotide
  Antisense strand to SEQ ID NO: 148594
ucuggccaagcaguuaucu

SEQ ID NO: 148596 - RNA, 19 nt, Artificial Sequence
  Description of Artificial Sequence: Synthetic oligonucleotide
  Sense strand starting at position 3526 of SEQ ID NO: 1909
gugacugugucaucacugu

SEQ ID NO: 148597 - RNA, 19 nt, Artificial Sequence
  Description of Artificial Sequence: Synthetic oligonucleotide
  Antisense strand to SEQ ID NO: 148596
acagugaugacacagucac

SEQ ID NO: 148598 - RNA, 19 nt, Artificial Sequence
  Description of Artificial Sequence: Synthetic oligonucleotide
  Sense strand starting at position 3522 of SEQ ID NO: 1909
cugugugacugugucauca

SEQ ID NO: 148599 - RNA, 19 nt, Artificial Sequence
  Description of Artificial Sequence: Synthetic oligonucleotide
  Antisense strand to SEQ ID NO: 148598
ugaugacacagucacacag

SEQ ID NO: 148600 - RNA, 19 nt, Artificial Sequence
  Description of Artificial Sequence: Synthetic oligonucleotide
  Sense strand starting at position 3422 of SEQ ID NO: 1909
uuucgaaccagggaugagu

SEQ ID NO: 148601 - RNA, 19 nt, Artificial Sequence
  Description of Artificial Sequence: Synthetic oligonucleotide
  Antisense strand to SEQ ID NO: 148600
acucaucccugguucgaaa

SEQ ID NO: 148602 - RNA, 19 nt, Artificial Sequence
  Description of Artificial Sequence: Synthetic oligonucleotide
  Sense strand starting at position 3418 of SEQ ID NO: 1909
gggcuuucgaaccagggau

SEQ ID NO: 148603 - RNA, 19 nt, Artificial Sequence
  Description of Artificial Sequence: Synthetic oligonucleotide
  Antisense strand to SEQ ID NO: 148602
aucccugguucgaaagccc

SEQ ID NO: 148604 - RNA, 19 nt, Artificial Sequence
  Description of Artificial Sequence: Synthetic oligonucleotide
  Sense strand starting at position 3326 of SEQ ID NO: 1909
ggcccuuugcgacaauaaa

SEQ ID NO: 148605 - RNA, 19 nt, Artificial Sequence
  Description of Artificial Sequence: Synthetic oligonucleotide
  Antisense strand to SEQ ID NO: 148604
uuuauugucgcaaagggcc

SEQ ID NO: 148606 - RNA, 19 nt, Artificial Sequence
  Description of Artificial Sequence: Synthetic oligonucleotide
  Sense strand starting at position 3285 of SEQ ID NO: 1909
guucgauguucaguuccuu

SEQ ID NO: 148607 - RNA, 19 nt, Artificial Sequence
  Description of Artificial Sequence: Synthetic oligonucleotide
  Antisense strand to SEQ ID NO: 148606
aaggaacugaacaucgaac

SEQ ID NO: 148608 - RNA, 19 nt, Artificial Sequence
  Description of Artificial Sequence: Synthetic oligonucleotide
  Sense strand starting at position 3276 of SEQ ID NO: 1909
uaagauaacguucgauguu

SEQ ID NO: 148609 - RNA, 19 nt, Artificial Sequence
  Description of Artificial Sequence: Synthetic oligonucleotide
  Antisense strand to SEQ ID NO: 148608
aacaucgaacguuaucuua

SEQ ID NO: 148610 - RNA, 19 nt, Artificial Sequence
  Description of Artificial Sequence: Synthetic oligonucleotide
  Sense strand starting at position 3263 of SEQ ID NO: 1909
ucugccagcuaauuaagau

SEQ ID NO: 148611 - RNA, 19 nt, Artificial Sequence
  Description of Artificial Sequence: Synthetic oligonucleotide
  Antisense strand to SEQ ID NO: 148610
aucuuaauuagcuggcaga

SEQ ID NO: 148612 - RNA, 19 nt, Artificial Sequence
  Description of Artificial Sequence: Synthetic oligonucleotide
  Sense strand starting at position 3037 of SEQ ID NO: 1909
agcuaaggauccugagaua

SEQ ID NO: 148613 - RNA, 19 nt, Artificial Sequence
  Description of Artificial Sequence: Synthetic oligonucleotide
  Antisense strand to SEQ ID NO: 148612
uaucucaggauccuuagcu

SEQ ID NO: 148614 - RNA, 19 nt, Artificial Sequence
  Description of Artificial Sequence: Synthetic oligonucleotide
  Sense strand starting at position 3028 of SEQ ID NO: 1909
ccaugucagagcuaaggau

SEQ ID NO: 148615 - RNA, 19 nt, Artificial Sequence
  Description of Artificial Sequence: Synthetic oligonucleotide
  Antisense strand to SEQ ID NO: 148614
auccuuagcucugacaugg

SEQ ID NO: 148616 - RNA, 19 nt, Artificial Sequence
  Description of Artificial Sequence: Synthetic oligonucleotide
  Sense strand starting at position 2913 of SEQ ID NO: 1909
guuccugcuccugauaauu

SEQ ID NO: 148617 - RNA, 19 nt, Artificial Sequence
  Description of Artificial Sequence: Synthetic oligonucleotide
  Antisense strand to SEQ ID NO: 148616
aauuaucaggagcaggaac

SEQ ID NO: 148618 - RNA, 19 nt, Artificial Sequence
  Description of Artificial Sequence: Synthetic oligonucleotide
  Sense strand starting at position 2787 of SEQ ID NO: 1909
agcagugaccuugaggcua

SEQ ID NO: 148619 - RNA, 19 nt, Artificial Sequence
  Description of Artificial Sequence: Synthetic oligonucleotide
  Antisense strand to SEQ ID NO: 148618
uagccucaaggucacugcu

SEQ ID NO: 148620 - RNA, 19 nt, Artificial Sequence
  Description of Artificial Sequence: Synthetic oligonucleotide
  Sense strand starting at position 2717 of SEQ ID NO: 1909
aggguacugagaggcuauu

SEQ ID NO: 148621 - RNA, 19 nt, Artificial Sequence
  Description of Artificial Sequence: Synthetic oligonucleotide
  Antisense strand to SEQ ID NO: 148620
aauagccucucaguacccu

SEQ ID NO: 148622 - RNA, 19 nt, Artificial Sequence
  Description of Artificial Sequence: Synthetic oligonucleotide
  Sense strand starting at position 2703 of SEQ ID NO: 1909
guguuuguggcagaagggu

SEQ ID NO: 148623 - RNA, 19 nt, Artificial Sequence
  Description of Artificial Sequence: Synthetic oligonucleotide
  Antisense strand to SEQ ID NO: 148622
acccuucugccacaaacac

SEQ ID NO: 148624 - RNA, 19 nt, Artificial Sequence
  Description of Artificial Sequence: Synthetic oligonucleotide
  Sense strand starting at position 2557 of SEQ ID NO: 1909
cugggagaguuacuuuacu

SEQ ID NO: 148625 - RNA, 19 nt, Artificial Sequence
  Description of Artificial Sequence: Synthetic oligonucleotide
  Antisense strand to SEQ ID NO: 148624
aguaaaguaacucucccag

SEQ ID NO: 148626 - RNA, 19 nt, Artificial Sequence
  Description of Artificial Sequence: Synthetic oligonucleotide
  Sense strand starting at position 2540 of SEQ ID NO: 1909
gcucacuagccgugugacu

SEQ ID NO: 148627 - RNA, 19 nt, Artificial Sequence
  Description of Artificial Sequence: Synthetic oligonucleotide
  Antisense strand to SEQ ID NO: 148626
agucacacggcuagugagc

SEQ ID NO: 148628 - RNA, 19 nt, Artificial Sequence
  Description of Artificial Sequence: Synthetic oligonucleotide
  Sense strand starting at position 2347 of SEQ ID NO: 1909
uucccugucccagagauga

SEQ ID NO: 148629 - RNA, 19 nt, Artificial Sequence
  Description of Artificial Sequence: Synthetic oligonucleotide
  Antisense strand to SEQ ID NO: 148628
ucaucucugggacagggaa

SEQ ID NO: 148630 - RNA, 19 nt, Artificial Sequence
  Description of Artificial Sequence: Synthetic oligonucleotide
  Sense strand starting at position 2212 of SEQ ID NO: 1909
ccugaaugccaggguauau

SEQ ID NO: 148631 - RNA, 19 nt, Artificial Sequence
  Description of Artificial Sequence: Synthetic oligonucleotide
  Antisense strand to SEQ ID NO: 148630
auauacccuggcauucagg

SEQ ID NO: 148632 - RNA, 19 nt, Artificial Sequence
  Description of Artificial Sequence: Synthetic oligonucleotide
  Sense strand starting at position 2211 of SEQ ID NO: 1909
gccugaaugccaggguaua

SEQ ID NO: 148633 - RNA, 19 nt, Artificial Sequence
  Description of Artificial Sequence: Synthetic oligonucleotide
  Antisense strand to SEQ ID NO: 148632
uauacccuggcauucaggc

SEQ ID NO: 148634 - RNA, 19 nt, Artificial Sequence
  Description of Artificial Sequence: Synthetic oligonucleotide
  Sense strand starting at position 2171 of SEQ ID NO: 1909
uuggucaagauugguggua

SEQ ID NO: 148635 - RNA, 19 nt, Artificial Sequence
  Description of Artificial Sequence: Synthetic oligonucleotide
  Antisense strand to SEQ ID NO: 148634
uaccaccaaucuugaccaa

SEQ ID NO: 148636 - RNA, 19 nt, Artificial Sequence
  Description of Artificial Sequence: Synthetic oligonucleotide
  Sense strand starting at position 2164 of SEQ ID NO: 1909
cuuccuguuggucaagauu

SEQ ID NO: 148637 - RNA, 19 nt, Artificial Sequence
  Description of Artificial Sequence: Synthetic oligonucleotide
  Antisense strand to SEQ ID NO: 148636
aaucuugaccaacaggaag

SEQ ID NO: 148638 - RNA, 19 nt, Artificial Sequence
  Description of Artificial Sequence: Synthetic oligonucleotide
  Sense strand starting at position 2163 of SEQ ID NO: 1909
ccuuccuguuggucaagau

SEQ ID NO: 148639 - RNA, 19 nt, Artificial Sequence
  Description of Artificial Sequence: Synthetic oligonucleotide
  Antisense strand to SEQ ID NO: 148638
aucuugaccaacaggaagg

SEQ ID NO: 148640 - RNA, 19 nt, Artificial Sequence
  Description of Artificial Sequence: Synthetic oligonucleotide
  Sense strand starting at position 2019 of SEQ ID NO: 1909
ucugcaagugucugccaga

SEQ ID NO: 148641 - RNA, 19 nt, Artificial Sequence
  Description of Artificial Sequence: Synthetic oligonucleotide
  Antisense strand to SEQ ID NO: 148640
ucuggcagacacuugcaga

SEQ ID NO: 148642 - RNA, 19 nt, Artificial Sequence
  Description of Artificial Sequence: Synthetic oligonucleotide
  Sense strand starting at position 2011 of SEQ ID NO: 1909
aagagaggucugcaagugu

SEQ ID NO: 148643 - RNA, 19 nt, Artificial Sequence
  Description of Artificial Sequence: Synthetic oligonucleotide
  Antisense strand to SEQ ID NO: 148642
acacuugcagaccucucuu

SEQ ID NO: 148644 - RNA, 19 nt, Artificial Sequence
  Description of Artificial Sequence: Synthetic oligonucleotide
  Sense strand starting at position 2009 of SEQ ID NO: 1909
agaagagaggucugcaagu

SEQ ID NO: 148645 - RNA, 19 nt, Artificial Sequence
  Description of Artificial Sequence: Synthetic oligonucleotide
  Antisense strand to SEQ ID NO: 148644
acuugcagaccucucuucu

SEQ ID NO: 148646 - RNA, 19 nt, Artificial Sequence
  Description of Artificial Sequence: Synthetic oligonucleotide
  Sense strand starting at position 1996 of SEQ ID NO: 1909
auugguggugcugagaaga

SEQ ID NO: 148647 - RNA, 19 nt, Artificial Sequence
  Description of Artificial Sequence: Synthetic oligonucleotide
  Antisense strand to SEQ ID NO: 148646
ucuucucagcaccaccaau

SEQ ID NO: 148648 - RNA, 19 nt, Artificial Sequence
  Description of Artificial Sequence: Synthetic oligonucleotide
  Sense strand starting at position 830 of SEQ ID NO: 1909
agaggaguguguucagcuu

SEQ ID NO: 148649 - RNA, 19 nt, Artificial Sequence
  Description of Artificial Sequence: Synthetic oligonucleotide
  Antisense strand to SEQ ID NO: 148648
aagcugaacacacuccucu

SEQ ID NO: 148650 - RNA, 19 nt, Artificial Sequence
  Description of Artificial Sequence: Synthetic oligonucleotide
  Sense strand starting at position 813 of SEQ ID NO: 1909
cuugguggaucucagaaag

SEQ ID NO: 148651 - RNA, 19 nt, Artificial Sequence
  Description of Artificial Sequence: Synthetic oligonucleotide
  Antisense strand to SEQ ID NO: 148650
cuuucugagauccaccaag

SEQ ID NO: 148652 - RNA, 19 nt, Artificial Sequence
  Description of Artificial Sequence: Synthetic oligonucleotide
  Sense strand starting at position 660 of SEQ ID NO: 1909
agacuuaagcuuugucaca

SEQ ID NO: 148653 - RNA, 19 nt, Artificial Sequence
  Description of Artificial Sequence: Synthetic oligonucleotide
  Antisense strand to SEQ ID NO: 148652
ugugacaaagcuuaagucu

SEQ ID NO: 148654 - RNA, 19 nt, Artificial Sequence
  Description of Artificial Sequence: Synthetic oligonucleotide
  Sense strand starting at position 617 of SEQ ID NO: 1909
agagguuuauucucagauc

SEQ ID NO: 148655 - RNA, 19 nt, Artificial Sequence
  Description of Artificial Sequence: Synthetic oligonucleotide
  Antisense strand to SEQ ID NO: 148654
gaucugagaauaaaccucu

SEQ ID NO: 148656 - RNA, 19 nt, Artificial Sequence
  Description of Artificial Sequence: Synthetic oligonucleotide
  Sense strand starting at position 608 of SEQ ID NO: 1909
ggauaauccagagguuuau

SEQ ID NO: 148657 - RNA, 19 nt, Artificial Sequence
  Description of Artificial Sequence: Synthetic oligonucleotide
  Antisense strand to SEQ ID NO: 148656
auaaaccucuggauuaucc

SEQ ID NO: 148658 - RNA, 19 nt, Artificial Sequence
  Description of Artificial Sequence: Synthetic oligonucleotide
  Sense strand starting at position 606 of SEQ ID NO: 1909
guggauaauccagagguuu

SEQ ID NO: 148659 - RNA, 19 nt, Artificial Sequence
  Description of Artificial Sequence: Synthetic oligonucleotide
  Antisense strand to SEQ ID NO: 148658
aaaccucuggauuauccac

SEQ ID NO: 148660 - RNA, 19 nt, Artificial Sequence
  Description of Artificial Sequence: Synthetic oligonucleotide
  Sense strand starting at position 514 of SEQ ID NO: 1909
gguauucuugcagaaagca

SEQ ID NO: 148661 - RNA, 19 nt, Artificial Sequence
  Description of Artificial Sequence: Synthetic oligonucleotide
  Antisense strand to SEQ ID NO: 148660
ugcuuucugcaagaauacc

SEQ ID NO: 148662 - RNA, 19 nt, Artificial Sequence
  Description of Artificial Sequence: Synthetic oligonucleotide
  Sense strand starting at position 512 of SEQ ID NO: 1909
uagguauucuugcagaaag

SEQ ID NO: 148663 - RNA, 19 nt, Artificial Sequence
  Description of Artificial Sequence: Synthetic oligonucleotide
  Antisense strand to SEQ ID NO: 148662
cuuucugcaagaauaccua

SEQ ID NO: 148664 - RNA, 19 nt, Artificial Sequence
  Description of Artificial Sequence: Synthetic oligonucleotide
  Sense strand starting at position 396 of SEQ ID NO: 1909
ggccuugauaccggagaaa

SEQ ID NO: 148665 - RNA, 19 nt, Artificial Sequence
  Description of Artificial Sequence: Synthetic oligonucleotide
  Antisense strand to SEQ ID NO: 148664
uuucuccgguaucaaggcc

SEQ ID NO: 148666 - RNA, 19 nt, Artificial Sequence
  Description of Artificial Sequence: Synthetic oligonucleotide
  Sense strand starting at position 247 of SEQ ID NO: 1909
cuggcaggugcuggaaauu

SEQ ID NO: 148667 - RNA, 19 nt, Artificial Sequence
  Description of Artificial Sequence: Synthetic oligonucleotide
  Antisense strand to SEQ ID NO: 148666
aauuuccagcaccugccag

SEQ ID NO: 148668 - RNA, 19 nt, Artificial Sequence
  Description of Artificial Sequence: Synthetic oligonucleotide
  Sense strand starting at position 151 of SEQ ID NO: 1909
gucuuugacuugucauuau

SEQ ID NO: 148669 - RNA, 19 nt, Artificial Sequence
  Description of Artificial Sequence: Synthetic oligonucleotide
  Antisense strand to SEQ ID NO: 148668
auaaugacaagucaaagac

SEQ ID NO: 148670 - RNA, 19 nt, Artificial Sequence
  Description of Artificial Sequence: Synthetic oligonucleotide
  Sense strand starting at position 147 of SEQ ID NO: 1909
ccaugucuuugacuuguca

SEQ ID NO: 148671 - RNA, 19 nt, Artificial Sequence
  Description of Artificial Sequence: Synthetic oligonucleotide
  Antisense strand to SEQ ID NO: 148670
ugacaagucaaagacaugg

SEQ ID NO: 148672 - RNA, 19 nt, Artificial Sequence
  Description of Artificial Sequence: Synthetic oligonucleotide
  Sense strand starting at position 143 of SEQ ID NO: 1909
ccacccaugucuuugacuu

SEQ ID NO: 148673 - RNA, 19 nt, Artificial Sequence
  Description of Artificial Sequence: Synthetic oligonucleotide
  Antisense strand to SEQ ID NO: 148672
aagucaaagacaugggugg

SEQ ID NO: 148674 - RNA, 19 nt, Artificial Sequence
  Description of Artificial Sequence: Synthetic oligonucleotide
  Sense strand starting at position 339 of SEQ ID NO: 1911
ugcaaacucccaggucuaa

SEQ ID NO: 148675 - RNA, 19 nt, Artificial Sequence
  Description of Artificial Sequence: Synthetic oligonucleotide
  Antisense strand to SEQ ID NO: 148674
uuagaccugggaguuugca

SEQ ID NO: 148676 - RNA, 19 nt, Artificial Sequence
  Description of Artificial Sequence: Synthetic oligonucleotide
  Sense strand starting at position 463 of SEQ ID NO: 1911
ugaauugguccacggagga

SEQ ID NO: 148677 - RNA, 19 nt, Artificial Sequence
  Description of Artificial Sequence: Synthetic oligonucleotide
  Antisense strand to SEQ ID NO: 148676
uccuccguggaccaauuca

SEQ ID NO: 148678 - RNA, 19 nt, Artificial Sequence
  Description of Artificial Sequence: Synthetic oligonucleotide
  Sense strand starting at position 532 of SEQ ID NO: 1911
gcugucuugccugccagaa

SEQ ID NO: 148679 - RNA, 19 nt, Artificial Sequence
  Description of Artificial Sequence: Synthetic oligonucleotide
  Antisense strand to SEQ ID NO: 148678
uucuggcaggcaagacagc

SEQ ID NO: 148680 - RNA, 19 nt, Artificial Sequence
  Description of Artificial Sequence: Synthetic oligonucleotide
  Sense strand starting at position 656 of SEQ ID NO: 1911
uguuucugucacuaaauca

SEQ ID NO: 148681 - RNA, 19 nt, Artificial Sequence
  Description of Artificial Sequence: Synthetic oligonucleotide
  Antisense strand to SEQ ID NO: 148680
ugauuuagugacagaaaca

SEQ ID NO: 148682 - RNA, 19 nt, Artificial Sequence
  Description of Artificial Sequence: Synthetic oligonucleotide
  Sense strand starting at position 850 of SEQ ID NO: 1911
aagugauugcagcaacucu

SEQ ID NO: 148683 - RNA, 19 nt, Artificial Sequence
  Description of Artificial Sequence: Synthetic oligonucleotide
  Antisense strand to SEQ ID NO: 148682
agaguugcugcaaucacuu

SEQ ID NO: 148684 - RNA, 19 nt, Artificial Sequence
  Description of Artificial Sequence: Synthetic oligonucleotide
  Sense strand starting at position 1096 of SEQ ID NO: 1911
ucauuacaaguuggcuaau

SEQ ID NO: 148685 - RNA, 19 nt, Artificial Sequence
  Description of Artificial Sequence: Synthetic oligonucleotide
  Antisense strand to SEQ ID NO: 148684
auuagccaacuuguaauga

SEQ ID NO: 148686 - RNA, 19 nt, Artificial Sequence
  Description of Artificial Sequence: Synthetic oligonucleotide
  Sense strand starting at position 1194 of SEQ ID NO: 1911
auucuaucuuugucucaga

SEQ ID NO: 148687 - RNA, 19 nt, Artificial Sequence
  Description of Artificial Sequence: Synthetic oligonucleotide
  Antisense strand to SEQ ID NO: 148686
ucugagacaaagauagaau

SEQ ID NO: 148688 - RNA, 19 nt, Artificial Sequence
  Description of Artificial Sequence: Synthetic oligonucleotide
  Sense strand starting at position 1231 of SEQ ID NO: 1911
gguuuacucucuccuuaga

SEQ ID NO: 148689 - RNA, 19 nt, Artificial Sequence
  Description of Artificial Sequence: Synthetic oligonucleotide
  Antisense strand to SEQ ID NO: 148688
ucuaaggagagaguaaacc

SEQ ID NO: 148690 - RNA, 19 nt, Artificial Sequence
  Description of Artificial Sequence: Synthetic oligonucleotide
  Sense strand starting at position 1415 of SEQ ID NO: 1911
agucauucguauuucccaa

SEQ ID NO: 148691 - RNA, 19 nt, Artificial Sequence
  Description of Artificial Sequence: Synthetic oligonucleotide
  Antisense strand to SEQ ID NO: 148690
uugggaaauacgaaugacu

SEQ ID NO: 148692 - RNA, 19 nt, Artificial Sequence
  Description of Artificial Sequence: Synthetic oligonucleotide
  Sense strand starting at position 1477 of SEQ ID NO: 1911
gggagauacuuaccuccau

SEQ ID NO: 148693 - RNA, 19 nt, Artificial Sequence
  Description of Artificial Sequence: Synthetic oligonucleotide
  Antisense strand to SEQ ID NO: 148692
auggagguaaguaucuccc

SEQ ID NO: 148694 - RNA, 19 nt, Artificial Sequence
  Description of Artificial Sequence: Synthetic oligonucleotide
  Sense strand starting at position 1632 of SEQ ID NO: 1911
ggcuaacaagaguggucau

SEQ ID NO: 148695 - RNA, 19 nt, Artificial Sequence
  Description of Artificial Sequence: Synthetic oligonucleotide
  Antisense strand to SEQ ID NO: 148694
augaccacucuuguuagcc

SEQ ID NO: 148696 - RNA, 19 nt, Artificial Sequence
  Description of Artificial Sequence: Synthetic oligonucleotide
  Sense strand starting at position 1702 of SEQ ID NO: 1911
ucaggaaucugccucuaga

SEQ ID NO: 148697 - RNA, 19 nt, Artificial Sequence
  Description of Artificial Sequence: Synthetic oligonucleotide
  Antisense strand to SEQ ID NO: 148696
ucuagaggcagauuccuga

SEQ ID NO: 148698 - RNA, 19 nt, Artificial Sequence
  Description of Artificial Sequence: Synthetic oligonucleotide
  Sense strand starting at position 1871 of SEQ ID NO: 1911
guuugauuaacucaggguu

SEQ ID NO: 148699 - RNA, 19 nt, Artificial Sequence
  Description of Artificial Sequence: Synthetic oligonucleotide
  Antisense strand to SEQ ID NO: 148698
aacccugaguuaaucaaac

SEQ ID NO: 148700 - RNA, 19 nt, Artificial Sequence
  Description of Artificial Sequence: Synthetic oligonucleotide
  Sense strand starting at position 1951 of SEQ ID NO: 1911
acgaucuauuaucuaggaa

SEQ ID NO: 148701 - RNA, 19 nt, Artificial Sequence
  Description of Artificial Sequence: Synthetic oligonucleotide
  Antisense strand to SEQ ID NO: 148700
uuccuagauaauagaucgu

SEQ ID NO: 148702 - RNA, 19 nt, Artificial Sequence
  Description of Artificial Sequence: Synthetic oligonucleotide
  Sense strand starting at position 1967 of SEQ ID NO: 1911
gaagccaaucgauguauga

SEQ ID NO: 148703 - RNA, 19 nt, Artificial Sequence
  Description of Artificial Sequence: Synthetic oligonucleotide
  Antisense strand to SEQ ID NO: 148702
ucauacaucgauuggcuuc

SEQ ID NO: 148704 - RNA, 19 nt, Artificial Sequence
  Description of Artificial Sequence: Synthetic oligonucleotide
  Sense strand starting at position 2028 of SEQ ID NO: 1911
auggaagacucuuuaggug

SEQ ID NO: 148705 - RNA, 19 nt, Artificial Sequence
  Description of Artificial Sequence: Synthetic oligonucleotide
  Antisense strand to SEQ ID NO: 148704
caccuaaagagucuuccau

SEQ ID NO: 148706 - RNA, 19 nt, Artificial Sequence
  Description of Artificial Sequence: Synthetic oligonucleotide
  Sense strand starting at position 2113 of SEQ ID NO: 1911
cuucuaucuguccaaugua

SEQ ID NO: 148707 - RNA, 19 nt, Artificial Sequence
  Description of Artificial Sequence: Synthetic oligonucleotide
  Antisense strand to SEQ ID NO: 148706
uacauuggacagauagaag

SEQ ID NO: 148708 - RNA, 19 nt, Artificial Sequence
  Description of Artificial Sequence: Synthetic oligonucleotide
  Sense strand starting at position 2249 of SEQ ID NO: 1911
uagaguagcccuuaaguug

SEQ ID NO: 148709 - RNA, 19 nt, Artificial Sequence
  Description of Artificial Sequence: Synthetic oligonucleotide
  Antisense strand to SEQ ID NO: 148708
caacuuaagggcuacucua

SEQ ID NO: 148710 - RNA, 19 nt, Artificial Sequence
  Description of Artificial Sequence: Synthetic oligonucleotide
  Sense strand starting at position 2292 of SEQ ID NO: 1911
gccggaagcauuuaucugu

SEQ ID NO: 148711 - RNA, 19 nt, Artificial Sequence
  Description of Artificial Sequence: Synthetic oligonucleotide
  Antisense strand to SEQ ID NO: 148710
acagauaaaugcuuccggc

SEQ ID NO: 148712 - RNA, 19 nt, Artificial Sequence
  Description of Artificial Sequence: Synthetic oligonucleotide
  Sense strand starting at position 2298 of SEQ ID NO: 1911
agcauuuaucugugcucua

SEQ ID NO: 148713 - RNA, 19 nt, Artificial Sequence
  Description of Artificial Sequence: Synthetic oligonucleotide
  Antisense strand to SEQ ID NO: 148712
uagagcacagauaaaugcu

SEQ ID NO: 148714 - RNA, 19 nt, Artificial Sequence
  Description of Artificial Sequence: Synthetic oligonucleotide
  Sense strand starting at position 2299 of SEQ ID NO: 1911
gcauuuaucugugcucuaa

SEQ ID NO: 148715 - RNA, 19 nt, Artificial Sequence
  Description of Artificial Sequence: Synthetic oligonucleotide
  Antisense strand to SEQ ID NO: 148714
uuagagcacagauaaaugc

SEQ ID NO: 148716 - RNA, 19 nt, Artificial Sequence
  Description of Artificial Sequence: Synthetic oligonucleotide
  Sense strand starting at position 2310 of SEQ ID NO: 1911
ugcucuaacaaugggaguu

SEQ ID NO: 148717 - RNA, 19 nt, Artificial Sequence
  Description of Artificial Sequence: Synthetic oligonucleotide
  Antisense strand to SEQ ID NO: 148716
aacucccauuguuagagca

SEQ ID NO: 148718 - RNA, 19 nt, Artificial Sequence
  Description of Artificial Sequence: Synthetic oligonucleotide
  Sense strand starting at position 2311 of SEQ ID NO: 1911
gcucuaacaaugggaguuu

SEQ ID NO: 148719 - RNA, 19 nt, Artificial Sequence
  Description of Artificial Sequence: Synthetic oligonucleotide
  Antisense strand to SEQ ID NO: 148718
aaacucccauuguuagagc

SEQ ID NO: 148720 - RNA, 19 nt, Artificial Sequence
  Description of Artificial Sequence: Synthetic oligonucleotide
  Sense strand starting at position 2405 of SEQ ID NO: 1911
aggucuuucucugcauuua

SEQ ID NO: 148721 - RNA, 19 nt, Artificial Sequence
  Description of Artificial Sequence: Synthetic oligonucleotide
  Antisense strand to SEQ ID NO: 148720
uaaaugcagagaaagaccu

SEQ ID NO: 148722 - RNA, 19 nt, Artificial Sequence
  Description of Artificial Sequence: Synthetic oligonucleotide
  Sense strand starting at position 2467 of SEQ ID NO: 1911
cuggguccucacuaacaca

SEQ ID NO: 148723 - RNA, 19 nt, Artificial Sequence
  Description of Artificial Sequence: Synthetic oligonucleotide
  Antisense strand to SEQ ID NO: 148722
uguguuagugaggacccag

SEQ ID NO: 148724 - RNA, 19 nt, Artificial Sequence
  Description of Artificial Sequence: Synthetic oligonucleotide
  Sense strand starting at position 2490 of SEQ ID NO: 1911
cugucuuguguggaacuga

SEQ ID NO: 148725 - RNA, 19 nt, Artificial Sequence
  Description of Artificial Sequence: Synthetic oligonucleotide
  Antisense strand to SEQ ID NO: 148724
ucaguuccacacaagacag

SEQ ID NO: 148726 - RNA, 19 nt, Artificial Sequence
  Description of Artificial Sequence: Synthetic oligonucleotide
  Sense strand starting at position 2499 of SEQ ID NO: 1911
guggaacugacccgagauc

SEQ ID NO: 148727 - RNA, 19 nt, Artificial Sequence
  Description of Artificial Sequence: Synthetic oligonucleotide
  Antisense strand to SEQ ID NO: 148726
gaucucgggucaguuccac

SEQ ID NO: 148728 - RNA, 19 nt, Artificial Sequence
  Description of Artificial Sequence: Synthetic oligonucleotide
  Sense strand starting at position 2785 of SEQ ID NO: 1911
ucugcaaauccugagauug

SEQ ID NO: 148729 - RNA, 19 nt, Artificial Sequence
  Description of Artificial Sequence: Synthetic oligonucleotide
  Antisense strand to SEQ ID NO: 148728
caaucucaggauuugcaga

SEQ ID NO: 148730 - RNA, 19 nt, Artificial Sequence
  Description of Artificial Sequence: Synthetic oligonucleotide
  Sense strand starting at position 3374 of SEQ ID NO: 1911
augagaguccaguggacau

SEQ ID NO: 148731 - RNA, 19 nt, Artificial Sequence
  Description of Artificial Sequence: Synthetic oligonucleotide
  Antisense strand to SEQ ID NO: 148730
auguccacuggacucucau

SEQ ID NO: 148732 - RNA, 19 nt, Artificial Sequence
  Description of Artificial Sequence: Synthetic oligonucleotide
  Sense strand starting at position 3723 of SEQ ID NO: 1911
uuauucgacucauugauaa

SEQ ID NO: 148733 - RNA, 19 nt, Artificial Sequence
  Description of Artificial Sequence: Synthetic oligonucleotide
  Antisense strand to SEQ ID NO: 148732
uuaucaaugagucgaauaa

SEQ ID NO: 148734 - RNA, 19 nt, Artificial Sequence
  Description of Artificial Sequence: Synthetic oligonucleotide
  Sense strand starting at position 3796 of SEQ ID NO: 1911
ucauuagugccuuagacac

SEQ ID NO: 148735 - RNA, 19 nt, Artificial Sequence
  Description of Artificial Sequence: Synthetic oligonucleotide
  Antisense strand to SEQ ID NO: 148734
gugucuaaggcacuaauga

SEQ ID NO: 148736 - RNA, 19 nt, Artificial Sequence
  Description of Artificial Sequence: Synthetic oligonucleotide
  Sense strand starting at position 3820 of SEQ ID NO: 1911
ucugcuacucacuaguuau

SEQ ID NO: 148737 - RNA, 19 nt, Artificial Sequence
  Description of Artificial Sequence: Synthetic oligonucleotide
  Antisense strand to SEQ ID NO: 148736
auaacuagugaguagcaga

SEQ ID NO: 148738 - RNA, 19 nt, Artificial Sequence
  Description of Artificial Sequence: Synthetic oligonucleotide
  Sense strand starting at position 3831 of SEQ ID NO: 1911
cuaguuauauggccuugaa

SEQ ID NO: 148739 - RNA, 19 nt, Artificial Sequence
  Description of Artificial Sequence: Synthetic oligonucleotide
  Antisense strand to SEQ ID NO: 148738
uucaaggccauauaacuag

SEQ ID NO: 148740 - RNA, 19 nt, Artificial Sequence
  Description of Artificial Sequence: Synthetic oligonucleotide
  Sense strand starting at position 3834 of SEQ ID NO: 1911
guuauauggccuugaaagg

SEQ ID NO: 148741 - RNA, 19 nt, Artificial Sequence
  Description of Artificial Sequence: Synthetic oligonucleotide
  Antisense strand to SEQ ID NO: 148740
ccuuucaaggccauauaac

SEQ ID NO: 148742 - RNA, 19 nt, Artificial Sequence
  Description of Artificial Sequence: Synthetic oligonucleotide
  Sense strand starting at position 3844 of SEQ ID NO: 1911
cuugaaaggcuauauguau

SEQ ID NO: 148743 - RNA, 19 nt, Artificial Sequence
  Description of Artificial Sequence: Synthetic oligonucleotide
  Antisense strand to SEQ ID NO: 148742
auacauauagccuuucaag

SEQ ID NO: 148744 - RNA, 19 nt, Artificial Sequence
  Description of Artificial Sequence: Synthetic oligonucleotide
  Sense strand starting at position 3850 of SEQ ID NO: 1911
aggcuauauguauaguaaa

SEQ ID NO: 148745 - RNA, 19 nt, Artificial Sequence
  Description of Artificial Sequence: Synthetic oligonucleotide
  Antisense strand to SEQ ID NO: 148744
uuuacuauacauauagccu

SEQ ID NO: 148746 - RNA, 19 nt, Artificial Sequence
  Description of Artificial Sequence: Synthetic oligonucleotide
  Sense strand starting at position 3893 of SEQ ID NO: 1911
ccaacauugcuggguacaa

SEQ ID NO: 148747 - RNA, 19 nt, Artificial Sequence
  Description of Artificial Sequence: Synthetic oligonucleotide
  Antisense strand to SEQ ID NO: 148746
uuguacccagcaauguugg

SEQ ID NO: 148748 - RNA, 19 nt, Artificial Sequence
  Description of Artificial Sequence: Synthetic oligonucleotide
  Sense strand starting at position 3894 of SEQ ID NO: 1911
caacauugcuggguacaaa

SEQ ID NO: 148749 - RNA, 19 nt, Artificial Sequence
  Description of Artificial Sequence: Synthetic oligonucleotide
  Antisense strand to SEQ ID NO: 148748
uuuguacccagcaauguug

SEQ ID NO: 148750 - RNA, 19 nt, Artificial Sequence
  Description of Artificial Sequence: Synthetic oligonucleotide
  Sense strand starting at position 3895 of SEQ ID NO: 1911
aacauugcuggguacaaau

SEQ ID NO: 148751 - RNA, 19 nt, Artificial Sequence
  Description of Artificial Sequence: Synthetic oligonucleotide
  Antisense strand to SEQ ID NO: 148750
auuuguacccagcaauguu

SEQ ID NO: 148752 - RNA, 19 nt, Artificial Sequence
  Description of Artificial Sequence: Synthetic oligonucleotide
  Sense strand starting at position 3944 of SEQ ID NO: 1911
cuggcaaaugaguaaaucu

SEQ ID NO: 148753 - RNA, 19 nt, Artificial Sequence
  Description of Artificial Sequence: Synthetic oligonucleotide
  Antisense strand to SEQ ID NO: 148752
agauuuacucauuugccag

SEQ ID NO: 148754 - RNA, 19 nt, Artificial Sequence
  Description of Artificial Sequence: Synthetic oligonucleotide
  Sense strand starting at position 112 of SEQ ID NO: 1910
gugagacagguugguugau

SEQ ID NO: 148755 - RNA, 19 nt, Artificial Sequence
  Description of Artificial Sequence: Synthetic oligonucleotide
  Antisense strand to SEQ ID NO: 148754
aucaaccaaccugucucac

SEQ ID NO: 148756 - RNA, 19 nt, Artificial Sequence
  Description of Artificial Sequence: Synthetic oligonucleotide
  Sense strand starting at position 448 of SEQ ID NO: 1910
uggagccauccuugaacau

SEQ ID NO: 148757 - RNA, 19 nt, Artificial Sequence
  Description of Artificial Sequence: Synthetic oligonucleotide
  Antisense strand to SEQ ID NO: 148756
auguucaaggauggcucca

SEQ ID NO: 148758 - RNA, 19 nt, Artificial Sequence
  Description of Artificial Sequence: Synthetic oligonucleotide
  Sense strand starting at position 449 of SEQ ID NO: 1910
ggagccauccuugaacauu

SEQ ID NO: 148759 - RNA, 19 nt, Artificial Sequence
  Description of Artificial Sequence: Synthetic oligonucleotide
  Antisense strand to SEQ ID NO: 148758
aauguucaaggauggcucc

SEQ ID NO: 148760 - RNA, 19 nt, Artificial Sequence
  Description of Artificial Sequence: Synthetic oligonucleotide
  Sense strand starting at position 564 of SEQ ID NO: 1910
guggcacagccuuaaucua

SEQ ID NO: 148761 - RNA, 19 nt, Artificial Sequence
  Description of Artificial Sequence: Synthetic oligonucleotide
  Antisense strand to SEQ ID NO: 148760
uagauuaaggcugugccac

SEQ ID NO: 148762 - RNA, 19 nt, Artificial Sequence
  Description of Artificial Sequence: Synthetic oligonucleotide
  Sense strand starting at position 603 of SEQ ID NO: 1910
gaguaauaagccuggaccu

SEQ ID NO: 148763 - RNA, 19 nt, Artificial Sequence
  Description of Artificial Sequence: Synthetic oligonucleotide
  Antisense strand to SEQ ID NO: 148762
agguccaggcuuauuacuc

SEQ ID NO: 148764 - RNA, 19 nt, Artificial Sequence
  Description of Artificial Sequence: Synthetic oligonucleotide
  Sense strand starting at position 627 of SEQ ID NO: 1910
auggguuuggucuaaaccu

SEQ ID NO: 148765 - RNA, 19 nt, Artificial Sequence
  Description of Artificial Sequence: Synthetic oligonucleotide
  Antisense strand to SEQ ID NO: 148764
agguuuagaccaaacccau

SEQ ID NO: 148766 - RNA, 19 nt, Artificial Sequence
  Description of Artificial Sequence: Synthetic oligonucleotide
  Sense strand starting at position 691 of SEQ ID NO: 1910
cccauuucuaggugagugu

SEQ ID NO: 148767 - RNA, 19 nt, Artificial Sequence
  Description of Artificial Sequence: Synthetic oligonucleotide
  Antisense strand to SEQ ID NO: 148766
acacucaccuagaaauggg

SEQ ID NO: 148768 - RNA, 19 nt, Artificial Sequence
  Description of Artificial Sequence: Synthetic oligonucleotide
  Sense strand starting at position 1364 of SEQ ID NO: 1910
ugaauuaccuaaguguaua

SEQ ID NO: 148769 - RNA, 19 nt, Artificial Sequence
  Description of Artificial Sequence: Synthetic oligonucleotide
  Antisense strand to SEQ ID NO: 148768
uauacacuuagguaauuca

SEQ ID NO: 148770 - RNA, 19 nt, Artificial Sequence
  Description of Artificial Sequence: Synthetic oligonucleotide
  Sense strand starting at position 1499 of SEQ ID NO: 1910
uaggguaaucagggcaagu

SEQ ID NO: 148771 - RNA, 19 nt, Artificial Sequence
  Description of Artificial Sequence: Synthetic oligonucleotide
  Antisense strand to SEQ ID NO: 148770
acuugcccugauuacccua

SEQ ID NO: 148772 - RNA, 19 nt, Artificial Sequence
  Description of Artificial Sequence: Synthetic oligonucleotide
  Sense strand starting at position 1818 of SEQ ID NO: 1910
accaguccugggugaggaa

SEQ ID NO: 148773 - RNA, 19 nt, Artificial Sequence
  Description of Artificial Sequence: Synthetic oligonucleotide
  Antisense strand to SEQ ID NO: 148772
uuccucacccaggacuggu

SEQ ID NO: 148774 - RNA, 19 nt, Artificial Sequence
  Description of Artificial Sequence: Synthetic oligonucleotide
  Sense strand starting at position 1838 of SEQ ID NO: 1910
gcaggaugcauaggaauaa

SEQ ID NO: 148775 - RNA, 19 nt, Artificial Sequence
  Description of Artificial Sequence: Synthetic oligonucleotide
  Antisense strand to SEQ ID NO: 148774
uuauuccuaugcauccugc

SEQ ID NO: 148776 - RNA, 19 nt, Artificial Sequence
  Description of Artificial Sequence: Synthetic oligonucleotide
  Sense strand starting at position 1850 of SEQ ID NO: 1910
ggaauaaucugcccagacg

SEQ ID NO: 148777 - RNA, 19 nt, Artificial Sequence
  Description of Artificial Sequence: Synthetic oligonucleotide
  Antisense strand to SEQ ID NO: 148776
cgucugggcagauuauucc

SEQ ID NO: 148778 - RNA, 19 nt, Artificial Sequence
  Description of Artificial Sequence: Synthetic oligonucleotide
  Sense strand starting at position 1851 of SEQ ID NO: 1910
gaauaaucugcccagacga

SEQ ID NO: 148779 - RNA, 19 nt, Artificial Sequence
  Description of Artificial Sequence: Synthetic oligonucleotide
  Antisense strand to SEQ ID NO: 148778
ucgucugggcagauuauuc

SEQ ID NO: 148780 - RNA, 19 nt, Artificial Sequence
  Description of Artificial Sequence: Synthetic oligonucleotide
  Sense strand starting at position 2162 of SEQ ID NO: 1910
cucacacagcucugaagau

SEQ ID NO: 148781 - RNA, 19 nt, Artificial Sequence
  Description of Artificial Sequence: Synthetic oligonucleotide
  Antisense strand to SEQ ID NO: 148780
aucuucagagcugugugag

SEQ ID NO: 148782 - RNA, 19 nt, Artificial Sequence
  Description of Artificial Sequence: Synthetic oligonucleotide
  Sense strand starting at position 2177 of SEQ ID NO: 1910
agaugaauugacuggccau

SEQ ID NO: 148783 - RNA, 19 nt, Artificial Sequence
  Description of Artificial Sequence: Synthetic oligonucleotide
  Antisense strand to SEQ ID NO: 148782
auggccagucaauucaucu

SEQ ID NO: 148784 - RNA, 19 nt, Artificial Sequence
  Description of Artificial Sequence: Synthetic oligonucleotide
  Sense strand starting at position 2180 of SEQ ID NO: 1910
ugaauugacuggccauguu

SEQ ID NO: 148785 - RNA, 19 nt, Artificial Sequence
  Description of Artificial Sequence: Synthetic oligonucleotide
  Antisense strand to SEQ ID NO: 148784
aacauggccagucaauuca

SEQ ID NO: 148786 - RNA, 19 nt, Artificial Sequence
  Description of Artificial Sequence: Synthetic oligonucleotide
  Sense strand starting at position 2192 of SEQ ID NO: 1910
ccauguuuggcucaaucag

SEQ ID NO: 148787 - RNA, 19 nt, Artificial Sequence
  Description of Artificial Sequence: Synthetic oligonucleotide
  Antisense strand to SEQ ID NO: 148786
cugauugagccaaacaugg

SEQ ID NO: 148788 - RNA, 19 nt, Artificial Sequence
  Description of Artificial Sequence: Synthetic oligonucleotide
  Sense strand starting at position 2341 of SEQ ID NO: 1910
uuguuuauuccuuagguuu

SEQ ID NO: 148789 - RNA, 19 nt, Artificial Sequence
  Description of Artificial Sequence: Synthetic oligonucleotide
  Antisense strand to SEQ ID NO: 148788
aaaccuaaggaauaaacaa

SEQ ID NO: 148790 - RNA, 19 nt, Artificial Sequence
  Description of Artificial Sequence: Synthetic oligonucleotide
  Sense strand starting at position 2382 of SEQ ID NO: 1910
ugugauugccaugagagua

SEQ ID NO: 148791 - RNA, 19 nt, Artificial Sequence
  Description of Artificial Sequence: Synthetic oligonucleotide
  Antisense strand to SEQ ID NO: 148790
uacucucauggcaaucaca

SEQ ID NO: 148792 - RNA, 19 nt, Artificial Sequence
  Description of Artificial Sequence: Synthetic oligonucleotide
  Sense strand starting at position 2469 of SEQ ID NO: 1910
auagcagguccacauaagu

SEQ ID NO: 148793 - RNA, 19 nt, Artificial Sequence
  Description of Artificial Sequence: Synthetic oligonucleotide
  Antisense strand to SEQ ID NO: 148792
acuuauguggaccugcuau

SEQ ID NO: 148794 - RNA, 19 nt, Artificial Sequence
  Description of Artificial Sequence: Synthetic oligonucleotide
  Sense strand starting at position 2475 of SEQ ID NO: 1910
gguccacauaaguaguuau

SEQ ID NO: 148795 - RNA, 19 nt, Artificial Sequence
  Description of Artificial Sequence: Synthetic oligonucleotide
  Antisense strand to SEQ ID NO: 148794
auaacuacuuauguggacc

SEQ ID NO: 148796 - RNA, 19 nt, Artificial Sequence
  Description of Artificial Sequence: Synthetic oligonucleotide
  Sense strand starting at position 2483 of SEQ ID NO: 1910
uaaguaguuauugggauga

SEQ ID NO: 148797 - RNA, 19 nt, Artificial Sequence
  Description of Artificial Sequence: Synthetic oligonucleotide
  Antisense strand to SEQ ID NO: 148796
ucaucccaauaacuacuua

SEQ ID NO: 148798 - RNA, 19 nt, Artificial Sequence
  Description of Artificial Sequence: Synthetic oligonucleotide
  Sense strand starting at position 2487 of SEQ ID NO: 1910
uaguuauugggaugaaugu

SEQ ID NO: 148799 - RNA, 19 nt, Artificial Sequence
  Description of Artificial Sequence: Synthetic oligonucleotide
  Antisense strand to SEQ ID NO: 148798
acauucaucccaauaacua

SEQ ID NO: 148800 - RNA, 19 nt, Artificial Sequence
  Description of Artificial Sequence: Synthetic oligonucleotide
  Sense strand starting at position 2497 of SEQ ID NO: 1910
gaugaaugucaaugcccuu

SEQ ID NO: 148801 - RNA, 19 nt, Artificial Sequence
  Description of Artificial Sequence: Synthetic oligonucleotide
  Antisense strand to SEQ ID NO: 148800
aagggcauugacauucauc

SEQ ID NO: 148802 - RNA, 19 nt, Artificial Sequence
  Description of Artificial Sequence: Synthetic oligonucleotide
  Sense strand starting at position 2838 of SEQ ID NO: 1910
ugcaauggaucugcauaau

SEQ ID NO: 148803 - RNA, 19 nt, Artificial Sequence
  Description of Artificial Sequence: Synthetic oligonucleotide
  Antisense strand to SEQ ID NO: 148802
auuaugcagauccauugca

SEQ ID NO: 148804 - RNA, 19 nt, Artificial Sequence
  Description of Artificial Sequence: Synthetic oligonucleotide
  Sense strand starting at position 2841 of SEQ ID NO: 1910
aauggaucugcauaaugug

SEQ ID NO: 148805 - RNA, 19 nt, Artificial Sequence
  Description of Artificial Sequence: Synthetic oligonucleotide
  Antisense strand to SEQ ID NO: 148804
cacauuaugcagauccauu

SEQ ID NO: 148806 - RNA, 19 nt, Artificial Sequence
  Description of Artificial Sequence: Synthetic oligonucleotide
  Sense strand starting at position 2872 of SEQ ID NO: 1910
acaagauuacccgggagca

SEQ ID NO: 148807 - RNA, 19 nt, Artificial Sequence
  Description of Artificial Sequence: Synthetic oligonucleotide
  Antisense strand to SEQ ID NO: 148806
ugcucccggguaaucuugu

SEQ ID NO: 148808 - RNA, 19 nt, Artificial Sequence
  Description of Artificial Sequence: Synthetic oligonucleotide
  Sense strand starting at position 3215 of SEQ ID NO: 1910
agaaauguguacucugaaa

SEQ ID NO: 148809 - RNA, 19 nt, Artificial Sequence
  Description of Artificial Sequence: Synthetic oligonucleotide
  Antisense strand to SEQ ID NO: 148808
uuucagaguacacauuucu

SEQ ID NO: 148810 - RNA, 19 nt, Artificial Sequence
  Description of Artificial Sequence: Synthetic oligonucleotide
  Sense strand starting at position 3247 of SEQ ID NO: 1910
ugagaaccauaagauuaga

SEQ ID NO: 148811 - RNA, 19 nt, Artificial Sequence
  Description of Artificial Sequence: Synthetic oligonucleotide
  Antisense strand to SEQ ID NO: 148810
ucuaaucuuaugguucuca

SEQ ID NO: 148812 - RNA, 19 nt, Artificial Sequence
  Description of Artificial Sequence: Synthetic oligonucleotide
  Sense strand starting at position 3316 of SEQ ID NO: 1910
uggccugaggaaugcuuua

SEQ ID NO: 148813 - RNA, 19 nt, Artificial Sequence
  Description of Artificial Sequence: Synthetic oligonucleotide
  Antisense strand to SEQ ID NO: 148812
uaaagcauuccucaggcca

SEQ ID NO: 148814 - RNA, 19 nt, Artificial Sequence
  Description of Artificial Sequence: Synthetic oligonucleotide
  Sense strand starting at position 3481 of SEQ ID NO: 1910
uaaggccgucuccaaauua

SEQ ID NO: 148815 - RNA, 19 nt, Artificial Sequence
  Description of Artificial Sequence: Synthetic oligonucleotide
  Antisense strand to SEQ ID NO: 148814
uaauuuggagacggccuua

SEQ ID NO: 148816 - RNA, 19 nt, Artificial Sequence
  Description of Artificial Sequence: Synthetic oligonucleotide
  Sense strand starting at position 3497 of SEQ ID NO: 1910
uuaucuaaucuauggagca

SEQ ID NO: 148817 - RNA, 19 nt, Artificial Sequence
  Description of Artificial Sequence: Synthetic oligonucleotide
  Antisense strand to SEQ ID NO: 148816
ugcuccauagauuagauaa

SEQ ID NO: 148818 - RNA, 19 nt, Artificial Sequence
  Description of Artificial Sequence: Synthetic oligonucleotide
  Sense strand starting at position 3589 of SEQ ID NO: 1910
aggugucucagaggagacu

SEQ ID NO: 148819 - RNA, 19 nt, Artificial Sequence
  Description of Artificial Sequence: Synthetic oligonucleotide
  Antisense strand to SEQ ID NO: 148818
agucuccucugagacaccu

SEQ ID NO: 148820 - RNA, 19 nt, Artificial Sequence
  Description of Artificial Sequence: Synthetic oligonucleotide
  Sense strand starting at position 3609 of SEQ ID NO: 1910
uaggcauggucacugaagu

SEQ ID NO: 148821 - RNA, 19 nt, Artificial Sequence
  Description of Artificial Sequence: Synthetic oligonucleotide
  Antisense strand to SEQ ID NO: 148820
acuucagugaccaugccua

SEQ ID NO: 148822 - RNA, 19 nt, Artificial Sequence
  Description of Artificial Sequence: Synthetic oligonucleotide
  Sense strand starting at position 3610 of SEQ ID NO: 1910
aggcauggucacugaaguu

SEQ ID NO: 148823 - RNA, 19 nt, Artificial Sequence
  Description of Artificial Sequence: Synthetic oligonucleotide
  Antisense strand to SEQ ID NO: 148822
aacuucagugaccaugccu

SEQ ID NO: 148824 - RNA, 19 nt, Artificial Sequence
  Description of Artificial Sequence: Synthetic oligonucleotide
  Sense strand starting at position 3619 of SEQ ID NO: 1910
cacugaaguucucucugga

SEQ ID NO: 148825 - RNA, 19 nt, Artificial Sequence
  Description of Artificial Sequence: Synthetic oligonucleotide
  Antisense strand to SEQ ID NO: 148824
uccagagagaacuucagug

SEQ ID NO: 148826 - RNA, 19 nt, Artificial Sequence
  Description of Artificial Sequence: Synthetic oligonucleotide
  Sense strand starting at position 3622 of SEQ ID NO: 1910
ugaaguucucucuggagua

SEQ ID NO: 148827 - RNA, 19 nt, Artificial Sequence
  Description of Artificial Sequence: Synthetic oligonucleotide
  Antisense strand to SEQ ID NO: 148826
uacuccagagagaacuuca

SEQ ID NO: 148828 - RNA, 19 nt, Artificial Sequence
  Description of Artificial Sequence: Synthetic oligonucleotide
  Sense strand starting at position 3706 of SEQ ID NO: 1910
ggacuuuguuagucaguga

SEQ ID NO: 148829 - RNA, 19 nt, Artificial Sequence
  Description of Artificial Sequence: Synthetic oligonucleotide
  Antisense strand to SEQ ID NO: 148828
ucacugacuaacaaagucc

SEQ ID NO: 148830 - RNA, 19 nt, Artificial Sequence
  Description of Artificial Sequence: Synthetic oligonucleotide
  Sense strand starting at position 3970 of SEQ ID NO: 1910
ggucaucagacaggaaagu

SEQ ID NO: 148831 - RNA, 19 nt, Artificial Sequence
  Description of Artificial Sequence: Synthetic oligonucleotide
  Antisense strand to SEQ ID NO: 148830
acuuuccugucugaugacc

SEQ ID NO: 148832 - RNA, 19 nt, Artificial Sequence
  Description of Artificial Sequence: Synthetic oligonucleotide
  Sense strand starting at position 3979 of SEQ ID NO: 1910
acaggaaaguucucuuacu

SEQ ID NO: 148833 - RNA, 19 nt, Artificial Sequence
  Description of Artificial Sequence: Synthetic oligonucleotide
  Antisense strand to SEQ ID NO: 148832
aguaagagaacuuuccugu

SEQ ID NO: 148834 - RNA, 19 nt, Artificial Sequence
  Description of Artificial Sequence: Synthetic oligonucleotide
  Sense strand starting at position 3815 of SEQ ID NO: 1912
cucucaauguaaguggaau

SEQ ID NO: 148835 - RNA, 19 nt, Artificial Sequence
  Description of Artificial Sequence: Synthetic oligonucleotide
  Antisense strand to SEQ ID NO: 148834
auuccacuuacauugagag

SEQ ID NO: 148836 - RNA, 19 nt, Artificial Sequence
  Description of Artificial Sequence: Synthetic oligonucleotide
  Sense strand starting at position 3781 of SEQ ID NO: 1912
ucuagcaagaguuaugguu

SEQ ID NO: 148837 - RNA, 19 nt, Artificial Sequence
  Description of Artificial Sequence: Synthetic oligonucleotide
  Antisense strand to SEQ ID NO: 148836
aaccauaacucuugcuaga

SEQ ID NO: 148838 - RNA, 19 nt, Artificial Sequence
  Description of Artificial Sequence: Synthetic oligonucleotide
  Sense strand starting at position 3777 of SEQ ID NO: 1912
cuguucuagcaagaguuau

SEQ ID NO: 148839 - RNA, 19 nt, Artificial Sequence
  Description of Artificial Sequence: Synthetic oligonucleotide
  Antisense strand to SEQ ID NO: 148838
auaacucuugcuagaacag

SEQ ID NO: 148840 - RNA, 19 nt, Artificial Sequence
  Description of Artificial Sequence: Synthetic oligonucleotide
  Sense strand starting at position 3697 of SEQ ID NO: 1912
ccauucuacccagauggua

SEQ ID NO: 148841 - RNA, 19 nt, Artificial Sequence
  Description of Artificial Sequence: Synthetic oligonucleotide
  Antisense strand to SEQ ID NO: 148840
uaccaucuggguagaaugg

SEQ ID NO: 148842 - RNA, 19 nt, Artificial Sequence
  Description of Artificial Sequence: Synthetic oligonucleotide
  Sense strand starting at position 3676 of SEQ ID NO: 1912
gagacagguuucuuaauua

SEQ ID NO: 148843 - RNA, 19 nt, Artificial Sequence
  Description of Artificial Sequence: Synthetic oligonucleotide
  Antisense strand to SEQ ID NO: 148842
uaauuaagaaaccugucuc

SEQ ID NO: 148844 - RNA, 19 nt, Artificial Sequence
  Description of Artificial Sequence: Synthetic oligonucleotide
  Sense strand starting at position 3675 of SEQ ID NO: 1912
agagacagguuucuuaauu

SEQ ID NO: 148845 - RNA, 19 nt, Artificial Sequence
  Description of Artificial Sequence: Synthetic oligonucleotide
  Antisense strand to SEQ ID NO: 148844
aauuaagaaaccugucucu

SEQ ID NO: 148846 - RNA, 19 nt, Artificial Sequence
  Description of Artificial Sequence: Synthetic oligonucleotide
  Sense strand starting at position 3577 of SEQ ID NO: 1912
uucugaaauuggcuccuga

SEQ ID NO: 148847 - RNA, 19 nt, Artificial Sequence
  Description of Artificial Sequence: Synthetic oligonucleotide
  Antisense strand to SEQ ID NO: 148846
ucaggagccaauuucagaa

SEQ ID NO: 148848 - RNA, 19 nt, Artificial Sequence
  Description of Artificial Sequence: Synthetic oligonucleotide
  Sense strand starting at position 3557 of SEQ ID NO: 1912
cuccaugagcaaugacuau

SEQ ID NO: 148849 - RNA, 19 nt, Artificial Sequence
  Description of Artificial Sequence: Synthetic oligonucleotide
  Antisense strand to SEQ ID NO: 148848
auagucauugcucauggag

SEQ ID NO: 148850 - RNA, 19 nt, Artificial Sequence
  Description of Artificial Sequence: Synthetic oligonucleotide
  Sense strand starting at position 3551 of SEQ ID NO: 1912
agaguccuccaugagcaau

SEQ ID NO: 148851 - RNA, 19 nt, Artificial Sequence
  Description of Artificial Sequence: Synthetic oligonucleotide
  Antisense strand to SEQ ID NO: 148850
auugcucauggaggacucu

SEQ ID NO: 148852 - RNA, 19 nt, Artificial Sequence
  Description of Artificial Sequence: Synthetic oligonucleotide
  Sense strand starting at position 3550 of SEQ ID NO: 1912
aagaguccuccaugagcaa

SEQ ID NO: 148853 - RNA, 19 nt, Artificial Sequence
  Description of Artificial Sequence: Synthetic oligonucleotide
  Antisense strand to SEQ ID NO: 148852
uugcucauggaggacucuu

SEQ ID NO: 148854 - RNA, 19 nt, Artificial Sequence
  Description of Artificial Sequence: Synthetic oligonucleotide
  Sense strand starting at position 3548 of SEQ ID NO: 1912
guaagaguccuccaugagc

SEQ ID NO: 148855 - RNA, 19 nt, Artificial Sequence
  Description of Artificial Sequence: Synthetic oligonucleotide
  Antisense strand to SEQ ID NO: 148854
gcucauggaggacucuuac

SEQ ID NO: 148856 - RNA, 19 nt, Artificial Sequence
  Description of Artificial Sequence: Synthetic oligonucleotide
  Sense strand starting at position 3336 of SEQ ID NO: 1912
gaaugacaauauguguaua

SEQ ID NO: 148857 - RNA, 19 nt, Artificial Sequence
  Description of Artificial Sequence: Synthetic oligonucleotide
  Antisense strand to SEQ ID NO: 148856
uauacacauauugucauuc

SEQ ID NO: 148858 - RNA, 19 nt, Artificial Sequence
  Description of Artificial Sequence: Synthetic oligonucleotide
  Sense strand starting at position 3319 of SEQ ID NO: 1912
uuuguaaauuuccaggaga

SEQ ID NO: 148859 - RNA, 19 nt, Artificial Sequence
  Description of Artificial Sequence: Synthetic oligonucleotide
  Antisense strand to SEQ ID NO: 148858
ucuccuggaaauuuacaaa

SEQ ID NO: 148860 - RNA, 19 nt, Artificial Sequence
  Description of Artificial Sequence: Synthetic oligonucleotide
  Sense strand starting at position 3199 of SEQ ID NO: 1912
uccguuuaccuacaucuua

SEQ ID NO: 148861 - RNA, 19 nt, Artificial Sequence
  Description of Artificial Sequence: Synthetic oligonucleotide
  Antisense strand to SEQ ID NO: 148860
uaagauguagguaaacgga

SEQ ID NO: 148862 - RNA, 19 nt, Artificial Sequence
  Description of Artificial Sequence: Synthetic oligonucleotide
  Sense strand starting at position 3163 of SEQ ID NO: 1912
cggagaugcagacauugua

SEQ ID NO: 148863 - RNA, 19 nt, Artificial Sequence
  Description of Artificial Sequence: Synthetic oligonucleotide
  Antisense strand to SEQ ID NO: 148862
uacaaugucugcaucuccg

SEQ ID NO: 148864 - RNA, 19 nt, Artificial Sequence
  Description of Artificial Sequence: Synthetic oligonucleotide
  Sense strand starting at position 3151 of SEQ ID NO: 1912
augucaguacuacggagau

SEQ ID NO: 148865 - RNA, 19 nt, Artificial Sequence
  Description of Artificial Sequence: Synthetic oligonucleotide
  Antisense strand to SEQ ID NO: 148864
aucuccguaguacugacau

SEQ ID NO: 148866 - RNA, 19 nt, Artificial Sequence
  Description of Artificial Sequence: Synthetic oligonucleotide
  Sense strand starting at position 3121 of SEQ ID NO: 1912
aaauaaguaugugcaaagu

SEQ ID NO: 148867 - RNA, 19 nt, Artificial Sequence
  Description of Artificial Sequence: Synthetic oligonucleotide
  Antisense strand to SEQ ID NO: 148866
acuuugcacauacuuauuu

SEQ ID NO: 148868 - RNA, 19 nt, Artificial Sequence
  Description of Artificial Sequence: Synthetic oligonucleotide
  Sense strand starting at position 2932 of SEQ ID NO: 1912
agagaagaaauucgagcau

SEQ ID NO: 148869 - RNA, 19 nt, Artificial Sequence
  Description of Artificial Sequence: Synthetic oligonucleotide
  Antisense strand to SEQ ID NO: 148868
augcucgaauuucuucucu

SEQ ID NO: 148870 - RNA, 19 nt, Artificial Sequence
  Description of Artificial Sequence: Synthetic oligonucleotide
  Sense strand starting at position 2917 of SEQ ID NO: 1912
ccauuauccuugcugagag

SEQ ID NO: 148871 - RNA, 19 nt, Artificial Sequence
  Description of Artificial Sequence: Synthetic oligonucleotide
  Antisense strand to SEQ ID NO: 148870
cucucagcaaggauaaugg

SEQ ID NO: 148872 - RNA, 19 nt, Artificial Sequence
  Description of Artificial Sequence: Synthetic oligonucleotide
  Sense strand starting at position 2850 of SEQ ID NO: 1912
cgguaaaguaugggauacu

SEQ ID NO: 148873 - RNA, 19 nt, Artificial Sequence
  Description of Artificial Sequence: Synthetic oligonucleotide
  Antisense strand to SEQ ID NO: 148872
aguaucccauacuuuaccg

SEQ ID NO: 148874 - RNA, 19 nt, Artificial Sequence
  Description of Artificial Sequence: Synthetic oligonucleotide
  Sense strand starting at position 2841 of SEQ ID NO: 1912
aaggaauugcgguaaagua

SEQ ID NO: 148875 - RNA, 19 nt, Artificial Sequence
  Description of Artificial Sequence: Synthetic oligonucleotide
  Antisense strand to SEQ ID NO: 148874
uacuuuaccgcaauuccuu

SEQ ID NO: 148876 - RNA, 19 nt, Artificial Sequence
  Description of Artificial Sequence: Synthetic oligonucleotide
  Sense strand starting at position 2694 of SEQ ID NO: 1912
gcagauaaucgaugcaaag

SEQ ID NO: 148877 - RNA, 19 nt, Artificial Sequence
  Description of Artificial Sequence: Synthetic oligonucleotide
  Antisense strand to SEQ ID NO: 148876
cuuugcaucgauuaucugc

SEQ ID NO: 148878 - RNA, 19 nt, Artificial Sequence
  Description of Artificial Sequence: Synthetic oligonucleotide
  Sense strand starting at position 2590 of SEQ ID NO: 1912
ccaaguagagauuacgcaa

SEQ ID NO: 148879 - RNA, 19 nt, Artificial Sequence
  Description of Artificial Sequence: Synthetic oligonucleotide
  Antisense strand to SEQ ID NO: 148878
uugcguaaucucuacuugg

SEQ ID NO: 148880 - RNA, 19 nt, Artificial Sequence
  Description of Artificial Sequence: Synthetic oligonucleotide
  Sense strand starting at position 2535 of SEQ ID NO: 1912
ucggaucgcacggaagaau

SEQ ID NO: 148881 - RNA, 19 nt, Artificial Sequence
  Description of Artificial Sequence: Synthetic oligonucleotide
  Antisense strand to SEQ ID NO: 148880
auucuuccgugcgauccga

SEQ ID NO: 148882 - RNA, 19 nt, Artificial Sequence
  Description of Artificial Sequence: Synthetic oligonucleotide
  Sense strand starting at position 1386 of SEQ ID NO: 1912
gcgguauucccagaaacag

SEQ ID NO: 148883 - RNA, 19 nt, Artificial Sequence
  Description of Artificial Sequence: Synthetic oligonucleotide
  Antisense strand to SEQ ID NO: 148882
cuguuucugggaauaccgc

SEQ ID NO: 148884 - RNA, 19 nt, Artificial Sequence
  Description of Artificial Sequence: Synthetic oligonucleotide
  Sense strand starting at position 1324 of SEQ ID NO: 1912
caacgucuucgcuccguga

SEQ ID NO: 148885 - RNA, 19 nt, Artificial Sequence
  Description of Artificial Sequence: Synthetic oligonucleotide
  Antisense strand to SEQ ID NO: 148884
ucacggagcgaagacguug

SEQ ID NO: 148886 - RNA, 19 nt, Artificial Sequence
  Description of Artificial Sequence: Synthetic oligonucleotide
  Sense strand starting at position 950 of SEQ ID NO: 1912
agaauuguauuagugugga

SEQ ID NO: 148887 - RNA, 19 nt, Artificial Sequence
  Description of Artificial Sequence: Synthetic oligonucleotide
  Antisense strand to SEQ ID NO: 148886
uccacacuaauacaauucu

SEQ ID NO: 148888 - RNA, 19 nt, Artificial Sequence
  Description of Artificial Sequence: Synthetic oligonucleotide
  Sense strand starting at position 797 of SEQ ID NO: 1912
uuauuauuagcaggaaguu

SEQ ID NO: 148889 - RNA, 19 nt, Artificial Sequence
  Description of Artificial Sequence: Synthetic oligonucleotide
  Antisense strand to SEQ ID NO: 148888
aacuuccugcuaauaauaa

SEQ ID NO: 148890 - RNA, 19 nt, Artificial Sequence
  Description of Artificial Sequence: Synthetic oligonucleotide
  Sense strand starting at position 794 of SEQ ID NO: 1912
agguuauuauuagcaggaa

SEQ ID NO: 148891 - RNA, 19 nt, Artificial Sequence
  Description of Artificial Sequence: Synthetic oligonucleotide
  Antisense strand to SEQ ID NO: 148890
uuccugcuaauaauaaccu

SEQ ID NO: 148892 - RNA, 19 nt, Artificial Sequence
  Description of Artificial Sequence: Synthetic oligonucleotide
  Sense strand starting at position 786 of SEQ ID NO: 1912
ugcuaacuagguuauuauu

SEQ ID NO: 148893 - RNA, 19 nt, Artificial Sequence
  Description of Artificial Sequence: Synthetic oligonucleotide
  Antisense strand to SEQ ID NO: 148892
aauaauaaccuaguuagca

SEQ ID NO: 148894 - RNA, 19 nt, Artificial Sequence
  Description of Artificial Sequence: Synthetic oligonucleotide
  Sense strand starting at position 784 of SEQ ID NO: 1912
gaugcuaacuagguuauua

SEQ ID NO: 148895 - RNA, 19 nt, Artificial Sequence
  Description of Artificial Sequence: Synthetic oligonucleotide
  Antisense strand to SEQ ID NO: 148894
uaauaaccuaguuagcauc

SEQ ID NO: 148896 - RNA, 19 nt, Artificial Sequence
  Description of Artificial Sequence: Synthetic oligonucleotide
  Sense strand starting at position 783 of SEQ ID NO: 1912
ggaugcuaacuagguuauu

SEQ ID NO: 148897 - RNA, 19 nt, Artificial Sequence
  Description of Artificial Sequence: Synthetic oligonucleotide
  Antisense strand to SEQ ID NO: 148896
aauaaccuaguuagcaucc

SEQ ID NO: 148898 - RNA, 19 nt, Artificial Sequence
  Description of Artificial Sequence: Synthetic oligonucleotide
  Sense strand starting at position 594 of SEQ ID NO: 1912
ugugauuauagguaacugu

SEQ ID NO: 148899 - RNA, 19 nt, Artificial Sequence
  Description of Artificial Sequence: Synthetic oligonucleotide
  Antisense strand to SEQ ID NO: 148898
acaguuaccuauaaucaca

SEQ ID NO: 148900 - RNA, 19 nt, Artificial Sequence
  Description of Artificial Sequence: Synthetic oligonucleotide
  Sense strand starting at position 466 of SEQ ID NO: 1912
aagagacagucguuuacaa

SEQ ID NO: 148901 - RNA, 19 nt, Artificial Sequence
  Description of Artificial Sequence: Synthetic oligonucleotide
  Antisense strand to SEQ ID NO: 148900
uuguaaacgacugucucuu

SEQ ID NO: 148902 - RNA, 19 nt, Artificial Sequence
  Description of Artificial Sequence: Synthetic oligonucleotide
  Sense strand starting at position 464 of SEQ ID NO: 1912
gaaagagacagucguuuac

SEQ ID NO: 148903 - RNA, 19 nt, Artificial Sequence
  Description of Artificial Sequence: Synthetic oligonucleotide
  Antisense strand to SEQ ID NO: 148902
guaaacgacugucucuuuc

SEQ ID NO: 148904 - RNA, 19 nt, Artificial Sequence
  Description of Artificial Sequence: Synthetic oligonucleotide
  Sense strand starting at position 378 of SEQ ID NO: 1912
gauuacuauuagguuguca

SEQ ID NO: 148905 - RNA, 19 nt, Artificial Sequence
  Description of Artificial Sequence: Synthetic oligonucleotide
  Antisense strand to SEQ ID NO: 148904
ugacaaccuaauaguaauc

SEQ ID NO: 148906 - RNA, 19 nt, Artificial Sequence
  Description of Artificial Sequence: Synthetic oligonucleotide
  Sense strand starting at position 366 of SEQ ID NO: 1912
gcuauuagacuggauuacu

SEQ ID NO: 148907 - RNA, 19 nt, Artificial Sequence
  Description of Artificial Sequence: Synthetic oligonucleotide
  Antisense strand to SEQ ID NO: 148906
aguaauccagucuaauagc

SEQ ID NO: 148908 - RNA, 19 nt, Artificial Sequence
  Description of Artificial Sequence: Synthetic oligonucleotide
  Sense strand starting at position 364 of SEQ ID NO: 1912
cagcuauuagacuggauua

SEQ ID NO: 148909 - RNA, 19 nt, Artificial Sequence
  Description of Artificial Sequence: Synthetic oligonucleotide
  Antisense strand to SEQ ID NO: 148908
uaauccagucuaauagcug

SEQ ID NO: 148910 - RNA, 19 nt, Artificial Sequence
  Description of Artificial Sequence: Synthetic oligonucleotide
  Sense strand starting at position 103 of SEQ ID NO: 1912
uuugauacgaauugauuga

SEQ ID NO: 148911 - RNA, 19 nt, Artificial Sequence
  Description of Artificial Sequence: Synthetic oligonucleotide
  Antisense strand to SEQ ID NO: 148910
ucaaucaauucguaucaaa

SEQ ID NO: 148912 - RNA, 19 nt, Artificial Sequence
  Description of Artificial Sequence: Synthetic oligonucleotide
  Sense strand starting at position 55 of SEQ ID NO: 1912
gugcaugaagccuaccaaa

SEQ ID NO: 148913 - RNA, 19 nt, Artificial Sequence
  Description of Artificial Sequence: Synthetic oligonucleotide
  Antisense strand to SEQ ID NO: 148912
uuugguaggcuucaugcac

SEQ ID NO: 148914 - RNA, 19 nt, Artificial Sequence
  Description of Artificial Sequence: Synthetic oligonucleotide
  Sense strand starting at position 3861 of SEQ ID NO: 1913
acaggucagcccugacaaa

SEQ ID NO: 148915 - RNA, 19 nt, Artificial Sequence
  Description of Artificial Sequence: Synthetic oligonucleotide
  Antisense strand to SEQ ID NO: 148914
uuugucagggcugaccugu

SEQ ID NO: 148916 - RNA, 19 nt, Artificial Sequence
  Description of Artificial Sequence: Synthetic oligonucleotide
  Sense strand starting at position 3766 of SEQ ID NO: 1913
ugagacugaugugauaaca

SEQ ID NO: 148917 - RNA, 19 nt, Artificial Sequence
  Description of Artificial Sequence: Synthetic oligonucleotide
  Antisense strand to SEQ ID NO: 148916
uguuaucacaucagucuca

SEQ ID NO: 148918 - RNA, 19 nt, Artificial Sequence
  Description of Artificial Sequence: Synthetic oligonucleotide
  Sense strand starting at position 3765 of SEQ ID NO: 1913
cugagacugaugugauaac

SEQ ID NO: 148919 - RNA, 19 nt, Artificial Sequence
  Description of Artificial Sequence: Synthetic oligonucleotide
  Antisense strand to SEQ ID NO: 148918
guuaucacaucagucucag

SEQ ID NO: 148920 - RNA, 19 nt, Artificial Sequence
  Description of Artificial Sequence: Synthetic oligonucleotide
  Sense strand starting at position 3652 of SEQ ID NO: 1913
gguuucuggagcugaaucu

SEQ ID NO: 148921 - RNA, 19 nt, Artificial Sequence
  Description of Artificial Sequence: Synthetic oligonucleotide
  Antisense strand to SEQ ID NO: 148920
agauucagcuccagaaacc

SEQ ID NO: 148922 - RNA, 19 nt, Artificial Sequence
  Description of Artificial Sequence: Synthetic oligonucleotide
  Sense strand starting at position 3594 of SEQ ID NO: 1913
gucccuaagccacagacau

SEQ ID NO: 148923 - RNA, 19 nt, Artificial Sequence
  Description of Artificial Sequence: Synthetic oligonucleotide
  Antisense strand to SEQ ID NO: 148922
augucuguggcuuagggac

SEQ ID NO: 148924 - RNA, 19 nt, Artificial Sequence
  Description of Artificial Sequence: Synthetic oligonucleotide
  Sense strand starting at position 3469 of SEQ ID NO: 1913
agggauucuugagacagac

SEQ ID NO: 148925 - RNA, 19 nt, Artificial Sequence
  Description of Artificial Sequence: Synthetic oligonucleotide
  Antisense strand to SEQ ID NO: 148924
gucugucucaagaaucccu

SEQ ID NO: 148926 - RNA, 19 nt, Artificial Sequence
  Description of Artificial Sequence: Synthetic oligonucleotide
  Sense strand starting at position 3448 of SEQ ID NO: 1913
gugagucugggugagacaa

SEQ ID NO: 148927 - RNA, 19 nt, Artificial Sequence
  Description of Artificial Sequence: Synthetic oligonucleotide
  Antisense strand to SEQ ID NO: 148926
uugucucacccagacucac

SEQ ID NO: 148928 - RNA, 19 nt, Artificial Sequence
  Description of Artificial Sequence: Synthetic oligonucleotide
  Sense strand starting at position 3437 of SEQ ID NO: 1913
ccuuaugaccugugagucu

SEQ ID NO: 148929 - RNA, 19 nt, Artificial Sequence
  Description of Artificial Sequence: Synthetic oligonucleotide
  Antisense strand to SEQ ID NO: 148928
agacucacaggucauaagg

SEQ ID NO: 148930 - RNA, 19 nt, Artificial Sequence
  Description of Artificial Sequence: Synthetic oligonucleotide
  Sense strand starting at position 3177 of SEQ ID NO: 1913
gacccuugucaccgggaga

SEQ ID NO: 148931 - RNA, 19 nt, Artificial Sequence
  Description of Artificial Sequence: Synthetic oligonucleotide
  Antisense strand to SEQ ID NO: 148930
ucucccggugacaaggguc

SEQ ID NO: 148932 - RNA, 19 nt, Artificial Sequence
  Description of Artificial Sequence: Synthetic oligonucleotide
  Sense strand starting at position 3016 of SEQ ID NO: 1913
aggagcuuuggaugaucga

SEQ ID NO: 148933 - RNA, 19 nt, Artificial Sequence
  Description of Artificial Sequence: Synthetic oligonucleotide
  Antisense strand to SEQ ID NO: 148932
ucgaucauccaaagcuccu

SEQ ID NO: 148934 - RNA, 19 nt, Artificial Sequence
  Description of Artificial Sequence: Synthetic oligonucleotide
  Sense strand starting at position 3014 of SEQ ID NO: 1913
gaaggagcuuuggaugauc

SEQ ID NO: 148935 - RNA, 19 nt, Artificial Sequence
  Description of Artificial Sequence: Synthetic oligonucleotide
  Antisense strand to SEQ ID NO: 148934
gaucauccaaagcuccuuc

SEQ ID NO: 148936 - RNA, 19 nt, Artificial Sequence
  Description of Artificial Sequence: Synthetic oligonucleotide
  Sense strand starting at position 2798 of SEQ ID NO: 1913
agaaucgaccacggaaauu

SEQ ID NO: 148937 - RNA, 19 nt, Artificial Sequence
  Description of Artificial Sequence: Synthetic oligonucleotide
  Antisense strand to SEQ ID NO: 148936
aauuuccguggucgauucu

SEQ ID NO: 148938 - RNA, 19 nt, Artificial Sequence
  Description of Artificial Sequence: Synthetic oligonucleotide
  Sense strand starting at position 2797 of SEQ ID NO: 1913
cagaaucgaccacggaaau

SEQ ID NO: 148939 - RNA, 19 nt, Artificial Sequence
  Description of Artificial Sequence: Synthetic oligonucleotide
  Antisense strand to SEQ ID NO: 148938
auuuccguggucgauucug

SEQ ID NO: 148940 - RNA, 19 nt, Artificial Sequence
  Description of Artificial Sequence: Synthetic oligonucleotide
  Sense strand starting at position 2772 of SEQ ID NO: 1913
gccugauugggcugucucu

SEQ ID NO: 148941 - RNA, 19 nt, Artificial Sequence
  Description of Artificial Sequence: Synthetic oligonucleotide
  Antisense strand to SEQ ID NO: 148940
agagacagcccaaucaggc

SEQ ID NO: 148942 - RNA, 19 nt, Artificial Sequence
  Description of Artificial Sequence: Synthetic oligonucleotide
  Sense strand starting at position 2602 of SEQ ID NO: 1913
ccugauuagacauggguau

SEQ ID NO: 148943 - RNA, 19 nt, Artificial Sequence
  Description of Artificial Sequence: Synthetic oligonucleotide
  Antisense strand to SEQ ID NO: 148942
auacccaugucuaaucagg

SEQ ID NO: 148944 - RNA, 19 nt, Artificial Sequence
  Description of Artificial Sequence: Synthetic oligonucleotide
  Sense strand starting at position 2484 of SEQ ID NO: 1913
guagcauccuuugugggau

SEQ ID NO: 148945 - RNA, 19 nt, Artificial Sequence
  Description of Artificial Sequence: Synthetic oligonucleotide
  Antisense strand to SEQ ID NO: 148944
aucccacaaaggaugcuac

SEQ ID NO: 148946 - RNA, 19 nt, Artificial Sequence
  Description of Artificial Sequence: Synthetic oligonucleotide
  Sense strand starting at position 2483 of SEQ ID NO: 1913
uguagcauccuuuguggga

SEQ ID NO: 148947 - RNA, 19 nt, Artificial Sequence
  Description of Artificial Sequence: Synthetic oligonucleotide
  Antisense strand to SEQ ID NO: 148946
ucccacaaaggaugcuaca

SEQ ID NO: 148948 - RNA, 19 nt, Artificial Sequence
  Description of Artificial Sequence: Synthetic oligonucleotide
  Sense strand starting at position 2472 of SEQ ID NO: 1913
ggaucuuggucuguagcau

SEQ ID NO: 148949 - RNA, 19 nt, Artificial Sequence
  Description of Artificial Sequence: Synthetic oligonucleotide
  Antisense strand to SEQ ID NO: 148948
augcuacagaccaagaucc

SEQ ID NO: 148950 - RNA, 19 nt, Artificial Sequence
  Description of Artificial Sequence: Synthetic oligonucleotide
  Sense strand starting at position 2471 of SEQ ID NO: 1913
gggaucuuggucuguagca

SEQ ID NO: 148951 - RNA, 19 nt, Artificial Sequence
  Description of Artificial Sequence: Synthetic oligonucleotide
  Antisense strand to SEQ ID NO: 148950
ugcuacagaccaagauccc

SEQ ID NO: 148952 - RNA, 19 nt, Artificial Sequence
  Description of Artificial Sequence: Synthetic oligonucleotide
  Sense strand starting at position 2469 of SEQ ID NO: 1913
gagggaucuuggucuguag

SEQ ID NO: 148953 - RNA, 19 nt, Artificial Sequence
  Description of Artificial Sequence: Synthetic oligonucleotide
  Antisense strand to SEQ ID NO: 148952
cuacagaccaagaucccuc

SEQ ID NO: 148954 - RNA, 19 nt, Artificial Sequence
  Description of Artificial Sequence: Synthetic oligonucleotide
  Sense strand starting at position 2460 of SEQ ID NO: 1913
ggguucucugagggaucuu

SEQ ID NO: 148955 - RNA, 19 nt, Artificial Sequence
  Description of Artificial Sequence: Synthetic oligonucleotide
  Antisense strand to SEQ ID NO: 148954
aagaucccucagagaaccc

SEQ ID NO: 148956 - RNA, 19 nt, Artificial Sequence
  Description of Artificial Sequence: Synthetic oligonucleotide
  Sense strand starting at position 2342 of SEQ ID NO: 1913
gacccucagugagaaacuu

SEQ ID NO: 148957 - RNA, 19 nt, Artificial Sequence
  Description of Artificial Sequence: Synthetic oligonucleotide
  Antisense strand to SEQ ID NO: 148956
aaguuucucacugaggguc

SEQ ID NO: 148958 - RNA, 19 nt, Artificial Sequence
  Description of Artificial Sequence: Synthetic oligonucleotide
  Sense strand starting at position 2208 of SEQ ID NO: 1913
agggacacuggaugucuua

SEQ ID NO: 148959 - RNA, 19 nt, Artificial Sequence
  Description of Artificial Sequence: Synthetic oligonucleotide
  Antisense strand to SEQ ID NO: 148958
uaagacauccagugucccu

SEQ ID NO: 148960 - RNA, 19 nt, Artificial Sequence
  Description of Artificial Sequence: Synthetic oligonucleotide
  Sense strand starting at position 1773 of SEQ ID NO: 1913
cugacugacuccucccaga

SEQ ID NO: 148961 - RNA, 19 nt, Artificial Sequence
  Description of Artificial Sequence: Synthetic oligonucleotide
  Antisense strand to SEQ ID NO: 148960
ucugggaggagucagucag

SEQ ID NO: 148962 - RNA, 19 nt, Artificial Sequence
  Description of Artificial Sequence: Synthetic oligonucleotide
  Sense strand starting at position 1496 of SEQ ID NO: 1913
ggcagaaacagcuguugua

SEQ ID NO: 148963 - RNA, 19 nt, Artificial Sequence
  Description of Artificial Sequence: Synthetic oligonucleotide
  Antisense strand to SEQ ID NO: 148962
uacaacagcuguuucugcc

SEQ ID NO: 148964 - RNA, 19 nt, Artificial Sequence
  Description of Artificial Sequence: Synthetic oligonucleotide
  Sense strand starting at position 1388 of SEQ ID NO: 1913
cccauaucaugggagcuuu

SEQ ID NO: 148965 - RNA, 19 nt, Artificial Sequence
  Description of Artificial Sequence: Synthetic oligonucleotide
  Antisense strand to SEQ ID NO: 148964
aaagcucccaugauauggg

SEQ ID NO: 148966 - RNA, 19 nt, Artificial Sequence
  Description of Artificial Sequence: Synthetic oligonucleotide
  Sense strand starting at position 1294 of SEQ ID NO: 1913
ucaagaggucugggccaaa

SEQ ID NO: 148967 - RNA, 19 nt, Artificial Sequence
  Description of Artificial Sequence: Synthetic oligonucleotide
  Antisense strand to SEQ ID NO: 148966
uuuggcccagaccucuuga

SEQ ID NO: 148968 - RNA, 19 nt, Artificial Sequence
  Description of Artificial Sequence: Synthetic oligonucleotide
  Sense strand starting at position 1224 of SEQ ID NO: 1913
gcaguucugagaggacuug

SEQ ID NO: 148969 - RNA, 19 nt, Artificial Sequence
  Description of Artificial Sequence: Synthetic oligonucleotide
  Antisense strand to SEQ ID NO: 148968
caaguccucucagaacugc

SEQ ID NO: 148970 - RNA, 19 nt, Artificial Sequence
  Description of Artificial Sequence: Synthetic oligonucleotide
  Sense strand starting at position 1195 of SEQ ID NO: 1913
ccuaaagcagccugggauu

SEQ ID NO: 148971 - RNA, 19 nt, Artificial Sequence
  Description of Artificial Sequence: Synthetic oligonucleotide
  Antisense strand to SEQ ID NO: 148970
aaucccaggcugcuuuagg

SEQ ID NO: 148972 - RNA, 19 nt, Artificial Sequence
  Description of Artificial Sequence: Synthetic oligonucleotide
  Sense strand starting at position 1059 of SEQ ID NO: 1913
gcaguugucacagagacau

SEQ ID NO: 148973 - RNA, 19 nt, Artificial Sequence
  Description of Artificial Sequence: Synthetic oligonucleotide
  Antisense strand to SEQ ID NO: 148972
augucucugugacaacugc

SEQ ID NO: 148974 - RNA, 19 nt, Artificial Sequence
  Description of Artificial Sequence: Synthetic oligonucleotide
  Sense strand starting at position 1028 of SEQ ID NO: 1913
gugagugucaucugaacuc

SEQ ID NO: 148975 - RNA, 19 nt, Artificial Sequence
  Description of Artificial Sequence: Synthetic oligonucleotide
  Antisense strand to SEQ ID NO: 148974
gaguucagaugacacucac

SEQ ID NO: 148976 - RNA, 19 nt, Artificial Sequence
  Description of Artificial Sequence: Synthetic oligonucleotide
  Sense strand starting at position 1026 of SEQ ID NO: 1913
uugugagugucaucugaac

SEQ ID NO: 148977 - RNA, 19 nt, Artificial Sequence
  Description of Artificial Sequence: Synthetic oligonucleotide
  Antisense strand to SEQ ID NO: 148976
guucagaugacacucacaa

SEQ ID NO: 148978 - RNA, 19 nt, Artificial Sequence
  Description of Artificial Sequence: Synthetic oligonucleotide
  Sense strand starting at position 829 of SEQ ID NO: 1913
aaaggaguggucuguugag

SEQ ID NO: 148979 - RNA, 19 nt, Artificial Sequence
  Description of Artificial Sequence: Synthetic oligonucleotide
  Antisense strand to SEQ ID NO: 148978
cucaacagaccacuccuuu

SEQ ID NO: 148980 - RNA, 19 nt, Artificial Sequence
  Description of Artificial Sequence: Synthetic oligonucleotide
  Sense strand starting at position 776 of SEQ ID NO: 1913
gcaugcgguccuuugaguu

SEQ ID NO: 148981 - RNA, 19 nt, Artificial Sequence
  Description of Artificial Sequence: Synthetic oligonucleotide
  Antisense strand to SEQ ID NO: 148980
aacucaaaggaccgcaugc

SEQ ID NO: 148982 - RNA, 19 nt, Artificial Sequence
  Description of Artificial Sequence: Synthetic oligonucleotide
  Sense strand starting at position 614 of SEQ ID NO: 1913
agaggaaugucugagccuu

SEQ ID NO: 148983 - RNA, 19 nt, Artificial Sequence
  Description of Artificial Sequence: Synthetic oligonucleotide
  Antisense strand to SEQ ID NO: 148982
aaggcucagacauuccucu

SEQ ID NO: 148984 - RNA, 19 nt, Artificial Sequence
  Description of Artificial Sequence: Synthetic oligonucleotide
  Sense strand starting at position 466 of SEQ ID NO: 1913
gacucugaguuuccuguca

SEQ ID NO: 148985 - RNA, 19 nt, Artificial Sequence
  Description of Artificial Sequence: Synthetic oligonucleotide
  Antisense strand to SEQ ID NO: 148984
ugacaggaaacucagaguc

SEQ ID NO: 148986 - RNA, 19 nt, Artificial Sequence
  Description of Artificial Sequence: Synthetic oligonucleotide
  Sense strand starting at position 459 of SEQ ID NO: 1913
ucucacugacucugaguuu

SEQ ID NO: 148987 - RNA, 19 nt, Artificial Sequence
  Description of Artificial Sequence: Synthetic oligonucleotide
  Antisense strand to SEQ ID NO: 148986
aaacucagagucagugaga

SEQ ID NO: 148988 - RNA, 19 nt, Artificial Sequence
  Description of Artificial Sequence: Synthetic oligonucleotide
  Sense strand starting at position 282 of SEQ ID NO: 1913
gaccuugccugucuagcau

SEQ ID NO: 148989 - RNA, 19 nt, Artificial Sequence
  Description of Artificial Sequence: Synthetic oligonucleotide
  Antisense strand to SEQ ID NO: 148988
augcuagacaggcaagguc

SEQ ID NO: 148990 - RNA, 19 nt, Artificial Sequence
  Description of Artificial Sequence: Synthetic oligonucleotide
  Sense strand starting at position 19 of SEQ ID NO: 1913
uugaucuuucccugagauu

SEQ ID NO: 148991 - RNA, 19 nt, Artificial Sequence
  Description of Artificial Sequence: Synthetic oligonucleotide
  Antisense strand to SEQ ID NO: 148990
aaucucagggaaagaucaa

SEQ ID NO: 148992 - RNA, 19 nt, Artificial Sequence
  Description of Artificial Sequence: Synthetic oligonucleotide
  Sense strand starting at position 18 of SEQ ID NO: 1913
auugaucuuucccugagau

SEQ ID NO: 148993 - RNA, 19 nt, Artificial Sequence
  Description of Artificial Sequence: Synthetic oligonucleotide
  Antisense strand to SEQ ID NO: 148992
aucucagggaaagaucaau

SEQ ID NO: 148994 - RNA, 19 nt, Artificial Sequence
  Description of Artificial Sequence: Synthetic oligonucleotide
  Sense strand starting at position 227 of SEQ ID NO: 1914
ggcaguucagucgagaaac

SEQ ID NO: 148995 - RNA, 19 nt, Artificial Sequence
  Description of Artificial Sequence: Synthetic oligonucleotide
  Antisense strand to SEQ ID NO: 148994
guuucucgacugaacugcc

SEQ ID NO: 148996 - RNA, 19 nt, Artificial Sequence
  Description of Artificial Sequence: Synthetic oligonucleotide
  Sense strand starting at position 337 of SEQ ID NO: 1914
gaguguucuguccaaacca

SEQ ID NO: 148997 - RNA, 19 nt, Artificial Sequence
  Description of Artificial Sequence: Synthetic oligonucleotide
  Antisense strand to SEQ ID NO: 148996
ugguuuggacagaacacuc

SEQ ID NO: 148998 - RNA, 19 nt, Artificial Sequence
  Description of Artificial Sequence: Synthetic oligonucleotide
  Sense strand starting at position 742 of SEQ ID NO: 1914
gggccaaauuaaucuauga

SEQ ID NO: 148999 - RNA, 19 nt, Artificial Sequence
  Description of Artificial Sequence: Synthetic oligonucleotide
  Antisense strand to SEQ ID NO: 148998
ucauagauuaauuuggccc

SEQ ID NO: 149000 - RNA, 19 nt, Artificial Sequence
  Description of Artificial Sequence: Synthetic oligonucleotide
  Sense strand starting at position 936 of SEQ ID NO: 1914
acccuuuccgucgagcaga

SEQ ID NO: 149001 - RNA, 19 nt, Artificial Sequence
  Description of Artificial Sequence: Synthetic oligonucleotide
  Antisense strand to SEQ ID NO: 149000
ucugcucgacggaaagggu

SEQ ID NO: 149002 - RNA, 19 nt, Artificial Sequence
  Description of Artificial Sequence: Synthetic oligonucleotide
  Sense strand starting at position 1181 of SEQ ID NO: 1914
guaggaaaggugggaguaa

SEQ ID NO: 149003 - RNA, 19 nt, Artificial Sequence
  Description of Artificial Sequence: Synthetic oligonucleotide
  Antisense strand to SEQ ID NO: 149002
uuacucccaccuuuccuac

SEQ ID NO: 149004 - RNA, 19 nt, Artificial Sequence
  Description of Artificial Sequence: Synthetic oligonucleotide
  Sense strand starting at position 1182 of SEQ ID NO: 1914
uaggaaaggugggaguaaa

SEQ ID NO: 149005 - RNA, 19 nt, Artificial Sequence
  Description of Artificial Sequence: Synthetic oligonucleotide
  Antisense strand to SEQ ID NO: 149004
uuuacucccaccuuuccua

SEQ ID NO: 149006 - RNA, 19 nt, Artificial Sequence
  Description of Artificial Sequence: Synthetic oligonucleotide
  Sense strand starting at position 1791 of SEQ ID NO: 1914
gacagagcguucuuguaaa

SEQ ID NO: 149007 - RNA, 19 nt, Artificial Sequence
  Description of Artificial Sequence: Synthetic oligonucleotide
  Antisense strand to SEQ ID NO: 149006
uuuacaagaacgcucuguc

SEQ ID NO: 149008 - RNA, 19 nt, Artificial Sequence
  Description of Artificial Sequence: Synthetic oligonucleotide
  Sense strand starting at position 1828 of SEQ ID NO: 1914
gguccugcucucgaauauu

SEQ ID NO: 149009 - RNA, 19 nt, Artificial Sequence
  Description of Artificial Sequence: Synthetic oligonucleotide
  Antisense strand to SEQ ID NO: 149008
aauauucgagagcaggacc

SEQ ID NO: 149010 - RNA, 19 nt, Artificial Sequence
  Description of Artificial Sequence: Synthetic oligonucleotide
  Sense strand starting at position 1988 of SEQ ID NO: 1914
cuaggaauuacuugcugga

SEQ ID NO: 149011 - RNA, 19 nt, Artificial Sequence
  Description of Artificial Sequence: Synthetic oligonucleotide
  Antisense strand to SEQ ID NO: 149010
uccagcaaguaauuccuag

SEQ ID NO: 149012 - RNA, 19 nt, Artificial Sequence
  Description of Artificial Sequence: Synthetic oligonucleotide
  Sense strand starting at position 1992 of SEQ ID NO: 1914
gaauuacuugcuggaugac

SEQ ID NO: 149013 - RNA, 19 nt, Artificial Sequence
  Description of Artificial Sequence: Synthetic oligonucleotide
  Antisense strand to SEQ ID NO: 149012
gucauccagcaaguaauuc

SEQ ID NO: 149014 - RNA, 19 nt, Artificial Sequence
  Description of Artificial Sequence: Synthetic oligonucleotide
  Sense strand starting at position 2247 of SEQ ID NO: 1914
ggcgucacuugaucaauag

SEQ ID NO: 149015 - RNA, 19 nt, Artificial Sequence
  Description of Artificial Sequence: Synthetic oligonucleotide
  Antisense strand to SEQ ID NO: 149014
cuauugaucaagugacgcc

SEQ ID NO: 149016 - RNA, 19 nt, Artificial Sequence
  Description of Artificial Sequence: Synthetic oligonucleotide
  Sense strand starting at position 2248 of SEQ ID NO: 1914
gcgucacuugaucaauagu

SEQ ID NO: 149017 - RNA, 19 nt, Artificial Sequence
  Description of Artificial Sequence: Synthetic oligonucleotide
  Antisense strand to SEQ ID NO: 149016
acuauugaucaagugacgc

SEQ ID NO: 149018 - RNA, 19 nt, Artificial Sequence
  Description of Artificial Sequence: Synthetic oligonucleotide
  Sense strand starting at position 2624 of SEQ ID NO: 1914
cuaaguuuccaaggcagua

SEQ ID NO: 149019 - RNA, 19 nt, Artificial Sequence
  Description of Artificial Sequence: Synthetic oligonucleotide
  Antisense strand to SEQ ID NO: 149018
uacugccuuggaaacuuag

SEQ ID NO: 149020 - RNA, 19 nt, Artificial Sequence
  Description of Artificial Sequence: Synthetic oligonucleotide
  Sense strand starting at position 2764 of SEQ ID NO: 1914
uuaauugugacucaggguu

SEQ ID NO: 149021 - RNA, 19 nt, Artificial Sequence
  Description of Artificial Sequence: Synthetic oligonucleotide
  Antisense strand to SEQ ID NO: 149020
aacccugagucacaauuaa

SEQ ID NO: 149022 - RNA, 19 nt, Artificial Sequence
  Description of Artificial Sequence: Synthetic oligonucleotide
  Sense strand starting at position 3102 of SEQ ID NO: 1914
cagggauugcaaugcgacu

SEQ ID NO: 149023 - RNA, 19 nt, Artificial Sequence
  Description of Artificial Sequence: Synthetic oligonucleotide
  Antisense strand to SEQ ID NO: 149022
agucgcauugcaaucccug

SEQ ID NO: 149024 - RNA, 19 nt, Artificial Sequence
  Description of Artificial Sequence: Synthetic oligonucleotide
  Sense strand starting at position 3119 of SEQ ID NO: 1914
cuggguuuagaaugggaau

SEQ ID NO: 149025 - RNA, 19 nt, Artificial Sequence
  Description of Artificial Sequence: Synthetic oligonucleotide
  Antisense strand to SEQ ID NO: 149024
auucccauucuaaacccag

SEQ ID NO: 149026 - RNA, 19 nt, Artificial Sequence
  Description of Artificial Sequence: Synthetic oligonucleotide
  Sense strand starting at position 3186 of SEQ ID NO: 1914
agaccuuaggagugcuuua

SEQ ID NO: 149027 - RNA, 19 nt, Artificial Sequence
  Description of Artificial Sequence: Synthetic oligonucleotide
  Antisense strand to SEQ ID NO: 149026
uaaagcacuccuaaggucu

SEQ ID NO: 149028 - RNA, 19 nt, Artificial Sequence
  Description of Artificial Sequence: Synthetic oligonucleotide
  Sense strand starting at position 3191 of SEQ ID NO: 1914
uuaggagugcuuuagugua

SEQ ID NO: 149029 - RNA, 19 nt, Artificial Sequence
  Description of Artificial Sequence: Synthetic oligonucleotide
  Antisense strand to SEQ ID NO: 149028
uacacuaaagcacuccuaa

SEQ ID NO: 149030 - RNA, 19 nt, Artificial Sequence
  Description of Artificial Sequence: Synthetic oligonucleotide
  Sense strand starting at position 3210 of SEQ ID NO: 1914
ugugguaggccugggaauu

SEQ ID NO: 149031 - RNA, 19 nt, Artificial Sequence
  Description of Artificial Sequence: Synthetic oligonucleotide
  Antisense strand to SEQ ID NO: 149030
aauucccaggccuaccaca

SEQ ID NO: 149032 - RNA, 19 nt, Artificial Sequence
  Description of Artificial Sequence: Synthetic oligonucleotide
  Sense strand starting at position 3234 of SEQ ID NO: 1914
auuagagaaucagucucuu

SEQ ID NO: 149033 - RNA, 19 nt, Artificial Sequence
  Description of Artificial Sequence: Synthetic oligonucleotide
  Antisense strand to SEQ ID NO: 149032
aagagacugauucucuaau

SEQ ID NO: 149034 - RNA, 19 nt, Artificial Sequence
  Description of Artificial Sequence: Synthetic oligonucleotide
  Sense strand starting at position 3245 of SEQ ID NO: 1914
agucucuuucucugaagag

SEQ ID NO: 149035 - RNA, 19 nt, Artificial Sequence
  Description of Artificial Sequence: Synthetic oligonucleotide
  Antisense strand to SEQ ID NO: 149034
cucuucagagaaagagacu

SEQ ID NO: 149036 - RNA, 19 nt, Artificial Sequence
  Description of Artificial Sequence: Synthetic oligonucleotide
  Sense strand starting at position 3266 of SEQ ID NO: 1914
ccaaguauugggcguuaga

SEQ ID NO: 149037 - RNA, 19 nt, Artificial Sequence
  Description of Artificial Sequence: Synthetic oligonucleotide
  Antisense strand to SEQ ID NO: 149036
ucuaacgcccaauacuugg

SEQ ID NO: 149038 - RNA, 19 nt, Artificial Sequence
  Description of Artificial Sequence: Synthetic oligonucleotide
  Sense strand starting at position 3269 of SEQ ID NO: 1914
aguauugggcguuagauaa

SEQ ID NO: 149039 - RNA, 19 nt, Artificial Sequence
  Description of Artificial Sequence: Synthetic oligonucleotide
  Antisense strand to SEQ ID NO: 149038
uuaucuaacgcccaauacu

SEQ ID NO: 149040 - RNA, 19 nt, Artificial Sequence
  Description of Artificial Sequence: Synthetic oligonucleotide
  Sense strand starting at position 3276 of SEQ ID NO: 1914
ggcguuagauaagcaaaca

SEQ ID NO: 149041 - RNA, 19 nt, Artificial Sequence
  Description of Artificial Sequence: Synthetic oligonucleotide
  Antisense strand to SEQ ID NO: 149040
uguuugcuuaucuaacgcc

SEQ ID NO: 149042 - RNA, 19 nt, Artificial Sequence
  Description of Artificial Sequence: Synthetic oligonucleotide
  Sense strand starting at position 3277 of SEQ ID NO: 1914
gcguuagauaagcaaacaa

SEQ ID NO: 149043 - RNA, 19 nt, Artificial Sequence
  Description of Artificial Sequence: Synthetic oligonucleotide
  Antisense strand to SEQ ID NO: 149042
uuguuugcuuaucuaacgc

SEQ ID NO: 149044 - RNA, 19 nt, Artificial Sequence
  Description of Artificial Sequence: Synthetic oligonucleotide
  Sense strand starting at position 3308 of SEQ ID NO: 1914
gugcuuagugaaugguaga

SEQ ID NO: 149045 - RNA, 19 nt, Artificial Sequence
  Description of Artificial Sequence: Synthetic oligonucleotide
  Antisense strand to SEQ ID NO: 149044
ucuaccauucacuaagcac

SEQ ID NO: 149046 - RNA, 19 nt, Artificial Sequence
  Description of Artificial Sequence: Synthetic oligonucleotide
  Sense strand starting at position 3315 of SEQ ID NO: 1914
gugaaugguagaggauacu

SEQ ID NO: 149047 - RNA, 19 nt, Artificial Sequence
  Description of Artificial Sequence: Synthetic oligonucleotide
  Antisense strand to SEQ ID NO: 149046
aguauccucuaccauucac

SEQ ID NO: 149048 - RNA, 19 nt, Artificial Sequence
  Description of Artificial Sequence: Synthetic oligonucleotide
  Sense strand starting at position 3326 of SEQ ID NO: 1914
aggauacuauuggauacua

SEQ ID NO: 149049 - RNA, 19 nt, Artificial Sequence
  Description of Artificial Sequence: Synthetic oligonucleotide
  Antisense strand to SEQ ID NO: 149048
uaguauccaauaguauccu

SEQ ID NO: 149050 - RNA, 19 nt, Artificial Sequence
  Description of Artificial Sequence: Synthetic oligonucleotide
  Sense strand starting at position 3334 of SEQ ID NO: 1914
auuggauacuaggagaaca

SEQ ID NO: 149051 - RNA, 19 nt, Artificial Sequence
  Description of Artificial Sequence: Synthetic oligonucleotide
  Antisense strand to SEQ ID NO: 149050
uguucuccuaguauccaau

SEQ ID NO: 149052 - RNA, 19 nt, Artificial Sequence
  Description of Artificial Sequence: Synthetic oligonucleotide
  Sense strand starting at position 3372 of SEQ ID NO: 1914
uccucuuggaguggucaca

SEQ ID NO: 149053 - RNA, 19 nt, Artificial Sequence
  Description of Artificial Sequence: Synthetic oligonucleotide
  Antisense strand to SEQ ID NO: 149052
ugugaccacuccaagagga

SEQ ID NO: 149054 - RNA, 19 nt, Artificial Sequence
  Description of Artificial Sequence: Synthetic oligonucleotide
  Sense strand starting at position 3639 of SEQ ID NO: 1914
acugcauaacaguguuuga

SEQ ID NO: 149055 - RNA, 19 nt, Artificial Sequence
  Description of Artificial Sequence: Synthetic oligonucleotide
  Antisense strand to SEQ ID NO: 149054
ucaaacacuguuaugcagu

SEQ ID NO: 149056 - RNA, 19 nt, Artificial Sequence
  Description of Artificial Sequence: Synthetic oligonucleotide
  Sense strand starting at position 3648 of SEQ ID NO: 1914
caguguuugagccaacgau

SEQ ID NO: 149057 - RNA, 19 nt, Artificial Sequence
  Description of Artificial Sequence: Synthetic oligonucleotide
  Antisense strand to SEQ ID NO: 149056
aucguuggcucaaacacug

SEQ ID NO: 149058 - RNA, 19 nt, Artificial Sequence
  Description of Artificial Sequence: Synthetic oligonucleotide
  Sense strand starting at position 3652 of SEQ ID NO: 1914
guuugagccaacgauggau

SEQ ID NO: 149059 - RNA, 19 nt, Artificial Sequence
  Description of Artificial Sequence: Synthetic oligonucleotide
  Antisense strand to SEQ ID NO: 149058
auccaucguuggcucaaac

SEQ ID NO: 149060 - RNA, 19 nt, Artificial Sequence
  Description of Artificial Sequence: Synthetic oligonucleotide
  Sense strand starting at position 3738 of SEQ ID NO: 1914
uguagcugucuagcgcaau

SEQ ID NO: 149061 - RNA, 19 nt, Artificial Sequence
  Description of Artificial Sequence: Synthetic oligonucleotide
  Antisense strand to SEQ ID NO: 149060
auugcgcuagacagcuaca

SEQ ID NO: 149062 - RNA, 19 nt, Artificial Sequence
  Description of Artificial Sequence: Synthetic oligonucleotide
  Sense strand starting at position 3749 of SEQ ID NO: 1914
agcgcaauacuuuacucau

SEQ ID NO: 149063 - RNA, 19 nt, Artificial Sequence
  Description of Artificial Sequence: Synthetic oligonucleotide
  Antisense strand to SEQ ID NO: 149062
augaguaaaguauugcgcu

SEQ ID NO: 149064 - RNA, 19 nt, Artificial Sequence
  Description of Artificial Sequence: Synthetic oligonucleotide
  Sense strand starting at position 3752 of SEQ ID NO: 1914
gcaauacuuuacucaugug

SEQ ID NO: 149065 - RNA, 19 nt, Artificial Sequence
  Description of Artificial Sequence: Synthetic oligonucleotide
  Antisense strand to SEQ ID NO: 149064
cacaugaguaaaguauugc

SEQ ID NO: 149066 - RNA, 19 nt, Artificial Sequence
  Description of Artificial Sequence: Synthetic oligonucleotide
  Sense strand starting at position 3833 of SEQ ID NO: 1914
accaauuauguguaguaug

SEQ ID NO: 149067 - RNA, 19 nt, Artificial Sequence
  Description of Artificial Sequence: Synthetic oligonucleotide
  Antisense strand to SEQ ID NO: 149066
cauacuacacauaauuggu

SEQ ID NO: 149068 - RNA, 19 nt, Artificial Sequence
  Description of Artificial Sequence: Synthetic oligonucleotide
  Sense strand starting at position 3840 of SEQ ID NO: 1914
auguguaguaugcaauacu

SEQ ID NO: 149069 - RNA, 19 nt, Artificial Sequence
  Description of Artificial Sequence: Synthetic oligonucleotide
  Antisense strand to SEQ ID NO: 149068
aguauugcauacuacacau

SEQ ID NO: 149070 - RNA, 19 nt, Artificial Sequence
  Description of Artificial Sequence: Synthetic oligonucleotide
  Sense strand starting at position 3843 of SEQ ID NO: 1914
uguaguaugcaauacuuga

SEQ ID NO: 149071 - RNA, 19 nt, Artificial Sequence
  Description of Artificial Sequence: Synthetic oligonucleotide
  Antisense strand to SEQ ID NO: 149070
ucaaguauugcauacuaca

SEQ ID NO: 149072 - RNA, 19 nt, Artificial Sequence
  Description of Artificial Sequence: Synthetic oligonucleotide
  Sense strand starting at position 3878 of SEQ ID NO: 1914
cuguuacugcauuauguau

SEQ ID NO: 149073 - RNA, 19 nt, Artificial Sequence
  Description of Artificial Sequence: Synthetic oligonucleotide
  Antisense strand to SEQ ID NO: 149072
auacauaaugcaguaacag

SEQ ID NO: 149074 - RNA, 19 nt, Artificial Sequence
  Description of Artificial Sequence: Synthetic oligonucleotide
  Sense strand starting at position 24 of SEQ ID NO: 1915
cccuaagagagguggacuu

SEQ ID NO: 149075 - RNA, 19 nt, Artificial Sequence
  Description of Artificial Sequence: Synthetic oligonucleotide
  Antisense strand to SEQ ID NO: 149074
aaguccaccucucuuaggg

SEQ ID NO: 149076 - RNA, 19 nt, Artificial Sequence
  Description of Artificial Sequence: Synthetic oligonucleotide
  Sense strand starting at position 48 of SEQ ID NO: 1915
caagaaucacauuguugga

SEQ ID NO: 149077 - RNA, 19 nt, Artificial Sequence
  Description of Artificial Sequence: Synthetic oligonucleotide
  Antisense strand to SEQ ID NO: 149076
uccaacaaugugauucuug

SEQ ID NO: 149078 - RNA, 19 nt, Artificial Sequence
  Description of Artificial Sequence: Synthetic oligonucleotide
  Sense strand starting at position 52 of SEQ ID NO: 1915
aaucacauuguuggaggau

SEQ ID NO: 149079 - RNA, 19 nt, Artificial Sequence
  Description of Artificial Sequence: Synthetic oligonucleotide
  Antisense strand to SEQ ID NO: 149078
auccuccaacaaugugauu

SEQ ID NO: 149080 - RNA, 19 nt, Artificial Sequence
  Description of Artificial Sequence: Synthetic oligonucleotide
  Sense strand starting at position 55 of SEQ ID NO: 1915
cacauuguuggaggaugau

SEQ ID NO: 149081 - RNA, 19 nt, Artificial Sequence
  Description of Artificial Sequence: Synthetic oligonucleotide
  Antisense strand to SEQ ID NO: 149080
aucauccuccaacaaugug

SEQ ID NO: 149082 - RNA, 19 nt, Artificial Sequence
  Description of Artificial Sequence: Synthetic oligonucleotide
  Sense strand starting at position 296 of SEQ ID NO: 1915
uugucaccuuucucuggaa

SEQ ID NO: 149083 - RNA, 19 nt, Artificial Sequence
  Description of Artificial Sequence: Synthetic oligonucleotide
  Antisense strand to SEQ ID NO: 149082
uuccagagaaaggugacaa

SEQ ID NO: 149084 - RNA, 19 nt, Artificial Sequence
  Description of Artificial Sequence: Synthetic oligonucleotide
  Sense strand starting at position 298 of SEQ ID NO: 1915
gucaccuuucucuggaacu

SEQ ID NO: 149085 - RNA, 19 nt, Artificial Sequence
  Description of Artificial Sequence: Synthetic oligonucleotide
  Antisense strand to SEQ ID NO: 149084
aguuccagagaaaggugac

SEQ ID NO: 149086 - RNA, 19 nt, Artificial Sequence
  Description of Artificial Sequence: Synthetic oligonucleotide
  Sense strand starting at position 412 of SEQ ID NO: 1915
aacaucagucuugguguaa

SEQ ID NO: 149087 - RNA, 19 nt, Artificial Sequence
  Description of Artificial Sequence: Synthetic oligonucleotide
  Antisense strand to SEQ ID NO: 149086
uuacaccaagacugauguu

SEQ ID NO: 149088 - RNA, 19 nt, Artificial Sequence
  Description of Artificial Sequence: Synthetic oligonucleotide
  Sense strand starting at position 423 of SEQ ID NO: 1915
ugguguaauuuagagauua

SEQ ID NO: 149089 - RNA, 19 nt, Artificial Sequence
  Description of Artificial Sequence: Synthetic oligonucleotide
  Antisense strand to SEQ ID NO: 149088
uaaucucuaaauuacacca

SEQ ID NO: 149090 - RNA, 19 nt, Artificial Sequence
  Description of Artificial Sequence: Synthetic oligonucleotide
  Sense strand starting at position 514 of SEQ ID NO: 1915
agagguaauucuccaaagu

SEQ ID NO: 149091 - RNA, 19 nt, Artificial Sequence
  Description of Artificial Sequence: Synthetic oligonucleotide
  Antisense strand to SEQ ID NO: 149090
acuuuggagaauuaccucu

SEQ ID NO: 149092 - RNA, 19 nt, Artificial Sequence
  Description of Artificial Sequence: Synthetic oligonucleotide
  Sense strand starting at position 798 of SEQ ID NO: 1915
cgcucaacauuugaggaaa

SEQ ID NO: 149093 - RNA, 19 nt, Artificial Sequence
  Description of Artificial Sequence: Synthetic oligonucleotide
  Antisense strand to SEQ ID NO: 149092
uuuccucaaauguugagcg

SEQ ID NO: 149094 - RNA, 19 nt, Artificial Sequence
  Description of Artificial Sequence: Synthetic oligonucleotide
  Sense strand starting at position 800 of SEQ ID NO: 1915
cucaacauuugaggaaaga

SEQ ID NO: 149095 - RNA, 19 nt, Artificial Sequence
  Description of Artificial Sequence: Synthetic oligonucleotide
  Antisense strand to SEQ ID NO: 149094
ucuuuccucaaauguugag

SEQ ID NO: 149096 - RNA, 19 nt, Artificial Sequence
  Description of Artificial Sequence: Synthetic oligonucleotide
  Sense strand starting at position 1790 of SEQ ID NO: 1915
aagauaaagucugcuggga

SEQ ID NO: 149097 - RNA, 19 nt, Artificial Sequence
  Description of Artificial Sequence: Synthetic oligonucleotide
  Antisense strand to SEQ ID NO: 149096
ucccagcagacuuuaucuu

SEQ ID NO: 149098 - RNA, 19 nt, Artificial Sequence
  Description of Artificial Sequence: Synthetic oligonucleotide
  Sense strand starting at position 1794 of SEQ ID NO: 1915
uaaagucugcugggaagua

SEQ ID NO: 149099 - RNA, 19 nt, Artificial Sequence
  Description of Artificial Sequence: Synthetic oligonucleotide
  Antisense strand to SEQ ID NO: 149098
uacuucccagcagacuuua

SEQ ID NO: 149100 - RNA, 19 nt, Artificial Sequence
  Description of Artificial Sequence: Synthetic oligonucleotide
  Sense strand starting at position 1803 of SEQ ID NO: 1915
cugggaaguauguggguuu

SEQ ID NO: 149101 - RNA, 19 nt, Artificial Sequence
  Description of Artificial Sequence: Synthetic oligonucleotide
  Antisense strand to SEQ ID NO: 149100
aaacccacauacuucccag

SEQ ID NO: 149102 - RNA, 19 nt, Artificial Sequence
  Description of Artificial Sequence: Synthetic oligonucleotide
  Sense strand starting at position 1868 of SEQ ID NO: 1915
ugaggcuuaccauguugga

SEQ ID NO: 149103 - RNA, 19 nt, Artificial Sequence
  Description of Artificial Sequence: Synthetic oligonucleotide
  Antisense strand to SEQ ID NO: 149102
uccaacaugguaagccuca

SEQ ID NO: 149104 - RNA, 19 nt, Artificial Sequence
  Description of Artificial Sequence: Synthetic oligonucleotide
  Sense strand starting at position 2118 of SEQ ID NO: 1915
cguccucuccagcgauuua

SEQ ID NO: 149105 - RNA, 19 nt, Artificial Sequence
  Description of Artificial Sequence: Synthetic oligonucleotide
  Antisense strand to SEQ ID NO: 149104
uaaaucgcuggagaggacg

SEQ ID NO: 149106 - RNA, 19 nt, Artificial Sequence
  Description of Artificial Sequence: Synthetic oligonucleotide
  Sense strand starting at position 2249 of SEQ ID NO: 1915
cacaguagucuucgggaag

SEQ ID NO: 149107 - RNA, 19 nt, Artificial Sequence
  Description of Artificial Sequence: Synthetic oligonucleotide
  Antisense strand to SEQ ID NO: 149106
cuucccgaagacuacugug

SEQ ID NO: 149108 - RNA, 19 nt, Artificial Sequence
  Description of Artificial Sequence: Synthetic oligonucleotide
  Sense strand starting at position 2252 of SEQ ID NO: 1915
aguagucuucgggaagucu

SEQ ID NO: 149109 - RNA, 19 nt, Artificial Sequence
  Description of Artificial Sequence: Synthetic oligonucleotide
  Antisense strand to SEQ ID NO: 149108
agacuucccgaagacuacu

SEQ ID NO: 149110 - RNA, 19 nt, Artificial Sequence
  Description of Artificial Sequence: Synthetic oligonucleotide
  Sense strand starting at position 2283 of SEQ ID NO: 1915
gggucuuucccauguauga

SEQ ID NO: 149111 - RNA, 19 nt, Artificial Sequence
  Description of Artificial Sequence: Synthetic oligonucleotide
  Antisense strand to SEQ ID NO: 149110
ucauacaugggaaagaccc

SEQ ID NO: 149112 - RNA, 19 nt, Artificial Sequence
  Description of Artificial Sequence: Synthetic oligonucleotide
  Sense strand starting at position 2300 of SEQ ID NO: 1915
gagcucauucugggcauuu

SEQ ID NO: 149113 - RNA, 19 nt, Artificial Sequence
  Description of Artificial Sequence: Synthetic oligonucleotide
  Antisense strand to SEQ ID NO: 149112
aaaugcccagaaugagcuc

SEQ ID NO: 149114 - RNA, 19 nt, Artificial Sequence
  Description of Artificial Sequence: Synthetic oligonucleotide
  Sense strand starting at position 2301 of SEQ ID NO: 1915
agcucauucugggcauuua

SEQ ID NO: 149115 - RNA, 19 nt, Artificial Sequence
  Description of Artificial Sequence: Synthetic oligonucleotide
  Antisense strand to SEQ ID NO: 149114
uaaaugcccagaaugagcu

SEQ ID NO: 149116 - RNA, 19 nt, Artificial Sequence
  Description of Artificial Sequence: Synthetic oligonucleotide
  Sense strand starting at position 2623 of SEQ ID NO: 1915
gcaacaagagcggaacaau

SEQ ID NO: 149117 - RNA, 19 nt, Artificial Sequence
  Description of Artificial Sequence: Synthetic oligonucleotide
  Antisense strand to SEQ ID NO: 149116
auuguuccgcucuuguugc

SEQ ID NO: 149118 - RNA, 19 nt, Artificial Sequence
  Description of Artificial Sequence: Synthetic oligonucleotide
  Sense strand starting at position 2971 of SEQ ID NO: 1915
ccaagaguguuaguuagga

SEQ ID NO: 149119 - RNA, 19 nt, Artificial Sequence
  Description of Artificial Sequence: Synthetic oligonucleotide
  Antisense strand to SEQ ID NO: 149118
uccuaacuaacacucuugg

SEQ ID NO: 149120 - RNA, 19 nt, Artificial Sequence
  Description of Artificial Sequence: Synthetic oligonucleotide
  Sense strand starting at position 2973 of SEQ ID NO: 1915
aagaguguuaguuaggaca

SEQ ID NO: 149121 - RNA, 19 nt, Artificial Sequence
  Description of Artificial Sequence: Synthetic oligonucleotide
  Antisense strand to SEQ ID NO: 149120
uguccuaacuaacacucuu

SEQ ID NO: 149122 - RNA, 19 nt, Artificial Sequence
  Description of Artificial Sequence: Synthetic oligonucleotide
  Sense strand starting at position 2990 of SEQ ID NO: 1915
cagagugcgggucagaauu

SEQ ID NO: 149123 - RNA, 19 nt, Artificial Sequence
  Description of Artificial Sequence: Synthetic oligonucleotide
  Antisense strand to SEQ ID NO: 149122
aauucugacccgcacucug

SEQ ID NO: 149124 - RNA, 19 nt, Artificial Sequence
  Description of Artificial Sequence: Synthetic oligonucleotide
  Sense strand starting at position 3000 of SEQ ID NO: 1915
gucagaauuguagacaagu

SEQ ID NO: 149125 - RNA, 19 nt, Artificial Sequence
  Description of Artificial Sequence: Synthetic oligonucleotide
  Antisense strand to SEQ ID NO: 149124
acuugucuacaauucugac

SEQ ID NO: 149126 - RNA, 19 nt, Artificial Sequence
  Description of Artificial Sequence: Synthetic oligonucleotide
  Sense strand starting at position 3037 of SEQ ID NO: 1915
ucuauugcuccacagggaa

SEQ ID NO: 149127 - RNA, 19 nt, Artificial Sequence
  Description of Artificial Sequence: Synthetic oligonucleotide
  Antisense strand to SEQ ID NO: 149126
uucccuguggagcaauaga

SEQ ID NO: 149128 - RNA, 19 nt, Artificial Sequence
  Description of Artificial Sequence: Synthetic oligonucleotide
  Sense strand starting at position 3064 of SEQ ID NO: 1915
acaguaaacaguggugagu

SEQ ID NO: 149129 - RNA, 19 nt, Artificial Sequence
  Description of Artificial Sequence: Synthetic oligonucleotide
  Antisense strand to SEQ ID NO: 149128
acucaccacuguuuacugu

SEQ ID NO: 149130 - RNA, 19 nt, Artificial Sequence
  Description of Artificial Sequence: Synthetic oligonucleotide
  Sense strand starting at position 3067 of SEQ ID NO: 1915
guaaacaguggugaguauu

SEQ ID NO: 149131 - RNA, 19 nt, Artificial Sequence
  Description of Artificial Sequence: Synthetic oligonucleotide
  Antisense strand to SEQ ID NO: 149130
aauacucaccacuguuuac

SEQ ID NO: 149132 - RNA, 19 nt, Artificial Sequence
  Description of Artificial Sequence: Synthetic oligonucleotide
  Sense strand starting at position 3090 of SEQ ID NO: 1915
aaucaauugccacgggauu

SEQ ID NO: 149133 - RNA, 19 nt, Artificial Sequence
  Description of Artificial Sequence: Synthetic oligonucleotide
  Antisense strand to SEQ ID NO: 149132
aaucccguggcaauugauu

SEQ ID NO: 149134 - RNA, 19 nt, Artificial Sequence
  Description of Artificial Sequence: Synthetic oligonucleotide
  Sense strand starting at position 3091 of SEQ ID NO: 1915
aucaauugccacgggauua

SEQ ID NO: 149135 - RNA, 19 nt, Artificial Sequence
  Description of Artificial Sequence: Synthetic oligonucleotide
  Antisense strand to SEQ ID NO: 149134
uaaucccguggcaauugau

SEQ ID NO: 149136 - RNA, 19 nt, Artificial Sequence
  Description of Artificial Sequence: Synthetic oligonucleotide
  Sense strand starting at position 3236 of SEQ ID NO: 1915
aggcauuuaucugugugca

SEQ ID NO: 149137 - RNA, 19 nt, Artificial Sequence
  Description of Artificial Sequence: Synthetic oligonucleotide
  Antisense strand to SEQ ID NO: 149136
ugcacacagauaaaugccu

SEQ ID NO: 149138 - RNA, 19 nt, Artificial Sequence
  Description of Artificial Sequence: Synthetic oligonucleotide
  Sense strand starting at position 3237 of SEQ ID NO: 1915
ggcauuuaucugugugcag

SEQ ID NO: 149139 - RNA, 19 nt, Artificial Sequence
  Description of Artificial Sequence: Synthetic oligonucleotide
  Antisense strand to SEQ ID NO: 149138
cugcacacagauaaaugcc

SEQ ID NO: 149140 - RNA, 19 nt, Artificial Sequence
  Description of Artificial Sequence: Synthetic oligonucleotide
  Sense strand starting at position 3239 of SEQ ID NO: 1915
cauuuaucugugugcaguu

SEQ ID NO: 149141 - RNA, 19 nt, Artificial Sequence
  Description of Artificial Sequence: Synthetic oligonucleotide
  Antisense strand to SEQ ID NO: 149140
aacugcacacagauaaaug

SEQ ID NO: 149142 - RNA, 19 nt, Artificial Sequence
  Description of Artificial Sequence: Synthetic oligonucleotide
  Sense strand starting at position 3240 of SEQ ID NO: 1915
auuuaucugugugcaguuu

SEQ ID NO: 149143 - RNA, 19 nt, Artificial Sequence
  Description of Artificial Sequence: Synthetic oligonucleotide
  Antisense strand to SEQ ID NO: 149142
aaacugcacacagauaaau

SEQ ID NO: 149144 - RNA, 19 nt, Artificial Sequence
  Description of Artificial Sequence: Synthetic oligonucleotide
  Sense strand starting at position 3244 of SEQ ID NO: 1915
aucugugugcaguuugcaa

SEQ ID NO: 149145 - RNA, 19 nt, Artificial Sequence
  Description of Artificial Sequence: Synthetic oligonucleotide
  Antisense strand to SEQ ID NO: 149144
uugcaaacugcacacagau

SEQ ID NO: 149146 - RNA, 19 nt, Artificial Sequence
  Description of Artificial Sequence: Synthetic oligonucleotide
  Sense strand starting at position 3417 of SEQ ID NO: 1915
gauuguuaggacugucaag

SEQ ID NO: 149147 - RNA, 19 nt, Artificial Sequence
  Description of Artificial Sequence: Synthetic oligonucleotide
  Antisense strand to SEQ ID NO: 149146
cuugacaguccuaacaauc

SEQ ID NO: 149148 - RNA, 19 nt, Artificial Sequence
  Description of Artificial Sequence: Synthetic oligonucleotide
  Sense strand starting at position 3604 of SEQ ID NO: 1915
ucaguuacuuguuuaugaa

SEQ ID NO: 149149 - RNA, 19 nt, Artificial Sequence
  Description of Artificial Sequence: Synthetic oligonucleotide
  Antisense strand to SEQ ID NO: 149148
uucauaaacaaguaacuga

SEQ ID NO: 149150 - RNA, 19 nt, Artificial Sequence
  Description of Artificial Sequence: Synthetic oligonucleotide
  Sense strand starting at position 3790 of SEQ ID NO: 1915
uaucaagugccagguaaua

SEQ ID NO: 149151 - RNA, 19 nt, Artificial Sequence
  Description of Artificial Sequence: Synthetic oligonucleotide
  Antisense strand to SEQ ID NO: 149150
uauuaccuggcacuugaua

SEQ ID NO: 149152 - RNA, 19 nt, Artificial Sequence
  Description of Artificial Sequence: Synthetic oligonucleotide
  Sense strand starting at position 3792 of SEQ ID NO: 1915
ucaagugccagguaauaga

SEQ ID NO: 149153 - RNA, 19 nt, Artificial Sequence
  Description of Artificial Sequence: Synthetic oligonucleotide
  Antisense strand to SEQ ID NO: 149152
ucuauuaccuggcacuuga

SEQ ID NO: 149154 - RNA, 19 nt, Artificial Sequence
  Description of Artificial Sequence: Synthetic oligonucleotide
  Sense strand starting at position 16 of SEQ ID NO: 1916
ucuaaaucagacugccaga

SEQ ID NO: 149155 - RNA, 19 nt, Artificial Sequence
  Description of Artificial Sequence: Synthetic oligonucleotide
  Antisense strand to SEQ ID NO: 149154
ucuggcagucugauuuaga

SEQ ID NO: 149156 - RNA, 19 nt, Artificial Sequence
  Description of Artificial Sequence: Synthetic oligonucleotide
  Sense strand starting at position 191 of SEQ ID NO: 1916
gaggacauugcuggguaaa

SEQ ID NO: 149157 - RNA, 19 nt, Artificial Sequence
  Description of Artificial Sequence: Synthetic oligonucleotide
  Antisense strand to SEQ ID NO: 149156
uuuacccagcaauguccuc

SEQ ID NO: 149158 - RNA, 19 nt, Artificial Sequence
  Description of Artificial Sequence: Synthetic oligonucleotide
  Sense strand starting at position 319 of SEQ ID NO: 1916
gcauccaggccuuggaaua

SEQ ID NO: 149159 - RNA, 19 nt, Artificial Sequence
  Description of Artificial Sequence: Synthetic oligonucleotide
  Antisense strand to SEQ ID NO: 149158
uauuccaaggccuggaugc

SEQ ID NO: 149160 - RNA, 19 nt, Artificial Sequence
  Description of Artificial Sequence: Synthetic oligonucleotide
  Sense strand starting at position 346 of SEQ ID NO: 1916
augacagcuuuaucuuuga

SEQ ID NO: 149161 - RNA, 19 nt, Artificial Sequence
  Description of Artificial Sequence: Synthetic oligonucleotide
  Antisense strand to SEQ ID NO: 149160
ucaaagauaaagcugucau

SEQ ID NO: 149162 - RNA, 19 nt, Artificial Sequence
  Description of Artificial Sequence: Synthetic oligonucleotide
  Sense strand starting at position 486 of SEQ ID NO: 1916
caacacuguguuggagaau

SEQ ID NO: 149163 - RNA, 19 nt, Artificial Sequence
  Description of Artificial Sequence: Synthetic oligonucleotide
  Antisense strand to SEQ ID NO: 149162
auucuccaacacaguguug

SEQ ID NO: 149164 - RNA, 19 nt, Artificial Sequence
  Description of Artificial Sequence: Synthetic oligonucleotide
  Sense strand starting at position 489 of SEQ ID NO: 1916
cacuguguuggagaaucca

SEQ ID NO: 149165 - RNA, 19 nt, Artificial Sequence
  Description of Artificial Sequence: Synthetic oligonucleotide
  Antisense strand to SEQ ID NO: 149164
uggauucuccaacacagug

SEQ ID NO: 149166 - RNA, 19 nt, Artificial Sequence
  Description of Artificial Sequence: Synthetic oligonucleotide
  Sense strand starting at position 497 of SEQ ID NO: 1916
uggagaauccaguguaaca

SEQ ID NO: 149167 - RNA, 19 nt, Artificial Sequence
  Description of Artificial Sequence: Synthetic oligonucleotide
  Antisense strand to SEQ ID NO: 149166
uguuacacuggauucucca

SEQ ID NO: 149168 - RNA, 19 nt, Artificial Sequence
  Description of Artificial Sequence: Synthetic oligonucleotide
  Sense strand starting at position 558 of SEQ ID NO: 1916
aggcuugaccuggaaggua

SEQ ID NO: 149169 - RNA, 19 nt, Artificial Sequence
  Description of Artificial Sequence: Synthetic oligonucleotide
  Antisense strand to SEQ ID NO: 149168
uaccuuccaggucaagccu

SEQ ID NO: 149170 - RNA, 19 nt, Artificial Sequence
  Description of Artificial Sequence: Synthetic oligonucleotide
  Sense strand starting at position 660 of SEQ ID NO: 1916
ugaguagagccuuaaguga

SEQ ID NO: 149171 - RNA, 19 nt, Artificial Sequence
  Description of Artificial Sequence: Synthetic oligonucleotide
  Antisense strand to SEQ ID NO: 149170
ucacuuaaggcucuacuca

SEQ ID NO: 149172 - RNA, 19 nt, Artificial Sequence
  Description of Artificial Sequence: Synthetic oligonucleotide
  Sense strand starting at position 665 of SEQ ID NO: 1916
agagccuuaagugaguuau

SEQ ID NO: 149173 - RNA, 19 nt, Artificial Sequence
  Description of Artificial Sequence: Synthetic oligonucleotide
  Antisense strand to SEQ ID NO: 149172
auaacucacuuaaggcucu

SEQ ID NO: 149174 - RNA, 19 nt, Artificial Sequence
  Description of Artificial Sequence: Synthetic oligonucleotide
  Sense strand starting at position 669 of SEQ ID NO: 1916
ccuuaagugaguuauugag

SEQ ID NO: 149175 - RNA, 19 nt, Artificial Sequence
  Description of Artificial Sequence: Synthetic oligonucleotide
  Antisense strand to SEQ ID NO: 149174
cucaauaacucacuuaagg

SEQ ID NO: 149176 - RNA, 19 nt, Artificial Sequence
  Description of Artificial Sequence: Synthetic oligonucleotide
  Sense strand starting at position 671 of SEQ ID NO: 1916
uuaagugaguuauugagag

SEQ ID NO: 149177 - RNA, 19 nt, Artificial Sequence
  Description of Artificial Sequence: Synthetic oligonucleotide
  Antisense strand to SEQ ID NO: 149176
cucucaauaacucacuuaa

SEQ ID NO: 149178 - RNA, 19 nt, Artificial Sequence
  Description of Artificial Sequence: Synthetic oligonucleotide
  Sense strand starting at position 721 of SEQ ID NO: 1916
gggagagcauccuuuggga

SEQ ID NO: 149179 - RNA, 19 nt, Artificial Sequence
  Description of Artificial Sequence: Synthetic oligonucleotide
  Antisense strand to SEQ ID NO: 149178
ucccaaaggaugcucuccc

SEQ ID NO: 149180 - RNA, 19 nt, Artificial Sequence
  Description of Artificial Sequence: Synthetic oligonucleotide
  Sense strand starting at position 865 of SEQ ID NO: 1916
guuugcaagcuccuuugua

SEQ ID NO: 149181 - RNA, 19 nt, Artificial Sequence
  Description of Artificial Sequence: Synthetic oligonucleotide
  Antisense strand to SEQ ID NO: 149180
uacaaaggagcuugcaaac

SEQ ID NO: 149182 - RNA, 19 nt, Artificial Sequence
  Description of Artificial Sequence: Synthetic oligonucleotide
  Sense strand starting at position 936 of SEQ ID NO: 1916
cugaguauugguggaagau

SEQ ID NO: 149183 - RNA, 19 nt, Artificial Sequence
  Description of Artificial Sequence: Synthetic oligonucleotide
  Antisense strand to SEQ ID NO: 149182
aucuuccaccaauacucag

SEQ ID NO: 149184 - RNA, 19 nt, Artificial Sequence
  Description of Artificial Sequence: Synthetic oligonucleotide
  Sense strand starting at position 1144 of SEQ ID NO: 1916
cuguuugauccauggugaa

SEQ ID NO: 149185 - RNA, 19 nt, Artificial Sequence
  Description of Artificial Sequence: Synthetic oligonucleotide
  Antisense strand to SEQ ID NO: 149184
uucaccauggaucaaacag

SEQ ID NO: 149186 - RNA, 19 nt, Artificial Sequence
  Description of Artificial Sequence: Synthetic oligonucleotide
  Sense strand starting at position 1161 of SEQ ID NO: 1916
aacuucucauguguggaua

SEQ ID NO: 149187 - RNA, 19 nt, Artificial Sequence
  Description of Artificial Sequence: Synthetic oligonucleotide
  Antisense strand to SEQ ID NO: 149186
uauccacacaugagaaguu

SEQ ID NO: 149188 - RNA, 19 nt, Artificial Sequence
  Description of Artificial Sequence: Synthetic oligonucleotide
  Sense strand starting at position 1164 of SEQ ID NO: 1916
uucucauguguggauagga

SEQ ID NO: 149189 - RNA, 19 nt, Artificial Sequence
  Description of Artificial Sequence: Synthetic oligonucleotide
  Antisense strand to SEQ ID NO: 149188
uccuauccacacaugagaa

SEQ ID NO: 149190 - RNA, 19 nt, Artificial Sequence
  Description of Artificial Sequence: Synthetic oligonucleotide
  Sense strand starting at position 1198 of SEQ ID NO: 1916
auauaauacugucuaacgu

SEQ ID NO: 149191 - RNA, 19 nt, Artificial Sequence
  Description of Artificial Sequence: Synthetic oligonucleotide
  Antisense strand to SEQ ID NO: 149190
acguuagacaguauuauau

SEQ ID NO: 149192 - RNA, 19 nt, Artificial Sequence
  Description of Artificial Sequence: Synthetic oligonucleotide
  Sense strand starting at position 1271 of SEQ ID NO: 1916
gcauaacuuggaggguauu

SEQ ID NO: 149193 - RNA, 19 nt, Artificial Sequence
  Description of Artificial Sequence: Synthetic oligonucleotide
  Antisense strand to SEQ ID NO: 149192
aauacccuccaaguuaugc

SEQ ID NO: 149194 - RNA, 19 nt, Artificial Sequence
  Description of Artificial Sequence: Synthetic oligonucleotide
  Sense strand starting at position 1281 of SEQ ID NO: 1916
gaggguauugcuuacucaa

SEQ ID NO: 149195 - RNA, 19 nt, Artificial Sequence
  Description of Artificial Sequence: Synthetic oligonucleotide
  Antisense strand to SEQ ID NO: 149194
uugaguaagcaauacccuc

SEQ ID NO: 149196 - RNA, 19 nt, Artificial Sequence
  Description of Artificial Sequence: Synthetic oligonucleotide
  Sense strand starting at position 1308 of SEQ ID NO: 1916
gggaaggguucugugauug

SEQ ID NO: 149197 - RNA, 19 nt, Artificial Sequence
  Description of Artificial Sequence: Synthetic oligonucleotide
  Antisense strand to SEQ ID NO: 149196
caaucacagaacccuuccc

SEQ ID NO: 149198 - RNA, 19 nt, Artificial Sequence
  Description of Artificial Sequence: Synthetic oligonucleotide
  Sense strand starting at position 1764 of SEQ ID NO: 1916
aaaucaugggacugagucu

SEQ ID NO: 149199 - RNA, 19 nt, Artificial Sequence
  Description of Artificial Sequence: Synthetic oligonucleotide
  Antisense strand to SEQ ID NO: 149198
agacucagucccaugauuu

SEQ ID NO: 149200 - RNA, 19 nt, Artificial Sequence
  Description of Artificial Sequence: Synthetic oligonucleotide
  Sense strand starting at position 1801 of SEQ ID NO: 1916
ugaucuacuuggguccaaa

SEQ ID NO: 149201 - RNA, 19 nt, Artificial Sequence
  Description of Artificial Sequence: Synthetic oligonucleotide
  Antisense strand to SEQ ID NO: 149200
uuuggacccaaguagauca

SEQ ID NO: 149202 - RNA, 19 nt, Artificial Sequence
  Description of Artificial Sequence: Synthetic oligonucleotide
  Sense strand starting at position 2046 of SEQ ID NO: 1916
aucuuagcccuugggugaa

SEQ ID NO: 149203 - RNA, 19 nt, Artificial Sequence
  Description of Artificial Sequence: Synthetic oligonucleotide
  Antisense strand to SEQ ID NO: 149202
uucacccaagggcuaagau

SEQ ID NO: 149204 - RNA, 19 nt, Artificial Sequence
  Description of Artificial Sequence: Synthetic oligonucleotide
  Sense strand starting at position 2158 of SEQ ID NO: 1916
cccagauuguacccagacu

SEQ ID NO: 149205 - RNA, 19 nt, Artificial Sequence
  Description of Artificial Sequence: Synthetic oligonucleotide
  Antisense strand to SEQ ID NO: 149204
agucuggguacaaucuggg

SEQ ID NO: 149206 - RNA, 19 nt, Artificial Sequence
  Description of Artificial Sequence: Synthetic oligonucleotide
  Sense strand starting at position 2189 of SEQ ID NO: 1916
ccugcucagccugaaacaa

SEQ ID NO: 149207 - RNA, 19 nt, Artificial Sequence
  Description of Artificial Sequence: Synthetic oligonucleotide
  Antisense strand to SEQ ID NO: 149206
uuguuucaggcugagcagg

SEQ ID NO: 149208 - RNA, 19 nt, Artificial Sequence
  Description of Artificial Sequence: Synthetic oligonucleotide
  Sense strand starting at position 2403 of SEQ ID NO: 1916
cuuaaagaucuuuaugcag

SEQ ID NO: 149209 - RNA, 19 nt, Artificial Sequence
  Description of Artificial Sequence: Synthetic oligonucleotide
  Antisense strand to SEQ ID NO: 149208
cugcauaaagaucuuuaag

SEQ ID NO: 149210 - RNA, 19 nt, Artificial Sequence
  Description of Artificial Sequence: Synthetic oligonucleotide
  Sense strand starting at position 2603 of SEQ ID NO: 1916
gcuggaguaggguaaucau

SEQ ID NO: 149211 - RNA, 19 nt, Artificial Sequence
  Description of Artificial Sequence: Synthetic oligonucleotide
  Antisense strand to SEQ ID NO: 149210
augauuacccuacuccagc

SEQ ID NO: 149212 - RNA, 19 nt, Artificial Sequence
  Description of Artificial Sequence: Synthetic oligonucleotide
  Sense strand starting at position 2606 of SEQ ID NO: 1916
ggaguaggguaaucauugu

SEQ ID NO: 149213 - RNA, 19 nt, Artificial Sequence
  Description of Artificial Sequence: Synthetic oligonucleotide
  Antisense strand to SEQ ID NO: 149212
acaaugauuacccuacucc

SEQ ID NO: 149214 - RNA, 19 nt, Artificial Sequence
  Description of Artificial Sequence: Synthetic oligonucleotide
  Sense strand starting at position 2876 of SEQ ID NO: 1916
gguuuaugccuagagguca

SEQ ID NO: 149215 - RNA, 19 nt, Artificial Sequence
  Description of Artificial Sequence: Synthetic oligonucleotide
  Antisense strand to SEQ ID NO: 149214
ugaccucuaggcauaaacc

SEQ ID NO: 149216 - RNA, 19 nt, Artificial Sequence
  Description of Artificial Sequence: Synthetic oligonucleotide
  Sense strand starting at position 3147 of SEQ ID NO: 1916
uguguaaaucaaugacaau

SEQ ID NO: 149217 - RNA, 19 nt, Artificial Sequence
  Description of Artificial Sequence: Synthetic oligonucleotide
  Antisense strand to SEQ ID NO: 149216
auugucauugauuuacaca

SEQ ID NO: 149218 - RNA, 19 nt, Artificial Sequence
  Description of Artificial Sequence: Synthetic oligonucleotide
  Sense strand starting at position 3216 of SEQ ID NO: 1916
ggaugcgugcccagaggua

SEQ ID NO: 149219 - RNA, 19 nt, Artificial Sequence
  Description of Artificial Sequence: Synthetic oligonucleotide
  Antisense strand to SEQ ID NO: 149218
uaccucugggcacgcaucc

SEQ ID NO: 149220 - RNA, 19 nt, Artificial Sequence
  Description of Artificial Sequence: Synthetic oligonucleotide
  Sense strand starting at position 3238 of SEQ ID NO: 1916
cuacgucuuucuccaaaga

SEQ ID NO: 149221 - RNA, 19 nt, Artificial Sequence
  Description of Artificial Sequence: Synthetic oligonucleotide
  Antisense strand to SEQ ID NO: 149220
ucuuuggagaaagacguag

SEQ ID NO: 149222 - RNA, 19 nt, Artificial Sequence
  Description of Artificial Sequence: Synthetic oligonucleotide
  Sense strand starting at position 3324 of SEQ ID NO: 1916
uuaaaugugucaguagaua

SEQ ID NO: 149223 - RNA, 19 nt, Artificial Sequence
  Description of Artificial Sequence: Synthetic oligonucleotide
  Antisense strand to SEQ ID NO: 149222
uaucuacugacacauuuaa

SEQ ID NO: 149224 - RNA, 19 nt, Artificial Sequence
  Description of Artificial Sequence: Synthetic oligonucleotide
  Sense strand starting at position 3329 of SEQ ID NO: 1916
ugugucaguagauaagaga

SEQ ID NO: 149225 - RNA, 19 nt, Artificial Sequence
  Description of Artificial Sequence: Synthetic oligonucleotide
  Antisense strand to SEQ ID NO: 149224
ucucuuaucuacugacaca

SEQ ID NO: 149226 - RNA, 19 nt, Artificial Sequence
  Description of Artificial Sequence: Synthetic oligonucleotide
  Sense strand starting at position 3365 of SEQ ID NO: 1916
uugagucuuugaucaaucu

SEQ ID NO: 149227 - RNA, 19 nt, Artificial Sequence
  Description of Artificial Sequence: Synthetic oligonucleotide
  Antisense strand to SEQ ID NO: 149226
agauugaucaaagacucaa

SEQ ID NO: 149228 - RNA, 19 nt, Artificial Sequence
  Description of Artificial Sequence: Synthetic oligonucleotide
  Sense strand starting at position 3366 of SEQ ID NO: 1916
ugagucuuugaucaaucuu

SEQ ID NO: 149229 - RNA, 19 nt, Artificial Sequence
  Description of Artificial Sequence: Synthetic oligonucleotide
  Antisense strand to SEQ ID NO: 149228
aagauugaucaaagacuca

SEQ ID NO: 149230 - RNA, 19 nt, Artificial Sequence
  Description of Artificial Sequence: Synthetic oligonucleotide
  Sense strand starting at position 3817 of SEQ ID NO: 1916
ucacaucugccuggagaag

SEQ ID NO: 149231 - RNA, 19 nt, Artificial Sequence
  Description of Artificial Sequence: Synthetic oligonucleotide
  Antisense strand to SEQ ID NO: 149230
cuucuccaggcagauguga

SEQ ID NO: 149232 - RNA, 19 nt, Artificial Sequence
  Description of Artificial Sequence: Synthetic oligonucleotide
  Sense strand starting at position 3861 of SEQ ID NO: 1916
caggcaagagguugcuaaa

SEQ ID NO: 149233 - RNA, 19 nt, Artificial Sequence
  Description of Artificial Sequence: Synthetic oligonucleotide
  Antisense strand to SEQ ID NO: 149232
uuuagcaaccucuugccug

SEQ ID NO: 149234 - RNA, 19 nt, Artificial Sequence
  Description of Artificial Sequence: Synthetic oligonucleotide
  Sense strand starting at position 29 of SEQ ID NO: 1919
gugucuuauuuagaaagag

SEQ ID NO: 149235 - RNA, 19 nt, Artificial Sequence
  Description of Artificial Sequence: Synthetic oligonucleotide
  Antisense strand to SEQ ID NO: 149234
cucuuucuaaauaagacac

SEQ ID NO: 149236 - RNA, 19 nt, Artificial Sequence
  Description of Artificial Sequence: Synthetic oligonucleotide
  Sense strand starting at position 41 of SEQ ID NO: 1919
gaaagaggucaaggugcau

SEQ ID NO: 149237 - RNA, 19 nt, Artificial Sequence
  Description of Artificial Sequence: Synthetic oligonucleotide
  Antisense strand to SEQ ID NO: 149236
augcaccuugaccucuuuc

SEQ ID NO: 149238 - RNA, 19 nt, Artificial Sequence
  Description of Artificial Sequence: Synthetic oligonucleotide
  Sense strand starting at position 61 of SEQ ID NO: 1919
acaucuuccuacuugagga

SEQ ID NO: 149239 - RNA, 19 nt, Artificial Sequence
  Description of Artificial Sequence: Synthetic oligonucleotide
  Antisense strand to SEQ ID NO: 149238
uccucaaguaggaagaugu

SEQ ID NO: 149240 - RNA, 19 nt, Artificial Sequence
  Description of Artificial Sequence: Synthetic oligonucleotide
  Sense strand starting at position 69 of SEQ ID NO: 1919
cuacuugaggaaugcucaa

SEQ ID NO: 149241 - RNA, 19 nt, Artificial Sequence
  Description of Artificial Sequence: Synthetic oligonucleotide
  Antisense strand to SEQ ID NO: 149240
uugagcauuccucaaguag

SEQ ID NO: 149242 - RNA, 19 nt, Artificial Sequence
  Description of Artificial Sequence: Synthetic oligonucleotide
  Sense strand starting at position 80 of SEQ ID NO: 1919
augcucaagguccagaaau

SEQ ID NO: 149243 - RNA, 19 nt, Artificial Sequence
  Description of Artificial Sequence: Synthetic oligonucleotide
  Antisense strand to SEQ ID NO: 149242
auuucuggaccuugagcau

SEQ ID NO: 149244 - RNA, 19 nt, Artificial Sequence
  Description of Artificial Sequence: Synthetic oligonucleotide
  Sense strand starting at position 82 of SEQ ID NO: 1919
gcucaagguccagaaaugu

SEQ ID NO: 149245 - RNA, 19 nt, Artificial Sequence
  Description of Artificial Sequence: Synthetic oligonucleotide
  Antisense strand to SEQ ID NO: 149244
acauuucuggaccuugagc

SEQ ID NO: 149246 - RNA, 19 nt, Artificial Sequence
  Description of Artificial Sequence: Synthetic oligonucleotide
  Sense strand starting at position 108 of SEQ ID NO: 1919
caagguuccaguuggaagu

SEQ ID NO: 149247 - RNA, 19 nt, Artificial Sequence
  Description of Artificial Sequence: Synthetic oligonucleotide
  Antisense strand to SEQ ID NO: 149246
acuuccaacuggaaccuug

SEQ ID NO: 149248 - RNA, 19 nt, Artificial Sequence
  Description of Artificial Sequence: Synthetic oligonucleotide
  Sense strand starting at position 468 of SEQ ID NO: 1919
cgcgcuaggccgaaagaau

SEQ ID NO: 149249 - RNA, 19 nt, Artificial Sequence
  Description of Artificial Sequence: Synthetic oligonucleotide
  Antisense strand to SEQ ID NO: 149248
auucuuucggccuagcgcg

SEQ ID NO: 149250 - RNA, 19 nt, Artificial Sequence
  Description of Artificial Sequence: Synthetic oligonucleotide
  Sense strand starting at position 515 of SEQ ID NO: 1919
agugguacuauguguaaac

SEQ ID NO: 149251 - RNA, 19 nt, Artificial Sequence
  Description of Artificial Sequence: Synthetic oligonucleotide
  Antisense strand to SEQ ID NO: 149250
guuuacacauaguaccacu

SEQ ID NO: 149252 - RNA, 19 nt, Artificial Sequence
  Description of Artificial Sequence: Synthetic oligonucleotide
  Sense strand starting at position 516 of SEQ ID NO: 1919
gugguacuauguguaaaca

SEQ ID NO: 149253 - RNA, 19 nt, Artificial Sequence
  Description of Artificial Sequence: Synthetic oligonucleotide
  Antisense strand to SEQ ID NO: 149252
uguuuacacauaguaccac

SEQ ID NO: 149254 - RNA, 19 nt, Artificial Sequence
  Description of Artificial Sequence: Synthetic oligonucleotide
  Sense strand starting at position 524 of SEQ ID NO: 1919
auguguaaacacuguagga

SEQ ID NO: 149255 - RNA, 19 nt, Artificial Sequence
  Description of Artificial Sequence: Synthetic oligonucleotide
  Antisense strand to SEQ ID NO: 149254
uccuacaguguuuacacau

SEQ ID NO: 149256 - RNA, 19 nt, Artificial Sequence
  Description of Artificial Sequence: Synthetic oligonucleotide
  Sense strand starting at position 764 of SEQ ID NO: 1919
ugcacauagucauuagaaa

SEQ ID NO: 149257 - RNA, 19 nt, Artificial Sequence
  Description of Artificial Sequence: Synthetic oligonucleotide
  Antisense strand to SEQ ID NO: 149256
uuucuaaugacuaugugca

SEQ ID NO: 149258 - RNA, 19 nt, Artificial Sequence
  Description of Artificial Sequence: Synthetic oligonucleotide
  Sense strand starting at position 1099 of SEQ ID NO: 1919
aucccuuauugagcaggaa

SEQ ID NO: 149259 - RNA, 19 nt, Artificial Sequence
  Description of Artificial Sequence: Synthetic oligonucleotide
  Antisense strand to SEQ ID NO: 149258
uuccugcucaauaagggau

SEQ ID NO: 149260 - RNA, 19 nt, Artificial Sequence
  Description of Artificial Sequence: Synthetic oligonucleotide
  Sense strand starting at position 1102 of SEQ ID NO: 1919
ccuuauugagcaggaaaca

SEQ ID NO: 149261 - RNA, 19 nt, Artificial Sequence
  Description of Artificial Sequence: Synthetic oligonucleotide
  Antisense strand to SEQ ID NO: 149260
uguuuccugcucaauaagg

SEQ ID NO: 149262 - RNA, 19 nt, Artificial Sequence
  Description of Artificial Sequence: Synthetic oligonucleotide
  Sense strand starting at position 1289 of SEQ ID NO: 1919
gagaaaucccuauguaggu

SEQ ID NO: 149263 - RNA, 19 nt, Artificial Sequence
  Description of Artificial Sequence: Synthetic oligonucleotide
  Antisense strand to SEQ ID NO: 149262
accuacauagggauuucuc

SEQ ID NO: 149264 - RNA, 19 nt, Artificial Sequence
  Description of Artificial Sequence: Synthetic oligonucleotide
  Sense strand starting at position 1298 of SEQ ID NO: 1919
cuauguaggucugcaacaa

SEQ ID NO: 149265 - RNA, 19 nt, Artificial Sequence
  Description of Artificial Sequence: Synthetic oligonucleotide
  Antisense strand to SEQ ID NO: 149264
uuguugcagaccuacauag

SEQ ID NO: 149266 - RNA, 19 nt, Artificial Sequence
  Description of Artificial Sequence: Synthetic oligonucleotide
  Sense strand starting at position 1299 of SEQ ID NO: 1919
uauguaggucugcaacaaa

SEQ ID NO: 149267 - RNA, 19 nt, Artificial Sequence
  Description of Artificial Sequence: Synthetic oligonucleotide
  Antisense strand to SEQ ID NO: 149266
uuuguugcagaccuacaua

SEQ ID NO: 149268 - RNA, 19 nt, Artificial Sequence
  Description of Artificial Sequence: Synthetic oligonucleotide
  Sense strand starting at position 1486 of SEQ ID NO: 1919
ggaauuugcuccuaauacu

SEQ ID NO: 149269 - RNA, 19 nt, Artificial Sequence
  Description of Artificial Sequence: Synthetic oligonucleotide
  Antisense strand to SEQ ID NO: 149268
aguauuaggagcaaauucc

SEQ ID NO: 149270 - RNA, 19 nt, Artificial Sequence
  Description of Artificial Sequence: Synthetic oligonucleotide
  Sense strand starting at position 1598 of SEQ ID NO: 1919
ggcccaauuguccggaaga

SEQ ID NO: 149271 - RNA, 19 nt, Artificial Sequence
  Description of Artificial Sequence: Synthetic oligonucleotide
  Antisense strand to SEQ ID NO: 149270
ucuuccggacaauugggcc

SEQ ID NO: 149272 - RNA, 19 nt, Artificial Sequence
  Description of Artificial Sequence: Synthetic oligonucleotide
  Sense strand starting at position 2251 of SEQ ID NO: 1919
ggugaguuucgguagugag

SEQ ID NO: 149273 - RNA, 19 nt, Artificial Sequence
  Description of Artificial Sequence: Synthetic oligonucleotide
  Antisense strand to SEQ ID NO: 149272
cucacuaccgaaacucacc

SEQ ID NO: 149274 - RNA, 19 nt, Artificial Sequence
  Description of Artificial Sequence: Synthetic oligonucleotide
  Sense strand starting at position 2252 of SEQ ID NO: 1919
gugaguuucgguagugaga

SEQ ID NO: 149275 - RNA, 19 nt, Artificial Sequence
  Description of Artificial Sequence: Synthetic oligonucleotide
  Antisense strand to SEQ ID NO: 149274
ucucacuaccgaaacucac

SEQ ID NO: 149276 - RNA, 19 nt, Artificial Sequence
  Description of Artificial Sequence: Synthetic oligonucleotide
  Sense strand starting at position 2547 of SEQ ID NO: 1919
gacuuugaggaauguugga

SEQ ID NO: 149277 - RNA, 19 nt, Artificial Sequence
  Description of Artificial Sequence: Synthetic oligonucleotide
  Antisense strand to SEQ ID NO: 149276
uccaacauuccucaaaguc

SEQ ID NO: 149278 - RNA, 19 nt, Artificial Sequence
  Description of Artificial Sequence: Synthetic oligonucleotide
  Sense strand starting at position 2564 of SEQ ID NO: 1919
gaaauuaauggcggcuuua

SEQ ID NO: 149279 - RNA, 19 nt, Artificial Sequence
  Description of Artificial Sequence: Synthetic oligonucleotide
  Antisense strand to SEQ ID NO: 149278
uaaagccgccauuaauuuc

SEQ ID NO: 149280 - RNA, 19 nt, Artificial Sequence
  Description of Artificial Sequence: Synthetic oligonucleotide
  Sense strand starting at position 2601 of SEQ ID NO: 1919
ggcucuuugcgagcuaauu

SEQ ID NO: 149281 - RNA, 19 nt, Artificial Sequence
  Description of Artificial Sequence: Synthetic oligonucleotide
  Antisense strand to SEQ ID NO: 149280
aauuagcucgcaaagagcc

SEQ ID NO: 149282 - RNA, 19 nt, Artificial Sequence
  Description of Artificial Sequence: Synthetic oligonucleotide
  Sense strand starting at position 2602 of SEQ ID NO: 1919
gcucuuugcgagcuaauuc

SEQ ID NO: 149283 - RNA, 19 nt, Artificial Sequence
  Description of Artificial Sequence: Synthetic oligonucleotide
  Antisense strand to SEQ ID NO: 149282
gaauuagcucgcaaagagc

SEQ ID NO: 149284 - RNA, 19 nt, Artificial Sequence
  Description of Artificial Sequence: Synthetic oligonucleotide
  Sense strand starting at position 2612 of SEQ ID NO: 1919
agcuaauucccaggugaau

SEQ ID NO: 149285 - RNA, 19 nt, Artificial Sequence
  Description of Artificial Sequence: Synthetic oligonucleotide
  Antisense strand to SEQ ID NO: 149284
auucaccugggaauuagcu

SEQ ID NO: 149286 - RNA, 19 nt, Artificial Sequence
  Description of Artificial Sequence: Synthetic oligonucleotide
  Sense strand starting at position 2670 of SEQ ID NO: 1919
uguuaaagucccuacuuga

SEQ ID NO: 149287 - RNA, 19 nt, Artificial Sequence
  Description of Artificial Sequence: Synthetic oligonucleotide
  Antisense strand to SEQ ID NO: 149286
ucaaguagggacuuuaaca

SEQ ID NO: 149288 - RNA, 19 nt, Artificial Sequence
  Description of Artificial Sequence: Synthetic oligonucleotide
  Sense strand starting at position 3093 of SEQ ID NO: 1919
acuuuagcugcacauuaga

SEQ ID NO: 149289 - RNA, 19 nt, Artificial Sequence
  Description of Artificial Sequence: Synthetic oligonucleotide
  Antisense strand to SEQ ID NO: 149288
ucuaaugugcagcuaaagu

SEQ ID NO: 149290 - RNA, 19 nt, Artificial Sequence
  Description of Artificial Sequence: Synthetic oligonucleotide
  Sense strand starting at position 3171 of SEQ ID NO: 1919
gagauugugguuuaauuga

SEQ ID NO: 149291 - RNA, 19 nt, Artificial Sequence
  Description of Artificial Sequence: Synthetic oligonucleotide
  Antisense strand to SEQ ID NO: 149290
ucaauuaaaccacaaucuc

SEQ ID NO: 149292 - RNA, 19 nt, Artificial Sequence
  Description of Artificial Sequence: Synthetic oligonucleotide
  Sense strand starting at position 3194 of SEQ ID NO: 1919
ggcccagaugucuguauuu

SEQ ID NO: 149293 - RNA, 19 nt, Artificial Sequence
  Description of Artificial Sequence: Synthetic oligonucleotide
  Antisense strand to SEQ ID NO: 149292
aaauacagacaucugggcc

SEQ ID NO: 149294 - RNA, 19 nt, Artificial Sequence
  Description of Artificial Sequence: Synthetic oligonucleotide
  Sense strand starting at position 3383 of SEQ ID NO: 1919
cuccuuggauaagucauau

SEQ ID NO: 149295 - RNA, 19 nt, Artificial Sequence
  Description of Artificial Sequence: Synthetic oligonucleotide
  Antisense strand to SEQ ID NO: 149294
auaugacuuauccaaggag

SEQ ID NO: 149296 - RNA, 19 nt, Artificial Sequence
  Description of Artificial Sequence: Synthetic oligonucleotide
  Sense strand starting at position 3389 of SEQ ID NO: 1919
ggauaagucauauguaguc

SEQ ID NO: 149297 - RNA, 19 nt, Artificial Sequence
  Description of Artificial Sequence: Synthetic oligonucleotide
  Antisense strand to SEQ ID NO: 149296
gacuacauaugacuuaucc

SEQ ID NO: 149298 - RNA, 19 nt, Artificial Sequence
  Description of Artificial Sequence: Synthetic oligonucleotide
  Sense strand starting at position 3394 of SEQ ID NO: 1919
agucauauguagucaaggu

SEQ ID NO: 149299 - RNA, 19 nt, Artificial Sequence
  Description of Artificial Sequence: Synthetic oligonucleotide
  Antisense strand to SEQ ID NO: 149298
accuugacuacauaugacu

SEQ ID NO: 149300 - RNA, 19 nt, Artificial Sequence
  Description of Artificial Sequence: Synthetic oligonucleotide
  Sense strand starting at position 3395 of SEQ ID NO: 1919
gucauauguagucaagguu

SEQ ID NO: 149301 - RNA, 19 nt, Artificial Sequence
  Description of Artificial Sequence: Synthetic oligonucleotide
  Antisense strand to SEQ ID NO: 149300
aaccuugacuacauaugac

SEQ ID NO: 149302 - RNA, 19 nt, Artificial Sequence
  Description of Artificial Sequence: Synthetic oligonucleotide
  Sense strand starting at position 3398 of SEQ ID NO: 1919
auauguagucaagguugaa

SEQ ID NO: 149303 - RNA, 19 nt, Artificial Sequence
  Description of Artificial Sequence: Synthetic oligonucleotide
  Antisense strand to SEQ ID NO: 149302
uucaaccuugacuacauau

SEQ ID NO: 149304 - RNA, 19 nt, Artificial Sequence
  Description of Artificial Sequence: Synthetic oligonucleotide
  Sense strand starting at position 3416 of SEQ ID NO: 1919
aaaugacugcucuagagua

SEQ ID NO: 149305 - RNA, 19 nt, Artificial Sequence
  Description of Artificial Sequence: Synthetic oligonucleotide
  Antisense strand to SEQ ID NO: 149304
uacucuagagcagucauuu

SEQ ID NO: 149306 - RNA, 19 nt, Artificial Sequence
  Description of Artificial Sequence: Synthetic oligonucleotide
  Sense strand starting at position 3418 of SEQ ID NO: 1919
augacugcucuagaguaaa

SEQ ID NO: 149307 - RNA, 19 nt, Artificial Sequence
  Description of Artificial Sequence: Synthetic oligonucleotide
  Antisense strand to SEQ ID NO: 149306
uuuacucuagagcagucau

SEQ ID NO: 149308 - RNA, 19 nt, Artificial Sequence
  Description of Artificial Sequence: Synthetic oligonucleotide
  Sense strand starting at position 3752 of SEQ ID NO: 1919
ccauacuuugauugcuaga

SEQ ID NO: 149309 - RNA, 19 nt, Artificial Sequence
  Description of Artificial Sequence: Synthetic oligonucleotide
  Antisense strand to SEQ ID NO: 149308
ucuagcaaucaaaguaugg

SEQ ID NO: 149310 - RNA, 19 nt, Artificial Sequence
  Description of Artificial Sequence: Synthetic oligonucleotide
  Sense strand starting at position 3754 of SEQ ID NO: 1919
auacuuugauugcuagauu

SEQ ID NO: 149311 - RNA, 19 nt, Artificial Sequence
  Description of Artificial Sequence: Synthetic oligonucleotide
  Antisense strand to SEQ ID NO: 149310
aaucuagcaaucaaaguau

SEQ ID NO: 149312 - RNA, 19 nt, Artificial Sequence
  Description of Artificial Sequence: Synthetic oligonucleotide
  Sense strand starting at position 3788 of SEQ ID NO: 1919
ugagaaauucccggguauu

SEQ ID NO: 149313 - RNA, 19 nt, Artificial Sequence
  Description of Artificial Sequence: Synthetic oligonucleotide
  Antisense strand to SEQ ID NO: 149312
aauacccgggaauuucuca

SEQ ID NO: 149314 - RNA, 19 nt, Artificial Sequence
  Description of Artificial Sequence: Synthetic oligonucleotide
  Sense strand starting at position 29 of SEQ ID NO: 1917
ucugacagucugugaaucu

SEQ ID NO: 149315 - RNA, 19 nt, Artificial Sequence
  Description of Artificial Sequence: Synthetic oligonucleotide
  Antisense strand to SEQ ID NO: 149314
agauucacagacugucaga

SEQ ID NO: 149316 - RNA, 19 nt, Artificial Sequence
  Description of Artificial Sequence: Synthetic oligonucleotide
  Sense strand starting at position 36 of SEQ ID NO: 1917
gucugugaaucuccuggaa

SEQ ID NO: 149317 - RNA, 19 nt, Artificial Sequence
  Description of Artificial Sequence: Synthetic oligonucleotide
  Antisense strand to SEQ ID NO: 149316
uuccaggagauucacagac

SEQ ID NO: 149318 - RNA, 19 nt, Artificial Sequence
  Description of Artificial Sequence: Synthetic oligonucleotide
  Sense strand starting at position 38 of SEQ ID NO: 1917
cugugaaucuccuggaagc

SEQ ID NO: 149319 - RNA, 19 nt, Artificial Sequence
  Description of Artificial Sequence: Synthetic oligonucleotide
  Antisense strand to SEQ ID NO: 149318
gcuuccaggagauucacag

SEQ ID NO: 149320 - RNA, 19 nt, Artificial Sequence
  Description of Artificial Sequence: Synthetic oligonucleotide
  Sense strand starting at position 40 of SEQ ID NO: 1917
gugaaucuccuggaagcca

SEQ ID NO: 149321 - RNA, 19 nt, Artificial Sequence
  Description of Artificial Sequence: Synthetic oligonucleotide
  Antisense strand to SEQ ID NO: 149320
uggcuuccaggagauucac

SEQ ID NO: 149322 - RNA, 19 nt, Artificial Sequence
  Description of Artificial Sequence: Synthetic oligonucleotide
  Sense strand starting at position 127 of SEQ ID NO: 1917
agcaucuucugacacaaga

SEQ ID NO: 149323 - RNA, 19 nt, Artificial Sequence
  Description of Artificial Sequence: Synthetic oligonucleotide
  Antisense strand to SEQ ID NO: 149322
ucuugugucagaagaugcu

SEQ ID NO: 149324 - RNA, 19 nt, Artificial Sequence
  Description of Artificial Sequence: Synthetic oligonucleotide
  Sense strand starting at position 714 of SEQ ID NO: 1917
cuuugaacucguugacgcu

SEQ ID NO: 149325 - RNA, 19 nt, Artificial Sequence
  Description of Artificial Sequence: Synthetic oligonucleotide
  Antisense strand to SEQ ID NO: 149324
agcgucaacgaguucaaag

SEQ ID NO: 149326 - RNA, 19 nt, Artificial Sequence
  Description of Artificial Sequence: Synthetic oligonucleotide
  Sense strand starting at position 873 of SEQ ID NO: 1917
ugaccuuugucagggcuga

SEQ ID NO: 149327 - RNA, 19 nt, Artificial Sequence
  Description of Artificial Sequence: Synthetic oligonucleotide
  Antisense strand to SEQ ID NO: 149326
ucagcccugacaaagguca

SEQ ID NO: 149328 - RNA, 19 nt, Artificial Sequence
  Description of Artificial Sequence: Synthetic oligonucleotide
  Sense strand starting at position 884 of SEQ ID NO: 1917
agggcugaccuguggaaga

SEQ ID NO: 149329 - RNA, 19 nt, Artificial Sequence
  Description of Artificial Sequence: Synthetic oligonucleotide
  Antisense strand to SEQ ID NO: 149328
ucuuccacaggucagcccu

SEQ ID NO: 149330 - RNA, 19 nt, Artificial Sequence
  Description of Artificial Sequence: Synthetic oligonucleotide
  Sense strand starting at position 964 of SEQ ID NO: 1917
cugccuugguguuaucaca

SEQ ID NO: 149331 - RNA, 19 nt, Artificial Sequence
  Description of Artificial Sequence: Synthetic oligonucleotide
  Antisense strand to SEQ ID NO: 149330
ugugauaacaccaaggcag

SEQ ID NO: 149332 - RNA, 19 nt, Artificial Sequence
  Description of Artificial Sequence: Synthetic oligonucleotide
  Sense strand starting at position 1121 of SEQ ID NO: 1917
cucacaauccgggauccuu

SEQ ID NO: 149333 - RNA, 19 nt, Artificial Sequence
  Description of Artificial Sequence: Synthetic oligonucleotide
  Antisense strand to SEQ ID NO: 149332
aaggaucccggauugugag

SEQ ID NO: 149334 - RNA, 19 nt, Artificial Sequence
  Description of Artificial Sequence: Synthetic oligonucleotide
  Sense strand starting at position 1140 of SEQ ID NO: 1917
uuuaaaugucuguggcuua

SEQ ID NO: 149335 - RNA, 19 nt, Artificial Sequence
  Description of Artificial Sequence: Synthetic oligonucleotide
  Antisense strand to SEQ ID NO: 149334
uaagccacagacauuuaaa

SEQ ID NO: 149336 - RNA, 19 nt, Artificial Sequence
  Description of Artificial Sequence: Synthetic oligonucleotide
  Sense strand starting at position 1264 of SEQ ID NO: 1917
uggcgugucugucucaaga

SEQ ID NO: 149337 - RNA, 19 nt, Artificial Sequence
  Description of Artificial Sequence: Synthetic oligonucleotide
  Antisense strand to SEQ ID NO: 149336
ucuugagacagacacgcca

SEQ ID NO: 149338 - RNA, 19 nt, Artificial Sequence
  Description of Artificial Sequence: Synthetic oligonucleotide
  Sense strand starting at position 1266 of SEQ ID NO: 1917
gcgugucugucucaagaau

SEQ ID NO: 149339 - RNA, 19 nt, Artificial Sequence
  Description of Artificial Sequence: Synthetic oligonucleotide
  Antisense strand to SEQ ID NO: 149338
auucuugagacagacacgc

SEQ ID NO: 149340 - RNA, 19 nt, Artificial Sequence
  Description of Artificial Sequence: Synthetic oligonucleotide
  Sense strand starting at position 1312 of SEQ ID NO: 1917
gucauaagguuguuugucu

SEQ ID NO: 149341 - RNA, 19 nt, Artificial Sequence
  Description of Artificial Sequence: Synthetic oligonucleotide
  Antisense strand to SEQ ID NO: 149340
agacaaacaaccuuaugac

SEQ ID NO: 149342 - RNA, 19 nt, Artificial Sequence
  Description of Artificial Sequence: Synthetic oligonucleotide
  Sense strand starting at position 1316 of SEQ ID NO: 1917
uaagguuguuugucuccaa

SEQ ID NO: 149343 - RNA, 19 nt, Artificial Sequence
  Description of Artificial Sequence: Synthetic oligonucleotide
  Antisense strand to SEQ ID NO: 149342
uuggagacaaacaaccuua

SEQ ID NO: 149344 - RNA, 19 nt, Artificial Sequence
  Description of Artificial Sequence: Synthetic oligonucleotide
  Sense strand starting at position 1317 of SEQ ID NO: 1917
aagguuguuugucuccaaa

SEQ ID NO: 149345 - RNA, 19 nt, Artificial Sequence
  Description of Artificial Sequence: Synthetic oligonucleotide
  Antisense strand to SEQ ID NO: 149344
uuuggagacaaacaaccuu

SEQ ID NO: 149346 - RNA, 19 nt, Artificial Sequence
  Description of Artificial Sequence: Synthetic oligonucleotide
  Sense strand starting at position 1319 of SEQ ID NO: 1917
gguuguuugucuccaaagc

SEQ ID NO: 149347 - RNA, 19 nt, Artificial Sequence
  Description of Artificial Sequence: Synthetic oligonucleotide
  Antisense strand to SEQ ID NO: 149346
gcuuuggagacaaacaacc

SEQ ID NO: 149348 - RNA, 19 nt, Artificial Sequence
  Description of Artificial Sequence: Synthetic oligonucleotide
  Sense strand starting at position 1320 of SEQ ID NO: 1917
guuguuugucuccaaagcu

SEQ ID NO: 149349 - RNA, 19 nt, Artificial Sequence
  Description of Artificial Sequence: Synthetic oligonucleotide
  Antisense strand to SEQ ID NO: 149348
agcuuuggagacaaacaac

SEQ ID NO: 149350 - RNA, 19 nt, Artificial Sequence
  Description of Artificial Sequence: Synthetic oligonucleotide
  Sense strand starting at position 1327 of SEQ ID NO: 1917
gucuccaaagcuuguuuau

SEQ ID NO: 149351 - RNA, 19 nt, Artificial Sequence
  Description of Artificial Sequence: Synthetic oligonucleotide
  Antisense strand to SEQ ID NO: 149350
auaaacaagcuuuggagac

SEQ ID NO: 149352 - RNA, 19 nt, Artificial Sequence
  Description of Artificial Sequence: Synthetic oligonucleotide
  Sense strand starting at position 1329 of SEQ ID NO: 1917
cuccaaagcuuguuuaugu

SEQ ID NO: 149353 - RNA, 19 nt, Artificial Sequence
  Description of Artificial Sequence: Synthetic oligonucleotide
  Antisense strand to SEQ ID NO: 149352
acauaaacaagcuuuggag

SEQ ID NO: 149354 - RNA, 19 nt, Artificial Sequence
  Description of Artificial Sequence: Synthetic oligonucleotide
  Sense strand starting at position 1712 of SEQ ID NO: 1917
cgcgcuguugcucgaucau

SEQ ID NO: 149355 - RNA, 19 nt, Artificial Sequence
  Description of Artificial Sequence: Synthetic oligonucleotide
  Antisense strand to SEQ ID NO: 149354
augaucgagcaacagcgcg

SEQ ID NO: 149356 - RNA, 19 nt, Artificial Sequence
  Description of Artificial Sequence: Synthetic oligonucleotide
  Sense strand starting at position 1715 of SEQ ID NO: 1917
gcuguugcucgaucaucca

SEQ ID NO: 149357 - RNA, 19 nt, Artificial Sequence
  Description of Artificial Sequence: Synthetic oligonucleotide
  Antisense strand to SEQ ID NO: 149356
uggaugaucgagcaacagc

SEQ ID NO: 149358 - RNA, 19 nt, Artificial Sequence
  Description of Artificial Sequence: Synthetic oligonucleotide
  Sense strand starting at position 1744 of SEQ ID NO: 1917
cugaauuccugucugagcu

SEQ ID NO: 149359 - RNA, 19 nt, Artificial Sequence
  Description of Artificial Sequence: Synthetic oligonucleotide
  Antisense strand to SEQ ID NO: 149358
agcucagacaggaauucag

SEQ ID NO: 149360 - RNA, 19 nt, Artificial Sequence
  Description of Artificial Sequence: Synthetic oligonucleotide
  Sense strand starting at position 1937 of SEQ ID NO: 1917
gucaaauuuccguggucga

SEQ ID NO: 149361 - RNA, 19 nt, Artificial Sequence
  Description of Artificial Sequence: Synthetic oligonucleotide
  Antisense strand to SEQ ID NO: 149360
ucgaccacggaaauuugac

SEQ ID NO: 149362 - RNA, 19 nt, Artificial Sequence
  Description of Artificial Sequence: Synthetic oligonucleotide
  Sense strand starting at position 1938 of SEQ ID NO: 1917
ucaaauuuccguggucgau

SEQ ID NO: 149363 - RNA, 19 nt, Artificial Sequence
  Description of Artificial Sequence: Synthetic oligonucleotide
  Antisense strand to SEQ ID NO: 149362
aucgaccacggaaauuuga

SEQ ID NO: 149364 - RNA, 19 nt, Artificial Sequence
  Description of Artificial Sequence: Synthetic oligonucleotide
  Sense strand starting at position 2099 of SEQ ID NO: 1917
ggguccuaguccucucaau

SEQ ID NO: 149365 - RNA, 19 nt, Artificial Sequence
  Description of Artificial Sequence: Synthetic oligonucleotide
  Antisense strand to SEQ ID NO: 149364
auugagaggacuaggaccc

SEQ ID NO: 149366 - RNA, 19 nt, Artificial Sequence
  Description of Artificial Sequence: Synthetic oligonucleotide
  Sense strand starting at position 2142 of SEQ ID NO: 1917
caugucuaaucaggagugu

SEQ ID NO: 149367 - RNA, 19 nt, Artificial Sequence
  Description of Artificial Sequence: Synthetic oligonucleotide
  Antisense strand to SEQ ID NO: 149366
acacuccugauuagacaug

SEQ ID NO: 149368 - RNA, 19 nt, Artificial Sequence
  Description of Artificial Sequence: Synthetic oligonucleotide
  Sense strand starting at position 2146 of SEQ ID NO: 1917
ucuaaucaggaguguguau

SEQ ID NO: 149369 - RNA, 19 nt, Artificial Sequence
  Description of Artificial Sequence: Synthetic oligonucleotide
  Antisense strand to SEQ ID NO: 149368
auacacacuccugauuaga

SEQ ID NO: 149370 - RNA, 19 nt, Artificial Sequence
  Description of Artificial Sequence: Synthetic oligonucleotide
  Sense strand starting at position 2344 of SEQ ID NO: 1917
agagaagaguccuggauug

SEQ ID NO: 149371 - RNA, 19 nt, Artificial Sequence
  Description of Artificial Sequence: Synthetic oligonucleotide
  Antisense strand to SEQ ID NO: 149370
caauccaggacucuucucu

SEQ ID NO: 149372 - RNA, 19 nt, Artificial Sequence
  Description of Artificial Sequence: Synthetic oligonucleotide
  Sense strand starting at position 2349 of SEQ ID NO: 1917
agaguccuggauugaaauc

SEQ ID NO: 149373 - RNA, 19 nt, Artificial Sequence
  Description of Artificial Sequence: Synthetic oligonucleotide
  Antisense strand to SEQ ID NO: 149372
gauuucaauccaggacucu

SEQ ID NO: 149374 - RNA, 19 nt, Artificial Sequence
  Description of Artificial Sequence: Synthetic oligonucleotide
  Sense strand starting at position 2360 of SEQ ID NO: 1917
uugaaaucccucugugggu

SEQ ID NO: 149375 - RNA, 19 nt, Artificial Sequence
  Description of Artificial Sequence: Synthetic oligonucleotide
  Antisense strand to SEQ ID NO: 149374
acccacagagggauuucaa

SEQ ID NO: 149376 - RNA, 19 nt, Artificial Sequence
  Description of Artificial Sequence: Synthetic oligonucleotide
  Sense strand starting at position 2392 of SEQ ID NO: 1917
agacuaaguuucucacuga

SEQ ID NO: 149377 - RNA, 19 nt, Artificial Sequence
  Description of Artificial Sequence: Synthetic oligonucleotide
  Antisense strand to SEQ ID NO: 149376
ucagugagaaacuuagucu

SEQ ID NO: 149378 - RNA, 19 nt, Artificial Sequence
  Description of Artificial Sequence: Synthetic oligonucleotide
  Sense strand starting at position 2393 of SEQ ID NO: 1917
gacuaaguuucucacugag

SEQ ID NO: 149379 - RNA, 19 nt, Artificial Sequence
  Description of Artificial Sequence: Synthetic oligonucleotide
  Antisense strand to SEQ ID NO: 149378
cucagugagaaacuuaguc

SEQ ID NO: 149380 - RNA, 19 nt, Artificial Sequence
  Description of Artificial Sequence: Synthetic oligonucleotide
  Sense strand starting at position 2396 of SEQ ID NO: 1917
uaaguuucucacugagggu

SEQ ID NO: 149381 - RNA, 19 nt, Artificial Sequence
  Description of Artificial Sequence: Synthetic oligonucleotide
  Antisense strand to SEQ ID NO: 149380
acccucagugagaaacuua

SEQ ID NO: 149382 - RNA, 19 nt, Artificial Sequence
  Description of Artificial Sequence: Synthetic oligonucleotide
  Sense strand starting at position 2705 of SEQ ID NO: 1917
aggguguucgucugugaag

SEQ ID NO: 149383 - RNA, 19 nt, Artificial Sequence
  Description of Artificial Sequence: Synthetic oligonucleotide
  Antisense strand to SEQ ID NO: 149382
cuucacagacgaacacccu

SEQ ID NO: 149384 - RNA, 19 nt, Artificial Sequence
  Description of Artificial Sequence: Synthetic oligonucleotide
  Sense strand starting at position 3022 of SEQ ID NO: 1917
ggaagguggugaugagaga

SEQ ID NO: 149385 - RNA, 19 nt, Artificial Sequence
  Description of Artificial Sequence: Synthetic oligonucleotide
  Antisense strand to SEQ ID NO: 149384
ucucucaucaccaccuucc

SEQ ID NO: 149386 - RNA, 19 nt, Artificial Sequence
  Description of Artificial Sequence: Synthetic oligonucleotide
  Sense strand starting at position 3347 of SEQ ID NO: 1917
gggcaaagcucccaugaua

SEQ ID NO: 149387 - RNA, 19 nt, Artificial Sequence
  Description of Artificial Sequence: Synthetic oligonucleotide
  Antisense strand to SEQ ID NO: 149386
uaucaugggagcuuugccc

SEQ ID NO: 149388 - RNA, 19 nt, Artificial Sequence
  Description of Artificial Sequence: Synthetic oligonucleotide
  Sense strand starting at position 3678 of SEQ ID NO: 1917
ccaugucucugugacaacu

SEQ ID NO: 149389 - RNA, 19 nt, Artificial Sequence
  Description of Artificial Sequence: Synthetic oligonucleotide
  Antisense strand to SEQ ID NO: 149388
aguugucacagagacaugg

SEQ ID NO: 149390 - RNA, 19 nt, Artificial Sequence
  Description of Artificial Sequence: Synthetic oligonucleotide
  Sense strand starting at position 3749 of SEQ ID NO: 1917
ugggaugucauucgaucag

SEQ ID NO: 149391 - RNA, 19 nt, Artificial Sequence
  Description of Artificial Sequence: Synthetic oligonucleotide
  Antisense strand to SEQ ID NO: 149390
cugaucgaaugacauccca

SEQ ID NO: 149392 - RNA, 19 nt, Artificial Sequence
  Description of Artificial Sequence: Synthetic oligonucleotide
  Sense strand starting at position 3806 of SEQ ID NO: 1917
ggacaucugauccgagaca

SEQ ID NO: 149393 - RNA, 19 nt, Artificial Sequence
  Description of Artificial Sequence: Synthetic oligonucleotide
  Antisense strand to SEQ ID NO: 149392
ugucucggaucagaugucc

SEQ ID NO: 149394 - RNA, 19 nt, Artificial Sequence
  Description of Artificial Sequence: Synthetic oligonucleotide
  Sense strand starting at position 136 of SEQ ID NO: 1921
gaggccagagucgaugaaa

SEQ ID NO: 149395 - RNA, 19 nt, Artificial Sequence
  Description of Artificial Sequence: Synthetic oligonucleotide
  Antisense strand to SEQ ID NO: 149394
uuucaucgacucuggccuc

SEQ ID NO: 149396 - RNA, 19 nt, Artificial Sequence
  Description of Artificial Sequence: Synthetic oligonucleotide
  Sense strand starting at position 286 of SEQ ID NO: 1921
ccaugaauuuggcuguguu

SEQ ID NO: 149397 - RNA, 19 nt, Artificial Sequence
  Description of Artificial Sequence: Synthetic oligonucleotide
  Antisense strand to SEQ ID NO: 149396
aacacagccaaauucaugg

SEQ ID NO: 149398 - RNA, 19 nt, Artificial Sequence
  Description of Artificial Sequence: Synthetic oligonucleotide
  Sense strand starting at position 287 of SEQ ID NO: 1921
caugaauuuggcuguguuu

SEQ ID NO: 149399 - RNA, 19 nt, Artificial Sequence
  Description of Artificial Sequence: Synthetic oligonucleotide
  Antisense strand to SEQ ID NO: 149398
aaacacagccaaauucaug

SEQ ID NO: 149400 - RNA, 19 nt, Artificial Sequence
  Description of Artificial Sequence: Synthetic oligonucleotide
  Sense strand starting at position 335 of SEQ ID NO: 1921
aggccucaguuuccauaua

SEQ ID NO: 149401 - RNA, 19 nt, Artificial Sequence
  Description of Artificial Sequence: Synthetic oligonucleotide
  Antisense strand to SEQ ID NO: 149400
uauauggaaacugaggccu

SEQ ID NO: 149402 - RNA, 19 nt, Artificial Sequence
  Description of Artificial Sequence: Synthetic oligonucleotide
  Sense strand starting at position 336 of SEQ ID NO: 1921
ggccucaguuuccauauau

SEQ ID NO: 149403 - RNA, 19 nt, Artificial Sequence
  Description of Artificial Sequence: Synthetic oligonucleotide
  Antisense strand to SEQ ID NO: 149402
auauauggaaacugaggcc

SEQ ID NO: 149404 - RNA, 19 nt, Artificial Sequence
  Description of Artificial Sequence: Synthetic oligonucleotide
  Sense strand starting at position 343 of SEQ ID NO: 1921
guuuccauauaugugaagu

SEQ ID NO: 149405 - RNA, 19 nt, Artificial Sequence
  Description of Artificial Sequence: Synthetic oligonucleotide
  Antisense strand to SEQ ID NO: 149404
acuucacauauauggaaac

SEQ ID NO: 149406 - RNA, 19 nt, Artificial Sequence
  Description of Artificial Sequence: Synthetic oligonucleotide
  Sense strand starting at position 345 of SEQ ID NO: 1921
uuccauauaugugaaguga

SEQ ID NO: 149407 - RNA, 19 nt, Artificial Sequence
  Description of Artificial Sequence: Synthetic oligonucleotide
  Antisense strand to SEQ ID NO: 149406
ucacuucacauauauggaa

SEQ ID NO: 149408 - RNA, 19 nt, Artificial Sequence
  Description of Artificial Sequence: Synthetic oligonucleotide
  Sense strand starting at position 402 of SEQ ID NO: 1921
ucugacagucugugaaucu

SEQ ID NO: 149409 - RNA, 19 nt, Artificial Sequence
  Description of Artificial Sequence: Synthetic oligonucleotide
  Antisense strand to SEQ ID NO: 149408
agauucacagacugucaga

SEQ ID NO: 149410 - RNA, 19 nt, Artificial Sequence
  Description of Artificial Sequence: Synthetic oligonucleotide
  Sense strand starting at position 409 of SEQ ID NO: 1921
gucugugaaucuccuggaa

SEQ ID NO: 149411 - RNA, 19 nt, Artificial Sequence
  Description of Artificial Sequence: Synthetic oligonucleotide
  Antisense strand to SEQ ID NO: 149410
uuccaggagauucacagac

SEQ ID NO: 149412 - RNA, 19 nt, Artificial Sequence
  Description of Artificial Sequence: Synthetic oligonucleotide
  Sense strand starting at position 411 of SEQ ID NO: 1921
cugugaaucuccuggaagc

SEQ ID NO: 149413 - RNA, 19 nt, Artificial Sequence
  Description of Artificial Sequence: Synthetic oligonucleotide
  Antisense strand to SEQ ID NO: 149412
gcuuccaggagauucacag

SEQ ID NO: 149414 - RNA, 19 nt, Artificial Sequence
  Description of Artificial Sequence: Synthetic oligonucleotide
  Sense strand starting at position 413 of SEQ ID NO: 1921
gugaaucuccuggaagcca

SEQ ID NO: 149415 - RNA, 19 nt, Artificial Sequence
  Description of Artificial Sequence: Synthetic oligonucleotide
  Antisense strand to SEQ ID NO: 149414
uggcuuccaggagauucac

SEQ ID NO: 149416 - RNA, 19 nt, Artificial Sequence
  Description of Artificial Sequence: Synthetic oligonucleotide
  Sense strand starting at position 500 of SEQ ID NO: 1921
agcaucuucugacacaaga

SEQ ID NO: 149417 - RNA, 19 nt, Artificial Sequence
  Description of Artificial Sequence: Synthetic oligonucleotide
  Antisense strand to SEQ ID NO: 149416
ucuugugucagaagaugcu

SEQ ID NO: 149418 - RNA, 19 nt, Artificial Sequence
  Description of Artificial Sequence: Synthetic oligonucleotide
  Sense strand starting at position 1087 of SEQ ID NO: 1921
cuuugaacucguugacgcu

SEQ ID NO: 149419 - RNA, 19 nt, Artificial Sequence
  Description of Artificial Sequence: Synthetic oligonucleotide
  Antisense strand to SEQ ID NO: 149418
agcgucaacgaguucaaag

SEQ ID NO: 149420 - RNA, 19 nt, Artificial Sequence
  Description of Artificial Sequence: Synthetic oligonucleotide
  Sense strand starting at position 1257 of SEQ ID NO: 1921
agggcugaccuguggaaga

SEQ ID NO: 149421 - RNA, 19 nt, Artificial Sequence
  Description of Artificial Sequence: Synthetic oligonucleotide
  Antisense strand to SEQ ID NO: 149420
ucuuccacaggucagcccu

SEQ ID NO: 149422 - RNA, 19 nt, Artificial Sequence
  Description of Artificial Sequence: Synthetic oligonucleotide
  Sense strand starting at position 1494 of SEQ ID NO: 1921
cucacaauccgggauccuu

SEQ ID NO: 149423 - RNA, 19 nt, Artificial Sequence
  Description of Artificial Sequence: Synthetic oligonucleotide
  Antisense strand to SEQ ID NO: 149422
aaggaucccggauugugag

SEQ ID NO: 149424 - RNA, 19 nt, Artificial Sequence
  Description of Artificial Sequence: Synthetic oligonucleotide
  Sense strand starting at position 1513 of SEQ ID NO: 1921
uuuaaaugucuguggcuua

SEQ ID NO: 149425 - RNA, 19 nt, Artificial Sequence
  Description of Artificial Sequence: Synthetic oligonucleotide
  Antisense strand to SEQ ID NO: 149424
uaagccacagacauuuaaa

SEQ ID NO: 149426 - RNA, 19 nt, Artificial Sequence
  Description of Artificial Sequence: Synthetic oligonucleotide
  Sense strand starting at position 1637 of SEQ ID NO: 1921
uggcgugucugucucaaga

SEQ ID NO: 149427 - RNA, 19 nt, Artificial Sequence
  Description of Artificial Sequence: Synthetic oligonucleotide
  Antisense strand to SEQ ID NO: 149426
ucuugagacagacacgcca

SEQ ID NO: 149428 - RNA, 19 nt, Artificial Sequence
  Description of Artificial Sequence: Synthetic oligonucleotide
  Sense strand starting at position 1685 of SEQ ID NO: 1921
gucauaagguuguuugucu

SEQ ID NO: 149429 - RNA, 19 nt, Artificial Sequence
  Description of Artificial Sequence: Synthetic oligonucleotide
  Antisense strand to SEQ ID NO: 149428
agacaaacaaccuuaugac

SEQ ID NO: 149430 - RNA, 19 nt, Artificial Sequence
  Description of Artificial Sequence: Synthetic oligonucleotide
  Sense strand starting at position 1689 of SEQ ID NO: 1921
uaagguuguuugucuccaa

SEQ ID NO: 149431 - RNA, 19 nt, Artificial Sequence
  Description of Artificial Sequence: Synthetic oligonucleotide
  Antisense strand to SEQ ID NO: 149430
uuggagacaaacaaccuua

SEQ ID NO: 149432 - RNA, 19 nt, Artificial Sequence
  Description of Artificial Sequence: Synthetic oligonucleotide
  Sense strand starting at position 1690 of SEQ ID NO: 1921
aagguuguuugucuccaaa

SEQ ID NO: 149433 - RNA, 19 nt, Artificial Sequence
  Description of Artificial Sequence: Synthetic oligonucleotide
  Antisense strand to SEQ ID NO: 149432
uuuggagacaaacaaccuu

SEQ ID NO: 149434 - RNA, 19 nt, Artificial Sequence
  Description of Artificial Sequence: Synthetic oligonucleotide
  Sense strand starting at position 1692 of SEQ ID NO: 1921
gguuguuugucuccaaagc

SEQ ID NO: 149435 - RNA, 19 nt, Artificial Sequence
  Description of Artificial Sequence: Synthetic oligonucleotide
  Antisense strand to SEQ ID NO: 149434
gcuuuggagacaaacaacc

SEQ ID NO: 149436 - RNA, 19 nt, Artificial Sequence
  Description of Artificial Sequence: Synthetic oligonucleotide
  Sense strand starting at position 1693 of SEQ ID NO: 1921
guuguuugucuccaaagcu

SEQ ID NO: 149437 - RNA, 19 nt, Artificial Sequence
  Description of Artificial Sequence: Synthetic oligonucleotide
  Antisense strand to SEQ ID NO: 149436
agcuuuggagacaaacaac

SEQ ID NO: 149438 - RNA, 19 nt, Artificial Sequence
  Description of Artificial Sequence: Synthetic oligonucleotide
  Sense strand starting at position 1700 of SEQ ID NO: 1921
gucuccaaagcuuguuuau

SEQ ID NO: 149439 - RNA, 19 nt, Artificial Sequence
  Description of Artificial Sequence: Synthetic oligonucleotide
  Antisense strand to SEQ ID NO: 149438
auaaacaagcuuuggagac

SEQ ID NO: 149440 - RNA, 19 nt, Artificial Sequence
  Description of Artificial Sequence: Synthetic oligonucleotide
  Sense strand starting at position 1702 of SEQ ID NO: 1921
cuccaaagcuuguuuaugu

SEQ ID NO: 149441 - RNA, 19 nt, Artificial Sequence
  Description of Artificial Sequence: Synthetic oligonucleotide
  Antisense strand to SEQ ID NO: 149440
acauaaacaagcuuuggag

SEQ ID NO: 149442 - RNA, 19 nt, Artificial Sequence
  Description of Artificial Sequence: Synthetic oligonucleotide
  Sense strand starting at position 2088 of SEQ ID NO: 1921
gcuguugcucgaucaucca

SEQ ID NO: 149443 - RNA, 19 nt, Artificial Sequence
  Description of Artificial Sequence: Synthetic oligonucleotide
  Antisense strand to SEQ ID NO: 149442
uggaugaucgagcaacagc

SEQ ID NO: 149444 - RNA, 19 nt, Artificial Sequence
  Description of Artificial Sequence: Synthetic oligonucleotide
  Sense strand starting at position 2117 of SEQ ID NO: 1921
cugaauuccugucugagcu

SEQ ID NO: 149445 - RNA, 19 nt, Artificial Sequence
  Description of Artificial Sequence: Synthetic oligonucleotide
  Antisense strand to SEQ ID NO: 149444
agcucagacaggaauucag

SEQ ID NO: 149446 - RNA, 19 nt, Artificial Sequence
  Description of Artificial Sequence: Synthetic oligonucleotide
  Sense strand starting at position 2310 of SEQ ID NO: 1921
gucaaauuuccguggucga

SEQ ID NO: 149447 - RNA, 19 nt, Artificial Sequence
  Description of Artificial Sequence: Synthetic oligonucleotide
  Antisense strand to SEQ ID NO: 149446
ucgaccacggaaauuugac

SEQ ID NO: 149448 - RNA, 19 nt, Artificial Sequence
  Description of Artificial Sequence: Synthetic oligonucleotide
  Sense strand starting at position 2311 of SEQ ID NO: 1921
ucaaauuuccguggucgau

SEQ ID NO: 149449 - RNA, 19 nt, Artificial Sequence
  Description of Artificial Sequence: Synthetic oligonucleotide
  Antisense strand to SEQ ID NO: 149448
aucgaccacggaaauuuga

SEQ ID NO: 149450 - RNA, 19 nt, Artificial Sequence
  Description of Artificial Sequence: Synthetic oligonucleotide
  Sense strand starting at position 2472 of SEQ ID NO: 1921
ggguccuaguccucucaau

SEQ ID NO: 149451 - RNA, 19 nt, Artificial Sequence
  Description of Artificial Sequence: Synthetic oligonucleotide
  Antisense strand to SEQ ID NO: 149450
auugagaggacuaggaccc

SEQ ID NO: 149452 - RNA, 19 nt, Artificial Sequence
  Description of Artificial Sequence: Synthetic oligonucleotide
  Sense strand starting at position 2515 of SEQ ID NO: 1921
caugucuaaucaggagugu

SEQ ID NO: 149453 - RNA, 19 nt, Artificial Sequence
  Description of Artificial Sequence: Synthetic oligonucleotide
  Antisense strand to SEQ ID NO: 149452
acacuccugauuagacaug

SEQ ID NO: 149454 - RNA, 19 nt, Artificial Sequence
  Description of Artificial Sequence: Synthetic oligonucleotide
  Sense strand starting at position 2519 of SEQ ID NO: 1921
ucuaaucaggaguguguau

SEQ ID NO: 149455 - RNA, 19 nt, Artificial Sequence
  Description of Artificial Sequence: Synthetic oligonucleotide
  Antisense strand to SEQ ID NO: 149454
auacacacuccugauuaga

SEQ ID NO: 149456 - RNA, 19 nt, Artificial Sequence
  Description of Artificial Sequence: Synthetic oligonucleotide
  Sense strand starting at position 2717 of SEQ ID NO: 1921
agagaagaguccuggauug

SEQ ID NO: 149457 - RNA, 19 nt, Artificial Sequence
  Description of Artificial Sequence: Synthetic oligonucleotide
  Antisense strand to SEQ ID NO: 149456
caauccaggacucuucucu

SEQ ID NO: 149458 - RNA, 19 nt, Artificial Sequence
  Description of Artificial Sequence: Synthetic oligonucleotide
  Sense strand starting at position 2722 of SEQ ID NO: 1921
agaguccuggauugaaauc

SEQ ID NO: 149459 - RNA, 19 nt, Artificial Sequence
  Description of Artificial Sequence: Synthetic oligonucleotide
  Antisense strand to SEQ ID NO: 149458
gauuucaauccaggacucu

SEQ ID NO: 149460 - RNA, 19 nt, Artificial Sequence
  Description of Artificial Sequence: Synthetic oligonucleotide
  Sense strand starting at position 2733 of SEQ ID NO: 1921
uugaaaucccucugugggu

SEQ ID NO: 149461 - RNA, 19 nt, Artificial Sequence
  Description of Artificial Sequence: Synthetic oligonucleotide
  Antisense strand to SEQ ID NO: 149460
acccacagagggauuucaa

SEQ ID NO: 149462 - RNA, 19 nt, Artificial Sequence
  Description of Artificial Sequence: Synthetic oligonucleotide
  Sense strand starting at position 2765 of SEQ ID NO: 1921
agacuaaguuucucacuga

SEQ ID NO: 149463 - RNA, 19 nt, Artificial Sequence
  Description of Artificial Sequence: Synthetic oligonucleotide
  Antisense strand to SEQ ID NO: 149462
ucagugagaaacuuagucu

SEQ ID NO: 149464 - RNA, 19 nt, Artificial Sequence
  Description of Artificial Sequence: Synthetic oligonucleotide
  Sense strand starting at position 2766 of SEQ ID NO: 1921
gacuaaguuucucacugag

SEQ ID NO: 149465 - RNA, 19 nt, Artificial Sequence
  Description of Artificial Sequence: Synthetic oligonucleotide
  Antisense strand to SEQ ID NO: 149464
cucagugagaaacuuaguc

SEQ ID NO: 149466 - RNA, 19 nt, Artificial Sequence
  Description of Artificial Sequence: Synthetic oligonucleotide
  Sense strand starting at position 2769 of SEQ ID NO: 1921
uaaguuucucacugagggu

SEQ ID NO: 149467 - RNA, 19 nt, Artificial Sequence
  Description of Artificial Sequence: Synthetic oligonucleotide
  Antisense strand to SEQ ID NO: 149466
acccucagugagaaacuua

SEQ ID NO: 149468 - RNA, 19 nt, Artificial Sequence
  Description of Artificial Sequence: Synthetic oligonucleotide
  Sense strand starting at position 3078 of SEQ ID NO: 1921
aggguguucgucugugaag

SEQ ID NO: 149469 - RNA, 19 nt, Artificial Sequence
  Description of Artificial Sequence: Synthetic oligonucleotide
  Antisense strand to SEQ ID NO: 149468
cuucacagacgaacacccu

SEQ ID NO: 149470 - RNA, 19 nt, Artificial Sequence
  Description of Artificial Sequence: Synthetic oligonucleotide
  Sense strand starting at position 3395 of SEQ ID NO: 1921
ggaagguggugaugagaga

SEQ ID NO: 149471 - RNA, 19 nt, Artificial Sequence
  Description of Artificial Sequence: Synthetic oligonucleotide
  Antisense strand to SEQ ID NO: 149470
ucucucaucaccaccuucc

SEQ ID NO: 149472 - RNA, 19 nt, Artificial Sequence
  Description of Artificial Sequence: Synthetic oligonucleotide
  Sense strand starting at position 3720 of SEQ ID NO: 1921
gggcaaagcucccaugaua

SEQ ID NO: 149473 - RNA, 19 nt, Artificial Sequence
  Description of Artificial Sequence: Synthetic oligonucleotide
  Antisense strand to SEQ ID NO: 149472
uaucaugggagcuuugccc

SEQ ID NO: 149474 - RNA, 19 nt, Artificial Sequence
  Description of Artificial Sequence: Synthetic oligonucleotide
  Sense strand starting at position 192 of SEQ ID NO: 1920
gucugagaaguuggaaguu

SEQ ID NO: 149475 - RNA, 19 nt, Artificial Sequence
  Description of Artificial Sequence: Synthetic oligonucleotide
  Antisense strand to SEQ ID NO: 149474
aacuuccaacuucucagac

SEQ ID NO: 149476 - RNA, 19 nt, Artificial Sequence
  Description of Artificial Sequence: Synthetic oligonucleotide
  Sense strand starting at position 356 of SEQ ID NO: 1920
gaggccagagucgaugaaa

SEQ ID NO: 149477 - RNA, 19 nt, Artificial Sequence
  Description of Artificial Sequence: Synthetic oligonucleotide
  Antisense strand to SEQ ID NO: 149476
uuucaucgacucuggccuc

SEQ ID NO: 149478 - RNA, 19 nt, Artificial Sequence
  Description of Artificial Sequence: Synthetic oligonucleotide
  Sense strand starting at position 506 of SEQ ID NO: 1920
ccaugaauuuggcuguguu

SEQ ID NO: 149479 - RNA, 19 nt, Artificial Sequence
  Description of Artificial Sequence: Synthetic oligonucleotide
  Antisense strand to SEQ ID NO: 149478
aacacagccaaauucaugg

SEQ ID NO: 149480 - RNA, 19 nt, Artificial Sequence
  Description of Artificial Sequence: Synthetic oligonucleotide
  Sense strand starting at position 507 of SEQ ID NO: 1920
caugaauuuggcuguguuu

SEQ ID NO: 149481 - RNA, 19 nt, Artificial Sequence
  Description of Artificial Sequence: Synthetic oligonucleotide
  Antisense strand to SEQ ID NO: 149480
aaacacagccaaauucaug

SEQ ID NO: 149482 - RNA, 19 nt, Artificial Sequence
  Description of Artificial Sequence: Synthetic oligonucleotide
  Sense strand starting at position 555 of SEQ ID NO: 1920
aggccucaguuuccauaua

SEQ ID NO: 149483 - RNA, 19 nt, Artificial Sequence
  Description of Artificial Sequence: Synthetic oligonucleotide
  Antisense strand to SEQ ID NO: 149482
uauauggaaacugaggccu

SEQ ID NO: 149484 - RNA, 19 nt, Artificial Sequence
  Description of Artificial Sequence: Synthetic oligonucleotide
  Sense strand starting at position 556 of SEQ ID NO: 1920
ggccucaguuuccauauau

SEQ ID NO: 149485 - RNA, 19 nt, Artificial Sequence
  Description of Artificial Sequence: Synthetic oligonucleotide
  Antisense strand to SEQ ID NO: 149484
auauauggaaacugaggcc

SEQ ID NO: 149486 - RNA, 19 nt, Artificial Sequence
  Description of Artificial Sequence: Synthetic oligonucleotide
  Sense strand starting at position 563 of SEQ ID NO: 1920
guuuccauauaugugaagu

SEQ ID NO: 149487 - RNA, 19 nt, Artificial Sequence
  Description of Artificial Sequence: Synthetic oligonucleotide
  Antisense strand to SEQ ID NO: 149486
acuucacauauauggaaac

SEQ ID NO: 149488 - RNA, 19 nt, Artificial Sequence
  Description of Artificial Sequence: Synthetic oligonucleotide
  Sense strand starting at position 565 of SEQ ID NO: 1920
uuccauauaugugaaguga

SEQ ID NO: 149489 - RNA, 19 nt, Artificial Sequence
  Description of Artificial Sequence: Synthetic oligonucleotide
  Antisense strand to SEQ ID NO: 149488
ucacuucacauauauggaa

SEQ ID NO: 149490 - RNA, 19 nt, Artificial Sequence
  Description of Artificial Sequence: Synthetic oligonucleotide
  Sense strand starting at position 622 of SEQ ID NO: 1920
ucugacagucugugaaucu

SEQ ID NO: 149491 - RNA, 19 nt, Artificial Sequence
  Description of Artificial Sequence: Synthetic oligonucleotide
  Antisense strand to SEQ ID NO: 149490
agauucacagacugucaga

SEQ ID NO: 149492 - RNA, 19 nt, Artificial Sequence
  Description of Artificial Sequence: Synthetic oligonucleotide
  Sense strand starting at position 629 of SEQ ID NO: 1920
gucugugaaucuccuggaa

SEQ ID NO: 149493 - RNA, 19 nt, Artificial Sequence
  Description of Artificial Sequence: Synthetic oligonucleotide
  Antisense strand to SEQ ID NO: 149492
uuccaggagauucacagac

SEQ ID NO: 149494 - RNA, 19 nt, Artificial Sequence
  Description of Artificial Sequence: Synthetic oligonucleotide
  Sense strand starting at position 631 of SEQ ID NO: 1920
cugugaaucuccuggaagc

SEQ ID NO: 149495 - RNA, 19 nt, Artificial Sequence
  Description of Artificial Sequence: Synthetic oligonucleotide
  Antisense strand to SEQ ID NO: 149494
gcuuccaggagauucacag

SEQ ID NO: 149496 - RNA, 19 nt, Artificial Sequence
  Description of Artificial Sequence: Synthetic oligonucleotide
  Sense strand starting at position 633 of SEQ ID NO: 1920
gugaaucuccuggaagcca

SEQ ID NO: 149497 - RNA, 19 nt, Artificial Sequence
  Description of Artificial Sequence: Synthetic oligonucleotide
  Antisense strand to SEQ ID NO: 149496
uggcuuccaggagauucac

SEQ ID NO: 149498 - RNA, 19 nt, Artificial Sequence
  Description of Artificial Sequence: Synthetic oligonucleotide
  Sense strand starting at position 720 of SEQ ID NO: 1920
agcaucuucugacacaaga

SEQ ID NO: 149499 - RNA, 19 nt, Artificial Sequence
  Description of Artificial Sequence: Synthetic oligonucleotide
  Antisense strand to SEQ ID NO: 149498
ucuugugucagaagaugcu

SEQ ID NO: 149500 - RNA, 19 nt, Artificial Sequence
  Description of Artificial Sequence: Synthetic oligonucleotide
  Sense strand starting at position 1307 of SEQ ID NO: 1920
cuuugaacucguugacgcu

SEQ ID NO: 149501 - RNA, 19 nt, Artificial Sequence
  Description of Artificial Sequence: Synthetic oligonucleotide
  Antisense strand to SEQ ID NO: 149500
agcgucaacgaguucaaag

SEQ ID NO: 149502 - RNA, 19 nt, Artificial Sequence
  Description of Artificial Sequence: Synthetic oligonucleotide
  Sense strand starting at position 1477 of SEQ ID NO: 1920
agggcugaccuguggaaga

SEQ ID NO: 149503 - RNA, 19 nt, Artificial Sequence
  Description of Artificial Sequence: Synthetic oligonucleotide
  Antisense strand to SEQ ID NO: 149502
ucuuccacaggucagcccu

SEQ ID NO: 149504 - RNA, 19 nt, Artificial Sequence
  Description of Artificial Sequence: Synthetic oligonucleotide
  Sense strand starting at position 1714 of SEQ ID NO: 1920
cucacaauccgggauccuu

SEQ ID NO: 149505 - RNA, 19 nt, Artificial Sequence
  Description of Artificial Sequence: Synthetic oligonucleotide
  Antisense strand to SEQ ID NO: 149504
aaggaucccggauugugag

SEQ ID NO: 149506 - RNA, 19 nt, Artificial Sequence
  Description of Artificial Sequence: Synthetic oligonucleotide
  Sense strand starting at position 1733 of SEQ ID NO: 1920
uuuaaaugucuguggcuua

SEQ ID NO: 149507 - RNA, 19 nt, Artificial Sequence
  Description of Artificial Sequence: Synthetic oligonucleotide
  Antisense strand to SEQ ID NO: 149506
uaagccacagacauuuaaa

SEQ ID NO: 149508 - RNA, 19 nt, Artificial Sequence
  Description of Artificial Sequence: Synthetic oligonucleotide
  Sense strand starting at position 1857 of SEQ ID NO: 1920
uggcgugucugucucaaga

SEQ ID NO: 149509 - RNA, 19 nt, Artificial Sequence
  Description of Artificial Sequence: Synthetic oligonucleotide
  Antisense strand to SEQ ID NO: 149508
ucuugagacagacacgcca

SEQ ID NO: 149510 - RNA, 19 nt, Artificial Sequence
  Description of Artificial Sequence: Synthetic oligonucleotide
  Sense strand starting at position 1905 of SEQ ID NO: 1920
gucauaagguuguuugucu

SEQ ID NO: 149511 - RNA, 19 nt, Artificial Sequence
  Description of Artificial Sequence: Synthetic oligonucleotide
  Antisense strand to SEQ ID NO: 149510
agacaaacaaccuuaugac

SEQ ID NO: 149512 - RNA, 19 nt, Artificial Sequence
  Description of Artificial Sequence: Synthetic oligonucleotide
  Sense strand starting at position 1909 of SEQ ID NO: 1920
uaagguuguuugucuccaa

SEQ ID NO: 149513 - RNA, 19 nt, Artificial Sequence
  Description of Artificial Sequence: Synthetic oligonucleotide
  Antisense strand to SEQ ID NO: 149512
uuggagacaaacaaccuua

SEQ ID NO: 149514 - RNA, 19 nt, Artificial Sequence
  Description of Artificial Sequence: Synthetic oligonucleotide
  Sense strand starting at position 1910 of SEQ ID NO: 1920
aagguuguuugucuccaaa

SEQ ID NO: 149515 - RNA, 19 nt, Artificial Sequence
  Description of Artificial Sequence: Synthetic oligonucleotide
  Antisense strand to SEQ ID NO: 149514
uuuggagacaaacaaccuu

SEQ ID NO: 149516 - RNA, 19 nt, Artificial Sequence
  Description of Artificial Sequence: Synthetic oligonucleotide
  Sense strand starting at position 1912 of SEQ ID NO: 1920
gguuguuugucuccaaagc

SEQ ID NO: 149517 - RNA, 19 nt, Artificial Sequence
  Description of Artificial Sequence: Synthetic oligonucleotide
  Antisense strand to SEQ ID NO: 149516
gcuuuggagacaaacaacc

SEQ ID NO: 149518 - RNA, 19 nt, Artificial Sequence
  Description of Artificial Sequence: Synthetic oligonucleotide
  Sense strand starting at position 1913 of SEQ ID NO: 1920
guuguuugucuccaaagcu

SEQ ID NO: 149519 - RNA, 19 nt, Artificial Sequence
  Description of Artificial Sequence: Synthetic oligonucleotide
  Antisense strand to SEQ ID NO: 149518
agcuuuggagacaaacaac

SEQ ID NO: 149520 - RNA, 19 nt, Artificial Sequence
  Description of Artificial Sequence: Synthetic oligonucleotide
  Sense strand starting at position 1920 of SEQ ID NO: 1920
gucuccaaagcuuguuuau

SEQ ID NO: 149521 - RNA, 19 nt, Artificial Sequence
  Description of Artificial Sequence: Synthetic oligonucleotide
  Antisense strand to SEQ ID NO: 149520
auaaacaagcuuuggagac

SEQ ID NO: 149522 - RNA, 19 nt, Artificial Sequence
  Description of Artificial Sequence: Synthetic oligonucleotide
  Sense strand starting at position 1922 of SEQ ID NO: 1920
cuccaaagcuuguuuaugu

SEQ ID NO: 149523 - RNA, 19 nt, Artificial Sequence
  Description of Artificial Sequence: Synthetic oligonucleotide
  Antisense strand to SEQ ID NO: 149522
acauaaacaagcuuuggag

SEQ ID NO: 149524 - RNA, 19 nt, Artificial Sequence
  Description of Artificial Sequence: Synthetic oligonucleotide
  Sense strand starting at position 2308 of SEQ ID NO: 1920
gcuguugcucgaucaucca

SEQ ID NO: 149525 - RNA, 19 nt, Artificial Sequence
  Description of Artificial Sequence: Synthetic oligonucleotide
  Antisense strand to SEQ ID NO: 149524
uggaugaucgagcaacagc

SEQ ID NO: 149526 - RNA, 19 nt, Artificial Sequence
  Description of Artificial Sequence: Synthetic oligonucleotide
  Sense strand starting at position 2337 of SEQ ID NO: 1920
cugaauuccugucugagcu

SEQ ID NO: 149527 - RNA, 19 nt, Artificial Sequence
  Description of Artificial Sequence: Synthetic oligonucleotide
  Antisense strand to SEQ ID NO: 149526
agcucagacaggaauucag

SEQ ID NO: 149528 - RNA, 19 nt, Artificial Sequence
  Description of Artificial Sequence: Synthetic oligonucleotide
  Sense strand starting at position 2530 of SEQ ID NO: 1920
gucaaauuuccguggucga

SEQ ID NO: 149529 - RNA, 19 nt, Artificial Sequence
  Description of Artificial Sequence: Synthetic oligonucleotide
  Antisense strand to SEQ ID NO: 149528
ucgaccacggaaauuugac

SEQ ID NO: 149530 - RNA, 19 nt, Artificial Sequence
  Description of Artificial Sequence: Synthetic oligonucleotide
  Sense strand starting at position 2531 of SEQ ID NO: 1920
ucaaauuuccguggucgau

SEQ ID NO: 149531 - RNA, 19 nt, Artificial Sequence
  Description of Artificial Sequence: Synthetic oligonucleotide
  Antisense strand to SEQ ID NO: 149530
aucgaccacggaaauuuga

SEQ ID NO: 149532 - RNA, 19 nt, Artificial Sequence
  Description of Artificial Sequence: Synthetic oligonucleotide
  Sense strand starting at position 2692 of SEQ ID NO: 1920
ggguccuaguccucucaau

SEQ ID NO: 149533 - RNA, 19 nt, Artificial Sequence
  Description of Artificial Sequence: Synthetic oligonucleotide
  Antisense strand to SEQ ID NO: 149532
auugagaggacuaggaccc

SEQ ID NO: 149534 - RNA, 19 nt, Artificial Sequence
  Description of Artificial Sequence: Synthetic oligonucleotide
  Sense strand starting at position 2739 of SEQ ID NO: 1920
ucuaaucaggaguguguau

SEQ ID NO: 149535 - RNA, 19 nt, Artificial Sequence
  Description of Artificial Sequence: Synthetic oligonucleotide
  Antisense strand to SEQ ID NO: 149534
auacacacuccugauuaga

SEQ ID NO: 149536 - RNA, 19 nt, Artificial Sequence
  Description of Artificial Sequence: Synthetic oligonucleotide
  Sense strand starting at position 2937 of SEQ ID NO: 1920
agagaagaguccuggauug

SEQ ID NO: 149537 - RNA, 19 nt, Artificial Sequence
  Description of Artificial Sequence: Synthetic oligonucleotide
  Antisense strand to SEQ ID NO: 149536
caauccaggacucuucucu

SEQ ID NO: 149538 - RNA, 19 nt, Artificial Sequence
  Description of Artificial Sequence: Synthetic oligonucleotide
  Sense strand starting at position 2942 of SEQ ID NO: 1920
agaguccuggauugaaauc

SEQ ID NO: 149539 - RNA, 19 nt, Artificial Sequence
  Description of Artificial Sequence: Synthetic oligonucleotide
  Antisense strand to SEQ ID NO: 149538
gauuucaauccaggacucu

SEQ ID NO: 149540 - RNA, 19 nt, Artificial Sequence
  Description of Artificial Sequence: Synthetic oligonucleotide
  Sense strand starting at position 2953 of SEQ ID NO: 1920
uugaaaucccucugugggu

SEQ ID NO: 149541 - RNA, 19 nt, Artificial Sequence
  Description of Artificial Sequence: Synthetic oligonucleotide
  Antisense strand to SEQ ID NO: 149540
acccacagagggauuucaa

SEQ ID NO: 149542 - RNA, 19 nt, Artificial Sequence
  Description of Artificial Sequence: Synthetic oligonucleotide
  Sense strand starting at position 2985 of SEQ ID NO: 1920
agacuaaguuucucacuga

SEQ ID NO: 149543 - RNA, 19 nt, Artificial Sequence
  Description of Artificial Sequence: Synthetic oligonucleotide
  Antisense strand to SEQ ID NO: 149542
ucagugagaaacuuagucu

SEQ ID NO: 149544 - RNA, 19 nt, Artificial Sequence
  Description of Artificial Sequence: Synthetic oligonucleotide
  Sense strand starting at position 2986 of SEQ ID NO: 1920
gacuaaguuucucacugag

SEQ ID NO: 149545 - RNA, 19 nt, Artificial Sequence
  Description of Artificial Sequence: Synthetic oligonucleotide
  Antisense strand to SEQ ID NO: 149544
cucagugagaaacuuaguc

SEQ ID NO: 149546 - RNA, 19 nt, Artificial Sequence
  Description of Artificial Sequence: Synthetic oligonucleotide
  Sense strand starting at position 2989 of SEQ ID NO: 1920
uaaguuucucacugagggu

SEQ ID NO: 149547 - RNA, 19 nt, Artificial Sequence
  Description of Artificial Sequence: Synthetic oligonucleotide
  Antisense strand to SEQ ID NO: 149546
acccucagugagaaacuua

SEQ ID NO: 149548 - RNA, 19 nt, Artificial Sequence
  Description of Artificial Sequence: Synthetic oligonucleotide
  Sense strand starting at position 3298 of SEQ ID NO: 1920
aggguguucgucugugaag

SEQ ID NO: 149549 - RNA, 19 nt, Artificial Sequence
  Description of Artificial Sequence: Synthetic oligonucleotide
  Antisense strand to SEQ ID NO: 149548
cuucacagacgaacacccu

SEQ ID NO: 149550 - RNA, 19 nt, Artificial Sequence
  Description of Artificial Sequence: Synthetic oligonucleotide
  Sense strand starting at position 3615 of SEQ ID NO: 1920
ggaagguggugaugagaga

SEQ ID NO: 149551 - RNA, 19 nt, Artificial Sequence
  Description of Artificial Sequence: Synthetic oligonucleotide
  Antisense strand to SEQ ID NO: 149550
ucucucaucaccaccuucc

SEQ ID NO: 149552 - RNA, 19 nt, Artificial Sequence
  Description of Artificial Sequence: Synthetic oligonucleotide
  Sense strand starting at position 3940 of SEQ ID NO: 1920
gggcaaagcucccaugaua

SEQ ID NO: 149553 - RNA, 19 nt, Artificial Sequence
  Description of Artificial Sequence: Synthetic oligonucleotide
  Antisense strand to SEQ ID NO: 149552
uaucaugggagcuuugccc

SEQ ID NO: 149554 - RNA, 19 nt, Artificial Sequence
  Description of Artificial Sequence: Synthetic oligonucleotide
  Sense strand starting at position 116 of SEQ ID NO: 1918
cuuugaacucguugacgcu

SEQ ID NO: 149555 - RNA, 19 nt, Artificial Sequence
  Description of Artificial Sequence: Synthetic oligonucleotide
  Antisense strand to SEQ ID NO: 149554
agcgucaacgaguucaaag

SEQ ID NO: 149556 - RNA, 19 nt, Artificial Sequence
  Description of Artificial Sequence: Synthetic oligonucleotide
  Sense strand starting at position 275 of SEQ ID NO: 1918
ugaccuuugucagggcuga

SEQ ID NO: 149557 - RNA, 19 nt, Artificial Sequence
  Description of Artificial Sequence: Synthetic oligonucleotide
  Antisense strand to SEQ ID NO: 149556
ucagcccugacaaagguca

SEQ ID NO: 149558 - RNA, 19 nt, Artificial Sequence
  Description of Artificial Sequence: Synthetic oligonucleotide
  Sense strand starting at position 286 of SEQ ID NO: 1918
agggcugaccuguggaaga

SEQ ID NO: 149559 - RNA, 19 nt, Artificial Sequence
  Description of Artificial Sequence: Synthetic oligonucleotide
  Antisense strand to SEQ ID NO: 149558
ucuuccacaggucagcccu

SEQ ID NO: 149560 - RNA, 19 nt, Artificial Sequence
  Description of Artificial Sequence: Synthetic oligonucleotide
  Sense strand starting at position 366 of SEQ ID NO: 1918
cugccuugguguuaucaca

SEQ ID NO: 149561 - RNA, 19 nt, Artificial Sequence
  Description of Artificial Sequence: Synthetic oligonucleotide
  Antisense strand to SEQ ID NO: 149560
ugugauaacaccaaggcag

SEQ ID NO: 149562 - RNA, 19 nt, Artificial Sequence
  Description of Artificial Sequence: Synthetic oligonucleotide
  Sense strand starting at position 523 of SEQ ID NO: 1918
cucacaauccgggauccuu

SEQ ID NO: 149563 - RNA, 19 nt, Artificial Sequence
  Description of Artificial Sequence: Synthetic oligonucleotide
  Antisense strand to SEQ ID NO: 149562
aaggaucccggauugugag

SEQ ID NO: 149564 - RNA, 19 nt, Artificial Sequence
  Description of Artificial Sequence: Synthetic oligonucleotide
  Sense strand starting at position 542 of SEQ ID NO: 1918
uuuaaaugucuguggcuua

SEQ ID NO: 149565 - RNA, 19 nt, Artificial Sequence
  Description of Artificial Sequence: Synthetic oligonucleotide
  Antisense strand to SEQ ID NO: 149564
uaagccacagacauuuaaa

SEQ ID NO: 149566 - RNA, 19 nt, Artificial Sequence
  Description of Artificial Sequence: Synthetic oligonucleotide
  Sense strand starting at position 666 of SEQ ID NO: 1918
uggcgugucugucucaaga

SEQ ID NO: 149567 - RNA, 19 nt, Artificial Sequence
  Description of Artificial Sequence: Synthetic oligonucleotide
  Antisense strand to SEQ ID NO: 149566
ucuugagacagacacgcca

SEQ ID NO: 149568 - RNA, 19 nt, Artificial Sequence
  Description of Artificial Sequence: Synthetic oligonucleotide
  Sense strand starting at position 668 of SEQ ID NO: 1918
gcgugucugucucaagaau

SEQ ID NO: 149569 - RNA, 19 nt, Artificial Sequence
  Description of Artificial Sequence: Synthetic oligonucleotide
  Antisense strand to SEQ ID NO: 149568
auucuugagacagacacgc

SEQ ID NO: 149570 - RNA, 19 nt, Artificial Sequence
  Description of Artificial Sequence: Synthetic oligonucleotide
  Sense strand starting at position 714 of SEQ ID NO: 1918
gucauaagguuguuugucu

SEQ ID NO: 149571 - RNA, 19 nt, Artificial Sequence
  Description of Artificial Sequence: Synthetic oligonucleotide
  Antisense strand to SEQ ID NO: 149570
agacaaacaaccuuaugac

SEQ ID NO: 149572 - RNA, 19 nt, Artificial Sequence
  Description of Artificial Sequence: Synthetic oligonucleotide
  Sense strand starting at position 718 of SEQ ID NO: 1918
uaagguuguuugucuccaa

SEQ ID NO: 149573 - RNA, 19 nt, Artificial Sequence
  Description of Artificial Sequence: Synthetic oligonucleotide
  Antisense strand to SEQ ID NO: 149572
uuggagacaaacaaccuua

SEQ ID NO: 149574 - RNA, 19 nt, Artificial Sequence
  Description of Artificial Sequence: Synthetic oligonucleotide
  Sense strand starting at position 719 of SEQ ID NO: 1918
aagguuguuugucuccaaa

SEQ ID NO: 149575 - RNA, 19 nt, Artificial Sequence
  Description of Artificial Sequence: Synthetic oligonucleotide
  Antisense strand to SEQ ID NO: 149574
uuuggagacaaacaaccuu

SEQ ID NO: 149576 - RNA, 19 nt, Artificial Sequence
  Description of Artificial Sequence: Synthetic oligonucleotide
  Sense strand starting at position 721 of SEQ ID NO: 1918
gguuguuugucuccaaagc

SEQ ID NO: 149577 - RNA, 19 nt, Artificial Sequence
  Description of Artificial Sequence: Synthetic oligonucleotide
  Antisense strand to SEQ ID NO: 149576
gcuuuggagacaaacaacc

SEQ ID NO: 149578 - RNA, 19 nt, Artificial Sequence
  Description of Artificial Sequence: Synthetic oligonucleotide
  Sense strand starting at position 722 of SEQ ID NO: 1918
guuguuugucuccaaagcu

SEQ ID NO: 149579 - RNA, 19 nt, Artificial Sequence
  Description of Artificial Sequence: Synthetic oligonucleotide
  Antisense strand to SEQ ID NO: 149578
agcuuuggagacaaacaac

SEQ ID NO: 149580 - RNA, 19 nt, Artificial Sequence
  Description of Artificial Sequence: Synthetic oligonucleotide
  Sense strand starting at position 729 of SEQ ID NO: 1918
gucuccaaagcuuguuuau

SEQ ID NO: 149581 - RNA, 19 nt, Artificial Sequence
  Description of Artificial Sequence: Synthetic oligonucleotide
  Antisense strand to SEQ ID NO: 149580
auaaacaagcuuuggagac

SEQ ID NO: 149582 - RNA, 19 nt, Artificial Sequence
  Description of Artificial Sequence: Synthetic oligonucleotide
  Sense strand starting at position 731 of SEQ ID NO: 1918
cuccaaagcuuguuuaugu

SEQ ID NO: 149583 - RNA, 19 nt, Artificial Sequence
  Description of Artificial Sequence: Synthetic oligonucleotide
  Antisense strand to SEQ ID NO: 149582
acauaaacaagcuuuggag

SEQ ID NO: 149584 - RNA, 19 nt, Artificial Sequence
  Description of Artificial Sequence: Synthetic oligonucleotide
  Sense strand starting at position 1114 of SEQ ID NO: 1918
cgcgcuguugcucgaucau

SEQ ID NO: 149585 - RNA, 19 nt, Artificial Sequence
  Description of Artificial Sequence: Synthetic oligonucleotide
  Antisense strand to SEQ ID NO: 149584
augaucgagcaacagcgcg

SEQ ID NO: 149586 - RNA, 19 nt, Artificial Sequence
  Description of Artificial Sequence: Synthetic oligonucleotide
  Sense strand starting at position 1117 of SEQ ID NO: 1918
gcuguugcucgaucaucca

SEQ ID NO: 149587 - RNA, 19 nt, Artificial Sequence
  Description of Artificial Sequence: Synthetic oligonucleotide
  Antisense strand to SEQ ID NO: 149586
uggaugaucgagcaacagc

SEQ ID NO: 149588 - RNA, 19 nt, Artificial Sequence
  Description of Artificial Sequence: Synthetic oligonucleotide
  Sense strand starting at position 1146 of SEQ ID NO: 1918
cugaauuccugucugagcu

SEQ ID NO: 149589 - RNA, 19 nt, Artificial Sequence
  Description of Artificial Sequence: Synthetic oligonucleotide
  Antisense strand to SEQ ID NO: 149588
agcucagacaggaauucag

SEQ ID NO: 149590 - RNA, 19 nt, Artificial Sequence
  Description of Artificial Sequence: Synthetic oligonucleotide
  Sense strand starting at position 1339 of SEQ ID NO: 1918
gucaaauuuccguggucga

SEQ ID NO: 149591 - RNA, 19 nt, Artificial Sequence
  Description of Artificial Sequence: Synthetic oligonucleotide
  Antisense strand to SEQ ID NO: 149590
ucgaccacggaaauuugac

SEQ ID NO: 149592 - RNA, 19 nt, Artificial Sequence
  Description of Artificial Sequence: Synthetic oligonucleotide
  Sense strand starting at position 1340 of SEQ ID NO: 1918
ucaaauuuccguggucgau

SEQ ID NO: 149593 - RNA, 19 nt, Artificial Sequence
  Description of Artificial Sequence: Synthetic oligonucleotide
  Antisense strand to SEQ ID NO: 149592
aucgaccacggaaauuuga

SEQ ID NO: 149594 - RNA, 19 nt, Artificial Sequence
  Description of Artificial Sequence: Synthetic oligonucleotide
  Sense strand starting at position 1501 of SEQ ID NO: 1918
ggguccuaguccucucaau

SEQ ID NO: 149595 - RNA, 19 nt, Artificial Sequence
  Description of Artificial Sequence: Synthetic oligonucleotide
  Antisense strand to SEQ ID NO: 149594
auugagaggacuaggaccc

SEQ ID NO: 149596 - RNA, 19 nt, Artificial Sequence
  Description of Artificial Sequence: Synthetic oligonucleotide
  Sense strand starting at position 1544 of SEQ ID NO: 1918
caugucuaaucaggagugu

SEQ ID NO: 149597 - RNA, 19 nt, Artificial Sequence
  Description of Artificial Sequence: Synthetic oligonucleotide
  Antisense strand to SEQ ID NO: 149596
acacuccugauuagacaug

SEQ ID NO: 149598 - RNA, 19 nt, Artificial Sequence
  Description of Artificial Sequence: Synthetic oligonucleotide
  Sense strand starting at position 1548 of SEQ ID NO: 1918
ucuaaucaggaguguguau

SEQ ID NO: 149599 - RNA, 19 nt, Artificial Sequence
  Description of Artificial Sequence: Synthetic oligonucleotide
  Antisense strand to SEQ ID NO: 149598
auacacacuccugauuaga

SEQ ID NO: 149600 - RNA, 19 nt, Artificial Sequence
  Description of Artificial Sequence: Synthetic oligonucleotide
  Sense strand starting at position 1746 of SEQ ID NO: 1918
agagaagaguccuggauug

SEQ ID NO: 149601 - RNA, 19 nt, Artificial Sequence
  Description of Artificial Sequence: Synthetic oligonucleotide
  Antisense strand to SEQ ID NO: 149600
caauccaggacucuucucu

SEQ ID NO: 149602 - RNA, 19 nt, Artificial Sequence
  Description of Artificial Sequence: Synthetic oligonucleotide
  Sense strand starting at position 1751 of SEQ ID NO: 1918
agaguccuggauugaaauc

SEQ ID NO: 149603 - RNA, 19 nt, Artificial Sequence
  Description of Artificial Sequence: Synthetic oligonucleotide
  Antisense strand to SEQ ID NO: 149602
gauuucaauccaggacucu

SEQ ID NO: 149604 - RNA, 19 nt, Artificial Sequence
  Description of Artificial Sequence: Synthetic oligonucleotide
  Sense strand starting at position 1762 of SEQ ID NO: 1918
uugaaaucccucugugggu

SEQ ID NO: 149605 - RNA, 19 nt, Artificial Sequence
  Description of Artificial Sequence: Synthetic oligonucleotide
  Antisense strand to SEQ ID NO: 149604
acccacagagggauuucaa

SEQ ID NO: 149606 - RNA, 19 nt, Artificial Sequence
  Description of Artificial Sequence: Synthetic oligonucleotide
  Sense strand starting at position 1794 of SEQ ID NO: 1918
agacuaaguuucucacuga

SEQ ID NO: 149607 - RNA, 19 nt, Artificial Sequence
  Description of Artificial Sequence: Synthetic oligonucleotide
  Antisense strand to SEQ ID NO: 149606
ucagugagaaacuuagucu

SEQ ID NO: 149608 - RNA, 19 nt, Artificial Sequence
  Description of Artificial Sequence: Synthetic oligonucleotide
  Sense strand starting at position 1795 of SEQ ID NO: 1918
gacuaaguuucucacugag

SEQ ID NO: 149609 - RNA, 19 nt, Artificial Sequence
  Description of Artificial Sequence: Synthetic oligonucleotide
  Antisense strand to SEQ ID NO: 149608
cucagugagaaacuuaguc

SEQ ID NO: 149610 - RNA, 19 nt, Artificial Sequence
  Description of Artificial Sequence: Synthetic oligonucleotide
  Sense strand starting at position 1798 of SEQ ID NO: 1918
uaaguuucucacugagggu

SEQ ID NO: 149611 - RNA, 19 nt, Artificial Sequence
  Description of Artificial Sequence: Synthetic oligonucleotide
  Antisense strand to SEQ ID NO: 149610
acccucagugagaaacuua

SEQ ID NO: 149612 - RNA, 19 nt, Artificial Sequence
  Description of Artificial Sequence: Synthetic oligonucleotide
  Sense strand starting at position 2107 of SEQ ID NO: 1918
aggguguucgucugugaag

SEQ ID NO: 149613 - RNA, 19 nt, Artificial Sequence
  Description of Artificial Sequence: Synthetic oligonucleotide
  Antisense strand to SEQ ID NO: 149612
cuucacagacgaacacccu

SEQ ID NO: 149614 - RNA, 19 nt, Artificial Sequence
  Description of Artificial Sequence: Synthetic oligonucleotide
  Sense strand starting at position 2424 of SEQ ID NO: 1918
ggaagguggugaugagaga

SEQ ID NO: 149615 - RNA, 19 nt, Artificial Sequence
  Description of Artificial Sequence: Synthetic oligonucleotide
  Antisense strand to SEQ ID NO: 149614
ucucucaucaccaccuucc

SEQ ID NO: 149616 - RNA, 19 nt, Artificial Sequence
  Description of Artificial Sequence: Synthetic oligonucleotide
  Sense strand starting at position 2749 of SEQ ID NO: 1918
gggcaaagcucccaugaua

SEQ ID NO: 149617 - RNA, 19 nt, Artificial Sequence
  Description of Artificial Sequence: Synthetic oligonucleotide
  Antisense strand to SEQ ID NO: 149616
uaucaugggagcuuugccc

SEQ ID NO: 149618 - RNA, 19 nt, Artificial Sequence
  Description of Artificial Sequence: Synthetic oligonucleotide
  Sense strand starting at position 3080 of SEQ ID NO: 1918
ccaugucucugugacaacu

SEQ ID NO: 149619 - RNA, 19 nt, Artificial Sequence
  Description of Artificial Sequence: Synthetic oligonucleotide
  Antisense strand to SEQ ID NO: 149618
aguugucacagagacaugg

SEQ ID NO: 149620 - RNA, 19 nt, Artificial Sequence
  Description of Artificial Sequence: Synthetic oligonucleotide
  Sense strand starting at position 3151 of SEQ ID NO: 1918
ugggaugucauucgaucag

SEQ ID NO: 149621 - RNA, 19 nt, Artificial Sequence
  Description of Artificial Sequence: Synthetic oligonucleotide
  Antisense strand to SEQ ID NO: 149620
cugaucgaaugacauccca

SEQ ID NO: 149622 - RNA, 19 nt, Artificial Sequence
  Description of Artificial Sequence: Synthetic oligonucleotide
  Sense strand starting at position 3208 of SEQ ID NO: 1918
ggacaucugauccgagaca

SEQ ID NO: 149623 - RNA, 19 nt, Artificial Sequence
  Description of Artificial Sequence: Synthetic oligonucleotide
  Antisense strand to SEQ ID NO: 149622
ugucucggaucagaugucc

SEQ ID NO: 149624 - RNA, 19 nt, Artificial Sequence
  Description of Artificial Sequence: Synthetic oligonucleotide
  Sense strand starting at position 3443 of SEQ ID NO: 1918
ccgaaucaaccaggaguga

SEQ ID NO: 149625 - RNA, 19 nt, Artificial Sequence
  Description of Artificial Sequence: Synthetic oligonucleotide
  Antisense strand to SEQ ID NO: 149624
ucacuccugguugauucgg

SEQ ID NO: 149626 - RNA, 19 nt, Artificial Sequence
  Description of Artificial Sequence: Synthetic oligonucleotide
  Sense strand starting at position 3596 of SEQ ID NO: 1918
gggagcauaucccaaagaa

SEQ ID NO: 149627 - RNA, 19 nt, Artificial Sequence
  Description of Artificial Sequence: Synthetic oligonucleotide
  Antisense strand to SEQ ID NO: 149626
uucuuugggauaugcuccc

SEQ ID NO: 149628 - RNA, 19 nt, Artificial Sequence
  Description of Artificial Sequence: Synthetic oligonucleotide
  Sense strand starting at position 3621 of SEQ ID NO: 1918
augacauguucaggagaga

SEQ ID NO: 149629 - RNA, 19 nt, Artificial Sequence
  Description of Artificial Sequence: Synthetic oligonucleotide
  Antisense strand to SEQ ID NO: 149628
ucucuccugaacaugucau

SEQ ID NO: 149630 - RNA, 19 nt, Artificial Sequence
  Description of Artificial Sequence: Synthetic oligonucleotide
  Sense strand starting at position 3848 of SEQ ID NO: 1918
agagcuuggcuaugcuaga

SEQ ID NO: 149631 - RNA, 19 nt, Artificial Sequence
  Description of Artificial Sequence: Synthetic oligonucleotide
  Antisense strand to SEQ ID NO: 149630
ucuagcauagccaagcucu

SEQ ID NO: 149632 - RNA, 19 nt, Artificial Sequence
  Description of Artificial Sequence: Synthetic oligonucleotide
  Sense strand starting at position 168 of SEQ ID NO: 1922
ggaaguagguucuuaaaga

SEQ ID NO: 149633 - RNA, 19 nt, Artificial Sequence
  Description of Artificial Sequence: Synthetic oligonucleotide
  Antisense strand to SEQ ID NO: 149632
ucuuuaagaaccuacuucc

SEQ ID NO: 149634 - RNA, 19 nt, Artificial Sequence
  Description of Artificial Sequence: Synthetic oligonucleotide
  Sense strand starting at position 169 of SEQ ID NO: 1922
gaaguagguucuuaaagac

SEQ ID NO: 149635 - RNA, 19 nt, Artificial Sequence
  Description of Artificial Sequence: Synthetic oligonucleotide
  Antisense strand to SEQ ID NO: 149634
gucuuuaagaaccuacuuc

SEQ ID NO: 149636 - RNA, 19 nt, Artificial Sequence
  Description of Artificial Sequence: Synthetic oligonucleotide
  Sense strand starting at position 845 of SEQ ID NO: 1922
ggagcacuugcuugggaag

SEQ ID NO: 149637 - RNA, 19 nt, Artificial Sequence
  Description of Artificial Sequence: Synthetic oligonucleotide
  Antisense strand to SEQ ID NO: 149636
cuucccaagcaagugcucc

SEQ ID NO: 149638 - RNA, 19 nt, Artificial Sequence
  Description of Artificial Sequence: Synthetic oligonucleotide
  Sense strand starting at position 846 of SEQ ID NO: 1922
gagcacuugcuugggaagu

SEQ ID NO: 149639 - RNA, 19 nt, Artificial Sequence
  Description of Artificial Sequence: Synthetic oligonucleotide
  Antisense strand to SEQ ID NO: 149638
acuucccaagcaagugcuc

SEQ ID NO: 149640 - RNA, 19 nt, Artificial Sequence
  Description of Artificial Sequence: Synthetic oligonucleotide
  Sense strand starting at position 884 of SEQ ID NO: 1922
gggugugcuccguccauac

SEQ ID NO: 149641 - RNA, 19 nt, Artificial Sequence
  Description of Artificial Sequence: Synthetic oligonucleotide
  Antisense strand to SEQ ID NO: 149640
guauggacggagcacaccc

SEQ ID NO: 149642 - RNA, 19 nt, Artificial Sequence
  Description of Artificial Sequence: Synthetic oligonucleotide
  Sense strand starting at position 894 of SEQ ID NO: 1922
cguccauaccggcaugaga

SEQ ID NO: 149643 - RNA, 19 nt, Artificial Sequence
  Description of Artificial Sequence: Synthetic oligonucleotide
  Antisense strand to SEQ ID NO: 149642
ucucaugccgguauggacg

SEQ ID NO: 149644 - RNA, 19 nt, Artificial Sequence
  Description of Artificial Sequence: Synthetic oligonucleotide
  Sense strand starting at position 980 of SEQ ID NO: 1922
cggaguacuggugaaaguu

SEQ ID NO: 149645 - RNA, 19 nt, Artificial Sequence
  Description of Artificial Sequence: Synthetic oligonucleotide
  Antisense strand to SEQ ID NO: 149644
aacuuucaccaguacuccg

SEQ ID NO: 149646 - RNA, 19 nt, Artificial Sequence
  Description of Artificial Sequence: Synthetic oligonucleotide
  Sense strand starting at position 988 of SEQ ID NO: 1922
uggugaaaguucuugauga

SEQ ID NO: 149647 - RNA, 19 nt, Artificial Sequence
  Description of Artificial Sequence: Synthetic oligonucleotide
  Antisense strand to SEQ ID NO: 149646
ucaucaagaacuuucacca

SEQ ID NO: 149648 - RNA, 19 nt, Artificial Sequence
  Description of Artificial Sequence: Synthetic oligonucleotide
  Sense strand starting at position 1341 of SEQ ID NO: 1922
cugugugggccucagaaga

SEQ ID NO: 149649 - RNA, 19 nt, Artificial Sequence
  Description of Artificial Sequence: Synthetic oligonucleotide
  Antisense strand to SEQ ID NO: 149648
ucuucugaggcccacacag

SEQ ID NO: 149650 - RNA, 19 nt, Artificial Sequence
  Description of Artificial Sequence: Synthetic oligonucleotide
  Sense strand starting at position 1542 of SEQ ID NO: 1922
ugguccuuuggugagaguu

SEQ ID NO: 149651 - RNA, 19 nt, Artificial Sequence
  Description of Artificial Sequence: Synthetic oligonucleotide
  Antisense strand to SEQ ID NO: 149650
aacucucaccaaaggacca

SEQ ID NO: 149652 - RNA, 19 nt, Artificial Sequence
  Description of Artificial Sequence: Synthetic oligonucleotide
  Sense strand starting at position 1555 of SEQ ID NO: 1922
agaguucuguuguccuaua

SEQ ID NO: 149653 - RNA, 19 nt, Artificial Sequence
  Description of Artificial Sequence: Synthetic oligonucleotide
  Antisense strand to SEQ ID NO: 149652
uauaggacaacagaacucu

SEQ ID NO: 149654 - RNA, 19 nt, Artificial Sequence
  Description of Artificial Sequence: Synthetic oligonucleotide
  Sense strand starting at position 1556 of SEQ ID NO: 1922
gaguucuguuguccuauag

SEQ ID NO: 149655 - RNA, 19 nt, Artificial Sequence
  Description of Artificial Sequence: Synthetic oligonucleotide
  Antisense strand to SEQ ID NO: 149654
cuauaggacaacagaacuc

SEQ ID NO: 149656 - RNA, 19 nt, Artificial Sequence
  Description of Artificial Sequence: Synthetic oligonucleotide
  Sense strand starting at position 1595 of SEQ ID NO: 1922
ggcucaugaucugcuuaga

SEQ ID NO: 149657 - RNA, 19 nt, Artificial Sequence
  Description of Artificial Sequence: Synthetic oligonucleotide
  Antisense strand to SEQ ID NO: 149656
ucuaagcagaucaugagcc

SEQ ID NO: 149658 - RNA, 19 nt, Artificial Sequence
  Description of Artificial Sequence: Synthetic oligonucleotide
  Sense strand starting at position 1637 of SEQ ID NO: 1922
gagagagucuagcauuucu

SEQ ID NO: 149659 - RNA, 19 nt, Artificial Sequence
  Description of Artificial Sequence: Synthetic oligonucleotide
  Antisense strand to SEQ ID NO: 149658
agaaaugcuagacucucuc

SEQ ID NO: 149660 - RNA, 19 nt, Artificial Sequence
  Description of Artificial Sequence: Synthetic oligonucleotide
  Sense strand starting at position 1925 of SEQ ID NO: 1922
ggcaguauauuugggugaa

SEQ ID NO: 149661 - RNA, 19 nt, Artificial Sequence
  Description of Artificial Sequence: Synthetic oligonucleotide
  Antisense strand to SEQ ID NO: 149660
uucacccaaauauacugcc

SEQ ID NO: 149662 - RNA, 19 nt, Artificial Sequence
  Description of Artificial Sequence: Synthetic oligonucleotide
  Sense strand starting at position 1926 of SEQ ID NO: 1922
gcaguauauuugggugaaa

SEQ ID NO: 149663 - RNA, 19 nt, Artificial Sequence
  Description of Artificial Sequence: Synthetic oligonucleotide
  Antisense strand to SEQ ID NO: 149662
uuucacccaaauauacugc

SEQ ID NO: 149664 - RNA, 19 nt, Artificial Sequence
  Description of Artificial Sequence: Synthetic oligonucleotide
  Sense strand starting at position 2124 of SEQ ID NO: 1922
gccagaguuccagagccua

SEQ ID NO: 149665 - RNA, 19 nt, Artificial Sequence
  Description of Artificial Sequence: Synthetic oligonucleotide
  Antisense strand to SEQ ID NO: 149664
uaggcucuggaacucuggc

SEQ ID NO: 149666 - RNA, 19 nt, Artificial Sequence
  Description of Artificial Sequence: Synthetic oligonucleotide
  Sense strand starting at position 2333 of SEQ ID NO: 1922
gggucugaaucugugacca

SEQ ID NO: 149667 - RNA, 19 nt, Artificial Sequence
  Description of Artificial Sequence: Synthetic oligonucleotide
  Antisense strand to SEQ ID NO: 149666
uggucacagauucagaccc

SEQ ID NO: 149668 - RNA, 19 nt, Artificial Sequence
  Description of Artificial Sequence: Synthetic oligonucleotide
  Sense strand starting at position 2337 of SEQ ID NO: 1922
cugaaucugugaccaggaa

SEQ ID NO: 149669 - RNA, 19 nt, Artificial Sequence
  Description of Artificial Sequence: Synthetic oligonucleotide
  Antisense strand to SEQ ID NO: 149668
uuccuggucacagauucag

SEQ ID NO: 149670 - RNA, 19 nt, Artificial Sequence
  Description of Artificial Sequence: Synthetic oligonucleotide
  Sense strand starting at position 2471 of SEQ ID NO: 1922
cuuggauacugacacucaa

SEQ ID NO: 149671 - RNA, 19 nt, Artificial Sequence
  Description of Artificial Sequence: Synthetic oligonucleotide
  Antisense strand to SEQ ID NO: 149670
uugagugucaguauccaag

SEQ ID NO: 149672 - RNA, 19 nt, Artificial Sequence
  Description of Artificial Sequence: Synthetic oligonucleotide
  Sense strand starting at position 2551 of SEQ ID NO: 1922
gaacuuggaucaggaggaa

SEQ ID NO: 149673 - RNA, 19 nt, Artificial Sequence
  Description of Artificial Sequence: Synthetic oligonucleotide
  Antisense strand to SEQ ID NO: 149672
uuccuccugauccaaguuc

SEQ ID NO: 149674 - RNA, 19 nt, Artificial Sequence
  Description of Artificial Sequence: Synthetic oligonucleotide
  Sense strand starting at position 2608 of SEQ ID NO: 1922
gugaguguuugccugaccu

SEQ ID NO: 149675 - RNA, 19 nt, Artificial Sequence
  Description of Artificial Sequence: Synthetic oligonucleotide
  Antisense strand to SEQ ID NO: 149674
aggucaggcaaacacucac

SEQ ID NO: 149676 - RNA, 19 nt, Artificial Sequence
  Description of Artificial Sequence: Synthetic oligonucleotide
  Sense strand starting at position 2943 of SEQ ID NO: 1922
gagccaaaguucccaggau

SEQ ID NO: 149677 - RNA, 19 nt, Artificial Sequence
  Description of Artificial Sequence: Synthetic oligonucleotide
  Antisense strand to SEQ ID NO: 149676
auccugggaacuuuggcuc

SEQ ID NO: 149678 - RNA, 19 nt, Artificial Sequence
  Description of Artificial Sequence: Synthetic oligonucleotide
  Sense strand starting at position 2964 of SEQ ID NO: 1922
uuuccuaaacgcugagauc

SEQ ID NO: 149679 - RNA, 19 nt, Artificial Sequence
  Description of Artificial Sequence: Synthetic oligonucleotide
  Antisense strand to SEQ ID NO: 149678
gaucucagcguuuaggaaa

SEQ ID NO: 149680 - RNA, 19 nt, Artificial Sequence
  Description of Artificial Sequence: Synthetic oligonucleotide
  Sense strand starting at position 2965 of SEQ ID NO: 1922
uuccuaaacgcugagauca

SEQ ID NO: 149681 - RNA, 19 nt, Artificial Sequence
  Description of Artificial Sequence: Synthetic oligonucleotide
  Antisense strand to SEQ ID NO: 149680
ugaucucagcguuuaggaa

SEQ ID NO: 149682 - RNA, 19 nt, Artificial Sequence
  Description of Artificial Sequence: Synthetic oligonucleotide
  Sense strand starting at position 3074 of SEQ ID NO: 1922
uucugagaguuccucugaa

SEQ ID NO: 149683 - RNA, 19 nt, Artificial Sequence
  Description of Artificial Sequence: Synthetic oligonucleotide
  Antisense strand to SEQ ID NO: 149682
uucagaggaacucucagaa

SEQ ID NO: 149684 - RNA, 19 nt, Artificial Sequence
  Description of Artificial Sequence: Synthetic oligonucleotide
  Sense strand starting at position 3138 of SEQ ID NO: 1922
uuccucugagagugacuua

SEQ ID NO: 149685 - RNA, 19 nt, Artificial Sequence
  Description of Artificial Sequence: Synthetic oligonucleotide
  Antisense strand to SEQ ID NO: 149684
uaagucacucucagaggaa

SEQ ID NO: 149686 - RNA, 19 nt, Artificial Sequence
  Description of Artificial Sequence: Synthetic oligonucleotide
  Sense strand starting at position 3203 of SEQ ID NO: 1922
ggcuucucacgguaaggga

SEQ ID NO: 149687 - RNA, 19 nt, Artificial Sequence
  Description of Artificial Sequence: Synthetic oligonucleotide
  Antisense strand to SEQ ID NO: 149686
ucccuuaccgugagaagcc

SEQ ID NO: 149688 - RNA, 19 nt, Artificial Sequence
  Description of Artificial Sequence: Synthetic oligonucleotide
  Sense strand starting at position 3243 of SEQ ID NO: 1922
ucuugaaugucucugccaa

SEQ ID NO: 149689 - RNA, 19 nt, Artificial Sequence
  Description of Artificial Sequence: Synthetic oligonucleotide
  Antisense strand to SEQ ID NO: 149688
uuggcagagacauucaaga

SEQ ID NO: 149690 - RNA, 19 nt, Artificial Sequence
  Description of Artificial Sequence: Synthetic oligonucleotide
  Sense strand starting at position 3599 of SEQ ID NO: 1922
gggaggaggcccuaguguu

SEQ ID NO: 149691 - RNA, 19 nt, Artificial Sequence
  Description of Artificial Sequence: Synthetic oligonucleotide
  Antisense strand to SEQ ID NO: 149690
aacacuagggccuccuccc

SEQ ID NO: 149692 - RNA, 19 nt, Artificial Sequence
  Description of Artificial Sequence: Synthetic oligonucleotide
  Sense strand starting at position 3607 of SEQ ID NO: 1922
gcccuaguguuccugagca

SEQ ID NO: 149693 - RNA, 19 nt, Artificial Sequence
  Description of Artificial Sequence: Synthetic oligonucleotide
  Antisense strand to SEQ ID NO: 149692
ugcucaggaacacuagggc

SEQ ID NO: 149694 - RNA, 19 nt, Artificial Sequence
  Description of Artificial Sequence: Synthetic oligonucleotide
  Sense strand starting at position 3611 of SEQ ID NO: 1922
uaguguuccugagcaccca

SEQ ID NO: 149695 - RNA, 19 nt, Artificial Sequence
  Description of Artificial Sequence: Synthetic oligonucleotide
  Antisense strand to SEQ ID NO: 149694
ugggugcucaggaacacua

SEQ ID NO: 149696 - RNA, 19 nt, Artificial Sequence
  Description of Artificial Sequence: Synthetic oligonucleotide
  Sense strand starting at position 3635 of SEQ ID NO: 1922
agaggauccugguuaauca

SEQ ID NO: 149697 - RNA, 19 nt, Artificial Sequence
  Description of Artificial Sequence: Synthetic oligonucleotide
  Antisense strand to SEQ ID NO: 149696
ugauuaaccaggauccucu

SEQ ID NO: 149698 - RNA, 19 nt, Artificial Sequence
  Description of Artificial Sequence: Synthetic oligonucleotide
  Sense strand starting at position 3670 of SEQ ID NO: 1922
cuauucuugucuuuaugac

SEQ ID NO: 149699 - RNA, 19 nt, Artificial Sequence
  Description of Artificial Sequence: Synthetic oligonucleotide
  Antisense strand to SEQ ID NO: 149698
gucauaaagacaagaauag

SEQ ID NO: 149700 - RNA, 19 nt, Artificial Sequence
  Description of Artificial Sequence: Synthetic oligonucleotide
  Sense strand starting at position 3695 of SEQ ID NO: 1922
uaagaucuguguccugauc

SEQ ID NO: 149701 - RNA, 19 nt, Artificial Sequence
  Description of Artificial Sequence: Synthetic oligonucleotide
  Antisense strand to SEQ ID NO: 149700
gaucaggacacagaucuua

SEQ ID NO: 149702 - RNA, 19 nt, Artificial Sequence
  Description of Artificial Sequence: Synthetic oligonucleotide
  Sense strand starting at position 3703 of SEQ ID NO: 1922
guguccugaucuuuaauac

SEQ ID NO: 149703 - RNA, 19 nt, Artificial Sequence
  Description of Artificial Sequence: Synthetic oligonucleotide
  Antisense strand to SEQ ID NO: 149702
guauuaaagaucaggacac

SEQ ID NO: 149704 - RNA, 19 nt, Artificial Sequence
  Description of Artificial Sequence: Synthetic oligonucleotide
  Sense strand starting at position 3707 of SEQ ID NO: 1922
ccugaucuuuaauacagga

SEQ ID NO: 149705 - RNA, 19 nt, Artificial Sequence
  Description of Artificial Sequence: Synthetic oligonucleotide
  Antisense strand to SEQ ID NO: 149704
uccuguauuaaagaucagg

SEQ ID NO: 149706 - RNA, 19 nt, Artificial Sequence
  Description of Artificial Sequence: Synthetic oligonucleotide
  Sense strand starting at position 3742 of SEQ ID NO: 1922
uccucaaaggacugugaga

SEQ ID NO: 149707 - RNA, 19 nt, Artificial Sequence
  Description of Artificial Sequence: Synthetic oligonucleotide
  Antisense strand to SEQ ID NO: 149706
ucucacaguccuuugagga

SEQ ID NO: 149708 - RNA, 19 nt, Artificial Sequence
  Description of Artificial Sequence: Synthetic oligonucleotide
  Sense strand starting at position 3747 of SEQ ID NO: 1922
aaaggacugugagaauuaa

SEQ ID NO: 149709 - RNA, 19 nt, Artificial Sequence
  Description of Artificial Sequence: Synthetic oligonucleotide
  Antisense strand to SEQ ID NO: 149708
uuaauucucacaguccuuu

SEQ ID NO: 149710 - RNA, 19 nt, Artificial Sequence
  Description of Artificial Sequence: Synthetic oligonucleotide
  Sense strand starting at position 3841 of SEQ ID NO: 1922
auugucauccaacggacaa

SEQ ID NO: 149711 - RNA, 19 nt, Artificial Sequence
  Description of Artificial Sequence: Synthetic oligonucleotide
  Antisense strand to SEQ ID NO: 149710
uuguccguuggaugacaau

SEQ ID NO: 149712 - RNA, 19 nt, Artificial Sequence
  Description of Artificial Sequence: Synthetic oligonucleotide
  Sense strand starting at position 366 of SEQ ID NO: 1923
ugggaugugucccuagacu

SEQ ID NO: 149713 - RNA, 19 nt, Artificial Sequence
  Description of Artificial Sequence: Synthetic oligonucleotide
  Antisense strand to SEQ ID NO: 149712
agucuagggacacauccca

SEQ ID NO: 149714 - RNA, 19 nt, Artificial Sequence
  Description of Artificial Sequence: Synthetic oligonucleotide
  Sense strand starting at position 397 of SEQ ID NO: 1923
ggucacuguucucuccaga

SEQ ID NO: 149715 - RNA, 19 nt, Artificial Sequence
  Description of Artificial Sequence: Synthetic oligonucleotide
  Antisense strand to SEQ ID NO: 149714
ucuggagagaacagugacc

SEQ ID NO: 149716 - RNA, 19 nt, Artificial Sequence
  Description of Artificial Sequence: Synthetic oligonucleotide
  Sense strand starting at position 402 of SEQ ID NO: 1923
cuguucucuccagagccua

SEQ ID NO: 149717 - RNA, 19 nt, Artificial Sequence
  Description of Artificial Sequence: Synthetic oligonucleotide
  Antisense strand to SEQ ID NO: 149716
uaggcucuggagagaacag

SEQ ID NO: 149718 - RNA, 19 nt, Artificial Sequence
  Description of Artificial Sequence: Synthetic oligonucleotide
  Sense strand starting at position 498 of SEQ ID NO: 1923
ugaguuugcuuacucauuc

SEQ ID NO: 149719 - RNA, 19 nt, Artificial Sequence
  Description of Artificial Sequence: Synthetic oligonucleotide
  Antisense strand to SEQ ID NO: 149718
gaaugaguaagcaaacuca

SEQ ID NO: 149720 - RNA, 19 nt, Artificial Sequence
  Description of Artificial Sequence: Synthetic oligonucleotide
  Sense strand starting at position 658 of SEQ ID NO: 1923
uccgaacugggcugacaau

SEQ ID NO: 149721 - RNA, 19 nt, Artificial Sequence
  Description of Artificial Sequence: Synthetic oligonucleotide
  Antisense strand to SEQ ID NO: 149720
auugucagcccaguucgga

SEQ ID NO: 149722 - RNA, 19 nt, Artificial Sequence
  Description of Artificial Sequence: Synthetic oligonucleotide
  Sense strand starting at position 844 of SEQ ID NO: 1923
acaggauucugcgucuaac

SEQ ID NO: 149723 - RNA, 19 nt, Artificial Sequence
  Description of Artificial Sequence: Synthetic oligonucleotide
  Antisense strand to SEQ ID NO: 149722
guuagacgcagaauccugu

SEQ ID NO: 149724 - RNA, 19 nt, Artificial Sequence
  Description of Artificial Sequence: Synthetic oligonucleotide
  Sense strand starting at position 847 of SEQ ID NO: 1923
ggauucugcgucuaacucu

SEQ ID NO: 149725 - RNA, 19 nt, Artificial Sequence
  Description of Artificial Sequence: Synthetic oligonucleotide
  Antisense strand to SEQ ID NO: 149724
agaguuagacgcagaaucc

SEQ ID NO: 149726 - RNA, 19 nt, Artificial Sequence
  Description of Artificial Sequence: Synthetic oligonucleotide
  Sense strand starting at position 1034 of SEQ ID NO: 1923
ggaggaguucaguguggau

SEQ ID NO: 149727 - RNA, 19 nt, Artificial Sequence
  Description of Artificial Sequence: Synthetic oligonucleotide
  Antisense strand to SEQ ID NO: 149726
auccacacugaacuccucc

SEQ ID NO: 149728 - RNA, 19 nt, Artificial Sequence
  Description of Artificial Sequence: Synthetic oligonucleotide
  Sense strand starting at position 1036 of SEQ ID NO: 1923
aggaguucaguguggaucu

SEQ ID NO: 149729 - RNA, 19 nt, Artificial Sequence
  Description of Artificial Sequence: Synthetic oligonucleotide
  Antisense strand to SEQ ID NO: 149728
agauccacacugaacuccu

SEQ ID NO: 149730 - RNA, 19 nt, Artificial Sequence
  Description of Artificial Sequence: Synthetic oligonucleotide
  Sense strand starting at position 1037 of SEQ ID NO: 1923
ggaguucaguguggaucuu

SEQ ID NO: 149731 - RNA, 19 nt, Artificial Sequence
  Description of Artificial Sequence: Synthetic oligonucleotide
  Antisense strand to SEQ ID NO: 149730
aagauccacacugaacucc

SEQ ID NO: 149732 - RNA, 19 nt, Artificial Sequence
  Description of Artificial Sequence: Synthetic oligonucleotide
  Sense strand starting at position 1396 of SEQ ID NO: 1923
cugcuugggucgugaggua

SEQ ID NO: 149733 - RNA, 19 nt, Artificial Sequence
  Description of Artificial Sequence: Synthetic oligonucleotide
  Antisense strand to SEQ ID NO: 149732
uaccucacgacccaagcag

SEQ ID NO: 149734 - RNA, 19 nt, Artificial Sequence
  Description of Artificial Sequence: Synthetic oligonucleotide
  Sense strand starting at position 1575 of SEQ ID NO: 1923
acgcauuuguccucuccuu

SEQ ID NO: 149735 - RNA, 19 nt, Artificial Sequence
  Description of Artificial Sequence: Synthetic oligonucleotide
  Antisense strand to SEQ ID NO: 149734
aaggagaggacaaaugcgu

SEQ ID NO: 149736 - RNA, 19 nt, Artificial Sequence
  Description of Artificial Sequence: Synthetic oligonucleotide
  Sense strand starting at position 1604 of SEQ ID NO: 1923
ucgaguagcuguggucaaa

SEQ ID NO: 149737 - RNA, 19 nt, Artificial Sequence
  Description of Artificial Sequence: Synthetic oligonucleotide
  Antisense strand to SEQ ID NO: 149736
uuugaccacagcuacucga

SEQ ID NO: 149738 - RNA, 19 nt, Artificial Sequence
  Description of Artificial Sequence: Synthetic oligonucleotide
  Sense strand starting at position 1616 of SEQ ID NO: 1923
ggucaaagcuuccaaauac

SEQ ID NO: 149739 - RNA, 19 nt, Artificial Sequence
  Description of Artificial Sequence: Synthetic oligonucleotide
  Antisense strand to SEQ ID NO: 149738
guauuuggaagcuuugacc

SEQ ID NO: 149740 - RNA, 19 nt, Artificial Sequence
  Description of Artificial Sequence: Synthetic oligonucleotide
  Sense strand starting at position 1754 of SEQ ID NO: 1923
uggccugugggagaaaguu

SEQ ID NO: 149741 - RNA, 19 nt, Artificial Sequence
  Description of Artificial Sequence: Synthetic oligonucleotide
  Antisense strand to SEQ ID NO: 149740
aacuuucucccacaggcca

SEQ ID NO: 149742 - RNA, 19 nt, Artificial Sequence
  Description of Artificial Sequence: Synthetic oligonucleotide
  Sense strand starting at position 1763 of SEQ ID NO: 1923
ggagaaaguuaauaauuac

SEQ ID NO: 149743 - RNA, 19 nt, Artificial Sequence
  Description of Artificial Sequence: Synthetic oligonucleotide
  Antisense strand to SEQ ID NO: 149742
guaauuauuaacuuucucc

SEQ ID NO: 149744 - RNA, 19 nt, Artificial Sequence
  Description of Artificial Sequence: Synthetic oligonucleotide
  Sense strand starting at position 2394 of SEQ ID NO: 1923
ggaguaacgcccgacuucu

SEQ ID NO: 149745 - RNA, 19 nt, Artificial Sequence
  Description of Artificial Sequence: Synthetic oligonucleotide
  Antisense strand to SEQ ID NO: 149744
agaagucgggcguuacucc

SEQ ID NO: 149746 - RNA, 19 nt, Artificial Sequence
  Description of Artificial Sequence: Synthetic oligonucleotide
  Sense strand starting at position 2402 of SEQ ID NO: 1923
gcccgacuucugugcucaa

SEQ ID NO: 149747 - RNA, 19 nt, Artificial Sequence
  Description of Artificial Sequence: Synthetic oligonucleotide
  Antisense strand to SEQ ID NO: 149746
uugagcacagaagucgggc

SEQ ID NO: 149748 - RNA, 19 nt, Artificial Sequence
  Description of Artificial Sequence: Synthetic oligonucleotide
  Sense strand starting at position 2403 of SEQ ID NO: 1923
cccgacuucugugcucaaa

SEQ ID NO: 149749 - RNA, 19 nt, Artificial Sequence
  Description of Artificial Sequence: Synthetic oligonucleotide
  Antisense strand to SEQ ID NO: 149748
uuugagcacagaagucggg

SEQ ID NO: 149750 - RNA, 19 nt, Artificial Sequence
  Description of Artificial Sequence: Synthetic oligonucleotide
  Sense strand starting at position 2405 of SEQ ID NO: 1923
cgacuucugugcucaaauc

SEQ ID NO: 149751 - RNA, 19 nt, Artificial Sequence
  Description of Artificial Sequence: Synthetic oligonucleotide
  Antisense strand to SEQ ID NO: 149750
gauuugagcacagaagucg

SEQ ID NO: 149752 - RNA, 19 nt, Artificial Sequence
  Description of Artificial Sequence: Synthetic oligonucleotide
  Sense strand starting at position 2502 of SEQ ID NO: 1923
gcccuaagaucccucaugu

SEQ ID NO: 149753 - RNA, 19 nt, Artificial Sequence
  Description of Artificial Sequence: Synthetic oligonucleotide
  Antisense strand to SEQ ID NO: 149752
acaugagggaucuuagggc

SEQ ID NO: 149754 - RNA, 19 nt, Artificial Sequence
  Description of Artificial Sequence: Synthetic oligonucleotide
  Sense strand starting at position 2554 of SEQ ID NO: 1923
cccaccguuucccuaagau

SEQ ID NO: 149755 - RNA, 19 nt, Artificial Sequence
  Description of Artificial Sequence: Synthetic oligonucleotide
  Antisense strand to SEQ ID NO: 149754
aucuuagggaaacgguggg

SEQ ID NO: 149756 - RNA, 19 nt, Artificial Sequence
  Description of Artificial Sequence: Synthetic oligonucleotide
  Sense strand starting at position 2654 of SEQ ID NO: 1923
cgggaaugauauuggguca

SEQ ID NO: 149757 - RNA, 19 nt, Artificial Sequence
  Description of Artificial Sequence: Synthetic oligonucleotide
  Antisense strand to SEQ ID NO: 149756
ugacccaauaucauucccg

SEQ ID NO: 149758 - RNA, 19 nt, Artificial Sequence
  Description of Artificial Sequence: Synthetic oligonucleotide
  Sense strand starting at position 2657 of SEQ ID NO: 1923
gaaugauauugggucacug

SEQ ID NO: 149759 - RNA, 19 nt, Artificial Sequence
  Description of Artificial Sequence: Synthetic oligonucleotide
  Antisense strand to SEQ ID NO: 149758
cagugacccaauaucauuc

SEQ ID NO: 149760 - RNA, 19 nt, Artificial Sequence
  Description of Artificial Sequence: Synthetic oligonucleotide
  Sense strand starting at position 2675 of SEQ ID NO: 1923
gggcacucaccauguguca

SEQ ID NO: 149761 - RNA, 19 nt, Artificial Sequence
  Description of Artificial Sequence: Synthetic oligonucleotide
  Antisense strand to SEQ ID NO: 149760
ugacacauggugagugccc

SEQ ID NO: 149762 - RNA, 19 nt, Artificial Sequence
  Description of Artificial Sequence: Synthetic oligonucleotide
  Sense strand starting at position 2700 of SEQ ID NO: 1923
cuguaagugcuuuacauga

SEQ ID NO: 149763 - RNA, 19 nt, Artificial Sequence
  Description of Artificial Sequence: Synthetic oligonucleotide
  Antisense strand to SEQ ID NO: 149762
ucauguaaagcacuuacag

SEQ ID NO: 149764 - RNA, 19 nt, Artificial Sequence
  Description of Artificial Sequence: Synthetic oligonucleotide
  Sense strand starting at position 2702 of SEQ ID NO: 1923
guaagugcuuuacaugaug

SEQ ID NO: 149765 - RNA, 19 nt, Artificial Sequence
  Description of Artificial Sequence: Synthetic oligonucleotide
  Antisense strand to SEQ ID NO: 149764
caucauguaaagcacuuac

SEQ ID NO: 149766 - RNA, 19 nt, Artificial Sequence
  Description of Artificial Sequence: Synthetic oligonucleotide
  Sense strand starting at position 2711 of SEQ ID NO: 1923
uuacaugauguguggcauu

SEQ ID NO: 149767 - RNA, 19 nt, Artificial Sequence
  Description of Artificial Sequence: Synthetic oligonucleotide
  Antisense strand to SEQ ID NO: 149766
aaugccacacaucauguaa

SEQ ID NO: 149768 - RNA, 19 nt, Artificial Sequence
  Description of Artificial Sequence: Synthetic oligonucleotide
  Sense strand starting at position 2736 of SEQ ID NO: 1923
cuggcaauccuguggaagu

SEQ ID NO: 149769 - RNA, 19 nt, Artificial Sequence
  Description of Artificial Sequence: Synthetic oligonucleotide
  Antisense strand to SEQ ID NO: 149768
acuuccacaggauugccag

SEQ ID NO: 149770 - RNA, 19 nt, Artificial Sequence
  Description of Artificial Sequence: Synthetic oligonucleotide
  Sense strand starting at position 2737 of SEQ ID NO: 1923
uggcaauccuguggaagua

SEQ ID NO: 149771 - RNA, 19 nt, Artificial Sequence
  Description of Artificial Sequence: Synthetic oligonucleotide
  Antisense strand to SEQ ID NO: 149770
uacuuccacaggauugcca

SEQ ID NO: 149772 - RNA, 19 nt, Artificial Sequence
  Description of Artificial Sequence: Synthetic oligonucleotide
  Sense strand starting at position 2738 of SEQ ID NO: 1923
ggcaauccuguggaaguaa

SEQ ID NO: 149773 - RNA, 19 nt, Artificial Sequence
  Description of Artificial Sequence: Synthetic oligonucleotide
  Antisense strand to SEQ ID NO: 149772
uuacuuccacaggauugcc

SEQ ID NO: 149774 - RNA, 19 nt, Artificial Sequence
  Description of Artificial Sequence: Synthetic oligonucleotide
  Sense strand starting at position 2814 of SEQ ID NO: 1923
uccaaugauaaguggcaga

SEQ ID NO: 149775 - RNA, 19 nt, Artificial Sequence
  Description of Artificial Sequence: Synthetic oligonucleotide
  Antisense strand to SEQ ID NO: 149774
ucugccacuuaucauugga

SEQ ID NO: 149776 - RNA, 19 nt, Artificial Sequence
  Description of Artificial Sequence: Synthetic oligonucleotide
  Sense strand starting at position 2851 of SEQ ID NO: 1923
gccagucagccuguuucua

SEQ ID NO: 149777 - RNA, 19 nt, Artificial Sequence
  Description of Artificial Sequence: Synthetic oligonucleotide
  Antisense strand to SEQ ID NO: 149776
uagaaacaggcugacuggc

SEQ ID NO: 149778 - RNA, 19 nt, Artificial Sequence
  Description of Artificial Sequence: Synthetic oligonucleotide
  Sense strand starting at position 3462 of SEQ ID NO: 1923
ggaaguagguucuuaaaga

SEQ ID NO: 149779 - RNA, 19 nt, Artificial Sequence
  Description of Artificial Sequence: Synthetic oligonucleotide
  Antisense strand to SEQ ID NO: 149778
ucuuuaagaaccuacuucc

SEQ ID NO: 149780 - RNA, 19 nt, Artificial Sequence
  Description of Artificial Sequence: Synthetic oligonucleotide
  Sense strand starting at position 3463 of SEQ ID NO: 1923
gaaguagguucuuaaagac

SEQ ID NO: 149781 - RNA, 19 nt, Artificial Sequence
  Description of Artificial Sequence: Synthetic oligonucleotide
  Antisense strand to SEQ ID NO: 149780
gucuuuaagaaccuacuuc

SEQ ID NO: 149782 - RNA, 19 nt, Artificial Sequence
  Description of Artificial Sequence: Synthetic oligonucleotide
  Sense strand starting at position 3722 of SEQ ID NO: 1923
agcugaacuuugcagagau

SEQ ID NO: 149783 - RNA, 19 nt, Artificial Sequence
  Description of Artificial Sequence: Synthetic oligonucleotide
  Antisense strand to SEQ ID NO: 149782
aucucugcaaaguucagcu

SEQ ID NO: 149784 - RNA, 19 nt, Artificial Sequence
  Description of Artificial Sequence: Synthetic oligonucleotide
  Sense strand starting at position 20 of SEQ ID NO: 1924
gcgccugcuccagagaacu

SEQ ID NO: 149785 - RNA, 19 nt, Artificial Sequence
  Description of Artificial Sequence: Synthetic oligonucleotide
  Antisense strand to SEQ ID NO: 149784
aguucucuggagcaggcgc

SEQ ID NO: 149786 - RNA, 19 nt, Artificial Sequence
  Description of Artificial Sequence: Synthetic oligonucleotide
  Sense strand starting at position 225 of SEQ ID NO: 1924
aggcgauaccuccaucuca

SEQ ID NO: 149787 - RNA, 19 nt, Artificial Sequence
  Description of Artificial Sequence: Synthetic oligonucleotide
  Antisense strand to SEQ ID NO: 149786
ugagauggagguaucgccu

SEQ ID NO: 149788 - RNA, 19 nt, Artificial Sequence
  Description of Artificial Sequence: Synthetic oligonucleotide
  Sense strand starting at position 258 of SEQ ID NO: 1924
gcuaaagcuucccuugugu

SEQ ID NO: 149789 - RNA, 19 nt, Artificial Sequence
  Description of Artificial Sequence: Synthetic oligonucleotide
  Antisense strand to SEQ ID NO: 149788
acacaagggaagcuuuagc

SEQ ID NO: 149790 - RNA, 19 nt, Artificial Sequence
  Description of Artificial Sequence: Synthetic oligonucleotide
  Sense strand starting at position 507 of SEQ ID NO: 1924
ggagucguuucccuccuua

SEQ ID NO: 149791 - RNA, 19 nt, Artificial Sequence
  Description of Artificial Sequence: Synthetic oligonucleotide
  Antisense strand to SEQ ID NO: 149790
uaaggagggaaacgacucc

SEQ ID NO: 149792 - RNA, 19 nt, Artificial Sequence
  Description of Artificial Sequence: Synthetic oligonucleotide
  Sense strand starting at position 511 of SEQ ID NO: 1924
ucguuucccuccuuagacu

SEQ ID NO: 149793 - RNA, 19 nt, Artificial Sequence
  Description of Artificial Sequence: Synthetic oligonucleotide
  Antisense strand to SEQ ID NO: 149792
agucuaaggagggaaacga

SEQ ID NO: 149794 - RNA, 19 nt, Artificial Sequence
  Description of Artificial Sequence: Synthetic oligonucleotide
  Sense strand starting at position 587 of SEQ ID NO: 1924
gcaggaguguuuccucucu

SEQ ID NO: 149795 - RNA, 19 nt, Artificial Sequence
  Description of Artificial Sequence: Synthetic oligonucleotide
  Antisense strand to SEQ ID NO: 149794
agagaggaaacacuccugc

SEQ ID NO: 149796 - RNA, 19 nt, Artificial Sequence
  Description of Artificial Sequence: Synthetic oligonucleotide
  Sense strand starting at position 589 of SEQ ID NO: 1924
aggaguguuuccucucuca

SEQ ID NO: 149797 - RNA, 19 nt, Artificial Sequence
  Description of Artificial Sequence: Synthetic oligonucleotide
  Antisense strand to SEQ ID NO: 149796
ugagagaggaaacacuccu

SEQ ID NO: 149798 - RNA, 19 nt, Artificial Sequence
  Description of Artificial Sequence: Synthetic oligonucleotide
  Sense strand starting at position 592 of SEQ ID NO: 1924
aguguuuccucucucagac

SEQ ID NO: 149799 - RNA, 19 nt, Artificial Sequence
  Description of Artificial Sequence: Synthetic oligonucleotide
  Antisense strand to SEQ ID NO: 149798
gucugagagaggaaacacu

SEQ ID NO: 149800 - RNA, 19 nt, Artificial Sequence
  Description of Artificial Sequence: Synthetic oligonucleotide
  Sense strand starting at position 594 of SEQ ID NO: 1924
uguuuccucucucagacua

SEQ ID NO: 149801 - RNA, 19 nt, Artificial Sequence
  Description of Artificial Sequence: Synthetic oligonucleotide
  Antisense strand to SEQ ID NO: 149800
uagucugagagaggaaaca

SEQ ID NO: 149802 - RNA, 19 nt, Artificial Sequence
  Description of Artificial Sequence: Synthetic oligonucleotide
  Sense strand starting at position 721 of SEQ ID NO: 1924
caggaaggauccuguugga

SEQ ID NO: 149803 - RNA, 19 nt, Artificial Sequence
  Description of Artificial Sequence: Synthetic oligonucleotide
  Antisense strand to SEQ ID NO: 149802
uccaacaggauccuuccug

SEQ ID NO: 149804 - RNA, 19 nt, Artificial Sequence
  Description of Artificial Sequence: Synthetic oligonucleotide
  Sense strand starting at position 724 of SEQ ID NO: 1924
gaaggauccuguuggaauu

SEQ ID NO: 149805 - RNA, 19 nt, Artificial Sequence
  Description of Artificial Sequence: Synthetic oligonucleotide
  Antisense strand to SEQ ID NO: 149804
aauuccaacaggauccuuc

SEQ ID NO: 149806 - RNA, 19 nt, Artificial Sequence
  Description of Artificial Sequence: Synthetic oligonucleotide
  Sense strand starting at position 725 of SEQ ID NO: 1924
aaggauccuguuggaauua

SEQ ID NO: 149807 - RNA, 19 nt, Artificial Sequence
  Description of Artificial Sequence: Synthetic oligonucleotide
  Antisense strand to SEQ ID NO: 149806
uaauuccaacaggauccuu

SEQ ID NO: 149808 - RNA, 19 nt, Artificial Sequence
  Description of Artificial Sequence: Synthetic oligonucleotide
  Sense strand starting at position 799 of SEQ ID NO: 1924
cggcaaggccucugagaau

SEQ ID NO: 149809 - RNA, 19 nt, Artificial Sequence
  Description of Artificial Sequence: Synthetic oligonucleotide
  Antisense strand to SEQ ID NO: 149808
auucucagaggccuugccg

SEQ ID NO: 149810 - RNA, 19 nt, Artificial Sequence
  Description of Artificial Sequence: Synthetic oligonucleotide
  Sense strand starting at position 1531 of SEQ ID NO: 1924
cacagagaguucuuccaag

SEQ ID NO: 149811 - RNA, 19 nt, Artificial Sequence
  Description of Artificial Sequence: Synthetic oligonucleotide
  Antisense strand to SEQ ID NO: 149810
cuuggaagaacucucugug

SEQ ID NO: 149812 - RNA, 19 nt, Artificial Sequence
  Description of Artificial Sequence: Synthetic oligonucleotide
  Sense strand starting at position 1560 of SEQ ID NO: 1924
cagagaggcccagguugau

SEQ ID NO: 149813 - RNA, 19 nt, Artificial Sequence
  Description of Artificial Sequence: Synthetic oligonucleotide
  Antisense strand to SEQ ID NO: 149812
aucaaccugggccucucug

SEQ ID NO: 149814 - RNA, 19 nt, Artificial Sequence
  Description of Artificial Sequence: Synthetic oligonucleotide
  Sense strand starting at position 2035 of SEQ ID NO: 1924
aggccucauucucaugaca

SEQ ID NO: 149815 - RNA, 19 nt, Artificial Sequence
  Description of Artificial Sequence: Synthetic oligonucleotide
  Antisense strand to SEQ ID NO: 149814
ugucaugagaaugaggccu

SEQ ID NO: 149816 - RNA, 19 nt, Artificial Sequence
  Description of Artificial Sequence: Synthetic oligonucleotide
  Sense strand starting at position 2037 of SEQ ID NO: 1924
gccucauucucaugacaug

SEQ ID NO: 149817 - RNA, 19 nt, Artificial Sequence
  Description of Artificial Sequence: Synthetic oligonucleotide
  Antisense strand to SEQ ID NO: 149816
caugucaugagaaugaggc

SEQ ID NO: 149818 - RNA, 19 nt, Artificial Sequence
  Description of Artificial Sequence: Synthetic oligonucleotide
  Sense strand starting at position 2046 of SEQ ID NO: 1924
ucaugacaugccugugagu

SEQ ID NO: 149819 - RNA, 19 nt, Artificial Sequence
  Description of Artificial Sequence: Synthetic oligonucleotide
  Antisense strand to SEQ ID NO: 149818
acucacaggcaugucauga

SEQ ID NO: 149820 - RNA, 19 nt, Artificial Sequence
  Description of Artificial Sequence: Synthetic oligonucleotide
  Sense strand starting at position 2048 of SEQ ID NO: 1924
augacaugccugugaguca

SEQ ID NO: 149821 - RNA, 19 nt, Artificial Sequence
  Description of Artificial Sequence: Synthetic oligonucleotide
  Antisense strand to SEQ ID NO: 149820
ugacucacaggcaugucau

SEQ ID NO: 149822 - RNA, 19 nt, Artificial Sequence
  Description of Artificial Sequence: Synthetic oligonucleotide
  Sense strand starting at position 2068 of SEQ ID NO: 1924
agcccacuccugugugaga

SEQ ID NO: 149823 - RNA, 19 nt, Artificial Sequence
  Description of Artificial Sequence: Synthetic oligonucleotide
  Antisense strand to SEQ ID NO: 149822
ucucacacaggagugggcu

SEQ ID NO: 149824 - RNA, 19 nt, Artificial Sequence
  Description of Artificial Sequence: Synthetic oligonucleotide
  Sense strand starting at position 2114 of SEQ ID NO: 1924
gguccagugcucguguaca

SEQ ID NO: 149825 - RNA, 19 nt, Artificial Sequence
  Description of Artificial Sequence: Synthetic oligonucleotide
  Antisense strand to SEQ ID NO: 149824
uguacacgagcacuggacc

SEQ ID NO: 149826 - RNA, 19 nt, Artificial Sequence
  Description of Artificial Sequence: Synthetic oligonucleotide
  Sense strand starting at position 2116 of SEQ ID NO: 1924
uccagugcucguguacaua

SEQ ID NO: 149827 - RNA, 19 nt, Artificial Sequence
  Description of Artificial Sequence: Synthetic oligonucleotide
  Antisense strand to SEQ ID NO: 149826
uauguacacgagcacugga

SEQ ID NO: 149828 - RNA, 19 nt, Artificial Sequence
  Description of Artificial Sequence: Synthetic oligonucleotide
  Sense strand starting at position 2252 of SEQ ID NO: 1924
gaugaaguggagugacuuu

SEQ ID NO: 149829 - RNA, 19 nt, Artificial Sequence
  Description of Artificial Sequence: Synthetic oligonucleotide
  Antisense strand to SEQ ID NO: 149828
aaagucacuccacuucauc

SEQ ID NO: 149830 - RNA, 19 nt, Artificial Sequence
  Description of Artificial Sequence: Synthetic oligonucleotide
  Sense strand starting at position 2308 of SEQ ID NO: 1924
gagguaacuaagugugcuu

SEQ ID NO: 149831 - RNA, 19 nt, Artificial Sequence
  Description of Artificial Sequence: Synthetic oligonucleotide
  Antisense strand to SEQ ID NO: 149830
aagcacacuuaguuaccuc

SEQ ID NO: 149832 - RNA, 19 nt, Artificial Sequence
  Description of Artificial Sequence: Synthetic oligonucleotide
  Sense strand starting at position 2311 of SEQ ID NO: 1924
guaacuaagugugcuuaga

SEQ ID NO: 149833 - RNA, 19 nt, Artificial Sequence
  Description of Artificial Sequence: Synthetic oligonucleotide
  Antisense strand to SEQ ID NO: 149832
ucuaagcacacuuaguuac

SEQ ID NO: 149834 - RNA, 19 nt, Artificial Sequence
  Description of Artificial Sequence: Synthetic oligonucleotide
  Sense strand starting at position 2313 of SEQ ID NO: 1924
aacuaagugugcuuagaaa

SEQ ID NO: 149835 - RNA, 19 nt, Artificial Sequence
  Description of Artificial Sequence: Synthetic oligonucleotide
  Antisense strand to SEQ ID NO: 149834
uuucuaagcacacuuaguu

SEQ ID NO: 149836 - RNA, 19 nt, Artificial Sequence
  Description of Artificial Sequence: Synthetic oligonucleotide
  Sense strand starting at position 2447 of SEQ ID NO: 1924
uaaggaagucccgaguagu

SEQ ID NO: 149837 - RNA, 19 nt, Artificial Sequence
  Description of Artificial Sequence: Synthetic oligonucleotide
  Antisense strand to SEQ ID NO: 149836
acuacucgggacuuccuua

SEQ ID NO: 149838 - RNA, 19 nt, Artificial Sequence
  Description of Artificial Sequence: Synthetic oligonucleotide
  Sense strand starting at position 2450 of SEQ ID NO: 1924
ggaagucccgaguaguuaa

SEQ ID NO: 149839 - RNA, 19 nt, Artificial Sequence
  Description of Artificial Sequence: Synthetic oligonucleotide
  Antisense strand to SEQ ID NO: 149838
uuaacuacucgggacuucc

SEQ ID NO: 149840 - RNA, 19 nt, Artificial Sequence
  Description of Artificial Sequence: Synthetic oligonucleotide
  Sense strand starting at position 2458 of SEQ ID NO: 1924
cgaguaguuaaaggcugaa

SEQ ID NO: 149841 - RNA, 19 nt, Artificial Sequence
  Description of Artificial Sequence: Synthetic oligonucleotide
  Antisense strand to SEQ ID NO: 149840
uucagccuuuaacuacucg

SEQ ID NO: 149842 - RNA, 19 nt, Artificial Sequence
  Description of Artificial Sequence: Synthetic oligonucleotide
  Sense strand starting at position 2861 of SEQ ID NO: 1924
aagugacucacccgagguu

SEQ ID NO: 149843 - RNA, 19 nt, Artificial Sequence
  Description of Artificial Sequence: Synthetic oligonucleotide
  Antisense strand to SEQ ID NO: 149842
aaccucgggugagucacuu

SEQ ID NO: 149844 - RNA, 19 nt, Artificial Sequence
  Description of Artificial Sequence: Synthetic oligonucleotide
  Sense strand starting at position 3027 of SEQ ID NO: 1924
ggaggagcuuuggauaaug

SEQ ID NO: 149845 - RNA, 19 nt, Artificial Sequence
  Description of Artificial Sequence: Synthetic oligonucleotide
  Antisense strand to SEQ ID NO: 149844
cauuauccaaagcuccucc

SEQ ID NO: 149846 - RNA, 19 nt, Artificial Sequence
  Description of Artificial Sequence: Synthetic oligonucleotide
  Sense strand starting at position 3114 of SEQ ID NO: 1924
cagccugagcaguguacau

SEQ ID NO: 149847 - RNA, 19 nt, Artificial Sequence
  Description of Artificial Sequence: Synthetic oligonucleotide
  Antisense strand to SEQ ID NO: 149846
auguacacugcucaggcug

SEQ ID NO: 149848 - RNA, 19 nt, Artificial Sequence
  Description of Artificial Sequence: Synthetic oligonucleotide
  Sense strand starting at position 3226 of SEQ ID NO: 1924
cuacuugucuucccaucga

SEQ ID NO: 149849 - RNA, 19 nt, Artificial Sequence
  Description of Artificial Sequence: Synthetic oligonucleotide
  Antisense strand to SEQ ID NO: 149848
ucgaugggaagacaaguag

SEQ ID NO: 149850 - RNA, 19 nt, Artificial Sequence
  Description of Artificial Sequence: Synthetic oligonucleotide
  Sense strand starting at position 3253 of SEQ ID NO: 1924
ucaaguagaacucggaaua

SEQ ID NO: 149851 - RNA, 19 nt, Artificial Sequence
  Description of Artificial Sequence: Synthetic oligonucleotide
  Antisense strand to SEQ ID NO: 149850
uauuccgaguucuacuuga

SEQ ID NO: 149852 - RNA, 19 nt, Artificial Sequence
  Description of Artificial Sequence: Synthetic oligonucleotide
  Sense strand starting at position 3254 of SEQ ID NO: 1924
caaguagaacucggaauaa

SEQ ID NO: 149853 - RNA, 19 nt, Artificial Sequence
  Description of Artificial Sequence: Synthetic oligonucleotide
  Antisense strand to SEQ ID NO: 149852
uuauuccgaguucuacuug

SEQ ID NO: 149854 - RNA, 19 nt, Artificial Sequence
  Description of Artificial Sequence: Synthetic oligonucleotide
  Sense strand starting at position 3416 of SEQ ID NO: 1924
ggcgguauguucucacuca

SEQ ID NO: 149855 - RNA, 19 nt, Artificial Sequence
  Description of Artificial Sequence: Synthetic oligonucleotide
  Antisense strand to SEQ ID NO: 149854
ugagugagaacauaccgcc

SEQ ID NO: 149856 - RNA, 19 nt, Artificial Sequence
  Description of Artificial Sequence: Synthetic oligonucleotide
  Sense strand starting at position 3417 of SEQ ID NO: 1924
gcgguauguucucacucau

SEQ ID NO: 149857 - RNA, 19 nt, Artificial Sequence
  Description of Artificial Sequence: Synthetic oligonucleotide
  Antisense strand to SEQ ID NO: 149856
augagugagaacauaccgc

SEQ ID NO: 149858 - RNA, 19 nt, Artificial Sequence
  Description of Artificial Sequence: Synthetic oligonucleotide
  Sense strand starting at position 3852 of SEQ ID NO: 1924
ugcccucuauccugcugaa

SEQ ID NO: 149859 - RNA, 19 nt, Artificial Sequence
  Description of Artificial Sequence: Synthetic oligonucleotide
  Antisense strand to SEQ ID NO: 149858
uucagcaggauagagggca

SEQ ID NO: 149860 - RNA, 19 nt, Artificial Sequence
  Description of Artificial Sequence: Synthetic oligonucleotide
  Sense strand starting at position 3939 of SEQ ID NO: 1924
uguucuguccuguacaaag

SEQ ID NO: 149861 - RNA, 19 nt, Artificial Sequence
  Description of Artificial Sequence: Synthetic oligonucleotide
  Antisense strand to SEQ ID NO: 149860
cuuuguacaggacagaaca

SEQ ID NO: 149862 - RNA, 19 nt, Artificial Sequence
  Description of Artificial Sequence: Synthetic oligonucleotide
  Sense strand starting at position 3973 of SEQ ID NO: 1924
uuucguguguacuuagaga

SEQ ID NO: 149863 - RNA, 19 nt, Artificial Sequence
  Description of Artificial Sequence: Synthetic oligonucleotide
  Antisense strand to SEQ ID NO: 149862
ucucuaaguacacacgaaa

SEQ ID NO: 149864 - RNA, 19 nt, Artificial Sequence
  Description of Artificial Sequence: Synthetic oligonucleotide
  Sense strand starting at position 34 of SEQ ID NO: 1925
ggagacgcguccucagaga

SEQ ID NO: 149865 - RNA, 19 nt, Artificial Sequence
  Description of Artificial Sequence: Synthetic oligonucleotide
  Antisense strand to SEQ ID NO: 149864
ucucugaggacgcgucucc

SEQ ID NO: 149866 - RNA, 19 nt, Artificial Sequence
  Description of Artificial Sequence: Synthetic oligonucleotide
  Sense strand starting at position 300 of SEQ ID NO: 1925
uggguuaacugaucgcaga

SEQ ID NO: 149867 - RNA, 19 nt, Artificial Sequence
  Description of Artificial Sequence: Synthetic oligonucleotide
  Antisense strand to SEQ ID NO: 149866
ucugcgaucaguuaaccca

SEQ ID NO: 149868 - RNA, 19 nt, Artificial Sequence
  Description of Artificial Sequence: Synthetic oligonucleotide
  Sense strand starting at position 301 of SEQ ID NO: 1925
ggguuaacugaucgcagaa

SEQ ID NO: 149869 - RNA, 19 nt, Artificial Sequence
  Description of Artificial Sequence: Synthetic oligonucleotide
  Antisense strand to SEQ ID NO: 149868
uucugcgaucaguuaaccc

SEQ ID NO: 149870 - RNA, 19 nt, Artificial Sequence
  Description of Artificial Sequence: Synthetic oligonucleotide
  Sense strand starting at position 456 of SEQ ID NO: 1925
ccuugaaguacucguggca

SEQ ID NO: 149871 - RNA, 19 nt, Artificial Sequence
  Description of Artificial Sequence: Synthetic oligonucleotide
  Antisense strand to SEQ ID NO: 149870
ugccacgaguacuucaagg

SEQ ID NO: 149872 - RNA, 19 nt, Artificial Sequence
  Description of Artificial Sequence: Synthetic oligonucleotide
  Sense strand starting at position 459 of SEQ ID NO: 1925
ugaaguacucguggcagua

SEQ ID NO: 149873 - RNA, 19 nt, Artificial Sequence
  Description of Artificial Sequence: Synthetic oligonucleotide
  Antisense strand to SEQ ID NO: 149872
uacugccacgaguacuuca

SEQ ID NO: 149874 - RNA, 19 nt, Artificial Sequence
  Description of Artificial Sequence: Synthetic oligonucleotide
  Sense strand starting at position 531 of SEQ ID NO: 1925
ccuuguugguguccagaac

SEQ ID NO: 149875 - RNA, 19 nt, Artificial Sequence
  Description of Artificial Sequence: Synthetic oligonucleotide
  Antisense strand to SEQ ID NO: 149874
guucuggacaccaacaagg

SEQ ID NO: 149876 - RNA, 19 nt, Artificial Sequence
  Description of Artificial Sequence: Synthetic oligonucleotide
  Sense strand starting at position 532 of SEQ ID NO: 1925
cuuguugguguccagaaca

SEQ ID NO: 149877 - RNA, 19 nt, Artificial Sequence
  Description of Artificial Sequence: Synthetic oligonucleotide
  Antisense strand to SEQ ID NO: 149876
uguucuggacaccaacaag

SEQ ID NO: 149878 - RNA, 19 nt, Artificial Sequence
  Description of Artificial Sequence: Synthetic oligonucleotide
  Sense strand starting at position 778 of SEQ ID NO: 1925
ucagauuauuaaucgagca

SEQ ID NO: 149879 - RNA, 19 nt, Artificial Sequence
  Description of Artificial Sequence: Synthetic oligonucleotide
  Antisense strand to SEQ ID NO: 149878
ugcucgauuaauaaucuga

SEQ ID NO: 149880 - RNA, 19 nt, Artificial Sequence
  Description of Artificial Sequence: Synthetic oligonucleotide
  Sense strand starting at position 887 of SEQ ID NO: 1925
ggaugauugucaucccauu

SEQ ID NO: 149881 - RNA, 19 nt, Artificial Sequence
  Description of Artificial Sequence: Synthetic oligonucleotide
  Antisense strand to SEQ ID NO: 149880
aaugggaugacaaucaucc

SEQ ID NO: 149882 - RNA, 19 nt, Artificial Sequence
  Description of Artificial Sequence: Synthetic oligonucleotide
  Sense strand starting at position 1013 of SEQ ID NO: 1925
ccaggucucucuuugcaga

SEQ ID NO: 149883 - RNA, 19 nt, Artificial Sequence
  Description of Artificial Sequence: Synthetic oligonucleotide
  Antisense strand to SEQ ID NO: 149882
ucugcaaagagagaccugg

SEQ ID NO: 149884 - RNA, 19 nt, Artificial Sequence
  Description of Artificial Sequence: Synthetic oligonucleotide
  Sense strand starting at position 1015 of SEQ ID NO: 1925
aggucucucuuugcagagu

SEQ ID NO: 149885 - RNA, 19 nt, Artificial Sequence
  Description of Artificial Sequence: Synthetic oligonucleotide
  Antisense strand to SEQ ID NO: 149884
acucugcaaagagagaccu

SEQ ID NO: 149886 - RNA, 19 nt, Artificial Sequence
  Description of Artificial Sequence: Synthetic oligonucleotide
  Sense strand starting at position 1018 of SEQ ID NO: 1925
ucucucuuugcagagucua

SEQ ID NO: 149887 - RNA, 19 nt, Artificial Sequence
  Description of Artificial Sequence: Synthetic oligonucleotide
  Antisense strand to SEQ ID NO: 149886
uagacucugcaaagagaga

SEQ ID NO: 149888 - RNA, 19 nt, Artificial Sequence
  Description of Artificial Sequence: Synthetic oligonucleotide
  Sense strand starting at position 1134 of SEQ ID NO: 1925
ccuggcagagcuuguauuu

SEQ ID NO: 149889 - RNA, 19 nt, Artificial Sequence
  Description of Artificial Sequence: Synthetic oligonucleotide
  Antisense strand to SEQ ID NO: 149888
aaauacaagcucugccagg

SEQ ID NO: 149890 - RNA, 19 nt, Artificial Sequence
  Description of Artificial Sequence: Synthetic oligonucleotide
  Sense strand starting at position 1168 of SEQ ID NO: 1925
ugcguauuccuggaaggug

SEQ ID NO: 149891 - RNA, 19 nt, Artificial Sequence
  Description of Artificial Sequence: Synthetic oligonucleotide
  Antisense strand to SEQ ID NO: 149890
caccuuccaggaauacgca

SEQ ID NO: 149892 - RNA, 19 nt, Artificial Sequence
  Description of Artificial Sequence: Synthetic oligonucleotide
  Sense strand starting at position 1302 of SEQ ID NO: 1925
guguuucucagagacuguu

SEQ ID NO: 149893 - RNA, 19 nt, Artificial Sequence
  Description of Artificial Sequence: Synthetic oligonucleotide
  Antisense strand to SEQ ID NO: 149892
aacagucucugagaaacac

SEQ ID NO: 149894 - RNA, 19 nt, Artificial Sequence
  Description of Artificial Sequence: Synthetic oligonucleotide
  Sense strand starting at position 1308 of SEQ ID NO: 1925
cucagagacuguucccaga

SEQ ID NO: 149895 - RNA, 19 nt, Artificial Sequence
  Description of Artificial Sequence: Synthetic oligonucleotide
  Antisense strand to SEQ ID NO: 149894
ucugggaacagucucugag

SEQ ID NO: 149896 - RNA, 19 nt, Artificial Sequence
  Description of Artificial Sequence: Synthetic oligonucleotide
  Sense strand starting at position 1419 of SEQ ID NO: 1925
cccugcuguccuguuguua

SEQ ID NO: 149897 - RNA, 19 nt, Artificial Sequence
  Description of Artificial Sequence: Synthetic oligonucleotide
  Antisense strand to SEQ ID NO: 149896
uaacaacaggacagcaggg

SEQ ID NO: 149898 - RNA, 19 nt, Artificial Sequence
  Description of Artificial Sequence: Synthetic oligonucleotide
  Sense strand starting at position 1420 of SEQ ID NO: 1925
ccugcuguccuguuguuau

SEQ ID NO: 149899 - RNA, 19 nt, Artificial Sequence
  Description of Artificial Sequence: Synthetic oligonucleotide
  Antisense strand to SEQ ID NO: 149898
auaacaacaggacagcagg

SEQ ID NO: 149900 - RNA, 19 nt, Artificial Sequence
  Description of Artificial Sequence: Synthetic oligonucleotide
  Sense strand starting at position 1464 of SEQ ID NO: 1925
ccaacaucgcuguaaacuc

SEQ ID NO: 149901 - RNA, 19 nt, Artificial Sequence
  Description of Artificial Sequence: Synthetic oligonucleotide
  Antisense strand to SEQ ID NO: 149900
gaguuuacagcgauguugg

SEQ ID NO: 149902 - RNA, 19 nt, Artificial Sequence
  Description of Artificial Sequence: Synthetic oligonucleotide
  Sense strand starting at position 1472 of SEQ ID NO: 1925
gcuguaaacuccucagaga

SEQ ID NO: 149903 - RNA, 19 nt, Artificial Sequence
  Description of Artificial Sequence: Synthetic oligonucleotide
  Antisense strand to SEQ ID NO: 149902
ucucugaggaguuuacagc

SEQ ID NO: 149904 - RNA, 19 nt, Artificial Sequence
  Description of Artificial Sequence: Synthetic oligonucleotide
  Sense strand starting at position 1475 of SEQ ID NO: 1925
guaaacuccucagagagac

SEQ ID NO: 149905 - RNA, 19 nt, Artificial Sequence
  Description of Artificial Sequence: Synthetic oligonucleotide
  Antisense strand to SEQ ID NO: 149904
gucucucugaggaguuuac

SEQ ID NO: 149906 - RNA, 19 nt, Artificial Sequence
  Description of Artificial Sequence: Synthetic oligonucleotide
  Sense strand starting at position 1684 of SEQ ID NO: 1925
gcccucagcccuuggagaa

SEQ ID NO: 149907 - RNA, 19 nt, Artificial Sequence
  Description of Artificial Sequence: Synthetic oligonucleotide
  Antisense strand to SEQ ID NO: 149906
uucuccaagggcugagggc

SEQ ID NO: 149908 - RNA, 19 nt, Artificial Sequence
  Description of Artificial Sequence: Synthetic oligonucleotide
  Sense strand starting at position 1891 of SEQ ID NO: 1925
gggccugaucuguaaguug

SEQ ID NO: 149909 - RNA, 19 nt, Artificial Sequence
  Description of Artificial Sequence: Synthetic oligonucleotide
  Antisense strand to SEQ ID NO: 149908
caacuuacagaucaggccc

SEQ ID NO: 149910 - RNA, 19 nt, Artificial Sequence
  Description of Artificial Sequence: Synthetic oligonucleotide
  Sense strand starting at position 2059 of SEQ ID NO: 1925
uagggauacucuguucuau

SEQ ID NO: 149911 - RNA, 19 nt, Artificial Sequence
  Description of Artificial Sequence: Synthetic oligonucleotide
  Antisense strand to SEQ ID NO: 149910
auagaacagaguaucccua

SEQ ID NO: 149912 - RNA, 19 nt, Artificial Sequence
  Description of Artificial Sequence: Synthetic oligonucleotide
  Sense strand starting at position 2061 of SEQ ID NO: 1925
gggauacucuguucuauug

SEQ ID NO: 149913 - RNA, 19 nt, Artificial Sequence
  Description of Artificial Sequence: Synthetic oligonucleotide
  Antisense strand to SEQ ID NO: 149912
caauagaacagaguauccc

SEQ ID NO: 149914 - RNA, 19 nt, Artificial Sequence
  Description of Artificial Sequence: Synthetic oligonucleotide
  Sense strand starting at position 2245 of SEQ ID NO: 1925
acaagaguccugcagcaca

SEQ ID NO: 149915 - RNA, 19 nt, Artificial Sequence
  Description of Artificial Sequence: Synthetic oligonucleotide
  Antisense strand to SEQ ID NO: 149914
ugugcugcaggacucuugu

SEQ ID NO: 149916 - RNA, 19 nt, Artificial Sequence
  Description of Artificial Sequence: Synthetic oligonucleotide
  Sense strand starting at position 2274 of SEQ ID NO: 1925
ggccaagacucucccugaa

SEQ ID NO: 149917 - RNA, 19 nt, Artificial Sequence
  Description of Artificial Sequence: Synthetic oligonucleotide
  Antisense strand to SEQ ID NO: 149916
uucagggagagucuuggcc

SEQ ID NO: 149918 - RNA, 19 nt, Artificial Sequence
  Description of Artificial Sequence: Synthetic oligonucleotide
  Sense strand starting at position 2459 of SEQ ID NO: 1925
gggccaugauccucagaaa

SEQ ID NO: 149919 - RNA, 19 nt, Artificial Sequence
  Description of Artificial Sequence: Synthetic oligonucleotide
  Antisense strand to SEQ ID NO: 149918
uuucugaggaucauggccc

SEQ ID NO: 149920 - RNA, 19 nt, Artificial Sequence
  Description of Artificial Sequence: Synthetic oligonucleotide
  Sense strand starting at position 2462 of SEQ ID NO: 1925
ccaugauccucagaaauga

SEQ ID NO: 149921 - RNA, 19 nt, Artificial Sequence
  Description of Artificial Sequence: Synthetic oligonucleotide
  Antisense strand to SEQ ID NO: 149920
ucauuucugaggaucaugg

SEQ ID NO: 149922 - RNA, 19 nt, Artificial Sequence
  Description of Artificial Sequence: Synthetic oligonucleotide
  Sense strand starting at position 2840 of SEQ ID NO: 1925
gagacagggcgucacuauu

SEQ ID NO: 149923 - RNA, 19 nt, Artificial Sequence
  Description of Artificial Sequence: Synthetic oligonucleotide
  Antisense strand to SEQ ID NO: 149922
aauagugacgcccugucuc

SEQ ID NO: 149924 - RNA, 19 nt, Artificial Sequence
  Description of Artificial Sequence: Synthetic oligonucleotide
  Sense strand starting at position 2903 of SEQ ID NO: 1925
guaggucaacacugaggau

SEQ ID NO: 149925 - RNA, 19 nt, Artificial Sequence
  Description of Artificial Sequence: Synthetic oligonucleotide
  Antisense strand to SEQ ID NO: 149924
auccucaguguugaccuac

SEQ ID NO: 149926 - RNA, 19 nt, Artificial Sequence
  Description of Artificial Sequence: Synthetic oligonucleotide
  Sense strand starting at position 3099 of SEQ ID NO: 1925
gacagucuggcuuauccau

SEQ ID NO: 149927 - RNA, 19 nt, Artificial Sequence
  Description of Artificial Sequence: Synthetic oligonucleotide
  Antisense strand to SEQ ID NO: 149926
auggauaagccagacuguc

SEQ ID NO: 149928 - RNA, 19 nt, Artificial Sequence
  Description of Artificial Sequence: Synthetic oligonucleotide
  Sense strand starting at position 3209 of SEQ ID NO: 1925
aucucuauuccggguagaa

SEQ ID NO: 149929 - RNA, 19 nt, Artificial Sequence
  Description of Artificial Sequence: Synthetic oligonucleotide
  Antisense strand to SEQ ID NO: 149928
uucuacccggaauagagau

SEQ ID NO: 149930 - RNA, 19 nt, Artificial Sequence
  Description of Artificial Sequence: Synthetic oligonucleotide
  Sense strand starting at position 3253 of SEQ ID NO: 1925
cccuuuacagacgagaagu

SEQ ID NO: 149931 - RNA, 19 nt, Artificial Sequence
  Description of Artificial Sequence: Synthetic oligonucleotide
  Antisense strand to SEQ ID NO: 149930
acuucucgucuguaaaggg

SEQ ID NO: 149932 - RNA, 19 nt, Artificial Sequence
  Description of Artificial Sequence: Synthetic oligonucleotide
  Sense strand starting at position 3261 of SEQ ID NO: 1925
agacgagaagucugaacuu

SEQ ID NO: 149933 - RNA, 19 nt, Artificial Sequence
  Description of Artificial Sequence: Synthetic oligonucleotide
  Antisense strand to SEQ ID NO: 149932
aaguucagacuucucgucu

SEQ ID NO: 149934 - RNA, 19 nt, Artificial Sequence
  Description of Artificial Sequence: Synthetic oligonucleotide
  Sense strand starting at position 3341 of SEQ ID NO: 1925
gugggaugucuuugaggca

SEQ ID NO: 149935 - RNA, 19 nt, Artificial Sequence
  Description of Artificial Sequence: Synthetic oligonucleotide
  Antisense strand to SEQ ID NO: 149934
ugccucaaagacaucccac

SEQ ID NO: 149936 - RNA, 19 nt, Artificial Sequence
  Description of Artificial Sequence: Synthetic oligonucleotide
  Sense strand starting at position 3395 of SEQ ID NO: 1925
agagucuaagcuugagauu

SEQ ID NO: 149937 - RNA, 19 nt, Artificial Sequence
  Description of Artificial Sequence: Synthetic oligonucleotide
  Antisense strand to SEQ ID NO: 149936
aaucucaagcuuagacucu

SEQ ID NO: 149938 - RNA, 19 nt, Artificial Sequence
  Description of Artificial Sequence: Synthetic oligonucleotide
  Sense strand starting at position 3398 of SEQ ID NO: 1925
gucuaagcuugagauuucu

SEQ ID NO: 149939 - RNA, 19 nt, Artificial Sequence
  Description of Artificial Sequence: Synthetic oligonucleotide
  Antisense strand to SEQ ID NO: 149938
agaaaucucaagcuuagac

SEQ ID NO: 149940 - RNA, 19 nt, Artificial Sequence
  Description of Artificial Sequence: Synthetic oligonucleotide
  Sense strand starting at position 3763 of SEQ ID NO: 1925
aguacagauucugcuuuga

SEQ ID NO: 149941 - RNA, 19 nt, Artificial Sequence
  Description of Artificial Sequence: Synthetic oligonucleotide
  Antisense strand to SEQ ID NO: 149940
ucaaagcagaaucuguacu

SEQ ID NO: 149942 - RNA, 19 nt, Artificial Sequence
  Description of Artificial Sequence: Synthetic oligonucleotide
  Sense strand starting at position 3959 of SEQ ID NO: 1925
cugagaaacuccucccugu

SEQ ID NO: 149943 - RNA, 19 nt, Artificial Sequence
  Description of Artificial Sequence: Synthetic oligonucleotide
  Antisense strand to SEQ ID NO: 149942
acagggaggaguuucucag

SEQ ID NO: 149944 - RNA, 19 nt, Artificial Sequence
  Description of Artificial Sequence: Synthetic oligonucleotide
  Sense strand starting at position 179 of SEQ ID NO: 1926
cccaguuucuacucccaga

SEQ ID NO: 149945 - RNA, 19 nt, Artificial Sequence
  Description of Artificial Sequence: Synthetic oligonucleotide
  Antisense strand to SEQ ID NO: 149944
ucugggaguagaaacuggg

SEQ ID NO: 149946 - RNA, 19 nt, Artificial Sequence
  Description of Artificial Sequence: Synthetic oligonucleotide
  Sense strand starting at position 269 of SEQ ID NO: 1926
gaaggugcuccuuggauaa

SEQ ID NO: 149947 - RNA, 19 nt, Artificial Sequence
  Description of Artificial Sequence: Synthetic oligonucleotide
  Antisense strand to SEQ ID NO: 149946
uuauccaaggagcaccuuc

SEQ ID NO: 149948 - RNA, 19 nt, Artificial Sequence
  Description of Artificial Sequence: Synthetic oligonucleotide
  Sense strand starting at position 273 of SEQ ID NO: 1926
gugcuccuuggauaaggaa

SEQ ID NO: 149949 - RNA, 19 nt, Artificial Sequence
  Description of Artificial Sequence: Synthetic oligonucleotide
  Antisense strand to SEQ ID NO: 149948
uuccuuauccaaggagcac

SEQ ID NO: 149950 - RNA, 19 nt, Artificial Sequence
  Description of Artificial Sequence: Synthetic oligonucleotide
  Sense strand starting at position 292 of SEQ ID NO: 1926
gucugaguaccuggugcaa

SEQ ID NO: 149951 - RNA, 19 nt, Artificial Sequence
  Description of Artificial Sequence: Synthetic oligonucleotide
  Antisense strand to SEQ ID NO: 149950
uugcaccagguacucagac

SEQ ID NO: 149952 - RNA, 19 nt, Artificial Sequence
  Description of Artificial Sequence: Synthetic oligonucleotide
  Sense strand starting at position 340 of SEQ ID NO: 1926
acccaagguuguucuaaua

SEQ ID NO: 149953 - RNA, 19 nt, Artificial Sequence
  Description of Artificial Sequence: Synthetic oligonucleotide
  Antisense strand to SEQ ID NO: 149952
uauuagaacaaccuugggu

SEQ ID NO: 149954 - RNA, 19 nt, Artificial Sequence
  Description of Artificial Sequence: Synthetic oligonucleotide
  Sense strand starting at position 353 of SEQ ID NO: 1926
cuaauaaucccaugaggua

SEQ ID NO: 149955 - RNA, 19 nt, Artificial Sequence
  Description of Artificial Sequence: Synthetic oligonucleotide
  Antisense strand to SEQ ID NO: 149954
uaccucaugggauuauuag

SEQ ID NO: 149956 - RNA, 19 nt, Artificial Sequence
  Description of Artificial Sequence: Synthetic oligonucleotide
  Sense strand starting at position 399 of SEQ ID NO: 1926
cuguguuauguuugauaca

SEQ ID NO: 149957 - RNA, 19 nt, Artificial Sequence
  Description of Artificial Sequence: Synthetic oligonucleotide
  Antisense strand to SEQ ID NO: 149956
uguaucaaacauaacacag

SEQ ID NO: 149958 - RNA, 19 nt, Artificial Sequence
  Description of Artificial Sequence: Synthetic oligonucleotide
  Sense strand starting at position 430 of SEQ ID NO: 1926
uauuguuugaagggaacgu

SEQ ID NO: 149959 - RNA, 19 nt, Artificial Sequence
  Description of Artificial Sequence: Synthetic oligonucleotide
  Antisense strand to SEQ ID NO: 149958
acguucccuucaaacaaua

SEQ ID NO: 149960 - RNA, 19 nt, Artificial Sequence
  Description of Artificial Sequence: Synthetic oligonucleotide
  Sense strand starting at position 457 of SEQ ID NO: 1926
cugugaucaucuccacauc

SEQ ID NO: 149961 - RNA, 19 nt, Artificial Sequence
  Description of Artificial Sequence: Synthetic oligonucleotide
  Antisense strand to SEQ ID NO: 149960
gauguggagaugaucacag

SEQ ID NO: 149962 - RNA, 19 nt, Artificial Sequence
  Description of Artificial Sequence: Synthetic oligonucleotide
  Sense strand starting at position 460 of SEQ ID NO: 1926
ugaucaucuccacaucugu

SEQ ID NO: 149963 - RNA, 19 nt, Artificial Sequence
  Description of Artificial Sequence: Synthetic oligonucleotide
  Antisense strand to SEQ ID NO: 149962
acagauguggagaugauca

SEQ ID NO: 149964 - RNA, 19 nt, Artificial Sequence
  Description of Artificial Sequence: Synthetic oligonucleotide
  Sense strand starting at position 588 of SEQ ID NO: 1926
ugggaaguuacuuagcacu

SEQ ID NO: 149965 - RNA, 19 nt, Artificial Sequence
  Description of Artificial Sequence: Synthetic oligonucleotide
  Antisense strand to SEQ ID NO: 149964
agugcuaaguaacuuccca

SEQ ID NO: 149966 - RNA, 19 nt, Artificial Sequence
  Description of Artificial Sequence: Synthetic oligonucleotide
  Sense strand starting at position 590 of SEQ ID NO: 1926
ggaaguuacuuagcacucu

SEQ ID NO: 149967 - RNA, 19 nt, Artificial Sequence
  Description of Artificial Sequence: Synthetic oligonucleotide
  Antisense strand to SEQ ID NO: 149966
agagugcuaaguaacuucc

SEQ ID NO: 149968 - RNA, 19 nt, Artificial Sequence
  Description of Artificial Sequence: Synthetic oligonucleotide
  Sense strand starting at position 627 of SEQ ID NO: 1926
aguuaaguugugcaaagca

SEQ ID NO: 149969 - RNA, 19 nt, Artificial Sequence
  Description of Artificial Sequence: Synthetic oligonucleotide
  Antisense strand to SEQ ID NO: 149968
ugcuuugcacaacuuaacu

SEQ ID NO: 149970 - RNA, 19 nt, Artificial Sequence
  Description of Artificial Sequence: Synthetic oligonucleotide
  Sense strand starting at position 766 of SEQ ID NO: 1926
gcuaaugcucuagagcaag

SEQ ID NO: 149971 - RNA, 19 nt, Artificial Sequence
  Description of Artificial Sequence: Synthetic oligonucleotide
  Antisense strand to SEQ ID NO: 149970
cuugcucuagagcauuagc

SEQ ID NO: 149972 - RNA, 19 nt, Artificial Sequence
  Description of Artificial Sequence: Synthetic oligonucleotide
  Sense strand starting at position 790 of SEQ ID NO: 1926
ugcccuccucugugggaaa

SEQ ID NO: 149973 - RNA, 19 nt, Artificial Sequence
  Description of Artificial Sequence: Synthetic oligonucleotide
  Antisense strand to SEQ ID NO: 149972
uuucccacagaggagggca

SEQ ID NO: 149974 - RNA, 19 nt, Artificial Sequence
  Description of Artificial Sequence: Synthetic oligonucleotide
  Sense strand starting at position 886 of SEQ ID NO: 1926
uuaguucugacuuguugag

SEQ ID NO: 149975 - RNA, 19 nt, Artificial Sequence
  Description of Artificial Sequence: Synthetic oligonucleotide
  Antisense strand to SEQ ID NO: 149974
cucaacaagucagaacuaa

SEQ ID NO: 149976 - RNA, 19 nt, Artificial Sequence
  Description of Artificial Sequence: Synthetic oligonucleotide
  Sense strand starting at position 895 of SEQ ID NO: 1926
acuuguugagcuugaacuu

SEQ ID NO: 149977 - RNA, 19 nt, Artificial Sequence
  Description of Artificial Sequence: Synthetic oligonucleotide
  Antisense strand to SEQ ID NO: 149976
aaguucaagcucaacaagu

SEQ ID NO: 149978 - RNA, 19 nt, Artificial Sequence
  Description of Artificial Sequence: Synthetic oligonucleotide
  Sense strand starting at position 918 of SEQ ID NO: 1926
cccucuuugcccgaguacu

SEQ ID NO: 149979 - RNA, 19 nt, Artificial Sequence
  Description of Artificial Sequence: Synthetic oligonucleotide
  Antisense strand to SEQ ID NO: 149978
aguacucgggcaaagaggg

SEQ ID NO: 149980 - RNA, 19 nt, Artificial Sequence
  Description of Artificial Sequence: Synthetic oligonucleotide
  Sense strand starting at position 1195 of SEQ ID NO: 1926
agugaacauuugcaagauc

SEQ ID NO: 149981 - RNA, 19 nt, Artificial Sequence
  Description of Artificial Sequence: Synthetic oligonucleotide
  Antisense strand to SEQ ID NO: 149980
gaucuugcaaauguucacu

SEQ ID NO: 149982 - RNA, 19 nt, Artificial Sequence
  Description of Artificial Sequence: Synthetic oligonucleotide
  Sense strand starting at position 1228 of SEQ ID NO: 1926
uggagauucgggcagcaaa

SEQ ID NO: 149983 - RNA, 19 nt, Artificial Sequence
  Description of Artificial Sequence: Synthetic oligonucleotide
  Antisense strand to SEQ ID NO: 149982
uuugcugcccgaaucucca

SEQ ID NO: 149984 - RNA, 19 nt, Artificial Sequence
  Description of Artificial Sequence: Synthetic oligonucleotide
  Sense strand starting at position 1424 of SEQ ID NO: 1926
gccgcuuagcucucagcau

SEQ ID NO: 149985 - RNA, 19 nt, Artificial Sequence
  Description of Artificial Sequence: Synthetic oligonucleotide
  Antisense strand to SEQ ID NO: 149984
augcugagagcuaagcggc

SEQ ID NO: 149986 - RNA, 19 nt, Artificial Sequence
  Description of Artificial Sequence: Synthetic oligonucleotide
  Sense strand starting at position 1843 of SEQ ID NO: 1926
ucuggaucucuuuagcaca

SEQ ID NO: 149987 - RNA, 19 nt, Artificial Sequence
  Description of Artificial Sequence: Synthetic oligonucleotide
  Antisense strand to SEQ ID NO: 149986
ugugcuaaagagauccaga

SEQ ID NO: 149988 - RNA, 19 nt, Artificial Sequence
  Description of Artificial Sequence: Synthetic oligonucleotide
  Sense strand starting at position 2007 of SEQ ID NO: 1926
ggcccagaggucugaccua

SEQ ID NO: 149989 - RNA, 19 nt, Artificial Sequence
  Description of Artificial Sequence: Synthetic oligonucleotide
  Antisense strand to SEQ ID NO: 149988
uaggucagaccucugggcc

SEQ ID NO: 149990 - RNA, 19 nt, Artificial Sequence
  Description of Artificial Sequence: Synthetic oligonucleotide
  Sense strand starting at position 2239 of SEQ ID NO: 1926
cauagcucagccugaguuu

SEQ ID NO: 149991 - RNA, 19 nt, Artificial Sequence
  Description of Artificial Sequence: Synthetic oligonucleotide
  Antisense strand to SEQ ID NO: 149990
aaacucaggcugagcuaug

SEQ ID NO: 149992 - RNA, 19 nt, Artificial Sequence
  Description of Artificial Sequence: Synthetic oligonucleotide
  Sense strand starting at position 2360 of SEQ ID NO: 1926
gugggagauugcccuggaa

SEQ ID NO: 149993 - RNA, 19 nt, Artificial Sequence
  Description of Artificial Sequence: Synthetic oligonucleotide
  Antisense strand to SEQ ID NO: 149992
uuccagggcaaucucccac

SEQ ID NO: 149994 - RNA, 19 nt, Artificial Sequence
  Description of Artificial Sequence: Synthetic oligonucleotide
  Sense strand starting at position 2362 of SEQ ID NO: 1926
gggagauugcccuggaaau

SEQ ID NO: 149995 - RNA, 19 nt, Artificial Sequence
  Description of Artificial Sequence: Synthetic oligonucleotide
  Antisense strand to SEQ ID NO: 149994
auuuccagggcaaucuccc

SEQ ID NO: 149996 - RNA, 19 nt, Artificial Sequence
  Description of Artificial Sequence: Synthetic oligonucleotide
  Sense strand starting at position 2363 of SEQ ID NO: 1926
ggagauugcccuggaaaug

SEQ ID NO: 149997 - RNA, 19 nt, Artificial Sequence
  Description of Artificial Sequence: Synthetic oligonucleotide
  Antisense strand to SEQ ID NO: 149996
cauuuccagggcaaucucc

SEQ ID NO: 149998 - RNA, 19 nt, Artificial Sequence
  Description of Artificial Sequence: Synthetic oligonucleotide
  Sense strand starting at position 2364 of SEQ ID NO: 1926
gagauugcccuggaaaugu

SEQ ID NO: 149999 - RNA, 19 nt, Artificial Sequence
  Description of Artificial Sequence: Synthetic oligonucleotide
  Antisense strand to SEQ ID NO: 149998
acauuuccagggcaaucuc

SEQ ID NO: 150000 - RNA, 19 nt, Artificial Sequence
  Description of Artificial Sequence: Synthetic oligonucleotide
  Sense strand starting at position 2458 of SEQ ID NO: 1926
agagacuucugucucuaua

SEQ ID NO: 150001 - RNA, 19 nt, Artificial Sequence
  Description of Artificial Sequence: Synthetic oligonucleotide
  Antisense strand to SEQ ID NO: 150000
uauagagacagaagucucu

SEQ ID NO: 150002 - RNA, 19 nt, Artificial Sequence
  Description of Artificial Sequence: Synthetic oligonucleotide
  Sense strand starting at position 2637 of SEQ ID NO: 1926
agaggaccuugucucuuaa

SEQ ID NO: 150003 - RNA, 19 nt, Artificial Sequence
  Description of Artificial Sequence: Synthetic oligonucleotide
  Antisense strand to SEQ ID NO: 150002
uuaagagacaagguccucu

SEQ ID NO: 150004 - RNA, 19 nt, Artificial Sequence
  Description of Artificial Sequence: Synthetic oligonucleotide
  Sense strand starting at position 2798 of SEQ ID NO: 1926
caggaacgucagugggaaa

SEQ ID NO: 150005 - RNA, 19 nt, Artificial Sequence
  Description of Artificial Sequence: Synthetic oligonucleotide
  Antisense strand to SEQ ID NO: 150004
uuucccacugacguuccug

SEQ ID NO: 150006 - RNA, 19 nt, Artificial Sequence
  Description of Artificial Sequence: Synthetic oligonucleotide
  Sense strand starting at position 2910 of SEQ ID NO: 1926
auuuaaaguugggaugagu

SEQ ID NO: 150007 - RNA, 19 nt, Artificial Sequence
  Description of Artificial Sequence: Synthetic oligonucleotide
  Antisense strand to SEQ ID NO: 150006
acucaucccaacuuuaaau

SEQ ID NO: 150008 - RNA, 19 nt, Artificial Sequence
  Description of Artificial Sequence: Synthetic oligonucleotide
  Sense strand starting at position 2968 of SEQ ID NO: 1926
ggugaaauggcaugaaaua

SEQ ID NO: 150009 - RNA, 19 nt, Artificial Sequence
  Description of Artificial Sequence: Synthetic oligonucleotide
  Antisense strand to SEQ ID NO: 150008
uauuucaugccauuucacc

SEQ ID NO: 150010 - RNA, 19 nt, Artificial Sequence
  Description of Artificial Sequence: Synthetic oligonucleotide
  Sense strand starting at position 2989 of SEQ ID NO: 1926
ggaguuauaauucggguca

SEQ ID NO: 150011 - RNA, 19 nt, Artificial Sequence
  Description of Artificial Sequence: Synthetic oligonucleotide
  Antisense strand to SEQ ID NO: 150010
ugacccgaauuauaacucc

SEQ ID NO: 150012 - RNA, 19 nt, Artificial Sequence
  Description of Artificial Sequence: Synthetic oligonucleotide
  Sense strand starting at position 3030 of SEQ ID NO: 1926
cccagugaggguuagaagu

SEQ ID NO: 150013 - RNA, 19 nt, Artificial Sequence
  Description of Artificial Sequence: Synthetic oligonucleotide
  Antisense strand to SEQ ID NO: 150012
acuucuaacccucacuggg

SEQ ID NO: 150014 - RNA, 19 nt, Artificial Sequence
  Description of Artificial Sequence: Synthetic oligonucleotide
  Sense strand starting at position 3133 of SEQ ID NO: 1926
ccuuccuggcugggagaaa

SEQ ID NO: 150015 - RNA, 19 nt, Artificial Sequence
  Description of Artificial Sequence: Synthetic oligonucleotide
  Antisense strand to SEQ ID NO: 150014
uuucucccagccaggaagg

SEQ ID NO: 150016 - RNA, 19 nt, Artificial Sequence
  Description of Artificial Sequence: Synthetic oligonucleotide
  Sense strand starting at position 3486 of SEQ ID NO: 1926
ggagacgcguccucagaga

SEQ ID NO: 150017 - RNA, 19 nt, Artificial Sequence
  Description of Artificial Sequence: Synthetic oligonucleotide
  Antisense strand to SEQ ID NO: 150016
ucucugaggacgcgucucc

SEQ ID NO: 150018 - RNA, 19 nt, Artificial Sequence
  Description of Artificial Sequence: Synthetic oligonucleotide
  Sense strand starting at position 3752 of SEQ ID NO: 1926
uggguuaacugaucgcaga

SEQ ID NO: 150019 - RNA, 19 nt, Artificial Sequence
  Description of Artificial Sequence: Synthetic oligonucleotide
  Antisense strand to SEQ ID NO: 150018
ucugcgaucaguuaaccca

SEQ ID NO: 150020 - RNA, 19 nt, Artificial Sequence
  Description of Artificial Sequence: Synthetic oligonucleotide
  Sense strand starting at position 3753 of SEQ ID NO: 1926
ggguuaacugaucgcagaa

SEQ ID NO: 150021 - RNA, 19 nt, Artificial Sequence
  Description of Artificial Sequence: Synthetic oligonucleotide
  Antisense strand to SEQ ID NO: 150020
uucugcgaucaguuaaccc

SEQ ID NO: 150022 - RNA, 19 nt, Artificial Sequence
  Description of Artificial Sequence: Synthetic oligonucleotide
  Sense strand starting at position 3983 of SEQ ID NO: 1926
ccuuguugguguccagaac

SEQ ID NO: 150023 - RNA, 19 nt, Artificial Sequence
  Description of Artificial Sequence: Synthetic oligonucleotide
  Antisense strand to SEQ ID NO: 150022
guucuggacaccaacaagg

SEQ ID NO: 150024 - RNA, 19 nt, Artificial Sequence
  Description of Artificial Sequence: Synthetic oligonucleotide
  Sense strand starting at position 376 of SEQ ID NO: 1927
gugaaacguggucaccaua

SEQ ID NO: 150025 - RNA, 19 nt, Artificial Sequence
  Description of Artificial Sequence: Synthetic oligonucleotide
  Antisense strand to SEQ ID NO: 150024
uauggugaccacguuucac

SEQ ID NO: 150026 - RNA, 19 nt, Artificial Sequence
  Description of Artificial Sequence: Synthetic oligonucleotide
  Sense strand starting at position 402 of SEQ ID NO: 1927
gggccuucuccagaggagu

SEQ ID NO: 150027 - RNA, 19 nt, Artificial Sequence
  Description of Artificial Sequence: Synthetic oligonucleotide
  Antisense strand to SEQ ID NO: 150026
acuccucuggagaaggccc

SEQ ID NO: 150028 - RNA, 19 nt, Artificial Sequence
  Description of Artificial Sequence: Synthetic oligonucleotide
  Sense strand starting at position 463 of SEQ ID NO: 1927
cccauuccucaggaaguca

SEQ ID NO: 150029 - RNA, 19 nt, Artificial Sequence
  Description of Artificial Sequence: Synthetic oligonucleotide
  Antisense strand to SEQ ID NO: 150028
ugacuuccugaggaauggg

SEQ ID NO: 150030 - RNA, 19 nt, Artificial Sequence
  Description of Artificial Sequence: Synthetic oligonucleotide
  Sense strand starting at position 578 of SEQ ID NO: 1927
ucuauaucaguacagguua

SEQ ID NO: 150031 - RNA, 19 nt, Artificial Sequence
  Description of Artificial Sequence: Synthetic oligonucleotide
  Antisense strand to SEQ ID NO: 150030
uaaccuguacugauauaga

SEQ ID NO: 150032 - RNA, 19 nt, Artificial Sequence
  Description of Artificial Sequence: Synthetic oligonucleotide
  Sense strand starting at position 852 of SEQ ID NO: 1927
ucaccugauaucgaggagu

SEQ ID NO: 150033 - RNA, 19 nt, Artificial Sequence
  Description of Artificial Sequence: Synthetic oligonucleotide
  Antisense strand to SEQ ID NO: 150032
acuccucgauaucagguga

SEQ ID NO: 150034 - RNA, 19 nt, Artificial Sequence
  Description of Artificial Sequence: Synthetic oligonucleotide
  Sense strand starting at position 855 of SEQ ID NO: 1927
ccugauaucgaggaguguc

SEQ ID NO: 150035 - RNA, 19 nt, Artificial Sequence
  Description of Artificial Sequence: Synthetic oligonucleotide
  Antisense strand to SEQ ID NO: 150034
gacacuccucgauaucagg

SEQ ID NO: 150036 - RNA, 19 nt, Artificial Sequence
  Description of Artificial Sequence: Synthetic oligonucleotide
  Sense strand starting at position 1065 of SEQ ID NO: 1927
uugaaaucuccaggaucau

SEQ ID NO: 150037 - RNA, 19 nt, Artificial Sequence
  Description of Artificial Sequence: Synthetic oligonucleotide
  Antisense strand to SEQ ID NO: 150036
augauccuggagauuucaa

SEQ ID NO: 150038 - RNA, 19 nt, Artificial Sequence
  Description of Artificial Sequence: Synthetic oligonucleotide
  Sense strand starting at position 1101 of SEQ ID NO: 1927
gaggcuacgcuugaauaag

SEQ ID NO: 150039 - RNA, 19 nt, Artificial Sequence
  Description of Artificial Sequence: Synthetic oligonucleotide
  Antisense strand to SEQ ID NO: 150038
cuuauucaagcguagccuc

SEQ ID NO: 150040 - RNA, 19 nt, Artificial Sequence
  Description of Artificial Sequence: Synthetic oligonucleotide
  Sense strand starting at position 1122 of SEQ ID NO: 1927
ccuggauuccaauagcaca

SEQ ID NO: 150041 - RNA, 19 nt, Artificial Sequence
  Description of Artificial Sequence: Synthetic oligonucleotide
  Antisense strand to SEQ ID NO: 150040
ugugcuauuggaauccagg

SEQ ID NO: 150042 - RNA, 19 nt, Artificial Sequence
  Description of Artificial Sequence: Synthetic oligonucleotide
  Sense strand starting at position 1249 of SEQ ID NO: 1927
cagguuaaaucuguggaga

SEQ ID NO: 150043 - RNA, 19 nt, Artificial Sequence
  Description of Artificial Sequence: Synthetic oligonucleotide
  Antisense strand to SEQ ID NO: 150042
ucuccacagauuuaaccug

SEQ ID NO: 150044 - RNA, 19 nt, Artificial Sequence
  Description of Artificial Sequence: Synthetic oligonucleotide
  Sense strand starting at position 1250 of SEQ ID NO: 1927
agguuaaaucuguggagag

SEQ ID NO: 150045 - RNA, 19 nt, Artificial Sequence
  Description of Artificial Sequence: Synthetic oligonucleotide
  Antisense strand to SEQ ID NO: 150044
cucuccacagauuuaaccu

SEQ ID NO: 150046 - RNA, 19 nt, Artificial Sequence
  Description of Artificial Sequence: Synthetic oligonucleotide
  Sense strand starting at position 1252 of SEQ ID NO: 1927
guuaaaucuguggagaguc

SEQ ID NO: 150047 - RNA, 19 nt, Artificial Sequence
  Description of Artificial Sequence: Synthetic oligonucleotide
  Antisense strand to SEQ ID NO: 150046
gacucuccacagauuuaac

SEQ ID NO: 150048 - RNA, 19 nt, Artificial Sequence
  Description of Artificial Sequence: Synthetic oligonucleotide
  Sense strand starting at position 1451 of SEQ ID NO: 1927
agagccauuucucaagaaa

SEQ ID NO: 150049 - RNA, 19 nt, Artificial Sequence
  Description of Artificial Sequence: Synthetic oligonucleotide
  Antisense strand to SEQ ID NO: 150048
uuucuugagaaauggcucu

SEQ ID NO: 150050 - RNA, 19 nt, Artificial Sequence
  Description of Artificial Sequence: Synthetic oligonucleotide
  Sense strand starting at position 1611 of SEQ ID NO: 1927
aggacuuaccacuguggga

SEQ ID NO: 150051 - RNA, 19 nt, Artificial Sequence
  Description of Artificial Sequence: Synthetic oligonucleotide
  Antisense strand to SEQ ID NO: 150050
ucccacagugguaaguccu

SEQ ID NO: 150052 - RNA, 19 nt, Artificial Sequence
  Description of Artificial Sequence: Synthetic oligonucleotide
  Sense strand starting at position 1695 of SEQ ID NO: 1927
ugaucucugucccuaggaa

SEQ ID NO: 150053 - RNA, 19 nt, Artificial Sequence
  Description of Artificial Sequence: Synthetic oligonucleotide
  Antisense strand to SEQ ID NO: 150052
uuccuagggacagagauca

SEQ ID NO: 150054 - RNA, 19 nt, Artificial Sequence
  Description of Artificial Sequence: Synthetic oligonucleotide
  Sense strand starting at position 1696 of SEQ ID NO: 1927
gaucucugucccuaggaau

SEQ ID NO: 150055 - RNA, 19 nt, Artificial Sequence
  Description of Artificial Sequence: Synthetic oligonucleotide
  Antisense strand to SEQ ID NO: 150054
auuccuagggacagagauc

SEQ ID NO: 150056 - RNA, 19 nt, Artificial Sequence
  Description of Artificial Sequence: Synthetic oligonucleotide
  Sense strand starting at position 1963 of SEQ ID NO: 1927
ccaggcuguccuggaaaga

SEQ ID NO: 150057 - RNA, 19 nt, Artificial Sequence
  Description of Artificial Sequence: Synthetic oligonucleotide
  Antisense strand to SEQ ID NO: 150056
ucuuuccaggacagccugg

SEQ ID NO: 150058 - RNA, 19 nt, Artificial Sequence
  Description of Artificial Sequence: Synthetic oligonucleotide
  Sense strand starting at position 1986 of SEQ ID NO: 1927
cucagaagugugggacaaa

SEQ ID NO: 150059 - RNA, 19 nt, Artificial Sequence
  Description of Artificial Sequence: Synthetic oligonucleotide
  Antisense strand to SEQ ID NO: 150058
uuugucccacacuucugag

SEQ ID NO: 150060 - RNA, 19 nt, Artificial Sequence
  Description of Artificial Sequence: Synthetic oligonucleotide
  Sense strand starting at position 2089 of SEQ ID NO: 1927
gaagacagcccuugagaug

SEQ ID NO: 150061 - RNA, 19 nt, Artificial Sequence
  Description of Artificial Sequence: Synthetic oligonucleotide
  Antisense strand to SEQ ID NO: 150060
caucucaagggcugucuuc

SEQ ID NO: 150062 - RNA, 19 nt, Artificial Sequence
  Description of Artificial Sequence: Synthetic oligonucleotide
  Sense strand starting at position 2145 of SEQ ID NO: 1927
ggucaaggucaugagcuaa

SEQ ID NO: 150063 - RNA, 19 nt, Artificial Sequence
  Description of Artificial Sequence: Synthetic oligonucleotide
  Antisense strand to SEQ ID NO: 150062
uuagcucaugaccuugacc

SEQ ID NO: 150064 - RNA, 19 nt, Artificial Sequence
  Description of Artificial Sequence: Synthetic oligonucleotide
  Sense strand starting at position 2201 of SEQ ID NO: 1927
cgauuucuucuaggccuca

SEQ ID NO: 150065 - RNA, 19 nt, Artificial Sequence
  Description of Artificial Sequence: Synthetic oligonucleotide
  Antisense strand to SEQ ID NO: 150064
ugaggccuagaagaaaucg

SEQ ID NO: 150066 - RNA, 19 nt, Artificial Sequence
  Description of Artificial Sequence: Synthetic oligonucleotide
  Sense strand starting at position 2244 of SEQ ID NO: 1927
cggagacucuuggcaugga

SEQ ID NO: 150067 - RNA, 19 nt, Artificial Sequence
  Description of Artificial Sequence: Synthetic oligonucleotide
  Antisense strand to SEQ ID NO: 150066
uccaugccaagagucuccg

SEQ ID NO: 150068 - RNA, 19 nt, Artificial Sequence
  Description of Artificial Sequence: Synthetic oligonucleotide
  Sense strand starting at position 2247 of SEQ ID NO: 1927
agacucuuggcauggagga

SEQ ID NO: 150069 - RNA, 19 nt, Artificial Sequence
  Description of Artificial Sequence: Synthetic oligonucleotide
  Antisense strand to SEQ ID NO: 150068
uccuccaugccaagagucu

SEQ ID NO: 150070 - RNA, 19 nt, Artificial Sequence
  Description of Artificial Sequence: Synthetic oligonucleotide
  Sense strand starting at position 2385 of SEQ ID NO: 1927
cagggagaguuuccuguau

SEQ ID NO: 150071 - RNA, 19 nt, Artificial Sequence
  Description of Artificial Sequence: Synthetic oligonucleotide
  Antisense strand to SEQ ID NO: 150070
auacaggaaacucucccug

SEQ ID NO: 150072 - RNA, 19 nt, Artificial Sequence
  Description of Artificial Sequence: Synthetic oligonucleotide
  Sense strand starting at position 2389 of SEQ ID NO: 1927
gagaguuuccuguauccca

SEQ ID NO: 150073 - RNA, 19 nt, Artificial Sequence
  Description of Artificial Sequence: Synthetic oligonucleotide
  Antisense strand to SEQ ID NO: 150072
ugggauacaggaaacucuc

SEQ ID NO: 150074 - RNA, 19 nt, Artificial Sequence
  Description of Artificial Sequence: Synthetic oligonucleotide
  Sense strand starting at position 2396 of SEQ ID NO: 1927
uccuguaucccaggagaca

SEQ ID NO: 150075 - RNA, 19 nt, Artificial Sequence
  Description of Artificial Sequence: Synthetic oligonucleotide
  Antisense strand to SEQ ID NO: 150074
ugucuccugggauacagga

SEQ ID NO: 150076 - RNA, 19 nt, Artificial Sequence
  Description of Artificial Sequence: Synthetic oligonucleotide
  Sense strand starting at position 2422 of SEQ ID NO: 1927
aucguucuaccacaguaga

SEQ ID NO: 150077 - RNA, 19 nt, Artificial Sequence
  Description of Artificial Sequence: Synthetic oligonucleotide
  Antisense strand to SEQ ID NO: 150076
ucuacugugguagaacgau

SEQ ID NO: 150078 - RNA, 19 nt, Artificial Sequence
  Description of Artificial Sequence: Synthetic oligonucleotide
  Sense strand starting at position 2484 of SEQ ID NO: 1927
ggguguaguaccuaucacu

SEQ ID NO: 150079 - RNA, 19 nt, Artificial Sequence
  Description of Artificial Sequence: Synthetic oligonucleotide
  Antisense strand to SEQ ID NO: 150078
agugauagguacuacaccc

SEQ ID NO: 150080 - RNA, 19 nt, Artificial Sequence
  Description of Artificial Sequence: Synthetic oligonucleotide
  Sense strand starting at position 2695 of SEQ ID NO: 1927
agcagacuuucuccugaac

SEQ ID NO: 150081 - RNA, 19 nt, Artificial Sequence
  Description of Artificial Sequence: Synthetic oligonucleotide
  Antisense strand to SEQ ID NO: 150080
guucaggagaaagucugcu

SEQ ID NO: 150082 - RNA, 19 nt, Artificial Sequence
  Description of Artificial Sequence: Synthetic oligonucleotide
  Sense strand starting at position 2911 of SEQ ID NO: 1927
cagacauggccuugaaguc

SEQ ID NO: 150083 - RNA, 19 nt, Artificial Sequence
  Description of Artificial Sequence: Synthetic oligonucleotide
  Antisense strand to SEQ ID NO: 150082
gacuucaaggccaugucug

SEQ ID NO: 150084 - RNA, 19 nt, Artificial Sequence
  Description of Artificial Sequence: Synthetic oligonucleotide
  Sense strand starting at position 3041 of SEQ ID NO: 1927
cagaucauauauguggaau

SEQ ID NO: 150085 - RNA, 19 nt, Artificial Sequence
  Description of Artificial Sequence: Synthetic oligonucleotide
  Antisense strand to SEQ ID NO: 150084
auuccacauauaugaucug

SEQ ID NO: 150086 - RNA, 19 nt, Artificial Sequence
  Description of Artificial Sequence: Synthetic oligonucleotide
  Sense strand starting at position 3159 of SEQ ID NO: 1927
gaaggagcuugauuccuga

SEQ ID NO: 150087 - RNA, 19 nt, Artificial Sequence
  Description of Artificial Sequence: Synthetic oligonucleotide
  Antisense strand to SEQ ID NO: 150086
ucaggaaucaagcuccuuc

SEQ ID NO: 150088 - RNA, 19 nt, Artificial Sequence
  Description of Artificial Sequence: Synthetic oligonucleotide
  Sense strand starting at position 3166 of SEQ ID NO: 1927
cuugauuccugacugauaa

SEQ ID NO: 150089 - RNA, 19 nt, Artificial Sequence
  Description of Artificial Sequence: Synthetic oligonucleotide
  Antisense strand to SEQ ID NO: 150088
uuaucagucaggaaucaag

SEQ ID NO: 150090 - RNA, 19 nt, Artificial Sequence
  Description of Artificial Sequence: Synthetic oligonucleotide
  Sense strand starting at position 3167 of SEQ ID NO: 1927
uugauuccugacugauaac

SEQ ID NO: 150091 - RNA, 19 nt, Artificial Sequence
  Description of Artificial Sequence: Synthetic oligonucleotide
  Antisense strand to SEQ ID NO: 150090
guuaucagucaggaaucaa

SEQ ID NO: 150092 - RNA, 19 nt, Artificial Sequence
  Description of Artificial Sequence: Synthetic oligonucleotide
  Sense strand starting at position 3187 of SEQ ID NO: 1927
gaucucauccagggaccuu

SEQ ID NO: 150093 - RNA, 19 nt, Artificial Sequence
  Description of Artificial Sequence: Synthetic oligonucleotide
  Antisense strand to SEQ ID NO: 150092
aaggucccuggaugagauc

SEQ ID NO: 150094 - RNA, 19 nt, Artificial Sequence
  Description of Artificial Sequence: Synthetic oligonucleotide
  Sense strand starting at position 3220 of SEQ ID NO: 1927
uggauucgagaaugccuau

SEQ ID NO: 150095 - RNA, 19 nt, Artificial Sequence
  Description of Artificial Sequence: Synthetic oligonucleotide
  Antisense strand to SEQ ID NO: 150094
auaggcauucucgaaucca

SEQ ID NO: 150096 - RNA, 19 nt, Artificial Sequence
  Description of Artificial Sequence: Synthetic oligonucleotide
  Sense strand starting at position 3223 of SEQ ID NO: 1927
auucgagaaugccuauauu

SEQ ID NO: 150097 - RNA, 19 nt, Artificial Sequence
  Description of Artificial Sequence: Synthetic oligonucleotide
  Antisense strand to SEQ ID NO: 150096
aauauaggcauucucgaau

SEQ ID NO: 150098 - RNA, 19 nt, Artificial Sequence
  Description of Artificial Sequence: Synthetic oligonucleotide
  Sense strand starting at position 3226 of SEQ ID NO: 1927
cgagaaugccuauauucuc

SEQ ID NO: 150099 - RNA, 19 nt, Artificial Sequence
  Description of Artificial Sequence: Synthetic oligonucleotide
  Antisense strand to SEQ ID NO: 150098
gagaauauaggcauucucg

SEQ ID NO: 150100 - RNA, 19 nt, Artificial Sequence
  Description of Artificial Sequence: Synthetic oligonucleotide
  Sense strand starting at position 3325 of SEQ ID NO: 1927
gugguuugaagccaaugau

SEQ ID NO: 150101 - RNA, 19 nt, Artificial Sequence
  Description of Artificial Sequence: Synthetic oligonucleotide
  Antisense strand to SEQ ID NO: 150100
aucauuggcuucaaaccac

SEQ ID NO: 150102 - RNA, 19 nt, Artificial Sequence
  Description of Artificial Sequence: Synthetic oligonucleotide
  Sense strand starting at position 3328 of SEQ ID NO: 1927
guuugaagccaaugaucug

SEQ ID NO: 150103 - RNA, 19 nt, Artificial Sequence
  Description of Artificial Sequence: Synthetic oligonucleotide
  Antisense strand to SEQ ID NO: 150102
cagaucauuggcuucaaac

SEQ ID NO: 150104 - RNA, 19 nt, Artificial Sequence
  Description of Artificial Sequence: Synthetic oligonucleotide
  Sense strand starting at position 140 of SEQ ID NO: 1928
uugagccuuuccuuaggau

SEQ ID NO: 150105 - RNA, 19 nt, Artificial Sequence
  Description of Artificial Sequence: Synthetic oligonucleotide
  Antisense strand to SEQ ID NO: 150104
auccuaaggaaaggcucaa

SEQ ID NO: 150106 - RNA, 19 nt, Artificial Sequence
  Description of Artificial Sequence: Synthetic oligonucleotide
  Sense strand starting at position 246 of SEQ ID NO: 1928
uggcgagucaaugagucau

SEQ ID NO: 150107 - RNA, 19 nt, Artificial Sequence
  Description of Artificial Sequence: Synthetic oligonucleotide
  Antisense strand to SEQ ID NO: 150106
augacucauugacucgcca

SEQ ID NO: 150108 - RNA, 19 nt, Artificial Sequence
  Description of Artificial Sequence: Synthetic oligonucleotide
  Sense strand starting at position 248 of SEQ ID NO: 1928
gcgagucaaugagucauuu

SEQ ID NO: 150109 - RNA, 19 nt, Artificial Sequence
  Description of Artificial Sequence: Synthetic oligonucleotide
  Antisense strand to SEQ ID NO: 150108
aaaugacucauugacucgc

SEQ ID NO: 150110 - RNA, 19 nt, Artificial Sequence
  Description of Artificial Sequence: Synthetic oligonucleotide
  Sense strand starting at position 270 of SEQ ID NO: 1928
gagguugaccgugagcaaa

SEQ ID NO: 150111 - RNA, 19 nt, Artificial Sequence
  Description of Artificial Sequence: Synthetic oligonucleotide
  Antisense strand to SEQ ID NO: 150110
uuugcucacggucaaccuc

SEQ ID NO: 150112 - RNA, 19 nt, Artificial Sequence
  Description of Artificial Sequence: Synthetic oligonucleotide
  Sense strand starting at position 280 of SEQ ID NO: 1928
gugagcaaaucuuccaaug

SEQ ID NO: 150113 - RNA, 19 nt, Artificial Sequence
  Description of Artificial Sequence: Synthetic oligonucleotide
  Antisense strand to SEQ ID NO: 150112
cauuggaagauuugcucac

SEQ ID NO: 150114 - RNA, 19 nt, Artificial Sequence
  Description of Artificial Sequence: Synthetic oligonucleotide
  Sense strand starting at position 328 of SEQ ID NO: 1928
agaaaucauucggaagcca

SEQ ID NO: 150115 - RNA, 19 nt, Artificial Sequence
  Description of Artificial Sequence: Synthetic oligonucleotide
  Antisense strand to SEQ ID NO: 150114
uggcuuccgaaugauuucu

SEQ ID NO: 150116 - RNA, 19 nt, Artificial Sequence
  Description of Artificial Sequence: Synthetic oligonucleotide
  Sense strand starting at position 505 of SEQ ID NO: 1928
ugacauacuccuggaaguu

SEQ ID NO: 150117 - RNA, 19 nt, Artificial Sequence
  Description of Artificial Sequence: Synthetic oligonucleotide
  Antisense strand to SEQ ID NO: 150116
aacuuccaggaguauguca

SEQ ID NO: 150118 - RNA, 19 nt, Artificial Sequence
  Description of Artificial Sequence: Synthetic oligonucleotide
  Sense strand starting at position 585 of SEQ ID NO: 1928
agcuucuaauguguuagaa

SEQ ID NO: 150119 - RNA, 19 nt, Artificial Sequence
  Description of Artificial Sequence: Synthetic oligonucleotide
  Antisense strand to SEQ ID NO: 150118
uucuaacacauuagaagcu

SEQ ID NO: 150120 - RNA, 19 nt, Artificial Sequence
  Description of Artificial Sequence: Synthetic oligonucleotide
  Sense strand starting at position 594 of SEQ ID NO: 1928
uguguuagaaugugaaauc

SEQ ID NO: 150121 - RNA, 19 nt, Artificial Sequence
  Description of Artificial Sequence: Synthetic oligonucleotide
  Antisense strand to SEQ ID NO: 150120
gauuucacauucuaacaca

SEQ ID NO: 150122 - RNA, 19 nt, Artificial Sequence
  Description of Artificial Sequence: Synthetic oligonucleotide
  Sense strand starting at position 609 of SEQ ID NO: 1928
aauccauacucagugguga

SEQ ID NO: 150123 - RNA, 19 nt, Artificial Sequence
  Description of Artificial Sequence: Synthetic oligonucleotide
  Antisense strand to SEQ ID NO: 150122
ucaccacugaguauggauu

SEQ ID NO: 150124 - RNA, 19 nt, Artificial Sequence
  Description of Artificial Sequence: Synthetic oligonucleotide
  Sense strand starting at position 610 of SEQ ID NO: 1928
auccauacucaguggugau

SEQ ID NO: 150125 - RNA, 19 nt, Artificial Sequence
  Description of Artificial Sequence: Synthetic oligonucleotide
  Antisense strand to SEQ ID NO: 150124
aucaccacugaguauggau

SEQ ID NO: 150126 - RNA, 19 nt, Artificial Sequence
  Description of Artificial Sequence: Synthetic oligonucleotide
  Sense strand starting at position 611 of SEQ ID NO: 1928
uccauacucaguggugaug

SEQ ID NO: 150127 - RNA, 19 nt, Artificial Sequence
  Description of Artificial Sequence: Synthetic oligonucleotide
  Antisense strand to SEQ ID NO: 150126
caucaccacugaguaugga

SEQ ID NO: 150128 - RNA, 19 nt, Artificial Sequence
  Description of Artificial Sequence: Synthetic oligonucleotide
  Sense strand starting at position 662 of SEQ ID NO: 1928
ggcaauccucucugcaagu

SEQ ID NO: 150129 - RNA, 19 nt, Artificial Sequence
  Description of Artificial Sequence: Synthetic oligonucleotide
  Antisense strand to SEQ ID NO: 150128
acuugcagagaggauugcc

SEQ ID NO: 150130 - RNA, 19 nt, Artificial Sequence
  Description of Artificial Sequence: Synthetic oligonucleotide
  Sense strand starting at position 745 of SEQ ID NO: 1928
cucaguuacugguccucau

SEQ ID NO: 150131 - RNA, 19 nt, Artificial Sequence
  Description of Artificial Sequence: Synthetic oligonucleotide
  Antisense strand to SEQ ID NO: 150130
augaggaccaguaacugag

SEQ ID NO: 150132 - RNA, 19 nt, Artificial Sequence
  Description of Artificial Sequence: Synthetic oligonucleotide
  Sense strand starting at position 754 of SEQ ID NO: 1928
ugguccucauuuggagaga

SEQ ID NO: 150133 - RNA, 19 nt, Artificial Sequence
  Description of Artificial Sequence: Synthetic oligonucleotide
  Antisense strand to SEQ ID NO: 150132
ucucuccaaaugaggacca

SEQ ID NO: 150134 - RNA, 19 nt, Artificial Sequence
  Description of Artificial Sequence: Synthetic oligonucleotide
  Sense strand starting at position 755 of SEQ ID NO: 1928
gguccucauuuggagagau

SEQ ID NO: 150135 - RNA, 19 nt, Artificial Sequence
  Description of Artificial Sequence: Synthetic oligonucleotide
  Antisense strand to SEQ ID NO: 150134
aucucuccaaaugaggacc

SEQ ID NO: 150136 - RNA, 19 nt, Artificial Sequence
  Description of Artificial Sequence: Synthetic oligonucleotide
  Sense strand starting at position 850 of SEQ ID NO: 1928
cucagaauguggguaaaug

SEQ ID NO: 150137 - RNA, 19 nt, Artificial Sequence
  Description of Artificial Sequence: Synthetic oligonucleotide
  Antisense strand to SEQ ID NO: 150136
cauuuacccacauucugag

SEQ ID NO: 150138 - RNA, 19 nt, Artificial Sequence
  Description of Artificial Sequence: Synthetic oligonucleotide
  Sense strand starting at position 851 of SEQ ID NO: 1928
ucagaauguggguaaaugu

SEQ ID NO: 150139 - RNA, 19 nt, Artificial Sequence
  Description of Artificial Sequence: Synthetic oligonucleotide
  Antisense strand to SEQ ID NO: 150138
acauuuacccacauucuga

SEQ ID NO: 150140 - RNA, 19 nt, Artificial Sequence
  Description of Artificial Sequence: Synthetic oligonucleotide
  Sense strand starting at position 860 of SEQ ID NO: 1928
ggguaaaugugagucagau

SEQ ID NO: 150141 - RNA, 19 nt, Artificial Sequence
  Description of Artificial Sequence: Synthetic oligonucleotide
  Antisense strand to SEQ ID NO: 150140
aucugacucacauuuaccc

SEQ ID NO: 150142 - RNA, 19 nt, Artificial Sequence
  Description of Artificial Sequence: Synthetic oligonucleotide
  Sense strand starting at position 1311 of SEQ ID NO: 1928
gcuuaaggauucuaagaag

SEQ ID NO: 150143 - RNA, 19 nt, Artificial Sequence
  Description of Artificial Sequence: Synthetic oligonucleotide
  Antisense strand to SEQ ID NO: 150142
cuucuuagaauccuuaagc

SEQ ID NO: 150144 - RNA, 19 nt, Artificial Sequence
  Description of Artificial Sequence: Synthetic oligonucleotide
  Sense strand starting at position 1999 of SEQ ID NO: 1928
agcucaguuugcucaguuu

SEQ ID NO: 150145 - RNA, 19 nt, Artificial Sequence
  Description of Artificial Sequence: Synthetic oligonucleotide
  Antisense strand to SEQ ID NO: 150144
aaacugagcaaacugagcu

SEQ ID NO: 150146 - RNA, 19 nt, Artificial Sequence
  Description of Artificial Sequence: Synthetic oligonucleotide
  Sense strand starting at position 2010 of SEQ ID NO: 1928
cucaguuugcucuucguga

SEQ ID NO: 150147 - RNA, 19 nt, Artificial Sequence
  Description of Artificial Sequence: Synthetic oligonucleotide
  Antisense strand to SEQ ID NO: 150146
ucacgaagagcaaacugag

SEQ ID NO: 150148 - RNA, 19 nt, Artificial Sequence
  Description of Artificial Sequence: Synthetic oligonucleotide
  Sense strand starting at position 2012 of SEQ ID NO: 1928
caguuugcucuucgugaca

SEQ ID NO: 150149 - RNA, 19 nt, Artificial Sequence
  Description of Artificial Sequence: Synthetic oligonucleotide
  Antisense strand to SEQ ID NO: 150148
ugucacgaagagcaaacug

SEQ ID NO: 150150 - RNA, 19 nt, Artificial Sequence
  Description of Artificial Sequence: Synthetic oligonucleotide
  Sense strand starting at position 2097 of SEQ ID NO: 1928
gaaugugacccucgagcca

SEQ ID NO: 150151 - RNA, 19 nt, Artificial Sequence
  Description of Artificial Sequence: Synthetic oligonucleotide
  Antisense strand to SEQ ID NO: 150150
uggcucgagggucacauuc

SEQ ID NO: 150152 - RNA, 19 nt, Artificial Sequence
  Description of Artificial Sequence: Synthetic oligonucleotide
  Sense strand starting at position 2158 of SEQ ID NO: 1928
cggugucccacagaggaua

SEQ ID NO: 150153 - RNA, 19 nt, Artificial Sequence
  Description of Artificial Sequence: Synthetic oligonucleotide
  Antisense strand to SEQ ID NO: 150152
uauccucugugggacaccg

SEQ ID NO: 150154 - RNA, 19 nt, Artificial Sequence
  Description of Artificial Sequence: Synthetic oligonucleotide
  Sense strand starting at position 2203 of SEQ ID NO: 1928
gggaguagccaguggugua

SEQ ID NO: 150155 - RNA, 19 nt, Artificial Sequence
  Description of Artificial Sequence: Synthetic oligonucleotide
  Antisense strand to SEQ ID NO: 150154
uacaccacuggcuacuccc

SEQ ID NO: 150156 - RNA, 19 nt, Artificial Sequence
  Description of Artificial Sequence: Synthetic oligonucleotide
  Sense strand starting at position 2204 of SEQ ID NO: 1928
ggaguagccagugguguaa

SEQ ID NO: 150157 - RNA, 19 nt, Artificial Sequence
  Description of Artificial Sequence: Synthetic oligonucleotide
  Antisense strand to SEQ ID NO: 150156
uuacaccacuggcuacucc

SEQ ID NO: 150158 - RNA, 19 nt, Artificial Sequence
  Description of Artificial Sequence: Synthetic oligonucleotide
  Sense strand starting at position 2322 of SEQ ID NO: 1928
ugguguuaaugugcaugca

SEQ ID NO: 150159 - RNA, 19 nt, Artificial Sequence
  Description of Artificial Sequence: Synthetic oligonucleotide
  Antisense strand to SEQ ID NO: 150158
ugcaugcacauuaacacca

SEQ ID NO: 150160 - RNA, 19 nt, Artificial Sequence
  Description of Artificial Sequence: Synthetic oligonucleotide
  Sense strand starting at position 2466 of SEQ ID NO: 1928
gaugaugagaguggugcua

SEQ ID NO: 150161 - RNA, 19 nt, Artificial Sequence
  Description of Artificial Sequence: Synthetic oligonucleotide
  Antisense strand to SEQ ID NO: 150160
uagcaccacucucaucauc

SEQ ID NO: 150162 - RNA, 19 nt, Artificial Sequence
  Description of Artificial Sequence: Synthetic oligonucleotide
  Sense strand starting at position 3053 of SEQ ID NO: 1928
ggucacuuguuguccucua

SEQ ID NO: 150163 - RNA, 19 nt, Artificial Sequence
  Description of Artificial Sequence: Synthetic oligonucleotide
  Antisense strand to SEQ ID NO: 150162
uagaggacaacaagugacc

SEQ ID NO: 150164 - RNA, 19 nt, Artificial Sequence
  Description of Artificial Sequence: Synthetic oligonucleotide
  Sense strand starting at position 3058 of SEQ ID NO: 1928
cuuguuguccucuagaaag

SEQ ID NO: 150165 - RNA, 19 nt, Artificial Sequence
  Description of Artificial Sequence: Synthetic oligonucleotide
  Antisense strand to SEQ ID NO: 150164
cuuucuagaggacaacaag

SEQ ID NO: 150166 - RNA, 19 nt, Artificial Sequence
  Description of Artificial Sequence: Synthetic oligonucleotide
  Sense strand starting at position 3060 of SEQ ID NO: 1928
uguuguccucuagaaagaa

SEQ ID NO: 150167 - RNA, 19 nt, Artificial Sequence
  Description of Artificial Sequence: Synthetic oligonucleotide
  Antisense strand to SEQ ID NO: 150166
uucuuucuagaggacaaca

SEQ ID NO: 150168 - RNA, 19 nt, Artificial Sequence
  Description of Artificial Sequence: Synthetic oligonucleotide
  Sense strand starting at position 3069 of SEQ ID NO: 1928
cuagaaagaagucguugua

SEQ ID NO: 150169 - RNA, 19 nt, Artificial Sequence
  Description of Artificial Sequence: Synthetic oligonucleotide
  Antisense strand to SEQ ID NO: 150168
uacaacgacuucuuucuag

SEQ ID NO: 150170 - RNA, 19 nt, Artificial Sequence
  Description of Artificial Sequence: Synthetic oligonucleotide
  Sense strand starting at position 3114 of SEQ ID NO: 1928
ccgaguacuccuugaaguc

SEQ ID NO: 150171 - RNA, 19 nt, Artificial Sequence
  Description of Artificial Sequence: Synthetic oligonucleotide
  Antisense strand to SEQ ID NO: 150170
gacuucaaggaguacucgg

SEQ ID NO: 150172 - RNA, 19 nt, Artificial Sequence
  Description of Artificial Sequence: Synthetic oligonucleotide
  Sense strand starting at position 3165 of SEQ ID NO: 1928
ucaucaagucaucgaugcu

SEQ ID NO: 150173 - RNA, 19 nt, Artificial Sequence
  Description of Artificial Sequence: Synthetic oligonucleotide
  Antisense strand to SEQ ID NO: 150172
agcaucgaugacuugauga

SEQ ID NO: 150174 - RNA, 19 nt, Artificial Sequence
  Description of Artificial Sequence: Synthetic oligonucleotide
  Sense strand starting at position 3440 of SEQ ID NO: 1928
gccugccuucccugcaaua

SEQ ID NO: 150175 - RNA, 19 nt, Artificial Sequence
  Description of Artificial Sequence: Synthetic oligonucleotide
  Antisense strand to SEQ ID NO: 150174
uauugcagggaaggcaggc

SEQ ID NO: 150176 - RNA, 19 nt, Artificial Sequence
  Description of Artificial Sequence: Synthetic oligonucleotide
  Sense strand starting at position 3833 of SEQ ID NO: 1928
uuauguggcauugagcauu

SEQ ID NO: 150177 - RNA, 19 nt, Artificial Sequence
  Description of Artificial Sequence: Synthetic oligonucleotide
  Antisense strand to SEQ ID NO: 150176
aaugcucaaugccacauaa

SEQ ID NO: 150178 - RNA, 19 nt, Artificial Sequence
  Description of Artificial Sequence: Synthetic oligonucleotide
  Sense strand starting at position 3839 of SEQ ID NO: 1928
ggcauugagcauuauccaa

SEQ ID NO: 150179 - RNA, 19 nt, Artificial Sequence
  Description of Artificial Sequence: Synthetic oligonucleotide
  Antisense strand to SEQ ID NO: 150178
uuggauaaugcucaaugcc

SEQ ID NO: 150180 - RNA, 19 nt, Artificial Sequence
  Description of Artificial Sequence: Synthetic oligonucleotide
  Sense strand starting at position 3851 of SEQ ID NO: 1928
uauccaagucucugaguga

SEQ ID NO: 150181 - RNA, 19 nt, Artificial Sequence
  Description of Artificial Sequence: Synthetic oligonucleotide
  Antisense strand to SEQ ID NO: 150180
ucacucagagacuuggaua

SEQ ID NO: 150182 - RNA, 19 nt, Artificial Sequence
  Description of Artificial Sequence: Synthetic oligonucleotide
  Sense strand starting at position 3972 of SEQ ID NO: 1928
cuaggagagcugugcaaga

SEQ ID NO: 150183 - RNA, 19 nt, Artificial Sequence
  Description of Artificial Sequence: Synthetic oligonucleotide
  Antisense strand to SEQ ID NO: 150182
ucuugcacagcucuccuag

SEQ ID NO: 150184 - RNA, 19 nt, Artificial Sequence
  Description of Artificial Sequence: Synthetic oligonucleotide
  Sense strand starting at position 289 of SEQ ID NO: 1929
ugguguauuugugaaacau

SEQ ID NO: 150185 - RNA, 19 nt, Artificial Sequence
  Description of Artificial Sequence: Synthetic oligonucleotide
  Antisense strand to SEQ ID NO: 150184
auguuucacaaauacacca

SEQ ID NO: 150186 - RNA, 19 nt, Artificial Sequence
  Description of Artificial Sequence: Synthetic oligonucleotide
  Sense strand starting at position 299 of SEQ ID NO: 1929
gugaaacaugucgaucaug

SEQ ID NO: 150187 - RNA, 19 nt, Artificial Sequence
  Description of Artificial Sequence: Synthetic oligonucleotide
  Antisense strand to SEQ ID NO: 150186
caugaucgacauguuucac

SEQ ID NO: 150188 - RNA, 19 nt, Artificial Sequence
  Description of Artificial Sequence: Synthetic oligonucleotide
  Sense strand starting at position 307 of SEQ ID NO: 1929
ugucgaucaugccuauuau

SEQ ID NO: 150189 - RNA, 19 nt, Artificial Sequence
  Description of Artificial Sequence: Synthetic oligonucleotide
  Antisense strand to SEQ ID NO: 150188
auaauaggcaugaucgaca

SEQ ID NO: 150190 - RNA, 19 nt, Artificial Sequence
  Description of Artificial Sequence: Synthetic oligonucleotide
  Sense strand starting at position 308 of SEQ ID NO: 1929
gucgaucaugccuauuaug

SEQ ID NO: 150191 - RNA, 19 nt, Artificial Sequence
  Description of Artificial Sequence: Synthetic oligonucleotide
  Antisense strand to SEQ ID NO: 150190
cauaauaggcaugaucgac

SEQ ID NO: 150192 - RNA, 19 nt, Artificial Sequence
  Description of Artificial Sequence: Synthetic oligonucleotide
  Sense strand starting at position 338 of SEQ ID NO: 1929
uugaguguugcucaucuuu

SEQ ID NO: 150193 - RNA, 19 nt, Artificial Sequence
  Description of Artificial Sequence: Synthetic oligonucleotide
  Antisense strand to SEQ ID NO: 150192
aaagaugagcaacacucaa

SEQ ID NO: 150194 - RNA, 19 nt, Artificial Sequence
  Description of Artificial Sequence: Synthetic oligonucleotide
  Sense strand starting at position 465 of SEQ ID NO: 1929
acggauaagguguagcaga

SEQ ID NO: 150195 - RNA, 19 nt, Artificial Sequence
  Description of Artificial Sequence: Synthetic oligonucleotide
  Antisense strand to SEQ ID NO: 150194
ucugcuacaccuuauccgu

SEQ ID NO: 150196 - RNA, 19 nt, Artificial Sequence
  Description of Artificial Sequence: Synthetic oligonucleotide
  Sense strand starting at position 466 of SEQ ID NO: 1929
cggauaagguguagcagaa

SEQ ID NO: 150197 - RNA, 19 nt, Artificial Sequence
  Description of Artificial Sequence: Synthetic oligonucleotide
  Antisense strand to SEQ ID NO: 150196
uucugcuacaccuuauccg

SEQ ID NO: 150198 - RNA, 19 nt, Artificial Sequence
  Description of Artificial Sequence: Synthetic oligonucleotide
  Sense strand starting at position 784 of SEQ ID NO: 1929
ggacaauggccuuggugau

SEQ ID NO: 150199 - RNA, 19 nt, Artificial Sequence
  Description of Artificial Sequence: Synthetic oligonucleotide
  Antisense strand to SEQ ID NO: 150198
aucaccaaggccauugucc

SEQ ID NO: 150200 - RNA, 19 nt, Artificial Sequence
  Description of Artificial Sequence: Synthetic oligonucleotide
  Sense strand starting at position 922 of SEQ ID NO: 1929
acgugaguguuagcaggaa

SEQ ID NO: 150201 - RNA, 19 nt, Artificial Sequence
  Description of Artificial Sequence: Synthetic oligonucleotide
  Antisense strand to SEQ ID NO: 150200
uuccugcuaacacucacgu

SEQ ID NO: 150202 - RNA, 19 nt, Artificial Sequence
  Description of Artificial Sequence: Synthetic oligonucleotide
  Sense strand starting at position 973 of SEQ ID NO: 1929
cuuguauucccuugggaac

SEQ ID NO: 150203 - RNA, 19 nt, Artificial Sequence
  Description of Artificial Sequence: Synthetic oligonucleotide
  Antisense strand to SEQ ID NO: 150202
guucccaagggaauacaag

SEQ ID NO: 150204 - RNA, 19 nt, Artificial Sequence
  Description of Artificial Sequence: Synthetic oligonucleotide
  Sense strand starting at position 999 of SEQ ID NO: 1929
aggaauggccucuguuaca

SEQ ID NO: 150205 - RNA, 19 nt, Artificial Sequence
  Description of Artificial Sequence: Synthetic oligonucleotide
  Antisense strand to SEQ ID NO: 150204
uguaacagaggccauuccu

SEQ ID NO: 150206 - RNA, 19 nt, Artificial Sequence
  Description of Artificial Sequence: Synthetic oligonucleotide
  Sense strand starting at position 1123 of SEQ ID NO: 1929
ccaagccuugacuguuuaa

SEQ ID NO: 150207 - RNA, 19 nt, Artificial Sequence
  Description of Artificial Sequence: Synthetic oligonucleotide
  Antisense strand to SEQ ID NO: 150206
uuaaacagucaaggcuugg

SEQ ID NO: 150208 - RNA, 19 nt, Artificial Sequence
  Description of Artificial Sequence: Synthetic oligonucleotide
  Sense strand starting at position 1126 of SEQ ID NO: 1929
agccuugacuguuuaaaua

SEQ ID NO: 150209 - RNA, 19 nt, Artificial Sequence
  Description of Artificial Sequence: Synthetic oligonucleotide
  Antisense strand to SEQ ID NO: 150208
uauuuaaacagucaaggcu

SEQ ID NO: 150210 - RNA, 19 nt, Artificial Sequence
  Description of Artificial Sequence: Synthetic oligonucleotide
  Sense strand starting at position 1283 of SEQ ID NO: 1929
gcauaugggugucugacaa

SEQ ID NO: 150211 - RNA, 19 nt, Artificial Sequence
  Description of Artificial Sequence: Synthetic oligonucleotide
  Antisense strand to SEQ ID NO: 150210
uugucagacacccauaugc

SEQ ID NO: 150212 - RNA, 19 nt, Artificial Sequence
  Description of Artificial Sequence: Synthetic oligonucleotide
  Sense strand starting at position 1315 of SEQ ID NO: 1929
ccucucaaugcaggagaaa

SEQ ID NO: 150213 - RNA, 19 nt, Artificial Sequence
  Description of Artificial Sequence: Synthetic oligonucleotide
  Antisense strand to SEQ ID NO: 150212
uuucuccugcauugagagg

SEQ ID NO: 150214 - RNA, 19 nt, Artificial Sequence
  Description of Artificial Sequence: Synthetic oligonucleotide
  Sense strand starting at position 1847 of SEQ ID NO: 1929
uucugagucuuuguccaca

SEQ ID NO: 150215 - RNA, 19 nt, Artificial Sequence
  Description of Artificial Sequence: Synthetic oligonucleotide
  Antisense strand to SEQ ID NO: 150214
uguggacaaagacucagaa

SEQ ID NO: 150216 - RNA, 19 nt, Artificial Sequence
  Description of Artificial Sequence: Synthetic oligonucleotide
  Sense strand starting at position 2003 of SEQ ID NO: 1929
agagcaguccuuuauaagg

SEQ ID NO: 150217 - RNA, 19 nt, Artificial Sequence
  Description of Artificial Sequence: Synthetic oligonucleotide
  Antisense strand to SEQ ID NO: 150216
ccuuauaaaggacugcucu

SEQ ID NO: 150218 - RNA, 19 nt, Artificial Sequence
  Description of Artificial Sequence: Synthetic oligonucleotide
  Sense strand starting at position 2060 of SEQ ID NO: 1929
ccaccucugucaucuguuu

SEQ ID NO: 150219 - RNA, 19 nt, Artificial Sequence
  Description of Artificial Sequence: Synthetic oligonucleotide
  Antisense strand to SEQ ID NO: 150218
aaacagaugacagaggugg

SEQ ID NO: 150220 - RNA, 19 nt, Artificial Sequence
  Description of Artificial Sequence: Synthetic oligonucleotide
  Sense strand starting at position 2132 of SEQ ID NO: 1929
caggauuucuggccagugu

SEQ ID NO: 150221 - RNA, 19 nt, Artificial Sequence
  Description of Artificial Sequence: Synthetic oligonucleotide
  Antisense strand to SEQ ID NO: 150220
acacuggccagaaauccug

SEQ ID NO: 150222 - RNA, 19 nt, Artificial Sequence
  Description of Artificial Sequence: Synthetic oligonucleotide
  Sense strand starting at position 2191 of SEQ ID NO: 1929
uggagucuucucuggcuca

SEQ ID NO: 150223 - RNA, 19 nt, Artificial Sequence
  Description of Artificial Sequence: Synthetic oligonucleotide
  Antisense strand to SEQ ID NO: 150222
ugagccagagaagacucca

SEQ ID NO: 150224 - RNA, 19 nt, Artificial Sequence
  Description of Artificial Sequence: Synthetic oligonucleotide
  Sense strand starting at position 2208 of SEQ ID NO: 1929
caaccuugauuugagggua

SEQ ID NO: 150225 - RNA, 19 nt, Artificial Sequence
  Description of Artificial Sequence: Synthetic oligonucleotide
  Antisense strand to SEQ ID NO: 150224
uacccucaaaucaagguug

SEQ ID NO: 150226 - RNA, 19 nt, Artificial Sequence
  Description of Artificial Sequence: Synthetic oligonucleotide
  Sense strand starting at position 2358 of SEQ ID NO: 1929
ccacacauuuguuaugaca

SEQ ID NO: 150227 - RNA, 19 nt, Artificial Sequence
  Description of Artificial Sequence: Synthetic oligonucleotide
  Antisense strand to SEQ ID NO: 150226
ugucauaacaaaugugugg

SEQ ID NO: 150228 - RNA, 19 nt, Artificial Sequence
  Description of Artificial Sequence: Synthetic oligonucleotide
  Sense strand starting at position 2371 of SEQ ID NO: 1929
augacagccuguucuauga

SEQ ID NO: 150229 - RNA, 19 nt, Artificial Sequence
  Description of Artificial Sequence: Synthetic oligonucleotide
  Antisense strand to SEQ ID NO: 150228
ucauagaacaggcugucau

SEQ ID NO: 150230 - RNA, 19 nt, Artificial Sequence
  Description of Artificial Sequence: Synthetic oligonucleotide
  Sense strand starting at position 2745 of SEQ ID NO: 1929
cucacuaucuagguugagu

SEQ ID NO: 150231 - RNA, 19 nt, Artificial Sequence
  Description of Artificial Sequence: Synthetic oligonucleotide
  Antisense strand to SEQ ID NO: 150230
acucaaccuagauagugag

SEQ ID NO: 150232 - RNA, 19 nt, Artificial Sequence
  Description of Artificial Sequence: Synthetic oligonucleotide
  Sense strand starting at position 2831 of SEQ ID NO: 1929
ggcacuaacuucccagaaa

SEQ ID NO: 150233 - RNA, 19 nt, Artificial Sequence
  Description of Artificial Sequence: Synthetic oligonucleotide
  Antisense strand to SEQ ID NO: 150232
uuucugggaaguuagugcc

SEQ ID NO: 150234 - RNA, 19 nt, Artificial Sequence
  Description of Artificial Sequence: Synthetic oligonucleotide
  Sense strand starting at position 3198 of SEQ ID NO: 1929
cucgucaguaccuauguaa

SEQ ID NO: 150235 - RNA, 19 nt, Artificial Sequence
  Description of Artificial Sequence: Synthetic oligonucleotide
  Antisense strand to SEQ ID NO: 150234
uuacauagguacugacgag

SEQ ID NO: 150236 - RNA, 19 nt, Artificial Sequence
  Description of Artificial Sequence: Synthetic oligonucleotide
  Sense strand starting at position 3201 of SEQ ID NO: 1929
gucaguaccuauguaacca

SEQ ID NO: 150237 - RNA, 19 nt, Artificial Sequence
  Description of Artificial Sequence: Synthetic oligonucleotide
  Antisense strand to SEQ ID NO: 150236
ugguuacauagguacugac

SEQ ID NO: 150238 - RNA, 19 nt, Artificial Sequence
  Description of Artificial Sequence: Synthetic oligonucleotide
  Sense strand starting at position 3252 of SEQ ID NO: 1929
augugauggcaauauuacu

SEQ ID NO: 150239 - RNA, 19 nt, Artificial Sequence
  Description of Artificial Sequence: Synthetic oligonucleotide
  Antisense strand to SEQ ID NO: 150238
aguaauauugccaucacau

SEQ ID NO: 150240 - RNA, 19 nt, Artificial Sequence
  Description of Artificial Sequence: Synthetic oligonucleotide
  Sense strand starting at position 3304 of SEQ ID NO: 1929
guggaaugcuacucagcua

SEQ ID NO: 150241 - RNA, 19 nt, Artificial Sequence
  Description of Artificial Sequence: Synthetic oligonucleotide
  Antisense strand to SEQ ID NO: 150240
uagcugaguagcauuccac

SEQ ID NO: 150242 - RNA, 19 nt, Artificial Sequence
  Description of Artificial Sequence: Synthetic oligonucleotide
  Sense strand starting at position 3466 of SEQ ID NO: 1929
agaguagaaucauagacac

SEQ ID NO: 150243 - RNA, 19 nt, Artificial Sequence
  Description of Artificial Sequence: Synthetic oligonucleotide
  Antisense strand to SEQ ID NO: 150242
gugucuaugauucuacucu

SEQ ID NO: 150244 - RNA, 19 nt, Artificial Sequence
  Description of Artificial Sequence: Synthetic oligonucleotide
  Sense strand starting at position 3518 of SEQ ID NO: 1929
ggugaaggaugagacauuu

SEQ ID NO: 150245 - RNA, 19 nt, Artificial Sequence
  Description of Artificial Sequence: Synthetic oligonucleotide
  Antisense strand to SEQ ID NO: 150244
aaaugucucauccuucacc

SEQ ID NO: 150246 - RNA, 19 nt, Artificial Sequence
  Description of Artificial Sequence: Synthetic oligonucleotide
  Sense strand starting at position 3543 of SEQ ID NO: 1929
ggguacaaugcaugcuauu

SEQ ID NO: 150247 - RNA, 19 nt, Artificial Sequence
  Description of Artificial Sequence: Synthetic oligonucleotide
  Antisense strand to SEQ ID NO: 150246
aauagcaugcauuguaccc

SEQ ID NO: 150248 - RNA, 19 nt, Artificial Sequence
  Description of Artificial Sequence: Synthetic oligonucleotide
  Sense strand starting at position 3592 of SEQ ID NO: 1929
accauugugccauauauuc

SEQ ID NO: 150249 - RNA, 19 nt, Artificial Sequence
  Description of Artificial Sequence: Synthetic oligonucleotide
  Antisense strand to SEQ ID NO: 150248
gaauauauggcacaauggu

SEQ ID NO: 150250 - RNA, 19 nt, Artificial Sequence
  Description of Artificial Sequence: Synthetic oligonucleotide
  Sense strand starting at position 3667 of SEQ ID NO: 1929
aaucccaaggagugugauu

SEQ ID NO: 150251 - RNA, 19 nt, Artificial Sequence
  Description of Artificial Sequence: Synthetic oligonucleotide
  Antisense strand to SEQ ID NO: 150250
aaucacacuccuugggauu

SEQ ID NO: 150252 - RNA, 19 nt, Artificial Sequence
  Description of Artificial Sequence: Synthetic oligonucleotide
  Sense strand starting at position 3767 of SEQ ID NO: 1929
uccugccaucaaugaauga

SEQ ID NO: 150253 - RNA, 19 nt, Artificial Sequence
  Description of Artificial Sequence: Synthetic oligonucleotide
  Antisense strand to SEQ ID NO: 150252
ucauucauugauggcagga

SEQ ID NO: 150254 - RNA, 19 nt, Artificial Sequence
  Description of Artificial Sequence: Synthetic oligonucleotide
  Sense strand starting at position 3771 of SEQ ID NO: 1929
gccaucaaugaaugagagu

SEQ ID NO: 150255 - RNA, 19 nt, Artificial Sequence
  Description of Artificial Sequence: Synthetic oligonucleotide
  Antisense strand to SEQ ID NO: 150254
acucucauucauugauggc

SEQ ID NO: 150256 - RNA, 19 nt, Artificial Sequence
  Description of Artificial Sequence: Synthetic oligonucleotide
  Sense strand starting at position 3893 of SEQ ID NO: 1929
gcauuuccuugaggacaua

SEQ ID NO: 150257 - RNA, 19 nt, Artificial Sequence
  Description of Artificial Sequence: Synthetic oligonucleotide
  Antisense strand to SEQ ID NO: 150256
uauguccucaaggaaaugc

SEQ ID NO: 150258 - RNA, 19 nt, Artificial Sequence
  Description of Artificial Sequence: Synthetic oligonucleotide
  Sense strand starting at position 3915 of SEQ ID NO: 1929
uguggagcaucuucugaua

SEQ ID NO: 150259 - RNA, 19 nt, Artificial Sequence
  Description of Artificial Sequence: Synthetic oligonucleotide
  Antisense strand to SEQ ID NO: 150258
uaucagaagaugcuccaca

SEQ ID NO: 150260 - RNA, 19 nt, Artificial Sequence
  Description of Artificial Sequence: Synthetic oligonucleotide
  Sense strand starting at position 3928 of SEQ ID NO: 1929
cugauaugcuuauuuguca

SEQ ID NO: 150261 - RNA, 19 nt, Artificial Sequence
  Description of Artificial Sequence: Synthetic oligonucleotide
  Antisense strand to SEQ ID NO: 150260
ugacaaauaagcauaucag

SEQ ID NO: 150262 - RNA, 19 nt, Artificial Sequence
  Description of Artificial Sequence: Synthetic oligonucleotide
  Sense strand starting at position 3947 of SEQ ID NO: 1929
ccuucuguaucuucuuuga

SEQ ID NO: 150263 - RNA, 19 nt, Artificial Sequence
  Description of Artificial Sequence: Synthetic oligonucleotide
  Antisense strand to SEQ ID NO: 150262
ucaaagaagauacagaagg

SEQ ID NO: 150264 - RNA, 19 nt, Artificial Sequence
  Description of Artificial Sequence: Synthetic oligonucleotide
  Sense strand starting at position 3958 of SEQ ID NO: 1930
acugguaucucauuguugu

SEQ ID NO: 150265 - RNA, 19 nt, Artificial Sequence
  Description of Artificial Sequence: Synthetic oligonucleotide
  Antisense strand to SEQ ID NO: 150264
acaacaaugagauaccagu

SEQ ID NO: 150266 - RNA, 19 nt, Artificial Sequence
  Description of Artificial Sequence: Synthetic oligonucleotide
  Sense strand starting at position 3940 of SEQ ID NO: 1930
gcauucucauaagugugua

SEQ ID NO: 150267 - RNA, 19 nt, Artificial Sequence
  Description of Artificial Sequence: Synthetic oligonucleotide
  Antisense strand to SEQ ID NO: 150266
uacacacuuaugagaaugc

SEQ ID NO: 150268 - RNA, 19 nt, Artificial Sequence
  Description of Artificial Sequence: Synthetic oligonucleotide
  Sense strand starting at position 3864 of SEQ ID NO: 1930
gccaucaaugaaugagagu

SEQ ID NO: 150269 - RNA, 19 nt, Artificial Sequence
  Description of Artificial Sequence: Synthetic oligonucleotide
  Antisense strand to SEQ ID NO: 150268
acucucauucauugauggc

SEQ ID NO: 150270 - RNA, 19 nt, Artificial Sequence
  Description of Artificial Sequence: Synthetic oligonucleotide
  Sense strand starting at position 3860 of SEQ ID NO: 1930
uccugccaucaaugaauga

SEQ ID NO: 150271 - RNA, 19 nt, Artificial Sequence
  Description of Artificial Sequence: Synthetic oligonucleotide
  Antisense strand to SEQ ID NO: 150270
ucauucauugauggcagga

SEQ ID NO: 150272 - RNA, 19 nt, Artificial Sequence
  Description of Artificial Sequence: Synthetic oligonucleotide
  Sense strand starting at position 3857 of SEQ ID NO: 1930
uguuccugccaucaaugaa

SEQ ID NO: 150273 - RNA, 19 nt, Artificial Sequence
  Description of Artificial Sequence: Synthetic oligonucleotide
  Antisense strand to SEQ ID NO: 150272
uucauugauggcaggaaca

SEQ ID NO: 150274 - RNA, 19 nt, Artificial Sequence
  Description of Artificial Sequence: Synthetic oligonucleotide
  Sense strand starting at position 3762 of SEQ ID NO: 1930
ucccgaagagugugauuuc

SEQ ID NO: 150275 - RNA, 19 nt, Artificial Sequence
  Description of Artificial Sequence: Synthetic oligonucleotide
  Antisense strand to SEQ ID NO: 150274
gaaaucacacucuucggga

SEQ ID NO: 150276 - RNA, 19 nt, Artificial Sequence
  Description of Artificial Sequence: Synthetic oligonucleotide
  Sense strand starting at position 3760 of SEQ ID NO: 1930
aaucccgaagagugugauu

SEQ ID NO: 150277 - RNA, 19 nt, Artificial Sequence
  Description of Artificial Sequence: Synthetic oligonucleotide
  Antisense strand to SEQ ID NO: 150276
aaucacacucuucgggauu

SEQ ID NO: 150278 - RNA, 19 nt, Artificial Sequence
  Description of Artificial Sequence: Synthetic oligonucleotide
  Sense strand starting at position 3754 of SEQ ID NO: 1930
uggguaaaucccgaagagu

SEQ ID NO: 150279 - RNA, 19 nt, Artificial Sequence
  Description of Artificial Sequence: Synthetic oligonucleotide
  Antisense strand to SEQ ID NO: 150278
acucuucgggauuuaccca

SEQ ID NO: 150280 - RNA, 19 nt, Artificial Sequence
  Description of Artificial Sequence: Synthetic oligonucleotide
  Sense strand starting at position 3654 of SEQ ID NO: 1930
uuaggauggcugcauuaaa

SEQ ID NO: 150281 - RNA, 19 nt, Artificial Sequence
  Description of Artificial Sequence: Synthetic oligonucleotide
  Antisense strand to SEQ ID NO: 150280
uuuaaugcagccauccuaa

SEQ ID NO: 150282 - RNA, 19 nt, Artificial Sequence
  Description of Artificial Sequence: Synthetic oligonucleotide
  Sense strand starting at position 3641 of SEQ ID NO: 1930
caaugcguguuauuuagga

SEQ ID NO: 150283 - RNA, 19 nt, Artificial Sequence
  Description of Artificial Sequence: Synthetic oligonucleotide
  Antisense strand to SEQ ID NO: 150282
uccuaaauaacacgcauug

SEQ ID NO: 150284 - RNA, 19 nt, Artificial Sequence
  Description of Artificial Sequence: Synthetic oligonucleotide
  Sense strand starting at position 3528 of SEQ ID NO: 1930
guacaucaugcauacagau

SEQ ID NO: 150285 - RNA, 19 nt, Artificial Sequence
  Description of Artificial Sequence: Synthetic oligonucleotide
  Antisense strand to SEQ ID NO: 150284
aucuguaugcaugauguac

SEQ ID NO: 150286 - RNA, 19 nt, Artificial Sequence
  Description of Artificial Sequence: Synthetic oligonucleotide
  Sense strand starting at position 3515 of SEQ ID NO: 1930
guguaagugggagguacau

SEQ ID NO: 150287 - RNA, 19 nt, Artificial Sequence
  Description of Artificial Sequence: Synthetic oligonucleotide
  Antisense strand to SEQ ID NO: 150286
auguaccucccacuuacac

SEQ ID NO: 150288 - RNA, 19 nt, Artificial Sequence
  Description of Artificial Sequence: Synthetic oligonucleotide
  Sense strand starting at position 3284 of SEQ ID NO: 1930
cccauaugacggcaauauu

SEQ ID NO: 150289 - RNA, 19 nt, Artificial Sequence
  Description of Artificial Sequence: Synthetic oligonucleotide
  Antisense strand to SEQ ID NO: 150288
aauauugccgucauauggg

SEQ ID NO: 150290 - RNA, 19 nt, Artificial Sequence
  Description of Artificial Sequence: Synthetic oligonucleotide
  Sense strand starting at position 3282 of SEQ ID NO: 1930
uucccauaugacggcaaua

SEQ ID NO: 150291 - RNA, 19 nt, Artificial Sequence
  Description of Artificial Sequence: Synthetic oligonucleotide
  Antisense strand to SEQ ID NO: 150290
uauugccgucauaugggaa

SEQ ID NO: 150292 - RNA, 19 nt, Artificial Sequence
  Description of Artificial Sequence: Synthetic oligonucleotide
  Sense strand starting at position 3236 of SEQ ID NO: 1930
gucaguucuuauguaacca

SEQ ID NO: 150293 - RNA, 19 nt, Artificial Sequence
  Description of Artificial Sequence: Synthetic oligonucleotide
  Antisense strand to SEQ ID NO: 150292
ugguuacauaagaacugac

SEQ ID NO: 150294 - RNA, 19 nt, Artificial Sequence
  Description of Artificial Sequence: Synthetic oligonucleotide
  Sense strand starting at position 3232 of SEQ ID NO: 1930
cucugucaguucuuaugua

SEQ ID NO: 150295 - RNA, 19 nt, Artificial Sequence
  Description of Artificial Sequence: Synthetic oligonucleotide
  Antisense strand to SEQ ID NO: 150294
uacauaagaacugacagag

SEQ ID NO: 150296 - RNA, 19 nt, Artificial Sequence
  Description of Artificial Sequence: Synthetic oligonucleotide
  Sense strand starting at position 3228 of SEQ ID NO: 1930
ccuucucugucaguucuua

SEQ ID NO: 150297 - RNA, 19 nt, Artificial Sequence
  Description of Artificial Sequence: Synthetic oligonucleotide
  Antisense strand to SEQ ID NO: 150296
uaagaacugacagagaagg

SEQ ID NO: 150298 - RNA, 19 nt, Artificial Sequence
  Description of Artificial Sequence: Synthetic oligonucleotide
  Sense strand starting at position 3158 of SEQ ID NO: 1930
cuccauagagcugauguga

SEQ ID NO: 150299 - RNA, 19 nt, Artificial Sequence
  Description of Artificial Sequence: Synthetic oligonucleotide
  Antisense strand to SEQ ID NO: 150298
ucacaucagcucuauggag

SEQ ID NO: 150300 - RNA, 19 nt, Artificial Sequence
  Description of Artificial Sequence: Synthetic oligonucleotide
  Sense strand starting at position 3110 of SEQ ID NO: 1930
gcaagagguccugguucau

SEQ ID NO: 150301 - RNA, 19 nt, Artificial Sequence
  Description of Artificial Sequence: Synthetic oligonucleotide
  Antisense strand to SEQ ID NO: 150300
augaaccaggaccucuugc

SEQ ID NO: 150302 - RNA, 19 nt, Artificial Sequence
  Description of Artificial Sequence: Synthetic oligonucleotide
  Sense strand starting at position 2867 of SEQ ID NO: 1930
ggcacuaacuucccagaaa

SEQ ID NO: 150303 - RNA, 19 nt, Artificial Sequence
  Description of Artificial Sequence: Synthetic oligonucleotide
  Antisense strand to SEQ ID NO: 150302
uuucugggaaguuagugcc

SEQ ID NO: 150304 - RNA, 19 nt, Artificial Sequence
  Description of Artificial Sequence: Synthetic oligonucleotide
  Sense strand starting at position 2818 of SEQ ID NO: 1930
uggaaugagccuggaggua

SEQ ID NO: 150305 - RNA, 19 nt, Artificial Sequence
  Description of Artificial Sequence: Synthetic oligonucleotide
  Antisense strand to SEQ ID NO: 150304
uaccuccaggcucauucca

SEQ ID NO: 150306 - RNA, 19 nt, Artificial Sequence
  Description of Artificial Sequence: Synthetic oligonucleotide
  Sense strand starting at position 2769 of SEQ ID NO: 1930
cucacuaucuagguugagu

SEQ ID NO: 150307 - RNA, 19 nt, Artificial Sequence
  Description of Artificial Sequence: Synthetic oligonucleotide
  Antisense strand to SEQ ID NO: 150306
acucaaccuagauagugag

SEQ ID NO: 150308 - RNA, 19 nt, Artificial Sequence
  Description of Artificial Sequence: Synthetic oligonucleotide
  Sense strand starting at position 2386 of SEQ ID NO: 1930
gugacagccuguucuauga

SEQ ID NO: 150309 - RNA, 19 nt, Artificial Sequence
  Description of Artificial Sequence: Synthetic oligonucleotide
  Antisense strand to SEQ ID NO: 150308
ucauagaacaggcugucac

SEQ ID NO: 150310 - RNA, 19 nt, Artificial Sequence
  Description of Artificial Sequence: Synthetic oligonucleotide
  Sense strand starting at position 2247 of SEQ ID NO: 1930
gcgguacauguguaguaac

SEQ ID NO: 150311 - RNA, 19 nt, Artificial Sequence
  Description of Artificial Sequence: Synthetic oligonucleotide
  Antisense strand to SEQ ID NO: 150310
guuacuacacauguaccgc

SEQ ID NO: 150312 - RNA, 19 nt, Artificial Sequence
  Description of Artificial Sequence: Synthetic oligonucleotide
  Sense strand starting at position 2223 of SEQ ID NO: 1930
caaucuugauuugagggua

SEQ ID NO: 150313 - RNA, 19 nt, Artificial Sequence
  Description of Artificial Sequence: Synthetic oligonucleotide
  Antisense strand to SEQ ID NO: 150312
uacccucaaaucaagauug

SEQ ID NO: 150314 - RNA, 19 nt, Artificial Sequence
  Description of Artificial Sequence: Synthetic oligonucleotide
  Sense strand starting at position 2135 of SEQ ID NO: 1930
ggaggcugugcucaggauu

SEQ ID NO: 150315 - RNA, 19 nt, Artificial Sequence
  Description of Artificial Sequence: Synthetic oligonucleotide
  Antisense strand to SEQ ID NO: 150314
aauccugagcacagccucc

SEQ ID NO: 150316 - RNA, 19 nt, Artificial Sequence
  Description of Artificial Sequence: Synthetic oligonucleotide
  Sense strand starting at position 2094 of SEQ ID NO: 1930
cuuggaggcuugucccaua

SEQ ID NO: 150317 - RNA, 19 nt, Artificial Sequence
  Description of Artificial Sequence: Synthetic oligonucleotide
  Antisense strand to SEQ ID NO: 150316
uaugggacaagccuccaag

SEQ ID NO: 150318 - RNA, 19 nt, Artificial Sequence
  Description of Artificial Sequence: Synthetic oligonucleotide
  Sense strand starting at position 2018 of SEQ ID NO: 1930
agagcaguccuuuauaagg

SEQ ID NO: 150319 - RNA, 19 nt, Artificial Sequence
  Description of Artificial Sequence: Synthetic oligonucleotide
  Antisense strand to SEQ ID NO: 150318
ccuuauaaaggacugcucu

SEQ ID NO: 150320 - RNA, 19 nt, Artificial Sequence
  Description of Artificial Sequence: Synthetic oligonucleotide
  Sense strand starting at position 1862 of SEQ ID NO: 1930
uucugagacuuuguccaca

SEQ ID NO: 150321 - RNA, 19 nt, Artificial Sequence
  Description of Artificial Sequence: Synthetic oligonucleotide
  Antisense strand to SEQ ID NO: 150320
uguggacaaagucucagaa

SEQ ID NO: 150322 - RNA, 19 nt, Artificial Sequence
  Description of Artificial Sequence: Synthetic oligonucleotide
  Sense strand starting at position 1217 of SEQ ID NO: 1930
guugacccuguuuaaauaa

SEQ ID NO: 150323 - RNA, 19 nt, Artificial Sequence
  Description of Artificial Sequence: Synthetic oligonucleotide
  Antisense strand to SEQ ID NO: 150322
uuauuuaaacagggucaac

SEQ ID NO: 150324 - RNA, 19 nt, Artificial Sequence
  Description of Artificial Sequence: Synthetic oligonucleotide
  Sense strand starting at position 1216 of SEQ ID NO: 1930
gguugacccuguuuaaaua

SEQ ID NO: 150325 - RNA, 19 nt, Artificial Sequence
  Description of Artificial Sequence: Synthetic oligonucleotide
  Antisense strand to SEQ ID NO: 150324
uauuuaaacagggucaacc

SEQ ID NO: 150326 - RNA, 19 nt, Artificial Sequence
  Description of Artificial Sequence: Synthetic oligonucleotide
  Sense strand starting at position 1213 of SEQ ID NO: 1930
aaggguugacccuguuuaa

SEQ ID NO: 150327 - RNA, 19 nt, Artificial Sequence
  Description of Artificial Sequence: Synthetic oligonucleotide
  Antisense strand to SEQ ID NO: 150326
uuaaacagggucaacccuu

SEQ ID NO: 150328 - RNA, 19 nt, Artificial Sequence
  Description of Artificial Sequence: Synthetic oligonucleotide
  Sense strand starting at position 1173 of SEQ ID NO: 1930
augucugcucuugggaaau

SEQ ID NO: 150329 - RNA, 19 nt, Artificial Sequence
  Description of Artificial Sequence: Synthetic oligonucleotide
  Antisense strand to SEQ ID NO: 150328
auuucccaagagcagacau

SEQ ID NO: 150330 - RNA, 19 nt, Artificial Sequence
  Description of Artificial Sequence: Synthetic oligonucleotide
  Sense strand starting at position 1159 of SEQ ID NO: 1930
gugggagucgcuucauguc

SEQ ID NO: 150331 - RNA, 19 nt, Artificial Sequence
  Description of Artificial Sequence: Synthetic oligonucleotide
  Antisense strand to SEQ ID NO: 150330
gacaugaagcgacucccac

SEQ ID NO: 150332 - RNA, 19 nt, Artificial Sequence
  Description of Artificial Sequence: Synthetic oligonucleotide
  Sense strand starting at position 1088 of SEQ ID NO: 1930
agaauugccucuguuacaa

SEQ ID NO: 150333 - RNA, 19 nt, Artificial Sequence
  Description of Artificial Sequence: Synthetic oligonucleotide
  Antisense strand to SEQ ID NO: 150332
uuguaacagaggcaauucu

SEQ ID NO: 150334 - RNA, 19 nt, Artificial Sequence
  Description of Artificial Sequence: Synthetic oligonucleotide
  Sense strand starting at position 1062 of SEQ ID NO: 1930
cuacauucccuugggaaug

SEQ ID NO: 150335 - RNA, 19 nt, Artificial Sequence
  Description of Artificial Sequence: Synthetic oligonucleotide
  Antisense strand to SEQ ID NO: 150334
cauucccaagggaauguag

SEQ ID NO: 150336 - RNA, 19 nt, Artificial Sequence
  Description of Artificial Sequence: Synthetic oligonucleotide
  Sense strand starting at position 1061 of SEQ ID NO: 1930
ccuacauucccuugggaau

SEQ ID NO: 150337 - RNA, 19 nt, Artificial Sequence
  Description of Artificial Sequence: Synthetic oligonucleotide
  Antisense strand to SEQ ID NO: 150336
auucccaagggaauguagg

SEQ ID NO: 150338 - RNA, 19 nt, Artificial Sequence
  Description of Artificial Sequence: Synthetic oligonucleotide
  Sense strand starting at position 872 of SEQ ID NO: 1930
ggacaauggccuuggugau

SEQ ID NO: 150339 - RNA, 19 nt, Artificial Sequence
  Description of Artificial Sequence: Synthetic oligonucleotide
  Antisense strand to SEQ ID NO: 150338
aucaccaaggccauugucc

SEQ ID NO: 150340 - RNA, 19 nt, Artificial Sequence
  Description of Artificial Sequence: Synthetic oligonucleotide
  Sense strand starting at position 498 of SEQ ID NO: 1930
gaauuaaggucucuaugug

SEQ ID NO: 150341 - RNA, 19 nt, Artificial Sequence
  Description of Artificial Sequence: Synthetic oligonucleotide
  Antisense strand to SEQ ID NO: 150340
cacauagagaccuuaauuc

SEQ ID NO: 150342 - RNA, 19 nt, Artificial Sequence
  Description of Artificial Sequence: Synthetic oligonucleotide
  Sense strand starting at position 134 of SEQ ID NO: 1930
cgccuaccauccuuagauu

SEQ ID NO: 150343 - RNA, 19 nt, Artificial Sequence
  Description of Artificial Sequence: Synthetic oligonucleotide
  Antisense strand to SEQ ID NO: 150342
aaucuaaggaugguaggcg

SEQ ID NO: 150344 - RNA, 19 nt, Artificial Sequence
  Description of Artificial Sequence: Synthetic oligonucleotide
  Sense strand starting at position 5 of SEQ ID NO: 1931
ggcucagaauuacccaaua

SEQ ID NO: 150345 - RNA, 19 nt, Artificial Sequence
  Description of Artificial Sequence: Synthetic oligonucleotide
  Antisense strand to SEQ ID NO: 150344
uauuggguaauucugagcc

SEQ ID NO: 150346 - RNA, 19 nt, Artificial Sequence
  Description of Artificial Sequence: Synthetic oligonucleotide
  Sense strand starting at position 239 of SEQ ID NO: 1931
cacuguauuggcgaaacau

SEQ ID NO: 150347 - RNA, 19 nt, Artificial Sequence
  Description of Artificial Sequence: Synthetic oligonucleotide
  Antisense strand to SEQ ID NO: 150346
auguuucgccaauacagug

SEQ ID NO: 150348 - RNA, 19 nt, Artificial Sequence
  Description of Artificial Sequence: Synthetic oligonucleotide
  Sense strand starting at position 249 of SEQ ID NO: 1931
gcgaaacaucgcgacuaug

SEQ ID NO: 150349 - RNA, 19 nt, Artificial Sequence
  Description of Artificial Sequence: Synthetic oligonucleotide
  Antisense strand to SEQ ID NO: 150348
cauagucgcgauguuucgc

SEQ ID NO: 150350 - RNA, 19 nt, Artificial Sequence
  Description of Artificial Sequence: Synthetic oligonucleotide
  Sense strand starting at position 274 of SEQ ID NO: 1931
augacuuucucaccuagag

SEQ ID NO: 150351 - RNA, 19 nt, Artificial Sequence
  Description of Artificial Sequence: Synthetic oligonucleotide
  Antisense strand to SEQ ID NO: 150350
cucuaggugagaaagucau

SEQ ID NO: 150352 - RNA, 19 nt, Artificial Sequence
  Description of Artificial Sequence: Synthetic oligonucleotide
  Sense strand starting at position 351 of SEQ ID NO: 1931
uucucuagugaaugacuga

SEQ ID NO: 150353 - RNA, 19 nt, Artificial Sequence
  Description of Artificial Sequence: Synthetic oligonucleotide
  Antisense strand to SEQ ID NO: 150352
ucagucauucacuagagaa

SEQ ID NO: 150354 - RNA, 19 nt, Artificial Sequence
  Description of Artificial Sequence: Synthetic oligonucleotide
  Sense strand starting at position 354 of SEQ ID NO: 1931
ucuagugaaugacugauau

SEQ ID NO: 150355 - RNA, 19 nt, Artificial Sequence
  Description of Artificial Sequence: Synthetic oligonucleotide
  Antisense strand to SEQ ID NO: 150354
auaucagucauucacuaga

SEQ ID NO: 150356 - RNA, 19 nt, Artificial Sequence
  Description of Artificial Sequence: Synthetic oligonucleotide
  Sense strand starting at position 358 of SEQ ID NO: 1931
gugaaugacugauauuaag

SEQ ID NO: 150357 - RNA, 19 nt, Artificial Sequence
  Description of Artificial Sequence: Synthetic oligonucleotide
  Antisense strand to SEQ ID NO: 150356
cuuaauaucagucauucac

SEQ ID NO: 150358 - RNA, 19 nt, Artificial Sequence
  Description of Artificial Sequence: Synthetic oligonucleotide
  Sense strand starting at position 364 of SEQ ID NO: 1931
gacugauauuaagaagaug

SEQ ID NO: 150359 - RNA, 19 nt, Artificial Sequence
  Description of Artificial Sequence: Synthetic oligonucleotide
  Antisense strand to SEQ ID NO: 150358
caucuucuuaauaucaguc

SEQ ID NO: 150360 - RNA, 19 nt, Artificial Sequence
  Description of Artificial Sequence: Synthetic oligonucleotide
  Sense strand starting at position 425 of SEQ ID NO: 1931
cagagaaaccuguguuucu

SEQ ID NO: 150361 - RNA, 19 nt, Artificial Sequence
  Description of Artificial Sequence: Synthetic oligonucleotide
  Antisense strand to SEQ ID NO: 150360
agaaacacagguuucucug

SEQ ID NO: 150362 - RNA, 19 nt, Artificial Sequence
  Description of Artificial Sequence: Synthetic oligonucleotide
  Sense strand starting at position 426 of SEQ ID NO: 1931
agagaaaccuguguuucuc

SEQ ID NO: 150363 - RNA, 19 nt, Artificial Sequence
  Description of Artificial Sequence: Synthetic oligonucleotide
  Antisense strand to SEQ ID NO: 150362
gagaaacacagguuucucu

SEQ ID NO: 150364 - RNA, 19 nt, Artificial Sequence
  Description of Artificial Sequence: Synthetic oligonucleotide
  Sense strand starting at position 442 of SEQ ID NO: 1931
cucuguguggugggauaaa

SEQ ID NO: 150365 - RNA, 19 nt, Artificial Sequence
  Description of Artificial Sequence: Synthetic oligonucleotide
  Antisense strand to SEQ ID NO: 150364
uuuaucccaccacacagag

SEQ ID NO: 150366 - RNA, 19 nt, Artificial Sequence
  Description of Artificial Sequence: Synthetic oligonucleotide
  Sense strand starting at position 452 of SEQ ID NO: 1931
ugggauaaauugcuuccaa

SEQ ID NO: 150367 - RNA, 19 nt, Artificial Sequence
  Description of Artificial Sequence: Synthetic oligonucleotide
  Antisense strand to SEQ ID NO: 150366
uuggaagcaauuuauccca

SEQ ID NO: 150368 - RNA, 19 nt, Artificial Sequence
  Description of Artificial Sequence: Synthetic oligonucleotide
  Sense strand starting at position 453 of SEQ ID NO: 1931
gggauaaauugcuuccaaa

SEQ ID NO: 150369 - RNA, 19 nt, Artificial Sequence
  Description of Artificial Sequence: Synthetic oligonucleotide
  Antisense strand to SEQ ID NO: 150368
uuuggaagcaauuuauccc

SEQ ID NO: 150370 - RNA, 19 nt, Artificial Sequence
  Description of Artificial Sequence: Synthetic oligonucleotide
  Sense strand starting at position 563 of SEQ ID NO: 1931
gugcuugugagagggagaa

SEQ ID NO: 150371 - RNA, 19 nt, Artificial Sequence
  Description of Artificial Sequence: Synthetic oligonucleotide
  Antisense strand to SEQ ID NO: 150370
uucucccucucacaagcac

SEQ ID NO: 150372 - RNA, 19 nt, Artificial Sequence
  Description of Artificial Sequence: Synthetic oligonucleotide
  Sense strand starting at position 856 of SEQ ID NO: 1931
cacauaugagcguggacau

SEQ ID NO: 150373 - RNA, 19 nt, Artificial Sequence
  Description of Artificial Sequence: Synthetic oligonucleotide
  Antisense strand to SEQ ID NO: 150372
auguccacgcucauaugug

SEQ ID NO: 150374 - RNA, 19 nt, Artificial Sequence
  Description of Artificial Sequence: Synthetic oligonucleotide
  Sense strand starting at position 871 of SEQ ID NO: 1931
acaugaguguuagcaggaa

SEQ ID NO: 150375 - RNA, 19 nt, Artificial Sequence
  Description of Artificial Sequence: Synthetic oligonucleotide
  Antisense strand to SEQ ID NO: 150374
uuccugcuaacacucaugu

SEQ ID NO: 150376 - RNA, 19 nt, Artificial Sequence
  Description of Artificial Sequence: Synthetic oligonucleotide
  Sense strand starting at position 928 of SEQ ID NO: 1931
cccucacaggaaugugaaa

SEQ ID NO: 150377 - RNA, 19 nt, Artificial Sequence
  Description of Artificial Sequence: Synthetic oligonucleotide
  Antisense strand to SEQ ID NO: 150376
uuucacauuccugugaggg

SEQ ID NO: 150378 - RNA, 19 nt, Artificial Sequence
  Description of Artificial Sequence: Synthetic oligonucleotide
  Sense strand starting at position 962 of SEQ ID NO: 1931
auagcuagccucuguuaaa

SEQ ID NO: 150379 - RNA, 19 nt, Artificial Sequence
  Description of Artificial Sequence: Synthetic oligonucleotide
  Antisense strand to SEQ ID NO: 150378
uuuaacagaggcuagcuau

SEQ ID NO: 150380 - RNA, 19 nt, Artificial Sequence
  Description of Artificial Sequence: Synthetic oligonucleotide
  Sense strand starting at position 1060 of SEQ ID NO: 1931
gggaauuaucugcacccuu

SEQ ID NO: 150381 - RNA, 19 nt, Artificial Sequence
  Description of Artificial Sequence: Synthetic oligonucleotide
  Antisense strand to SEQ ID NO: 150380
aagggugcagauaauuccc

SEQ ID NO: 150382 - RNA, 19 nt, Artificial Sequence
  Description of Artificial Sequence: Synthetic oligonucleotide
  Sense strand starting at position 1088 of SEQ ID NO: 1931
aaggcuggauguuauuuaa

SEQ ID NO: 150383 - RNA, 19 nt, Artificial Sequence
  Description of Artificial Sequence: Synthetic oligonucleotide
  Antisense strand to SEQ ID NO: 150382
uuaaauaacauccagccuu

SEQ ID NO: 150384 - RNA, 19 nt, Artificial Sequence
  Description of Artificial Sequence: Synthetic oligonucleotide
  Sense strand starting at position 1390 of SEQ ID NO: 1931
gacugagaguuugcagguu

SEQ ID NO: 150385 - RNA, 19 nt, Artificial Sequence
  Description of Artificial Sequence: Synthetic oligonucleotide
  Antisense strand to SEQ ID NO: 150384
aaccugcaaacucucaguc

SEQ ID NO: 150386 - RNA, 19 nt, Artificial Sequence
  Description of Artificial Sequence: Synthetic oligonucleotide
  Sense strand starting at position 1423 of SEQ ID NO: 1931
gggagcuuugguugcucaa

SEQ ID NO: 150387 - RNA, 19 nt, Artificial Sequence
  Description of Artificial Sequence: Synthetic oligonucleotide
  Antisense strand to SEQ ID NO: 150386
uugagcaaccaaagcuccc

SEQ ID NO: 150388 - RNA, 19 nt, Artificial Sequence
  Description of Artificial Sequence: Synthetic oligonucleotide
  Sense strand starting at position 1425 of SEQ ID NO: 1931
gagcuuugguugcucaaua

SEQ ID NO: 150389 - RNA, 19 nt, Artificial Sequence
  Description of Artificial Sequence: Synthetic oligonucleotide
  Antisense strand to SEQ ID NO: 150388
uauugagcaaccaaagcuc

SEQ ID NO: 150390 - RNA, 19 nt, Artificial Sequence
  Description of Artificial Sequence: Synthetic oligonucleotide
  Sense strand starting at position 1430 of SEQ ID NO: 1931
uugguugcucaauaccuua

SEQ ID NO: 150391 - RNA, 19 nt, Artificial Sequence
  Description of Artificial Sequence: Synthetic oligonucleotide
  Antisense strand to SEQ ID NO: 150390
uaagguauugagcaaccaa

SEQ ID NO: 150392 - RNA, 19 nt, Artificial Sequence
  Description of Artificial Sequence: Synthetic oligonucleotide
  Sense strand starting at position 1511 of SEQ ID NO: 1931
ucagcaagccuccaaagua

SEQ ID NO: 150393 - RNA, 19 nt, Artificial Sequence
  Description of Artificial Sequence: Synthetic oligonucleotide
  Antisense strand to SEQ ID NO: 150392
uacuuuggaggcuugcuga

SEQ ID NO: 150394 - RNA, 19 nt, Artificial Sequence
  Description of Artificial Sequence: Synthetic oligonucleotide
  Sense strand starting at position 1800 of SEQ ID NO: 1931
gcuccugagucaucaucca

SEQ ID NO: 150395 - RNA, 19 nt, Artificial Sequence
  Description of Artificial Sequence: Synthetic oligonucleotide
  Antisense strand to SEQ ID NO: 150394
uggaugaugacucaggagc

SEQ ID NO: 150396 - RNA, 19 nt, Artificial Sequence
  Description of Artificial Sequence: Synthetic oligonucleotide
  Sense strand starting at position 2045 of SEQ ID NO: 1931
agcuuugucccacaucaga

SEQ ID NO: 150397 - RNA, 19 nt, Artificial Sequence
  Description of Artificial Sequence: Synthetic oligonucleotide
  Antisense strand to SEQ ID NO: 150396
ucugaugugggacaaagcu

SEQ ID NO: 150398 - RNA, 19 nt, Artificial Sequence
  Description of Artificial Sequence: Synthetic oligonucleotide
  Sense strand starting at position 2154 of SEQ ID NO: 1931
ggagccuucucuguuccaa

SEQ ID NO: 150399 - RNA, 19 nt, Artificial Sequence
  Description of Artificial Sequence: Synthetic oligonucleotide
  Antisense strand to SEQ ID NO: 150398
uuggaacagagaaggcucc

SEQ ID NO: 150400 - RNA, 19 nt, Artificial Sequence
  Description of Artificial Sequence: Synthetic oligonucleotide
  Sense strand starting at position 2193 of SEQ ID NO: 1931
gccaguggaugugucagau

SEQ ID NO: 150401 - RNA, 19 nt, Artificial Sequence
  Description of Artificial Sequence: Synthetic oligonucleotide
  Antisense strand to SEQ ID NO: 150400
aucugacacauccacuggc

SEQ ID NO: 150402 - RNA, 19 nt, Artificial Sequence
  Description of Artificial Sequence: Synthetic oligonucleotide
  Sense strand starting at position 2391 of SEQ ID NO: 1931
guacaugaguuucucuuua

SEQ ID NO: 150403 - RNA, 19 nt, Artificial Sequence
  Description of Artificial Sequence: Synthetic oligonucleotide
  Antisense strand to SEQ ID NO: 150402
uaaagagaaacucauguac

SEQ ID NO: 150404 - RNA, 19 nt, Artificial Sequence
  Description of Artificial Sequence: Synthetic oligonucleotide
  Sense strand starting at position 2393 of SEQ ID NO: 1931
acaugaguuucucuuuagu

SEQ ID NO: 150405 - RNA, 19 nt, Artificial Sequence
  Description of Artificial Sequence: Synthetic oligonucleotide
  Antisense strand to SEQ ID NO: 150404
acuaaagagaaacucaugu

SEQ ID NO: 150406 - RNA, 19 nt, Artificial Sequence
  Description of Artificial Sequence: Synthetic oligonucleotide
  Sense strand starting at position 2493 of SEQ ID NO: 1931
caaguuuacucagcuaggu

SEQ ID NO: 150407 - RNA, 19 nt, Artificial Sequence
  Description of Artificial Sequence: Synthetic oligonucleotide
  Antisense strand to SEQ ID NO: 150406
accuagcugaguaaacuug

SEQ ID NO: 150408 - RNA, 19 nt, Artificial Sequence
  Description of Artificial Sequence: Synthetic oligonucleotide
  Sense strand starting at position 2573 of SEQ ID NO: 1931
uugcuuuauguugaagaua

SEQ ID NO: 150409 - RNA, 19 nt, Artificial Sequence
  Description of Artificial Sequence: Synthetic oligonucleotide
  Antisense strand to SEQ ID NO: 150408
uaucuucaacauaaagcaa

SEQ ID NO: 150410 - RNA, 19 nt, Artificial Sequence
  Description of Artificial Sequence: Synthetic oligonucleotide
  Sense strand starting at position 3222 of SEQ ID NO: 1931
cauauuucgugccugggua

SEQ ID NO: 150411 - RNA, 19 nt, Artificial Sequence
  Description of Artificial Sequence: Synthetic oligonucleotide
  Antisense strand to SEQ ID NO: 150410
uacccaggcacgaaauaug

SEQ ID NO: 150412 - RNA, 19 nt, Artificial Sequence
  Description of Artificial Sequence: Synthetic oligonucleotide
  Sense strand starting at position 3223 of SEQ ID NO: 1931
auauuucgugccuggguau

SEQ ID NO: 150413 - RNA, 19 nt, Artificial Sequence
  Description of Artificial Sequence: Synthetic oligonucleotide
  Antisense strand to SEQ ID NO: 150412
auacccaggcacgaaauau

SEQ ID NO: 150414 - RNA, 19 nt, Artificial Sequence
  Description of Artificial Sequence: Synthetic oligonucleotide
  Sense strand starting at position 3436 of SEQ ID NO: 1931
ucgugugucccacucaguu

SEQ ID NO: 150415 - RNA, 19 nt, Artificial Sequence
  Description of Artificial Sequence: Synthetic oligonucleotide
  Antisense strand to SEQ ID NO: 150414
aacugagugggacacacga

SEQ ID NO: 150416 - RNA, 19 nt, Artificial Sequence
  Description of Artificial Sequence: Synthetic oligonucleotide
  Sense strand starting at position 3602 of SEQ ID NO: 1931
cauagagcagucuaucaga

SEQ ID NO: 150417 - RNA, 19 nt, Artificial Sequence
  Description of Artificial Sequence: Synthetic oligonucleotide
  Antisense strand to SEQ ID NO: 150416
ucugauagacugcucuaug

SEQ ID NO: 150418 - RNA, 19 nt, Artificial Sequence
  Description of Artificial Sequence: Synthetic oligonucleotide
  Sense strand starting at position 3618 of SEQ ID NO: 1931
agauauuauuagcucugau

SEQ ID NO: 150419 - RNA, 19 nt, Artificial Sequence
  Description of Artificial Sequence: Synthetic oligonucleotide
  Antisense strand to SEQ ID NO: 150418
aucagagcuaauaauaucu

SEQ ID NO: 150420 - RNA, 19 nt, Artificial Sequence
  Description of Artificial Sequence: Synthetic oligonucleotide
  Sense strand starting at position 3633 of SEQ ID NO: 1931
ugaucaagucccugugcaa

SEQ ID NO: 150421 - RNA, 19 nt, Artificial Sequence
  Description of Artificial Sequence: Synthetic oligonucleotide
  Antisense strand to SEQ ID NO: 150420
uugcacagggacuugauca

SEQ ID NO: 150422 - RNA, 19 nt, Artificial Sequence
  Description of Artificial Sequence: Synthetic oligonucleotide
  Sense strand starting at position 3703 of SEQ ID NO: 1931
gcuccuagccaagaacaau

SEQ ID NO: 150423 - RNA, 19 nt, Artificial Sequence
  Description of Artificial Sequence: Synthetic oligonucleotide
  Antisense strand to SEQ ID NO: 150422
auuguucuuggcuaggagc

SEQ ID NO: 150424 - RNA, 19 nt, Artificial Sequence
  Description of Artificial Sequence: Synthetic oligonucleotide
  Sense strand starting at position 459 of SEQ ID NO: 1932
acacacuucuauguagcua

SEQ ID NO: 150425 - RNA, 19 nt, Artificial Sequence
  Description of Artificial Sequence: Synthetic oligonucleotide
  Antisense strand to SEQ ID NO: 150424
uagcuacauagaagugugu

SEQ ID NO: 150426 - RNA, 19 nt, Artificial Sequence
  Description of Artificial Sequence: Synthetic oligonucleotide
  Sense strand starting at position 806 of SEQ ID NO: 1932
cgaggaaccucauuccaca

SEQ ID NO: 150427 - RNA, 19 nt, Artificial Sequence
  Description of Artificial Sequence: Synthetic oligonucleotide
  Antisense strand to SEQ ID NO: 150426
uguggaaugagguuccucg

SEQ ID NO: 150428 - RNA, 19 nt, Artificial Sequence
  Description of Artificial Sequence: Synthetic oligonucleotide
  Sense strand starting at position 841 of SEQ ID NO: 1932
gcaugagguauugaugacu

SEQ ID NO: 150429 - RNA, 19 nt, Artificial Sequence
  Description of Artificial Sequence: Synthetic oligonucleotide
  Antisense strand to SEQ ID NO: 150428
agucaucaauaccucaugc

SEQ ID NO: 150430 - RNA, 19 nt, Artificial Sequence
  Description of Artificial Sequence: Synthetic oligonucleotide
  Sense strand starting at position 846 of SEQ ID NO: 1932
agguauugaugacuuuauu

SEQ ID NO: 150431 - RNA, 19 nt, Artificial Sequence
  Description of Artificial Sequence: Synthetic oligonucleotide
  Antisense strand to SEQ ID NO: 150430
aauaaagucaucaauaccu

SEQ ID NO: 150432 - RNA, 19 nt, Artificial Sequence
  Description of Artificial Sequence: Synthetic oligonucleotide
  Sense strand starting at position 980 of SEQ ID NO: 1932
ugaggaacuccuggaaguu

SEQ ID NO: 150433 - RNA, 19 nt, Artificial Sequence
  Description of Artificial Sequence: Synthetic oligonucleotide
  Antisense strand to SEQ ID NO: 150432
aacuuccaggaguuccuca

SEQ ID NO: 150434 - RNA, 19 nt, Artificial Sequence
  Description of Artificial Sequence: Synthetic oligonucleotide
  Sense strand starting at position 1110 of SEQ ID NO: 1932
ggcauagccaucuaugaag

SEQ ID NO: 150435 - RNA, 19 nt, Artificial Sequence
  Description of Artificial Sequence: Synthetic oligonucleotide
  Antisense strand to SEQ ID NO: 150434
cuucauagauggcuaugcc

SEQ ID NO: 150436 - RNA, 19 nt, Artificial Sequence
  Description of Artificial Sequence: Synthetic oligonucleotide
  Sense strand starting at position 1222 of SEQ ID NO: 1932
acacucggucucuagcaau

SEQ ID NO: 150437 - RNA, 19 nt, Artificial Sequence
  Description of Artificial Sequence: Synthetic oligonucleotide
  Antisense strand to SEQ ID NO: 150436
auugcuagagaccgagugu

SEQ ID NO: 150438 - RNA, 19 nt, Artificial Sequence
  Description of Artificial Sequence: Synthetic oligonucleotide
  Sense strand starting at position 1245 of SEQ ID NO: 1932
ucaggucaucccuguagac

SEQ ID NO: 150439 - RNA, 19 nt, Artificial Sequence
  Description of Artificial Sequence: Synthetic oligonucleotide
  Antisense strand to SEQ ID NO: 150438
gucuacagggaugaccuga

SEQ ID NO: 150440 - RNA, 19 nt, Artificial Sequence
  Description of Artificial Sequence: Synthetic oligonucleotide
  Sense strand starting at position 1257 of SEQ ID NO: 1932
uguagacggcauggaaauu

SEQ ID NO: 150441 - RNA, 19 nt, Artificial Sequence
  Description of Artificial Sequence: Synthetic oligonucleotide
  Antisense strand to SEQ ID NO: 150440
aauuuccaugccgucuaca

SEQ ID NO: 150442 - RNA, 19 nt, Artificial Sequence
  Description of Artificial Sequence: Synthetic oligonucleotide
  Sense strand starting at position 1297 of SEQ ID NO: 1932
gugguagacgucgaugaua

SEQ ID NO: 150443 - RNA, 19 nt, Artificial Sequence
  Description of Artificial Sequence: Synthetic oligonucleotide
  Antisense strand to SEQ ID NO: 150442
uaucaucgacgucuaccac

SEQ ID NO: 150444 - RNA, 19 nt, Artificial Sequence
  Description of Artificial Sequence: Synthetic oligonucleotide
  Sense strand starting at position 1299 of SEQ ID NO: 1932
gguagacgucgaugauaga

SEQ ID NO: 150445 - RNA, 19 nt, Artificial Sequence
  Description of Artificial Sequence: Synthetic oligonucleotide
  Antisense strand to SEQ ID NO: 150444
ucuaucaucgacgucuacc

SEQ ID NO: 150446 - RNA, 19 nt, Artificial Sequence
  Description of Artificial Sequence: Synthetic oligonucleotide
  Sense strand starting at position 1684 of SEQ ID NO: 1932
ggaggauacucuccuuccu

SEQ ID NO: 150447 - RNA, 19 nt, Artificial Sequence
  Description of Artificial Sequence: Synthetic oligonucleotide
  Antisense strand to SEQ ID NO: 150446
aggaaggagaguauccucc

SEQ ID NO: 150448 - RNA, 19 nt, Artificial Sequence
  Description of Artificial Sequence: Synthetic oligonucleotide
  Sense strand starting at position 1729 of SEQ ID NO: 1932
ggaguaucuuugcuccaga

SEQ ID NO: 150449 - RNA, 19 nt, Artificial Sequence
  Description of Artificial Sequence: Synthetic oligonucleotide
  Antisense strand to SEQ ID NO: 150448
ucuggagcaaagauacucc

SEQ ID NO: 150450 - RNA, 19 nt, Artificial Sequence
  Description of Artificial Sequence: Synthetic oligonucleotide
  Sense strand starting at position 1730 of SEQ ID NO: 1932
gaguaucuuugcuccagac

SEQ ID NO: 150451 - RNA, 19 nt, Artificial Sequence
  Description of Artificial Sequence: Synthetic oligonucleotide
  Antisense strand to SEQ ID NO: 150450
gucuggagcaaagauacuc

SEQ ID NO: 150452 - RNA, 19 nt, Artificial Sequence
  Description of Artificial Sequence: Synthetic oligonucleotide
  Sense strand starting at position 1732 of SEQ ID NO: 1932
guaucuuugcuccagaccu

SEQ ID NO: 150453 - RNA, 19 nt, Artificial Sequence
  Description of Artificial Sequence: Synthetic oligonucleotide
  Antisense strand to SEQ ID NO: 150452
aggucuggagcaaagauac

SEQ ID NO: 150454 - RNA, 19 nt, Artificial Sequence
  Description of Artificial Sequence: Synthetic oligonucleotide
  Sense strand starting at position 1848 of SEQ ID NO: 1932
cuuaccaggucuucugaaa

SEQ ID NO: 150455 - RNA, 19 nt, Artificial Sequence
  Description of Artificial Sequence: Synthetic oligonucleotide
  Antisense strand to SEQ ID NO: 150454
uuucagaagaccugguaag

SEQ ID NO: 150456 - RNA, 19 nt, Artificial Sequence
  Description of Artificial Sequence: Synthetic oligonucleotide
  Sense strand starting at position 1994 of SEQ ID NO: 1932
guuucucaaccaggugaau

SEQ ID NO: 150457 - RNA, 19 nt, Artificial Sequence
  Description of Artificial Sequence: Synthetic oligonucleotide
  Antisense strand to SEQ ID NO: 150456
auucaccugguugagaaac

SEQ ID NO: 150458 - RNA, 19 nt, Artificial Sequence
  Description of Artificial Sequence: Synthetic oligonucleotide
  Sense strand starting at position 2014 of SEQ ID NO: 1932
uggcaaucacugugcagaa

SEQ ID NO: 150459 - RNA, 19 nt, Artificial Sequence
  Description of Artificial Sequence: Synthetic oligonucleotide
  Antisense strand to SEQ ID NO: 150458
uucugcacagugauugcca

SEQ ID NO: 150460 - RNA, 19 nt, Artificial Sequence
  Description of Artificial Sequence: Synthetic oligonucleotide
  Sense strand starting at position 2015 of SEQ ID NO: 1932
ggcaaucacugugcagaau

SEQ ID NO: 150461 - RNA, 19 nt, Artificial Sequence
  Description of Artificial Sequence: Synthetic oligonucleotide
  Antisense strand to SEQ ID NO: 150460
auucugcacagugauugcc

SEQ ID NO: 150462 - RNA, 19 nt, Artificial Sequence
  Description of Artificial Sequence: Synthetic oligonucleotide
  Sense strand starting at position 2073 of SEQ ID NO: 1932
aaggcauuugcugggcaau

SEQ ID NO: 150463 - RNA, 19 nt, Artificial Sequence
  Description of Artificial Sequence: Synthetic oligonucleotide
  Antisense strand to SEQ ID NO: 150462
auugcccagcaaaugccuu

SEQ ID NO: 150464 - RNA, 19 nt, Artificial Sequence
  Description of Artificial Sequence: Synthetic oligonucleotide
  Sense strand starting at position 2074 of SEQ ID NO: 1932
aggcauuugcugggcaaua

SEQ ID NO: 150465 - RNA, 19 nt, Artificial Sequence
  Description of Artificial Sequence: Synthetic oligonucleotide
  Antisense strand to SEQ ID NO: 150464
uauugcccagcaaaugccu

SEQ ID NO: 150466 - RNA, 19 nt, Artificial Sequence
  Description of Artificial Sequence: Synthetic oligonucleotide
  Sense strand starting at position 2076 of SEQ ID NO: 1932
gcauuugcugggcaauagu

SEQ ID NO: 150467 - RNA, 19 nt, Artificial Sequence
  Description of Artificial Sequence: Synthetic oligonucleotide
  Antisense strand to SEQ ID NO: 150466
acuauugcccagcaaaugc

SEQ ID NO: 150468 - RNA, 19 nt, Artificial Sequence
  Description of Artificial Sequence: Synthetic oligonucleotide
  Sense strand starting at position 2226 of SEQ ID NO: 1932
ggccauacaucccugaaac

SEQ ID NO: 150469 - RNA, 19 nt, Artificial Sequence
  Description of Artificial Sequence: Synthetic oligonucleotide
  Antisense strand to SEQ ID NO: 150468
guuucagggauguauggcc

SEQ ID NO: 150470 - RNA, 19 nt, Artificial Sequence
  Description of Artificial Sequence: Synthetic oligonucleotide
  Sense strand starting at position 2275 of SEQ ID NO: 1932
gcaugcacucagugagaac

SEQ ID NO: 150471 - RNA, 19 nt, Artificial Sequence
  Description of Artificial Sequence: Synthetic oligonucleotide
  Antisense strand to SEQ ID NO: 150470
guucucacugagugcaugc

SEQ ID NO: 150472 - RNA, 19 nt, Artificial Sequence
  Description of Artificial Sequence: Synthetic oligonucleotide
  Sense strand starting at position 2286 of SEQ ID NO: 1932
gugagaacauuccuccaug

SEQ ID NO: 150473 - RNA, 19 nt, Artificial Sequence
  Description of Artificial Sequence: Synthetic oligonucleotide
  Antisense strand to SEQ ID NO: 150472
cauggaggaauguucucac

SEQ ID NO: 150474 - RNA, 19 nt, Artificial Sequence
  Description of Artificial Sequence: Synthetic oligonucleotide
  Sense strand starting at position 2383 of SEQ ID NO: 1932
ugagaacuauuguucucau

SEQ ID NO: 150475 - RNA, 19 nt, Artificial Sequence
  Description of Artificial Sequence: Synthetic oligonucleotide
  Antisense strand to SEQ ID NO: 150474
augagaacaauaguucuca

SEQ ID NO: 150476 - RNA, 19 nt, Artificial Sequence
  Description of Artificial Sequence: Synthetic oligonucleotide
  Sense strand starting at position 2645 of SEQ ID NO: 1932
uaauuauugugucugggac

SEQ ID NO: 150477 - RNA, 19 nt, Artificial Sequence
  Description of Artificial Sequence: Synthetic oligonucleotide
  Antisense strand to SEQ ID NO: 150476
gucccagacacaauaauua

SEQ ID NO: 150478 - RNA, 19 nt, Artificial Sequence
  Description of Artificial Sequence: Synthetic oligonucleotide
  Sense strand starting at position 2687 of SEQ ID NO: 1932
ggaagcuaacucugaggua

SEQ ID NO: 150479 - RNA, 19 nt, Artificial Sequence
  Description of Artificial Sequence: Synthetic oligonucleotide
  Antisense strand to SEQ ID NO: 150478
uaccucagaguuagcuucc

SEQ ID NO: 150480 - RNA, 19 nt, Artificial Sequence
  Description of Artificial Sequence: Synthetic oligonucleotide
  Sense strand starting at position 2843 of SEQ ID NO: 1932
gcuuccaaccuugaagacu

SEQ ID NO: 150481 - RNA, 19 nt, Artificial Sequence
  Description of Artificial Sequence: Synthetic oligonucleotide
  Antisense strand to SEQ ID NO: 150480
agucuucaagguuggaagc

SEQ ID NO: 150482 - RNA, 19 nt, Artificial Sequence
  Description of Artificial Sequence: Synthetic oligonucleotide
  Sense strand starting at position 2901 of SEQ ID NO: 1932
acaaauaucugauaaggga

SEQ ID NO: 150483 - RNA, 19 nt, Artificial Sequence
  Description of Artificial Sequence: Synthetic oligonucleotide
  Antisense strand to SEQ ID NO: 150482
ucccuuaucagauauuugu

SEQ ID NO: 150484 - RNA, 19 nt, Artificial Sequence
  Description of Artificial Sequence: Synthetic oligonucleotide
  Sense strand starting at position 3284 of SEQ ID NO: 1932
ucugcuccuggguauauau

SEQ ID NO: 150485 - RNA, 19 nt, Artificial Sequence
  Description of Artificial Sequence: Synthetic oligonucleotide
  Antisense strand to SEQ ID NO: 150484
auauauacccaggagcaga

SEQ ID NO: 150486 - RNA, 19 nt, Artificial Sequence
  Description of Artificial Sequence: Synthetic oligonucleotide
  Sense strand starting at position 3394 of SEQ ID NO: 1932
ccaagugucccucaacaca

SEQ ID NO: 150487 - RNA, 19 nt, Artificial Sequence
  Description of Artificial Sequence: Synthetic oligonucleotide
  Antisense strand to SEQ ID NO: 150486
uguguugagggacacuugg

SEQ ID NO: 150488 - RNA, 19 nt, Artificial Sequence
  Description of Artificial Sequence: Synthetic oligonucleotide
  Sense strand starting at position 3585 of SEQ ID NO: 1932
ugagccauugcauaaacau

SEQ ID NO: 150489 - RNA, 19 nt, Artificial Sequence
  Description of Artificial Sequence: Synthetic oligonucleotide
  Antisense strand to SEQ ID NO: 150488
auguuuaugcaauggcuca

SEQ ID NO: 150490 - RNA, 19 nt, Artificial Sequence
  Description of Artificial Sequence: Synthetic oligonucleotide
  Sense strand starting at position 3759 of SEQ ID NO: 1932
uucccauguccgggaacua

SEQ ID NO: 150491 - RNA, 19 nt, Artificial Sequence
  Description of Artificial Sequence: Synthetic oligonucleotide
  Antisense strand to SEQ ID NO: 150490
uaguucccggacaugggaa

SEQ ID NO: 150492 - RNA, 19 nt, Artificial Sequence
  Description of Artificial Sequence: Synthetic oligonucleotide
  Sense strand starting at position 3760 of SEQ ID NO: 1932
ucccauguccgggaacuau

SEQ ID NO: 150493 - RNA, 19 nt, Artificial Sequence
  Description of Artificial Sequence: Synthetic oligonucleotide
  Antisense strand to SEQ ID NO: 150492
auaguucccggacauggga

SEQ ID NO: 150494 - RNA, 19 nt, Artificial Sequence
  Description of Artificial Sequence: Synthetic oligonucleotide
  Sense strand starting at position 3786 of SEQ ID NO: 1932
gcugcuuuauuugcauuga

SEQ ID NO: 150495 - RNA, 19 nt, Artificial Sequence
  Description of Artificial Sequence: Synthetic oligonucleotide
  Antisense strand to SEQ ID NO: 150494
ucaaugcaaauaaagcagc

SEQ ID NO: 150496 - RNA, 19 nt, Artificial Sequence
  Description of Artificial Sequence: Synthetic oligonucleotide
  Sense strand starting at position 3818 of SEQ ID NO: 1932
acacuaauccaaugacgua

SEQ ID NO: 150497 - RNA, 19 nt, Artificial Sequence
  Description of Artificial Sequence: Synthetic oligonucleotide
  Antisense strand to SEQ ID NO: 150496
uacgucauuggauuagugu

SEQ ID NO: 150498 - RNA, 19 nt, Artificial Sequence
  Description of Artificial Sequence: Synthetic oligonucleotide
  Sense strand starting at position 3825 of SEQ ID NO: 1932
uccaaugacguauguacua

SEQ ID NO: 150499 - RNA, 19 nt, Artificial Sequence
  Description of Artificial Sequence: Synthetic oligonucleotide
  Antisense strand to SEQ ID NO: 150498
uaguacauacgucauugga

SEQ ID NO: 150500 - RNA, 19 nt, Artificial Sequence
  Description of Artificial Sequence: Synthetic oligonucleotide
  Sense strand starting at position 3905 of SEQ ID NO: 1932
guaucaaaugauugaguga

SEQ ID NO: 150501 - RNA, 19 nt, Artificial Sequence
  Description of Artificial Sequence: Synthetic oligonucleotide
  Antisense strand to SEQ ID NO: 150500
ucacucaaucauuugauac

SEQ ID NO: 150502 - RNA, 19 nt, Artificial Sequence
  Description of Artificial Sequence: Synthetic oligonucleotide
  Sense strand starting at position 3912 of SEQ ID NO: 1932
augauugagugacucauga

SEQ ID NO: 150503 - RNA, 19 nt, Artificial Sequence
  Description of Artificial Sequence: Synthetic oligonucleotide
  Antisense strand to SEQ ID NO: 150502
ucaugagucacucaaucau

SEQ ID NO: 150504 - RNA, 19 nt, Artificial Sequence
  Description of Artificial Sequence: Synthetic oligonucleotide
  Sense strand starting at position 3970 of SEQ ID NO: 1933
acaugagucgccuacgaau

SEQ ID NO: 150505 - RNA, 19 nt, Artificial Sequence
  Description of Artificial Sequence: Synthetic oligonucleotide
  Antisense strand to SEQ ID NO: 150504
auucguaggcgacucaugu

SEQ ID NO: 150506 - RNA, 19 nt, Artificial Sequence
  Description of Artificial Sequence: Synthetic oligonucleotide
  Sense strand starting at position 3952 of SEQ ID NO: 1933
auaaaugagugcuugaaua

SEQ ID NO: 150507 - RNA, 19 nt, Artificial Sequence
  Description of Artificial Sequence: Synthetic oligonucleotide
  Antisense strand to SEQ ID NO: 150506
uauucaagcacucauuuau

SEQ ID NO: 150508 - RNA, 19 nt, Artificial Sequence
  Description of Artificial Sequence: Synthetic oligonucleotide
  Sense strand starting at position 3949 of SEQ ID NO: 1933
uaaauaaaugagugcuuga

SEQ ID NO: 150509 - RNA, 19 nt, Artificial Sequence
  Description of Artificial Sequence: Synthetic oligonucleotide
  Antisense strand to SEQ ID NO: 150508
ucaagcacucauuuauuua

SEQ ID NO: 150510 - RNA, 19 nt, Artificial Sequence
  Description of Artificial Sequence: Synthetic oligonucleotide
  Sense strand starting at position 3886 of SEQ ID NO: 1933
uuuaaacucuugguagcua

SEQ ID NO: 150511 - RNA, 19 nt, Artificial Sequence
  Description of Artificial Sequence: Synthetic oligonucleotide
  Antisense strand to SEQ ID NO: 150510
uagcuaccaagaguuuaaa

SEQ ID NO: 150512 - RNA, 19 nt, Artificial Sequence
  Description of Artificial Sequence: Synthetic oligonucleotide
  Sense strand starting at position 3792 of SEQ ID NO: 1933
gccagauaugaaugcuaga

SEQ ID NO: 150513 - RNA, 19 nt, Artificial Sequence
  Description of Artificial Sequence: Synthetic oligonucleotide
  Antisense strand to SEQ ID NO: 150512
ucuagcauucauaucuggc

SEQ ID NO: 150514 - RNA, 19 nt, Artificial Sequence
  Description of Artificial Sequence: Synthetic oligonucleotide
  Sense strand starting at position 3784 of SEQ ID NO: 1933
uacugagugccagauauga

SEQ ID NO: 150515 - RNA, 19 nt, Artificial Sequence
  Description of Artificial Sequence: Synthetic oligonucleotide
  Antisense strand to SEQ ID NO: 150514
ucauaucuggcacucagua

SEQ ID NO: 150516 - RNA, 19 nt, Artificial Sequence
  Description of Artificial Sequence: Synthetic oligonucleotide
  Sense strand starting at position 3685 of SEQ ID NO: 1933
gcgacaauacauggaaagu

SEQ ID NO: 150517 - RNA, 19 nt, Artificial Sequence
  Description of Artificial Sequence: Synthetic oligonucleotide
  Antisense strand to SEQ ID NO: 150516
acuuuccauguauugucgc

SEQ ID NO: 150518 - RNA, 19 nt, Artificial Sequence
  Description of Artificial Sequence: Synthetic oligonucleotide
  Sense strand starting at position 3653 of SEQ ID NO: 1933
auaggauaauaucaggacu

SEQ ID NO: 150519 - RNA, 19 nt, Artificial Sequence
  Description of Artificial Sequence: Synthetic oligonucleotide
  Antisense strand to SEQ ID NO: 150518
aguccugauauuauccuau

SEQ ID NO: 150520 - RNA, 19 nt, Artificial Sequence
  Description of Artificial Sequence: Synthetic oligonucleotide
  Sense strand starting at position 3566 of SEQ ID NO: 1933
uggaguagugguuaagacu

SEQ ID NO: 150521 - RNA, 19 nt, Artificial Sequence
  Description of Artificial Sequence: Synthetic oligonucleotide
  Antisense strand to SEQ ID NO: 150520
agucuuaaccacuacucca

SEQ ID NO: 150522 - RNA, 19 nt, Artificial Sequence
  Description of Artificial Sequence: Synthetic oligonucleotide
  Sense strand starting at position 3554 of SEQ ID NO: 1933
cugagaugcaccuggagua

SEQ ID NO: 150523 - RNA, 19 nt, Artificial Sequence
  Description of Artificial Sequence: Synthetic oligonucleotide
  Antisense strand to SEQ ID NO: 150522
uacuccaggugcaucucag

SEQ ID NO: 150524 - RNA, 19 nt, Artificial Sequence
  Description of Artificial Sequence: Synthetic oligonucleotide
  Sense strand starting at position 3486 of SEQ ID NO: 1933
cucugaaagccugaggcaa

SEQ ID NO: 150525 - RNA, 19 nt, Artificial Sequence
  Description of Artificial Sequence: Synthetic oligonucleotide
  Antisense strand to SEQ ID NO: 150524
uugccucaggcuuucagag

SEQ ID NO: 150526 - RNA, 19 nt, Artificial Sequence
  Description of Artificial Sequence: Synthetic oligonucleotide
  Sense strand starting at position 3428 of SEQ ID NO: 1933
uuguucugucuccaugaag

SEQ ID NO: 150527 - RNA, 19 nt, Artificial Sequence
  Description of Artificial Sequence: Synthetic oligonucleotide
  Antisense strand to SEQ ID NO: 150526
cuucauggagacagaacaa

SEQ ID NO: 150528 - RNA, 19 nt, Artificial Sequence
  Description of Artificial Sequence: Synthetic oligonucleotide
  Sense strand starting at position 3388 of SEQ ID NO: 1933
caggaaagaugguucucuu

SEQ ID NO: 150529 - RNA, 19 nt, Artificial Sequence
  Description of Artificial Sequence: Synthetic oligonucleotide
  Antisense strand to SEQ ID NO: 150528
aagagaaccaucuuuccug

SEQ ID NO: 150530 - RNA, 19 nt, Artificial Sequence
  Description of Artificial Sequence: Synthetic oligonucleotide
  Sense strand starting at position 3324 of SEQ ID NO: 1933
ccuggaagccaguauggau

SEQ ID NO: 150531 - RNA, 19 nt, Artificial Sequence
  Description of Artificial Sequence: Synthetic oligonucleotide
  Antisense strand to SEQ ID NO: 150530
auccauacuggcuuccagg

SEQ ID NO: 150532 - RNA, 19 nt, Artificial Sequence
  Description of Artificial Sequence: Synthetic oligonucleotide
  Sense strand starting at position 3279 of SEQ ID NO: 1933
gauugauccuugcugaagu

SEQ ID NO: 150533 - RNA, 19 nt, Artificial Sequence
  Description of Artificial Sequence: Synthetic oligonucleotide
  Antisense strand to SEQ ID NO: 150532
acuucagcaaggaucaauc

SEQ ID NO: 150534 - RNA, 19 nt, Artificial Sequence
  Description of Artificial Sequence: Synthetic oligonucleotide
  Sense strand starting at position 3277 of SEQ ID NO: 1933
cugauugauccuugcugaa

SEQ ID NO: 150535 - RNA, 19 nt, Artificial Sequence
  Description of Artificial Sequence: Synthetic oligonucleotide
  Antisense strand to SEQ ID NO: 150534
uucagcaaggaucaaucag

SEQ ID NO: 150536 - RNA, 19 nt, Artificial Sequence
  Description of Artificial Sequence: Synthetic oligonucleotide
  Sense strand starting at position 3185 of SEQ ID NO: 1933
gcuguagauccucaaaggu

SEQ ID NO: 150537 - RNA, 19 nt, Artificial Sequence
  Description of Artificial Sequence: Synthetic oligonucleotide
  Antisense strand to SEQ ID NO: 150536
accuuugaggaucuacagc

SEQ ID NO: 150538 - RNA, 19 nt, Artificial Sequence
  Description of Artificial Sequence: Synthetic oligonucleotide
  Sense strand starting at position 3175 of SEQ ID NO: 1933
ccaacaauuggcuguagau

SEQ ID NO: 150539 - RNA, 19 nt, Artificial Sequence
  Description of Artificial Sequence: Synthetic oligonucleotide
  Antisense strand to SEQ ID NO: 150538
aucuacagccaauuguugg

SEQ ID NO: 150540 - RNA, 19 nt, Artificial Sequence
  Description of Artificial Sequence: Synthetic oligonucleotide
  Sense strand starting at position 3132 of SEQ ID NO: 1933
cuugcuuuccuggaguaaa

SEQ ID NO: 150541 - RNA, 19 nt, Artificial Sequence
  Description of Artificial Sequence: Synthetic oligonucleotide
  Antisense strand to SEQ ID NO: 150540
uuuacuccaggaaagcaag

SEQ ID NO: 150542 - RNA, 19 nt, Artificial Sequence
  Description of Artificial Sequence: Synthetic oligonucleotide
  Sense strand starting at position 3131 of SEQ ID NO: 1933
acuugcuuuccuggaguaa

SEQ ID NO: 150543 - RNA, 19 nt, Artificial Sequence
  Description of Artificial Sequence: Synthetic oligonucleotide
  Antisense strand to SEQ ID NO: 150542
uuacuccaggaaagcaagu

SEQ ID NO: 150544 - RNA, 19 nt, Artificial Sequence
  Description of Artificial Sequence: Synthetic oligonucleotide
  Sense strand starting at position 3088 of SEQ ID NO: 1933
ugucuuccugacuaugauu

SEQ ID NO: 150545 - RNA, 19 nt, Artificial Sequence
  Description of Artificial Sequence: Synthetic oligonucleotide
  Antisense strand to SEQ ID NO: 150544
aaucauagucaggaagaca

SEQ ID NO: 150546 - RNA, 19 nt, Artificial Sequence
  Description of Artificial Sequence: Synthetic oligonucleotide
  Sense strand starting at position 3087 of SEQ ID NO: 1933
cugucuuccugacuaugau

SEQ ID NO: 150547 - RNA, 19 nt, Artificial Sequence
  Description of Artificial Sequence: Synthetic oligonucleotide
  Antisense strand to SEQ ID NO: 150546
aucauagucaggaagacag

SEQ ID NO: 150548 - RNA, 19 nt, Artificial Sequence
  Description of Artificial Sequence: Synthetic oligonucleotide
  Sense strand starting at position 3039 of SEQ ID NO: 1933
acucucuuccaaggagacu

SEQ ID NO: 150549 - RNA, 19 nt, Artificial Sequence
  Description of Artificial Sequence: Synthetic oligonucleotide
  Antisense strand to SEQ ID NO: 150548
agucuccuuggaagagagu

SEQ ID NO: 150550 - RNA, 19 nt, Artificial Sequence
  Description of Artificial Sequence: Synthetic oligonucleotide
  Sense strand starting at position 2990 of SEQ ID NO: 1933
ccuacuccacagugauauc

SEQ ID NO: 150551 - RNA, 19 nt, Artificial Sequence
  Description of Artificial Sequence: Synthetic oligonucleotide
  Antisense strand to SEQ ID NO: 150550
gauaucacuguggaguagg

SEQ ID NO: 150552 - RNA, 19 nt, Artificial Sequence
  Description of Artificial Sequence: Synthetic oligonucleotide
  Sense strand starting at position 2631 of SEQ ID NO: 1933
ggcaauucugaugauaccu

SEQ ID NO: 150553 - RNA, 19 nt, Artificial Sequence
  Description of Artificial Sequence: Synthetic oligonucleotide
  Antisense strand to SEQ ID NO: 150552
agguaucaucagaauugcc

SEQ ID NO: 150554 - RNA, 19 nt, Artificial Sequence
  Description of Artificial Sequence: Synthetic oligonucleotide
  Sense strand starting at position 2549 of SEQ ID NO: 1933
cggagauggaccugagcaa

SEQ ID NO: 150555 - RNA, 19 nt, Artificial Sequence
  Description of Artificial Sequence: Synthetic oligonucleotide
  Antisense strand to SEQ ID NO: 150554
uugcucagguccaucuccg

SEQ ID NO: 150556 - RNA, 19 nt, Artificial Sequence
  Description of Artificial Sequence: Synthetic oligonucleotide
  Sense strand starting at position 2521 of SEQ ID NO: 1933
uugcauuguagaugaagaa

SEQ ID NO: 150557 - RNA, 19 nt, Artificial Sequence
  Description of Artificial Sequence: Synthetic oligonucleotide
  Antisense strand to SEQ ID NO: 150556
uucuucaucuacaaugcaa

SEQ ID NO: 150558 - RNA, 19 nt, Artificial Sequence
  Description of Artificial Sequence: Synthetic oligonucleotide
  Sense strand starting at position 2203 of SEQ ID NO: 1933
ggaggaagcugguuguuua

SEQ ID NO: 150559 - RNA, 19 nt, Artificial Sequence
  Description of Artificial Sequence: Synthetic oligonucleotide
  Antisense strand to SEQ ID NO: 150558
uaaacaaccagcuuccucc

SEQ ID NO: 150560 - RNA, 19 nt, Artificial Sequence
  Description of Artificial Sequence: Synthetic oligonucleotide
  Sense strand starting at position 2187 of SEQ ID NO: 1933
gccugaaacugguuuggga

SEQ ID NO: 150561 - RNA, 19 nt, Artificial Sequence
  Description of Artificial Sequence: Synthetic oligonucleotide
  Antisense strand to SEQ ID NO: 150560
ucccaaaccaguuucaggc

SEQ ID NO: 150562 - RNA, 19 nt, Artificial Sequence
  Description of Artificial Sequence: Synthetic oligonucleotide
  Sense strand starting at position 2074 of SEQ ID NO: 1933
ggaagauugcuucacaggu

SEQ ID NO: 150563 - RNA, 19 nt, Artificial Sequence
  Description of Artificial Sequence: Synthetic oligonucleotide
  Antisense strand to SEQ ID NO: 150562
accugugaagcaaucuucc

SEQ ID NO: 150564 - RNA, 19 nt, Artificial Sequence
  Description of Artificial Sequence: Synthetic oligonucleotide
  Sense strand starting at position 1712 of SEQ ID NO: 1933
gcaacuuaacugggagaug

SEQ ID NO: 150565 - RNA, 19 nt, Artificial Sequence
  Description of Artificial Sequence: Synthetic oligonucleotide
  Antisense strand to SEQ ID NO: 150564
caucucccaguuaaguugc

SEQ ID NO: 150566 - RNA, 19 nt, Artificial Sequence
  Description of Artificial Sequence: Synthetic oligonucleotide
  Sense strand starting at position 1609 of SEQ ID NO: 1933
uugggacacuuagaagaaa

SEQ ID NO: 150567 - RNA, 19 nt, Artificial Sequence
  Description of Artificial Sequence: Synthetic oligonucleotide
  Antisense strand to SEQ ID NO: 150566
uuucuucuaagugucccaa

SEQ ID NO: 150568 - RNA, 19 nt, Artificial Sequence
  Description of Artificial Sequence: Synthetic oligonucleotide
  Sense strand starting at position 1412 of SEQ ID NO: 1933
ccagcccuaccuugagaaa

SEQ ID NO: 150569 - RNA, 19 nt, Artificial Sequence
  Description of Artificial Sequence: Synthetic oligonucleotide
  Antisense strand to SEQ ID NO: 150568
uuucucaagguagggcugg

SEQ ID NO: 150570 - RNA, 19 nt, Artificial Sequence
  Description of Artificial Sequence: Synthetic oligonucleotide
  Sense strand starting at position 1266 of SEQ ID NO: 1933
gcaccugcccuguauaaca

SEQ ID NO: 150571 - RNA, 19 nt, Artificial Sequence
  Description of Artificial Sequence: Synthetic oligonucleotide
  Antisense strand to SEQ ID NO: 150570
uguuauacagggcaggugc

SEQ ID NO: 150572 - RNA, 19 nt, Artificial Sequence
  Description of Artificial Sequence: Synthetic oligonucleotide
  Sense strand starting at position 1140 of SEQ ID NO: 1933
gucucccuccacuggaaua

SEQ ID NO: 150573 - RNA, 19 nt, Artificial Sequence
  Description of Artificial Sequence: Synthetic oligonucleotide
  Antisense strand to SEQ ID NO: 150572
uauuccaguggagggagac

SEQ ID NO: 150574 - RNA, 19 nt, Artificial Sequence
  Description of Artificial Sequence: Synthetic oligonucleotide
  Sense strand starting at position 1110 of SEQ ID NO: 1933
gcucuuuauuggccaacaa

SEQ ID NO: 150575 - RNA, 19 nt, Artificial Sequence
  Description of Artificial Sequence: Synthetic oligonucleotide
  Antisense strand to SEQ ID NO: 150574
uuguuggccaauaaagagc

SEQ ID NO: 150576 - RNA, 19 nt, Artificial Sequence
  Description of Artificial Sequence: Synthetic oligonucleotide
  Sense strand starting at position 1091 of SEQ ID NO: 1933
ggcauuuggcuuuaucugu

SEQ ID NO: 150577 - RNA, 19 nt, Artificial Sequence
  Description of Artificial Sequence: Synthetic oligonucleotide
  Antisense strand to SEQ ID NO: 150576
acagauaaagccaaaugcc

SEQ ID NO: 150578 - RNA, 19 nt, Artificial Sequence
  Description of Artificial Sequence: Synthetic oligonucleotide
  Sense strand starting at position 844 of SEQ ID NO: 1933
accgcagacccuuaggauu

SEQ ID NO: 150579 - RNA, 19 nt, Artificial Sequence
  Description of Artificial Sequence: Synthetic oligonucleotide
  Antisense strand to SEQ ID NO: 150578
aauccuaagggucugcggu

SEQ ID NO: 150580 - RNA, 19 nt, Artificial Sequence
  Description of Artificial Sequence: Synthetic oligonucleotide
  Sense strand starting at position 637 of SEQ ID NO: 1933
gacugagacccauguguuc

SEQ ID NO: 150581 - RNA, 19 nt, Artificial Sequence
  Description of Artificial Sequence: Synthetic oligonucleotide
  Antisense strand to SEQ ID NO: 150580
gaacacaugggucucaguc

SEQ ID NO: 150582 - RNA, 19 nt, Artificial Sequence
  Description of Artificial Sequence: Synthetic oligonucleotide
  Sense strand starting at position 496 of SEQ ID NO: 1933
gccugaggccuccaccuau

SEQ ID NO: 150583 - RNA, 19 nt, Artificial Sequence
  Description of Artificial Sequence: Synthetic oligonucleotide
  Antisense strand to SEQ ID NO: 150582
auagguggaggccucaggc

SEQ ID NO: 150584 - RNA, 19 nt, Artificial Sequence
  Description of Artificial Sequence: Synthetic oligonucleotide
  Sense strand starting at position 3978 of SEQ ID NO: 1934
cuagauucuuuguuuccua

SEQ ID NO: 150585 - RNA, 19 nt, Artificial Sequence
  Description of Artificial Sequence: Synthetic oligonucleotide
  Antisense strand to SEQ ID NO: 150584
uaggaaacaaagaaucuag

SEQ ID NO: 150586 - RNA, 19 nt, Artificial Sequence
  Description of Artificial Sequence: Synthetic oligonucleotide
  Sense strand starting at position 3977 of SEQ ID NO: 1934
gcuagauucuuuguuuccu

SEQ ID NO: 150587 - RNA, 19 nt, Artificial Sequence
  Description of Artificial Sequence: Synthetic oligonucleotide
  Antisense strand to SEQ ID NO: 150586
aggaaacaaagaaucuagc

SEQ ID NO: 150588 - RNA, 19 nt, Artificial Sequence
  Description of Artificial Sequence: Synthetic oligonucleotide
  Sense strand starting at position 3974 of SEQ ID NO: 1934
cuagcuagauucuuuguuu

SEQ ID NO: 150589 - RNA, 19 nt, Artificial Sequence
  Description of Artificial Sequence: Synthetic oligonucleotide
  Antisense strand to SEQ ID NO: 150588
aaacaaagaaucuagcuag

SEQ ID NO: 150590 - RNA, 19 nt, Artificial Sequence
  Description of Artificial Sequence: Synthetic oligonucleotide
  Sense strand starting at position 3860 of SEQ ID NO: 1934
gaaugauacucuguuguau

SEQ ID NO: 150591 - RNA, 19 nt, Artificial Sequence
  Description of Artificial Sequence: Synthetic oligonucleotide
  Antisense strand to SEQ ID NO: 150590
auacaacagaguaucauuc

SEQ ID NO: 150592 - RNA, 19 nt, Artificial Sequence
  Description of Artificial Sequence: Synthetic oligonucleotide
  Sense strand starting at position 3857 of SEQ ID NO: 1934
guugaaugauacucuguug

SEQ ID NO: 150593 - RNA, 19 nt, Artificial Sequence
  Description of Artificial Sequence: Synthetic oligonucleotide
  Antisense strand to SEQ ID NO: 150592
caacagaguaucauucaac

SEQ ID NO: 150594 - RNA, 19 nt, Artificial Sequence
  Description of Artificial Sequence: Synthetic oligonucleotide
  Sense strand starting at position 3767 of SEQ ID NO: 1934
guuuguugugucugacuuu

SEQ ID NO: 150595 - RNA, 19 nt, Artificial Sequence
  Description of Artificial Sequence: Synthetic oligonucleotide
  Antisense strand to SEQ ID NO: 150594
aaagucagacacaacaaac

SEQ ID NO: 150596 - RNA, 19 nt, Artificial Sequence
  Description of Artificial Sequence: Synthetic oligonucleotide
  Sense strand starting at position 3733 of SEQ ID NO: 1934
cugggcauuuccuguaacu

SEQ ID NO: 150597 - RNA, 19 nt, Artificial Sequence
  Description of Artificial Sequence: Synthetic oligonucleotide
  Antisense strand to SEQ ID NO: 150596
aguuacaggaaaugcccag

SEQ ID NO: 150598 - RNA, 19 nt, Artificial Sequence
  Description of Artificial Sequence: Synthetic oligonucleotide
  Sense strand starting at position 3716 of SEQ ID NO: 1934
ccagguauuugcguauucu

SEQ ID NO: 150599 - RNA, 19 nt, Artificial Sequence
  Description of Artificial Sequence: Synthetic oligonucleotide
  Antisense strand to SEQ ID NO: 150598
agaauacgcaaauaccugg

SEQ ID NO: 150600 - RNA, 19 nt, Artificial Sequence
  Description of Artificial Sequence: Synthetic oligonucleotide
  Sense strand starting at position 3172 of SEQ ID NO: 1934
ugauaaaucaguugggcca

SEQ ID NO: 150601 - RNA, 19 nt, Artificial Sequence
  Description of Artificial Sequence: Synthetic oligonucleotide
  Antisense strand to SEQ ID NO: 150600
uggcccaacugauuuauca

SEQ ID NO: 150602 - RNA, 19 nt, Artificial Sequence
  Description of Artificial Sequence: Synthetic oligonucleotide
  Sense strand starting at position 3160 of SEQ ID NO: 1934
uucuaagaguagugauaaa

SEQ ID NO: 150603 - RNA, 19 nt, Artificial Sequence
  Description of Artificial Sequence: Synthetic oligonucleotide
  Antisense strand to SEQ ID NO: 150602
uuuaucacuacucuuagaa

SEQ ID NO: 150604 - RNA, 19 nt, Artificial Sequence
  Description of Artificial Sequence: Synthetic oligonucleotide
  Sense strand starting at position 3157 of SEQ ID NO: 1934
uccuucuaagaguagugau

SEQ ID NO: 150605 - RNA, 19 nt, Artificial Sequence
  Description of Artificial Sequence: Synthetic oligonucleotide
  Antisense strand to SEQ ID NO: 150604
aucacuacucuuagaagga

SEQ ID NO: 150606 - RNA, 19 nt, Artificial Sequence
  Description of Artificial Sequence: Synthetic oligonucleotide
  Sense strand starting at position 3077 of SEQ ID NO: 1934
uuauuuguuuaagagaggu

SEQ ID NO: 150607 - RNA, 19 nt, Artificial Sequence
  Description of Artificial Sequence: Synthetic oligonucleotide
  Antisense strand to SEQ ID NO: 150606
accucucuuaaacaaauaa

SEQ ID NO: 150608 - RNA, 19 nt, Artificial Sequence
  Description of Artificial Sequence: Synthetic oligonucleotide
  Sense strand starting at position 3053 of SEQ ID NO: 1934
guuucuacauaguauacau

SEQ ID NO: 150609 - RNA, 19 nt, Artificial Sequence
  Description of Artificial Sequence: Synthetic oligonucleotide
  Antisense strand to SEQ ID NO: 150608
auguauacuauguagaaac

SEQ ID NO: 150610 - RNA, 19 nt, Artificial Sequence
  Description of Artificial Sequence: Synthetic oligonucleotide
  Sense strand starting at position 2956 of SEQ ID NO: 1934
uuaucagcgacgcaugauu

SEQ ID NO: 150611 - RNA, 19 nt, Artificial Sequence
  Description of Artificial Sequence: Synthetic oligonucleotide
  Antisense strand to SEQ ID NO: 150610
aaucaugcgucgcugauaa

SEQ ID NO: 150612 - RNA, 19 nt, Artificial Sequence
  Description of Artificial Sequence: Synthetic oligonucleotide
  Sense strand starting at position 2877 of SEQ ID NO: 1934
ugagcaaaguuaugaggaa

SEQ ID NO: 150613 - RNA, 19 nt, Artificial Sequence
  Description of Artificial Sequence: Synthetic oligonucleotide
  Antisense strand to SEQ ID NO: 150612
uuccucauaacuuugcuca

SEQ ID NO: 150614 - RNA, 19 nt, Artificial Sequence
  Description of Artificial Sequence: Synthetic oligonucleotide
  Sense strand starting at position 2845 of SEQ ID NO: 1934
cagaaauuguggcaaauuu

SEQ ID NO: 150615 - RNA, 19 nt, Artificial Sequence
  Description of Artificial Sequence: Synthetic oligonucleotide
  Antisense strand to SEQ ID NO: 150614
aaauuugccacaauuucug

SEQ ID NO: 150616 - RNA, 19 nt, Artificial Sequence
  Description of Artificial Sequence: Synthetic oligonucleotide
  Sense strand starting at position 2760 of SEQ ID NO: 1934
guuuguuaccaagaacuac

SEQ ID NO: 150617 - RNA, 19 nt, Artificial Sequence
  Description of Artificial Sequence: Synthetic oligonucleotide
  Antisense strand to SEQ ID NO: 150616
guaguucuugguaacaaac

SEQ ID NO: 150618 - RNA, 19 nt, Artificial Sequence
  Description of Artificial Sequence: Synthetic oligonucleotide
  Sense strand starting at position 2756 of SEQ ID NO: 1934
uuccguuuguuaccaagaa

SEQ ID NO: 150619 - RNA, 19 nt, Artificial Sequence
  Description of Artificial Sequence: Synthetic oligonucleotide
  Antisense strand to SEQ ID NO: 150618
uucuugguaacaaacggaa

SEQ ID NO: 150620 - RNA, 19 nt, Artificial Sequence
  Description of Artificial Sequence: Synthetic oligonucleotide
  Sense strand starting at position 2748 of SEQ ID NO: 1934
cacaaauguuccguuuguu

SEQ ID NO: 150621 - RNA, 19 nt, Artificial Sequence
  Description of Artificial Sequence: Synthetic oligonucleotide
  Antisense strand to SEQ ID NO: 150620
aacaaacggaacauuugug

SEQ ID NO: 150622 - RNA, 19 nt, Artificial Sequence
  Description of Artificial Sequence: Synthetic oligonucleotide
  Sense strand starting at position 2626 of SEQ ID NO: 1934
ucaaguaaguacuggaaga

SEQ ID NO: 150623 - RNA, 19 nt, Artificial Sequence
  Description of Artificial Sequence: Synthetic oligonucleotide
  Antisense strand to SEQ ID NO: 150622
ucuuccaguacuuacuuga

SEQ ID NO: 150624 - RNA, 19 nt, Artificial Sequence
  Description of Artificial Sequence: Synthetic oligonucleotide
  Sense strand starting at position 2479 of SEQ ID NO: 1934
uuguguuggagccaaacuu

SEQ ID NO: 150625 - RNA, 19 nt, Artificial Sequence
  Description of Artificial Sequence: Synthetic oligonucleotide
  Antisense strand to SEQ ID NO: 150624
aaguuuggcuccaacacaa

SEQ ID NO: 150626 - RNA, 19 nt, Artificial Sequence
  Description of Artificial Sequence: Synthetic oligonucleotide
  Sense strand starting at position 2467 of SEQ ID NO: 1934
cguccaguugucuuguguu

SEQ ID NO: 150627 - RNA, 19 nt, Artificial Sequence
  Description of Artificial Sequence: Synthetic oligonucleotide
  Antisense strand to SEQ ID NO: 150626
aacacaagacaacuggacg

SEQ ID NO: 150628 - RNA, 19 nt, Artificial Sequence
  Description of Artificial Sequence: Synthetic oligonucleotide
  Sense strand starting at position 2297 of SEQ ID NO: 1934
gcccgagguucagugauuu

SEQ ID NO: 150629 - RNA, 19 nt, Artificial Sequence
  Description of Artificial Sequence: Synthetic oligonucleotide
  Antisense strand to SEQ ID NO: 150628
aaaucacugaaccucgggc

SEQ ID NO: 150630 - RNA, 19 nt, Artificial Sequence
  Description of Artificial Sequence: Synthetic oligonucleotide
  Sense strand starting at position 2288 of SEQ ID NO: 1934
ggauuaggagcccgagguu

SEQ ID NO: 150631 - RNA, 19 nt, Artificial Sequence
  Description of Artificial Sequence: Synthetic oligonucleotide
  Antisense strand to SEQ ID NO: 150630
aaccucgggcuccuaaucc

SEQ ID NO: 150632 - RNA, 19 nt, Artificial Sequence
  Description of Artificial Sequence: Synthetic oligonucleotide
  Sense strand starting at position 2100 of SEQ ID NO: 1934
gcuggacucgcgugacagu

SEQ ID NO: 150633 - RNA, 19 nt, Artificial Sequence
  Description of Artificial Sequence: Synthetic oligonucleotide
  Antisense strand to SEQ ID NO: 150632
acugucacgcgaguccagc

SEQ ID NO: 150634 - RNA, 19 nt, Artificial Sequence
  Description of Artificial Sequence: Synthetic oligonucleotide
  Sense strand starting at position 1396 of SEQ ID NO: 1934
gcuaucuucccgccagcaa

SEQ ID NO: 150635 - RNA, 19 nt, Artificial Sequence
  Description of Artificial Sequence: Synthetic oligonucleotide
  Antisense strand to SEQ ID NO: 150634
uugcuggcgggaagauagc

SEQ ID NO: 150636 - RNA, 19 nt, Artificial Sequence
  Description of Artificial Sequence: Synthetic oligonucleotide
  Sense strand starting at position 1339 of SEQ ID NO: 1934
gggaaugggucguccucuu

SEQ ID NO: 150637 - RNA, 19 nt, Artificial Sequence
  Description of Artificial Sequence: Synthetic oligonucleotide
  Antisense strand to SEQ ID NO: 150636
aagaggacgacccauuccc

SEQ ID NO: 150638 - RNA, 19 nt, Artificial Sequence
  Description of Artificial Sequence: Synthetic oligonucleotide
  Sense strand starting at position 1224 of SEQ ID NO: 1934
gcgggagaagcgagaguuu

SEQ ID NO: 150639 - RNA, 19 nt, Artificial Sequence
  Description of Artificial Sequence: Synthetic oligonucleotide
  Antisense strand to SEQ ID NO: 150638
aaacucucgcuucucccgc

SEQ ID NO: 150640 - RNA, 19 nt, Artificial Sequence
  Description of Artificial Sequence: Synthetic oligonucleotide
  Sense strand starting at position 1091 of SEQ ID NO: 1934
gcccaaccuuuggaggaua

SEQ ID NO: 150641 - RNA, 19 nt, Artificial Sequence
  Description of Artificial Sequence: Synthetic oligonucleotide
  Antisense strand to SEQ ID NO: 150640
uauccuccaaagguugggc

SEQ ID NO: 150642 - RNA, 19 nt, Artificial Sequence
  Description of Artificial Sequence: Synthetic oligonucleotide
  Sense strand starting at position 1022 of SEQ ID NO: 1934
ccucuugcccuggaaguaa

SEQ ID NO: 150643 - RNA, 19 nt, Artificial Sequence
  Description of Artificial Sequence: Synthetic oligonucleotide
  Antisense strand to SEQ ID NO: 150642
uuacuuccagggcaagagg

SEQ ID NO: 150644 - RNA, 19 nt, Artificial Sequence
  Description of Artificial Sequence: Synthetic oligonucleotide
  Sense strand starting at position 1021 of SEQ ID NO: 1934
cccucuugcccuggaagua

SEQ ID NO: 150645 - RNA, 19 nt, Artificial Sequence
  Description of Artificial Sequence: Synthetic oligonucleotide
  Antisense strand to SEQ ID NO: 150644
uacuuccagggcaagaggg

SEQ ID NO: 150646 - RNA, 19 nt, Artificial Sequence
  Description of Artificial Sequence: Synthetic oligonucleotide
  Sense strand starting at position 1006 of SEQ ID NO: 1934
gguaauaacugcuuucccu

SEQ ID NO: 150647 - RNA, 19 nt, Artificial Sequence
  Description of Artificial Sequence: Synthetic oligonucleotide
  Antisense strand to SEQ ID NO: 150646
agggaaagcaguuauuacc

SEQ ID NO: 150648 - RNA, 19 nt, Artificial Sequence
  Description of Artificial Sequence: Synthetic oligonucleotide
  Sense strand starting at position 911 of SEQ ID NO: 1934
uggagucccuaauaaauac

SEQ ID NO: 150649 - RNA, 19 nt, Artificial Sequence
  Description of Artificial Sequence: Synthetic oligonucleotide
  Antisense strand to SEQ ID NO: 150648
guauuuauuagggacucca

SEQ ID NO: 150650 - RNA, 19 nt, Artificial Sequence
  Description of Artificial Sequence: Synthetic oligonucleotide
  Sense strand starting at position 786 of SEQ ID NO: 1934
agaugagggugccaggauu

SEQ ID NO: 150651 - RNA, 19 nt, Artificial Sequence
  Description of Artificial Sequence: Synthetic oligonucleotide
  Antisense strand to SEQ ID NO: 150650
aauccuggcacccucaucu

SEQ ID NO: 150652 - RNA, 19 nt, Artificial Sequence
  Description of Artificial Sequence: Synthetic oligonucleotide
  Sense strand starting at position 756 of SEQ ID NO: 1934
gcaaaucuuugcuuuaggu

SEQ ID NO: 150653 - RNA, 19 nt, Artificial Sequence
  Description of Artificial Sequence: Synthetic oligonucleotide
  Antisense strand to SEQ ID NO: 150652
accuaaagcaaagauuugc

SEQ ID NO: 150654 - RNA, 19 nt, Artificial Sequence
  Description of Artificial Sequence: Synthetic oligonucleotide
  Sense strand starting at position 753 of SEQ ID NO: 1934
gcugcaaaucuuugcuuua

SEQ ID NO: 150655 - RNA, 19 nt, Artificial Sequence
  Description of Artificial Sequence: Synthetic oligonucleotide
  Antisense strand to SEQ ID NO: 150654
uaaagcaaagauuugcagc

SEQ ID NO: 150656 - RNA, 19 nt, Artificial Sequence
  Description of Artificial Sequence: Synthetic oligonucleotide
  Sense strand starting at position 698 of SEQ ID NO: 1934
ugcaaauuccuucgaagua

SEQ ID NO: 150657 - RNA, 19 nt, Artificial Sequence
  Description of Artificial Sequence: Synthetic oligonucleotide
  Antisense strand to SEQ ID NO: 150656
uacuucgaaggaauuugca

SEQ ID NO: 150658 - RNA, 19 nt, Artificial Sequence
  Description of Artificial Sequence: Synthetic oligonucleotide
  Sense strand starting at position 696 of SEQ ID NO: 1934
uuugcaaauuccuucgaag

SEQ ID NO: 150659 - RNA, 19 nt, Artificial Sequence
  Description of Artificial Sequence: Synthetic oligonucleotide
  Antisense strand to SEQ ID NO: 150658
cuucgaaggaauuugcaaa

SEQ ID NO: 150660 - RNA, 19 nt, Artificial Sequence
  Description of Artificial Sequence: Synthetic oligonucleotide
  Sense strand starting at position 521 of SEQ ID NO: 1934
agagauuauuuccagugga

SEQ ID NO: 150661 - RNA, 19 nt, Artificial Sequence
  Description of Artificial Sequence: Synthetic oligonucleotide
  Antisense strand to SEQ ID NO: 150660
uccacuggaaauaaucucu

SEQ ID NO: 150662 - RNA, 19 nt, Artificial Sequence
  Description of Artificial Sequence: Synthetic oligonucleotide
  Sense strand starting at position 412 of SEQ ID NO: 1934
cuuuauugaggccacuaaa

SEQ ID NO: 150663 - RNA, 19 nt, Artificial Sequence
  Description of Artificial Sequence: Synthetic oligonucleotide
  Antisense strand to SEQ ID NO: 150662
uuuaguggccucaauaaag

SEQ ID NO: 150664 - RNA, 19 nt, Artificial Sequence
  Description of Artificial Sequence: Synthetic oligonucleotide
  Sense strand starting at position 3936 of SEQ ID NO: 1935
gaaugauacucuguuguau

SEQ ID NO: 150665 - RNA, 19 nt, Artificial Sequence
  Description of Artificial Sequence: Synthetic oligonucleotide
  Antisense strand to SEQ ID NO: 150664
auacaacagaguaucauuc

SEQ ID NO: 150666 - RNA, 19 nt, Artificial Sequence
  Description of Artificial Sequence: Synthetic oligonucleotide
  Sense strand starting at position 3933 of SEQ ID NO: 1935
guugaaugauacucuguug

SEQ ID NO: 150667 - RNA, 19 nt, Artificial Sequence
  Description of Artificial Sequence: Synthetic oligonucleotide
  Antisense strand to SEQ ID NO: 150666
caacagaguaucauucaac

SEQ ID NO: 150668 - RNA, 19 nt, Artificial Sequence
  Description of Artificial Sequence: Synthetic oligonucleotide
  Sense strand starting at position 3843 of SEQ ID NO: 1935
guuuguugugucugacuuu

SEQ ID NO: 150669 - RNA, 19 nt, Artificial Sequence
  Description of Artificial Sequence: Synthetic oligonucleotide
  Antisense strand to SEQ ID NO: 150668
aaagucagacacaacaaac

SEQ ID NO: 150670 - RNA, 19 nt, Artificial Sequence
  Description of Artificial Sequence: Synthetic oligonucleotide
  Sense strand starting at position 3809 of SEQ ID NO: 1935
cugggcauuuccuguaacu

SEQ ID NO: 150671 - RNA, 19 nt, Artificial Sequence
  Description of Artificial Sequence: Synthetic oligonucleotide
  Antisense strand to SEQ ID NO: 150670
aguuacaggaaaugcccag

SEQ ID NO: 150672 - RNA, 19 nt, Artificial Sequence
  Description of Artificial Sequence: Synthetic oligonucleotide
  Sense strand starting at position 3792 of SEQ ID NO: 1935
ccagguauuugcguauucu

SEQ ID NO: 150673 - RNA, 19 nt, Artificial Sequence
  Description of Artificial Sequence: Synthetic oligonucleotide
  Antisense strand to SEQ ID NO: 150672
agaauacgcaaauaccugg

SEQ ID NO: 150674 - RNA, 19 nt, Artificial Sequence
  Description of Artificial Sequence: Synthetic oligonucleotide
  Sense strand starting at position 3248 of SEQ ID NO: 1935
ugauaaaucaguugggcca

SEQ ID NO: 150675 - RNA, 19 nt, Artificial Sequence
  Description of Artificial Sequence: Synthetic oligonucleotide
  Antisense strand to SEQ ID NO: 150674
uggcccaacugauuuauca

SEQ ID NO: 150676 - RNA, 19 nt, Artificial Sequence
  Description of Artificial Sequence: Synthetic oligonucleotide
  Sense strand starting at position 3236 of SEQ ID NO: 1935
uucuaagaguagugauaaa

SEQ ID NO: 150677 - RNA, 19 nt, Artificial Sequence
  Description of Artificial Sequence: Synthetic oligonucleotide
  Antisense strand to SEQ ID NO: 150676
uuuaucacuacucuuagaa

SEQ ID NO: 150678 - RNA, 19 nt, Artificial Sequence
  Description of Artificial Sequence: Synthetic oligonucleotide
  Sense strand starting at position 3233 of SEQ ID NO: 1935
uccuucuaagaguagugau

SEQ ID NO: 150679 - RNA, 19 nt, Artificial Sequence
  Description of Artificial Sequence: Synthetic oligonucleotide
  Antisense strand to SEQ ID NO: 150678
aucacuacucuuagaagga

SEQ ID NO: 150680 - RNA, 19 nt, Artificial Sequence
  Description of Artificial Sequence: Synthetic oligonucleotide
  Sense strand starting at position 3153 of SEQ ID NO: 1935
uuauuuguuuaagagaggu

SEQ ID NO: 150681 - RNA, 19 nt, Artificial Sequence
  Description of Artificial Sequence: Synthetic oligonucleotide
  Antisense strand to SEQ ID NO: 150680
accucucuuaaacaaauaa

SEQ ID NO: 150682 - RNA, 19 nt, Artificial Sequence
  Description of Artificial Sequence: Synthetic oligonucleotide
  Sense strand starting at position 3129 of SEQ ID NO: 1935
guuucuacauaguauacau

SEQ ID NO: 150683 - RNA, 19 nt, Artificial Sequence
  Description of Artificial Sequence: Synthetic oligonucleotide
  Antisense strand to SEQ ID NO: 150682
auguauacuauguagaaac

SEQ ID NO: 150684 - RNA, 19 nt, Artificial Sequence
  Description of Artificial Sequence: Synthetic oligonucleotide
  Sense strand starting at position 3122 of SEQ ID NO: 1935
uguuauuguuucuacauag

SEQ ID NO: 150685 - RNA, 19 nt, Artificial Sequence
  Description of Artificial Sequence: Synthetic oligonucleotide
  Antisense strand to SEQ ID NO: 150684
cuauguagaaacaauaaca

SEQ ID NO: 150686 - RNA, 19 nt, Artificial Sequence
  Description of Artificial Sequence: Synthetic oligonucleotide
  Sense strand starting at position 3032 of SEQ ID NO: 1935
uuaucagcgacgcaugauu

SEQ ID NO: 150687 - RNA, 19 nt, Artificial Sequence
  Description of Artificial Sequence: Synthetic oligonucleotide
  Antisense strand to SEQ ID NO: 150686
aaucaugcgucgcugauaa

SEQ ID NO: 150688 - RNA, 19 nt, Artificial Sequence
  Description of Artificial Sequence: Synthetic oligonucleotide
  Sense strand starting at position 2953 of SEQ ID NO: 1935
ugagcaaaguuaugaggaa

SEQ ID NO: 150689 - RNA, 19 nt, Artificial Sequence
  Description of Artificial Sequence: Synthetic oligonucleotide
  Antisense strand to SEQ ID NO: 150688
uuccucauaacuuugcuca

SEQ ID NO: 150690 - RNA, 19 nt, Artificial Sequence
  Description of Artificial Sequence: Synthetic oligonucleotide
  Sense strand starting at position 2921 of SEQ ID NO: 1935
cagaaauuguggcaaauuu

SEQ ID NO: 150691 - RNA, 19 nt, Artificial Sequence
  Description of Artificial Sequence: Synthetic oligonucleotide
  Antisense strand to SEQ ID NO: 150690
aaauuugccacaauuucug

SEQ ID NO: 150692 - RNA, 19 nt, Artificial Sequence
  Description of Artificial Sequence: Synthetic oligonucleotide
  Sense strand starting at position 2836 of SEQ ID NO: 1935
guuuguuaccaagaacuac

SEQ ID NO: 150693 - RNA, 19 nt, Artificial Sequence
  Description of Artificial Sequence: Synthetic oligonucleotide
  Antisense strand to SEQ ID NO: 150692
guaguucuugguaacaaac

SEQ ID NO: 150694 - RNA, 19 nt, Artificial Sequence
  Description of Artificial Sequence: Synthetic oligonucleotide
  Sense strand starting at position 2832 of SEQ ID NO: 1935
uuccguuuguuaccaagaa

SEQ ID NO: 150695 - RNA, 19 nt, Artificial Sequence
  Description of Artificial Sequence: Synthetic oligonucleotide
  Antisense strand to SEQ ID NO: 150694
uucuugguaacaaacggaa

SEQ ID NO: 150696 - RNA, 19 nt, Artificial Sequence
  Description of Artificial Sequence: Synthetic oligonucleotide
  Sense strand starting at position 2824 of SEQ ID NO: 1935
cacaaauguuccguuuguu

SEQ ID NO: 150697 - RNA, 19 nt, Artificial Sequence
  Description of Artificial Sequence: Synthetic oligonucleotide
  Antisense strand to SEQ ID NO: 150696
aacaaacggaacauuugug

SEQ ID NO: 150698 - RNA, 19 nt, Artificial Sequence
  Description of Artificial Sequence: Synthetic oligonucleotide
  Sense strand starting at position 2702 of SEQ ID NO: 1935
ucaaguaaguacuggaaga

SEQ ID NO: 150699 - RNA, 19 nt, Artificial Sequence
  Description of Artificial Sequence: Synthetic oligonucleotide
  Antisense strand to SEQ ID NO: 150698
ucuuccaguacuuacuuga

SEQ ID NO: 150700 - RNA, 19 nt, Artificial Sequence
  Description of Artificial Sequence: Synthetic oligonucleotide
  Sense strand starting at position 2555 of SEQ ID NO: 1935
uuguguuggagccaaacuu

SEQ ID NO: 150701 - RNA, 19 nt, Artificial Sequence
  Description of Artificial Sequence: Synthetic oligonucleotide
  Antisense strand to SEQ ID NO: 150700
aaguuuggcuccaacacaa

SEQ ID NO: 150702 - RNA, 19 nt, Artificial Sequence
  Description of Artificial Sequence: Synthetic oligonucleotide
  Sense strand starting at position 2543 of SEQ ID NO: 1935
cguccaguugucuuguguu

SEQ ID NO: 150703 - RNA, 19 nt, Artificial Sequence
  Description of Artificial Sequence: Synthetic oligonucleotide
  Antisense strand to SEQ ID NO: 150702
aacacaagacaacuggacg

SEQ ID NO: 150704 - RNA, 19 nt, Artificial Sequence
  Description of Artificial Sequence: Synthetic oligonucleotide
  Sense strand starting at position 2373 of SEQ ID NO: 1935
gcccgagguucagugauuu

SEQ ID NO: 150705 - RNA, 19 nt, Artificial Sequence
  Description of Artificial Sequence: Synthetic oligonucleotide
  Antisense strand to SEQ ID NO: 150704
aaaucacugaaccucgggc

SEQ ID NO: 150706 - RNA, 19 nt, Artificial Sequence
  Description of Artificial Sequence: Synthetic oligonucleotide
  Sense strand starting at position 2364 of SEQ ID NO: 1935
ggauuaggagcccgagguu

SEQ ID NO: 150707 - RNA, 19 nt, Artificial Sequence
  Description of Artificial Sequence: Synthetic oligonucleotide
  Antisense strand to SEQ ID NO: 150706
aaccucgggcuccuaaucc

SEQ ID NO: 150708 - RNA, 19 nt, Artificial Sequence
  Description of Artificial Sequence: Synthetic oligonucleotide
  Sense strand starting at position 2176 of SEQ ID NO: 1935
gcuggacucgcgugacagu

SEQ ID NO: 150709 - RNA, 19 nt, Artificial Sequence
  Description of Artificial Sequence: Synthetic oligonucleotide
  Antisense strand to SEQ ID NO: 150708
acugucacgcgaguccagc

SEQ ID NO: 150710 - RNA, 19 nt, Artificial Sequence
  Description of Artificial Sequence: Synthetic oligonucleotide
  Sense strand starting at position 1472 of SEQ ID NO: 1935
gcuaucuucccgccagcaa

SEQ ID NO: 150711 - RNA, 19 nt, Artificial Sequence
  Description of Artificial Sequence: Synthetic oligonucleotide
  Antisense strand to SEQ ID NO: 150710
uugcuggcgggaagauagc

SEQ ID NO: 150712 - RNA, 19 nt, Artificial Sequence
  Description of Artificial Sequence: Synthetic oligonucleotide
  Sense strand starting at position 1415 of SEQ ID NO: 1935
gggaaugggucguccucuu

SEQ ID NO: 150713 - RNA, 19 nt, Artificial Sequence
  Description of Artificial Sequence: Synthetic oligonucleotide
  Antisense strand to SEQ ID NO: 150712
aagaggacgacccauuccc

SEQ ID NO: 150714 - RNA, 19 nt, Artificial Sequence
  Description of Artificial Sequence: Synthetic oligonucleotide
  Sense strand starting at position 1300 of SEQ ID NO: 1935
gcgggagaagcgagaguuu

SEQ ID NO: 150715 - RNA, 19 nt, Artificial Sequence
  Description of Artificial Sequence: Synthetic oligonucleotide
  Antisense strand to SEQ ID NO: 150714
aaacucucgcuucucccgc

SEQ ID NO: 150716 - RNA, 19 nt, Artificial Sequence
  Description of Artificial Sequence: Synthetic oligonucleotide
  Sense strand starting at position 1167 of SEQ ID NO: 1935
gcccaaccuuuggaggaua

SEQ ID NO: 150717 - RNA, 19 nt, Artificial Sequence
  Description of Artificial Sequence: Synthetic oligonucleotide
  Antisense strand to SEQ ID NO: 150716
uauccuccaaagguugggc

SEQ ID NO: 150718 - RNA, 19 nt, Artificial Sequence
  Description of Artificial Sequence: Synthetic oligonucleotide
  Sense strand starting at position 1166 of SEQ ID NO: 1935
ggcccaaccuuuggaggau

SEQ ID NO: 150719 - RNA, 19 nt, Artificial Sequence
  Description of Artificial Sequence: Synthetic oligonucleotide
  Antisense strand to SEQ ID NO: 150718
auccuccaaagguugggcc

SEQ ID NO: 150720 - RNA, 19 nt, Artificial Sequence
  Description of Artificial Sequence: Synthetic oligonucleotide
  Sense strand starting at position 1098 of SEQ ID NO: 1935
ccucuugcccuggaaguaa

SEQ ID NO: 150721 - RNA, 19 nt, Artificial Sequence
  Description of Artificial Sequence: Synthetic oligonucleotide
  Antisense strand to SEQ ID NO: 150720
uuacuuccagggcaagagg

SEQ ID NO: 150722 - RNA, 19 nt, Artificial Sequence
  Description of Artificial Sequence: Synthetic oligonucleotide
  Sense strand starting at position 1097 of SEQ ID NO: 1935
cccucuugcccuggaagua

SEQ ID NO: 150723 - RNA, 19 nt, Artificial Sequence
  Description of Artificial Sequence: Synthetic oligonucleotide
  Antisense strand to SEQ ID NO: 150722
uacuuccagggcaagaggg

SEQ ID NO: 150724 - RNA, 19 nt, Artificial Sequence
  Description of Artificial Sequence: Synthetic oligonucleotide
  Sense strand starting at position 1082 of SEQ ID NO: 1935
gguaauaacugcuuucccu

SEQ ID NO: 150725 - RNA, 19 nt, Artificial Sequence
  Description of Artificial Sequence: Synthetic oligonucleotide
  Antisense strand to SEQ ID NO: 150724
agggaaagcaguuauuacc

SEQ ID NO: 150726 - RNA, 19 nt, Artificial Sequence
  Description of Artificial Sequence: Synthetic oligonucleotide
  Sense strand starting at position 987 of SEQ ID NO: 1935
uggagucccuaauaaauac

SEQ ID NO: 150727 - RNA, 19 nt, Artificial Sequence
  Description of Artificial Sequence: Synthetic oligonucleotide
  Antisense strand to SEQ ID NO: 150726
guauuuauuagggacucca

SEQ ID NO: 150728 - RNA, 19 nt, Artificial Sequence
  Description of Artificial Sequence: Synthetic oligonucleotide
  Sense strand starting at position 862 of SEQ ID NO: 1935
agaugagggugccaggauu

SEQ ID NO: 150729 - RNA, 19 nt, Artificial Sequence
  Description of Artificial Sequence: Synthetic oligonucleotide
  Antisense strand to SEQ ID NO: 150728
aauccuggcacccucaucu

SEQ ID NO: 150730 - RNA, 19 nt, Artificial Sequence
  Description of Artificial Sequence: Synthetic oligonucleotide
  Sense strand starting at position 832 of SEQ ID NO: 1935
gcaaaucuuugcuuuaggu

SEQ ID NO: 150731 - RNA, 19 nt, Artificial Sequence
  Description of Artificial Sequence: Synthetic oligonucleotide
  Antisense strand to SEQ ID NO: 150730
accuaaagcaaagauuugc

SEQ ID NO: 150732 - RNA, 19 nt, Artificial Sequence
  Description of Artificial Sequence: Synthetic oligonucleotide
  Sense strand starting at position 829 of SEQ ID NO: 1935
gcugcaaaucuuugcuuua

SEQ ID NO: 150733 - RNA, 19 nt, Artificial Sequence
  Description of Artificial Sequence: Synthetic oligonucleotide
  Antisense strand to SEQ ID NO: 150732
uaaagcaaagauuugcagc

SEQ ID NO: 150734 - RNA, 19 nt, Artificial Sequence
  Description of Artificial Sequence: Synthetic oligonucleotide
  Sense strand starting at position 775 of SEQ ID NO: 1935
gcaaauuccuucgaaguaa

SEQ ID NO: 150735 - RNA, 19 nt, Artificial Sequence
  Description of Artificial Sequence: Synthetic oligonucleotide
  Antisense strand to SEQ ID NO: 150734
uuacuucgaaggaauuugc

SEQ ID NO: 150736 - RNA, 19 nt, Artificial Sequence
  Description of Artificial Sequence: Synthetic oligonucleotide
  Sense strand starting at position 774 of SEQ ID NO: 1935
ugcaaauuccuucgaagua

SEQ ID NO: 150737 - RNA, 19 nt, Artificial Sequence
  Description of Artificial Sequence: Synthetic oligonucleotide
  Antisense strand to SEQ ID NO: 150736
uacuucgaaggaauuugca

SEQ ID NO: 150738 - RNA, 19 nt, Artificial Sequence
  Description of Artificial Sequence: Synthetic oligonucleotide
  Sense strand starting at position 772 of SEQ ID NO: 1935
uuugcaaauuccuucgaag

SEQ ID NO: 150739 - RNA, 19 nt, Artificial Sequence
  Description of Artificial Sequence: Synthetic oligonucleotide
  Antisense strand to SEQ ID NO: 150738
cuucgaaggaauuugcaaa

SEQ ID NO: 150740 - RNA, 19 nt, Artificial Sequence
  Description of Artificial Sequence: Synthetic oligonucleotide
  Sense strand starting at position 597 of SEQ ID NO: 1935
agagauuauuuccagugga

SEQ ID NO: 150741 - RNA, 19 nt, Artificial Sequence
  Description of Artificial Sequence: Synthetic oligonucleotide
  Antisense strand to SEQ ID NO: 150740
uccacuggaaauaaucucu

SEQ ID NO: 150742 - RNA, 19 nt, Artificial Sequence
  Description of Artificial Sequence: Synthetic oligonucleotide
  Sense strand starting at position 488 of SEQ ID NO: 1935
cuuuauugaggccacuaaa

SEQ ID NO: 150743 - RNA, 19 nt, Artificial Sequence
  Description of Artificial Sequence: Synthetic oligonucleotide
  Antisense strand to SEQ ID NO: 150742
uuuaguggccucaauaaag

SEQ ID NO: 150744 - RNA, 19 nt, Artificial Sequence
  Description of Artificial Sequence: Synthetic oligonucleotide
  Sense strand starting at position 3886 of SEQ ID NO: 1936
ugccuaugauaucucaugu

SEQ ID NO: 150745 - RNA, 19 nt, Artificial Sequence
  Description of Artificial Sequence: Synthetic oligonucleotide
  Antisense strand to SEQ ID NO: 150744
acaugagauaucauaggca

SEQ ID NO: 150746 - RNA, 19 nt, Artificial Sequence
  Description of Artificial Sequence: Synthetic oligonucleotide
  Sense strand starting at position 3880 of SEQ ID NO: 1936
auugucugccuaugauauc

SEQ ID NO: 150747 - RNA, 19 nt, Artificial Sequence
  Description of Artificial Sequence: Synthetic oligonucleotide
  Antisense strand to SEQ ID NO: 150746
gauaucauaggcagacaau

SEQ ID NO: 150748 - RNA, 19 nt, Artificial Sequence
  Description of Artificial Sequence: Synthetic oligonucleotide
  Sense strand starting at position 3837 of SEQ ID NO: 1936
guguauacauaugcauauu

SEQ ID NO: 150749 - RNA, 19 nt, Artificial Sequence
  Description of Artificial Sequence: Synthetic oligonucleotide
  Antisense strand to SEQ ID NO: 150748
aauaugcauauguauacac

SEQ ID NO: 150750 - RNA, 19 nt, Artificial Sequence
  Description of Artificial Sequence: Synthetic oligonucleotide
  Sense strand starting at position 3742 of SEQ ID NO: 1936
cugcauuucugacuguaca

SEQ ID NO: 150751 - RNA, 19 nt, Artificial Sequence
  Description of Artificial Sequence: Synthetic oligonucleotide
  Antisense strand to SEQ ID NO: 150750
uguacagucagaaaugcag

SEQ ID NO: 150752 - RNA, 19 nt, Artificial Sequence
  Description of Artificial Sequence: Synthetic oligonucleotide
  Sense strand starting at position 3687 of SEQ ID NO: 1936
ugaaauauauguuccuaga

SEQ ID NO: 150753 - RNA, 19 nt, Artificial Sequence
  Description of Artificial Sequence: Synthetic oligonucleotide
  Antisense strand to SEQ ID NO: 150752
ucuaggaacauauauuuca

SEQ ID NO: 150754 - RNA, 19 nt, Artificial Sequence
  Description of Artificial Sequence: Synthetic oligonucleotide
  Sense strand starting at position 3659 of SEQ ID NO: 1936
gcuaucagucaauaaauag

SEQ ID NO: 150755 - RNA, 19 nt, Artificial Sequence
  Description of Artificial Sequence: Synthetic oligonucleotide
  Antisense strand to SEQ ID NO: 150754
cuauuuauugacugauagc

SEQ ID NO: 150756 - RNA, 19 nt, Artificial Sequence
  Description of Artificial Sequence: Synthetic oligonucleotide
  Sense strand starting at position 3577 of SEQ ID NO: 1936
cuuguagauuucccagcua

SEQ ID NO: 150757 - RNA, 19 nt, Artificial Sequence
  Description of Artificial Sequence: Synthetic oligonucleotide
  Antisense strand to SEQ ID NO: 150756
uagcugggaaaucuacaag

SEQ ID NO: 150758 - RNA, 19 nt, Artificial Sequence
  Description of Artificial Sequence: Synthetic oligonucleotide
  Sense strand starting at position 3569 of SEQ ID NO: 1936
uaaggugacuuguagauuu

SEQ ID NO: 150759 - RNA, 19 nt, Artificial Sequence
  Description of Artificial Sequence: Synthetic oligonucleotide
  Antisense strand to SEQ ID NO: 150758
aaaucuacaagucaccuua

SEQ ID NO: 150760 - RNA, 19 nt, Artificial Sequence
  Description of Artificial Sequence: Synthetic oligonucleotide
  Sense strand starting at position 3542 of SEQ ID NO: 1936
uguugagagaagugucauu

SEQ ID NO: 150761 - RNA, 19 nt, Artificial Sequence
  Description of Artificial Sequence: Synthetic oligonucleotide
  Antisense strand to SEQ ID NO: 150760
aaugacacuucucucaaca

SEQ ID NO: 150762 - RNA, 19 nt, Artificial Sequence
  Description of Artificial Sequence: Synthetic oligonucleotide
  Sense strand starting at position 3508 of SEQ ID NO: 1936
cugugaaguaaguaagcau

SEQ ID NO: 150763 - RNA, 19 nt, Artificial Sequence
  Description of Artificial Sequence: Synthetic oligonucleotide
  Antisense strand to SEQ ID NO: 150762
augcuuacuuacuucacag

SEQ ID NO: 150764 - RNA, 19 nt, Artificial Sequence
  Description of Artificial Sequence: Synthetic oligonucleotide
  Sense strand starting at position 3504 of SEQ ID NO: 1936
ugcucugugaaguaaguaa

SEQ ID NO: 150765 - RNA, 19 nt, Artificial Sequence
  Description of Artificial Sequence: Synthetic oligonucleotide
  Antisense strand to SEQ ID NO: 150764
uuacuuacuucacagagca

SEQ ID NO: 150766 - RNA, 19 nt, Artificial Sequence
  Description of Artificial Sequence: Synthetic oligonucleotide
  Sense strand starting at position 3497 of SEQ ID NO: 1936
accuuacugcucugugaag

SEQ ID NO: 150767 - RNA, 19 nt, Artificial Sequence
  Description of Artificial Sequence: Synthetic oligonucleotide
  Antisense strand to SEQ ID NO: 150766
cuucacagagcaguaaggu

SEQ ID NO: 150768 - RNA, 19 nt, Artificial Sequence
  Description of Artificial Sequence: Synthetic oligonucleotide
  Sense strand starting at position 3340 of SEQ ID NO: 1936
gguauauugugucuaccca

SEQ ID NO: 150769 - RNA, 19 nt, Artificial Sequence
  Description of Artificial Sequence: Synthetic oligonucleotide
  Antisense strand to SEQ ID NO: 150768
uggguagacacaauauacc

SEQ ID NO: 150770 - RNA, 19 nt, Artificial Sequence
  Description of Artificial Sequence: Synthetic oligonucleotide
  Sense strand starting at position 3300 of SEQ ID NO: 1936
cuaauuggauuugaagacu

SEQ ID NO: 150771 - RNA, 19 nt, Artificial Sequence
  Description of Artificial Sequence: Synthetic oligonucleotide
  Antisense strand to SEQ ID NO: 150770
agucuucaaauccaauuag

SEQ ID NO: 150772 - RNA, 19 nt, Artificial Sequence
  Description of Artificial Sequence: Synthetic oligonucleotide
  Sense strand starting at position 3292 of SEQ ID NO: 1936
aguagauccuaauuggauu

SEQ ID NO: 150773 - RNA, 19 nt, Artificial Sequence
  Description of Artificial Sequence: Synthetic oligonucleotide
  Antisense strand to SEQ ID NO: 150772
aauccaauuaggaucuacu

SEQ ID NO: 150774 - RNA, 19 nt, Artificial Sequence
  Description of Artificial Sequence: Synthetic oligonucleotide
  Sense strand starting at position 3267 of SEQ ID NO: 1936
agauaacgguccucuaaga

SEQ ID NO: 150775 - RNA, 19 nt, Artificial Sequence
  Description of Artificial Sequence: Synthetic oligonucleotide
  Antisense strand to SEQ ID NO: 150774
ucuuagaggaccguuaucu

SEQ ID NO: 150776 - RNA, 19 nt, Artificial Sequence
  Description of Artificial Sequence: Synthetic oligonucleotide
  Sense strand starting at position 3069 of SEQ ID NO: 1936
guaccugaaugacucagaa

SEQ ID NO: 150777 - RNA, 19 nt, Artificial Sequence
  Description of Artificial Sequence: Synthetic oligonucleotide
  Antisense strand to SEQ ID NO: 150776
uucugagucauucagguac

SEQ ID NO: 150778 - RNA, 19 nt, Artificial Sequence
  Description of Artificial Sequence: Synthetic oligonucleotide
  Sense strand starting at position 2896 of SEQ ID NO: 1936
ggcggacuuggucagaucu

SEQ ID NO: 150779 - RNA, 19 nt, Artificial Sequence
  Description of Artificial Sequence: Synthetic oligonucleotide
  Antisense strand to SEQ ID NO: 150778
agaucugaccaaguccgcc

SEQ ID NO: 150780 - RNA, 19 nt, Artificial Sequence
  Description of Artificial Sequence: Synthetic oligonucleotide
  Sense strand starting at position 2791 of SEQ ID NO: 1936
ucacauucugcuugggagu

SEQ ID NO: 150781 - RNA, 19 nt, Artificial Sequence
  Description of Artificial Sequence: Synthetic oligonucleotide
  Antisense strand to SEQ ID NO: 150780
acucccaagcagaauguga

SEQ ID NO: 150782 - RNA, 19 nt, Artificial Sequence
  Description of Artificial Sequence: Synthetic oligonucleotide
  Sense strand starting at position 2726 of SEQ ID NO: 1936
gggagauucucggccagga

SEQ ID NO: 150783 - RNA, 19 nt, Artificial Sequence
  Description of Artificial Sequence: Synthetic oligonucleotide
  Antisense strand to SEQ ID NO: 150782
uccuggccgagaaucuccc

SEQ ID NO: 150784 - RNA, 19 nt, Artificial Sequence
  Description of Artificial Sequence: Synthetic oligonucleotide
  Sense strand starting at position 2454 of SEQ ID NO: 1936
gagaaugaaccgggagguu

SEQ ID NO: 150785 - RNA, 19 nt, Artificial Sequence
  Description of Artificial Sequence: Synthetic oligonucleotide
  Antisense strand to SEQ ID NO: 150784
aaccucccgguucauucuc

SEQ ID NO: 150786 - RNA, 19 nt, Artificial Sequence
  Description of Artificial Sequence: Synthetic oligonucleotide
  Sense strand starting at position 1492 of SEQ ID NO: 1936
uccuuaguagcccagagau

SEQ ID NO: 150787 - RNA, 19 nt, Artificial Sequence
  Description of Artificial Sequence: Synthetic oligonucleotide
  Antisense strand to SEQ ID NO: 150786
aucucugggcuacuaagga

SEQ ID NO: 150788 - RNA, 19 nt, Artificial Sequence
  Description of Artificial Sequence: Synthetic oligonucleotide
  Sense strand starting at position 1326 of SEQ ID NO: 1936
auucuuugucuauaggauu

SEQ ID NO: 150789 - RNA, 19 nt, Artificial Sequence
  Description of Artificial Sequence: Synthetic oligonucleotide
  Antisense strand to SEQ ID NO: 150788
aauccuauagacaaagaau

SEQ ID NO: 150790 - RNA, 19 nt, Artificial Sequence
  Description of Artificial Sequence: Synthetic oligonucleotide
  Sense strand starting at position 1324 of SEQ ID NO: 1936
auauucuuugucuauagga

SEQ ID NO: 150791 - RNA, 19 nt, Artificial Sequence
  Description of Artificial Sequence: Synthetic oligonucleotide
  Antisense strand to SEQ ID NO: 150790
uccuauagacaaagaauau

SEQ ID NO: 150792 - RNA, 19 nt, Artificial Sequence
  Description of Artificial Sequence: Synthetic oligonucleotide
  Sense strand starting at position 1322 of SEQ ID NO: 1936
ccauauucuuugucuauag

SEQ ID NO: 150793 - RNA, 19 nt, Artificial Sequence
  Description of Artificial Sequence: Synthetic oligonucleotide
  Antisense strand to SEQ ID NO: 150792
cuauagacaaagaauaugg

SEQ ID NO: 150794 - RNA, 19 nt, Artificial Sequence
  Description of Artificial Sequence: Synthetic oligonucleotide
  Sense strand starting at position 1272 of SEQ ID NO: 1936
gcuccugggcaguacuaau

SEQ ID NO: 150795 - RNA, 19 nt, Artificial Sequence
  Description of Artificial Sequence: Synthetic oligonucleotide
  Antisense strand to SEQ ID NO: 150794
auuaguacugcccaggagc

SEQ ID NO: 150796 - RNA, 19 nt, Artificial Sequence
  Description of Artificial Sequence: Synthetic oligonucleotide
  Sense strand starting at position 1113 of SEQ ID NO: 1936
gcagaagucuacuucuaag

SEQ ID NO: 150797 - RNA, 19 nt, Artificial Sequence
  Description of Artificial Sequence: Synthetic oligonucleotide
  Antisense strand to SEQ ID NO: 150796
cuuagaaguagacuucugc

SEQ ID NO: 150798 - RNA, 19 nt, Artificial Sequence
  Description of Artificial Sequence: Synthetic oligonucleotide
  Sense strand starting at position 1102 of SEQ ID NO: 1936
ggcacuggucagcagaagu

SEQ ID NO: 150799 - RNA, 19 nt, Artificial Sequence
  Description of Artificial Sequence: Synthetic oligonucleotide
  Antisense strand to SEQ ID NO: 150798
acuucugcugaccagugcc

SEQ ID NO: 150800 - RNA, 19 nt, Artificial Sequence
  Description of Artificial Sequence: Synthetic oligonucleotide
  Sense strand starting at position 1071 of SEQ ID NO: 1936
acuagaaaguuacaaagaa

SEQ ID NO: 150801 - RNA, 19 nt, Artificial Sequence
  Description of Artificial Sequence: Synthetic oligonucleotide
  Antisense strand to SEQ ID NO: 150800
uucuuuguaacuuucuagu

SEQ ID NO: 150802 - RNA, 19 nt, Artificial Sequence
  Description of Artificial Sequence: Synthetic oligonucleotide
  Sense strand starting at position 1010 of SEQ ID NO: 1936
uaaauuugcgugggcaguu

SEQ ID NO: 150803 - RNA, 19 nt, Artificial Sequence
  Description of Artificial Sequence: Synthetic oligonucleotide
  Antisense strand to SEQ ID NO: 150802
aacugcccacgcaaauuua

SEQ ID NO: 150804 - RNA, 19 nt, Artificial Sequence
  Description of Artificial Sequence: Synthetic oligonucleotide
  Sense strand starting at position 1009 of SEQ ID NO: 1936
cuaaauuugcgugggcagu

SEQ ID NO: 150805 - RNA, 19 nt, Artificial Sequence
  Description of Artificial Sequence: Synthetic oligonucleotide
  Antisense strand to SEQ ID NO: 150804
acugcccacgcaaauuuag

SEQ ID NO: 150806 - RNA, 19 nt, Artificial Sequence
  Description of Artificial Sequence: Synthetic oligonucleotide
  Sense strand starting at position 1008 of SEQ ID NO: 1936
gcuaaauuugcgugggcag

SEQ ID NO: 150807 - RNA, 19 nt, Artificial Sequence
  Description of Artificial Sequence: Synthetic oligonucleotide
  Antisense strand to SEQ ID NO: 150806
cugcccacgcaaauuuagc

SEQ ID NO: 150808 - RNA, 19 nt, Artificial Sequence
  Description of Artificial Sequence: Synthetic oligonucleotide
  Sense strand starting at position 944 of SEQ ID NO: 1936
auuucuaauuucgauugca

SEQ ID NO: 150809 - RNA, 19 nt, Artificial Sequence
  Description of Artificial Sequence: Synthetic oligonucleotide
  Antisense strand to SEQ ID NO: 150808
ugcaaucgaaauuagaaau

SEQ ID NO: 150810 - RNA, 19 nt, Artificial Sequence
  Description of Artificial Sequence: Synthetic oligonucleotide
  Sense strand starting at position 867 of SEQ ID NO: 1936
cuuuguuuaguuuagccaa

SEQ ID NO: 150811 - RNA, 19 nt, Artificial Sequence
  Description of Artificial Sequence: Synthetic oligonucleotide
  Antisense strand to SEQ ID NO: 150810
uuggcuaaacuaaacaaag

SEQ ID NO: 150812 - RNA, 19 nt, Artificial Sequence
  Description of Artificial Sequence: Synthetic oligonucleotide
  Sense strand starting at position 838 of SEQ ID NO: 1936
acauuaguugauugcauaa

SEQ ID NO: 150813 - RNA, 19 nt, Artificial Sequence
  Description of Artificial Sequence: Synthetic oligonucleotide
  Antisense strand to SEQ ID NO: 150812
uuaugcaaucaacuaaugu

SEQ ID NO: 150814 - RNA, 19 nt, Artificial Sequence
  Description of Artificial Sequence: Synthetic oligonucleotide
  Sense strand starting at position 827 of SEQ ID NO: 1936
agaaguuucguacauuagu

SEQ ID NO: 150815 - RNA, 19 nt, Artificial Sequence
  Description of Artificial Sequence: Synthetic oligonucleotide
  Antisense strand to SEQ ID NO: 150814
acuaauguacgaaacuucu

SEQ ID NO: 150816 - RNA, 19 nt, Artificial Sequence
  Description of Artificial Sequence: Synthetic oligonucleotide
  Sense strand starting at position 824 of SEQ ID NO: 1936
cccagaaguuucguacauu

SEQ ID NO: 150817 - RNA, 19 nt, Artificial Sequence
  Description of Artificial Sequence: Synthetic oligonucleotide
  Antisense strand to SEQ ID NO: 150816
aauguacgaaacuucuggg

SEQ ID NO: 150818 - RNA, 19 nt, Artificial Sequence
  Description of Artificial Sequence: Synthetic oligonucleotide
  Sense strand starting at position 339 of SEQ ID NO: 1936
ccaugagauucucugaagc

SEQ ID NO: 150819 - RNA, 19 nt, Artificial Sequence
  Description of Artificial Sequence: Synthetic oligonucleotide
  Antisense strand to SEQ ID NO: 150818
gcuucagagaaucucaugg

SEQ ID NO: 150820 - RNA, 19 nt, Artificial Sequence
  Description of Artificial Sequence: Synthetic oligonucleotide
  Sense strand starting at position 195 of SEQ ID NO: 1936
uuggcuguggguugacaaa

SEQ ID NO: 150821 - RNA, 19 nt, Artificial Sequence
  Description of Artificial Sequence: Synthetic oligonucleotide
  Antisense strand to SEQ ID NO: 150820
uuugucaacccacagccaa

SEQ ID NO: 150822 - RNA, 19 nt, Artificial Sequence
  Description of Artificial Sequence: Synthetic oligonucleotide
  Sense strand starting at position 3 of SEQ ID NO: 1936
gcuccaauuguguuguugu

SEQ ID NO: 150823 - RNA, 19 nt, Artificial Sequence
  Description of Artificial Sequence: Synthetic oligonucleotide
  Antisense strand to SEQ ID NO: 150822
acaacaacacaauuggagc

SEQ ID NO: 150824 - RNA, 19 nt, Artificial Sequence
  Description of Artificial Sequence: Synthetic oligonucleotide
  Sense strand starting at position 2911 of SEQ ID NO: 1937
ggcagaguuugcgcacgua

SEQ ID NO: 150825 - RNA, 19 nt, Artificial Sequence
  Description of Artificial Sequence: Synthetic oligonucleotide
  Antisense strand to SEQ ID NO: 150824
uacgugcgcaaacucugcc

SEQ ID NO: 150826 - RNA, 19 nt, Artificial Sequence
  Description of Artificial Sequence: Synthetic oligonucleotide
  Sense strand starting at position 2624 of SEQ ID NO: 1937
gcgaucuguccguguucac

SEQ ID NO: 150827 - RNA, 19 nt, Artificial Sequence
  Description of Artificial Sequence: Synthetic oligonucleotide
  Antisense strand to SEQ ID NO: 150826
gugaacacggacagaucgc

SEQ ID NO: 150828 - RNA, 19 nt, Artificial Sequence
  Description of Artificial Sequence: Synthetic oligonucleotide
  Sense strand starting at position 2623 of SEQ ID NO: 1937
ggcgaucuguccguguuca

SEQ ID NO: 150829 - RNA, 19 nt, Artificial Sequence
  Description of Artificial Sequence: Synthetic oligonucleotide
  Antisense strand to SEQ ID NO: 150828
ugaacacggacagaucgcc

SEQ ID NO: 150830 - RNA, 19 nt, Artificial Sequence
  Description of Artificial Sequence: Synthetic oligonucleotide
  Sense strand starting at position 2622 of SEQ ID NO: 1937
gggcgaucuguccguguuc

SEQ ID NO: 150831 - RNA, 19 nt, Artificial Sequence
  Description of Artificial Sequence: Synthetic oligonucleotide
  Antisense strand to SEQ ID NO: 150830
gaacacggacagaucgccc

SEQ ID NO: 150832 - RNA, 19 nt, Artificial Sequence
  Description of Artificial Sequence: Synthetic oligonucleotide
  Sense strand starting at position 1902 of SEQ ID NO: 1937
ccggcucguggacgaaaua

SEQ ID NO: 150833 - RNA, 19 nt, Artificial Sequence
  Description of Artificial Sequence: Synthetic oligonucleotide
  Antisense strand to SEQ ID NO: 150832
uauuucguccacgagccgg

SEQ ID NO: 150834 - RNA, 19 nt, Artificial Sequence
  Description of Artificial Sequence: Synthetic oligonucleotide
  Sense strand starting at position 1407 of SEQ ID NO: 1937
uuacuccucccagggagaa

SEQ ID NO: 150835 - RNA, 19 nt, Artificial Sequence
  Description of Artificial Sequence: Synthetic oligonucleotide
  Antisense strand to SEQ ID NO: 150834
uucucccugggaggaguaa

SEQ ID NO: 150836 - RNA, 19 nt, Artificial Sequence
  Description of Artificial Sequence: Synthetic oligonucleotide
  Sense strand starting at position 928 of SEQ ID NO: 1937
ggcccuaauuggcuccaaa

SEQ ID NO: 150837 - RNA, 19 nt, Artificial Sequence
  Description of Artificial Sequence: Synthetic oligonucleotide
  Antisense strand to SEQ ID NO: 150836
uuuggagccaauuagggcc

SEQ ID NO: 150838 - RNA, 19 nt, Artificial Sequence
  Description of Artificial Sequence: Synthetic oligonucleotide
  Sense strand starting at position 886 of SEQ ID NO: 1937
cugagugugucaggaauug

SEQ ID NO: 150839 - RNA, 19 nt, Artificial Sequence
  Description of Artificial Sequence: Synthetic oligonucleotide
  Antisense strand to SEQ ID NO: 150838
caauuccugacacacucag

SEQ ID NO: 150840 - RNA, 19 nt, Artificial Sequence
  Description of Artificial Sequence: Synthetic oligonucleotide
  Sense strand starting at position 884 of SEQ ID NO: 1937
uccugagugugucaggaau

SEQ ID NO: 150841 - RNA, 19 nt, Artificial Sequence
  Description of Artificial Sequence: Synthetic oligonucleotide
  Antisense strand to SEQ ID NO: 150840
auuccugacacacucagga

SEQ ID NO: 150842 - RNA, 19 nt, Artificial Sequence
  Description of Artificial Sequence: Synthetic oligonucleotide
  Sense strand starting at position 860 of SEQ ID NO: 1937
cuacccuuuccuggaagaa

SEQ ID NO: 150843 - RNA, 19 nt, Artificial Sequence
  Description of Artificial Sequence: Synthetic oligonucleotide
  Antisense strand to SEQ ID NO: 150842
uucuuccaggaaaggguag

SEQ ID NO: 150844 - RNA, 19 nt, Artificial Sequence
  Description of Artificial Sequence: Synthetic oligonucleotide
  Sense strand starting at position 859 of SEQ ID NO: 1937
ccuacccuuuccuggaaga

SEQ ID NO: 150845 - RNA, 19 nt, Artificial Sequence
  Description of Artificial Sequence: Synthetic oligonucleotide
  Antisense strand to SEQ ID NO: 150844
ucuuccaggaaaggguagg

SEQ ID NO: 150846 - RNA, 19 nt, Artificial Sequence
  Description of Artificial Sequence: Synthetic oligonucleotide
  Sense strand starting at position 522 of SEQ ID NO: 1937
guaggucugugacagcaga

SEQ ID NO: 150847 - RNA, 19 nt, Artificial Sequence
  Description of Artificial Sequence: Synthetic oligonucleotide
  Antisense strand to SEQ ID NO: 150846
ucugcugucacagaccuac

SEQ ID NO: 150848 - RNA, 19 nt, Artificial Sequence
  Description of Artificial Sequence: Synthetic oligonucleotide
  Sense strand starting at position 343 of SEQ ID NO: 1937
gaagcacugucggaagaga

SEQ ID NO: 150849 - RNA, 19 nt, Artificial Sequence
  Description of Artificial Sequence: Synthetic oligonucleotide
  Antisense strand to SEQ ID NO: 150848
ucucuuccgacagugcuuc

SEQ ID NO: 150850 - RNA, 19 nt, Artificial Sequence
  Description of Artificial Sequence: Synthetic oligonucleotide
  Sense strand starting at position 140 of SEQ ID NO: 1937
gccucugaguaagaaacau

SEQ ID NO: 150851 - RNA, 19 nt, Artificial Sequence
  Description of Artificial Sequence: Synthetic oligonucleotide
  Antisense strand to SEQ ID NO: 150850
auguuucuuacucagaggc

SEQ ID NO: 150852 - RNA, 19 nt, Artificial Sequence
  Description of Artificial Sequence: Synthetic oligonucleotide
  Sense strand starting at position 136 of SEQ ID NO: 1937
gacagccucugaguaagaa

SEQ ID NO: 150853 - RNA, 19 nt, Artificial Sequence
  Description of Artificial Sequence: Synthetic oligonucleotide
  Antisense strand to SEQ ID NO: 150852
uucuuacucagaggcuguc

SEQ ID NO: 150854 - RNA, 19 nt, Artificial Sequence
  Description of Artificial Sequence: Synthetic oligonucleotide
  Sense strand starting at position 134 of SEQ ID NO: 1937
gagacagccucugaguaag

SEQ ID NO: 150855 - RNA, 19 nt, Artificial Sequence
  Description of Artificial Sequence: Synthetic oligonucleotide
  Antisense strand to SEQ ID NO: 150854
cuuacucagaggcugucuc

SEQ ID NO: 150856 - RNA, 19 nt, Artificial Sequence
  Description of Artificial Sequence: Synthetic oligonucleotide
  Sense strand starting at position 133 of SEQ ID NO: 1937
ggagacagccucugaguaa

SEQ ID NO: 150857 - RNA, 19 nt, Artificial Sequence
  Description of Artificial Sequence: Synthetic oligonucleotide
  Antisense strand to SEQ ID NO: 150856
uuacucagaggcugucucc

SEQ ID NO: 150858 - RNA, 19 nt, Artificial Sequence
  Description of Artificial Sequence: Synthetic oligonucleotide
  Sense strand starting at position 3652 of SEQ ID NO: 1938
ugauguuacgauuguaauu

SEQ ID NO: 150859 - RNA, 19 nt, Artificial Sequence
  Description of Artificial Sequence: Synthetic oligonucleotide
  Antisense strand to SEQ ID NO: 150858
aauuacaaucguaacauca

SEQ ID NO: 150860 - RNA, 19 nt, Artificial Sequence
  Description of Artificial Sequence: Synthetic oligonucleotide
  Sense strand starting at position 3515 of SEQ ID NO: 1938
acaagucuauuagugcaau

SEQ ID NO: 150861 - RNA, 19 nt, Artificial Sequence
  Description of Artificial Sequence: Synthetic oligonucleotide
  Antisense strand to SEQ ID NO: 150860
auugcacuaauagacuugu

SEQ ID NO: 150862 - RNA, 19 nt, Artificial Sequence
  Description of Artificial Sequence: Synthetic oligonucleotide
  Sense strand starting at position 3498 of SEQ ID NO: 1938
ugguaacccuguguugaac

SEQ ID NO: 150863 - RNA, 19 nt, Artificial Sequence
  Description of Artificial Sequence: Synthetic oligonucleotide
  Antisense strand to SEQ ID NO: 150862
guucaacacaggguuacca

SEQ ID NO: 150864 - RNA, 19 nt, Artificial Sequence
  Description of Artificial Sequence: Synthetic oligonucleotide
  Sense strand starting at position 3497 of SEQ ID NO: 1938
uugguaacccuguguugaa

SEQ ID NO: 150865 - RNA, 19 nt, Artificial Sequence
  Description of Artificial Sequence: Synthetic oligonucleotide
  Antisense strand to SEQ ID NO: 150864
uucaacacaggguuaccaa

SEQ ID NO: 150866 - RNA, 19 nt, Artificial Sequence
  Description of Artificial Sequence: Synthetic oligonucleotide
  Sense strand starting at position 3322 of SEQ ID NO: 1938
agauuaaguagaugauguu

SEQ ID NO: 150867 - RNA, 19 nt, Artificial Sequence
  Description of Artificial Sequence: Synthetic oligonucleotide
  Antisense strand to SEQ ID NO: 150866
aacaucaucuacuuaaucu

SEQ ID NO: 150868 - RNA, 19 nt, Artificial Sequence
  Description of Artificial Sequence: Synthetic oligonucleotide
  Sense strand starting at position 3299 of SEQ ID NO: 1938
gaaucaaauugguuguuau

SEQ ID NO: 150869 - RNA, 19 nt, Artificial Sequence
  Description of Artificial Sequence: Synthetic oligonucleotide
  Antisense strand to SEQ ID NO: 150868
auaacaaccaauuugauuc

SEQ ID NO: 150870 - RNA, 19 nt, Artificial Sequence
  Description of Artificial Sequence: Synthetic oligonucleotide
  Sense strand starting at position 3298 of SEQ ID NO: 1938
agaaucaaauugguuguua

SEQ ID NO: 150871 - RNA, 19 nt, Artificial Sequence
  Description of Artificial Sequence: Synthetic oligonucleotide
  Antisense strand to SEQ ID NO: 150870
uaacaaccaauuugauucu

SEQ ID NO: 150872 - RNA, 19 nt, Artificial Sequence
  Description of Artificial Sequence: Synthetic oligonucleotide
  Sense strand starting at position 3196 of SEQ ID NO: 1938
uggcaaugauagcuugaac

SEQ ID NO: 150873 - RNA, 19 nt, Artificial Sequence
  Description of Artificial Sequence: Synthetic oligonucleotide
  Antisense strand to SEQ ID NO: 150872
guucaagcuaucauugcca

SEQ ID NO: 150874 - RNA, 19 nt, Artificial Sequence
  Description of Artificial Sequence: Synthetic oligonucleotide
  Sense strand starting at position 3176 of SEQ ID NO: 1938
gugacaauacucuaagcua

SEQ ID NO: 150875 - RNA, 19 nt, Artificial Sequence
  Description of Artificial Sequence: Synthetic oligonucleotide
  Antisense strand to SEQ ID NO: 150874
uagcuuagaguauugucac

SEQ ID NO: 150876 - RNA, 19 nt, Artificial Sequence
  Description of Artificial Sequence: Synthetic oligonucleotide
  Sense strand starting at position 3115 of SEQ ID NO: 1938
gaaauucucuuuguguuag

SEQ ID NO: 150877 - RNA, 19 nt, Artificial Sequence
  Description of Artificial Sequence: Synthetic oligonucleotide
  Antisense strand to SEQ ID NO: 150876
cuaacacaaagagaauuuc

SEQ ID NO: 150878 - RNA, 19 nt, Artificial Sequence
  Description of Artificial Sequence: Synthetic oligonucleotide
  Sense strand starting at position 3114 of SEQ ID NO: 1938
agaaauucucuuuguguua

SEQ ID NO: 150879 - RNA, 19 nt, Artificial Sequence
  Description of Artificial Sequence: Synthetic oligonucleotide
  Antisense strand to SEQ ID NO: 150878
uaacacaaagagaauuucu

SEQ ID NO: 150880 - RNA, 19 nt, Artificial Sequence
  Description of Artificial Sequence: Synthetic oligonucleotide
  Sense strand starting at position 3111 of SEQ ID NO: 1938
ugcagaaauucucuuugug

SEQ ID NO: 150881 - RNA, 19 nt, Artificial Sequence
  Description of Artificial Sequence: Synthetic oligonucleotide
  Antisense strand to SEQ ID NO: 150880
cacaaagagaauuucugca

SEQ ID NO: 150882 - RNA, 19 nt, Artificial Sequence
  Description of Artificial Sequence: Synthetic oligonucleotide
  Sense strand starting at position 2945 of SEQ ID NO: 1938
agguaaguucuuuaaccuc

SEQ ID NO: 150883 - RNA, 19 nt, Artificial Sequence
  Description of Artificial Sequence: Synthetic oligonucleotide
  Antisense strand to SEQ ID NO: 150882
gagguuaaagaacuuaccu

SEQ ID NO: 150884 - RNA, 19 nt, Artificial Sequence
  Description of Artificial Sequence: Synthetic oligonucleotide
  Sense strand starting at position 2890 of SEQ ID NO: 1938
ccagauaaaccuuggauuc

SEQ ID NO: 150885 - RNA, 19 nt, Artificial Sequence
  Description of Artificial Sequence: Synthetic oligonucleotide
  Antisense strand to SEQ ID NO: 150884
gaauccaagguuuaucugg

SEQ ID NO: 150886 - RNA, 19 nt, Artificial Sequence
  Description of Artificial Sequence: Synthetic oligonucleotide
  Sense strand starting at position 2709 of SEQ ID NO: 1938
gacggacuuccuugaaaug

SEQ ID NO: 150887 - RNA, 19 nt, Artificial Sequence
  Description of Artificial Sequence: Synthetic oligonucleotide
  Antisense strand to SEQ ID NO: 150886
cauuucaaggaaguccguc

SEQ ID NO: 150888 - RNA, 19 nt, Artificial Sequence
  Description of Artificial Sequence: Synthetic oligonucleotide
  Sense strand starting at position 2443 of SEQ ID NO: 1938
gcuaaagaugcagggaguu

SEQ ID NO: 150889 - RNA, 19 nt, Artificial Sequence
  Description of Artificial Sequence: Synthetic oligonucleotide
  Antisense strand to SEQ ID NO: 150888
aacucccugcaucuuuagc

SEQ ID NO: 150890 - RNA, 19 nt, Artificial Sequence
  Description of Artificial Sequence: Synthetic oligonucleotide
  Sense strand starting at position 2327 of SEQ ID NO: 1938
uuaguugcaccuuacacau

SEQ ID NO: 150891 - RNA, 19 nt, Artificial Sequence
  Description of Artificial Sequence: Synthetic oligonucleotide
  Antisense strand to SEQ ID NO: 150890
auguguaaggugcaacuaa

SEQ ID NO: 150892 - RNA, 19 nt, Artificial Sequence
  Description of Artificial Sequence: Synthetic oligonucleotide
  Sense strand starting at position 2317 of SEQ ID NO: 1938
gggugaguaguuaguugca

SEQ ID NO: 150893 - RNA, 19 nt, Artificial Sequence
  Description of Artificial Sequence: Synthetic oligonucleotide
  Antisense strand to SEQ ID NO: 150892
ugcaacuaacuacucaccc

SEQ ID NO: 150894 - RNA, 19 nt, Artificial Sequence
  Description of Artificial Sequence: Synthetic oligonucleotide
  Sense strand starting at position 2311 of SEQ ID NO: 1938
aaaggagggugaguaguua

SEQ ID NO: 150895 - RNA, 19 nt, Artificial Sequence
  Description of Artificial Sequence: Synthetic oligonucleotide
  Antisense strand to SEQ ID NO: 150894
uaacuacucacccuccuuu

SEQ ID NO: 150896 - RNA, 19 nt, Artificial Sequence
  Description of Artificial Sequence: Synthetic oligonucleotide
  Sense strand starting at position 2263 of SEQ ID NO: 1938
agaauauucuugcucacag

SEQ ID NO: 150897 - RNA, 19 nt, Artificial Sequence
  Description of Artificial Sequence: Synthetic oligonucleotide
  Antisense strand to SEQ ID NO: 150896
cugugagcaagaauauucu

SEQ ID NO: 150898 - RNA, 19 nt, Artificial Sequence
  Description of Artificial Sequence: Synthetic oligonucleotide
  Sense strand starting at position 2158 of SEQ ID NO: 1938
caguaauguuaaguagaga

SEQ ID NO: 150899 - RNA, 19 nt, Artificial Sequence
  Description of Artificial Sequence: Synthetic oligonucleotide
  Antisense strand to SEQ ID NO: 150898
ucucuacuuaacauuacug

SEQ ID NO: 150900 - RNA, 19 nt, Artificial Sequence
  Description of Artificial Sequence: Synthetic oligonucleotide
  Sense strand starting at position 2149 of SEQ ID NO: 1938
ggacucuggcaguaauguu

SEQ ID NO: 150901 - RNA, 19 nt, Artificial Sequence
  Description of Artificial Sequence: Synthetic oligonucleotide
  Antisense strand to SEQ ID NO: 150900
aacauuacugccagagucc

SEQ ID NO: 150902 - RNA, 19 nt, Artificial Sequence
  Description of Artificial Sequence: Synthetic oligonucleotide
  Sense strand starting at position 2109 of SEQ ID NO: 1938
gucuuacucgcuuaugaca

SEQ ID NO: 150903 - RNA, 19 nt, Artificial Sequence
  Description of Artificial Sequence: Synthetic oligonucleotide
  Antisense strand to SEQ ID NO: 150902
ugucauaagcgaguaagac

SEQ ID NO: 150904 - RNA, 19 nt, Artificial Sequence
  Description of Artificial Sequence: Synthetic oligonucleotide
  Sense strand starting at position 1460 of SEQ ID NO: 1938
ggaagccggucuuuggaaa

SEQ ID NO: 150905 - RNA, 19 nt, Artificial Sequence
  Description of Artificial Sequence: Synthetic oligonucleotide
  Antisense strand to SEQ ID NO: 150904
uuuccaaagaccggcuucc

SEQ ID NO: 150906 - RNA, 19 nt, Artificial Sequence
  Description of Artificial Sequence: Synthetic oligonucleotide
  Sense strand starting at position 1424 of SEQ ID NO: 1938
ggcaguucgcuggcguuua

SEQ ID NO: 150907 - RNA, 19 nt, Artificial Sequence
  Description of Artificial Sequence: Synthetic oligonucleotide
  Antisense strand to SEQ ID NO: 150906
uaaacgccagcgaacugcc

SEQ ID NO: 150908 - RNA, 19 nt, Artificial Sequence
  Description of Artificial Sequence: Synthetic oligonucleotide
  Sense strand starting at position 1395 of SEQ ID NO: 1938
aaaguuucuggcuaagacu

SEQ ID NO: 150909 - RNA, 19 nt, Artificial Sequence
  Description of Artificial Sequence: Synthetic oligonucleotide
  Antisense strand to SEQ ID NO: 150908
agucuuagccagaaacuuu

SEQ ID NO: 150910 - RNA, 19 nt, Artificial Sequence
  Description of Artificial Sequence: Synthetic oligonucleotide
  Sense strand starting at position 1394 of SEQ ID NO: 1938
gaaaguuucuggcuaagac

SEQ ID NO: 150911 - RNA, 19 nt, Artificial Sequence
  Description of Artificial Sequence: Synthetic oligonucleotide
  Antisense strand to SEQ ID NO: 150910
gucuuagccagaaacuuuc

SEQ ID NO: 150912 - RNA, 19 nt, Artificial Sequence
  Description of Artificial Sequence: Synthetic oligonucleotide
  Sense strand starting at position 1280 of SEQ ID NO: 1938
ugagaacuggccugagaag

SEQ ID NO: 150913 - RNA, 19 nt, Artificial Sequence
  Description of Artificial Sequence: Synthetic oligonucleotide
  Antisense strand to SEQ ID NO: 150912
cuucucaggccaguucuca

SEQ ID NO: 150914 - RNA, 19 nt, Artificial Sequence
  Description of Artificial Sequence: Synthetic oligonucleotide
  Sense strand starting at position 1079 of SEQ ID NO: 1938
ggaagcuguugacuuugau

SEQ ID NO: 150915 - RNA, 19 nt, Artificial Sequence
  Description of Artificial Sequence: Synthetic oligonucleotide
  Antisense strand to SEQ ID NO: 150914
aucaaagucaacagcuucc

SEQ ID NO: 150916 - RNA, 19 nt, Artificial Sequence
  Description of Artificial Sequence: Synthetic oligonucleotide
  Sense strand starting at position 1033 of SEQ ID NO: 1938
ugggaaugcgcucagauag

SEQ ID NO: 150917 - RNA, 19 nt, Artificial Sequence
  Description of Artificial Sequence: Synthetic oligonucleotide
  Antisense strand to SEQ ID NO: 150916
cuaucugagcgcauuccca

SEQ ID NO: 150918 - RNA, 19 nt, Artificial Sequence
  Description of Artificial Sequence: Synthetic oligonucleotide
  Sense strand starting at position 1003 of SEQ ID NO: 1938
aguauucuggagcagaacu

SEQ ID NO: 150919 - RNA, 19 nt, Artificial Sequence
  Description of Artificial Sequence: Synthetic oligonucleotide
  Antisense strand to SEQ ID NO: 150918
aguucugcuccagaauacu

SEQ ID NO: 150920 - RNA, 19 nt, Artificial Sequence
  Description of Artificial Sequence: Synthetic oligonucleotide
  Sense strand starting at position 1000 of SEQ ID NO: 1938
gucaguauucuggagcaga

SEQ ID NO: 150921 - RNA, 19 nt, Artificial Sequence
  Description of Artificial Sequence: Synthetic oligonucleotide
  Antisense strand to SEQ ID NO: 150920
ucugcuccagaauacugac

SEQ ID NO: 150922 - RNA, 19 nt, Artificial Sequence
  Description of Artificial Sequence: Synthetic oligonucleotide
  Sense strand starting at position 794 of SEQ ID NO: 1938
aaaguaugugagugugaug

SEQ ID NO: 150923 - RNA, 19 nt, Artificial Sequence
  Description of Artificial Sequence: Synthetic oligonucleotide
  Antisense strand to SEQ ID NO: 150922
caucacacucacauacuuu

SEQ ID NO: 150924 - RNA, 19 nt, Artificial Sequence
  Description of Artificial Sequence: Synthetic oligonucleotide
  Sense strand starting at position 793 of SEQ ID NO: 1938
uaaaguaugugagugugau

SEQ ID NO: 150925 - RNA, 19 nt, Artificial Sequence
  Description of Artificial Sequence: Synthetic oligonucleotide
  Antisense strand to SEQ ID NO: 150924
aucacacucacauacuuua

SEQ ID NO: 150926 - RNA, 19 nt, Artificial Sequence
  Description of Artificial Sequence: Synthetic oligonucleotide
  Sense strand starting at position 788 of SEQ ID NO: 1938
uagcauaaaguaugugagu

SEQ ID NO: 150927 - RNA, 19 nt, Artificial Sequence
  Description of Artificial Sequence: Synthetic oligonucleotide
  Antisense strand to SEQ ID NO: 150926
acucacauacuuuaugcua

SEQ ID NO: 150928 - RNA, 19 nt, Artificial Sequence
  Description of Artificial Sequence: Synthetic oligonucleotide
  Sense strand starting at position 781 of SEQ ID NO: 1938
uaguauguagcauaaagua

SEQ ID NO: 150929 - RNA, 19 nt, Artificial Sequence
  Description of Artificial Sequence: Synthetic oligonucleotide
  Antisense strand to SEQ ID NO: 150928
uacuuuaugcuacauacua

SEQ ID NO: 150930 - RNA, 19 nt, Artificial Sequence
  Description of Artificial Sequence: Synthetic oligonucleotide
  Sense strand starting at position 636 of SEQ ID NO: 1938
uuucuaacuuugguaguaa

SEQ ID NO: 150931 - RNA, 19 nt, Artificial Sequence
  Description of Artificial Sequence: Synthetic oligonucleotide
  Antisense strand to SEQ ID NO: 150930
uuacuaccaaaguuagaaa

SEQ ID NO: 150932 - RNA, 19 nt, Artificial Sequence
  Description of Artificial Sequence: Synthetic oligonucleotide
  Sense strand starting at position 546 of SEQ ID NO: 1938
gaaaguguuguaggaaguu

SEQ ID NO: 150933 - RNA, 19 nt, Artificial Sequence
  Description of Artificial Sequence: Synthetic oligonucleotide
  Antisense strand to SEQ ID NO: 150932
aacuuccuacaacacuuuc

SEQ ID NO: 150934 - RNA, 19 nt, Artificial Sequence
  Description of Artificial Sequence: Synthetic oligonucleotide
  Sense strand starting at position 524 of SEQ ID NO: 1938
guuacacaagaguaaaguu

SEQ ID NO: 150935 - RNA, 19 nt, Artificial Sequence
  Description of Artificial Sequence: Synthetic oligonucleotide
  Antisense strand to SEQ ID NO: 150934
aacuuuacucuuguguaac

SEQ ID NO: 150936 - RNA, 19 nt, Artificial Sequence
  Description of Artificial Sequence: Synthetic oligonucleotide
  Sense strand starting at position 13 of SEQ ID NO: 1938
ccuugaagaucagugccaa

SEQ ID NO: 150937 - RNA, 19 nt, Artificial Sequence
  Description of Artificial Sequence: Synthetic oligonucleotide
  Antisense strand to SEQ ID NO: 150936
uuggcacugaucuucaagg

SEQ ID NO: 150938 - RNA, 19 nt, Artificial Sequence
  Description of Artificial Sequence: Synthetic oligonucleotide
  Sense strand starting at position 3876 of SEQ ID NO: 1940
uuucuaacuuugguaguaa

SEQ ID NO: 150939 - RNA, 19 nt, Artificial Sequence
  Description of Artificial Sequence: Synthetic oligonucleotide
  Antisense strand to SEQ ID NO: 150938
uuacuaccaaaguuagaaa

SEQ ID NO: 150940 - RNA, 19 nt, Artificial Sequence
  Description of Artificial Sequence: Synthetic oligonucleotide
  Sense strand starting at position 3786 of SEQ ID NO: 1940
gaaaguguuguaggaaguu

SEQ ID NO: 150941 - RNA, 19 nt, Artificial Sequence
  Description of Artificial Sequence: Synthetic oligonucleotide
  Antisense strand to SEQ ID NO: 150940
aacuuccuacaacacuuuc

SEQ ID NO: 150942 - RNA, 19 nt, Artificial Sequence
  Description of Artificial Sequence: Synthetic oligonucleotide
  Sense strand starting at position 3764 of SEQ ID NO: 1940
guuacacaagaguaaaguu

SEQ ID NO: 150943 - RNA, 19 nt, Artificial Sequence
  Description of Artificial Sequence: Synthetic oligonucleotide
  Antisense strand to SEQ ID NO: 150942
aacuuuacucuuguguaac

SEQ ID NO: 150944 - RNA, 19 nt, Artificial Sequence
  Description of Artificial Sequence: Synthetic oligonucleotide
  Sense strand starting at position 3253 of SEQ ID NO: 1940
ccuugaagaucagugccaa

SEQ ID NO: 150945 - RNA, 19 nt, Artificial Sequence
  Description of Artificial Sequence: Synthetic oligonucleotide
  Antisense strand to SEQ ID NO: 150944
uuggcacugaucuucaagg

SEQ ID NO: 150946 - RNA, 19 nt, Artificial Sequence
  Description of Artificial Sequence: Synthetic oligonucleotide
  Sense strand starting at position 3157 of SEQ ID NO: 1940
ggagauuaccuuugaucua

SEQ ID NO: 150947 - RNA, 19 nt, Artificial Sequence
  Description of Artificial Sequence: Synthetic oligonucleotide
  Antisense strand to SEQ ID NO: 150946
uagaucaaagguaaucucc

SEQ ID NO: 150948 - RNA, 19 nt, Artificial Sequence
  Description of Artificial Sequence: Synthetic oligonucleotide
  Sense strand starting at position 3154 of SEQ ID NO: 1940
uuaggagauuaccuuugau

SEQ ID NO: 150949 - RNA, 19 nt, Artificial Sequence
  Description of Artificial Sequence: Synthetic oligonucleotide
  Antisense strand to SEQ ID NO: 150948
aucaaagguaaucuccuaa

SEQ ID NO: 150950 - RNA, 19 nt, Artificial Sequence
  Description of Artificial Sequence: Synthetic oligonucleotide
  Sense strand starting at position 3075 of SEQ ID NO: 1940
uguaauauccuguagaauu

SEQ ID NO: 150951 - RNA, 19 nt, Artificial Sequence
  Description of Artificial Sequence: Synthetic oligonucleotide
  Antisense strand to SEQ ID NO: 150950
aauucuacaggauauuaca

SEQ ID NO: 150952 - RNA, 19 nt, Artificial Sequence
  Description of Artificial Sequence: Synthetic oligonucleotide
  Sense strand starting at position 2990 of SEQ ID NO: 1940
aggucaagauggucaacaa

SEQ ID NO: 150953 - RNA, 19 nt, Artificial Sequence
  Description of Artificial Sequence: Synthetic oligonucleotide
  Antisense strand to SEQ ID NO: 150952
uuguugaccaucuugaccu

SEQ ID NO: 150954 - RNA, 19 nt, Artificial Sequence
  Description of Artificial Sequence: Synthetic oligonucleotide
  Sense strand starting at position 2834 of SEQ ID NO: 1940
uuaaguuacccuggucauu

SEQ ID NO: 150955 - RNA, 19 nt, Artificial Sequence
  Description of Artificial Sequence: Synthetic oligonucleotide
  Antisense strand to SEQ ID NO: 150954
aaugaccaggguaacuuaa

SEQ ID NO: 150956 - RNA, 19 nt, Artificial Sequence
  Description of Artificial Sequence: Synthetic oligonucleotide
  Sense strand starting at position 2700 of SEQ ID NO: 1940
gguacuauauuaguuacau

SEQ ID NO: 150957 - RNA, 19 nt, Artificial Sequence
  Description of Artificial Sequence: Synthetic oligonucleotide
  Antisense strand to SEQ ID NO: 150956
auguaacuaauauaguacc

SEQ ID NO: 150958 - RNA, 19 nt, Artificial Sequence
  Description of Artificial Sequence: Synthetic oligonucleotide
  Sense strand starting at position 2690 of SEQ ID NO: 1940
augaguacccgguacuaua

SEQ ID NO: 150959 - RNA, 19 nt, Artificial Sequence
  Description of Artificial Sequence: Synthetic oligonucleotide
  Antisense strand to SEQ ID NO: 150958
uauaguaccggguacucau

SEQ ID NO: 150960 - RNA, 19 nt, Artificial Sequence
  Description of Artificial Sequence: Synthetic oligonucleotide
  Sense strand starting at position 2605 of SEQ ID NO: 1940
uuaguucugggagguuuaa

SEQ ID NO: 150961 - RNA, 19 nt, Artificial Sequence
  Description of Artificial Sequence: Synthetic oligonucleotide
  Antisense strand to SEQ ID NO: 150960
uuaaaccucccagaacuaa

SEQ ID NO: 150962 - RNA, 19 nt, Artificial Sequence
  Description of Artificial Sequence: Synthetic oligonucleotide
  Sense strand starting at position 2602 of SEQ ID NO: 1940
caauuaguucugggagguu

SEQ ID NO: 150963 - RNA, 19 nt, Artificial Sequence
  Description of Artificial Sequence: Synthetic oligonucleotide
  Antisense strand to SEQ ID NO: 150962
aaccucccagaacuaauug

SEQ ID NO: 150964 - RNA, 19 nt, Artificial Sequence
  Description of Artificial Sequence: Synthetic oligonucleotide
  Sense strand starting at position 2458 of SEQ ID NO: 1940
uaacauauuucggaaagga

SEQ ID NO: 150965 - RNA, 19 nt, Artificial Sequence
  Description of Artificial Sequence: Synthetic oligonucleotide
  Antisense strand to SEQ ID NO: 150964
uccuuuccgaaauauguua

SEQ ID NO: 150966 - RNA, 19 nt, Artificial Sequence
  Description of Artificial Sequence: Synthetic oligonucleotide
  Sense strand starting at position 2388 of SEQ ID NO: 1940
aguaaucucuuugugagaa

SEQ ID NO: 150967 - RNA, 19 nt, Artificial Sequence
  Description of Artificial Sequence: Synthetic oligonucleotide
  Antisense strand to SEQ ID NO: 150966
uucucacaaagagauuacu

SEQ ID NO: 150968 - RNA, 19 nt, Artificial Sequence
  Description of Artificial Sequence: Synthetic oligonucleotide
  Sense strand starting at position 2387 of SEQ ID NO: 1940
aaguaaucucuuugugaga

SEQ ID NO: 150969 - RNA, 19 nt, Artificial Sequence
  Description of Artificial Sequence: Synthetic oligonucleotide
  Antisense strand to SEQ ID NO: 150968
ucucacaaagagauuacuu

SEQ ID NO: 150970 - RNA, 19 nt, Artificial Sequence
  Description of Artificial Sequence: Synthetic oligonucleotide
  Sense strand starting at position 2386 of SEQ ID NO: 1940
uaaguaaucucuuugugag

SEQ ID NO: 150971 - RNA, 19 nt, Artificial Sequence
  Description of Artificial Sequence: Synthetic oligonucleotide
  Antisense strand to SEQ ID NO: 150970
cucacaaagagauuacuua

SEQ ID NO: 150972 - RNA, 19 nt, Artificial Sequence
  Description of Artificial Sequence: Synthetic oligonucleotide
  Sense strand starting at position 2207 of SEQ ID NO: 1940
uguuguucugagcaugaau

SEQ ID NO: 150973 - RNA, 19 nt, Artificial Sequence
  Description of Artificial Sequence: Synthetic oligonucleotide
  Antisense strand to SEQ ID NO: 150972
auucaugcucagaacaaca

SEQ ID NO: 150974 - RNA, 19 nt, Artificial Sequence
  Description of Artificial Sequence: Synthetic oligonucleotide
  Sense strand starting at position 2119 of SEQ ID NO: 1940
accugucuuguacaaagaa

SEQ ID NO: 150975 - RNA, 19 nt, Artificial Sequence
  Description of Artificial Sequence: Synthetic oligonucleotide
  Antisense strand to SEQ ID NO: 150974
uucuuuguacaagacaggu

SEQ ID NO: 150976 - RNA, 19 nt, Artificial Sequence
  Description of Artificial Sequence: Synthetic oligonucleotide
  Sense strand starting at position 2063 of SEQ ID NO: 1940
gcacaauuagugcaagaaa

SEQ ID NO: 150977 - RNA, 19 nt, Artificial Sequence
  Description of Artificial Sequence: Synthetic oligonucleotide
  Antisense strand to SEQ ID NO: 150976
uuucuugcacuaauugugc

SEQ ID NO: 150978 - RNA, 19 nt, Artificial Sequence
  Description of Artificial Sequence: Synthetic oligonucleotide
  Sense strand starting at position 1457 of SEQ ID NO: 1940
acuguaagugugggauaau

SEQ ID NO: 150979 - RNA, 19 nt, Artificial Sequence
  Description of Artificial Sequence: Synthetic oligonucleotide
  Antisense strand to SEQ ID NO: 150978
auuaucccacacuuacagu

SEQ ID NO: 150980 - RNA, 19 nt, Artificial Sequence
  Description of Artificial Sequence: Synthetic oligonucleotide
  Sense strand starting at position 1392 of SEQ ID NO: 1940
gugcaucauuuaguauauu

SEQ ID NO: 150981 - RNA, 19 nt, Artificial Sequence
  Description of Artificial Sequence: Synthetic oligonucleotide
  Antisense strand to SEQ ID NO: 150980
aauauacuaaaugaugcac

SEQ ID NO: 150982 - RNA, 19 nt, Artificial Sequence
  Description of Artificial Sequence: Synthetic oligonucleotide
  Sense strand starting at position 1388 of SEQ ID NO: 1940
gcaagugcaucauuuagua

SEQ ID NO: 150983 - RNA, 19 nt, Artificial Sequence
  Description of Artificial Sequence: Synthetic oligonucleotide
  Antisense strand to SEQ ID NO: 150982
uacuaaaugaugcacuugc

SEQ ID NO: 150984 - RNA, 19 nt, Artificial Sequence
  Description of Artificial Sequence: Synthetic oligonucleotide
  Sense strand starting at position 1359 of SEQ ID NO: 1940
acuccuucucuagggauua

SEQ ID NO: 150985 - RNA, 19 nt, Artificial Sequence
  Description of Artificial Sequence: Synthetic oligonucleotide
  Antisense strand to SEQ ID NO: 150984
uaaucccuagagaaggagu

SEQ ID NO: 150986 - RNA, 19 nt, Artificial Sequence
  Description of Artificial Sequence: Synthetic oligonucleotide
  Sense strand starting at position 1357 of SEQ ID NO: 1940
gcacuccuucucuagggau

SEQ ID NO: 150987 - RNA, 19 nt, Artificial Sequence
  Description of Artificial Sequence: Synthetic oligonucleotide
  Antisense strand to SEQ ID NO: 150986
aucccuagagaaggagugc

SEQ ID NO: 150988 - RNA, 19 nt, Artificial Sequence
  Description of Artificial Sequence: Synthetic oligonucleotide
  Sense strand starting at position 1083 of SEQ ID NO: 1940
gguaacucauuagauuuau

SEQ ID NO: 150989 - RNA, 19 nt, Artificial Sequence
  Description of Artificial Sequence: Synthetic oligonucleotide
  Antisense strand to SEQ ID NO: 150988
auaaaucuaaugaguuacc

SEQ ID NO: 150990 - RNA, 19 nt, Artificial Sequence
  Description of Artificial Sequence: Synthetic oligonucleotide
  Sense strand starting at position 1080 of SEQ ID NO: 1940
guagguaacucauuagauu

SEQ ID NO: 150991 - RNA, 19 nt, Artificial Sequence
  Description of Artificial Sequence: Synthetic oligonucleotide
  Antisense strand to SEQ ID NO: 150990
aaucuaaugaguuaccuac

SEQ ID NO: 150992 - RNA, 19 nt, Artificial Sequence
  Description of Artificial Sequence: Synthetic oligonucleotide
  Sense strand starting at position 1076 of SEQ ID NO: 1940
aagaguagguaacucauua

SEQ ID NO: 150993 - RNA, 19 nt, Artificial Sequence
  Description of Artificial Sequence: Synthetic oligonucleotide
  Antisense strand to SEQ ID NO: 150992
uaaugaguuaccuacucuu

SEQ ID NO: 150994 - RNA, 19 nt, Artificial Sequence
  Description of Artificial Sequence: Synthetic oligonucleotide
  Sense strand starting at position 1004 of SEQ ID NO: 1940
gcccuuagcacagaaaggu

SEQ ID NO: 150995 - RNA, 19 nt, Artificial Sequence
  Description of Artificial Sequence: Synthetic oligonucleotide
  Antisense strand to SEQ ID NO: 150994
accuuucugugcuaagggc

SEQ ID NO: 150996 - RNA, 19 nt, Artificial Sequence
  Description of Artificial Sequence: Synthetic oligonucleotide
  Sense strand starting at position 997 of SEQ ID NO: 1940
ccagauagcccuuagcaca

SEQ ID NO: 150997 - RNA, 19 nt, Artificial Sequence
  Description of Artificial Sequence: Synthetic oligonucleotide
  Antisense strand to SEQ ID NO: 150996
ugugcuaagggcuaucugg

SEQ ID NO: 150998 - RNA, 19 nt, Artificial Sequence
  Description of Artificial Sequence: Synthetic oligonucleotide
  Sense strand starting at position 648 of SEQ ID NO: 1940
gaaauugaauccucguuga

SEQ ID NO: 150999 - RNA, 19 nt, Artificial Sequence
  Description of Artificial Sequence: Synthetic oligonucleotide
  Antisense strand to SEQ ID NO: 150998
ucaacgaggauucaauuuc

SEQ ID NO: 151000 - RNA, 19 nt, Artificial Sequence
  Description of Artificial Sequence: Synthetic oligonucleotide
  Sense strand starting at position 621 of SEQ ID NO: 1940
cugccuugacaauaagcau

SEQ ID NO: 151001 - RNA, 19 nt, Artificial Sequence
  Description of Artificial Sequence: Synthetic oligonucleotide
  Antisense strand to SEQ ID NO: 151000
augcuuauugucaaggcag

SEQ ID NO: 151002 - RNA, 19 nt, Artificial Sequence
  Description of Artificial Sequence: Synthetic oligonucleotide
  Sense strand starting at position 544 of SEQ ID NO: 1940
ggcgauuggagagauguga

SEQ ID NO: 151003 - RNA, 19 nt, Artificial Sequence
  Description of Artificial Sequence: Synthetic oligonucleotide
  Antisense strand to SEQ ID NO: 151002
ucacaucucuccaaucgcc

SEQ ID NO: 151004 - RNA, 19 nt, Artificial Sequence
  Description of Artificial Sequence: Synthetic oligonucleotide
  Sense strand starting at position 233 of SEQ ID NO: 1940
uguaguagauaagcaagaa

SEQ ID NO: 151005 - RNA, 19 nt, Artificial Sequence
  Description of Artificial Sequence: Synthetic oligonucleotide
  Antisense strand to SEQ ID NO: 151004
uucuugcuuaucuacuaca

SEQ ID NO: 151006 - RNA, 19 nt, Artificial Sequence
  Description of Artificial Sequence: Synthetic oligonucleotide
  Sense strand starting at position 123 of SEQ ID NO: 1940
agucaucucugucuuagaa

SEQ ID NO: 151007 - RNA, 19 nt, Artificial Sequence
  Description of Artificial Sequence: Synthetic oligonucleotide
  Antisense strand to SEQ ID NO: 151006
uucuaagacagagaugacu

SEQ ID NO: 151008 - RNA, 19 nt, Artificial Sequence
  Description of Artificial Sequence: Synthetic oligonucleotide
  Sense strand starting at position 121 of SEQ ID NO: 1940
ugagucaucucugucuuag

SEQ ID NO: 151009 - RNA, 19 nt, Artificial Sequence
  Description of Artificial Sequence: Synthetic oligonucleotide
  Antisense strand to SEQ ID NO: 151008
cuaagacagagaugacuca

SEQ ID NO: 151010 - RNA, 19 nt, Artificial Sequence
  Description of Artificial Sequence: Synthetic oligonucleotide
  Sense strand starting at position 112 of SEQ ID NO: 1940
uuugaugucugagucaucu

SEQ ID NO: 151011 - RNA, 19 nt, Artificial Sequence
  Description of Artificial Sequence: Synthetic oligonucleotide
  Antisense strand to SEQ ID NO: 151010
agaugacucagacaucaaa

SEQ ID NO: 151012 - RNA, 19 nt, Artificial Sequence
  Description of Artificial Sequence: Synthetic oligonucleotide
  Sense strand starting at position 75 of SEQ ID NO: 1940
uguuccaaagccugauaca

SEQ ID NO: 151013 - RNA, 19 nt, Artificial Sequence
  Description of Artificial Sequence: Synthetic oligonucleotide
  Antisense strand to SEQ ID NO: 151012
uguaucaggcuuuggaaca

SEQ ID NO: 151014 - RNA, 19 nt, Artificial Sequence
  Description of Artificial Sequence: Synthetic oligonucleotide
  Sense strand starting at position 53 of SEQ ID NO: 1940
ggcugaaauccucaaccau

SEQ ID NO: 151015 - RNA, 19 nt, Artificial Sequence
  Description of Artificial Sequence: Synthetic oligonucleotide
  Antisense strand to SEQ ID NO: 151014
augguugaggauuucagcc

SEQ ID NO: 151016 - RNA, 19 nt, Artificial Sequence
  Description of Artificial Sequence: Synthetic oligonucleotide
  Sense strand starting at position 7 of SEQ ID NO: 1940
ggaagagucucugcuugga

SEQ ID NO: 151017 - RNA, 19 nt, Artificial Sequence
  Description of Artificial Sequence: Synthetic oligonucleotide
  Antisense strand to SEQ ID NO: 151016
uccaagcagagacucuucc

SEQ ID NO: 151018 - RNA, 19 nt, Artificial Sequence
  Description of Artificial Sequence: Synthetic oligonucleotide
  Sense strand starting at position 3745 of SEQ ID NO: 1939
gguacuauauuaguuacau

SEQ ID NO: 151019 - RNA, 19 nt, Artificial Sequence
  Description of Artificial Sequence: Synthetic oligonucleotide
  Antisense strand to SEQ ID NO: 151018
auguaacuaauauaguacc

SEQ ID NO: 151020 - RNA, 19 nt, Artificial Sequence
  Description of Artificial Sequence: Synthetic oligonucleotide
  Sense strand starting at position 3735 of SEQ ID NO: 1939
augaguacccgguacuaua

SEQ ID NO: 151021 - RNA, 19 nt, Artificial Sequence
  Description of Artificial Sequence: Synthetic oligonucleotide
  Antisense strand to SEQ ID NO: 151020
uauaguaccggguacucau

SEQ ID NO: 151022 - RNA, 19 nt, Artificial Sequence
  Description of Artificial Sequence: Synthetic oligonucleotide
  Sense strand starting at position 3650 of SEQ ID NO: 1939
uuaguucugggagguuuaa

SEQ ID NO: 151023 - RNA, 19 nt, Artificial Sequence
  Description of Artificial Sequence: Synthetic oligonucleotide
  Antisense strand to SEQ ID NO: 151022
uuaaaccucccagaacuaa

SEQ ID NO: 151024 - RNA, 19 nt, Artificial Sequence
  Description of Artificial Sequence: Synthetic oligonucleotide
  Sense strand starting at position 3647 of SEQ ID NO: 1939
caauuaguucugggagguu

SEQ ID NO: 151025 - RNA, 19 nt, Artificial Sequence
  Description of Artificial Sequence: Synthetic oligonucleotide
  Antisense strand to SEQ ID NO: 151024
aaccucccagaacuaauug

SEQ ID NO: 151026 - RNA, 19 nt, Artificial Sequence
  Description of Artificial Sequence: Synthetic oligonucleotide
  Sense strand starting at position 3503 of SEQ ID NO: 1939
uaacauauuucggaaagga

SEQ ID NO: 151027 - RNA, 19 nt, Artificial Sequence
  Description of Artificial Sequence: Synthetic oligonucleotide
  Antisense strand to SEQ ID NO: 151026
uccuuuccgaaauauguua

SEQ ID NO: 151028 - RNA, 19 nt, Artificial Sequence
  Description of Artificial Sequence: Synthetic oligonucleotide
  Sense strand starting at position 3433 of SEQ ID NO: 1939
aguaaucucuuugugagaa

SEQ ID NO: 151029 - RNA, 19 nt, Artificial Sequence
  Description of Artificial Sequence: Synthetic oligonucleotide
  Antisense strand to SEQ ID NO: 151028
uucucacaaagagauuacu

SEQ ID NO: 151030 - RNA, 19 nt, Artificial Sequence
  Description of Artificial Sequence: Synthetic oligonucleotide
  Sense strand starting at position 3432 of SEQ ID NO: 1939
aaguaaucucuuugugaga

SEQ ID NO: 151031 - RNA, 19 nt, Artificial Sequence
  Description of Artificial Sequence: Synthetic oligonucleotide
  Antisense strand to SEQ ID NO: 151030
ucucacaaagagauuacuu

SEQ ID NO: 151032 - RNA, 19 nt, Artificial Sequence
  Description of Artificial Sequence: Synthetic oligonucleotide
  Sense strand starting at position 3431 of SEQ ID NO: 1939
uaaguaaucucuuugugag

SEQ ID NO: 151033 - RNA, 19 nt, Artificial Sequence
  Description of Artificial Sequence: Synthetic oligonucleotide
  Antisense strand to SEQ ID NO: 151032
cucacaaagagauuacuua

SEQ ID NO: 151034 - RNA, 19 nt, Artificial Sequence
  Description of Artificial Sequence: Synthetic oligonucleotide
  Sense strand starting at position 3252 of SEQ ID NO: 1939
uguuguucugagcaugaau

SEQ ID NO: 151035 - RNA, 19 nt, Artificial Sequence
  Description of Artificial Sequence: Synthetic oligonucleotide
  Antisense strand to SEQ ID NO: 151034
auucaugcucagaacaaca

SEQ ID NO: 151036 - RNA, 19 nt, Artificial Sequence
  Description of Artificial Sequence: Synthetic oligonucleotide
  Sense strand starting at position 3164 of SEQ ID NO: 1939
accugucuuguacaaagaa

SEQ ID NO: 151037 - RNA, 19 nt, Artificial Sequence
  Description of Artificial Sequence: Synthetic oligonucleotide
  Antisense strand to SEQ ID NO: 151036
uucuuuguacaagacaggu

SEQ ID NO: 151038 - RNA, 19 nt, Artificial Sequence
  Description of Artificial Sequence: Synthetic oligonucleotide
  Sense strand starting at position 3108 of SEQ ID NO: 1939
gcacaauuagugcaagaaa

SEQ ID NO: 151039 - RNA, 19 nt, Artificial Sequence
  Description of Artificial Sequence: Synthetic oligonucleotide
  Antisense strand to SEQ ID NO: 151038
uuucuugcacuaauugugc

SEQ ID NO: 151040 - RNA, 19 nt, Artificial Sequence
  Description of Artificial Sequence: Synthetic oligonucleotide
  Sense strand starting at position 2502 of SEQ ID NO: 1939
acuguaagugugggauaau

SEQ ID NO: 151041 - RNA, 19 nt, Artificial Sequence
  Description of Artificial Sequence: Synthetic oligonucleotide
  Antisense strand to SEQ ID NO: 151040
auuaucccacacuuacagu

SEQ ID NO: 151042 - RNA, 19 nt, Artificial Sequence
  Description of Artificial Sequence: Synthetic oligonucleotide
  Sense strand starting at position 2437 of SEQ ID NO: 1939
gugcaucauuuaguauauu

SEQ ID NO: 151043 - RNA, 19 nt, Artificial Sequence
  Description of Artificial Sequence: Synthetic oligonucleotide
  Antisense strand to SEQ ID NO: 151042
aauauacuaaaugaugcac

SEQ ID NO: 151044 - RNA, 19 nt, Artificial Sequence
  Description of Artificial Sequence: Synthetic oligonucleotide
  Sense strand starting at position 2433 of SEQ ID NO: 1939
gcaagugcaucauuuagua

SEQ ID NO: 151045 - RNA, 19 nt, Artificial Sequence
  Description of Artificial Sequence: Synthetic oligonucleotide
  Antisense strand to SEQ ID NO: 151044
uacuaaaugaugcacuugc

SEQ ID NO: 151046 - RNA, 19 nt, Artificial Sequence
  Description of Artificial Sequence: Synthetic oligonucleotide
  Sense strand starting at position 2404 of SEQ ID NO: 1939
acuccuucucuagggauua

SEQ ID NO: 151047 - RNA, 19 nt, Artificial Sequence
  Description of Artificial Sequence: Synthetic oligonucleotide
  Antisense strand to SEQ ID NO: 151046
uaaucccuagagaaggagu

SEQ ID NO: 151048 - RNA, 19 nt, Artificial Sequence
  Description of Artificial Sequence: Synthetic oligonucleotide
  Sense strand starting at position 2402 of SEQ ID NO: 1939
gcacuccuucucuagggau

SEQ ID NO: 151049 - RNA, 19 nt, Artificial Sequence
  Description of Artificial Sequence: Synthetic oligonucleotide
  Antisense strand to SEQ ID NO: 151048
aucccuagagaaggagugc

SEQ ID NO: 151050 - RNA, 19 nt, Artificial Sequence
  Description of Artificial Sequence: Synthetic oligonucleotide
  Sense strand starting at position 2128 of SEQ ID NO: 1939
gguaacucauuagauuuau

SEQ ID NO: 151051 - RNA, 19 nt, Artificial Sequence
  Description of Artificial Sequence: Synthetic oligonucleotide
  Antisense strand to SEQ ID NO: 151050
auaaaucuaaugaguuacc

SEQ ID NO: 151052 - RNA, 19 nt, Artificial Sequence
  Description of Artificial Sequence: Synthetic oligonucleotide
  Sense strand starting at position 2125 of SEQ ID NO: 1939
guagguaacucauuagauu

SEQ ID NO: 151053 - RNA, 19 nt, Artificial Sequence
  Description of Artificial Sequence: Synthetic oligonucleotide
  Antisense strand to SEQ ID NO: 151052
aaucuaaugaguuaccuac

SEQ ID NO: 151054 - RNA, 19 nt, Artificial Sequence
  Description of Artificial Sequence: Synthetic oligonucleotide
  Sense strand starting at position 2121 of SEQ ID NO: 1939
aagaguagguaacucauua

SEQ ID NO: 151055 - RNA, 19 nt, Artificial Sequence
  Description of Artificial Sequence: Synthetic oligonucleotide
  Antisense strand to SEQ ID NO: 151054
uaaugaguuaccuacucuu

SEQ ID NO: 151056 - RNA, 19 nt, Artificial Sequence
  Description of Artificial Sequence: Synthetic oligonucleotide
  Sense strand starting at position 2049 of SEQ ID NO: 1939
gcccuuagcacagaaaggu

SEQ ID NO: 151057 - RNA, 19 nt, Artificial Sequence
  Description of Artificial Sequence: Synthetic oligonucleotide
  Antisense strand to SEQ ID NO: 151056
accuuucugugcuaagggc

SEQ ID NO: 151058 - RNA, 19 nt, Artificial Sequence
  Description of Artificial Sequence: Synthetic oligonucleotide
  Sense strand starting at position 2042 of SEQ ID NO: 1939
ccagauagcccuuagcaca

SEQ ID NO: 151059 - RNA, 19 nt, Artificial Sequence
  Description of Artificial Sequence: Synthetic oligonucleotide
  Antisense strand to SEQ ID NO: 151058
ugugcuaagggcuaucugg

SEQ ID NO: 151060 - RNA, 19 nt, Artificial Sequence
  Description of Artificial Sequence: Synthetic oligonucleotide
  Sense strand starting at position 1693 of SEQ ID NO: 1939
gaaauugaauccucguuga

SEQ ID NO: 151061 - RNA, 19 nt, Artificial Sequence
  Description of Artificial Sequence: Synthetic oligonucleotide
  Antisense strand to SEQ ID NO: 151060
ucaacgaggauucaauuuc

SEQ ID NO: 151062 - RNA, 19 nt, Artificial Sequence
  Description of Artificial Sequence: Synthetic oligonucleotide
  Sense strand starting at position 1666 of SEQ ID NO: 1939
cugccuugacaauaagcau

SEQ ID NO: 151063 - RNA, 19 nt, Artificial Sequence
  Description of Artificial Sequence: Synthetic oligonucleotide
  Antisense strand to SEQ ID NO: 151062
augcuuauugucaaggcag

SEQ ID NO: 151064 - RNA, 19 nt, Artificial Sequence
  Description of Artificial Sequence: Synthetic oligonucleotide
  Sense strand starting at position 1589 of SEQ ID NO: 1939
ggcgauuggagagauguga

SEQ ID NO: 151065 - RNA, 19 nt, Artificial Sequence
  Description of Artificial Sequence: Synthetic oligonucleotide
  Antisense strand to SEQ ID NO: 151064
ucacaucucuccaaucgcc

SEQ ID NO: 151066 - RNA, 19 nt, Artificial Sequence
  Description of Artificial Sequence: Synthetic oligonucleotide
  Sense strand starting at position 1278 of SEQ ID NO: 1939
uguaguagauaagcaagaa

SEQ ID NO: 151067 - RNA, 19 nt, Artificial Sequence
  Description of Artificial Sequence: Synthetic oligonucleotide
  Antisense strand to SEQ ID NO: 151066
uucuugcuuaucuacuaca

SEQ ID NO: 151068 - RNA, 19 nt, Artificial Sequence
  Description of Artificial Sequence: Synthetic oligonucleotide
  Sense strand starting at position 1168 of SEQ ID NO: 1939
agucaucucugucuuagaa

SEQ ID NO: 151069 - RNA, 19 nt, Artificial Sequence
  Description of Artificial Sequence: Synthetic oligonucleotide
  Antisense strand to SEQ ID NO: 151068
uucuaagacagagaugacu

SEQ ID NO: 151070 - RNA, 19 nt, Artificial Sequence
  Description of Artificial Sequence: Synthetic oligonucleotide
  Sense strand starting at position 1098 of SEQ ID NO: 1939
ggcugaaauccucaaccau

SEQ ID NO: 151071 - RNA, 19 nt, Artificial Sequence
  Description of Artificial Sequence: Synthetic oligonucleotide
  Antisense strand to SEQ ID NO: 151070
augguugaggauuucagcc

SEQ ID NO: 151072 - RNA, 19 nt, Artificial Sequence
  Description of Artificial Sequence: Synthetic oligonucleotide
  Sense strand starting at position 1052 of SEQ ID NO: 1939
ggaagagucucugcuugga

SEQ ID NO: 151073 - RNA, 19 nt, Artificial Sequence
  Description of Artificial Sequence: Synthetic oligonucleotide
  Antisense strand to SEQ ID NO: 151072
uccaagcagagacucuucc

SEQ ID NO: 151074 - RNA, 19 nt, Artificial Sequence
  Description of Artificial Sequence: Synthetic oligonucleotide
  Sense strand starting at position 980 of SEQ ID NO: 1939
agaguuagaggugauugua

SEQ ID NO: 151075 - RNA, 19 nt, Artificial Sequence
  Description of Artificial Sequence: Synthetic oligonucleotide
  Antisense strand to SEQ ID NO: 151074
uacaaucaccucuaacucu

SEQ ID NO: 151076 - RNA, 19 nt, Artificial Sequence
  Description of Artificial Sequence: Synthetic oligonucleotide
  Sense strand starting at position 979 of SEQ ID NO: 1939
cagaguuagaggugauugu

SEQ ID NO: 151077 - RNA, 19 nt, Artificial Sequence
  Description of Artificial Sequence: Synthetic oligonucleotide
  Antisense strand to SEQ ID NO: 151076
acaaucaccucuaacucug

SEQ ID NO: 151078 - RNA, 19 nt, Artificial Sequence
  Description of Artificial Sequence: Synthetic oligonucleotide
  Sense strand starting at position 749 of SEQ ID NO: 1939
auguuacaugugcaauuga

SEQ ID NO: 151079 - RNA, 19 nt, Artificial Sequence
  Description of Artificial Sequence: Synthetic oligonucleotide
  Antisense strand to SEQ ID NO: 151078
ucaauugcacauguaacau

SEQ ID NO: 151080 - RNA, 19 nt, Artificial Sequence
  Description of Artificial Sequence: Synthetic oligonucleotide
  Sense strand starting at position 388 of SEQ ID NO: 1939
gaugguaaucagcauggca

SEQ ID NO: 151081 - RNA, 19 nt, Artificial Sequence
  Description of Artificial Sequence: Synthetic oligonucleotide
  Antisense strand to SEQ ID NO: 151080
ugccaugcugauuaccauc

SEQ ID NO: 151082 - RNA, 19 nt, Artificial Sequence
  Description of Artificial Sequence: Synthetic oligonucleotide
  Sense strand starting at position 384 of SEQ ID NO: 1939
uagggaugguaaucagcau

SEQ ID NO: 151083 - RNA, 19 nt, Artificial Sequence
  Description of Artificial Sequence: Synthetic oligonucleotide
  Antisense strand to SEQ ID NO: 151082
augcugauuaccaucccua

SEQ ID NO: 151084 - RNA, 19 nt, Artificial Sequence
  Description of Artificial Sequence: Synthetic oligonucleotide
  Sense strand starting at position 304 of SEQ ID NO: 1939
guuggauaacacugaucua

SEQ ID NO: 151085 - RNA, 19 nt, Artificial Sequence
  Description of Artificial Sequence: Synthetic oligonucleotide
  Antisense strand to SEQ ID NO: 151084
uagaucaguguuauccaac

SEQ ID NO: 151086 - RNA, 19 nt, Artificial Sequence
  Description of Artificial Sequence: Synthetic oligonucleotide
  Sense strand starting at position 298 of SEQ ID NO: 1939
aguacuguuggauaacacu

SEQ ID NO: 151087 - RNA, 19 nt, Artificial Sequence
  Description of Artificial Sequence: Synthetic oligonucleotide
  Antisense strand to SEQ ID NO: 151086
aguguuauccaacaguacu

SEQ ID NO: 151088 - RNA, 19 nt, Artificial Sequence
  Description of Artificial Sequence: Synthetic oligonucleotide
  Sense strand starting at position 295 of SEQ ID NO: 1939
gaaaguacuguuggauaac

SEQ ID NO: 151089 - RNA, 19 nt, Artificial Sequence
  Description of Artificial Sequence: Synthetic oligonucleotide
  Antisense strand to SEQ ID NO: 151088
guuauccaacaguacuuuc

SEQ ID NO: 151090 - RNA, 19 nt, Artificial Sequence
  Description of Artificial Sequence: Synthetic oligonucleotide
  Sense strand starting at position 283 of SEQ ID NO: 1939
uccaucauuguugaaagua

SEQ ID NO: 151091 - RNA, 19 nt, Artificial Sequence
  Description of Artificial Sequence: Synthetic oligonucleotide
  Antisense strand to SEQ ID NO: 151090
uacuuucaacaaugaugga

SEQ ID NO: 151092 - RNA, 19 nt, Artificial Sequence
  Description of Artificial Sequence: Synthetic oligonucleotide
  Sense strand starting at position 281 of SEQ ID NO: 1939
uuuccaucauuguugaaag

SEQ ID NO: 151093 - RNA, 19 nt, Artificial Sequence
  Description of Artificial Sequence: Synthetic oligonucleotide
  Antisense strand to SEQ ID NO: 151092
cuuucaacaaugauggaaa

SEQ ID NO: 151094 - RNA, 19 nt, Artificial Sequence
  Description of Artificial Sequence: Synthetic oligonucleotide
  Sense strand starting at position 120 of SEQ ID NO: 1939
uuaugcaaggauuauacuu

SEQ ID NO: 151095 - RNA, 19 nt, Artificial Sequence
  Description of Artificial Sequence: Synthetic oligonucleotide
  Antisense strand to SEQ ID NO: 151094
aaguauaauccuugcauaa

SEQ ID NO: 151096 - RNA, 19 nt, Artificial Sequence
  Description of Artificial Sequence: Synthetic oligonucleotide
  Sense strand starting at position 37 of SEQ ID NO: 1939
ggaaauauuugucaucuua

SEQ ID NO: 151097 - RNA, 19 nt, Artificial Sequence
  Description of Artificial Sequence: Synthetic oligonucleotide
  Antisense strand to SEQ ID NO: 151096
uaagaugacaaauauuucc

SEQ ID NO: 151098 - RNA, 19 nt, Artificial Sequence
  Description of Artificial Sequence: Synthetic oligonucleotide
  Sense strand starting at position 3941 of SEQ ID NO: 1941
agaagacucuccucaaagu

SEQ ID NO: 151099 - RNA, 19 nt, Artificial Sequence
  Description of Artificial Sequence: Synthetic oligonucleotide
  Antisense strand to SEQ ID NO: 151098
acuuugaggagagucuucu

SEQ ID NO: 151100 - RNA, 19 nt, Artificial Sequence
  Description of Artificial Sequence: Synthetic oligonucleotide
  Sense strand starting at position 3914 of SEQ ID NO: 1941
agcugcagucuuggaggaa

SEQ ID NO: 151101 - RNA, 19 nt, Artificial Sequence
  Description of Artificial Sequence: Synthetic oligonucleotide
  Antisense strand to SEQ ID NO: 151100
uuccuccaagacugcagcu

SEQ ID NO: 151102 - RNA, 19 nt, Artificial Sequence
  Description of Artificial Sequence: Synthetic oligonucleotide
  Sense strand starting at position 3773 of SEQ ID NO: 1941
guaggucaggucuaacaac

SEQ ID NO: 151103 - RNA, 19 nt, Artificial Sequence
  Description of Artificial Sequence: Synthetic oligonucleotide
  Antisense strand to SEQ ID NO: 151102
guuguuagaccugaccuac

SEQ ID NO: 151104 - RNA, 19 nt, Artificial Sequence
  Description of Artificial Sequence: Synthetic oligonucleotide
  Sense strand starting at position 3658 of SEQ ID NO: 1941
agaaauguuguguguugag

SEQ ID NO: 151105 - RNA, 19 nt, Artificial Sequence
  Description of Artificial Sequence: Synthetic oligonucleotide
  Antisense strand to SEQ ID NO: 151104
cucaacacacaacauuucu

SEQ ID NO: 151106 - RNA, 19 nt, Artificial Sequence
  Description of Artificial Sequence: Synthetic oligonucleotide
  Sense strand starting at position 3643 of SEQ ID NO: 1941
acugcaucuggucacagaa

SEQ ID NO: 151107 - RNA, 19 nt, Artificial Sequence
  Description of Artificial Sequence: Synthetic oligonucleotide
  Antisense strand to SEQ ID NO: 151106
uucugugaccagaugcagu

SEQ ID NO: 151108 - RNA, 19 nt, Artificial Sequence
  Description of Artificial Sequence: Synthetic oligonucleotide
  Sense strand starting at position 3642 of SEQ ID NO: 1941
cacugcaucuggucacaga

SEQ ID NO: 151109 - RNA, 19 nt, Artificial Sequence
  Description of Artificial Sequence: Synthetic oligonucleotide
  Antisense strand to SEQ ID NO: 151108
ucugugaccagaugcagug

SEQ ID NO: 151110 - RNA, 19 nt, Artificial Sequence
  Description of Artificial Sequence: Synthetic oligonucleotide
  Sense strand starting at position 3582 of SEQ ID NO: 1941
gccaauguccacuggagaa

SEQ ID NO: 151111 - RNA, 19 nt, Artificial Sequence
  Description of Artificial Sequence: Synthetic oligonucleotide
  Antisense strand to SEQ ID NO: 151110
uucuccaguggacauuggc

SEQ ID NO: 151112 - RNA, 19 nt, Artificial Sequence
  Description of Artificial Sequence: Synthetic oligonucleotide
  Sense strand starting at position 3570 of SEQ ID NO: 1941
auagaaugcuuagccaaug

SEQ ID NO: 151113 - RNA, 19 nt, Artificial Sequence
  Description of Artificial Sequence: Synthetic oligonucleotide
  Antisense strand to SEQ ID NO: 151112
cauuggcuaagcauucuau

SEQ ID NO: 151114 - RNA, 19 nt, Artificial Sequence
  Description of Artificial Sequence: Synthetic oligonucleotide
  Sense strand starting at position 3564 of SEQ ID NO: 1941
ugaauuauagaaugcuuag

SEQ ID NO: 151115 - RNA, 19 nt, Artificial Sequence
  Description of Artificial Sequence: Synthetic oligonucleotide
  Antisense strand to SEQ ID NO: 151114
cuaagcauucuauaauuca

SEQ ID NO: 151116 - RNA, 19 nt, Artificial Sequence
  Description of Artificial Sequence: Synthetic oligonucleotide
  Sense strand starting at position 3483 of SEQ ID NO: 1941
agcagucuagugggaucaa

SEQ ID NO: 151117 - RNA, 19 nt, Artificial Sequence
  Description of Artificial Sequence: Synthetic oligonucleotide
  Antisense strand to SEQ ID NO: 151116
uugaucccacuagacugcu

SEQ ID NO: 151118 - RNA, 19 nt, Artificial Sequence
  Description of Artificial Sequence: Synthetic oligonucleotide
  Sense strand starting at position 3463 of SEQ ID NO: 1941
gcaauuggcaucugaagag

SEQ ID NO: 151119 - RNA, 19 nt, Artificial Sequence
  Description of Artificial Sequence: Synthetic oligonucleotide
  Antisense strand to SEQ ID NO: 151118
cucuucagaugccaauugc

SEQ ID NO: 151120 - RNA, 19 nt, Artificial Sequence
  Description of Artificial Sequence: Synthetic oligonucleotide
  Sense strand starting at position 3430 of SEQ ID NO: 1941
gcugcuaagaaguauaggu

SEQ ID NO: 151121 - RNA, 19 nt, Artificial Sequence
  Description of Artificial Sequence: Synthetic oligonucleotide
  Antisense strand to SEQ ID NO: 151120
accuauacuucuuagcagc

SEQ ID NO: 151122 - RNA, 19 nt, Artificial Sequence
  Description of Artificial Sequence: Synthetic oligonucleotide
  Sense strand starting at position 3370 of SEQ ID NO: 1941
ugagccuucucagcaaauu

SEQ ID NO: 151123 - RNA, 19 nt, Artificial Sequence
  Description of Artificial Sequence: Synthetic oligonucleotide
  Antisense strand to SEQ ID NO: 151122
aauuugcugagaaggcuca

SEQ ID NO: 151124 - RNA, 19 nt, Artificial Sequence
  Description of Artificial Sequence: Synthetic oligonucleotide
  Sense strand starting at position 3350 of SEQ ID NO: 1941
aaauguuuccuugaggucu

SEQ ID NO: 151125 - RNA, 19 nt, Artificial Sequence
  Description of Artificial Sequence: Synthetic oligonucleotide
  Antisense strand to SEQ ID NO: 151124
agaccucaaggaaacauuu

SEQ ID NO: 151126 - RNA, 19 nt, Artificial Sequence
  Description of Artificial Sequence: Synthetic oligonucleotide
  Sense strand starting at position 3347 of SEQ ID NO: 1941
gguaaauguuuccuugagg

SEQ ID NO: 151127 - RNA, 19 nt, Artificial Sequence
  Description of Artificial Sequence: Synthetic oligonucleotide
  Antisense strand to SEQ ID NO: 151126
ccucaaggaaacauuuacc

SEQ ID NO: 151128 - RNA, 19 nt, Artificial Sequence
  Description of Artificial Sequence: Synthetic oligonucleotide
  Sense strand starting at position 3346 of SEQ ID NO: 1941
ugguaaauguuuccuugag

SEQ ID NO: 151129 - RNA, 19 nt, Artificial Sequence
  Description of Artificial Sequence: Synthetic oligonucleotide
  Antisense strand to SEQ ID NO: 151128
cucaaggaaacauuuacca

SEQ ID NO: 151130 - RNA, 19 nt, Artificial Sequence
  Description of Artificial Sequence: Synthetic oligonucleotide
  Sense strand starting at position 3312 of SEQ ID NO: 1941
auuuguacccuuuguacua

SEQ ID NO: 151131 - RNA, 19 nt, Artificial Sequence
  Description of Artificial Sequence: Synthetic oligonucleotide
  Antisense strand to SEQ ID NO: 151130
uaguacaaaggguacaaau

SEQ ID NO: 151132 - RNA, 19 nt, Artificial Sequence
  Description of Artificial Sequence: Synthetic oligonucleotide
  Sense strand starting at position 3236 of SEQ ID NO: 1941
gugucuugcccagaaaggu

SEQ ID NO: 151133 - RNA, 19 nt, Artificial Sequence
  Description of Artificial Sequence: Synthetic oligonucleotide
  Antisense strand to SEQ ID NO: 151132
accuuucugggcaagacac

SEQ ID NO: 151134 - RNA, 19 nt, Artificial Sequence
  Description of Artificial Sequence: Synthetic oligonucleotide
  Sense strand starting at position 3234 of SEQ ID NO: 1941
gggugucuugcccagaaag

SEQ ID NO: 151135 - RNA, 19 nt, Artificial Sequence
  Description of Artificial Sequence: Synthetic oligonucleotide
  Antisense strand to SEQ ID NO: 151134
cuuucugggcaagacaccc

SEQ ID NO: 151136 - RNA, 19 nt, Artificial Sequence
  Description of Artificial Sequence: Synthetic oligonucleotide
  Sense strand starting at position 3232 of SEQ ID NO: 1941
gagggugucuugcccagaa

SEQ ID NO: 151137 - RNA, 19 nt, Artificial Sequence
  Description of Artificial Sequence: Synthetic oligonucleotide
  Antisense strand to SEQ ID NO: 151136
uucugggcaagacacccuc

SEQ ID NO: 151138 - RNA, 19 nt, Artificial Sequence
  Description of Artificial Sequence: Synthetic oligonucleotide
  Sense strand starting at position 3191 of SEQ ID NO: 1941
guugaugagcuucaggguu

SEQ ID NO: 151139 - RNA, 19 nt, Artificial Sequence
  Description of Artificial Sequence: Synthetic oligonucleotide
  Antisense strand to SEQ ID NO: 151138
aacccugaagcucaucaac

SEQ ID NO: 151140 - RNA, 19 nt, Artificial Sequence
  Description of Artificial Sequence: Synthetic oligonucleotide
  Sense strand starting at position 3167 of SEQ ID NO: 1941
ucuauaaacgcucgaacaa

SEQ ID NO: 151141 - RNA, 19 nt, Artificial Sequence
  Description of Artificial Sequence: Synthetic oligonucleotide
  Antisense strand to SEQ ID NO: 151140
uuguucgagcguuuauaga

SEQ ID NO: 151142 - RNA, 19 nt, Artificial Sequence
  Description of Artificial Sequence: Synthetic oligonucleotide
  Sense strand starting at position 2874 of SEQ ID NO: 1941
gagggugugacauagcuaa

SEQ ID NO: 151143 - RNA, 19 nt, Artificial Sequence
  Description of Artificial Sequence: Synthetic oligonucleotide
  Antisense strand to SEQ ID NO: 151142
uuagcuaugucacacccuc

SEQ ID NO: 151144 - RNA, 19 nt, Artificial Sequence
  Description of Artificial Sequence: Synthetic oligonucleotide
  Sense strand starting at position 2867 of SEQ ID NO: 1941
cugagaugagggugugaca

SEQ ID NO: 151145 - RNA, 19 nt, Artificial Sequence
  Description of Artificial Sequence: Synthetic oligonucleotide
  Antisense strand to SEQ ID NO: 151144
ugucacacccucaucucag

SEQ ID NO: 151146 - RNA, 19 nt, Artificial Sequence
  Description of Artificial Sequence: Synthetic oligonucleotide
  Sense strand starting at position 2816 of SEQ ID NO: 1941
gaagcuagaugugcuaaga

SEQ ID NO: 151147 - RNA, 19 nt, Artificial Sequence
  Description of Artificial Sequence: Synthetic oligonucleotide
  Antisense strand to SEQ ID NO: 151146
ucuuagcacaucuagcuuc

SEQ ID NO: 151148 - RNA, 19 nt, Artificial Sequence
  Description of Artificial Sequence: Synthetic oligonucleotide
  Sense strand starting at position 2660 of SEQ ID NO: 1941
auucuaguugccgagugaa

SEQ ID NO: 151149 - RNA, 19 nt, Artificial Sequence
  Description of Artificial Sequence: Synthetic oligonucleotide
  Antisense strand to SEQ ID NO: 151148
uucacucggcaacuagaau

SEQ ID NO: 151150 - RNA, 19 nt, Artificial Sequence
  Description of Artificial Sequence: Synthetic oligonucleotide
  Sense strand starting at position 2655 of SEQ ID NO: 1941
gaaauauucuaguugccga

SEQ ID NO: 151151 - RNA, 19 nt, Artificial Sequence
  Description of Artificial Sequence: Synthetic oligonucleotide
  Antisense strand to SEQ ID NO: 151150
ucggcaacuagaauauuuc

SEQ ID NO: 151152 - RNA, 19 nt, Artificial Sequence
  Description of Artificial Sequence: Synthetic oligonucleotide
  Sense strand starting at position 2604 of SEQ ID NO: 1941
gaagaacgguuuguaucau

SEQ ID NO: 151153 - RNA, 19 nt, Artificial Sequence
  Description of Artificial Sequence: Synthetic oligonucleotide
  Antisense strand to SEQ ID NO: 151152
augauacaaaccguucuuc

SEQ ID NO: 151154 - RNA, 19 nt, Artificial Sequence
  Description of Artificial Sequence: Synthetic oligonucleotide
  Sense strand starting at position 2603 of SEQ ID NO: 1941
ugaagaacgguuuguauca

SEQ ID NO: 151155 - RNA, 19 nt, Artificial Sequence
  Description of Artificial Sequence: Synthetic oligonucleotide
  Antisense strand to SEQ ID NO: 151154
ugauacaaaccguucuuca

SEQ ID NO: 151156 - RNA, 19 nt, Artificial Sequence
  Description of Artificial Sequence: Synthetic oligonucleotide
  Sense strand starting at position 2571 of SEQ ID NO: 1941
aggucaugucuugggucaa

SEQ ID NO: 151157 - RNA, 19 nt, Artificial Sequence
  Description of Artificial Sequence: Synthetic oligonucleotide
  Antisense strand to SEQ ID NO: 151156
uugacccaagacaugaccu

SEQ ID NO: 151158 - RNA, 19 nt, Artificial Sequence
  Description of Artificial Sequence: Synthetic oligonucleotide
  Sense strand starting at position 2545 of SEQ ID NO: 1941
agauuugaacgccguauaa

SEQ ID NO: 151159 - RNA, 19 nt, Artificial Sequence
  Description of Artificial Sequence: Synthetic oligonucleotide
  Antisense strand to SEQ ID NO: 151158
uuauacggcguucaaaucu

SEQ ID NO: 151160 - RNA, 19 nt, Artificial Sequence
  Description of Artificial Sequence: Synthetic oligonucleotide
  Sense strand starting at position 2542 of SEQ ID NO: 1941
agcagauuugaacgccgua

SEQ ID NO: 151161 - RNA, 19 nt, Artificial Sequence
  Description of Artificial Sequence: Synthetic oligonucleotide
  Antisense strand to SEQ ID NO: 151160
uacggcguucaaaucugcu

SEQ ID NO: 151162 - RNA, 19 nt, Artificial Sequence
  Description of Artificial Sequence: Synthetic oligonucleotide
  Sense strand starting at position 2398 of SEQ ID NO: 1941
gugccuuagaaaugguaua

SEQ ID NO: 151163 - RNA, 19 nt, Artificial Sequence
  Description of Artificial Sequence: Synthetic oligonucleotide
  Antisense strand to SEQ ID NO: 151162
uauaccauuucuaaggcac

SEQ ID NO: 151164 - RNA, 19 nt, Artificial Sequence
  Description of Artificial Sequence: Synthetic oligonucleotide
  Sense strand starting at position 2370 of SEQ ID NO: 1941
gcuaccucagcuuaagauu

SEQ ID NO: 151165 - RNA, 19 nt, Artificial Sequence
  Description of Artificial Sequence: Synthetic oligonucleotide
  Antisense strand to SEQ ID NO: 151164
aaucuuaagcugagguagc

SEQ ID NO: 151166 - RNA, 19 nt, Artificial Sequence
  Description of Artificial Sequence: Synthetic oligonucleotide
  Sense strand starting at position 2342 of SEQ ID NO: 1941
acaagaggauggcauauuu

SEQ ID NO: 151167 - RNA, 19 nt, Artificial Sequence
  Description of Artificial Sequence: Synthetic oligonucleotide
  Antisense strand to SEQ ID NO: 151166
aaauaugccauccucuugu

SEQ ID NO: 151168 - RNA, 19 nt, Artificial Sequence
  Description of Artificial Sequence: Synthetic oligonucleotide
  Sense strand starting at position 2301 of SEQ ID NO: 1941
gggcucuuucccugaaccu

SEQ ID NO: 151169 - RNA, 19 nt, Artificial Sequence
  Description of Artificial Sequence: Synthetic oligonucleotide
  Antisense strand to SEQ ID NO: 151168
agguucagggaaagagccc

SEQ ID NO: 151170 - RNA, 19 nt, Artificial Sequence
  Description of Artificial Sequence: Synthetic oligonucleotide
  Sense strand starting at position 2153 of SEQ ID NO: 1941
aacugugaucgccacauaa

SEQ ID NO: 151171 - RNA, 19 nt, Artificial Sequence
  Description of Artificial Sequence: Synthetic oligonucleotide
  Antisense strand to SEQ ID NO: 151170
uuauguggcgaucacaguu

SEQ ID NO: 151172 - RNA, 19 nt, Artificial Sequence
  Description of Artificial Sequence: Synthetic oligonucleotide
  Sense strand starting at position 1407 of SEQ ID NO: 1941
gaccaaagauucguguuag

SEQ ID NO: 151173 - RNA, 19 nt, Artificial Sequence
  Description of Artificial Sequence: Synthetic oligonucleotide
  Antisense strand to SEQ ID NO: 151172
cuaacacgaaucuuugguc

SEQ ID NO: 151174 - RNA, 19 nt, Artificial Sequence
  Description of Artificial Sequence: Synthetic oligonucleotide
  Sense strand starting at position 1406 of SEQ ID NO: 1941
ggaccaaagauucguguua

SEQ ID NO: 151175 - RNA, 19 nt, Artificial Sequence
  Description of Artificial Sequence: Synthetic oligonucleotide
  Antisense strand to SEQ ID NO: 151174
uaacacgaaucuuuggucc

SEQ ID NO: 151176 - RNA, 19 nt, Artificial Sequence
  Description of Artificial Sequence: Synthetic oligonucleotide
  Sense strand starting at position 1374 of SEQ ID NO: 1941
ggccuugcugaagaugaga

SEQ ID NO: 151177 - RNA, 19 nt, Artificial Sequence
  Description of Artificial Sequence: Synthetic oligonucleotide
  Antisense strand to SEQ ID NO: 151176
ucucaucuucagcaaggcc

SEQ ID NO: 151178 - RNA, 19 nt, Artificial Sequence
  Description of Artificial Sequence: Synthetic oligonucleotide
  Sense strand starting at position 74 of SEQ ID NO: 1942
auggcaauguaaccagaaa

SEQ ID NO: 151179 - RNA, 19 nt, Artificial Sequence
  Description of Artificial Sequence: Synthetic oligonucleotide
  Antisense strand to SEQ ID NO: 151178
uuucugguuacauugccau

SEQ ID NO: 151180 - RNA, 19 nt, Artificial Sequence
  Description of Artificial Sequence: Synthetic oligonucleotide
  Sense strand starting at position 163 of SEQ ID NO: 1942
aacaguguuguccaaugga

SEQ ID NO: 151181 - RNA, 19 nt, Artificial Sequence
  Description of Artificial Sequence: Synthetic oligonucleotide
  Antisense strand to SEQ ID NO: 151180
uccauuggacaacacuguu

SEQ ID NO: 151182 - RNA, 19 nt, Artificial Sequence
  Description of Artificial Sequence: Synthetic oligonucleotide
  Sense strand starting at position 166 of SEQ ID NO: 1942
aguguuguccaauggagau

SEQ ID NO: 151183 - RNA, 19 nt, Artificial Sequence
  Description of Artificial Sequence: Synthetic oligonucleotide
  Antisense strand to SEQ ID NO: 151182
aucuccauuggacaacacu

SEQ ID NO: 151184 - RNA, 19 nt, Artificial Sequence
  Description of Artificial Sequence: Synthetic oligonucleotide
  Sense strand starting at position 197 of SEQ ID NO: 1942
acaaaugugagccagguau

SEQ ID NO: 151185 - RNA, 19 nt, Artificial Sequence
  Description of Artificial Sequence: Synthetic oligonucleotide
  Antisense strand to SEQ ID NO: 151184
auaccuggcucacauuugu

SEQ ID NO: 151186 - RNA, 19 nt, Artificial Sequence
  Description of Artificial Sequence: Synthetic oligonucleotide
  Sense strand starting at position 201 of SEQ ID NO: 1942
augugagccagguauguaa

SEQ ID NO: 151187 - RNA, 19 nt, Artificial Sequence
  Description of Artificial Sequence: Synthetic oligonucleotide
  Antisense strand to SEQ ID NO: 151186
uuacauaccuggcucacau

SEQ ID NO: 151188 - RNA, 19 nt, Artificial Sequence
  Description of Artificial Sequence: Synthetic oligonucleotide
  Sense strand starting at position 1003 of SEQ ID NO: 1942
acaaccauugaguguuaga

SEQ ID NO: 151189 - RNA, 19 nt, Artificial Sequence
  Description of Artificial Sequence: Synthetic oligonucleotide
  Antisense strand to SEQ ID NO: 151188
ucuaacacucaaugguugu

SEQ ID NO: 151190 - RNA, 19 nt, Artificial Sequence
  Description of Artificial Sequence: Synthetic oligonucleotide
  Sense strand starting at position 1042 of SEQ ID NO: 1942
ucuccugaccucuggucaa

SEQ ID NO: 151191 - RNA, 19 nt, Artificial Sequence
  Description of Artificial Sequence: Synthetic oligonucleotide
  Antisense strand to SEQ ID NO: 151190
uugaccagaggucaggaga

SEQ ID NO: 151192 - RNA, 19 nt, Artificial Sequence
  Description of Artificial Sequence: Synthetic oligonucleotide
  Sense strand starting at position 1121 of SEQ ID NO: 1942
ggucuuuauuuccuccagu

SEQ ID NO: 151193 - RNA, 19 nt, Artificial Sequence
  Description of Artificial Sequence: Synthetic oligonucleotide
  Antisense strand to SEQ ID NO: 151192
acuggaggaaauaaagacc

SEQ ID NO: 151194 - RNA, 19 nt, Artificial Sequence
  Description of Artificial Sequence: Synthetic oligonucleotide
  Sense strand starting at position 1130 of SEQ ID NO: 1942
uuccuccagugauuguaaa

SEQ ID NO: 151195 - RNA, 19 nt, Artificial Sequence
  Description of Artificial Sequence: Synthetic oligonucleotide
  Antisense strand to SEQ ID NO: 151194
uuuacaaucacuggaggaa

SEQ ID NO: 151196 - RNA, 19 nt, Artificial Sequence
  Description of Artificial Sequence: Synthetic oligonucleotide
  Sense strand starting at position 1219 of SEQ ID NO: 1942
ggcaauauuuauugaauga

SEQ ID NO: 151197 - RNA, 19 nt, Artificial Sequence
  Description of Artificial Sequence: Synthetic oligonucleotide
  Antisense strand to SEQ ID NO: 151196
ucauucaauaaauauugcc

SEQ ID NO: 151198 - RNA, 19 nt, Artificial Sequence
  Description of Artificial Sequence: Synthetic oligonucleotide
  Sense strand starting at position 1443 of SEQ ID NO: 1942
ggcugugagcccucacgua

SEQ ID NO: 151199 - RNA, 19 nt, Artificial Sequence
  Description of Artificial Sequence: Synthetic oligonucleotide
  Antisense strand to SEQ ID NO: 151198
uacgugagggcucacagcc

SEQ ID NO: 151200 - RNA, 19 nt, Artificial Sequence
  Description of Artificial Sequence: Synthetic oligonucleotide
  Sense strand starting at position 1469 of SEQ ID NO: 1942
uuaacuucucugggccaga

SEQ ID NO: 151201 - RNA, 19 nt, Artificial Sequence
  Description of Artificial Sequence: Synthetic oligonucleotide
  Antisense strand to SEQ ID NO: 151200
ucuggcccagagaaguuaa

SEQ ID NO: 151202 - RNA, 19 nt, Artificial Sequence
  Description of Artificial Sequence: Synthetic oligonucleotide
  Sense strand starting at position 1480 of SEQ ID NO: 1942
gggccagaguucuuaucug

SEQ ID NO: 151203 - RNA, 19 nt, Artificial Sequence
  Description of Artificial Sequence: Synthetic oligonucleotide
  Antisense strand to SEQ ID NO: 151202
cagauaagaacucuggccc

SEQ ID NO: 151204 - RNA, 19 nt, Artificial Sequence
  Description of Artificial Sequence: Synthetic oligonucleotide
  Sense strand starting at position 1509 of SEQ ID NO: 1942
agaguagggcuauaaucuu

SEQ ID NO: 151205 - RNA, 19 nt, Artificial Sequence
  Description of Artificial Sequence: Synthetic oligonucleotide
  Antisense strand to SEQ ID NO: 151204
aagauuauagcccuacucu

SEQ ID NO: 151206 - RNA, 19 nt, Artificial Sequence
  Description of Artificial Sequence: Synthetic oligonucleotide
  Sense strand starting at position 1912 of SEQ ID NO: 1942
cgggauuagccugagaggu

SEQ ID NO: 151207 - RNA, 19 nt, Artificial Sequence
  Description of Artificial Sequence: Synthetic oligonucleotide
  Antisense strand to SEQ ID NO: 151206
accucucaggcuaaucccg

SEQ ID NO: 151208 - RNA, 19 nt, Artificial Sequence
  Description of Artificial Sequence: Synthetic oligonucleotide
  Sense strand starting at position 1937 of SEQ ID NO: 1942
ccugauaaaguuugaguuu

SEQ ID NO: 151209 - RNA, 19 nt, Artificial Sequence
  Description of Artificial Sequence: Synthetic oligonucleotide
  Antisense strand to SEQ ID NO: 151208
aaacucaaacuuuaucagg

SEQ ID NO: 151210 - RNA, 19 nt, Artificial Sequence
  Description of Artificial Sequence: Synthetic oligonucleotide
  Sense strand starting at position 2064 of SEQ ID NO: 1942
agggaagacgguuguggua

SEQ ID NO: 151211 - RNA, 19 nt, Artificial Sequence
  Description of Artificial Sequence: Synthetic oligonucleotide
  Antisense strand to SEQ ID NO: 151210
uaccacaaccgucuucccu

SEQ ID NO: 151212 - RNA, 19 nt, Artificial Sequence
  Description of Artificial Sequence: Synthetic oligonucleotide
  Sense strand starting at position 2079 of SEQ ID NO: 1942
gguaguuccggguauuaac

SEQ ID NO: 151213 - RNA, 19 nt, Artificial Sequence
  Description of Artificial Sequence: Synthetic oligonucleotide
  Antisense strand to SEQ ID NO: 151212
guuaauacccggaacuacc

SEQ ID NO: 151214 - RNA, 19 nt, Artificial Sequence
  Description of Artificial Sequence: Synthetic oligonucleotide
  Sense strand starting at position 2125 of SEQ ID NO: 1942
auguuuguuaagggaagga

SEQ ID NO: 151215 - RNA, 19 nt, Artificial Sequence
  Description of Artificial Sequence: Synthetic oligonucleotide
  Antisense strand to SEQ ID NO: 151214
uccuucccuuaacaaacau

SEQ ID NO: 151216 - RNA, 19 nt, Artificial Sequence
  Description of Artificial Sequence: Synthetic oligonucleotide
  Sense strand starting at position 2378 of SEQ ID NO: 1942
ucucucaagagucggaaau

SEQ ID NO: 151217 - RNA, 19 nt, Artificial Sequence
  Description of Artificial Sequence: Synthetic oligonucleotide
  Antisense strand to SEQ ID NO: 151216
auuuccgacucuugagaga

SEQ ID NO: 151218 - RNA, 19 nt, Artificial Sequence
  Description of Artificial Sequence: Synthetic oligonucleotide
  Sense strand starting at position 2379 of SEQ ID NO: 1942
cucucaagagucggaaaua

SEQ ID NO: 151219 - RNA, 19 nt, Artificial Sequence
  Description of Artificial Sequence: Synthetic oligonucleotide
  Antisense strand to SEQ ID NO: 151218
uauuuccgacucuugagag

SEQ ID NO: 151220 - RNA, 19 nt, Artificial Sequence
  Description of Artificial Sequence: Synthetic oligonucleotide
  Sense strand starting at position 2516 of SEQ ID NO: 1942
gagcgauuaugaguucuag

SEQ ID NO: 151221 - RNA, 19 nt, Artificial Sequence
  Description of Artificial Sequence: Synthetic oligonucleotide
  Antisense strand to SEQ ID NO: 151220
cuagaacucauaaucgcuc

SEQ ID NO: 151222 - RNA, 19 nt, Artificial Sequence
  Description of Artificial Sequence: Synthetic oligonucleotide
  Sense strand starting at position 2606 of SEQ ID NO: 1942
aucuuaacucaugguaaug

SEQ ID NO: 151223 - RNA, 19 nt, Artificial Sequence
  Description of Artificial Sequence: Synthetic oligonucleotide
  Antisense strand to SEQ ID NO: 151222
cauuaccaugaguuaagau

SEQ ID NO: 151224 - RNA, 19 nt, Artificial Sequence
  Description of Artificial Sequence: Synthetic oligonucleotide
  Sense strand starting at position 2764 of SEQ ID NO: 1942
gugaaugcgguuggaagaa

SEQ ID NO: 151225 - RNA, 19 nt, Artificial Sequence
  Description of Artificial Sequence: Synthetic oligonucleotide
  Antisense strand to SEQ ID NO: 151224
uucuuccaaccgcauucac

SEQ ID NO: 151226 - RNA, 19 nt, Artificial Sequence
  Description of Artificial Sequence: Synthetic oligonucleotide
  Sense strand starting at position 3361 of SEQ ID NO: 1942
aagagagcauguccuuaua

SEQ ID NO: 151227 - RNA, 19 nt, Artificial Sequence
  Description of Artificial Sequence: Synthetic oligonucleotide
  Antisense strand to SEQ ID NO: 151226
uauaaggacaugcucucuu

SEQ ID NO: 151228 - RNA, 19 nt, Artificial Sequence
  Description of Artificial Sequence: Synthetic oligonucleotide
  Sense strand starting at position 3363 of SEQ ID NO: 1942
gagagcauguccuuauagu

SEQ ID NO: 151229 - RNA, 19 nt, Artificial Sequence
  Description of Artificial Sequence: Synthetic oligonucleotide
  Antisense strand to SEQ ID NO: 151228
acuauaaggacaugcucuc

SEQ ID NO: 151230 - RNA, 19 nt, Artificial Sequence
  Description of Artificial Sequence: Synthetic oligonucleotide
  Sense strand starting at position 3364 of SEQ ID NO: 1942
agagcauguccuuauaguu

SEQ ID NO: 151231 - RNA, 19 nt, Artificial Sequence
  Description of Artificial Sequence: Synthetic oligonucleotide
  Antisense strand to SEQ ID NO: 151230
aacuauaaggacaugcucu

SEQ ID NO: 151232 - RNA, 19 nt, Artificial Sequence
  Description of Artificial Sequence: Synthetic oligonucleotide
  Sense strand starting at position 3406 of SEQ ID NO: 1942
caaagcgaucagcaucaga

SEQ ID NO: 151233 - RNA, 19 nt, Artificial Sequence
  Description of Artificial Sequence: Synthetic oligonucleotide
  Antisense strand to SEQ ID NO: 151232
ucugaugcugaucgcuuug

SEQ ID NO: 151234 - RNA, 19 nt, Artificial Sequence
  Description of Artificial Sequence: Synthetic oligonucleotide
  Sense strand starting at position 3490 of SEQ ID NO: 1942
gacaauauccagugcagau

SEQ ID NO: 151235 - RNA, 19 nt, Artificial Sequence
  Description of Artificial Sequence: Synthetic oligonucleotide
  Antisense strand to SEQ ID NO: 151234
aucugcacuggauauuguc

SEQ ID NO: 151236 - RNA, 19 nt, Artificial Sequence
  Description of Artificial Sequence: Synthetic oligonucleotide
  Sense strand starting at position 3532 of SEQ ID NO: 1942
gccacucuccaucauaguu

SEQ ID NO: 151237 - RNA, 19 nt, Artificial Sequence
  Description of Artificial Sequence: Synthetic oligonucleotide
  Antisense strand to SEQ ID NO: 151236
aacuaugauggagaguggc

SEQ ID NO: 151238 - RNA, 19 nt, Artificial Sequence
  Description of Artificial Sequence: Synthetic oligonucleotide
  Sense strand starting at position 3628 of SEQ ID NO: 1942
gaauaugggagacgugauu

SEQ ID NO: 151239 - RNA, 19 nt, Artificial Sequence
  Description of Artificial Sequence: Synthetic oligonucleotide
  Antisense strand to SEQ ID NO: 151238
aaucacgucucccauauuc

SEQ ID NO: 151240 - RNA, 19 nt, Artificial Sequence
  Description of Artificial Sequence: Synthetic oligonucleotide
  Sense strand starting at position 3659 of SEQ ID NO: 1942
ucugaauuaugcccauagu

SEQ ID NO: 151241 - RNA, 19 nt, Artificial Sequence
  Description of Artificial Sequence: Synthetic oligonucleotide
  Antisense strand to SEQ ID NO: 151240
acuaugggcauaauucaga

SEQ ID NO: 151242 - RNA, 19 nt, Artificial Sequence
  Description of Artificial Sequence: Synthetic oligonucleotide
  Sense strand starting at position 3660 of SEQ ID NO: 1942
cugaauuaugcccauaguc

SEQ ID NO: 151243 - RNA, 19 nt, Artificial Sequence
  Description of Artificial Sequence: Synthetic oligonucleotide
  Antisense strand to SEQ ID NO: 151242
gacuaugggcauaauucag

SEQ ID NO: 151244 - RNA, 19 nt, Artificial Sequence
  Description of Artificial Sequence: Synthetic oligonucleotide
  Sense strand starting at position 3703 of SEQ ID NO: 1942
gcaaacaucccuuguugaa

SEQ ID NO: 151245 - RNA, 19 nt, Artificial Sequence
  Description of Artificial Sequence: Synthetic oligonucleotide
  Antisense strand to SEQ ID NO: 151244
uucaacaagggauguuugc

SEQ ID NO: 151246 - RNA, 19 nt, Artificial Sequence
  Description of Artificial Sequence: Synthetic oligonucleotide
  Sense strand starting at position 3713 of SEQ ID NO: 1942
cuuguugaagaaugagagu

SEQ ID NO: 151247 - RNA, 19 nt, Artificial Sequence
  Description of Artificial Sequence: Synthetic oligonucleotide
  Antisense strand to SEQ ID NO: 151246
acucucauucuucaacaag

SEQ ID NO: 151248 - RNA, 19 nt, Artificial Sequence
  Description of Artificial Sequence: Synthetic oligonucleotide
  Sense strand starting at position 3820 of SEQ ID NO: 1942
cuuacaagcugauuaguau

SEQ ID NO: 151249 - RNA, 19 nt, Artificial Sequence
  Description of Artificial Sequence: Synthetic oligonucleotide
  Antisense strand to SEQ ID NO: 151248
auacuaaucagcuuguaag

SEQ ID NO: 151250 - RNA, 19 nt, Artificial Sequence
  Description of Artificial Sequence: Synthetic oligonucleotide
  Sense strand starting at position 3821 of SEQ ID NO: 1942
uuacaagcugauuaguauu

SEQ ID NO: 151251 - RNA, 19 nt, Artificial Sequence
  Description of Artificial Sequence: Synthetic oligonucleotide
  Antisense strand to SEQ ID NO: 151250
aauacuaaucagcuuguaa

SEQ ID NO: 151252 - RNA, 19 nt, Artificial Sequence
  Description of Artificial Sequence: Synthetic oligonucleotide
  Sense strand starting at position 3827 of SEQ ID NO: 1942
gcugauuaguauuccuaua

SEQ ID NO: 151253 - RNA, 19 nt, Artificial Sequence
  Description of Artificial Sequence: Synthetic oligonucleotide
  Antisense strand to SEQ ID NO: 151252
uauaggaauacuaaucagc

SEQ ID NO: 151254 - RNA, 19 nt, Artificial Sequence
  Description of Artificial Sequence: Synthetic oligonucleotide
  Sense strand starting at position 3829 of SEQ ID NO: 1942
ugauuaguauuccuauaga

SEQ ID NO: 151255 - RNA, 19 nt, Artificial Sequence
  Description of Artificial Sequence: Synthetic oligonucleotide
  Antisense strand to SEQ ID NO: 151254
ucuauaggaauacuaauca

SEQ ID NO: 151256 - RNA, 19 nt, Artificial Sequence
  Description of Artificial Sequence: Synthetic oligonucleotide
  Sense strand starting at position 3962 of SEQ ID NO: 1942
uuaugauguaacuggaugu

SEQ ID NO: 151257 - RNA, 19 nt, Artificial Sequence
  Description of Artificial Sequence: Synthetic oligonucleotide
  Antisense strand to SEQ ID NO: 151256
acauccaguuacaucauaa

SEQ ID NO: 151258 - RNA, 19 nt, Artificial Sequence
  Description of Artificial Sequence: Synthetic oligonucleotide
  Sense strand starting at position 159 of SEQ ID NO: 1943
cuguaugagccauaguucu

SEQ ID NO: 151259 - RNA, 19 nt, Artificial Sequence
  Description of Artificial Sequence: Synthetic oligonucleotide
  Antisense strand to SEQ ID NO: 151258
agaacuauggcucauacag

SEQ ID NO: 151260 - RNA, 19 nt, Artificial Sequence
  Description of Artificial Sequence: Synthetic oligonucleotide
  Sense strand starting at position 287 of SEQ ID NO: 1943
agaccuuagugaucaucua

SEQ ID NO: 151261 - RNA, 19 nt, Artificial Sequence
  Description of Artificial Sequence: Synthetic oligonucleotide
  Antisense strand to SEQ ID NO: 151260
uagaugaucacuaaggucu

SEQ ID NO: 151262 - RNA, 19 nt, Artificial Sequence
  Description of Artificial Sequence: Synthetic oligonucleotide
  Sense strand starting at position 295 of SEQ ID NO: 1943
gugaucaucuagucccuca

SEQ ID NO: 151263 - RNA, 19 nt, Artificial Sequence
  Description of Artificial Sequence: Synthetic oligonucleotide
  Antisense strand to SEQ ID NO: 151262
ugagggacuagaugaucac

SEQ ID NO: 151264 - RNA, 19 nt, Artificial Sequence
  Description of Artificial Sequence: Synthetic oligonucleotide
  Sense strand starting at position 322 of SEQ ID NO: 1943
gaaucuagagucugcuuga

SEQ ID NO: 151265 - RNA, 19 nt, Artificial Sequence
  Description of Artificial Sequence: Synthetic oligonucleotide
  Antisense strand to SEQ ID NO: 151264
ucaagcagacucuagauuc

SEQ ID NO: 151266 - RNA, 19 nt, Artificial Sequence
  Description of Artificial Sequence: Synthetic oligonucleotide
  Sense strand starting at position 323 of SEQ ID NO: 1943
aaucuagagucugcuugaa

SEQ ID NO: 151267 - RNA, 19 nt, Artificial Sequence
  Description of Artificial Sequence: Synthetic oligonucleotide
  Antisense strand to SEQ ID NO: 151266
uucaagcagacucuagauu

SEQ ID NO: 151268 - RNA, 19 nt, Artificial Sequence
  Description of Artificial Sequence: Synthetic oligonucleotide
  Sense strand starting at position 325 of SEQ ID NO: 1943
ucuagagucugcuugaaua

SEQ ID NO: 151269 - RNA, 19 nt, Artificial Sequence
  Description of Artificial Sequence: Synthetic oligonucleotide
  Antisense strand to SEQ ID NO: 151268
uauucaagcagacucuaga

SEQ ID NO: 151270 - RNA, 19 nt, Artificial Sequence
  Description of Artificial Sequence: Synthetic oligonucleotide
  Sense strand starting at position 333 of SEQ ID NO: 1943
cugcuugaauaccuuuaga

SEQ ID NO: 151271 - RNA, 19 nt, Artificial Sequence
  Description of Artificial Sequence: Synthetic oligonucleotide
  Antisense strand to SEQ ID NO: 151270
ucuaaagguauucaagcag

SEQ ID NO: 151272 - RNA, 19 nt, Artificial Sequence
  Description of Artificial Sequence: Synthetic oligonucleotide
  Sense strand starting at position 414 of SEQ ID NO: 1943
uugaauuucugucagagaa

SEQ ID NO: 151273 - RNA, 19 nt, Artificial Sequence
  Description of Artificial Sequence: Synthetic oligonucleotide
  Antisense strand to SEQ ID NO: 151272
uucucugacagaaauucaa

SEQ ID NO: 151274 - RNA, 19 nt, Artificial Sequence
  Description of Artificial Sequence: Synthetic oligonucleotide
  Sense strand starting at position 416 of SEQ ID NO: 1943
gaauuucugucagagaacu

SEQ ID NO: 151275 - RNA, 19 nt, Artificial Sequence
  Description of Artificial Sequence: Synthetic oligonucleotide
  Antisense strand to SEQ ID NO: 151274
aguucucugacagaaauuc

SEQ ID NO: 151276 - RNA, 19 nt, Artificial Sequence
  Description of Artificial Sequence: Synthetic oligonucleotide
  Sense strand starting at position 471 of SEQ ID NO: 1943
uccaauuccuuagugagga

SEQ ID NO: 151277 - RNA, 19 nt, Artificial Sequence
  Description of Artificial Sequence: Synthetic oligonucleotide
  Antisense strand to SEQ ID NO: 151276
uccucacuaaggaauugga

SEQ ID NO: 151278 - RNA, 19 nt, Artificial Sequence
  Description of Artificial Sequence: Synthetic oligonucleotide
  Sense strand starting at position 897 of SEQ ID NO: 1943
cuucuaauccagugggaca

SEQ ID NO: 151279 - RNA, 19 nt, Artificial Sequence
  Description of Artificial Sequence: Synthetic oligonucleotide
  Antisense strand to SEQ ID NO: 151278
ugucccacuggauuagaag

SEQ ID NO: 151280 - RNA, 19 nt, Artificial Sequence
  Description of Artificial Sequence: Synthetic oligonucleotide
  Sense strand starting at position 899 of SEQ ID NO: 1943
ucuaauccagugggacaaa

SEQ ID NO: 151281 - RNA, 19 nt, Artificial Sequence
  Description of Artificial Sequence: Synthetic oligonucleotide
  Antisense strand to SEQ ID NO: 151280
uuugucccacuggauuaga

SEQ ID NO: 151282 - RNA, 19 nt, Artificial Sequence
  Description of Artificial Sequence: Synthetic oligonucleotide
  Sense strand starting at position 1137 of SEQ ID NO: 1943
agccucucucagggaacua

SEQ ID NO: 151283 - RNA, 19 nt, Artificial Sequence
  Description of Artificial Sequence: Synthetic oligonucleotide
  Antisense strand to SEQ ID NO: 151282
uaguucccugagagaggcu

SEQ ID NO: 151284 - RNA, 19 nt, Artificial Sequence
  Description of Artificial Sequence: Synthetic oligonucleotide
  Sense strand starting at position 1590 of SEQ ID NO: 1943
cggcucuucccaggaucaa

SEQ ID NO: 151285 - RNA, 19 nt, Artificial Sequence
  Description of Artificial Sequence: Synthetic oligonucleotide
  Antisense strand to SEQ ID NO: 151284
uugauccugggaagagccg

SEQ ID NO: 151286 - RNA, 19 nt, Artificial Sequence
  Description of Artificial Sequence: Synthetic oligonucleotide
  Sense strand starting at position 1591 of SEQ ID NO: 1943
ggcucuucccaggaucaaa

SEQ ID NO: 151287 - RNA, 19 nt, Artificial Sequence
  Description of Artificial Sequence: Synthetic oligonucleotide
  Antisense strand to SEQ ID NO: 151286
uuugauccugggaagagcc

SEQ ID NO: 151288 - RNA, 19 nt, Artificial Sequence
  Description of Artificial Sequence: Synthetic oligonucleotide
  Sense strand starting at position 1982 of SEQ ID NO: 1943
acgugauaccucuaaccca

SEQ ID NO: 151289 - RNA, 19 nt, Artificial Sequence
  Description of Artificial Sequence: Synthetic oligonucleotide
  Antisense strand to SEQ ID NO: 151288
uggguuagagguaucacgu

SEQ ID NO: 151290 - RNA, 19 nt, Artificial Sequence
  Description of Artificial Sequence: Synthetic oligonucleotide
  Sense strand starting at position 2178 of SEQ ID NO: 1943
cugaguuucuggcucuaua

SEQ ID NO: 151291 - RNA, 19 nt, Artificial Sequence
  Description of Artificial Sequence: Synthetic oligonucleotide
  Antisense strand to SEQ ID NO: 151290
uauagagccagaaacucag

SEQ ID NO: 151292 - RNA, 19 nt, Artificial Sequence
  Description of Artificial Sequence: Synthetic oligonucleotide
  Sense strand starting at position 2207 of SEQ ID NO: 1943
gccuaaugacucuaggagu

SEQ ID NO: 151293 - RNA, 19 nt, Artificial Sequence
  Description of Artificial Sequence: Synthetic oligonucleotide
  Antisense strand to SEQ ID NO: 151292
acuccuagagucauuaggc

SEQ ID NO: 151294 - RNA, 19 nt, Artificial Sequence
  Description of Artificial Sequence: Synthetic oligonucleotide
  Sense strand starting at position 2221 of SEQ ID NO: 1943
ggagucagaucuuucccaa

SEQ ID NO: 151295 - RNA, 19 nt, Artificial Sequence
  Description of Artificial Sequence: Synthetic oligonucleotide
  Antisense strand to SEQ ID NO: 151294
uugggaaagaucugacucc

SEQ ID NO: 151296 - RNA, 19 nt, Artificial Sequence
  Description of Artificial Sequence: Synthetic oligonucleotide
  Sense strand starting at position 2418 of SEQ ID NO: 1943
cucagaaaguuugccaaua

SEQ ID NO: 151297 - RNA, 19 nt, Artificial Sequence
  Description of Artificial Sequence: Synthetic oligonucleotide
  Antisense strand to SEQ ID NO: 151296
uauuggcaaacuuucugag

SEQ ID NO: 151298 - RNA, 19 nt, Artificial Sequence
  Description of Artificial Sequence: Synthetic oligonucleotide
  Sense strand starting at position 2419 of SEQ ID NO: 1943
ucagaaaguuugccaauag

SEQ ID NO: 151299 - RNA, 19 nt, Artificial Sequence
  Description of Artificial Sequence: Synthetic oligonucleotide
  Antisense strand to SEQ ID NO: 151298
cuauuggcaaacuuucuga

SEQ ID NO: 151300 - RNA, 19 nt, Artificial Sequence
  Description of Artificial Sequence: Synthetic oligonucleotide
  Sense strand starting at position 2487 of SEQ ID NO: 1943
ggucaaaugaagcacguua

SEQ ID NO: 151301 - RNA, 19 nt, Artificial Sequence
  Description of Artificial Sequence: Synthetic oligonucleotide
  Antisense strand to SEQ ID NO: 151300
uaacgugcuucauuugacc

SEQ ID NO: 151302 - RNA, 19 nt, Artificial Sequence
  Description of Artificial Sequence: Synthetic oligonucleotide
  Sense strand starting at position 2489 of SEQ ID NO: 1943
ucaaaugaagcacguuauu

SEQ ID NO: 151303 - RNA, 19 nt, Artificial Sequence
  Description of Artificial Sequence: Synthetic oligonucleotide
  Antisense strand to SEQ ID NO: 151302
aauaacgugcuucauuuga

SEQ ID NO: 151304 - RNA, 19 nt, Artificial Sequence
  Description of Artificial Sequence: Synthetic oligonucleotide
  Sense strand starting at position 2611 of SEQ ID NO: 1943
ggguggaaacuguguggau

SEQ ID NO: 151305 - RNA, 19 nt, Artificial Sequence
  Description of Artificial Sequence: Synthetic oligonucleotide
  Antisense strand to SEQ ID NO: 151304
auccacacaguuuccaccc

SEQ ID NO: 151306 - RNA, 19 nt, Artificial Sequence
  Description of Artificial Sequence: Synthetic oligonucleotide
  Sense strand starting at position 2634 of SEQ ID NO: 1943
uaguauuauguacaaggca

SEQ ID NO: 151307 - RNA, 19 nt, Artificial Sequence
  Description of Artificial Sequence: Synthetic oligonucleotide
  Antisense strand to SEQ ID NO: 151306
ugccuuguacauaauacua

SEQ ID NO: 151308 - RNA, 19 nt, Artificial Sequence
  Description of Artificial Sequence: Synthetic oligonucleotide
  Sense strand starting at position 2744 of SEQ ID NO: 1943
uggcucguucucuuguaua

SEQ ID NO: 151309 - RNA, 19 nt, Artificial Sequence
  Description of Artificial Sequence: Synthetic oligonucleotide
  Antisense strand to SEQ ID NO: 151308
uauacaagagaacgagcca

SEQ ID NO: 151310 - RNA, 19 nt, Artificial Sequence
  Description of Artificial Sequence: Synthetic oligonucleotide
  Sense strand starting at position 2931 of SEQ ID NO: 1943
gccgcuuagcugguucaua

SEQ ID NO: 151311 - RNA, 19 nt, Artificial Sequence
  Description of Artificial Sequence: Synthetic oligonucleotide
  Antisense strand to SEQ ID NO: 151310
uaugaaccagcuaagcggc

SEQ ID NO: 151312 - RNA, 19 nt, Artificial Sequence
  Description of Artificial Sequence: Synthetic oligonucleotide
  Sense strand starting at position 3154 of SEQ ID NO: 1943
ggaccaacguuucugauau

SEQ ID NO: 151313 - RNA, 19 nt, Artificial Sequence
  Description of Artificial Sequence: Synthetic oligonucleotide
  Antisense strand to SEQ ID NO: 151312
auaucagaaacguuggucc

SEQ ID NO: 151314 - RNA, 19 nt, Artificial Sequence
  Description of Artificial Sequence: Synthetic oligonucleotide
  Sense strand starting at position 3223 of SEQ ID NO: 1943
aguucuuucuacuuguaua

SEQ ID NO: 151315 - RNA, 19 nt, Artificial Sequence
  Description of Artificial Sequence: Synthetic oligonucleotide
  Antisense strand to SEQ ID NO: 151314
uauacaaguagaaagaacu

SEQ ID NO: 151316 - RNA, 19 nt, Artificial Sequence
  Description of Artificial Sequence: Synthetic oligonucleotide
  Sense strand starting at position 3233 of SEQ ID NO: 1943
acuuguauauccuugucaa

SEQ ID NO: 151317 - RNA, 19 nt, Artificial Sequence
  Description of Artificial Sequence: Synthetic oligonucleotide
  Antisense strand to SEQ ID NO: 151316
uugacaaggauauacaagu

SEQ ID NO: 151318 - RNA, 19 nt, Artificial Sequence
  Description of Artificial Sequence: Synthetic oligonucleotide
  Sense strand starting at position 3234 of SEQ ID NO: 1943
cuuguauauccuugucaac

SEQ ID NO: 151319 - RNA, 19 nt, Artificial Sequence
  Description of Artificial Sequence: Synthetic oligonucleotide
  Antisense strand to SEQ ID NO: 151318
guugacaaggauauacaag

SEQ ID NO: 151320 - RNA, 19 nt, Artificial Sequence
  Description of Artificial Sequence: Synthetic oligonucleotide
  Sense strand starting at position 3236 of SEQ ID NO: 1943
uguauauccuugucaacuu

SEQ ID NO: 151321 - RNA, 19 nt, Artificial Sequence
  Description of Artificial Sequence: Synthetic oligonucleotide
  Antisense strand to SEQ ID NO: 151320
aaguugacaaggauauaca

SEQ ID NO: 151322 - RNA, 19 nt, Artificial Sequence
  Description of Artificial Sequence: Synthetic oligonucleotide
  Sense strand starting at position 3333 of SEQ ID NO: 1943
ccaggacauugcuuugauc

SEQ ID NO: 151323 - RNA, 19 nt, Artificial Sequence
  Description of Artificial Sequence: Synthetic oligonucleotide
  Antisense strand to SEQ ID NO: 151322
gaucaaagcaauguccugg

SEQ ID NO: 151324 - RNA, 19 nt, Artificial Sequence
  Description of Artificial Sequence: Synthetic oligonucleotide
  Sense strand starting at position 3335 of SEQ ID NO: 1943
aggacauugcuuugaucuc

SEQ ID NO: 151325 - RNA, 19 nt, Artificial Sequence
  Description of Artificial Sequence: Synthetic oligonucleotide
  Antisense strand to SEQ ID NO: 151324
gagaucaaagcaauguccu

SEQ ID NO: 151326 - RNA, 19 nt, Artificial Sequence
  Description of Artificial Sequence: Synthetic oligonucleotide
  Sense strand starting at position 3414 of SEQ ID NO: 1943
guuuccucuguugaccaaa

SEQ ID NO: 151327 - RNA, 19 nt, Artificial Sequence
  Description of Artificial Sequence: Synthetic oligonucleotide
  Antisense strand to SEQ ID NO: 151326
uuuggucaacagaggaaac

SEQ ID NO: 151328 - RNA, 19 nt, Artificial Sequence
  Description of Artificial Sequence: Synthetic oligonucleotide
  Sense strand starting at position 3417 of SEQ ID NO: 1943
uccucuguugaccaaagau

SEQ ID NO: 151329 - RNA, 19 nt, Artificial Sequence
  Description of Artificial Sequence: Synthetic oligonucleotide
  Antisense strand to SEQ ID NO: 151328
aucuuuggucaacagagga

SEQ ID NO: 151330 - RNA, 19 nt, Artificial Sequence
  Description of Artificial Sequence: Synthetic oligonucleotide
  Sense strand starting at position 3473 of SEQ ID NO: 1943
ucugcuugugaagagcauu

SEQ ID NO: 151331 - RNA, 19 nt, Artificial Sequence
  Description of Artificial Sequence: Synthetic oligonucleotide
  Antisense strand to SEQ ID NO: 151330
aaugcucuucacaagcaga

SEQ ID NO: 151332 - RNA, 19 nt, Artificial Sequence
  Description of Artificial Sequence: Synthetic oligonucleotide
  Sense strand starting at position 3685 of SEQ ID NO: 1943
gaaggucacccuuguuaca

SEQ ID NO: 151333 - RNA, 19 nt, Artificial Sequence
  Description of Artificial Sequence: Synthetic oligonucleotide
  Antisense strand to SEQ ID NO: 151332
uguaacaagggugaccuuc

SEQ ID NO: 151334 - RNA, 19 nt, Artificial Sequence
  Description of Artificial Sequence: Synthetic oligonucleotide
  Sense strand starting at position 3687 of SEQ ID NO: 1943
aggucacccuuguuacaau

SEQ ID NO: 151335 - RNA, 19 nt, Artificial Sequence
  Description of Artificial Sequence: Synthetic oligonucleotide
  Antisense strand to SEQ ID NO: 151334
auuguaacaagggugaccu

SEQ ID NO: 151336 - RNA, 19 nt, Artificial Sequence
  Description of Artificial Sequence: Synthetic oligonucleotide
  Sense strand starting at position 3777 of SEQ ID NO: 1943
uagaccaauucuguggaga

SEQ ID NO: 151337 - RNA, 19 nt, Artificial Sequence
  Description of Artificial Sequence: Synthetic oligonucleotide
  Antisense strand to SEQ ID NO: 151336
ucuccacagaauuggucua

SEQ ID NO: 151338 - RNA, 19 nt, Artificial Sequence
  Description of Artificial Sequence: Synthetic oligonucleotide
  Sense strand starting at position 3911 of SEQ ID NO: 1944
guacuuccugcagaaccau

SEQ ID NO: 151339 - RNA, 19 nt, Artificial Sequence
  Description of Artificial Sequence: Synthetic oligonucleotide
  Antisense strand to SEQ ID NO: 151338
augguucugcaggaaguac

SEQ ID NO: 151340 - RNA, 19 nt, Artificial Sequence
  Description of Artificial Sequence: Synthetic oligonucleotide
  Sense strand starting at position 3824 of SEQ ID NO: 1944
gugauacauuggcuccauu

SEQ ID NO: 151341 - RNA, 19 nt, Artificial Sequence
  Description of Artificial Sequence: Synthetic oligonucleotide
  Antisense strand to SEQ ID NO: 151340
aauggagccaauguaucac

SEQ ID NO: 151342 - RNA, 19 nt, Artificial Sequence
  Description of Artificial Sequence: Synthetic oligonucleotide
  Sense strand starting at position 3823 of SEQ ID NO: 1944
ugugauacauuggcuccau

SEQ ID NO: 151343 - RNA, 19 nt, Artificial Sequence
  Description of Artificial Sequence: Synthetic oligonucleotide
  Antisense strand to SEQ ID NO: 151342
auggagccaauguaucaca

SEQ ID NO: 151344 - RNA, 19 nt, Artificial Sequence
  Description of Artificial Sequence: Synthetic oligonucleotide
  Sense strand starting at position 3767 of SEQ ID NO: 1944
agagcugguaguugaaaga

SEQ ID NO: 151345 - RNA, 19 nt, Artificial Sequence
  Description of Artificial Sequence: Synthetic oligonucleotide
  Antisense strand to SEQ ID NO: 151344
ucuuucaacuaccagcucu

SEQ ID NO: 151346 - RNA, 19 nt, Artificial Sequence
  Description of Artificial Sequence: Synthetic oligonucleotide
  Sense strand starting at position 3730 of SEQ ID NO: 1944
ggauaaugaguauguucuc

SEQ ID NO: 151347 - RNA, 19 nt, Artificial Sequence
  Description of Artificial Sequence: Synthetic oligonucleotide
  Antisense strand to SEQ ID NO: 151346
gagaacauacucauuaucc

SEQ ID NO: 151348 - RNA, 19 nt, Artificial Sequence
  Description of Artificial Sequence: Synthetic oligonucleotide
  Sense strand starting at position 3727 of SEQ ID NO: 1944
ccaggauaaugaguauguu

SEQ ID NO: 151349 - RNA, 19 nt, Artificial Sequence
  Description of Artificial Sequence: Synthetic oligonucleotide
  Antisense strand to SEQ ID NO: 151348
aacauacucauuauccugg

SEQ ID NO: 151350 - RNA, 19 nt, Artificial Sequence
  Description of Artificial Sequence: Synthetic oligonucleotide
  Sense strand starting at position 3149 of SEQ ID NO: 1944
agcacuugguauucucaga

SEQ ID NO: 151351 - RNA, 19 nt, Artificial Sequence
  Description of Artificial Sequence: Synthetic oligonucleotide
  Antisense strand to SEQ ID NO: 151350
ucugagaauaccaagugcu

SEQ ID NO: 151352 - RNA, 19 nt, Artificial Sequence
  Description of Artificial Sequence: Synthetic oligonucleotide
  Sense strand starting at position 3044 of SEQ ID NO: 1944
gugcuagaauauccauauu

SEQ ID NO: 151353 - RNA, 19 nt, Artificial Sequence
  Description of Artificial Sequence: Synthetic oligonucleotide
  Antisense strand to SEQ ID NO: 151352
aauauggauauucuagcac

SEQ ID NO: 151354 - RNA, 19 nt, Artificial Sequence
  Description of Artificial Sequence: Synthetic oligonucleotide
  Sense strand starting at position 3012 of SEQ ID NO: 1944
uauugaauaugugucagga

SEQ ID NO: 151355 - RNA, 19 nt, Artificial Sequence
  Description of Artificial Sequence: Synthetic oligonucleotide
  Antisense strand to SEQ ID NO: 151354
uccugacacauauucaaua

SEQ ID NO: 151356 - RNA, 19 nt, Artificial Sequence
  Description of Artificial Sequence: Synthetic oligonucleotide
  Sense strand starting at position 3007 of SEQ ID NO: 1944
aaguguauugaauaugugu

SEQ ID NO: 151357 - RNA, 19 nt, Artificial Sequence
  Description of Artificial Sequence: Synthetic oligonucleotide
  Antisense strand to SEQ ID NO: 151356
acacauauucaauacacuu

SEQ ID NO: 151358 - RNA, 19 nt, Artificial Sequence
  Description of Artificial Sequence: Synthetic oligonucleotide
  Sense strand starting at position 2816 of SEQ ID NO: 1944
gugaacuuauucccaaaug

SEQ ID NO: 151359 - RNA, 19 nt, Artificial Sequence
  Description of Artificial Sequence: Synthetic oligonucleotide
  Antisense strand to SEQ ID NO: 151358
cauuugggaauaaguucac

SEQ ID NO: 151360 - RNA, 19 nt, Artificial Sequence
  Description of Artificial Sequence: Synthetic oligonucleotide
  Sense strand starting at position 2814 of SEQ ID NO: 1944
ucgugaacuuauucccaaa

SEQ ID NO: 151361 - RNA, 19 nt, Artificial Sequence
  Description of Artificial Sequence: Synthetic oligonucleotide
  Antisense strand to SEQ ID NO: 151360
uuugggaauaaguucacga

SEQ ID NO: 151362 - RNA, 19 nt, Artificial Sequence
  Description of Artificial Sequence: Synthetic oligonucleotide
  Sense strand starting at position 2806 of SEQ ID NO: 1944
ucaugaugucgugaacuua

SEQ ID NO: 151363 - RNA, 19 nt, Artificial Sequence
  Description of Artificial Sequence: Synthetic oligonucleotide
  Antisense strand to SEQ ID NO: 151362
uaaguucacgacaucauga

SEQ ID NO: 151364 - RNA, 19 nt, Artificial Sequence
  Description of Artificial Sequence: Synthetic oligonucleotide
  Sense strand starting at position 2662 of SEQ ID NO: 1944
cggccacuugccugaauuu

SEQ ID NO: 151365 - RNA, 19 nt, Artificial Sequence
  Description of Artificial Sequence: Synthetic oligonucleotide
  Antisense strand to SEQ ID NO: 151364
aaauucaggcaaguggccg

SEQ ID NO: 151366 - RNA, 19 nt, Artificial Sequence
  Description of Artificial Sequence: Synthetic oligonucleotide
  Sense strand starting at position 2528 of SEQ ID NO: 1944
ugaaauauaugucuugcaa

SEQ ID NO: 151367 - RNA, 19 nt, Artificial Sequence
  Description of Artificial Sequence: Synthetic oligonucleotide
  Antisense strand to SEQ ID NO: 151366
uugcaagacauauauuuca

SEQ ID NO: 151368 - RNA, 19 nt, Artificial Sequence
  Description of Artificial Sequence: Synthetic oligonucleotide
  Sense strand starting at position 2063 of SEQ ID NO: 1944
gagcaaagagugcgagaaa

SEQ ID NO: 151369 - RNA, 19 nt, Artificial Sequence
  Description of Artificial Sequence: Synthetic oligonucleotide
  Antisense strand to SEQ ID NO: 151368
uuucucgcacucuuugcuc

SEQ ID NO: 151370 - RNA, 19 nt, Artificial Sequence
  Description of Artificial Sequence: Synthetic oligonucleotide
  Sense strand starting at position 1306 of SEQ ID NO: 1944
auggcaguauuugaaacau

SEQ ID NO: 151371 - RNA, 19 nt, Artificial Sequence
  Description of Artificial Sequence: Synthetic oligonucleotide
  Antisense strand to SEQ ID NO: 151370
auguuucaaauacugccau

SEQ ID NO: 151372 - RNA, 19 nt, Artificial Sequence
  Description of Artificial Sequence: Synthetic oligonucleotide
  Sense strand starting at position 976 of SEQ ID NO: 1944
agacacugucaguacaacu

SEQ ID NO: 151373 - RNA, 19 nt, Artificial Sequence
  Description of Artificial Sequence: Synthetic oligonucleotide
  Antisense strand to SEQ ID NO: 151372
aguuguacugacagugucu

SEQ ID NO: 151374 - RNA, 19 nt, Artificial Sequence
  Description of Artificial Sequence: Synthetic oligonucleotide
  Sense strand starting at position 925 of SEQ ID NO: 1944
gcuggaguauucuuacaca

SEQ ID NO: 151375 - RNA, 19 nt, Artificial Sequence
  Description of Artificial Sequence: Synthetic oligonucleotide
  Antisense strand to SEQ ID NO: 151374
uguguaagaauacuccagc

SEQ ID NO: 151376 - RNA, 19 nt, Artificial Sequence
  Description of Artificial Sequence: Synthetic oligonucleotide
  Sense strand starting at position 917 of SEQ ID NO: 1944
ggaagacugcuggaguauu

SEQ ID NO: 151377 - RNA, 19 nt, Artificial Sequence
  Description of Artificial Sequence: Synthetic oligonucleotide
  Antisense strand to SEQ ID NO: 151376
aauacuccagcagucuucc

SEQ ID NO: 151378 - RNA, 19 nt, Artificial Sequence
  Description of Artificial Sequence: Synthetic oligonucleotide
  Sense strand starting at position 877 of SEQ ID NO: 1944
gcgucuaaaccagaaauac

SEQ ID NO: 151379 - RNA, 19 nt, Artificial Sequence
  Description of Artificial Sequence: Synthetic oligonucleotide
  Antisense strand to SEQ ID NO: 151378
guauuucugguuuagacgc

SEQ ID NO: 151380 - RNA, 19 nt, Artificial Sequence
  Description of Artificial Sequence: Synthetic oligonucleotide
  Sense strand starting at position 858 of SEQ ID NO: 1944
augcuuagagaauacguaa

SEQ ID NO: 151381 - RNA, 19 nt, Artificial Sequence
  Description of Artificial Sequence: Synthetic oligonucleotide
  Antisense strand to SEQ ID NO: 151380
uuacguauucucuaagcau

SEQ ID NO: 151382 - RNA, 19 nt, Artificial Sequence
  Description of Artificial Sequence: Synthetic oligonucleotide
  Sense strand starting at position 850 of SEQ ID NO: 1944
cuaccugaaugcuuagaga

SEQ ID NO: 151383 - RNA, 19 nt, Artificial Sequence
  Description of Artificial Sequence: Synthetic oligonucleotide
  Antisense strand to SEQ ID NO: 151382
ucucuaagcauucagguag

SEQ ID NO: 151384 - RNA, 19 nt, Artificial Sequence
  Description of Artificial Sequence: Synthetic oligonucleotide
  Sense strand starting at position 816 of SEQ ID NO: 1944
cuaccugaaugcuuagauu

SEQ ID NO: 151385 - RNA, 19 nt, Artificial Sequence
  Description of Artificial Sequence: Synthetic oligonucleotide
  Antisense strand to SEQ ID NO: 151384
aaucuaagcauucagguag

SEQ ID NO: 151386 - RNA, 19 nt, Artificial Sequence
  Description of Artificial Sequence: Synthetic oligonucleotide
  Sense strand starting at position 721 of SEQ ID NO: 1944
uggacaacgucacucaaua

SEQ ID NO: 151387 - RNA, 19 nt, Artificial Sequence
  Description of Artificial Sequence: Synthetic oligonucleotide
  Antisense strand to SEQ ID NO: 151386
uauugagugacguugucca

SEQ ID NO: 151388 - RNA, 19 nt, Artificial Sequence
  Description of Artificial Sequence: Synthetic oligonucleotide
  Sense strand starting at position 709 of SEQ ID NO: 1944
caggucuuagcauggacaa

SEQ ID NO: 151389 - RNA, 19 nt, Artificial Sequence
  Description of Artificial Sequence: Synthetic oligonucleotide
  Antisense strand to SEQ ID NO: 151388
uuguccaugcuaagaccug

SEQ ID NO: 151390 - RNA, 19 nt, Artificial Sequence
  Description of Artificial Sequence: Synthetic oligonucleotide
  Sense strand starting at position 587 of SEQ ID NO: 1944
gggaguuaauagccaaauu

SEQ ID NO: 151391 - RNA, 19 nt, Artificial Sequence
  Description of Artificial Sequence: Synthetic oligonucleotide
  Antisense strand to SEQ ID NO: 151390
aauuuggcuauuaacuccc

SEQ ID NO: 151392 - RNA, 19 nt, Artificial Sequence
  Description of Artificial Sequence: Synthetic oligonucleotide
  Sense strand starting at position 576 of SEQ ID NO: 1944
gggaaaucuacgggaguua

SEQ ID NO: 151393 - RNA, 19 nt, Artificial Sequence
  Description of Artificial Sequence: Synthetic oligonucleotide
  Antisense strand to SEQ ID NO: 151392
uaacucccguagauuuccc

SEQ ID NO: 151394 - RNA, 19 nt, Artificial Sequence
  Description of Artificial Sequence: Synthetic oligonucleotide
  Sense strand starting at position 574 of SEQ ID NO: 1944
aagggaaaucuacgggagu

SEQ ID NO: 151395 - RNA, 19 nt, Artificial Sequence
  Description of Artificial Sequence: Synthetic oligonucleotide
  Antisense strand to SEQ ID NO: 151394
acucccguagauuucccuu

SEQ ID NO: 151396 - RNA, 19 nt, Artificial Sequence
  Description of Artificial Sequence: Synthetic oligonucleotide
  Sense strand starting at position 562 of SEQ ID NO: 1944
gggugucuguauaagggaa

SEQ ID NO: 151397 - RNA, 19 nt, Artificial Sequence
  Description of Artificial Sequence: Synthetic oligonucleotide
  Antisense strand to SEQ ID NO: 151396
uucccuuauacagacaccc

SEQ ID NO: 151398 - RNA, 19 nt, Artificial Sequence
  Description of Artificial Sequence: Synthetic oligonucleotide
  Sense strand starting at position 503 of SEQ ID NO: 1944
cagggcauuguaugaaagu

SEQ ID NO: 151399 - RNA, 19 nt, Artificial Sequence
  Description of Artificial Sequence: Synthetic oligonucleotide
  Antisense strand to SEQ ID NO: 151398
acuuucauacaaugcccug

SEQ ID NO: 151400 - RNA, 19 nt, Artificial Sequence
  Description of Artificial Sequence: Synthetic oligonucleotide
  Sense strand starting at position 462 of SEQ ID NO: 1944
uggugucuucuguacauaa

SEQ ID NO: 151401 - RNA, 19 nt, Artificial Sequence
  Description of Artificial Sequence: Synthetic oligonucleotide
  Antisense strand to SEQ ID NO: 151400
uuauguacagaagacacca

SEQ ID NO: 151402 - RNA, 19 nt, Artificial Sequence
  Description of Artificial Sequence: Synthetic oligonucleotide
  Sense strand starting at position 457 of SEQ ID NO: 1944
cuacguggugucuucugua

SEQ ID NO: 151403 - RNA, 19 nt, Artificial Sequence
  Description of Artificial Sequence: Synthetic oligonucleotide
  Antisense strand to SEQ ID NO: 151402
uacagaagacaccacguag

SEQ ID NO: 151404 - RNA, 19 nt, Artificial Sequence
  Description of Artificial Sequence: Synthetic oligonucleotide
  Sense strand starting at position 411 of SEQ ID NO: 1944
uuacguguugguaguguca

SEQ ID NO: 151405 - RNA, 19 nt, Artificial Sequence
  Description of Artificial Sequence: Synthetic oligonucleotide
  Antisense strand to SEQ ID NO: 151404
ugacacuaccaacacguaa

SEQ ID NO: 151406 - RNA, 19 nt, Artificial Sequence
  Description of Artificial Sequence: Synthetic oligonucleotide
  Sense strand starting at position 394 of SEQ ID NO: 1944
aagcucuuuggucagaauu

SEQ ID NO: 151407 - RNA, 19 nt, Artificial Sequence
  Description of Artificial Sequence: Synthetic oligonucleotide
  Antisense strand to SEQ ID NO: 151406
aauucugaccaaagagcuu

SEQ ID NO: 151408 - RNA, 19 nt, Artificial Sequence
  Description of Artificial Sequence: Synthetic oligonucleotide
  Sense strand starting at position 393 of SEQ ID NO: 1944
aaagcucuuuggucagaau

SEQ ID NO: 151409 - RNA, 19 nt, Artificial Sequence
  Description of Artificial Sequence: Synthetic oligonucleotide
  Antisense strand to SEQ ID NO: 151408
auucugaccaaagagcuuu

SEQ ID NO: 151410 - RNA, 19 nt, Artificial Sequence
  Description of Artificial Sequence: Synthetic oligonucleotide
  Sense strand starting at position 275 of SEQ ID NO: 1944
gggcauuauauaugauaag

SEQ ID NO: 151411 - RNA, 19 nt, Artificial Sequence
  Description of Artificial Sequence: Synthetic oligonucleotide
  Antisense strand to SEQ ID NO: 151410
cuuaucauauauaaugccc

SEQ ID NO: 151412 - RNA, 19 nt, Artificial Sequence
  Description of Artificial Sequence: Synthetic oligonucleotide
  Sense strand starting at position 233 of SEQ ID NO: 1944
ucaauaggugaagguauau

SEQ ID NO: 151413 - RNA, 19 nt, Artificial Sequence
  Description of Artificial Sequence: Synthetic oligonucleotide
  Antisense strand to SEQ ID NO: 151412
auauaccuucaccuauuga

SEQ ID NO: 151414 - RNA, 19 nt, Artificial Sequence
  Description of Artificial Sequence: Synthetic oligonucleotide
  Sense strand starting at position 230 of SEQ ID NO: 1944
guuucaauaggugaaggua

SEQ ID NO: 151415 - RNA, 19 nt, Artificial Sequence
  Description of Artificial Sequence: Synthetic oligonucleotide
  Antisense strand to SEQ ID NO: 151414
uaccuucaccuauugaaac

SEQ ID NO: 151416 - RNA, 19 nt, Artificial Sequence
  Description of Artificial Sequence: Synthetic oligonucleotide
  Sense strand starting at position 200 of SEQ ID NO: 1944
ggaauuaacuggcucaacu

SEQ ID NO: 151417 - RNA, 19 nt, Artificial Sequence
  Description of Artificial Sequence: Synthetic oligonucleotide
  Antisense strand to SEQ ID NO: 151416
aguugagccaguuaauucc

SEQ ID NO: 151418 - RNA, 19 nt, Artificial Sequence
  Description of Artificial Sequence: Synthetic oligonucleotide
  Sense strand starting at position 91 of SEQ ID NO: 1946
gaaauaggcuuagaaagau

SEQ ID NO: 151419 - RNA, 19 nt, Artificial Sequence
  Description of Artificial Sequence: Synthetic oligonucleotide
  Antisense strand to SEQ ID NO: 151418
aucuuucuaagccuauuuc

SEQ ID NO: 151420 - RNA, 19 nt, Artificial Sequence
  Description of Artificial Sequence: Synthetic oligonucleotide
  Sense strand starting at position 176 of SEQ ID NO: 1946
gucugacuccuauguccau

SEQ ID NO: 151421 - RNA, 19 nt, Artificial Sequence
  Description of Artificial Sequence: Synthetic oligonucleotide
  Antisense strand to SEQ ID NO: 151420
auggacauaggagucagac

SEQ ID NO: 151422 - RNA, 19 nt, Artificial Sequence
  Description of Artificial Sequence: Synthetic oligonucleotide
  Sense strand starting at position 375 of SEQ ID NO: 1946
uagaguaaagucugaguau

SEQ ID NO: 151423 - RNA, 19 nt, Artificial Sequence
  Description of Artificial Sequence: Synthetic oligonucleotide
  Antisense strand to SEQ ID NO: 151422
auacucagacuuuacucua

SEQ ID NO: 151424 - RNA, 19 nt, Artificial Sequence
  Description of Artificial Sequence: Synthetic oligonucleotide
  Sense strand starting at position 378 of SEQ ID NO: 1946
aguaaagucugaguauagc

SEQ ID NO: 151425 - RNA, 19 nt, Artificial Sequence
  Description of Artificial Sequence: Synthetic oligonucleotide
  Antisense strand to SEQ ID NO: 151424
gcuauacucagacuuuacu

SEQ ID NO: 151426 - RNA, 19 nt, Artificial Sequence
  Description of Artificial Sequence: Synthetic oligonucleotide
  Sense strand starting at position 491 of SEQ ID NO: 1946
ucuuuacaacccugugaag

SEQ ID NO: 151427 - RNA, 19 nt, Artificial Sequence
  Description of Artificial Sequence: Synthetic oligonucleotide
  Antisense strand to SEQ ID NO: 151426
cuucacaggguuguaaaga

SEQ ID NO: 151428 - RNA, 19 nt, Artificial Sequence
  Description of Artificial Sequence: Synthetic oligonucleotide
  Sense strand starting at position 493 of SEQ ID NO: 1946
uuuacaacccugugaagua

SEQ ID NO: 151429 - RNA, 19 nt, Artificial Sequence
  Description of Artificial Sequence: Synthetic oligonucleotide
  Antisense strand to SEQ ID NO: 151428
uacuucacaggguuguaaa

SEQ ID NO: 151430 - RNA, 19 nt, Artificial Sequence
  Description of Artificial Sequence: Synthetic oligonucleotide
  Sense strand starting at position 678 of SEQ ID NO: 1946
uaauauguugcaggaaaga

SEQ ID NO: 151431 - RNA, 19 nt, Artificial Sequence
  Description of Artificial Sequence: Synthetic oligonucleotide
  Antisense strand to SEQ ID NO: 151430
ucuuuccugcaacauauua

SEQ ID NO: 151432 - RNA, 19 nt, Artificial Sequence
  Description of Artificial Sequence: Synthetic oligonucleotide
  Sense strand starting at position 788 of SEQ ID NO: 1946
ugauacagguaucuggaua

SEQ ID NO: 151433 - RNA, 19 nt, Artificial Sequence
  Description of Artificial Sequence: Synthetic oligonucleotide
  Antisense strand to SEQ ID NO: 151432
uauccagauaccuguauca

SEQ ID NO: 151434 - RNA, 19 nt, Artificial Sequence
  Description of Artificial Sequence: Synthetic oligonucleotide
  Sense strand starting at position 849 of SEQ ID NO: 1946
aaauguuaagacugauguu

SEQ ID NO: 151435 - RNA, 19 nt, Artificial Sequence
  Description of Artificial Sequence: Synthetic oligonucleotide
  Antisense strand to SEQ ID NO: 151434
aacaucagucuuaacauuu

SEQ ID NO: 151436 - RNA, 19 nt, Artificial Sequence
  Description of Artificial Sequence: Synthetic oligonucleotide
  Sense strand starting at position 859 of SEQ ID NO: 1946
acugauguuuaugcaggaa

SEQ ID NO: 151437 - RNA, 19 nt, Artificial Sequence
  Description of Artificial Sequence: Synthetic oligonucleotide
  Antisense strand to SEQ ID NO: 151436
uuccugcauaaacaucagu

SEQ ID NO: 151438 - RNA, 19 nt, Artificial Sequence
  Description of Artificial Sequence: Synthetic oligonucleotide
  Sense strand starting at position 958 of SEQ ID NO: 1946
ugcaauuauuggucugacu

SEQ ID NO: 151439 - RNA, 19 nt, Artificial Sequence
  Description of Artificial Sequence: Synthetic oligonucleotide
  Antisense strand to SEQ ID NO: 151438
agucagaccaauaauugca

SEQ ID NO: 151440 - RNA, 19 nt, Artificial Sequence
  Description of Artificial Sequence: Synthetic oligonucleotide
  Sense strand starting at position 1235 of SEQ ID NO: 1946
uggucuguggccuacugau

SEQ ID NO: 151441 - RNA, 19 nt, Artificial Sequence
  Description of Artificial Sequence: Synthetic oligonucleotide
  Antisense strand to SEQ ID NO: 151440
aucaguaggccacagacca

SEQ ID NO: 151442 - RNA, 19 nt, Artificial Sequence
  Description of Artificial Sequence: Synthetic oligonucleotide
  Sense strand starting at position 1264 of SEQ ID NO: 1946
ugaugugacagcugagaug

SEQ ID NO: 151443 - RNA, 19 nt, Artificial Sequence
  Description of Artificial Sequence: Synthetic oligonucleotide
  Antisense strand to SEQ ID NO: 151442
caucucagcugucacauca

SEQ ID NO: 151444 - RNA, 19 nt, Artificial Sequence
  Description of Artificial Sequence: Synthetic oligonucleotide
  Sense strand starting at position 1335 of SEQ ID NO: 1946
gacagagacacguggaauu

SEQ ID NO: 151445 - RNA, 19 nt, Artificial Sequence
  Description of Artificial Sequence: Synthetic oligonucleotide
  Antisense strand to SEQ ID NO: 151444
aauuccacgugucucuguc

SEQ ID NO: 151446 - RNA, 19 nt, Artificial Sequence
  Description of Artificial Sequence: Synthetic oligonucleotide
  Sense strand starting at position 1484 of SEQ ID NO: 1946
guuggagcauaagucauua

SEQ ID NO: 151447 - RNA, 19 nt, Artificial Sequence
  Description of Artificial Sequence: Synthetic oligonucleotide
  Antisense strand to SEQ ID NO: 151446
uaaugacuuaugcuccaac

SEQ ID NO: 151448 - RNA, 19 nt, Artificial Sequence
  Description of Artificial Sequence: Synthetic oligonucleotide
  Sense strand starting at position 1553 of SEQ ID NO: 1946
aaucgaguauuugucuagu

SEQ ID NO: 151449 - RNA, 19 nt, Artificial Sequence
  Description of Artificial Sequence: Synthetic oligonucleotide
  Antisense strand to SEQ ID NO: 151448
acuagacaaauacucgauu

SEQ ID NO: 151450 - RNA, 19 nt, Artificial Sequence
  Description of Artificial Sequence: Synthetic oligonucleotide
  Sense strand starting at position 1555 of SEQ ID NO: 1946
ucgaguauuugucuaguuc

SEQ ID NO: 151451 - RNA, 19 nt, Artificial Sequence
  Description of Artificial Sequence: Synthetic oligonucleotide
  Antisense strand to SEQ ID NO: 151450
gaacuagacaaauacucga

SEQ ID NO: 151452 - RNA, 19 nt, Artificial Sequence
  Description of Artificial Sequence: Synthetic oligonucleotide
  Sense strand starting at position 1596 of SEQ ID NO: 1946
cugagauucuuaguaguca

SEQ ID NO: 151453 - RNA, 19 nt, Artificial Sequence
  Description of Artificial Sequence: Synthetic oligonucleotide
  Antisense strand to SEQ ID NO: 151452
ugacuacuaagaaucucag

SEQ ID NO: 151454 - RNA, 19 nt, Artificial Sequence
  Description of Artificial Sequence: Synthetic oligonucleotide
  Sense strand starting at position 1600 of SEQ ID NO: 1946
gauucuuaguagucauugu

SEQ ID NO: 151455 - RNA, 19 nt, Artificial Sequence
  Description of Artificial Sequence: Synthetic oligonucleotide
  Antisense strand to SEQ ID NO: 151454
acaaugacuacuaagaauc

SEQ ID NO: 151456 - RNA, 19 nt, Artificial Sequence
  Description of Artificial Sequence: Synthetic oligonucleotide
  Sense strand starting at position 1604 of SEQ ID NO: 1946
cuuaguagucauuguggaa

SEQ ID NO: 151457 - RNA, 19 nt, Artificial Sequence
  Description of Artificial Sequence: Synthetic oligonucleotide
  Antisense strand to SEQ ID NO: 151456
uuccacaaugacuacuaag

SEQ ID NO: 151458 - RNA, 19 nt, Artificial Sequence
  Description of Artificial Sequence: Synthetic oligonucleotide
  Sense strand starting at position 1712 of SEQ ID NO: 1946
ugaagcuaauuugggauua

SEQ ID NO: 151459 - RNA, 19 nt, Artificial Sequence
  Description of Artificial Sequence: Synthetic oligonucleotide
  Antisense strand to SEQ ID NO: 151458
uaaucccaaauuagcuuca

SEQ ID NO: 151460 - RNA, 19 nt, Artificial Sequence
  Description of Artificial Sequence: Synthetic oligonucleotide
  Sense strand starting at position 1805 of SEQ ID NO: 1946
cugcaauauuugcuucuga

SEQ ID NO: 151461 - RNA, 19 nt, Artificial Sequence
  Description of Artificial Sequence: Synthetic oligonucleotide
  Antisense strand to SEQ ID NO: 151460
ucagaagcaaauauugcag

SEQ ID NO: 151462 - RNA, 19 nt, Artificial Sequence
  Description of Artificial Sequence: Synthetic oligonucleotide
  Sense strand starting at position 1832 of SEQ ID NO: 1946
uugaguuauuuguaaacuc

SEQ ID NO: 151463 - RNA, 19 nt, Artificial Sequence
  Description of Artificial Sequence: Synthetic oligonucleotide
  Antisense strand to SEQ ID NO: 151462
gaguuuacaaauaacucaa

SEQ ID NO: 151464 - RNA, 19 nt, Artificial Sequence
  Description of Artificial Sequence: Synthetic oligonucleotide
  Sense strand starting at position 1933 of SEQ ID NO: 1946
uugauauugggaugcagac

SEQ ID NO: 151465 - RNA, 19 nt, Artificial Sequence
  Description of Artificial Sequence: Synthetic oligonucleotide
  Antisense strand to SEQ ID NO: 151464
gucugcaucccaauaucaa

SEQ ID NO: 151466 - RNA, 19 nt, Artificial Sequence
  Description of Artificial Sequence: Synthetic oligonucleotide
  Sense strand starting at position 1952 of SEQ ID NO: 1946
ucugauaggugaccauauu

SEQ ID NO: 151467 - RNA, 19 nt, Artificial Sequence
  Description of Artificial Sequence: Synthetic oligonucleotide
  Antisense strand to SEQ ID NO: 151466
aauauggucaccuaucaga

SEQ ID NO: 151468 - RNA, 19 nt, Artificial Sequence
  Description of Artificial Sequence: Synthetic oligonucleotide
  Sense strand starting at position 2097 of SEQ ID NO: 1946
auccacuuccgagauucua

SEQ ID NO: 151469 - RNA, 19 nt, Artificial Sequence
  Description of Artificial Sequence: Synthetic oligonucleotide
  Antisense strand to SEQ ID NO: 151468
uagaaucucggaaguggau

SEQ ID NO: 151470 - RNA, 19 nt, Artificial Sequence
  Description of Artificial Sequence: Synthetic oligonucleotide
  Sense strand starting at position 2105 of SEQ ID NO: 1946
ccgagauucuaugcuaagg

SEQ ID NO: 151471 - RNA, 19 nt, Artificial Sequence
  Description of Artificial Sequence: Synthetic oligonucleotide
  Antisense strand to SEQ ID NO: 151470
ccuuagcauagaaucucgg

SEQ ID NO: 151472 - RNA, 19 nt, Artificial Sequence
  Description of Artificial Sequence: Synthetic oligonucleotide
  Sense strand starting at position 2167 of SEQ ID NO: 1946
cuuggcauuguuuacaaua

SEQ ID NO: 151473 - RNA, 19 nt, Artificial Sequence
  Description of Artificial Sequence: Synthetic oligonucleotide
  Antisense strand to SEQ ID NO: 151472
uauuguaaacaaugccaag

SEQ ID NO: 151474 - RNA, 19 nt, Artificial Sequence
  Description of Artificial Sequence: Synthetic oligonucleotide
  Sense strand starting at position 2356 of SEQ ID NO: 1946
auggaaugaucacaauuau

SEQ ID NO: 151475 - RNA, 19 nt, Artificial Sequence
  Description of Artificial Sequence: Synthetic oligonucleotide
  Antisense strand to SEQ ID NO: 151474
auaauugugaucauuccau

SEQ ID NO: 151476 - RNA, 19 nt, Artificial Sequence
  Description of Artificial Sequence: Synthetic oligonucleotide
  Sense strand starting at position 2402 of SEQ ID NO: 1946
caguuaugggcucaacugu

SEQ ID NO: 151477 - RNA, 19 nt, Artificial Sequence
  Description of Artificial Sequence: Synthetic oligonucleotide
  Antisense strand to SEQ ID NO: 151476
acaguugagcccauaacug

SEQ ID NO: 151478 - RNA, 19 nt, Artificial Sequence
  Description of Artificial Sequence: Synthetic oligonucleotide
  Sense strand starting at position 2832 of SEQ ID NO: 1946
uguucugaucuuggagcaa

SEQ ID NO: 151479 - RNA, 19 nt, Artificial Sequence
  Description of Artificial Sequence: Synthetic oligonucleotide
  Antisense strand to SEQ ID NO: 151478
uugcuccaagaucagaaca

SEQ ID NO: 151480 - RNA, 19 nt, Artificial Sequence
  Description of Artificial Sequence: Synthetic oligonucleotide
  Sense strand starting at position 2856 of SEQ ID NO: 1946
ggguggagucuggaugcua

SEQ ID NO: 151481 - RNA, 19 nt, Artificial Sequence
  Description of Artificial Sequence: Synthetic oligonucleotide
  Antisense strand to SEQ ID NO: 151480
uagcauccagacuccaccc

SEQ ID NO: 151482 - RNA, 19 nt, Artificial Sequence
  Description of Artificial Sequence: Synthetic oligonucleotide
  Sense strand starting at position 2891 of SEQ ID NO: 1946
gcagauagguuccuaagca

SEQ ID NO: 151483 - RNA, 19 nt, Artificial Sequence
  Description of Artificial Sequence: Synthetic oligonucleotide
  Antisense strand to SEQ ID NO: 151482
ugcuuaggaaccuaucugc

SEQ ID NO: 151484 - RNA, 19 nt, Artificial Sequence
  Description of Artificial Sequence: Synthetic oligonucleotide
  Sense strand starting at position 2895 of SEQ ID NO: 1946
auagguuccuaagcagaaa

SEQ ID NO: 151485 - RNA, 19 nt, Artificial Sequence
  Description of Artificial Sequence: Synthetic oligonucleotide
  Antisense strand to SEQ ID NO: 151484
uuucugcuuaggaaccuau

SEQ ID NO: 151486 - RNA, 19 nt, Artificial Sequence
  Description of Artificial Sequence: Synthetic oligonucleotide
  Sense strand starting at position 3116 of SEQ ID NO: 1946
ggacgaagauaugacugaa

SEQ ID NO: 151487 - RNA, 19 nt, Artificial Sequence
  Description of Artificial Sequence: Synthetic oligonucleotide
  Antisense strand to SEQ ID NO: 151486
uucagucauaucuucgucc

SEQ ID NO: 151488 - RNA, 19 nt, Artificial Sequence
  Description of Artificial Sequence: Synthetic oligonucleotide
  Sense strand starting at position 3131 of SEQ ID NO: 1946
ugaacaaucugccugcaga

SEQ ID NO: 151489 - RNA, 19 nt, Artificial Sequence
  Description of Artificial Sequence: Synthetic oligonucleotide
  Antisense strand to SEQ ID NO: 151488
ucugcaggcagauuguuca

SEQ ID NO: 151490 - RNA, 19 nt, Artificial Sequence
  Description of Artificial Sequence: Synthetic oligonucleotide
  Sense strand starting at position 3202 of SEQ ID NO: 1946
gugacaaccugcuugcaga

SEQ ID NO: 151491 - RNA, 19 nt, Artificial Sequence
  Description of Artificial Sequence: Synthetic oligonucleotide
  Antisense strand to SEQ ID NO: 151490
ucugcaagcagguugucac

SEQ ID NO: 151492 - RNA, 19 nt, Artificial Sequence
  Description of Artificial Sequence: Synthetic oligonucleotide
  Sense strand starting at position 3301 of SEQ ID NO: 1946
acccucucugcugagaagu

SEQ ID NO: 151493 - RNA, 19 nt, Artificial Sequence
  Description of Artificial Sequence: Synthetic oligonucleotide
  Antisense strand to SEQ ID NO: 151492
acuucucagcagagagggu

SEQ ID NO: 151494 - RNA, 19 nt, Artificial Sequence
  Description of Artificial Sequence: Synthetic oligonucleotide
  Sense strand starting at position 3321 of SEQ ID NO: 1946
agugaacacuuguugggaa

SEQ ID NO: 151495 - RNA, 19 nt, Artificial Sequence
  Description of Artificial Sequence: Synthetic oligonucleotide
  Antisense strand to SEQ ID NO: 151494
uucccaacaaguguucacu

SEQ ID NO: 151496 - RNA, 19 nt, Artificial Sequence
  Description of Artificial Sequence: Synthetic oligonucleotide
  Sense strand starting at position 3909 of SEQ ID NO: 1946
cucucuuggaggcgugaga

SEQ ID NO: 151497 - RNA, 19 nt, Artificial Sequence
  Description of Artificial Sequence: Synthetic oligonucleotide
  Antisense strand to SEQ ID NO: 151496
ucucacgccuccaagagag

SEQ ID NO: 151498 - RNA, 19 nt, Artificial Sequence
  Description of Artificial Sequence: Synthetic oligonucleotide
  Sense strand starting at position 3 of SEQ ID NO: 1948
acauaugugcuacaaaguu

SEQ ID NO: 151499 - RNA, 19 nt, Artificial Sequence
  Description of Artificial Sequence: Synthetic oligonucleotide
  Antisense strand to SEQ ID NO: 151498
aacuuuguagcacauaugu

SEQ ID NO: 151500 - RNA, 19 nt, Artificial Sequence
  Description of Artificial Sequence: Synthetic oligonucleotide
  Sense strand starting at position 117 of SEQ ID NO: 1948
acugaaacuuugcuuagua

SEQ ID NO: 151501 - RNA, 19 nt, Artificial Sequence
  Description of Artificial Sequence: Synthetic oligonucleotide
  Antisense strand to SEQ ID NO: 151500
uacuaagcaaaguuucagu

SEQ ID NO: 151502 - RNA, 19 nt, Artificial Sequence
  Description of Artificial Sequence: Synthetic oligonucleotide
  Sense strand starting at position 118 of SEQ ID NO: 1948
cugaaacuuugcuuaguac

SEQ ID NO: 151503 - RNA, 19 nt, Artificial Sequence
  Description of Artificial Sequence: Synthetic oligonucleotide
  Antisense strand to SEQ ID NO: 151502
guacuaagcaaaguuucag

SEQ ID NO: 151504 - RNA, 19 nt, Artificial Sequence
  Description of Artificial Sequence: Synthetic oligonucleotide
  Sense strand starting at position 119 of SEQ ID NO: 1948
ugaaacuuugcuuaguacu

SEQ ID NO: 151505 - RNA, 19 nt, Artificial Sequence
  Description of Artificial Sequence: Synthetic oligonucleotide
  Antisense strand to SEQ ID NO: 151504
aguacuaagcaaaguuuca

SEQ ID NO: 151506 - RNA, 19 nt, Artificial Sequence
  Description of Artificial Sequence: Synthetic oligonucleotide
  Sense strand starting at position 210 of SEQ ID NO: 1948
auuacuaaccugcagaguu

SEQ ID NO: 151507 - RNA, 19 nt, Artificial Sequence
  Description of Artificial Sequence: Synthetic oligonucleotide
  Antisense strand to SEQ ID NO: 151506
aacucugcagguuaguaau

SEQ ID NO: 151508 - RNA, 19 nt, Artificial Sequence
  Description of Artificial Sequence: Synthetic oligonucleotide
  Sense strand starting at position 220 of SEQ ID NO: 1948
ugcagaguugcuuaggcaa

SEQ ID NO: 151509 - RNA, 19 nt, Artificial Sequence
  Description of Artificial Sequence: Synthetic oligonucleotide
  Antisense strand to SEQ ID NO: 151508
uugccuaagcaacucugca

SEQ ID NO: 151510 - RNA, 19 nt, Artificial Sequence
  Description of Artificial Sequence: Synthetic oligonucleotide
  Sense strand starting at position 227 of SEQ ID NO: 1948
uugcuuaggcaagaguuua

SEQ ID NO: 151511 - RNA, 19 nt, Artificial Sequence
  Description of Artificial Sequence: Synthetic oligonucleotide
  Antisense strand to SEQ ID NO: 151510
uaaacucuugccuaagcaa

SEQ ID NO: 151512 - RNA, 19 nt, Artificial Sequence
  Description of Artificial Sequence: Synthetic oligonucleotide
  Sense strand starting at position 247 of SEQ ID NO: 1948
gagguugguaaguaagcaa

SEQ ID NO: 151513 - RNA, 19 nt, Artificial Sequence
  Description of Artificial Sequence: Synthetic oligonucleotide
  Antisense strand to SEQ ID NO: 151512
uugcuuacuuaccaaccuc

SEQ ID NO: 151514 - RNA, 19 nt, Artificial Sequence
  Description of Artificial Sequence: Synthetic oligonucleotide
  Sense strand starting at position 307 of SEQ ID NO: 1948
ggcaguuagaacuagagca

SEQ ID NO: 151515 - RNA, 19 nt, Artificial Sequence
  Description of Artificial Sequence: Synthetic oligonucleotide
  Antisense strand to SEQ ID NO: 151514
ugcucuaguucuaacugcc

SEQ ID NO: 151516 - RNA, 19 nt, Artificial Sequence
  Description of Artificial Sequence: Synthetic oligonucleotide
  Sense strand starting at position 376 of SEQ ID NO: 1948
gcaguuuggcacuaaacua

SEQ ID NO: 151517 - RNA, 19 nt, Artificial Sequence
  Description of Artificial Sequence: Synthetic oligonucleotide
  Antisense strand to SEQ ID NO: 151516
uaguuuagugccaaacugc

SEQ ID NO: 151518 - RNA, 19 nt, Artificial Sequence
  Description of Artificial Sequence: Synthetic oligonucleotide
  Sense strand starting at position 384 of SEQ ID NO: 1948
gcacuaaacuaggucucaa

SEQ ID NO: 151519 - RNA, 19 nt, Artificial Sequence
  Description of Artificial Sequence: Synthetic oligonucleotide
  Antisense strand to SEQ ID NO: 151518
uugagaccuaguuuagugc

SEQ ID NO: 151520 - RNA, 19 nt, Artificial Sequence
  Description of Artificial Sequence: Synthetic oligonucleotide
  Sense strand starting at position 436 of SEQ ID NO: 1948
auucuauuugccuggcaca

SEQ ID NO: 151521 - RNA, 19 nt, Artificial Sequence
  Description of Artificial Sequence: Synthetic oligonucleotide
  Antisense strand to SEQ ID NO: 151520
ugugccaggcaaauagaau

SEQ ID NO: 151522 - RNA, 19 nt, Artificial Sequence
  Description of Artificial Sequence: Synthetic oligonucleotide
  Sense strand starting at position 437 of SEQ ID NO: 1948
uucuauuugccuggcacau

SEQ ID NO: 151523 - RNA, 19 nt, Artificial Sequence
  Description of Artificial Sequence: Synthetic oligonucleotide
  Antisense strand to SEQ ID NO: 151522
augugccaggcaaauagaa

SEQ ID NO: 151524 - RNA, 19 nt, Artificial Sequence
  Description of Artificial Sequence: Synthetic oligonucleotide
  Sense strand starting at position 476 of SEQ ID NO: 1948
ugauguacauuaguuagca

SEQ ID NO: 151525 - RNA, 19 nt, Artificial Sequence
  Description of Artificial Sequence: Synthetic oligonucleotide
  Antisense strand to SEQ ID NO: 151524
ugcuaacuaauguacauca

SEQ ID NO: 151526 - RNA, 19 nt, Artificial Sequence
  Description of Artificial Sequence: Synthetic oligonucleotide
  Sense strand starting at position 477 of SEQ ID NO: 1948
gauguacauuaguuagcaa

SEQ ID NO: 151527 - RNA, 19 nt, Artificial Sequence
  Description of Artificial Sequence: Synthetic oligonucleotide
  Antisense strand to SEQ ID NO: 151526
uugcuaacuaauguacauc

SEQ ID NO: 151528 - RNA, 19 nt, Artificial Sequence
  Description of Artificial Sequence: Synthetic oligonucleotide
  Sense strand starting at position 480 of SEQ ID NO: 1948
guacauuaguuagcaacau

SEQ ID NO: 151529 - RNA, 19 nt, Artificial Sequence
  Description of Artificial Sequence: Synthetic oligonucleotide
  Antisense strand to SEQ ID NO: 151528
auguugcuaacuaauguac

SEQ ID NO: 151530 - RNA, 19 nt, Artificial Sequence
  Description of Artificial Sequence: Synthetic oligonucleotide
  Sense strand starting at position 702 of SEQ ID NO: 1948
uagagaaacuuacuacguu

SEQ ID NO: 151531 - RNA, 19 nt, Artificial Sequence
  Description of Artificial Sequence: Synthetic oligonucleotide
  Antisense strand to SEQ ID NO: 151530
aacguaguaaguuucucua

SEQ ID NO: 151532 - RNA, 19 nt, Artificial Sequence
  Description of Artificial Sequence: Synthetic oligonucleotide
  Sense strand starting at position 850 of SEQ ID NO: 1948
gggacaugauuacuaucuu

SEQ ID NO: 151533 - RNA, 19 nt, Artificial Sequence
  Description of Artificial Sequence: Synthetic oligonucleotide
  Antisense strand to SEQ ID NO: 151532
aagauaguaaucauguccc

SEQ ID NO: 151534 - RNA, 19 nt, Artificial Sequence
  Description of Artificial Sequence: Synthetic oligonucleotide
  Sense strand starting at position 942 of SEQ ID NO: 1948
aaccaaauguguccaggaa

SEQ ID NO: 151535 - RNA, 19 nt, Artificial Sequence
  Description of Artificial Sequence: Synthetic oligonucleotide
  Antisense strand to SEQ ID NO: 151534
uuccuggacacauuugguu

SEQ ID NO: 151536 - RNA, 19 nt, Artificial Sequence
  Description of Artificial Sequence: Synthetic oligonucleotide
  Sense strand starting at position 961 of SEQ ID NO: 1948
cagaauggguuuccuuuaa

SEQ ID NO: 151537 - RNA, 19 nt, Artificial Sequence
  Description of Artificial Sequence: Synthetic oligonucleotide
  Antisense strand to SEQ ID NO: 151536
uuaaaggaaacccauucug

SEQ ID NO: 151538 - RNA, 19 nt, Artificial Sequence
  Description of Artificial Sequence: Synthetic oligonucleotide
  Sense strand starting at position 977 of SEQ ID NO: 1948
uaaagagauucgcuucgga

SEQ ID NO: 151539 - RNA, 19 nt, Artificial Sequence
  Description of Artificial Sequence: Synthetic oligonucleotide
  Antisense strand to SEQ ID NO: 151538
uccgaagcgaaucucuuua

SEQ ID NO: 151540 - RNA, 19 nt, Artificial Sequence
  Description of Artificial Sequence: Synthetic oligonucleotide
  Sense strand starting at position 980 of SEQ ID NO: 1948
agagauucgcuucggauca

SEQ ID NO: 151541 - RNA, 19 nt, Artificial Sequence
  Description of Artificial Sequence: Synthetic oligonucleotide
  Antisense strand to SEQ ID NO: 151540
ugauccgaagcgaaucucu

SEQ ID NO: 151542 - RNA, 19 nt, Artificial Sequence
  Description of Artificial Sequence: Synthetic oligonucleotide
  Sense strand starting at position 2570 of SEQ ID NO: 1948
gagagaugaguuggugcuu

SEQ ID NO: 151543 - RNA, 19 nt, Artificial Sequence
  Description of Artificial Sequence: Synthetic oligonucleotide
  Antisense strand to SEQ ID NO: 151542
aagcaccaacucaucucuc

SEQ ID NO: 151544 - RNA, 19 nt, Artificial Sequence
  Description of Artificial Sequence: Synthetic oligonucleotide
  Sense strand starting at position 2628 of SEQ ID NO: 1948
uggugaucccuucaacgag

SEQ ID NO: 151545 - RNA, 19 nt, Artificial Sequence
  Description of Artificial Sequence: Synthetic oligonucleotide
  Antisense strand to SEQ ID NO: 151544
cucguugaagggaucacca

SEQ ID NO: 151546 - RNA, 19 nt, Artificial Sequence
  Description of Artificial Sequence: Synthetic oligonucleotide
  Sense strand starting at position 2707 of SEQ ID NO: 1948
agccauguuggcuacacaa

SEQ ID NO: 151547 - RNA, 19 nt, Artificial Sequence
  Description of Artificial Sequence: Synthetic oligonucleotide
  Antisense strand to SEQ ID NO: 151546
uuguguagccaacauggcu

SEQ ID NO: 151548 - RNA, 19 nt, Artificial Sequence
  Description of Artificial Sequence: Synthetic oligonucleotide
  Sense strand starting at position 2709 of SEQ ID NO: 1948
ccauguuggcuacacaauu

SEQ ID NO: 151549 - RNA, 19 nt, Artificial Sequence
  Description of Artificial Sequence: Synthetic oligonucleotide
  Antisense strand to SEQ ID NO: 151548
aauuguguagccaacaugg

SEQ ID NO: 151550 - RNA, 19 nt, Artificial Sequence
  Description of Artificial Sequence: Synthetic oligonucleotide
  Sense strand starting at position 3061 of SEQ ID NO: 1948
aggaaugucuuguuaauga

SEQ ID NO: 151551 - RNA, 19 nt, Artificial Sequence
  Description of Artificial Sequence: Synthetic oligonucleotide
  Antisense strand to SEQ ID NO: 151550
ucauuaacaagacauuccu

SEQ ID NO: 151552 - RNA, 19 nt, Artificial Sequence
  Description of Artificial Sequence: Synthetic oligonucleotide
  Sense strand starting at position 3076 of SEQ ID NO: 1948
augauccuucugugaacaa

SEQ ID NO: 151553 - RNA, 19 nt, Artificial Sequence
  Description of Artificial Sequence: Synthetic oligonucleotide
  Antisense strand to SEQ ID NO: 151552
uuguucacagaaggaucau

SEQ ID NO: 151554 - RNA, 19 nt, Artificial Sequence
  Description of Artificial Sequence: Synthetic oligonucleotide
  Sense strand starting at position 3080 of SEQ ID NO: 1948
uccuucugugaacaauguu

SEQ ID NO: 151555 - RNA, 19 nt, Artificial Sequence
  Description of Artificial Sequence: Synthetic oligonucleotide
  Antisense strand to SEQ ID NO: 151554
aacauuguucacagaagga

SEQ ID NO: 151556 - RNA, 19 nt, Artificial Sequence
  Description of Artificial Sequence: Synthetic oligonucleotide
  Sense strand starting at position 3089 of SEQ ID NO: 1948
gaacaauguuccuuggagg

SEQ ID NO: 151557 - RNA, 19 nt, Artificial Sequence
  Description of Artificial Sequence: Synthetic oligonucleotide
  Antisense strand to SEQ ID NO: 151556
ccuccaaggaacauuguuc

SEQ ID NO: 151558 - RNA, 19 nt, Artificial Sequence
  Description of Artificial Sequence: Synthetic oligonucleotide
  Sense strand starting at position 3183 of SEQ ID NO: 1948
gucuuagagcuuuggacug

SEQ ID NO: 151559 - RNA, 19 nt, Artificial Sequence
  Description of Artificial Sequence: Synthetic oligonucleotide
  Antisense strand to SEQ ID NO: 151558
caguccaaagcucuaagac

SEQ ID NO: 151560 - RNA, 19 nt, Artificial Sequence
  Description of Artificial Sequence: Synthetic oligonucleotide
  Sense strand starting at position 3246 of SEQ ID NO: 1948
gucugcccauucuugagaa

SEQ ID NO: 151561 - RNA, 19 nt, Artificial Sequence
  Description of Artificial Sequence: Synthetic oligonucleotide
  Antisense strand to SEQ ID NO: 151560
uucucaagaaugggcagac

SEQ ID NO: 151562 - RNA, 19 nt, Artificial Sequence
  Description of Artificial Sequence: Synthetic oligonucleotide
  Sense strand starting at position 3248 of SEQ ID NO: 1948
cugcccauucuugagaaau

SEQ ID NO: 151563 - RNA, 19 nt, Artificial Sequence
  Description of Artificial Sequence: Synthetic oligonucleotide
  Antisense strand to SEQ ID NO: 151562
auuucucaagaaugggcag

SEQ ID NO: 151564 - RNA, 19 nt, Artificial Sequence
  Description of Artificial Sequence: Synthetic oligonucleotide
  Sense strand starting at position 3274 of SEQ ID NO: 1948
gucagaaucuauccagguu

SEQ ID NO: 151565 - RNA, 19 nt, Artificial Sequence
  Description of Artificial Sequence: Synthetic oligonucleotide
  Antisense strand to SEQ ID NO: 151564
aaccuggauagauucugac

SEQ ID NO: 151566 - RNA, 19 nt, Artificial Sequence
  Description of Artificial Sequence: Synthetic oligonucleotide
  Sense strand starting at position 3344 of SEQ ID NO: 1948
gggaguaccugucucauga

SEQ ID NO: 151567 - RNA, 19 nt, Artificial Sequence
  Description of Artificial Sequence: Synthetic oligonucleotide
  Antisense strand to SEQ ID NO: 151566
ucaugagacagguacuccc

SEQ ID NO: 151568 - RNA, 19 nt, Artificial Sequence
  Description of Artificial Sequence: Synthetic oligonucleotide
  Sense strand starting at position 3427 of SEQ ID NO: 1948
uuaugucaauagcuaauga

SEQ ID NO: 151569 - RNA, 19 nt, Artificial Sequence
  Description of Artificial Sequence: Synthetic oligonucleotide
  Antisense strand to SEQ ID NO: 151568
ucauuagcuauugacauaa

SEQ ID NO: 151570 - RNA, 19 nt, Artificial Sequence
  Description of Artificial Sequence: Synthetic oligonucleotide
  Sense strand starting at position 3442 of SEQ ID NO: 1948
augagagcacaguguugua

SEQ ID NO: 151571 - RNA, 19 nt, Artificial Sequence
  Description of Artificial Sequence: Synthetic oligonucleotide
  Antisense strand to SEQ ID NO: 151570
uacaacacugugcucucau

SEQ ID NO: 151572 - RNA, 19 nt, Artificial Sequence
  Description of Artificial Sequence: Synthetic oligonucleotide
  Sense strand starting at position 3455 of SEQ ID NO: 1948
guuguaagugcucauauua

SEQ ID NO: 151573 - RNA, 19 nt, Artificial Sequence
  Description of Artificial Sequence: Synthetic oligonucleotide
  Antisense strand to SEQ ID NO: 151572
uaauaugagcacuuacaac

SEQ ID NO: 151574 - RNA, 19 nt, Artificial Sequence
  Description of Artificial Sequence: Synthetic oligonucleotide
  Sense strand starting at position 3594 of SEQ ID NO: 1948
ggugucauaggcugaaauc

SEQ ID NO: 151575 - RNA, 19 nt, Artificial Sequence
  Description of Artificial Sequence: Synthetic oligonucleotide
  Antisense strand to SEQ ID NO: 151574
gauuucagccuaugacacc

SEQ ID NO: 151576 - RNA, 19 nt, Artificial Sequence
  Description of Artificial Sequence: Synthetic oligonucleotide
  Sense strand starting at position 3595 of SEQ ID NO: 1948
gugucauaggcugaaauca

SEQ ID NO: 151577 - RNA, 19 nt, Artificial Sequence
  Description of Artificial Sequence: Synthetic oligonucleotide
  Antisense strand to SEQ ID NO: 151576
ugauuucagccuaugacac

SEQ ID NO: 151578 - RNA, 19 nt, Artificial Sequence
  Description of Artificial Sequence: Synthetic oligonucleotide
  Sense strand starting at position 11 of SEQ ID NO: 1947
cugagauucuuaguaguca

SEQ ID NO: 151579 - RNA, 19 nt, Artificial Sequence
  Description of Artificial Sequence: Synthetic oligonucleotide
  Antisense strand to SEQ ID NO: 151578
ugacuacuaagaaucucag

SEQ ID NO: 151580 - RNA, 19 nt, Artificial Sequence
  Description of Artificial Sequence: Synthetic oligonucleotide
  Sense strand starting at position 15 of SEQ ID NO: 1947
gauucuuaguagucauugu

SEQ ID NO: 151581 - RNA, 19 nt, Artificial Sequence
  Description of Artificial Sequence: Synthetic oligonucleotide
  Antisense strand to SEQ ID NO: 151580
acaaugacuacuaagaauc

SEQ ID NO: 151582 - RNA, 19 nt, Artificial Sequence
  Description of Artificial Sequence: Synthetic oligonucleotide
  Sense strand starting at position 19 of SEQ ID NO: 1947
cuuaguagucauuguggaa

SEQ ID NO: 151583 - RNA, 19 nt, Artificial Sequence
  Description of Artificial Sequence: Synthetic oligonucleotide
  Antisense strand to SEQ ID NO: 151582
uuccacaaugacuacuaag

SEQ ID NO: 151584 - RNA, 19 nt, Artificial Sequence
  Description of Artificial Sequence: Synthetic oligonucleotide
  Sense strand starting at position 127 of SEQ ID NO: 1947
ugaagcuaauuugggauua

SEQ ID NO: 151585 - RNA, 19 nt, Artificial Sequence
  Description of Artificial Sequence: Synthetic oligonucleotide
  Antisense strand to SEQ ID NO: 151584
uaaucccaaauuagcuuca

SEQ ID NO: 151586 - RNA, 19 nt, Artificial Sequence
  Description of Artificial Sequence: Synthetic oligonucleotide
  Sense strand starting at position 220 of SEQ ID NO: 1947
cugcaauauuugcuucuga

SEQ ID NO: 151587 - RNA, 19 nt, Artificial Sequence
  Description of Artificial Sequence: Synthetic oligonucleotide
  Antisense strand to SEQ ID NO: 151586
ucagaagcaaauauugcag

SEQ ID NO: 151588 - RNA, 19 nt, Artificial Sequence
  Description of Artificial Sequence: Synthetic oligonucleotide
  Sense strand starting at position 247 of SEQ ID NO: 1947
uugaguuauuuguaaacuc

SEQ ID NO: 151589 - RNA, 19 nt, Artificial Sequence
  Description of Artificial Sequence: Synthetic oligonucleotide
  Antisense strand to SEQ ID NO: 151588
gaguuuacaaauaacucaa

SEQ ID NO: 151590 - RNA, 19 nt, Artificial Sequence
  Description of Artificial Sequence: Synthetic oligonucleotide
  Sense strand starting at position 348 of SEQ ID NO: 1947
uugauauugggaugcagac

SEQ ID NO: 151591 - RNA, 19 nt, Artificial Sequence
  Description of Artificial Sequence: Synthetic oligonucleotide
  Antisense strand to SEQ ID NO: 151590
gucugcaucccaauaucaa

SEQ ID NO: 151592 - RNA, 19 nt, Artificial Sequence
  Description of Artificial Sequence: Synthetic oligonucleotide
  Sense strand starting at position 367 of SEQ ID NO: 1947
ucugauaggugaccauauu

SEQ ID NO: 151593 - RNA, 19 nt, Artificial Sequence
  Description of Artificial Sequence: Synthetic oligonucleotide
  Antisense strand to SEQ ID NO: 151592
aauauggucaccuaucaga

SEQ ID NO: 151594 - RNA, 19 nt, Artificial Sequence
  Description of Artificial Sequence: Synthetic oligonucleotide
  Sense strand starting at position 512 of SEQ ID NO: 1947
auccacuuccgagauucua

SEQ ID NO: 151595 - RNA, 19 nt, Artificial Sequence
  Description of Artificial Sequence: Synthetic oligonucleotide
  Antisense strand to SEQ ID NO: 151594
uagaaucucggaaguggau

SEQ ID NO: 151596 - RNA, 19 nt, Artificial Sequence
  Description of Artificial Sequence: Synthetic oligonucleotide
  Sense strand starting at position 520 of SEQ ID NO: 1947
ccgagauucuaugcuaagg

SEQ ID NO: 151597 - RNA, 19 nt, Artificial Sequence
  Description of Artificial Sequence: Synthetic oligonucleotide
  Antisense strand to SEQ ID NO: 151596
ccuuagcauagaaucucgg

SEQ ID NO: 151598 - RNA, 19 nt, Artificial Sequence
  Description of Artificial Sequence: Synthetic oligonucleotide
  Sense strand starting at position 582 of SEQ ID NO: 1947
cuuggcauuguuuacaaua

SEQ ID NO: 151599 - RNA, 19 nt, Artificial Sequence
  Description of Artificial Sequence: Synthetic oligonucleotide
  Antisense strand to SEQ ID NO: 151598
uauuguaaacaaugccaag

SEQ ID NO: 151600 - RNA, 19 nt, Artificial Sequence
  Description of Artificial Sequence: Synthetic oligonucleotide
  Sense strand starting at position 771 of SEQ ID NO: 1947
auggaaugaucacaauuau

SEQ ID NO: 151601 - RNA, 19 nt, Artificial Sequence
  Description of Artificial Sequence: Synthetic oligonucleotide
  Antisense strand to SEQ ID NO: 151600
auaauugugaucauuccau

SEQ ID NO: 151602 - RNA, 19 nt, Artificial Sequence
  Description of Artificial Sequence: Synthetic oligonucleotide
  Sense strand starting at position 817 of SEQ ID NO: 1947
caguuaugggcucaacugu

SEQ ID NO: 151603 - RNA, 19 nt, Artificial Sequence
  Description of Artificial Sequence: Synthetic oligonucleotide
  Antisense strand to SEQ ID NO: 151602
acaguugagcccauaacug

SEQ ID NO: 151604 - RNA, 19 nt, Artificial Sequence
  Description of Artificial Sequence: Synthetic oligonucleotide
  Sense strand starting at position 1247 of SEQ ID NO: 1947
uguucugaucuuggagcaa

SEQ ID NO: 151605 - RNA, 19 nt, Artificial Sequence
  Description of Artificial Sequence: Synthetic oligonucleotide
  Antisense strand to SEQ ID NO: 151604
uugcuccaagaucagaaca

SEQ ID NO: 151606 - RNA, 19 nt, Artificial Sequence
  Description of Artificial Sequence: Synthetic oligonucleotide
  Sense strand starting at position 1271 of SEQ ID NO: 1947
ggguggagucuggaugcua

SEQ ID NO: 151607 - RNA, 19 nt, Artificial Sequence
  Description of Artificial Sequence: Synthetic oligonucleotide
  Antisense strand to SEQ ID NO: 151606
uagcauccagacuccaccc

SEQ ID NO: 151608 - RNA, 19 nt, Artificial Sequence
  Description of Artificial Sequence: Synthetic oligonucleotide
  Sense strand starting at position 1306 of SEQ ID NO: 1947
gcagauagguuccuaagca

SEQ ID NO: 151609 - RNA, 19 nt, Artificial Sequence
  Description of Artificial Sequence: Synthetic oligonucleotide
  Antisense strand to SEQ ID NO: 151608
ugcuuaggaaccuaucugc

SEQ ID NO: 151610 - RNA, 19 nt, Artificial Sequence
  Description of Artificial Sequence: Synthetic oligonucleotide
  Sense strand starting at position 1310 of SEQ ID NO: 1947
auagguuccuaagcagaaa

SEQ ID NO: 151611 - RNA, 19 nt, Artificial Sequence
  Description of Artificial Sequence: Synthetic oligonucleotide
  Antisense strand to SEQ ID NO: 151610
uuucugcuuaggaaccuau

SEQ ID NO: 151612 - RNA, 19 nt, Artificial Sequence
  Description of Artificial Sequence: Synthetic oligonucleotide
  Sense strand starting at position 1531 of SEQ ID NO: 1947
ggacgaagauaugacugaa

SEQ ID NO: 151613 - RNA, 19 nt, Artificial Sequence
  Description of Artificial Sequence: Synthetic oligonucleotide
  Antisense strand to SEQ ID NO: 151612
uucagucauaucuucgucc

SEQ ID NO: 151614 - RNA, 19 nt, Artificial Sequence
  Description of Artificial Sequence: Synthetic oligonucleotide
  Sense strand starting at position 1546 of SEQ ID NO: 1947
ugaacaaucugccugcaga

SEQ ID NO: 151615 - RNA, 19 nt, Artificial Sequence
  Description of Artificial Sequence: Synthetic oligonucleotide
  Antisense strand to SEQ ID NO: 151614
ucugcaggcagauuguuca

SEQ ID NO: 151616 - RNA, 19 nt, Artificial Sequence
  Description of Artificial Sequence: Synthetic oligonucleotide
  Sense strand starting at position 1617 of SEQ ID NO: 1947
gugacaaccugcuugcaga

SEQ ID NO: 151617 - RNA, 19 nt, Artificial Sequence
  Description of Artificial Sequence: Synthetic oligonucleotide
  Antisense strand to SEQ ID NO: 151616
ucugcaagcagguugucac

SEQ ID NO: 151618 - RNA, 19 nt, Artificial Sequence
  Description of Artificial Sequence: Synthetic oligonucleotide
  Sense strand starting at position 1716 of SEQ ID NO: 1947
acccucucugcugagaagu

SEQ ID NO: 151619 - RNA, 19 nt, Artificial Sequence
  Description of Artificial Sequence: Synthetic oligonucleotide
  Antisense strand to SEQ ID NO: 151618
acuucucagcagagagggu

SEQ ID NO: 151620 - RNA, 19 nt, Artificial Sequence
  Description of Artificial Sequence: Synthetic oligonucleotide
  Sense strand starting at position 1736 of SEQ ID NO: 1947
agugaacacuuguugggaa

SEQ ID NO: 151621 - RNA, 19 nt, Artificial Sequence
  Description of Artificial Sequence: Synthetic oligonucleotide
  Antisense strand to SEQ ID NO: 151620
uucccaacaaguguucacu

SEQ ID NO: 151622 - RNA, 19 nt, Artificial Sequence
  Description of Artificial Sequence: Synthetic oligonucleotide
  Sense strand starting at position 1772 of SEQ ID NO: 1947
gagcuauccuuccugcuag

SEQ ID NO: 151623 - RNA, 19 nt, Artificial Sequence
  Description of Artificial Sequence: Synthetic oligonucleotide
  Antisense strand to SEQ ID NO: 151622
cuagcaggaaggauagcuc

SEQ ID NO: 151624 - RNA, 19 nt, Artificial Sequence
  Description of Artificial Sequence: Synthetic oligonucleotide
  Sense strand starting at position 2324 of SEQ ID NO: 1947
cucucuuggaggcgugaga

SEQ ID NO: 151625 - RNA, 19 nt, Artificial Sequence
  Description of Artificial Sequence: Synthetic oligonucleotide
  Antisense strand to SEQ ID NO: 151624
ucucacgccuccaagagag

SEQ ID NO: 151626 - RNA, 19 nt, Artificial Sequence
  Description of Artificial Sequence: Synthetic oligonucleotide
  Sense strand starting at position 2471 of SEQ ID NO: 1947
cccacaauauuuggagaaa

SEQ ID NO: 151627 - RNA, 19 nt, Artificial Sequence
  Description of Artificial Sequence: Synthetic oligonucleotide
  Antisense strand to SEQ ID NO: 151626
uuucuccaaauauuguggg

SEQ ID NO: 151628 - RNA, 19 nt, Artificial Sequence
  Description of Artificial Sequence: Synthetic oligonucleotide
  Sense strand starting at position 2851 of SEQ ID NO: 1947
uuaucuuugggugguagua

SEQ ID NO: 151629 - RNA, 19 nt, Artificial Sequence
  Description of Artificial Sequence: Synthetic oligonucleotide
  Antisense strand to SEQ ID NO: 151628
uacuaccacccaaagauaa

SEQ ID NO: 151630 - RNA, 19 nt, Artificial Sequence
  Description of Artificial Sequence: Synthetic oligonucleotide
  Sense strand starting at position 3066 of SEQ ID NO: 1947
acuccauggucccucauua

SEQ ID NO: 151631 - RNA, 19 nt, Artificial Sequence
  Description of Artificial Sequence: Synthetic oligonucleotide
  Antisense strand to SEQ ID NO: 151630
uaaugagggaccauggagu

SEQ ID NO: 151632 - RNA, 19 nt, Artificial Sequence
  Description of Artificial Sequence: Synthetic oligonucleotide
  Sense strand starting at position 3134 of SEQ ID NO: 1947
ugucaaacguaccuacuaa

SEQ ID NO: 151633 - RNA, 19 nt, Artificial Sequence
  Description of Artificial Sequence: Synthetic oligonucleotide
  Antisense strand to SEQ ID NO: 151632
uuaguagguacguuugaca

SEQ ID NO: 151634 - RNA, 19 nt, Artificial Sequence
  Description of Artificial Sequence: Synthetic oligonucleotide
  Sense strand starting at position 3213 of SEQ ID NO: 1947
cucacuagugcugaagaaa

SEQ ID NO: 151635 - RNA, 19 nt, Artificial Sequence
  Description of Artificial Sequence: Synthetic oligonucleotide
  Antisense strand to SEQ ID NO: 151634
uuucuucagcacuagugag

SEQ ID NO: 151636 - RNA, 19 nt, Artificial Sequence
  Description of Artificial Sequence: Synthetic oligonucleotide
  Sense strand starting at position 3487 of SEQ ID NO: 1947
acgguagagacuugaucuu

SEQ ID NO: 151637 - RNA, 19 nt, Artificial Sequence
  Description of Artificial Sequence: Synthetic oligonucleotide
  Antisense strand to SEQ ID NO: 151636
aagaucaagucucuaccgu

SEQ ID NO: 151638 - RNA, 19 nt, Artificial Sequence
  Description of Artificial Sequence: Synthetic oligonucleotide
  Sense strand starting at position 3499 of SEQ ID NO: 1947
ugaucuuguuuagugguga

SEQ ID NO: 151639 - RNA, 19 nt, Artificial Sequence
  Description of Artificial Sequence: Synthetic oligonucleotide
  Antisense strand to SEQ ID NO: 151638
ucaccacuaaacaagauca

SEQ ID NO: 151640 - RNA, 19 nt, Artificial Sequence
  Description of Artificial Sequence: Synthetic oligonucleotide
  Sense strand starting at position 3537 of SEQ ID NO: 1947
guaacaggcgcucauuaaa

SEQ ID NO: 151641 - RNA, 19 nt, Artificial Sequence
  Description of Artificial Sequence: Synthetic oligonucleotide
  Antisense strand to SEQ ID NO: 151640
uuuaaugagcgccuguuac

SEQ ID NO: 151642 - RNA, 19 nt, Artificial Sequence
  Description of Artificial Sequence: Synthetic oligonucleotide
  Sense strand starting at position 3547 of SEQ ID NO: 1947
cucauuaaaugucugguga

SEQ ID NO: 151643 - RNA, 19 nt, Artificial Sequence
  Description of Artificial Sequence: Synthetic oligonucleotide
  Antisense strand to SEQ ID NO: 151642
ucaccagacauuuaaugag

SEQ ID NO: 151644 - RNA, 19 nt, Artificial Sequence
  Description of Artificial Sequence: Synthetic oligonucleotide
  Sense strand starting at position 3548 of SEQ ID NO: 1947
ucauuaaaugucuggugaa

SEQ ID NO: 151645 - RNA, 19 nt, Artificial Sequence
  Description of Artificial Sequence: Synthetic oligonucleotide
  Antisense strand to SEQ ID NO: 151644
uucaccagacauuuaauga

SEQ ID NO: 151646 - RNA, 19 nt, Artificial Sequence
  Description of Artificial Sequence: Synthetic oligonucleotide
  Sense strand starting at position 3594 of SEQ ID NO: 1947
ucugacuucucuccuguua

SEQ ID NO: 151647 - RNA, 19 nt, Artificial Sequence
  Description of Artificial Sequence: Synthetic oligonucleotide
  Antisense strand to SEQ ID NO: 151646
uaacaggagagaagucaga

SEQ ID NO: 151648 - RNA, 19 nt, Artificial Sequence
  Description of Artificial Sequence: Synthetic oligonucleotide
  Sense strand starting at position 3732 of SEQ ID NO: 1947
uuuguaauuggccaacaau

SEQ ID NO: 151649 - RNA, 19 nt, Artificial Sequence
  Description of Artificial Sequence: Synthetic oligonucleotide
  Antisense strand to SEQ ID NO: 151648
auuguuggccaauuacaaa

SEQ ID NO: 151650 - RNA, 19 nt, Artificial Sequence
  Description of Artificial Sequence: Synthetic oligonucleotide
  Sense strand starting at position 3735 of SEQ ID NO: 1947
guaauuggccaacaauaau

SEQ ID NO: 151651 - RNA, 19 nt, Artificial Sequence
  Description of Artificial Sequence: Synthetic oligonucleotide
  Antisense strand to SEQ ID NO: 151650
auuauuguuggccaauuac

SEQ ID NO: 151652 - RNA, 19 nt, Artificial Sequence
  Description of Artificial Sequence: Synthetic oligonucleotide
  Sense strand starting at position 3790 of SEQ ID NO: 1947
auacguacacauuguggaa

SEQ ID NO: 151653 - RNA, 19 nt, Artificial Sequence
  Description of Artificial Sequence: Synthetic oligonucleotide
  Antisense strand to SEQ ID NO: 151652
uuccacaauguguacguau

SEQ ID NO: 151654 - RNA, 19 nt, Artificial Sequence
  Description of Artificial Sequence: Synthetic oligonucleotide
  Sense strand starting at position 3895 of SEQ ID NO: 1947
uuuagcuauuucgaaauac

SEQ ID NO: 151655 - RNA, 19 nt, Artificial Sequence
  Description of Artificial Sequence: Synthetic oligonucleotide
  Antisense strand to SEQ ID NO: 151654
guauuucgaaauagcuaaa

SEQ ID NO: 151656 - RNA, 19 nt, Artificial Sequence
  Description of Artificial Sequence: Synthetic oligonucleotide
  Sense strand starting at position 3937 of SEQ ID NO: 1947
gucaacaugcucugcaaua

SEQ ID NO: 151657 - RNA, 19 nt, Artificial Sequence
  Description of Artificial Sequence: Synthetic oligonucleotide
  Antisense strand to SEQ ID NO: 151656
uauugcagagcauguugac

SEQ ID NO: 151658 - RNA, 19 nt, Artificial Sequence
  Description of Artificial Sequence: Synthetic oligonucleotide
  Sense strand starting at position 8 of SEQ ID NO: 1945
agaggcucaauaugaguuu

SEQ ID NO: 151659 - RNA, 19 nt, Artificial Sequence
  Description of Artificial Sequence: Synthetic oligonucleotide
  Antisense strand to SEQ ID NO: 151658
aaacucauauugagccucu

SEQ ID NO: 151660 - RNA, 19 nt, Artificial Sequence
  Description of Artificial Sequence: Synthetic oligonucleotide
  Sense strand starting at position 20 of SEQ ID NO: 1945
ugaguuucugagugaauga

SEQ ID NO: 151661 - RNA, 19 nt, Artificial Sequence
  Description of Artificial Sequence: Synthetic oligonucleotide
  Antisense strand to SEQ ID NO: 151660
ucauucacucagaaacuca

SEQ ID NO: 151662 - RNA, 19 nt, Artificial Sequence
  Description of Artificial Sequence: Synthetic oligonucleotide
  Sense strand starting at position 127 of SEQ ID NO: 1945
gagcaaaucugaguuuaaa

SEQ ID NO: 151663 - RNA, 19 nt, Artificial Sequence
  Description of Artificial Sequence: Synthetic oligonucleotide
  Antisense strand to SEQ ID NO: 151662
uuuaaacucagauuugcuc

SEQ ID NO: 151664 - RNA, 19 nt, Artificial Sequence
  Description of Artificial Sequence: Synthetic oligonucleotide
  Sense strand starting at position 141 of SEQ ID NO: 1945
uuaaaugauuaccuaguga

SEQ ID NO: 151665 - RNA, 19 nt, Artificial Sequence
  Description of Artificial Sequence: Synthetic oligonucleotide
  Antisense strand to SEQ ID NO: 151664
ucacuagguaaucauuuaa

SEQ ID NO: 151666 - RNA, 19 nt, Artificial Sequence
  Description of Artificial Sequence: Synthetic oligonucleotide
  Sense strand starting at position 146 of SEQ ID NO: 1945
ugauuaccuagugauggua

SEQ ID NO: 151667 - RNA, 19 nt, Artificial Sequence
  Description of Artificial Sequence: Synthetic oligonucleotide
  Antisense strand to SEQ ID NO: 151666
uaccaucacuagguaauca

SEQ ID NO: 151668 - RNA, 19 nt, Artificial Sequence
  Description of Artificial Sequence: Synthetic oligonucleotide
  Sense strand starting at position 296 of SEQ ID NO: 1945
ugcugagugcuggacauau

SEQ ID NO: 151669 - RNA, 19 nt, Artificial Sequence
  Description of Artificial Sequence: Synthetic oligonucleotide
  Antisense strand to SEQ ID NO: 151668
auauguccagcacucagca

SEQ ID NO: 151670 - RNA, 19 nt, Artificial Sequence
  Description of Artificial Sequence: Synthetic oligonucleotide
  Sense strand starting at position 298 of SEQ ID NO: 1945
cugagugcuggacauauaa

SEQ ID NO: 151671 - RNA, 19 nt, Artificial Sequence
  Description of Artificial Sequence: Synthetic oligonucleotide
  Antisense strand to SEQ ID NO: 151670
uuauauguccagcacucag

SEQ ID NO: 151672 - RNA, 19 nt, Artificial Sequence
  Description of Artificial Sequence: Synthetic oligonucleotide
  Sense strand starting at position 305 of SEQ ID NO: 1945
cuggacauauaacuguaau

SEQ ID NO: 151673 - RNA, 19 nt, Artificial Sequence
  Description of Artificial Sequence: Synthetic oligonucleotide
  Antisense strand to SEQ ID NO: 151672
auuacaguuauauguccag

SEQ ID NO: 151674 - RNA, 19 nt, Artificial Sequence
  Description of Artificial Sequence: Synthetic oligonucleotide
  Sense strand starting at position 419 of SEQ ID NO: 1945
ugauaagugcuacacugga

SEQ ID NO: 151675 - RNA, 19 nt, Artificial Sequence
  Description of Artificial Sequence: Synthetic oligonucleotide
  Antisense strand to SEQ ID NO: 151674
uccaguguagcacuuauca

SEQ ID NO: 151676 - RNA, 19 nt, Artificial Sequence
  Description of Artificial Sequence: Synthetic oligonucleotide
  Sense strand starting at position 615 of SEQ ID NO: 1945
guucuaaaugcagaucuuu

SEQ ID NO: 151677 - RNA, 19 nt, Artificial Sequence
  Description of Artificial Sequence: Synthetic oligonucleotide
  Antisense strand to SEQ ID NO: 151676
aaagaucugcauuuagaac

SEQ ID NO: 151678 - RNA, 19 nt, Artificial Sequence
  Description of Artificial Sequence: Synthetic oligonucleotide
  Sense strand starting at position 740 of SEQ ID NO: 1945
agaggaagucuucaagcgu

SEQ ID NO: 151679 - RNA, 19 nt, Artificial Sequence
  Description of Artificial Sequence: Synthetic oligonucleotide
  Antisense strand to SEQ ID NO: 151678
acgcuugaagacuuccucu

SEQ ID NO: 151680 - RNA, 19 nt, Artificial Sequence
  Description of Artificial Sequence: Synthetic oligonucleotide
  Sense strand starting at position 775 of SEQ ID NO: 1945
cuggcuguaguguaaagaa

SEQ ID NO: 151681 - RNA, 19 nt, Artificial Sequence
  Description of Artificial Sequence: Synthetic oligonucleotide
  Antisense strand to SEQ ID NO: 151680
uucuuuacacuacagccag

SEQ ID NO: 151682 - RNA, 19 nt, Artificial Sequence
  Description of Artificial Sequence: Synthetic oligonucleotide
  Sense strand starting at position 846 of SEQ ID NO: 1945
uuuaauaaucuagguguga

SEQ ID NO: 151683 - RNA, 19 nt, Artificial Sequence
  Description of Artificial Sequence: Synthetic oligonucleotide
  Antisense strand to SEQ ID NO: 151682
ucacaccuagauuauuaaa

SEQ ID NO: 151684 - RNA, 19 nt, Artificial Sequence
  Description of Artificial Sequence: Synthetic oligonucleotide
  Sense strand starting at position 847 of SEQ ID NO: 1945
uuaauaaucuaggugugag

SEQ ID NO: 151685 - RNA, 19 nt, Artificial Sequence
  Description of Artificial Sequence: Synthetic oligonucleotide
  Antisense strand to SEQ ID NO: 151684
cucacaccuagauuauuaa

SEQ ID NO: 151686 - RNA, 19 nt, Artificial Sequence
  Description of Artificial Sequence: Synthetic oligonucleotide
  Sense strand starting at position 850 of SEQ ID NO: 1945
auaaucuaggugugagauu

SEQ ID NO: 151687 - RNA, 19 nt, Artificial Sequence
  Description of Artificial Sequence: Synthetic oligonucleotide
  Antisense strand to SEQ ID NO: 151686
aaucucacaccuagauuau

SEQ ID NO: 151688 - RNA, 19 nt, Artificial Sequence
  Description of Artificial Sequence: Synthetic oligonucleotide
  Sense strand starting at position 985 of SEQ ID NO: 1945
agggaugacuaacagaaau

SEQ ID NO: 151689 - RNA, 19 nt, Artificial Sequence
  Description of Artificial Sequence: Synthetic oligonucleotide
  Antisense strand to SEQ ID NO: 151688
auuucuguuagucaucccu

SEQ ID NO: 151690 - RNA, 19 nt, Artificial Sequence
  Description of Artificial Sequence: Synthetic oligonucleotide
  Sense strand starting at position 1233 of SEQ ID NO: 1945
cuccuuaugcuagauggua

SEQ ID NO: 151691 - RNA, 19 nt, Artificial Sequence
  Description of Artificial Sequence: Synthetic oligonucleotide
  Antisense strand to SEQ ID NO: 151690
uaccaucuagcauaaggag

SEQ ID NO: 151692 - RNA, 19 nt, Artificial Sequence
  Description of Artificial Sequence: Synthetic oligonucleotide
  Sense strand starting at position 1282 of SEQ ID NO: 1945
agaggauaugccuaugcaa

SEQ ID NO: 151693 - RNA, 19 nt, Artificial Sequence
  Description of Artificial Sequence: Synthetic oligonucleotide
  Antisense strand to SEQ ID NO: 151692
uugcauaggcauauccucu

SEQ ID NO: 151694 - RNA, 19 nt, Artificial Sequence
  Description of Artificial Sequence: Synthetic oligonucleotide
  Sense strand starting at position 1362 of SEQ ID NO: 1945
auguuaaauugaguaccca

SEQ ID NO: 151695 - RNA, 19 nt, Artificial Sequence
  Description of Artificial Sequence: Synthetic oligonucleotide
  Antisense strand to SEQ ID NO: 151694
uggguacucaauuuaacau

SEQ ID NO: 151696 - RNA, 19 nt, Artificial Sequence
  Description of Artificial Sequence: Synthetic oligonucleotide
  Sense strand starting at position 1874 of SEQ ID NO: 1945
uagaguaaagucugaguau

SEQ ID NO: 151697 - RNA, 19 nt, Artificial Sequence
  Description of Artificial Sequence: Synthetic oligonucleotide
  Antisense strand to SEQ ID NO: 151696
auacucagacuuuacucua

SEQ ID NO: 151698 - RNA, 19 nt, Artificial Sequence
  Description of Artificial Sequence: Synthetic oligonucleotide
  Sense strand starting at position 1990 of SEQ ID NO: 1945
ucuuuacaacccugugaag

SEQ ID NO: 151699 - RNA, 19 nt, Artificial Sequence
  Description of Artificial Sequence: Synthetic oligonucleotide
  Antisense strand to SEQ ID NO: 151698
cuucacaggguuguaaaga

SEQ ID NO: 151700 - RNA, 19 nt, Artificial Sequence
  Description of Artificial Sequence: Synthetic oligonucleotide
  Sense strand starting at position 1992 of SEQ ID NO: 1945
uuuacaacccugugaagua

SEQ ID NO: 151701 - RNA, 19 nt, Artificial Sequence
  Description of Artificial Sequence: Synthetic oligonucleotide
  Antisense strand to SEQ ID NO: 151700
uacuucacaggguuguaaa

SEQ ID NO: 151702 - RNA, 19 nt, Artificial Sequence
  Description of Artificial Sequence: Synthetic oligonucleotide
  Sense strand starting at position 2177 of SEQ ID NO: 1945
uaauauguugcaggaaaga

SEQ ID NO: 151703 - RNA, 19 nt, Artificial Sequence
  Description of Artificial Sequence: Synthetic oligonucleotide
  Antisense strand to SEQ ID NO: 151702
ucuuuccugcaacauauua

SEQ ID NO: 151704 - RNA, 19 nt, Artificial Sequence
  Description of Artificial Sequence: Synthetic oligonucleotide
  Sense strand starting at position 2287 of SEQ ID NO: 1945
ugauacagguaucuggaua

SEQ ID NO: 151705 - RNA, 19 nt, Artificial Sequence
  Description of Artificial Sequence: Synthetic oligonucleotide
  Antisense strand to SEQ ID NO: 151704
uauccagauaccuguauca

SEQ ID NO: 151706 - RNA, 19 nt, Artificial Sequence
  Description of Artificial Sequence: Synthetic oligonucleotide
  Sense strand starting at position 2348 of SEQ ID NO: 1945
aaauguuaagacugauguu

SEQ ID NO: 151707 - RNA, 19 nt, Artificial Sequence
  Description of Artificial Sequence: Synthetic oligonucleotide
  Antisense strand to SEQ ID NO: 151706
aacaucagucuuaacauuu

SEQ ID NO: 151708 - RNA, 19 nt, Artificial Sequence
  Description of Artificial Sequence: Synthetic oligonucleotide
  Sense strand starting at position 2358 of SEQ ID NO: 1945
acugauguuuaugcaggaa

SEQ ID NO: 151709 - RNA, 19 nt, Artificial Sequence
  Description of Artificial Sequence: Synthetic oligonucleotide
  Antisense strand to SEQ ID NO: 151708
uuccugcauaaacaucagu

SEQ ID NO: 151710 - RNA, 19 nt, Artificial Sequence
  Description of Artificial Sequence: Synthetic oligonucleotide
  Sense strand starting at position 2763 of SEQ ID NO: 1945
ugaugugacagcugagaug

SEQ ID NO: 151711 - RNA, 19 nt, Artificial Sequence
  Description of Artificial Sequence: Synthetic oligonucleotide
  Antisense strand to SEQ ID NO: 151710
caucucagcugucacauca

SEQ ID NO: 151712 - RNA, 19 nt, Artificial Sequence
  Description of Artificial Sequence: Synthetic oligonucleotide
  Sense strand starting at position 2834 of SEQ ID NO: 1945
gacagagacacguggaauu

SEQ ID NO: 151713 - RNA, 19 nt, Artificial Sequence
  Description of Artificial Sequence: Synthetic oligonucleotide
  Antisense strand to SEQ ID NO: 151712
aauuccacgugucucuguc

SEQ ID NO: 151714 - RNA, 19 nt, Artificial Sequence
  Description of Artificial Sequence: Synthetic oligonucleotide
  Sense strand starting at position 2983 of SEQ ID NO: 1945
guuggagcauaagucauua

SEQ ID NO: 151715 - RNA, 19 nt, Artificial Sequence
  Description of Artificial Sequence: Synthetic oligonucleotide
  Antisense strand to SEQ ID NO: 151714
uaaugacuuaugcuccaac

SEQ ID NO: 151716 - RNA, 19 nt, Artificial Sequence
  Description of Artificial Sequence: Synthetic oligonucleotide
  Sense strand starting at position 3052 of SEQ ID NO: 1945
aaucgaguauuugucuagu

SEQ ID NO: 151717 - RNA, 19 nt, Artificial Sequence
  Description of Artificial Sequence: Synthetic oligonucleotide
  Antisense strand to SEQ ID NO: 151716
acuagacaaauacucgauu

SEQ ID NO: 151718 - RNA, 19 nt, Artificial Sequence
  Description of Artificial Sequence: Synthetic oligonucleotide
  Sense strand starting at position 3054 of SEQ ID NO: 1945
ucgaguauuugucuaguuc

SEQ ID NO: 151719 - RNA, 19 nt, Artificial Sequence
  Description of Artificial Sequence: Synthetic oligonucleotide
  Antisense strand to SEQ ID NO: 151718
gaacuagacaaauacucga

SEQ ID NO: 151720 - RNA, 19 nt, Artificial Sequence
  Description of Artificial Sequence: Synthetic oligonucleotide
  Sense strand starting at position 3095 of SEQ ID NO: 1945
cugagauucuuaguaguca

SEQ ID NO: 151721 - RNA, 19 nt, Artificial Sequence
  Description of Artificial Sequence: Synthetic oligonucleotide
  Antisense strand to SEQ ID NO: 151720
ugacuacuaagaaucucag

SEQ ID NO: 151722 - RNA, 19 nt, Artificial Sequence
  Description of Artificial Sequence: Synthetic oligonucleotide
  Sense strand starting at position 3103 of SEQ ID NO: 1945
cuuaguagucauuguggaa

SEQ ID NO: 151723 - RNA, 19 nt, Artificial Sequence
  Description of Artificial Sequence: Synthetic oligonucleotide
  Antisense strand to SEQ ID NO: 151722
uuccacaaugacuacuaag

SEQ ID NO: 151724 - RNA, 19 nt, Artificial Sequence
  Description of Artificial Sequence: Synthetic oligonucleotide
  Sense strand starting at position 3304 of SEQ ID NO: 1945
cugcaauauuugcuucuga

SEQ ID NO: 151725 - RNA, 19 nt, Artificial Sequence
  Description of Artificial Sequence: Synthetic oligonucleotide
  Antisense strand to SEQ ID NO: 151724
ucagaagcaaauauugcag

SEQ ID NO: 151726 - RNA, 19 nt, Artificial Sequence
  Description of Artificial Sequence: Synthetic oligonucleotide
  Sense strand starting at position 3432 of SEQ ID NO: 1945
uugauauugggaugcagac

SEQ ID NO: 151727 - RNA, 19 nt, Artificial Sequence
  Description of Artificial Sequence: Synthetic oligonucleotide
  Antisense strand to SEQ ID NO: 151726
gucugcaucccaauaucaa

SEQ ID NO: 151728 - RNA, 19 nt, Artificial Sequence
  Description of Artificial Sequence: Synthetic oligonucleotide
  Sense strand starting at position 3451 of SEQ ID NO: 1945
ucugauaggugaccauauu

SEQ ID NO: 151729 - RNA, 19 nt, Artificial Sequence
  Description of Artificial Sequence: Synthetic oligonucleotide
  Antisense strand to SEQ ID NO: 151728
aauauggucaccuaucaga

SEQ ID NO: 151730 - RNA, 19 nt, Artificial Sequence
  Description of Artificial Sequence: Synthetic oligonucleotide
  Sense strand starting at position 3596 of SEQ ID NO: 1945
auccacuuccgagauucua

SEQ ID NO: 151731 - RNA, 19 nt, Artificial Sequence
  Description of Artificial Sequence: Synthetic oligonucleotide
  Antisense strand to SEQ ID NO: 151730
uagaaucucggaaguggau

SEQ ID NO: 151732 - RNA, 19 nt, Artificial Sequence
  Description of Artificial Sequence: Synthetic oligonucleotide
  Sense strand starting at position 3604 of SEQ ID NO: 1945
ccgagauucuaugcuaagg

SEQ ID NO: 151733 - RNA, 19 nt, Artificial Sequence
  Description of Artificial Sequence: Synthetic oligonucleotide
  Antisense strand to SEQ ID NO: 151732
ccuuagcauagaaucucgg

SEQ ID NO: 151734 - RNA, 19 nt, Artificial Sequence
  Description of Artificial Sequence: Synthetic oligonucleotide
  Sense strand starting at position 3666 of SEQ ID NO: 1945
cuuggcauuguuuacaaua

SEQ ID NO: 151735 - RNA, 19 nt, Artificial Sequence
  Description of Artificial Sequence: Synthetic oligonucleotide
  Antisense strand to SEQ ID NO: 151734
uauuguaaacaaugccaag

SEQ ID NO: 151736 - RNA, 19 nt, Artificial Sequence
  Description of Artificial Sequence: Synthetic oligonucleotide
  Sense strand starting at position 3901 of SEQ ID NO: 1945
caguuaugggcucaacugu

SEQ ID NO: 151737 - RNA, 19 nt, Artificial Sequence
  Description of Artificial Sequence: Synthetic oligonucleotide
  Antisense strand to SEQ ID NO: 151736
acaguugagcccauaacug

SEQ ID NO: 151738 - RNA, 19 nt, Artificial Sequence
  Description of Artificial Sequence: Synthetic oligonucleotide
  Sense strand starting at position 3895 of SEQ ID NO: 1949
uaagguuacgaguacgaga

SEQ ID NO: 151739 - RNA, 19 nt, Artificial Sequence
  Description of Artificial Sequence: Synthetic oligonucleotide
  Antisense strand to SEQ ID NO: 151738
ucucguacucguaaccuua

SEQ ID NO: 151740 - RNA, 19 nt, Artificial Sequence
  Description of Artificial Sequence: Synthetic oligonucleotide
  Sense strand starting at position 3799 of SEQ ID NO: 1949
ugaguuuguaaagguauua

SEQ ID NO: 151741 - RNA, 19 nt, Artificial Sequence
  Description of Artificial Sequence: Synthetic oligonucleotide
  Antisense strand to SEQ ID NO: 151740
uaauaccuuuacaaacuca

SEQ ID NO: 151742 - RNA, 19 nt, Artificial Sequence
  Description of Artificial Sequence: Synthetic oligonucleotide
  Sense strand starting at position 3796 of SEQ ID NO: 1949
uggugaguuuguaaaggua

SEQ ID NO: 151743 - RNA, 19 nt, Artificial Sequence
  Description of Artificial Sequence: Synthetic oligonucleotide
  Antisense strand to SEQ ID NO: 151742
uaccuuuacaaacucacca

SEQ ID NO: 151744 - RNA, 19 nt, Artificial Sequence
  Description of Artificial Sequence: Synthetic oligonucleotide
  Sense strand starting at position 3719 of SEQ ID NO: 1949
gguugcuguccucauguaa

SEQ ID NO: 151745 - RNA, 19 nt, Artificial Sequence
  Description of Artificial Sequence: Synthetic oligonucleotide
  Antisense strand to SEQ ID NO: 151744
uuacaugaggacagcaacc

SEQ ID NO: 151746 - RNA, 19 nt, Artificial Sequence
  Description of Artificial Sequence: Synthetic oligonucleotide
  Sense strand starting at position 3670 of SEQ ID NO: 1949
uuuaaagcacugugauaac

SEQ ID NO: 151747 - RNA, 19 nt, Artificial Sequence
  Description of Artificial Sequence: Synthetic oligonucleotide
  Antisense strand to SEQ ID NO: 151746
guuaucacagugcuuuaaa

SEQ ID NO: 151748 - RNA, 19 nt, Artificial Sequence
  Description of Artificial Sequence: Synthetic oligonucleotide
  Sense strand starting at position 3557 of SEQ ID NO: 1949
aauguacagcauugaaguu

SEQ ID NO: 151749 - RNA, 19 nt, Artificial Sequence
  Description of Artificial Sequence: Synthetic oligonucleotide
  Antisense strand to SEQ ID NO: 151748
aacuucaaugcuguacauu

SEQ ID NO: 151750 - RNA, 19 nt, Artificial Sequence
  Description of Artificial Sequence: Synthetic oligonucleotide
  Sense strand starting at position 3501 of SEQ ID NO: 1949
gguacucuacaccaaguau

SEQ ID NO: 151751 - RNA, 19 nt, Artificial Sequence
  Description of Artificial Sequence: Synthetic oligonucleotide
  Antisense strand to SEQ ID NO: 151750
auacuugguguagaguacc

SEQ ID NO: 151752 - RNA, 19 nt, Artificial Sequence
  Description of Artificial Sequence: Synthetic oligonucleotide
  Sense strand starting at position 3463 of SEQ ID NO: 1949
ccuucuuuccaguaaggug

SEQ ID NO: 151753 - RNA, 19 nt, Artificial Sequence
  Description of Artificial Sequence: Synthetic oligonucleotide
  Antisense strand to SEQ ID NO: 151752
caccuuacuggaaagaagg

SEQ ID NO: 151754 - RNA, 19 nt, Artificial Sequence
  Description of Artificial Sequence: Synthetic oligonucleotide
  Sense strand starting at position 3404 of SEQ ID NO: 1949
aguucucaguuccuaaagu

SEQ ID NO: 151755 - RNA, 19 nt, Artificial Sequence
  Description of Artificial Sequence: Synthetic oligonucleotide
  Antisense strand to SEQ ID NO: 151754
acuuuaggaacugagaacu

SEQ ID NO: 151756 - RNA, 19 nt, Artificial Sequence
  Description of Artificial Sequence: Synthetic oligonucleotide
  Sense strand starting at position 3364 of SEQ ID NO: 1949
ugauuaaacguuuacagca

SEQ ID NO: 151757 - RNA, 19 nt, Artificial Sequence
  Description of Artificial Sequence: Synthetic oligonucleotide
  Antisense strand to SEQ ID NO: 151756
ugcuguaaacguuuaauca

SEQ ID NO: 151758 - RNA, 19 nt, Artificial Sequence
  Description of Artificial Sequence: Synthetic oligonucleotide
  Sense strand starting at position 3352 of SEQ ID NO: 1949
uuauguugagagugauuaa

SEQ ID NO: 151759 - RNA, 19 nt, Artificial Sequence
  Description of Artificial Sequence: Synthetic oligonucleotide
  Antisense strand to SEQ ID NO: 151758
uuaaucacucucaacauaa

SEQ ID NO: 151760 - RNA, 19 nt, Artificial Sequence
  Description of Artificial Sequence: Synthetic oligonucleotide
  Sense strand starting at position 3317 of SEQ ID NO: 1949
aggucugucugacucuauu

SEQ ID NO: 151761 - RNA, 19 nt, Artificial Sequence
  Description of Artificial Sequence: Synthetic oligonucleotide
  Antisense strand to SEQ ID NO: 151760
aauagagucagacagaccu

SEQ ID NO: 151762 - RNA, 19 nt, Artificial Sequence
  Description of Artificial Sequence: Synthetic oligonucleotide
  Sense strand starting at position 3284 of SEQ ID NO: 1949
ucaaauaaugagcgucaga

SEQ ID NO: 151763 - RNA, 19 nt, Artificial Sequence
  Description of Artificial Sequence: Synthetic oligonucleotide
  Antisense strand to SEQ ID NO: 151762
ucugacgcucauuauuuga

SEQ ID NO: 151764 - RNA, 19 nt, Artificial Sequence
  Description of Artificial Sequence: Synthetic oligonucleotide
  Sense strand starting at position 3273 of SEQ ID NO: 1949
uuuggcuaaggucaaauaa

SEQ ID NO: 151765 - RNA, 19 nt, Artificial Sequence
  Description of Artificial Sequence: Synthetic oligonucleotide
  Antisense strand to SEQ ID NO: 151764
uuauuugaccuuagccaaa

SEQ ID NO: 151766 - RNA, 19 nt, Artificial Sequence
  Description of Artificial Sequence: Synthetic oligonucleotide
  Sense strand starting at position 3263 of SEQ ID NO: 1949
gguuaaccaguuuggcuaa

SEQ ID NO: 151767 - RNA, 19 nt, Artificial Sequence
  Description of Artificial Sequence: Synthetic oligonucleotide
  Antisense strand to SEQ ID NO: 151766
uuagccaaacugguuaacc

SEQ ID NO: 151768 - RNA, 19 nt, Artificial Sequence
  Description of Artificial Sequence: Synthetic oligonucleotide
  Sense strand starting at position 3257 of SEQ ID NO: 1949
uggauugguuaaccaguuu

SEQ ID NO: 151769 - RNA, 19 nt, Artificial Sequence
  Description of Artificial Sequence: Synthetic oligonucleotide
  Antisense strand to SEQ ID NO: 151768
aaacugguuaaccaaucca

SEQ ID NO: 151770 - RNA, 19 nt, Artificial Sequence
  Description of Artificial Sequence: Synthetic oligonucleotide
  Sense strand starting at position 3250 of SEQ ID NO: 1949
ugagacuuggauugguuaa

SEQ ID NO: 151771 - RNA, 19 nt, Artificial Sequence
  Description of Artificial Sequence: Synthetic oligonucleotide
  Antisense strand to SEQ ID NO: 151770
uuaaccaauccaagucuca

SEQ ID NO: 151772 - RNA, 19 nt, Artificial Sequence
  Description of Artificial Sequence: Synthetic oligonucleotide
  Sense strand starting at position 3214 of SEQ ID NO: 1949
auacauuuaucguucccuu

SEQ ID NO: 151773 - RNA, 19 nt, Artificial Sequence
  Description of Artificial Sequence: Synthetic oligonucleotide
  Antisense strand to SEQ ID NO: 151772
aagggaacgauaaauguau

SEQ ID NO: 151774 - RNA, 19 nt, Artificial Sequence
  Description of Artificial Sequence: Synthetic oligonucleotide
  Sense strand starting at position 3172 of SEQ ID NO: 1949
ucacauacguuagcucauu

SEQ ID NO: 151775 - RNA, 19 nt, Artificial Sequence
  Description of Artificial Sequence: Synthetic oligonucleotide
  Antisense strand to SEQ ID NO: 151774
aaugagcuaacguauguga

SEQ ID NO: 151776 - RNA, 19 nt, Artificial Sequence
  Description of Artificial Sequence: Synthetic oligonucleotide
  Sense strand starting at position 3110 of SEQ ID NO: 1949
cuacuauuccaacggagag

SEQ ID NO: 151777 - RNA, 19 nt, Artificial Sequence
  Description of Artificial Sequence: Synthetic oligonucleotide
  Antisense strand to SEQ ID NO: 151776
cucuccguuggaauaguag

SEQ ID NO: 151778 - RNA, 19 nt, Artificial Sequence
  Description of Artificial Sequence: Synthetic oligonucleotide
  Sense strand starting at position 3031 of SEQ ID NO: 1949
ccugaaauguuccuaaugu

SEQ ID NO: 151779 - RNA, 19 nt, Artificial Sequence
  Description of Artificial Sequence: Synthetic oligonucleotide
  Antisense strand to SEQ ID NO: 151778
acauuaggaacauuucagg

SEQ ID NO: 151780 - RNA, 19 nt, Artificial Sequence
  Description of Artificial Sequence: Synthetic oligonucleotide
  Sense strand starting at position 2984 of SEQ ID NO: 1949
gggauuuaguccugagaag

SEQ ID NO: 151781 - RNA, 19 nt, Artificial Sequence
  Description of Artificial Sequence: Synthetic oligonucleotide
  Antisense strand to SEQ ID NO: 151780
cuucucaggacuaaauccc

SEQ ID NO: 151782 - RNA, 19 nt, Artificial Sequence
  Description of Artificial Sequence: Synthetic oligonucleotide
  Sense strand starting at position 2561 of SEQ ID NO: 1949
gggacagauuuguggauaa

SEQ ID NO: 151783 - RNA, 19 nt, Artificial Sequence
  Description of Artificial Sequence: Synthetic oligonucleotide
  Antisense strand to SEQ ID NO: 151782
uuauccacaaaucuguccc

SEQ ID NO: 151784 - RNA, 19 nt, Artificial Sequence
  Description of Artificial Sequence: Synthetic oligonucleotide
  Sense strand starting at position 2480 of SEQ ID NO: 1949
gucaauguagcgaggaguu

SEQ ID NO: 151785 - RNA, 19 nt, Artificial Sequence
  Description of Artificial Sequence: Synthetic oligonucleotide
  Antisense strand to SEQ ID NO: 151784
aacuccucgcuacauugac

SEQ ID NO: 151786 - RNA, 19 nt, Artificial Sequence
  Description of Artificial Sequence: Synthetic oligonucleotide
  Sense strand starting at position 2479 of SEQ ID NO: 1949
ggucaauguagcgaggagu

SEQ ID NO: 151787 - RNA, 19 nt, Artificial Sequence
  Description of Artificial Sequence: Synthetic oligonucleotide
  Antisense strand to SEQ ID NO: 151786
acuccucgcuacauugacc

SEQ ID NO: 151788 - RNA, 19 nt, Artificial Sequence
  Description of Artificial Sequence: Synthetic oligonucleotide
  Sense strand starting at position 2470 of SEQ ID NO: 1949
aaggucagaggucaaugua

SEQ ID NO: 151789 - RNA, 19 nt, Artificial Sequence
  Description of Artificial Sequence: Synthetic oligonucleotide
  Antisense strand to SEQ ID NO: 151788
uacauugaccucugaccuu

SEQ ID NO: 151790 - RNA, 19 nt, Artificial Sequence
  Description of Artificial Sequence: Synthetic oligonucleotide
  Sense strand starting at position 2449 of SEQ ID NO: 1949
gaggauuauuucuagaguu

SEQ ID NO: 151791 - RNA, 19 nt, Artificial Sequence
  Description of Artificial Sequence: Synthetic oligonucleotide
  Antisense strand to SEQ ID NO: 151790
aacucuagaaauaauccuc

SEQ ID NO: 151792 - RNA, 19 nt, Artificial Sequence
  Description of Artificial Sequence: Synthetic oligonucleotide
  Sense strand starting at position 2348 of SEQ ID NO: 1949
uguuccugacucuagcaaa

SEQ ID NO: 151793 - RNA, 19 nt, Artificial Sequence
  Description of Artificial Sequence: Synthetic oligonucleotide
  Antisense strand to SEQ ID NO: 151792
uuugcuagagucaggaaca

SEQ ID NO: 151794 - RNA, 19 nt, Artificial Sequence
  Description of Artificial Sequence: Synthetic oligonucleotide
  Sense strand starting at position 2266 of SEQ ID NO: 1949
cugaguggaagguguacua

SEQ ID NO: 151795 - RNA, 19 nt, Artificial Sequence
  Description of Artificial Sequence: Synthetic oligonucleotide
  Antisense strand to SEQ ID NO: 151794
uaguacaccuuccacucag

SEQ ID NO: 151796 - RNA, 19 nt, Artificial Sequence
  Description of Artificial Sequence: Synthetic oligonucleotide
  Sense strand starting at position 2260 of SEQ ID NO: 1949
ggaucucugaguggaaggu

SEQ ID NO: 151797 - RNA, 19 nt, Artificial Sequence
  Description of Artificial Sequence: Synthetic oligonucleotide
  Antisense strand to SEQ ID NO: 151796
accuuccacucagagaucc

SEQ ID NO: 151798 - RNA, 19 nt, Artificial Sequence
  Description of Artificial Sequence: Synthetic oligonucleotide
  Sense strand starting at position 2223 of SEQ ID NO: 1949
gagggugugaccuaucuua

SEQ ID NO: 151799 - RNA, 19 nt, Artificial Sequence
  Description of Artificial Sequence: Synthetic oligonucleotide
  Antisense strand to SEQ ID NO: 151798
uaagauaggucacacccuc

SEQ ID NO: 151800 - RNA, 19 nt, Artificial Sequence
  Description of Artificial Sequence: Synthetic oligonucleotide
  Sense strand starting at position 2212 of SEQ ID NO: 1949
agccgaaauuugagggugu

SEQ ID NO: 151801 - RNA, 19 nt, Artificial Sequence
  Description of Artificial Sequence: Synthetic oligonucleotide
  Antisense strand to SEQ ID NO: 151800
acacccucaaauuucggcu

SEQ ID NO: 151802 - RNA, 19 nt, Artificial Sequence
  Description of Artificial Sequence: Synthetic oligonucleotide
  Sense strand starting at position 2017 of SEQ ID NO: 1949
ugcauugcgcgauccggaa

SEQ ID NO: 151803 - RNA, 19 nt, Artificial Sequence
  Description of Artificial Sequence: Synthetic oligonucleotide
  Antisense strand to SEQ ID NO: 151802
uuccggaucgcgcaaugca

SEQ ID NO: 151804 - RNA, 19 nt, Artificial Sequence
  Description of Artificial Sequence: Synthetic oligonucleotide
  Sense strand starting at position 1737 of SEQ ID NO: 1949
uugccagagcaaugaaaca

SEQ ID NO: 151805 - RNA, 19 nt, Artificial Sequence
  Description of Artificial Sequence: Synthetic oligonucleotide
  Antisense strand to SEQ ID NO: 151804
uguuucauugcucuggcaa

SEQ ID NO: 151806 - RNA, 19 nt, Artificial Sequence
  Description of Artificial Sequence: Synthetic oligonucleotide
  Sense strand starting at position 941 of SEQ ID NO: 1949
aagaguggugugcagagau

SEQ ID NO: 151807 - RNA, 19 nt, Artificial Sequence
  Description of Artificial Sequence: Synthetic oligonucleotide
  Antisense strand to SEQ ID NO: 151806
aucucugcacaccacucuu

SEQ ID NO: 151808 - RNA, 19 nt, Artificial Sequence
  Description of Artificial Sequence: Synthetic oligonucleotide
  Sense strand starting at position 928 of SEQ ID NO: 1949
aaagcauagcaccaagagu

SEQ ID NO: 151809 - RNA, 19 nt, Artificial Sequence
  Description of Artificial Sequence: Synthetic oligonucleotide
  Antisense strand to SEQ ID NO: 151808
acucuuggugcuaugcuuu

SEQ ID NO: 151810 - RNA, 19 nt, Artificial Sequence
  Description of Artificial Sequence: Synthetic oligonucleotide
  Sense strand starting at position 767 of SEQ ID NO: 1949
gggucuugccuagaacaca

SEQ ID NO: 151811 - RNA, 19 nt, Artificial Sequence
  Description of Artificial Sequence: Synthetic oligonucleotide
  Antisense strand to SEQ ID NO: 151810
uguguucuaggcaagaccc

SEQ ID NO: 151812 - RNA, 19 nt, Artificial Sequence
  Description of Artificial Sequence: Synthetic oligonucleotide
  Sense strand starting at position 765 of SEQ ID NO: 1949
cagggucuugccuagaaca

SEQ ID NO: 151813 - RNA, 19 nt, Artificial Sequence
  Description of Artificial Sequence: Synthetic oligonucleotide
  Antisense strand to SEQ ID NO: 151812
uguucuaggcaagacccug

SEQ ID NO: 151814 - RNA, 19 nt, Artificial Sequence
  Description of Artificial Sequence: Synthetic oligonucleotide
  Sense strand starting at position 66 of SEQ ID NO: 1949
ucuuaagacuuuguauagu

SEQ ID NO: 151815 - RNA, 19 nt, Artificial Sequence
  Description of Artificial Sequence: Synthetic oligonucleotide
  Antisense strand to SEQ ID NO: 151814
acuauacaaagucuuaaga

SEQ ID NO: 151816 - RNA, 19 nt, Artificial Sequence
  Description of Artificial Sequence: Synthetic oligonucleotide
  Sense strand starting at position 65 of SEQ ID NO: 1949
aucuuaagacuuuguauag

SEQ ID NO: 151817 - RNA, 19 nt, Artificial Sequence
  Description of Artificial Sequence: Synthetic oligonucleotide
  Antisense strand to SEQ ID NO: 151816
cuauacaaagucuuaagau

SEQ ID NO: 151818 - RNA, 19 nt, Artificial Sequence
  Description of Artificial Sequence: Synthetic oligonucleotide
  Sense strand starting at position 3535 of SEQ ID NO: 1950
guuccauauuauggucuuu

SEQ ID NO: 151819 - RNA, 19 nt, Artificial Sequence
  Description of Artificial Sequence: Synthetic oligonucleotide
  Antisense strand to SEQ ID NO: 151818
aaagaccauaauauggaac

SEQ ID NO: 151820 - RNA, 19 nt, Artificial Sequence
  Description of Artificial Sequence: Synthetic oligonucleotide
  Sense strand starting at position 3527 of SEQ ID NO: 1950
cccagcugguuccauauua

SEQ ID NO: 151821 - RNA, 19 nt, Artificial Sequence
  Description of Artificial Sequence: Synthetic oligonucleotide
  Antisense strand to SEQ ID NO: 151820
uaauauggaaccagcuggg

SEQ ID NO: 151822 - RNA, 19 nt, Artificial Sequence
  Description of Artificial Sequence: Synthetic oligonucleotide
  Sense strand starting at position 3471 of SEQ ID NO: 1950
cugcaaguguugguauaaa

SEQ ID NO: 151823 - RNA, 19 nt, Artificial Sequence
  Description of Artificial Sequence: Synthetic oligonucleotide
  Antisense strand to SEQ ID NO: 151822
uuuauaccaacacuugcag

SEQ ID NO: 151824 - RNA, 19 nt, Artificial Sequence
  Description of Artificial Sequence: Synthetic oligonucleotide
  Sense strand starting at position 3470 of SEQ ID NO: 1950
ccugcaaguguugguauaa

SEQ ID NO: 151825 - RNA, 19 nt, Artificial Sequence
  Description of Artificial Sequence: Synthetic oligonucleotide
  Antisense strand to SEQ ID NO: 151824
uuauaccaacacuugcagg

SEQ ID NO: 151826 - RNA, 19 nt, Artificial Sequence
  Description of Artificial Sequence: Synthetic oligonucleotide
  Sense strand starting at position 3469 of SEQ ID NO: 1950
accugcaaguguugguaua

SEQ ID NO: 151827 - RNA, 19 nt, Artificial Sequence
  Description of Artificial Sequence: Synthetic oligonucleotide
  Antisense strand to SEQ ID NO: 151826
uauaccaacacuugcaggu

SEQ ID NO: 151828 - RNA, 19 nt, Artificial Sequence
  Description of Artificial Sequence: Synthetic oligonucleotide
  Sense strand starting at position 3139 of SEQ ID NO: 1950
gaagaugccucagugguga

SEQ ID NO: 151829 - RNA, 19 nt, Artificial Sequence
  Description of Artificial Sequence: Synthetic oligonucleotide
  Antisense strand to SEQ ID NO: 151828
ucaccacugaggcaucuuc

SEQ ID NO: 151830 - RNA, 19 nt, Artificial Sequence
  Description of Artificial Sequence: Synthetic oligonucleotide
  Sense strand starting at position 3035 of SEQ ID NO: 1950
aagguuuguccaggaaaug

SEQ ID NO: 151831 - RNA, 19 nt, Artificial Sequence
  Description of Artificial Sequence: Synthetic oligonucleotide
  Antisense strand to SEQ ID NO: 151830
cauuuccuggacaaaccuu

SEQ ID NO: 151832 - RNA, 19 nt, Artificial Sequence
  Description of Artificial Sequence: Synthetic oligonucleotide
  Sense strand starting at position 2653 of SEQ ID NO: 1950
gaguaucucgugggcugau

SEQ ID NO: 151833 - RNA, 19 nt, Artificial Sequence
  Description of Artificial Sequence: Synthetic oligonucleotide
  Antisense strand to SEQ ID NO: 151832
aucagcccacgagauacuc

SEQ ID NO: 151834 - RNA, 19 nt, Artificial Sequence
  Description of Artificial Sequence: Synthetic oligonucleotide
  Sense strand starting at position 2652 of SEQ ID NO: 1950
ggaguaucucgugggcuga

SEQ ID NO: 151835 - RNA, 19 nt, Artificial Sequence
  Description of Artificial Sequence: Synthetic oligonucleotide
  Antisense strand to SEQ ID NO: 151834
ucagcccacgagauacucc

SEQ ID NO: 151836 - RNA, 19 nt, Artificial Sequence
  Description of Artificial Sequence: Synthetic oligonucleotide
  Sense strand starting at position 2544 of SEQ ID NO: 1950
uuguucuuugcauagauaa

SEQ ID NO: 151837 - RNA, 19 nt, Artificial Sequence
  Description of Artificial Sequence: Synthetic oligonucleotide
  Antisense strand to SEQ ID NO: 151836
uuaucuaugcaaagaacaa

SEQ ID NO: 151838 - RNA, 19 nt, Artificial Sequence
  Description of Artificial Sequence: Synthetic oligonucleotide
  Sense strand starting at position 2540 of SEQ ID NO: 1950
ugaauuguucuuugcauag

SEQ ID NO: 151839 - RNA, 19 nt, Artificial Sequence
  Description of Artificial Sequence: Synthetic oligonucleotide
  Antisense strand to SEQ ID NO: 151838
cuaugcaaagaacaauuca

SEQ ID NO: 151840 - RNA, 19 nt, Artificial Sequence
  Description of Artificial Sequence: Synthetic oligonucleotide
  Sense strand starting at position 2538 of SEQ ID NO: 1950
acugaauuguucuuugcau

SEQ ID NO: 151841 - RNA, 19 nt, Artificial Sequence
  Description of Artificial Sequence: Synthetic oligonucleotide
  Antisense strand to SEQ ID NO: 151840
augcaaagaacaauucagu

SEQ ID NO: 151842 - RNA, 19 nt, Artificial Sequence
  Description of Artificial Sequence: Synthetic oligonucleotide
  Sense strand starting at position 1697 of SEQ ID NO: 1950
ggucuuagccaugggcauu

SEQ ID NO: 151843 - RNA, 19 nt, Artificial Sequence
  Description of Artificial Sequence: Synthetic oligonucleotide
  Antisense strand to SEQ ID NO: 151842
aaugcccauggcuaagacc

SEQ ID NO: 151844 - RNA, 19 nt, Artificial Sequence
  Description of Artificial Sequence: Synthetic oligonucleotide
  Sense strand starting at position 1696 of SEQ ID NO: 1950
uggucuuagccaugggcau

SEQ ID NO: 151845 - RNA, 19 nt, Artificial Sequence
  Description of Artificial Sequence: Synthetic oligonucleotide
  Antisense strand to SEQ ID NO: 151844
augcccauggcuaagacca

SEQ ID NO: 151846 - RNA, 19 nt, Artificial Sequence
  Description of Artificial Sequence: Synthetic oligonucleotide
  Sense strand starting at position 1664 of SEQ ID NO: 1950
auuauaagcccugaacugu

SEQ ID NO: 151847 - RNA, 19 nt, Artificial Sequence
  Description of Artificial Sequence: Synthetic oligonucleotide
  Antisense strand to SEQ ID NO: 151846
acaguucagggcuuauaau

SEQ ID NO: 151848 - RNA, 19 nt, Artificial Sequence
  Description of Artificial Sequence: Synthetic oligonucleotide
  Sense strand starting at position 1632 of SEQ ID NO: 1950
ccuucuagguucccucaua

SEQ ID NO: 151849 - RNA, 19 nt, Artificial Sequence
  Description of Artificial Sequence: Synthetic oligonucleotide
  Antisense strand to SEQ ID NO: 151848
uaugagggaaccuagaagg

SEQ ID NO: 151850 - RNA, 19 nt, Artificial Sequence
  Description of Artificial Sequence: Synthetic oligonucleotide
  Sense strand starting at position 1365 of SEQ ID NO: 1950
ucgggauucccgugggcau

SEQ ID NO: 151851 - RNA, 19 nt, Artificial Sequence
  Description of Artificial Sequence: Synthetic oligonucleotide
  Antisense strand to SEQ ID NO: 151850
augcccacgggaaucccga

SEQ ID NO: 151852 - RNA, 19 nt, Artificial Sequence
  Description of Artificial Sequence: Synthetic oligonucleotide
  Sense strand starting at position 1332 of SEQ ID NO: 1950
acgguucuggugcaauaga

SEQ ID NO: 151853 - RNA, 19 nt, Artificial Sequence
  Description of Artificial Sequence: Synthetic oligonucleotide
  Antisense strand to SEQ ID NO: 151852
ucuauugcaccagaaccgu

SEQ ID NO: 151854 - RNA, 19 nt, Artificial Sequence
  Description of Artificial Sequence: Synthetic oligonucleotide
  Sense strand starting at position 1082 of SEQ ID NO: 1950
ugcucucucccaggaaaga

SEQ ID NO: 151855 - RNA, 19 nt, Artificial Sequence
  Description of Artificial Sequence: Synthetic oligonucleotide
  Antisense strand to SEQ ID NO: 151854
ucuuuccugggagagagca

SEQ ID NO: 151856 - RNA, 19 nt, Artificial Sequence
  Description of Artificial Sequence: Synthetic oligonucleotide
  Sense strand starting at position 501 of SEQ ID NO: 1950
gagauuguggcuggaagca

SEQ ID NO: 151857 - RNA, 19 nt, Artificial Sequence
  Description of Artificial Sequence: Synthetic oligonucleotide
  Antisense strand to SEQ ID NO: 151856
ugcuuccagccacaaucuc

SEQ ID NO: 151858 - RNA, 19 nt, Artificial Sequence
  Description of Artificial Sequence: Synthetic oligonucleotide
  Sense strand starting at position 499 of SEQ ID NO: 1950
cagagauuguggcuggaag

SEQ ID NO: 151859 - RNA, 19 nt, Artificial Sequence
  Description of Artificial Sequence: Synthetic oligonucleotide
  Antisense strand to SEQ ID NO: 151858
cuuccagccacaaucucug

SEQ ID NO: 151860 - RNA, 19 nt, Artificial Sequence
  Description of Artificial Sequence: Synthetic oligonucleotide
  Sense strand starting at position 489 of SEQ ID NO: 1950
aggugcuugccagagauug

SEQ ID NO: 151861 - RNA, 19 nt, Artificial Sequence
  Description of Artificial Sequence: Synthetic oligonucleotide
  Antisense strand to SEQ ID NO: 151860
caaucucuggcaagcaccu

SEQ ID NO: 151862 - RNA, 19 nt, Artificial Sequence
  Description of Artificial Sequence: Synthetic oligonucleotide
  Sense strand starting at position 487 of SEQ ID NO: 1950
cuaggugcuugccagagau

SEQ ID NO: 151863 - RNA, 19 nt, Artificial Sequence
  Description of Artificial Sequence: Synthetic oligonucleotide
  Antisense strand to SEQ ID NO: 151862
aucucuggcaagcaccuag

SEQ ID NO: 151864 - RNA, 19 nt, Artificial Sequence
  Description of Artificial Sequence: Synthetic oligonucleotide
  Sense strand starting at position 1 of SEQ ID NO: 1950
ggcucuguguuccugacau

SEQ ID NO: 151865 - RNA, 19 nt, Artificial Sequence
  Description of Artificial Sequence: Synthetic oligonucleotide
  Antisense strand to SEQ ID NO: 151864
augucaggaacacagagcc

SEQ ID NO: 151866 - RNA, 19 nt, Artificial Sequence
  Description of Artificial Sequence: Synthetic oligonucleotide
  Sense strand starting at position 3966 of SEQ ID NO: 1951
gcuuauggucaucacuaac

SEQ ID NO: 151867 - RNA, 19 nt, Artificial Sequence
  Description of Artificial Sequence: Synthetic oligonucleotide
  Antisense strand to SEQ ID NO: 151866
guuagugaugaccauaagc

SEQ ID NO: 151868 - RNA, 19 nt, Artificial Sequence
  Description of Artificial Sequence: Synthetic oligonucleotide
  Sense strand starting at position 3965 of SEQ ID NO: 1951
ugcuuauggucaucacuaa

SEQ ID NO: 151869 - RNA, 19 nt, Artificial Sequence
  Description of Artificial Sequence: Synthetic oligonucleotide
  Antisense strand to SEQ ID NO: 151868
uuagugaugaccauaagca

SEQ ID NO: 151870 - RNA, 19 nt, Artificial Sequence
  Description of Artificial Sequence: Synthetic oligonucleotide
  Sense strand starting at position 3893 of SEQ ID NO: 1951
guuaaugagccucaucauu

SEQ ID NO: 151871 - RNA, 19 nt, Artificial Sequence
  Description of Artificial Sequence: Synthetic oligonucleotide
  Antisense strand to SEQ ID NO: 151870
aaugaugaggcucauuaac

SEQ ID NO: 151872 - RNA, 19 nt, Artificial Sequence
  Description of Artificial Sequence: Synthetic oligonucleotide
  Sense strand starting at position 3748 of SEQ ID NO: 1951
uuucuaagucauuggaugu

SEQ ID NO: 151873 - RNA, 19 nt, Artificial Sequence
  Description of Artificial Sequence: Synthetic oligonucleotide
  Antisense strand to SEQ ID NO: 151872
acauccaaugacuuagaaa

SEQ ID NO: 151874 - RNA, 19 nt, Artificial Sequence
  Description of Artificial Sequence: Synthetic oligonucleotide
  Sense strand starting at position 3694 of SEQ ID NO: 1951
uuccaaugugaaggacuaa

SEQ ID NO: 151875 - RNA, 19 nt, Artificial Sequence
  Description of Artificial Sequence: Synthetic oligonucleotide
  Antisense strand to SEQ ID NO: 151874
uuaguccuucacauuggaa

SEQ ID NO: 151876 - RNA, 19 nt, Artificial Sequence
  Description of Artificial Sequence: Synthetic oligonucleotide
  Sense strand starting at position 3688 of SEQ ID NO: 1951
uucccuuuccaaugugaag

SEQ ID NO: 151877 - RNA, 19 nt, Artificial Sequence
  Description of Artificial Sequence: Synthetic oligonucleotide
  Antisense strand to SEQ ID NO: 151876
cuucacauuggaaagggaa

SEQ ID NO: 151878 - RNA, 19 nt, Artificial Sequence
  Description of Artificial Sequence: Synthetic oligonucleotide
  Sense strand starting at position 3651 of SEQ ID NO: 1951
gguauuuguuaauaccgaa

SEQ ID NO: 151879 - RNA, 19 nt, Artificial Sequence
  Description of Artificial Sequence: Synthetic oligonucleotide
  Antisense strand to SEQ ID NO: 151878
uucgguauuaacaaauacc

SEQ ID NO: 151880 - RNA, 19 nt, Artificial Sequence
  Description of Artificial Sequence: Synthetic oligonucleotide
  Sense strand starting at position 3578 of SEQ ID NO: 1951
cuggcuguccacuggauau

SEQ ID NO: 151881 - RNA, 19 nt, Artificial Sequence
  Description of Artificial Sequence: Synthetic oligonucleotide
  Antisense strand to SEQ ID NO: 151880
auauccaguggacagccag

SEQ ID NO: 151882 - RNA, 19 nt, Artificial Sequence
  Description of Artificial Sequence: Synthetic oligonucleotide
  Sense strand starting at position 3492 of SEQ ID NO: 1951
gcaauaugauugguggauc

SEQ ID NO: 151883 - RNA, 19 nt, Artificial Sequence
  Description of Artificial Sequence: Synthetic oligonucleotide
  Antisense strand to SEQ ID NO: 151882
gauccaccaaucauauugc

SEQ ID NO: 151884 - RNA, 19 nt, Artificial Sequence
  Description of Artificial Sequence: Synthetic oligonucleotide
  Sense strand starting at position 3491 of SEQ ID NO: 1951
agcaauaugauugguggau

SEQ ID NO: 151885 - RNA, 19 nt, Artificial Sequence
  Description of Artificial Sequence: Synthetic oligonucleotide
  Antisense strand to SEQ ID NO: 151884
auccaccaaucauauugcu

SEQ ID NO: 151886 - RNA, 19 nt, Artificial Sequence
  Description of Artificial Sequence: Synthetic oligonucleotide
  Sense strand starting at position 3462 of SEQ ID NO: 1951
guuucuugaaacugaugga

SEQ ID NO: 151887 - RNA, 19 nt, Artificial Sequence
  Description of Artificial Sequence: Synthetic oligonucleotide
  Antisense strand to SEQ ID NO: 151886
uccaucaguuucaagaaac

SEQ ID NO: 151888 - RNA, 19 nt, Artificial Sequence
  Description of Artificial Sequence: Synthetic oligonucleotide
  Sense strand starting at position 3443 of SEQ ID NO: 1951
ggcacugacauguacaguu

SEQ ID NO: 151889 - RNA, 19 nt, Artificial Sequence
  Description of Artificial Sequence: Synthetic oligonucleotide
  Antisense strand to SEQ ID NO: 151888
aacuguacaugucagugcc

SEQ ID NO: 151890 - RNA, 19 nt, Artificial Sequence
  Description of Artificial Sequence: Synthetic oligonucleotide
  Sense strand starting at position 3327 of SEQ ID NO: 1951
ugauuacaccucugaauag

SEQ ID NO: 151891 - RNA, 19 nt, Artificial Sequence
  Description of Artificial Sequence: Synthetic oligonucleotide
  Antisense strand to SEQ ID NO: 151890
cuauucagagguguaauca

SEQ ID NO: 151892 - RNA, 19 nt, Artificial Sequence
  Description of Artificial Sequence: Synthetic oligonucleotide
  Sense strand starting at position 3271 of SEQ ID NO: 1951
gaggcuucggcagaaagau

SEQ ID NO: 151893 - RNA, 19 nt, Artificial Sequence
  Description of Artificial Sequence: Synthetic oligonucleotide
  Antisense strand to SEQ ID NO: 151892
aucuuucugccgaagccuc

SEQ ID NO: 151894 - RNA, 19 nt, Artificial Sequence
  Description of Artificial Sequence: Synthetic oligonucleotide
  Sense strand starting at position 3110 of SEQ ID NO: 1951
ccuagaagauucuaaggau

SEQ ID NO: 151895 - RNA, 19 nt, Artificial Sequence
  Description of Artificial Sequence: Synthetic oligonucleotide
  Antisense strand to SEQ ID NO: 151894
auccuuagaaucuucuagg

SEQ ID NO: 151896 - RNA, 19 nt, Artificial Sequence
  Description of Artificial Sequence: Synthetic oligonucleotide
  Sense strand starting at position 3081 of SEQ ID NO: 1951
uuugcaguaucagcauuua

SEQ ID NO: 151897 - RNA, 19 nt, Artificial Sequence
  Description of Artificial Sequence: Synthetic oligonucleotide
  Antisense strand to SEQ ID NO: 151896
uaaaugcugauacugcaaa

SEQ ID NO: 151898 - RNA, 19 nt, Artificial Sequence
  Description of Artificial Sequence: Synthetic oligonucleotide
  Sense strand starting at position 3012 of SEQ ID NO: 1951
gaugcacguccuuaaacuu

SEQ ID NO: 151899 - RNA, 19 nt, Artificial Sequence
  Description of Artificial Sequence: Synthetic oligonucleotide
  Antisense strand to SEQ ID NO: 151898
aaguuuaaggacgugcauc

SEQ ID NO: 151900 - RNA, 19 nt, Artificial Sequence
  Description of Artificial Sequence: Synthetic oligonucleotide
  Sense strand starting at position 2993 of SEQ ID NO: 1951
cggaccugucuccaaagau

SEQ ID NO: 151901 - RNA, 19 nt, Artificial Sequence
  Description of Artificial Sequence: Synthetic oligonucleotide
  Antisense strand to SEQ ID NO: 151900
aucuuuggagacagguccg

SEQ ID NO: 151902 - RNA, 19 nt, Artificial Sequence
  Description of Artificial Sequence: Synthetic oligonucleotide
  Sense strand starting at position 2847 of SEQ ID NO: 1951
ugugaagguugaucaaaga

SEQ ID NO: 151903 - RNA, 19 nt, Artificial Sequence
  Description of Artificial Sequence: Synthetic oligonucleotide
  Antisense strand to SEQ ID NO: 151902
ucuuugaucaaccuucaca

SEQ ID NO: 151904 - RNA, 19 nt, Artificial Sequence
  Description of Artificial Sequence: Synthetic oligonucleotide
  Sense strand starting at position 2844 of SEQ ID NO: 1951
acaugugaagguugaucaa

SEQ ID NO: 151905 - RNA, 19 nt, Artificial Sequence
  Description of Artificial Sequence: Synthetic oligonucleotide
  Antisense strand to SEQ ID NO: 151904
uugaucaaccuucacaugu

SEQ ID NO: 151906 - RNA, 19 nt, Artificial Sequence
  Description of Artificial Sequence: Synthetic oligonucleotide
  Sense strand starting at position 2841 of SEQ ID NO: 1951
cucacaugugaagguugau

SEQ ID NO: 151907 - RNA, 19 nt, Artificial Sequence
  Description of Artificial Sequence: Synthetic oligonucleotide
  Antisense strand to SEQ ID NO: 151906
aucaaccuucacaugugag

SEQ ID NO: 151908 - RNA, 19 nt, Artificial Sequence
  Description of Artificial Sequence: Synthetic oligonucleotide
  Sense strand starting at position 2464 of SEQ ID NO: 1951
cuuccauguuuauuggaga

SEQ ID NO: 151909 - RNA, 19 nt, Artificial Sequence
  Description of Artificial Sequence: Synthetic oligonucleotide
  Antisense strand to SEQ ID NO: 151908
ucuccaauaaacauggaag

SEQ ID NO: 151910 - RNA, 19 nt, Artificial Sequence
  Description of Artificial Sequence: Synthetic oligonucleotide
  Sense strand starting at position 2329 of SEQ ID NO: 1951
uggauacaaugucuaaauc

SEQ ID NO: 151911 - RNA, 19 nt, Artificial Sequence
  Description of Artificial Sequence: Synthetic oligonucleotide
  Antisense strand to SEQ ID NO: 151910
gauuuagacauuguaucca

SEQ ID NO: 151912 - RNA, 19 nt, Artificial Sequence
  Description of Artificial Sequence: Synthetic oligonucleotide
  Sense strand starting at position 2255 of SEQ ID NO: 1951
ggcaguugagagugaauuc

SEQ ID NO: 151913 - RNA, 19 nt, Artificial Sequence
  Description of Artificial Sequence: Synthetic oligonucleotide
  Antisense strand to SEQ ID NO: 151912
gaauucacucucaacugcc

SEQ ID NO: 151914 - RNA, 19 nt, Artificial Sequence
  Description of Artificial Sequence: Synthetic oligonucleotide
  Sense strand starting at position 2180 of SEQ ID NO: 1951
gcggacucaugaaagguga

SEQ ID NO: 151915 - RNA, 19 nt, Artificial Sequence
  Description of Artificial Sequence: Synthetic oligonucleotide
  Antisense strand to SEQ ID NO: 151914
ucaccuuucaugaguccgc

SEQ ID NO: 151916 - RNA, 19 nt, Artificial Sequence
  Description of Artificial Sequence: Synthetic oligonucleotide
  Sense strand starting at position 2017 of SEQ ID NO: 1951
gagcguucucuagcccuua

SEQ ID NO: 151917 - RNA, 19 nt, Artificial Sequence
  Description of Artificial Sequence: Synthetic oligonucleotide
  Antisense strand to SEQ ID NO: 151916
uaagggcuagagaacgcuc

SEQ ID NO: 151918 - RNA, 19 nt, Artificial Sequence
  Description of Artificial Sequence: Synthetic oligonucleotide
  Sense strand starting at position 1616 of SEQ ID NO: 1951
agagauuccgcagaguaca

SEQ ID NO: 151919 - RNA, 19 nt, Artificial Sequence
  Description of Artificial Sequence: Synthetic oligonucleotide
  Antisense strand to SEQ ID NO: 151918
uguacucugcggaaucucu

SEQ ID NO: 151920 - RNA, 19 nt, Artificial Sequence
  Description of Artificial Sequence: Synthetic oligonucleotide
  Sense strand starting at position 1613 of SEQ ID NO: 1951
cccagagauuccgcagagu

SEQ ID NO: 151921 - RNA, 19 nt, Artificial Sequence
  Description of Artificial Sequence: Synthetic oligonucleotide
  Antisense strand to SEQ ID NO: 151920
acucugcggaaucucuggg

SEQ ID NO: 151922 - RNA, 19 nt, Artificial Sequence
  Description of Artificial Sequence: Synthetic oligonucleotide
  Sense strand starting at position 1508 of SEQ ID NO: 1951
aggugagauccuuggauua

SEQ ID NO: 151923 - RNA, 19 nt, Artificial Sequence
  Description of Artificial Sequence: Synthetic oligonucleotide
  Antisense strand to SEQ ID NO: 151922
uaauccaaggaucucaccu

SEQ ID NO: 151924 - RNA, 19 nt, Artificial Sequence
  Description of Artificial Sequence: Synthetic oligonucleotide
  Sense strand starting at position 1216 of SEQ ID NO: 1951
gcaguuuggcauuaaggag

SEQ ID NO: 151925 - RNA, 19 nt, Artificial Sequence
  Description of Artificial Sequence: Synthetic oligonucleotide
  Antisense strand to SEQ ID NO: 151924
cuccuuaaugccaaacugc

SEQ ID NO: 151926 - RNA, 19 nt, Artificial Sequence
  Description of Artificial Sequence: Synthetic oligonucleotide
  Sense strand starting at position 1076 of SEQ ID NO: 1951
cgaggcguccuggagaaga

SEQ ID NO: 151927 - RNA, 19 nt, Artificial Sequence
  Description of Artificial Sequence: Synthetic oligonucleotide
  Antisense strand to SEQ ID NO: 151926
ucuucuccaggacgccucg

SEQ ID NO: 151928 - RNA, 19 nt, Artificial Sequence
  Description of Artificial Sequence: Synthetic oligonucleotide
  Sense strand starting at position 987 of SEQ ID NO: 1951
gcuuuaguacugcccggua

SEQ ID NO: 151929 - RNA, 19 nt, Artificial Sequence
  Description of Artificial Sequence: Synthetic oligonucleotide
  Antisense strand to SEQ ID NO: 151928
uaccgggcaguacuaaagc

SEQ ID NO: 151930 - RNA, 19 nt, Artificial Sequence
  Description of Artificial Sequence: Synthetic oligonucleotide
  Sense strand starting at position 979 of SEQ ID NO: 1951
gccuaugagcuuuaguacu

SEQ ID NO: 151931 - RNA, 19 nt, Artificial Sequence
  Description of Artificial Sequence: Synthetic oligonucleotide
  Antisense strand to SEQ ID NO: 151930
aguacuaaagcucauaggc

SEQ ID NO: 151932 - RNA, 19 nt, Artificial Sequence
  Description of Artificial Sequence: Synthetic oligonucleotide
  Sense strand starting at position 345 of SEQ ID NO: 1951
cuguccaccuguguuagaa

SEQ ID NO: 151933 - RNA, 19 nt, Artificial Sequence
  Description of Artificial Sequence: Synthetic oligonucleotide
  Antisense strand to SEQ ID NO: 151932
uucuaacacagguggacag

SEQ ID NO: 151934 - RNA, 19 nt, Artificial Sequence
  Description of Artificial Sequence: Synthetic oligonucleotide
  Sense strand starting at position 344 of SEQ ID NO: 1951
acuguccaccuguguuaga

SEQ ID NO: 151935 - RNA, 19 nt, Artificial Sequence
  Description of Artificial Sequence: Synthetic oligonucleotide
  Antisense strand to SEQ ID NO: 151934
ucuaacacagguggacagu

SEQ ID NO: 151936 - RNA, 19 nt, Artificial Sequence
  Description of Artificial Sequence: Synthetic oligonucleotide
  Sense strand starting at position 305 of SEQ ID NO: 1951
aagguuugacugcauuaau

SEQ ID NO: 151937 - RNA, 19 nt, Artificial Sequence
  Description of Artificial Sequence: Synthetic oligonucleotide
  Antisense strand to SEQ ID NO: 151936
auuaaugcagucaaaccuu

SEQ ID NO: 151938 - RNA, 19 nt, Artificial Sequence
  Description of Artificial Sequence: Synthetic oligonucleotide
  Sense strand starting at position 245 of SEQ ID NO: 1951
gguuuagacaacugugcuu

SEQ ID NO: 151939 - RNA, 19 nt, Artificial Sequence
  Description of Artificial Sequence: Synthetic oligonucleotide
  Antisense strand to SEQ ID NO: 151938
aagcacaguugucuaaacc

SEQ ID NO: 151940 - RNA, 19 nt, Artificial Sequence
  Description of Artificial Sequence: Synthetic oligonucleotide
  Sense strand starting at position 124 of SEQ ID NO: 1951
gccagauaggcacaucauu

SEQ ID NO: 151941 - RNA, 19 nt, Artificial Sequence
  Description of Artificial Sequence: Synthetic oligonucleotide
  Antisense strand to SEQ ID NO: 151940
aaugaugugccuaucuggc

SEQ ID NO: 151942 - RNA, 19 nt, Artificial Sequence
  Description of Artificial Sequence: Synthetic oligonucleotide
  Sense strand starting at position 113 of SEQ ID NO: 1951
aaaguacacuggccagaua

SEQ ID NO: 151943 - RNA, 19 nt, Artificial Sequence
  Description of Artificial Sequence: Synthetic oligonucleotide
  Antisense strand to SEQ ID NO: 151942
uaucuggccaguguacuuu

SEQ ID NO: 151944 - RNA, 19 nt, Artificial Sequence
  Description of Artificial Sequence: Synthetic oligonucleotide
  Sense strand starting at position 37 of SEQ ID NO: 1951
uacaguguugucuagucaa

SEQ ID NO: 151945 - RNA, 19 nt, Artificial Sequence
  Description of Artificial Sequence: Synthetic oligonucleotide
  Antisense strand to SEQ ID NO: 151944
uugacuagacaacacugua

SEQ ID NO: 151946 - RNA, 19 nt, Artificial Sequence
  Description of Artificial Sequence: Synthetic oligonucleotide
  Sense strand starting at position 3946 of SEQ ID NO: 1952
cuggaaaucugccuuuaua

SEQ ID NO: 151947 - RNA, 19 nt, Artificial Sequence
  Description of Artificial Sequence: Synthetic oligonucleotide
  Antisense strand to SEQ ID NO: 151946
uauaaaggcagauuuccag

SEQ ID NO: 151948 - RNA, 19 nt, Artificial Sequence
  Description of Artificial Sequence: Synthetic oligonucleotide
  Sense strand starting at position 3774 of SEQ ID NO: 1952
ccagcagggcaagauuaua

SEQ ID NO: 151949 - RNA, 19 nt, Artificial Sequence
  Description of Artificial Sequence: Synthetic oligonucleotide
  Antisense strand to SEQ ID NO: 151948
uauaaucuugcccugcugg

SEQ ID NO: 151950 - RNA, 19 nt, Artificial Sequence
  Description of Artificial Sequence: Synthetic oligonucleotide
  Sense strand starting at position 3216 of SEQ ID NO: 1952
cuaagcagugucuauauau

SEQ ID NO: 151951 - RNA, 19 nt, Artificial Sequence
  Description of Artificial Sequence: Synthetic oligonucleotide
  Antisense strand to SEQ ID NO: 151950
auauauagacacugcuuag

SEQ ID NO: 151952 - RNA, 19 nt, Artificial Sequence
  Description of Artificial Sequence: Synthetic oligonucleotide
  Sense strand starting at position 3212 of SEQ ID NO: 1952
auuucuaagcagugucuau

SEQ ID NO: 151953 - RNA, 19 nt, Artificial Sequence
  Description of Artificial Sequence: Synthetic oligonucleotide
  Antisense strand to SEQ ID NO: 151952
auagacacugcuuagaaau

SEQ ID NO: 151954 - RNA, 19 nt, Artificial Sequence
  Description of Artificial Sequence: Synthetic oligonucleotide
  Sense strand starting at position 2715 of SEQ ID NO: 1952
gguuaagaauguucuauca

SEQ ID NO: 151955 - RNA, 19 nt, Artificial Sequence
  Description of Artificial Sequence: Synthetic oligonucleotide
  Antisense strand to SEQ ID NO: 151954
ugauagaacauucuuaacc

SEQ ID NO: 151956 - RNA, 19 nt, Artificial Sequence
  Description of Artificial Sequence: Synthetic oligonucleotide
  Sense strand starting at position 2712 of SEQ ID NO: 1952
cuggguuaagaauguucua

SEQ ID NO: 151957 - RNA, 19 nt, Artificial Sequence
  Description of Artificial Sequence: Synthetic oligonucleotide
  Antisense strand to SEQ ID NO: 151956
uagaacauucuuaacccag

SEQ ID NO: 151958 - RNA, 19 nt, Artificial Sequence
  Description of Artificial Sequence: Synthetic oligonucleotide
  Sense strand starting at position 2670 of SEQ ID NO: 1952
auauuuguuugccuuucua

SEQ ID NO: 151959 - RNA, 19 nt, Artificial Sequence
  Description of Artificial Sequence: Synthetic oligonucleotide
  Antisense strand to SEQ ID NO: 151958
uagaaaggcaaacaaauau

SEQ ID NO: 151960 - RNA, 19 nt, Artificial Sequence
  Description of Artificial Sequence: Synthetic oligonucleotide
  Sense strand starting at position 2605 of SEQ ID NO: 1952
aucugugaaugguuacaaa

SEQ ID NO: 151961 - RNA, 19 nt, Artificial Sequence
  Description of Artificial Sequence: Synthetic oligonucleotide
  Antisense strand to SEQ ID NO: 151960
uuuguaaccauucacagau

SEQ ID NO: 151962 - RNA, 19 nt, Artificial Sequence
  Description of Artificial Sequence: Synthetic oligonucleotide
  Sense strand starting at position 2598 of SEQ ID NO: 1952
aagguuaaucugugaaugg

SEQ ID NO: 151963 - RNA, 19 nt, Artificial Sequence
  Description of Artificial Sequence: Synthetic oligonucleotide
  Antisense strand to SEQ ID NO: 151962
ccauucacagauuaaccuu

SEQ ID NO: 151964 - RNA, 19 nt, Artificial Sequence
  Description of Artificial Sequence: Synthetic oligonucleotide
  Sense strand starting at position 2597 of SEQ ID NO: 1952
aaagguuaaucugugaaug

SEQ ID NO: 151965 - RNA, 19 nt, Artificial Sequence
  Description of Artificial Sequence: Synthetic oligonucleotide
  Antisense strand to SEQ ID NO: 151964
cauucacagauuaaccuuu

SEQ ID NO: 151966 - RNA, 19 nt, Artificial Sequence
  Description of Artificial Sequence: Synthetic oligonucleotide
  Sense strand starting at position 2594 of SEQ ID NO: 1952
cagaaagguuaaucuguga

SEQ ID NO: 151967 - RNA, 19 nt, Artificial Sequence
  Description of Artificial Sequence: Synthetic oligonucleotide
  Antisense strand to SEQ ID NO: 151966
ucacagauuaaccuuucug

SEQ ID NO: 151968 - RNA, 19 nt, Artificial Sequence
  Description of Artificial Sequence: Synthetic oligonucleotide
  Sense strand starting at position 2549 of SEQ ID NO: 1952
gauguuuagagcugaaagg

SEQ ID NO: 151969 - RNA, 19 nt, Artificial Sequence
  Description of Artificial Sequence: Synthetic oligonucleotide
  Antisense strand to SEQ ID NO: 151968
ccuuucagcucuaaacauc

SEQ ID NO: 151970 - RNA, 19 nt, Artificial Sequence
  Description of Artificial Sequence: Synthetic oligonucleotide
  Sense strand starting at position 2400 of SEQ ID NO: 1952
uuagcugguaugggaaauu

SEQ ID NO: 151971 - RNA, 19 nt, Artificial Sequence
  Description of Artificial Sequence: Synthetic oligonucleotide
  Antisense strand to SEQ ID NO: 151970
aauuucccauaccagcuaa

SEQ ID NO: 151972 - RNA, 19 nt, Artificial Sequence
  Description of Artificial Sequence: Synthetic oligonucleotide
  Sense strand starting at position 2109 of SEQ ID NO: 1952
ggauguuugugacuuuaaa

SEQ ID NO: 151973 - RNA, 19 nt, Artificial Sequence
  Description of Artificial Sequence: Synthetic oligonucleotide
  Antisense strand to SEQ ID NO: 151972
uuuaaagucacaaacaucc

SEQ ID NO: 151974 - RNA, 19 nt, Artificial Sequence
  Description of Artificial Sequence: Synthetic oligonucleotide
  Sense strand starting at position 1858 of SEQ ID NO: 1952
aggauuaacugacacacaa

SEQ ID NO: 151975 - RNA, 19 nt, Artificial Sequence
  Description of Artificial Sequence: Synthetic oligonucleotide
  Antisense strand to SEQ ID NO: 151974
uugugugucaguuaauccu

SEQ ID NO: 151976 - RNA, 19 nt, Artificial Sequence
  Description of Artificial Sequence: Synthetic oligonucleotide
  Sense strand starting at position 1711 of SEQ ID NO: 1952
accuaaaguugguuaaauu

SEQ ID NO: 151977 - RNA, 19 nt, Artificial Sequence
  Description of Artificial Sequence: Synthetic oligonucleotide
  Antisense strand to SEQ ID NO: 151976
aauuuaaccaacuuuaggu

SEQ ID NO: 151978 - RNA, 19 nt, Artificial Sequence
  Description of Artificial Sequence: Synthetic oligonucleotide
  Sense strand starting at position 1709 of SEQ ID NO: 1952
ucaccuaaaguugguuaaa

SEQ ID NO: 151979 - RNA, 19 nt, Artificial Sequence
  Description of Artificial Sequence: Synthetic oligonucleotide
  Antisense strand to SEQ ID NO: 151978
uuuaaccaacuuuagguga

SEQ ID NO: 151980 - RNA, 19 nt, Artificial Sequence
  Description of Artificial Sequence: Synthetic oligonucleotide
  Sense strand starting at position 1668 of SEQ ID NO: 1952
caguacucucgugacuauc

SEQ ID NO: 151981 - RNA, 19 nt, Artificial Sequence
  Description of Artificial Sequence: Synthetic oligonucleotide
  Antisense strand to SEQ ID NO: 151980
gauagucacgagaguacug

SEQ ID NO: 151982 - RNA, 19 nt, Artificial Sequence
  Description of Artificial Sequence: Synthetic oligonucleotide
  Sense strand starting at position 1509 of SEQ ID NO: 1952
uuagcuggacucggaaaua

SEQ ID NO: 151983 - RNA, 19 nt, Artificial Sequence
  Description of Artificial Sequence: Synthetic oligonucleotide
  Antisense strand to SEQ ID NO: 151982
uauuuccgaguccagcuaa

SEQ ID NO: 151984 - RNA, 19 nt, Artificial Sequence
  Description of Artificial Sequence: Synthetic oligonucleotide
  Sense strand starting at position 1508 of SEQ ID NO: 1952
auuagcuggacucggaaau

SEQ ID NO: 151985 - RNA, 19 nt, Artificial Sequence
  Description of Artificial Sequence: Synthetic oligonucleotide
  Antisense strand to SEQ ID NO: 151984
auuuccgaguccagcuaau

SEQ ID NO: 151986 - RNA, 19 nt, Artificial Sequence
  Description of Artificial Sequence: Synthetic oligonucleotide
  Sense strand starting at position 1412 of SEQ ID NO: 1952
gaaagaaagugccugcaaa

SEQ ID NO: 151987 - RNA, 19 nt, Artificial Sequence
  Description of Artificial Sequence: Synthetic oligonucleotide
  Antisense strand to SEQ ID NO: 151986
uuugcaggcacuuucuuuc

SEQ ID NO: 151988 - RNA, 19 nt, Artificial Sequence
  Description of Artificial Sequence: Synthetic oligonucleotide
  Sense strand starting at position 1397 of SEQ ID NO: 1952
uccugagugggaugcgaaa

SEQ ID NO: 151989 - RNA, 19 nt, Artificial Sequence
  Description of Artificial Sequence: Synthetic oligonucleotide
  Antisense strand to SEQ ID NO: 151988
uuucgcaucccacucagga

SEQ ID NO: 151990 - RNA, 19 nt, Artificial Sequence
  Description of Artificial Sequence: Synthetic oligonucleotide
  Sense strand starting at position 1361 of SEQ ID NO: 1952
acauuucuuugagagauaa

SEQ ID NO: 151991 - RNA, 19 nt, Artificial Sequence
  Description of Artificial Sequence: Synthetic oligonucleotide
  Antisense strand to SEQ ID NO: 151990
uuaucucucaaagaaaugu

SEQ ID NO: 151992 - RNA, 19 nt, Artificial Sequence
  Description of Artificial Sequence: Synthetic oligonucleotide
  Sense strand starting at position 1094 of SEQ ID NO: 1952
gaccucaguggugagguaa

SEQ ID NO: 151993 - RNA, 19 nt, Artificial Sequence
  Description of Artificial Sequence: Synthetic oligonucleotide
  Antisense strand to SEQ ID NO: 151992
uuaccucaccacugagguc

SEQ ID NO: 151994 - RNA, 19 nt, Artificial Sequence
  Description of Artificial Sequence: Synthetic oligonucleotide
  Sense strand starting at position 912 of SEQ ID NO: 1952
auauccuuuguuggagaaa

SEQ ID NO: 151995 - RNA, 19 nt, Artificial Sequence
  Description of Artificial Sequence: Synthetic oligonucleotide
  Antisense strand to SEQ ID NO: 151994
uuucuccaacaaaggauau

SEQ ID NO: 151996 - RNA, 19 nt, Artificial Sequence
  Description of Artificial Sequence: Synthetic oligonucleotide
  Sense strand starting at position 910 of SEQ ID NO: 1952
ucauauccuuuguuggaga

SEQ ID NO: 151997 - RNA, 19 nt, Artificial Sequence
  Description of Artificial Sequence: Synthetic oligonucleotide
  Antisense strand to SEQ ID NO: 151996
ucuccaacaaaggauauga

SEQ ID NO: 151998 - RNA, 19 nt, Artificial Sequence
  Description of Artificial Sequence: Synthetic oligonucleotide
  Sense strand starting at position 908 of SEQ ID NO: 1952
ucucauauccuuuguugga

SEQ ID NO: 151999 - RNA, 19 nt, Artificial Sequence
  Description of Artificial Sequence: Synthetic oligonucleotide
  Antisense strand to SEQ ID NO: 151998
uccaacaaaggauaugaga

SEQ ID NO: 152000 - RNA, 19 nt, Artificial Sequence
  Description of Artificial Sequence: Synthetic oligonucleotide
  Sense strand starting at position 897 of SEQ ID NO: 1952
aaagaagugugucucauau

SEQ ID NO: 152001 - RNA, 19 nt, Artificial Sequence
  Description of Artificial Sequence: Synthetic oligonucleotide
  Antisense strand to SEQ ID NO: 152000
auaugagacacacuucuuu

SEQ ID NO: 152002 - RNA, 19 nt, Artificial Sequence
  Description of Artificial Sequence: Synthetic oligonucleotide
  Sense strand starting at position 810 of SEQ ID NO: 1952
aaagaagugugucuccaug

SEQ ID NO: 152003 - RNA, 19 nt, Artificial Sequence
  Description of Artificial Sequence: Synthetic oligonucleotide
  Antisense strand to SEQ ID NO: 152002
cauggagacacacuucuuu

SEQ ID NO: 152004 - RNA, 19 nt, Artificial Sequence
  Description of Artificial Sequence: Synthetic oligonucleotide
  Sense strand starting at position 731 of SEQ ID NO: 1952
auuauauucugggcagaga

SEQ ID NO: 152005 - RNA, 19 nt, Artificial Sequence
  Description of Artificial Sequence: Synthetic oligonucleotide
  Antisense strand to SEQ ID NO: 152004
ucucugcccagaauauaau

SEQ ID NO: 152006 - RNA, 19 nt, Artificial Sequence
  Description of Artificial Sequence: Synthetic oligonucleotide
  Sense strand starting at position 700 of SEQ ID NO: 1952
cgggcuuuaaauuauaagu

SEQ ID NO: 152007 - RNA, 19 nt, Artificial Sequence
  Description of Artificial Sequence: Synthetic oligonucleotide
  Antisense strand to SEQ ID NO: 152006
acuuauaauuuaaagcccg

SEQ ID NO: 152008 - RNA, 19 nt, Artificial Sequence
  Description of Artificial Sequence: Synthetic oligonucleotide
  Sense strand starting at position 695 of SEQ ID NO: 1952
ugagacgggcuuuaaauua

SEQ ID NO: 152009 - RNA, 19 nt, Artificial Sequence
  Description of Artificial Sequence: Synthetic oligonucleotide
  Antisense strand to SEQ ID NO: 152008
uaauuuaaagcccgucuca

SEQ ID NO: 152010 - RNA, 19 nt, Artificial Sequence
  Description of Artificial Sequence: Synthetic oligonucleotide
  Sense strand starting at position 690 of SEQ ID NO: 1952
guauuugagacgggcuuua

SEQ ID NO: 152011 - RNA, 19 nt, Artificial Sequence
  Description of Artificial Sequence: Synthetic oligonucleotide
  Antisense strand to SEQ ID NO: 152010
uaaagcccgucucaaauac

SEQ ID NO: 152012 - RNA, 19 nt, Artificial Sequence
  Description of Artificial Sequence: Synthetic oligonucleotide
  Sense strand starting at position 658 of SEQ ID NO: 1952
uacaaagugcuguggauau

SEQ ID NO: 152013 - RNA, 19 nt, Artificial Sequence
  Description of Artificial Sequence: Synthetic oligonucleotide
  Antisense strand to SEQ ID NO: 152012
auauccacagcacuuugua

SEQ ID NO: 152014 - RNA, 19 nt, Artificial Sequence
  Description of Artificial Sequence: Synthetic oligonucleotide
  Sense strand starting at position 570 of SEQ ID NO: 1952
agucuuaggccucaaggau

SEQ ID NO: 152015 - RNA, 19 nt, Artificial Sequence
  Description of Artificial Sequence: Synthetic oligonucleotide
  Antisense strand to SEQ ID NO: 152014
auccuugaggccuaagacu

SEQ ID NO: 152016 - RNA, 19 nt, Artificial Sequence
  Description of Artificial Sequence: Synthetic oligonucleotide
  Sense strand starting at position 266 of SEQ ID NO: 1952
gucaaaccuccuuguauuu

SEQ ID NO: 152017 - RNA, 19 nt, Artificial Sequence
  Description of Artificial Sequence: Synthetic oligonucleotide
  Antisense strand to SEQ ID NO: 152016
aaauacaaggagguuugac

SEQ ID NO: 152018 - RNA, 19 nt, Artificial Sequence
  Description of Artificial Sequence: Synthetic oligonucleotide
  Sense strand starting at position 92 of SEQ ID NO: 1952
guguaauauagucacauga

SEQ ID NO: 152019 - RNA, 19 nt, Artificial Sequence
  Description of Artificial Sequence: Synthetic oligonucleotide
  Antisense strand to SEQ ID NO: 152018
ucaugugacuauauuacac

SEQ ID NO: 152020 - RNA, 19 nt, Artificial Sequence
  Description of Artificial Sequence: Synthetic oligonucleotide
  Sense strand starting at position 83 of SEQ ID NO: 1952
cuaccuaauguguaauaua

SEQ ID NO: 152021 - RNA, 19 nt, Artificial Sequence
  Description of Artificial Sequence: Synthetic oligonucleotide
  Antisense strand to SEQ ID NO: 152020
uauauuacacauuagguag

SEQ ID NO: 152022 - RNA, 19 nt, Artificial Sequence
  Description of Artificial Sequence: Synthetic oligonucleotide
  Sense strand starting at position 82 of SEQ ID NO: 1952
ucuaccuaauguguaauau

SEQ ID NO: 152023 - RNA, 19 nt, Artificial Sequence
  Description of Artificial Sequence: Synthetic oligonucleotide
  Antisense strand to SEQ ID NO: 152022
auauuacacauuagguaga

SEQ ID NO: 152024 - RNA, 19 nt, Artificial Sequence
  Description of Artificial Sequence: Synthetic oligonucleotide
  Sense strand starting at position 70 of SEQ ID NO: 1952
augucagacugaucuaccu

SEQ ID NO: 152025 - RNA, 19 nt, Artificial Sequence
  Description of Artificial Sequence: Synthetic oligonucleotide
  Antisense strand to SEQ ID NO: 152024
agguagaucagucugacau

SEQ ID NO: 152026 - RNA, 19 nt, Artificial Sequence
  Description of Artificial Sequence: Synthetic oligonucleotide
  Sense strand starting at position 86 of SEQ ID NO: 1953
gcauguuaacuuugacaga

SEQ ID NO: 152027 - RNA, 19 nt, Artificial Sequence
  Description of Artificial Sequence: Synthetic oligonucleotide
  Antisense strand to SEQ ID NO: 152026
ucugucaaaguuaacaugc

SEQ ID NO: 152028 - RNA, 19 nt, Artificial Sequence
  Description of Artificial Sequence: Synthetic oligonucleotide
  Sense strand starting at position 112 of SEQ ID NO: 1953
ugauaccaucaguguaaua

SEQ ID NO: 152029 - RNA, 19 nt, Artificial Sequence
  Description of Artificial Sequence: Synthetic oligonucleotide
  Antisense strand to SEQ ID NO: 152028
uauuacacugaugguauca

SEQ ID NO: 152030 - RNA, 19 nt, Artificial Sequence
  Description of Artificial Sequence: Synthetic oligonucleotide
  Sense strand starting at position 114 of SEQ ID NO: 1953
auaccaucaguguaauacu

SEQ ID NO: 152031 - RNA, 19 nt, Artificial Sequence
  Description of Artificial Sequence: Synthetic oligonucleotide
  Antisense strand to SEQ ID NO: 152030
aguauuacacugaugguau

SEQ ID NO: 152032 - RNA, 19 nt, Artificial Sequence
  Description of Artificial Sequence: Synthetic oligonucleotide
  Sense strand starting at position 272 of SEQ ID NO: 1953
cuguuauaugaagaaguuu

SEQ ID NO: 152033 - RNA, 19 nt, Artificial Sequence
  Description of Artificial Sequence: Synthetic oligonucleotide
  Antisense strand to SEQ ID NO: 152032
aaacuucuucauauaacag

SEQ ID NO: 152034 - RNA, 19 nt, Artificial Sequence
  Description of Artificial Sequence: Synthetic oligonucleotide
  Sense strand starting at position 627 of SEQ ID NO: 1953
ccuaguaucccguaauagg

SEQ ID NO: 152035 - RNA, 19 nt, Artificial Sequence
  Description of Artificial Sequence: Synthetic oligonucleotide
  Antisense strand to SEQ ID NO: 152034
ccuauuacgggauacuagg

SEQ ID NO: 152036 - RNA, 19 nt, Artificial Sequence
  Description of Artificial Sequence: Synthetic oligonucleotide
  Sense strand starting at position 689 of SEQ ID NO: 1953
aguugacagucucugacuu

SEQ ID NO: 152037 - RNA, 19 nt, Artificial Sequence
  Description of Artificial Sequence: Synthetic oligonucleotide
  Antisense strand to SEQ ID NO: 152036
aagucagagacugucaacu

SEQ ID NO: 152038 - RNA, 19 nt, Artificial Sequence
  Description of Artificial Sequence: Synthetic oligonucleotide
  Sense strand starting at position 693 of SEQ ID NO: 1953
gacagucucugacuugaau

SEQ ID NO: 152039 - RNA, 19 nt, Artificial Sequence
  Description of Artificial Sequence: Synthetic oligonucleotide
  Antisense strand to SEQ ID NO: 152038
auucaagucagagacuguc

SEQ ID NO: 152040 - RNA, 19 nt, Artificial Sequence
  Description of Artificial Sequence: Synthetic oligonucleotide
  Sense strand starting at position 699 of SEQ ID NO: 1953
cucugacuugaauaugcau

SEQ ID NO: 152041 - RNA, 19 nt, Artificial Sequence
  Description of Artificial Sequence: Synthetic oligonucleotide
  Antisense strand to SEQ ID NO: 152040
augcauauucaagucagag

SEQ ID NO: 152042 - RNA, 19 nt, Artificial Sequence
  Description of Artificial Sequence: Synthetic oligonucleotide
  Sense strand starting at position 706 of SEQ ID NO: 1953
uugaauaugcaucagucuu

SEQ ID NO: 152043 - RNA, 19 nt, Artificial Sequence
  Description of Artificial Sequence: Synthetic oligonucleotide
  Antisense strand to SEQ ID NO: 152042
aagacugaugcauauucaa

SEQ ID NO: 152044 - RNA, 19 nt, Artificial Sequence
  Description of Artificial Sequence: Synthetic oligonucleotide
  Sense strand starting at position 784 of SEQ ID NO: 1953
ccgcuuguagauuaagaaa

SEQ ID NO: 152045 - RNA, 19 nt, Artificial Sequence
  Description of Artificial Sequence: Synthetic oligonucleotide
  Antisense strand to SEQ ID NO: 152044
uuucuuaaucuacaagcgg

SEQ ID NO: 152046 - RNA, 19 nt, Artificial Sequence
  Description of Artificial Sequence: Synthetic oligonucleotide
  Sense strand starting at position 860 of SEQ ID NO: 1953
auggaaauguuucuaccaa

SEQ ID NO: 152047 - RNA, 19 nt, Artificial Sequence
  Description of Artificial Sequence: Synthetic oligonucleotide
  Antisense strand to SEQ ID NO: 152046
uugguagaaacauuuccau

SEQ ID NO: 152048 - RNA, 19 nt, Artificial Sequence
  Description of Artificial Sequence: Synthetic oligonucleotide
  Sense strand starting at position 924 of SEQ ID NO: 1953
cucccuuagcuugaaaguu

SEQ ID NO: 152049 - RNA, 19 nt, Artificial Sequence
  Description of Artificial Sequence: Synthetic oligonucleotide
  Antisense strand to SEQ ID NO: 152048
aacuuucaagcuaagggag

SEQ ID NO: 152050 - RNA, 19 nt, Artificial Sequence
  Description of Artificial Sequence: Synthetic oligonucleotide
  Sense strand starting at position 957 of SEQ ID NO: 1953
uugcacucugaguauuaag

SEQ ID NO: 152051 - RNA, 19 nt, Artificial Sequence
  Description of Artificial Sequence: Synthetic oligonucleotide
  Antisense strand to SEQ ID NO: 152050
cuuaauacucagagugcaa

SEQ ID NO: 152052 - RNA, 19 nt, Artificial Sequence
  Description of Artificial Sequence: Synthetic oligonucleotide
  Sense strand starting at position 968 of SEQ ID NO: 1953
guauuaaggaugcacugua

SEQ ID NO: 152053 - RNA, 19 nt, Artificial Sequence
  Description of Artificial Sequence: Synthetic oligonucleotide
  Antisense strand to SEQ ID NO: 152052
uacagugcauccuuaauac

SEQ ID NO: 152054 - RNA, 19 nt, Artificial Sequence
  Description of Artificial Sequence: Synthetic oligonucleotide
  Sense strand starting at position 1031 of SEQ ID NO: 1953
ugcuuucguguuucaggua

SEQ ID NO: 152055 - RNA, 19 nt, Artificial Sequence
  Description of Artificial Sequence: Synthetic oligonucleotide
  Antisense strand to SEQ ID NO: 152054
uaccugaaacacgaaagca

SEQ ID NO: 152056 - RNA, 19 nt, Artificial Sequence
  Description of Artificial Sequence: Synthetic oligonucleotide
  Sense strand starting at position 1101 of SEQ ID NO: 1953
acaauuaagucuuuaugga

SEQ ID NO: 152057 - RNA, 19 nt, Artificial Sequence
  Description of Artificial Sequence: Synthetic oligonucleotide
  Antisense strand to SEQ ID NO: 152056
uccauaaagacuuaauugu

SEQ ID NO: 152058 - RNA, 19 nt, Artificial Sequence
  Description of Artificial Sequence: Synthetic oligonucleotide
  Sense strand starting at position 1240 of SEQ ID NO: 1953
ugaauaugcucuuccgaga

SEQ ID NO: 152059 - RNA, 19 nt, Artificial Sequence
  Description of Artificial Sequence: Synthetic oligonucleotide
  Antisense strand to SEQ ID NO: 152058
ucucggaagagcauauuca

SEQ ID NO: 152060 - RNA, 19 nt, Artificial Sequence
  Description of Artificial Sequence: Synthetic oligonucleotide
  Sense strand starting at position 1245 of SEQ ID NO: 1953
augcucuuccgagaaaugu

SEQ ID NO: 152061 - RNA, 19 nt, Artificial Sequence
  Description of Artificial Sequence: Synthetic oligonucleotide
  Antisense strand to SEQ ID NO: 152060
acauuucucggaagagcau

SEQ ID NO: 152062 - RNA, 19 nt, Artificial Sequence
  Description of Artificial Sequence: Synthetic oligonucleotide
  Sense strand starting at position 1328 of SEQ ID NO: 1953
ggcacuggucuuggaucaa

SEQ ID NO: 152063 - RNA, 19 nt, Artificial Sequence
  Description of Artificial Sequence: Synthetic oligonucleotide
  Antisense strand to SEQ ID NO: 152062
uugauccaagaccagugcc

SEQ ID NO: 152064 - RNA, 19 nt, Artificial Sequence
  Description of Artificial Sequence: Synthetic oligonucleotide
  Sense strand starting at position 1959 of SEQ ID NO: 1953
ggguuucuccuacaccaua

SEQ ID NO: 152065 - RNA, 19 nt, Artificial Sequence
  Description of Artificial Sequence: Synthetic oligonucleotide
  Antisense strand to SEQ ID NO: 152064
uaugguguaggagaaaccc

SEQ ID NO: 152066 - RNA, 19 nt, Artificial Sequence
  Description of Artificial Sequence: Synthetic oligonucleotide
  Sense strand starting at position 2150 of SEQ ID NO: 1953
cuaguuaguccacgaagau

SEQ ID NO: 152067 - RNA, 19 nt, Artificial Sequence
  Description of Artificial Sequence: Synthetic oligonucleotide
  Antisense strand to SEQ ID NO: 152066
aucuucguggacuaacuag

SEQ ID NO: 152068 - RNA, 19 nt, Artificial Sequence
  Description of Artificial Sequence: Synthetic oligonucleotide
  Sense strand starting at position 2151 of SEQ ID NO: 1953
uaguuaguccacgaagaug

SEQ ID NO: 152069 - RNA, 19 nt, Artificial Sequence
  Description of Artificial Sequence: Synthetic oligonucleotide
  Antisense strand to SEQ ID NO: 152068
caucuucguggacuaacua

SEQ ID NO: 152070 - RNA, 19 nt, Artificial Sequence
  Description of Artificial Sequence: Synthetic oligonucleotide
  Sense strand starting at position 2200 of SEQ ID NO: 1953
uaaguuugucuugacuuga

SEQ ID NO: 152071 - RNA, 19 nt, Artificial Sequence
  Description of Artificial Sequence: Synthetic oligonucleotide
  Antisense strand to SEQ ID NO: 152070
ucaagucaagacaaacuua

SEQ ID NO: 152072 - RNA, 19 nt, Artificial Sequence
  Description of Artificial Sequence: Synthetic oligonucleotide
  Sense strand starting at position 2327 of SEQ ID NO: 1953
acgggaauuagcgaggacu

SEQ ID NO: 152073 - RNA, 19 nt, Artificial Sequence
  Description of Artificial Sequence: Synthetic oligonucleotide
  Antisense strand to SEQ ID NO: 152072
aguccucgcuaauucccgu

SEQ ID NO: 152074 - RNA, 19 nt, Artificial Sequence
  Description of Artificial Sequence: Synthetic oligonucleotide
  Sense strand starting at position 2329 of SEQ ID NO: 1953
gggaauuagcgaggacuuu

SEQ ID NO: 152075 - RNA, 19 nt, Artificial Sequence
  Description of Artificial Sequence: Synthetic oligonucleotide
  Antisense strand to SEQ ID NO: 152074
aaaguccucgcuaauuccc

SEQ ID NO: 152076 - RNA, 19 nt, Artificial Sequence
  Description of Artificial Sequence: Synthetic oligonucleotide
  Sense strand starting at position 2432 of SEQ ID NO: 1953
cguggugaucucgcuugau

SEQ ID NO: 152077 - RNA, 19 nt, Artificial Sequence
  Description of Artificial Sequence: Synthetic oligonucleotide
  Antisense strand to SEQ ID NO: 152076
aucaagcgagaucaccacg

SEQ ID NO: 152078 - RNA, 19 nt, Artificial Sequence
  Description of Artificial Sequence: Synthetic oligonucleotide
  Sense strand starting at position 2686 of SEQ ID NO: 1953
cacccuugacgcgaaucau

SEQ ID NO: 152079 - RNA, 19 nt, Artificial Sequence
  Description of Artificial Sequence: Synthetic oligonucleotide
  Antisense strand to SEQ ID NO: 152078
augauucgcgucaagggug

SEQ ID NO: 152080 - RNA, 19 nt, Artificial Sequence
  Description of Artificial Sequence: Synthetic oligonucleotide
  Sense strand starting at position 2756 of SEQ ID NO: 1953
agcugcuuugguuaacaga

SEQ ID NO: 152081 - RNA, 19 nt, Artificial Sequence
  Description of Artificial Sequence: Synthetic oligonucleotide
  Antisense strand to SEQ ID NO: 152080
ucuguuaaccaaagcagcu

SEQ ID NO: 152082 - RNA, 19 nt, Artificial Sequence
  Description of Artificial Sequence: Synthetic oligonucleotide
  Sense strand starting at position 2781 of SEQ ID NO: 1953
cguaguauagcagagauaa

SEQ ID NO: 152083 - RNA, 19 nt, Artificial Sequence
  Description of Artificial Sequence: Synthetic oligonucleotide
  Antisense strand to SEQ ID NO: 152082
uuaucucugcuauacuacg

SEQ ID NO: 152084 - RNA, 19 nt, Artificial Sequence
  Description of Artificial Sequence: Synthetic oligonucleotide
  Sense strand starting at position 2864 of SEQ ID NO: 1953
aggaauugugcugacaauu

SEQ ID NO: 152085 - RNA, 19 nt, Artificial Sequence
  Description of Artificial Sequence: Synthetic oligonucleotide
  Antisense strand to SEQ ID NO: 152084
aauugucagcacaauuccu

SEQ ID NO: 152086 - RNA, 19 nt, Artificial Sequence
  Description of Artificial Sequence: Synthetic oligonucleotide
  Sense strand starting at position 2881 of SEQ ID NO: 1953
uuuggauaugccgaggaga

SEQ ID NO: 152087 - RNA, 19 nt, Artificial Sequence
  Description of Artificial Sequence: Synthetic oligonucleotide
  Antisense strand to SEQ ID NO: 152086
ucuccucggcauauccaaa

SEQ ID NO: 152088 - RNA, 19 nt, Artificial Sequence
  Description of Artificial Sequence: Synthetic oligonucleotide
  Sense strand starting at position 2883 of SEQ ID NO: 1953
uggauaugccgaggagaag

SEQ ID NO: 152089 - RNA, 19 nt, Artificial Sequence
  Description of Artificial Sequence: Synthetic oligonucleotide
  Antisense strand to SEQ ID NO: 152088
cuucuccucggcauaucca

SEQ ID NO: 152090 - RNA, 19 nt, Artificial Sequence
  Description of Artificial Sequence: Synthetic oligonucleotide
  Sense strand starting at position 2928 of SEQ ID NO: 1953
aggugaaagcucuggacuu

SEQ ID NO: 152091 - RNA, 19 nt, Artificial Sequence
  Description of Artificial Sequence: Synthetic oligonucleotide
  Antisense strand to SEQ ID NO: 152090
aaguccagagcuuucaccu

SEQ ID NO: 152092 - RNA, 19 nt, Artificial Sequence
  Description of Artificial Sequence: Synthetic oligonucleotide
  Sense strand starting at position 2930 of SEQ ID NO: 1953
gugaaagcucuggacuuaa

SEQ ID NO: 152093 - RNA, 19 nt, Artificial Sequence
  Description of Artificial Sequence: Synthetic oligonucleotide
  Antisense strand to SEQ ID NO: 152092
uuaaguccagagcuuucac

SEQ ID NO: 152094 - RNA, 19 nt, Artificial Sequence
  Description of Artificial Sequence: Synthetic oligonucleotide
  Sense strand starting at position 2963 of SEQ ID NO: 1953
gagucauaugcugagguug

SEQ ID NO: 152095 - RNA, 19 nt, Artificial Sequence
  Description of Artificial Sequence: Synthetic oligonucleotide
  Antisense strand to SEQ ID NO: 152094
caaccucagcauaugacuc

SEQ ID NO: 152096 - RNA, 19 nt, Artificial Sequence
  Description of Artificial Sequence: Synthetic oligonucleotide
  Sense strand starting at position 3184 of SEQ ID NO: 1953
ccagaaaguguugagccua

SEQ ID NO: 152097 - RNA, 19 nt, Artificial Sequence
  Description of Artificial Sequence: Synthetic oligonucleotide
  Antisense strand to SEQ ID NO: 152096
uaggcucaacacuuucugg

SEQ ID NO: 152098 - RNA, 19 nt, Artificial Sequence
  Description of Artificial Sequence: Synthetic oligonucleotide
  Sense strand starting at position 3326 of SEQ ID NO: 1953
gccacaucugcugaugaag

SEQ ID NO: 152099 - RNA, 19 nt, Artificial Sequence
  Description of Artificial Sequence: Synthetic oligonucleotide
  Antisense strand to SEQ ID NO: 152098
cuucaucagcagauguggc

SEQ ID NO: 152100 - RNA, 19 nt, Artificial Sequence
  Description of Artificial Sequence: Synthetic oligonucleotide
  Sense strand starting at position 3353 of SEQ ID NO: 1953
acaugucuggcagaguuga

SEQ ID NO: 152101 - RNA, 19 nt, Artificial Sequence
  Description of Artificial Sequence: Synthetic oligonucleotide
  Antisense strand to SEQ ID NO: 152100
ucaacucugccagacaugu

SEQ ID NO: 152102 - RNA, 19 nt, Artificial Sequence
  Description of Artificial Sequence: Synthetic oligonucleotide
  Sense strand starting at position 3366 of SEQ ID NO: 1953
aguugaagacauugguuaa

SEQ ID NO: 152103 - RNA, 19 nt, Artificial Sequence
  Description of Artificial Sequence: Synthetic oligonucleotide
  Antisense strand to SEQ ID NO: 152102
uuaaccaaugucuucaacu

SEQ ID NO: 152104 - RNA, 19 nt, Artificial Sequence
  Description of Artificial Sequence: Synthetic oligonucleotide
  Sense strand starting at position 3367 of SEQ ID NO: 1953
guugaagacauugguuaag

SEQ ID NO: 152105 - RNA, 19 nt, Artificial Sequence
  Description of Artificial Sequence: Synthetic oligonucleotide
  Antisense strand to SEQ ID NO: 152104
cuuaaccaaugucuucaac

SEQ ID NO: 152106 - RNA, 19 nt, Artificial Sequence
  Description of Artificial Sequence: Synthetic oligonucleotide
  Sense strand starting at position 139 of SEQ ID NO: 1954
aacccaggguugugugauu

SEQ ID NO: 152107 - RNA, 19 nt, Artificial Sequence
  Description of Artificial Sequence: Synthetic oligonucleotide
  Antisense strand to SEQ ID NO: 152106
aaucacacaacccuggguu

SEQ ID NO: 152108 - RNA, 19 nt, Artificial Sequence
  Description of Artificial Sequence: Synthetic oligonucleotide
  Sense strand starting at position 148 of SEQ ID NO: 1954
uugugugauucccaagccu

SEQ ID NO: 152109 - RNA, 19 nt, Artificial Sequence
  Description of Artificial Sequence: Synthetic oligonucleotide
  Antisense strand to SEQ ID NO: 152108
aggcuugggaaucacacaa

SEQ ID NO: 152110 - RNA, 19 nt, Artificial Sequence
  Description of Artificial Sequence: Synthetic oligonucleotide
  Sense strand starting at position 498 of SEQ ID NO: 1954
cacccaguguugcuugaga

SEQ ID NO: 152111 - RNA, 19 nt, Artificial Sequence
  Description of Artificial Sequence: Synthetic oligonucleotide
  Antisense strand to SEQ ID NO: 152110
ucucaagcaacacugggug

SEQ ID NO: 152112 - RNA, 19 nt, Artificial Sequence
  Description of Artificial Sequence: Synthetic oligonucleotide
  Sense strand starting at position 617 of SEQ ID NO: 1954
ccuggacacuuguccaaca

SEQ ID NO: 152113 - RNA, 19 nt, Artificial Sequence
  Description of Artificial Sequence: Synthetic oligonucleotide
  Antisense strand to SEQ ID NO: 152112
uguuggacaaguguccagg

SEQ ID NO: 152114 - RNA, 19 nt, Artificial Sequence
  Description of Artificial Sequence: Synthetic oligonucleotide
  Sense strand starting at position 746 of SEQ ID NO: 1954
acucaagggucaccucaua

SEQ ID NO: 152115 - RNA, 19 nt, Artificial Sequence
  Description of Artificial Sequence: Synthetic oligonucleotide
  Antisense strand to SEQ ID NO: 152114
uaugaggugacccuugagu

SEQ ID NO: 152116 - RNA, 19 nt, Artificial Sequence
  Description of Artificial Sequence: Synthetic oligonucleotide
  Sense strand starting at position 2414 of SEQ ID NO: 1954
aagggucccgcgugggaua

SEQ ID NO: 152117 - RNA, 19 nt, Artificial Sequence
  Description of Artificial Sequence: Synthetic oligonucleotide
  Antisense strand to SEQ ID NO: 152116
uaucccacgcgggacccuu

SEQ ID NO: 152118 - RNA, 19 nt, Artificial Sequence
  Description of Artificial Sequence: Synthetic oligonucleotide
  Sense strand starting at position 2519 of SEQ ID NO: 1954
gcacgugucucuuccugga

SEQ ID NO: 152119 - RNA, 19 nt, Artificial Sequence
  Description of Artificial Sequence: Synthetic oligonucleotide
  Antisense strand to SEQ ID NO: 152118
uccaggaagagacacgugc

SEQ ID NO: 152120 - RNA, 19 nt, Artificial Sequence
  Description of Artificial Sequence: Synthetic oligonucleotide
  Sense strand starting at position 2974 of SEQ ID NO: 1954
uguucuuacuucuccaagu

SEQ ID NO: 152121 - RNA, 19 nt, Artificial Sequence
  Description of Artificial Sequence: Synthetic oligonucleotide
  Antisense strand to SEQ ID NO: 152120
acuuggagaaguaagaaca

SEQ ID NO: 152122 - RNA, 19 nt, Artificial Sequence
  Description of Artificial Sequence: Synthetic oligonucleotide
  Sense strand starting at position 3079 of SEQ ID NO: 1954
gcaugacaucgaugcucaa

SEQ ID NO: 152123 - RNA, 19 nt, Artificial Sequence
  Description of Artificial Sequence: Synthetic oligonucleotide
  Antisense strand to SEQ ID NO: 152122
uugagcaucgaugucaugc

SEQ ID NO: 152124 - RNA, 19 nt, Artificial Sequence
  Description of Artificial Sequence: Synthetic oligonucleotide
  Sense strand starting at position 3256 of SEQ ID NO: 1954
uaaggucggucugucaaua

SEQ ID NO: 152125 - RNA, 19 nt, Artificial Sequence
  Description of Artificial Sequence: Synthetic oligonucleotide
  Antisense strand to SEQ ID NO: 152124
uauugacagaccgaccuua

SEQ ID NO: 152126 - RNA, 19 nt, Artificial Sequence
  Description of Artificial Sequence: Synthetic oligonucleotide
  Sense strand starting at position 3305 of SEQ ID NO: 1954
ccagcaagaagagguuauu

SEQ ID NO: 152127 - RNA, 19 nt, Artificial Sequence
  Description of Artificial Sequence: Synthetic oligonucleotide
  Antisense strand to SEQ ID NO: 152126
aauaaccucuucuugcugg

SEQ ID NO: 152128 - RNA, 19 nt, Artificial Sequence
  Description of Artificial Sequence: Synthetic oligonucleotide
  Sense strand starting at position 3315 of SEQ ID NO: 1954
gagguuauuugcugaugac

SEQ ID NO: 152129 - RNA, 19 nt, Artificial Sequence
  Description of Artificial Sequence: Synthetic oligonucleotide
  Antisense strand to SEQ ID NO: 152128
gucaucagcaaauaaccuc

SEQ ID NO: 152130 - RNA, 19 nt, Artificial Sequence
  Description of Artificial Sequence: Synthetic oligonucleotide
  Sense strand starting at position 3397 of SEQ ID NO: 1954
cuuagagccugccauuaga

SEQ ID NO: 152131 - RNA, 19 nt, Artificial Sequence
  Description of Artificial Sequence: Synthetic oligonucleotide
  Antisense strand to SEQ ID NO: 152130
ucuaauggcaggcucuaag

SEQ ID NO: 152132 - RNA, 19 nt, Artificial Sequence
  Description of Artificial Sequence: Synthetic oligonucleotide
  Sense strand starting at position 3750 of SEQ ID NO: 1954
acgaaauugaguugaaacu

SEQ ID NO: 152133 - RNA, 19 nt, Artificial Sequence
  Description of Artificial Sequence: Synthetic oligonucleotide
  Antisense strand to SEQ ID NO: 152132
aguuucaacucaauuucgu

SEQ ID NO: 152134 - RNA, 19 nt, Artificial Sequence
  Description of Artificial Sequence: Synthetic oligonucleotide
  Sense strand starting at position 3938 of SEQ ID NO: 1955
uguugugucagggaaauga

SEQ ID NO: 152135 - RNA, 19 nt, Artificial Sequence
  Description of Artificial Sequence: Synthetic oligonucleotide
  Antisense strand to SEQ ID NO: 152134
ucauuucccugacacaaca

SEQ ID NO: 152136 - RNA, 19 nt, Artificial Sequence
  Description of Artificial Sequence: Synthetic oligonucleotide
  Sense strand starting at position 3867 of SEQ ID NO: 1955
ugccaaggugaucaauaua

SEQ ID NO: 152137 - RNA, 19 nt, Artificial Sequence
  Description of Artificial Sequence: Synthetic oligonucleotide
  Antisense strand to SEQ ID NO: 152136
uauauugaucaccuuggca

SEQ ID NO: 152138 - RNA, 19 nt, Artificial Sequence
  Description of Artificial Sequence: Synthetic oligonucleotide
  Sense strand starting at position 3866 of SEQ ID NO: 1955
cugccaaggugaucaauau

SEQ ID NO: 152139 - RNA, 19 nt, Artificial Sequence
  Description of Artificial Sequence: Synthetic oligonucleotide
  Antisense strand to SEQ ID NO: 152138
auauugaucaccuuggcag

SEQ ID NO: 152140 - RNA, 19 nt, Artificial Sequence
  Description of Artificial Sequence: Synthetic oligonucleotide
  Sense strand starting at position 3763 of SEQ ID NO: 1955
uucggugguguuucguaga

SEQ ID NO: 152141 - RNA, 19 nt, Artificial Sequence
  Description of Artificial Sequence: Synthetic oligonucleotide
  Antisense strand to SEQ ID NO: 152140
ucuacgaaacaccaccgaa

SEQ ID NO: 152142 - RNA, 19 nt, Artificial Sequence
  Description of Artificial Sequence: Synthetic oligonucleotide
  Sense strand starting at position 3733 of SEQ ID NO: 1955
ggauuuguauacuaaguca

SEQ ID NO: 152143 - RNA, 19 nt, Artificial Sequence
  Description of Artificial Sequence: Synthetic oligonucleotide
  Antisense strand to SEQ ID NO: 152142
ugacuuaguauacaaaucc

SEQ ID NO: 152144 - RNA, 19 nt, Artificial Sequence
  Description of Artificial Sequence: Synthetic oligonucleotide
  Sense strand starting at position 3720 of SEQ ID NO: 1955
gcgggaagacgugggauuu

SEQ ID NO: 152145 - RNA, 19 nt, Artificial Sequence
  Description of Artificial Sequence: Synthetic oligonucleotide
  Antisense strand to SEQ ID NO: 152144
aaaucccacgucuucccgc

SEQ ID NO: 152146 - RNA, 19 nt, Artificial Sequence
  Description of Artificial Sequence: Synthetic oligonucleotide
  Sense strand starting at position 3279 of SEQ ID NO: 1955
cccuaagugcauugaauca

SEQ ID NO: 152147 - RNA, 19 nt, Artificial Sequence
  Description of Artificial Sequence: Synthetic oligonucleotide
  Antisense strand to SEQ ID NO: 152146
ugauucaaugcacuuaggg

SEQ ID NO: 152148 - RNA, 19 nt, Artificial Sequence
  Description of Artificial Sequence: Synthetic oligonucleotide
  Sense strand starting at position 2621 of SEQ ID NO: 1955
gggugagacccucgcacaa

SEQ ID NO: 152149 - RNA, 19 nt, Artificial Sequence
  Description of Artificial Sequence: Synthetic oligonucleotide
  Antisense strand to SEQ ID NO: 152148
uugugcgagggucucaccc

SEQ ID NO: 152150 - RNA, 19 nt, Artificial Sequence
  Description of Artificial Sequence: Synthetic oligonucleotide
  Sense strand starting at position 2546 of SEQ ID NO: 1955
cgccgagguccucuucauu

SEQ ID NO: 152151 - RNA, 19 nt, Artificial Sequence
  Description of Artificial Sequence: Synthetic oligonucleotide
  Antisense strand to SEQ ID NO: 152150
aaugaagaggaccucggcg

SEQ ID NO: 152152 - RNA, 19 nt, Artificial Sequence
  Description of Artificial Sequence: Synthetic oligonucleotide
  Sense strand starting at position 2199 of SEQ ID NO: 1955
gguuuagucccgccuccau

SEQ ID NO: 152153 - RNA, 19 nt, Artificial Sequence
  Description of Artificial Sequence: Synthetic oligonucleotide
  Antisense strand to SEQ ID NO: 152152
auggaggcgggacuaaacc

SEQ ID NO: 152154 - RNA, 19 nt, Artificial Sequence
  Description of Artificial Sequence: Synthetic oligonucleotide
  Sense strand starting at position 2012 of SEQ ID NO: 1955
uugcacgucgggaguugua

SEQ ID NO: 152155 - RNA, 19 nt, Artificial Sequence
  Description of Artificial Sequence: Synthetic oligonucleotide
  Antisense strand to SEQ ID NO: 152154
uacaacucccgacgugcaa

SEQ ID NO: 152156 - RNA, 19 nt, Artificial Sequence
  Description of Artificial Sequence: Synthetic oligonucleotide
  Sense strand starting at position 1572 of SEQ ID NO: 1955
aggaaacaucguugcuuaa

SEQ ID NO: 152157 - RNA, 19 nt, Artificial Sequence
  Description of Artificial Sequence: Synthetic oligonucleotide
  Antisense strand to SEQ ID NO: 152156
uuaagcaacgauguuuccu

SEQ ID NO: 152158 - RNA, 19 nt, Artificial Sequence
  Description of Artificial Sequence: Synthetic oligonucleotide
  Sense strand starting at position 1571 of SEQ ID NO: 1955
gaggaaacaucguugcuua

SEQ ID NO: 152159 - RNA, 19 nt, Artificial Sequence
  Description of Artificial Sequence: Synthetic oligonucleotide
  Antisense strand to SEQ ID NO: 152158
uaagcaacgauguuuccuc

SEQ ID NO: 152160 - RNA, 19 nt, Artificial Sequence
  Description of Artificial Sequence: Synthetic oligonucleotide
  Sense strand starting at position 1552 of SEQ ID NO: 1955
gagguaacuacgggaaucu

SEQ ID NO: 152161 - RNA, 19 nt, Artificial Sequence
  Description of Artificial Sequence: Synthetic oligonucleotide
  Antisense strand to SEQ ID NO: 152160
agauucccguaguuaccuc

SEQ ID NO: 152162 - RNA, 19 nt, Artificial Sequence
  Description of Artificial Sequence: Synthetic oligonucleotide
  Sense strand starting at position 1539 of SEQ ID NO: 1955
caaggaguugauugaggua

SEQ ID NO: 152163 - RNA, 19 nt, Artificial Sequence
  Description of Artificial Sequence: Synthetic oligonucleotide
  Antisense strand to SEQ ID NO: 152162
uaccucaaucaacuccuug

SEQ ID NO: 152164 - RNA, 19 nt, Artificial Sequence
  Description of Artificial Sequence: Synthetic oligonucleotide
  Sense strand starting at position 1530 of SEQ ID NO: 1955
aguuaagaucaaggaguug

SEQ ID NO: 152165 - RNA, 19 nt, Artificial Sequence
  Description of Artificial Sequence: Synthetic oligonucleotide
  Antisense strand to SEQ ID NO: 152164
caacuccuugaucuuaacu

SEQ ID NO: 152166 - RNA, 19 nt, Artificial Sequence
  Description of Artificial Sequence: Synthetic oligonucleotide
  Sense strand starting at position 1503 of SEQ ID NO: 1955
ugcugucgccgguugagaa

SEQ ID NO: 152167 - RNA, 19 nt, Artificial Sequence
  Description of Artificial Sequence: Synthetic oligonucleotide
  Antisense strand to SEQ ID NO: 152166
uucucaaccggcgacagca

SEQ ID NO: 152168 - RNA, 19 nt, Artificial Sequence
  Description of Artificial Sequence: Synthetic oligonucleotide
  Sense strand starting at position 1502 of SEQ ID NO: 1955
cugcugucgccgguugaga

SEQ ID NO: 152169 - RNA, 19 nt, Artificial Sequence
  Description of Artificial Sequence: Synthetic oligonucleotide
  Antisense strand to SEQ ID NO: 152168
ucucaaccggcgacagcag

SEQ ID NO: 152170 - RNA, 19 nt, Artificial Sequence
  Description of Artificial Sequence: Synthetic oligonucleotide
  Sense strand starting at position 1484 of SEQ ID NO: 1955
agagcuauccaagaguuuc

SEQ ID NO: 152171 - RNA, 19 nt, Artificial Sequence
  Description of Artificial Sequence: Synthetic oligonucleotide
  Antisense strand to SEQ ID NO: 152170
gaaacucuuggauagcucu

SEQ ID NO: 152172 - RNA, 19 nt, Artificial Sequence
  Description of Artificial Sequence: Synthetic oligonucleotide
  Sense strand starting at position 1456 of SEQ ID NO: 1955
acguaugggaacugaacaa

SEQ ID NO: 152173 - RNA, 19 nt, Artificial Sequence
  Description of Artificial Sequence: Synthetic oligonucleotide
  Antisense strand to SEQ ID NO: 152172
uuguucaguucccauacgu

SEQ ID NO: 152174 - RNA, 19 nt, Artificial Sequence
  Description of Artificial Sequence: Synthetic oligonucleotide
  Sense strand starting at position 1299 of SEQ ID NO: 1955
guauguaaauagccuaaau

SEQ ID NO: 152175 - RNA, 19 nt, Artificial Sequence
  Description of Artificial Sequence: Synthetic oligonucleotide
  Antisense strand to SEQ ID NO: 152174
auuuaggcuauuuacauac

SEQ ID NO: 152176 - RNA, 19 nt, Artificial Sequence
  Description of Artificial Sequence: Synthetic oligonucleotide
  Sense strand starting at position 1276 of SEQ ID NO: 1955
guguaagcugcagaugauu

SEQ ID NO: 152177 - RNA, 19 nt, Artificial Sequence
  Description of Artificial Sequence: Synthetic oligonucleotide
  Antisense strand to SEQ ID NO: 152176
aaucaucugcagcuuacac

SEQ ID NO: 152178 - RNA, 19 nt, Artificial Sequence
  Description of Artificial Sequence: Synthetic oligonucleotide
  Sense strand starting at position 1274 of SEQ ID NO: 1955
ugguguaagcugcagauga

SEQ ID NO: 152179 - RNA, 19 nt, Artificial Sequence
  Description of Artificial Sequence: Synthetic oligonucleotide
  Antisense strand to SEQ ID NO: 152178
ucaucugcagcuuacacca

SEQ ID NO: 152180 - RNA, 19 nt, Artificial Sequence
  Description of Artificial Sequence: Synthetic oligonucleotide
  Sense strand starting at position 1267 of SEQ ID NO: 1955
acacgauugguguaagcug

SEQ ID NO: 152181 - RNA, 19 nt, Artificial Sequence
  Description of Artificial Sequence: Synthetic oligonucleotide
  Antisense strand to SEQ ID NO: 152180
cagcuuacaccaaucgugu

SEQ ID NO: 152182 - RNA, 19 nt, Artificial Sequence
  Description of Artificial Sequence: Synthetic oligonucleotide
  Sense strand starting at position 1129 of SEQ ID NO: 1955
auggcuugauuaguaaaua

SEQ ID NO: 152183 - RNA, 19 nt, Artificial Sequence
  Description of Artificial Sequence: Synthetic oligonucleotide
  Antisense strand to SEQ ID NO: 152182
uauuuacuaaucaagccau

SEQ ID NO: 152184 - RNA, 19 nt, Artificial Sequence
  Description of Artificial Sequence: Synthetic oligonucleotide
  Sense strand starting at position 1124 of SEQ ID NO: 1955
uaauuauggcuugauuagu

SEQ ID NO: 152185 - RNA, 19 nt, Artificial Sequence
  Description of Artificial Sequence: Synthetic oligonucleotide
  Antisense strand to SEQ ID NO: 152184
acuaaucaagccauaauua

SEQ ID NO: 152186 - RNA, 19 nt, Artificial Sequence
  Description of Artificial Sequence: Synthetic oligonucleotide
  Sense strand starting at position 1123 of SEQ ID NO: 1955
guaauuauggcuugauuag

SEQ ID NO: 152187 - RNA, 19 nt, Artificial Sequence
  Description of Artificial Sequence: Synthetic oligonucleotide
  Antisense strand to SEQ ID NO: 152186
cuaaucaagccauaauuac

SEQ ID NO: 152188 - RNA, 19 nt, Artificial Sequence
  Description of Artificial Sequence: Synthetic oligonucleotide
  Sense strand starting at position 1121 of SEQ ID NO: 1955
uaguaauuauggcuugauu

SEQ ID NO: 152189 - RNA, 19 nt, Artificial Sequence
  Description of Artificial Sequence: Synthetic oligonucleotide
  Antisense strand to SEQ ID NO: 152188
aaucaagccauaauuacua

SEQ ID NO: 152190 - RNA, 19 nt, Artificial Sequence
  Description of Artificial Sequence: Synthetic oligonucleotide
  Sense strand starting at position 1061 of SEQ ID NO: 1955
acagauacuugcucauaug

SEQ ID NO: 152191 - RNA, 19 nt, Artificial Sequence
  Description of Artificial Sequence: Synthetic oligonucleotide
  Antisense strand to SEQ ID NO: 152190
cauaugagcaaguaucugu

SEQ ID NO: 152192 - RNA, 19 nt, Artificial Sequence
  Description of Artificial Sequence: Synthetic oligonucleotide
  Sense strand starting at position 1048 of SEQ ID NO: 1955
agacauuauuuguacagau

SEQ ID NO: 152193 - RNA, 19 nt, Artificial Sequence
  Description of Artificial Sequence: Synthetic oligonucleotide
  Antisense strand to SEQ ID NO: 152192
aucuguacaaauaaugucu

SEQ ID NO: 152194 - RNA, 19 nt, Artificial Sequence
  Description of Artificial Sequence: Synthetic oligonucleotide
  Sense strand starting at position 950 of SEQ ID NO: 1955
aaucgaaauuucuagaugu

SEQ ID NO: 152195 - RNA, 19 nt, Artificial Sequence
  Description of Artificial Sequence: Synthetic oligonucleotide
  Antisense strand to SEQ ID NO: 152194
acaucuagaaauuucgauu

SEQ ID NO: 152196 - RNA, 19 nt, Artificial Sequence
  Description of Artificial Sequence: Synthetic oligonucleotide
  Sense strand starting at position 808 of SEQ ID NO: 1955
guacacauaugucccauau

SEQ ID NO: 152197 - RNA, 19 nt, Artificial Sequence
  Description of Artificial Sequence: Synthetic oligonucleotide
  Antisense strand to SEQ ID NO: 152196
auaugggacauauguguac

SEQ ID NO: 152198 - RNA, 19 nt, Artificial Sequence
  Description of Artificial Sequence: Synthetic oligonucleotide
  Sense strand starting at position 708 of SEQ ID NO: 1955
agucaugaccuagaggcuu

SEQ ID NO: 152199 - RNA, 19 nt, Artificial Sequence
  Description of Artificial Sequence: Synthetic oligonucleotide
  Antisense strand to SEQ ID NO: 152198
aagccucuaggucaugacu

SEQ ID NO: 152200 - RNA, 19 nt, Artificial Sequence
  Description of Artificial Sequence: Synthetic oligonucleotide
  Sense strand starting at position 652 of SEQ ID NO: 1955
gcauauuaugcagaacaac

SEQ ID NO: 152201 - RNA, 19 nt, Artificial Sequence
  Description of Artificial Sequence: Synthetic oligonucleotide
  Antisense strand to SEQ ID NO: 152200
guuguucugcauaauaugc

SEQ ID NO: 152202 - RNA, 19 nt, Artificial Sequence
  Description of Artificial Sequence: Synthetic oligonucleotide
  Sense strand starting at position 640 of SEQ ID NO: 1955
gacacauaguaggcauauu

SEQ ID NO: 152203 - RNA, 19 nt, Artificial Sequence
  Description of Artificial Sequence: Synthetic oligonucleotide
  Antisense strand to SEQ ID NO: 152202
aauaugccuacuauguguc

SEQ ID NO: 152204 - RNA, 19 nt, Artificial Sequence
  Description of Artificial Sequence: Synthetic oligonucleotide
  Sense strand starting at position 451 of SEQ ID NO: 1955
acauuuaaugagugcuugu

SEQ ID NO: 152205 - RNA, 19 nt, Artificial Sequence
  Description of Artificial Sequence: Synthetic oligonucleotide
  Antisense strand to SEQ ID NO: 152204
acaagcacucauuaaaugu

SEQ ID NO: 152206 - RNA, 19 nt, Artificial Sequence
  Description of Artificial Sequence: Synthetic oligonucleotide
  Sense strand starting at position 255 of SEQ ID NO: 1955
ugaggaagguguucauuaa

SEQ ID NO: 152207 - RNA, 19 nt, Artificial Sequence
  Description of Artificial Sequence: Synthetic oligonucleotide
  Antisense strand to SEQ ID NO: 152206
uuaaugaacaccuuccuca

SEQ ID NO: 152208 - RNA, 19 nt, Artificial Sequence
  Description of Artificial Sequence: Synthetic oligonucleotide
  Sense strand starting at position 252 of SEQ ID NO: 1955
gguugaggaagguguucau

SEQ ID NO: 152209 - RNA, 19 nt, Artificial Sequence
  Description of Artificial Sequence: Synthetic oligonucleotide
  Antisense strand to SEQ ID NO: 152208
augaacaccuuccucaacc

SEQ ID NO: 152210 - RNA, 19 nt, Artificial Sequence
  Description of Artificial Sequence: Synthetic oligonucleotide
  Sense strand starting at position 243 of SEQ ID NO: 1955
acaucaguagguugaggaa

SEQ ID NO: 152211 - RNA, 19 nt, Artificial Sequence
  Description of Artificial Sequence: Synthetic oligonucleotide
  Antisense strand to SEQ ID NO: 152210
uuccucaaccuacugaugu

SEQ ID NO: 152212 - RNA, 19 nt, Artificial Sequence
  Description of Artificial Sequence: Synthetic oligonucleotide
  Sense strand starting at position 237 of SEQ ID NO: 1955
cuugaaacaucaguagguu

SEQ ID NO: 152213 - RNA, 19 nt, Artificial Sequence
  Description of Artificial Sequence: Synthetic oligonucleotide
  Antisense strand to SEQ ID NO: 152212
aaccuacugauguuucaag

SEQ ID NO: 152214 - RNA, 19 nt, Artificial Sequence
  Description of Artificial Sequence: Synthetic oligonucleotide
  Sense strand starting at position 8 of SEQ ID NO: 1956
ucauauuugcuauggucau

SEQ ID NO: 152215 - RNA, 19 nt, Artificial Sequence
  Description of Artificial Sequence: Synthetic oligonucleotide
  Antisense strand to SEQ ID NO: 152214
augaccauagcaaauauga

SEQ ID NO: 152216 - RNA, 19 nt, Artificial Sequence
  Description of Artificial Sequence: Synthetic oligonucleotide
  Sense strand starting at position 19 of SEQ ID NO: 1956
auggucauguuccuuaagu

SEQ ID NO: 152217 - RNA, 19 nt, Artificial Sequence
  Description of Artificial Sequence: Synthetic oligonucleotide
  Antisense strand to SEQ ID NO: 152216
acuuaaggaacaugaccau

SEQ ID NO: 152218 - RNA, 19 nt, Artificial Sequence
  Description of Artificial Sequence: Synthetic oligonucleotide
  Sense strand starting at position 21 of SEQ ID NO: 1956
ggucauguuccuuaaguuu

SEQ ID NO: 152219 - RNA, 19 nt, Artificial Sequence
  Description of Artificial Sequence: Synthetic oligonucleotide
  Antisense strand to SEQ ID NO: 152218
aaacuuaaggaacaugacc

SEQ ID NO: 152220 - RNA, 19 nt, Artificial Sequence
  Description of Artificial Sequence: Synthetic oligonucleotide
  Sense strand starting at position 32 of SEQ ID NO: 1956
uuaaguuucugacugaauc

SEQ ID NO: 152221 - RNA, 19 nt, Artificial Sequence
  Description of Artificial Sequence: Synthetic oligonucleotide
  Antisense strand to SEQ ID NO: 152220
gauucagucagaaacuuaa

SEQ ID NO: 152222 - RNA, 19 nt, Artificial Sequence
  Description of Artificial Sequence: Synthetic oligonucleotide
  Sense strand starting at position 365 of SEQ ID NO: 1956
cuauauuucuugcuuccga

SEQ ID NO: 152223 - RNA, 19 nt, Artificial Sequence
  Description of Artificial Sequence: Synthetic oligonucleotide
  Antisense strand to SEQ ID NO: 152222
ucggaagcaagaaauauag

SEQ ID NO: 152224 - RNA, 19 nt, Artificial Sequence
  Description of Artificial Sequence: Synthetic oligonucleotide
  Sense strand starting at position 445 of SEQ ID NO: 1956
uuggaucaauugucagcaa

SEQ ID NO: 152225 - RNA, 19 nt, Artificial Sequence
  Description of Artificial Sequence: Synthetic oligonucleotide
  Antisense strand to SEQ ID NO: 152224
uugcugacaauugauccaa

SEQ ID NO: 152226 - RNA, 19 nt, Artificial Sequence
  Description of Artificial Sequence: Synthetic oligonucleotide
  Sense strand starting at position 448 of SEQ ID NO: 1956
gaucaauugucagcaaguu

SEQ ID NO: 152227 - RNA, 19 nt, Artificial Sequence
  Description of Artificial Sequence: Synthetic oligonucleotide
  Antisense strand to SEQ ID NO: 152226
aacuugcugacaauugauc

SEQ ID NO: 152228 - RNA, 19 nt, Artificial Sequence
  Description of Artificial Sequence: Synthetic oligonucleotide
  Sense strand starting at position 449 of SEQ ID NO: 1956
aucaauugucagcaaguuu

SEQ ID NO: 152229 - RNA, 19 nt, Artificial Sequence
  Description of Artificial Sequence: Synthetic oligonucleotide
  Antisense strand to SEQ ID NO: 152228
aaacuugcugacaauugau

SEQ ID NO: 152230 - RNA, 19 nt, Artificial Sequence
  Description of Artificial Sequence: Synthetic oligonucleotide
  Sense strand starting at position 853 of SEQ ID NO: 1956
aacaguugugcuuacaguu

SEQ ID NO: 152231 - RNA, 19 nt, Artificial Sequence
  Description of Artificial Sequence: Synthetic oligonucleotide
  Antisense strand to SEQ ID NO: 152230
aacuguaagcacaacuguu

SEQ ID NO: 152232 - RNA, 19 nt, Artificial Sequence
  Description of Artificial Sequence: Synthetic oligonucleotide
  Sense strand starting at position 1234 of SEQ ID NO: 1956
acaaauaugcacggacaaa

SEQ ID NO: 152233 - RNA, 19 nt, Artificial Sequence
  Description of Artificial Sequence: Synthetic oligonucleotide
  Antisense strand to SEQ ID NO: 152232
uuuguccgugcauauuugu

SEQ ID NO: 152234 - RNA, 19 nt, Artificial Sequence
  Description of Artificial Sequence: Synthetic oligonucleotide
  Sense strand starting at position 1273 of SEQ ID NO: 1956
ugaacacuucuacguaaca

SEQ ID NO: 152235 - RNA, 19 nt, Artificial Sequence
  Description of Artificial Sequence: Synthetic oligonucleotide
  Antisense strand to SEQ ID NO: 152234
uguuacguagaaguguuca

SEQ ID NO: 152236 - RNA, 19 nt, Artificial Sequence
  Description of Artificial Sequence: Synthetic oligonucleotide
  Sense strand starting at position 1315 of SEQ ID NO: 1956
acaggacacacgugugaau

SEQ ID NO: 152237 - RNA, 19 nt, Artificial Sequence
  Description of Artificial Sequence: Synthetic oligonucleotide
  Antisense strand to SEQ ID NO: 152236
auucacacguguguccugu

SEQ ID NO: 152238 - RNA, 19 nt, Artificial Sequence
  Description of Artificial Sequence: Synthetic oligonucleotide
  Sense strand starting at position 1327 of SEQ ID NO: 1956
ugugaaugcuuggucacaa

SEQ ID NO: 152239 - RNA, 19 nt, Artificial Sequence
  Description of Artificial Sequence: Synthetic oligonucleotide
  Antisense strand to SEQ ID NO: 152238
uugugaccaagcauucaca

SEQ ID NO: 152240 - RNA, 19 nt, Artificial Sequence
  Description of Artificial Sequence: Synthetic oligonucleotide
  Sense strand starting at position 1328 of SEQ ID NO: 1956
gugaaugcuuggucacaac

SEQ ID NO: 152241 - RNA, 19 nt, Artificial Sequence
  Description of Artificial Sequence: Synthetic oligonucleotide
  Antisense strand to SEQ ID NO: 152240
guugugaccaagcauucac

SEQ ID NO: 152242 - RNA, 19 nt, Artificial Sequence
  Description of Artificial Sequence: Synthetic oligonucleotide
  Sense strand starting at position 1392 of SEQ ID NO: 1956
uggguuuggauaugacaua

SEQ ID NO: 152243 - RNA, 19 nt, Artificial Sequence
  Description of Artificial Sequence: Synthetic oligonucleotide
  Antisense strand to SEQ ID NO: 152242
uaugucauauccaaaccca

SEQ ID NO: 152244 - RNA, 19 nt, Artificial Sequence
  Description of Artificial Sequence: Synthetic oligonucleotide
  Sense strand starting at position 1404 of SEQ ID NO: 1956
ugacauacuucucuaggcu

SEQ ID NO: 152245 - RNA, 19 nt, Artificial Sequence
  Description of Artificial Sequence: Synthetic oligonucleotide
  Antisense strand to SEQ ID NO: 152244
agccuagagaaguauguca

SEQ ID NO: 152246 - RNA, 19 nt, Artificial Sequence
  Description of Artificial Sequence: Synthetic oligonucleotide
  Sense strand starting at position 1427 of SEQ ID NO: 1956
cuaacaaggcugugugaug

SEQ ID NO: 152247 - RNA, 19 nt, Artificial Sequence
  Description of Artificial Sequence: Synthetic oligonucleotide
  Antisense strand to SEQ ID NO: 152246
caucacacagccuuguuag

SEQ ID NO: 152248 - RNA, 19 nt, Artificial Sequence
  Description of Artificial Sequence: Synthetic oligonucleotide
  Sense strand starting at position 1436 of SEQ ID NO: 1956
cugugugaugaguggacaa

SEQ ID NO: 152249 - RNA, 19 nt, Artificial Sequence
  Description of Artificial Sequence: Synthetic oligonucleotide
  Antisense strand to SEQ ID NO: 152248
uuguccacucaucacacag

SEQ ID NO: 152250 - RNA, 19 nt, Artificial Sequence
  Description of Artificial Sequence: Synthetic oligonucleotide
  Sense strand starting at position 1530 of SEQ ID NO: 1956
ccauuauauuuacggauaa

SEQ ID NO: 152251 - RNA, 19 nt, Artificial Sequence
  Description of Artificial Sequence: Synthetic oligonucleotide
  Antisense strand to SEQ ID NO: 152250
uuauccguaaauauaaugg

SEQ ID NO: 152252 - RNA, 19 nt, Artificial Sequence
  Description of Artificial Sequence: Synthetic oligonucleotide
  Sense strand starting at position 1583 of SEQ ID NO: 1956
ggacuaagugccuguaaca

SEQ ID NO: 152253 - RNA, 19 nt, Artificial Sequence
  Description of Artificial Sequence: Synthetic oligonucleotide
  Antisense strand to SEQ ID NO: 152252
uguuacaggcacuuagucc

SEQ ID NO: 152254 - RNA, 19 nt, Artificial Sequence
  Description of Artificial Sequence: Synthetic oligonucleotide
  Sense strand starting at position 1682 of SEQ ID NO: 1956
gcaccuuaacacugaggaa

SEQ ID NO: 152255 - RNA, 19 nt, Artificial Sequence
  Description of Artificial Sequence: Synthetic oligonucleotide
  Antisense strand to SEQ ID NO: 152254
uuccucaguguuaaggugc

SEQ ID NO: 152256 - RNA, 19 nt, Artificial Sequence
  Description of Artificial Sequence: Synthetic oligonucleotide
  Sense strand starting at position 1815 of SEQ ID NO: 1956
ccgaaauccucaccugauc

SEQ ID NO: 152257 - RNA, 19 nt, Artificial Sequence
  Description of Artificial Sequence: Synthetic oligonucleotide
  Antisense strand to SEQ ID NO: 152256
gaucaggugaggauuucgg

SEQ ID NO: 152258 - RNA, 19 nt, Artificial Sequence
  Description of Artificial Sequence: Synthetic oligonucleotide
  Sense strand starting at position 2174 of SEQ ID NO: 1956
cgaggcguugcuaggagaa

SEQ ID NO: 152259 - RNA, 19 nt, Artificial Sequence
  Description of Artificial Sequence: Synthetic oligonucleotide
  Antisense strand to SEQ ID NO: 152258
uucuccuagcaacgccucg

SEQ ID NO: 152260 - RNA, 19 nt, Artificial Sequence
  Description of Artificial Sequence: Synthetic oligonucleotide
  Sense strand starting at position 2268 of SEQ ID NO: 1956
gcgauaaggcuuuaacuga

SEQ ID NO: 152261 - RNA, 19 nt, Artificial Sequence
  Description of Artificial Sequence: Synthetic oligonucleotide
  Antisense strand to SEQ ID NO: 152260
ucaguuaaagccuuaucgc

SEQ ID NO: 152262 - RNA, 19 nt, Artificial Sequence
  Description of Artificial Sequence: Synthetic oligonucleotide
  Sense strand starting at position 2321 of SEQ ID NO: 1956
cucacaucuguguaguuau

SEQ ID NO: 152263 - RNA, 19 nt, Artificial Sequence
  Description of Artificial Sequence: Synthetic oligonucleotide
  Antisense strand to SEQ ID NO: 152262
auaacuacacagaugugag

SEQ ID NO: 152264 - RNA, 19 nt, Artificial Sequence
  Description of Artificial Sequence: Synthetic oligonucleotide
  Sense strand starting at position 2351 of SEQ ID NO: 1956
ggagaauuguggcccgaga

SEQ ID NO: 152265 - RNA, 19 nt, Artificial Sequence
  Description of Artificial Sequence: Synthetic oligonucleotide
  Antisense strand to SEQ ID NO: 152264
ucucgggccacaauucucc

SEQ ID NO: 152266 - RNA, 19 nt, Artificial Sequence
  Description of Artificial Sequence: Synthetic oligonucleotide
  Sense strand starting at position 2353 of SEQ ID NO: 1956
agaauuguggcccgagaag

SEQ ID NO: 152267 - RNA, 19 nt, Artificial Sequence
  Description of Artificial Sequence: Synthetic oligonucleotide
  Antisense strand to SEQ ID NO: 152266
cuucucgggccacaauucu

SEQ ID NO: 152268 - RNA, 19 nt, Artificial Sequence
  Description of Artificial Sequence: Synthetic oligonucleotide
  Sense strand starting at position 2433 of SEQ ID NO: 1956
gcuuccuuggccuagagga

SEQ ID NO: 152269 - RNA, 19 nt, Artificial Sequence
  Description of Artificial Sequence: Synthetic oligonucleotide
  Antisense strand to SEQ ID NO: 152268
uccucuaggccaaggaagc

SEQ ID NO: 152270 - RNA, 19 nt, Artificial Sequence
  Description of Artificial Sequence: Synthetic oligonucleotide
  Sense strand starting at position 2695 of SEQ ID NO: 1956
aggagugacguuuauaguc

SEQ ID NO: 152271 - RNA, 19 nt, Artificial Sequence
  Description of Artificial Sequence: Synthetic oligonucleotide
  Antisense strand to SEQ ID NO: 152270
gacuauaaacgucacuccu

SEQ ID NO: 152272 - RNA, 19 nt, Artificial Sequence
  Description of Artificial Sequence: Synthetic oligonucleotide
  Sense strand starting at position 2704 of SEQ ID NO: 1956
guuuauagucaugcugcuu

SEQ ID NO: 152273 - RNA, 19 nt, Artificial Sequence
  Description of Artificial Sequence: Synthetic oligonucleotide
  Antisense strand to SEQ ID NO: 152272
aagcagcaugacuauaaac

SEQ ID NO: 152274 - RNA, 19 nt, Artificial Sequence
  Description of Artificial Sequence: Synthetic oligonucleotide
  Sense strand starting at position 2743 of SEQ ID NO: 1956
uuuauucugcaccauggaa

SEQ ID NO: 152275 - RNA, 19 nt, Artificial Sequence
  Description of Artificial Sequence: Synthetic oligonucleotide
  Antisense strand to SEQ ID NO: 152274
uuccauggugcagaauaaa

SEQ ID NO: 152276 - RNA, 19 nt, Artificial Sequence
  Description of Artificial Sequence: Synthetic oligonucleotide
  Sense strand starting at position 2809 of SEQ ID NO: 1956
ccgaaagagucccuuaaua

SEQ ID NO: 152277 - RNA, 19 nt, Artificial Sequence
  Description of Artificial Sequence: Synthetic oligonucleotide
  Antisense strand to SEQ ID NO: 152276
uauuaagggacucuuucgg

SEQ ID NO: 152278 - RNA, 19 nt, Artificial Sequence
  Description of Artificial Sequence: Synthetic oligonucleotide
  Sense strand starting at position 2835 of SEQ ID NO: 1956
gaaugagauuaugguauuu

SEQ ID NO: 152279 - RNA, 19 nt, Artificial Sequence
  Description of Artificial Sequence: Synthetic oligonucleotide
  Antisense strand to SEQ ID NO: 152278
aaauaccauaaucucauuc

SEQ ID NO: 152280 - RNA, 19 nt, Artificial Sequence
  Description of Artificial Sequence: Synthetic oligonucleotide
  Sense strand starting at position 2896 of SEQ ID NO: 1956
gaagguuauuuggagauau

SEQ ID NO: 152281 - RNA, 19 nt, Artificial Sequence
  Description of Artificial Sequence: Synthetic oligonucleotide
  Antisense strand to SEQ ID NO: 152280
auaucuccaaauaaccuuc

SEQ ID NO: 152282 - RNA, 19 nt, Artificial Sequence
  Description of Artificial Sequence: Synthetic oligonucleotide
  Sense strand starting at position 3463 of SEQ ID NO: 1956
gagagagucuccguuucag

SEQ ID NO: 152283 - RNA, 19 nt, Artificial Sequence
  Description of Artificial Sequence: Synthetic oligonucleotide
  Antisense strand to SEQ ID NO: 152282
cugaaacggagacucucuc

SEQ ID NO: 152284 - RNA, 19 nt, Artificial Sequence
  Description of Artificial Sequence: Synthetic oligonucleotide
  Sense strand starting at position 3490 of SEQ ID NO: 1956
gauauauuguaccuaggaa

SEQ ID NO: 152285 - RNA, 19 nt, Artificial Sequence
  Description of Artificial Sequence: Synthetic oligonucleotide
  Antisense strand to SEQ ID NO: 152284
uuccuagguacaauauauc

SEQ ID NO: 152286 - RNA, 19 nt, Artificial Sequence
  Description of Artificial Sequence: Synthetic oligonucleotide
  Sense strand starting at position 3695 of SEQ ID NO: 1956
gugauuucuuccuucuggu

SEQ ID NO: 152287 - RNA, 19 nt, Artificial Sequence
  Description of Artificial Sequence: Synthetic oligonucleotide
  Antisense strand to SEQ ID NO: 152286
accagaaggaagaaaucac

SEQ ID NO: 152288 - RNA, 19 nt, Artificial Sequence
  Description of Artificial Sequence: Synthetic oligonucleotide
  Sense strand starting at position 3702 of SEQ ID NO: 1956
cuuccuucuggugaucaaa

SEQ ID NO: 152289 - RNA, 19 nt, Artificial Sequence
  Description of Artificial Sequence: Synthetic oligonucleotide
  Antisense strand to SEQ ID NO: 152288
uuugaucaccagaaggaag

SEQ ID NO: 152290 - RNA, 19 nt, Artificial Sequence
  Description of Artificial Sequence: Synthetic oligonucleotide
  Sense strand starting at position 3784 of SEQ ID NO: 1956
caaguaacuguauaaaggu

SEQ ID NO: 152291 - RNA, 19 nt, Artificial Sequence
  Description of Artificial Sequence: Synthetic oligonucleotide
  Antisense strand to SEQ ID NO: 152290
accuuuauacaguuacuug

SEQ ID NO: 152292 - RNA, 19 nt, Artificial Sequence
  Description of Artificial Sequence: Synthetic oligonucleotide
  Sense strand starting at position 3847 of SEQ ID NO: 1956
gugucuugugaggaauuau

SEQ ID NO: 152293 - RNA, 19 nt, Artificial Sequence
  Description of Artificial Sequence: Synthetic oligonucleotide
  Antisense strand to SEQ ID NO: 152292
auaauuccucacaagacac

SEQ ID NO: 152294 - RNA, 19 nt, Artificial Sequence
  Description of Artificial Sequence: Synthetic oligonucleotide
  Sense strand starting at position 221 of SEQ ID NO: 1957
gaaugcuacccuggguaau

SEQ ID NO: 152295 - RNA, 19 nt, Artificial Sequence
  Description of Artificial Sequence: Synthetic oligonucleotide
  Antisense strand to SEQ ID NO: 152294
auuacccaggguagcauuc

SEQ ID NO: 152296 - RNA, 19 nt, Artificial Sequence
  Description of Artificial Sequence: Synthetic oligonucleotide
  Sense strand starting at position 222 of SEQ ID NO: 1957
aaugcuacccuggguaaua

SEQ ID NO: 152297 - RNA, 19 nt, Artificial Sequence
  Description of Artificial Sequence: Synthetic oligonucleotide
  Antisense strand to SEQ ID NO: 152296
uauuacccaggguagcauu

SEQ ID NO: 152298 - RNA, 19 nt, Artificial Sequence
  Description of Artificial Sequence: Synthetic oligonucleotide
  Sense strand starting at position 223 of SEQ ID NO: 1957
augcuacccuggguaauau

SEQ ID NO: 152299 - RNA, 19 nt, Artificial Sequence
  Description of Artificial Sequence: Synthetic oligonucleotide
  Antisense strand to SEQ ID NO: 152298
auauuacccaggguagcau

SEQ ID NO: 152300 - RNA, 19 nt, Artificial Sequence
  Description of Artificial Sequence: Synthetic oligonucleotide
  Sense strand starting at position 224 of SEQ ID NO: 1957
ugcuacccuggguaauauu

SEQ ID NO: 152301 - RNA, 19 nt, Artificial Sequence
  Description of Artificial Sequence: Synthetic oligonucleotide
  Antisense strand to SEQ ID NO: 152300
aauauuacccaggguagca

SEQ ID NO: 152302 - RNA, 19 nt, Artificial Sequence
  Description of Artificial Sequence: Synthetic oligonucleotide
  Sense strand starting at position 251 of SEQ ID NO: 1957
aaaugcugccuccagguau

SEQ ID NO: 152303 - RNA, 19 nt, Artificial Sequence
  Description of Artificial Sequence: Synthetic oligonucleotide
  Antisense strand to SEQ ID NO: 152302
auaccuggaggcagcauuu

SEQ ID NO: 152304 - RNA, 19 nt, Artificial Sequence
  Description of Artificial Sequence: Synthetic oligonucleotide
  Sense strand starting at position 258 of SEQ ID NO: 1957
gccuccagguaucgagaaa

SEQ ID NO: 152305 - RNA, 19 nt, Artificial Sequence
  Description of Artificial Sequence: Synthetic oligonucleotide
  Antisense strand to SEQ ID NO: 152304
uuucucgauaccuggaggc

SEQ ID NO: 152306 - RNA, 19 nt, Artificial Sequence
  Description of Artificial Sequence: Synthetic oligonucleotide
  Sense strand starting at position 291 of SEQ ID NO: 1957
ccaugaaagugguccugaa

SEQ ID NO: 152307 - RNA, 19 nt, Artificial Sequence
  Description of Artificial Sequence: Synthetic oligonucleotide
  Antisense strand to SEQ ID NO: 152306
uucaggaccacuuucaugg

SEQ ID NO: 152308 - RNA, 19 nt, Artificial Sequence
  Description of Artificial Sequence: Synthetic oligonucleotide
  Sense strand starting at position 295 of SEQ ID NO: 1957
gaaagugguccugaaguca

SEQ ID NO: 152309 - RNA, 19 nt, Artificial Sequence
  Description of Artificial Sequence: Synthetic oligonucleotide
  Antisense strand to SEQ ID NO: 152308
ugacuucaggaccacuuuc

SEQ ID NO: 152310 - RNA, 19 nt, Artificial Sequence
  Description of Artificial Sequence: Synthetic oligonucleotide
  Sense strand starting at position 723 of SEQ ID NO: 1957
uucccuagugguggcauaa

SEQ ID NO: 152311 - RNA, 19 nt, Artificial Sequence
  Description of Artificial Sequence: Synthetic oligonucleotide
  Antisense strand to SEQ ID NO: 152310
uuaugccaccacuagggaa

SEQ ID NO: 152312 - RNA, 19 nt, Artificial Sequence
  Description of Artificial Sequence: Synthetic oligonucleotide
  Sense strand starting at position 853 of SEQ ID NO: 1957
gugcaaagagacuguacuu

SEQ ID NO: 152313 - RNA, 19 nt, Artificial Sequence
  Description of Artificial Sequence: Synthetic oligonucleotide
  Antisense strand to SEQ ID NO: 152312
aaguacagucucuuugcac

SEQ ID NO: 152314 - RNA, 19 nt, Artificial Sequence
  Description of Artificial Sequence: Synthetic oligonucleotide
  Sense strand starting at position 863 of SEQ ID NO: 1957
acuguacuuuguuccuaga

SEQ ID NO: 152315 - RNA, 19 nt, Artificial Sequence
  Description of Artificial Sequence: Synthetic oligonucleotide
  Antisense strand to SEQ ID NO: 152314
ucuaggaacaaaguacagu

SEQ ID NO: 152316 - RNA, 19 nt, Artificial Sequence
  Description of Artificial Sequence: Synthetic oligonucleotide
  Sense strand starting at position 865 of SEQ ID NO: 1957
uguacuuuguuccuagaga

SEQ ID NO: 152317 - RNA, 19 nt, Artificial Sequence
  Description of Artificial Sequence: Synthetic oligonucleotide
  Antisense strand to SEQ ID NO: 152316
ucucuaggaacaaaguaca

SEQ ID NO: 152318 - RNA, 19 nt, Artificial Sequence
  Description of Artificial Sequence: Synthetic oligonucleotide
  Sense strand starting at position 866 of SEQ ID NO: 1957
guacuuuguuccuagagaa

SEQ ID NO: 152319 - RNA, 19 nt, Artificial Sequence
  Description of Artificial Sequence: Synthetic oligonucleotide
  Antisense strand to SEQ ID NO: 152318
uucucuaggaacaaaguac

SEQ ID NO: 152320 - RNA, 19 nt, Artificial Sequence
  Description of Artificial Sequence: Synthetic oligonucleotide
  Sense strand starting at position 891 of SEQ ID NO: 1957
gcuaguucuugauucuaca

SEQ ID NO: 152321 - RNA, 19 nt, Artificial Sequence
  Description of Artificial Sequence: Synthetic oligonucleotide
  Antisense strand to SEQ ID NO: 152320
uguagaaucaagaacuagc

SEQ ID NO: 152322 - RNA, 19 nt, Artificial Sequence
  Description of Artificial Sequence: Synthetic oligonucleotide
  Sense strand starting at position 894 of SEQ ID NO: 1957
aguucuugauucuacauau

SEQ ID NO: 152323 - RNA, 19 nt, Artificial Sequence
  Description of Artificial Sequence: Synthetic oligonucleotide
  Antisense strand to SEQ ID NO: 152322
auauguagaaucaagaacu

SEQ ID NO: 152324 - RNA, 19 nt, Artificial Sequence
  Description of Artificial Sequence: Synthetic oligonucleotide
  Sense strand starting at position 904 of SEQ ID NO: 1957
ucuacauaucuugaugagu

SEQ ID NO: 152325 - RNA, 19 nt, Artificial Sequence
  Description of Artificial Sequence: Synthetic oligonucleotide
  Antisense strand to SEQ ID NO: 152324
acucaucaagauauguaga

SEQ ID NO: 152326 - RNA, 19 nt, Artificial Sequence
  Description of Artificial Sequence: Synthetic oligonucleotide
  Sense strand starting at position 915 of SEQ ID NO: 1957
ugaugaguuacacgguuua

SEQ ID NO: 152327 - RNA, 19 nt, Artificial Sequence
  Description of Artificial Sequence: Synthetic oligonucleotide
  Antisense strand to SEQ ID NO: 152326
uaaaccguguaacucauca

SEQ ID NO: 152328 - RNA, 19 nt, Artificial Sequence
  Description of Artificial Sequence: Synthetic oligonucleotide
  Sense strand starting at position 927 of SEQ ID NO: 1957
cgguuuacuugaggcagga

SEQ ID NO: 152329 - RNA, 19 nt, Artificial Sequence
  Description of Artificial Sequence: Synthetic oligonucleotide
  Antisense strand to SEQ ID NO: 152328
uccugccucaaguaaaccg

SEQ ID NO: 152330 - RNA, 19 nt, Artificial Sequence
  Description of Artificial Sequence: Synthetic oligonucleotide
  Sense strand starting at position 976 of SEQ ID NO: 1957
gagacugcgucucuuuaaa

SEQ ID NO: 152331 - RNA, 19 nt, Artificial Sequence
  Description of Artificial Sequence: Synthetic oligonucleotide
  Antisense strand to SEQ ID NO: 152330
uuuaaagagacgcagucuc

SEQ ID NO: 152332 - RNA, 19 nt, Artificial Sequence
  Description of Artificial Sequence: Synthetic oligonucleotide
  Sense strand starting at position 1202 of SEQ ID NO: 1957
cucaguucccagcaaggaa

SEQ ID NO: 152333 - RNA, 19 nt, Artificial Sequence
  Description of Artificial Sequence: Synthetic oligonucleotide
  Antisense strand to SEQ ID NO: 152332
uuccuugcugggaacugag

SEQ ID NO: 152334 - RNA, 19 nt, Artificial Sequence
  Description of Artificial Sequence: Synthetic oligonucleotide
  Sense strand starting at position 1266 of SEQ ID NO: 1957
gacgcuauuucuuugccau

SEQ ID NO: 152335 - RNA, 19 nt, Artificial Sequence
  Description of Artificial Sequence: Synthetic oligonucleotide
  Antisense strand to SEQ ID NO: 152334
auggcaaagaaauagcguc

SEQ ID NO: 152336 - RNA, 19 nt, Artificial Sequence
  Description of Artificial Sequence: Synthetic oligonucleotide
  Sense strand starting at position 1290 of SEQ ID NO: 1957
ggcuucagcucugguggaa

SEQ ID NO: 152337 - RNA, 19 nt, Artificial Sequence
  Description of Artificial Sequence: Synthetic oligonucleotide
  Antisense strand to SEQ ID NO: 152336
uuccaccagagcugaagcc

SEQ ID NO: 152338 - RNA, 19 nt, Artificial Sequence
  Description of Artificial Sequence: Synthetic oligonucleotide
  Sense strand starting at position 1310 of SEQ ID NO: 1957
gaggcuauuucuggcaguu

SEQ ID NO: 152339 - RNA, 19 nt, Artificial Sequence
  Description of Artificial Sequence: Synthetic oligonucleotide
  Antisense strand to SEQ ID NO: 152338
aacugccagaaauagccuc

SEQ ID NO: 152340 - RNA, 19 nt, Artificial Sequence
  Description of Artificial Sequence: Synthetic oligonucleotide
  Sense strand starting at position 1312 of SEQ ID NO: 1957
ggcuauuucuggcaguuaa

SEQ ID NO: 152341 - RNA, 19 nt, Artificial Sequence
  Description of Artificial Sequence: Synthetic oligonucleotide
  Antisense strand to SEQ ID NO: 152340
uuaacugccagaaauagcc

SEQ ID NO: 152342 - RNA, 19 nt, Artificial Sequence
  Description of Artificial Sequence: Synthetic oligonucleotide
  Sense strand starting at position 1378 of SEQ ID NO: 1957
gccucugagccagacauca

SEQ ID NO: 152343 - RNA, 19 nt, Artificial Sequence
  Description of Artificial Sequence: Synthetic oligonucleotide
  Antisense strand to SEQ ID NO: 152342
ugaugucuggcucagaggc

SEQ ID NO: 152344 - RNA, 19 nt, Artificial Sequence
  Description of Artificial Sequence: Synthetic oligonucleotide
  Sense strand starting at position 96 of SEQ ID NO: 1958
ugguucaguggucagacua

SEQ ID NO: 152345 - RNA, 19 nt, Artificial Sequence
  Description of Artificial Sequence: Synthetic oligonucleotide
  Antisense strand to SEQ ID NO: 152344
uagucugaccacugaacca

SEQ ID NO: 152346 - RNA, 19 nt, Artificial Sequence
  Description of Artificial Sequence: Synthetic oligonucleotide
  Sense strand starting at position 103 of SEQ ID NO: 1958
guggucagacuauaagcau

SEQ ID NO: 152347 - RNA, 19 nt, Artificial Sequence
  Description of Artificial Sequence: Synthetic oligonucleotide
  Antisense strand to SEQ ID NO: 152346
augcuuauagucugaccac

SEQ ID NO: 152348 - RNA, 19 nt, Artificial Sequence
  Description of Artificial Sequence: Synthetic oligonucleotide
  Sense strand starting at position 106 of SEQ ID NO: 1958
gucagacuauaagcauaaa

SEQ ID NO: 152349 - RNA, 19 nt, Artificial Sequence
  Description of Artificial Sequence: Synthetic oligonucleotide
  Antisense strand to SEQ ID NO: 152348
uuuaugcuuauagucugac

SEQ ID NO: 152350 - RNA, 19 nt, Artificial Sequence
  Description of Artificial Sequence: Synthetic oligonucleotide
  Sense strand starting at position 396 of SEQ ID NO: 1958
uuguuugcucagcaacuau

SEQ ID NO: 152351 - RNA, 19 nt, Artificial Sequence
  Description of Artificial Sequence: Synthetic oligonucleotide
  Antisense strand to SEQ ID NO: 152350
auaguugcugagcaaacaa

SEQ ID NO: 152352 - RNA, 19 nt, Artificial Sequence
  Description of Artificial Sequence: Synthetic oligonucleotide
  Sense strand starting at position 425 of SEQ ID NO: 1958
gguaaacaagcucauuauc

SEQ ID NO: 152353 - RNA, 19 nt, Artificial Sequence
  Description of Artificial Sequence: Synthetic oligonucleotide
  Antisense strand to SEQ ID NO: 152352
gauaaugagcuuguuuacc

SEQ ID NO: 152354 - RNA, 19 nt, Artificial Sequence
  Description of Artificial Sequence: Synthetic oligonucleotide
  Sense strand starting at position 595 of SEQ ID NO: 1958
caauauguacuguguuaug

SEQ ID NO: 152355 - RNA, 19 nt, Artificial Sequence
  Description of Artificial Sequence: Synthetic oligonucleotide
  Antisense strand to SEQ ID NO: 152354
cauaacacaguacauauug

SEQ ID NO: 152356 - RNA, 19 nt, Artificial Sequence
  Description of Artificial Sequence: Synthetic oligonucleotide
  Sense strand starting at position 634 of SEQ ID NO: 1958
gaugaaagauguccucauu

SEQ ID NO: 152357 - RNA, 19 nt, Artificial Sequence
  Description of Artificial Sequence: Synthetic oligonucleotide
  Antisense strand to SEQ ID NO: 152356
aaugaggacaucuuucauc

SEQ ID NO: 152358 - RNA, 19 nt, Artificial Sequence
  Description of Artificial Sequence: Synthetic oligonucleotide
  Sense strand starting at position 702 of SEQ ID NO: 1958
ucccaagaucuaugcuaag

SEQ ID NO: 152359 - RNA, 19 nt, Artificial Sequence
  Description of Artificial Sequence: Synthetic oligonucleotide
  Antisense strand to SEQ ID NO: 152358
cuuagcauagaucuuggga

SEQ ID NO: 152360 - RNA, 19 nt, Artificial Sequence
  Description of Artificial Sequence: Synthetic oligonucleotide
  Sense strand starting at position 754 of SEQ ID NO: 1958
caggucugcuucuugggaa

SEQ ID NO: 152361 - RNA, 19 nt, Artificial Sequence
  Description of Artificial Sequence: Synthetic oligonucleotide
  Antisense strand to SEQ ID NO: 152360
uucccaagaagcagaccug

SEQ ID NO: 152362 - RNA, 19 nt, Artificial Sequence
  Description of Artificial Sequence: Synthetic oligonucleotide
  Sense strand starting at position 761 of SEQ ID NO: 1958
gcuucuugggaaugugaua

SEQ ID NO: 152363 - RNA, 19 nt, Artificial Sequence
  Description of Artificial Sequence: Synthetic oligonucleotide
  Antisense strand to SEQ ID NO: 152362
uaucacauucccaagaagc

SEQ ID NO: 152364 - RNA, 19 nt, Artificial Sequence
  Description of Artificial Sequence: Synthetic oligonucleotide
  Sense strand starting at position 895 of SEQ ID NO: 1958
ggaacagacuuagaaagga

SEQ ID NO: 152365 - RNA, 19 nt, Artificial Sequence
  Description of Artificial Sequence: Synthetic oligonucleotide
  Antisense strand to SEQ ID NO: 152364
uccuuucuaagucuguucc

SEQ ID NO: 152366 - RNA, 19 nt, Artificial Sequence
  Description of Artificial Sequence: Synthetic oligonucleotide
  Sense strand starting at position 922 of SEQ ID NO: 1958
uccuuagucccuuauguau

SEQ ID NO: 152367 - RNA, 19 nt, Artificial Sequence
  Description of Artificial Sequence: Synthetic oligonucleotide
  Antisense strand to SEQ ID NO: 152366
auacauaagggacuaagga

SEQ ID NO: 152368 - RNA, 19 nt, Artificial Sequence
  Description of Artificial Sequence: Synthetic oligonucleotide
  Sense strand starting at position 988 of SEQ ID NO: 1958
aggucagaaauguguuguu

SEQ ID NO: 152369 - RNA, 19 nt, Artificial Sequence
  Description of Artificial Sequence: Synthetic oligonucleotide
  Antisense strand to SEQ ID NO: 152368
aacaacacauuucugaccu

SEQ ID NO: 152370 - RNA, 19 nt, Artificial Sequence
  Description of Artificial Sequence: Synthetic oligonucleotide
  Sense strand starting at position 1002 of SEQ ID NO: 1958
uuguuucuuggccauacaa

SEQ ID NO: 152371 - RNA, 19 nt, Artificial Sequence
  Description of Artificial Sequence: Synthetic oligonucleotide
  Antisense strand to SEQ ID NO: 152370
uuguauggccaagaaacaa

SEQ ID NO: 152372 - RNA, 19 nt, Artificial Sequence
  Description of Artificial Sequence: Synthetic oligonucleotide
  Sense strand starting at position 1087 of SEQ ID NO: 1958
ccugucauuccaugucaac

SEQ ID NO: 152373 - RNA, 19 nt, Artificial Sequence
  Description of Artificial Sequence: Synthetic oligonucleotide
  Antisense strand to SEQ ID NO: 152372
guugacauggaaugacagg

SEQ ID NO: 152374 - RNA, 19 nt, Artificial Sequence
  Description of Artificial Sequence: Synthetic oligonucleotide
  Sense strand starting at position 1105 of SEQ ID NO: 1958
cucuaugagguccguauua

SEQ ID NO: 152375 - RNA, 19 nt, Artificial Sequence
  Description of Artificial Sequence: Synthetic oligonucleotide
  Antisense strand to SEQ ID NO: 152374
uaauacggaccucauagag

SEQ ID NO: 152376 - RNA, 19 nt, Artificial Sequence
  Description of Artificial Sequence: Synthetic oligonucleotide
  Sense strand starting at position 1107 of SEQ ID NO: 1958
cuaugagguccguauuauu

SEQ ID NO: 152377 - RNA, 19 nt, Artificial Sequence
  Description of Artificial Sequence: Synthetic oligonucleotide
  Antisense strand to SEQ ID NO: 152376
aauaauacggaccucauag

SEQ ID NO: 152378 - RNA, 19 nt, Artificial Sequence
  Description of Artificial Sequence: Synthetic oligonucleotide
  Sense strand starting at position 1124 of SEQ ID NO: 1958
uuauaugaccuuuagaguc

SEQ ID NO: 152379 - RNA, 19 nt, Artificial Sequence
  Description of Artificial Sequence: Synthetic oligonucleotide
  Antisense strand to SEQ ID NO: 152378
gacucuaaaggucauauaa

SEQ ID NO: 152380 - RNA, 19 nt, Artificial Sequence
  Description of Artificial Sequence: Synthetic oligonucleotide
  Sense strand starting at position 1142 of SEQ ID NO: 1958
cagaaacacugagaggaua

SEQ ID NO: 152381 - RNA, 19 nt, Artificial Sequence
  Description of Artificial Sequence: Synthetic oligonucleotide
  Antisense strand to SEQ ID NO: 152380
uauccucucaguguuucug

SEQ ID NO: 152382 - RNA, 19 nt, Artificial Sequence
  Description of Artificial Sequence: Synthetic oligonucleotide
  Sense strand starting at position 1175 of SEQ ID NO: 1958
gugacacugcuuuaaggaa

SEQ ID NO: 152383 - RNA, 19 nt, Artificial Sequence
  Description of Artificial Sequence: Synthetic oligonucleotide
  Antisense strand to SEQ ID NO: 152382
uuccuuaaagcagugucac

SEQ ID NO: 152384 - RNA, 19 nt, Artificial Sequence
  Description of Artificial Sequence: Synthetic oligonucleotide
  Sense strand starting at position 1336 of SEQ ID NO: 1958
ccucgcacccuugaggaau

SEQ ID NO: 152385 - RNA, 19 nt, Artificial Sequence
  Description of Artificial Sequence: Synthetic oligonucleotide
  Antisense strand to SEQ ID NO: 152384
auuccucaagggugcgagg

SEQ ID NO: 152386 - RNA, 19 nt, Artificial Sequence
  Description of Artificial Sequence: Synthetic oligonucleotide
  Sense strand starting at position 1350 of SEQ ID NO: 1958
ggaauuaccucgcuuccca

SEQ ID NO: 152387 - RNA, 19 nt, Artificial Sequence
  Description of Artificial Sequence: Synthetic oligonucleotide
  Antisense strand to SEQ ID NO: 152386
ugggaagcgagguaauucc

SEQ ID NO: 152388 - RNA, 19 nt, Artificial Sequence
  Description of Artificial Sequence: Synthetic oligonucleotide
  Sense strand starting at position 1476 of SEQ ID NO: 1958
gcagucauucgcuugccau

SEQ ID NO: 152389 - RNA, 19 nt, Artificial Sequence
  Description of Artificial Sequence: Synthetic oligonucleotide
  Antisense strand to SEQ ID NO: 152388
auggcaagcgaaugacugc

SEQ ID NO: 152390 - RNA, 19 nt, Artificial Sequence
  Description of Artificial Sequence: Synthetic oligonucleotide
  Sense strand starting at position 1602 of SEQ ID NO: 1958
aagauaacuugacagggau

SEQ ID NO: 152391 - RNA, 19 nt, Artificial Sequence
  Description of Artificial Sequence: Synthetic oligonucleotide
  Antisense strand to SEQ ID NO: 152390
aucccugucaaguuaucuu

SEQ ID NO: 152392 - RNA, 19 nt, Artificial Sequence
  Description of Artificial Sequence: Synthetic oligonucleotide
  Sense strand starting at position 1898 of SEQ ID NO: 1958
gccggugucccgucgaaca

SEQ ID NO: 152393 - RNA, 19 nt, Artificial Sequence
  Description of Artificial Sequence: Synthetic oligonucleotide
  Antisense strand to SEQ ID NO: 152392
uguucgacgggacaccggc

SEQ ID NO: 152394 - RNA, 19 nt, Artificial Sequence
  Description of Artificial Sequence: Synthetic oligonucleotide
  Sense strand starting at position 3101 of SEQ ID NO: 1958
cuaagaauuugucagucuu

SEQ ID NO: 152395 - RNA, 19 nt, Artificial Sequence
  Description of Artificial Sequence: Synthetic oligonucleotide
  Antisense strand to SEQ ID NO: 152394
aagacugacaaauucuuag

SEQ ID NO: 152396 - RNA, 19 nt, Artificial Sequence
  Description of Artificial Sequence: Synthetic oligonucleotide
  Sense strand starting at position 3152 of SEQ ID NO: 1958
cagcccuuucugucgcaua

SEQ ID NO: 152397 - RNA, 19 nt, Artificial Sequence
  Description of Artificial Sequence: Synthetic oligonucleotide
  Antisense strand to SEQ ID NO: 152396
uaugcgacagaaagggcug

SEQ ID NO: 152398 - RNA, 19 nt, Artificial Sequence
  Description of Artificial Sequence: Synthetic oligonucleotide
  Sense strand starting at position 3196 of SEQ ID NO: 1958
agguuucugcacugagagu

SEQ ID NO: 152399 - RNA, 19 nt, Artificial Sequence
  Description of Artificial Sequence: Synthetic oligonucleotide
  Antisense strand to SEQ ID NO: 152398
acucucagugcagaaaccu

SEQ ID NO: 152400 - RNA, 19 nt, Artificial Sequence
  Description of Artificial Sequence: Synthetic oligonucleotide
  Sense strand starting at position 3381 of SEQ ID NO: 1958
guggucacugcucauugaa

SEQ ID NO: 152401 - RNA, 19 nt, Artificial Sequence
  Description of Artificial Sequence: Synthetic oligonucleotide
  Antisense strand to SEQ ID NO: 152400
uucaaugagcagugaccac

SEQ ID NO: 152402 - RNA, 19 nt, Artificial Sequence
  Description of Artificial Sequence: Synthetic oligonucleotide
  Sense strand starting at position 3383 of SEQ ID NO: 1958
ggucacugcucauugaauu

SEQ ID NO: 152403 - RNA, 19 nt, Artificial Sequence
  Description of Artificial Sequence: Synthetic oligonucleotide
  Antisense strand to SEQ ID NO: 152402
aauucaaugagcagugacc

SEQ ID NO: 152404 - RNA, 19 nt, Artificial Sequence
  Description of Artificial Sequence: Synthetic oligonucleotide
  Sense strand starting at position 3384 of SEQ ID NO: 1958
gucacugcucauugaauuu

SEQ ID NO: 152405 - RNA, 19 nt, Artificial Sequence
  Description of Artificial Sequence: Synthetic oligonucleotide
  Antisense strand to SEQ ID NO: 152404
aaauucaaugagcagugac

SEQ ID NO: 152406 - RNA, 19 nt, Artificial Sequence
  Description of Artificial Sequence: Synthetic oligonucleotide
  Sense strand starting at position 3451 of SEQ ID NO: 1958
agcucuguucuguacgaga

SEQ ID NO: 152407 - RNA, 19 nt, Artificial Sequence
  Description of Artificial Sequence: Synthetic oligonucleotide
  Antisense strand to SEQ ID NO: 152406
ucucguacagaacagagcu

SEQ ID NO: 152408 - RNA, 19 nt, Artificial Sequence
  Description of Artificial Sequence: Synthetic oligonucleotide
  Sense strand starting at position 3502 of SEQ ID NO: 1958
guggcuuuguuagccauuu

SEQ ID NO: 152409 - RNA, 19 nt, Artificial Sequence
  Description of Artificial Sequence: Synthetic oligonucleotide
  Antisense strand to SEQ ID NO: 152408
aaauggcuaacaaagccac

SEQ ID NO: 152410 - RNA, 19 nt, Artificial Sequence
  Description of Artificial Sequence: Synthetic oligonucleotide
  Sense strand starting at position 3503 of SEQ ID NO: 1958
uggcuuuguuagccauuua

SEQ ID NO: 152411 - RNA, 19 nt, Artificial Sequence
  Description of Artificial Sequence: Synthetic oligonucleotide
  Antisense strand to SEQ ID NO: 152410
uaaauggcuaacaaagcca

SEQ ID NO: 152412 - RNA, 19 nt, Artificial Sequence
  Description of Artificial Sequence: Synthetic oligonucleotide
  Sense strand starting at position 3582 of SEQ ID NO: 1958
cacagcaguucugugaaga

SEQ ID NO: 152413 - RNA, 19 nt, Artificial Sequence
  Description of Artificial Sequence: Synthetic oligonucleotide
  Antisense strand to SEQ ID NO: 152412
ucuucacagaacugcugug

SEQ ID NO: 152414 - RNA, 19 nt, Artificial Sequence
  Description of Artificial Sequence: Synthetic oligonucleotide
  Sense strand starting at position 3670 of SEQ ID NO: 1958
cauggaucugcucagagcu

SEQ ID NO: 152415 - RNA, 19 nt, Artificial Sequence
  Description of Artificial Sequence: Synthetic oligonucleotide
  Antisense strand to SEQ ID NO: 152414
agcucugagcagauccaug

SEQ ID NO: 152416 - RNA, 19 nt, Artificial Sequence
  Description of Artificial Sequence: Synthetic oligonucleotide
  Sense strand starting at position 3765 of SEQ ID NO: 1958
gcguuuguguagauuguua

SEQ ID NO: 152417 - RNA, 19 nt, Artificial Sequence
  Description of Artificial Sequence: Synthetic oligonucleotide
  Antisense strand to SEQ ID NO: 152416
uaacaaucuacacaaacgc

SEQ ID NO: 152418 - RNA, 19 nt, Artificial Sequence
  Description of Artificial Sequence: Synthetic oligonucleotide
  Sense strand starting at position 3769 of SEQ ID NO: 1958
uuguguagauuguuaaccu

SEQ ID NO: 152419 - RNA, 19 nt, Artificial Sequence
  Description of Artificial Sequence: Synthetic oligonucleotide
  Antisense strand to SEQ ID NO: 152418
agguuaacaaucuacacaa

SEQ ID NO: 152420 - RNA, 19 nt, Artificial Sequence
  Description of Artificial Sequence: Synthetic oligonucleotide
  Sense strand starting at position 3773 of SEQ ID NO: 1958
guagauuguuaaccuugca

SEQ ID NO: 152421 - RNA, 19 nt, Artificial Sequence
  Description of Artificial Sequence: Synthetic oligonucleotide
  Antisense strand to SEQ ID NO: 152420
ugcaagguuaacaaucuac

SEQ ID NO: 152422 - RNA, 19 nt, Artificial Sequence
  Description of Artificial Sequence: Synthetic oligonucleotide
  Sense strand starting at position 3956 of SEQ ID NO: 1958
ucuggaguccuugacugga

SEQ ID NO: 152423 - RNA, 19 nt, Artificial Sequence
  Description of Artificial Sequence: Synthetic oligonucleotide
  Antisense strand to SEQ ID NO: 152422
uccagucaaggacuccaga

SEQ ID NO: 152424 - RNA, 19 nt, Artificial Sequence
  Description of Artificial Sequence: Synthetic oligonucleotide
  Sense strand starting at position 3980 of SEQ ID NO: 1959
guaaacauuugucaaugau

SEQ ID NO: 152425 - RNA, 19 nt, Artificial Sequence
  Description of Artificial Sequence: Synthetic oligonucleotide
  Antisense strand to SEQ ID NO: 152424
aucauugacaaauguuuac

SEQ ID NO: 152426 - RNA, 19 nt, Artificial Sequence
  Description of Artificial Sequence: Synthetic oligonucleotide
  Sense strand starting at position 3880 of SEQ ID NO: 1959
gguggaguuagguggaaau

SEQ ID NO: 152427 - RNA, 19 nt, Artificial Sequence
  Description of Artificial Sequence: Synthetic oligonucleotide
  Antisense strand to SEQ ID NO: 152426
auuuccaccuaacuccacc

SEQ ID NO: 152428 - RNA, 19 nt, Artificial Sequence
  Description of Artificial Sequence: Synthetic oligonucleotide
  Sense strand starting at position 3856 of SEQ ID NO: 1959
ggaaaugauugcuuacagu

SEQ ID NO: 152429 - RNA, 19 nt, Artificial Sequence
  Description of Artificial Sequence: Synthetic oligonucleotide
  Antisense strand to SEQ ID NO: 152428
acuguaagcaaucauuucc

SEQ ID NO: 152430 - RNA, 19 nt, Artificial Sequence
  Description of Artificial Sequence: Synthetic oligonucleotide
  Sense strand starting at position 3855 of SEQ ID NO: 1959
aggaaaugauugcuuacag

SEQ ID NO: 152431 - RNA, 19 nt, Artificial Sequence
  Description of Artificial Sequence: Synthetic oligonucleotide
  Antisense strand to SEQ ID NO: 152430
cuguaagcaaucauuuccu

SEQ ID NO: 152432 - RNA, 19 nt, Artificial Sequence
  Description of Artificial Sequence: Synthetic oligonucleotide
  Sense strand starting at position 3760 of SEQ ID NO: 1959
guuauagccuuagcaggau

SEQ ID NO: 152433 - RNA, 19 nt, Artificial Sequence
  Description of Artificial Sequence: Synthetic oligonucleotide
  Antisense strand to SEQ ID NO: 152432
auccugcuaaggcuauaac

SEQ ID NO: 152434 - RNA, 19 nt, Artificial Sequence
  Description of Artificial Sequence: Synthetic oligonucleotide
  Sense strand starting at position 3192 of SEQ ID NO: 1959
acaacuuauucguuaguua

SEQ ID NO: 152435 - RNA, 19 nt, Artificial Sequence
  Description of Artificial Sequence: Synthetic oligonucleotide
  Antisense strand to SEQ ID NO: 152434
uaacuaacgaauaaguugu

SEQ ID NO: 152436 - RNA, 19 nt, Artificial Sequence
  Description of Artificial Sequence: Synthetic oligonucleotide
  Sense strand starting at position 3188 of SEQ ID NO: 1959
augaacaacuuauucguua

SEQ ID NO: 152437 - RNA, 19 nt, Artificial Sequence
  Description of Artificial Sequence: Synthetic oligonucleotide
  Antisense strand to SEQ ID NO: 152436
uaacgaauaaguuguucau

SEQ ID NO: 152438 - RNA, 19 nt, Artificial Sequence
  Description of Artificial Sequence: Synthetic oligonucleotide
  Sense strand starting at position 3094 of SEQ ID NO: 1959
agggaucuccucugcaaca

SEQ ID NO: 152439 - RNA, 19 nt, Artificial Sequence
  Description of Artificial Sequence: Synthetic oligonucleotide
  Antisense strand to SEQ ID NO: 152438
uguugcagaggagaucccu

SEQ ID NO: 152440 - RNA, 19 nt, Artificial Sequence
  Description of Artificial Sequence: Synthetic oligonucleotide
  Sense strand starting at position 3040 of SEQ ID NO: 1959
auucguacacuuuaggauu

SEQ ID NO: 152441 - RNA, 19 nt, Artificial Sequence
  Description of Artificial Sequence: Synthetic oligonucleotide
  Antisense strand to SEQ ID NO: 152440
aauccuaaaguguacgaau

SEQ ID NO: 152442 - RNA, 19 nt, Artificial Sequence
  Description of Artificial Sequence: Synthetic oligonucleotide
  Sense strand starting at position 3035 of SEQ ID NO: 1959
agcacauucguacacuuua

SEQ ID NO: 152443 - RNA, 19 nt, Artificial Sequence
  Description of Artificial Sequence: Synthetic oligonucleotide
  Antisense strand to SEQ ID NO: 152442
uaaaguguacgaaugugcu

SEQ ID NO: 152444 - RNA, 19 nt, Artificial Sequence
  Description of Artificial Sequence: Synthetic oligonucleotide
  Sense strand starting at position 2983 of SEQ ID NO: 1959
auuucugcaucagaugaau

SEQ ID NO: 152445 - RNA, 19 nt, Artificial Sequence
  Description of Artificial Sequence: Synthetic oligonucleotide
  Antisense strand to SEQ ID NO: 152444
auucaucugaugcagaaau

SEQ ID NO: 152446 - RNA, 19 nt, Artificial Sequence
  Description of Artificial Sequence: Synthetic oligonucleotide
  Sense strand starting at position 2958 of SEQ ID NO: 1959
ggauuuaaauagcacaaau

SEQ ID NO: 152447 - RNA, 19 nt, Artificial Sequence
  Description of Artificial Sequence: Synthetic oligonucleotide
  Antisense strand to SEQ ID NO: 152446
auuugugcuauuuaaaucc

SEQ ID NO: 152448 - RNA, 19 nt, Artificial Sequence
  Description of Artificial Sequence: Synthetic oligonucleotide
  Sense strand starting at position 2686 of SEQ ID NO: 1959
agaacacgcuuugauuuau

SEQ ID NO: 152449 - RNA, 19 nt, Artificial Sequence
  Description of Artificial Sequence: Synthetic oligonucleotide
  Antisense strand to SEQ ID NO: 152448
auaaaucaaagcguguucu

SEQ ID NO: 152450 - RNA, 19 nt, Artificial Sequence
  Description of Artificial Sequence: Synthetic oligonucleotide
  Sense strand starting at position 2610 of SEQ ID NO: 1959
ggacaaugcucccuuguuc

SEQ ID NO: 152451 - RNA, 19 nt, Artificial Sequence
  Description of Artificial Sequence: Synthetic oligonucleotide
  Antisense strand to SEQ ID NO: 152450
gaacaagggagcauugucc

SEQ ID NO: 152452 - RNA, 19 nt, Artificial Sequence
  Description of Artificial Sequence: Synthetic oligonucleotide
  Sense strand starting at position 2568 of SEQ ID NO: 1959
cuggguuugagcugccaca

SEQ ID NO: 152453 - RNA, 19 nt, Artificial Sequence
  Description of Artificial Sequence: Synthetic oligonucleotide
  Antisense strand to SEQ ID NO: 152452
uguggcagcucaaacccag

SEQ ID NO: 152454 - RNA, 19 nt, Artificial Sequence
  Description of Artificial Sequence: Synthetic oligonucleotide
  Sense strand starting at position 2559 of SEQ ID NO: 1959
ccacaauuccuggguuuga

SEQ ID NO: 152455 - RNA, 19 nt, Artificial Sequence
  Description of Artificial Sequence: Synthetic oligonucleotide
  Antisense strand to SEQ ID NO: 152454
ucaaacccaggaauugugg

SEQ ID NO: 152456 - RNA, 19 nt, Artificial Sequence
  Description of Artificial Sequence: Synthetic oligonucleotide
  Sense strand starting at position 2299 of SEQ ID NO: 1959
uuagauucuuccuuaagga

SEQ ID NO: 152457 - RNA, 19 nt, Artificial Sequence
  Description of Artificial Sequence: Synthetic oligonucleotide
  Antisense strand to SEQ ID NO: 152456
uccuuaaggaagaaucuaa

SEQ ID NO: 152458 - RNA, 19 nt, Artificial Sequence
  Description of Artificial Sequence: Synthetic oligonucleotide
  Sense strand starting at position 2298 of SEQ ID NO: 1959
uuuagauucuuccuuaagg

SEQ ID NO: 152459 - RNA, 19 nt, Artificial Sequence
  Description of Artificial Sequence: Synthetic oligonucleotide
  Antisense strand to SEQ ID NO: 152458
ccuuaaggaagaaucuaaa

SEQ ID NO: 152460 - RNA, 19 nt, Artificial Sequence
  Description of Artificial Sequence: Synthetic oligonucleotide
  Sense strand starting at position 2295 of SEQ ID NO: 1959
uuguuuagauucuuccuua

SEQ ID NO: 152461 - RNA, 19 nt, Artificial Sequence
  Description of Artificial Sequence: Synthetic oligonucleotide
  Antisense strand to SEQ ID NO: 152460
uaaggaagaaucuaaacaa

SEQ ID NO: 152462 - RNA, 19 nt, Artificial Sequence
  Description of Artificial Sequence: Synthetic oligonucleotide
  Sense strand starting at position 2288 of SEQ ID NO: 1959
ggcggacuuguuuagauuc

SEQ ID NO: 152463 - RNA, 19 nt, Artificial Sequence
  Description of Artificial Sequence: Synthetic oligonucleotide
  Antisense strand to SEQ ID NO: 152462
gaaucuaaacaaguccgcc

SEQ ID NO: 152464 - RNA, 19 nt, Artificial Sequence
  Description of Artificial Sequence: Synthetic oligonucleotide
  Sense strand starting at position 2238 of SEQ ID NO: 1959
guuccaccugcguacauau

SEQ ID NO: 152465 - RNA, 19 nt, Artificial Sequence
  Description of Artificial Sequence: Synthetic oligonucleotide
  Antisense strand to SEQ ID NO: 152464
auauguacgcagguggaac

SEQ ID NO: 152466 - RNA, 19 nt, Artificial Sequence
  Description of Artificial Sequence: Synthetic oligonucleotide
  Sense strand starting at position 2181 of SEQ ID NO: 1959
accggaauuugccaggauu

SEQ ID NO: 152467 - RNA, 19 nt, Artificial Sequence
  Description of Artificial Sequence: Synthetic oligonucleotide
  Antisense strand to SEQ ID NO: 152466
aauccuggcaaauuccggu

SEQ ID NO: 152468 - RNA, 19 nt, Artificial Sequence
  Description of Artificial Sequence: Synthetic oligonucleotide
  Sense strand starting at position 2066 of SEQ ID NO: 1959
ugacgagagucucuuuaaa

SEQ ID NO: 152469 - RNA, 19 nt, Artificial Sequence
  Description of Artificial Sequence: Synthetic oligonucleotide
  Antisense strand to SEQ ID NO: 152468
uuuaaagagacucucguca

SEQ ID NO: 152470 - RNA, 19 nt, Artificial Sequence
  Description of Artificial Sequence: Synthetic oligonucleotide
  Sense strand starting at position 1674 of SEQ ID NO: 1959
uugcguuagaaguacuaga

SEQ ID NO: 152471 - RNA, 19 nt, Artificial Sequence
  Description of Artificial Sequence: Synthetic oligonucleotide
  Antisense strand to SEQ ID NO: 152470
ucuaguacuucuaacgcaa

SEQ ID NO: 152472 - RNA, 19 nt, Artificial Sequence
  Description of Artificial Sequence: Synthetic oligonucleotide
  Sense strand starting at position 1668 of SEQ ID NO: 1959
agcaauuugcguuagaagu

SEQ ID NO: 152473 - RNA, 19 nt, Artificial Sequence
  Description of Artificial Sequence: Synthetic oligonucleotide
  Antisense strand to SEQ ID NO: 152472
acuucuaacgcaaauugcu

SEQ ID NO: 152474 - RNA, 19 nt, Artificial Sequence
  Description of Artificial Sequence: Synthetic oligonucleotide
  Sense strand starting at position 1666 of SEQ ID NO: 1959
agagcaauuugcguuagaa

SEQ ID NO: 152475 - RNA, 19 nt, Artificial Sequence
  Description of Artificial Sequence: Synthetic oligonucleotide
  Antisense strand to SEQ ID NO: 152474
uucuaacgcaaauugcucu

SEQ ID NO: 152476 - RNA, 19 nt, Artificial Sequence
  Description of Artificial Sequence: Synthetic oligonucleotide
  Sense strand starting at position 1663 of SEQ ID NO: 1959
ccgagagcaauuugcguua

SEQ ID NO: 152477 - RNA, 19 nt, Artificial Sequence
  Description of Artificial Sequence: Synthetic oligonucleotide
  Antisense strand to SEQ ID NO: 152476
uaacgcaaauugcucucgg

SEQ ID NO: 152478 - RNA, 19 nt, Artificial Sequence
  Description of Artificial Sequence: Synthetic oligonucleotide
  Sense strand starting at position 1614 of SEQ ID NO: 1959
guggcugaccuugaaguua

SEQ ID NO: 152479 - RNA, 19 nt, Artificial Sequence
  Description of Artificial Sequence: Synthetic oligonucleotide
  Antisense strand to SEQ ID NO: 152478
uaacuucaaggucagccac

SEQ ID NO: 152480 - RNA, 19 nt, Artificial Sequence
  Description of Artificial Sequence: Synthetic oligonucleotide
  Sense strand starting at position 1613 of SEQ ID NO: 1959
gguggcugaccuugaaguu

SEQ ID NO: 152481 - RNA, 19 nt, Artificial Sequence
  Description of Artificial Sequence: Synthetic oligonucleotide
  Antisense strand to SEQ ID NO: 152480
aacuucaaggucagccacc

SEQ ID NO: 152482 - RNA, 19 nt, Artificial Sequence
  Description of Artificial Sequence: Synthetic oligonucleotide
  Sense strand starting at position 1294 of SEQ ID NO: 1959
ggguauuucucuggacaac

SEQ ID NO: 152483 - RNA, 19 nt, Artificial Sequence
  Description of Artificial Sequence: Synthetic oligonucleotide
  Antisense strand to SEQ ID NO: 152482
guuguccagagaaauaccc

SEQ ID NO: 152484 - RNA, 19 nt, Artificial Sequence
  Description of Artificial Sequence: Synthetic oligonucleotide
  Sense strand starting at position 1215 of SEQ ID NO: 1959
gcgcuagucgcugugacua

SEQ ID NO: 152485 - RNA, 19 nt, Artificial Sequence
  Description of Artificial Sequence: Synthetic oligonucleotide
  Antisense strand to SEQ ID NO: 152484
uagucacagcgacuagcgc

SEQ ID NO: 152486 - RNA, 19 nt, Artificial Sequence
  Description of Artificial Sequence: Synthetic oligonucleotide
  Sense strand starting at position 1190 of SEQ ID NO: 1959
ggauuuguaccaggcgugu

SEQ ID NO: 152487 - RNA, 19 nt, Artificial Sequence
  Description of Artificial Sequence: Synthetic oligonucleotide
  Antisense strand to SEQ ID NO: 152486
acacgccugguacaaaucc

SEQ ID NO: 152488 - RNA, 19 nt, Artificial Sequence
  Description of Artificial Sequence: Synthetic oligonucleotide
  Sense strand starting at position 1179 of SEQ ID NO: 1959
aaacuaugcugggauuugu

SEQ ID NO: 152489 - RNA, 19 nt, Artificial Sequence
  Description of Artificial Sequence: Synthetic oligonucleotide
  Antisense strand to SEQ ID NO: 152488
acaaaucccagcauaguuu

SEQ ID NO: 152490 - RNA, 19 nt, Artificial Sequence
  Description of Artificial Sequence: Synthetic oligonucleotide
  Sense strand starting at position 923 of SEQ ID NO: 1959
uggcauaccuuagacagaa

SEQ ID NO: 152491 - RNA, 19 nt, Artificial Sequence
  Description of Artificial Sequence: Synthetic oligonucleotide
  Antisense strand to SEQ ID NO: 152490
uucugucuaagguaugcca

SEQ ID NO: 152492 - RNA, 19 nt, Artificial Sequence
  Description of Artificial Sequence: Synthetic oligonucleotide
  Sense strand starting at position 413 of SEQ ID NO: 1959
ugcagagaccuuuguccuu

SEQ ID NO: 152493 - RNA, 19 nt, Artificial Sequence
  Description of Artificial Sequence: Synthetic oligonucleotide
  Antisense strand to SEQ ID NO: 152492
aaggacaaaggucucugca

SEQ ID NO: 152494 - RNA, 19 nt, Artificial Sequence
  Description of Artificial Sequence: Synthetic oligonucleotide
  Sense strand starting at position 364 of SEQ ID NO: 1959
uuauguguauacguaucua

SEQ ID NO: 152495 - RNA, 19 nt, Artificial Sequence
  Description of Artificial Sequence: Synthetic oligonucleotide
  Antisense strand to SEQ ID NO: 152494
uagauacguauacacauaa

SEQ ID NO: 152496 - RNA, 19 nt, Artificial Sequence
  Description of Artificial Sequence: Synthetic oligonucleotide
  Sense strand starting at position 359 of SEQ ID NO: 1959
gauguuuauguguauacgu

SEQ ID NO: 152497 - RNA, 19 nt, Artificial Sequence
  Description of Artificial Sequence: Synthetic oligonucleotide
  Antisense strand to SEQ ID NO: 152496
acguauacacauaaacauc

SEQ ID NO: 152498 - RNA, 19 nt, Artificial Sequence
  Description of Artificial Sequence: Synthetic oligonucleotide
  Sense strand starting at position 227 of SEQ ID NO: 1959
ugaucaucccugggcaaug

SEQ ID NO: 152499 - RNA, 19 nt, Artificial Sequence
  Description of Artificial Sequence: Synthetic oligonucleotide
  Antisense strand to SEQ ID NO: 152498
cauugcccagggaugauca

SEQ ID NO: 152500 - RNA, 19 nt, Artificial Sequence
  Description of Artificial Sequence: Synthetic oligonucleotide
  Sense strand starting at position 226 of SEQ ID NO: 1959
cugaucaucccugggcaau

SEQ ID NO: 152501 - RNA, 19 nt, Artificial Sequence
  Description of Artificial Sequence: Synthetic oligonucleotide
  Antisense strand to SEQ ID NO: 152500
auugcccagggaugaucag

SEQ ID NO: 152502 - RNA, 19 nt, Artificial Sequence
  Description of Artificial Sequence: Synthetic oligonucleotide
  Sense strand starting at position 225 of SEQ ID NO: 1959
ccugaucaucccugggcaa

SEQ ID NO: 152503 - RNA, 19 nt, Artificial Sequence
  Description of Artificial Sequence: Synthetic oligonucleotide
  Antisense strand to SEQ ID NO: 152502
uugcccagggaugaucagg

SEQ ID NO: 152504 - RNA, 19 nt, Artificial Sequence
  Description of Artificial Sequence: Synthetic oligonucleotide
  Sense strand starting at position 172 of SEQ ID NO: 1960
caaacauagugguugauua

SEQ ID NO: 152505 - RNA, 19 nt, Artificial Sequence
  Description of Artificial Sequence: Synthetic oligonucleotide
  Antisense strand to SEQ ID NO: 152504
uaaucaaccacuauguuug

SEQ ID NO: 152506 - RNA, 19 nt, Artificial Sequence
  Description of Artificial Sequence: Synthetic oligonucleotide
  Sense strand starting at position 240 of SEQ ID NO: 1960
ccauauggucacggauaca

SEQ ID NO: 152507 - RNA, 19 nt, Artificial Sequence
  Description of Artificial Sequence: Synthetic oligonucleotide
  Antisense strand to SEQ ID NO: 152506
uguauccgugaccauaugg

SEQ ID NO: 152508 - RNA, 19 nt, Artificial Sequence
  Description of Artificial Sequence: Synthetic oligonucleotide
  Sense strand starting at position 258 of SEQ ID NO: 1960
agagaaaucugagaaacaa

SEQ ID NO: 152509 - RNA, 19 nt, Artificial Sequence
  Description of Artificial Sequence: Synthetic oligonucleotide
  Antisense strand to SEQ ID NO: 152508
uuguuucucagauuucucu

SEQ ID NO: 152510 - RNA, 19 nt, Artificial Sequence
  Description of Artificial Sequence: Synthetic oligonucleotide
  Sense strand starting at position 377 of SEQ ID NO: 1960
ggagacagauaacaauaau

SEQ ID NO: 152511 - RNA, 19 nt, Artificial Sequence
  Description of Artificial Sequence: Synthetic oligonucleotide
  Antisense strand to SEQ ID NO: 152510
auuauuguuaucugucucc

SEQ ID NO: 152512 - RNA, 19 nt, Artificial Sequence
  Description of Artificial Sequence: Synthetic oligonucleotide
  Sense strand starting at position 419 of SEQ ID NO: 1960
aggaaucccaguugauguu

SEQ ID NO: 152513 - RNA, 19 nt, Artificial Sequence
  Description of Artificial Sequence: Synthetic oligonucleotide
  Antisense strand to SEQ ID NO: 152512
aacaucaacugggauuccu

SEQ ID NO: 152514 - RNA, 19 nt, Artificial Sequence
  Description of Artificial Sequence: Synthetic oligonucleotide
  Sense strand starting at position 452 of SEQ ID NO: 1960
cccagcaaguguuuauuua

SEQ ID NO: 152515 - RNA, 19 nt, Artificial Sequence
  Description of Artificial Sequence: Synthetic oligonucleotide
  Antisense strand to SEQ ID NO: 152514
uaaauaaacacuugcuggg

SEQ ID NO: 152516 - RNA, 19 nt, Artificial Sequence
  Description of Artificial Sequence: Synthetic oligonucleotide
  Sense strand starting at position 648 of SEQ ID NO: 1960
aaagauaaccuaugcgaag

SEQ ID NO: 152517 - RNA, 19 nt, Artificial Sequence
  Description of Artificial Sequence: Synthetic oligonucleotide
  Antisense strand to SEQ ID NO: 152516
cuucgcauagguuaucuuu

SEQ ID NO: 152518 - RNA, 19 nt, Artificial Sequence
  Description of Artificial Sequence: Synthetic oligonucleotide
  Sense strand starting at position 649 of SEQ ID NO: 1960
aagauaaccuaugcgaagu

SEQ ID NO: 152519 - RNA, 19 nt, Artificial Sequence
  Description of Artificial Sequence: Synthetic oligonucleotide
  Antisense strand to SEQ ID NO: 152518
acuucgcauagguuaucuu

SEQ ID NO: 152520 - RNA, 19 nt, Artificial Sequence
  Description of Artificial Sequence: Synthetic oligonucleotide
  Sense strand starting at position 670 of SEQ ID NO: 1960
guaacauguuaccuaacau

SEQ ID NO: 152521 - RNA, 19 nt, Artificial Sequence
  Description of Artificial Sequence: Synthetic oligonucleotide
  Antisense strand to SEQ ID NO: 152520
auguuagguaacauguuac

SEQ ID NO: 152522 - RNA, 19 nt, Artificial Sequence
  Description of Artificial Sequence: Synthetic oligonucleotide
  Sense strand starting at position 706 of SEQ ID NO: 1960
auagcaguguuaucaagga

SEQ ID NO: 152523 - RNA, 19 nt, Artificial Sequence
  Description of Artificial Sequence: Synthetic oligonucleotide
  Antisense strand to SEQ ID NO: 152522
uccuugauaacacugcuau

SEQ ID NO: 152524 - RNA, 19 nt, Artificial Sequence
  Description of Artificial Sequence: Synthetic oligonucleotide
  Sense strand starting at position 710 of SEQ ID NO: 1960
caguguuaucaaggauaaa

SEQ ID NO: 152525 - RNA, 19 nt, Artificial Sequence
  Description of Artificial Sequence: Synthetic oligonucleotide
  Antisense strand to SEQ ID NO: 152524
uuuauccuugauaacacug

SEQ ID NO: 152526 - RNA, 19 nt, Artificial Sequence
  Description of Artificial Sequence: Synthetic oligonucleotide
  Sense strand starting at position 737 of SEQ ID NO: 1960
uaguaugaguggcugaaga

SEQ ID NO: 152527 - RNA, 19 nt, Artificial Sequence
  Description of Artificial Sequence: Synthetic oligonucleotide
  Antisense strand to SEQ ID NO: 152526
ucuucagccacucauacua

SEQ ID NO: 152528 - RNA, 19 nt, Artificial Sequence
  Description of Artificial Sequence: Synthetic oligonucleotide
  Sense strand starting at position 739 of SEQ ID NO: 1960
guaugaguggcugaagaug

SEQ ID NO: 152529 - RNA, 19 nt, Artificial Sequence
  Description of Artificial Sequence: Synthetic oligonucleotide
  Antisense strand to SEQ ID NO: 152528
caucuucagccacucauac

SEQ ID NO: 152530 - RNA, 19 nt, Artificial Sequence
  Description of Artificial Sequence: Synthetic oligonucleotide
  Sense strand starting at position 747 of SEQ ID NO: 1960
ggcugaagauguuuauuaa

SEQ ID NO: 152531 - RNA, 19 nt, Artificial Sequence
  Description of Artificial Sequence: Synthetic oligonucleotide
  Antisense strand to SEQ ID NO: 152530
uuaauaaacaucuucagcc

SEQ ID NO: 152532 - RNA, 19 nt, Artificial Sequence
  Description of Artificial Sequence: Synthetic oligonucleotide
  Sense strand starting at position 929 of SEQ ID NO: 1960
gccauaucucaggauucuu

SEQ ID NO: 152533 - RNA, 19 nt, Artificial Sequence
  Description of Artificial Sequence: Synthetic oligonucleotide
  Antisense strand to SEQ ID NO: 152532
aagaauccugagauauggc

SEQ ID NO: 152534 - RNA, 19 nt, Artificial Sequence
  Description of Artificial Sequence: Synthetic oligonucleotide
  Sense strand starting at position 1125 of SEQ ID NO: 1960
cuuacucuugcucagggau

SEQ ID NO: 152535 - RNA, 19 nt, Artificial Sequence
  Description of Artificial Sequence: Synthetic oligonucleotide
  Antisense strand to SEQ ID NO: 152534
aucccugagcaagaguaag

SEQ ID NO: 152536 - RNA, 19 nt, Artificial Sequence
  Description of Artificial Sequence: Synthetic oligonucleotide
  Sense strand starting at position 1139 of SEQ ID NO: 1960
gggauuccuugugucagga

SEQ ID NO: 152537 - RNA, 19 nt, Artificial Sequence
  Description of Artificial Sequence: Synthetic oligonucleotide
  Antisense strand to SEQ ID NO: 152536
uccugacacaaggaauccc

SEQ ID NO: 152538 - RNA, 19 nt, Artificial Sequence
  Description of Artificial Sequence: Synthetic oligonucleotide
  Sense strand starting at position 1215 of SEQ ID NO: 1960
gcaagauucugaucaaauc

SEQ ID NO: 152539 - RNA, 19 nt, Artificial Sequence
  Description of Artificial Sequence: Synthetic oligonucleotide
  Antisense strand to SEQ ID NO: 152538
gauuugaucagaaucuugc

SEQ ID NO: 152540 - RNA, 19 nt, Artificial Sequence
  Description of Artificial Sequence: Synthetic oligonucleotide
  Sense strand starting at position 1313 of SEQ ID NO: 1960
uugaaauugagacgucacu

SEQ ID NO: 152541 - RNA, 19 nt, Artificial Sequence
  Description of Artificial Sequence: Synthetic oligonucleotide
  Antisense strand to SEQ ID NO: 152540
agugacgucucaauuucaa

SEQ ID NO: 152542 - RNA, 19 nt, Artificial Sequence
  Description of Artificial Sequence: Synthetic oligonucleotide
  Sense strand starting at position 1375 of SEQ ID NO: 1960
gagcuaugagacggcagaa

SEQ ID NO: 152543 - RNA, 19 nt, Artificial Sequence
  Description of Artificial Sequence: Synthetic oligonucleotide
  Antisense strand to SEQ ID NO: 152542
uucugccgucucauagcuc

SEQ ID NO: 152544 - RNA, 19 nt, Artificial Sequence
  Description of Artificial Sequence: Synthetic oligonucleotide
  Sense strand starting at position 1657 of SEQ ID NO: 1960
cagauagucucauuaggca

SEQ ID NO: 152545 - RNA, 19 nt, Artificial Sequence
  Description of Artificial Sequence: Synthetic oligonucleotide
  Antisense strand to SEQ ID NO: 152544
ugccuaaugagacuaucug

SEQ ID NO: 152546 - RNA, 19 nt, Artificial Sequence
  Description of Artificial Sequence: Synthetic oligonucleotide
  Sense strand starting at position 2036 of SEQ ID NO: 1960
ccucuuggagacugucaaa

SEQ ID NO: 152547 - RNA, 19 nt, Artificial Sequence
  Description of Artificial Sequence: Synthetic oligonucleotide
  Antisense strand to SEQ ID NO: 152546
uuugacagucuccaagagg

SEQ ID NO: 152548 - RNA, 19 nt, Artificial Sequence
  Description of Artificial Sequence: Synthetic oligonucleotide
  Sense strand starting at position 2499 of SEQ ID NO: 1960
ggcugaaauguugguaaag

SEQ ID NO: 152549 - RNA, 19 nt, Artificial Sequence
  Description of Artificial Sequence: Synthetic oligonucleotide
  Antisense strand to SEQ ID NO: 152548
cuuuaccaacauuucagcc

SEQ ID NO: 152550 - RNA, 19 nt, Artificial Sequence
  Description of Artificial Sequence: Synthetic oligonucleotide
  Sense strand starting at position 2511 of SEQ ID NO: 1960
gguaaagcagcacaugaua

SEQ ID NO: 152551 - RNA, 19 nt, Artificial Sequence
  Description of Artificial Sequence: Synthetic oligonucleotide
  Antisense strand to SEQ ID NO: 152550
uaucaugugcugcuuuacc

SEQ ID NO: 152552 - RNA, 19 nt, Artificial Sequence
  Description of Artificial Sequence: Synthetic oligonucleotide
  Sense strand starting at position 2542 of SEQ ID NO: 1960
ugcccugcagaucaauauu

SEQ ID NO: 152553 - RNA, 19 nt, Artificial Sequence
  Description of Artificial Sequence: Synthetic oligonucleotide
  Antisense strand to SEQ ID NO: 152552
aauauugaucugcagggca

SEQ ID NO: 152554 - RNA, 19 nt, Artificial Sequence
  Description of Artificial Sequence: Synthetic oligonucleotide
  Sense strand starting at position 2799 of SEQ ID NO: 1960
uuucucgcacuugaaauau

SEQ ID NO: 152555 - RNA, 19 nt, Artificial Sequence
  Description of Artificial Sequence: Synthetic oligonucleotide
  Antisense strand to SEQ ID NO: 152554
auauuucaagugcgagaaa

SEQ ID NO: 152556 - RNA, 19 nt, Artificial Sequence
  Description of Artificial Sequence: Synthetic oligonucleotide
  Sense strand starting at position 2854 of SEQ ID NO: 1960
gcacaugacuacuucugaa

SEQ ID NO: 152557 - RNA, 19 nt, Artificial Sequence
  Description of Artificial Sequence: Synthetic oligonucleotide
  Antisense strand to SEQ ID NO: 152556
uucagaaguagucaugugc

SEQ ID NO: 152558 - RNA, 19 nt, Artificial Sequence
  Description of Artificial Sequence: Synthetic oligonucleotide
  Sense strand starting at position 3061 of SEQ ID NO: 1960
gucauauagggucauguac

SEQ ID NO: 152559 - RNA, 19 nt, Artificial Sequence
  Description of Artificial Sequence: Synthetic oligonucleotide
  Antisense strand to SEQ ID NO: 152558
guacaugacccuauaugac

SEQ ID NO: 152560 - RNA, 19 nt, Artificial Sequence
  Description of Artificial Sequence: Synthetic oligonucleotide
  Sense strand starting at position 3069 of SEQ ID NO: 1960
gggucauguaccuaagcua

SEQ ID NO: 152561 - RNA, 19 nt, Artificial Sequence
  Description of Artificial Sequence: Synthetic oligonucleotide
  Antisense strand to SEQ ID NO: 152560
uagcuuagguacaugaccc

SEQ ID NO: 152562 - RNA, 19 nt, Artificial Sequence
  Description of Artificial Sequence: Synthetic oligonucleotide
  Sense strand starting at position 3076 of SEQ ID NO: 1960
guaccuaagcuacaagauu

SEQ ID NO: 152563 - RNA, 19 nt, Artificial Sequence
  Description of Artificial Sequence: Synthetic oligonucleotide
  Antisense strand to SEQ ID NO: 152562
aaucuuguagcuuagguac

SEQ ID NO: 152564 - RNA, 19 nt, Artificial Sequence
  Description of Artificial Sequence: Synthetic oligonucleotide
  Sense strand starting at position 3127 of SEQ ID NO: 1960
agcaacugagcauagaauu

SEQ ID NO: 152565 - RNA, 19 nt, Artificial Sequence
  Description of Artificial Sequence: Synthetic oligonucleotide
  Antisense strand to SEQ ID NO: 152564
aauucuaugcucaguugcu

SEQ ID NO: 152566 - RNA, 19 nt, Artificial Sequence
  Description of Artificial Sequence: Synthetic oligonucleotide
  Sense strand starting at position 3135 of SEQ ID NO: 1960
agcauagaauucucugacu

SEQ ID NO: 152567 - RNA, 19 nt, Artificial Sequence
  Description of Artificial Sequence: Synthetic oligonucleotide
  Antisense strand to SEQ ID NO: 152566
agucagagaauucuaugcu

SEQ ID NO: 152568 - RNA, 19 nt, Artificial Sequence
  Description of Artificial Sequence: Synthetic oligonucleotide
  Sense strand starting at position 3567 of SEQ ID NO: 1960
gcacauuaacagcaggaau

SEQ ID NO: 152569 - RNA, 19 nt, Artificial Sequence
  Description of Artificial Sequence: Synthetic oligonucleotide
  Antisense strand to SEQ ID NO: 152568
auuccugcuguuaaugugc

SEQ ID NO: 152570 - RNA, 19 nt, Artificial Sequence
  Description of Artificial Sequence: Synthetic oligonucleotide
  Sense strand starting at position 3584 of SEQ ID NO: 1960
aucagaaugugggugauga

SEQ ID NO: 152571 - RNA, 19 nt, Artificial Sequence
  Description of Artificial Sequence: Synthetic oligonucleotide
  Antisense strand to SEQ ID NO: 152570
ucaucacccacauucugau

SEQ ID NO: 152572 - RNA, 19 nt, Artificial Sequence
  Description of Artificial Sequence: Synthetic oligonucleotide
  Sense strand starting at position 3585 of SEQ ID NO: 1960
ucagaaugugggugaugau

SEQ ID NO: 152573 - RNA, 19 nt, Artificial Sequence
  Description of Artificial Sequence: Synthetic oligonucleotide
  Antisense strand to SEQ ID NO: 152572
aucaucacccacauucuga

SEQ ID NO: 152574 - RNA, 19 nt, Artificial Sequence
  Description of Artificial Sequence: Synthetic oligonucleotide
  Sense strand starting at position 3603 of SEQ ID NO: 1960
uuacacugacgugauauca

SEQ ID NO: 152575 - RNA, 19 nt, Artificial Sequence
  Description of Artificial Sequence: Synthetic oligonucleotide
  Antisense strand to SEQ ID NO: 152574
ugauaucacgucaguguaa

SEQ ID NO: 152576 - RNA, 19 nt, Artificial Sequence
  Description of Artificial Sequence: Synthetic oligonucleotide
  Sense strand starting at position 3722 of SEQ ID NO: 1960
gcauuaugggaauguuaac

SEQ ID NO: 152577 - RNA, 19 nt, Artificial Sequence
  Description of Artificial Sequence: Synthetic oligonucleotide
  Antisense strand to SEQ ID NO: 152576
guuaacauucccauaaugc

SEQ ID NO: 152578 - RNA, 19 nt, Artificial Sequence
  Description of Artificial Sequence: Synthetic oligonucleotide
  Sense strand starting at position 3728 of SEQ ID NO: 1960
ugggaauguuaacuuugaa

SEQ ID NO: 152579 - RNA, 19 nt, Artificial Sequence
  Description of Artificial Sequence: Synthetic oligonucleotide
  Antisense strand to SEQ ID NO: 152578
uucaaaguuaacauuccca

SEQ ID NO: 152580 - RNA, 19 nt, Artificial Sequence
  Description of Artificial Sequence: Synthetic oligonucleotide
  Sense strand starting at position 3902 of SEQ ID NO: 1960
uuaguaagagcugauuauu

SEQ ID NO: 152581 - RNA, 19 nt, Artificial Sequence
  Description of Artificial Sequence: Synthetic oligonucleotide
  Antisense strand to SEQ ID NO: 152580
aauaaucagcucuuacuaa

SEQ ID NO: 152582 - RNA, 19 nt, Artificial Sequence
  Description of Artificial Sequence: Synthetic oligonucleotide
  Sense strand starting at position 3934 of SEQ ID NO: 1960
uugugugagccgguuguua

SEQ ID NO: 152583 - RNA, 19 nt, Artificial Sequence
  Description of Artificial Sequence: Synthetic oligonucleotide
  Antisense strand to SEQ ID NO: 152582
uaacaaccggcucacacaa

SEQ ID NO: 152584 - RNA, 19 nt, Artificial Sequence
  Description of Artificial Sequence: Synthetic oligonucleotide
  Sense strand starting at position 578 of SEQ ID NO: 1961
ugucauaccuucugggaag

SEQ ID NO: 152585 - RNA, 19 nt, Artificial Sequence
  Description of Artificial Sequence: Synthetic oligonucleotide
  Antisense strand to SEQ ID NO: 152584
cuucccagaagguaugaca

SEQ ID NO: 152586 - RNA, 19 nt, Artificial Sequence
  Description of Artificial Sequence: Synthetic oligonucleotide
  Sense strand starting at position 590 of SEQ ID NO: 1961
ugggaagacuuuccugauu

SEQ ID NO: 152587 - RNA, 19 nt, Artificial Sequence
  Description of Artificial Sequence: Synthetic oligonucleotide
  Antisense strand to SEQ ID NO: 152586
aaucaggaaagucuuccca

SEQ ID NO: 152588 - RNA, 19 nt, Artificial Sequence
  Description of Artificial Sequence: Synthetic oligonucleotide
  Sense strand starting at position 1025 of SEQ ID NO: 1961
uuuccacuguguuucuaaa

SEQ ID NO: 152589 - RNA, 19 nt, Artificial Sequence
  Description of Artificial Sequence: Synthetic oligonucleotide
  Antisense strand to SEQ ID NO: 152588
uuuagaaacacaguggaaa

SEQ ID NO: 152590 - RNA, 19 nt, Artificial Sequence
  Description of Artificial Sequence: Synthetic oligonucleotide
  Sense strand starting at position 1395 of SEQ ID NO: 1961
acguuauagacuugaagaa

SEQ ID NO: 152591 - RNA, 19 nt, Artificial Sequence
  Description of Artificial Sequence: Synthetic oligonucleotide
  Antisense strand to SEQ ID NO: 152590
uucuucaagucuauaacgu

SEQ ID NO: 152592 - RNA, 19 nt, Artificial Sequence
  Description of Artificial Sequence: Synthetic oligonucleotide
  Sense strand starting at position 1512 of SEQ ID NO: 1961
aacacugggugaucacaau

SEQ ID NO: 152593 - RNA, 19 nt, Artificial Sequence
  Description of Artificial Sequence: Synthetic oligonucleotide
  Antisense strand to SEQ ID NO: 152592
auugugaucacccaguguu

SEQ ID NO: 152594 - RNA, 19 nt, Artificial Sequence
  Description of Artificial Sequence: Synthetic oligonucleotide
  Sense strand starting at position 1627 of SEQ ID NO: 1961
gguagucucuccuacacca

SEQ ID NO: 152595 - RNA, 19 nt, Artificial Sequence
  Description of Artificial Sequence: Synthetic oligonucleotide
  Antisense strand to SEQ ID NO: 152594
ugguguaggagagacuacc

SEQ ID NO: 152596 - RNA, 19 nt, Artificial Sequence
  Description of Artificial Sequence: Synthetic oligonucleotide
  Sense strand starting at position 1713 of SEQ ID NO: 1961
gaaggaauccgaugcugag

SEQ ID NO: 152597 - RNA, 19 nt, Artificial Sequence
  Description of Artificial Sequence: Synthetic oligonucleotide
  Antisense strand to SEQ ID NO: 152596
cucagcaucggauuccuuc

SEQ ID NO: 152598 - RNA, 19 nt, Artificial Sequence
  Description of Artificial Sequence: Synthetic oligonucleotide
  Sense strand starting at position 1836 of SEQ ID NO: 1961
gggcgaucauuguuagcaa

SEQ ID NO: 152599 - RNA, 19 nt, Artificial Sequence
  Description of Artificial Sequence: Synthetic oligonucleotide
  Antisense strand to SEQ ID NO: 152598
uugcuaacaaugaucgccc

SEQ ID NO: 152600 - RNA, 19 nt, Artificial Sequence
  Description of Artificial Sequence: Synthetic oligonucleotide
  Sense strand starting at position 1934 of SEQ ID NO: 1961
acaguuauacccuaugucu

SEQ ID NO: 152601 - RNA, 19 nt, Artificial Sequence
  Description of Artificial Sequence: Synthetic oligonucleotide
  Antisense strand to SEQ ID NO: 152600
agacauaggguauaacugu

SEQ ID NO: 152602 - RNA, 19 nt, Artificial Sequence
  Description of Artificial Sequence: Synthetic oligonucleotide
  Sense strand starting at position 1936 of SEQ ID NO: 1961
aguuauacccuaugucuca

SEQ ID NO: 152603 - RNA, 19 nt, Artificial Sequence
  Description of Artificial Sequence: Synthetic oligonucleotide
  Antisense strand to SEQ ID NO: 152602
ugagacauaggguauaacu

SEQ ID NO: 152604 - RNA, 19 nt, Artificial Sequence
  Description of Artificial Sequence: Synthetic oligonucleotide
  Sense strand starting at position 1949 of SEQ ID NO: 1961
gucucaguuaccggagauc

SEQ ID NO: 152605 - RNA, 19 nt, Artificial Sequence
  Description of Artificial Sequence: Synthetic oligonucleotide
  Antisense strand to SEQ ID NO: 152604
gaucuccgguaacugagac

SEQ ID NO: 152606 - RNA, 19 nt, Artificial Sequence
  Description of Artificial Sequence: Synthetic oligonucleotide
  Sense strand starting at position 2137 of SEQ ID NO: 1961
auuugaggcuucgaauaag

SEQ ID NO: 152607 - RNA, 19 nt, Artificial Sequence
  Description of Artificial Sequence: Synthetic oligonucleotide
  Antisense strand to SEQ ID NO: 152606
cuuauucgaagccucaaau

SEQ ID NO: 152608 - RNA, 19 nt, Artificial Sequence
  Description of Artificial Sequence: Synthetic oligonucleotide
  Sense strand starting at position 2211 of SEQ ID NO: 1961
gaaacuaagucuugggaga

SEQ ID NO: 152609 - RNA, 19 nt, Artificial Sequence
  Description of Artificial Sequence: Synthetic oligonucleotide
  Antisense strand to SEQ ID NO: 152608
ucucccaagacuuaguuuc

SEQ ID NO: 152610 - RNA, 19 nt, Artificial Sequence
  Description of Artificial Sequence: Synthetic oligonucleotide
  Sense strand starting at position 2244 of SEQ ID NO: 1961
ggugggaguuaauggguaa

SEQ ID NO: 152611 - RNA, 19 nt, Artificial Sequence
  Description of Artificial Sequence: Synthetic oligonucleotide
  Antisense strand to SEQ ID NO: 152610
uuacccauuaacucccacc

SEQ ID NO: 152612 - RNA, 19 nt, Artificial Sequence
  Description of Artificial Sequence: Synthetic oligonucleotide
  Sense strand starting at position 2245 of SEQ ID NO: 1961
gugggaguuaauggguaau

SEQ ID NO: 152613 - RNA, 19 nt, Artificial Sequence
  Description of Artificial Sequence: Synthetic oligonucleotide
  Antisense strand to SEQ ID NO: 152612
auuacccauuaacucccac

SEQ ID NO: 152614 - RNA, 19 nt, Artificial Sequence
  Description of Artificial Sequence: Synthetic oligonucleotide
  Sense strand starting at position 2462 of SEQ ID NO: 1961
uaaacaguuuaugguaaga

SEQ ID NO: 152615 - RNA, 19 nt, Artificial Sequence
  Description of Artificial Sequence: Synthetic oligonucleotide
  Antisense strand to SEQ ID NO: 152614
ucuuaccauaaacuguuua

SEQ ID NO: 152616 - RNA, 19 nt, Artificial Sequence
  Description of Artificial Sequence: Synthetic oligonucleotide
  Sense strand starting at position 2464 of SEQ ID NO: 1961
aacaguuuaugguaagaag

SEQ ID NO: 152617 - RNA, 19 nt, Artificial Sequence
  Description of Artificial Sequence: Synthetic oligonucleotide
  Antisense strand to SEQ ID NO: 152616
cuucuuaccauaaacuguu

SEQ ID NO: 152618 - RNA, 19 nt, Artificial Sequence
  Description of Artificial Sequence: Synthetic oligonucleotide
  Sense strand starting at position 2467 of SEQ ID NO: 1961
aguuuaugguaagaaguca

SEQ ID NO: 152619 - RNA, 19 nt, Artificial Sequence
  Description of Artificial Sequence: Synthetic oligonucleotide
  Antisense strand to SEQ ID NO: 152618
ugacuucuuaccauaaacu

SEQ ID NO: 152620 - RNA, 19 nt, Artificial Sequence
  Description of Artificial Sequence: Synthetic oligonucleotide
  Sense strand starting at position 2492 of SEQ ID NO: 1961
auguguuguaugugugaau

SEQ ID NO: 152621 - RNA, 19 nt, Artificial Sequence
  Description of Artificial Sequence: Synthetic oligonucleotide
  Antisense strand to SEQ ID NO: 152620
auucacacauacaacacau

SEQ ID NO: 152622 - RNA, 19 nt, Artificial Sequence
  Description of Artificial Sequence: Synthetic oligonucleotide
  Sense strand starting at position 2495 of SEQ ID NO: 1961
uguuguaugugugaauaaa

SEQ ID NO: 152623 - RNA, 19 nt, Artificial Sequence
  Description of Artificial Sequence: Synthetic oligonucleotide
  Antisense strand to SEQ ID NO: 152622
uuuauucacacauacaaca

SEQ ID NO: 152624 - RNA, 19 nt, Artificial Sequence
  Description of Artificial Sequence: Synthetic oligonucleotide
  Sense strand starting at position 2907 of SEQ ID NO: 1961
cugauauaucuagguguuc

SEQ ID NO: 152625 - RNA, 19 nt, Artificial Sequence
  Description of Artificial Sequence: Synthetic oligonucleotide
  Antisense strand to SEQ ID NO: 152624
gaacaccuagauauaucag

SEQ ID NO: 152626 - RNA, 19 nt, Artificial Sequence
  Description of Artificial Sequence: Synthetic oligonucleotide
  Sense strand starting at position 2964 of SEQ ID NO: 1961
gggauaugaucggccuuuc

SEQ ID NO: 152627 - RNA, 19 nt, Artificial Sequence
  Description of Artificial Sequence: Synthetic oligonucleotide
  Antisense strand to SEQ ID NO: 152626
gaaaggccgaucauauccc

SEQ ID NO: 152628 - RNA, 19 nt, Artificial Sequence
  Description of Artificial Sequence: Synthetic oligonucleotide
  Sense strand starting at position 3091 of SEQ ID NO: 1961
uuuacuaagugcuuacagu

SEQ ID NO: 152629 - RNA, 19 nt, Artificial Sequence
  Description of Artificial Sequence: Synthetic oligonucleotide
  Antisense strand to SEQ ID NO: 152628
acuguaagcacuuaguaaa

SEQ ID NO: 152630 - RNA, 19 nt, Artificial Sequence
  Description of Artificial Sequence: Synthetic oligonucleotide
  Sense strand starting at position 3092 of SEQ ID NO: 1961
uuacuaagugcuuacaguu

SEQ ID NO: 152631 - RNA, 19 nt, Artificial Sequence
  Description of Artificial Sequence: Synthetic oligonucleotide
  Antisense strand to SEQ ID NO: 152630
aacuguaagcacuuaguaa

SEQ ID NO: 152632 - RNA, 19 nt, Artificial Sequence
  Description of Artificial Sequence: Synthetic oligonucleotide
  Sense strand starting at position 3104 of SEQ ID NO: 1961
uacaguuaguucucgcauu

SEQ ID NO: 152633 - RNA, 19 nt, Artificial Sequence
  Description of Artificial Sequence: Synthetic oligonucleotide
  Antisense strand to SEQ ID NO: 152632
aaugcgagaacuaacugua

SEQ ID NO: 152634 - RNA, 19 nt, Artificial Sequence
  Description of Artificial Sequence: Synthetic oligonucleotide
  Sense strand starting at position 3110 of SEQ ID NO: 1961
uaguucucgcauuaauaga

SEQ ID NO: 152635 - RNA, 19 nt, Artificial Sequence
  Description of Artificial Sequence: Synthetic oligonucleotide
  Antisense strand to SEQ ID NO: 152634
ucuauuaaugcgagaacua

SEQ ID NO: 152636 - RNA, 19 nt, Artificial Sequence
  Description of Artificial Sequence: Synthetic oligonucleotide
  Sense strand starting at position 3134 of SEQ ID NO: 1961
uguuaaguauguucuagau

SEQ ID NO: 152637 - RNA, 19 nt, Artificial Sequence
  Description of Artificial Sequence: Synthetic oligonucleotide
  Antisense strand to SEQ ID NO: 152636
aucuagaacauacuuaaca

SEQ ID NO: 152638 - RNA, 19 nt, Artificial Sequence
  Description of Artificial Sequence: Synthetic oligonucleotide
  Sense strand starting at position 3140 of SEQ ID NO: 1961
guauguucuagauauuagu

SEQ ID NO: 152639 - RNA, 19 nt, Artificial Sequence
  Description of Artificial Sequence: Synthetic oligonucleotide
  Antisense strand to SEQ ID NO: 152638
acuaauaucuagaacauac

SEQ ID NO: 152640 - RNA, 19 nt, Artificial Sequence
  Description of Artificial Sequence: Synthetic oligonucleotide
  Sense strand starting at position 3146 of SEQ ID NO: 1961
ucuagauauuaguuaagca

SEQ ID NO: 152641 - RNA, 19 nt, Artificial Sequence
  Description of Artificial Sequence: Synthetic oligonucleotide
  Antisense strand to SEQ ID NO: 152640
ugcuuaacuaauaucuaga

SEQ ID NO: 152642 - RNA, 19 nt, Artificial Sequence
  Description of Artificial Sequence: Synthetic oligonucleotide
  Sense strand starting at position 3167 of SEQ ID NO: 1961
ccaguaagcuuguuuagua

SEQ ID NO: 152643 - RNA, 19 nt, Artificial Sequence
  Description of Artificial Sequence: Synthetic oligonucleotide
  Antisense strand to SEQ ID NO: 152642
uacuaaacaagcuuacugg

SEQ ID NO: 152644 - RNA, 19 nt, Artificial Sequence
  Description of Artificial Sequence: Synthetic oligonucleotide
  Sense strand starting at position 3168 of SEQ ID NO: 1961
caguaagcuuguuuaguau

SEQ ID NO: 152645 - RNA, 19 nt, Artificial Sequence
  Description of Artificial Sequence: Synthetic oligonucleotide
  Antisense strand to SEQ ID NO: 152644
auacuaaacaagcuuacug

SEQ ID NO: 152646 - RNA, 19 nt, Artificial Sequence
  Description of Artificial Sequence: Synthetic oligonucleotide
  Sense strand starting at position 3183 of SEQ ID NO: 1961
guauuauaucuccacuuug

SEQ ID NO: 152647 - RNA, 19 nt, Artificial Sequence
  Description of Artificial Sequence: Synthetic oligonucleotide
  Antisense strand to SEQ ID NO: 152646
caaaguggagauauaauac

SEQ ID NO: 152648 - RNA, 19 nt, Artificial Sequence
  Description of Artificial Sequence: Synthetic oligonucleotide
  Sense strand starting at position 3197 of SEQ ID NO: 1961
cuuuguaguugagaggaaa

SEQ ID NO: 152649 - RNA, 19 nt, Artificial Sequence
  Description of Artificial Sequence: Synthetic oligonucleotide
  Antisense strand to SEQ ID NO: 152648
uuuccucucaacuacaaag

SEQ ID NO: 152650 - RNA, 19 nt, Artificial Sequence
  Description of Artificial Sequence: Synthetic oligonucleotide
  Sense strand starting at position 3275 of SEQ ID NO: 1961
ugaugugauucugucuuaa

SEQ ID NO: 152651 - RNA, 19 nt, Artificial Sequence
  Description of Artificial Sequence: Synthetic oligonucleotide
  Antisense strand to SEQ ID NO: 152650
uuaagacagaaucacauca

SEQ ID NO: 152652 - RNA, 19 nt, Artificial Sequence
  Description of Artificial Sequence: Synthetic oligonucleotide
  Sense strand starting at position 3277 of SEQ ID NO: 1961
augugauucugucuuaacu

SEQ ID NO: 152653 - RNA, 19 nt, Artificial Sequence
  Description of Artificial Sequence: Synthetic oligonucleotide
  Antisense strand to SEQ ID NO: 152652
aguuaagacagaaucacau

SEQ ID NO: 152654 - RNA, 19 nt, Artificial Sequence
  Description of Artificial Sequence: Synthetic oligonucleotide
  Sense strand starting at position 3279 of SEQ ID NO: 1961
gugauucugucuuaacuug

SEQ ID NO: 152655 - RNA, 19 nt, Artificial Sequence
  Description of Artificial Sequence: Synthetic oligonucleotide
  Antisense strand to SEQ ID NO: 152654
caaguuaagacagaaucac

SEQ ID NO: 152656 - RNA, 19 nt, Artificial Sequence
  Description of Artificial Sequence: Synthetic oligonucleotide
  Sense strand starting at position 3496 of SEQ ID NO: 1961
accugaguugcguacauuu

SEQ ID NO: 152657 - RNA, 19 nt, Artificial Sequence
  Description of Artificial Sequence: Synthetic oligonucleotide
  Antisense strand to SEQ ID NO: 152656
aaauguacgcaacucaggu

SEQ ID NO: 152658 - RNA, 19 nt, Artificial Sequence
  Description of Artificial Sequence: Synthetic oligonucleotide
  Sense strand starting at position 3621 of SEQ ID NO: 1961
gcucacacuuaagugagaa

SEQ ID NO: 152659 - RNA, 19 nt, Artificial Sequence
  Description of Artificial Sequence: Synthetic oligonucleotide
  Antisense strand to SEQ ID NO: 152658
uucucacuuaagugugagc

SEQ ID NO: 152660 - RNA, 19 nt, Artificial Sequence
  Description of Artificial Sequence: Synthetic oligonucleotide
  Sense strand starting at position 3625 of SEQ ID NO: 1961
acacuuaagugagaacaua

SEQ ID NO: 152661 - RNA, 19 nt, Artificial Sequence
  Description of Artificial Sequence: Synthetic oligonucleotide
  Antisense strand to SEQ ID NO: 152660
uauguucucacuuaagugu

SEQ ID NO: 152662 - RNA, 19 nt, Artificial Sequence
  Description of Artificial Sequence: Synthetic oligonucleotide
  Sense strand starting at position 3924 of SEQ ID NO: 1961
ccuagugauugacuccaca

SEQ ID NO: 152663 - RNA, 19 nt, Artificial Sequence
  Description of Artificial Sequence: Synthetic oligonucleotide
  Antisense strand to SEQ ID NO: 152662
uguggagucaaucacuagg

SEQ ID NO: 152664 - RNA, 19 nt, Artificial Sequence
  Description of Artificial Sequence: Synthetic oligonucleotide
  Sense strand starting at position 275 of SEQ ID NO: 1962
auauaaaugcuguaggcua

SEQ ID NO: 152665 - RNA, 19 nt, Artificial Sequence
  Description of Artificial Sequence: Synthetic oligonucleotide
  Antisense strand to SEQ ID NO: 152664
uagccuacagcauuuauau

SEQ ID NO: 152666 - RNA, 19 nt, Artificial Sequence
  Description of Artificial Sequence: Synthetic oligonucleotide
  Sense strand starting at position 400 of SEQ ID NO: 1962
agagaaacuuuagcaguua

SEQ ID NO: 152667 - RNA, 19 nt, Artificial Sequence
  Description of Artificial Sequence: Synthetic oligonucleotide
  Antisense strand to SEQ ID NO: 152666
uaacugcuaaaguuucucu

SEQ ID NO: 152668 - RNA, 19 nt, Artificial Sequence
  Description of Artificial Sequence: Synthetic oligonucleotide
  Sense strand starting at position 470 of SEQ ID NO: 1962
ugcuguaaauuugccaaga

SEQ ID NO: 152669 - RNA, 19 nt, Artificial Sequence
  Description of Artificial Sequence: Synthetic oligonucleotide
  Antisense strand to SEQ ID NO: 152668
ucuuggcaaauuuacagca

SEQ ID NO: 152670 - RNA, 19 nt, Artificial Sequence
  Description of Artificial Sequence: Synthetic oligonucleotide
  Sense strand starting at position 471 of SEQ ID NO: 1962
gcuguaaauuugccaagau

SEQ ID NO: 152671 - RNA, 19 nt, Artificial Sequence
  Description of Artificial Sequence: Synthetic oligonucleotide
  Antisense strand to SEQ ID NO: 152670
aucuuggcaaauuuacagc

SEQ ID NO: 152672 - RNA, 19 nt, Artificial Sequence
  Description of Artificial Sequence: Synthetic oligonucleotide
  Sense strand starting at position 745 of SEQ ID NO: 1962
caguaauaacuuggugaau

SEQ ID NO: 152673 - RNA, 19 nt, Artificial Sequence
  Description of Artificial Sequence: Synthetic oligonucleotide
  Antisense strand to SEQ ID NO: 152672
auucaccaaguuauuacug

SEQ ID NO: 152674 - RNA, 19 nt, Artificial Sequence
  Description of Artificial Sequence: Synthetic oligonucleotide
  Sense strand starting at position 746 of SEQ ID NO: 1962
aguaauaacuuggugaaua

SEQ ID NO: 152675 - RNA, 19 nt, Artificial Sequence
  Description of Artificial Sequence: Synthetic oligonucleotide
  Antisense strand to SEQ ID NO: 152674
uauucaccaaguuauuacu

SEQ ID NO: 152676 - RNA, 19 nt, Artificial Sequence
  Description of Artificial Sequence: Synthetic oligonucleotide
  Sense strand starting at position 754 of SEQ ID NO: 1962
cuuggugaauagcucaaua

SEQ ID NO: 152677 - RNA, 19 nt, Artificial Sequence
  Description of Artificial Sequence: Synthetic oligonucleotide
  Antisense strand to SEQ ID NO: 152676
uauugagcuauucaccaag

SEQ ID NO: 152678 - RNA, 19 nt, Artificial Sequence
  Description of Artificial Sequence: Synthetic oligonucleotide
  Sense strand starting at position 756 of SEQ ID NO: 1962
uggugaauagcucaauaug

SEQ ID NO: 152679 - RNA, 19 nt, Artificial Sequence
  Description of Artificial Sequence: Synthetic oligonucleotide
  Antisense strand to SEQ ID NO: 152678
cauauugagcuauucacca

SEQ ID NO: 152680 - RNA, 19 nt, Artificial Sequence
  Description of Artificial Sequence: Synthetic oligonucleotide
  Sense strand starting at position 775 of SEQ ID NO: 1962
gaguuuagguacucaaucu

SEQ ID NO: 152681 - RNA, 19 nt, Artificial Sequence
  Description of Artificial Sequence: Synthetic oligonucleotide
  Antisense strand to SEQ ID NO: 152680
agauugaguaccuaaacuc

SEQ ID NO: 152682 - RNA, 19 nt, Artificial Sequence
  Description of Artificial Sequence: Synthetic oligonucleotide
  Sense strand starting at position 824 of SEQ ID NO: 1962
uguaccuuugcugacaaua

SEQ ID NO: 152683 - RNA, 19 nt, Artificial Sequence
  Description of Artificial Sequence: Synthetic oligonucleotide
  Antisense strand to SEQ ID NO: 152682
uauugucagcaaagguaca

SEQ ID NO: 152684 - RNA, 19 nt, Artificial Sequence
  Description of Artificial Sequence: Synthetic oligonucleotide
  Sense strand starting at position 1052 of SEQ ID NO: 1962
guaagaaguacguaugaag

SEQ ID NO: 152685 - RNA, 19 nt, Artificial Sequence
  Description of Artificial Sequence: Synthetic oligonucleotide
  Antisense strand to SEQ ID NO: 152684
cuucauacguacuucuuac

SEQ ID NO: 152686 - RNA, 19 nt, Artificial Sequence
  Description of Artificial Sequence: Synthetic oligonucleotide
  Sense strand starting at position 1231 of SEQ ID NO: 1962
agguacuuuccaugaacca

SEQ ID NO: 152687 - RNA, 19 nt, Artificial Sequence
  Description of Artificial Sequence: Synthetic oligonucleotide
  Antisense strand to SEQ ID NO: 152686
ugguucauggaaaguaccu

SEQ ID NO: 152688 - RNA, 19 nt, Artificial Sequence
  Description of Artificial Sequence: Synthetic oligonucleotide
  Sense strand starting at position 1232 of SEQ ID NO: 1962
gguacuuuccaugaaccau

SEQ ID NO: 152689 - RNA, 19 nt, Artificial Sequence
  Description of Artificial Sequence: Synthetic oligonucleotide
  Antisense strand to SEQ ID NO: 152688
augguucauggaaaguacc

SEQ ID NO: 152690 - RNA, 19 nt, Artificial Sequence
  Description of Artificial Sequence: Synthetic oligonucleotide
  Sense strand starting at position 1371 of SEQ ID NO: 1962
gcagguagaggucaaggau

SEQ ID NO: 152691 - RNA, 19 nt, Artificial Sequence
  Description of Artificial Sequence: Synthetic oligonucleotide
  Antisense strand to SEQ ID NO: 152690
auccuugaccucuaccugc

SEQ ID NO: 152692 - RNA, 19 nt, Artificial Sequence
  Description of Artificial Sequence: Synthetic oligonucleotide
  Sense strand starting at position 1418 of SEQ ID NO: 1962
ccagacaagcaaggauauu

SEQ ID NO: 152693 - RNA, 19 nt, Artificial Sequence
  Description of Artificial Sequence: Synthetic oligonucleotide
  Antisense strand to SEQ ID NO: 152692
aauauccuugcuugucugg

SEQ ID NO: 152694 - RNA, 19 nt, Artificial Sequence
  Description of Artificial Sequence: Synthetic oligonucleotide
  Sense strand starting at position 1450 of SEQ ID NO: 1962
ucuauagugcgagaaugag

SEQ ID NO: 152695 - RNA, 19 nt, Artificial Sequence
  Description of Artificial Sequence: Synthetic oligonucleotide
  Antisense strand to SEQ ID NO: 152694
cucauucucgcacuauaga

SEQ ID NO: 152696 - RNA, 19 nt, Artificial Sequence
  Description of Artificial Sequence: Synthetic oligonucleotide
  Sense strand starting at position 1464 of SEQ ID NO: 1962
augagaaaucuuggucuaa

SEQ ID NO: 152697 - RNA, 19 nt, Artificial Sequence
  Description of Artificial Sequence: Synthetic oligonucleotide
  Antisense strand to SEQ ID NO: 152696
uuagaccaagauuucucau

SEQ ID NO: 152698 - RNA, 19 nt, Artificial Sequence
  Description of Artificial Sequence: Synthetic oligonucleotide
  Sense strand starting at position 1465 of SEQ ID NO: 1962
ugagaaaucuuggucuaau

SEQ ID NO: 152699 - RNA, 19 nt, Artificial Sequence
  Description of Artificial Sequence: Synthetic oligonucleotide
  Antisense strand to SEQ ID NO: 152698
auuagaccaagauuucuca

SEQ ID NO: 152700 - RNA, 19 nt, Artificial Sequence
  Description of Artificial Sequence: Synthetic oligonucleotide
  Sense strand starting at position 1466 of SEQ ID NO: 1962
gagaaaucuuggucuaaug

SEQ ID NO: 152701 - RNA, 19 nt, Artificial Sequence
  Description of Artificial Sequence: Synthetic oligonucleotide
  Antisense strand to SEQ ID NO: 152700
cauuagaccaagauuucuc

SEQ ID NO: 152702 - RNA, 19 nt, Artificial Sequence
  Description of Artificial Sequence: Synthetic oligonucleotide
  Sense strand starting at position 1558 of SEQ ID NO: 1962
aagguuuaggcuugaaaua

SEQ ID NO: 152703 - RNA, 19 nt, Artificial Sequence
  Description of Artificial Sequence: Synthetic oligonucleotide
  Antisense strand to SEQ ID NO: 152702
uauuucaagccuaaaccuu

SEQ ID NO: 152704 - RNA, 19 nt, Artificial Sequence
  Description of Artificial Sequence: Synthetic oligonucleotide
  Sense strand starting at position 1559 of SEQ ID NO: 1962
agguuuaggcuugaaauac

SEQ ID NO: 152705 - RNA, 19 nt, Artificial Sequence
  Description of Artificial Sequence: Synthetic oligonucleotide
  Antisense strand to SEQ ID NO: 152704
guauuucaagccuaaaccu

SEQ ID NO: 152706 - RNA, 19 nt, Artificial Sequence
  Description of Artificial Sequence: Synthetic oligonucleotide
  Sense strand starting at position 1623 of SEQ ID NO: 1962
uggguagcuaguuacauua

SEQ ID NO: 152707 - RNA, 19 nt, Artificial Sequence
  Description of Artificial Sequence: Synthetic oligonucleotide
  Antisense strand to SEQ ID NO: 152706
uaauguaacuagcuaccca

SEQ ID NO: 152708 - RNA, 19 nt, Artificial Sequence
  Description of Artificial Sequence: Synthetic oligonucleotide
  Sense strand starting at position 1638 of SEQ ID NO: 1962
auuauucuaccaugauguu

SEQ ID NO: 152709 - RNA, 19 nt, Artificial Sequence
  Description of Artificial Sequence: Synthetic oligonucleotide
  Antisense strand to SEQ ID NO: 152708
aacaucaugguagaauaau

SEQ ID NO: 152710 - RNA, 19 nt, Artificial Sequence
  Description of Artificial Sequence: Synthetic oligonucleotide
  Sense strand starting at position 1639 of SEQ ID NO: 1962
uuauucuaccaugauguuu

SEQ ID NO: 152711 - RNA, 19 nt, Artificial Sequence
  Description of Artificial Sequence: Synthetic oligonucleotide
  Antisense strand to SEQ ID NO: 152710
aaacaucaugguagaauaa

SEQ ID NO: 152712 - RNA, 19 nt, Artificial Sequence
  Description of Artificial Sequence: Synthetic oligonucleotide
  Sense strand starting at position 1793 of SEQ ID NO: 1962
acaauaagagcuuguacag

SEQ ID NO: 152713 - RNA, 19 nt, Artificial Sequence
  Description of Artificial Sequence: Synthetic oligonucleotide
  Antisense strand to SEQ ID NO: 152712
cuguacaagcucuuauugu

SEQ ID NO: 152714 - RNA, 19 nt, Artificial Sequence
  Description of Artificial Sequence: Synthetic oligonucleotide
  Sense strand starting at position 1952 of SEQ ID NO: 1962
gucucaggucaguauagga

SEQ ID NO: 152715 - RNA, 19 nt, Artificial Sequence
  Description of Artificial Sequence: Synthetic oligonucleotide
  Antisense strand to SEQ ID NO: 152714
uccuauacugaccugagac

SEQ ID NO: 152716 - RNA, 19 nt, Artificial Sequence
  Description of Artificial Sequence: Synthetic oligonucleotide
  Sense strand starting at position 1978 of SEQ ID NO: 1962
ugugaagucagccaagaac

SEQ ID NO: 152717 - RNA, 19 nt, Artificial Sequence
  Description of Artificial Sequence: Synthetic oligonucleotide
  Antisense strand to SEQ ID NO: 152716
guucuuggcugacuucaca

SEQ ID NO: 152718 - RNA, 19 nt, Artificial Sequence
  Description of Artificial Sequence: Synthetic oligonucleotide
  Sense strand starting at position 2117 of SEQ ID NO: 1962
gggaauauccacgaugcuu

SEQ ID NO: 152719 - RNA, 19 nt, Artificial Sequence
  Description of Artificial Sequence: Synthetic oligonucleotide
  Antisense strand to SEQ ID NO: 152718
aagcaucguggauauuccc

SEQ ID NO: 152720 - RNA, 19 nt, Artificial Sequence
  Description of Artificial Sequence: Synthetic oligonucleotide
  Sense strand starting at position 2154 of SEQ ID NO: 1962
gaaacucugucucuugaag

SEQ ID NO: 152721 - RNA, 19 nt, Artificial Sequence
  Description of Artificial Sequence: Synthetic oligonucleotide
  Antisense strand to SEQ ID NO: 152720
cuucaagagacagaguuuc

SEQ ID NO: 152722 - RNA, 19 nt, Artificial Sequence
  Description of Artificial Sequence: Synthetic oligonucleotide
  Sense strand starting at position 2319 of SEQ ID NO: 1962
ugugguaguaauuagaauu

SEQ ID NO: 152723 - RNA, 19 nt, Artificial Sequence
  Description of Artificial Sequence: Synthetic oligonucleotide
  Antisense strand to SEQ ID NO: 152722
aauucuaauuacuaccaca

SEQ ID NO: 152724 - RNA, 19 nt, Artificial Sequence
  Description of Artificial Sequence: Synthetic oligonucleotide
  Sense strand starting at position 2356 of SEQ ID NO: 1962
caagaauagguuugucauc

SEQ ID NO: 152725 - RNA, 19 nt, Artificial Sequence
  Description of Artificial Sequence: Synthetic oligonucleotide
  Antisense strand to SEQ ID NO: 152724
gaugacaaaccuauucuug

SEQ ID NO: 152726 - RNA, 19 nt, Artificial Sequence
  Description of Artificial Sequence: Synthetic oligonucleotide
  Sense strand starting at position 2358 of SEQ ID NO: 1962
agaauagguuugucaucca

SEQ ID NO: 152727 - RNA, 19 nt, Artificial Sequence
  Description of Artificial Sequence: Synthetic oligonucleotide
  Antisense strand to SEQ ID NO: 152726
uggaugacaaaccuauucu

SEQ ID NO: 152728 - RNA, 19 nt, Artificial Sequence
  Description of Artificial Sequence: Synthetic oligonucleotide
  Sense strand starting at position 2361 of SEQ ID NO: 1962
auagguuugucauccauag

SEQ ID NO: 152729 - RNA, 19 nt, Artificial Sequence
  Description of Artificial Sequence: Synthetic oligonucleotide
  Antisense strand to SEQ ID NO: 152728
cuauggaugacaaaccuau

SEQ ID NO: 152730 - RNA, 19 nt, Artificial Sequence
  Description of Artificial Sequence: Synthetic oligonucleotide
  Sense strand starting at position 2478 of SEQ ID NO: 1962
cugucucacagaggaauga

SEQ ID NO: 152731 - RNA, 19 nt, Artificial Sequence
  Description of Artificial Sequence: Synthetic oligonucleotide
  Antisense strand to SEQ ID NO: 152730
ucauuccucugugagacag

SEQ ID NO: 152732 - RNA, 19 nt, Artificial Sequence
  Description of Artificial Sequence: Synthetic oligonucleotide
  Sense strand starting at position 2631 of SEQ ID NO: 1962
auauuuacaucugggaaag

SEQ ID NO: 152733 - RNA, 19 nt, Artificial Sequence
  Description of Artificial Sequence: Synthetic oligonucleotide
  Antisense strand to SEQ ID NO: 152732
cuuucccagauguaaauau

SEQ ID NO: 152734 - RNA, 19 nt, Artificial Sequence
  Description of Artificial Sequence: Synthetic oligonucleotide
  Sense strand starting at position 2633 of SEQ ID NO: 1962
auuuacaucugggaaaguu

SEQ ID NO: 152735 - RNA, 19 nt, Artificial Sequence
  Description of Artificial Sequence: Synthetic oligonucleotide
  Antisense strand to SEQ ID NO: 152734
aacuuucccagauguaaau

SEQ ID NO: 152736 - RNA, 19 nt, Artificial Sequence
  Description of Artificial Sequence: Synthetic oligonucleotide
  Sense strand starting at position 3231 of SEQ ID NO: 1962
gaaacuugucucuaggcca

SEQ ID NO: 152737 - RNA, 19 nt, Artificial Sequence
  Description of Artificial Sequence: Synthetic oligonucleotide
  Antisense strand to SEQ ID NO: 152736
uggccuagagacaaguuuc

SEQ ID NO: 152738 - RNA, 19 nt, Artificial Sequence
  Description of Artificial Sequence: Synthetic oligonucleotide
  Sense strand starting at position 3584 of SEQ ID NO: 1962
gaaggagauguauguggua

SEQ ID NO: 152739 - RNA, 19 nt, Artificial Sequence
  Description of Artificial Sequence: Synthetic oligonucleotide
  Antisense strand to SEQ ID NO: 152738
uaccacauacaucuccuuc

SEQ ID NO: 152740 - RNA, 19 nt, Artificial Sequence
  Description of Artificial Sequence: Synthetic oligonucleotide
  Sense strand starting at position 3630 of SEQ ID NO: 1962
auuucuucugggugauugu

SEQ ID NO: 152741 - RNA, 19 nt, Artificial Sequence
  Description of Artificial Sequence: Synthetic oligonucleotide
  Antisense strand to SEQ ID NO: 152740
acaaucacccagaagaaau

SEQ ID NO: 152742 - RNA, 19 nt, Artificial Sequence
  Description of Artificial Sequence: Synthetic oligonucleotide
  Sense strand starting at position 3631 of SEQ ID NO: 1962
uuucuucugggugauugua

SEQ ID NO: 152743 - RNA, 19 nt, Artificial Sequence
  Description of Artificial Sequence: Synthetic oligonucleotide
  Antisense strand to SEQ ID NO: 152742
uacaaucacccagaagaaa

SEQ ID NO: 152744 - RNA, 19 nt, Artificial Sequence
  Description of Artificial Sequence: Synthetic oligonucleotide
  Sense strand starting at position 296 of SEQ ID NO: 1963
ccuacuuugcuagguagau

SEQ ID NO: 152745 - RNA, 19 nt, Artificial Sequence
  Description of Artificial Sequence: Synthetic oligonucleotide
  Antisense strand to SEQ ID NO: 152744
aucuaccuagcaaaguagg

SEQ ID NO: 152746 - RNA, 19 nt, Artificial Sequence
  Description of Artificial Sequence: Synthetic oligonucleotide
  Sense strand starting at position 297 of SEQ ID NO: 1963
cuacuuugcuagguagaua

SEQ ID NO: 152747 - RNA, 19 nt, Artificial Sequence
  Description of Artificial Sequence: Synthetic oligonucleotide
  Antisense strand to SEQ ID NO: 152746
uaucuaccuagcaaaguag

SEQ ID NO: 152748 - RNA, 19 nt, Artificial Sequence
  Description of Artificial Sequence: Synthetic oligonucleotide
  Sense strand starting at position 662 of SEQ ID NO: 1963
gagugaaauucugacuaaa

SEQ ID NO: 152749 - RNA, 19 nt, Artificial Sequence
  Description of Artificial Sequence: Synthetic oligonucleotide
  Antisense strand to SEQ ID NO: 152748
uuuagucagaauuucacuc

SEQ ID NO: 152750 - RNA, 19 nt, Artificial Sequence
  Description of Artificial Sequence: Synthetic oligonucleotide
  Sense strand starting at position 826 of SEQ ID NO: 1963
gagacugguucuguuacac

SEQ ID NO: 152751 - RNA, 19 nt, Artificial Sequence
  Description of Artificial Sequence: Synthetic oligonucleotide
  Antisense strand to SEQ ID NO: 152750
guguaacagaaccagucuc

SEQ ID NO: 152752 - RNA, 19 nt, Artificial Sequence
  Description of Artificial Sequence: Synthetic oligonucleotide
  Sense strand starting at position 1698 of SEQ ID NO: 1963
gcccgucuuccucagaaag

SEQ ID NO: 152753 - RNA, 19 nt, Artificial Sequence
  Description of Artificial Sequence: Synthetic oligonucleotide
  Antisense strand to SEQ ID NO: 152752
cuuucugaggaagacgggc

SEQ ID NO: 152754 - RNA, 19 nt, Artificial Sequence
  Description of Artificial Sequence: Synthetic oligonucleotide
  Sense strand starting at position 1872 of SEQ ID NO: 1963
ggcaaugggugauuggaaa

SEQ ID NO: 152755 - RNA, 19 nt, Artificial Sequence
  Description of Artificial Sequence: Synthetic oligonucleotide
  Antisense strand to SEQ ID NO: 152754
uuuccaaucacccauugcc

SEQ ID NO: 152756 - RNA, 19 nt, Artificial Sequence
  Description of Artificial Sequence: Synthetic oligonucleotide
  Sense strand starting at position 2040 of SEQ ID NO: 1963
ggcuguagcccagaguaaa

SEQ ID NO: 152757 - RNA, 19 nt, Artificial Sequence
  Description of Artificial Sequence: Synthetic oligonucleotide
  Antisense strand to SEQ ID NO: 152756
uuuacucugggcuacagcc

SEQ ID NO: 152758 - RNA, 19 nt, Artificial Sequence
  Description of Artificial Sequence: Synthetic oligonucleotide
  Sense strand starting at position 2100 of SEQ ID NO: 1963
ggcaacugguguuugaauu

SEQ ID NO: 152759 - RNA, 19 nt, Artificial Sequence
  Description of Artificial Sequence: Synthetic oligonucleotide
  Antisense strand to SEQ ID NO: 152758
aauucaaacaccaguugcc

SEQ ID NO: 152760 - RNA, 19 nt, Artificial Sequence
  Description of Artificial Sequence: Synthetic oligonucleotide
  Sense strand starting at position 2156 of SEQ ID NO: 1963
gggagccugugcuuuauuu

SEQ ID NO: 152761 - RNA, 19 nt, Artificial Sequence
  Description of Artificial Sequence: Synthetic oligonucleotide
  Antisense strand to SEQ ID NO: 152760
aaauaaagcacaggcuccc

SEQ ID NO: 152762 - RNA, 19 nt, Artificial Sequence
  Description of Artificial Sequence: Synthetic oligonucleotide
  Sense strand starting at position 2158 of SEQ ID NO: 1963
gagccugugcuuuauuuau

SEQ ID NO: 152763 - RNA, 19 nt, Artificial Sequence
  Description of Artificial Sequence: Synthetic oligonucleotide
  Antisense strand to SEQ ID NO: 152762
auaaauaaagcacaggcuc

SEQ ID NO: 152764 - RNA, 19 nt, Artificial Sequence
  Description of Artificial Sequence: Synthetic oligonucleotide
  Sense strand starting at position 2505 of SEQ ID NO: 1963
ggauuugugugucugggca

SEQ ID NO: 152765 - RNA, 19 nt, Artificial Sequence
  Description of Artificial Sequence: Synthetic oligonucleotide
  Antisense strand to SEQ ID NO: 152764
ugcccagacacacaaaucc

SEQ ID NO: 152766 - RNA, 19 nt, Artificial Sequence
  Description of Artificial Sequence: Synthetic oligonucleotide
  Sense strand starting at position 2593 of SEQ ID NO: 1963
ugugaauuuccacgugugu

SEQ ID NO: 152767 - RNA, 19 nt, Artificial Sequence
  Description of Artificial Sequence: Synthetic oligonucleotide
  Antisense strand to SEQ ID NO: 152766
acacacguggaaauucaca

SEQ ID NO: 152768 - RNA, 19 nt, Artificial Sequence
  Description of Artificial Sequence: Synthetic oligonucleotide
  Sense strand starting at position 2595 of SEQ ID NO: 1963
ugaauuuccacguguguga

SEQ ID NO: 152769 - RNA, 19 nt, Artificial Sequence
  Description of Artificial Sequence: Synthetic oligonucleotide
  Antisense strand to SEQ ID NO: 152768
ucacacacguggaaauuca

SEQ ID NO: 152770 - RNA, 19 nt, Artificial Sequence
  Description of Artificial Sequence: Synthetic oligonucleotide
  Sense strand starting at position 2597 of SEQ ID NO: 1963
aauuuccacgugugugaau

SEQ ID NO: 152771 - RNA, 19 nt, Artificial Sequence
  Description of Artificial Sequence: Synthetic oligonucleotide
  Antisense strand to SEQ ID NO: 152770
auucacacacguggaaauu

SEQ ID NO: 152772 - RNA, 19 nt, Artificial Sequence
  Description of Artificial Sequence: Synthetic oligonucleotide
  Sense strand starting at position 2667 of SEQ ID NO: 1963
ucuguaugugccuaccaga

SEQ ID NO: 152773 - RNA, 19 nt, Artificial Sequence
  Description of Artificial Sequence: Synthetic oligonucleotide
  Antisense strand to SEQ ID NO: 152772
ucugguaggcacauacaga

SEQ ID NO: 152774 - RNA, 19 nt, Artificial Sequence
  Description of Artificial Sequence: Synthetic oligonucleotide
  Sense strand starting at position 2731 of SEQ ID NO: 1963
ugaguaugugcuugcuaga

SEQ ID NO: 152775 - RNA, 19 nt, Artificial Sequence
  Description of Artificial Sequence: Synthetic oligonucleotide
  Antisense strand to SEQ ID NO: 152774
ucuagcaagcacauacuca

SEQ ID NO: 152776 - RNA, 19 nt, Artificial Sequence
  Description of Artificial Sequence: Synthetic oligonucleotide
  Sense strand starting at position 2736 of SEQ ID NO: 1963
augugcuugcuagaguauc

SEQ ID NO: 152777 - RNA, 19 nt, Artificial Sequence
  Description of Artificial Sequence: Synthetic oligonucleotide
  Antisense strand to SEQ ID NO: 152776
gauacucuagcaagcacau

SEQ ID NO: 152778 - RNA, 19 nt, Artificial Sequence
  Description of Artificial Sequence: Synthetic oligonucleotide
  Sense strand starting at position 2815 of SEQ ID NO: 1963
gugcaugugcuuguguaag

SEQ ID NO: 152779 - RNA, 19 nt, Artificial Sequence
  Description of Artificial Sequence: Synthetic oligonucleotide
  Antisense strand to SEQ ID NO: 152778
cuuacacaagcacaugcac

SEQ ID NO: 152780 - RNA, 19 nt, Artificial Sequence
  Description of Artificial Sequence: Synthetic oligonucleotide
  Sense strand starting at position 2849 of SEQ ID NO: 1963
guuccugugucuccaaaug

SEQ ID NO: 152781 - RNA, 19 nt, Artificial Sequence
  Description of Artificial Sequence: Synthetic oligonucleotide
  Antisense strand to SEQ ID NO: 152780
cauuuggagacacaggaac

SEQ ID NO: 152782 - RNA, 19 nt, Artificial Sequence
  Description of Artificial Sequence: Synthetic oligonucleotide
  Sense strand starting at position 2864 of SEQ ID NO: 1963
aaugcucgucuuuguauuu

SEQ ID NO: 152783 - RNA, 19 nt, Artificial Sequence
  Description of Artificial Sequence: Synthetic oligonucleotide
  Antisense strand to SEQ ID NO: 152782
aaauacaaagacgagcauu

SEQ ID NO: 152784 - RNA, 19 nt, Artificial Sequence
  Description of Artificial Sequence: Synthetic oligonucleotide
  Sense strand starting at position 2885 of SEQ ID NO: 1963
accugucucuuagcauuua

SEQ ID NO: 152785 - RNA, 19 nt, Artificial Sequence
  Description of Artificial Sequence: Synthetic oligonucleotide
  Antisense strand to SEQ ID NO: 152784
uaaaugcuaagagacaggu

SEQ ID NO: 152786 - RNA, 19 nt, Artificial Sequence
  Description of Artificial Sequence: Synthetic oligonucleotide
  Sense strand starting at position 2934 of SEQ ID NO: 1963
agggucacuucuucccuaa

SEQ ID NO: 152787 - RNA, 19 nt, Artificial Sequence
  Description of Artificial Sequence: Synthetic oligonucleotide
  Antisense strand to SEQ ID NO: 152786
uuagggaagaagugacccu

SEQ ID NO: 152788 - RNA, 19 nt, Artificial Sequence
  Description of Artificial Sequence: Synthetic oligonucleotide
  Sense strand starting at position 2936 of SEQ ID NO: 1963
ggucacuucuucccuaaga

SEQ ID NO: 152789 - RNA, 19 nt, Artificial Sequence
  Description of Artificial Sequence: Synthetic oligonucleotide
  Antisense strand to SEQ ID NO: 152788
ucuuagggaagaagugacc

SEQ ID NO: 152790 - RNA, 19 nt, Artificial Sequence
  Description of Artificial Sequence: Synthetic oligonucleotide
  Sense strand starting at position 3027 of SEQ ID NO: 1963
aagaauaaagucugggcuu

SEQ ID NO: 152791 - RNA, 19 nt, Artificial Sequence
  Description of Artificial Sequence: Synthetic oligonucleotide
  Antisense strand to SEQ ID NO: 152790
aagcccagacuuuauucuu

SEQ ID NO: 152792 - RNA, 19 nt, Artificial Sequence
  Description of Artificial Sequence: Synthetic oligonucleotide
  Sense strand starting at position 3029 of SEQ ID NO: 1963
gaauaaagucugggcuuga

SEQ ID NO: 152793 - RNA, 19 nt, Artificial Sequence
  Description of Artificial Sequence: Synthetic oligonucleotide
  Antisense strand to SEQ ID NO: 152792
ucaagcccagacuuuauuc

SEQ ID NO: 152794 - RNA, 19 nt, Artificial Sequence
  Description of Artificial Sequence: Synthetic oligonucleotide
  Sense strand starting at position 3033 of SEQ ID NO: 1963
aaagucugggcuugagauu

SEQ ID NO: 152795 - RNA, 19 nt, Artificial Sequence
  Description of Artificial Sequence: Synthetic oligonucleotide
  Antisense strand to SEQ ID NO: 152794
aaucucaagcccagacuuu

SEQ ID NO: 152796 - RNA, 19 nt, Artificial Sequence
  Description of Artificial Sequence: Synthetic oligonucleotide
  Sense strand starting at position 3039 of SEQ ID NO: 1963
ugggcuugagauugcaagu

SEQ ID NO: 152797 - RNA, 19 nt, Artificial Sequence
  Description of Artificial Sequence: Synthetic oligonucleotide
  Antisense strand to SEQ ID NO: 152796
acuugcaaucucaagccca

SEQ ID NO: 152798 - RNA, 19 nt, Artificial Sequence
  Description of Artificial Sequence: Synthetic oligonucleotide
  Sense strand starting at position 3136 of SEQ ID NO: 1963
gcucccaucagugagggau

SEQ ID NO: 152799 - RNA, 19 nt, Artificial Sequence
  Description of Artificial Sequence: Synthetic oligonucleotide
  Antisense strand to SEQ ID NO: 152798
aucccucacugaugggagc

SEQ ID NO: 152800 - RNA, 19 nt, Artificial Sequence
  Description of Artificial Sequence: Synthetic oligonucleotide
  Sense strand starting at position 3139 of SEQ ID NO: 1963
cccaucagugagggaucau

SEQ ID NO: 152801 - RNA, 19 nt, Artificial Sequence
  Description of Artificial Sequence: Synthetic oligonucleotide
  Antisense strand to SEQ ID NO: 152800
augaucccucacugauggg

SEQ ID NO: 152802 - RNA, 19 nt, Artificial Sequence
  Description of Artificial Sequence: Synthetic oligonucleotide
  Sense strand starting at position 3150 of SEQ ID NO: 1963
gggaucaugugcccaucaa

SEQ ID NO: 152803 - RNA, 19 nt, Artificial Sequence
  Description of Artificial Sequence: Synthetic oligonucleotide
  Antisense strand to SEQ ID NO: 152802
uugaugggcacaugauccc

SEQ ID NO: 152804 - RNA, 19 nt, Artificial Sequence
  Description of Artificial Sequence: Synthetic oligonucleotide
  Sense strand starting at position 3151 of SEQ ID NO: 1963
ggaucaugugcccaucaag

SEQ ID NO: 152805 - RNA, 19 nt, Artificial Sequence
  Description of Artificial Sequence: Synthetic oligonucleotide
  Antisense strand to SEQ ID NO: 152804
cuugaugggcacaugaucc

SEQ ID NO: 152806 - RNA, 19 nt, Artificial Sequence
  Description of Artificial Sequence: Synthetic oligonucleotide
  Sense strand starting at position 3154 of SEQ ID NO: 1963
ucaugugcccaucaaggaa

SEQ ID NO: 152807 - RNA, 19 nt, Artificial Sequence
  Description of Artificial Sequence: Synthetic oligonucleotide
  Antisense strand to SEQ ID NO: 152806
uuccuugaugggcacauga

SEQ ID NO: 152808 - RNA, 19 nt, Artificial Sequence
  Description of Artificial Sequence: Synthetic oligonucleotide
  Sense strand starting at position 3192 of SEQ ID NO: 1963
gggcaagggucuucucuua

SEQ ID NO: 152809 - RNA, 19 nt, Artificial Sequence
  Description of Artificial Sequence: Synthetic oligonucleotide
  Antisense strand to SEQ ID NO: 152808
uaagagaagacccuugccc

SEQ ID NO: 152810 - RNA, 19 nt, Artificial Sequence
  Description of Artificial Sequence: Synthetic oligonucleotide
  Sense strand starting at position 3236 of SEQ ID NO: 1963
ggcuccauccugcaucuau

SEQ ID NO: 152811 - RNA, 19 nt, Artificial Sequence
  Description of Artificial Sequence: Synthetic oligonucleotide
  Antisense strand to SEQ ID NO: 152810
auagaugcaggauggagcc

SEQ ID NO: 152812 - RNA, 19 nt, Artificial Sequence
  Description of Artificial Sequence: Synthetic oligonucleotide
  Sense strand starting at position 3468 of SEQ ID NO: 1963
ggcuucuuggcuuggguua

SEQ ID NO: 152813 - RNA, 19 nt, Artificial Sequence
  Description of Artificial Sequence: Synthetic oligonucleotide
  Antisense strand to SEQ ID NO: 152812
uaacccaagccaagaagcc

SEQ ID NO: 152814 - RNA, 19 nt, Artificial Sequence
  Description of Artificial Sequence: Synthetic oligonucleotide
  Sense strand starting at position 3481 of SEQ ID NO: 1963
ggguuaguccaccacccaa

SEQ ID NO: 152815 - RNA, 19 nt, Artificial Sequence
  Description of Artificial Sequence: Synthetic oligonucleotide
  Antisense strand to SEQ ID NO: 152814
uugggugguggacuaaccc

SEQ ID NO: 152816 - RNA, 19 nt, Artificial Sequence
  Description of Artificial Sequence: Synthetic oligonucleotide
  Sense strand starting at position 3586 of SEQ ID NO: 1963
guuuguuguggucugucau

SEQ ID NO: 152817 - RNA, 19 nt, Artificial Sequence
  Description of Artificial Sequence: Synthetic oligonucleotide
  Antisense strand to SEQ ID NO: 152816
augacagaccacaacaaac

SEQ ID NO: 152818 - RNA, 19 nt, Artificial Sequence
  Description of Artificial Sequence: Synthetic oligonucleotide
  Sense strand starting at position 3593 of SEQ ID NO: 1963
guggucugucauugacuac

SEQ ID NO: 152819 - RNA, 19 nt, Artificial Sequence
  Description of Artificial Sequence: Synthetic oligonucleotide
  Antisense strand to SEQ ID NO: 152818
guagucaaugacagaccac

SEQ ID NO: 152820 - RNA, 19 nt, Artificial Sequence
  Description of Artificial Sequence: Synthetic oligonucleotide
  Sense strand starting at position 3970 of SEQ ID NO: 1963
ccuggcugaccuggauaau

SEQ ID NO: 152821 - RNA, 19 nt, Artificial Sequence
  Description of Artificial Sequence: Synthetic oligonucleotide
  Antisense strand to SEQ ID NO: 152820
auuauccaggucagccagg

SEQ ID NO: 152822 - RNA, 19 nt, Artificial Sequence
  Description of Artificial Sequence: Synthetic oligonucleotide
  Sense strand starting at position 3971 of SEQ ID NO: 1963
cuggcugaccuggauaauu

SEQ ID NO: 152823 - RNA, 19 nt, Artificial Sequence
  Description of Artificial Sequence: Synthetic oligonucleotide
  Antisense strand to SEQ ID NO: 152822
aauuauccaggucagccag

SEQ ID NO: 152824 - RNA, 19 nt, Artificial Sequence
  Description of Artificial Sequence: Synthetic oligonucleotide
  Sense strand starting at position 114 of SEQ ID NO: 1964
cuaaguuucuaugugacac

SEQ ID NO: 152825 - RNA, 19 nt, Artificial Sequence
  Description of Artificial Sequence: Synthetic oligonucleotide
  Antisense strand to SEQ ID NO: 152824
gugucacauagaaacuuag

SEQ ID NO: 152826 - RNA, 19 nt, Artificial Sequence
  Description of Artificial Sequence: Synthetic oligonucleotide
  Sense strand starting at position 143 of SEQ ID NO: 1964
uggcauaaggaauguguga

SEQ ID NO: 152827 - RNA, 19 nt, Artificial Sequence
  Description of Artificial Sequence: Synthetic oligonucleotide
  Antisense strand to SEQ ID NO: 152826
ucacacauuccuuaugcca

SEQ ID NO: 152828 - RNA, 19 nt, Artificial Sequence
  Description of Artificial Sequence: Synthetic oligonucleotide
  Sense strand starting at position 145 of SEQ ID NO: 1964
gcauaaggaaugugugaac

SEQ ID NO: 152829 - RNA, 19 nt, Artificial Sequence
  Description of Artificial Sequence: Synthetic oligonucleotide
  Antisense strand to SEQ ID NO: 152828
guucacacauuccuuaugc

SEQ ID NO: 152830 - RNA, 19 nt, Artificial Sequence
  Description of Artificial Sequence: Synthetic oligonucleotide
  Sense strand starting at position 151 of SEQ ID NO: 1964
ggaaugugugaacgggaga

SEQ ID NO: 152831 - RNA, 19 nt, Artificial Sequence
  Description of Artificial Sequence: Synthetic oligonucleotide
  Antisense strand to SEQ ID NO: 152830
ucucccguucacacauucc

SEQ ID NO: 152832 - RNA, 19 nt, Artificial Sequence
  Description of Artificial Sequence: Synthetic oligonucleotide
  Sense strand starting at position 154 of SEQ ID NO: 1964
augugugaacgggagaguu

SEQ ID NO: 152833 - RNA, 19 nt, Artificial Sequence
  Description of Artificial Sequence: Synthetic oligonucleotide
  Antisense strand to SEQ ID NO: 152832
aacucucccguucacacau

SEQ ID NO: 152834 - RNA, 19 nt, Artificial Sequence
  Description of Artificial Sequence: Synthetic oligonucleotide
  Sense strand starting at position 217 of SEQ ID NO: 1964
agaagacauuaguuuacuu

SEQ ID NO: 152835 - RNA, 19 nt, Artificial Sequence
  Description of Artificial Sequence: Synthetic oligonucleotide
  Antisense strand to SEQ ID NO: 152834
aaguaaacuaaugucuucu

SEQ ID NO: 152836 - RNA, 19 nt, Artificial Sequence
  Description of Artificial Sequence: Synthetic oligonucleotide
  Sense strand starting at position 221 of SEQ ID NO: 1964
gacauuaguuuacuuagga

SEQ ID NO: 152837 - RNA, 19 nt, Artificial Sequence
  Description of Artificial Sequence: Synthetic oligonucleotide
  Antisense strand to SEQ ID NO: 152836
uccuaaguaaacuaauguc

SEQ ID NO: 152838 - RNA, 19 nt, Artificial Sequence
  Description of Artificial Sequence: Synthetic oligonucleotide
  Sense strand starting at position 222 of SEQ ID NO: 1964
acauuaguuuacuuaggaa

SEQ ID NO: 152839 - RNA, 19 nt, Artificial Sequence
  Description of Artificial Sequence: Synthetic oligonucleotide
  Antisense strand to SEQ ID NO: 152838
uuccuaaguaaacuaaugu

SEQ ID NO: 152840 - RNA, 19 nt, Artificial Sequence
  Description of Artificial Sequence: Synthetic oligonucleotide
  Sense strand starting at position 257 of SEQ ID NO: 1964
aaagcuauugcuggagagu

SEQ ID NO: 152841 - RNA, 19 nt, Artificial Sequence
  Description of Artificial Sequence: Synthetic oligonucleotide
  Antisense strand to SEQ ID NO: 152840
acucuccagcaauagcuuu

SEQ ID NO: 152842 - RNA, 19 nt, Artificial Sequence
  Description of Artificial Sequence: Synthetic oligonucleotide
  Sense strand starting at position 258 of SEQ ID NO: 1964
aagcuauugcuggagaguc

SEQ ID NO: 152843 - RNA, 19 nt, Artificial Sequence
  Description of Artificial Sequence: Synthetic oligonucleotide
  Antisense strand to SEQ ID NO: 152842
gacucuccagcaauagcuu

SEQ ID NO: 152844 - RNA, 19 nt, Artificial Sequence
  Description of Artificial Sequence: Synthetic oligonucleotide
  Sense strand starting at position 260 of SEQ ID NO: 1964
gcuauugcuggagagucuu

SEQ ID NO: 152845 - RNA, 19 nt, Artificial Sequence
  Description of Artificial Sequence: Synthetic oligonucleotide
  Antisense strand to SEQ ID NO: 152844
aagacucuccagcaauagc

SEQ ID NO: 152846 - RNA, 19 nt, Artificial Sequence
  Description of Artificial Sequence: Synthetic oligonucleotide
  Sense strand starting at position 423 of SEQ ID NO: 1964
cuaaauauuugguacagau

SEQ ID NO: 152847 - RNA, 19 nt, Artificial Sequence
  Description of Artificial Sequence: Synthetic oligonucleotide
  Antisense strand to SEQ ID NO: 152846
aucuguaccaaauauuuag
